United States Patent Application Publication US 2012/0157512 A1 - sequence listing, part 9

SEQ ID NO: 261129 - DNA, 21 bp, Artificial sequence
  SiRNA target sequence
tcccaaaattcgtttgccaac

SEQ ID NO: 261130 - DNA, 21 bp, Artificial sequence
  SiRNA target sequence
cccaaaattcgtttgccaaca

SEQ ID NO: 261131 - DNA, 21 bp, Artificial sequence
  SiRNA target sequence
ccaaaattcgtttgccaacat

SEQ ID NO: 261132 - DNA, 21 bp, Artificial sequence
  SiRNA target sequence
caaaattcgtttgccaacatt

SEQ ID NO: 261133 - DNA, 21 bp, Artificial sequence
  SiRNA target sequence
aaaattcgtttgccaacattc

SEQ ID NO: 261134 - DNA, 21 bp, Artificial sequence
  SiRNA target sequence
aaattcgtttgccaacattct

SEQ ID NO: 261135 - DNA, 21 bp, Artificial sequence
  SiRNA target sequence
aattcgtttgccaacattctg

SEQ ID NO: 261136 - DNA, 21 bp, Artificial sequence
  SiRNA target sequence
attcgtttgccaacattctga

SEQ ID NO: 261137 - DNA, 21 bp, Artificial sequence
  SiRNA target sequence
ttcgtttgccaacattctgat

SEQ ID NO: 261138 - DNA, 21 bp, Artificial sequence
  SiRNA target sequence
tcgtttgccaacattctgatt

SEQ ID NO: 261139 - DNA, 21 bp, Artificial sequence
  SiRNA target sequence
cgtttgccaacattctgattt

SEQ ID NO: 261140 - DNA, 21 bp, Artificial sequence
  SiRNA target sequence
gtttgccaacattctgattta

SEQ ID NO: 261141 - DNA, 21 bp, Artificial sequence
  SiRNA target sequence
tttgccaacattctgatttag

SEQ ID NO: 261142 - DNA, 21 bp, Artificial sequence
  SiRNA target sequence
ttgccaacattctgatttagt

SEQ ID NO: 261143 - DNA, 21 bp, Artificial sequence
  SiRNA target sequence
tgccaacattctgatttagtt

SEQ ID NO: 261144 - DNA, 21 bp, Artificial sequence
  SiRNA target sequence
gccaacattctgatttagtta

SEQ ID NO: 261145 - DNA, 21 bp, Artificial sequence
  SiRNA target sequence
ccaacattctgatttagttaa

SEQ ID NO: 261146 - DNA, 21 bp, Artificial sequence
  SiRNA target sequence
caacattctgatttagttaag

SEQ ID NO: 261147 - DNA, 21 bp, Artificial sequence
  SiRNA target sequence
aacattctgatttagttaagc

SEQ ID NO: 261148 - DNA, 21 bp, Artificial sequence
  SiRNA target sequence
acattctgatttagttaagca

SEQ ID NO: 261149 - DNA, 21 bp, Artificial sequence
  SiRNA target sequence
cattctgatttagttaagcat

SEQ ID NO: 261150 - DNA, 21 bp, Artificial sequence
  SiRNA target sequence
attctgatttagttaagcatt

SEQ ID NO: 261151 - DNA, 21 bp, Artificial sequence
  SiRNA target sequence
ttctgatttagttaagcattt

SEQ ID NO: 261152 - DNA, 21 bp, Artificial sequence
  SiRNA target sequence
tctgatttagttaagcatttc

SEQ ID NO: 261153 - DNA, 21 bp, Artificial sequence
  SiRNA target sequence
ctgatttagttaagcatttcc

SEQ ID NO: 261154 - DNA, 21 bp, Artificial sequence
  SiRNA target sequence
tgatttagttaagcatttcca

SEQ ID NO: 261155 - DNA, 21 bp, Artificial sequence
  SiRNA target sequence
gatttagttaagcatttccaa

SEQ ID NO: 261156 - DNA, 21 bp, Artificial sequence
  SiRNA target sequence
atttagttaagcatttccaaa

SEQ ID NO: 261157 - DNA, 21 bp, Artificial sequence
  SiRNA target sequence
tttagttaagcatttccaaaa

SEQ ID NO: 261158 - DNA, 21 bp, Artificial sequence
  SiRNA target sequence
ttagttaagcatttccaaaat

SEQ ID NO: 261159 - DNA, 21 bp, Artificial sequence
  SiRNA target sequence
tagttaagcatttccaaaatg

SEQ ID NO: 261160 - DNA, 21 bp, Artificial sequence
  SiRNA target sequence
agttaagcatttccaaaatgc

SEQ ID NO: 261161 - DNA, 21 bp, Artificial sequence
  SiRNA target sequence
gttaagcatttccaaaatgct

SEQ ID NO: 261162 - DNA, 21 bp, Artificial sequence
  SiRNA target sequence
ttaagcatttccaaaatgctg

SEQ ID NO: 261163 - DNA, 21 bp, Artificial sequence
  SiRNA target sequence
taagcatttccaaaatgctga

SEQ ID NO: 261164 - DNA, 21 bp, Artificial sequence
  SiRNA target sequence
aagcatttccaaaatgctgaa

SEQ ID NO: 261165 - DNA, 21 bp, Artificial sequence
  SiRNA target sequence
agcatttccaaaatgctgaat

SEQ ID NO: 261166 - DNA, 21 bp, Artificial sequence
  SiRNA target sequence
gcatttccaaaatgctgaatc

SEQ ID NO: 261167 - DNA, 21 bp, Artificial sequence
  SiRNA target sequence
catttccaaaatgctgaatct

SEQ ID NO: 261168 - DNA, 21 bp, Artificial sequence
  SiRNA target sequence
atttccaaaatgctgaatcta

SEQ ID NO: 261169 - DNA, 21 bp, Artificial sequence
  SiRNA target sequence
tttccaaaatgctgaatctat

SEQ ID NO: 261170 - DNA, 21 bp, Artificial sequence
  SiRNA target sequence
ttccaaaatgctgaatctatg

SEQ ID NO: 261171 - DNA, 21 bp, Artificial sequence
  SiRNA target sequence
tccaaaatgctgaatctatgt

SEQ ID NO: 261172 - DNA, 21 bp, Artificial sequence
  SiRNA target sequence
ccaaaatgctgaatctatgtc

SEQ ID NO: 261173 - DNA, 21 bp, Artificial sequence
  SiRNA target sequence
caaaatgctgaatctatgtcg

SEQ ID NO: 261174 - DNA, 21 bp, Artificial sequence
  SiRNA target sequence
aaaatgctgaatctatgtcga

SEQ ID NO: 261175 - DNA, 21 bp, Artificial sequence
  SiRNA target sequence
aaatgctgaatctatgtcgaa

SEQ ID NO: 261176 - DNA, 21 bp, Artificial sequence
  SiRNA target sequence
aatgctgaatctatgtcgaaa

SEQ ID NO: 261177 - DNA, 21 bp, Artificial sequence
  SiRNA target sequence
atgctgaatctatgtcgaaat

SEQ ID NO: 261178 - DNA, 21 bp, Artificial sequence
  SiRNA target sequence
tgctgaatctatgtcgaaatt

SEQ ID NO: 261179 - DNA, 21 bp, Artificial sequence
  SiRNA target sequence
gctgaatctatgtcgaaattt

SEQ ID NO: 261180 - DNA, 21 bp, Artificial sequence
  SiRNA target sequence
ctgaatctatgtcgaaattta

SEQ ID NO: 261181 - DNA, 21 bp, Artificial sequence
  SiRNA target sequence
tgaatctatgtcgaaatttaa

SEQ ID NO: 261182 - DNA, 21 bp, Artificial sequence
  SiRNA target sequence
gaatctatgtcgaaatttaaa

SEQ ID NO: 261183 - DNA, 21 bp, Artificial sequence
  SiRNA target sequence
aatctatgtcgaaatttaaac

SEQ ID NO: 261184 - DNA, 21 bp, Artificial sequence
  SiRNA target sequence
atctatgtcgaaatttaaacg

SEQ ID NO: 261185 - DNA, 21 bp, Artificial sequence
  SiRNA target sequence
tctatgtcgaaatttaaacga

SEQ ID NO: 261186 - DNA, 21 bp, Artificial sequence
  SiRNA target sequence
ctatgtcgaaatttaaacgat

SEQ ID NO: 261187 - DNA, 21 bp, Artificial sequence
  SiRNA target sequence
tatgtcgaaatttaaacgatg

SEQ ID NO: 261188 - DNA, 21 bp, Artificial sequence
  SiRNA target sequence
atgtcgaaatttaaacgatgt

SEQ ID NO: 261189 - DNA, 21 bp, Artificial sequence
  SiRNA target sequence
tgtcgaaatttaaacgatgtg

SEQ ID NO: 261190 - DNA, 21 bp, Artificial sequence
  SiRNA target sequence
gtcgaaatttaaacgatgtga

SEQ ID NO: 261191 - DNA, 21 bp, Artificial sequence
  SiRNA target sequence
tcgaaatttaaacgatgtgaa

SEQ ID NO: 261192 - DNA, 21 bp, Artificial sequence
  SiRNA target sequence
cgaaatttaaacgatgtgaag

SEQ ID NO: 261193 - DNA, 21 bp, Artificial sequence
  SiRNA target sequence
gaaatttaaacgatgtgaagt

SEQ ID NO: 261194 - DNA, 21 bp, Artificial sequence
  SiRNA target sequence
aaatttaaacgatgtgaagtc

SEQ ID NO: 261195 - DNA, 21 bp, Artificial sequence
  SiRNA target sequence
aatttaaacgatgtgaagtca

SEQ ID NO: 261196 - DNA, 21 bp, Artificial sequence
  SiRNA target sequence
atttaaacgatgtgaagtcac

SEQ ID NO: 261197 - DNA, 21 bp, Artificial sequence
  SiRNA target sequence
tttaaacgatgtgaagtcact

SEQ ID NO: 261198 - DNA, 21 bp, Artificial sequence
  SiRNA target sequence
ttaaacgatgtgaagtcactc

SEQ ID NO: 261199 - DNA, 21 bp, Artificial sequence
  SiRNA target sequence
taaacgatgtgaagtcactct

SEQ ID NO: 261200 - DNA, 21 bp, Artificial sequence
  SiRNA target sequence
aaacgatgtgaagtcactcta

SEQ ID NO: 261201 - DNA, 21 bp, Artificial sequence
  SiRNA target sequence
aacgatgtgaagtcactctac

SEQ ID NO: 261202 - DNA, 21 bp, Artificial sequence
  SiRNA target sequence
acgatgtgaagtcactctacc

SEQ ID NO: 261203 - DNA, 21 bp, Artificial sequence
  SiRNA target sequence
cgatgtgaagtcactctaccc

SEQ ID NO: 261204 - DNA, 21 bp, Artificial sequence
  SiRNA target sequence
gatgtgaagtcactctacccg

SEQ ID NO: 261205 - DNA, 21 bp, Artificial sequence
  SiRNA target sequence
atgtgaagtcactctacccgt

SEQ ID NO: 261206 - DNA, 21 bp, Artificial sequence
  SiRNA target sequence
tgtgaagtcactctacccgtt

SEQ ID NO: 261207 - DNA, 21 bp, Artificial sequence
  SiRNA target sequence
gtgaagtcactctacccgttt

SEQ ID NO: 261208 - DNA, 21 bp, Artificial sequence
  SiRNA target sequence
tgaagtcactctacccgtttt

SEQ ID NO: 261209 - DNA, 21 bp, Artificial sequence
  SiRNA target sequence
gaagtcactctacccgtttta

SEQ ID NO: 261210 - DNA, 21 bp, Artificial sequence
  SiRNA target sequence
aagtcactctacccgttttac

SEQ ID NO: 261211 - DNA, 21 bp, Artificial sequence
  SiRNA target sequence
agtcactctacccgttttacg

SEQ ID NO: 261212 - DNA, 21 bp, Artificial sequence
  SiRNA target sequence
gtcactctacccgttttacgt

SEQ ID NO: 261213 - DNA, 21 bp, Artificial sequence
  SiRNA target sequence
tcactctacccgttttacgtt

SEQ ID NO: 261214 - DNA, 21 bp, Artificial sequence
  SiRNA target sequence
cactctacccgttttacgttt

SEQ ID NO: 261215 - DNA, 21 bp, Artificial sequence
  SiRNA target sequence
actctacccgttttacgtttc

SEQ ID NO: 261216 - DNA, 21 bp, Artificial sequence
  SiRNA target sequence
ctctacccgttttacgtttct

SEQ ID NO: 261217 - DNA, 21 bp, Artificial sequence
  SiRNA target sequence
tctacccgttttacgtttctc

SEQ ID NO: 261218 - DNA, 21 bp, Artificial sequence
  SiRNA target sequence
ctacccgttttacgtttctct

SEQ ID NO: 261219 - DNA, 21 bp, Artificial sequence
  SiRNA target sequence
tacccgttttacgtttctctg

SEQ ID NO: 261220 - DNA, 21 bp, Artificial sequence
  SiRNA target sequence
acccgttttacgtttctctga

SEQ ID NO: 261221 - DNA, 21 bp, Artificial sequence
  SiRNA target sequence
cccgttttacgtttctctgag

SEQ ID NO: 261222 - DNA, 21 bp, Artificial sequence
  SiRNA target sequence
ccgttttacgtttctctgaga

SEQ ID NO: 261223 - DNA, 21 bp, Artificial sequence
  SiRNA target sequence
cgttttacgtttctctgagaa

SEQ ID NO: 261224 - DNA, 21 bp, Artificial sequence
  SiRNA target sequence
gttttacgtttctctgagaaa

SEQ ID NO: 261225 - DNA, 21 bp, Artificial sequence
  SiRNA target sequence
ttttacgtttctctgagaaag

SEQ ID NO: 261226 - DNA, 21 bp, Artificial sequence
  SiRNA target sequence
tttacgtttctctgagaaagt

SEQ ID NO: 261227 - DNA, 21 bp, Artificial sequence
  SiRNA target sequence
ttacgtttctctgagaaagtt

SEQ ID NO: 261228 - DNA, 21 bp, Artificial sequence
  SiRNA target sequence
tacgtttctctgagaaagttg

SEQ ID NO: 261229 - DNA, 21 bp, Artificial sequence
  SiRNA target sequence
acgtttctctgagaaagttgg

SEQ ID NO: 261230 - DNA, 21 bp, Artificial sequence
  SiRNA target sequence
cgtttctctgagaaagttggt

SEQ ID NO: 261231 - DNA, 21 bp, Artificial sequence
  SiRNA target sequence
gtttctctgagaaagttggta

SEQ ID NO: 261232 - DNA, 21 bp, Artificial sequence
  SiRNA target sequence
tttctctgagaaagttggtaa

SEQ ID NO: 261233 - DNA, 21 bp, Artificial sequence
  SiRNA target sequence
ttctctgagaaagttggtaaa

SEQ ID NO: 261234 - DNA, 21 bp, Artificial sequence
  SiRNA target sequence
tctctgagaaagttggtaaat

SEQ ID NO: 261235 - DNA, 21 bp, Artificial sequence
  SiRNA target sequence
ctctgagaaagttggtaaatt

SEQ ID NO: 261236 - DNA, 21 bp, Artificial sequence
  SiRNA target sequence
tctgagaaagttggtaaattt

SEQ ID NO: 261237 - DNA, 21 bp, Artificial sequence
  SiRNA target sequence
ctgagaaagttggtaaatttt

SEQ ID NO: 261238 - DNA, 21 bp, Artificial sequence
  SiRNA target sequence
tgagaaagttggtaaattttt

SEQ ID NO: 261239 - DNA, 21 bp, Artificial sequence
  SiRNA target sequence
gagaaagttggtaaattttta

SEQ ID NO: 261240 - DNA, 21 bp, Artificial sequence
  SiRNA target sequence
agaaagttggtaaatttttat

SEQ ID NO: 261241 - DNA, 21 bp, Artificial sequence
  SiRNA target sequence
gaaagttggtaaatttttatc

SEQ ID NO: 261242 - DNA, 21 bp, Artificial sequence
  SiRNA target sequence
aaagttggtaaatttttatca

SEQ ID NO: 261243 - DNA, 21 bp, Artificial sequence
  SiRNA target sequence
aagttggtaaatttttatcaa

SEQ ID NO: 261244 - DNA, 21 bp, Artificial sequence
  SiRNA target sequence
agttggtaaatttttatcaac

SEQ ID NO: 261245 - DNA, 21 bp, Artificial sequence
  SiRNA target sequence
gttggtaaatttttatcaaca

SEQ ID NO: 261246 - DNA, 21 bp, Artificial sequence
  SiRNA target sequence
ttggtaaatttttatcaacac

SEQ ID NO: 261247 - DNA, 21 bp, Artificial sequence
  SiRNA target sequence
tggtaaatttttatcaacact

SEQ ID NO: 261248 - DNA, 21 bp, Artificial sequence
  SiRNA target sequence
ggtaaatttttatcaacactc

SEQ ID NO: 261249 - DNA, 21 bp, Artificial sequence
  SiRNA target sequence
gtaaatttttatcaacactca

SEQ ID NO: 261250 - DNA, 21 bp, Artificial sequence
  SiRNA target sequence
taaatttttatcaacactcat

SEQ ID NO: 261251 - DNA, 21 bp, Artificial sequence
  SiRNA target sequence
aaatttttatcaacactcatt

SEQ ID NO: 261252 - DNA, 21 bp, Artificial sequence
  SiRNA target sequence
aatttttatcaacactcattg

SEQ ID NO: 261253 - DNA, 21 bp, Artificial sequence
  SiRNA target sequence
atttttatcaacactcattga

SEQ ID NO: 261254 - DNA, 21 bp, Artificial sequence
  SiRNA target sequence
tttttatcaacactcattgaa

SEQ ID NO: 261255 - DNA, 21 bp, Artificial sequence
  SiRNA target sequence
ttttatcaacactcattgaat

SEQ ID NO: 261256 - DNA, 21 bp, Artificial sequence
  SiRNA target sequence
tttatcaacactcattgaatg

SEQ ID NO: 261257 - DNA, 21 bp, Artificial sequence
  SiRNA target sequence
ttatcaacactcattgaatgt

SEQ ID NO: 261258 - DNA, 21 bp, Artificial sequence
  SiRNA target sequence
tatcaacactcattgaatgtg

SEQ ID NO: 261259 - DNA, 21 bp, Artificial sequence
  SiRNA target sequence
atcaacactcattgaatgtga

SEQ ID NO: 261260 - DNA, 21 bp, Artificial sequence
  SiRNA target sequence
tcaacactcattgaatgtgat

SEQ ID NO: 261261 - DNA, 21 bp, Artificial sequence
  SiRNA target sequence
caacactcattgaatgtgatc

SEQ ID NO: 261262 - DNA, 21 bp, Artificial sequence
  SiRNA target sequence
aacactcattgaatgtgatcg

SEQ ID NO: 261263 - DNA, 21 bp, Artificial sequence
  SiRNA target sequence
acactcattgaatgtgatcga

SEQ ID NO: 261264 - DNA, 21 bp, Artificial sequence
  SiRNA target sequence
cactcattgaatgtgatcgag

SEQ ID NO: 261265 - DNA, 21 bp, Artificial sequence
  SiRNA target sequence
actcattgaatgtgatcgagt

SEQ ID NO: 261266 - DNA, 21 bp, Artificial sequence
  SiRNA target sequence
ctcattgaatgtgatcgagtg

SEQ ID NO: 261267 - DNA, 21 bp, Artificial sequence
  SiRNA target sequence
tcattgaatgtgatcgagtgg

SEQ ID NO: 261268 - DNA, 21 bp, Artificial sequence
  SiRNA target sequence
cattgaatgtgatcgagtgga

SEQ ID NO: 261269 - DNA, 21 bp, Artificial sequence
  SiRNA target sequence
attgaatgtgatcgagtggag

SEQ ID NO: 261270 - DNA, 21 bp, Artificial sequence
  SiRNA target sequence
ttgaatgtgatcgagtggagg

SEQ ID NO: 261271 - DNA, 21 bp, Artificial sequence
  SiRNA target sequence
tgaatgtgatcgagtggaggc

SEQ ID NO: 261272 - DNA, 21 bp, Artificial sequence
  SiRNA target sequence
gaatgtgatcgagtggaggct

SEQ ID NO: 261273 - DNA, 21 bp, Artificial sequence
  SiRNA target sequence
aatgtgatcgagtggaggctt

SEQ ID NO: 261274 - DNA, 21 bp, Artificial sequence
  SiRNA target sequence
atgtgatcgagtggaggctta

SEQ ID NO: 261275 - DNA, 21 bp, Artificial sequence
  SiRNA target sequence
tgtgatcgagtggaggcttat

SEQ ID NO: 261276 - DNA, 21 bp, Artificial sequence
  SiRNA target sequence
gtgatcgagtggaggcttatg

SEQ ID NO: 261277 - DNA, 21 bp, Artificial sequence
  SiRNA target sequence
tgatcgagtggaggcttatga

SEQ ID NO: 261278 - DNA, 21 bp, Artificial sequence
  SiRNA target sequence
gatcgagtggaggcttatgat

SEQ ID NO: 261279 - DNA, 21 bp, Artificial sequence
  SiRNA target sequence
atcgagtggaggcttatgata

SEQ ID NO: 261280 - DNA, 21 bp, Artificial sequence
  SiRNA target sequence
tcgagtggaggcttatgatag

SEQ ID NO: 261281 - DNA, 21 bp, Artificial sequence
  SiRNA target sequence
cgagtggaggcttatgataga

SEQ ID NO: 261282 - DNA, 21 bp, Artificial sequence
  SiRNA target sequence
gagtggaggcttatgatagac

SEQ ID NO: 261283 - DNA, 21 bp, Artificial sequence
  SiRNA target sequence
agtggaggcttatgatagacc

SEQ ID NO: 261284 - DNA, 21 bp, Artificial sequence
  SiRNA target sequence
gtggaggcttatgatagacct

SEQ ID NO: 261285 - DNA, 21 bp, Artificial sequence
  SiRNA target sequence
tggaggcttatgatagacctt

SEQ ID NO: 261286 - DNA, 21 bp, Artificial sequence
  SiRNA target sequence
ggaggcttatgatagacctta

SEQ ID NO: 261287 - DNA, 21 bp, Artificial sequence
  SiRNA target sequence
gaggcttatgatagaccttat

SEQ ID NO: 261288 - DNA, 21 bp, Artificial sequence
  SiRNA target sequence
aggcttatgatagaccttata

SEQ ID NO: 261289 - DNA, 21 bp, Artificial sequence
  SiRNA target sequence
ggcttatgatagaccttatac

SEQ ID NO: 261290 - DNA, 21 bp, Artificial sequence
  SiRNA target sequence
gcttatgatagaccttatacg

SEQ ID NO: 261291 - DNA, 21 bp, Artificial sequence
  SiRNA target sequence
cttatgatagaccttatacgc

SEQ ID NO: 261292 - DNA, 21 bp, Artificial sequence
  SiRNA target sequence
ttatgatagaccttatacgct

SEQ ID NO: 261293 - DNA, 21 bp, Artificial sequence
  SiRNA target sequence
tatgatagaccttatacgctg

SEQ ID NO: 261294 - DNA, 21 bp, Artificial sequence
  SiRNA target sequence
atgatagaccttatacgctga

SEQ ID NO: 261295 - DNA, 21 bp, Artificial sequence
  SiRNA target sequence
tgatagaccttatacgctgaa

SEQ ID NO: 261296 - DNA, 21 bp, Artificial sequence
  SiRNA target sequence
gatagaccttatacgctgaac

SEQ ID NO: 261297 - DNA, 21 bp, Artificial sequence
  SiRNA target sequence
atagaccttatacgctgaacg

SEQ ID NO: 261298 - DNA, 21 bp, Artificial sequence
  SiRNA target sequence
tagaccttatacgctgaacga

SEQ ID NO: 261299 - DNA, 21 bp, Artificial sequence
  SiRNA target sequence
agaccttatacgctgaacgat

SEQ ID NO: 261300 - DNA, 21 bp, Artificial sequence
  SiRNA target sequence
gaccttatacgctgaacgatt

SEQ ID NO: 261301 - DNA, 21 bp, Artificial sequence
  SiRNA target sequence
accttatacgctgaacgattc

SEQ ID NO: 261302 - DNA, 21 bp, Artificial sequence
  SiRNA target sequence
ccttatacgctgaacgattct

SEQ ID NO: 261303 - DNA, 21 bp, Artificial sequence
  SiRNA target sequence
cttatacgctgaacgattctc

SEQ ID NO: 261304 - DNA, 21 bp, Artificial sequence
  SiRNA target sequence
ttatacgctgaacgattctca

SEQ ID NO: 261305 - DNA, 21 bp, Artificial sequence
  SiRNA target sequence
tatacgctgaacgattctcaa

SEQ ID NO: 261306 - DNA, 21 bp, Artificial sequence
  SiRNA target sequence
atacgctgaacgattctcaaa

SEQ ID NO: 261307 - DNA, 21 bp, Artificial sequence
  SiRNA target sequence
tacgctgaacgattctcaaaa

SEQ ID NO: 261308 - DNA, 21 bp, Artificial sequence
  SiRNA target sequence
acgctgaacgattctcaaaaa

SEQ ID NO: 261309 - DNA, 21 bp, Artificial sequence
  SiRNA target sequence
cgctgaacgattctcaaaaag

SEQ ID NO: 261310 - DNA, 21 bp, Artificial sequence
  SiRNA target sequence
gctgaacgattctcaaaaagg

SEQ ID NO: 261311 - DNA, 21 bp, Artificial sequence
  SiRNA target sequence
ctgaacgattctcaaaaagga

SEQ ID NO: 261312 - DNA, 21 bp, Artificial sequence
  SiRNA target sequence
tgaacgattctcaaaaaggac

SEQ ID NO: 261313 - DNA, 21 bp, Artificial sequence
  SiRNA target sequence
gaacgattctcaaaaaggaca

SEQ ID NO: 261314 - DNA, 21 bp, Artificial sequence
  SiRNA target sequence
aacgattctcaaaaaggacaa

SEQ ID NO: 261315 - DNA, 21 bp, Artificial sequence
  SiRNA target sequence
acgattctcaaaaaggacaat

SEQ ID NO: 261316 - DNA, 21 bp, Artificial sequence
  SiRNA target sequence
cgattctcaaaaaggacaata

SEQ ID NO: 261317 - DNA, 21 bp, Artificial sequence
  SiRNA target sequence
gattctcaaaaaggacaatat

SEQ ID NO: 261318 - DNA, 21 bp, Artificial sequence
  SiRNA target sequence
attctcaaaaaggacaatata

SEQ ID NO: 261319 - DNA, 21 bp, Artificial sequence
  SiRNA target sequence
ttctcaaaaaggacaatatat

SEQ ID NO: 261320 - DNA, 21 bp, Artificial sequence
  SiRNA target sequence
tctcaaaaaggacaatatatt

SEQ ID NO: 261321 - DNA, 21 bp, Artificial sequence
  SiRNA target sequence
ctcaaaaaggacaatatattc

SEQ ID NO: 261322 - DNA, 21 bp, Artificial sequence
  SiRNA target sequence
tcaaaaaggacaatatattct

SEQ ID NO: 261323 - DNA, 21 bp, Artificial sequence
  SiRNA target sequence
caaaaaggacaatatattcta

SEQ ID NO: 261324 - DNA, 21 bp, Artificial sequence
  SiRNA target sequence
aaaaaggacaatatattctac

SEQ ID NO: 261325 - DNA, 21 bp, Artificial sequence
  SiRNA target sequence
aaaaggacaatatattctacg

SEQ ID NO: 261326 - DNA, 21 bp, Artificial sequence
  SiRNA target sequence
aaaggacaatatattctacgt

SEQ ID NO: 261327 - DNA, 21 bp, Artificial sequence
  SiRNA target sequence
aaggacaatatattctacgtc

SEQ ID NO: 261328 - DNA, 21 bp, Artificial sequence
  SiRNA target sequence
aggacaatatattctacgtca

SEQ ID NO: 261329 - DNA, 21 bp, Artificial sequence
  SiRNA target sequence
ggacaatatattctacgtcaa

SEQ ID NO: 261330 - DNA, 21 bp, Artificial sequence
  SiRNA target sequence
gacaatatattctacgtcaag

SEQ ID NO: 261331 - DNA, 21 bp, Artificial sequence
  SiRNA target sequence
acaatatattctacgtcaagg

SEQ ID NO: 261332 - DNA, 21 bp, Artificial sequence
  SiRNA target sequence
caatatattctacgtcaaggc

SEQ ID NO: 261333 - DNA, 21 bp, Artificial sequence
  SiRNA target sequence
aatatattctacgtcaaggct

SEQ ID NO: 261334 - DNA, 21 bp, Artificial sequence
  SiRNA target sequence
atatattctacgtcaaggctt

SEQ ID NO: 261335 - DNA, 21 bp, Artificial sequence
  SiRNA target sequence
tatattctacgtcaaggctta

SEQ ID NO: 261336 - DNA, 21 bp, Artificial sequence
  SiRNA target sequence
atattctacgtcaaggcttag

SEQ ID NO: 261337 - DNA, 21 bp, Artificial sequence
  SiRNA target sequence
tattctacgtcaaggcttaga

SEQ ID NO: 261338 - DNA, 21 bp, Artificial sequence
  SiRNA target sequence
attctacgtcaaggcttagaa

SEQ ID NO: 261339 - DNA, 21 bp, Artificial sequence
  SiRNA target sequence
ttctacgtcaaggcttagaat

SEQ ID NO: 261340 - DNA, 21 bp, Artificial sequence
  SiRNA target sequence
tctacgtcaaggcttagaata

SEQ ID NO: 261341 - DNA, 21 bp, Artificial sequence
  SiRNA target sequence
ctacgtcaaggcttagaatat

SEQ ID NO: 261342 - DNA, 21 bp, Artificial sequence
  SiRNA target sequence
tacgtcaaggcttagaatata

SEQ ID NO: 261343 - DNA, 21 bp, Artificial sequence
  SiRNA target sequence
acgtcaaggcttagaatatat

SEQ ID NO: 261344 - DNA, 21 bp, Artificial sequence
  SiRNA target sequence
cgtcaaggcttagaatatatg

SEQ ID NO: 261345 - DNA, 21 bp, Artificial sequence
  SiRNA target sequence
gtcaaggcttagaatatatga

SEQ ID NO: 261346 - DNA, 21 bp, Artificial sequence
  SiRNA target sequence
tcaaggcttagaatatatgat

SEQ ID NO: 261347 - DNA, 21 bp, Artificial sequence
  SiRNA target sequence
caaggcttagaatatatgatg

SEQ ID NO: 261348 - DNA, 21 bp, Artificial sequence
  SiRNA target sequence
aaggcttagaatatatgatgc

SEQ ID NO: 261349 - DNA, 21 bp, Artificial sequence
  SiRNA target sequence
aggcttagaatatatgatgcc

SEQ ID NO: 261350 - DNA, 21 bp, Artificial sequence
  SiRNA target sequence
ggcttagaatatatgatgccc

SEQ ID NO: 261351 - DNA, 21 bp, Artificial sequence
  SiRNA target sequence
gcttagaatatatgatgccca

SEQ ID NO: 261352 - DNA, 21 bp, Artificial sequence
  SiRNA target sequence
cttagaatatatgatgcccac

SEQ ID NO: 261353 - DNA, 21 bp, Artificial sequence
  SiRNA target sequence
ttagaatatatgatgcccacg

SEQ ID NO: 261354 - DNA, 21 bp, Artificial sequence
  SiRNA target sequence
tagaatatatgatgcccacga

SEQ ID NO: 261355 - DNA, 21 bp, Artificial sequence
  SiRNA target sequence
agaatatatgatgcccacgac

SEQ ID NO: 261356 - DNA, 21 bp, Artificial sequence
  SiRNA target sequence
gaatatatgatgcccacgact

SEQ ID NO: 261357 - DNA, 21 bp, Artificial sequence
  SiRNA target sequence
aatatatgatgcccacgacta

SEQ ID NO: 261358 - DNA, 21 bp, Artificial sequence
  SiRNA target sequence
atatatgatgcccacgactaa

SEQ ID NO: 261359 - DNA, 21 bp, Artificial sequence
  SiRNA target sequence
tatatgatgcccacgactaat

SEQ ID NO: 261360 - DNA, 21 bp, Artificial sequence
  SiRNA target sequence
atatgatgcccacgactaatg

SEQ ID NO: 261361 - DNA, 21 bp, Artificial sequence
  SiRNA target sequence
tatgatgcccacgactaatgg

SEQ ID NO: 261362 - DNA, 21 bp, Artificial sequence
  SiRNA target sequence
atgatgcccacgactaatggt

SEQ ID NO: 261363 - DNA, 21 bp, Artificial sequence
  SiRNA target sequence
tgatgcccacgactaatggtg

SEQ ID NO: 261364 - DNA, 21 bp, Artificial sequence
  SiRNA target sequence
gatgcccacgactaatggtga

SEQ ID NO: 261365 - DNA, 21 bp, Artificial sequence
  SiRNA target sequence
atgcccacgactaatggtgat

SEQ ID NO: 261366 - DNA, 21 bp, Artificial sequence
  SiRNA target sequence
tgcccacgactaatggtgatt

SEQ ID NO: 261367 - DNA, 21 bp, Artificial sequence
  SiRNA target sequence
gcccacgactaatggtgattg

SEQ ID NO: 261368 - DNA, 21 bp, Artificial sequence
  SiRNA target sequence
cccacgactaatggtgattgt

SEQ ID NO: 261369 - DNA, 21 bp, Artificial sequence
  SiRNA target sequence
ccacgactaatggtgattgtg

SEQ ID NO: 261370 - DNA, 21 bp, Artificial sequence
  SiRNA target sequence
cacgactaatggtgattgtgg

SEQ ID NO: 261371 - DNA, 21 bp, Artificial sequence
  SiRNA target sequence
acgactaatggtgattgtggc

SEQ ID NO: 261372 - DNA, 21 bp, Artificial sequence
  SiRNA target sequence
cgactaatggtgattgtggct

SEQ ID NO: 261373 - DNA, 21 bp, Artificial sequence
  SiRNA target sequence
gactaatggtgattgtggctc

SEQ ID NO: 261374 - DNA, 21 bp, Artificial sequence
  SiRNA target sequence
actaatggtgattgtggctcg

SEQ ID NO: 261375 - DNA, 21 bp, Artificial sequence
  SiRNA target sequence
ctaatggtgattgtggctcgc

SEQ ID NO: 261376 - DNA, 21 bp, Artificial sequence
  SiRNA target sequence
taatggtgattgtggctcgcc

SEQ ID NO: 261377 - DNA, 21 bp, Artificial sequence
  SiRNA target sequence
aatggtgattgtggctcgccg

SEQ ID NO: 261378 - DNA, 21 bp, Artificial sequence
  SiRNA target sequence
atggtgattgtggctcgccgc

SEQ ID NO: 261379 - DNA, 21 bp, Artificial sequence
  SiRNA target sequence
tggtgattgtggctcgccgct

SEQ ID NO: 261380 - DNA, 21 bp, Artificial sequence
  SiRNA target sequence
ggtgattgtggctcgccgctc

SEQ ID NO: 261381 - DNA, 21 bp, Artificial sequence
  SiRNA target sequence
gtgattgtggctcgccgctca

SEQ ID NO: 261382 - DNA, 21 bp, Artificial sequence
  SiRNA target sequence
tgattgtggctcgccgctcat

SEQ ID NO: 261383 - DNA, 21 bp, Artificial sequence
  SiRNA target sequence
gattgtggctcgccgctcatc

SEQ ID NO: 261384 - DNA, 21 bp, Artificial sequence
  SiRNA target sequence
attgtggctcgccgctcatca

SEQ ID NO: 261385 - DNA, 21 bp, Artificial sequence
  SiRNA target sequence
ttgtggctcgccgctcatcat

SEQ ID NO: 261386 - DNA, 21 bp, Artificial sequence
  SiRNA target sequence
tgtggctcgccgctcatcatt

SEQ ID NO: 261387 - DNA, 21 bp, Artificial sequence
  SiRNA target sequence
gtggctcgccgctcatcatta

SEQ ID NO: 261388 - DNA, 21 bp, Artificial sequence
  SiRNA target sequence
tggctcgccgctcatcattaa

SEQ ID NO: 261389 - DNA, 21 bp, Artificial sequence
  SiRNA target sequence
ggctcgccgctcatcattaat

SEQ ID NO: 261390 - DNA, 21 bp, Artificial sequence
  SiRNA target sequence
gctcgccgctcatcattaatg

SEQ ID NO: 261391 - DNA, 21 bp, Artificial sequence
  SiRNA target sequence
ctcgccgctcatcattaatga

SEQ ID NO: 261392 - DNA, 21 bp, Artificial sequence
  SiRNA target sequence
tcgccgctcatcattaatgaa

SEQ ID NO: 261393 - DNA, 21 bp, Artificial sequence
  SiRNA target sequence
cgccgctcatcattaatgaaa

SEQ ID NO: 261394 - DNA, 21 bp, Artificial sequence
  SiRNA target sequence
gccgctcatcattaatgaaac

SEQ ID NO: 261395 - DNA, 21 bp, Artificial sequence
  SiRNA target sequence
ccgctcatcattaatgaaacc

SEQ ID NO: 261396 - DNA, 21 bp, Artificial sequence
  SiRNA target sequence
cgctcatcattaatgaaaccc

SEQ ID NO: 261397 - DNA, 21 bp, Artificial sequence
  SiRNA target sequence
gctcatcattaatgaaaccca

SEQ ID NO: 261398 - DNA, 21 bp, Artificial sequence
  SiRNA target sequence
ctcatcattaatgaaacccaa

SEQ ID NO: 261399 - DNA, 21 bp, Artificial sequence
  SiRNA target sequence
tcatcattaatgaaacccaag

SEQ ID NO: 261400 - DNA, 21 bp, Artificial sequence
  SiRNA target sequence
catcattaatgaaacccaagt

SEQ ID NO: 261401 - DNA, 21 bp, Artificial sequence
  SiRNA target sequence
atcattaatgaaacccaagtt

SEQ ID NO: 261402 - DNA, 21 bp, Artificial sequence
  SiRNA target sequence
tcattaatgaaacccaagttt

SEQ ID NO: 261403 - DNA, 21 bp, Artificial sequence
  SiRNA target sequence
cattaatgaaacccaagtttt

SEQ ID NO: 261404 - DNA, 21 bp, Artificial sequence
  SiRNA target sequence
attaatgaaacccaagttttg

SEQ ID NO: 261405 - DNA, 21 bp, Artificial sequence
  SiRNA target sequence
ttaatgaaacccaagttttga

SEQ ID NO: 261406 - DNA, 21 bp, Artificial sequence
  SiRNA target sequence
taatgaaacccaagttttgag

SEQ ID NO: 261407 - DNA, 21 bp, Artificial sequence
  SiRNA target sequence
aatgaaacccaagttttgagg

SEQ ID NO: 261408 - DNA, 21 bp, Artificial sequence
  SiRNA target sequence
atgaaacccaagttttgagga

SEQ ID NO: 261409 - DNA, 21 bp, Artificial sequence
  SiRNA target sequence
tgaaacccaagttttgaggaa

SEQ ID NO: 261410 - DNA, 21 bp, Artificial sequence
  SiRNA target sequence
gaaacccaagttttgaggaaa

SEQ ID NO: 261411 - DNA, 21 bp, Artificial sequence
  SiRNA target sequence
aaacccaagttttgaggaaaa

SEQ ID NO: 261412 - DNA, 21 bp, Artificial sequence
  SiRNA target sequence
aacccaagttttgaggaaaat

SEQ ID NO: 261413 - DNA, 21 bp, Artificial sequence
  SiRNA target sequence
acccaagttttgaggaaaatt

SEQ ID NO: 261414 - DNA, 21 bp, Artificial sequence
  SiRNA target sequence
cccaagttttgaggaaaattg

SEQ ID NO: 261415 - DNA, 21 bp, Artificial sequence
  SiRNA target sequence
ccaagttttgaggaaaattgc

SEQ ID NO: 261416 - DNA, 21 bp, Artificial sequence
  SiRNA target sequence
caagttttgaggaaaattgct

SEQ ID NO: 261417 - DNA, 21 bp, Artificial sequence
  SiRNA target sequence
aagttttgaggaaaattgctg

SEQ ID NO: 261418 - DNA, 21 bp, Artificial sequence
  SiRNA target sequence
agttttgaggaaaattgctgg

SEQ ID NO: 261419 - DNA, 21 bp, Artificial sequence
  SiRNA target sequence
gttttgaggaaaattgctggt

SEQ ID NO: 261420 - DNA, 21 bp, Artificial sequence
  SiRNA target sequence
ttttgaggaaaattgctggta

SEQ ID NO: 261421 - DNA, 21 bp, Artificial sequence
  SiRNA target sequence
tttgaggaaaattgctggtat

SEQ ID NO: 261422 - DNA, 21 bp, Artificial sequence
  SiRNA target sequence
ttgaggaaaattgctggtatt

SEQ ID NO: 261423 - DNA, 21 bp, Artificial sequence
  SiRNA target sequence
tgaggaaaattgctggtattc

SEQ ID NO: 261424 - DNA, 21 bp, Artificial sequence
  SiRNA target sequence
gaggaaaattgctggtattca

SEQ ID NO: 261425 - DNA, 21 bp, Artificial sequence
  SiRNA target sequence
aggaaaattgctggtattcat

SEQ ID NO: 261426 - DNA, 21 bp, Artificial sequence
  SiRNA target sequence
ggaaaattgctggtattcatg

SEQ ID NO: 261427 - DNA, 21 bp, Artificial sequence
  SiRNA target sequence
gaaaattgctggtattcatgt

SEQ ID NO: 261428 - DNA, 21 bp, Artificial sequence
  SiRNA target sequence
aaaattgctggtattcatgta

SEQ ID NO: 261429 - DNA, 21 bp, Artificial sequence
  SiRNA target sequence
aaattgctggtattcatgtag

SEQ ID NO: 261430 - DNA, 21 bp, Artificial sequence
  SiRNA target sequence
aattgctggtattcatgtagc

SEQ ID NO: 261431 - DNA, 21 bp, Artificial sequence
  SiRNA target sequence
attgctggtattcatgtagct

SEQ ID NO: 261432 - DNA, 21 bp, Artificial sequence
  SiRNA target sequence
ttgctggtattcatgtagctg

SEQ ID NO: 261433 - DNA, 21 bp, Artificial sequence
  SiRNA target sequence
tgctggtattcatgtagctgg

SEQ ID NO: 261434 - DNA, 21 bp, Artificial sequence
  SiRNA target sequence
gctggtattcatgtagctgga

SEQ ID NO: 261435 - DNA, 21 bp, Artificial sequence
  SiRNA target sequence
ctggtattcatgtagctggag

SEQ ID NO: 261436 - DNA, 21 bp, Artificial sequence
  SiRNA target sequence
tggtattcatgtagctggagc

SEQ ID NO: 261437 - DNA, 21 bp, Artificial sequence
  SiRNA target sequence
ggtattcatgtagctggagct

SEQ ID NO: 261438 - DNA, 21 bp, Artificial sequence
  SiRNA target sequence
gtattcatgtagctggagcta

SEQ ID NO: 261439 - DNA, 21 bp, Artificial sequence
  SiRNA target sequence
tattcatgtagctggagctac

SEQ ID NO: 261440 - DNA, 21 bp, Artificial sequence
  SiRNA target sequence
attcatgtagctggagctaca

SEQ ID NO: 261441 - DNA, 21 bp, Artificial sequence
  SiRNA target sequence
ttcatgtagctggagctacaa

SEQ ID NO: 261442 - DNA, 21 bp, Artificial sequence
  SiRNA target sequence
tcatgtagctggagctacaac

SEQ ID NO: 261443 - DNA, 21 bp, Artificial sequence
  SiRNA target sequence
catgtagctggagctacaact

SEQ ID NO: 261444 - DNA, 21 bp, Artificial sequence
  SiRNA target sequence
atgtagctggagctacaactg

SEQ ID NO: 261445 - DNA, 21 bp, Artificial sequence
  SiRNA target sequence
tgtagctggagctacaactgg

SEQ ID NO: 261446 - DNA, 21 bp, Artificial sequence
  SiRNA target sequence
gtagctggagctacaactggc

SEQ ID NO: 261447 - DNA, 21 bp, Artificial sequence
  SiRNA target sequence
tagctggagctacaactggca

SEQ ID NO: 261448 - DNA, 21 bp, Artificial sequence
  SiRNA target sequence
agctggagctacaactggcaa

SEQ ID NO: 261449 - DNA, 21 bp, Artificial sequence
  SiRNA target sequence
gctggagctacaactggcaaa

SEQ ID NO: 261450 - DNA, 21 bp, Artificial sequence
  SiRNA target sequence
ctggagctacaactggcaaag

SEQ ID NO: 261451 - DNA, 21 bp, Artificial sequence
  SiRNA target sequence
tggagctacaactggcaaagc

SEQ ID NO: 261452 - DNA, 21 bp, Artificial sequence
  SiRNA target sequence
ggagctacaactggcaaagcc

SEQ ID NO: 261453 - DNA, 21 bp, Artificial sequence
  SiRNA target sequence
gagctacaactggcaaagcct

SEQ ID NO: 261454 - DNA, 21 bp, Artificial sequence
  SiRNA target sequence
agctacaactggcaaagccta

SEQ ID NO: 261455 - DNA, 21 bp, Artificial sequence
  SiRNA target sequence
gctacaactggcaaagcctat

SEQ ID NO: 261456 - DNA, 21 bp, Artificial sequence
  SiRNA target sequence
ctacaactggcaaagcctatg

SEQ ID NO: 261457 - DNA, 21 bp, Artificial sequence
  SiRNA target sequence
tacaactggcaaagcctatgc

SEQ ID NO: 261458 - DNA, 21 bp, Artificial sequence
  SiRNA target sequence
acaactggcaaagcctatgct

SEQ ID NO: 261459 - DNA, 21 bp, Artificial sequence
  SiRNA target sequence
caactggcaaagcctatgctg

SEQ ID NO: 261460 - DNA, 21 bp, Artificial sequence
  SiRNA target sequence
aactggcaaagcctatgctga

SEQ ID NO: 261461 - DNA, 21 bp, Artificial sequence
  SiRNA target sequence
actggcaaagcctatgctgag

SEQ ID NO: 261462 - DNA, 21 bp, Artificial sequence
  SiRNA target sequence
ctggcaaagcctatgctgagt

SEQ ID NO: 261463 - DNA, 21 bp, Artificial sequence
  SiRNA target sequence
tggcaaagcctatgctgagtc

SEQ ID NO: 261464 - DNA, 21 bp, Artificial sequence
  SiRNA target sequence
ggcaaagcctatgctgagtct

SEQ ID NO: 261465 - DNA, 21 bp, Artificial sequence
  SiRNA target sequence
gcaaagcctatgctgagtcta

SEQ ID NO: 261466 - DNA, 21 bp, Artificial sequence
  SiRNA target sequence
caaagcctatgctgagtctat

SEQ ID NO: 261467 - DNA, 21 bp, Artificial sequence
  SiRNA target sequence
aaagcctatgctgagtctata

SEQ ID NO: 261468 - DNA, 21 bp, Artificial sequence
  SiRNA target sequence
aagcctatgctgagtctataa

SEQ ID NO: 261469 - DNA, 21 bp, Artificial sequence
  SiRNA target sequence
agcctatgctgagtctataac

SEQ ID NO: 261470 - DNA, 21 bp, Artificial sequence
  SiRNA target sequence
gcctatgctgagtctataacc

SEQ ID NO: 261471 - DNA, 21 bp, Artificial sequence
  SiRNA target sequence
cctatgctgagtctataaccc

SEQ ID NO: 261472 - DNA, 21 bp, Artificial sequence
  SiRNA target sequence
ctatgctgagtctataaccca

SEQ ID NO: 261473 - DNA, 21 bp, Artificial sequence
  SiRNA target sequence
tatgctgagtctataacccaa

SEQ ID NO: 261474 - DNA, 21 bp, Artificial sequence
  SiRNA target sequence
atgctgagtctataacccaaa

SEQ ID NO: 261475 - DNA, 21 bp, Artificial sequence
  SiRNA target sequence
tgctgagtctataacccaaaa

SEQ ID NO: 261476 - DNA, 21 bp, Artificial sequence
  SiRNA target sequence
gctgagtctataacccaaaaa

SEQ ID NO: 261477 - DNA, 21 bp, Artificial sequence
  SiRNA target sequence
ctgagtctataacccaaaaag

SEQ ID NO: 261478 - DNA, 21 bp, Artificial sequence
  SiRNA target sequence
tgagtctataacccaaaaaga

SEQ ID NO: 261479 - DNA, 21 bp, Artificial sequence
  SiRNA target sequence
gagtctataacccaaaaagat

SEQ ID NO: 261480 - DNA, 21 bp, Artificial sequence
  SiRNA target sequence
agtctataacccaaaaagatc

SEQ ID NO: 261481 - DNA, 21 bp, Artificial sequence
  SiRNA target sequence
gtctataacccaaaaagatct

SEQ ID NO: 261482 - DNA, 21 bp, Artificial sequence
  SiRNA target sequence
tctataacccaaaaagatctt

SEQ ID NO: 261483 - DNA, 21 bp, Artificial sequence
  SiRNA target sequence
ctataacccaaaaagatcttg

SEQ ID NO: 261484 - DNA, 21 bp, Artificial sequence
  SiRNA target sequence
tataacccaaaaagatcttga

SEQ ID NO: 261485 - DNA, 21 bp, Artificial sequence
  SiRNA target sequence
ataacccaaaaagatcttgag

SEQ ID NO: 261486 - DNA, 21 bp, Artificial sequence
  SiRNA target sequence
taacccaaaaagatcttgagc

SEQ ID NO: 261487 - DNA, 21 bp, Artificial sequence
  SiRNA target sequence
aacccaaaaagatcttgagcg

SEQ ID NO: 261488 - DNA, 21 bp, Artificial sequence
  SiRNA target sequence
acccaaaaagatcttgagcga

SEQ ID NO: 261489 - DNA, 21 bp, Artificial sequence
  SiRNA target sequence
cccaaaaagatcttgagcgag

SEQ ID NO: 261490 - DNA, 21 bp, Artificial sequence
  SiRNA target sequence
ccaaaaagatcttgagcgagc

SEQ ID NO: 261491 - DNA, 21 bp, Artificial sequence
  SiRNA target sequence
caaaaagatcttgagcgagca

SEQ ID NO: 261492 - DNA, 21 bp, Artificial sequence
  SiRNA target sequence
aaaaagatcttgagcgagcat

SEQ ID NO: 261493 - DNA, 21 bp, Artificial sequence
  SiRNA target sequence
aaaagatcttgagcgagcatt

SEQ ID NO: 261494 - DNA, 21 bp, Artificial sequence
  SiRNA target sequence
aaagatcttgagcgagcattt

SEQ ID NO: 261495 - DNA, 21 bp, Artificial sequence
  SiRNA target sequence
aagatcttgagcgagcattta

SEQ ID NO: 261496 - DNA, 21 bp, Artificial sequence
  SiRNA target sequence
agatcttgagcgagcatttat

SEQ ID NO: 261497 - DNA, 21 bp, Artificial sequence
  SiRNA target sequence
gatcttgagcgagcatttatt

SEQ ID NO: 261498 - DNA, 21 bp, Artificial sequence
  SiRNA target sequence
atcttgagcgagcatttatta

SEQ ID NO: 261499 - DNA, 21 bp, Artificial sequence
  SiRNA target sequence
tcttgagcgagcatttattaa

SEQ ID NO: 261500 - DNA, 21 bp, Artificial sequence
  SiRNA target sequence
cttgagcgagcatttattaaa

SEQ ID NO: 261501 - DNA, 21 bp, Artificial sequence
  SiRNA target sequence
ttgagcgagcatttattaaaa

SEQ ID NO: 261502 - DNA, 21 bp, Artificial sequence
  SiRNA target sequence
tgagcgagcatttattaaaat

SEQ ID NO: 261503 - DNA, 21 bp, Artificial sequence
  SiRNA target sequence
gagcgagcatttattaaaata

SEQ ID NO: 261504 - DNA, 21 bp, Artificial sequence
  SiRNA target sequence
agcgagcatttattaaaatag

SEQ ID NO: 261505 - DNA, 21 bp, Artificial sequence
  SiRNA target sequence
gcgagcatttattaaaataga

SEQ ID NO: 261506 - DNA, 21 bp, Artificial sequence
  SiRNA target sequence
cgagcatttattaaaatagat

SEQ ID NO: 261507 - DNA, 21 bp, Artificial sequence
  SiRNA target sequence
gagcatttattaaaatagatg

SEQ ID NO: 261508 - DNA, 21 bp, Artificial sequence
  SiRNA target sequence
agcatttattaaaatagatgt

SEQ ID NO: 261509 - DNA, 21 bp, Artificial sequence
  SiRNA target sequence
gcatttattaaaatagatgta

SEQ ID NO: 261510 - DNA, 21 bp, Artificial sequence
  SiRNA target sequence
catttattaaaatagatgtaa

SEQ ID NO: 261511 - DNA, 21 bp, Artificial sequence
  SiRNA target sequence
atttattaaaatagatgtaag

SEQ ID NO: 261512 - DNA, 21 bp, Artificial sequence
  SiRNA target sequence
tttattaaaatagatgtaagc

SEQ ID NO: 261513 - DNA, 21 bp, Artificial sequence
  SiRNA target sequence
ttattaaaatagatgtaagca

SEQ ID NO: 261514 - DNA, 21 bp, Artificial sequence
  SiRNA target sequence
tattaaaatagatgtaagcat

SEQ ID NO: 261515 - DNA, 21 bp, Artificial sequence
  SiRNA target sequence
attaaaatagatgtaagcatg

SEQ ID NO: 261516 - DNA, 21 bp, Artificial sequence
  SiRNA target sequence
ttaaaatagatgtaagcatgc

SEQ ID NO: 261517 - DNA, 21 bp, Artificial sequence
  SiRNA target sequence
taaaatagatgtaagcatgca

SEQ ID NO: 261518 - DNA, 21 bp, Artificial sequence
  SiRNA target sequence
aaaatagatgtaagcatgcag

SEQ ID NO: 261519 - DNA, 21 bp, Artificial sequence
  SiRNA target sequence
aaatagatgtaagcatgcaga

SEQ ID NO: 261520 - DNA, 21 bp, Artificial sequence
  SiRNA target sequence
aatagatgtaagcatgcagat

SEQ ID NO: 261521 - DNA, 21 bp, Artificial sequence
  SiRNA target sequence
atagatgtaagcatgcagatc

SEQ ID NO: 261522 - DNA, 21 bp, Artificial sequence
  SiRNA target sequence
tagatgtaagcatgcagatcc

SEQ ID NO: 261523 - DNA, 21 bp, Artificial sequence
  SiRNA target sequence
agatgtaagcatgcagatcca

SEQ ID NO: 261524 - DNA, 21 bp, Artificial sequence
  SiRNA target sequence
gatgtaagcatgcagatccaa

SEQ ID NO: 261525 - DNA, 21 bp, Artificial sequence
  SiRNA target sequence
atgtaagcatgcagatccaat

SEQ ID NO: 261526 - DNA, 21 bp, Artificial sequence
  SiRNA target sequence
tgtaagcatgcagatccaatt

SEQ ID NO: 261527 - DNA, 21 bp, Artificial sequence
  SiRNA target sequence
gtaagcatgcagatccaattg

SEQ ID NO: 261528 - DNA, 21 bp, Artificial sequence
  SiRNA target sequence
taagcatgcagatccaattgg

SEQ ID NO: 261529 - DNA, 21 bp, Artificial sequence
  SiRNA target sequence
aagcatgcagatccaattgga

SEQ ID NO: 261530 - DNA, 21 bp, Artificial sequence
  SiRNA target sequence
agcatgcagatccaattggat

SEQ ID NO: 261531 - DNA, 21 bp, Artificial sequence
  SiRNA target sequence
gcatgcagatccaattggatt

SEQ ID NO: 261532 - DNA, 21 bp, Artificial sequence
  SiRNA target sequence
catgcagatccaattggattt

SEQ ID NO: 261533 - DNA, 21 bp, Artificial sequence
  SiRNA target sequence
atgcagatccaattggatttg

SEQ ID NO: 261534 - DNA, 21 bp, Artificial sequence
  SiRNA target sequence
tgcagatccaattggatttgg

SEQ ID NO: 261535 - DNA, 21 bp, Artificial sequence
  SiRNA target sequence
gcagatccaattggatttgga

SEQ ID NO: 261536 - DNA, 21 bp, Artificial sequence
  SiRNA target sequence
cagatccaattggatttggat

SEQ ID NO: 261537 - DNA, 21 bp, Artificial sequence
  SiRNA target sequence
agatccaattggatttggatt

SEQ ID NO: 261538 - DNA, 21 bp, Artificial sequence
  SiRNA target sequence
gatccaattggatttggattc

SEQ ID NO: 261539 - DNA, 21 bp, Artificial sequence
  SiRNA target sequence
atccaattggatttggattca

SEQ ID NO: 261540 - DNA, 21 bp, Artificial sequence
  SiRNA target sequence
tccaattggatttggattcaa

SEQ ID NO: 261541 - DNA, 21 bp, Artificial sequence
  SiRNA target sequence
ccaattggatttggattcaac

SEQ ID NO: 261542 - DNA, 21 bp, Artificial sequence
  SiRNA target sequence
caattggatttggattcaaca

SEQ ID NO: 261543 - DNA, 21 bp, Artificial sequence
  SiRNA target sequence
aattggatttggattcaacat

SEQ ID NO: 261544 - DNA, 21 bp, Artificial sequence
  SiRNA target sequence
attggatttggattcaacatt

SEQ ID NO: 261545 - DNA, 21 bp, Artificial sequence
  SiRNA target sequence
ttggatttggattcaacattg

SEQ ID NO: 261546 - DNA, 21 bp, Artificial sequence
  SiRNA target sequence
tggatttggattcaacattgg

SEQ ID NO: 261547 - DNA, 21 bp, Artificial sequence
  SiRNA target sequence
ggatttggattcaacattgga

SEQ ID NO: 261548 - DNA, 21 bp, Artificial sequence
  SiRNA target sequence
gatttggattcaacattggat

SEQ ID NO: 261549 - DNA, 21 bp, Artificial sequence
  SiRNA target sequence
atttggattcaacattggatt

SEQ ID NO: 261550 - DNA, 21 bp, Artificial sequence
  SiRNA target sequence
tttggattcaacattggattt

SEQ ID NO: 261551 - DNA, 21 bp, Artificial sequence
  SiRNA target sequence
ttggattcaacattggatttc

SEQ ID NO: 261552 - DNA, 21 bp, Artificial sequence
  SiRNA target sequence
tggattcaacattggatttct

SEQ ID NO: 261553 - DNA, 21 bp, Artificial sequence
  SiRNA target sequence
ggattcaacattggatttctc

SEQ ID NO: 261554 - DNA, 21 bp, Artificial sequence
  SiRNA target sequence
gattcaacattggatttctca

SEQ ID NO: 261555 - DNA, 21 bp, Artificial sequence
  SiRNA target sequence
attcaacattggatttctcaa

SEQ ID NO: 261556 - DNA, 21 bp, Artificial sequence
  SiRNA target sequence
ttcaacattggatttctcaaa

SEQ ID NO: 261557 - DNA, 21 bp, Artificial sequence
  SiRNA target sequence
tcaacattggatttctcaaaa

SEQ ID NO: 261558 - DNA, 21 bp, Artificial sequence
  SiRNA target sequence
caacattggatttctcaaaac

SEQ ID NO: 261559 - DNA, 21 bp, Artificial sequence
  SiRNA target sequence
aacattggatttctcaaaacc

SEQ ID NO: 261560 - DNA, 21 bp, Artificial sequence
  SiRNA target sequence
acattggatttctcaaaaccc

SEQ ID NO: 261561 - DNA, 21 bp, Artificial sequence
  SiRNA target sequence
cattggatttctcaaaacccg

SEQ ID NO: 261562 - DNA, 21 bp, Artificial sequence
  SiRNA target sequence
attggatttctcaaaacccga

SEQ ID NO: 261563 - DNA, 21 bp, Artificial sequence
  SiRNA target sequence
ttggatttctcaaaacccgaa

SEQ ID NO: 261564 - DNA, 21 bp, Artificial sequence
  SiRNA target sequence
tggatttctcaaaacccgaac

SEQ ID NO: 261565 - DNA, 21 bp, Artificial sequence
  SiRNA target sequence
ggatttctcaaaacccgaacc

SEQ ID NO: 261566 - DNA, 21 bp, Artificial sequence
  SiRNA target sequence
gatttctcaaaacccgaaccc

SEQ ID NO: 261567 - DNA, 21 bp, Artificial sequence
  SiRNA target sequence
atttctcaaaacccgaaccca

SEQ ID NO: 261568 - DNA, 21 bp, Artificial sequence
  SiRNA target sequence
tttctcaaaacccgaacccaa

SEQ ID NO: 261569 - DNA, 21 bp, Artificial sequence
  SiRNA target sequence
ttctcaaaacccgaacccaaa

SEQ ID NO: 261570 - DNA, 21 bp, Artificial sequence
  SiRNA target sequence
tctcaaaacccgaacccaaat

SEQ ID NO: 261571 - DNA, 21 bp, Artificial sequence
  SiRNA target sequence
ctcaaaacccgaacccaaatt

SEQ ID NO: 261572 - DNA, 21 bp, Artificial sequence
  SiRNA target sequence
tcaaaacccgaacccaaattg

SEQ ID NO: 261573 - DNA, 21 bp, Artificial sequence
  SiRNA target sequence
caaaacccgaacccaaattgc

SEQ ID NO: 261574 - DNA, 21 bp, Artificial sequence
  SiRNA target sequence
aaaacccgaacccaaattgcc

SEQ ID NO: 261575 - DNA, 21 bp, Artificial sequence
  SiRNA target sequence
aaacccgaacccaaattgcct

SEQ ID NO: 261576 - DNA, 21 bp, Artificial sequence
  SiRNA target sequence
aacccgaacccaaattgcctt

SEQ ID NO: 261577 - DNA, 21 bp, Artificial sequence
  SiRNA target sequence
acccgaacccaaattgccttc

SEQ ID NO: 261578 - DNA, 21 bp, Artificial sequence
  SiRNA target sequence
cccgaacccaaattgccttct

SEQ ID NO: 261579 - DNA, 21 bp, Artificial sequence
  SiRNA target sequence
ccgaacccaaattgccttctg

SEQ ID NO: 261580 - DNA, 21 bp, Artificial sequence
  SiRNA target sequence
cgaacccaaattgccttctgg

SEQ ID NO: 261581 - DNA, 21 bp, Artificial sequence
  SiRNA target sequence
gaacccaaattgccttctggt

SEQ ID NO: 261582 - DNA, 21 bp, Artificial sequence
  SiRNA target sequence
aacccaaattgccttctggta

SEQ ID NO: 261583 - DNA, 21 bp, Artificial sequence
  SiRNA target sequence
acccaaattgccttctggtac

SEQ ID NO: 261584 - DNA, 21 bp, Artificial sequence
  SiRNA target sequence
cccaaattgccttctggtact

SEQ ID NO: 261585 - DNA, 21 bp, Artificial sequence
  SiRNA target sequence
ccaaattgccttctggtactg

SEQ ID NO: 261586 - DNA, 21 bp, Artificial sequence
  SiRNA target sequence
caaattgccttctggtactga

SEQ ID NO: 261587 - DNA, 21 bp, Artificial sequence
  SiRNA target sequence
aaattgccttctggtactgaa

SEQ ID NO: 261588 - DNA, 21 bp, Artificial sequence
  SiRNA target sequence
aattgccttctggtactgaat

SEQ ID NO: 261589 - DNA, 21 bp, Artificial sequence
  SiRNA target sequence
attgccttctggtactgaatt

SEQ ID NO: 261590 - DNA, 21 bp, Artificial sequence
  SiRNA target sequence
ttgccttctggtactgaattt

SEQ ID NO: 261591 - DNA, 21 bp, Artificial sequence
  SiRNA target sequence
tgccttctggtactgaatttg

SEQ ID NO: 261592 - DNA, 21 bp, Artificial sequence
  SiRNA target sequence
gccttctggtactgaatttgg

SEQ ID NO: 261593 - DNA, 21 bp, Artificial sequence
  SiRNA target sequence
ccttctggtactgaatttggt

SEQ ID NO: 261594 - DNA, 21 bp, Artificial sequence
  SiRNA target sequence
cttctggtactgaatttggtc

SEQ ID NO: 261595 - DNA, 21 bp, Artificial sequence
  SiRNA target sequence
ttctggtactgaatttggtcc

SEQ ID NO: 261596 - DNA, 21 bp, Artificial sequence
  SiRNA target sequence
tctggtactgaatttggtcct

SEQ ID NO: 261597 - DNA, 21 bp, Artificial sequence
  SiRNA target sequence
ctggtactgaatttggtcctg

SEQ ID NO: 261598 - DNA, 21 bp, Artificial sequence
  SiRNA target sequence
tggtactgaatttggtcctga

SEQ ID NO: 261599 - DNA, 21 bp, Artificial sequence
  SiRNA target sequence
ggtactgaatttggtcctgaa

SEQ ID NO: 261600 - DNA, 21 bp, Artificial sequence
  SiRNA target sequence
gtactgaatttggtcctgaag

SEQ ID NO: 261601 - DNA, 21 bp, Artificial sequence
  SiRNA target sequence
tactgaatttggtcctgaaga

SEQ ID NO: 261602 - DNA, 21 bp, Artificial sequence
  SiRNA target sequence
actgaatttggtcctgaagat

SEQ ID NO: 261603 - DNA, 21 bp, Artificial sequence
  SiRNA target sequence
ctgaatttggtcctgaagatc

SEQ ID NO: 261604 - DNA, 21 bp, Artificial sequence
  SiRNA target sequence
tgaatttggtcctgaagatct

SEQ ID NO: 261605 - DNA, 21 bp, Artificial sequence
  SiRNA target sequence
gaatttggtcctgaagatctc

SEQ ID NO: 261606 - DNA, 21 bp, Artificial sequence
  SiRNA target sequence
aatttggtcctgaagatctca

SEQ ID NO: 261607 - DNA, 21 bp, Artificial sequence
  SiRNA target sequence
atttggtcctgaagatctcag

SEQ ID NO: 261608 - DNA, 21 bp, Artificial sequence
  SiRNA target sequence
tttggtcctgaagatctcagc

SEQ ID NO: 261609 - DNA, 21 bp, Artificial sequence
  SiRNA target sequence
ttggtcctgaagatctcagct

SEQ ID NO: 261610 - DNA, 21 bp, Artificial sequence
  SiRNA target sequence
tggtcctgaagatctcagctt

SEQ ID NO: 261611 - DNA, 21 bp, Artificial sequence
  SiRNA target sequence
ggtcctgaagatctcagcttt

SEQ ID NO: 261612 - DNA, 21 bp, Artificial sequence
  SiRNA target sequence
gtcctgaagatctcagctttt

SEQ ID NO: 261613 - DNA, 21 bp, Artificial sequence
  SiRNA target sequence
tcctgaagatctcagcttttg

SEQ ID NO: 261614 - DNA, 21 bp, Artificial sequence
  SiRNA target sequence
cctgaagatctcagcttttgt

SEQ ID NO: 261615 - DNA, 21 bp, Artificial sequence
  SiRNA target sequence
ctgaagatctcagcttttgtg

SEQ ID NO: 261616 - DNA, 21 bp, Artificial sequence
  SiRNA target sequence
tgaagatctcagcttttgtga

SEQ ID NO: 261617 - DNA, 21 bp, Artificial sequence
  SiRNA target sequence
gaagatctcagcttttgtgat

SEQ ID NO: 261618 - DNA, 21 bp, Artificial sequence
  SiRNA target sequence
aagatctcagcttttgtgatc

SEQ ID NO: 261619 - DNA, 21 bp, Artificial sequence
  SiRNA target sequence
agatctcagcttttgtgatct

SEQ ID NO: 261620 - DNA, 21 bp, Artificial sequence
  SiRNA target sequence
gatctcagcttttgtgatctt

SEQ ID NO: 261621 - DNA, 21 bp, Artificial sequence
  SiRNA target sequence
atctcagcttttgtgatcttc

SEQ ID NO: 261622 - DNA, 21 bp, Artificial sequence
  SiRNA target sequence
tctcagcttttgtgatcttcc

SEQ ID NO: 261623 - DNA, 21 bp, Artificial sequence
  SiRNA target sequence
ctcagcttttgtgatcttccc

SEQ ID NO: 261624 - DNA, 21 bp, Artificial sequence
  SiRNA target sequence
tcagcttttgtgatcttcccg

SEQ ID NO: 261625 - DNA, 21 bp, Artificial sequence
  SiRNA target sequence
cagcttttgtgatcttcccgc

SEQ ID NO: 261626 - DNA, 21 bp, Artificial sequence
  SiRNA target sequence
agcttttgtgatcttcccgcc

SEQ ID NO: 261627 - DNA, 21 bp, Artificial sequence
  SiRNA target sequence
gcttttgtgatcttcccgccc

SEQ ID NO: 261628 - DNA, 21 bp, Artificial sequence
  SiRNA target sequence
cttttgtgatcttcccgccct

SEQ ID NO: 261629 - DNA, 21 bp, Artificial sequence
  SiRNA target sequence
ttttgtgatcttcccgcccta

SEQ ID NO: 261630 - DNA, 21 bp, Artificial sequence
  SiRNA target sequence
tttgtgatcttcccgccctaa

SEQ ID NO: 261631 - DNA, 21 bp, Artificial sequence
  SiRNA target sequence
ttgtgatcttcccgccctaaa

SEQ ID NO: 261632 - DNA, 21 bp, Artificial sequence
  SiRNA target sequence
tgtgatcttcccgccctaaag

SEQ ID NO: 261633 - DNA, 21 bp, Artificial sequence
  SiRNA target sequence
gtgatcttcccgccctaaaga

SEQ ID NO: 261634 - DNA, 21 bp, Artificial sequence
  SiRNA target sequence
tgatcttcccgccctaaagat

SEQ ID NO: 261635 - DNA, 21 bp, Artificial sequence
  SiRNA target sequence
gatcttcccgccctaaagatg

SEQ ID NO: 261636 - DNA, 21 bp, Artificial sequence
  SiRNA target sequence
atcttcccgccctaaagatgt

SEQ ID NO: 261637 - DNA, 21 bp, Artificial sequence
  SiRNA target sequence
tcttcccgccctaaagatgtt

SEQ ID NO: 261638 - DNA, 21 bp, Artificial sequence
  SiRNA target sequence
cttcccgccctaaagatgtta

SEQ ID NO: 261639 - DNA, 21 bp, Artificial sequence
  SiRNA target sequence
ttcccgccctaaagatgttac

SEQ ID NO: 261640 - DNA, 21 bp, Artificial sequence
  SiRNA target sequence
tcccgccctaaagatgttacc

SEQ ID NO: 261641 - DNA, 21 bp, Artificial sequence
  SiRNA target sequence
cccgccctaaagatgttacca

SEQ ID NO: 261642 - DNA, 21 bp, Artificial sequence
  SiRNA target sequence
ccgccctaaagatgttaccag

SEQ ID NO: 261643 - DNA, 21 bp, Artificial sequence
  SiRNA target sequence
cgccctaaagatgttaccagt

SEQ ID NO: 261644 - DNA, 21 bp, Artificial sequence
  SiRNA target sequence
gccctaaagatgttaccagtt

SEQ ID NO: 261645 - DNA, 21 bp, Artificial sequence
  SiRNA target sequence
ccctaaagatgttaccagttg

SEQ ID NO: 261646 - DNA, 21 bp, Artificial sequence
  SiRNA target sequence
cctaaagatgttaccagttgg

SEQ ID NO: 261647 - DNA, 21 bp, Artificial sequence
  SiRNA target sequence
ctaaagatgttaccagttggt

SEQ ID NO: 261648 - DNA, 21 bp, Artificial sequence
  SiRNA target sequence
taaagatgttaccagttggta

SEQ ID NO: 261649 - DNA, 21 bp, Artificial sequence
  SiRNA target sequence
aaagatgttaccagttggtaa

SEQ ID NO: 261650 - DNA, 21 bp, Artificial sequence
  SiRNA target sequence
aagatgttaccagttggtaaa

SEQ ID NO: 261651 - DNA, 21 bp, Artificial sequence
  SiRNA target sequence
agatgttaccagttggtaaac

SEQ ID NO: 261652 - DNA, 21 bp, Artificial sequence
  SiRNA target sequence
gatgttaccagttggtaaact

SEQ ID NO: 261653 - DNA, 21 bp, Artificial sequence
  SiRNA target sequence
atgttaccagttggtaaactt

SEQ ID NO: 261654 - DNA, 21 bp, Artificial sequence
  SiRNA target sequence
tgttaccagttggtaaacttt

SEQ ID NO: 261655 - DNA, 21 bp, Artificial sequence
  SiRNA target sequence
gttaccagttggtaaactttc

SEQ ID NO: 261656 - DNA, 21 bp, Artificial sequence
  SiRNA target sequence
ttaccagttggtaaactttct

SEQ ID NO: 261657 - DNA, 21 bp, Artificial sequence
  SiRNA target sequence
taccagttggtaaactttctg

SEQ ID NO: 261658 - DNA, 21 bp, Artificial sequence
  SiRNA target sequence
accagttggtaaactttctga

SEQ ID NO: 261659 - DNA, 21 bp, Artificial sequence
  SiRNA target sequence
ccagttggtaaactttctgaa

SEQ ID NO: 261660 - DNA, 21 bp, Artificial sequence
  SiRNA target sequence
cagttggtaaactttctgaat

SEQ ID NO: 261661 - DNA, 21 bp, Artificial sequence
  SiRNA target sequence
agttggtaaactttctgaatc

SEQ ID NO: 261662 - DNA, 21 bp, Artificial sequence
  SiRNA target sequence
gttggtaaactttctgaatcc

SEQ ID NO: 261663 - DNA, 21 bp, Artificial sequence
  SiRNA target sequence
ttggtaaactttctgaatcct

SEQ ID NO: 261664 - DNA, 21 bp, Artificial sequence
  SiRNA target sequence
tggtaaactttctgaatcctt

SEQ ID NO: 261665 - DNA, 21 bp, Artificial sequence
  SiRNA target sequence
ggtaaactttctgaatcctta

SEQ ID NO: 261666 - DNA, 21 bp, Artificial sequence
  SiRNA target sequence
gtaaactttctgaatccttat

SEQ ID NO: 261667 - DNA, 21 bp, Artificial sequence
  SiRNA target sequence
taaactttctgaatccttatt

SEQ ID NO: 261668 - DNA, 21 bp, Artificial sequence
  SiRNA target sequence
aaactttctgaatccttattc

SEQ ID NO: 261669 - DNA, 21 bp, Artificial sequence
  SiRNA target sequence
aactttctgaatccttattcg

SEQ ID NO: 261670 - DNA, 21 bp, Artificial sequence
  SiRNA target sequence
actttctgaatccttattcga

SEQ ID NO: 261671 - DNA, 21 bp, Artificial sequence
  SiRNA target sequence
ctttctgaatccttattcgaa

SEQ ID NO: 261672 - DNA, 21 bp, Artificial sequence
  SiRNA target sequence
tttctgaatccttattcgaac

SEQ ID NO: 261673 - DNA, 21 bp, Artificial sequence
  SiRNA target sequence
ttctgaatccttattcgaacc

SEQ ID NO: 261674 - DNA, 21 bp, Artificial sequence
  SiRNA target sequence
tctgaatccttattcgaacct

SEQ ID NO: 261675 - DNA, 21 bp, Artificial sequence
  SiRNA target sequence
ctgaatccttattcgaacctg

SEQ ID NO: 261676 - DNA, 21 bp, Artificial sequence
  SiRNA target sequence
tgaatccttattcgaacctgg

SEQ ID NO: 261677 - DNA, 21 bp, Artificial sequence
  SiRNA target sequence
gaatccttattcgaacctggc

SEQ ID NO: 261678 - DNA, 21 bp, Artificial sequence
  SiRNA target sequence
aatccttattcgaacctggca

SEQ ID NO: 261679 - DNA, 21 bp, Artificial sequence
  SiRNA target sequence
atccttattcgaacctggcaa

SEQ ID NO: 261680 - DNA, 21 bp, Artificial sequence
  SiRNA target sequence
tccttattcgaacctggcaag

SEQ ID NO: 261681 - DNA, 21 bp, Artificial sequence
  SiRNA target sequence
ccttattcgaacctggcaaga

SEQ ID NO: 261682 - DNA, 21 bp, Artificial sequence
  SiRNA target sequence
cttattcgaacctggcaagac

SEQ ID NO: 261683 - DNA, 21 bp, Artificial sequence
  SiRNA target sequence
ttattcgaacctggcaagacg

SEQ ID NO: 261684 - DNA, 21 bp, Artificial sequence
  SiRNA target sequence
tattcgaacctggcaagacgg

SEQ ID NO: 261685 - DNA, 21 bp, Artificial sequence
  SiRNA target sequence
attcgaacctggcaagacgga

SEQ ID NO: 261686 - DNA, 21 bp, Artificial sequence
  SiRNA target sequence
ttcgaacctggcaagacggat

SEQ ID NO: 261687 - DNA, 21 bp, Artificial sequence
  SiRNA target sequence
tcgaacctggcaagacggata

SEQ ID NO: 261688 - DNA, 21 bp, Artificial sequence
  SiRNA target sequence
cgaacctggcaagacggatat

SEQ ID NO: 261689 - DNA, 21 bp, Artificial sequence
  SiRNA target sequence
gaacctggcaagacggatata

SEQ ID NO: 261690 - DNA, 21 bp, Artificial sequence
  SiRNA target sequence
aacctggcaagacggatataa

SEQ ID NO: 261691 - DNA, 21 bp, Artificial sequence
  SiRNA target sequence
acctggcaagacggatataag

SEQ ID NO: 261692 - DNA, 21 bp, Artificial sequence
  SiRNA target sequence
cctggcaagacggatataagg

SEQ ID NO: 261693 - DNA, 21 bp, Artificial sequence
  SiRNA target sequence
ctggcaagacggatataaggc

SEQ ID NO: 261694 - DNA, 21 bp, Artificial sequence
  SiRNA target sequence
tggcaagacggatataaggcc

SEQ ID NO: 261695 - DNA, 21 bp, Artificial sequence
  SiRNA target sequence
ggcaagacggatataaggccc

SEQ ID NO: 261696 - DNA, 21 bp, Artificial sequence
  SiRNA target sequence
gcaagacggatataaggccct

SEQ ID NO: 261697 - DNA, 21 bp, Artificial sequence
  SiRNA target sequence
caagacggatataaggccctc

SEQ ID NO: 261698 - DNA, 21 bp, Artificial sequence
  SiRNA target sequence
aagacggatataaggccctct

SEQ ID NO: 261699 - DNA, 21 bp, Artificial sequence
  SiRNA target sequence
agacggatataaggccctctt

SEQ ID NO: 261700 - DNA, 21 bp, Artificial sequence
  SiRNA target sequence
gacggatataaggccctcttt

SEQ ID NO: 261701 - DNA, 21 bp, Artificial sequence
  SiRNA target sequence
acggatataaggccctctttg

SEQ ID NO: 261702 - DNA, 21 bp, Artificial sequence
  SiRNA target sequence
cggatataaggccctctttgg

SEQ ID NO: 261703 - DNA, 21 bp, Artificial sequence
  SiRNA target sequence
ggatataaggccctctttggt

SEQ ID NO: 261704 - DNA, 21 bp, Artificial sequence
  SiRNA target sequence
gatataaggccctctttggta

SEQ ID NO: 261705 - DNA, 21 bp, Artificial sequence
  SiRNA target sequence
atataaggccctctttggtac

SEQ ID NO: 261706 - DNA, 21 bp, Artificial sequence
  SiRNA target sequence
tataaggccctctttggtaca

SEQ ID NO: 261707 - DNA, 21 bp, Artificial sequence
  SiRNA target sequence
ataaggccctctttggtacat

SEQ ID NO: 261708 - DNA, 21 bp, Artificial sequence
  SiRNA target sequence
taaggccctctttggtacatg

SEQ ID NO: 261709 - DNA, 21 bp, Artificial sequence
  SiRNA target sequence
aaggccctctttggtacatgg

SEQ ID NO: 261710 - DNA, 21 bp, Artificial sequence
  SiRNA target sequence
aggccctctttggtacatggt

SEQ ID NO: 261711 - DNA, 21 bp, Artificial sequence
  SiRNA target sequence
ggccctctttggtacatggtc

SEQ ID NO: 261712 - DNA, 21 bp, Artificial sequence
  SiRNA target sequence
gccctctttggtacatggtca

SEQ ID NO: 261713 - DNA, 21 bp, Artificial sequence
  SiRNA target sequence
ccctctttggtacatggtcaa

SEQ ID NO: 261714 - DNA, 21 bp, Artificial sequence
  SiRNA target sequence
cctctttggtacatggtcaaa

SEQ ID NO: 261715 - DNA, 21 bp, Artificial sequence
  SiRNA target sequence
ctctttggtacatggtcaaat

SEQ ID NO: 261716 - DNA, 21 bp, Artificial sequence
  SiRNA target sequence
tctttggtacatggtcaaatt

SEQ ID NO: 261717 - DNA, 21 bp, Artificial sequence
  SiRNA target sequence
ctttggtacatggtcaaatta

SEQ ID NO: 261718 - DNA, 21 bp, Artificial sequence
  SiRNA target sequence
tttggtacatggtcaaattag

SEQ ID NO: 261719 - DNA, 21 bp, Artificial sequence
  SiRNA target sequence
ttggtacatggtcaaattagt

SEQ ID NO: 261720 - DNA, 21 bp, Artificial sequence
  SiRNA target sequence
tggtacatggtcaaattagtg

SEQ ID NO: 261721 - DNA, 21 bp, Artificial sequence
  SiRNA target sequence
ggtacatggtcaaattagtga

SEQ ID NO: 261722 - DNA, 21 bp, Artificial sequence
  SiRNA target sequence
gtacatggtcaaattagtgac

SEQ ID NO: 261723 - DNA, 21 bp, Artificial sequence
  SiRNA target sequence
tacatggtcaaattagtgaca

SEQ ID NO: 261724 - DNA, 21 bp, Artificial sequence
  SiRNA target sequence
acatggtcaaattagtgacat

SEQ ID NO: 261725 - DNA, 21 bp, Artificial sequence
  SiRNA target sequence
catggtcaaattagtgacata

SEQ ID NO: 261726 - DNA, 21 bp, Artificial sequence
  SiRNA target sequence
atggtcaaattagtgacataa

SEQ ID NO: 261727 - DNA, 21 bp, Artificial sequence
  SiRNA target sequence
tggtcaaattagtgacataaa

SEQ ID NO: 261728 - DNA, 21 bp, Artificial sequence
  SiRNA target sequence
ggtcaaattagtgacataaaa

SEQ ID NO: 261729 - DNA, 21 bp, Artificial sequence
  SiRNA target sequence
gtcaaattagtgacataaaaa

SEQ ID NO: 261730 - DNA, 21 bp, Artificial sequence
  SiRNA target sequence
tcaaattagtgacataaaaac

SEQ ID NO: 261731 - DNA, 21 bp, Artificial sequence
  SiRNA target sequence
caaattagtgacataaaaaca

SEQ ID NO: 261732 - DNA, 21 bp, Artificial sequence
  SiRNA target sequence
aaattagtgacataaaaacaa

SEQ ID NO: 261733 - DNA, 21 bp, Artificial sequence
  SiRNA target sequence
aattagtgacataaaaacaaa

SEQ ID NO: 261734 - DNA, 21 bp, Artificial sequence
  SiRNA target sequence
attagtgacataaaaacaaaa

SEQ ID NO: 261735 - DNA, 21 bp, Artificial sequence
  SiRNA target sequence
ttagtgacataaaaacaaaac

SEQ ID NO: 261736 - DNA, 21 bp, Artificial sequence
  SiRNA target sequence
tagtgacataaaaacaaaacc

SEQ ID NO: 261737 - DNA, 21 bp, Artificial sequence
  SiRNA target sequence
agtgacataaaaacaaaacca

SEQ ID NO: 261738 - DNA, 21 bp, Artificial sequence
  SiRNA target sequence
gtgacataaaaacaaaaccag

SEQ ID NO: 261739 - DNA, 21 bp, Artificial sequence
  SiRNA target sequence
tgacataaaaacaaaaccagc

SEQ ID NO: 261740 - DNA, 21 bp, Artificial sequence
  SiRNA target sequence
gacataaaaacaaaaccagcc

SEQ ID NO: 261741 - DNA, 21 bp, Artificial sequence
  SiRNA target sequence
acataaaaacaaaaccagcct

SEQ ID NO: 261742 - DNA, 21 bp, Artificial sequence
  SiRNA target sequence
cataaaaacaaaaccagccta

SEQ ID NO: 261743 - DNA, 21 bp, Artificial sequence
  SiRNA target sequence
ataaaaacaaaaccagcctat

SEQ ID NO: 261744 - DNA, 21 bp, Artificial sequence
  SiRNA target sequence
taaaaacaaaaccagcctatt

SEQ ID NO: 261745 - DNA, 21 bp, Artificial sequence
  SiRNA target sequence
aaaaacaaaaccagcctattt

SEQ ID NO: 261746 - DNA, 21 bp, Artificial sequence
  SiRNA target sequence
aaaacaaaaccagcctattta

SEQ ID NO: 261747 - DNA, 21 bp, Artificial sequence
  SiRNA target sequence
aaacaaaaccagcctatttac

SEQ ID NO: 261748 - DNA, 21 bp, Artificial sequence
  SiRNA target sequence
aacaaaaccagcctatttacg

SEQ ID NO: 261749 - DNA, 21 bp, Artificial sequence
  SiRNA target sequence
acaaaaccagcctatttacgt

SEQ ID NO: 261750 - DNA, 21 bp, Artificial sequence
  SiRNA target sequence
caaaaccagcctatttacgta

SEQ ID NO: 261751 - DNA, 21 bp, Artificial sequence
  SiRNA target sequence
aaaaccagcctatttacgtaa

SEQ ID NO: 261752 - DNA, 21 bp, Artificial sequence
  SiRNA target sequence
aaaccagcctatttacgtaat

SEQ ID NO: 261753 - DNA, 21 bp, Artificial sequence
  SiRNA target sequence
aaccagcctatttacgtaatg

SEQ ID NO: 261754 - DNA, 21 bp, Artificial sequence
  SiRNA target sequence
accagcctatttacgtaatgt

SEQ ID NO: 261755 - DNA, 21 bp, Artificial sequence
  SiRNA target sequence
ccagcctatttacgtaatgta

SEQ ID NO: 261756 - DNA, 21 bp, Artificial sequence
  SiRNA target sequence
cagcctatttacgtaatgtaa

SEQ ID NO: 261757 - DNA, 21 bp, Artificial sequence
  SiRNA target sequence
agcctatttacgtaatgtaat

SEQ ID NO: 261758 - DNA, 21 bp, Artificial sequence
  SiRNA target sequence
gcctatttacgtaatgtaatt

SEQ ID NO: 261759 - DNA, 21 bp, Artificial sequence
  SiRNA target sequence
cctatttacgtaatgtaatta

SEQ ID NO: 261760 - DNA, 21 bp, Artificial sequence
  SiRNA target sequence
ctatttacgtaatgtaattaa

SEQ ID NO: 261761 - DNA, 21 bp, Artificial sequence
  SiRNA target sequence
tatttacgtaatgtaattaag

SEQ ID NO: 261762 - DNA, 21 bp, Artificial sequence
  SiRNA target sequence
atttacgtaatgtaattaagg

SEQ ID NO: 261763 - DNA, 21 bp, Artificial sequence
  SiRNA target sequence
tttacgtaatgtaattaagga

SEQ ID NO: 261764 - DNA, 21 bp, Artificial sequence
  SiRNA target sequence
ttacgtaatgtaattaaggat

SEQ ID NO: 261765 - DNA, 21 bp, Artificial sequence
  SiRNA target sequence
tacgtaatgtaattaaggatg

SEQ ID NO: 261766 - DNA, 21 bp, Artificial sequence
  SiRNA target sequence
acgtaatgtaattaaggatgg

SEQ ID NO: 261767 - DNA, 21 bp, Artificial sequence
  SiRNA target sequence
cgtaatgtaattaaggatgga

SEQ ID NO: 261768 - DNA, 21 bp, Artificial sequence
  SiRNA target sequence
gtaatgtaattaaggatggag

SEQ ID NO: 261769 - DNA, 21 bp, Artificial sequence
  SiRNA target sequence
taatgtaattaaggatggaga

SEQ ID NO: 261770 - DNA, 21 bp, Artificial sequence
  SiRNA target sequence
aatgtaattaaggatggagat

SEQ ID NO: 261771 - DNA, 21 bp, Artificial sequence
  SiRNA target sequence
atgtaattaaggatggagatt

SEQ ID NO: 261772 - DNA, 21 bp, Artificial sequence
  SiRNA target sequence
tgtaattaaggatggagattt

SEQ ID NO: 261773 - DNA, 21 bp, Artificial sequence
  SiRNA target sequence
gtaattaaggatggagatttt

SEQ ID NO: 261774 - DNA, 21 bp, Artificial sequence
  SiRNA target sequence
taattaaggatggagattttg

SEQ ID NO: 261775 - DNA, 21 bp, Artificial sequence
  SiRNA target sequence
aattaaggatggagattttgt

SEQ ID NO: 261776 - DNA, 21 bp, Artificial sequence
  SiRNA target sequence
attaaggatggagattttgtt

SEQ ID NO: 261777 - DNA, 21 bp, Artificial sequence
  SiRNA target sequence
ttaaggatggagattttgtta

SEQ ID NO: 261778 - DNA, 21 bp, Artificial sequence
  SiRNA target sequence
taaggatggagattttgttaa

SEQ ID NO: 261779 - DNA, 21 bp, Artificial sequence
  SiRNA target sequence
aaggatggagattttgttaat

SEQ ID NO: 261780 - DNA, 21 bp, Artificial sequence
  SiRNA target sequence
aggatggagattttgttaata

SEQ ID NO: 261781 - DNA, 21 bp, Artificial sequence
  SiRNA target sequence
ggatggagattttgttaatat

SEQ ID NO: 261782 - DNA, 21 bp, Artificial sequence
  SiRNA target sequence
gatggagattttgttaatatg

SEQ ID NO: 261783 - DNA, 21 bp, Artificial sequence
  SiRNA target sequence
atggagattttgttaatatga

SEQ ID NO: 261784 - DNA, 21 bp, Artificial sequence
  SiRNA target sequence
tggagattttgttaatatgaa

SEQ ID NO: 261785 - DNA, 21 bp, Artificial sequence
  SiRNA target sequence
ggagattttgttaatatgaaa

SEQ ID NO: 261786 - DNA, 21 bp, Artificial sequence
  SiRNA target sequence
gagattttgttaatatgaaac

SEQ ID NO: 261787 - DNA, 21 bp, Artificial sequence
  SiRNA target sequence
agattttgttaatatgaaaca

SEQ ID NO: 261788 - DNA, 21 bp, Artificial sequence
  SiRNA target sequence
gattttgttaatatgaaacat

SEQ ID NO: 261789 - DNA, 21 bp, Artificial sequence
  SiRNA target sequence
attttgttaatatgaaacata

SEQ ID NO: 261790 - DNA, 21 bp, Artificial sequence
  SiRNA target sequence
ttttgttaatatgaaacataa

SEQ ID NO: 261791 - DNA, 21 bp, Artificial sequence
  SiRNA target sequence
tttgttaatatgaaacataaa

SEQ ID NO: 261792 - DNA, 21 bp, Artificial sequence
  SiRNA target sequence
ttgttaatatgaaacataaaa

SEQ ID NO: 261793 - DNA, 21 bp, Artificial sequence
  SiRNA target sequence
tgttaatatgaaacataaaaa

SEQ ID NO: 261794 - DNA, 21 bp, Artificial sequence
  SiRNA target sequence
gttaatatgaaacataaaaat

SEQ ID NO: 261795 - DNA, 21 bp, Artificial sequence
  SiRNA target sequence
ttaatatgaaacataaaaatt

SEQ ID NO: 261796 - DNA, 21 bp, Artificial sequence
  SiRNA target sequence
taatatgaaacataaaaattt

SEQ ID NO: 261797 - DNA, 21 bp, Artificial sequence
  SiRNA target sequence
aatatgaaacataaaaatttg

SEQ ID NO: 261798 - DNA, 21 bp, Artificial sequence
  SiRNA target sequence
atatgaaacataaaaatttga

SEQ ID NO: 261799 - DNA, 21 bp, Artificial sequence
  SiRNA target sequence
tatgaaacataaaaatttgat

SEQ ID NO: 261800 - DNA, 21 bp, Artificial sequence
  SiRNA target sequence
atgaaacataaaaatttgatg

SEQ ID NO: 261801 - DNA, 21 bp, Artificial sequence
  SiRNA target sequence
tgaaacataaaaatttgatga

SEQ ID NO: 261802 - DNA, 21 bp, Artificial sequence
  SiRNA target sequence
gaaacataaaaatttgatgaa

SEQ ID NO: 261803 - DNA, 21 bp, Artificial sequence
  SiRNA target sequence
aaacataaaaatttgatgaaa

SEQ ID NO: 261804 - DNA, 21 bp, Artificial sequence
  SiRNA target sequence
aacataaaaatttgatgaaat

SEQ ID NO: 261805 - DNA, 21 bp, Artificial sequence
  SiRNA target sequence
acataaaaatttgatgaaatg

SEQ ID NO: 261806 - DNA, 21 bp, Artificial sequence
  SiRNA target sequence
cataaaaatttgatgaaatgt

SEQ ID NO: 261807 - DNA, 21 bp, Artificial sequence
  SiRNA target sequence
ataaaaatttgatgaaatgtg

SEQ ID NO: 261808 - DNA, 21 bp, Artificial sequence
  SiRNA target sequence
taaaaatttgatgaaatgtgc

SEQ ID NO: 261809 - DNA, 21 bp, Artificial sequence
  SiRNA target sequence
aaaaatttgatgaaatgtgct

SEQ ID NO: 261810 - DNA, 21 bp, Artificial sequence
  SiRNA target sequence
aaaatttgatgaaatgtgcta

SEQ ID NO: 261811 - DNA, 21 bp, Artificial sequence
  SiRNA target sequence
aaatttgatgaaatgtgctat

SEQ ID NO: 261812 - DNA, 21 bp, Artificial sequence
  SiRNA target sequence
aatttgatgaaatgtgctatg

SEQ ID NO: 261813 - DNA, 21 bp, Artificial sequence
  SiRNA target sequence
atttgatgaaatgtgctatgg

SEQ ID NO: 261814 - DNA, 21 bp, Artificial sequence
  SiRNA target sequence
tttgatgaaatgtgctatgga

SEQ ID NO: 261815 - DNA, 21 bp, Artificial sequence
  SiRNA target sequence
ttgatgaaatgtgctatggat

SEQ ID NO: 261816 - DNA, 21 bp, Artificial sequence
  SiRNA target sequence
tgatgaaatgtgctatggata

SEQ ID NO: 261817 - DNA, 21 bp, Artificial sequence
  SiRNA target sequence
gatgaaatgtgctatggatac

SEQ ID NO: 261818 - DNA, 21 bp, Artificial sequence
  SiRNA target sequence
atgaaatgtgctatggataca

SEQ ID NO: 261819 - DNA, 21 bp, Artificial sequence
  SiRNA target sequence
tgaaatgtgctatggatacac

SEQ ID NO: 261820 - DNA, 21 bp, Artificial sequence
  SiRNA target sequence
gaaatgtgctatggatacacc

SEQ ID NO: 261821 - DNA, 21 bp, Artificial sequence
  SiRNA target sequence
aaatgtgctatggatacaccc

SEQ ID NO: 261822 - DNA, 21 bp, Artificial sequence
  SiRNA target sequence
aatgtgctatggatacaccct

SEQ ID NO: 261823 - DNA, 21 bp, Artificial sequence
  SiRNA target sequence
atgtgctatggatacacccta

SEQ ID NO: 261824 - DNA, 21 bp, Artificial sequence
  SiRNA target sequence
tgtgctatggatacaccctat

SEQ ID NO: 261825 - DNA, 21 bp, Artificial sequence
  SiRNA target sequence
gtgctatggatacaccctata

SEQ ID NO: 261826 - DNA, 21 bp, Artificial sequence
  SiRNA target sequence
tgctatggatacaccctatat

SEQ ID NO: 261827 - DNA, 21 bp, Artificial sequence
  SiRNA target sequence
gctatggatacaccctatatc

SEQ ID NO: 261828 - DNA, 21 bp, Artificial sequence
  SiRNA target sequence
ctatggatacaccctatatcg

SEQ ID NO: 261829 - DNA, 21 bp, Artificial sequence
  SiRNA target sequence
tatggatacaccctatatcga

SEQ ID NO: 261830 - DNA, 21 bp, Artificial sequence
  SiRNA target sequence
atggatacaccctatatcgac

SEQ ID NO: 261831 - DNA, 21 bp, Artificial sequence
  SiRNA target sequence
tggatacaccctatatcgaca

SEQ ID NO: 261832 - DNA, 21 bp, Artificial sequence
  SiRNA target sequence
ggatacaccctatatcgacaa

SEQ ID NO: 261833 - DNA, 21 bp, Artificial sequence
  SiRNA target sequence
gatacaccctatatcgacaag

SEQ ID NO: 261834 - DNA, 21 bp, Artificial sequence
  SiRNA target sequence
atacaccctatatcgacaagg

SEQ ID NO: 261835 - DNA, 21 bp, Artificial sequence
  SiRNA target sequence
tacaccctatatcgacaagga

SEQ ID NO: 261836 - DNA, 21 bp, Artificial sequence
  SiRNA target sequence
acaccctatatcgacaaggac

SEQ ID NO: 261837 - DNA, 21 bp, Artificial sequence
  SiRNA target sequence
caccctatatcgacaaggaca

SEQ ID NO: 261838 - DNA, 21 bp, Artificial sequence
  SiRNA target sequence
accctatatcgacaaggacat

SEQ ID NO: 261839 - DNA, 21 bp, Artificial sequence
  SiRNA target sequence
ccctatatcgacaaggacatg

SEQ ID NO: 261840 - DNA, 21 bp, Artificial sequence
  SiRNA target sequence
cctatatcgacaaggacatga

SEQ ID NO: 261841 - DNA, 21 bp, Artificial sequence
  SiRNA target sequence
ctatatcgacaaggacatgat

SEQ ID NO: 261842 - DNA, 21 bp, Artificial sequence
  SiRNA target sequence
tatatcgacaaggacatgatt

SEQ ID NO: 261843 - DNA, 21 bp, Artificial sequence
  SiRNA target sequence
atatcgacaaggacatgattg

SEQ ID NO: 261844 - DNA, 21 bp, Artificial sequence
  SiRNA target sequence
tatcgacaaggacatgattga

SEQ ID NO: 261845 - DNA, 21 bp, Artificial sequence
  SiRNA target sequence
atcgacaaggacatgattgat

SEQ ID NO: 261846 - DNA, 21 bp, Artificial sequence
  SiRNA target sequence
tcgacaaggacatgattgatg

SEQ ID NO: 261847 - DNA, 21 bp, Artificial sequence
  SiRNA target sequence
cgacaaggacatgattgatga

SEQ ID NO: 261848 - DNA, 21 bp, Artificial sequence
  SiRNA target sequence
gacaaggacatgattgatgag

SEQ ID NO: 261849 - DNA, 21 bp, Artificial sequence
  SiRNA target sequence
acaaggacatgattgatgagg

SEQ ID NO: 261850 - DNA, 21 bp, Artificial sequence
  SiRNA target sequence
caaggacatgattgatgaggc

SEQ ID NO: 261851 - DNA, 21 bp, Artificial sequence
  SiRNA target sequence
aaggacatgattgatgaggca

SEQ ID NO: 261852 - DNA, 21 bp, Artificial sequence
  SiRNA target sequence
aggacatgattgatgaggcat

SEQ ID NO: 261853 - DNA, 21 bp, Artificial sequence
  SiRNA target sequence
ggacatgattgatgaggcata

SEQ ID NO: 261854 - DNA, 21 bp, Artificial sequence
  SiRNA target sequence
gacatgattgatgaggcatat

SEQ ID NO: 261855 - DNA, 21 bp, Artificial sequence
  SiRNA target sequence
acatgattgatgaggcatatc

SEQ ID NO: 261856 - DNA, 21 bp, Artificial sequence
  SiRNA target sequence
catgattgatgaggcatatca

SEQ ID NO: 261857 - DNA, 21 bp, Artificial sequence
  SiRNA target sequence
atgattgatgaggcatatcag

SEQ ID NO: 261858 - DNA, 21 bp, Artificial sequence
  SiRNA target sequence
tgattgatgaggcatatcagt

SEQ ID NO: 261859 - DNA, 21 bp, Artificial sequence
  SiRNA target sequence
gattgatgaggcatatcagtt

SEQ ID NO: 261860 - DNA, 21 bp, Artificial sequence
  SiRNA target sequence
attgatgaggcatatcagtta

SEQ ID NO: 261861 - DNA, 21 bp, Artificial sequence
  SiRNA target sequence
ttgatgaggcatatcagttaa

SEQ ID NO: 261862 - DNA, 21 bp, Artificial sequence
  SiRNA target sequence
tgatgaggcatatcagttaac

SEQ ID NO: 261863 - DNA, 21 bp, Artificial sequence
  SiRNA target sequence
gatgaggcatatcagttaact

SEQ ID NO: 261864 - DNA, 21 bp, Artificial sequence
  SiRNA target sequence
atgaggcatatcagttaacta

SEQ ID NO: 261865 - DNA, 21 bp, Artificial sequence
  SiRNA target sequence
tgaggcatatcagttaactaa

SEQ ID NO: 261866 - DNA, 21 bp, Artificial sequence
  SiRNA target sequence
gaggcatatcagttaactaaa

SEQ ID NO: 261867 - DNA, 21 bp, Artificial sequence
  SiRNA target sequence
aggcatatcagttaactaaat

SEQ ID NO: 261868 - DNA, 21 bp, Artificial sequence
  SiRNA target sequence
ggcatatcagttaactaaatc

SEQ ID NO: 261869 - DNA, 21 bp, Artificial sequence
  SiRNA target sequence
gcatatcagttaactaaatct

SEQ ID NO: 261870 - DNA, 21 bp, Artificial sequence
  SiRNA target sequence
catatcagttaactaaatctg

SEQ ID NO: 261871 - DNA, 21 bp, Artificial sequence
  SiRNA target sequence
atatcagttaactaaatctgt

SEQ ID NO: 261872 - DNA, 21 bp, Artificial sequence
  SiRNA target sequence
tatcagttaactaaatctgtt

SEQ ID NO: 261873 - DNA, 21 bp, Artificial sequence
  SiRNA target sequence
atcagttaactaaatctgttt

SEQ ID NO: 261874 - DNA, 21 bp, Artificial sequence
  SiRNA target sequence
tcagttaactaaatctgtttg

SEQ ID NO: 261875 - DNA, 21 bp, Artificial sequence
  SiRNA target sequence
cagttaactaaatctgtttgg

SEQ ID NO: 261876 - DNA, 21 bp, Artificial sequence
  SiRNA target sequence
agttaactaaatctgtttggt

SEQ ID NO: 261877 - DNA, 21 bp, Artificial sequence
  SiRNA target sequence
gttaactaaatctgtttggtt

SEQ ID NO: 261878 - DNA, 21 bp, Artificial sequence
  SiRNA target sequence
ttaactaaatctgtttggtta

SEQ ID NO: 261879 - DNA, 21 bp, Artificial sequence
  SiRNA target sequence
taactaaatctgtttggttaa

SEQ ID NO: 261880 - DNA, 21 bp, Artificial sequence
  SiRNA target sequence
aactaaatctgtttggttaaa

SEQ ID NO: 261881 - DNA, 21 bp, Artificial sequence
  SiRNA target sequence
actaaatctgtttggttaaaa

SEQ ID NO: 261882 - DNA, 21 bp, Artificial sequence
  SiRNA target sequence
ctaaatctgtttggttaaaag

SEQ ID NO: 261883 - DNA, 21 bp, Artificial sequence
  SiRNA target sequence
taaatctgtttggttaaaagg

SEQ ID NO: 261884 - DNA, 21 bp, Artificial sequence
  SiRNA target sequence
aaatctgtttggttaaaaggt

SEQ ID NO: 261885 - DNA, 21 bp, Artificial sequence
  SiRNA target sequence
aatctgtttggttaaaaggta

SEQ ID NO: 261886 - DNA, 21 bp, Artificial sequence
  SiRNA target sequence
atctgtttggttaaaaggtat

SEQ ID NO: 261887 - DNA, 21 bp, Artificial sequence
  SiRNA target sequence
tctgtttggttaaaaggtatg

SEQ ID NO: 261888 - DNA, 21 bp, Artificial sequence
  SiRNA target sequence
ctgtttggttaaaaggtatga

SEQ ID NO: 261889 - DNA, 21 bp, Artificial sequence
  SiRNA target sequence
tgtttggttaaaaggtatgag

SEQ ID NO: 261890 - DNA, 21 bp, Artificial sequence
  SiRNA target sequence
gtttggttaaaaggtatgaga

SEQ ID NO: 261891 - DNA, 21 bp, Artificial sequence
  SiRNA target sequence
tttggttaaaaggtatgagag

SEQ ID NO: 261892 - DNA, 21 bp, Artificial sequence
  SiRNA target sequence
ttggttaaaaggtatgagaga

SEQ ID NO: 261893 - DNA, 21 bp, Artificial sequence
  SiRNA target sequence
tggttaaaaggtatgagagat

SEQ ID NO: 261894 - DNA, 21 bp, Artificial sequence
  SiRNA target sequence
ggttaaaaggtatgagagatg

SEQ ID NO: 261895 - DNA, 21 bp, Artificial sequence
  SiRNA target sequence
gttaaaaggtatgagagatga

SEQ ID NO: 261896 - DNA, 21 bp, Artificial sequence
  SiRNA target sequence
ttaaaaggtatgagagatgaa

SEQ ID NO: 261897 - DNA, 21 bp, Artificial sequence
  SiRNA target sequence
taaaaggtatgagagatgaat

SEQ ID NO: 261898 - DNA, 21 bp, Artificial sequence
  SiRNA target sequence
aaaaggtatgagagatgaatt

SEQ ID NO: 261899 - DNA, 21 bp, Artificial sequence
  SiRNA target sequence
aaaggtatgagagatgaattg

SEQ ID NO: 261900 - DNA, 21 bp, Artificial sequence
  SiRNA target sequence
aaggtatgagagatgaattga

SEQ ID NO: 261901 - DNA, 21 bp, Artificial sequence
  SiRNA target sequence
aggtatgagagatgaattgaa

SEQ ID NO: 261902 - DNA, 21 bp, Artificial sequence
  SiRNA target sequence
ggtatgagagatgaattgaag

SEQ ID NO: 261903 - DNA, 21 bp, Artificial sequence
  SiRNA target sequence
gtatgagagatgaattgaaga

SEQ ID NO: 261904 - DNA, 21 bp, Artificial sequence
  SiRNA target sequence
tatgagagatgaattgaagaa

SEQ ID NO: 261905 - DNA, 21 bp, Artificial sequence
  SiRNA target sequence
atgagagatgaattgaagaag

SEQ ID NO: 261906 - DNA, 21 bp, Artificial sequence
  SiRNA target sequence
tgagagatgaattgaagaagg

SEQ ID NO: 261907 - DNA, 21 bp, Artificial sequence
  SiRNA target sequence
gagagatgaattgaagaaggt

SEQ ID NO: 261908 - DNA, 21 bp, Artificial sequence
  SiRNA target sequence
agagatgaattgaagaaggtt

SEQ ID NO: 261909 - DNA, 21 bp, Artificial sequence
  SiRNA target sequence
gagatgaattgaagaaggttc

SEQ ID NO: 261910 - DNA, 21 bp, Artificial sequence
  SiRNA target sequence
agatgaattgaagaaggttct

SEQ ID NO: 261911 - DNA, 21 bp, Artificial sequence
  SiRNA target sequence
gatgaattgaagaaggttctc

SEQ ID NO: 261912 - DNA, 21 bp, Artificial sequence
  SiRNA target sequence
atgaattgaagaaggttctca

SEQ ID NO: 261913 - DNA, 21 bp, Artificial sequence
  SiRNA target sequence
tgaattgaagaaggttctcac

SEQ ID NO: 261914 - DNA, 21 bp, Artificial sequence
  SiRNA target sequence
gaattgaagaaggttctcact

SEQ ID NO: 261915 - DNA, 21 bp, Artificial sequence
  SiRNA target sequence
aattgaagaaggttctcactt

SEQ ID NO: 261916 - DNA, 21 bp, Artificial sequence
  SiRNA target sequence
attgaagaaggttctcactta

SEQ ID NO: 261917 - DNA, 21 bp, Artificial sequence
  SiRNA target sequence
ttgaagaaggttctcacttat

SEQ ID NO: 261918 - DNA, 21 bp, Artificial sequence
  SiRNA target sequence
tgaagaaggttctcacttatg

SEQ ID NO: 261919 - DNA, 21 bp, Artificial sequence
  SiRNA target sequence
gaagaaggttctcacttatga

SEQ ID NO: 261920 - DNA, 21 bp, Artificial sequence
  SiRNA target sequence
aagaaggttctcacttatgaa

SEQ ID NO: 261921 - DNA, 21 bp, Artificial sequence
  SiRNA target sequence
agaaggttctcacttatgaag

SEQ ID NO: 261922 - DNA, 21 bp, Artificial sequence
  SiRNA target sequence
gaaggttctcacttatgaaga

SEQ ID NO: 261923 - DNA, 21 bp, Artificial sequence
  SiRNA target sequence
aaggttctcacttatgaagaa

SEQ ID NO: 261924 - DNA, 21 bp, Artificial sequence
  SiRNA target sequence
aggttctcacttatgaagaag

SEQ ID NO: 261925 - DNA, 21 bp, Artificial sequence
  SiRNA target sequence
ggttctcacttatgaagaagc

SEQ ID NO: 261926 - DNA, 21 bp, Artificial sequence
  SiRNA target sequence
gttctcacttatgaagaagcc

SEQ ID NO: 261927 - DNA, 21 bp, Artificial sequence
  SiRNA target sequence
ttctcacttatgaagaagcca

SEQ ID NO: 261928 - DNA, 21 bp, Artificial sequence
  SiRNA target sequence
tctcacttatgaagaagccat

SEQ ID NO: 261929 - DNA, 21 bp, Artificial sequence
  SiRNA target sequence
ctcacttatgaagaagccatt

SEQ ID NO: 261930 - DNA, 21 bp, Artificial sequence
  SiRNA target sequence
tcacttatgaagaagccattt

SEQ ID NO: 261931 - DNA, 21 bp, Artificial sequence
  SiRNA target sequence
cacttatgaagaagccatttg

SEQ ID NO: 261932 - DNA, 21 bp, Artificial sequence
  SiRNA target sequence
acttatgaagaagccatttgt

SEQ ID NO: 261933 - DNA, 21 bp, Artificial sequence
  SiRNA target sequence
cttatgaagaagccatttgtg

SEQ ID NO: 261934 - DNA, 21 bp, Artificial sequence
  SiRNA target sequence
ttatgaagaagccatttgtgg

SEQ ID NO: 261935 - DNA, 21 bp, Artificial sequence
  SiRNA target sequence
tatgaagaagccatttgtggc

SEQ ID NO: 261936 - DNA, 21 bp, Artificial sequence
  SiRNA target sequence
atgaagaagccatttgtggct

SEQ ID NO: 261937 - DNA, 21 bp, Artificial sequence
  SiRNA target sequence
tgaagaagccatttgtggctc

SEQ ID NO: 261938 - DNA, 21 bp, Artificial sequence
  SiRNA target sequence
gaagaagccatttgtggctct

SEQ ID NO: 261939 - DNA, 21 bp, Artificial sequence
  SiRNA target sequence
aagaagccatttgtggctctg

SEQ ID NO: 261940 - DNA, 21 bp, Artificial sequence
  SiRNA target sequence
agaagccatttgtggctctga

SEQ ID NO: 261941 - DNA, 21 bp, Artificial sequence
  SiRNA target sequence
gaagccatttgtggctctgaa

SEQ ID NO: 261942 - DNA, 21 bp, Artificial sequence
  SiRNA target sequence
aagccatttgtggctctgaag

SEQ ID NO: 261943 - DNA, 21 bp, Artificial sequence
  SiRNA target sequence
agccatttgtggctctgaagt

SEQ ID NO: 261944 - DNA, 21 bp, Artificial sequence
  SiRNA target sequence
gccatttgtggctctgaagta

SEQ ID NO: 261945 - DNA, 21 bp, Artificial sequence
  SiRNA target sequence
ccatttgtggctctgaagtaa

SEQ ID NO: 261946 - DNA, 21 bp, Artificial sequence
  SiRNA target sequence
catttgtggctctgaagtaag

SEQ ID NO: 261947 - DNA, 21 bp, Artificial sequence
  SiRNA target sequence
atttgtggctctgaagtaagt

SEQ ID NO: 261948 - DNA, 21 bp, Artificial sequence
  SiRNA target sequence
tttgtggctctgaagtaagtg

SEQ ID NO: 261949 - DNA, 21 bp, Artificial sequence
  SiRNA target sequence
ttgtggctctgaagtaagtga

SEQ ID NO: 261950 - DNA, 21 bp, Artificial sequence
  SiRNA target sequence
tgtggctctgaagtaagtgag

SEQ ID NO: 261951 - DNA, 21 bp, Artificial sequence
  SiRNA target sequence
gtggctctgaagtaagtgagt

SEQ ID NO: 261952 - DNA, 21 bp, Artificial sequence
  SiRNA target sequence
tggctctgaagtaagtgagta

SEQ ID NO: 261953 - DNA, 21 bp, Artificial sequence
  SiRNA target sequence
ggctctgaagtaagtgagtac

SEQ ID NO: 261954 - DNA, 21 bp, Artificial sequence
  SiRNA target sequence
gctctgaagtaagtgagtaca

SEQ ID NO: 261955 - DNA, 21 bp, Artificial sequence
  SiRNA target sequence
ctctgaagtaagtgagtacat

SEQ ID NO: 261956 - DNA, 21 bp, Artificial sequence
  SiRNA target sequence
tctgaagtaagtgagtacatt

SEQ ID NO: 261957 - DNA, 21 bp, Artificial sequence
  SiRNA target sequence
ctgaagtaagtgagtacattt

SEQ ID NO: 261958 - DNA, 21 bp, Artificial sequence
  SiRNA target sequence
tgaagtaagtgagtacatttc

SEQ ID NO: 261959 - DNA, 21 bp, Artificial sequence
  SiRNA target sequence
gaagtaagtgagtacatttct

SEQ ID NO: 261960 - DNA, 21 bp, Artificial sequence
  SiRNA target sequence
aagtaagtgagtacatttctt

SEQ ID NO: 261961 - DNA, 21 bp, Artificial sequence
  SiRNA target sequence
agtaagtgagtacatttcttc

SEQ ID NO: 261962 - DNA, 21 bp, Artificial sequence
  SiRNA target sequence
gtaagtgagtacatttcttca

SEQ ID NO: 261963 - DNA, 21 bp, Artificial sequence
  SiRNA target sequence
taagtgagtacatttcttcaa

SEQ ID NO: 261964 - DNA, 21 bp, Artificial sequence
  SiRNA target sequence
aagtgagtacatttcttcaat

SEQ ID NO: 261965 - DNA, 21 bp, Artificial sequence
  SiRNA target sequence
agtgagtacatttcttcaata

SEQ ID NO: 261966 - DNA, 21 bp, Artificial sequence
  SiRNA target sequence
gtgagtacatttcttcaataa

SEQ ID NO: 261967 - DNA, 21 bp, Artificial sequence
  SiRNA target sequence
tgagtacatttcttcaataaa

SEQ ID NO: 261968 - DNA, 21 bp, Artificial sequence
  SiRNA target sequence
gagtacatttcttcaataaat

SEQ ID NO: 261969 - DNA, 21 bp, Artificial sequence
  SiRNA target sequence
agtacatttcttcaataaatc

SEQ ID NO: 261970 - DNA, 21 bp, Artificial sequence
  SiRNA target sequence
gtacatttcttcaataaatcg

SEQ ID NO: 261971 - DNA, 21 bp, Artificial sequence
  SiRNA target sequence
tacatttcttcaataaatcga

SEQ ID NO: 261972 - DNA, 21 bp, Artificial sequence
  SiRNA target sequence
acatttcttcaataaatcgaa

SEQ ID NO: 261973 - DNA, 21 bp, Artificial sequence
  SiRNA target sequence
catttcttcaataaatcgaag

SEQ ID NO: 261974 - DNA, 21 bp, Artificial sequence
  SiRNA target sequence
atttcttcaataaatcgaagt

SEQ ID NO: 261975 - DNA, 21 bp, Artificial sequence
  SiRNA target sequence
tttcttcaataaatcgaagta

SEQ ID NO: 261976 - DNA, 21 bp, Artificial sequence
  SiRNA target sequence
ttcttcaataaatcgaagtag

SEQ ID NO: 261977 - DNA, 21 bp, Artificial sequence
  SiRNA target sequence
tcttcaataaatcgaagtagt

SEQ ID NO: 261978 - DNA, 21 bp, Artificial sequence
  SiRNA target sequence
cttcaataaatcgaagtagtt

SEQ ID NO: 261979 - DNA, 21 bp, Artificial sequence
  SiRNA target sequence
ttcaataaatcgaagtagttc

SEQ ID NO: 261980 - DNA, 21 bp, Artificial sequence
  SiRNA target sequence
tcaataaatcgaagtagttcc

SEQ ID NO: 261981 - DNA, 21 bp, Artificial sequence
  SiRNA target sequence
caataaatcgaagtagttccc

SEQ ID NO: 261982 - DNA, 21 bp, Artificial sequence
  SiRNA target sequence
aataaatcgaagtagttcccc

SEQ ID NO: 261983 - DNA, 21 bp, Artificial sequence
  SiRNA target sequence
ataaatcgaagtagttcccct

SEQ ID NO: 261984 - DNA, 21 bp, Artificial sequence
  SiRNA target sequence
taaatcgaagtagttcccctg

SEQ ID NO: 261985 - DNA, 21 bp, Artificial sequence
  SiRNA target sequence
aaatcgaagtagttcccctgg

SEQ ID NO: 261986 - DNA, 21 bp, Artificial sequence
  SiRNA target sequence
aatcgaagtagttcccctgga

SEQ ID NO: 261987 - DNA, 21 bp, Artificial sequence
  SiRNA target sequence
atcgaagtagttcccctggat

SEQ ID NO: 261988 - DNA, 21 bp, Artificial sequence
  SiRNA target sequence
tcgaagtagttcccctggata

SEQ ID NO: 261989 - DNA, 21 bp, Artificial sequence
  SiRNA target sequence
cgaagtagttcccctggatat

SEQ ID NO: 261990 - DNA, 21 bp, Artificial sequence
  SiRNA target sequence
gaagtagttcccctggatatc

SEQ ID NO: 261991 - DNA, 21 bp, Artificial sequence
  SiRNA target sequence
aagtagttcccctggatatcc

SEQ ID NO: 261992 - DNA, 21 bp, Artificial sequence
  SiRNA target sequence
agtagttcccctggatatcct

SEQ ID NO: 261993 - DNA, 21 bp, Artificial sequence
  SiRNA target sequence
gtagttcccctggatatcctt

SEQ ID NO: 261994 - DNA, 21 bp, Artificial sequence
  SiRNA target sequence
tagttcccctggatatccttg

SEQ ID NO: 261995 - DNA, 21 bp, Artificial sequence
  SiRNA target sequence
agttcccctggatatccttgg

SEQ ID NO: 261996 - DNA, 21 bp, Artificial sequence
  SiRNA target sequence
gttcccctggatatccttgga

SEQ ID NO: 261997 - DNA, 21 bp, Artificial sequence
  SiRNA target sequence
ttcccctggatatccttggat

SEQ ID NO: 261998 - DNA, 21 bp, Artificial sequence
  SiRNA target sequence
tcccctggatatccttggatt

SEQ ID NO: 261999 - DNA, 21 bp, Artificial sequence
  SiRNA target sequence
cccctggatatccttggatta

SEQ ID NO: 262000 - DNA, 21 bp, Artificial sequence
  SiRNA target sequence
ccctggatatccttggattaa

SEQ ID NO: 262001 - DNA, 21 bp, Artificial sequence
  SiRNA target sequence
cctggatatccttggattaag

SEQ ID NO: 262002 - DNA, 21 bp, Artificial sequence
  SiRNA target sequence
ctggatatccttggattaagg

SEQ ID NO: 262003 - DNA, 21 bp, Artificial sequence
  SiRNA target sequence
tggatatccttggattaagga

SEQ ID NO: 262004 - DNA, 21 bp, Artificial sequence
  SiRNA target sequence
ggatatccttggattaaggat

SEQ ID NO: 262005 - DNA, 21 bp, Artificial sequence
  SiRNA target sequence
gatatccttggattaaggata

SEQ ID NO: 262006 - DNA, 21 bp, Artificial sequence
  SiRNA target sequence
atatccttggattaaggatag

SEQ ID NO: 262007 - DNA, 21 bp, Artificial sequence
  SiRNA target sequence
tatccttggattaaggataga

SEQ ID NO: 262008 - DNA, 21 bp, Artificial sequence
  SiRNA target sequence
atccttggattaaggatagaa

SEQ ID NO: 262009 - DNA, 21 bp, Artificial sequence
  SiRNA target sequence
tccttggattaaggatagaac

SEQ ID NO: 262010 - DNA, 21 bp, Artificial sequence
  SiRNA target sequence
ccttggattaaggatagaaca

SEQ ID NO: 262011 - DNA, 21 bp, Artificial sequence
  SiRNA target sequence
cttggattaaggatagaacaa

SEQ ID NO: 262012 - DNA, 21 bp, Artificial sequence
  SiRNA target sequence
ttggattaaggatagaacaaa

SEQ ID NO: 262013 - DNA, 21 bp, Artificial sequence
  SiRNA target sequence
tggattaaggatagaacaaaa

SEQ ID NO: 262014 - DNA, 21 bp, Artificial sequence
  SiRNA target sequence
ggattaaggatagaacaaaag

SEQ ID NO: 262015 - DNA, 21 bp, Artificial sequence
  SiRNA target sequence
gattaaggatagaacaaaagg

SEQ ID NO: 262016 - DNA, 21 bp, Artificial sequence
  SiRNA target sequence
attaaggatagaacaaaagga

SEQ ID NO: 262017 - DNA, 21 bp, Artificial sequence
  SiRNA target sequence
ttaaggatagaacaaaaggaa

SEQ ID NO: 262018 - DNA, 21 bp, Artificial sequence
  SiRNA target sequence
taaggatagaacaaaaggaac

SEQ ID NO: 262019 - DNA, 21 bp, Artificial sequence
  SiRNA target sequence
aaggatagaacaaaaggaact

SEQ ID NO: 262020 - DNA, 21 bp, Artificial sequence
  SiRNA target sequence
aggatagaacaaaaggaacta

SEQ ID NO: 262021 - DNA, 21 bp, Artificial sequence
  SiRNA target sequence
ggatagaacaaaaggaactaa

SEQ ID NO: 262022 - DNA, 21 bp, Artificial sequence
  SiRNA target sequence
gatagaacaaaaggaactaaa

SEQ ID NO: 262023 - DNA, 21 bp, Artificial sequence
  SiRNA target sequence
atagaacaaaaggaactaaag

SEQ ID NO: 262024 - DNA, 21 bp, Artificial sequence
  SiRNA target sequence
tagaacaaaaggaactaaagg

SEQ ID NO: 262025 - DNA, 21 bp, Artificial sequence
  SiRNA target sequence
agaacaaaaggaactaaagga

SEQ ID NO: 262026 - DNA, 21 bp, Artificial sequence
  SiRNA target sequence
gaacaaaaggaactaaaggaa

SEQ ID NO: 262027 - DNA, 21 bp, Artificial sequence
  SiRNA target sequence
aacaaaaggaactaaaggaaa

SEQ ID NO: 262028 - DNA, 21 bp, Artificial sequence
  SiRNA target sequence
acaaaaggaactaaaggaaaa

SEQ ID NO: 262029 - DNA, 21 bp, Artificial sequence
  SiRNA target sequence
caaaaggaactaaaggaaaac

SEQ ID NO: 262030 - DNA, 21 bp, Artificial sequence
  SiRNA target sequence
aaaaggaactaaaggaaaaca

SEQ ID NO: 262031 - DNA, 21 bp, Artificial sequence
  SiRNA target sequence
aaaggaactaaaggaaaacaa

SEQ ID NO: 262032 - DNA, 21 bp, Artificial sequence
  SiRNA target sequence
aaggaactaaaggaaaacaag

SEQ ID NO: 262033 - DNA, 21 bp, Artificial sequence
  SiRNA target sequence
aggaactaaaggaaaacaagg

SEQ ID NO: 262034 - DNA, 21 bp, Artificial sequence
  SiRNA target sequence
ggaactaaaggaaaacaaggc

SEQ ID NO: 262035 - DNA, 21 bp, Artificial sequence
  SiRNA target sequence
gaactaaaggaaaacaaggct

SEQ ID NO: 262036 - DNA, 21 bp, Artificial sequence
  SiRNA target sequence
aactaaaggaaaacaaggctg

SEQ ID NO: 262037 - DNA, 21 bp, Artificial sequence
  SiRNA target sequence
actaaaggaaaacaaggctgg

SEQ ID NO: 262038 - DNA, 21 bp, Artificial sequence
  SiRNA target sequence
ctaaaggaaaacaaggctggt

SEQ ID NO: 262039 - DNA, 21 bp, Artificial sequence
  SiRNA target sequence
taaaggaaaacaaggctggtt

SEQ ID NO: 262040 - DNA, 21 bp, Artificial sequence
  SiRNA target sequence
aaaggaaaacaaggctggttt

SEQ ID NO: 262041 - DNA, 21 bp, Artificial sequence
  SiRNA target sequence
aaggaaaacaaggctggtttg

SEQ ID NO: 262042 - DNA, 21 bp, Artificial sequence
  SiRNA target sequence
aggaaaacaaggctggtttgg

SEQ ID NO: 262043 - DNA, 21 bp, Artificial sequence
  SiRNA target sequence
ggaaaacaaggctggtttgga

SEQ ID NO: 262044 - DNA, 21 bp, Artificial sequence
  SiRNA target sequence
gaaaacaaggctggtttggat

SEQ ID NO: 262045 - DNA, 21 bp, Artificial sequence
  SiRNA target sequence
aaaacaaggctggtttggatc

SEQ ID NO: 262046 - DNA, 21 bp, Artificial sequence
  SiRNA target sequence
aaacaaggctggtttggatct

SEQ ID NO: 262047 - DNA, 21 bp, Artificial sequence
  SiRNA target sequence
aacaaggctggtttggatctg

SEQ ID NO: 262048 - DNA, 21 bp, Artificial sequence
  SiRNA target sequence
acaaggctggtttggatctga

SEQ ID NO: 262049 - DNA, 21 bp, Artificial sequence
  SiRNA target sequence
caaggctggtttggatctgaa

SEQ ID NO: 262050 - DNA, 21 bp, Artificial sequence
  SiRNA target sequence
aaggctggtttggatctgaag

SEQ ID NO: 262051 - DNA, 21 bp, Artificial sequence
  SiRNA target sequence
aggctggtttggatctgaagg

SEQ ID NO: 262052 - DNA, 21 bp, Artificial sequence
  SiRNA target sequence
ggctggtttggatctgaagga

SEQ ID NO: 262053 - DNA, 21 bp, Artificial sequence
  SiRNA target sequence
gctggtttggatctgaaggag

SEQ ID NO: 262054 - DNA, 21 bp, Artificial sequence
  SiRNA target sequence
ctggtttggatctgaaggaga

SEQ ID NO: 262055 - DNA, 21 bp, Artificial sequence
  SiRNA target sequence
tggtttggatctgaaggagaa

SEQ ID NO: 262056 - DNA, 21 bp, Artificial sequence
  SiRNA target sequence
ggtttggatctgaaggagaat

SEQ ID NO: 262057 - DNA, 21 bp, Artificial sequence
  SiRNA target sequence
gtttggatctgaaggagaata

SEQ ID NO: 262058 - DNA, 21 bp, Artificial sequence
  SiRNA target sequence
tttggatctgaaggagaatat

SEQ ID NO: 262059 - DNA, 21 bp, Artificial sequence
  SiRNA target sequence
ttggatctgaaggagaatata

SEQ ID NO: 262060 - DNA, 21 bp, Artificial sequence
  SiRNA target sequence
tggatctgaaggagaatatat

SEQ ID NO: 262061 - DNA, 21 bp, Artificial sequence
  SiRNA target sequence
ggatctgaaggagaatatatt

SEQ ID NO: 262062 - DNA, 21 bp, Artificial sequence
  SiRNA target sequence
gatctgaaggagaatatattc

SEQ ID NO: 262063 - DNA, 21 bp, Artificial sequence
  SiRNA target sequence
atctgaaggagaatatattct

SEQ ID NO: 262064 - DNA, 21 bp, Artificial sequence
  SiRNA target sequence
tctgaaggagaatatattctc

SEQ ID NO: 262065 - DNA, 21 bp, Artificial sequence
  SiRNA target sequence
ctgaaggagaatatattctca

SEQ ID NO: 262066 - DNA, 21 bp, Artificial sequence
  SiRNA target sequence
tgaaggagaatatattctcaa

SEQ ID NO: 262067 - DNA, 21 bp, Artificial sequence
  SiRNA target sequence
gaaggagaatatattctcaat

SEQ ID NO: 262068 - DNA, 21 bp, Artificial sequence
  SiRNA target sequence
aaggagaatatattctcaatg

SEQ ID NO: 262069 - DNA, 21 bp, Artificial sequence
  SiRNA target sequence
aggagaatatattctcaatga

SEQ ID NO: 262070 - DNA, 21 bp, Artificial sequence
  SiRNA target sequence
ggagaatatattctcaatgaa

SEQ ID NO: 262071 - DNA, 21 bp, Artificial sequence
  SiRNA target sequence
gagaatatattctcaatgaag

SEQ ID NO: 262072 - DNA, 21 bp, Artificial sequence
  SiRNA target sequence
agaatatattctcaatgaaga

SEQ ID NO: 262073 - DNA, 21 bp, Artificial sequence
  SiRNA target sequence
gaatatattctcaatgaagat

SEQ ID NO: 262074 - DNA, 21 bp, Artificial sequence
  SiRNA target sequence
aatatattctcaatgaagatg

SEQ ID NO: 262075 - DNA, 21 bp, Artificial sequence
  SiRNA target sequence
atatattctcaatgaagatgt

SEQ ID NO: 262076 - DNA, 21 bp, Artificial sequence
  SiRNA target sequence
tatattctcaatgaagatgtt

SEQ ID NO: 262077 - DNA, 21 bp, Artificial sequence
  SiRNA target sequence
atattctcaatgaagatgtta

SEQ ID NO: 262078 - DNA, 21 bp, Artificial sequence
  SiRNA target sequence
tattctcaatgaagatgttag

SEQ ID NO: 262079 - DNA, 21 bp, Artificial sequence
  SiRNA target sequence
attctcaatgaagatgttaga

SEQ ID NO: 262080 - DNA, 21 bp, Artificial sequence
  SiRNA target sequence
ttctcaatgaagatgttagac

SEQ ID NO: 262081 - DNA, 21 bp, Artificial sequence
  SiRNA target sequence
tctcaatgaagatgttagact

SEQ ID NO: 262082 - DNA, 21 bp, Artificial sequence
  SiRNA target sequence
ctcaatgaagatgttagactg

SEQ ID NO: 262083 - DNA, 21 bp, Artificial sequence
  SiRNA target sequence
tcaatgaagatgttagactgg

SEQ ID NO: 262084 - DNA, 21 bp, Artificial sequence
  SiRNA target sequence
caatgaagatgttagactggc

SEQ ID NO: 262085 - DNA, 21 bp, Artificial sequence
  SiRNA target sequence
aatgaagatgttagactggcc

SEQ ID NO: 262086 - DNA, 21 bp, Artificial sequence
  SiRNA target sequence
atgaagatgttagactggccg

SEQ ID NO: 262087 - DNA, 21 bp, Artificial sequence
  SiRNA target sequence
tgaagatgttagactggccgt

SEQ ID NO: 262088 - DNA, 21 bp, Artificial sequence
  SiRNA target sequence
gaagatgttagactggccgtt

SEQ ID NO: 262089 - DNA, 21 bp, Artificial sequence
  SiRNA target sequence
aagatgttagactggccgttc

SEQ ID NO: 262090 - DNA, 21 bp, Artificial sequence
  SiRNA target sequence
agatgttagactggccgttca

SEQ ID NO: 262091 - DNA, 21 bp, Artificial sequence
  SiRNA target sequence
gatgttagactggccgttcaa

SEQ ID NO: 262092 - DNA, 21 bp, Artificial sequence
  SiRNA target sequence
atgttagactggccgttcaac

SEQ ID NO: 262093 - DNA, 21 bp, Artificial sequence
  SiRNA target sequence
tgttagactggccgttcaacg

SEQ ID NO: 262094 - DNA, 21 bp, Artificial sequence
  SiRNA target sequence
gttagactggccgttcaacga

SEQ ID NO: 262095 - DNA, 21 bp, Artificial sequence
  SiRNA target sequence
ttagactggccgttcaacgac

SEQ ID NO: 262096 - DNA, 21 bp, Artificial sequence
  SiRNA target sequence
tagactggccgttcaacgacg

SEQ ID NO: 262097 - DNA, 21 bp, Artificial sequence
  SiRNA target sequence
agactggccgttcaacgacga

SEQ ID NO: 262098 - DNA, 21 bp, Artificial sequence
  SiRNA target sequence
gactggccgttcaacgacgaa

SEQ ID NO: 262099 - DNA, 21 bp, Artificial sequence
  SiRNA target sequence
actggccgttcaacgacgaat

SEQ ID NO: 262100 - DNA, 21 bp, Artificial sequence
  SiRNA target sequence
ctggccgttcaacgacgaatt

SEQ ID NO: 262101 - DNA, 21 bp, Artificial sequence
  SiRNA target sequence
tggccgttcaacgacgaattc

SEQ ID NO: 262102 - DNA, 21 bp, Artificial sequence
  SiRNA target sequence
ggccgttcaacgacgaattca

SEQ ID NO: 262103 - DNA, 21 bp, Artificial sequence
  SiRNA target sequence
gccgttcaacgacgaattcag

SEQ ID NO: 262104 - DNA, 21 bp, Artificial sequence
  SiRNA target sequence
ccgttcaacgacgaattcagg

SEQ ID NO: 262105 - DNA, 21 bp, Artificial sequence
  SiRNA target sequence
cgttcaacgacgaattcaggc

SEQ ID NO: 262106 - DNA, 21 bp, Artificial sequence
  SiRNA target sequence
gttcaacgacgaattcaggca

SEQ ID NO: 262107 - DNA, 21 bp, Artificial sequence
  SiRNA target sequence
ttcaacgacgaattcaggcag

SEQ ID NO: 262108 - DNA, 21 bp, Artificial sequence
  SiRNA target sequence
tcaacgacgaattcaggcagc

SEQ ID NO: 262109 - DNA, 21 bp, Artificial sequence
  SiRNA target sequence
caacgacgaattcaggcagct

SEQ ID NO: 262110 - DNA, 21 bp, Artificial sequence
  SiRNA target sequence
aacgacgaattcaggcagctc

SEQ ID NO: 262111 - DNA, 21 bp, Artificial sequence
  SiRNA target sequence
acgacgaattcaggcagctcg

SEQ ID NO: 262112 - DNA, 21 bp, Artificial sequence
  SiRNA target sequence
cgacgaattcaggcagctcgt

SEQ ID NO: 262113 - DNA, 21 bp, Artificial sequence
  SiRNA target sequence
gacgaattcaggcagctcgtg

SEQ ID NO: 262114 - DNA, 21 bp, Artificial sequence
  SiRNA target sequence
acgaattcaggcagctcgtga

SEQ ID NO: 262115 - DNA, 21 bp, Artificial sequence
  SiRNA target sequence
cgaattcaggcagctcgtgaa

SEQ ID NO: 262116 - DNA, 21 bp, Artificial sequence
  SiRNA target sequence
gaattcaggcagctcgtgaag

SEQ ID NO: 262117 - DNA, 21 bp, Artificial sequence
  SiRNA target sequence
aattcaggcagctcgtgaagg

SEQ ID NO: 262118 - DNA, 21 bp, Artificial sequence
  SiRNA target sequence
attcaggcagctcgtgaagga

SEQ ID NO: 262119 - DNA, 21 bp, Artificial sequence
  SiRNA target sequence
ttcaggcagctcgtgaaggaa

SEQ ID NO: 262120 - DNA, 21 bp, Artificial sequence
  SiRNA target sequence
tcaggcagctcgtgaaggaaa

SEQ ID NO: 262121 - DNA, 21 bp, Artificial sequence
  SiRNA target sequence
caggcagctcgtgaaggaaaa

SEQ ID NO: 262122 - DNA, 21 bp, Artificial sequence
  SiRNA target sequence
aggcagctcgtgaaggaaaac

SEQ ID NO: 262123 - DNA, 21 bp, Artificial sequence
  SiRNA target sequence
ggcagctcgtgaaggaaaacg

SEQ ID NO: 262124 - DNA, 21 bp, Artificial sequence
  SiRNA target sequence
gcagctcgtgaaggaaaacga

SEQ ID NO: 262125 - DNA, 21 bp, Artificial sequence
  SiRNA target sequence
cagctcgtgaaggaaaacgat

SEQ ID NO: 262126 - DNA, 21 bp, Artificial sequence
  SiRNA target sequence
agctcgtgaaggaaaacgatt

SEQ ID NO: 262127 - DNA, 21 bp, Artificial sequence
  SiRNA target sequence
gctcgtgaaggaaaacgatta

SEQ ID NO: 262128 - DNA, 21 bp, Artificial sequence
  SiRNA target sequence
ctcgtgaaggaaaacgattac

SEQ ID NO: 262129 - DNA, 21 bp, Artificial sequence
  SiRNA target sequence
tcgtgaaggaaaacgattacc

SEQ ID NO: 262130 - DNA, 21 bp, Artificial sequence
  SiRNA target sequence
cgtgaaggaaaacgattacct

SEQ ID NO: 262131 - DNA, 21 bp, Artificial sequence
  SiRNA target sequence
gtgaaggaaaacgattacctg

SEQ ID NO: 262132 - DNA, 21 bp, Artificial sequence
  SiRNA target sequence
tgaaggaaaacgattacctgt

SEQ ID NO: 262133 - DNA, 21 bp, Artificial sequence
  SiRNA target sequence
gaaggaaaacgattacctgta

SEQ ID NO: 262134 - DNA, 21 bp, Artificial sequence
  SiRNA target sequence
aaggaaaacgattacctgtaa

SEQ ID NO: 262135 - DNA, 21 bp, Artificial sequence
  SiRNA target sequence
aggaaaacgattacctgtaat

SEQ ID NO: 262136 - DNA, 21 bp, Artificial sequence
  SiRNA target sequence
ggaaaacgattacctgtaatg

SEQ ID NO: 262137 - DNA, 21 bp, Artificial sequence
  SiRNA target sequence
gaaaacgattacctgtaatgt

SEQ ID NO: 262138 - DNA, 21 bp, Artificial sequence
  SiRNA target sequence
aaaacgattacctgtaatgtg

SEQ ID NO: 262139 - DNA, 21 bp, Artificial sequence
  SiRNA target sequence
aaacgattacctgtaatgtgg

SEQ ID NO: 262140 - DNA, 21 bp, Artificial sequence
  SiRNA target sequence
aacgattacctgtaatgtggg

SEQ ID NO: 262141 - DNA, 21 bp, Artificial sequence
  SiRNA target sequence
acgattacctgtaatgtgggt

SEQ ID NO: 262142 - DNA, 21 bp, Artificial sequence
  SiRNA target sequence
cgattacctgtaatgtgggtt

SEQ ID NO: 262143 - DNA, 21 bp, Artificial sequence
  SiRNA target sequence
gattacctgtaatgtgggttg

SEQ ID NO: 262144 - DNA, 21 bp, Artificial sequence
  SiRNA target sequence
attacctgtaatgtgggttga

SEQ ID NO: 262145 - DNA, 21 bp, Artificial sequence
  SiRNA target sequence
ttacctgtaatgtgggttgat

SEQ ID NO: 262146 - DNA, 21 bp, Artificial sequence
  SiRNA target sequence
tacctgtaatgtgggttgata

SEQ ID NO: 262147 - DNA, 21 bp, Artificial sequence
  SiRNA target sequence
acctgtaatgtgggttgatac

SEQ ID NO: 262148 - DNA, 21 bp, Artificial sequence
  SiRNA target sequence
cctgtaatgtgggttgataca

SEQ ID NO: 262149 - DNA, 21 bp, Artificial sequence
  SiRNA target sequence
ctgtaatgtgggttgatacat

SEQ ID NO: 262150 - DNA, 21 bp, Artificial sequence
  SiRNA target sequence
tgtaatgtgggttgatacatt

SEQ ID NO: 262151 - DNA, 21 bp, Artificial sequence
  SiRNA target sequence
gtaatgtgggttgatacattg

SEQ ID NO: 262152 - DNA, 21 bp, Artificial sequence
  SiRNA target sequence
taatgtgggttgatacattga

SEQ ID NO: 262153 - DNA, 21 bp, Artificial sequence
  SiRNA target sequence
aatgtgggttgatacattgaa

SEQ ID NO: 262154 - DNA, 21 bp, Artificial sequence
  SiRNA target sequence
atgtgggttgatacattgaaa

SEQ ID NO: 262155 - DNA, 21 bp, Artificial sequence
  SiRNA target sequence
tgtgggttgatacattgaaag

SEQ ID NO: 262156 - DNA, 21 bp, Artificial sequence
  SiRNA target sequence
gtgggttgatacattgaaaga

SEQ ID NO: 262157 - DNA, 21 bp, Artificial sequence
  SiRNA target sequence
tgggttgatacattgaaagat

SEQ ID NO: 262158 - DNA, 21 bp, Artificial sequence
  SiRNA target sequence
gggttgatacattgaaagatg

SEQ ID NO: 262159 - DNA, 21 bp, Artificial sequence
  SiRNA target sequence
ggttgatacattgaaagatga

SEQ ID NO: 262160 - DNA, 21 bp, Artificial sequence
  SiRNA target sequence
gttgatacattgaaagatgag

SEQ ID NO: 262161 - DNA, 21 bp, Artificial sequence
  SiRNA target sequence
ttgatacattgaaagatgagc

SEQ ID NO: 262162 - DNA, 21 bp, Artificial sequence
  SiRNA target sequence
tgatacattgaaagatgagcg

SEQ ID NO: 262163 - DNA, 21 bp, Artificial sequence
  SiRNA target sequence
gatacattgaaagatgagcgt

SEQ ID NO: 262164 - DNA, 21 bp, Artificial sequence
  SiRNA target sequence
atacattgaaagatgagcgtc

SEQ ID NO: 262165 - DNA, 21 bp, Artificial sequence
  SiRNA target sequence
tacattgaaagatgagcgtcg

SEQ ID NO: 262166 - DNA, 21 bp, Artificial sequence
  SiRNA target sequence
acattgaaagatgagcgtcga

SEQ ID NO: 262167 - DNA, 21 bp, Artificial sequence
  SiRNA target sequence
cattgaaagatgagcgtcgac

SEQ ID NO: 262168 - DNA, 21 bp, Artificial sequence
  SiRNA target sequence
attgaaagatgagcgtcgacc

SEQ ID NO: 262169 - DNA, 21 bp, Artificial sequence
  SiRNA target sequence
ttgaaagatgagcgtcgaccc

SEQ ID NO: 262170 - DNA, 21 bp, Artificial sequence
  SiRNA target sequence
tgaaagatgagcgtcgaccca

SEQ ID NO: 262171 - DNA, 21 bp, Artificial sequence
  SiRNA target sequence
gaaagatgagcgtcgacccat

SEQ ID NO: 262172 - DNA, 21 bp, Artificial sequence
  SiRNA target sequence
aaagatgagcgtcgacccatt

SEQ ID NO: 262173 - DNA, 21 bp, Artificial sequence
  SiRNA target sequence
aagatgagcgtcgacccattg

SEQ ID NO: 262174 - DNA, 21 bp, Artificial sequence
  SiRNA target sequence
agatgagcgtcgacccattga

SEQ ID NO: 262175 - DNA, 21 bp, Artificial sequence
  SiRNA target sequence
gatgagcgtcgacccattgaa

SEQ ID NO: 262176 - DNA, 21 bp, Artificial sequence
  SiRNA target sequence
atgagcgtcgacccattgaaa

SEQ ID NO: 262177 - DNA, 21 bp, Artificial sequence
  SiRNA target sequence
tgagcgtcgacccattgaaaa

SEQ ID NO: 262178 - DNA, 21 bp, Artificial sequence
  SiRNA target sequence
gagcgtcgacccattgaaaaa

SEQ ID NO: 262179 - DNA, 21 bp, Artificial sequence
  SiRNA target sequence
agcgtcgacccattgaaaaag

SEQ ID NO: 262180 - DNA, 21 bp, Artificial sequence
  SiRNA target sequence
gcgtcgacccattgaaaaagt

SEQ ID NO: 262181 - DNA, 21 bp, Artificial sequence
  SiRNA target sequence
cgtcgacccattgaaaaagtt

SEQ ID NO: 262182 - DNA, 21 bp, Artificial sequence
  SiRNA target sequence
gtcgacccattgaaaaagtta

SEQ ID NO: 262183 - DNA, 21 bp, Artificial sequence
  SiRNA target sequence
tcgacccattgaaaaagttaa

SEQ ID NO: 262184 - DNA, 21 bp, Artificial sequence
  SiRNA target sequence
cgacccattgaaaaagttaat

SEQ ID NO: 262185 - DNA, 21 bp, Artificial sequence
  SiRNA target sequence
gacccattgaaaaagttaatc

SEQ ID NO: 262186 - DNA, 21 bp, Artificial sequence
  SiRNA target sequence
acccattgaaaaagttaatca

SEQ ID NO: 262187 - DNA, 21 bp, Artificial sequence
  SiRNA target sequence
cccattgaaaaagttaatcaa

SEQ ID NO: 262188 - DNA, 21 bp, Artificial sequence
  SiRNA target sequence
ccattgaaaaagttaatcaat

SEQ ID NO: 262189 - DNA, 21 bp, Artificial sequence
  SiRNA target sequence
cattgaaaaagttaatcaatt

SEQ ID NO: 262190 - DNA, 21 bp, Artificial sequence
  SiRNA target sequence
attgaaaaagttaatcaattg

SEQ ID NO: 262191 - DNA, 21 bp, Artificial sequence
  SiRNA target sequence
ttgaaaaagttaatcaattga

SEQ ID NO: 262192 - DNA, 21 bp, Artificial sequence
  SiRNA target sequence
tgaaaaagttaatcaattgaa

SEQ ID NO: 262193 - DNA, 21 bp, Artificial sequence
  SiRNA target sequence
gaaaaagttaatcaattgaaa

SEQ ID NO: 262194 - DNA, 21 bp, Artificial sequence
  SiRNA target sequence
aaaaagttaatcaattgaaaa

SEQ ID NO: 262195 - DNA, 21 bp, Artificial sequence
  SiRNA target sequence
aaaagttaatcaattgaaaac

SEQ ID NO: 262196 - DNA, 21 bp, Artificial sequence
  SiRNA target sequence
aaagttaatcaattgaaaaca

SEQ ID NO: 262197 - DNA, 21 bp, Artificial sequence
  SiRNA target sequence
aagttaatcaattgaaaacac

SEQ ID NO: 262198 - DNA, 21 bp, Artificial sequence
  SiRNA target sequence
agttaatcaattgaaaacacg

SEQ ID NO: 262199 - DNA, 21 bp, Artificial sequence
  SiRNA target sequence
gttaatcaattgaaaacacga

SEQ ID NO: 262200 - DNA, 21 bp, Artificial sequence
  SiRNA target sequence
ttaatcaattgaaaacacgag

SEQ ID NO: 262201 - DNA, 21 bp, Artificial sequence
  SiRNA target sequence
taatcaattgaaaacacgagt

SEQ ID NO: 262202 - DNA, 21 bp, Artificial sequence
  SiRNA target sequence
aatcaattgaaaacacgagta

SEQ ID NO: 262203 - DNA, 21 bp, Artificial sequence
  SiRNA target sequence
atcaattgaaaacacgagtat

SEQ ID NO: 262204 - DNA, 21 bp, Artificial sequence
  SiRNA target sequence
tcaattgaaaacacgagtatt

SEQ ID NO: 262205 - DNA, 21 bp, Artificial sequence
  SiRNA target sequence
caattgaaaacacgagtattc

SEQ ID NO: 262206 - DNA, 21 bp, Artificial sequence
  SiRNA target sequence
aattgaaaacacgagtattct

SEQ ID NO: 262207 - DNA, 21 bp, Artificial sequence
  SiRNA target sequence
attgaaaacacgagtattctc

SEQ ID NO: 262208 - DNA, 21 bp, Artificial sequence
  SiRNA target sequence
ttgaaaacacgagtattctca

SEQ ID NO: 262209 - DNA, 21 bp, Artificial sequence
  SiRNA target sequence
tgaaaacacgagtattctcaa

SEQ ID NO: 262210 - DNA, 21 bp, Artificial sequence
  SiRNA target sequence
gaaaacacgagtattctcaaa

SEQ ID NO: 262211 - DNA, 21 bp, Artificial sequence
  SiRNA target sequence
aaaacacgagtattctcaaat

SEQ ID NO: 262212 - DNA, 21 bp, Artificial sequence
  SiRNA target sequence
aaacacgagtattctcaaatg

SEQ ID NO: 262213 - DNA, 21 bp, Artificial sequence
  SiRNA target sequence
aacacgagtattctcaaatgg

SEQ ID NO: 262214 - DNA, 21 bp, Artificial sequence
  SiRNA target sequence
acacgagtattctcaaatgga

SEQ ID NO: 262215 - DNA, 21 bp, Artificial sequence
  SiRNA target sequence
cacgagtattctcaaatggac

SEQ ID NO: 262216 - DNA, 21 bp, Artificial sequence
  SiRNA target sequence
acgagtattctcaaatggacc

SEQ ID NO: 262217 - DNA, 21 bp, Artificial sequence
  SiRNA target sequence
cgagtattctcaaatggacca

SEQ ID NO: 262218 - DNA, 21 bp, Artificial sequence
  SiRNA target sequence
gagtattctcaaatggaccaa

SEQ ID NO: 262219 - DNA, 21 bp, Artificial sequence
  SiRNA target sequence
agtattctcaaatggaccaat

SEQ ID NO: 262220 - DNA, 21 bp, Artificial sequence
  SiRNA target sequence
gtattctcaaatggaccaatg

SEQ ID NO: 262221 - DNA, 21 bp, Artificial sequence
  SiRNA target sequence
tattctcaaatggaccaatgg

SEQ ID NO: 262222 - DNA, 21 bp, Artificial sequence
  SiRNA target sequence
attctcaaatggaccaatgga

SEQ ID NO: 262223 - DNA, 21 bp, Artificial sequence
  SiRNA target sequence
ttctcaaatggaccaatggat

SEQ ID NO: 262224 - DNA, 21 bp, Artificial sequence
  SiRNA target sequence
tctcaaatggaccaatggatt

SEQ ID NO: 262225 - DNA, 21 bp, Artificial sequence
  SiRNA target sequence
ctcaaatggaccaatggattt

SEQ ID NO: 262226 - DNA, 21 bp, Artificial sequence
  SiRNA target sequence
tcaaatggaccaatggatttc

SEQ ID NO: 262227 - DNA, 21 bp, Artificial sequence
  SiRNA target sequence
caaatggaccaatggatttct

SEQ ID NO: 262228 - DNA, 21 bp, Artificial sequence
  SiRNA target sequence
aaatggaccaatggatttctc

SEQ ID NO: 262229 - DNA, 21 bp, Artificial sequence
  SiRNA target sequence
aatggaccaatggatttctct

SEQ ID NO: 262230 - DNA, 21 bp, Artificial sequence
  SiRNA target sequence
atggaccaatggatttctcta

SEQ ID NO: 262231 - DNA, 21 bp, Artificial sequence
  SiRNA target sequence
tggaccaatggatttctctat

SEQ ID NO: 262232 - DNA, 21 bp, Artificial sequence
  SiRNA target sequence
ggaccaatggatttctctata

SEQ ID NO: 262233 - DNA, 21 bp, Artificial sequence
  SiRNA target sequence
gaccaatggatttctctatag

SEQ ID NO: 262234 - DNA, 21 bp, Artificial sequence
  SiRNA target sequence
accaatggatttctctatagc

SEQ ID NO: 262235 - DNA, 21 bp, Artificial sequence
  SiRNA target sequence
ccaatggatttctctatagct

SEQ ID NO: 262236 - DNA, 21 bp, Artificial sequence
  SiRNA target sequence
caatggatttctctatagctt

SEQ ID NO: 262237 - DNA, 21 bp, Artificial sequence
  SiRNA target sequence
aatggatttctctatagcttt

SEQ ID NO: 262238 - DNA, 21 bp, Artificial sequence
  SiRNA target sequence
atggatttctctatagctttt

SEQ ID NO: 262239 - DNA, 21 bp, Artificial sequence
  SiRNA target sequence
tggatttctctatagcttttc

SEQ ID NO: 262240 - DNA, 21 bp, Artificial sequence
  SiRNA target sequence
ggatttctctatagcttttcg

SEQ ID NO: 262241 - DNA, 21 bp, Artificial sequence
  SiRNA target sequence
gatttctctatagcttttcga

SEQ ID NO: 262242 - DNA, 21 bp, Artificial sequence
  SiRNA target sequence
atttctctatagcttttcgaa

SEQ ID NO: 262243 - DNA, 21 bp, Artificial sequence
  SiRNA target sequence
tttctctatagcttttcgaat

SEQ ID NO: 262244 - DNA, 21 bp, Artificial sequence
  SiRNA target sequence
ttctctatagcttttcgaatg

SEQ ID NO: 262245 - DNA, 21 bp, Artificial sequence
  SiRNA target sequence
tctctatagcttttcgaatgt

SEQ ID NO: 262246 - DNA, 21 bp, Artificial sequence
  SiRNA target sequence
ctctatagcttttcgaatgta

SEQ ID NO: 262247 - DNA, 21 bp, Artificial sequence
  SiRNA target sequence
tctatagcttttcgaatgtat

SEQ ID NO: 262248 - DNA, 21 bp, Artificial sequence
  SiRNA target sequence
ctatagcttttcgaatgtatt

SEQ ID NO: 262249 - DNA, 21 bp, Artificial sequence
  SiRNA target sequence
tatagcttttcgaatgtatta

SEQ ID NO: 262250 - DNA, 21 bp, Artificial sequence
  SiRNA target sequence
atagcttttcgaatgtattat

SEQ ID NO: 262251 - DNA, 21 bp, Artificial sequence
  SiRNA target sequence
tagcttttcgaatgtattatt

SEQ ID NO: 262252 - DNA, 21 bp, Artificial sequence
  SiRNA target sequence
agcttttcgaatgtattattt

SEQ ID NO: 262253 - DNA, 21 bp, Artificial sequence
  SiRNA target sequence
gcttttcgaatgtattatttg

SEQ ID NO: 262254 - DNA, 21 bp, Artificial sequence
  SiRNA target sequence
cttttcgaatgtattatttgg

SEQ ID NO: 262255 - DNA, 21 bp, Artificial sequence
  SiRNA target sequence
ttttcgaatgtattatttggg

SEQ ID NO: 262256 - DNA, 21 bp, Artificial sequence
  SiRNA target sequence
tttcgaatgtattatttgggc

SEQ ID NO: 262257 - DNA, 21 bp, Artificial sequence
  SiRNA target sequence
ttcgaatgtattatttgggct

SEQ ID NO: 262258 - DNA, 21 bp, Artificial sequence
  SiRNA target sequence
tcgaatgtattatttgggctt

SEQ ID NO: 262259 - DNA, 21 bp, Artificial sequence
  SiRNA target sequence
cgaatgtattatttgggcttt

SEQ ID NO: 262260 - DNA, 21 bp, Artificial sequence
  SiRNA target sequence
gaatgtattatttgggcttta

SEQ ID NO: 262261 - DNA, 21 bp, Artificial sequence
  SiRNA target sequence
aatgtattatttgggctttat

SEQ ID NO: 262262 - DNA, 21 bp, Artificial sequence
  SiRNA target sequence
atgtattatttgggctttata

SEQ ID NO: 262263 - DNA, 21 bp, Artificial sequence
  SiRNA target sequence
tgtattatttgggctttatag

SEQ ID NO: 262264 - DNA, 21 bp, Artificial sequence
  SiRNA target sequence
gtattatttgggctttatagc

SEQ ID NO: 262265 - DNA, 21 bp, Artificial sequence
  SiRNA target sequence
tattatttgggctttatagct

SEQ ID NO: 262266 - DNA, 21 bp, Artificial sequence
  SiRNA target sequence
attatttgggctttatagctc

SEQ ID NO: 262267 - DNA, 21 bp, Artificial sequence
  SiRNA target sequence
ttatttgggctttatagctca

SEQ ID NO: 262268 - DNA, 21 bp, Artificial sequence
  SiRNA target sequence
tatttgggctttatagctcat

SEQ ID NO: 262269 - DNA, 21 bp, Artificial sequence
  SiRNA target sequence
atttgggctttatagctcatt

SEQ ID NO: 262270 - DNA, 21 bp, Artificial sequence
  SiRNA target sequence
tttgggctttatagctcattt

SEQ ID NO: 262271 - DNA, 21 bp, Artificial sequence
  SiRNA target sequence
ttgggctttatagctcatttg

SEQ ID NO: 262272 - DNA, 21 bp, Artificial sequence
  SiRNA target sequence
tgggctttatagctcatttga

SEQ ID NO: 262273 - DNA, 21 bp, Artificial sequence
  SiRNA target sequence
gggctttatagctcatttgat

SEQ ID NO: 262274 - DNA, 21 bp, Artificial sequence
  SiRNA target sequence
ggctttatagctcatttgatg

SEQ ID NO: 262275 - DNA, 21 bp, Artificial sequence
  SiRNA target sequence
gctttatagctcatttgatgg

SEQ ID NO: 262276 - DNA, 21 bp, Artificial sequence
  SiRNA target sequence
ctttatagctcatttgatgga

SEQ ID NO: 262277 - DNA, 21 bp, Artificial sequence
  SiRNA target sequence
tttatagctcatttgatggaa

SEQ ID NO: 262278 - DNA, 21 bp, Artificial sequence
  SiRNA target sequence
ttatagctcatttgatggaaa

SEQ ID NO: 262279 - DNA, 21 bp, Artificial sequence
  SiRNA target sequence
tatagctcatttgatggaaaa

SEQ ID NO: 262280 - DNA, 21 bp, Artificial sequence
  SiRNA target sequence
atagctcatttgatggaaaat

SEQ ID NO: 262281 - DNA, 21 bp, Artificial sequence
  SiRNA target sequence
tagctcatttgatggaaaatc

SEQ ID NO: 262282 - DNA, 21 bp, Artificial sequence
  SiRNA target sequence
agctcatttgatggaaaatcg

SEQ ID NO: 262283 - DNA, 21 bp, Artificial sequence
  SiRNA target sequence
gctcatttgatggaaaatcga

SEQ ID NO: 262284 - DNA, 21 bp, Artificial sequence
  SiRNA target sequence
ctcatttgatggaaaatcgaa

SEQ ID NO: 262285 - DNA, 21 bp, Artificial sequence
  SiRNA target sequence
tcatttgatggaaaatcgaat

SEQ ID NO: 262286 - DNA, 21 bp, Artificial sequence
  SiRNA target sequence
catttgatggaaaatcgaatt

SEQ ID NO: 262287 - DNA, 21 bp, Artificial sequence
  SiRNA target sequence
atttgatggaaaatcgaatta

SEQ ID NO: 262288 - DNA, 21 bp, Artificial sequence
  SiRNA target sequence
tttgatggaaaatcgaattac

SEQ ID NO: 262289 - DNA, 21 bp, Artificial sequence
  SiRNA target sequence
ttgatggaaaatcgaattact

SEQ ID NO: 262290 - DNA, 21 bp, Artificial sequence
  SiRNA target sequence
tgatggaaaatcgaattacta

SEQ ID NO: 262291 - DNA, 21 bp, Artificial sequence
  SiRNA target sequence
gatggaaaatcgaattactaa

SEQ ID NO: 262292 - DNA, 21 bp, Artificial sequence
  SiRNA target sequence
atggaaaatcgaattactaat

SEQ ID NO: 262293 - DNA, 21 bp, Artificial sequence
  SiRNA target sequence
tggaaaatcgaattactaatg

SEQ ID NO: 262294 - DNA, 21 bp, Artificial sequence
  SiRNA target sequence
ggaaaatcgaattactaatga

SEQ ID NO: 262295 - DNA, 21 bp, Artificial sequence
  SiRNA target sequence
gaaaatcgaattactaatgag

SEQ ID NO: 262296 - DNA, 21 bp, Artificial sequence
  SiRNA target sequence
aaaatcgaattactaatgagg

SEQ ID NO: 262297 - DNA, 21 bp, Artificial sequence
  SiRNA target sequence
aaatcgaattactaatgaggt

SEQ ID NO: 262298 - DNA, 21 bp, Artificial sequence
  SiRNA target sequence
aatcgaattactaatgaggtg

SEQ ID NO: 262299 - DNA, 21 bp, Artificial sequence
  SiRNA target sequence
atcgaattactaatgaggtgt

SEQ ID NO: 262300 - DNA, 21 bp, Artificial sequence
  SiRNA target sequence
tcgaattactaatgaggtgtc

SEQ ID NO: 262301 - DNA, 21 bp, Artificial sequence
  SiRNA target sequence
cgaattactaatgaggtgtcc

SEQ ID NO: 262302 - DNA, 21 bp, Artificial sequence
  SiRNA target sequence
gaattactaatgaggtgtcca

SEQ ID NO: 262303 - DNA, 21 bp, Artificial sequence
  SiRNA target sequence
aattactaatgaggtgtccat

SEQ ID NO: 262304 - DNA, 21 bp, Artificial sequence
  SiRNA target sequence
attactaatgaggtgtccatt

SEQ ID NO: 262305 - DNA, 21 bp, Artificial sequence
  SiRNA target sequence
ttactaatgaggtgtccattg

SEQ ID NO: 262306 - DNA, 21 bp, Artificial sequence
  SiRNA target sequence
tactaatgaggtgtccattgg

SEQ ID NO: 262307 - DNA, 21 bp, Artificial sequence
  SiRNA target sequence
actaatgaggtgtccattgga

SEQ ID NO: 262308 - DNA, 21 bp, Artificial sequence
  SiRNA target sequence
ctaatgaggtgtccattggaa

SEQ ID NO: 262309 - DNA, 21 bp, Artificial sequence
  SiRNA target sequence
taatgaggtgtccattggaac

SEQ ID NO: 262310 - DNA, 21 bp, Artificial sequence
  SiRNA target sequence
aatgaggtgtccattggaacg

SEQ ID NO: 262311 - DNA, 21 bp, Artificial sequence
  SiRNA target sequence
atgaggtgtccattggaacga

SEQ ID NO: 262312 - DNA, 21 bp, Artificial sequence
  SiRNA target sequence
tgaggtgtccattggaacgaa

SEQ ID NO: 262313 - DNA, 21 bp, Artificial sequence
  SiRNA target sequence
gaggtgtccattggaacgaat

SEQ ID NO: 262314 - DNA, 21 bp, Artificial sequence
  SiRNA target sequence
aggtgtccattggaacgaatg

SEQ ID NO: 262315 - DNA, 21 bp, Artificial sequence
  SiRNA target sequence
ggtgtccattggaacgaatgt

SEQ ID NO: 262316 - DNA, 21 bp, Artificial sequence
  SiRNA target sequence
gtgtccattggaacgaatgtg

SEQ ID NO: 262317 - DNA, 21 bp, Artificial sequence
  SiRNA target sequence
tgtccattggaacgaatgtgt

SEQ ID NO: 262318 - DNA, 21 bp, Artificial sequence
  SiRNA target sequence
gtccattggaacgaatgtgta

SEQ ID NO: 262319 - DNA, 21 bp, Artificial sequence
  SiRNA target sequence
tccattggaacgaatgtgtat

SEQ ID NO: 262320 - DNA, 21 bp, Artificial sequence
  SiRNA target sequence
ccattggaacgaatgtgtatt

SEQ ID NO: 262321 - DNA, 21 bp, Artificial sequence
  SiRNA target sequence
cattggaacgaatgtgtattc

SEQ ID NO: 262322 - DNA, 21 bp, Artificial sequence
  SiRNA target sequence
attggaacgaatgtgtattct

SEQ ID NO: 262323 - DNA, 21 bp, Artificial sequence
  SiRNA target sequence
ttggaacgaatgtgtattctc

SEQ ID NO: 262324 - DNA, 21 bp, Artificial sequence
  SiRNA target sequence
tggaacgaatgtgtattctca

SEQ ID NO: 262325 - DNA, 21 bp, Artificial sequence
  SiRNA target sequence
ggaacgaatgtgtattctcaa

SEQ ID NO: 262326 - DNA, 21 bp, Artificial sequence
  SiRNA target sequence
gaacgaatgtgtattctcaag

SEQ ID NO: 262327 - DNA, 21 bp, Artificial sequence
  SiRNA target sequence
aacgaatgtgtattctcaaga

SEQ ID NO: 262328 - DNA, 21 bp, Artificial sequence
  SiRNA target sequence
acgaatgtgtattctcaagac

SEQ ID NO: 262329 - DNA, 21 bp, Artificial sequence
  SiRNA target sequence
cgaatgtgtattctcaagact

SEQ ID NO: 262330 - DNA, 21 bp, Artificial sequence
  SiRNA target sequence
gaatgtgtattctcaagactg

SEQ ID NO: 262331 - DNA, 21 bp, Artificial sequence
  SiRNA target sequence
aatgtgtattctcaagactgg

SEQ ID NO: 262332 - DNA, 21 bp, Artificial sequence
  SiRNA target sequence
atgtgtattctcaagactgga

SEQ ID NO: 262333 - DNA, 21 bp, Artificial sequence
  SiRNA target sequence
tgtgtattctcaagactggag

SEQ ID NO: 262334 - DNA, 21 bp, Artificial sequence
  SiRNA target sequence
gtgtattctcaagactggagt

SEQ ID NO: 262335 - DNA, 21 bp, Artificial sequence
  SiRNA target sequence
tgtattctcaagactggagta

SEQ ID NO: 262336 - DNA, 21 bp, Artificial sequence
  SiRNA target sequence
gtattctcaagactggagtaa

SEQ ID NO: 262337 - DNA, 21 bp, Artificial sequence
  SiRNA target sequence
tattctcaagactggagtaaa

SEQ ID NO: 262338 - DNA, 21 bp, Artificial sequence
  SiRNA target sequence
attctcaagactggagtaaaa

SEQ ID NO: 262339 - DNA, 21 bp, Artificial sequence
  SiRNA target sequence
ttctcaagactggagtaaaac

SEQ ID NO: 262340 - DNA, 21 bp, Artificial sequence
  SiRNA target sequence
tctcaagactggagtaaaact

SEQ ID NO: 262341 - DNA, 21 bp, Artificial sequence
  SiRNA target sequence
ctcaagactggagtaaaactg

SEQ ID NO: 262342 - DNA, 21 bp, Artificial sequence
  SiRNA target sequence
tcaagactggagtaaaactgt

SEQ ID NO: 262343 - DNA, 21 bp, Artificial sequence
  SiRNA target sequence
caagactggagtaaaactgtt

SEQ ID NO: 262344 - DNA, 21 bp, Artificial sequence
  SiRNA target sequence
aagactggagtaaaactgttc

SEQ ID NO: 262345 - DNA, 21 bp, Artificial sequence
  SiRNA target sequence
agactggagtaaaactgttcg

SEQ ID NO: 262346 - DNA, 21 bp, Artificial sequence
  SiRNA target sequence
gactggagtaaaactgttcgt

SEQ ID NO: 262347 - DNA, 21 bp, Artificial sequence
  SiRNA target sequence
actggagtaaaactgttcgta

SEQ ID NO: 262348 - DNA, 21 bp, Artificial sequence
  SiRNA target sequence
ctggagtaaaactgttcgtaa

SEQ ID NO: 262349 - DNA, 21 bp, Artificial sequence
  SiRNA target sequence
tggagtaaaactgttcgtaag

SEQ ID NO: 262350 - DNA, 21 bp, Artificial sequence
  SiRNA target sequence
ggagtaaaactgttcgtaagt

SEQ ID NO: 262351 - DNA, 21 bp, Artificial sequence
  SiRNA target sequence
gagtaaaactgttcgtaagtt

SEQ ID NO: 262352 - DNA, 21 bp, Artificial sequence
  SiRNA target sequence
agtaaaactgttcgtaagttg

SEQ ID NO: 262353 - DNA, 21 bp, Artificial sequence
  SiRNA target sequence
gtaaaactgttcgtaagttga

SEQ ID NO: 262354 - DNA, 21 bp, Artificial sequence
  SiRNA target sequence
taaaactgttcgtaagttgac

SEQ ID NO: 262355 - DNA, 21 bp, Artificial sequence
  SiRNA target sequence
aaaactgttcgtaagttgact

SEQ ID NO: 262356 - DNA, 21 bp, Artificial sequence
  SiRNA target sequence
aaactgttcgtaagttgacta

SEQ ID NO: 262357 - DNA, 21 bp, Artificial sequence
  SiRNA target sequence
aactgttcgtaagttgactaa

SEQ ID NO: 262358 - DNA, 21 bp, Artificial sequence
  SiRNA target sequence
actgttcgtaagttgactaaa

SEQ ID NO: 262359 - DNA, 21 bp, Artificial sequence
  SiRNA target sequence
ctgttcgtaagttgactaaat

SEQ ID NO: 262360 - DNA, 21 bp, Artificial sequence
  SiRNA target sequence
tgttcgtaagttgactaaatt

SEQ ID NO: 262361 - DNA, 21 bp, Artificial sequence
  SiRNA target sequence
gttcgtaagttgactaaattt

SEQ ID NO: 262362 - DNA, 21 bp, Artificial sequence
  SiRNA target sequence
ttcgtaagttgactaaatttg

SEQ ID NO: 262363 - DNA, 21 bp, Artificial sequence
  SiRNA target sequence
tcgtaagttgactaaatttgg

SEQ ID NO: 262364 - DNA, 21 bp, Artificial sequence
  SiRNA target sequence
cgtaagttgactaaatttgga

SEQ ID NO: 262365 - DNA, 21 bp, Artificial sequence
  SiRNA target sequence
gtaagttgactaaatttggaa

SEQ ID NO: 262366 - DNA, 21 bp, Artificial sequence
  SiRNA target sequence
taagttgactaaatttggaaa

SEQ ID NO: 262367 - DNA, 21 bp, Artificial sequence
  SiRNA target sequence
aagttgactaaatttggaaat

SEQ ID NO: 262368 - DNA, 21 bp, Artificial sequence
  SiRNA target sequence
agttgactaaatttggaaata

SEQ ID NO: 262369 - DNA, 21 bp, Artificial sequence
  SiRNA target sequence
gttgactaaatttggaaataa

SEQ ID NO: 262370 - DNA, 21 bp, Artificial sequence
  SiRNA target sequence
ttgactaaatttggaaataaa

SEQ ID NO: 262371 - DNA, 21 bp, Artificial sequence
  SiRNA target sequence
tgactaaatttggaaataaag

SEQ ID NO: 262372 - DNA, 21 bp, Artificial sequence
  SiRNA target sequence
gactaaatttggaaataaagt

SEQ ID NO: 262373 - DNA, 21 bp, Artificial sequence
  SiRNA target sequence
actaaatttggaaataaagtt

SEQ ID NO: 262374 - DNA, 21 bp, Artificial sequence
  SiRNA target sequence
ctaaatttggaaataaagtta

SEQ ID NO: 262375 - DNA, 21 bp, Artificial sequence
  SiRNA target sequence
taaatttggaaataaagttat

SEQ ID NO: 262376 - DNA, 21 bp, Artificial sequence
  SiRNA target sequence
aaatttggaaataaagttatt

SEQ ID NO: 262377 - DNA, 21 bp, Artificial sequence
  SiRNA target sequence
aatttggaaataaagttattg

SEQ ID NO: 262378 - DNA, 21 bp, Artificial sequence
  SiRNA target sequence
atttggaaataaagttattgc

SEQ ID NO: 262379 - DNA, 21 bp, Artificial sequence
  SiRNA target sequence
tttggaaataaagttattgca

SEQ ID NO: 262380 - DNA, 21 bp, Artificial sequence
  SiRNA target sequence
ttggaaataaagttattgcag

SEQ ID NO: 262381 - DNA, 21 bp, Artificial sequence
  SiRNA target sequence
tggaaataaagttattgcagg

SEQ ID NO: 262382 - DNA, 21 bp, Artificial sequence
  SiRNA target sequence
ggaaataaagttattgcaggt

SEQ ID NO: 262383 - DNA, 21 bp, Artificial sequence
  SiRNA target sequence
gaaataaagttattgcaggtg

SEQ ID NO: 262384 - DNA, 21 bp, Artificial sequence
  SiRNA target sequence
aaataaagttattgcaggtga

SEQ ID NO: 262385 - DNA, 21 bp, Artificial sequence
  SiRNA target sequence
aataaagttattgcaggtgat

SEQ ID NO: 262386 - DNA, 21 bp, Artificial sequence
  SiRNA target sequence
ataaagttattgcaggtgatt

SEQ ID NO: 262387 - DNA, 21 bp, Artificial sequence
  SiRNA target sequence
taaagttattgcaggtgattt

SEQ ID NO: 262388 - DNA, 21 bp, Artificial sequence
  SiRNA target sequence
aaagttattgcaggtgatttt

SEQ ID NO: 262389 - DNA, 21 bp, Artificial sequence
  SiRNA target sequence
aagttattgcaggtgattttt

SEQ ID NO: 262390 - DNA, 21 bp, Artificial sequence
  SiRNA target sequence
agttattgcaggtgatttttc

SEQ ID NO: 262391 - DNA, 21 bp, Artificial sequence
  SiRNA target sequence
gttattgcaggtgatttttca

SEQ ID NO: 262392 - DNA, 21 bp, Artificial sequence
  SiRNA target sequence
ttattgcaggtgatttttcaa

SEQ ID NO: 262393 - DNA, 21 bp, Artificial sequence
  SiRNA target sequence
tattgcaggtgatttttcaac

SEQ ID NO: 262394 - DNA, 21 bp, Artificial sequence
  SiRNA target sequence
attgcaggtgatttttcaact

SEQ ID NO: 262395 - DNA, 21 bp, Artificial sequence
  SiRNA target sequence
ttgcaggtgatttttcaactt

SEQ ID NO: 262396 - DNA, 21 bp, Artificial sequence
  SiRNA target sequence
tgcaggtgatttttcaacttt

SEQ ID NO: 262397 - DNA, 21 bp, Artificial sequence
  SiRNA target sequence
gcaggtgatttttcaactttt

SEQ ID NO: 262398 - DNA, 21 bp, Artificial sequence
  SiRNA target sequence
caggtgatttttcaacttttg

SEQ ID NO: 262399 - DNA, 21 bp, Artificial sequence
  SiRNA target sequence
aggtgatttttcaacttttga

SEQ ID NO: 262400 - DNA, 21 bp, Artificial sequence
  SiRNA target sequence
ggtgatttttcaacttttgat

SEQ ID NO: 262401 - DNA, 21 bp, Artificial sequence
  SiRNA target sequence
gtgatttttcaacttttgatg

SEQ ID NO: 262402 - DNA, 21 bp, Artificial sequence
  SiRNA target sequence
tgatttttcaacttttgatgg

SEQ ID NO: 262403 - DNA, 21 bp, Artificial sequence
  SiRNA target sequence
gatttttcaacttttgatgga

SEQ ID NO: 262404 - DNA, 21 bp, Artificial sequence
  SiRNA target sequence
atttttcaacttttgatggat

SEQ ID NO: 262405 - DNA, 21 bp, Artificial sequence
  SiRNA target sequence
tttttcaacttttgatggatc

SEQ ID NO: 262406 - DNA, 21 bp, Artificial sequence
  SiRNA target sequence
ttttcaacttttgatggatca

SEQ ID NO: 262407 - DNA, 21 bp, Artificial sequence
  SiRNA target sequence
tttcaacttttgatggatcac

SEQ ID NO: 262408 - DNA, 21 bp, Artificial sequence
  SiRNA target sequence
ttcaacttttgatggatcact

SEQ ID NO: 262409 - DNA, 21 bp, Artificial sequence
  SiRNA target sequence
tcaacttttgatggatcactg

SEQ ID NO: 262410 - DNA, 21 bp, Artificial sequence
  SiRNA target sequence
caacttttgatggatcactga

SEQ ID NO: 262411 - DNA, 21 bp, Artificial sequence
  SiRNA target sequence
aacttttgatggatcactgaa

SEQ ID NO: 262412 - DNA, 21 bp, Artificial sequence
  SiRNA target sequence
acttttgatggatcactgaat

SEQ ID NO: 262413 - DNA, 21 bp, Artificial sequence
  SiRNA target sequence
cttttgatggatcactgaatg

SEQ ID NO: 262414 - DNA, 21 bp, Artificial sequence
  SiRNA target sequence
ttttgatggatcactgaatgt

SEQ ID NO: 262415 - DNA, 21 bp, Artificial sequence
  SiRNA target sequence
tttgatggatcactgaatgta

SEQ ID NO: 262416 - DNA, 21 bp, Artificial sequence
  SiRNA target sequence
ttgatggatcactgaatgtat

SEQ ID NO: 262417 - DNA, 21 bp, Artificial sequence
  SiRNA target sequence
tgatggatcactgaatgtatg

SEQ ID NO: 262418 - DNA, 21 bp, Artificial sequence
  SiRNA target sequence
gatggatcactgaatgtatgt

SEQ ID NO: 262419 - DNA, 21 bp, Artificial sequence
  SiRNA target sequence
atggatcactgaatgtatgta

SEQ ID NO: 262420 - DNA, 21 bp, Artificial sequence
  SiRNA target sequence
tggatcactgaatgtatgtat

SEQ ID NO: 262421 - DNA, 21 bp, Artificial sequence
  SiRNA target sequence
ggatcactgaatgtatgtatt

SEQ ID NO: 262422 - DNA, 21 bp, Artificial sequence
  SiRNA target sequence
gatcactgaatgtatgtatta

SEQ ID NO: 262423 - DNA, 21 bp, Artificial sequence
  SiRNA target sequence
atcactgaatgtatgtattat

SEQ ID NO: 262424 - DNA, 21 bp, Artificial sequence
  SiRNA target sequence
tcactgaatgtatgtattatg

SEQ ID NO: 262425 - DNA, 21 bp, Artificial sequence
  SiRNA target sequence
cactgaatgtatgtattatgg

SEQ ID NO: 262426 - DNA, 21 bp, Artificial sequence
  SiRNA target sequence
actgaatgtatgtattatgga

SEQ ID NO: 262427 - DNA, 21 bp, Artificial sequence
  SiRNA target sequence
ctgaatgtatgtattatggaa

SEQ ID NO: 262428 - DNA, 21 bp, Artificial sequence
  SiRNA target sequence
tgaatgtatgtattatggaaa

SEQ ID NO: 262429 - DNA, 21 bp, Artificial sequence
  SiRNA target sequence
gaatgtatgtattatggaaaa

SEQ ID NO: 262430 - DNA, 21 bp, Artificial sequence
  SiRNA target sequence
aatgtatgtattatggaaaaa

SEQ ID NO: 262431 - DNA, 21 bp, Artificial sequence
  SiRNA target sequence
atgtatgtattatggaaaaat

SEQ ID NO: 262432 - DNA, 21 bp, Artificial sequence
  SiRNA target sequence
tgtatgtattatggaaaaatt

SEQ ID NO: 262433 - DNA, 21 bp, Artificial sequence
  SiRNA target sequence
gtatgtattatggaaaaattt

SEQ ID NO: 262434 - DNA, 21 bp, Artificial sequence
  SiRNA target sequence
tatgtattatggaaaaatttg

SEQ ID NO: 262435 - DNA, 21 bp, Artificial sequence
  SiRNA target sequence
atgtattatggaaaaatttgc

SEQ ID NO: 262436 - DNA, 21 bp, Artificial sequence
  SiRNA target sequence
tgtattatggaaaaatttgca

SEQ ID NO: 262437 - DNA, 21 bp, Artificial sequence
  SiRNA target sequence
gtattatggaaaaatttgcag

SEQ ID NO: 262438 - DNA, 21 bp, Artificial sequence
  SiRNA target sequence
tattatggaaaaatttgcaga

SEQ ID NO: 262439 - DNA, 21 bp, Artificial sequence
  SiRNA target sequence
attatggaaaaatttgcagat

SEQ ID NO: 262440 - DNA, 21 bp, Artificial sequence
  SiRNA target sequence
ttatggaaaaatttgcagatt

SEQ ID NO: 262441 - DNA, 21 bp, Artificial sequence
  SiRNA target sequence
tatggaaaaatttgcagattt

SEQ ID NO: 262442 - DNA, 21 bp, Artificial sequence
  SiRNA target sequence
atggaaaaatttgcagattta

SEQ ID NO: 262443 - DNA, 21 bp, Artificial sequence
  SiRNA target sequence
tggaaaaatttgcagatttag

SEQ ID NO: 262444 - DNA, 21 bp, Artificial sequence
  SiRNA target sequence
ggaaaaatttgcagatttagc

SEQ ID NO: 262445 - DNA, 21 bp, Artificial sequence
  SiRNA target sequence
gaaaaatttgcagatttagcg

SEQ ID NO: 262446 - DNA, 21 bp, Artificial sequence
  SiRNA target sequence
aaaaatttgcagatttagcga

SEQ ID NO: 262447 - DNA, 21 bp, Artificial sequence
  SiRNA target sequence
aaaatttgcagatttagcgaa

SEQ ID NO: 262448 - DNA, 21 bp, Artificial sequence
  SiRNA target sequence
aaatttgcagatttagcgaat

SEQ ID NO: 262449 - DNA, 21 bp, Artificial sequence
  SiRNA target sequence
aatttgcagatttagcgaatg

SEQ ID NO: 262450 - DNA, 21 bp, Artificial sequence
  SiRNA target sequence
atttgcagatttagcgaatga

SEQ ID NO: 262451 - DNA, 21 bp, Artificial sequence
  SiRNA target sequence
tttgcagatttagcgaatgag

SEQ ID NO: 262452 - DNA, 21 bp, Artificial sequence
  SiRNA target sequence
ttgcagatttagcgaatgagt

SEQ ID NO: 262453 - DNA, 21 bp, Artificial sequence
  SiRNA target sequence
tgcagatttagcgaatgagtt

SEQ ID NO: 262454 - DNA, 21 bp, Artificial sequence
  SiRNA target sequence
gcagatttagcgaatgagttt

SEQ ID NO: 262455 - DNA, 21 bp, Artificial sequence
  SiRNA target sequence
cagatttagcgaatgagtttt

SEQ ID NO: 262456 - DNA, 21 bp, Artificial sequence
  SiRNA target sequence
agatttagcgaatgagtttta

SEQ ID NO: 262457 - DNA, 21 bp, Artificial sequence
  SiRNA target sequence
gatttagcgaatgagttttat

SEQ ID NO: 262458 - DNA, 21 bp, Artificial sequence
  SiRNA target sequence
atttagcgaatgagttttatg

SEQ ID NO: 262459 - DNA, 21 bp, Artificial sequence
  SiRNA target sequence
tttagcgaatgagttttatga

SEQ ID NO: 262460 - DNA, 21 bp, Artificial sequence
  SiRNA target sequence
ttagcgaatgagttttatgat

SEQ ID NO: 262461 - DNA, 21 bp, Artificial sequence
  SiRNA target sequence
tagcgaatgagttttatgatg

SEQ ID NO: 262462 - DNA, 21 bp, Artificial sequence
  SiRNA target sequence
agcgaatgagttttatgatga

SEQ ID NO: 262463 - DNA, 21 bp, Artificial sequence
  SiRNA target sequence
gcgaatgagttttatgatgat

SEQ ID NO: 262464 - DNA, 21 bp, Artificial sequence
  SiRNA target sequence
cgaatgagttttatgatgatg

SEQ ID NO: 262465 - DNA, 21 bp, Artificial sequence
  SiRNA target sequence
gaatgagttttatgatgatgg

SEQ ID NO: 262466 - DNA, 21 bp, Artificial sequence
  SiRNA target sequence
aatgagttttatgatgatgga

SEQ ID NO: 262467 - DNA, 21 bp, Artificial sequence
  SiRNA target sequence
atgagttttatgatgatggaa

SEQ ID NO: 262468 - DNA, 21 bp, Artificial sequence
  SiRNA target sequence
tgagttttatgatgatggaaa

SEQ ID NO: 262469 - DNA, 21 bp, Artificial sequence
  SiRNA target sequence
gagttttatgatgatggaaaa

SEQ ID NO: 262470 - DNA, 21 bp, Artificial sequence
  SiRNA target sequence
agttttatgatgatggaaaag

SEQ ID NO: 262471 - DNA, 21 bp, Artificial sequence
  SiRNA target sequence
gttttatgatgatggaaaaga

SEQ ID NO: 262472 - DNA, 21 bp, Artificial sequence
  SiRNA target sequence
ttttatgatgatggaaaagaa

SEQ ID NO: 262473 - DNA, 21 bp, Artificial sequence
  SiRNA target sequence
tttatgatgatggaaaagaaa

SEQ ID NO: 262474 - DNA, 21 bp, Artificial sequence
  SiRNA target sequence
ttatgatgatggaaaagaaaa

SEQ ID NO: 262475 - DNA, 21 bp, Artificial sequence
  SiRNA target sequence
tatgatgatggaaaagaaaat

SEQ ID NO: 262476 - DNA, 21 bp, Artificial sequence
  SiRNA target sequence
atgatgatggaaaagaaaata

SEQ ID NO: 262477 - DNA, 21 bp, Artificial sequence
  SiRNA target sequence
tgatgatggaaaagaaaataa

SEQ ID NO: 262478 - DNA, 21 bp, Artificial sequence
  SiRNA target sequence
gatgatggaaaagaaaataat

SEQ ID NO: 262479 - DNA, 21 bp, Artificial sequence
  SiRNA target sequence
atgatggaaaagaaaataatc

SEQ ID NO: 262480 - DNA, 21 bp, Artificial sequence
  SiRNA target sequence
tgatggaaaagaaaataatct

SEQ ID NO: 262481 - DNA, 21 bp, Artificial sequence
  SiRNA target sequence
gatggaaaagaaaataatctg

SEQ ID NO: 262482 - DNA, 21 bp, Artificial sequence
  SiRNA target sequence
atggaaaagaaaataatctga

SEQ ID NO: 262483 - DNA, 21 bp, Artificial sequence
  SiRNA target sequence
tggaaaagaaaataatctgat

SEQ ID NO: 262484 - DNA, 21 bp, Artificial sequence
  SiRNA target sequence
ggaaaagaaaataatctgatc

SEQ ID NO: 262485 - DNA, 21 bp, Artificial sequence
  SiRNA target sequence
gaaaagaaaataatctgatca

SEQ ID NO: 262486 - DNA, 21 bp, Artificial sequence
  SiRNA target sequence
aaaagaaaataatctgatcag

SEQ ID NO: 262487 - DNA, 21 bp, Artificial sequence
  SiRNA target sequence
aaagaaaataatctgatcaga

SEQ ID NO: 262488 - DNA, 21 bp, Artificial sequence
  SiRNA target sequence
aagaaaataatctgatcagac

SEQ ID NO: 262489 - DNA, 21 bp, Artificial sequence
  SiRNA target sequence
agaaaataatctgatcagaca

SEQ ID NO: 262490 - DNA, 21 bp, Artificial sequence
  SiRNA target sequence
gaaaataatctgatcagacac

SEQ ID NO: 262491 - DNA, 21 bp, Artificial sequence
  SiRNA target sequence
aaaataatctgatcagacacg

SEQ ID NO: 262492 - DNA, 21 bp, Artificial sequence
  SiRNA target sequence
aaataatctgatcagacacgt

SEQ ID NO: 262493 - DNA, 21 bp, Artificial sequence
  SiRNA target sequence
aataatctgatcagacacgta

SEQ ID NO: 262494 - DNA, 21 bp, Artificial sequence
  SiRNA target sequence
ataatctgatcagacacgtat

SEQ ID NO: 262495 - DNA, 21 bp, Artificial sequence
  SiRNA target sequence
taatctgatcagacacgtatt

SEQ ID NO: 262496 - DNA, 21 bp, Artificial sequence
  SiRNA target sequence
aatctgatcagacacgtattg

SEQ ID NO: 262497 - DNA, 21 bp, Artificial sequence
  SiRNA target sequence
atctgatcagacacgtattgt

SEQ ID NO: 262498 - DNA, 21 bp, Artificial sequence
  SiRNA target sequence
tctgatcagacacgtattgtt

SEQ ID NO: 262499 - DNA, 21 bp, Artificial sequence
  SiRNA target sequence
ctgatcagacacgtattgttg

SEQ ID NO: 262500 - DNA, 21 bp, Artificial sequence
  SiRNA target sequence
tgatcagacacgtattgttga

SEQ ID NO: 262501 - DNA, 21 bp, Artificial sequence
  SiRNA target sequence
gatcagacacgtattgttgat

SEQ ID NO: 262502 - DNA, 21 bp, Artificial sequence
  SiRNA target sequence
atcagacacgtattgttgatg

SEQ ID NO: 262503 - DNA, 21 bp, Artificial sequence
  SiRNA target sequence
tcagacacgtattgttgatgg

SEQ ID NO: 262504 - DNA, 21 bp, Artificial sequence
  SiRNA target sequence
cagacacgtattgttgatgga

SEQ ID NO: 262505 - DNA, 21 bp, Artificial sequence
  SiRNA target sequence
agacacgtattgttgatggat

SEQ ID NO: 262506 - DNA, 21 bp, Artificial sequence
  SiRNA target sequence
gacacgtattgttgatggatg

SEQ ID NO: 262507 - DNA, 21 bp, Artificial sequence
  SiRNA target sequence
acacgtattgttgatggatgt

SEQ ID NO: 262508 - DNA, 21 bp, Artificial sequence
  SiRNA target sequence
cacgtattgttgatggatgtg

SEQ ID NO: 262509 - DNA, 21 bp, Artificial sequence
  SiRNA target sequence
acgtattgttgatggatgtgt

SEQ ID NO: 262510 - DNA, 21 bp, Artificial sequence
  SiRNA target sequence
cgtattgttgatggatgtgta

SEQ ID NO: 262511 - DNA, 21 bp, Artificial sequence
  SiRNA target sequence
gtattgttgatggatgtgtac

SEQ ID NO: 262512 - DNA, 21 bp, Artificial sequence
  SiRNA target sequence
tattgttgatggatgtgtaca

SEQ ID NO: 262513 - DNA, 21 bp, Artificial sequence
  SiRNA target sequence
attgttgatggatgtgtacaa

SEQ ID NO: 262514 - DNA, 21 bp, Artificial sequence
  SiRNA target sequence
ttgttgatggatgtgtacaat

SEQ ID NO: 262515 - DNA, 21 bp, Artificial sequence
  SiRNA target sequence
tgttgatggatgtgtacaatt

SEQ ID NO: 262516 - DNA, 21 bp, Artificial sequence
  SiRNA target sequence
gttgatggatgtgtacaattc

SEQ ID NO: 262517 - DNA, 21 bp, Artificial sequence
  SiRNA target sequence
ttgatggatgtgtacaattct

SEQ ID NO: 262518 - DNA, 21 bp, Artificial sequence
  SiRNA target sequence
tgatggatgtgtacaattctg

SEQ ID NO: 262519 - DNA, 21 bp, Artificial sequence
  SiRNA target sequence
gatggatgtgtacaattctgt

SEQ ID NO: 262520 - DNA, 21 bp, Artificial sequence
  SiRNA target sequence
atggatgtgtacaattctgta

SEQ ID NO: 262521 - DNA, 21 bp, Artificial sequence
  SiRNA target sequence
tggatgtgtacaattctgtac

SEQ ID NO: 262522 - DNA, 21 bp, Artificial sequence
  SiRNA target sequence
ggatgtgtacaattctgtaca

SEQ ID NO: 262523 - DNA, 21 bp, Artificial sequence
  SiRNA target sequence
gatgtgtacaattctgtacac

SEQ ID NO: 262524 - DNA, 21 bp, Artificial sequence
  SiRNA target sequence
atgtgtacaattctgtacaca

SEQ ID NO: 262525 - DNA, 21 bp, Artificial sequence
  SiRNA target sequence
tgtgtacaattctgtacacat

SEQ ID NO: 262526 - DNA, 21 bp, Artificial sequence
  SiRNA target sequence
gtgtacaattctgtacacatt

SEQ ID NO: 262527 - DNA, 21 bp, Artificial sequence
  SiRNA target sequence
tgtacaattctgtacacattt

SEQ ID NO: 262528 - DNA, 21 bp, Artificial sequence
  SiRNA target sequence
gtacaattctgtacacatttg

SEQ ID NO: 262529 - DNA, 21 bp, Artificial sequence
  SiRNA target sequence
tacaattctgtacacatttgc

SEQ ID NO: 262530 - DNA, 21 bp, Artificial sequence
  SiRNA target sequence
acaattctgtacacatttgca

SEQ ID NO: 262531 - DNA, 21 bp, Artificial sequence
  SiRNA target sequence
caattctgtacacatttgcaa

SEQ ID NO: 262532 - DNA, 21 bp, Artificial sequence
  SiRNA target sequence
aattctgtacacatttgcaat

SEQ ID NO: 262533 - DNA, 21 bp, Artificial sequence
  SiRNA target sequence
attctgtacacatttgcaatg

SEQ ID NO: 262534 - DNA, 21 bp, Artificial sequence
  SiRNA target sequence
ttctgtacacatttgcaatga

SEQ ID NO: 262535 - DNA, 21 bp, Artificial sequence
  SiRNA target sequence
tctgtacacatttgcaatgac

SEQ ID NO: 262536 - DNA, 21 bp, Artificial sequence
  SiRNA target sequence
ctgtacacatttgcaatgact

SEQ ID NO: 262537 - DNA, 21 bp, Artificial sequence
  SiRNA target sequence
tgtacacatttgcaatgactc

SEQ ID NO: 262538 - DNA, 21 bp, Artificial sequence
  SiRNA target sequence
gtacacatttgcaatgactcc

SEQ ID NO: 262539 - DNA, 21 bp, Artificial sequence
  SiRNA target sequence
tacacatttgcaatgactccg

SEQ ID NO: 262540 - DNA, 21 bp, Artificial sequence
  SiRNA target sequence
acacatttgcaatgactccgt

SEQ ID NO: 262541 - DNA, 21 bp, Artificial sequence
  SiRNA target sequence
cacatttgcaatgactccgtg

SEQ ID NO: 262542 - DNA, 21 bp, Artificial sequence
  SiRNA target sequence
acatttgcaatgactccgtgt

SEQ ID NO: 262543 - DNA, 21 bp, Artificial sequence
  SiRNA target sequence
catttgcaatgactccgtgta

SEQ ID NO: 262544 - DNA, 21 bp, Artificial sequence
  SiRNA target sequence
atttgcaatgactccgtgtat

SEQ ID NO: 262545 - DNA, 21 bp, Artificial sequence
  SiRNA target sequence
tttgcaatgactccgtgtata

SEQ ID NO: 262546 - DNA, 21 bp, Artificial sequence
  SiRNA target sequence
ttgcaatgactccgtgtatat

SEQ ID NO: 262547 - DNA, 21 bp, Artificial sequence
  SiRNA target sequence
tgcaatgactccgtgtatatg

SEQ ID NO: 262548 - DNA, 21 bp, Artificial sequence
  SiRNA target sequence
gcaatgactccgtgtatatga

SEQ ID NO: 262549 - DNA, 21 bp, Artificial sequence
  SiRNA target sequence
caatgactccgtgtatatgat

SEQ ID NO: 262550 - DNA, 21 bp, Artificial sequence
  SiRNA target sequence
aatgactccgtgtatatgatg

SEQ ID NO: 262551 - DNA, 21 bp, Artificial sequence
  SiRNA target sequence
atgactccgtgtatatgatga

SEQ ID NO: 262552 - DNA, 21 bp, Artificial sequence
  SiRNA target sequence
tgactccgtgtatatgatgac

SEQ ID NO: 262553 - DNA, 21 bp, Artificial sequence
  SiRNA target sequence
gactccgtgtatatgatgaca

SEQ ID NO: 262554 - DNA, 21 bp, Artificial sequence
  SiRNA target sequence
actccgtgtatatgatgacac

SEQ ID NO: 262555 - DNA, 21 bp, Artificial sequence
  SiRNA target sequence
ctccgtgtatatgatgacaca

SEQ ID NO: 262556 - DNA, 21 bp, Artificial sequence
  SiRNA target sequence
tccgtgtatatgatgacacac

SEQ ID NO: 262557 - DNA, 21 bp, Artificial sequence
  SiRNA target sequence
ccgtgtatatgatgacacaca

SEQ ID NO: 262558 - DNA, 21 bp, Artificial sequence
  SiRNA target sequence
cgtgtatatgatgacacacag

SEQ ID NO: 262559 - DNA, 21 bp, Artificial sequence
  SiRNA target sequence
gtgtatatgatgacacacagc

SEQ ID NO: 262560 - DNA, 21 bp, Artificial sequence
  SiRNA target sequence
tgtatatgatgacacacagcc

SEQ ID NO: 262561 - DNA, 21 bp, Artificial sequence
  SiRNA target sequence
gtatatgatgacacacagcca

SEQ ID NO: 262562 - DNA, 21 bp, Artificial sequence
  SiRNA target sequence
tatatgatgacacacagccaa

SEQ ID NO: 262563 - DNA, 21 bp, Artificial sequence
  SiRNA target sequence
atatgatgacacacagccaac

SEQ ID NO: 262564 - DNA, 21 bp, Artificial sequence
  SiRNA target sequence
tatgatgacacacagccaacc

SEQ ID NO: 262565 - DNA, 21 bp, Artificial sequence
  SiRNA target sequence
atgatgacacacagccaaccc

SEQ ID NO: 262566 - DNA, 21 bp, Artificial sequence
  SiRNA target sequence
tgatgacacacagccaaccct

SEQ ID NO: 262567 - DNA, 21 bp, Artificial sequence
  SiRNA target sequence
gatgacacacagccaaccctc

SEQ ID NO: 262568 - DNA, 21 bp, Artificial sequence
  SiRNA target sequence
atgacacacagccaaccctct

SEQ ID NO: 262569 - DNA, 21 bp, Artificial sequence
  SiRNA target sequence
tgacacacagccaaccctctg

SEQ ID NO: 262570 - DNA, 21 bp, Artificial sequence
  SiRNA target sequence
gacacacagccaaccctctgg

SEQ ID NO: 262571 - DNA, 21 bp, Artificial sequence
  SiRNA target sequence
acacacagccaaccctctgga

SEQ ID NO: 262572 - DNA, 21 bp, Artificial sequence
  SiRNA target sequence
cacacagccaaccctctggaa

SEQ ID NO: 262573 - DNA, 21 bp, Artificial sequence
  SiRNA target sequence
acacagccaaccctctggaaa

SEQ ID NO: 262574 - DNA, 21 bp, Artificial sequence
  SiRNA target sequence
cacagccaaccctctggaaat

SEQ ID NO: 262575 - DNA, 21 bp, Artificial sequence
  SiRNA target sequence
acagccaaccctctggaaatc

SEQ ID NO: 262576 - DNA, 21 bp, Artificial sequence
  SiRNA target sequence
cagccaaccctctggaaatcc

SEQ ID NO: 262577 - DNA, 21 bp, Artificial sequence
  SiRNA target sequence
agccaaccctctggaaatccc

SEQ ID NO: 262578 - DNA, 21 bp, Artificial sequence
  SiRNA target sequence
gccaaccctctggaaatcccg

SEQ ID NO: 262579 - DNA, 21 bp, Artificial sequence
  SiRNA target sequence
ccaaccctctggaaatcccgc

SEQ ID NO: 262580 - DNA, 21 bp, Artificial sequence
  SiRNA target sequence
caaccctctggaaatcccgca

SEQ ID NO: 262581 - DNA, 21 bp, Artificial sequence
  SiRNA target sequence
aaccctctggaaatcccgcaa

SEQ ID NO: 262582 - DNA, 21 bp, Artificial sequence
  SiRNA target sequence
accctctggaaatcccgcaac

SEQ ID NO: 262583 - DNA, 21 bp, Artificial sequence
  SiRNA target sequence
ccctctggaaatcccgcaacg

SEQ ID NO: 262584 - DNA, 21 bp, Artificial sequence
  SiRNA target sequence
cctctggaaatcccgcaacga

SEQ ID NO: 262585 - DNA, 21 bp, Artificial sequence
  SiRNA target sequence
ctctggaaatcccgcaacgac

SEQ ID NO: 262586 - DNA, 21 bp, Artificial sequence
  SiRNA target sequence
tctggaaatcccgcaacgact

SEQ ID NO: 262587 - DNA, 21 bp, Artificial sequence
  SiRNA target sequence
ctggaaatcccgcaacgactc

SEQ ID NO: 262588 - DNA, 21 bp, Artificial sequence
  SiRNA target sequence
tggaaatcccgcaacgactcc

SEQ ID NO: 262589 - DNA, 21 bp, Artificial sequence
  SiRNA target sequence
ggaaatcccgcaacgactccg

SEQ ID NO: 262590 - DNA, 21 bp, Artificial sequence
  SiRNA target sequence
gaaatcccgcaacgactccgc

SEQ ID NO: 262591 - DNA, 21 bp, Artificial sequence
  SiRNA target sequence
aaatcccgcaacgactccgct

SEQ ID NO: 262592 - DNA, 21 bp, Artificial sequence
  SiRNA target sequence
aatcccgcaacgactccgctc

SEQ ID NO: 262593 - DNA, 21 bp, Artificial sequence
  SiRNA target sequence
atcccgcaacgactccgctca

SEQ ID NO: 262594 - DNA, 21 bp, Artificial sequence
  SiRNA target sequence
tcccgcaacgactccgctcaa

SEQ ID NO: 262595 - DNA, 21 bp, Artificial sequence
  SiRNA target sequence
cccgcaacgactccgctcaat

SEQ ID NO: 262596 - DNA, 21 bp, Artificial sequence
  SiRNA target sequence
ccgcaacgactccgctcaatt

SEQ ID NO: 262597 - DNA, 21 bp, Artificial sequence
  SiRNA target sequence
cgcaacgactccgctcaattg

SEQ ID NO: 262598 - DNA, 21 bp, Artificial sequence
  SiRNA target sequence
gcaacgactccgctcaattgc

SEQ ID NO: 262599 - DNA, 21 bp, Artificial sequence
  SiRNA target sequence
caacgactccgctcaattgct

SEQ ID NO: 262600 - DNA, 21 bp, Artificial sequence
  SiRNA target sequence
aacgactccgctcaattgctt

SEQ ID NO: 262601 - DNA, 21 bp, Artificial sequence
  SiRNA target sequence
acgactccgctcaattgcttc

SEQ ID NO: 262602 - DNA, 21 bp, Artificial sequence
  SiRNA target sequence
cgactccgctcaattgcttca

SEQ ID NO: 262603 - DNA, 21 bp, Artificial sequence
  SiRNA target sequence
gactccgctcaattgcttcat

SEQ ID NO: 262604 - DNA, 21 bp, Artificial sequence
  SiRNA target sequence
actccgctcaattgcttcatt

SEQ ID NO: 262605 - DNA, 21 bp, Artificial sequence
  SiRNA target sequence
ctccgctcaattgcttcatta

SEQ ID NO: 262606 - DNA, 21 bp, Artificial sequence
  SiRNA target sequence
tccgctcaattgcttcattaa

SEQ ID NO: 262607 - DNA, 21 bp, Artificial sequence
  SiRNA target sequence
ccgctcaattgcttcattaat

SEQ ID NO: 262608 - DNA, 21 bp, Artificial sequence
  SiRNA target sequence
cgctcaattgcttcattaata

SEQ ID NO: 262609 - DNA, 21 bp, Artificial sequence
  SiRNA target sequence
gctcaattgcttcattaatag

SEQ ID NO: 262610 - DNA, 21 bp, Artificial sequence
  SiRNA target sequence
ctcaattgcttcattaatagt

SEQ ID NO: 262611 - DNA, 21 bp, Artificial sequence
  SiRNA target sequence
tcaattgcttcattaatagta

SEQ ID NO: 262612 - DNA, 21 bp, Artificial sequence
  SiRNA target sequence
caattgcttcattaatagtat

SEQ ID NO: 262613 - DNA, 21 bp, Artificial sequence
  SiRNA target sequence
aattgcttcattaatagtatg

SEQ ID NO: 262614 - DNA, 21 bp, Artificial sequence
  SiRNA target sequence
attgcttcattaatagtatgg

SEQ ID NO: 262615 - DNA, 21 bp, Artificial sequence
  SiRNA target sequence
ttgcttcattaatagtatggg

SEQ ID NO: 262616 - DNA, 21 bp, Artificial sequence
  SiRNA target sequence
tgcttcattaatagtatggga

SEQ ID NO: 262617 - DNA, 21 bp, Artificial sequence
  SiRNA target sequence
gcttcattaatagtatgggat

SEQ ID NO: 262618 - DNA, 21 bp, Artificial sequence
  SiRNA target sequence
cttcattaatagtatgggatt

SEQ ID NO: 262619 - DNA, 21 bp, Artificial sequence
  SiRNA target sequence
ttcattaatagtatgggatta

SEQ ID NO: 262620 - DNA, 21 bp, Artificial sequence
  SiRNA target sequence
tcattaatagtatgggattac

SEQ ID NO: 262621 - DNA, 21 bp, Artificial sequence
  SiRNA target sequence
cattaatagtatgggattacg

SEQ ID NO: 262622 - DNA, 21 bp, Artificial sequence
  SiRNA target sequence
attaatagtatgggattacga

SEQ ID NO: 262623 - DNA, 21 bp, Artificial sequence
  SiRNA target sequence
ttaatagtatgggattacgaa

SEQ ID NO: 262624 - DNA, 21 bp, Artificial sequence
  SiRNA target sequence
taatagtatgggattacgaat

SEQ ID NO: 262625 - DNA, 21 bp, Artificial sequence
  SiRNA target sequence
aatagtatgggattacgaatg

SEQ ID NO: 262626 - DNA, 21 bp, Artificial sequence
  SiRNA target sequence
atagtatgggattacgaatgt

SEQ ID NO: 262627 - DNA, 21 bp, Artificial sequence
  SiRNA target sequence
tagtatgggattacgaatgtg

SEQ ID NO: 262628 - DNA, 21 bp, Artificial sequence
  SiRNA target sequence
agtatgggattacgaatgtgt

SEQ ID NO: 262629 - DNA, 21 bp, Artificial sequence
  SiRNA target sequence
gtatgggattacgaatgtgtt

SEQ ID NO: 262630 - DNA, 21 bp, Artificial sequence
  SiRNA target sequence
tatgggattacgaatgtgttt

SEQ ID NO: 262631 - DNA, 21 bp, Artificial sequence
  SiRNA target sequence
atgggattacgaatgtgtttc

SEQ ID NO: 262632 - DNA, 21 bp, Artificial sequence
  SiRNA target sequence
tgggattacgaatgtgtttcg

SEQ ID NO: 262633 - DNA, 21 bp, Artificial sequence
  SiRNA target sequence
gggattacgaatgtgtttcgc

SEQ ID NO: 262634 - DNA, 21 bp, Artificial sequence
  SiRNA target sequence
ggattacgaatgtgtttcgca

SEQ ID NO: 262635 - DNA, 21 bp, Artificial sequence
  SiRNA target sequence
gattacgaatgtgtttcgcaa

SEQ ID NO: 262636 - DNA, 21 bp, Artificial sequence
  SiRNA target sequence
attacgaatgtgtttcgcaat

SEQ ID NO: 262637 - DNA, 21 bp, Artificial sequence
  SiRNA target sequence
ttacgaatgtgtttcgcaatt

SEQ ID NO: 262638 - DNA, 21 bp, Artificial sequence
  SiRNA target sequence
tacgaatgtgtttcgcaattt

SEQ ID NO: 262639 - DNA, 21 bp, Artificial sequence
  SiRNA target sequence
acgaatgtgtttcgcaatttg

SEQ ID NO: 262640 - DNA, 21 bp, Artificial sequence
  SiRNA target sequence
cgaatgtgtttcgcaatttgt

SEQ ID NO: 262641 - DNA, 21 bp, Artificial sequence
  SiRNA target sequence
gaatgtgtttcgcaatttgtg

SEQ ID NO: 262642 - DNA, 21 bp, Artificial sequence
  SiRNA target sequence
aatgtgtttcgcaatttgtgt

SEQ ID NO: 262643 - DNA, 21 bp, Artificial sequence
  SiRNA target sequence
atgtgtttcgcaatttgtgtt

SEQ ID NO: 262644 - DNA, 21 bp, Artificial sequence
  SiRNA target sequence
tgtgtttcgcaatttgtgtta

SEQ ID NO: 262645 - DNA, 21 bp, Artificial sequence
  SiRNA target sequence
gtgtttcgcaatttgtgttaa

SEQ ID NO: 262646 - DNA, 21 bp, Artificial sequence
  SiRNA target sequence
tgtttcgcaatttgtgttaag

SEQ ID NO: 262647 - DNA, 21 bp, Artificial sequence
  SiRNA target sequence
gtttcgcaatttgtgttaaga

SEQ ID NO: 262648 - DNA, 21 bp, Artificial sequence
  SiRNA target sequence
tttcgcaatttgtgttaagaa

SEQ ID NO: 262649 - DNA, 21 bp, Artificial sequence
  SiRNA target sequence
ttcgcaatttgtgttaagaat

SEQ ID NO: 262650 - DNA, 21 bp, Artificial sequence
  SiRNA target sequence
tcgcaatttgtgttaagaatg

SEQ ID NO: 262651 - DNA, 21 bp, Artificial sequence
  SiRNA target sequence
cgcaatttgtgttaagaatgc

SEQ ID NO: 262652 - DNA, 21 bp, Artificial sequence
  SiRNA target sequence
gcaatttgtgttaagaatgca

SEQ ID NO: 262653 - DNA, 21 bp, Artificial sequence
  SiRNA target sequence
caatttgtgttaagaatgcag

SEQ ID NO: 262654 - DNA, 21 bp, Artificial sequence
  SiRNA target sequence
aatttgtgttaagaatgcagg

SEQ ID NO: 262655 - DNA, 21 bp, Artificial sequence
  SiRNA target sequence
atttgtgttaagaatgcaggc

SEQ ID NO: 262656 - DNA, 21 bp, Artificial sequence
  SiRNA target sequence
tttgtgttaagaatgcaggca

SEQ ID NO: 262657 - DNA, 21 bp, Artificial sequence
  SiRNA target sequence
ttgtgttaagaatgcaggcat

SEQ ID NO: 262658 - DNA, 21 bp, Artificial sequence
  SiRNA target sequence
tgtgttaagaatgcaggcata

SEQ ID NO: 262659 - DNA, 21 bp, Artificial sequence
  SiRNA target sequence
gtgttaagaatgcaggcataa

SEQ ID NO: 262660 - DNA, 21 bp, Artificial sequence
  SiRNA target sequence
tgttaagaatgcaggcataaa

SEQ ID NO: 262661 - DNA, 21 bp, Artificial sequence
  SiRNA target sequence
gttaagaatgcaggcataaag

SEQ ID NO: 262662 - DNA, 21 bp, Artificial sequence
  SiRNA target sequence
ttaagaatgcaggcataaaga

SEQ ID NO: 262663 - DNA, 21 bp, Artificial sequence
  SiRNA target sequence
taagaatgcaggcataaagat

SEQ ID NO: 262664 - DNA, 21 bp, Artificial sequence
  SiRNA target sequence
aagaatgcaggcataaagatg

SEQ ID NO: 262665 - DNA, 21 bp, Artificial sequence
  SiRNA target sequence
agaatgcaggcataaagatga

SEQ ID NO: 262666 - DNA, 21 bp, Artificial sequence
  SiRNA target sequence
gaatgcaggcataaagatgac

SEQ ID NO: 262667 - DNA, 21 bp, Artificial sequence
  SiRNA target sequence
aatgcaggcataaagatgaca

SEQ ID NO: 262668 - DNA, 21 bp, Artificial sequence
  SiRNA target sequence
atgcaggcataaagatgacaa

SEQ ID NO: 262669 - DNA, 21 bp, Artificial sequence
  SiRNA target sequence
tgcaggcataaagatgacaat

SEQ ID NO: 262670 - DNA, 21 bp, Artificial sequence
  SiRNA target sequence
gcaggcataaagatgacaatg

SEQ ID NO: 262671 - DNA, 21 bp, Artificial sequence
  SiRNA target sequence
caggcataaagatgacaatga

SEQ ID NO: 262672 - DNA, 21 bp, Artificial sequence
  SiRNA target sequence
aggcataaagatgacaatgag

SEQ ID NO: 262673 - DNA, 21 bp, Artificial sequence
  SiRNA target sequence
ggcataaagatgacaatgaga

SEQ ID NO: 262674 - DNA, 21 bp, Artificial sequence
  SiRNA target sequence
gcataaagatgacaatgagag

SEQ ID NO: 262675 - DNA, 21 bp, Artificial sequence
  SiRNA target sequence
cataaagatgacaatgagaga

SEQ ID NO: 262676 - DNA, 21 bp, Artificial sequence
  SiRNA target sequence
ataaagatgacaatgagagat

SEQ ID NO: 262677 - DNA, 21 bp, Artificial sequence
  SiRNA target sequence
taaagatgacaatgagagatt

SEQ ID NO: 262678 - DNA, 21 bp, Artificial sequence
  SiRNA target sequence
aaagatgacaatgagagattt

SEQ ID NO: 262679 - DNA, 21 bp, Artificial sequence
  SiRNA target sequence
aagatgacaatgagagatttt

SEQ ID NO: 262680 - DNA, 21 bp, Artificial sequence
  SiRNA target sequence
agatgacaatgagagattttg

SEQ ID NO: 262681 - DNA, 21 bp, Artificial sequence
  SiRNA target sequence
gatgacaatgagagattttgg

SEQ ID NO: 262682 - DNA, 21 bp, Artificial sequence
  SiRNA target sequence
atgacaatgagagattttggt

SEQ ID NO: 262683 - DNA, 21 bp, Artificial sequence
  SiRNA target sequence
tgacaatgagagattttggta

SEQ ID NO: 262684 - DNA, 21 bp, Artificial sequence
  SiRNA target sequence
gacaatgagagattttggtaa

SEQ ID NO: 262685 - DNA, 21 bp, Artificial sequence
  SiRNA target sequence
acaatgagagattttggtaag

SEQ ID NO: 262686 - DNA, 21 bp, Artificial sequence
  SiRNA target sequence
caatgagagattttggtaagc

SEQ ID NO: 262687 - DNA, 21 bp, Artificial sequence
  SiRNA target sequence
aatgagagattttggtaagca

SEQ ID NO: 262688 - DNA, 21 bp, Artificial sequence
  SiRNA target sequence
atgagagattttggtaagcat

SEQ ID NO: 262689 - DNA, 21 bp, Artificial sequence
  SiRNA target sequence
tgagagattttggtaagcatg

SEQ ID NO: 262690 - DNA, 21 bp, Artificial sequence
  SiRNA target sequence
gagagattttggtaagcatgt

SEQ ID NO: 262691 - DNA, 21 bp, Artificial sequence
  SiRNA target sequence
agagattttggtaagcatgtt

SEQ ID NO: 262692 - DNA, 21 bp, Artificial sequence
  SiRNA target sequence
gagattttggtaagcatgttt

SEQ ID NO: 262693 - DNA, 21 bp, Artificial sequence
  SiRNA target sequence
agattttggtaagcatgtttc

SEQ ID NO: 262694 - DNA, 21 bp, Artificial sequence
  SiRNA target sequence
gattttggtaagcatgtttcc

SEQ ID NO: 262695 - DNA, 21 bp, Artificial sequence
  SiRNA target sequence
attttggtaagcatgtttcca

SEQ ID NO: 262696 - DNA, 21 bp, Artificial sequence
  SiRNA target sequence
ttttggtaagcatgtttccat

SEQ ID NO: 262697 - DNA, 21 bp, Artificial sequence
  SiRNA target sequence
tttggtaagcatgtttccatg

SEQ ID NO: 262698 - DNA, 21 bp, Artificial sequence
  SiRNA target sequence
ttggtaagcatgtttccatgg

SEQ ID NO: 262699 - DNA, 21 bp, Artificial sequence
  SiRNA target sequence
tggtaagcatgtttccatggt

SEQ ID NO: 262700 - DNA, 21 bp, Artificial sequence
  SiRNA target sequence
ggtaagcatgtttccatggtc

SEQ ID NO: 262701 - DNA, 21 bp, Artificial sequence
  SiRNA target sequence
gtaagcatgtttccatggtct

SEQ ID NO: 262702 - DNA, 21 bp, Artificial sequence
  SiRNA target sequence
taagcatgtttccatggtctc

SEQ ID NO: 262703 - DNA, 21 bp, Artificial sequence
  SiRNA target sequence
aagcatgtttccatggtctct

SEQ ID NO: 262704 - DNA, 21 bp, Artificial sequence
  SiRNA target sequence
agcatgtttccatggtctctt

SEQ ID NO: 262705 - DNA, 21 bp, Artificial sequence
  SiRNA target sequence
gcatgtttccatggtctctta

SEQ ID NO: 262706 - DNA, 21 bp, Artificial sequence
  SiRNA target sequence
catgtttccatggtctcttat

SEQ ID NO: 262707 - DNA, 21 bp, Artificial sequence
  SiRNA target sequence
atgtttccatggtctcttatg

SEQ ID NO: 262708 - DNA, 21 bp, Artificial sequence
  SiRNA target sequence
tgtttccatggtctcttatgg

SEQ ID NO: 262709 - DNA, 21 bp, Artificial sequence
  SiRNA target sequence
gtttccatggtctcttatgga

SEQ ID NO: 262710 - DNA, 21 bp, Artificial sequence
  SiRNA target sequence
tttccatggtctcttatggag

SEQ ID NO: 262711 - DNA, 21 bp, Artificial sequence
  SiRNA target sequence
ttccatggtctcttatggaga

SEQ ID NO: 262712 - DNA, 21 bp, Artificial sequence
  SiRNA target sequence
tccatggtctcttatggagat

SEQ ID NO: 262713 - DNA, 21 bp, Artificial sequence
  SiRNA target sequence
ccatggtctcttatggagatg

SEQ ID NO: 262714 - DNA, 21 bp, Artificial sequence
  SiRNA target sequence
catggtctcttatggagatga

SEQ ID NO: 262715 - DNA, 21 bp, Artificial sequence
  SiRNA target sequence
atggtctcttatggagatgac

SEQ ID NO: 262716 - DNA, 21 bp, Artificial sequence
  SiRNA target sequence
tggtctcttatggagatgaca

SEQ ID NO: 262717 - DNA, 21 bp, Artificial sequence
  SiRNA target sequence
ggtctcttatggagatgacaa

SEQ ID NO: 262718 - DNA, 21 bp, Artificial sequence
  SiRNA target sequence
gtctcttatggagatgacaat

SEQ ID NO: 262719 - DNA, 21 bp, Artificial sequence
  SiRNA target sequence
tctcttatggagatgacaatg

SEQ ID NO: 262720 - DNA, 21 bp, Artificial sequence
  SiRNA target sequence
ctcttatggagatgacaatgt

SEQ ID NO: 262721 - DNA, 21 bp, Artificial sequence
  SiRNA target sequence
tcttatggagatgacaatgtc

SEQ ID NO: 262722 - DNA, 21 bp, Artificial sequence
  SiRNA target sequence
cttatggagatgacaatgtca

SEQ ID NO: 262723 - DNA, 21 bp, Artificial sequence
  SiRNA target sequence
ttatggagatgacaatgtcat

SEQ ID NO: 262724 - DNA, 21 bp, Artificial sequence
  SiRNA target sequence
tatggagatgacaatgtcata

SEQ ID NO: 262725 - DNA, 21 bp, Artificial sequence
  SiRNA target sequence
atggagatgacaatgtcataa

SEQ ID NO: 262726 - DNA, 21 bp, Artificial sequence
  SiRNA target sequence
tggagatgacaatgtcataaa

SEQ ID NO: 262727 - DNA, 21 bp, Artificial sequence
  SiRNA target sequence
ggagatgacaatgtcataaac

SEQ ID NO: 262728 - DNA, 21 bp, Artificial sequence
  SiRNA target sequence
gagatgacaatgtcataaact

SEQ ID NO: 262729 - DNA, 21 bp, Artificial sequence
  SiRNA target sequence
agatgacaatgtcataaactt

SEQ ID NO: 262730 - DNA, 21 bp, Artificial sequence
  SiRNA target sequence
gatgacaatgtcataaacttc

SEQ ID NO: 262731 - DNA, 21 bp, Artificial sequence
  SiRNA target sequence
atgacaatgtcataaacttca

SEQ ID NO: 262732 - DNA, 21 bp, Artificial sequence
  SiRNA target sequence
tgacaatgtcataaacttcag

SEQ ID NO: 262733 - DNA, 21 bp, Artificial sequence
  SiRNA target sequence
gacaatgtcataaacttcagt

SEQ ID NO: 262734 - DNA, 21 bp, Artificial sequence
  SiRNA target sequence
acaatgtcataaacttcagtg

SEQ ID NO: 262735 - DNA, 21 bp, Artificial sequence
  SiRNA target sequence
caatgtcataaacttcagtga

SEQ ID NO: 262736 - DNA, 21 bp, Artificial sequence
  SiRNA target sequence
aatgtcataaacttcagtgat

SEQ ID NO: 262737 - DNA, 21 bp, Artificial sequence
  SiRNA target sequence
atgtcataaacttcagtgatg

SEQ ID NO: 262738 - DNA, 21 bp, Artificial sequence
  SiRNA target sequence
tgtcataaacttcagtgatga

SEQ ID NO: 262739 - DNA, 21 bp, Artificial sequence
  SiRNA target sequence
gtcataaacttcagtgatgaa

SEQ ID NO: 262740 - DNA, 21 bp, Artificial sequence
  SiRNA target sequence
tcataaacttcagtgatgaag

SEQ ID NO: 262741 - DNA, 21 bp, Artificial sequence
  SiRNA target sequence
cataaacttcagtgatgaagt

SEQ ID NO: 262742 - DNA, 21 bp, Artificial sequence
  SiRNA target sequence
ataaacttcagtgatgaagta

SEQ ID NO: 262743 - DNA, 21 bp, Artificial sequence
  SiRNA target sequence
taaacttcagtgatgaagtat

SEQ ID NO: 262744 - DNA, 21 bp, Artificial sequence
  SiRNA target sequence
aaacttcagtgatgaagtatg

SEQ ID NO: 262745 - DNA, 21 bp, Artificial sequence
  SiRNA target sequence
aacttcagtgatgaagtatgt

SEQ ID NO: 262746 - DNA, 21 bp, Artificial sequence
  SiRNA target sequence
acttcagtgatgaagtatgtg

SEQ ID NO: 262747 - DNA, 21 bp, Artificial sequence
  SiRNA target sequence
cttcagtgatgaagtatgtga

SEQ ID NO: 262748 - DNA, 21 bp, Artificial sequence
  SiRNA target sequence
ttcagtgatgaagtatgtgaa

SEQ ID NO: 262749 - DNA, 21 bp, Artificial sequence
  SiRNA target sequence
tcagtgatgaagtatgtgaat

SEQ ID NO: 262750 - DNA, 21 bp, Artificial sequence
  SiRNA target sequence
cagtgatgaagtatgtgaatg

SEQ ID NO: 262751 - DNA, 21 bp, Artificial sequence
  SiRNA target sequence
agtgatgaagtatgtgaatgg

SEQ ID NO: 262752 - DNA, 21 bp, Artificial sequence
  SiRNA target sequence
gtgatgaagtatgtgaatggt

SEQ ID NO: 262753 - DNA, 21 bp, Artificial sequence
  SiRNA target sequence
tgatgaagtatgtgaatggta

SEQ ID NO: 262754 - DNA, 21 bp, Artificial sequence
  SiRNA target sequence
gatgaagtatgtgaatggtat

SEQ ID NO: 262755 - DNA, 21 bp, Artificial sequence
  SiRNA target sequence
atgaagtatgtgaatggtata

SEQ ID NO: 262756 - DNA, 21 bp, Artificial sequence
  SiRNA target sequence
tgaagtatgtgaatggtataa

SEQ ID NO: 262757 - DNA, 21 bp, Artificial sequence
  SiRNA target sequence
gaagtatgtgaatggtataac

SEQ ID NO: 262758 - DNA, 21 bp, Artificial sequence
  SiRNA target sequence
aagtatgtgaatggtataaca

SEQ ID NO: 262759 - DNA, 21 bp, Artificial sequence
  SiRNA target sequence
agtatgtgaatggtataacat

SEQ ID NO: 262760 - DNA, 21 bp, Artificial sequence
  SiRNA target sequence
gtatgtgaatggtataacatg

SEQ ID NO: 262761 - DNA, 21 bp, Artificial sequence
  SiRNA target sequence
tatgtgaatggtataacatgg

SEQ ID NO: 262762 - DNA, 21 bp, Artificial sequence
  SiRNA target sequence
atgtgaatggtataacatgga

SEQ ID NO: 262763 - DNA, 21 bp, Artificial sequence
  SiRNA target sequence
tgtgaatggtataacatggaa

SEQ ID NO: 262764 - DNA, 21 bp, Artificial sequence
  SiRNA target sequence
gtgaatggtataacatggaaa

SEQ ID NO: 262765 - DNA, 21 bp, Artificial sequence
  SiRNA target sequence
tgaatggtataacatggaaac

SEQ ID NO: 262766 - DNA, 21 bp, Artificial sequence
  SiRNA target sequence
gaatggtataacatggaaact

SEQ ID NO: 262767 - DNA, 21 bp, Artificial sequence
  SiRNA target sequence
aatggtataacatggaaacta

SEQ ID NO: 262768 - DNA, 21 bp, Artificial sequence
  SiRNA target sequence
atggtataacatggaaactat

SEQ ID NO: 262769 - DNA, 21 bp, Artificial sequence
  SiRNA target sequence
tggtataacatggaaactatt

SEQ ID NO: 262770 - DNA, 21 bp, Artificial sequence
  SiRNA target sequence
ggtataacatggaaactattg

SEQ ID NO: 262771 - DNA, 21 bp, Artificial sequence
  SiRNA target sequence
gtataacatggaaactattgc

SEQ ID NO: 262772 - DNA, 21 bp, Artificial sequence
  SiRNA target sequence
tataacatggaaactattgct

SEQ ID NO: 262773 - DNA, 21 bp, Artificial sequence
  SiRNA target sequence
ataacatggaaactattgcta

SEQ ID NO: 262774 - DNA, 21 bp, Artificial sequence
  SiRNA target sequence
taacatggaaactattgctaa

SEQ ID NO: 262775 - DNA, 21 bp, Artificial sequence
  SiRNA target sequence
aacatggaaactattgctaaa

SEQ ID NO: 262776 - DNA, 21 bp, Artificial sequence
  SiRNA target sequence
acatggaaactattgctaaag

SEQ ID NO: 262777 - DNA, 21 bp, Artificial sequence
  SiRNA target sequence
catggaaactattgctaaagc

SEQ ID NO: 262778 - DNA, 21 bp, Artificial sequence
  SiRNA target sequence
atggaaactattgctaaagca

SEQ ID NO: 262779 - DNA, 21 bp, Artificial sequence
  SiRNA target sequence
tggaaactattgctaaagcat

SEQ ID NO: 262780 - DNA, 21 bp, Artificial sequence
  SiRNA target sequence
ggaaactattgctaaagcatt

SEQ ID NO: 262781 - DNA, 21 bp, Artificial sequence
  SiRNA target sequence
gaaactattgctaaagcattt

SEQ ID NO: 262782 - DNA, 21 bp, Artificial sequence
  SiRNA target sequence
aaactattgctaaagcatttg

SEQ ID NO: 262783 - DNA, 21 bp, Artificial sequence
  SiRNA target sequence
aactattgctaaagcatttga

SEQ ID NO: 262784 - DNA, 21 bp, Artificial sequence
  SiRNA target sequence
actattgctaaagcatttgaa

SEQ ID NO: 262785 - DNA, 21 bp, Artificial sequence
  SiRNA target sequence
ctattgctaaagcatttgaaa

SEQ ID NO: 262786 - DNA, 21 bp, Artificial sequence
  SiRNA target sequence
tattgctaaagcatttgaaac

SEQ ID NO: 262787 - DNA, 21 bp, Artificial sequence
  SiRNA target sequence
attgctaaagcatttgaaacc

SEQ ID NO: 262788 - DNA, 21 bp, Artificial sequence
  SiRNA target sequence
ttgctaaagcatttgaaaccc

SEQ ID NO: 262789 - DNA, 21 bp, Artificial sequence
  SiRNA target sequence
tgctaaagcatttgaaaccct

SEQ ID NO: 262790 - DNA, 21 bp, Artificial sequence
  SiRNA target sequence
gctaaagcatttgaaaccctt

SEQ ID NO: 262791 - DNA, 21 bp, Artificial sequence
  SiRNA target sequence
ctaaagcatttgaaacccttg

SEQ ID NO: 262792 - DNA, 21 bp, Artificial sequence
  SiRNA target sequence
taaagcatttgaaacccttgg

SEQ ID NO: 262793 - DNA, 21 bp, Artificial sequence
  SiRNA target sequence
aaagcatttgaaacccttgga

SEQ ID NO: 262794 - DNA, 21 bp, Artificial sequence
  SiRNA target sequence
aagcatttgaaacccttggat

SEQ ID NO: 262795 - DNA, 21 bp, Artificial sequence
  SiRNA target sequence
agcatttgaaacccttggatt

SEQ ID NO: 262796 - DNA, 21 bp, Artificial sequence
  SiRNA target sequence
gcatttgaaacccttggattc

SEQ ID NO: 262797 - DNA, 21 bp, Artificial sequence
  SiRNA target sequence
catttgaaacccttggattca

SEQ ID NO: 262798 - DNA, 21 bp, Artificial sequence
  SiRNA target sequence
atttgaaacccttggattcac

SEQ ID NO: 262799 - DNA, 21 bp, Artificial sequence
  SiRNA target sequence
tttgaaacccttggattcacc

SEQ ID NO: 262800 - DNA, 21 bp, Artificial sequence
  SiRNA target sequence
ttgaaacccttggattcacct

SEQ ID NO: 262801 - DNA, 21 bp, Artificial sequence
  SiRNA target sequence
tgaaacccttggattcaccta

SEQ ID NO: 262802 - DNA, 21 bp, Artificial sequence
  SiRNA target sequence
gaaacccttggattcacctat

SEQ ID NO: 262803 - DNA, 21 bp, Artificial sequence
  SiRNA target sequence
aaacccttggattcacctata

SEQ ID NO: 262804 - DNA, 21 bp, Artificial sequence
  SiRNA target sequence
aacccttggattcacctatac

SEQ ID NO: 262805 - DNA, 21 bp, Artificial sequence
  SiRNA target sequence
acccttggattcacctatact

SEQ ID NO: 262806 - DNA, 21 bp, Artificial sequence
  SiRNA target sequence
cccttggattcacctatactg

SEQ ID NO: 262807 - DNA, 21 bp, Artificial sequence
  SiRNA target sequence
ccttggattcacctatactga

SEQ ID NO: 262808 - DNA, 21 bp, Artificial sequence
  SiRNA target sequence
cttggattcacctatactgat

SEQ ID NO: 262809 - DNA, 21 bp, Artificial sequence
  SiRNA target sequence
ttggattcacctatactgatg

SEQ ID NO: 262810 - DNA, 21 bp, Artificial sequence
  SiRNA target sequence
tggattcacctatactgatga

SEQ ID NO: 262811 - DNA, 21 bp, Artificial sequence
  SiRNA target sequence
ggattcacctatactgatgag

SEQ ID NO: 262812 - DNA, 21 bp, Artificial sequence
  SiRNA target sequence
gattcacctatactgatgagc

SEQ ID NO: 262813 - DNA, 21 bp, Artificial sequence
  SiRNA target sequence
attcacctatactgatgagct

SEQ ID NO: 262814 - DNA, 21 bp, Artificial sequence
  SiRNA target sequence
ttcacctatactgatgagctt

SEQ ID NO: 262815 - DNA, 21 bp, Artificial sequence
  SiRNA target sequence
tcacctatactgatgagctta

SEQ ID NO: 262816 - DNA, 21 bp, Artificial sequence
  SiRNA target sequence
cacctatactgatgagcttaa

SEQ ID NO: 262817 - DNA, 21 bp, Artificial sequence
  SiRNA target sequence
acctatactgatgagcttaag

SEQ ID NO: 262818 - DNA, 21 bp, Artificial sequence
  SiRNA target sequence
cctatactgatgagcttaagg

SEQ ID NO: 262819 - DNA, 21 bp, Artificial sequence
  SiRNA target sequence
ctatactgatgagcttaaggg

SEQ ID NO: 262820 - DNA, 21 bp, Artificial sequence
  SiRNA target sequence
tatactgatgagcttaagggc

SEQ ID NO: 262821 - DNA, 21 bp, Artificial sequence
  SiRNA target sequence
atactgatgagcttaagggcg

SEQ ID NO: 262822 - DNA, 21 bp, Artificial sequence
  SiRNA target sequence
tactgatgagcttaagggcgt

SEQ ID NO: 262823 - DNA, 21 bp, Artificial sequence
  SiRNA target sequence
actgatgagcttaagggcgta

SEQ ID NO: 262824 - DNA, 21 bp, Artificial sequence
  SiRNA target sequence
ctgatgagcttaagggcgtaa

SEQ ID NO: 262825 - DNA, 21 bp, Artificial sequence
  SiRNA target sequence
tgatgagcttaagggcgtaaa

SEQ ID NO: 262826 - DNA, 21 bp, Artificial sequence
  SiRNA target sequence
gatgagcttaagggcgtaaat

SEQ ID NO: 262827 - DNA, 21 bp, Artificial sequence
  SiRNA target sequence
atgagcttaagggcgtaaatg

SEQ ID NO: 262828 - DNA, 21 bp, Artificial sequence
  SiRNA target sequence
tgagcttaagggcgtaaatgg

SEQ ID NO: 262829 - DNA, 21 bp, Artificial sequence
  SiRNA target sequence
gagcttaagggcgtaaatggc

SEQ ID NO: 262830 - DNA, 21 bp, Artificial sequence
  SiRNA target sequence
agcttaagggcgtaaatggcg

SEQ ID NO: 262831 - DNA, 21 bp, Artificial sequence
  SiRNA target sequence
gcttaagggcgtaaatggcga

SEQ ID NO: 262832 - DNA, 21 bp, Artificial sequence
  SiRNA target sequence
cttaagggcgtaaatggcgaa

SEQ ID NO: 262833 - DNA, 21 bp, Artificial sequence
  SiRNA target sequence
ttaagggcgtaaatggcgaag

SEQ ID NO: 262834 - DNA, 21 bp, Artificial sequence
  SiRNA target sequence
taagggcgtaaatggcgaagt

SEQ ID NO: 262835 - DNA, 21 bp, Artificial sequence
  SiRNA target sequence
aagggcgtaaatggcgaagta

SEQ ID NO: 262836 - DNA, 21 bp, Artificial sequence
  SiRNA target sequence
agggcgtaaatggcgaagtac

SEQ ID NO: 262837 - DNA, 21 bp, Artificial sequence
  SiRNA target sequence
gggcgtaaatggcgaagtacc

SEQ ID NO: 262838 - DNA, 21 bp, Artificial sequence
  SiRNA target sequence
ggcgtaaatggcgaagtacca

SEQ ID NO: 262839 - DNA, 21 bp, Artificial sequence
  SiRNA target sequence
gcgtaaatggcgaagtaccaa

SEQ ID NO: 262840 - DNA, 21 bp, Artificial sequence
  SiRNA target sequence
cgtaaatggcgaagtaccaaa

SEQ ID NO: 262841 - DNA, 21 bp, Artificial sequence
  SiRNA target sequence
gtaaatggcgaagtaccaaaa

SEQ ID NO: 262842 - DNA, 21 bp, Artificial sequence
  SiRNA target sequence
taaatggcgaagtaccaaaat

SEQ ID NO: 262843 - DNA, 21 bp, Artificial sequence
  SiRNA target sequence
aaatggcgaagtaccaaaatg

SEQ ID NO: 262844 - DNA, 21 bp, Artificial sequence
  SiRNA target sequence
aatggcgaagtaccaaaatgg

SEQ ID NO: 262845 - DNA, 21 bp, Artificial sequence
  SiRNA target sequence
atggcgaagtaccaaaatggc

SEQ ID NO: 262846 - DNA, 21 bp, Artificial sequence
  SiRNA target sequence
tggcgaagtaccaaaatggcg

SEQ ID NO: 262847 - DNA, 21 bp, Artificial sequence
  SiRNA target sequence
ggcgaagtaccaaaatggcga

SEQ ID NO: 262848 - DNA, 21 bp, Artificial sequence
  SiRNA target sequence
gcgaagtaccaaaatggcgat

SEQ ID NO: 262849 - DNA, 21 bp, Artificial sequence
  SiRNA target sequence
cgaagtaccaaaatggcgatc

SEQ ID NO: 262850 - DNA, 21 bp, Artificial sequence
  SiRNA target sequence
gaagtaccaaaatggcgatca

SEQ ID NO: 262851 - DNA, 21 bp, Artificial sequence
  SiRNA target sequence
aagtaccaaaatggcgatcaa

SEQ ID NO: 262852 - DNA, 21 bp, Artificial sequence
  SiRNA target sequence
agtaccaaaatggcgatcaat

SEQ ID NO: 262853 - DNA, 21 bp, Artificial sequence
  SiRNA target sequence
gtaccaaaatggcgatcaatt

SEQ ID NO: 262854 - DNA, 21 bp, Artificial sequence
  SiRNA target sequence
taccaaaatggcgatcaatta

SEQ ID NO: 262855 - DNA, 21 bp, Artificial sequence
  SiRNA target sequence
accaaaatggcgatcaattaa

SEQ ID NO: 262856 - DNA, 21 bp, Artificial sequence
  SiRNA target sequence
ccaaaatggcgatcaattaag

SEQ ID NO: 262857 - DNA, 21 bp, Artificial sequence
  SiRNA target sequence
caaaatggcgatcaattaagg

SEQ ID NO: 262858 - DNA, 21 bp, Artificial sequence
  SiRNA target sequence
aaaatggcgatcaattaagga

SEQ ID NO: 262859 - DNA, 21 bp, Artificial sequence
  SiRNA target sequence
aaatggcgatcaattaaggac

SEQ ID NO: 262860 - DNA, 21 bp, Artificial sequence
  SiRNA target sequence
aatggcgatcaattaaggacg

SEQ ID NO: 262861 - DNA, 21 bp, Artificial sequence
  SiRNA target sequence
atggcgatcaattaaggacgt

SEQ ID NO: 262862 - DNA, 21 bp, Artificial sequence
  SiRNA target sequence
tggcgatcaattaaggacgtg

SEQ ID NO: 262863 - DNA, 21 bp, Artificial sequence
  SiRNA target sequence
ggcgatcaattaaggacgtgc

SEQ ID NO: 262864 - DNA, 21 bp, Artificial sequence
  SiRNA target sequence
gcgatcaattaaggacgtgca

SEQ ID NO: 262865 - DNA, 21 bp, Artificial sequence
  SiRNA target sequence
cgatcaattaaggacgtgcag

SEQ ID NO: 262866 - DNA, 21 bp, Artificial sequence
  SiRNA target sequence
gatcaattaaggacgtgcagt

SEQ ID NO: 262867 - DNA, 21 bp, Artificial sequence
  SiRNA target sequence
atcaattaaggacgtgcagta

SEQ ID NO: 262868 - DNA, 21 bp, Artificial sequence
  SiRNA target sequence
tcaattaaggacgtgcagtat

SEQ ID NO: 262869 - DNA, 21 bp, Artificial sequence
  SiRNA target sequence
caattaaggacgtgcagtatt

SEQ ID NO: 262870 - DNA, 21 bp, Artificial sequence
  SiRNA target sequence
aattaaggacgtgcagtattt

SEQ ID NO: 262871 - DNA, 21 bp, Artificial sequence
  SiRNA target sequence
attaaggacgtgcagtattta

SEQ ID NO: 262872 - DNA, 21 bp, Artificial sequence
  SiRNA target sequence
ttaaggacgtgcagtatttaa

SEQ ID NO: 262873 - DNA, 21 bp, Artificial sequence
  SiRNA target sequence
taaggacgtgcagtatttaaa

SEQ ID NO: 262874 - DNA, 21 bp, Artificial sequence
  SiRNA target sequence
aaggacgtgcagtatttaaaa

SEQ ID NO: 262875 - DNA, 21 bp, Artificial sequence
  SiRNA target sequence
aggacgtgcagtatttaaaac

SEQ ID NO: 262876 - DNA, 21 bp, Artificial sequence
  SiRNA target sequence
ggacgtgcagtatttaaaacg

SEQ ID NO: 262877 - DNA, 21 bp, Artificial sequence
  SiRNA target sequence
gacgtgcagtatttaaaacgt

SEQ ID NO: 262878 - DNA, 21 bp, Artificial sequence
  SiRNA target sequence
acgtgcagtatttaaaacgta

SEQ ID NO: 262879 - DNA, 21 bp, Artificial sequence
  SiRNA target sequence
cgtgcagtatttaaaacgtaa

SEQ ID NO: 262880 - DNA, 21 bp, Artificial sequence
  SiRNA target sequence
gtgcagtatttaaaacgtaag

SEQ ID NO: 262881 - DNA, 21 bp, Artificial sequence
  SiRNA target sequence
tgcagtatttaaaacgtaagt

SEQ ID NO: 262882 - DNA, 21 bp, Artificial sequence
  SiRNA target sequence
gcagtatttaaaacgtaagtt

SEQ ID NO: 262883 - DNA, 21 bp, Artificial sequence
  SiRNA target sequence
cagtatttaaaacgtaagttt

SEQ ID NO: 262884 - DNA, 21 bp, Artificial sequence
  SiRNA target sequence
agtatttaaaacgtaagttta

SEQ ID NO: 262885 - DNA, 21 bp, Artificial sequence
  SiRNA target sequence
gtatttaaaacgtaagtttag

SEQ ID NO: 262886 - DNA, 21 bp, Artificial sequence
  SiRNA target sequence
tatttaaaacgtaagtttaga

SEQ ID NO: 262887 - DNA, 21 bp, Artificial sequence
  SiRNA target sequence
atttaaaacgtaagtttagat

SEQ ID NO: 262888 - DNA, 21 bp, Artificial sequence
  SiRNA target sequence
tttaaaacgtaagtttagata

SEQ ID NO: 262889 - DNA, 21 bp, Artificial sequence
  SiRNA target sequence
ttaaaacgtaagtttagatac

SEQ ID NO: 262890 - DNA, 21 bp, Artificial sequence
  SiRNA target sequence
taaaacgtaagtttagatacg

SEQ ID NO: 262891 - DNA, 21 bp, Artificial sequence
  SiRNA target sequence
aaaacgtaagtttagatacga

SEQ ID NO: 262892 - DNA, 21 bp, Artificial sequence
  SiRNA target sequence
aaacgtaagtttagatacgat

SEQ ID NO: 262893 - DNA, 21 bp, Artificial sequence
  SiRNA target sequence
aacgtaagtttagatacgatg

SEQ ID NO: 262894 - DNA, 21 bp, Artificial sequence
  SiRNA target sequence
acgtaagtttagatacgatga

SEQ ID NO: 262895 - DNA, 21 bp, Artificial sequence
  SiRNA target sequence
cgtaagtttagatacgatgaa

SEQ ID NO: 262896 - DNA, 21 bp, Artificial sequence
  SiRNA target sequence
gtaagtttagatacgatgaac

SEQ ID NO: 262897 - DNA, 21 bp, Artificial sequence
  SiRNA target sequence
taagtttagatacgatgaaca

SEQ ID NO: 262898 - DNA, 21 bp, Artificial sequence
  SiRNA target sequence
aagtttagatacgatgaacaa

SEQ ID NO: 262899 - DNA, 21 bp, Artificial sequence
  SiRNA target sequence
agtttagatacgatgaacaac

SEQ ID NO: 262900 - DNA, 21 bp, Artificial sequence
  SiRNA target sequence
gtttagatacgatgaacaacg

SEQ ID NO: 262901 - DNA, 21 bp, Artificial sequence
  SiRNA target sequence
tttagatacgatgaacaacgg

SEQ ID NO: 262902 - DNA, 21 bp, Artificial sequence
  SiRNA target sequence
ttagatacgatgaacaacgga

SEQ ID NO: 262903 - DNA, 21 bp, Artificial sequence
  SiRNA target sequence
tagatacgatgaacaacggaa

SEQ ID NO: 262904 - DNA, 21 bp, Artificial sequence
  SiRNA target sequence
agatacgatgaacaacggaag

SEQ ID NO: 262905 - DNA, 21 bp, Artificial sequence
  SiRNA target sequence
gatacgatgaacaacggaagg

SEQ ID NO: 262906 - DNA, 21 bp, Artificial sequence
  SiRNA target sequence
atacgatgaacaacggaaggt

SEQ ID NO: 262907 - DNA, 21 bp, Artificial sequence
  SiRNA target sequence
tacgatgaacaacggaaggtt

SEQ ID NO: 262908 - DNA, 21 bp, Artificial sequence
  SiRNA target sequence
acgatgaacaacggaaggttt

SEQ ID NO: 262909 - DNA, 21 bp, Artificial sequence
  SiRNA target sequence
cgatgaacaacggaaggtttg

SEQ ID NO: 262910 - DNA, 21 bp, Artificial sequence
  SiRNA target sequence
gatgaacaacggaaggtttgg

SEQ ID NO: 262911 - DNA, 21 bp, Artificial sequence
  SiRNA target sequence
atgaacaacggaaggtttggg

SEQ ID NO: 262912 - DNA, 21 bp, Artificial sequence
  SiRNA target sequence
tgaacaacggaaggtttggga

SEQ ID NO: 262913 - DNA, 21 bp, Artificial sequence
  SiRNA target sequence
gaacaacggaaggtttgggaa

SEQ ID NO: 262914 - DNA, 21 bp, Artificial sequence
  SiRNA target sequence
aacaacggaaggtttgggaag

SEQ ID NO: 262915 - DNA, 21 bp, Artificial sequence
  SiRNA target sequence
acaacggaaggtttgggaagc

SEQ ID NO: 262916 - DNA, 21 bp, Artificial sequence
  SiRNA target sequence
caacggaaggtttgggaagcc

SEQ ID NO: 262917 - DNA, 21 bp, Artificial sequence
  SiRNA target sequence
aacggaaggtttgggaagccc

SEQ ID NO: 262918 - DNA, 21 bp, Artificial sequence
  SiRNA target sequence
acggaaggtttgggaagcccc

SEQ ID NO: 262919 - DNA, 21 bp, Artificial sequence
  SiRNA target sequence
cggaaggtttgggaagcccca

SEQ ID NO: 262920 - DNA, 21 bp, Artificial sequence
  SiRNA target sequence
ggaaggtttgggaagccccac

SEQ ID NO: 262921 - DNA, 21 bp, Artificial sequence
  SiRNA target sequence
gaaggtttgggaagccccact

SEQ ID NO: 262922 - DNA, 21 bp, Artificial sequence
  SiRNA target sequence
aaggtttgggaagccccactt

SEQ ID NO: 262923 - DNA, 21 bp, Artificial sequence
  SiRNA target sequence
aggtttgggaagccccacttt

SEQ ID NO: 262924 - DNA, 21 bp, Artificial sequence
  SiRNA target sequence
ggtttgggaagccccactttg

SEQ ID NO: 262925 - DNA, 21 bp, Artificial sequence
  SiRNA target sequence
gtttgggaagccccactttgt

SEQ ID NO: 262926 - DNA, 21 bp, Artificial sequence
  SiRNA target sequence
tttgggaagccccactttgta

SEQ ID NO: 262927 - DNA, 21 bp, Artificial sequence
  SiRNA target sequence
ttgggaagccccactttgtat

SEQ ID NO: 262928 - DNA, 21 bp, Artificial sequence
  SiRNA target sequence
tgggaagccccactttgtatg

SEQ ID NO: 262929 - DNA, 21 bp, Artificial sequence
  SiRNA target sequence
gggaagccccactttgtatgg

SEQ ID NO: 262930 - DNA, 21 bp, Artificial sequence
  SiRNA target sequence
ggaagccccactttgtatgga

SEQ ID NO: 262931 - DNA, 21 bp, Artificial sequence
  SiRNA target sequence
gaagccccactttgtatggac

SEQ ID NO: 262932 - DNA, 21 bp, Artificial sequence
  SiRNA target sequence
aagccccactttgtatggaca

SEQ ID NO: 262933 - DNA, 21 bp, Artificial sequence
  SiRNA target sequence
agccccactttgtatggacac

SEQ ID NO: 262934 - DNA, 21 bp, Artificial sequence
  SiRNA target sequence
gccccactttgtatggacaca

SEQ ID NO: 262935 - DNA, 21 bp, Artificial sequence
  SiRNA target sequence
ccccactttgtatggacacaa

SEQ ID NO: 262936 - DNA, 21 bp, Artificial sequence
  SiRNA target sequence
cccactttgtatggacacaat

SEQ ID NO: 262937 - DNA, 21 bp, Artificial sequence
  SiRNA target sequence
ccactttgtatggacacaatt

SEQ ID NO: 262938 - DNA, 21 bp, Artificial sequence
  SiRNA target sequence
cactttgtatggacacaattc

SEQ ID NO: 262939 - DNA, 21 bp, Artificial sequence
  SiRNA target sequence
actttgtatggacacaattct

SEQ ID NO: 262940 - DNA, 21 bp, Artificial sequence
  SiRNA target sequence
ctttgtatggacacaattctt

SEQ ID NO: 262941 - DNA, 21 bp, Artificial sequence
  SiRNA target sequence
tttgtatggacacaattcttg

SEQ ID NO: 262942 - DNA, 21 bp, Artificial sequence
  SiRNA target sequence
ttgtatggacacaattcttga

SEQ ID NO: 262943 - DNA, 21 bp, Artificial sequence
  SiRNA target sequence
tgtatggacacaattcttgaa

SEQ ID NO: 262944 - DNA, 21 bp, Artificial sequence
  SiRNA target sequence
gtatggacacaattcttgaaa

SEQ ID NO: 262945 - DNA, 21 bp, Artificial sequence
  SiRNA target sequence
tatggacacaattcttgaaat

SEQ ID NO: 262946 - DNA, 21 bp, Artificial sequence
  SiRNA target sequence
atggacacaattcttgaaatg

SEQ ID NO: 262947 - DNA, 21 bp, Artificial sequence
  SiRNA target sequence
tggacacaattcttgaaatgc

SEQ ID NO: 262948 - DNA, 21 bp, Artificial sequence
  SiRNA target sequence
ggacacaattcttgaaatgcc

SEQ ID NO: 262949 - DNA, 21 bp, Artificial sequence
  SiRNA target sequence
gacacaattcttgaaatgcca

SEQ ID NO: 262950 - DNA, 21 bp, Artificial sequence
  SiRNA target sequence
acacaattcttgaaatgccaa

SEQ ID NO: 262951 - DNA, 21 bp, Artificial sequence
  SiRNA target sequence
cacaattcttgaaatgccaaa

SEQ ID NO: 262952 - DNA, 21 bp, Artificial sequence
  SiRNA target sequence
acaattcttgaaatgccaaac

SEQ ID NO: 262953 - DNA, 21 bp, Artificial sequence
  SiRNA target sequence
caattcttgaaatgccaaact

SEQ ID NO: 262954 - DNA, 21 bp, Artificial sequence
  SiRNA target sequence
aattcttgaaatgccaaactg

SEQ ID NO: 262955 - DNA, 21 bp, Artificial sequence
  SiRNA target sequence
attcttgaaatgccaaactgg

SEQ ID NO: 262956 - DNA, 21 bp, Artificial sequence
  SiRNA target sequence
ttcttgaaatgccaaactggt

SEQ ID NO: 262957 - DNA, 21 bp, Artificial sequence
  SiRNA target sequence
tcttgaaatgccaaactggtg

SEQ ID NO: 262958 - DNA, 21 bp, Artificial sequence
  SiRNA target sequence
cttgaaatgccaaactggtgt

SEQ ID NO: 262959 - DNA, 21 bp, Artificial sequence
  SiRNA target sequence
ttgaaatgccaaactggtgtc

SEQ ID NO: 262960 - DNA, 21 bp, Artificial sequence
  SiRNA target sequence
tgaaatgccaaactggtgtcg

SEQ ID NO: 262961 - DNA, 21 bp, Artificial sequence
  SiRNA target sequence
gaaatgccaaactggtgtcga

SEQ ID NO: 262962 - DNA, 21 bp, Artificial sequence
  SiRNA target sequence
aaatgccaaactggtgtcgag

SEQ ID NO: 262963 - DNA, 21 bp, Artificial sequence
  SiRNA target sequence
aatgccaaactggtgtcgagg

SEQ ID NO: 262964 - DNA, 21 bp, Artificial sequence
  SiRNA target sequence
atgccaaactggtgtcgagga

SEQ ID NO: 262965 - DNA, 21 bp, Artificial sequence
  SiRNA target sequence
tgccaaactggtgtcgaggag

SEQ ID NO: 262966 - DNA, 21 bp, Artificial sequence
  SiRNA target sequence
gccaaactggtgtcgaggagg

SEQ ID NO: 262967 - DNA, 21 bp, Artificial sequence
  SiRNA target sequence
ccaaactggtgtcgaggagga

SEQ ID NO: 262968 - DNA, 21 bp, Artificial sequence
  SiRNA target sequence
caaactggtgtcgaggaggac

SEQ ID NO: 262969 - DNA, 21 bp, Artificial sequence
  SiRNA target sequence
aaactggtgtcgaggaggact

SEQ ID NO: 262970 - DNA, 21 bp, Artificial sequence
  SiRNA target sequence
aactggtgtcgaggaggactt

SEQ ID NO: 262971 - DNA, 21 bp, Artificial sequence
  SiRNA target sequence
actggtgtcgaggaggacttg

SEQ ID NO: 262972 - DNA, 21 bp, Artificial sequence
  SiRNA target sequence
ctggtgtcgaggaggacttga

SEQ ID NO: 262973 - DNA, 21 bp, Artificial sequence
  SiRNA target sequence
tggtgtcgaggaggacttgac

SEQ ID NO: 262974 - DNA, 21 bp, Artificial sequence
  SiRNA target sequence
ggtgtcgaggaggacttgaca

SEQ ID NO: 262975 - DNA, 21 bp, Artificial sequence
  SiRNA target sequence
gtgtcgaggaggacttgacat

SEQ ID NO: 262976 - DNA, 21 bp, Artificial sequence
  SiRNA target sequence
tgtcgaggaggacttgacatt

SEQ ID NO: 262977 - DNA, 21 bp, Artificial sequence
  SiRNA target sequence
gtcgaggaggacttgacattc

SEQ ID NO: 262978 - DNA, 21 bp, Artificial sequence
  SiRNA target sequence
tcgaggaggacttgacattca

SEQ ID NO: 262979 - DNA, 21 bp, Artificial sequence
  SiRNA target sequence
cgaggaggacttgacattcaa

SEQ ID NO: 262980 - DNA, 21 bp, Artificial sequence
  SiRNA target sequence
gaggaggacttgacattcaag

SEQ ID NO: 262981 - DNA, 21 bp, Artificial sequence
  SiRNA target sequence
aggaggacttgacattcaaga

SEQ ID NO: 262982 - DNA, 21 bp, Artificial sequence
  SiRNA target sequence
ggaggacttgacattcaagaa

SEQ ID NO: 262983 - DNA, 21 bp, Artificial sequence
  SiRNA target sequence
gaggacttgacattcaagaag

SEQ ID NO: 262984 - DNA, 21 bp, Artificial sequence
  SiRNA target sequence
aggacttgacattcaagaagg

SEQ ID NO: 262985 - DNA, 21 bp, Artificial sequence
  SiRNA target sequence
ggacttgacattcaagaaggt

SEQ ID NO: 262986 - DNA, 21 bp, Artificial sequence
  SiRNA target sequence
gacttgacattcaagaaggta

SEQ ID NO: 262987 - DNA, 21 bp, Artificial sequence
  SiRNA target sequence
acttgacattcaagaaggtac

SEQ ID NO: 262988 - DNA, 21 bp, Artificial sequence
  SiRNA target sequence
cttgacattcaagaaggtaca

SEQ ID NO: 262989 - DNA, 21 bp, Artificial sequence
  SiRNA target sequence
ttgacattcaagaaggtacaa

SEQ ID NO: 262990 - DNA, 21 bp, Artificial sequence
  SiRNA target sequence
tgacattcaagaaggtacaaa

SEQ ID NO: 262991 - DNA, 21 bp, Artificial sequence
  SiRNA target sequence
gacattcaagaaggtacaaag

SEQ ID NO: 262992 - DNA, 21 bp, Artificial sequence
  SiRNA target sequence
acattcaagaaggtacaaagt

SEQ ID NO: 262993 - DNA, 21 bp, Artificial sequence
  SiRNA target sequence
cattcaagaaggtacaaagtt

SEQ ID NO: 262994 - DNA, 21 bp, Artificial sequence
  SiRNA target sequence
attcaagaaggtacaaagttg

SEQ ID NO: 262995 - DNA, 21 bp, Artificial sequence
  SiRNA target sequence
ttcaagaaggtacaaagttga

SEQ ID NO: 262996 - DNA, 21 bp, Artificial sequence
  SiRNA target sequence
tcaagaaggtacaaagttgaa

SEQ ID NO: 262997 - DNA, 21 bp, Artificial sequence
  SiRNA target sequence
caagaaggtacaaagttgaat

SEQ ID NO: 262998 - DNA, 21 bp, Artificial sequence
  SiRNA target sequence
aagaaggtacaaagttgaatt

SEQ ID NO: 262999 - DNA, 21 bp, Artificial sequence
  SiRNA target sequence
agaaggtacaaagttgaattg

SEQ ID NO: 263000 - DNA, 21 bp, Artificial sequence
  SiRNA target sequence
gaaggtacaaagttgaattgt

SEQ ID NO: 263001 - DNA, 21 bp, Artificial sequence
  SiRNA target sequence
aaggtacaaagttgaattgtg

SEQ ID NO: 263002 - DNA, 21 bp, Artificial sequence
  SiRNA target sequence
aggtacaaagttgaattgtga

SEQ ID NO: 263003 - DNA, 21 bp, Artificial sequence
  SiRNA target sequence
ggtacaaagttgaattgtgaa

SEQ ID NO: 263004 - DNA, 21 bp, Artificial sequence
  SiRNA target sequence
gtacaaagttgaattgtgaaa

SEQ ID NO: 263005 - DNA, 21 bp, Artificial sequence
  SiRNA target sequence
tacaaagttgaattgtgaaaa

SEQ ID NO: 263006 - DNA, 21 bp, Artificial sequence
  SiRNA target sequence
acaaagttgaattgtgaaaat

SEQ ID NO: 263007 - DNA, 21 bp, Artificial sequence
  SiRNA target sequence
caaagttgaattgtgaaaatg

SEQ ID NO: 263008 - DNA, 21 bp, Artificial sequence
  SiRNA target sequence
aaagttgaattgtgaaaatgc

SEQ ID NO: 263009 - DNA, 21 bp, Artificial sequence
  SiRNA target sequence
aagttgaattgtgaaaatgca

SEQ ID NO: 263010 - DNA, 21 bp, Artificial sequence
  SiRNA target sequence
agttgaattgtgaaaatgcaa

SEQ ID NO: 263011 - DNA, 21 bp, Artificial sequence
  SiRNA target sequence
gttgaattgtgaaaatgcaat

SEQ ID NO: 263012 - DNA, 21 bp, Artificial sequence
  SiRNA target sequence
ttgaattgtgaaaatgcaatt

SEQ ID NO: 263013 - DNA, 21 bp, Artificial sequence
  SiRNA target sequence
tgaattgtgaaaatgcaatta

SEQ ID NO: 263014 - DNA, 21 bp, Artificial sequence
  SiRNA target sequence
gaattgtgaaaatgcaattat

SEQ ID NO: 263015 - DNA, 21 bp, Artificial sequence
  SiRNA target sequence
aattgtgaaaatgcaattatg

SEQ ID NO: 263016 - DNA, 21 bp, Artificial sequence
  SiRNA target sequence
attgtgaaaatgcaattatgg

SEQ ID NO: 263017 - DNA, 21 bp, Artificial sequence
  SiRNA target sequence
ttgtgaaaatgcaattatgga

SEQ ID NO: 263018 - DNA, 21 bp, Artificial sequence
  SiRNA target sequence
tgtgaaaatgcaattatggag

SEQ ID NO: 263019 - DNA, 21 bp, Artificial sequence
  SiRNA target sequence
gtgaaaatgcaattatggagc

SEQ ID NO: 263020 - DNA, 21 bp, Artificial sequence
  SiRNA target sequence
tgaaaatgcaattatggagct

SEQ ID NO: 263021 - DNA, 21 bp, Artificial sequence
  SiRNA target sequence
gaaaatgcaattatggagctt

SEQ ID NO: 263022 - DNA, 21 bp, Artificial sequence
  SiRNA target sequence
aaaatgcaattatggagcttt

SEQ ID NO: 263023 - DNA, 21 bp, Artificial sequence
  SiRNA target sequence
aaatgcaattatggagctttc

SEQ ID NO: 263024 - DNA, 21 bp, Artificial sequence
  SiRNA target sequence
aatgcaattatggagctttcc

SEQ ID NO: 263025 - DNA, 21 bp, Artificial sequence
  SiRNA target sequence
atgcaattatggagctttcca

SEQ ID NO: 263026 - DNA, 21 bp, Artificial sequence
  SiRNA target sequence
tgcaattatggagctttccat

SEQ ID NO: 263027 - DNA, 21 bp, Artificial sequence
  SiRNA target sequence
gcaattatggagctttccatg

SEQ ID NO: 263028 - DNA, 21 bp, Artificial sequence
  SiRNA target sequence
caattatggagctttccatgc

SEQ ID NO: 263029 - DNA, 21 bp, Artificial sequence
  SiRNA target sequence
aattatggagctttccatgca

SEQ ID NO: 263030 - DNA, 21 bp, Artificial sequence
  SiRNA target sequence
attatggagctttccatgcat

SEQ ID NO: 263031 - DNA, 21 bp, Artificial sequence
  SiRNA target sequence
ttatggagctttccatgcatg

SEQ ID NO: 263032 - DNA, 21 bp, Artificial sequence
  SiRNA target sequence
tatggagctttccatgcatga

SEQ ID NO: 263033 - DNA, 21 bp, Artificial sequence
  SiRNA target sequence
atggagctttccatgcatgaa

SEQ ID NO: 263034 - DNA, 21 bp, Artificial sequence
  SiRNA target sequence
tggagctttccatgcatgaag

SEQ ID NO: 263035 - DNA, 21 bp, Artificial sequence
  SiRNA target sequence
ggagctttccatgcatgaaga

SEQ ID NO: 263036 - DNA, 21 bp, Artificial sequence
  SiRNA target sequence
gagctttccatgcatgaagag

SEQ ID NO: 263037 - DNA, 21 bp, Artificial sequence
  SiRNA target sequence
agctttccatgcatgaagaga

SEQ ID NO: 263038 - DNA, 21 bp, Artificial sequence
  SiRNA target sequence
gctttccatgcatgaagagag

SEQ ID NO: 263039 - DNA, 21 bp, Artificial sequence
  SiRNA target sequence
ctttccatgcatgaagagagc

SEQ ID NO: 263040 - DNA, 21 bp, Artificial sequence
  SiRNA target sequence
tttccatgcatgaagagagcg

SEQ ID NO: 263041 - DNA, 21 bp, Artificial sequence
  SiRNA target sequence
ttccatgcatgaagagagcgt

SEQ ID NO: 263042 - DNA, 21 bp, Artificial sequence
  SiRNA target sequence
tccatgcatgaagagagcgtt

SEQ ID NO: 263043 - DNA, 21 bp, Artificial sequence
  SiRNA target sequence
ccatgcatgaagagagcgttt

SEQ ID NO: 263044 - DNA, 21 bp, Artificial sequence
  SiRNA target sequence
catgcatgaagagagcgtttt

SEQ ID NO: 263045 - DNA, 21 bp, Artificial sequence
  SiRNA target sequence
atgcatgaagagagcgttttt

SEQ ID NO: 263046 - DNA, 21 bp, Artificial sequence
  SiRNA target sequence
tgcatgaagagagcgttttta

SEQ ID NO: 263047 - DNA, 21 bp, Artificial sequence
  SiRNA target sequence
gcatgaagagagcgtttttaa

SEQ ID NO: 263048 - DNA, 21 bp, Artificial sequence
  SiRNA target sequence
catgaagagagcgtttttaat

SEQ ID NO: 263049 - DNA, 21 bp, Artificial sequence
  SiRNA target sequence
atgaagagagcgtttttaata

SEQ ID NO: 263050 - DNA, 21 bp, Artificial sequence
  SiRNA target sequence
tgaagagagcgtttttaatac

SEQ ID NO: 263051 - DNA, 21 bp, Artificial sequence
  SiRNA target sequence
gaagagagcgtttttaatacc

SEQ ID NO: 263052 - DNA, 21 bp, Artificial sequence
  SiRNA target sequence
aagagagcgtttttaatacct

SEQ ID NO: 263053 - DNA, 21 bp, Artificial sequence
  SiRNA target sequence
agagagcgtttttaatacctg

SEQ ID NO: 263054 - DNA, 21 bp, Artificial sequence
  SiRNA target sequence
gagagcgtttttaatacctgg

SEQ ID NO: 263055 - DNA, 21 bp, Artificial sequence
  SiRNA target sequence
agagcgtttttaatacctggt

SEQ ID NO: 263056 - DNA, 21 bp, Artificial sequence
  SiRNA target sequence
gagcgtttttaatacctggtc

SEQ ID NO: 263057 - DNA, 21 bp, Artificial sequence
  SiRNA target sequence
agcgtttttaatacctggtct

SEQ ID NO: 263058 - DNA, 21 bp, Artificial sequence
  SiRNA target sequence
gcgtttttaatacctggtcta

SEQ ID NO: 263059 - DNA, 21 bp, Artificial sequence
  SiRNA target sequence
cgtttttaatacctggtctaa

SEQ ID NO: 263060 - DNA, 21 bp, Artificial sequence
  SiRNA target sequence
gtttttaatacctggtctaaa

SEQ ID NO: 263061 - DNA, 21 bp, Artificial sequence
  SiRNA target sequence
tttttaatacctggtctaaaa

SEQ ID NO: 263062 - DNA, 21 bp, Artificial sequence
  SiRNA target sequence
ttttaatacctggtctaaaat

SEQ ID NO: 263063 - DNA, 21 bp, Artificial sequence
  SiRNA target sequence
tttaatacctggtctaaaata

SEQ ID NO: 263064 - DNA, 21 bp, Artificial sequence
  SiRNA target sequence
ttaatacctggtctaaaataa

SEQ ID NO: 263065 - DNA, 21 bp, Artificial sequence
  SiRNA target sequence
taatacctggtctaaaataat

SEQ ID NO: 263066 - DNA, 21 bp, Artificial sequence
  SiRNA target sequence
aatacctggtctaaaataatt

SEQ ID NO: 263067 - DNA, 21 bp, Artificial sequence
  SiRNA target sequence
atacctggtctaaaataattg

SEQ ID NO: 263068 - DNA, 21 bp, Artificial sequence
  SiRNA target sequence
tacctggtctaaaataattga

SEQ ID NO: 263069 - DNA, 21 bp, Artificial sequence
  SiRNA target sequence
acctggtctaaaataattgac

SEQ ID NO: 263070 - DNA, 21 bp, Artificial sequence
  SiRNA target sequence
cctggtctaaaataattgacc

SEQ ID NO: 263071 - DNA, 21 bp, Artificial sequence
  SiRNA target sequence
ctggtctaaaataattgaccg

SEQ ID NO: 263072 - DNA, 21 bp, Artificial sequence
  SiRNA target sequence
tggtctaaaataattgaccga

SEQ ID NO: 263073 - DNA, 21 bp, Artificial sequence
  SiRNA target sequence
ggtctaaaataattgaccgag

SEQ ID NO: 263074 - DNA, 21 bp, Artificial sequence
  SiRNA target sequence
gtctaaaataattgaccgagt

SEQ ID NO: 263075 - DNA, 21 bp, Artificial sequence
  SiRNA target sequence
tctaaaataattgaccgagta

SEQ ID NO: 263076 - DNA, 21 bp, Artificial sequence
  SiRNA target sequence
ctaaaataattgaccgagtat

SEQ ID NO: 263077 - DNA, 21 bp, Artificial sequence
  SiRNA target sequence
taaaataattgaccgagtata

SEQ ID NO: 263078 - DNA, 21 bp, Artificial sequence
  SiRNA target sequence
aaaataattgaccgagtatat

SEQ ID NO: 263079 - DNA, 21 bp, Artificial sequence
  SiRNA target sequence
aaataattgaccgagtatatg

SEQ ID NO: 263080 - DNA, 21 bp, Artificial sequence
  SiRNA target sequence
aataattgaccgagtatatgc

SEQ ID NO: 263081 - DNA, 21 bp, Artificial sequence
  SiRNA target sequence
ataattgaccgagtatatgca

SEQ ID NO: 263082 - DNA, 21 bp, Artificial sequence
  SiRNA target sequence
taattgaccgagtatatgcaa

SEQ ID NO: 263083 - DNA, 21 bp, Artificial sequence
  SiRNA target sequence
aattgaccgagtatatgcaaa

SEQ ID NO: 263084 - DNA, 21 bp, Artificial sequence
  SiRNA target sequence
attgaccgagtatatgcaaat

SEQ ID NO: 263085 - DNA, 21 bp, Artificial sequence
  SiRNA target sequence
ttgaccgagtatatgcaaatg

SEQ ID NO: 263086 - DNA, 21 bp, Artificial sequence
  SiRNA target sequence
tgaccgagtatatgcaaatgc

SEQ ID NO: 263087 - DNA, 21 bp, Artificial sequence
  SiRNA target sequence
gaccgagtatatgcaaatgcg

SEQ ID NO: 263088 - DNA, 21 bp, Artificial sequence
  SiRNA target sequence
accgagtatatgcaaatgcga

SEQ ID NO: 263089 - DNA, 21 bp, Artificial sequence
  SiRNA target sequence
ccgagtatatgcaaatgcgac

SEQ ID NO: 263090 - DNA, 21 bp, Artificial sequence
  SiRNA target sequence
cgagtatatgcaaatgcgact

SEQ ID NO: 263091 - DNA, 21 bp, Artificial sequence
  SiRNA target sequence
gagtatatgcaaatgcgactg

SEQ ID NO: 263092 - DNA, 21 bp, Artificial sequence
  SiRNA target sequence
agtatatgcaaatgcgactgg

SEQ ID NO: 263093 - DNA, 21 bp, Artificial sequence
  SiRNA target sequence
gtatatgcaaatgcgactgga

SEQ ID NO: 263094 - DNA, 21 bp, Artificial sequence
  SiRNA target sequence
tatatgcaaatgcgactggag

SEQ ID NO: 263095 - DNA, 21 bp, Artificial sequence
  SiRNA target sequence
atatgcaaatgcgactggaga

SEQ ID NO: 263096 - DNA, 21 bp, Artificial sequence
  SiRNA target sequence
tatgcaaatgcgactggagat

SEQ ID NO: 263097 - DNA, 21 bp, Artificial sequence
  SiRNA target sequence
atgcaaatgcgactggagatc

SEQ ID NO: 263098 - DNA, 21 bp, Artificial sequence
  SiRNA target sequence
tgcaaatgcgactggagatca

SEQ ID NO: 263099 - DNA, 21 bp, Artificial sequence
  SiRNA target sequence
gcaaatgcgactggagatcac

SEQ ID NO: 263100 - DNA, 21 bp, Artificial sequence
  SiRNA target sequence
caaatgcgactggagatcacc

SEQ ID NO: 263101 - DNA, 21 bp, Artificial sequence
  SiRNA target sequence
aaatgcgactggagatcacct

SEQ ID NO: 263102 - DNA, 21 bp, Artificial sequence
  SiRNA target sequence
aatgcgactggagatcacctg

SEQ ID NO: 263103 - DNA, 21 bp, Artificial sequence
  SiRNA target sequence
atgcgactggagatcacctgg

SEQ ID NO: 263104 - DNA, 21 bp, Artificial sequence
  SiRNA target sequence
tgcgactggagatcacctgga

SEQ ID NO: 263105 - DNA, 21 bp, Artificial sequence
  SiRNA target sequence
gcgactggagatcacctggac

SEQ ID NO: 263106 - DNA, 21 bp, Artificial sequence
  SiRNA target sequence
cgactggagatcacctggaca

SEQ ID NO: 263107 - DNA, 21 bp, Artificial sequence
  SiRNA target sequence
gactggagatcacctggacat

SEQ ID NO: 263108 - DNA, 21 bp, Artificial sequence
  SiRNA target sequence
actggagatcacctggacata

SEQ ID NO: 263109 - DNA, 21 bp, Artificial sequence
  SiRNA target sequence
ctggagatcacctggacataa

SEQ ID NO: 263110 - DNA, 21 bp, Artificial sequence
  SiRNA target sequence
tggagatcacctggacataaa

SEQ ID NO: 263111 - DNA, 21 bp, Artificial sequence
  SiRNA target sequence
ggagatcacctggacataaac

SEQ ID NO: 263112 - DNA, 21 bp, Artificial sequence
  SiRNA target sequence
gagatcacctggacataaaca

SEQ ID NO: 263113 - DNA, 21 bp, Artificial sequence
  SiRNA target sequence
agatcacctggacataaacac

SEQ ID NO: 263114 - DNA, 21 bp, Artificial sequence
  SiRNA target sequence
gatcacctggacataaacact

SEQ ID NO: 263115 - DNA, 21 bp, Artificial sequence
  SiRNA target sequence
atcacctggacataaacactt

SEQ ID NO: 263116 - DNA, 21 bp, Artificial sequence
  SiRNA target sequence
tcacctggacataaacactta

SEQ ID NO: 263117 - DNA, 21 bp, Artificial sequence
  SiRNA target sequence
cacctggacataaacacttat

SEQ ID NO: 263118 - DNA, 21 bp, Artificial sequence
  SiRNA target sequence
acctggacataaacacttatc

SEQ ID NO: 263119 - DNA, 21 bp, Artificial sequence
  SiRNA target sequence
cctggacataaacacttatcg

SEQ ID NO: 263120 - DNA, 21 bp, Artificial sequence
  SiRNA target sequence
ctggacataaacacttatcgt

SEQ ID NO: 263121 - DNA, 21 bp, Artificial sequence
  SiRNA target sequence
tggacataaacacttatcgtg

SEQ ID NO: 263122 - DNA, 21 bp, Artificial sequence
  SiRNA target sequence
ggacataaacacttatcgtgg

SEQ ID NO: 263123 - DNA, 21 bp, Artificial sequence
  SiRNA target sequence
gacataaacacttatcgtggt

SEQ ID NO: 263124 - DNA, 21 bp, Artificial sequence
  SiRNA target sequence
acataaacacttatcgtggtt

SEQ ID NO: 263125 - DNA, 21 bp, Artificial sequence
  SiRNA target sequence
cataaacacttatcgtggtta

SEQ ID NO: 263126 - DNA, 21 bp, Artificial sequence
  SiRNA target sequence
ataaacacttatcgtggttat

SEQ ID NO: 263127 - DNA, 21 bp, Artificial sequence
  SiRNA target sequence
taaacacttatcgtggttatg

SEQ ID NO: 263128 - DNA, 21 bp, Artificial sequence
  SiRNA target sequence
aaacacttatcgtggttatgc

SEQ ID NO: 263129 - DNA, 21 bp, Artificial sequence
  SiRNA target sequence
aacacttatcgtggttatgct

SEQ ID NO: 263130 - DNA, 21 bp, Artificial sequence
  SiRNA target sequence
acacttatcgtggttatgctc

SEQ ID NO: 263131 - DNA, 21 bp, Artificial sequence
  SiRNA target sequence
cacttatcgtggttatgctca

SEQ ID NO: 263132 - DNA, 21 bp, Artificial sequence
  SiRNA target sequence
acttatcgtggttatgctcag

SEQ ID NO: 263133 - DNA, 21 bp, Artificial sequence
  SiRNA target sequence
cttatcgtggttatgctcagg

SEQ ID NO: 263134 - DNA, 21 bp, Artificial sequence
  SiRNA target sequence
ttatcgtggttatgctcagga

SEQ ID NO: 263135 - DNA, 21 bp, Artificial sequence
  SiRNA target sequence
tatcgtggttatgctcaggag

SEQ ID NO: 263136 - DNA, 21 bp, Artificial sequence
  SiRNA target sequence
atcgtggttatgctcaggagc

SEQ ID NO: 263137 - DNA, 21 bp, Artificial sequence
  SiRNA target sequence
tcgtggttatgctcaggagcg

SEQ ID NO: 263138 - DNA, 21 bp, Artificial sequence
  SiRNA target sequence
cgtggttatgctcaggagcgg

SEQ ID NO: 263139 - DNA, 21 bp, Artificial sequence
  SiRNA target sequence
gtggttatgctcaggagcggt

SEQ ID NO: 263140 - DNA, 21 bp, Artificial sequence
  SiRNA target sequence
tggttatgctcaggagcggtt

SEQ ID NO: 263141 - DNA, 21 bp, Artificial sequence
  SiRNA target sequence
ggttatgctcaggagcggttt

SEQ ID NO: 263142 - DNA, 21 bp, Artificial sequence
  SiRNA target sequence
gttatgctcaggagcggtttc

SEQ ID NO: 263143 - DNA, 21 bp, Artificial sequence
  SiRNA target sequence
ttatgctcaggagcggtttct

SEQ ID NO: 263144 - DNA, 21 bp, Artificial sequence
  SiRNA target sequence
tatgctcaggagcggtttctg

SEQ ID NO: 263145 - DNA, 21 bp, Artificial sequence
  SiRNA target sequence
atgctcaggagcggtttctgg

SEQ ID NO: 263146 - DNA, 21 bp, Artificial sequence
  SiRNA target sequence
tgctcaggagcggtttctgga

SEQ ID NO: 263147 - DNA, 21 bp, Artificial sequence
  SiRNA target sequence
gctcaggagcggtttctggaa

SEQ ID NO: 263148 - DNA, 21 bp, Artificial sequence
  SiRNA target sequence
ctcaggagcggtttctggaat

SEQ ID NO: 263149 - DNA, 21 bp, Artificial sequence
  SiRNA target sequence
tcaggagcggtttctggaata

SEQ ID NO: 263150 - DNA, 21 bp, Artificial sequence
  SiRNA target sequence
caggagcggtttctggaatac

SEQ ID NO: 263151 - DNA, 21 bp, Artificial sequence
  SiRNA target sequence
aggagcggtttctggaatact

SEQ ID NO: 263152 - DNA, 21 bp, Artificial sequence
  SiRNA target sequence
ggagcggtttctggaatacta

SEQ ID NO: 263153 - DNA, 21 bp, Artificial sequence
  SiRNA target sequence
gagcggtttctggaatactat

SEQ ID NO: 263154 - DNA, 21 bp, Artificial sequence
  SiRNA target sequence
agcggtttctggaatactata

SEQ ID NO: 263155 - DNA, 21 bp, Artificial sequence
  SiRNA target sequence
gcggtttctggaatactatat

SEQ ID NO: 263156 - DNA, 21 bp, Artificial sequence
  SiRNA target sequence
cggtttctggaatactatatg

SEQ ID NO: 263157 - DNA, 21 bp, Artificial sequence
  SiRNA target sequence
ggtttctggaatactatatgt

SEQ ID NO: 263158 - DNA, 21 bp, Artificial sequence
  SiRNA target sequence
gtttctggaatactatatgta

SEQ ID NO: 263159 - DNA, 21 bp, Artificial sequence
  SiRNA target sequence
tttctggaatactatatgtaa

SEQ ID NO: 263160 - DNA, 21 bp, Artificial sequence
  SiRNA target sequence
ttctggaatactatatgtaag

SEQ ID NO: 263161 - DNA, 21 bp, Artificial sequence
  SiRNA target sequence
tctggaatactatatgtaagt

SEQ ID NO: 263162 - DNA, 21 bp, Artificial sequence
  SiRNA target sequence
ctggaatactatatgtaagta

SEQ ID NO: 263163 - DNA, 21 bp, Artificial sequence
  SiRNA target sequence
tggaatactatatgtaagtat

SEQ ID NO: 263164 - DNA, 21 bp, Artificial sequence
  SiRNA target sequence
ggaatactatatgtaagtata

SEQ ID NO: 263165 - DNA, 21 bp, Artificial sequence
  SiRNA target sequence
gaatactatatgtaagtatag

SEQ ID NO: 263166 - DNA, 21 bp, Artificial sequence
  SiRNA target sequence
aatactatatgtaagtatagt

SEQ ID NO: 263167 - DNA, 21 bp, Artificial sequence
  SiRNA target sequence
atactatatgtaagtatagtg

SEQ ID NO: 263168 - DNA, 21 bp, Artificial sequence
  SiRNA target sequence
tactatatgtaagtatagtgt

SEQ ID NO: 263169 - DNA, 21 bp, Artificial sequence
  SiRNA target sequence
actatatgtaagtatagtgtt

SEQ ID NO: 263170 - DNA, 21 bp, Artificial sequence
  SiRNA target sequence
ctatatgtaagtatagtgttc

SEQ ID NO: 263171 - DNA, 21 bp, Artificial sequence
  SiRNA target sequence
tatatgtaagtatagtgttct

SEQ ID NO: 263172 - DNA, 21 bp, Artificial sequence
  SiRNA target sequence
atatgtaagtatagtgttctg

SEQ ID NO: 263173 - DNA, 21 bp, Artificial sequence
  SiRNA target sequence
tatgtaagtatagtgttctgg

SEQ ID NO: 263174 - DNA, 21 bp, Artificial sequence
  SiRNA target sequence
atgtaagtatagtgttctgga

SEQ ID NO: 263175 - DNA, 21 bp, Artificial sequence
  SiRNA target sequence
tgtaagtatagtgttctggag

SEQ ID NO: 263176 - DNA, 21 bp, Artificial sequence
  SiRNA target sequence
gtaagtatagtgttctggagg

SEQ ID NO: 263177 - DNA, 21 bp, Artificial sequence
  SiRNA target sequence
taagtatagtgttctggaggc

SEQ ID NO: 263178 - DNA, 21 bp, Artificial sequence
  SiRNA target sequence
aagtatagtgttctggaggca

SEQ ID NO: 263179 - DNA, 21 bp, Artificial sequence
  SiRNA target sequence
agtatagtgttctggaggcat

SEQ ID NO: 263180 - DNA, 21 bp, Artificial sequence
  SiRNA target sequence
gtatagtgttctggaggcatc

SEQ ID NO: 263181 - DNA, 21 bp, Artificial sequence
  SiRNA target sequence
tatagtgttctggaggcatca

SEQ ID NO: 263182 - DNA, 21 bp, Artificial sequence
  SiRNA target sequence
atagtgttctggaggcatcat

SEQ ID NO: 263183 - DNA, 21 bp, Artificial sequence
  SiRNA target sequence
tagtgttctggaggcatcatt

SEQ ID NO: 263184 - DNA, 21 bp, Artificial sequence
  SiRNA target sequence
agtgttctggaggcatcattc

SEQ ID NO: 263185 - DNA, 21 bp, Artificial sequence
  SiRNA target sequence
gtgttctggaggcatcattct

SEQ ID NO: 263186 - DNA, 21 bp, Artificial sequence
  SiRNA target sequence
tgttctggaggcatcattcta

SEQ ID NO: 263187 - DNA, 21 bp, Artificial sequence
  SiRNA target sequence
gttctggaggcatcattctat

SEQ ID NO: 263188 - DNA, 21 bp, Artificial sequence
  SiRNA target sequence
ttctggaggcatcattctatg

SEQ ID NO: 263189 - DNA, 21 bp, Artificial sequence
  SiRNA target sequence
tctggaggcatcattctatgg

SEQ ID NO: 263190 - DNA, 21 bp, Artificial sequence
  SiRNA target sequence
ctggaggcatcattctatggt

SEQ ID NO: 263191 - DNA, 21 bp, Artificial sequence
  SiRNA target sequence
tggaggcatcattctatggtt

SEQ ID NO: 263192 - DNA, 21 bp, Artificial sequence
  SiRNA target sequence
ggaggcatcattctatggtta

SEQ ID NO: 263193 - DNA, 21 bp, Artificial sequence
  SiRNA target sequence
gaggcatcattctatggttac

SEQ ID NO: 263194 - DNA, 21 bp, Artificial sequence
  SiRNA target sequence
aggcatcattctatggttacc

SEQ ID NO: 263195 - DNA, 21 bp, Artificial sequence
  SiRNA target sequence
ggcatcattctatggttaccc

SEQ ID NO: 263196 - DNA, 21 bp, Artificial sequence
  SiRNA target sequence
gcatcattctatggttaccca

SEQ ID NO: 263197 - DNA, 21 bp, Artificial sequence
  SiRNA target sequence
catcattctatggttacccat

SEQ ID NO: 263198 - DNA, 21 bp, Artificial sequence
  SiRNA target sequence
atcattctatggttacccatc

SEQ ID NO: 263199 - DNA, 21 bp, Artificial sequence
  SiRNA target sequence
tcattctatggttacccatca

SEQ ID NO: 263200 - DNA, 21 bp, Artificial sequence
  SiRNA target sequence
cattctatggttacccatcat

SEQ ID NO: 263201 - DNA, 21 bp, Artificial sequence
  SiRNA target sequence
attctatggttacccatcatt

SEQ ID NO: 263202 - DNA, 21 bp, Artificial sequence
  SiRNA target sequence
ttctatggttacccatcatta

SEQ ID NO: 263203 - DNA, 21 bp, Artificial sequence
  SiRNA target sequence
tctatggttacccatcattag

SEQ ID NO: 263204 - DNA, 21 bp, Artificial sequence
  SiRNA target sequence
ctatggttacccatcattaga

SEQ ID NO: 263205 - DNA, 21 bp, Artificial sequence
  SiRNA target sequence
tatggttacccatcattagag

SEQ ID NO: 263206 - DNA, 21 bp, Artificial sequence
  SiRNA target sequence
atggttacccatcattagagg

SEQ ID NO: 263207 - DNA, 21 bp, Artificial sequence
  SiRNA target sequence
tggttacccatcattagagga

SEQ ID NO: 263208 - DNA, 21 bp, Artificial sequence
  SiRNA target sequence
ggttacccatcattagaggaa

SEQ ID NO: 263209 - DNA, 21 bp, Artificial sequence
  SiRNA target sequence
gttacccatcattagaggaaa

SEQ ID NO: 263210 - DNA, 21 bp, Artificial sequence
  SiRNA target sequence
ttacccatcattagaggaaat

SEQ ID NO: 263211 - DNA, 21 bp, Artificial sequence
  SiRNA target sequence
tacccatcattagaggaaatt

SEQ ID NO: 263212 - DNA, 21 bp, Artificial sequence
  SiRNA target sequence
acccatcattagaggaaattt

SEQ ID NO: 263213 - DNA, 21 bp, Artificial sequence
  SiRNA target sequence
cccatcattagaggaaatttc

SEQ ID NO: 263214 - DNA, 21 bp, Artificial sequence
  SiRNA target sequence
ccatcattagaggaaatttcc

SEQ ID NO: 263215 - DNA, 21 bp, Artificial sequence
  SiRNA target sequence
catcattagaggaaatttcca

SEQ ID NO: 263216 - DNA, 21 bp, Artificial sequence
  SiRNA target sequence
atcattagaggaaatttccaa

SEQ ID NO: 263217 - DNA, 21 bp, Artificial sequence
  SiRNA target sequence
tcattagaggaaatttccaat

SEQ ID NO: 263218 - DNA, 21 bp, Artificial sequence
  SiRNA target sequence
cattagaggaaatttccaata

SEQ ID NO: 263219 - DNA, 21 bp, Artificial sequence
  SiRNA target sequence
attagaggaaatttccaataa

SEQ ID NO: 263220 - DNA, 21 bp, Artificial sequence
  SiRNA target sequence
ttagaggaaatttccaataaa

SEQ ID NO: 263221 - DNA, 21 bp, Artificial sequence
  SiRNA target sequence
tagaggaaatttccaataaac

SEQ ID NO: 263222 - DNA, 21 bp, Artificial sequence
  SiRNA target sequence
agaggaaatttccaataaact

SEQ ID NO: 263223 - DNA, 21 bp, Artificial sequence
  SiRNA target sequence
gaggaaatttccaataaactc

SEQ ID NO: 263224 - DNA, 21 bp, Artificial sequence
  SiRNA target sequence
aggaaatttccaataaactct

SEQ ID NO: 263225 - DNA, 21 bp, Artificial sequence
  SiRNA target sequence
ggaaatttccaataaactctg

SEQ ID NO: 263226 - DNA, 21 bp, Artificial sequence
  SiRNA target sequence
gaaatttccaataaactctgg

SEQ ID NO: 263227 - DNA, 21 bp, Artificial sequence
  SiRNA target sequence
aaatttccaataaactctggt

SEQ ID NO: 263228 - DNA, 21 bp, Artificial sequence
  SiRNA target sequence
aatttccaataaactctggtg

SEQ ID NO: 263229 - DNA, 21 bp, Artificial sequence
  SiRNA target sequence
atttccaataaactctggtgt

SEQ ID NO: 263230 - DNA, 21 bp, Artificial sequence
  SiRNA target sequence
tttccaataaactctggtgta

SEQ ID NO: 263231 - DNA, 21 bp, Artificial sequence
  SiRNA target sequence
ttccaataaactctggtgtaa

SEQ ID NO: 263232 - DNA, 21 bp, Artificial sequence
  SiRNA target sequence
tccaataaactctggtgtaag

SEQ ID NO: 263233 - DNA, 21 bp, Artificial sequence
  SiRNA target sequence
ccaataaactctggtgtaagg

SEQ ID NO: 263234 - DNA, 21 bp, Artificial sequence
  SiRNA target sequence
caataaactctggtgtaaggc

SEQ ID NO: 263235 - DNA, 21 bp, Artificial sequence
  SiRNA target sequence
aataaactctggtgtaaggct

SEQ ID NO: 263236 - DNA, 21 bp, Artificial sequence
  SiRNA target sequence
ataaactctggtgtaaggctt

SEQ ID NO: 263237 - DNA, 21 bp, Artificial sequence
  SiRNA target sequence
taaactctggtgtaaggctta

SEQ ID NO: 263238 - DNA, 21 bp, Artificial sequence
  SiRNA target sequence
aaactctggtgtaaggcttag

SEQ ID NO: 263239 - DNA, 21 bp, Artificial sequence
  SiRNA target sequence
aactctggtgtaaggcttaga

SEQ ID NO: 263240 - DNA, 21 bp, Artificial sequence
  SiRNA target sequence
actctggtgtaaggcttagag

SEQ ID NO: 263241 - DNA, 21 bp, Artificial sequence
  SiRNA target sequence
ctctggtgtaaggcttagagt

SEQ ID NO: 263242 - DNA, 21 bp, Artificial sequence
  SiRNA target sequence
tctggtgtaaggcttagagtg

SEQ ID NO: 263243 - DNA, 21 bp, Artificial sequence
  SiRNA target sequence
ctggtgtaaggcttagagtga

SEQ ID NO: 263244 - DNA, 21 bp, Artificial sequence
  SiRNA target sequence
tggtgtaaggcttagagtgat

SEQ ID NO: 263245 - DNA, 21 bp, Artificial sequence
  SiRNA target sequence
ggtgtaaggcttagagtgatg

SEQ ID NO: 263246 - DNA, 21 bp, Artificial sequence
  SiRNA target sequence
gtgtaaggcttagagtgatgg

SEQ ID NO: 263247 - DNA, 21 bp, Artificial sequence
  SiRNA target sequence
tgtaaggcttagagtgatggt

SEQ ID NO: 263248 - DNA, 21 bp, Artificial sequence
  SiRNA target sequence
gtaaggcttagagtgatggtc

SEQ ID NO: 263249 - DNA, 21 bp, Artificial sequence
  SiRNA target sequence
taaggcttagagtgatggtcg

SEQ ID NO: 263250 - DNA, 21 bp, Artificial sequence
  SiRNA target sequence
aaggcttagagtgatggtcga

SEQ ID NO: 263251 - DNA, 21 bp, Artificial sequence
  SiRNA target sequence
aggcttagagtgatggtcgag

SEQ ID NO: 263252 - DNA, 21 bp, Artificial sequence
  SiRNA target sequence
ggcttagagtgatggtcgagg

SEQ ID NO: 263253 - DNA, 21 bp, Artificial sequence
  SiRNA target sequence
gcttagagtgatggtcgaggt

SEQ ID NO: 263254 - DNA, 21 bp, Artificial sequence
  SiRNA target sequence
cttagagtgatggtcgaggtg

SEQ ID NO: 263255 - DNA, 21 bp, Artificial sequence
  SiRNA target sequence
ttagagtgatggtcgaggtgc

SEQ ID NO: 263256 - DNA, 21 bp, Artificial sequence
  SiRNA target sequence
tagagtgatggtcgaggtgcc

SEQ ID NO: 263257 - DNA, 21 bp, Artificial sequence
  SiRNA target sequence
agagtgatggtcgaggtgccc

SEQ ID NO: 263258 - DNA, 21 bp, Artificial sequence
  SiRNA target sequence
gagtgatggtcgaggtgccct

SEQ ID NO: 263259 - DNA, 21 bp, Artificial sequence
  SiRNA target sequence
agtgatggtcgaggtgcccta

SEQ ID NO: 263260 - DNA, 21 bp, Artificial sequence
  SiRNA target sequence
gtgatggtcgaggtgccctat

SEQ ID NO: 263261 - DNA, 21 bp, Artificial sequence
  SiRNA target sequence
tgatggtcgaggtgccctatt

SEQ ID NO: 263262 - DNA, 21 bp, Artificial sequence
  SiRNA target sequence
gatggtcgaggtgccctattt

SEQ ID NO: 263263 - DNA, 21 bp, Artificial sequence
  SiRNA target sequence
atggtcgaggtgccctattta

SEQ ID NO: 263264 - DNA, 21 bp, Artificial sequence
  SiRNA target sequence
tggtcgaggtgccctatttag

SEQ ID NO: 263265 - DNA, 21 bp, Artificial sequence
  SiRNA target sequence
ggtcgaggtgccctatttagg

SEQ ID NO: 263266 - DNA, 21 bp, Artificial sequence
  SiRNA target sequence
gtcgaggtgccctatttaggg

SEQ ID NO: 263267 - DNA, 21 bp, Artificial sequence
  SiRNA target sequence
tcgaggtgccctatttagggt

SEQ ID NO: 263268 - DNA, 21 bp, Artificial sequence
  SiRNA target sequence
cgaggtgccctatttagggtg

SEQ ID NO: 263269 - DNA, 21 bp, Artificial sequence
  SiRNA target sequence
gaggtgccctatttagggtga

SEQ ID NO: 263270 - DNA, 21 bp, Artificial sequence
  SiRNA target sequence
aggtgccctatttagggtgag

SEQ ID NO: 263271 - DNA, 21 bp, Artificial sequence
  SiRNA target sequence
ggtgccctatttagggtgagg

SEQ ID NO: 263272 - DNA, 21 bp, Artificial sequence
  SiRNA target sequence
gtgccctatttagggtgagga

SEQ ID NO: 263273 - DNA, 21 bp, Artificial sequence
  SiRNA target sequence
tgccctatttagggtgaggag

SEQ ID NO: 263274 - DNA, 21 bp, Artificial sequence
  SiRNA target sequence
gccctatttagggtgaggagc

SEQ ID NO: 263275 - DNA, 21 bp, Artificial sequence
  SiRNA target sequence
ccctatttagggtgaggagcc

SEQ ID NO: 263276 - DNA, 21 bp, Artificial sequence
  SiRNA target sequence
cctatttagggtgaggagcct

SEQ ID NO: 263277 - DNA, 21 bp, Artificial sequence
  SiRNA target sequence
ctatttagggtgaggagcctc

SEQ ID NO: 263278 - DNA, 21 bp, Artificial sequence
  SiRNA target sequence
tatttagggtgaggagcctcg

SEQ ID NO: 263279 - DNA, 21 bp, Artificial sequence
  SiRNA target sequence
atttagggtgaggagcctcgg

SEQ ID NO: 263280 - DNA, 21 bp, Artificial sequence
  SiRNA target sequence
tttagggtgaggagcctcggt

SEQ ID NO: 263281 - DNA, 21 bp, Artificial sequence
  SiRNA target sequence
ttagggtgaggagcctcggtg

SEQ ID NO: 263282 - DNA, 21 bp, Artificial sequence
  SiRNA target sequence
tagggtgaggagcctcggtgg

SEQ ID NO: 263283 - DNA, 21 bp, Artificial sequence
  SiRNA target sequence
agggtgaggagcctcggtggc

SEQ ID NO: 263284 - DNA, 21 bp, Artificial sequence
  SiRNA target sequence
gggtgaggagcctcggtggca

SEQ ID NO: 263285 - DNA, 21 bp, Artificial sequence
  SiRNA target sequence
ggtgaggagcctcggtggcag

SEQ ID NO: 263286 - DNA, 21 bp, Artificial sequence
  SiRNA target sequence
gtgaggagcctcggtggcagc

SEQ ID NO: 263287 - DNA, 21 bp, Artificial sequence
  SiRNA target sequence
tgaggagcctcggtggcagcc

SEQ ID NO: 263288 - DNA, 21 bp, Artificial sequence
  SiRNA target sequence
gaggagcctcggtggcagccc

SEQ ID NO: 263289 - DNA, 21 bp, Artificial sequence
  SiRNA target sequence
aggagcctcggtggcagcccc

SEQ ID NO: 263290 - DNA, 21 bp, Artificial sequence
  SiRNA target sequence
ggagcctcggtggcagcccca

SEQ ID NO: 263291 - DNA, 21 bp, Artificial sequence
  SiRNA target sequence
gagcctcggtggcagccccac

SEQ ID NO: 263292 - DNA, 21 bp, Artificial sequence
  SiRNA target sequence
agcctcggtggcagccccacc

SEQ ID NO: 263293 - DNA, 21 bp, Artificial sequence
  SiRNA target sequence
gcctcggtggcagccccacca

SEQ ID NO: 263294 - DNA, 21 bp, Artificial sequence
  SiRNA target sequence
cctcggtggcagccccaccaa

SEQ ID NO: 263295 - DNA, 21 bp, Artificial sequence
  SiRNA target sequence
ctcggtggcagccccaccaaa

SEQ ID NO: 263296 - DNA, 21 bp, Artificial sequence
  SiRNA target sequence
tcggtggcagccccaccaaat

SEQ ID NO: 263297 - DNA, 21 bp, Artificial sequence
  SiRNA target sequence
cggtggcagccccaccaaatc

SEQ ID NO: 263298 - DNA, 21 bp, Artificial sequence
  SiRNA target sequence
ggtggcagccccaccaaatcc

SEQ ID NO: 263299 - DNA, 21 bp, Artificial sequence
  SiRNA target sequence
gtggcagccccaccaaatcct

SEQ ID NO: 263300 - DNA, 21 bp, Artificial sequence
  SiRNA target sequence
tggcagccccaccaaatcctc

SEQ ID NO: 263301 - DNA, 21 bp, Artificial sequence
  SiRNA target sequence
ggcagccccaccaaatcctct

SEQ ID NO: 263302 - DNA, 21 bp, Artificial sequence
  SiRNA target sequence
gcagccccaccaaatcctcta

SEQ ID NO: 263303 - DNA, 21 bp, Artificial sequence
  SiRNA target sequence
cagccccaccaaatcctctat

SEQ ID NO: 263304 - DNA, 21 bp, Artificial sequence
  SiRNA target sequence
agccccaccaaatcctctatt

SEQ ID NO: 263305 - DNA, 21 bp, Artificial sequence
  SiRNA target sequence
gccccaccaaatcctctattg

SEQ ID NO: 263306 - DNA, 21 bp, Artificial sequence
  SiRNA target sequence
ccccaccaaatcctctattgg

SEQ ID NO: 263307 - DNA, 21 bp, Artificial sequence
  SiRNA target sequence
cccaccaaatcctctattgga

SEQ ID NO: 263308 - DNA, 21 bp, Artificial sequence
  SiRNA target sequence
ccaccaaatcctctattggat

SEQ ID NO: 263309 - DNA, 21 bp, Artificial sequence
  SiRNA target sequence
caccaaatcctctattggata

SEQ ID NO: 263310 - DNA, 21 bp, Artificial sequence
  SiRNA target sequence
accaaatcctctattggatag

SEQ ID NO: 263311 - DNA, 21 bp, Artificial sequence
  SiRNA target sequence
ccaaatcctctattggatagg

SEQ ID NO: 263312 - DNA, 21 bp, Artificial sequence
  SiRNA target sequence
caaatcctctattggatagga

SEQ ID NO: 263313 - DNA, 21 bp, Artificial sequence
  SiRNA target sequence
aaatcctctattggataggaa

SEQ ID NO: 263314 - DNA, 21 bp, Artificial sequence
  SiRNA target sequence
aatcctctattggataggaac

SEQ ID NO: 263315 - DNA, 21 bp, Artificial sequence
  SiRNA target sequence
atcctctattggataggaaca

SEQ ID NO: 263316 - DNA, 21 bp, Artificial sequence
  SiRNA target sequence
tcctctattggataggaacag

SEQ ID NO: 263317 - DNA, 21 bp, Artificial sequence
  SiRNA target sequence
cctctattggataggaacagc

SEQ ID NO: 263318 - DNA, 21 bp, Artificial sequence
  SiRNA target sequence
ctctattggataggaacagct

SEQ ID NO: 263319 - DNA, 21 bp, Artificial sequence
  SiRNA target sequence
tctattggataggaacagctg

SEQ ID NO: 263320 - DNA, 21 bp, Artificial sequence
  SiRNA target sequence
ctattggataggaacagctgt

SEQ ID NO: 263321 - DNA, 21 bp, Artificial sequence
  SiRNA target sequence
tattggataggaacagctgta

SEQ ID NO: 263322 - DNA, 21 bp, Artificial sequence
  SiRNA target sequence
attggataggaacagctgtac

SEQ ID NO: 263323 - DNA, 21 bp, Artificial sequence
  SiRNA target sequence
ttggataggaacagctgtact

SEQ ID NO: 263324 - DNA, 21 bp, Artificial sequence
  SiRNA target sequence
tggataggaacagctgtactg

SEQ ID NO: 263325 - DNA, 21 bp, Artificial sequence
  SiRNA target sequence
ggataggaacagctgtactgg

SEQ ID NO: 263326 - DNA, 21 bp, Artificial sequence
  SiRNA target sequence
gataggaacagctgtactggg

SEQ ID NO: 263327 - DNA, 21 bp, Artificial sequence
  SiRNA target sequence
ataggaacagctgtactgggc

SEQ ID NO: 263328 - DNA, 21 bp, Artificial sequence
  SiRNA target sequence
taggaacagctgtactgggca

SEQ ID NO: 263329 - DNA, 21 bp, Artificial sequence
  SiRNA target sequence
aggaacagctgtactgggcag

SEQ ID NO: 263330 - DNA, 21 bp, Artificial sequence
  SiRNA target sequence
ggaacagctgtactgggcagt

SEQ ID NO: 263331 - DNA, 21 bp, Artificial sequence
  SiRNA target sequence
gaacagctgtactgggcagtt

SEQ ID NO: 263332 - DNA, 21 bp, Artificial sequence
  SiRNA target sequence
aacagctgtactgggcagtta

SEQ ID NO: 263333 - DNA, 21 bp, Artificial sequence
  SiRNA target sequence
acagctgtactgggcagttac

SEQ ID NO: 263334 - DNA, 21 bp, Artificial sequence
  SiRNA target sequence
cagctgtactgggcagttaca

SEQ ID NO: 263335 - DNA, 21 bp, Artificial sequence
  SiRNA target sequence
agctgtactgggcagttacag

SEQ ID NO: 263336 - DNA, 21 bp, Artificial sequence
  SiRNA target sequence
gctgtactgggcagttacagc

SEQ ID NO: 263337 - DNA, 21 bp, Artificial sequence
  SiRNA target sequence
ctgtactgggcagttacagca

SEQ ID NO: 263338 - DNA, 21 bp, Artificial sequence
  SiRNA target sequence
tgtactgggcagttacagcag

SEQ ID NO: 263339 - DNA, 21 bp, Artificial sequence
  SiRNA target sequence
gtactgggcagttacagcagt

SEQ ID NO: 263340 - DNA, 21 bp, Artificial sequence
  SiRNA target sequence
tactgggcagttacagcagtc

SEQ ID NO: 263341 - DNA, 21 bp, Artificial sequence
  SiRNA target sequence
actgggcagttacagcagtcg

SEQ ID NO: 263342 - DNA, 21 bp, Artificial sequence
  SiRNA target sequence
ctgggcagttacagcagtcgt

SEQ ID NO: 263343 - DNA, 21 bp, Artificial sequence
  SiRNA target sequence
tgggcagttacagcagtcgta

SEQ ID NO: 263344 - DNA, 21 bp, Artificial sequence
  SiRNA target sequence
gggcagttacagcagtcgtat

SEQ ID NO: 263345 - DNA, 21 bp, Artificial sequence
  SiRNA target sequence
ggcagttacagcagtcgtatg

SEQ ID NO: 263346 - DNA, 21 bp, Artificial sequence
  SiRNA target sequence
gcagttacagcagtcgtatgg

SEQ ID NO: 263347 - DNA, 21 bp, Artificial sequence
  SiRNA target sequence
cagttacagcagtcgtatggt

SEQ ID NO: 263348 - DNA, 21 bp, Artificial sequence
  SiRNA target sequence
agttacagcagtcgtatggta

SEQ ID NO: 263349 - DNA, 21 bp, Artificial sequence
  SiRNA target sequence
gttacagcagtcgtatggtaa

SEQ ID NO: 263350 - DNA, 21 bp, Artificial sequence
  SiRNA target sequence
ttacagcagtcgtatggtaac

SEQ ID NO: 263351 - DNA, 21 bp, Artificial sequence
  SiRNA target sequence
tacagcagtcgtatggtaaca

SEQ ID NO: 263352 - DNA, 21 bp, Artificial sequence
  SiRNA target sequence
acagcagtcgtatggtaacac

SEQ ID NO: 263353 - DNA, 21 bp, Artificial sequence
  SiRNA target sequence
cagcagtcgtatggtaacaca

SEQ ID NO: 263354 - DNA, 21 bp, Artificial sequence
  SiRNA target sequence
agcagtcgtatggtaacacat

SEQ ID NO: 263355 - DNA, 21 bp, Artificial sequence
  SiRNA target sequence
gcagtcgtatggtaacacatg

SEQ ID NO: 263356 - DNA, 21 bp, Artificial sequence
  SiRNA target sequence
cagtcgtatggtaacacatgc

SEQ ID NO: 263357 - DNA, 21 bp, Artificial sequence
  SiRNA target sequence
agtcgtatggtaacacatgcg

SEQ ID NO: 263358 - DNA, 21 bp, Artificial sequence
  SiRNA target sequence
gtcgtatggtaacacatgcgg

SEQ ID NO: 263359 - DNA, 21 bp, Artificial sequence
  SiRNA target sequence
tcgtatggtaacacatgcggc

SEQ ID NO: 263360 - DNA, 21 bp, Artificial sequence
  SiRNA target sequence
cgtatggtaacacatgcggcg

SEQ ID NO: 263361 - DNA, 21 bp, Artificial sequence
  SiRNA target sequence
gtatggtaacacatgcggcgt

SEQ ID NO: 263362 - DNA, 21 bp, Artificial sequence
  SiRNA target sequence
tatggtaacacatgcggcgtt

SEQ ID NO: 263363 - DNA, 21 bp, Artificial sequence
  SiRNA target sequence
atggtaacacatgcggcgttc

SEQ ID NO: 263364 - DNA, 21 bp, Artificial sequence
  SiRNA target sequence
tggtaacacatgcggcgttcc

SEQ ID NO: 263365 - DNA, 21 bp, Artificial sequence
  SiRNA target sequence
ggtaacacatgcggcgttccg

SEQ ID NO: 263366 - DNA, 21 bp, Artificial sequence
  SiRNA target sequence
gtaacacatgcggcgttccga

SEQ ID NO: 263367 - DNA, 21 bp, Artificial sequence
  SiRNA target sequence
taacacatgcggcgttccgaa

SEQ ID NO: 263368 - DNA, 21 bp, Artificial sequence
  SiRNA target sequence
aacacatgcggcgttccgaaa

SEQ ID NO: 263369 - DNA, 21 bp, Artificial sequence
  SiRNA target sequence
acacatgcggcgttccgaaat

SEQ ID NO: 263370 - DNA, 21 bp, Artificial sequence
  SiRNA target sequence
cacatgcggcgttccgaaata

SEQ ID NO: 263371 - DNA, 21 bp, Artificial sequence
  SiRNA target sequence
acatgcggcgttccgaaatac

SEQ ID NO: 263372 - DNA, 21 bp, Artificial sequence
  SiRNA target sequence
catgcggcgttccgaaatacc

SEQ ID NO: 263373 - DNA, 21 bp, Artificial sequence
  SiRNA target sequence
atgcggcgttccgaaatacca

SEQ ID NO: 263374 - DNA, 21 bp, Artificial sequence
  SiRNA target sequence
tgcggcgttccgaaataccat

SEQ ID NO: 263375 - DNA, 21 bp, Artificial sequence
  SiRNA target sequence
gcggcgttccgaaataccatg

SEQ ID NO: 263376 - DNA, 21 bp, Artificial sequence
  SiRNA target sequence
cggcgttccgaaataccatgc

SEQ ID NO: 263377 - DNA, 21 bp, Artificial sequence
  SiRNA target sequence
ggcgttccgaaataccatgcc

SEQ ID NO: 263378 - DNA, 21 bp, Artificial sequence
  SiRNA target sequence
gcgttccgaaataccatgcct

SEQ ID NO: 263379 - DNA, 21 bp, Artificial sequence
  SiRNA target sequence
cgttccgaaataccatgcctg

SEQ ID NO: 263380 - DNA, 21 bp, Artificial sequence
  SiRNA target sequence
gttccgaaataccatgcctgg

SEQ ID NO: 263381 - DNA, 21 bp, Artificial sequence
  SiRNA target sequence
ttccgaaataccatgcctggc

SEQ ID NO: 263382 - DNA, 21 bp, Artificial sequence
  SiRNA target sequence
tccgaaataccatgcctggcg

SEQ ID NO: 263383 - DNA, 21 bp, Artificial sequence
  SiRNA target sequence
ccgaaataccatgcctggcga

SEQ ID NO: 263384 - DNA, 21 bp, Artificial sequence
  SiRNA target sequence
cgaaataccatgcctggcgat

SEQ ID NO: 263385 - DNA, 21 bp, Artificial sequence
  SiRNA target sequence
gaaataccatgcctggcgatt

SEQ ID NO: 263386 - DNA, 21 bp, Artificial sequence
  SiRNA target sequence
aaataccatgcctggcgattc

SEQ ID NO: 263387 - DNA, 21 bp, Artificial sequence
  SiRNA target sequence
aataccatgcctggcgattca

SEQ ID NO: 263388 - DNA, 21 bp, Artificial sequence
  SiRNA target sequence
ataccatgcctggcgattcac

SEQ ID NO: 263389 - DNA, 21 bp, Artificial sequence
  SiRNA target sequence
taccatgcctggcgattcaca

SEQ ID NO: 263390 - DNA, 21 bp, Artificial sequence
  SiRNA target sequence
accatgcctggcgattcacaa

SEQ ID NO: 263391 - DNA, 21 bp, Artificial sequence
  SiRNA target sequence
ccatgcctggcgattcacaac

SEQ ID NO: 263392 - DNA, 21 bp, Artificial sequence
  SiRNA target sequence
catgcctggcgattcacaaca

SEQ ID NO: 263393 - DNA, 21 bp, Artificial sequence
  SiRNA target sequence
atgcctggcgattcacaacaa

SEQ ID NO: 263394 - DNA, 21 bp, Artificial sequence
  SiRNA target sequence
tgcctggcgattcacaacaag

SEQ ID NO: 263395 - DNA, 21 bp, Artificial sequence
  SiRNA target sequence
gcctggcgattcacaacaaga

SEQ ID NO: 263396 - DNA, 21 bp, Artificial sequence
  SiRNA target sequence
cctggcgattcacaacaagaa

SEQ ID NO: 263397 - DNA, 21 bp, Artificial sequence
  SiRNA target sequence
ctggcgattcacaacaagaaa

SEQ ID NO: 263398 - DNA, 21 bp, Artificial sequence
  SiRNA target sequence
tggcgattcacaacaagaaag

SEQ ID NO: 263399 - DNA, 21 bp, Artificial sequence
  SiRNA target sequence
ggcgattcacaacaagaaagc

SEQ ID NO: 263400 - DNA, 21 bp, Artificial sequence
  SiRNA target sequence
gcgattcacaacaagaaagca

SEQ ID NO: 263401 - DNA, 21 bp, Artificial sequence
  SiRNA target sequence
cgattcacaacaagaaagcaa

SEQ ID NO: 263402 - DNA, 21 bp, Artificial sequence
  SiRNA target sequence
gattcacaacaagaaagcaat

SEQ ID NO: 263403 - DNA, 21 bp, Artificial sequence
  SiRNA target sequence
attcacaacaagaaagcaata

SEQ ID NO: 263404 - DNA, 21 bp, Artificial sequence
  SiRNA target sequence
ttcacaacaagaaagcaatac

SEQ ID NO: 263405 - DNA, 21 bp, Artificial sequence
  SiRNA target sequence
tcacaacaagaaagcaatact

SEQ ID NO: 263406 - DNA, 21 bp, Artificial sequence
  SiRNA target sequence
cacaacaagaaagcaatactc

SEQ ID NO: 263407 - DNA, 21 bp, Artificial sequence
  SiRNA target sequence
acaacaagaaagcaatactcc

SEQ ID NO: 263408 - DNA, 21 bp, Artificial sequence
  SiRNA target sequence
caacaagaaagcaatactccc

SEQ ID NO: 263409 - DNA, 21 bp, Artificial sequence
  SiRNA target sequence
aacaagaaagcaatactccca

SEQ ID NO: 263410 - DNA, 21 bp, Artificial sequence
  SiRNA target sequence
acaagaaagcaatactcccaa

SEQ ID NO: 263411 - DNA, 21 bp, Artificial sequence
  SiRNA target sequence
caagaaagcaatactcccaac

SEQ ID NO: 263412 - DNA, 21 bp, Artificial sequence
  SiRNA target sequence
aagaaagcaatactcccaacg

SEQ ID NO: 263413 - DNA, 21 bp, Artificial sequence
  SiRNA target sequence
agaaagcaatactcccaacgt

SEQ ID NO: 263414 - DNA, 21 bp, Artificial sequence
  SiRNA target sequence
gaaagcaatactcccaacgta

SEQ ID NO: 263415 - DNA, 21 bp, Artificial sequence
  SiRNA target sequence
aaagcaatactcccaacgtac

SEQ ID NO: 263416 - DNA, 21 bp, Artificial sequence
  SiRNA target sequence
aagcaatactcccaacgtaca

SEQ ID NO: 263417 - DNA, 21 bp, Artificial sequence
  SiRNA target sequence
agcaatactcccaacgtacac

SEQ ID NO: 263418 - DNA, 21 bp, Artificial sequence
  SiRNA target sequence
gcaatactcccaacgtacaca

SEQ ID NO: 263419 - DNA, 21 bp, Artificial sequence
  SiRNA target sequence
caatactcccaacgtacacaa

SEQ ID NO: 263420 - DNA, 21 bp, Artificial sequence
  SiRNA target sequence
aatactcccaacgtacacaat

SEQ ID NO: 263421 - DNA, 21 bp, Artificial sequence
  SiRNA target sequence
atactcccaacgtacacaata

SEQ ID NO: 263422 - DNA, 21 bp, Artificial sequence
  SiRNA target sequence
tactcccaacgtacacaatac

SEQ ID NO: 263423 - DNA, 21 bp, Artificial sequence
  SiRNA target sequence
actcccaacgtacacaatacg

SEQ ID NO: 263424 - DNA, 21 bp, Artificial sequence
  SiRNA target sequence
ctcccaacgtacacaatacgg

SEQ ID NO: 263425 - DNA, 21 bp, Artificial sequence
  SiRNA target sequence
tcccaacgtacacaatacgga

SEQ ID NO: 263426 - DNA, 21 bp, Artificial sequence
  SiRNA target sequence
cccaacgtacacaatacggaa

SEQ ID NO: 263427 - DNA, 21 bp, Artificial sequence
  SiRNA target sequence
ccaacgtacacaatacggaac

SEQ ID NO: 263428 - DNA, 21 bp, Artificial sequence
  SiRNA target sequence
caacgtacacaatacggaact

SEQ ID NO: 263429 - DNA, 21 bp, Artificial sequence
  SiRNA target sequence
aacgtacacaatacggaactc

SEQ ID NO: 263430 - DNA, 21 bp, Artificial sequence
  SiRNA target sequence
acgtacacaatacggaactcg

SEQ ID NO: 263431 - DNA, 21 bp, Artificial sequence
  SiRNA target sequence
cgtacacaatacggaactcgc

SEQ ID NO: 263432 - DNA, 21 bp, Artificial sequence
  SiRNA target sequence
gtacacaatacggaactcgct

SEQ ID NO: 263433 - DNA, 21 bp, Artificial sequence
  SiRNA target sequence
tacacaatacggaactcgctt

SEQ ID NO: 263434 - DNA, 21 bp, Artificial sequence
  SiRNA target sequence
acacaatacggaactcgcttc

SEQ ID NO: 263435 - DNA, 21 bp, Artificial sequence
  SiRNA target sequence
cacaatacggaactcgcttcg

SEQ ID NO: 263436 - DNA, 21 bp, Artificial sequence
  SiRNA target sequence
acaatacggaactcgcttcgt

SEQ ID NO: 263437 - DNA, 21 bp, Artificial sequence
  SiRNA target sequence
caatacggaactcgcttcgtc

SEQ ID NO: 263438 - DNA, 21 bp, Artificial sequence
  SiRNA target sequence
aatacggaactcgcttcgtcc

SEQ ID NO: 263439 - DNA, 21 bp, Artificial sequence
  SiRNA target sequence
atacggaactcgcttcgtcca

SEQ ID NO: 263440 - DNA, 21 bp, Artificial sequence
  SiRNA target sequence
tacggaactcgcttcgtccac

SEQ ID NO: 263441 - DNA, 21 bp, Artificial sequence
  SiRNA target sequence
acggaactcgcttcgtccact

SEQ ID NO: 263442 - DNA, 21 bp, Artificial sequence
  SiRNA target sequence
cggaactcgcttcgtccacta

SEQ ID NO: 263443 - DNA, 21 bp, Artificial sequence
  SiRNA target sequence
ggaactcgcttcgtccactag

SEQ ID NO: 263444 - DNA, 21 bp, Artificial sequence
  SiRNA target sequence
gaactcgcttcgtccactagt

SEQ ID NO: 263445 - DNA, 21 bp, Artificial sequence
  SiRNA target sequence
aactcgcttcgtccactagtg

SEQ ID NO: 263446 - DNA, 21 bp, Artificial sequence
  SiRNA target sequence
actcgcttcgtccactagtga

SEQ ID NO: 263447 - DNA, 21 bp, Artificial sequence
  SiRNA target sequence
ctcgcttcgtccactagtgaa

SEQ ID NO: 263448 - DNA, 21 bp, Artificial sequence
  SiRNA target sequence
tcgcttcgtccactagtgaaa

SEQ ID NO: 263449 - DNA, 21 bp, Artificial sequence
  SiRNA target sequence
cgcttcgtccactagtgaaaa

SEQ ID NO: 263450 - DNA, 21 bp, Artificial sequence
  SiRNA target sequence
gcttcgtccactagtgaaaac

SEQ ID NO: 263451 - DNA, 21 bp, Artificial sequence
  SiRNA target sequence
cttcgtccactagtgaaaact

SEQ ID NO: 263452 - DNA, 21 bp, Artificial sequence
  SiRNA target sequence
ttcgtccactagtgaaaactc

SEQ ID NO: 263453 - DNA, 21 bp, Artificial sequence
  SiRNA target sequence
tcgtccactagtgaaaactcg

SEQ ID NO: 263454 - DNA, 21 bp, Artificial sequence
  SiRNA target sequence
cgtccactagtgaaaactcgg

SEQ ID NO: 263455 - DNA, 21 bp, Artificial sequence
  SiRNA target sequence
gtccactagtgaaaactcggt

SEQ ID NO: 263456 - DNA, 21 bp, Artificial sequence
  SiRNA target sequence
tccactagtgaaaactcggtt

SEQ ID NO: 263457 - DNA, 21 bp, Artificial sequence
  SiRNA target sequence
ccactagtgaaaactcggttg

SEQ ID NO: 263458 - DNA, 21 bp, Artificial sequence
  SiRNA target sequence
cactagtgaaaactcggttga

SEQ ID NO: 263459 - DNA, 21 bp, Artificial sequence
  SiRNA target sequence
actagtgaaaactcggttgag

SEQ ID NO: 263460 - DNA, 21 bp, Artificial sequence
  SiRNA target sequence
ctagtgaaaactcggttgaga

SEQ ID NO: 263461 - DNA, 21 bp, Artificial sequence
  SiRNA target sequence
tagtgaaaactcggttgagac

SEQ ID NO: 263462 - DNA, 21 bp, Artificial sequence
  SiRNA target sequence
agtgaaaactcggttgagacc

SEQ ID NO: 263463 - DNA, 21 bp, Artificial sequence
  SiRNA target sequence
gtgaaaactcggttgagaccc

SEQ ID NO: 263464 - DNA, 21 bp, Artificial sequence
  SiRNA target sequence
tgaaaactcggttgagaccca

SEQ ID NO: 263465 - DNA, 21 bp, Artificial sequence
  SiRNA target sequence
gaaaactcggttgagacccaa

SEQ ID NO: 263466 - DNA, 21 bp, Artificial sequence
  SiRNA target sequence
aaaactcggttgagacccaag

SEQ ID NO: 263467 - DNA, 21 bp, Artificial sequence
  SiRNA target sequence
aaactcggttgagacccaaga

SEQ ID NO: 263468 - DNA, 21 bp, Artificial sequence
  SiRNA target sequence
aactcggttgagacccaagaa

SEQ ID NO: 263469 - DNA, 21 bp, Artificial sequence
  SiRNA target sequence
actcggttgagacccaagaaa

SEQ ID NO: 263470 - DNA, 21 bp, Artificial sequence
  SiRNA target sequence
ctcggttgagacccaagaaat

SEQ ID NO: 263471 - DNA, 21 bp, Artificial sequence
  SiRNA target sequence
tcggttgagacccaagaaatc

SEQ ID NO: 263472 - DNA, 21 bp, Artificial sequence
  SiRNA target sequence
cggttgagacccaagaaatca

SEQ ID NO: 263473 - DNA, 21 bp, Artificial sequence
  SiRNA target sequence
ggttgagacccaagaaatcac

SEQ ID NO: 263474 - DNA, 21 bp, Artificial sequence
  SiRNA target sequence
gttgagacccaagaaatcaca

SEQ ID NO: 263475 - DNA, 21 bp, Artificial sequence
  SiRNA target sequence
ttgagacccaagaaatcacaa

SEQ ID NO: 263476 - DNA, 21 bp, Artificial sequence
  SiRNA target sequence
tgagacccaagaaatcacaac

SEQ ID NO: 263477 - DNA, 21 bp, Artificial sequence
  SiRNA target sequence
gagacccaagaaatcacaacc

SEQ ID NO: 263478 - DNA, 21 bp, Artificial sequence
  SiRNA target sequence
agacccaagaaatcacaacct

SEQ ID NO: 263479 - DNA, 21 bp, Artificial sequence
  SiRNA target sequence
gacccaagaaatcacaacctt

SEQ ID NO: 263480 - DNA, 21 bp, Artificial sequence
  SiRNA target sequence
acccaagaaatcacaaccttt

SEQ ID NO: 263481 - DNA, 21 bp, Artificial sequence
  SiRNA target sequence
cccaagaaatcacaacctttc

SEQ ID NO: 263482 - DNA, 21 bp, Artificial sequence
  SiRNA target sequence
ccaagaaatcacaacctttca

SEQ ID NO: 263483 - DNA, 21 bp, Artificial sequence
  SiRNA target sequence
caagaaatcacaacctttcat

SEQ ID NO: 263484 - DNA, 21 bp, Artificial sequence
  SiRNA target sequence
aagaaatcacaacctttcatg

SEQ ID NO: 263485 - DNA, 21 bp, Artificial sequence
  SiRNA target sequence
agaaatcacaacctttcatga

SEQ ID NO: 263486 - DNA, 21 bp, Artificial sequence
  SiRNA target sequence
gaaatcacaacctttcatgat

SEQ ID NO: 263487 - DNA, 21 bp, Artificial sequence
  SiRNA target sequence
aaatcacaacctttcatgatg

SEQ ID NO: 263488 - DNA, 21 bp, Artificial sequence
  SiRNA target sequence
aatcacaacctttcatgatgt

SEQ ID NO: 263489 - DNA, 21 bp, Artificial sequence
  SiRNA target sequence
atcacaacctttcatgatgtg

SEQ ID NO: 263490 - DNA, 21 bp, Artificial sequence
  SiRNA target sequence
tcacaacctttcatgatgtgg

SEQ ID NO: 263491 - DNA, 21 bp, Artificial sequence
  SiRNA target sequence
cacaacctttcatgatgtgga

SEQ ID NO: 263492 - DNA, 21 bp, Artificial sequence
  SiRNA target sequence
acaacctttcatgatgtggaa

SEQ ID NO: 263493 - DNA, 21 bp, Artificial sequence
  SiRNA target sequence
caacctttcatgatgtggaaa

SEQ ID NO: 263494 - DNA, 21 bp, Artificial sequence
  SiRNA target sequence
aacctttcatgatgtggaaac

SEQ ID NO: 263495 - DNA, 21 bp, Artificial sequence
  SiRNA target sequence
acctttcatgatgtggaaact

SEQ ID NO: 263496 - DNA, 21 bp, Artificial sequence
  SiRNA target sequence
cctttcatgatgtggaaactc

SEQ ID NO: 263497 - DNA, 21 bp, Artificial sequence
  SiRNA target sequence
ctttcatgatgtggaaactcc

SEQ ID NO: 263498 - DNA, 21 bp, Artificial sequence
  SiRNA target sequence
tttcatgatgtggaaactcca

SEQ ID NO: 263499 - DNA, 21 bp, Artificial sequence
  SiRNA target sequence
ttcatgatgtggaaactccaa

SEQ ID NO: 263500 - DNA, 21 bp, Artificial sequence
  SiRNA target sequence
tcatgatgtggaaactccaaa

SEQ ID NO: 263501 - DNA, 21 bp, Artificial sequence
  SiRNA target sequence
catgatgtggaaactccaaat

SEQ ID NO: 263502 - DNA, 21 bp, Artificial sequence
  SiRNA target sequence
atgatgtggaaactccaaata

SEQ ID NO: 263503 - DNA, 21 bp, Artificial sequence
  SiRNA target sequence
tgatgtggaaactccaaatag

SEQ ID NO: 263504 - DNA, 21 bp, Artificial sequence
  SiRNA target sequence
gatgtggaaactccaaatagg

SEQ ID NO: 263505 - DNA, 21 bp, Artificial sequence
  SiRNA target sequence
atgtggaaactccaaatagga

SEQ ID NO: 263506 - DNA, 21 bp, Artificial sequence
  SiRNA target sequence
tgtggaaactccaaataggat

SEQ ID NO: 263507 - DNA, 21 bp, Artificial sequence
  SiRNA target sequence
gtggaaactccaaataggatc

SEQ ID NO: 263508 - DNA, 21 bp, Artificial sequence
  SiRNA target sequence
tggaaactccaaataggatcg

SEQ ID NO: 263509 - DNA, 21 bp, Artificial sequence
  SiRNA target sequence
ggaaactccaaataggatcga

SEQ ID NO: 263510 - DNA, 21 bp, Artificial sequence
  SiRNA target sequence
gaaactccaaataggatcgat

SEQ ID NO: 263511 - DNA, 21 bp, Artificial sequence
  SiRNA target sequence
aaactccaaataggatcgata

SEQ ID NO: 263512 - DNA, 21 bp, Artificial sequence
  SiRNA target sequence
aactccaaataggatcgatac

SEQ ID NO: 263513 - DNA, 21 bp, Artificial sequence
  SiRNA target sequence
actccaaataggatcgatacc

SEQ ID NO: 263514 - DNA, 21 bp, Artificial sequence
  SiRNA target sequence
ctccaaataggatcgataccc

SEQ ID NO: 263515 - DNA, 21 bp, Artificial sequence
  SiRNA target sequence
tccaaataggatcgatacccc

SEQ ID NO: 263516 - DNA, 21 bp, Artificial sequence
  SiRNA target sequence
ccaaataggatcgataccccc

SEQ ID NO: 263517 - DNA, 21 bp, Artificial sequence
  SiRNA target sequence
caaataggatcgataccccca

SEQ ID NO: 263518 - DNA, 21 bp, Artificial sequence
  SiRNA target sequence
aaataggatcgatacccccat

SEQ ID NO: 263519 - DNA, 21 bp, Artificial sequence
  SiRNA target sequence
aataggatcgatacccccatg

SEQ ID NO: 263520 - DNA, 21 bp, Artificial sequence
  SiRNA target sequence
ataggatcgatacccccatgg

SEQ ID NO: 263521 - DNA, 21 bp, Artificial sequence
  SiRNA target sequence
taggatcgatacccccatggc

SEQ ID NO: 263522 - DNA, 21 bp, Artificial sequence
  SiRNA target sequence
aggatcgatacccccatggct

SEQ ID NO: 263523 - DNA, 21 bp, Artificial sequence
  SiRNA target sequence
ggatcgatacccccatggctc

SEQ ID NO: 263524 - DNA, 21 bp, Artificial sequence
  SiRNA target sequence
gatcgatacccccatggctca

SEQ ID NO: 263525 - DNA, 21 bp, Artificial sequence
  SiRNA target sequence
atcgatacccccatggctcag

SEQ ID NO: 263526 - DNA, 21 bp, Artificial sequence
  SiRNA target sequence
tcgatacccccatggctcagg

SEQ ID NO: 263527 - DNA, 21 bp, Artificial sequence
  SiRNA target sequence
cgatacccccatggctcagga

SEQ ID NO: 263528 - DNA, 21 bp, Artificial sequence
  SiRNA target sequence
gatacccccatggctcaggat

SEQ ID NO: 263529 - DNA, 21 bp, Artificial sequence
  SiRNA target sequence
atacccccatggctcaggata

SEQ ID NO: 263530 - DNA, 21 bp, Artificial sequence
  SiRNA target sequence
tacccccatggctcaggatac

SEQ ID NO: 263531 - DNA, 21 bp, Artificial sequence
  SiRNA target sequence
acccccatggctcaggatact

SEQ ID NO: 263532 - DNA, 21 bp, Artificial sequence
  SiRNA target sequence
cccccatggctcaggatactt

SEQ ID NO: 263533 - DNA, 21 bp, Artificial sequence
  SiRNA target sequence
ccccatggctcaggatacttc

SEQ ID NO: 263534 - DNA, 21 bp, Artificial sequence
  SiRNA target sequence
cccatggctcaggatacttca

SEQ ID NO: 263535 - DNA, 21 bp, Artificial sequence
  SiRNA target sequence
ccatggctcaggatacttcat

SEQ ID NO: 263536 - DNA, 21 bp, Artificial sequence
  SiRNA target sequence
catggctcaggatacttcatc

SEQ ID NO: 263537 - DNA, 21 bp, Artificial sequence
  SiRNA target sequence
atggctcaggatacttcatcg

SEQ ID NO: 263538 - DNA, 21 bp, Artificial sequence
  SiRNA target sequence
tggctcaggatacttcatcgg

SEQ ID NO: 263539 - DNA, 21 bp, Artificial sequence
  SiRNA target sequence
ggctcaggatacttcatcggc

SEQ ID NO: 263540 - DNA, 21 bp, Artificial sequence
  SiRNA target sequence
gctcaggatacttcatcggct

SEQ ID NO: 263541 - DNA, 21 bp, Artificial sequence
  SiRNA target sequence
ctcaggatacttcatcggcta

SEQ ID NO: 263542 - DNA, 21 bp, Artificial sequence
  SiRNA target sequence
tcaggatacttcatcggctag

SEQ ID NO: 263543 - DNA, 21 bp, Artificial sequence
  SiRNA target sequence
caggatacttcatcggctagg

SEQ ID NO: 263544 - DNA, 21 bp, Artificial sequence
  SiRNA target sequence
aggatacttcatcggctagga

SEQ ID NO: 263545 - DNA, 21 bp, Artificial sequence
  SiRNA target sequence
ggatacttcatcggctaggaa

SEQ ID NO: 263546 - DNA, 21 bp, Artificial sequence
  SiRNA target sequence
gatacttcatcggctaggaac

SEQ ID NO: 263547 - DNA, 21 bp, Artificial sequence
  SiRNA target sequence
atacttcatcggctaggaaca

SEQ ID NO: 263548 - DNA, 21 bp, Artificial sequence
  SiRNA target sequence
tacttcatcggctaggaacat

SEQ ID NO: 263549 - DNA, 21 bp, Artificial sequence
  SiRNA target sequence
acttcatcggctaggaacatg

SEQ ID NO: 263550 - DNA, 21 bp, Artificial sequence
  SiRNA target sequence
cttcatcggctaggaacatgg

SEQ ID NO: 263551 - DNA, 21 bp, Artificial sequence
  SiRNA target sequence
ttcatcggctaggaacatgga

SEQ ID NO: 263552 - DNA, 21 bp, Artificial sequence
  SiRNA target sequence
tcatcggctaggaacatggat

SEQ ID NO: 263553 - DNA, 21 bp, Artificial sequence
  SiRNA target sequence
catcggctaggaacatggatg

SEQ ID NO: 263554 - DNA, 21 bp, Artificial sequence
  SiRNA target sequence
atcggctaggaacatggatga

SEQ ID NO: 263555 - DNA, 21 bp, Artificial sequence
  SiRNA target sequence
tcggctaggaacatggatgat

SEQ ID NO: 263556 - DNA, 21 bp, Artificial sequence
  SiRNA target sequence
cggctaggaacatggatgata

SEQ ID NO: 263557 - DNA, 21 bp, Artificial sequence
  SiRNA target sequence
ggctaggaacatggatgatac

SEQ ID NO: 263558 - DNA, 21 bp, Artificial sequence
  SiRNA target sequence
gctaggaacatggatgatacg

SEQ ID NO: 263559 - DNA, 21 bp, Artificial sequence
  SiRNA target sequence
ctaggaacatggatgatacgc

SEQ ID NO: 263560 - DNA, 21 bp, Artificial sequence
  SiRNA target sequence
taggaacatggatgatacgca

SEQ ID NO: 263561 - DNA, 21 bp, Artificial sequence
  SiRNA target sequence
aggaacatggatgatacgcac

SEQ ID NO: 263562 - DNA, 21 bp, Artificial sequence
  SiRNA target sequence
ggaacatggatgatacgcaca

SEQ ID NO: 263563 - DNA, 21 bp, Artificial sequence
  SiRNA target sequence
gaacatggatgatacgcacag

SEQ ID NO: 263564 - DNA, 21 bp, Artificial sequence
  SiRNA target sequence
aacatggatgatacgcacagt

SEQ ID NO: 263565 - DNA, 21 bp, Artificial sequence
  SiRNA target sequence
acatggatgatacgcacagta

SEQ ID NO: 263566 - DNA, 21 bp, Artificial sequence
  SiRNA target sequence
catggatgatacgcacagtat

SEQ ID NO: 263567 - DNA, 21 bp, Artificial sequence
  SiRNA target sequence
atggatgatacgcacagtatt

SEQ ID NO: 263568 - DNA, 21 bp, Artificial sequence
  SiRNA target sequence
tggatgatacgcacagtatta

SEQ ID NO: 263569 - DNA, 21 bp, Artificial sequence
  SiRNA target sequence
ggatgatacgcacagtattat

SEQ ID NO: 263570 - DNA, 21 bp, Artificial sequence
  SiRNA target sequence
gatgatacgcacagtattatt

SEQ ID NO: 263571 - DNA, 21 bp, Artificial sequence
  SiRNA target sequence
atgatacgcacagtattattc

SEQ ID NO: 263572 - DNA, 21 bp, Artificial sequence
  SiRNA target sequence
tgatacgcacagtattattca

SEQ ID NO: 263573 - DNA, 21 bp, Artificial sequence
  SiRNA target sequence
gatacgcacagtattattcag

SEQ ID NO: 263574 - DNA, 21 bp, Artificial sequence
  SiRNA target sequence
atacgcacagtattattcagt

SEQ ID NO: 263575 - DNA, 21 bp, Artificial sequence
  SiRNA target sequence
tacgcacagtattattcagtt

SEQ ID NO: 263576 - DNA, 21 bp, Artificial sequence
  SiRNA target sequence
acgcacagtattattcagttt

SEQ ID NO: 263577 - DNA, 21 bp, Artificial sequence
  SiRNA target sequence
cgcacagtattattcagtttt

SEQ ID NO: 263578 - DNA, 21 bp, Artificial sequence
  SiRNA target sequence
gcacagtattattcagttttt

SEQ ID NO: 263579 - DNA, 21 bp, Artificial sequence
  SiRNA target sequence
cacagtattattcagttttta

SEQ ID NO: 263580 - DNA, 21 bp, Artificial sequence
  SiRNA target sequence
acagtattattcagtttttac

SEQ ID NO: 263581 - DNA, 21 bp, Artificial sequence
  SiRNA target sequence
cagtattattcagtttttaca

SEQ ID NO: 263582 - DNA, 21 bp, Artificial sequence
  SiRNA target sequence
agtattattcagtttttacag

SEQ ID NO: 263583 - DNA, 21 bp, Artificial sequence
  SiRNA target sequence
gtattattcagtttttacagc

SEQ ID NO: 263584 - DNA, 21 bp, Artificial sequence
  SiRNA target sequence
tattattcagtttttacagcg

SEQ ID NO: 263585 - DNA, 21 bp, Artificial sequence
  SiRNA target sequence
attattcagtttttacagcgc

SEQ ID NO: 263586 - DNA, 21 bp, Artificial sequence
  SiRNA target sequence
ttattcagtttttacagcgcc

SEQ ID NO: 263587 - DNA, 21 bp, Artificial sequence
  SiRNA target sequence
tattcagtttttacagcgccc

SEQ ID NO: 263588 - DNA, 21 bp, Artificial sequence
  SiRNA target sequence
attcagtttttacagcgcccc

SEQ ID NO: 263589 - DNA, 21 bp, Artificial sequence
  SiRNA target sequence
ttcagtttttacagcgccccg

SEQ ID NO: 263590 - DNA, 21 bp, Artificial sequence
  SiRNA target sequence
tcagtttttacagcgccccgt

SEQ ID NO: 263591 - DNA, 21 bp, Artificial sequence
  SiRNA target sequence
cagtttttacagcgccccgtt

SEQ ID NO: 263592 - DNA, 21 bp, Artificial sequence
  SiRNA target sequence
agtttttacagcgccccgttc

SEQ ID NO: 263593 - DNA, 21 bp, Artificial sequence
  SiRNA target sequence
gtttttacagcgccccgttct

SEQ ID NO: 263594 - DNA, 21 bp, Artificial sequence
  SiRNA target sequence
tttttacagcgccccgttctc

SEQ ID NO: 263595 - DNA, 21 bp, Artificial sequence
  SiRNA target sequence
ttttacagcgccccgttctca

SEQ ID NO: 263596 - DNA, 21 bp, Artificial sequence
  SiRNA target sequence
tttacagcgccccgttctcat

SEQ ID NO: 263597 - DNA, 21 bp, Artificial sequence
  SiRNA target sequence
ttacagcgccccgttctcatt

SEQ ID NO: 263598 - DNA, 21 bp, Artificial sequence
  SiRNA target sequence
tacagcgccccgttctcattg

SEQ ID NO: 263599 - DNA, 21 bp, Artificial sequence
  SiRNA target sequence
acagcgccccgttctcattga

SEQ ID NO: 263600 - DNA, 21 bp, Artificial sequence
  SiRNA target sequence
cagcgccccgttctcattgac

SEQ ID NO: 263601 - DNA, 21 bp, Artificial sequence
  SiRNA target sequence
agcgccccgttctcattgaca

SEQ ID NO: 263602 - DNA, 21 bp, Artificial sequence
  SiRNA target sequence
gcgccccgttctcattgacaa

SEQ ID NO: 263603 - DNA, 21 bp, Artificial sequence
  SiRNA target sequence
cgccccgttctcattgacaac

SEQ ID NO: 263604 - DNA, 21 bp, Artificial sequence
  SiRNA target sequence
gccccgttctcattgacaaca

SEQ ID NO: 263605 - DNA, 21 bp, Artificial sequence
  SiRNA target sequence
ccccgttctcattgacaacat

SEQ ID NO: 263606 - DNA, 21 bp, Artificial sequence
  SiRNA target sequence
cccgttctcattgacaacatt

SEQ ID NO: 263607 - DNA, 21 bp, Artificial sequence
  SiRNA target sequence
ccgttctcattgacaacattg

SEQ ID NO: 263608 - DNA, 21 bp, Artificial sequence
  SiRNA target sequence
cgttctcattgacaacattga

SEQ ID NO: 263609 - DNA, 21 bp, Artificial sequence
  SiRNA target sequence
gttctcattgacaacattgag

SEQ ID NO: 263610 - DNA, 21 bp, Artificial sequence
  SiRNA target sequence
ttctcattgacaacattgaga

SEQ ID NO: 263611 - DNA, 21 bp, Artificial sequence
  SiRNA target sequence
tctcattgacaacattgagat

SEQ ID NO: 263612 - DNA, 21 bp, Artificial sequence
  SiRNA target sequence
ctcattgacaacattgagatc

SEQ ID NO: 263613 - DNA, 21 bp, Artificial sequence
  SiRNA target sequence
tcattgacaacattgagatca

SEQ ID NO: 263614 - DNA, 21 bp, Artificial sequence
  SiRNA target sequence
cattgacaacattgagatcat

SEQ ID NO: 263615 - DNA, 21 bp, Artificial sequence
  SiRNA target sequence
attgacaacattgagatcatt

SEQ ID NO: 263616 - DNA, 21 bp, Artificial sequence
  SiRNA target sequence
ttgacaacattgagatcattg

SEQ ID NO: 263617 - DNA, 21 bp, Artificial sequence
  SiRNA target sequence
tgacaacattgagatcattgc

SEQ ID NO: 263618 - DNA, 21 bp, Artificial sequence
  SiRNA target sequence
gacaacattgagatcattgct

SEQ ID NO: 263619 - DNA, 21 bp, Artificial sequence
  SiRNA target sequence
acaacattgagatcattgctg

SEQ ID NO: 263620 - DNA, 21 bp, Artificial sequence
  SiRNA target sequence
caacattgagatcattgctgg

SEQ ID NO: 263621 - DNA, 21 bp, Artificial sequence
  SiRNA target sequence
aacattgagatcattgctgga

SEQ ID NO: 263622 - DNA, 21 bp, Artificial sequence
  SiRNA target sequence
acattgagatcattgctggaa

SEQ ID NO: 263623 - DNA, 21 bp, Artificial sequence
  SiRNA target sequence
cattgagatcattgctggaac

SEQ ID NO: 263624 - DNA, 21 bp, Artificial sequence
  SiRNA target sequence
attgagatcattgctggaaca

SEQ ID NO: 263625 - DNA, 21 bp, Artificial sequence
  SiRNA target sequence
ttgagatcattgctggaacaa

SEQ ID NO: 263626 - DNA, 21 bp, Artificial sequence
  SiRNA target sequence
tgagatcattgctggaacaac

SEQ ID NO: 263627 - DNA, 21 bp, Artificial sequence
  SiRNA target sequence
gagatcattgctggaacaacg

SEQ ID NO: 263628 - DNA, 21 bp, Artificial sequence
  SiRNA target sequence
agatcattgctggaacaacgg

SEQ ID NO: 263629 - DNA, 21 bp, Artificial sequence
  SiRNA target sequence
gatcattgctggaacaacggc

SEQ ID NO: 263630 - DNA, 21 bp, Artificial sequence
  SiRNA target sequence
atcattgctggaacaacggcc

SEQ ID NO: 263631 - DNA, 21 bp, Artificial sequence
  SiRNA target sequence
tcattgctggaacaacggccg

SEQ ID NO: 263632 - DNA, 21 bp, Artificial sequence
  SiRNA target sequence
cattgctggaacaacggccga

SEQ ID NO: 263633 - DNA, 21 bp, Artificial sequence
  SiRNA target sequence
attgctggaacaacggccgat

SEQ ID NO: 263634 - DNA, 21 bp, Artificial sequence
  SiRNA target sequence
ttgctggaacaacggccgatg

SEQ ID NO: 263635 - DNA, 21 bp, Artificial sequence
  SiRNA target sequence
tgctggaacaacggccgatgc

SEQ ID NO: 263636 - DNA, 21 bp, Artificial sequence
  SiRNA target sequence
gctggaacaacggccgatgca

SEQ ID NO: 263637 - DNA, 21 bp, Artificial sequence
  SiRNA target sequence
ctggaacaacggccgatgcaa

SEQ ID NO: 263638 - DNA, 21 bp, Artificial sequence
  SiRNA target sequence
tggaacaacggccgatgcaaa

SEQ ID NO: 263639 - DNA, 21 bp, Artificial sequence
  SiRNA target sequence
ggaacaacggccgatgcaaac

SEQ ID NO: 263640 - DNA, 21 bp, Artificial sequence
  SiRNA target sequence
gaacaacggccgatgcaaaca

SEQ ID NO: 263641 - DNA, 21 bp, Artificial sequence
  SiRNA target sequence
aacaacggccgatgcaaacaa

SEQ ID NO: 263642 - DNA, 21 bp, Artificial sequence
  SiRNA target sequence
acaacggccgatgcaaacaaa

SEQ ID NO: 263643 - DNA, 21 bp, Artificial sequence
  SiRNA target sequence
caacggccgatgcaaacaaac

SEQ ID NO: 263644 - DNA, 21 bp, Artificial sequence
  SiRNA target sequence
aacggccgatgcaaacaaacc

SEQ ID NO: 263645 - DNA, 21 bp, Artificial sequence
  SiRNA target sequence
acggccgatgcaaacaaaccc

SEQ ID NO: 263646 - DNA, 21 bp, Artificial sequence
  SiRNA target sequence
cggccgatgcaaacaaacccc

SEQ ID NO: 263647 - DNA, 21 bp, Artificial sequence
  SiRNA target sequence
ggccgatgcaaacaaacccct

SEQ ID NO: 263648 - DNA, 21 bp, Artificial sequence
  SiRNA target sequence
gccgatgcaaacaaacccctt

SEQ ID NO: 263649 - DNA, 21 bp, Artificial sequence
  SiRNA target sequence
ccgatgcaaacaaacccctta

SEQ ID NO: 263650 - DNA, 21 bp, Artificial sequence
  SiRNA target sequence
cgatgcaaacaaaccccttag

SEQ ID NO: 263651 - DNA, 21 bp, Artificial sequence
  SiRNA target sequence
gatgcaaacaaaccccttagc

SEQ ID NO: 263652 - DNA, 21 bp, Artificial sequence
  SiRNA target sequence
atgcaaacaaaccccttagcc

SEQ ID NO: 263653 - DNA, 21 bp, Artificial sequence
  SiRNA target sequence
tgcaaacaaaccccttagccg

SEQ ID NO: 263654 - DNA, 21 bp, Artificial sequence
  SiRNA target sequence
gcaaacaaaccccttagccga

SEQ ID NO: 263655 - DNA, 21 bp, Artificial sequence
  SiRNA target sequence
caaacaaaccccttagccgat

SEQ ID NO: 263656 - DNA, 21 bp, Artificial sequence
  SiRNA target sequence
aaacaaaccccttagccgata

SEQ ID NO: 263657 - DNA, 21 bp, Artificial sequence
  SiRNA target sequence
aacaaaccccttagccgatat

SEQ ID NO: 263658 - DNA, 21 bp, Artificial sequence
  SiRNA target sequence
acaaaccccttagccgatatg

SEQ ID NO: 263659 - DNA, 21 bp, Artificial sequence
  SiRNA target sequence
caaaccccttagccgatatgt

SEQ ID NO: 263660 - DNA, 21 bp, Artificial sequence
  SiRNA target sequence
aaaccccttagccgatatgtg

SEQ ID NO: 263661 - DNA, 21 bp, Artificial sequence
  SiRNA target sequence
aaccccttagccgatatgtgt

SEQ ID NO: 263662 - DNA, 21 bp, Artificial sequence
  SiRNA target sequence
accccttagccgatatgtgtt

SEQ ID NO: 263663 - DNA, 21 bp, Artificial sequence
  SiRNA target sequence
ccccttagccgatatgtgtta

SEQ ID NO: 263664 - DNA, 21 bp, Artificial sequence
  SiRNA target sequence
cccttagccgatatgtgttag

SEQ ID NO: 263665 - DNA, 21 bp, Artificial sequence
  SiRNA target sequence
ccttagccgatatgtgttaga

SEQ ID NO: 263666 - DNA, 21 bp, Artificial sequence
  SiRNA target sequence
cttagccgatatgtgttagat

SEQ ID NO: 263667 - DNA, 21 bp, Artificial sequence
  SiRNA target sequence
ttagccgatatgtgttagatc

SEQ ID NO: 263668 - DNA, 21 bp, Artificial sequence
  SiRNA target sequence
tagccgatatgtgttagatca

SEQ ID NO: 263669 - DNA, 21 bp, Artificial sequence
  SiRNA target sequence
agccgatatgtgttagatcaa

SEQ ID NO: 263670 - DNA, 21 bp, Artificial sequence
  SiRNA target sequence
gccgatatgtgttagatcaac

SEQ ID NO: 263671 - DNA, 21 bp, Artificial sequence
  SiRNA target sequence
ccgatatgtgttagatcaaca

SEQ ID NO: 263672 - DNA, 21 bp, Artificial sequence
  SiRNA target sequence
cgatatgtgttagatcaacaa

SEQ ID NO: 263673 - DNA, 21 bp, Artificial sequence
  SiRNA target sequence
gatatgtgttagatcaacaaa

SEQ ID NO: 263674 - DNA, 21 bp, Artificial sequence
  SiRNA target sequence
atatgtgttagatcaacaaaa

SEQ ID NO: 263675 - DNA, 21 bp, Artificial sequence
  SiRNA target sequence
tatgtgttagatcaacaaaat

SEQ ID NO: 263676 - DNA, 21 bp, Artificial sequence
  SiRNA target sequence
atgtgttagatcaacaaaatt

SEQ ID NO: 263677 - DNA, 21 bp, Artificial sequence
  SiRNA target sequence
tgtgttagatcaacaaaattc

SEQ ID NO: 263678 - DNA, 21 bp, Artificial sequence
  SiRNA target sequence
gtgttagatcaacaaaattcc

SEQ ID NO: 263679 - DNA, 21 bp, Artificial sequence
  SiRNA target sequence
tgttagatcaacaaaattccc

SEQ ID NO: 263680 - DNA, 21 bp, Artificial sequence
  SiRNA target sequence
gttagatcaacaaaattccca

SEQ ID NO: 263681 - DNA, 21 bp, Artificial sequence
  SiRNA target sequence
ttagatcaacaaaattcccaa

SEQ ID NO: 263682 - DNA, 21 bp, Artificial sequence
  SiRNA target sequence
tagatcaacaaaattcccaaa

SEQ ID NO: 263683 - DNA, 21 bp, Artificial sequence
  SiRNA target sequence
agatcaacaaaattcccaaaa

SEQ ID NO: 263684 - DNA, 21 bp, Artificial sequence
  SiRNA target sequence
gatcaacaaaattcccaaaag

SEQ ID NO: 263685 - DNA, 21 bp, Artificial sequence
  SiRNA target sequence
atcaacaaaattcccaaaagt

SEQ ID NO: 263686 - DNA, 21 bp, Artificial sequence
  SiRNA target sequence
tcaacaaaattcccaaaagta

SEQ ID NO: 263687 - DNA, 21 bp, Artificial sequence
  SiRNA target sequence
caacaaaattcccaaaagtat

SEQ ID NO: 263688 - DNA, 21 bp, Artificial sequence
  SiRNA target sequence
aacaaaattcccaaaagtatg

SEQ ID NO: 263689 - DNA, 21 bp, Artificial sequence
  SiRNA target sequence
acaaaattcccaaaagtatgt

SEQ ID NO: 263690 - DNA, 21 bp, Artificial sequence
  SiRNA target sequence
caaaattcccaaaagtatgta

SEQ ID NO: 263691 - DNA, 21 bp, Artificial sequence
  SiRNA target sequence
aaaattcccaaaagtatgtac

SEQ ID NO: 263692 - DNA, 21 bp, Artificial sequence
  SiRNA target sequence
aaattcccaaaagtatgtacg

SEQ ID NO: 263693 - DNA, 21 bp, Artificial sequence
  SiRNA target sequence
aattcccaaaagtatgtacga

SEQ ID NO: 263694 - DNA, 21 bp, Artificial sequence
  SiRNA target sequence
attcccaaaagtatgtacgaa

SEQ ID NO: 263695 - DNA, 21 bp, Artificial sequence
  SiRNA target sequence
ttcccaaaagtatgtacgaag

SEQ ID NO: 263696 - DNA, 21 bp, Artificial sequence
  SiRNA target sequence
tcccaaaagtatgtacgaagc

SEQ ID NO: 263697 - DNA, 21 bp, Artificial sequence
  SiRNA target sequence
cccaaaagtatgtacgaagct

SEQ ID NO: 263698 - DNA, 21 bp, Artificial sequence
  SiRNA target sequence
ccaaaagtatgtacgaagctg

SEQ ID NO: 263699 - DNA, 21 bp, Artificial sequence
  SiRNA target sequence
caaaagtatgtacgaagctgg

SEQ ID NO: 263700 - DNA, 21 bp, Artificial sequence
  SiRNA target sequence
aaaagtatgtacgaagctgga

SEQ ID NO: 263701 - DNA, 21 bp, Artificial sequence
  SiRNA target sequence
aaagtatgtacgaagctggac

SEQ ID NO: 263702 - DNA, 21 bp, Artificial sequence
  SiRNA target sequence
aagtatgtacgaagctggaca

SEQ ID NO: 263703 - DNA, 21 bp, Artificial sequence
  SiRNA target sequence
agtatgtacgaagctggacat

SEQ ID NO: 263704 - DNA, 21 bp, Artificial sequence
  SiRNA target sequence
gtatgtacgaagctggacatt

SEQ ID NO: 263705 - DNA, 21 bp, Artificial sequence
  SiRNA target sequence
tatgtacgaagctggacatta

SEQ ID NO: 263706 - DNA, 21 bp, Artificial sequence
  SiRNA target sequence
atgtacgaagctggacattac

SEQ ID NO: 263707 - DNA, 21 bp, Artificial sequence
  SiRNA target sequence
tgtacgaagctggacattacc

SEQ ID NO: 263708 - DNA, 21 bp, Artificial sequence
  SiRNA target sequence
gtacgaagctggacattacca

SEQ ID NO: 263709 - DNA, 21 bp, Artificial sequence
  SiRNA target sequence
tacgaagctggacattaccat

SEQ ID NO: 263710 - DNA, 21 bp, Artificial sequence
  SiRNA target sequence
acgaagctggacattaccatc

SEQ ID NO: 263711 - DNA, 21 bp, Artificial sequence
  SiRNA target sequence
cgaagctggacattaccatca

SEQ ID NO: 263712 - DNA, 21 bp, Artificial sequence
  SiRNA target sequence
gaagctggacattaccatcaa

SEQ ID NO: 263713 - DNA, 21 bp, Artificial sequence
  SiRNA target sequence
aagctggacattaccatcaac

SEQ ID NO: 263714 - DNA, 21 bp, Artificial sequence
  SiRNA target sequence
agctggacattaccatcaacg

SEQ ID NO: 263715 - DNA, 21 bp, Artificial sequence
  SiRNA target sequence
gctggacattaccatcaacgg

SEQ ID NO: 263716 - DNA, 21 bp, Artificial sequence
  SiRNA target sequence
ctggacattaccatcaacggt

SEQ ID NO: 263717 - DNA, 21 bp, Artificial sequence
  SiRNA target sequence
tggacattaccatcaacggtg

SEQ ID NO: 263718 - DNA, 21 bp, Artificial sequence
  SiRNA target sequence
ggacattaccatcaacggtgc

SEQ ID NO: 263719 - DNA, 21 bp, Artificial sequence
  SiRNA target sequence
gacattaccatcaacggtgct

SEQ ID NO: 263720 - DNA, 21 bp, Artificial sequence
  SiRNA target sequence
acattaccatcaacggtgctt

SEQ ID NO: 263721 - DNA, 21 bp, Artificial sequence
  SiRNA target sequence
cattaccatcaacggtgctta

SEQ ID NO: 263722 - DNA, 21 bp, Artificial sequence
  SiRNA target sequence
attaccatcaacggtgcttaa

SEQ ID NO: 263723 - DNA, 21 bp, Artificial sequence
  SiRNA target sequence
ttaccatcaacggtgcttaag

SEQ ID NO: 263724 - DNA, 21 bp, Artificial sequence
  SiRNA target sequence
taccatcaacggtgcttaagg

SEQ ID NO: 263725 - DNA, 21 bp, Artificial sequence
  SiRNA target sequence
accatcaacggtgcttaaggc

SEQ ID NO: 263726 - DNA, 21 bp, Artificial sequence
  SiRNA target sequence
ccatcaacggtgcttaaggct

SEQ ID NO: 263727 - DNA, 21 bp, Artificial sequence
  SiRNA target sequence
catcaacggtgcttaaggctg

SEQ ID NO: 263728 - DNA, 21 bp, Artificial sequence
  SiRNA target sequence
atcaacggtgcttaaggctgg

SEQ ID NO: 263729 - DNA, 21 bp, Artificial sequence
  SiRNA target sequence
tcaacggtgcttaaggctggc

SEQ ID NO: 263730 - DNA, 21 bp, Artificial sequence
  SiRNA target sequence
caacggtgcttaaggctggcg

SEQ ID NO: 263731 - DNA, 21 bp, Artificial sequence
  SiRNA target sequence
aacggtgcttaaggctggcgg

SEQ ID NO: 263732 - DNA, 21 bp, Artificial sequence
  SiRNA target sequence
acggtgcttaaggctggcgga

SEQ ID NO: 263733 - DNA, 21 bp, Artificial sequence
  SiRNA target sequence
cggtgcttaaggctggcggaa

SEQ ID NO: 263734 - DNA, 21 bp, Artificial sequence
  SiRNA target sequence
ggtgcttaaggctggcggaaa

SEQ ID NO: 263735 - DNA, 21 bp, Artificial sequence
  SiRNA target sequence
gtgcttaaggctggcggaaaa

SEQ ID NO: 263736 - DNA, 21 bp, Artificial sequence
  SiRNA target sequence
tgcttaaggctggcggaaaag

SEQ ID NO: 263737 - DNA, 21 bp, Artificial sequence
  SiRNA target sequence
gcttaaggctggcggaaaagc

SEQ ID NO: 263738 - DNA, 21 bp, Artificial sequence
  SiRNA target sequence
cttaaggctggcggaaaagct

SEQ ID NO: 263739 - DNA, 21 bp, Artificial sequence
  SiRNA target sequence
ttaaggctggcggaaaagctc

SEQ ID NO: 263740 - DNA, 21 bp, Artificial sequence
  SiRNA target sequence
taaggctggcggaaaagctca

SEQ ID NO: 263741 - DNA, 21 bp, Artificial sequence
  SiRNA target sequence
aaggctggcggaaaagctcaa

SEQ ID NO: 263742 - DNA, 21 bp, Artificial sequence
  SiRNA target sequence
aggctggcggaaaagctcaaa

SEQ ID NO: 263743 - DNA, 21 bp, Artificial sequence
  SiRNA target sequence
ggctggcggaaaagctcaaaa

SEQ ID NO: 263744 - DNA, 21 bp, Artificial sequence
  SiRNA target sequence
gctggcggaaaagctcaaaag

SEQ ID NO: 263745 - DNA, 21 bp, Artificial sequence
  SiRNA target sequence
ctggcggaaaagctcaaaagc

SEQ ID NO: 263746 - DNA, 21 bp, Artificial sequence
  SiRNA target sequence
tggcggaaaagctcaaaagct

SEQ ID NO: 263747 - DNA, 21 bp, Artificial sequence
  SiRNA target sequence
ggcggaaaagctcaaaagctt

SEQ ID NO: 263748 - DNA, 21 bp, Artificial sequence
  SiRNA target sequence
gcggaaaagctcaaaagcttg

SEQ ID NO: 263749 - DNA, 21 bp, Artificial sequence
  SiRNA target sequence
cggaaaagctcaaaagcttgc

SEQ ID NO: 263750 - DNA, 21 bp, Artificial sequence
  SiRNA target sequence
ggaaaagctcaaaagcttgcc

SEQ ID NO: 263751 - DNA, 21 bp, Artificial sequence
  SiRNA target sequence
gaaaagctcaaaagcttgcca

SEQ ID NO: 263752 - DNA, 21 bp, Artificial sequence
  SiRNA target sequence
aaaagctcaaaagcttgccaa

SEQ ID NO: 263753 - DNA, 21 bp, Artificial sequence
  SiRNA target sequence
aaagctcaaaagcttgccaat

SEQ ID NO: 263754 - DNA, 21 bp, Artificial sequence
  SiRNA target sequence
aagctcaaaagcttgccaatt

SEQ ID NO: 263755 - DNA, 21 bp, Artificial sequence
  SiRNA target sequence
agctcaaaagcttgccaattt

SEQ ID NO: 263756 - DNA, 21 bp, Artificial sequence
  SiRNA target sequence
gctcaaaagcttgccaatttt

SEQ ID NO: 263757 - DNA, 21 bp, Artificial sequence
  SiRNA target sequence
ctcaaaagcttgccaatttta

SEQ ID NO: 263758 - DNA, 21 bp, Artificial sequence
  SiRNA target sequence
tcaaaagcttgccaattttaa

SEQ ID NO: 263759 - DNA, 21 bp, Artificial sequence
  SiRNA target sequence
caaaagcttgccaattttaag

SEQ ID NO: 263760 - DNA, 21 bp, Artificial sequence
  SiRNA target sequence
aaaagcttgccaattttaagt

SEQ ID NO: 263761 - DNA, 21 bp, Artificial sequence
  SiRNA target sequence
aaagcttgccaattttaagta

SEQ ID NO: 263762 - DNA, 21 bp, Artificial sequence
  SiRNA target sequence
aagcttgccaattttaagtac

SEQ ID NO: 263763 - DNA, 21 bp, Artificial sequence
  SiRNA target sequence
agcttgccaattttaagtacc

SEQ ID NO: 263764 - DNA, 21 bp, Artificial sequence
  SiRNA target sequence
gcttgccaattttaagtacct

SEQ ID NO: 263765 - DNA, 21 bp, Artificial sequence
  SiRNA target sequence
cttgccaattttaagtacctg

SEQ ID NO: 263766 - DNA, 21 bp, Artificial sequence
  SiRNA target sequence
ttgccaattttaagtacctgc

SEQ ID NO: 263767 - DNA, 21 bp, Artificial sequence
  SiRNA target sequence
tgccaattttaagtacctgcg

SEQ ID NO: 263768 - DNA, 21 bp, Artificial sequence
  SiRNA target sequence
gccaattttaagtacctgcga

SEQ ID NO: 263769 - DNA, 21 bp, Artificial sequence
  SiRNA target sequence
ccaattttaagtacctgcgat

SEQ ID NO: 263770 - DNA, 21 bp, Artificial sequence
  SiRNA target sequence
caattttaagtacctgcgatg

SEQ ID NO: 263771 - DNA, 21 bp, Artificial sequence
  SiRNA target sequence
aattttaagtacctgcgatgt

SEQ ID NO: 263772 - DNA, 21 bp, Artificial sequence
  SiRNA target sequence
attttaagtacctgcgatgtg

SEQ ID NO: 263773 - DNA, 21 bp, Artificial sequence
  SiRNA target sequence
ttttaagtacctgcgatgtga

SEQ ID NO: 263774 - DNA, 21 bp, Artificial sequence
  SiRNA target sequence
tttaagtacctgcgatgtgat

SEQ ID NO: 263775 - DNA, 21 bp, Artificial sequence
  SiRNA target sequence
ttaagtacctgcgatgtgatg

SEQ ID NO: 263776 - DNA, 21 bp, Artificial sequence
  SiRNA target sequence
taagtacctgcgatgtgatgt

SEQ ID NO: 263777 - DNA, 21 bp, Artificial sequence
  SiRNA target sequence
aagtacctgcgatgtgatgtt

SEQ ID NO: 263778 - DNA, 21 bp, Artificial sequence
  SiRNA target sequence
agtacctgcgatgtgatgttc

SEQ ID NO: 263779 - DNA, 21 bp, Artificial sequence
  SiRNA target sequence
gtacctgcgatgtgatgttca

SEQ ID NO: 263780 - DNA, 21 bp, Artificial sequence
  SiRNA target sequence
tacctgcgatgtgatgttcag

SEQ ID NO: 263781 - DNA, 21 bp, Artificial sequence
  SiRNA target sequence
acctgcgatgtgatgttcagg

SEQ ID NO: 263782 - DNA, 21 bp, Artificial sequence
  SiRNA target sequence
cctgcgatgtgatgttcaggt

SEQ ID NO: 263783 - DNA, 21 bp, Artificial sequence
  SiRNA target sequence
ctgcgatgtgatgttcaggtg

SEQ ID NO: 263784 - DNA, 21 bp, Artificial sequence
  SiRNA target sequence
tgcgatgtgatgttcaggtga

SEQ ID NO: 263785 - DNA, 21 bp, Artificial sequence
  SiRNA target sequence
gcgatgtgatgttcaggtgaa

SEQ ID NO: 263786 - DNA, 21 bp, Artificial sequence
  SiRNA target sequence
cgatgtgatgttcaggtgaag

SEQ ID NO: 263787 - DNA, 21 bp, Artificial sequence
  SiRNA target sequence
gatgtgatgttcaggtgaagt

SEQ ID NO: 263788 - DNA, 21 bp, Artificial sequence
  SiRNA target sequence
atgtgatgttcaggtgaagtt

SEQ ID NO: 263789 - DNA, 21 bp, Artificial sequence
  SiRNA target sequence
tgtgatgttcaggtgaagtta

SEQ ID NO: 263790 - DNA, 21 bp, Artificial sequence
  SiRNA target sequence
gtgatgttcaggtgaagttag

SEQ ID NO: 263791 - DNA, 21 bp, Artificial sequence
  SiRNA target sequence
tgatgttcaggtgaagttagt

SEQ ID NO: 263792 - DNA, 21 bp, Artificial sequence
  SiRNA target sequence
gatgttcaggtgaagttagta

SEQ ID NO: 263793 - DNA, 21 bp, Artificial sequence
  SiRNA target sequence
atgttcaggtgaagttagtac

SEQ ID NO: 263794 - DNA, 21 bp, Artificial sequence
  SiRNA target sequence
tgttcaggtgaagttagtact

SEQ ID NO: 263795 - DNA, 21 bp, Artificial sequence
  SiRNA target sequence
gttcaggtgaagttagtactt

SEQ ID NO: 263796 - DNA, 21 bp, Artificial sequence
  SiRNA target sequence
ttcaggtgaagttagtactta

SEQ ID NO: 263797 - DNA, 21 bp, Artificial sequence
  SiRNA target sequence
tcaggtgaagttagtacttaa

SEQ ID NO: 263798 - DNA, 21 bp, Artificial sequence
  SiRNA target sequence
caggtgaagttagtacttaat

SEQ ID NO: 263799 - DNA, 21 bp, Artificial sequence
  SiRNA target sequence
aggtgaagttagtacttaatg

SEQ ID NO: 263800 - DNA, 21 bp, Artificial sequence
  SiRNA target sequence
ggtgaagttagtacttaatgc

SEQ ID NO: 263801 - DNA, 21 bp, Artificial sequence
  SiRNA target sequence
gtgaagttagtacttaatgcg

SEQ ID NO: 263802 - DNA, 21 bp, Artificial sequence
  SiRNA target sequence
tgaagttagtacttaatgcga

SEQ ID NO: 263803 - DNA, 21 bp, Artificial sequence
  SiRNA target sequence
gaagttagtacttaatgcgaa

SEQ ID NO: 263804 - DNA, 21 bp, Artificial sequence
  SiRNA target sequence
aagttagtacttaatgcgaat

SEQ ID NO: 263805 - DNA, 21 bp, Artificial sequence
  SiRNA target sequence
agttagtacttaatgcgaatc

SEQ ID NO: 263806 - DNA, 21 bp, Artificial sequence
  SiRNA target sequence
gttagtacttaatgcgaatcc

SEQ ID NO: 263807 - DNA, 21 bp, Artificial sequence
  SiRNA target sequence
ttagtacttaatgcgaatccc

SEQ ID NO: 263808 - DNA, 21 bp, Artificial sequence
  SiRNA target sequence
tagtacttaatgcgaatccct

SEQ ID NO: 263809 - DNA, 21 bp, Artificial sequence
  SiRNA target sequence
agtacttaatgcgaatccctt

SEQ ID NO: 263810 - DNA, 21 bp, Artificial sequence
  SiRNA target sequence
gtacttaatgcgaatcccttt

SEQ ID NO: 263811 - DNA, 21 bp, Artificial sequence
  SiRNA target sequence
tacttaatgcgaatccctttg

SEQ ID NO: 263812 - DNA, 21 bp, Artificial sequence
  SiRNA target sequence
acttaatgcgaatccctttgt

SEQ ID NO: 263813 - DNA, 21 bp, Artificial sequence
  SiRNA target sequence
cttaatgcgaatccctttgta

SEQ ID NO: 263814 - DNA, 21 bp, Artificial sequence
  SiRNA target sequence
ttaatgcgaatccctttgtag

SEQ ID NO: 263815 - DNA, 21 bp, Artificial sequence
  SiRNA target sequence
taatgcgaatccctttgtagc

SEQ ID NO: 263816 - DNA, 21 bp, Artificial sequence
  SiRNA target sequence
aatgcgaatccctttgtagca

SEQ ID NO: 263817 - DNA, 21 bp, Artificial sequence
  SiRNA target sequence
atgcgaatccctttgtagcag

SEQ ID NO: 263818 - DNA, 21 bp, Artificial sequence
  SiRNA target sequence
tgcgaatccctttgtagcagg

SEQ ID NO: 263819 - DNA, 21 bp, Artificial sequence
  SiRNA target sequence
gcgaatccctttgtagcagga

SEQ ID NO: 263820 - DNA, 21 bp, Artificial sequence
  SiRNA target sequence
cgaatccctttgtagcaggaa

SEQ ID NO: 263821 - DNA, 21 bp, Artificial sequence
  SiRNA target sequence
gaatccctttgtagcaggaag

SEQ ID NO: 263822 - DNA, 21 bp, Artificial sequence
  SiRNA target sequence
aatccctttgtagcaggaaga

SEQ ID NO: 263823 - DNA, 21 bp, Artificial sequence
  SiRNA target sequence
atccctttgtagcaggaagaa

SEQ ID NO: 263824 - DNA, 21 bp, Artificial sequence
  SiRNA target sequence
tccctttgtagcaggaagaat

SEQ ID NO: 263825 - DNA, 21 bp, Artificial sequence
  SiRNA target sequence
ccctttgtagcaggaagaatg

SEQ ID NO: 263826 - DNA, 21 bp, Artificial sequence
  SiRNA target sequence
cctttgtagcaggaagaatgt

SEQ ID NO: 263827 - DNA, 21 bp, Artificial sequence
  SiRNA target sequence
ctttgtagcaggaagaatgta

SEQ ID NO: 263828 - DNA, 21 bp, Artificial sequence
  SiRNA target sequence
tttgtagcaggaagaatgtat

SEQ ID NO: 263829 - DNA, 21 bp, Artificial sequence
  SiRNA target sequence
ttgtagcaggaagaatgtatc

SEQ ID NO: 263830 - DNA, 21 bp, Artificial sequence
  SiRNA target sequence
tgtagcaggaagaatgtatct

SEQ ID NO: 263831 - DNA, 21 bp, Artificial sequence
  SiRNA target sequence
gtagcaggaagaatgtatcta

SEQ ID NO: 263832 - DNA, 21 bp, Artificial sequence
  SiRNA target sequence
tagcaggaagaatgtatctag

SEQ ID NO: 263833 - DNA, 21 bp, Artificial sequence
  SiRNA target sequence
agcaggaagaatgtatctagc

SEQ ID NO: 263834 - DNA, 21 bp, Artificial sequence
  SiRNA target sequence
gcaggaagaatgtatctagca

SEQ ID NO: 263835 - DNA, 21 bp, Artificial sequence
  SiRNA target sequence
caggaagaatgtatctagcat

SEQ ID NO: 263836 - DNA, 21 bp, Artificial sequence
  SiRNA target sequence
aggaagaatgtatctagcata

SEQ ID NO: 263837 - DNA, 21 bp, Artificial sequence
  SiRNA target sequence
ggaagaatgtatctagcatat

SEQ ID NO: 263838 - DNA, 21 bp, Artificial sequence
  SiRNA target sequence
gaagaatgtatctagcatata

SEQ ID NO: 263839 - DNA, 21 bp, Artificial sequence
  SiRNA target sequence
aagaatgtatctagcatatag

SEQ ID NO: 263840 - DNA, 21 bp, Artificial sequence
  SiRNA target sequence
agaatgtatctagcatatagt

SEQ ID NO: 263841 - DNA, 21 bp, Artificial sequence
  SiRNA target sequence
gaatgtatctagcatatagtc

SEQ ID NO: 263842 - DNA, 21 bp, Artificial sequence
  SiRNA target sequence
aatgtatctagcatatagtcc

SEQ ID NO: 263843 - DNA, 21 bp, Artificial sequence
  SiRNA target sequence
atgtatctagcatatagtcct

SEQ ID NO: 263844 - DNA, 21 bp, Artificial sequence
  SiRNA target sequence
tgtatctagcatatagtcctt

SEQ ID NO: 263845 - DNA, 21 bp, Artificial sequence
  SiRNA target sequence
gtatctagcatatagtcctta

SEQ ID NO: 263846 - DNA, 21 bp, Artificial sequence
  SiRNA target sequence
tatctagcatatagtccttac

SEQ ID NO: 263847 - DNA, 21 bp, Artificial sequence
  SiRNA target sequence
atctagcatatagtccttacg

SEQ ID NO: 263848 - DNA, 21 bp, Artificial sequence
  SiRNA target sequence
tctagcatatagtccttacga

SEQ ID NO: 263849 - DNA, 21 bp, Artificial sequence
  SiRNA target sequence
ctagcatatagtccttacgat

SEQ ID NO: 263850 - DNA, 21 bp, Artificial sequence
  SiRNA target sequence
tagcatatagtccttacgatg

SEQ ID NO: 263851 - DNA, 21 bp, Artificial sequence
  SiRNA target sequence
agcatatagtccttacgatga

SEQ ID NO: 263852 - DNA, 21 bp, Artificial sequence
  SiRNA target sequence
gcatatagtccttacgatgat

SEQ ID NO: 263853 - DNA, 21 bp, Artificial sequence
  SiRNA target sequence
catatagtccttacgatgata

SEQ ID NO: 263854 - DNA, 21 bp, Artificial sequence
  SiRNA target sequence
atatagtccttacgatgataa

SEQ ID NO: 263855 - DNA, 21 bp, Artificial sequence
  SiRNA target sequence
tatagtccttacgatgataaa

SEQ ID NO: 263856 - DNA, 21 bp, Artificial sequence
  SiRNA target sequence
atagtccttacgatgataaag

SEQ ID NO: 263857 - DNA, 21 bp, Artificial sequence
  SiRNA target sequence
tagtccttacgatgataaagt

SEQ ID NO: 263858 - DNA, 21 bp, Artificial sequence
  SiRNA target sequence
agtccttacgatgataaagtt

SEQ ID NO: 263859 - DNA, 21 bp, Artificial sequence
  SiRNA target sequence
gtccttacgatgataaagttg

SEQ ID NO: 263860 - DNA, 21 bp, Artificial sequence
  SiRNA target sequence
tccttacgatgataaagttga

SEQ ID NO: 263861 - DNA, 21 bp, Artificial sequence
  SiRNA target sequence
ccttacgatgataaagttgac

SEQ ID NO: 263862 - DNA, 21 bp, Artificial sequence
  SiRNA target sequence
cttacgatgataaagttgaca

SEQ ID NO: 263863 - DNA, 21 bp, Artificial sequence
  SiRNA target sequence
ttacgatgataaagttgacac

SEQ ID NO: 263864 - DNA, 21 bp, Artificial sequence
  SiRNA target sequence
tacgatgataaagttgacacg

SEQ ID NO: 263865 - DNA, 21 bp, Artificial sequence
  SiRNA target sequence
acgatgataaagttgacacgg

SEQ ID NO: 263866 - DNA, 21 bp, Artificial sequence
  SiRNA target sequence
cgatgataaagttgacacggc

SEQ ID NO: 263867 - DNA, 21 bp, Artificial sequence
  SiRNA target sequence
gatgataaagttgacacggcc

SEQ ID NO: 263868 - DNA, 21 bp, Artificial sequence
  SiRNA target sequence
atgataaagttgacacggccc

SEQ ID NO: 263869 - DNA, 21 bp, Artificial sequence
  SiRNA target sequence
tgataaagttgacacggcccg

SEQ ID NO: 263870 - DNA, 21 bp, Artificial sequence
  SiRNA target sequence
gataaagttgacacggcccgt

SEQ ID NO: 263871 - DNA, 21 bp, Artificial sequence
  SiRNA target sequence
ataaagttgacacggcccgta

SEQ ID NO: 263872 - DNA, 21 bp, Artificial sequence
  SiRNA target sequence
taaagttgacacggcccgtag

SEQ ID NO: 263873 - DNA, 21 bp, Artificial sequence
  SiRNA target sequence
aaagttgacacggcccgtagt

SEQ ID NO: 263874 - DNA, 21 bp, Artificial sequence
  SiRNA target sequence
aagttgacacggcccgtagtg

SEQ ID NO: 263875 - DNA, 21 bp, Artificial sequence
  SiRNA target sequence
agttgacacggcccgtagtgt

SEQ ID NO: 263876 - DNA, 21 bp, Artificial sequence
  SiRNA target sequence
gttgacacggcccgtagtgtt

SEQ ID NO: 263877 - DNA, 21 bp, Artificial sequence
  SiRNA target sequence
ttgacacggcccgtagtgttt

SEQ ID NO: 263878 - DNA, 21 bp, Artificial sequence
  SiRNA target sequence
tgacacggcccgtagtgtttt

SEQ ID NO: 263879 - DNA, 21 bp, Artificial sequence
  SiRNA target sequence
gacacggcccgtagtgtttta

SEQ ID NO: 263880 - DNA, 21 bp, Artificial sequence
  SiRNA target sequence
acacggcccgtagtgttttac

SEQ ID NO: 263881 - DNA, 21 bp, Artificial sequence
  SiRNA target sequence
cacggcccgtagtgttttaca

SEQ ID NO: 263882 - DNA, 21 bp, Artificial sequence
  SiRNA target sequence
acggcccgtagtgttttacaa

SEQ ID NO: 263883 - DNA, 21 bp, Artificial sequence
  SiRNA target sequence
cggcccgtagtgttttacaaa

SEQ ID NO: 263884 - DNA, 21 bp, Artificial sequence
  SiRNA target sequence
ggcccgtagtgttttacaaac

SEQ ID NO: 263885 - DNA, 21 bp, Artificial sequence
  SiRNA target sequence
gcccgtagtgttttacaaaca

SEQ ID NO: 263886 - DNA, 21 bp, Artificial sequence
  SiRNA target sequence
cccgtagtgttttacaaacat

SEQ ID NO: 263887 - DNA, 21 bp, Artificial sequence
  SiRNA target sequence
ccgtagtgttttacaaacatc

SEQ ID NO: 263888 - DNA, 21 bp, Artificial sequence
  SiRNA target sequence
cgtagtgttttacaaacatcg

SEQ ID NO: 263889 - DNA, 21 bp, Artificial sequence
  SiRNA target sequence
gtagtgttttacaaacatcgc

SEQ ID NO: 263890 - DNA, 21 bp, Artificial sequence
  SiRNA target sequence
tagtgttttacaaacatcgcg

SEQ ID NO: 263891 - DNA, 21 bp, Artificial sequence
  SiRNA target sequence
agtgttttacaaacatcgcga

SEQ ID NO: 263892 - DNA, 21 bp, Artificial sequence
  SiRNA target sequence
gtgttttacaaacatcgcgag

SEQ ID NO: 263893 - DNA, 21 bp, Artificial sequence
  SiRNA target sequence
tgttttacaaacatcgcgagc

SEQ ID NO: 263894 - DNA, 21 bp, Artificial sequence
  SiRNA target sequence
gttttacaaacatcgcgagct

SEQ ID NO: 263895 - DNA, 21 bp, Artificial sequence
  SiRNA target sequence
ttttacaaacatcgcgagctg

SEQ ID NO: 263896 - DNA, 21 bp, Artificial sequence
  SiRNA target sequence
tttacaaacatcgcgagctgg

SEQ ID NO: 263897 - DNA, 21 bp, Artificial sequence
  SiRNA target sequence
ttacaaacatcgcgagctggg

SEQ ID NO: 263898 - DNA, 21 bp, Artificial sequence
  SiRNA target sequence
tacaaacatcgcgagctgggg

SEQ ID NO: 263899 - DNA, 21 bp, Artificial sequence
  SiRNA target sequence
acaaacatcgcgagctggggt

SEQ ID NO: 263900 - DNA, 21 bp, Artificial sequence
  SiRNA target sequence
caaacatcgcgagctggggtc

SEQ ID NO: 263901 - DNA, 21 bp, Artificial sequence
  SiRNA target sequence
aaacatcgcgagctggggtca

SEQ ID NO: 263902 - DNA, 21 bp, Artificial sequence
  SiRNA target sequence
aacatcgcgagctggggtcac

SEQ ID NO: 263903 - DNA, 21 bp, Artificial sequence
  SiRNA target sequence
acatcgcgagctggggtcaca

SEQ ID NO: 263904 - DNA, 21 bp, Artificial sequence
  SiRNA target sequence
catcgcgagctggggtcacag

SEQ ID NO: 263905 - DNA, 21 bp, Artificial sequence
  SiRNA target sequence
atcgcgagctggggtcacagg

SEQ ID NO: 263906 - DNA, 21 bp, Artificial sequence
  SiRNA target sequence
tcgcgagctggggtcacaggc

SEQ ID NO: 263907 - DNA, 21 bp, Artificial sequence
  SiRNA target sequence
cgcgagctggggtcacaggct

SEQ ID NO: 263908 - DNA, 21 bp, Artificial sequence
  SiRNA target sequence
gcgagctggggtcacaggcta

SEQ ID NO: 263909 - DNA, 21 bp, Artificial sequence
  SiRNA target sequence
cgagctggggtcacaggctat

SEQ ID NO: 263910 - DNA, 21 bp, Artificial sequence
  SiRNA target sequence
gagctggggtcacaggctatc

SEQ ID NO: 263911 - DNA, 21 bp, Artificial sequence
  SiRNA target sequence
agctggggtcacaggctatcc

SEQ ID NO: 263912 - DNA, 21 bp, Artificial sequence
  SiRNA target sequence
gctggggtcacaggctatccg

SEQ ID NO: 263913 - DNA, 21 bp, Artificial sequence
  SiRNA target sequence
ctggggtcacaggctatccgg

SEQ ID NO: 263914 - DNA, 21 bp, Artificial sequence
  SiRNA target sequence
tggggtcacaggctatccggg

SEQ ID NO: 263915 - DNA, 21 bp, Artificial sequence
  SiRNA target sequence
ggggtcacaggctatccggga

SEQ ID NO: 263916 - DNA, 21 bp, Artificial sequence
  SiRNA target sequence
gggtcacaggctatccgggag

SEQ ID NO: 263917 - DNA, 21 bp, Artificial sequence
  SiRNA target sequence
ggtcacaggctatccgggagt

SEQ ID NO: 263918 - DNA, 21 bp, Artificial sequence
  SiRNA target sequence
gtcacaggctatccgggagtc

SEQ ID NO: 263919 - DNA, 21 bp, Artificial sequence
  SiRNA target sequence
tcacaggctatccgggagtcg

SEQ ID NO: 263920 - DNA, 21 bp, Artificial sequence
  SiRNA target sequence
cacaggctatccgggagtcga

SEQ ID NO: 263921 - DNA, 21 bp, Artificial sequence
  SiRNA target sequence
acaggctatccgggagtcgaa

SEQ ID NO: 263922 - DNA, 21 bp, Artificial sequence
  SiRNA target sequence
caggctatccgggagtcgaat

SEQ ID NO: 263923 - DNA, 21 bp, Artificial sequence
  SiRNA target sequence
aggctatccgggagtcgaatt

SEQ ID NO: 263924 - DNA, 21 bp, Artificial sequence
  SiRNA target sequence
ggctatccgggagtcgaatta

SEQ ID NO: 263925 - DNA, 21 bp, Artificial sequence
  SiRNA target sequence
gctatccgggagtcgaattag

SEQ ID NO: 263926 - DNA, 21 bp, Artificial sequence
  SiRNA target sequence
ctatccgggagtcgaattaga

SEQ ID NO: 263927 - DNA, 21 bp, Artificial sequence
  SiRNA target sequence
tatccgggagtcgaattagac

SEQ ID NO: 263928 - DNA, 21 bp, Artificial sequence
  SiRNA target sequence
atccgggagtcgaattagact

SEQ ID NO: 263929 - DNA, 21 bp, Artificial sequence
  SiRNA target sequence
tccgggagtcgaattagactt

SEQ ID NO: 263930 - DNA, 21 bp, Artificial sequence
  SiRNA target sequence
ccgggagtcgaattagacttc

SEQ ID NO: 263931 - DNA, 21 bp, Artificial sequence
  SiRNA target sequence
cgggagtcgaattagacttcc

SEQ ID NO: 263932 - DNA, 21 bp, Artificial sequence
  SiRNA target sequence
gggagtcgaattagacttcca

SEQ ID NO: 263933 - DNA, 21 bp, Artificial sequence
  SiRNA target sequence
ggagtcgaattagacttccaa

SEQ ID NO: 263934 - DNA, 21 bp, Artificial sequence
  SiRNA target sequence
gagtcgaattagacttccaat

SEQ ID NO: 263935 - DNA, 21 bp, Artificial sequence
  SiRNA target sequence
agtcgaattagacttccaatt

SEQ ID NO: 263936 - DNA, 21 bp, Artificial sequence
  SiRNA target sequence
gtcgaattagacttccaattg

SEQ ID NO: 263937 - DNA, 21 bp, Artificial sequence
  SiRNA target sequence
tcgaattagacttccaattgg

SEQ ID NO: 263938 - DNA, 21 bp, Artificial sequence
  SiRNA target sequence
cgaattagacttccaattgga

SEQ ID NO: 263939 - DNA, 21 bp, Artificial sequence
  SiRNA target sequence
gaattagacttccaattggac

SEQ ID NO: 263940 - DNA, 21 bp, Artificial sequence
  SiRNA target sequence
aattagacttccaattggaca

SEQ ID NO: 263941 - DNA, 21 bp, Artificial sequence
  SiRNA target sequence
attagacttccaattggacaa

SEQ ID NO: 263942 - DNA, 21 bp, Artificial sequence
  SiRNA target sequence
ttagacttccaattggacaac

SEQ ID NO: 263943 - DNA, 21 bp, Artificial sequence
  SiRNA target sequence
tagacttccaattggacaact

SEQ ID NO: 263944 - DNA, 21 bp, Artificial sequence
  SiRNA target sequence
agacttccaattggacaactc

SEQ ID NO: 263945 - DNA, 21 bp, Artificial sequence
  SiRNA target sequence
gacttccaattggacaactct

SEQ ID NO: 263946 - DNA, 21 bp, Artificial sequence
  SiRNA target sequence
acttccaattggacaactctg

SEQ ID NO: 263947 - DNA, 21 bp, Artificial sequence
  SiRNA target sequence
cttccaattggacaactctgt

SEQ ID NO: 263948 - DNA, 21 bp, Artificial sequence
  SiRNA target sequence
ttccaattggacaactctgta

SEQ ID NO: 263949 - DNA, 21 bp, Artificial sequence
  SiRNA target sequence
tccaattggacaactctgtag

SEQ ID NO: 263950 - DNA, 21 bp, Artificial sequence
  SiRNA target sequence
ccaattggacaactctgtaga

SEQ ID NO: 263951 - DNA, 21 bp, Artificial sequence
  SiRNA target sequence
caattggacaactctgtagaa

SEQ ID NO: 263952 - DNA, 21 bp, Artificial sequence
  SiRNA target sequence
aattggacaactctgtagaaa

SEQ ID NO: 263953 - DNA, 21 bp, Artificial sequence
  SiRNA target sequence
attggacaactctgtagaaat

SEQ ID NO: 263954 - DNA, 21 bp, Artificial sequence
  SiRNA target sequence
ttggacaactctgtagaaatg

SEQ ID NO: 263955 - DNA, 21 bp, Artificial sequence
  SiRNA target sequence
tggacaactctgtagaaatga

SEQ ID NO: 263956 - DNA, 21 bp, Artificial sequence
  SiRNA target sequence
ggacaactctgtagaaatgac

SEQ ID NO: 263957 - DNA, 21 bp, Artificial sequence
  SiRNA target sequence
gacaactctgtagaaatgact

SEQ ID NO: 263958 - DNA, 21 bp, Artificial sequence
  SiRNA target sequence
acaactctgtagaaatgacta

SEQ ID NO: 263959 - DNA, 21 bp, Artificial sequence
  SiRNA target sequence
caactctgtagaaatgactat

SEQ ID NO: 263960 - DNA, 21 bp, Artificial sequence
  SiRNA target sequence
aactctgtagaaatgactatt

SEQ ID NO: 263961 - DNA, 21 bp, Artificial sequence
  SiRNA target sequence
actctgtagaaatgactattc

SEQ ID NO: 263962 - DNA, 21 bp, Artificial sequence
  SiRNA target sequence
ctctgtagaaatgactattcc

SEQ ID NO: 263963 - DNA, 21 bp, Artificial sequence
  SiRNA target sequence
tctgtagaaatgactattcca

SEQ ID NO: 263964 - DNA, 21 bp, Artificial sequence
  SiRNA target sequence
ctgtagaaatgactattccat

SEQ ID NO: 263965 - DNA, 21 bp, Artificial sequence
  SiRNA target sequence
tgtagaaatgactattccata

SEQ ID NO: 263966 - DNA, 21 bp, Artificial sequence
  SiRNA target sequence
gtagaaatgactattccatat

SEQ ID NO: 263967 - DNA, 21 bp, Artificial sequence
  SiRNA target sequence
tagaaatgactattccatatg

SEQ ID NO: 263968 - DNA, 21 bp, Artificial sequence
  SiRNA target sequence
agaaatgactattccatatgc

SEQ ID NO: 263969 - DNA, 21 bp, Artificial sequence
  SiRNA target sequence
gaaatgactattccatatgcc

SEQ ID NO: 263970 - DNA, 21 bp, Artificial sequence
  SiRNA target sequence
aaatgactattccatatgcct

SEQ ID NO: 263971 - DNA, 21 bp, Artificial sequence
  SiRNA target sequence
aatgactattccatatgcctc

SEQ ID NO: 263972 - DNA, 21 bp, Artificial sequence
  SiRNA target sequence
atgactattccatatgcctct

SEQ ID NO: 263973 - DNA, 21 bp, Artificial sequence
  SiRNA target sequence
tgactattccatatgcctctt

SEQ ID NO: 263974 - DNA, 21 bp, Artificial sequence
  SiRNA target sequence
gactattccatatgcctcttt

SEQ ID NO: 263975 - DNA, 21 bp, Artificial sequence
  SiRNA target sequence
actattccatatgcctctttc

SEQ ID NO: 263976 - DNA, 21 bp, Artificial sequence
  SiRNA target sequence
ctattccatatgcctctttcc

SEQ ID NO: 263977 - DNA, 21 bp, Artificial sequence
  SiRNA target sequence
tattccatatgcctctttcca

SEQ ID NO: 263978 - DNA, 21 bp, Artificial sequence
  SiRNA target sequence
attccatatgcctctttccaa

SEQ ID NO: 263979 - DNA, 21 bp, Artificial sequence
  SiRNA target sequence
ttccatatgcctctttccaag

SEQ ID NO: 263980 - DNA, 21 bp, Artificial sequence
  SiRNA target sequence
tccatatgcctctttccaaga

SEQ ID NO: 263981 - DNA, 21 bp, Artificial sequence
  SiRNA target sequence
ccatatgcctctttccaagag

SEQ ID NO: 263982 - DNA, 21 bp, Artificial sequence
  SiRNA target sequence
catatgcctctttccaagagg

SEQ ID NO: 263983 - DNA, 21 bp, Artificial sequence
  SiRNA target sequence
atatgcctctttccaagaggc

SEQ ID NO: 263984 - DNA, 21 bp, Artificial sequence
  SiRNA target sequence
tatgcctctttccaagaggct

SEQ ID NO: 263985 - DNA, 21 bp, Artificial sequence
  SiRNA target sequence
atgcctctttccaagaggctt

SEQ ID NO: 263986 - DNA, 21 bp, Artificial sequence
  SiRNA target sequence
tgcctctttccaagaggctta

SEQ ID NO: 263987 - DNA, 21 bp, Artificial sequence
  SiRNA target sequence
gcctctttccaagaggcttat

SEQ ID NO: 263988 - DNA, 21 bp, Artificial sequence
  SiRNA target sequence
cctctttccaagaggcttatg

SEQ ID NO: 263989 - DNA, 21 bp, Artificial sequence
  SiRNA target sequence
ctctttccaagaggcttatga

SEQ ID NO: 263990 - DNA, 21 bp, Artificial sequence
  SiRNA target sequence
tctttccaagaggcttatgat

SEQ ID NO: 263991 - DNA, 21 bp, Artificial sequence
  SiRNA target sequence
ctttccaagaggcttatgatt

SEQ ID NO: 263992 - DNA, 21 bp, Artificial sequence
  SiRNA target sequence
tttccaagaggcttatgattt

SEQ ID NO: 263993 - DNA, 21 bp, Artificial sequence
  SiRNA target sequence
ttccaagaggcttatgattta

SEQ ID NO: 263994 - DNA, 21 bp, Artificial sequence
  SiRNA target sequence
tccaagaggcttatgatttag

SEQ ID NO: 263995 - DNA, 21 bp, Artificial sequence
  SiRNA target sequence
ccaagaggcttatgatttagt

SEQ ID NO: 263996 - DNA, 21 bp, Artificial sequence
  SiRNA target sequence
caagaggcttatgatttagtt

SEQ ID NO: 263997 - DNA, 21 bp, Artificial sequence
  SiRNA target sequence
aagaggcttatgatttagtta

SEQ ID NO: 263998 - DNA, 21 bp, Artificial sequence
  SiRNA target sequence
agaggcttatgatttagttac

SEQ ID NO: 263999 - DNA, 21 bp, Artificial sequence
  SiRNA target sequence
gaggcttatgatttagttact

SEQ ID NO: 264000 - DNA, 21 bp, Artificial sequence
  SiRNA target sequence
aggcttatgatttagttactg

SEQ ID NO: 264001 - DNA, 21 bp, Artificial sequence
  SiRNA target sequence
ggcttatgatttagttactgg

SEQ ID NO: 264002 - DNA, 21 bp, Artificial sequence
  SiRNA target sequence
gcttatgatttagttactgga

SEQ ID NO: 264003 - DNA, 21 bp, Artificial sequence
  SiRNA target sequence
cttatgatttagttactggaa

SEQ ID NO: 264004 - DNA, 21 bp, Artificial sequence
  SiRNA target sequence
ttatgatttagttactggaac

SEQ ID NO: 264005 - DNA, 21 bp, Artificial sequence
  SiRNA target sequence
tatgatttagttactggaacg

SEQ ID NO: 264006 - DNA, 21 bp, Artificial sequence
  SiRNA target sequence
atgatttagttactggaacgg

SEQ ID NO: 264007 - DNA, 21 bp, Artificial sequence
  SiRNA target sequence
tgatttagttactggaacgga

SEQ ID NO: 264008 - DNA, 21 bp, Artificial sequence
  SiRNA target sequence
gatttagttactggaacggaa

SEQ ID NO: 264009 - DNA, 21 bp, Artificial sequence
  SiRNA target sequence
atttagttactggaacggaag

SEQ ID NO: 264010 - DNA, 21 bp, Artificial sequence
  SiRNA target sequence
tttagttactggaacggaaga

SEQ ID NO: 264011 - DNA, 21 bp, Artificial sequence
  SiRNA target sequence
ttagttactggaacggaagat

SEQ ID NO: 264012 - DNA, 21 bp, Artificial sequence
  SiRNA target sequence
tagttactggaacggaagatt

SEQ ID NO: 264013 - DNA, 21 bp, Artificial sequence
  SiRNA target sequence
agttactggaacggaagattt

SEQ ID NO: 264014 - DNA, 21 bp, Artificial sequence
  SiRNA target sequence
gttactggaacggaagatttt

SEQ ID NO: 264015 - DNA, 21 bp, Artificial sequence
  SiRNA target sequence
ttactggaacggaagattttg

SEQ ID NO: 264016 - DNA, 21 bp, Artificial sequence
  SiRNA target sequence
tactggaacggaagattttgt

SEQ ID NO: 264017 - DNA, 21 bp, Artificial sequence
  SiRNA target sequence
actggaacggaagattttgta

SEQ ID NO: 264018 - DNA, 21 bp, Artificial sequence
  SiRNA target sequence
ctggaacggaagattttgtac

SEQ ID NO: 264019 - DNA, 21 bp, Artificial sequence
  SiRNA target sequence
tggaacggaagattttgtaca

SEQ ID NO: 264020 - DNA, 21 bp, Artificial sequence
  SiRNA target sequence
ggaacggaagattttgtacag

SEQ ID NO: 264021 - DNA, 21 bp, Artificial sequence
  SiRNA target sequence
gaacggaagattttgtacagt

SEQ ID NO: 264022 - DNA, 21 bp, Artificial sequence
  SiRNA target sequence
aacggaagattttgtacagtt

SEQ ID NO: 264023 - DNA, 21 bp, Artificial sequence
  SiRNA target sequence
acggaagattttgtacagttg

SEQ ID NO: 264024 - DNA, 21 bp, Artificial sequence
  SiRNA target sequence
cggaagattttgtacagttgt

SEQ ID NO: 264025 - DNA, 21 bp, Artificial sequence
  SiRNA target sequence
ggaagattttgtacagttgta

SEQ ID NO: 264026 - DNA, 21 bp, Artificial sequence
  SiRNA target sequence
gaagattttgtacagttgtat

SEQ ID NO: 264027 - DNA, 21 bp, Artificial sequence
  SiRNA target sequence
aagattttgtacagttgtatt

SEQ ID NO: 264028 - DNA, 21 bp, Artificial sequence
  SiRNA target sequence
agattttgtacagttgtattt

SEQ ID NO: 264029 - DNA, 21 bp, Artificial sequence
  SiRNA target sequence
gattttgtacagttgtatttg

SEQ ID NO: 264030 - DNA, 21 bp, Artificial sequence
  SiRNA target sequence
attttgtacagttgtatttgt

SEQ ID NO: 264031 - DNA, 21 bp, Artificial sequence
  SiRNA target sequence
ttttgtacagttgtatttgtt

SEQ ID NO: 264032 - DNA, 21 bp, Artificial sequence
  SiRNA target sequence
tttgtacagttgtatttgttc

SEQ ID NO: 264033 - DNA, 21 bp, Artificial sequence
  SiRNA target sequence
ttgtacagttgtatttgttcc

SEQ ID NO: 264034 - DNA, 21 bp, Artificial sequence
  SiRNA target sequence
tgtacagttgtatttgttccc

SEQ ID NO: 264035 - DNA, 21 bp, Artificial sequence
  SiRNA target sequence
gtacagttgtatttgttccca

SEQ ID NO: 264036 - DNA, 21 bp, Artificial sequence
  SiRNA target sequence
tacagttgtatttgttcccaa

SEQ ID NO: 264037 - DNA, 21 bp, Artificial sequence
  SiRNA target sequence
acagttgtatttgttcccaat

SEQ ID NO: 264038 - DNA, 21 bp, Artificial sequence
  SiRNA target sequence
cagttgtatttgttcccaatc

SEQ ID NO: 264039 - DNA, 21 bp, Artificial sequence
  SiRNA target sequence
agttgtatttgttcccaatca

SEQ ID NO: 264040 - DNA, 21 bp, Artificial sequence
  SiRNA target sequence
gttgtatttgttcccaatcac

SEQ ID NO: 264041 - DNA, 21 bp, Artificial sequence
  SiRNA target sequence
ttgtatttgttcccaatcaca

SEQ ID NO: 264042 - DNA, 21 bp, Artificial sequence
  SiRNA target sequence
tgtatttgttcccaatcacac

SEQ ID NO: 264043 - DNA, 21 bp, Artificial sequence
  SiRNA target sequence
gtatttgttcccaatcacacc

SEQ ID NO: 264044 - DNA, 21 bp, Artificial sequence
  SiRNA target sequence
tatttgttcccaatcacacct

SEQ ID NO: 264045 - DNA, 21 bp, Artificial sequence
  SiRNA target sequence
atttgttcccaatcacacctg

SEQ ID NO: 264046 - DNA, 21 bp, Artificial sequence
  SiRNA target sequence
tttgttcccaatcacacctgt

SEQ ID NO: 264047 - DNA, 21 bp, Artificial sequence
  SiRNA target sequence
ttgttcccaatcacacctgta

SEQ ID NO: 264048 - DNA, 21 bp, Artificial sequence
  SiRNA target sequence
tgttcccaatcacacctgtac

SEQ ID NO: 264049 - DNA, 21 bp, Artificial sequence
  SiRNA target sequence
gttcccaatcacacctgtact

SEQ ID NO: 264050 - DNA, 21 bp, Artificial sequence
  SiRNA target sequence
ttcccaatcacacctgtacta

SEQ ID NO: 264051 - DNA, 21 bp, Artificial sequence
  SiRNA target sequence
tcccaatcacacctgtactag

SEQ ID NO: 264052 - DNA, 21 bp, Artificial sequence
  SiRNA target sequence
cccaatcacacctgtactagg

SEQ ID NO: 264053 - DNA, 21 bp, Artificial sequence
  SiRNA target sequence
ccaatcacacctgtactagga

SEQ ID NO: 264054 - DNA, 21 bp, Artificial sequence
  SiRNA target sequence
caatcacacctgtactaggac

SEQ ID NO: 264055 - DNA, 21 bp, Artificial sequence
  SiRNA target sequence
aatcacacctgtactaggacc

SEQ ID NO: 264056 - DNA, 21 bp, Artificial sequence
  SiRNA target sequence
atcacacctgtactaggacct

SEQ ID NO: 264057 - DNA, 21 bp, Artificial sequence
  SiRNA target sequence
tcacacctgtactaggaccta

SEQ ID NO: 264058 - DNA, 21 bp, Artificial sequence
  SiRNA target sequence
cacacctgtactaggacctaa

SEQ ID NO: 264059 - DNA, 21 bp, Artificial sequence
  SiRNA target sequence
acacctgtactaggacctaaa

SEQ ID NO: 264060 - DNA, 21 bp, Artificial sequence
  SiRNA target sequence
cacctgtactaggacctaaat

SEQ ID NO: 264061 - DNA, 21 bp, Artificial sequence
  SiRNA target sequence
acctgtactaggacctaaatc

SEQ ID NO: 264062 - DNA, 21 bp, Artificial sequence
  SiRNA target sequence
cctgtactaggacctaaatct

SEQ ID NO: 264063 - DNA, 21 bp, Artificial sequence
  SiRNA target sequence
ctgtactaggacctaaatctg

SEQ ID NO: 264064 - DNA, 21 bp, Artificial sequence
  SiRNA target sequence
tgtactaggacctaaatctga

SEQ ID NO: 264065 - DNA, 21 bp, Artificial sequence
  SiRNA target sequence
gtactaggacctaaatctgaa

SEQ ID NO: 264066 - DNA, 21 bp, Artificial sequence
  SiRNA target sequence
tactaggacctaaatctgaat

SEQ ID NO: 264067 - DNA, 21 bp, Artificial sequence
  SiRNA target sequence
actaggacctaaatctgaatc

SEQ ID NO: 264068 - DNA, 21 bp, Artificial sequence
  SiRNA target sequence
ctaggacctaaatctgaatca

SEQ ID NO: 264069 - DNA, 21 bp, Artificial sequence
  SiRNA target sequence
taggacctaaatctgaatcag

SEQ ID NO: 264070 - DNA, 21 bp, Artificial sequence
  SiRNA target sequence
aggacctaaatctgaatcaga

SEQ ID NO: 264071 - DNA, 21 bp, Artificial sequence
  SiRNA target sequence
ggacctaaatctgaatcagaa

SEQ ID NO: 264072 - DNA, 21 bp, Artificial sequence
  SiRNA target sequence
gacctaaatctgaatcagaaa

SEQ ID NO: 264073 - DNA, 21 bp, Artificial sequence
  SiRNA target sequence
acctaaatctgaatcagaaag

SEQ ID NO: 264074 - DNA, 21 bp, Artificial sequence
  SiRNA target sequence
cctaaatctgaatcagaaagt

SEQ ID NO: 264075 - DNA, 21 bp, Artificial sequence
  SiRNA target sequence
ctaaatctgaatcagaaagtt

SEQ ID NO: 264076 - DNA, 21 bp, Artificial sequence
  SiRNA target sequence
taaatctgaatcagaaagttc

SEQ ID NO: 264077 - DNA, 21 bp, Artificial sequence
  SiRNA target sequence
aaatctgaatcagaaagttcc

SEQ ID NO: 264078 - DNA, 21 bp, Artificial sequence
  SiRNA target sequence
aatctgaatcagaaagttcca

SEQ ID NO: 264079 - DNA, 21 bp, Artificial sequence
  SiRNA target sequence
atctgaatcagaaagttccaa

SEQ ID NO: 264080 - DNA, 21 bp, Artificial sequence
  SiRNA target sequence
tctgaatcagaaagttccaaa

SEQ ID NO: 264081 - DNA, 21 bp, Artificial sequence
  SiRNA target sequence
ctgaatcagaaagttccaaag

SEQ ID NO: 264082 - DNA, 21 bp, Artificial sequence
  SiRNA target sequence
tgaatcagaaagttccaaagt

SEQ ID NO: 264083 - DNA, 21 bp, Artificial sequence
  SiRNA target sequence
gaatcagaaagttccaaagtt

SEQ ID NO: 264084 - DNA, 21 bp, Artificial sequence
  SiRNA target sequence
aatcagaaagttccaaagttg

SEQ ID NO: 264085 - DNA, 21 bp, Artificial sequence
  SiRNA target sequence
atcagaaagttccaaagttga

SEQ ID NO: 264086 - DNA, 21 bp, Artificial sequence
  SiRNA target sequence
tcagaaagttccaaagttgac

SEQ ID NO: 264087 - DNA, 21 bp, Artificial sequence
  SiRNA target sequence
cagaaagttccaaagttgaca

SEQ ID NO: 264088 - DNA, 21 bp, Artificial sequence
  SiRNA target sequence
agaaagttccaaagttgacat

SEQ ID NO: 264089 - DNA, 21 bp, Artificial sequence
  SiRNA target sequence
gaaagttccaaagttgacatt

SEQ ID NO: 264090 - DNA, 21 bp, Artificial sequence
  SiRNA target sequence
aaagttccaaagttgacattt

SEQ ID NO: 264091 - DNA, 21 bp, Artificial sequence
  SiRNA target sequence
aagttccaaagttgacatttc

SEQ ID NO: 264092 - DNA, 21 bp, Artificial sequence
  SiRNA target sequence
agttccaaagttgacatttca

SEQ ID NO: 264093 - DNA, 21 bp, Artificial sequence
  SiRNA target sequence
gttccaaagttgacatttcag

SEQ ID NO: 264094 - DNA, 21 bp, Artificial sequence
  SiRNA target sequence
ttccaaagttgacatttcagt

SEQ ID NO: 264095 - DNA, 21 bp, Artificial sequence
  SiRNA target sequence
tccaaagttgacatttcagtt

SEQ ID NO: 264096 - DNA, 21 bp, Artificial sequence
  SiRNA target sequence
ccaaagttgacatttcagttt

SEQ ID NO: 264097 - DNA, 21 bp, Artificial sequence
  SiRNA target sequence
caaagttgacatttcagttta

SEQ ID NO: 264098 - DNA, 21 bp, Artificial sequence
  SiRNA target sequence
aaagttgacatttcagtttat

SEQ ID NO: 264099 - DNA, 21 bp, Artificial sequence
  SiRNA target sequence
aagttgacatttcagtttata

SEQ ID NO: 264100 - DNA, 21 bp, Artificial sequence
  SiRNA target sequence
agttgacatttcagtttatat

SEQ ID NO: 264101 - DNA, 21 bp, Artificial sequence
  SiRNA target sequence
gttgacatttcagtttatatg

SEQ ID NO: 264102 - DNA, 21 bp, Artificial sequence
  SiRNA target sequence
ttgacatttcagtttatatgt

SEQ ID NO: 264103 - DNA, 21 bp, Artificial sequence
  SiRNA target sequence
tgacatttcagtttatatgtg

SEQ ID NO: 264104 - DNA, 21 bp, Artificial sequence
  SiRNA target sequence
gacatttcagtttatatgtgg

SEQ ID NO: 264105 - DNA, 21 bp, Artificial sequence
  SiRNA target sequence
acatttcagtttatatgtggt

SEQ ID NO: 264106 - DNA, 21 bp, Artificial sequence
  SiRNA target sequence
catttcagtttatatgtggtt

SEQ ID NO: 264107 - DNA, 21 bp, Artificial sequence
  SiRNA target sequence
atttcagtttatatgtggttg

SEQ ID NO: 264108 - DNA, 21 bp, Artificial sequence
  SiRNA target sequence
tttcagtttatatgtggttga

SEQ ID NO: 264109 - DNA, 21 bp, Artificial sequence
  SiRNA target sequence
ttcagtttatatgtggttgag

SEQ ID NO: 264110 - DNA, 21 bp, Artificial sequence
  SiRNA target sequence
tcagtttatatgtggttgagt

SEQ ID NO: 264111 - DNA, 21 bp, Artificial sequence
  SiRNA target sequence
cagtttatatgtggttgagta

SEQ ID NO: 264112 - DNA, 21 bp, Artificial sequence
  SiRNA target sequence
agtttatatgtggttgagtaa

SEQ ID NO: 264113 - DNA, 21 bp, Artificial sequence
  SiRNA target sequence
gtttatatgtggttgagtaac

SEQ ID NO: 264114 - DNA, 21 bp, Artificial sequence
  SiRNA target sequence
tttatatgtggttgagtaaca

SEQ ID NO: 264115 - DNA, 21 bp, Artificial sequence
  SiRNA target sequence
ttatatgtggttgagtaacat

SEQ ID NO: 264116 - DNA, 21 bp, Artificial sequence
  SiRNA target sequence
tatatgtggttgagtaacata

SEQ ID NO: 264117 - DNA, 21 bp, Artificial sequence
  SiRNA target sequence
atatgtggttgagtaacatat

SEQ ID NO: 264118 - DNA, 21 bp, Artificial sequence
  SiRNA target sequence
tatgtggttgagtaacatatc

SEQ ID NO: 264119 - DNA, 21 bp, Artificial sequence
  SiRNA target sequence
atgtggttgagtaacatatct

SEQ ID NO: 264120 - DNA, 21 bp, Artificial sequence
  SiRNA target sequence
tgtggttgagtaacatatctc

SEQ ID NO: 264121 - DNA, 21 bp, Artificial sequence
  SiRNA target sequence
gtggttgagtaacatatctct

SEQ ID NO: 264122 - DNA, 21 bp, Artificial sequence
  SiRNA target sequence
tggttgagtaacatatctctt

SEQ ID NO: 264123 - DNA, 21 bp, Artificial sequence
  SiRNA target sequence
ggttgagtaacatatctcttg

SEQ ID NO: 264124 - DNA, 21 bp, Artificial sequence
  SiRNA target sequence
gttgagtaacatatctcttgt

SEQ ID NO: 264125 - DNA, 21 bp, Artificial sequence
  SiRNA target sequence
ttgagtaacatatctcttgtt

SEQ ID NO: 264126 - DNA, 21 bp, Artificial sequence
  SiRNA target sequence
tgagtaacatatctcttgtta

SEQ ID NO: 264127 - DNA, 21 bp, Artificial sequence
  SiRNA target sequence
gagtaacatatctcttgttat

SEQ ID NO: 264128 - DNA, 21 bp, Artificial sequence
  SiRNA target sequence
agtaacatatctcttgttatt

SEQ ID NO: 264129 - DNA, 21 bp, Artificial sequence
  SiRNA target sequence
gtaacatatctcttgttattc

SEQ ID NO: 264130 - DNA, 21 bp, Artificial sequence
  SiRNA target sequence
taacatatctcttgttattcc

SEQ ID NO: 264131 - DNA, 21 bp, Artificial sequence
  SiRNA target sequence
aacatatctcttgttattcca

SEQ ID NO: 264132 - DNA, 21 bp, Artificial sequence
  SiRNA target sequence
acatatctcttgttattccaa

SEQ ID NO: 264133 - DNA, 21 bp, Artificial sequence
  SiRNA target sequence
catatctcttgttattccaac

SEQ ID NO: 264134 - DNA, 21 bp, Artificial sequence
  SiRNA target sequence
atatctcttgttattccaact

SEQ ID NO: 264135 - DNA, 21 bp, Artificial sequence
  SiRNA target sequence
tatctcttgttattccaactt

SEQ ID NO: 264136 - DNA, 21 bp, Artificial sequence
  SiRNA target sequence
atctcttgttattccaactta

SEQ ID NO: 264137 - DNA, 21 bp, Artificial sequence
  SiRNA target sequence
tctcttgttattccaacttat

SEQ ID NO: 264138 - DNA, 21 bp, Artificial sequence
  SiRNA target sequence
ctcttgttattccaacttatc

SEQ ID NO: 264139 - DNA, 21 bp, Artificial sequence
  SiRNA target sequence
tcttgttattccaacttatcg

SEQ ID NO: 264140 - DNA, 21 bp, Artificial sequence
  SiRNA target sequence
cttgttattccaacttatcgc

SEQ ID NO: 264141 - DNA, 21 bp, Artificial sequence
  SiRNA target sequence
ttgttattccaacttatcgca

SEQ ID NO: 264142 - DNA, 21 bp, Artificial sequence
  SiRNA target sequence
tgttattccaacttatcgcat

SEQ ID NO: 264143 - DNA, 21 bp, Artificial sequence
  SiRNA target sequence
gttattccaacttatcgcatg

SEQ ID NO: 264144 - DNA, 21 bp, Artificial sequence
  SiRNA target sequence
ttattccaacttatcgcatga

SEQ ID NO: 264145 - DNA, 21 bp, Artificial sequence
  SiRNA target sequence
tattccaacttatcgcatgaa

SEQ ID NO: 264146 - DNA, 21 bp, Artificial sequence
  SiRNA target sequence
attccaacttatcgcatgaat

SEQ ID NO: 264147 - DNA, 21 bp, Artificial sequence
  SiRNA target sequence
ttccaacttatcgcatgaatc

SEQ ID NO: 264148 - DNA, 21 bp, Artificial sequence
  SiRNA target sequence
tccaacttatcgcatgaatcc

SEQ ID NO: 264149 - DNA, 21 bp, Artificial sequence
  SiRNA target sequence
ccaacttatcgcatgaatcct

SEQ ID NO: 264150 - DNA, 21 bp, Artificial sequence
  SiRNA target sequence
caacttatcgcatgaatcctg

SEQ ID NO: 264151 - DNA, 21 bp, Artificial sequence
  SiRNA target sequence
aacttatcgcatgaatcctga

SEQ ID NO: 264152 - DNA, 21 bp, Artificial sequence
  SiRNA target sequence
acttatcgcatgaatcctgat

SEQ ID NO: 264153 - DNA, 21 bp, Artificial sequence
  SiRNA target sequence
cttatcgcatgaatcctgata

SEQ ID NO: 264154 - DNA, 21 bp, Artificial sequence
  SiRNA target sequence
ttatcgcatgaatcctgatat

SEQ ID NO: 264155 - DNA, 21 bp, Artificial sequence
  SiRNA target sequence
tatcgcatgaatcctgatatt

SEQ ID NO: 264156 - DNA, 21 bp, Artificial sequence
  SiRNA target sequence
atcgcatgaatcctgatattg

SEQ ID NO: 264157 - DNA, 21 bp, Artificial sequence
  SiRNA target sequence
tcgcatgaatcctgatattgt

SEQ ID NO: 264158 - DNA, 21 bp, Artificial sequence
  SiRNA target sequence
cgcatgaatcctgatattgtc

SEQ ID NO: 264159 - DNA, 21 bp, Artificial sequence
  SiRNA target sequence
gcatgaatcctgatattgtca

SEQ ID NO: 264160 - DNA, 21 bp, Artificial sequence
  SiRNA target sequence
catgaatcctgatattgtcaa

SEQ ID NO: 264161 - DNA, 21 bp, Artificial sequence
  SiRNA target sequence
atgaatcctgatattgtcaaa

SEQ ID NO: 264162 - DNA, 21 bp, Artificial sequence
  SiRNA target sequence
tgaatcctgatattgtcaaac

SEQ ID NO: 264163 - DNA, 21 bp, Artificial sequence
  SiRNA target sequence
gaatcctgatattgtcaaaca

SEQ ID NO: 264164 - DNA, 21 bp, Artificial sequence
  SiRNA target sequence
aatcctgatattgtcaaacaa

SEQ ID NO: 264165 - DNA, 21 bp, Artificial sequence
  SiRNA target sequence
atcctgatattgtcaaacaag

SEQ ID NO: 264166 - DNA, 21 bp, Artificial sequence
  SiRNA target sequence
tcctgatattgtcaaacaagg

SEQ ID NO: 264167 - DNA, 21 bp, Artificial sequence
  SiRNA target sequence
cctgatattgtcaaacaagga

SEQ ID NO: 264168 - DNA, 21 bp, Artificial sequence
  SiRNA target sequence
ctgatattgtcaaacaaggag

SEQ ID NO: 264169 - DNA, 21 bp, Artificial sequence
  SiRNA target sequence
tgatattgtcaaacaaggagc

SEQ ID NO: 264170 - DNA, 21 bp, Artificial sequence
  SiRNA target sequence
gatattgtcaaacaaggagct

SEQ ID NO: 264171 - DNA, 21 bp, Artificial sequence
  SiRNA target sequence
atattgtcaaacaaggagctt

SEQ ID NO: 264172 - DNA, 21 bp, Artificial sequence
  SiRNA target sequence
tattgtcaaacaaggagcttc

SEQ ID NO: 264173 - DNA, 21 bp, Artificial sequence
  SiRNA target sequence
attgtcaaacaaggagcttca

SEQ ID NO: 264174 - DNA, 21 bp, Artificial sequence
  SiRNA target sequence
ttgtcaaacaaggagcttcaa

SEQ ID NO: 264175 - DNA, 21 bp, Artificial sequence
  SiRNA target sequence
tgtcaaacaaggagcttcaag

SEQ ID NO: 264176 - DNA, 21 bp, Artificial sequence
  SiRNA target sequence
gtcaaacaaggagcttcaagg

SEQ ID NO: 264177 - DNA, 21 bp, Artificial sequence
  SiRNA target sequence
tcaaacaaggagcttcaagga

SEQ ID NO: 264178 - DNA, 21 bp, Artificial sequence
  SiRNA target sequence
caaacaaggagcttcaaggat

SEQ ID NO: 264179 - DNA, 21 bp, Artificial sequence
  SiRNA target sequence
aaacaaggagcttcaaggatg

SEQ ID NO: 264180 - DNA, 21 bp, Artificial sequence
  SiRNA target sequence
aacaaggagcttcaaggatgg

SEQ ID NO: 264181 - DNA, 21 bp, Artificial sequence
  SiRNA target sequence
acaaggagcttcaaggatggt

SEQ ID NO: 264182 - DNA, 21 bp, Artificial sequence
  SiRNA target sequence
caaggagcttcaaggatggta

SEQ ID NO: 264183 - DNA, 21 bp, Artificial sequence
  SiRNA target sequence
aaggagcttcaaggatggtaa

SEQ ID NO: 264184 - DNA, 21 bp, Artificial sequence
  SiRNA target sequence
aggagcttcaaggatggtaac

SEQ ID NO: 264185 - DNA, 21 bp, Artificial sequence
  SiRNA target sequence
ggagcttcaaggatggtaact

SEQ ID NO: 264186 - DNA, 21 bp, Artificial sequence
  SiRNA target sequence
gagcttcaaggatggtaactg

SEQ ID NO: 264187 - DNA, 21 bp, Artificial sequence
  SiRNA target sequence
agcttcaaggatggtaactga

SEQ ID NO: 264188 - DNA, 21 bp, Artificial sequence
  SiRNA target sequence
gcttcaaggatggtaactgaa

SEQ ID NO: 264189 - DNA, 21 bp, Artificial sequence
  SiRNA target sequence
cttcaaggatggtaactgaat

SEQ ID NO: 264190 - DNA, 21 bp, Artificial sequence
  SiRNA target sequence
ttcaaggatggtaactgaatt

SEQ ID NO: 264191 - DNA, 21 bp, Artificial sequence
  SiRNA target sequence
tcaaggatggtaactgaattt

SEQ ID NO: 264192 - DNA, 21 bp, Artificial sequence
  SiRNA target sequence
caaggatggtaactgaatttg

SEQ ID NO: 264193 - DNA, 21 bp, Artificial sequence
  SiRNA target sequence
aaggatggtaactgaatttgt

SEQ ID NO: 264194 - DNA, 21 bp, Artificial sequence
  SiRNA target sequence
aggatggtaactgaatttgtt

SEQ ID NO: 264195 - DNA, 21 bp, Artificial sequence
  SiRNA target sequence
ggatggtaactgaatttgttc

SEQ ID NO: 264196 - DNA, 21 bp, Artificial sequence
  SiRNA target sequence
gatggtaactgaatttgttcc

SEQ ID NO: 264197 - DNA, 21 bp, Artificial sequence
  SiRNA target sequence
atggtaactgaatttgttcca

SEQ ID NO: 264198 - DNA, 21 bp, Artificial sequence
  SiRNA target sequence
tggtaactgaatttgttccaa

SEQ ID NO: 264199 - DNA, 21 bp, Artificial sequence
  SiRNA target sequence
ggtaactgaatttgttccaaa

SEQ ID NO: 264200 - DNA, 21 bp, Artificial sequence
  SiRNA target sequence
gtaactgaatttgttccaaat

SEQ ID NO: 264201 - DNA, 21 bp, Artificial sequence
  SiRNA target sequence
taactgaatttgttccaaatc

SEQ ID NO: 264202 - DNA, 21 bp, Artificial sequence
  SiRNA target sequence
aactgaatttgttccaaatcc

SEQ ID NO: 264203 - DNA, 21 bp, Artificial sequence
  SiRNA target sequence
actgaatttgttccaaatcct

SEQ ID NO: 264204 - DNA, 21 bp, Artificial sequence
  SiRNA target sequence
ctgaatttgttccaaatcctc

SEQ ID NO: 264205 - DNA, 21 bp, Artificial sequence
  SiRNA target sequence
tgaatttgttccaaatcctct

SEQ ID NO: 264206 - DNA, 21 bp, Artificial sequence
  SiRNA target sequence
gaatttgttccaaatcctctt

SEQ ID NO: 264207 - DNA, 21 bp, Artificial sequence
  SiRNA target sequence
aatttgttccaaatcctcttg

SEQ ID NO: 264208 - DNA, 21 bp, Artificial sequence
  SiRNA target sequence
atttgttccaaatcctcttga

SEQ ID NO: 264209 - DNA, 21 bp, Artificial sequence
  SiRNA target sequence
tttgttccaaatcctcttgaa

SEQ ID NO: 264210 - DNA, 21 bp, Artificial sequence
  SiRNA target sequence
ttgttccaaatcctcttgaaa

SEQ ID NO: 264211 - DNA, 21 bp, Artificial sequence
  SiRNA target sequence
tgttccaaatcctcttgaaaa

SEQ ID NO: 264212 - DNA, 21 bp, Artificial sequence
  SiRNA target sequence
gttccaaatcctcttgaaaaa

SEQ ID NO: 264213 - DNA, 21 bp, Artificial sequence
  SiRNA target sequence
ttccaaatcctcttgaaaaag

SEQ ID NO: 264214 - DNA, 21 bp, Artificial sequence
  SiRNA target sequence
tccaaatcctcttgaaaaaga

SEQ ID NO: 264215 - DNA, 21 bp, Artificial sequence
  SiRNA target sequence
ccaaatcctcttgaaaaagat

SEQ ID NO: 264216 - DNA, 21 bp, Artificial sequence
  SiRNA target sequence
caaatcctcttgaaaaagatg

SEQ ID NO: 264217 - DNA, 21 bp, Artificial sequence
  SiRNA target sequence
aaatcctcttgaaaaagatgc

SEQ ID NO: 264218 - DNA, 21 bp, Artificial sequence
  SiRNA target sequence
aatcctcttgaaaaagatgcc

SEQ ID NO: 264219 - DNA, 21 bp, Artificial sequence
  SiRNA target sequence
atcctcttgaaaaagatgcca

SEQ ID NO: 264220 - DNA, 21 bp, Artificial sequence
  SiRNA target sequence
tcctcttgaaaaagatgccaa

SEQ ID NO: 264221 - DNA, 21 bp, Artificial sequence
  SiRNA target sequence
cctcttgaaaaagatgccaaa

SEQ ID NO: 264222 - DNA, 21 bp, Artificial sequence
  SiRNA target sequence
ctcttgaaaaagatgccaaaa

SEQ ID NO: 264223 - DNA, 21 bp, Artificial sequence
  SiRNA target sequence
tcttgaaaaagatgccaaaac

SEQ ID NO: 264224 - DNA, 21 bp, Artificial sequence
  SiRNA target sequence
cttgaaaaagatgccaaaacc

SEQ ID NO: 264225 - DNA, 21 bp, Artificial sequence
  SiRNA target sequence
ttgaaaaagatgccaaaacca

SEQ ID NO: 264226 - DNA, 21 bp, Artificial sequence
  SiRNA target sequence
tgaaaaagatgccaaaaccat

SEQ ID NO: 264227 - DNA, 21 bp, Artificial sequence
  SiRNA target sequence
gaaaaagatgccaaaaccata

SEQ ID NO: 264228 - DNA, 21 bp, Artificial sequence
  SiRNA target sequence
aaaaagatgccaaaaccatag

SEQ ID NO: 264229 - DNA, 21 bp, Artificial sequence
  SiRNA target sequence
aaaagatgccaaaaccatagc

SEQ ID NO: 264230 - DNA, 21 bp, Artificial sequence
  SiRNA target sequence
aaagatgccaaaaccatagca

SEQ ID NO: 264231 - DNA, 21 bp, Artificial sequence
  SiRNA target sequence
aagatgccaaaaccatagcag

SEQ ID NO: 264232 - DNA, 21 bp, Artificial sequence
  SiRNA target sequence
agatgccaaaaccatagcaga

SEQ ID NO: 264233 - DNA, 21 bp, Artificial sequence
  SiRNA target sequence
gatgccaaaaccatagcagat

SEQ ID NO: 264234 - DNA, 21 bp, Artificial sequence
  SiRNA target sequence
atgccaaaaccatagcagatg

SEQ ID NO: 264235 - DNA, 21 bp, Artificial sequence
  SiRNA target sequence
tgccaaaaccatagcagatgc

SEQ ID NO: 264236 - DNA, 21 bp, Artificial sequence
  SiRNA target sequence
gccaaaaccatagcagatgct

SEQ ID NO: 264237 - DNA, 21 bp, Artificial sequence
  SiRNA target sequence
ccaaaaccatagcagatgctc

SEQ ID NO: 264238 - DNA, 21 bp, Artificial sequence
  SiRNA target sequence
caaaaccatagcagatgctct

SEQ ID NO: 264239 - DNA, 21 bp, Artificial sequence
  SiRNA target sequence
aaaaccatagcagatgctctt

SEQ ID NO: 264240 - DNA, 21 bp, Artificial sequence
  SiRNA target sequence
aaaccatagcagatgctctta

SEQ ID NO: 264241 - DNA, 21 bp, Artificial sequence
  SiRNA target sequence
aaccatagcagatgctcttaa

SEQ ID NO: 264242 - DNA, 21 bp, Artificial sequence
  SiRNA target sequence
accatagcagatgctcttaag

SEQ ID NO: 264243 - DNA, 21 bp, Artificial sequence
  SiRNA target sequence
ccatagcagatgctcttaaga

SEQ ID NO: 264244 - DNA, 21 bp, Artificial sequence
  SiRNA target sequence
catagcagatgctcttaagaa

SEQ ID NO: 264245 - DNA, 21 bp, Artificial sequence
  SiRNA target sequence
atagcagatgctcttaagaaa

SEQ ID NO: 264246 - DNA, 21 bp, Artificial sequence
  SiRNA target sequence
tagcagatgctcttaagaaag

SEQ ID NO: 264247 - DNA, 21 bp, Artificial sequence
  SiRNA target sequence
agcagatgctcttaagaaagt

SEQ ID NO: 264248 - DNA, 21 bp, Artificial sequence
  SiRNA target sequence
gcagatgctcttaagaaagtt

SEQ ID NO: 264249 - DNA, 21 bp, Artificial sequence
  SiRNA target sequence
cagatgctcttaagaaagttc

SEQ ID NO: 264250 - DNA, 21 bp, Artificial sequence
  SiRNA target sequence
agatgctcttaagaaagttca

SEQ ID NO: 264251 - DNA, 21 bp, Artificial sequence
  SiRNA target sequence
gatgctcttaagaaagttcag

SEQ ID NO: 264252 - DNA, 21 bp, Artificial sequence
  SiRNA target sequence
atgctcttaagaaagttcaga

SEQ ID NO: 264253 - DNA, 21 bp, Artificial sequence
  SiRNA target sequence
tgctcttaagaaagttcagaa

SEQ ID NO: 264254 - DNA, 21 bp, Artificial sequence
  SiRNA target sequence
gctcttaagaaagttcagaaa

SEQ ID NO: 264255 - DNA, 21 bp, Artificial sequence
  SiRNA target sequence
ctcttaagaaagttcagaaaa

SEQ ID NO: 264256 - DNA, 21 bp, Artificial sequence
  SiRNA target sequence
tcttaagaaagttcagaaaaa

SEQ ID NO: 264257 - DNA, 21 bp, Artificial sequence
  SiRNA target sequence
cttaagaaagttcagaaaaat

SEQ ID NO: 264258 - DNA, 21 bp, Artificial sequence
  SiRNA target sequence
ttaagaaagttcagaaaaata

SEQ ID NO: 264259 - DNA, 21 bp, Artificial sequence
  SiRNA target sequence
taagaaagttcagaaaaataa

SEQ ID NO: 264260 - DNA, 21 bp, Artificial sequence
  SiRNA target sequence
aagaaagttcagaaaaataat

SEQ ID NO: 264261 - DNA, 21 bp, Artificial sequence
  SiRNA target sequence
agaaagttcagaaaaataatc

SEQ ID NO: 264262 - DNA, 21 bp, Artificial sequence
  SiRNA target sequence
gaaagttcagaaaaataatcc

SEQ ID NO: 264263 - DNA, 21 bp, Artificial sequence
  SiRNA target sequence
aaagttcagaaaaataatcct

SEQ ID NO: 264264 - DNA, 21 bp, Artificial sequence
  SiRNA target sequence
aagttcagaaaaataatcctt

SEQ ID NO: 264265 - DNA, 21 bp, Artificial sequence
  SiRNA target sequence
agttcagaaaaataatccttc

SEQ ID NO: 264266 - DNA, 21 bp, Artificial sequence
  SiRNA target sequence
gttcagaaaaataatccttct

SEQ ID NO: 264267 - DNA, 21 bp, Artificial sequence
  SiRNA target sequence
ttcagaaaaataatccttctg

SEQ ID NO: 264268 - DNA, 21 bp, Artificial sequence
  SiRNA target sequence
tcagaaaaataatccttctgg

SEQ ID NO: 264269 - DNA, 21 bp, Artificial sequence
  SiRNA target sequence
cagaaaaataatccttctggg

SEQ ID NO: 264270 - DNA, 21 bp, Artificial sequence
  SiRNA target sequence
agaaaaataatccttctgggt

SEQ ID NO: 264271 - DNA, 21 bp, Artificial sequence
  SiRNA target sequence
gaaaaataatccttctgggta

SEQ ID NO: 264272 - DNA, 21 bp, Artificial sequence
  SiRNA target sequence
aaaaataatccttctgggtat

SEQ ID NO: 264273 - DNA, 21 bp, Artificial sequence
  SiRNA target sequence
aaaataatccttctgggtata

SEQ ID NO: 264274 - DNA, 21 bp, Artificial sequence
  SiRNA target sequence
aaataatccttctgggtataa

SEQ ID NO: 264275 - DNA, 21 bp, Artificial sequence
  SiRNA target sequence
aataatccttctgggtataaa

SEQ ID NO: 264276 - DNA, 21 bp, Artificial sequence
  SiRNA target sequence
ataatccttctgggtataaat

SEQ ID NO: 264277 - DNA, 21 bp, Artificial sequence
  SiRNA target sequence
taatccttctgggtataaata

SEQ ID NO: 264278 - DNA, 21 bp, Artificial sequence
  SiRNA target sequence
aatccttctgggtataaatat

SEQ ID NO: 264279 - DNA, 21 bp, Artificial sequence
  SiRNA target sequence
atccttctgggtataaatata

SEQ ID NO: 264280 - DNA, 21 bp, Artificial sequence
  SiRNA target sequence
tccttctgggtataaatatat

SEQ ID NO: 264281 - DNA, 21 bp, Artificial sequence
  SiRNA target sequence
ccttctgggtataaatatatt

SEQ ID NO: 264282 - DNA, 21 bp, Artificial sequence
  SiRNA target sequence
cttctgggtataaatatatta

SEQ ID NO: 264283 - DNA, 21 bp, Artificial sequence
  SiRNA target sequence
ttctgggtataaatatattat

SEQ ID NO: 264284 - DNA, 21 bp, Artificial sequence
  SiRNA target sequence
tctgggtataaatatattatg

SEQ ID NO: 264285 - DNA, 21 bp, Artificial sequence
  SiRNA target sequence
ctgggtataaatatattatgc

SEQ ID NO: 264286 - DNA, 21 bp, Artificial sequence
  SiRNA target sequence
tgggtataaatatattatgca

SEQ ID NO: 264287 - DNA, 21 bp, Artificial sequence
  SiRNA target sequence
gggtataaatatattatgcat

SEQ ID NO: 264288 - DNA, 21 bp, Artificial sequence
  SiRNA target sequence
ggtataaatatattatgcatg

SEQ ID NO: 264289 - DNA, 21 bp, Artificial sequence
  SiRNA target sequence
gtataaatatattatgcatgt

SEQ ID NO: 264290 - DNA, 21 bp, Artificial sequence
  SiRNA target sequence
tataaatatattatgcatgtc

SEQ ID NO: 264291 - DNA, 21 bp, Artificial sequence
  SiRNA target sequence
ataaatatattatgcatgtct

SEQ ID NO: 264292 - DNA, 21 bp, Artificial sequence
  SiRNA target sequence
taaatatattatgcatgtctt

SEQ ID NO: 264293 - DNA, 21 bp, Artificial sequence
  SiRNA target sequence
aaatatattatgcatgtcttg

SEQ ID NO: 264294 - DNA, 21 bp, Artificial sequence
  SiRNA target sequence
aatatattatgcatgtcttga

SEQ ID NO: 264295 - DNA, 21 bp, Artificial sequence
  SiRNA target sequence
atatattatgcatgtcttgac

SEQ ID NO: 264296 - DNA, 21 bp, Artificial sequence
  SiRNA target sequence
tatattatgcatgtcttgact

SEQ ID NO: 264297 - DNA, 21 bp, Artificial sequence
  SiRNA target sequence
atattatgcatgtcttgactg

SEQ ID NO: 264298 - DNA, 21 bp, Artificial sequence
  SiRNA target sequence
tattatgcatgtcttgactgg

SEQ ID NO: 264299 - DNA, 21 bp, Artificial sequence
  SiRNA target sequence
attatgcatgtcttgactggc

SEQ ID NO: 264300 - DNA, 21 bp, Artificial sequence
  SiRNA target sequence
ttatgcatgtcttgactggct

SEQ ID NO: 264301 - DNA, 21 bp, Artificial sequence
  SiRNA target sequence
tatgcatgtcttgactggcta

SEQ ID NO: 264302 - DNA, 21 bp, Artificial sequence
  SiRNA target sequence
atgcatgtcttgactggctat

SEQ ID NO: 264303 - DNA, 21 bp, Artificial sequence
  SiRNA target sequence
tgcatgtcttgactggctatg

SEQ ID NO: 264304 - DNA, 21 bp, Artificial sequence
  SiRNA target sequence
gcatgtcttgactggctatga

SEQ ID NO: 264305 - DNA, 21 bp, Artificial sequence
  SiRNA target sequence
catgtcttgactggctatgaa

SEQ ID NO: 264306 - DNA, 21 bp, Artificial sequence
  SiRNA target sequence
atgtcttgactggctatgaac

SEQ ID NO: 264307 - DNA, 21 bp, Artificial sequence
  SiRNA target sequence
tgtcttgactggctatgaacc

SEQ ID NO: 264308 - DNA, 21 bp, Artificial sequence
  SiRNA target sequence
gtcttgactggctatgaacct

SEQ ID NO: 264309 - DNA, 21 bp, Artificial sequence
  SiRNA target sequence
tcttgactggctatgaacctg

SEQ ID NO: 264310 - DNA, 21 bp, Artificial sequence
  SiRNA target sequence
cttgactggctatgaacctga

SEQ ID NO: 264311 - DNA, 21 bp, Artificial sequence
  SiRNA target sequence
ttgactggctatgaacctgaa

SEQ ID NO: 264312 - DNA, 21 bp, Artificial sequence
  SiRNA target sequence
tgactggctatgaacctgaag

SEQ ID NO: 264313 - DNA, 21 bp, Artificial sequence
  SiRNA target sequence
gactggctatgaacctgaagt

SEQ ID NO: 264314 - DNA, 21 bp, Artificial sequence
  SiRNA target sequence
actggctatgaacctgaagta

SEQ ID NO: 264315 - DNA, 21 bp, Artificial sequence
  SiRNA target sequence
ctggctatgaacctgaagtaa

SEQ ID NO: 264316 - DNA, 21 bp, Artificial sequence
  SiRNA target sequence
tggctatgaacctgaagtaaa

SEQ ID NO: 264317 - DNA, 21 bp, Artificial sequence
  SiRNA target sequence
ggctatgaacctgaagtaaag

SEQ ID NO: 264318 - DNA, 21 bp, Artificial sequence
  SiRNA target sequence
gctatgaacctgaagtaaaga

SEQ ID NO: 264319 - DNA, 21 bp, Artificial sequence
  SiRNA target sequence
ctatgaacctgaagtaaagaa

SEQ ID NO: 264320 - DNA, 21 bp, Artificial sequence
  SiRNA target sequence
tatgaacctgaagtaaagaat

SEQ ID NO: 264321 - DNA, 21 bp, Artificial sequence
  SiRNA target sequence
atgaacctgaagtaaagaatg

SEQ ID NO: 264322 - DNA, 21 bp, Artificial sequence
  SiRNA target sequence
tgaacctgaagtaaagaatgt

SEQ ID NO: 264323 - DNA, 21 bp, Artificial sequence
  SiRNA target sequence
gaacctgaagtaaagaatgta

SEQ ID NO: 264324 - DNA, 21 bp, Artificial sequence
  SiRNA target sequence
aacctgaagtaaagaatgtaa

SEQ ID NO: 264325 - DNA, 21 bp, Artificial sequence
  SiRNA target sequence
acctgaagtaaagaatgtaac

SEQ ID NO: 264326 - DNA, 21 bp, Artificial sequence
  SiRNA target sequence
cctgaagtaaagaatgtaaca

SEQ ID NO: 264327 - DNA, 21 bp, Artificial sequence
  SiRNA target sequence
ctgaagtaaagaatgtaacaa

SEQ ID NO: 264328 - DNA, 21 bp, Artificial sequence
  SiRNA target sequence
tgaagtaaagaatgtaacaat

SEQ ID NO: 264329 - DNA, 21 bp, Artificial sequence
  SiRNA target sequence
gaagtaaagaatgtaacaatg

SEQ ID NO: 264330 - DNA, 21 bp, Artificial sequence
  SiRNA target sequence
aagtaaagaatgtaacaatgc

SEQ ID NO: 264331 - DNA, 21 bp, Artificial sequence
  SiRNA target sequence
agtaaagaatgtaacaatgca

SEQ ID NO: 264332 - DNA, 21 bp, Artificial sequence
  SiRNA target sequence
gtaaagaatgtaacaatgcaa

SEQ ID NO: 264333 - DNA, 21 bp, Artificial sequence
  SiRNA target sequence
taaagaatgtaacaatgcaag

SEQ ID NO: 264334 - DNA, 21 bp, Artificial sequence
  SiRNA target sequence
aaagaatgtaacaatgcaagt

SEQ ID NO: 264335 - DNA, 21 bp, Artificial sequence
  SiRNA target sequence
aagaatgtaacaatgcaagtg

SEQ ID NO: 264336 - DNA, 21 bp, Artificial sequence
  SiRNA target sequence
agaatgtaacaatgcaagtga

SEQ ID NO: 264337 - DNA, 21 bp, Artificial sequence
  SiRNA target sequence
gaatgtaacaatgcaagtgaa

SEQ ID NO: 264338 - DNA, 21 bp, Artificial sequence
  SiRNA target sequence
aatgtaacaatgcaagtgaac

SEQ ID NO: 264339 - DNA, 21 bp, Artificial sequence
  SiRNA target sequence
atgtaacaatgcaagtgaacg

SEQ ID NO: 264340 - DNA, 21 bp, Artificial sequence
  SiRNA target sequence
tgtaacaatgcaagtgaacgc

SEQ ID NO: 264341 - DNA, 21 bp, Artificial sequence
  SiRNA target sequence
gtaacaatgcaagtgaacgct

SEQ ID NO: 264342 - DNA, 21 bp, Artificial sequence
  SiRNA target sequence
taacaatgcaagtgaacgctc

SEQ ID NO: 264343 - DNA, 21 bp, Artificial sequence
  SiRNA target sequence
aacaatgcaagtgaacgctcc

SEQ ID NO: 264344 - DNA, 21 bp, Artificial sequence
  SiRNA target sequence
acaatgcaagtgaacgctcca

SEQ ID NO: 264345 - DNA, 21 bp, Artificial sequence
  SiRNA target sequence
caatgcaagtgaacgctccaa

SEQ ID NO: 264346 - DNA, 21 bp, Artificial sequence
  SiRNA target sequence
aatgcaagtgaacgctccaaa

SEQ ID NO: 264347 - DNA, 21 bp, Artificial sequence
  SiRNA target sequence
atgcaagtgaacgctccaaaa

SEQ ID NO: 264348 - DNA, 21 bp, Artificial sequence
  SiRNA target sequence
tgcaagtgaacgctccaaaaa

SEQ ID NO: 264349 - DNA, 21 bp, Artificial sequence
  SiRNA target sequence
gcaagtgaacgctccaaaaac

SEQ ID NO: 264350 - DNA, 21 bp, Artificial sequence
  SiRNA target sequence
caagtgaacgctccaaaaacg

SEQ ID NO: 264351 - DNA, 21 bp, Artificial sequence
  SiRNA target sequence
aagtgaacgctccaaaaacga

SEQ ID NO: 264352 - DNA, 21 bp, Artificial sequence
  SiRNA target sequence
agtgaacgctccaaaaacgaa

SEQ ID NO: 264353 - DNA, 21 bp, Artificial sequence
  SiRNA target sequence
gtgaacgctccaaaaacgaaa

SEQ ID NO: 264354 - DNA, 21 bp, Artificial sequence
  SiRNA target sequence
tgaacgctccaaaaacgaaaa

SEQ ID NO: 264355 - DNA, 21 bp, Artificial sequence
  SiRNA target sequence
gaacgctccaaaaacgaaaac

SEQ ID NO: 264356 - DNA, 21 bp, Artificial sequence
  SiRNA target sequence
aacgctccaaaaacgaaaaca

SEQ ID NO: 264357 - DNA, 21 bp, Artificial sequence
  SiRNA target sequence
acgctccaaaaacgaaaacaa

SEQ ID NO: 264358 - DNA, 21 bp, Artificial sequence
  SiRNA target sequence
cgctccaaaaacgaaaacaag

SEQ ID NO: 264359 - DNA, 21 bp, Artificial sequence
  SiRNA target sequence
gctccaaaaacgaaaacaagt

SEQ ID NO: 264360 - DNA, 21 bp, Artificial sequence
  SiRNA target sequence
ctccaaaaacgaaaacaagtc

SEQ ID NO: 264361 - DNA, 21 bp, Artificial sequence
  SiRNA target sequence
tccaaaaacgaaaacaagtca

SEQ ID NO: 264362 - DNA, 21 bp, Artificial sequence
  SiRNA target sequence
ccaaaaacgaaaacaagtcaa

SEQ ID NO: 264363 - DNA, 21 bp, Artificial sequence
  SiRNA target sequence
caaaaacgaaaacaagtcaaa

SEQ ID NO: 264364 - DNA, 21 bp, Artificial sequence
  SiRNA target sequence
aaaaacgaaaacaagtcaaaa

SEQ ID NO: 264365 - DNA, 21 bp, Artificial sequence
  SiRNA target sequence
aaaacgaaaacaagtcaaaaa

SEQ ID NO: 264366 - DNA, 21 bp, Artificial sequence
  SiRNA target sequence
aaacgaaaacaagtcaaaaat

SEQ ID NO: 264367 - DNA, 21 bp, Artificial sequence
  SiRNA target sequence
aacgaaaacaagtcaaaaatc

SEQ ID NO: 264368 - DNA, 21 bp, Artificial sequence
  SiRNA target sequence
acgaaaacaagtcaaaaatct

SEQ ID NO: 264369 - DNA, 21 bp, Artificial sequence
  SiRNA target sequence
cgaaaacaagtcaaaaatcta

SEQ ID NO: 264370 - DNA, 21 bp, Artificial sequence
  SiRNA target sequence
gaaaacaagtcaaaaatctac

SEQ ID NO: 264371 - DNA, 21 bp, Artificial sequence
  SiRNA target sequence
aaaacaagtcaaaaatctacc

SEQ ID NO: 264372 - DNA, 21 bp, Artificial sequence
  SiRNA target sequence
aaacaagtcaaaaatctacct

SEQ ID NO: 264373 - DNA, 21 bp, Artificial sequence
  SiRNA target sequence
aacaagtcaaaaatctacctc

SEQ ID NO: 264374 - DNA, 21 bp, Artificial sequence
  SiRNA target sequence
acaagtcaaaaatctacctca

SEQ ID NO: 264375 - DNA, 21 bp, Artificial sequence
  SiRNA target sequence
caagtcaaaaatctacctcag

SEQ ID NO: 264376 - DNA, 21 bp, Artificial sequence
  SiRNA target sequence
aagtcaaaaatctacctcaga

SEQ ID NO: 264377 - DNA, 21 bp, Artificial sequence
  SiRNA target sequence
agtcaaaaatctacctcagaa

SEQ ID NO: 264378 - DNA, 21 bp, Artificial sequence
  SiRNA target sequence
gtcaaaaatctacctcagaaa

SEQ ID NO: 264379 - DNA, 21 bp, Artificial sequence
  SiRNA target sequence
tcaaaaatctacctcagaaaa

SEQ ID NO: 264380 - DNA, 21 bp, Artificial sequence
  SiRNA target sequence
caaaaatctacctcagaaaat

SEQ ID NO: 264381 - DNA, 21 bp, Artificial sequence
  SiRNA target sequence
aaaaatctacctcagaaaatc

SEQ ID NO: 264382 - DNA, 21 bp, Artificial sequence
  SiRNA target sequence
aaaatctacctcagaaaatcc

SEQ ID NO: 264383 - DNA, 21 bp, Artificial sequence
  SiRNA target sequence
aaatctacctcagaaaatccc

SEQ ID NO: 264384 - DNA, 21 bp, Artificial sequence
  SiRNA target sequence
aatctacctcagaaaatccca

SEQ ID NO: 264385 - DNA, 21 bp, Artificial sequence
  SiRNA target sequence
atctacctcagaaaatcccaa

SEQ ID NO: 264386 - DNA, 21 bp, Artificial sequence
  SiRNA target sequence
tctacctcagaaaatcccaaa

SEQ ID NO: 264387 - DNA, 21 bp, Artificial sequence
  SiRNA target sequence
ctacctcagaaaatcccaaag

SEQ ID NO: 264388 - DNA, 21 bp, Artificial sequence
  SiRNA target sequence
tacctcagaaaatcccaaagt

SEQ ID NO: 264389 - DNA, 21 bp, Artificial sequence
  SiRNA target sequence
acctcagaaaatcccaaagtt

SEQ ID NO: 264390 - DNA, 21 bp, Artificial sequence
  SiRNA target sequence
cctcagaaaatcccaaagttg

SEQ ID NO: 264391 - DNA, 21 bp, Artificial sequence
  SiRNA target sequence
ctcagaaaatcccaaagttgg

SEQ ID NO: 264392 - DNA, 21 bp, Artificial sequence
  SiRNA target sequence
tcagaaaatcccaaagttgga

SEQ ID NO: 264393 - DNA, 21 bp, Artificial sequence
  SiRNA target sequence
cagaaaatcccaaagttggac

SEQ ID NO: 264394 - DNA, 21 bp, Artificial sequence
  SiRNA target sequence
agaaaatcccaaagttggacc

SEQ ID NO: 264395 - DNA, 21 bp, Artificial sequence
  SiRNA target sequence
gaaaatcccaaagttggacca

SEQ ID NO: 264396 - DNA, 21 bp, Artificial sequence
  SiRNA target sequence
aaaatcccaaagttggaccaa

SEQ ID NO: 264397 - DNA, 21 bp, Artificial sequence
  SiRNA target sequence
aaatcccaaagttggaccaat

SEQ ID NO: 264398 - DNA, 21 bp, Artificial sequence
  SiRNA target sequence
aatcccaaagttggaccaata

SEQ ID NO: 264399 - DNA, 21 bp, Artificial sequence
  SiRNA target sequence
atcccaaagttggaccaatat

SEQ ID NO: 264400 - DNA, 21 bp, Artificial sequence
  SiRNA target sequence
tcccaaagttggaccaatatc

SEQ ID NO: 264401 - DNA, 21 bp, Artificial sequence
  SiRNA target sequence
cccaaagttggaccaatatct

SEQ ID NO: 264402 - DNA, 21 bp, Artificial sequence
  SiRNA target sequence
ccaaagttggaccaatatctg

SEQ ID NO: 264403 - DNA, 21 bp, Artificial sequence
  SiRNA target sequence
caaagttggaccaatatctga

SEQ ID NO: 264404 - DNA, 21 bp, Artificial sequence
  SiRNA target sequence
aaagttggaccaatatctgaa

SEQ ID NO: 264405 - DNA, 21 bp, Artificial sequence
  SiRNA target sequence
aagttggaccaatatctgaag

SEQ ID NO: 264406 - DNA, 21 bp, Artificial sequence
  SiRNA target sequence
agttggaccaatatctgaagt

SEQ ID NO: 264407 - DNA, 21 bp, Artificial sequence
  SiRNA target sequence
gttggaccaatatctgaagtg

SEQ ID NO: 264408 - DNA, 21 bp, Artificial sequence
  SiRNA target sequence
ttggaccaatatctgaagtgg

SEQ ID NO: 264409 - DNA, 21 bp, Artificial sequence
  SiRNA target sequence
tggaccaatatctgaagtggc

SEQ ID NO: 264410 - DNA, 21 bp, Artificial sequence
  SiRNA target sequence
ggaccaatatctgaagtggct

SEQ ID NO: 264411 - DNA, 21 bp, Artificial sequence
  SiRNA target sequence
gaccaatatctgaagtggctt

SEQ ID NO: 264412 - DNA, 21 bp, Artificial sequence
  SiRNA target sequence
accaatatctgaagtggcttc

SEQ ID NO: 264413 - DNA, 21 bp, Artificial sequence
  SiRNA target sequence
ccaatatctgaagtggcttct

SEQ ID NO: 264414 - DNA, 21 bp, Artificial sequence
  SiRNA target sequence
caatatctgaagtggcttctg

SEQ ID NO: 264415 - DNA, 21 bp, Artificial sequence
  SiRNA target sequence
aatatctgaagtggcttctgg

SEQ ID NO: 264416 - DNA, 21 bp, Artificial sequence
  SiRNA target sequence
atatctgaagtggcttctgga

SEQ ID NO: 264417 - DNA, 21 bp, Artificial sequence
  SiRNA target sequence
tatctgaagtggcttctggag

SEQ ID NO: 264418 - DNA, 21 bp, Artificial sequence
  SiRNA target sequence
atctgaagtggcttctggagt

SEQ ID NO: 264419 - DNA, 21 bp, Artificial sequence
  SiRNA target sequence
tctgaagtggcttctggagtg

SEQ ID NO: 264420 - DNA, 21 bp, Artificial sequence
  SiRNA target sequence
ctgaagtggcttctggagtga

SEQ ID NO: 264421 - DNA, 21 bp, Artificial sequence
  SiRNA target sequence
tgaagtggcttctggagtgaa

SEQ ID NO: 264422 - DNA, 21 bp, Artificial sequence
  SiRNA target sequence
gaagtggcttctggagtgaag

SEQ ID NO: 264423 - DNA, 21 bp, Artificial sequence
  SiRNA target sequence
aagtggcttctggagtgaaga

SEQ ID NO: 264424 - DNA, 21 bp, Artificial sequence
  SiRNA target sequence
agtggcttctggagtgaagac

SEQ ID NO: 264425 - DNA, 21 bp, Artificial sequence
  SiRNA target sequence
gtggcttctggagtgaagaca

SEQ ID NO: 264426 - DNA, 21 bp, Artificial sequence
  SiRNA target sequence
tggcttctggagtgaagacaa

SEQ ID NO: 264427 - DNA, 21 bp, Artificial sequence
  SiRNA target sequence
ggcttctggagtgaagacaac

SEQ ID NO: 264428 - DNA, 21 bp, Artificial sequence
  SiRNA target sequence
gcttctggagtgaagacaaca

SEQ ID NO: 264429 - DNA, 21 bp, Artificial sequence
  SiRNA target sequence
cttctggagtgaagacaacag

SEQ ID NO: 264430 - DNA, 21 bp, Artificial sequence
  SiRNA target sequence
ttctggagtgaagacaacagc

SEQ ID NO: 264431 - DNA, 21 bp, Artificial sequence
  SiRNA target sequence
tctggagtgaagacaacagct

SEQ ID NO: 264432 - DNA, 21 bp, Artificial sequence
  SiRNA target sequence
ctggagtgaagacaacagcta

SEQ ID NO: 264433 - DNA, 21 bp, Artificial sequence
  SiRNA target sequence
tggagtgaagacaacagctaa

SEQ ID NO: 264434 - DNA, 21 bp, Artificial sequence
  SiRNA target sequence
ggagtgaagacaacagctaat

SEQ ID NO: 264435 - DNA, 21 bp, Artificial sequence
  SiRNA target sequence
gagtgaagacaacagctaatg

SEQ ID NO: 264436 - DNA, 21 bp, Artificial sequence
  SiRNA target sequence
agtgaagacaacagctaatgg

SEQ ID NO: 264437 - DNA, 21 bp, Artificial sequence
  SiRNA target sequence
gtgaagacaacagctaatgga

SEQ ID NO: 264438 - DNA, 21 bp, Artificial sequence
  SiRNA target sequence
tgaagacaacagctaatggaa

SEQ ID NO: 264439 - DNA, 21 bp, Artificial sequence
  SiRNA target sequence
gaagacaacagctaatggaat

SEQ ID NO: 264440 - DNA, 21 bp, Artificial sequence
  SiRNA target sequence
aagacaacagctaatggaatt

SEQ ID NO: 264441 - DNA, 21 bp, Artificial sequence
  SiRNA target sequence
agacaacagctaatggaattg

SEQ ID NO: 264442 - DNA, 21 bp, Artificial sequence
  SiRNA target sequence
gacaacagctaatggaattga

SEQ ID NO: 264443 - DNA, 21 bp, Artificial sequence
  SiRNA target sequence
acaacagctaatggaattgag

SEQ ID NO: 264444 - DNA, 21 bp, Artificial sequence
  SiRNA target sequence
caacagctaatggaattgagc

SEQ ID NO: 264445 - DNA, 21 bp, Artificial sequence
  SiRNA target sequence
aacagctaatggaattgagcg

SEQ ID NO: 264446 - DNA, 21 bp, Artificial sequence
  SiRNA target sequence
acagctaatggaattgagcgt

SEQ ID NO: 264447 - DNA, 21 bp, Artificial sequence
  SiRNA target sequence
cagctaatggaattgagcgta

SEQ ID NO: 264448 - DNA, 21 bp, Artificial sequence
  SiRNA target sequence
agctaatggaattgagcgtat

SEQ ID NO: 264449 - DNA, 21 bp, Artificial sequence
  SiRNA target sequence
gctaatggaattgagcgtatc

SEQ ID NO: 264450 - DNA, 21 bp, Artificial sequence
  SiRNA target sequence
ctaatggaattgagcgtatcc

SEQ ID NO: 264451 - DNA, 21 bp, Artificial sequence
  SiRNA target sequence
taatggaattgagcgtatccc

SEQ ID NO: 264452 - DNA, 21 bp, Artificial sequence
  SiRNA target sequence
aatggaattgagcgtatccct

SEQ ID NO: 264453 - DNA, 21 bp, Artificial sequence
  SiRNA target sequence
atggaattgagcgtatccctg

SEQ ID NO: 264454 - DNA, 21 bp, Artificial sequence
  SiRNA target sequence
tggaattgagcgtatccctgt

SEQ ID NO: 264455 - DNA, 21 bp, Artificial sequence
  SiRNA target sequence
ggaattgagcgtatccctgtg

SEQ ID NO: 264456 - DNA, 21 bp, Artificial sequence
  SiRNA target sequence
gaattgagcgtatccctgtga

SEQ ID NO: 264457 - DNA, 21 bp, Artificial sequence
  SiRNA target sequence
aattgagcgtatccctgtgat

SEQ ID NO: 264458 - DNA, 21 bp, Artificial sequence
  SiRNA target sequence
attgagcgtatccctgtgata

SEQ ID NO: 264459 - DNA, 21 bp, Artificial sequence
  SiRNA target sequence
ttgagcgtatccctgtgatag

SEQ ID NO: 264460 - DNA, 21 bp, Artificial sequence
  SiRNA target sequence
tgagcgtatccctgtgatagg

SEQ ID NO: 264461 - DNA, 21 bp, Artificial sequence
  SiRNA target sequence
gagcgtatccctgtgataggt

SEQ ID NO: 264462 - DNA, 21 bp, Artificial sequence
  SiRNA target sequence
agcgtatccctgtgataggtg

SEQ ID NO: 264463 - DNA, 21 bp, Artificial sequence
  SiRNA target sequence
gcgtatccctgtgataggtga

SEQ ID NO: 264464 - DNA, 21 bp, Artificial sequence
  SiRNA target sequence
cgtatccctgtgataggtgaa

SEQ ID NO: 264465 - DNA, 21 bp, Artificial sequence
  SiRNA target sequence
gtatccctgtgataggtgaaa

SEQ ID NO: 264466 - DNA, 21 bp, Artificial sequence
  SiRNA target sequence
tatccctgtgataggtgaaat

SEQ ID NO: 264467 - DNA, 21 bp, Artificial sequence
  SiRNA target sequence
atccctgtgataggtgaaatt

SEQ ID NO: 264468 - DNA, 21 bp, Artificial sequence
  SiRNA target sequence
tccctgtgataggtgaaattg

SEQ ID NO: 264469 - DNA, 21 bp, Artificial sequence
  SiRNA target sequence
ccctgtgataggtgaaattgc

SEQ ID NO: 264470 - DNA, 21 bp, Artificial sequence
  SiRNA target sequence
cctgtgataggtgaaattgca

SEQ ID NO: 264471 - DNA, 21 bp, Artificial sequence
  SiRNA target sequence
ctgtgataggtgaaattgcaa

SEQ ID NO: 264472 - DNA, 21 bp, Artificial sequence
  SiRNA target sequence
tgtgataggtgaaattgcaaa

SEQ ID NO: 264473 - DNA, 21 bp, Artificial sequence
  SiRNA target sequence
gtgataggtgaaattgcaaag

SEQ ID NO: 264474 - DNA, 21 bp, Artificial sequence
  SiRNA target sequence
tgataggtgaaattgcaaagc

SEQ ID NO: 264475 - DNA, 21 bp, Artificial sequence
  SiRNA target sequence
gataggtgaaattgcaaagcc

SEQ ID NO: 264476 - DNA, 21 bp, Artificial sequence
  SiRNA target sequence
ataggtgaaattgcaaagcct

SEQ ID NO: 264477 - DNA, 21 bp, Artificial sequence
  SiRNA target sequence
taggtgaaattgcaaagcctg

SEQ ID NO: 264478 - DNA, 21 bp, Artificial sequence
  SiRNA target sequence
aggtgaaattgcaaagcctgt

SEQ ID NO: 264479 - DNA, 21 bp, Artificial sequence
  SiRNA target sequence
ggtgaaattgcaaagcctgta

SEQ ID NO: 264480 - DNA, 21 bp, Artificial sequence
  SiRNA target sequence
gtgaaattgcaaagcctgtaa

SEQ ID NO: 264481 - DNA, 21 bp, Artificial sequence
  SiRNA target sequence
tgaaattgcaaagcctgtaac

SEQ ID NO: 264482 - DNA, 21 bp, Artificial sequence
  SiRNA target sequence
gaaattgcaaagcctgtaaca

SEQ ID NO: 264483 - DNA, 21 bp, Artificial sequence
  SiRNA target sequence
aaattgcaaagcctgtaacaa

SEQ ID NO: 264484 - DNA, 21 bp, Artificial sequence
  SiRNA target sequence
aattgcaaagcctgtaacaac

SEQ ID NO: 264485 - DNA, 21 bp, Artificial sequence
  SiRNA target sequence
attgcaaagcctgtaacaact

SEQ ID NO: 264486 - DNA, 21 bp, Artificial sequence
  SiRNA target sequence
ttgcaaagcctgtaacaactg

SEQ ID NO: 264487 - DNA, 21 bp, Artificial sequence
  SiRNA target sequence
tgcaaagcctgtaacaactgc

SEQ ID NO: 264488 - DNA, 21 bp, Artificial sequence
  SiRNA target sequence
gcaaagcctgtaacaactgct

SEQ ID NO: 264489 - DNA, 21 bp, Artificial sequence
  SiRNA target sequence
caaagcctgtaacaactgctg

SEQ ID NO: 264490 - DNA, 21 bp, Artificial sequence
  SiRNA target sequence
aaagcctgtaacaactgctgt

SEQ ID NO: 264491 - DNA, 21 bp, Artificial sequence
  SiRNA target sequence
aagcctgtaacaactgctgta

SEQ ID NO: 264492 - DNA, 21 bp, Artificial sequence
  SiRNA target sequence
agcctgtaacaactgctgtaa

SEQ ID NO: 264493 - DNA, 21 bp, Artificial sequence
  SiRNA target sequence
gcctgtaacaactgctgtaaa

SEQ ID NO: 264494 - DNA, 21 bp, Artificial sequence
  SiRNA target sequence
cctgtaacaactgctgtaaag

SEQ ID NO: 264495 - DNA, 21 bp, Artificial sequence
  SiRNA target sequence
ctgtaacaactgctgtaaagt

SEQ ID NO: 264496 - DNA, 21 bp, Artificial sequence
  SiRNA target sequence
tgtaacaactgctgtaaagtg

SEQ ID NO: 264497 - DNA, 21 bp, Artificial sequence
  SiRNA target sequence
gtaacaactgctgtaaagtgg

SEQ ID NO: 264498 - DNA, 21 bp, Artificial sequence
  SiRNA target sequence
taacaactgctgtaaagtggt

SEQ ID NO: 264499 - DNA, 21 bp, Artificial sequence
  SiRNA target sequence
aacaactgctgtaaagtggtt

SEQ ID NO: 264500 - DNA, 21 bp, Artificial sequence
  SiRNA target sequence
acaactgctgtaaagtggttt

SEQ ID NO: 264501 - DNA, 21 bp, Artificial sequence
  SiRNA target sequence
caactgctgtaaagtggtttg

SEQ ID NO: 264502 - DNA, 21 bp, Artificial sequence
  SiRNA target sequence
aactgctgtaaagtggtttgc

SEQ ID NO: 264503 - DNA, 21 bp, Artificial sequence
  SiRNA target sequence
actgctgtaaagtggtttgca

SEQ ID NO: 264504 - DNA, 21 bp, Artificial sequence
  SiRNA target sequence
ctgctgtaaagtggtttgcag

SEQ ID NO: 264505 - DNA, 21 bp, Artificial sequence
  SiRNA target sequence
tgctgtaaagtggtttgcaga

SEQ ID NO: 264506 - DNA, 21 bp, Artificial sequence
  SiRNA target sequence
gctgtaaagtggtttgcagat

SEQ ID NO: 264507 - DNA, 21 bp, Artificial sequence
  SiRNA target sequence
ctgtaaagtggtttgcagatg

SEQ ID NO: 264508 - DNA, 21 bp, Artificial sequence
  SiRNA target sequence
tgtaaagtggtttgcagatgt

SEQ ID NO: 264509 - DNA, 21 bp, Artificial sequence
  SiRNA target sequence
gtaaagtggtttgcagatgtt

SEQ ID NO: 264510 - DNA, 21 bp, Artificial sequence
  SiRNA target sequence
taaagtggtttgcagatgttg

SEQ ID NO: 264511 - DNA, 21 bp, Artificial sequence
  SiRNA target sequence
aaagtggtttgcagatgttgt

SEQ ID NO: 264512 - DNA, 21 bp, Artificial sequence
  SiRNA target sequence
aagtggtttgcagatgttgtc

SEQ ID NO: 264513 - DNA, 21 bp, Artificial sequence
  SiRNA target sequence
agtggtttgcagatgttgtcg

SEQ ID NO: 264514 - DNA, 21 bp, Artificial sequence
  SiRNA target sequence
gtggtttgcagatgttgtcgg

SEQ ID NO: 264515 - DNA, 21 bp, Artificial sequence
  SiRNA target sequence
tggtttgcagatgttgtcgga

SEQ ID NO: 264516 - DNA, 21 bp, Artificial sequence
  SiRNA target sequence
ggtttgcagatgttgtcggaa

SEQ ID NO: 264517 - DNA, 21 bp, Artificial sequence
  SiRNA target sequence
gtttgcagatgttgtcggaac

SEQ ID NO: 264518 - DNA, 21 bp, Artificial sequence
  SiRNA target sequence
tttgcagatgttgtcggaact

SEQ ID NO: 264519 - DNA, 21 bp, Artificial sequence
  SiRNA target sequence
ttgcagatgttgtcggaactg

SEQ ID NO: 264520 - DNA, 21 bp, Artificial sequence
  SiRNA target sequence
tgcagatgttgtcggaactgt

SEQ ID NO: 264521 - DNA, 21 bp, Artificial sequence
  SiRNA target sequence
gcagatgttgtcggaactgtg

SEQ ID NO: 264522 - DNA, 21 bp, Artificial sequence
  SiRNA target sequence
cagatgttgtcggaactgtgg

SEQ ID NO: 264523 - DNA, 21 bp, Artificial sequence
  SiRNA target sequence
agatgttgtcggaactgtggc

SEQ ID NO: 264524 - DNA, 21 bp, Artificial sequence
  SiRNA target sequence
gatgttgtcggaactgtggca

SEQ ID NO: 264525 - DNA, 21 bp, Artificial sequence
  SiRNA target sequence
atgttgtcggaactgtggcag

SEQ ID NO: 264526 - DNA, 21 bp, Artificial sequence
  SiRNA target sequence
tgttgtcggaactgtggcagc

SEQ ID NO: 264527 - DNA, 21 bp, Artificial sequence
  SiRNA target sequence
gttgtcggaactgtggcagct

SEQ ID NO: 264528 - DNA, 21 bp, Artificial sequence
  SiRNA target sequence
ttgtcggaactgtggcagcta

SEQ ID NO: 264529 - DNA, 21 bp, Artificial sequence
  SiRNA target sequence
tgtcggaactgtggcagctat

SEQ ID NO: 264530 - DNA, 21 bp, Artificial sequence
  SiRNA target sequence
gtcggaactgtggcagctatt

SEQ ID NO: 264531 - DNA, 21 bp, Artificial sequence
  SiRNA target sequence
tcggaactgtggcagctattt

SEQ ID NO: 264532 - DNA, 21 bp, Artificial sequence
  SiRNA target sequence
cggaactgtggcagctatttt

SEQ ID NO: 264533 - DNA, 21 bp, Artificial sequence
  SiRNA target sequence
ggaactgtggcagctattttt

SEQ ID NO: 264534 - DNA, 21 bp, Artificial sequence
  SiRNA target sequence
gaactgtggcagctatttttg

SEQ ID NO: 264535 - DNA, 21 bp, Artificial sequence
  SiRNA target sequence
aactgtggcagctatttttgg

SEQ ID NO: 264536 - DNA, 21 bp, Artificial sequence
  SiRNA target sequence
actgtggcagctatttttggc

SEQ ID NO: 264537 - DNA, 21 bp, Artificial sequence
  SiRNA target sequence
ctgtggcagctatttttggct

SEQ ID NO: 264538 - DNA, 21 bp, Artificial sequence
  SiRNA target sequence
tgtggcagctatttttggctg

SEQ ID NO: 264539 - DNA, 21 bp, Artificial sequence
  SiRNA target sequence
gtggcagctatttttggctgg

SEQ ID NO: 264540 - DNA, 21 bp, Artificial sequence
  SiRNA target sequence
tggcagctatttttggctggt

SEQ ID NO: 264541 - DNA, 21 bp, Artificial sequence
  SiRNA target sequence
ggcagctatttttggctggtc

SEQ ID NO: 264542 - DNA, 21 bp, Artificial sequence
  SiRNA target sequence
gcagctatttttggctggtcc

SEQ ID NO: 264543 - DNA, 21 bp, Artificial sequence
  SiRNA target sequence
cagctatttttggctggtcca

SEQ ID NO: 264544 - DNA, 21 bp, Artificial sequence
  SiRNA target sequence
agctatttttggctggtccaa

SEQ ID NO: 264545 - DNA, 21 bp, Artificial sequence
  SiRNA target sequence
gctatttttggctggtccaaa

SEQ ID NO: 264546 - DNA, 21 bp, Artificial sequence
  SiRNA target sequence
ctatttttggctggtccaaac

SEQ ID NO: 264547 - DNA, 21 bp, Artificial sequence
  SiRNA target sequence
tatttttggctggtccaaacc

SEQ ID NO: 264548 - DNA, 21 bp, Artificial sequence
  SiRNA target sequence
atttttggctggtccaaacct

SEQ ID NO: 264549 - DNA, 21 bp, Artificial sequence
  SiRNA target sequence
tttttggctggtccaaacctc

SEQ ID NO: 264550 - DNA, 21 bp, Artificial sequence
  SiRNA target sequence
ttttggctggtccaaacctcg

SEQ ID NO: 264551 - DNA, 21 bp, Artificial sequence
  SiRNA target sequence
tttggctggtccaaacctcga

SEQ ID NO: 264552 - DNA, 21 bp, Artificial sequence
  SiRNA target sequence
ttggctggtccaaacctcgaa

SEQ ID NO: 264553 - DNA, 21 bp, Artificial sequence
  SiRNA target sequence
tggctggtccaaacctcgaaa

SEQ ID NO: 264554 - DNA, 21 bp, Artificial sequence
  SiRNA target sequence
ggctggtccaaacctcgaaat

SEQ ID NO: 264555 - DNA, 21 bp, Artificial sequence
  SiRNA target sequence
gctggtccaaacctcgaaatc

SEQ ID NO: 264556 - DNA, 21 bp, Artificial sequence
  SiRNA target sequence
ctggtccaaacctcgaaatca

SEQ ID NO: 264557 - DNA, 21 bp, Artificial sequence
  SiRNA target sequence
tggtccaaacctcgaaatcaa

SEQ ID NO: 264558 - DNA, 21 bp, Artificial sequence
  SiRNA target sequence
ggtccaaacctcgaaatcaac

SEQ ID NO: 264559 - DNA, 21 bp, Artificial sequence
  SiRNA target sequence
gtccaaacctcgaaatcaaca

SEQ ID NO: 264560 - DNA, 21 bp, Artificial sequence
  SiRNA target sequence
tccaaacctcgaaatcaacaa

SEQ ID NO: 264561 - DNA, 21 bp, Artificial sequence
  SiRNA target sequence
ccaaacctcgaaatcaacaac

SEQ ID NO: 264562 - DNA, 21 bp, Artificial sequence
  SiRNA target sequence
caaacctcgaaatcaacaaca

SEQ ID NO: 264563 - DNA, 21 bp, Artificial sequence
  SiRNA target sequence
aaacctcgaaatcaacaacag

SEQ ID NO: 264564 - DNA, 21 bp, Artificial sequence
  SiRNA target sequence
aacctcgaaatcaacaacagg

SEQ ID NO: 264565 - DNA, 21 bp, Artificial sequence
  SiRNA target sequence
acctcgaaatcaacaacaggt

SEQ ID NO: 264566 - DNA, 21 bp, Artificial sequence
  SiRNA target sequence
cctcgaaatcaacaacaggta

SEQ ID NO: 264567 - DNA, 21 bp, Artificial sequence
  SiRNA target sequence
ctcgaaatcaacaacaggtat

SEQ ID NO: 264568 - DNA, 21 bp, Artificial sequence
  SiRNA target sequence
tcgaaatcaacaacaggtatg

SEQ ID NO: 264569 - DNA, 21 bp, Artificial sequence
  SiRNA target sequence
cgaaatcaacaacaggtatgt

SEQ ID NO: 264570 - DNA, 21 bp, Artificial sequence
  SiRNA target sequence
gaaatcaacaacaggtatgtc

SEQ ID NO: 264571 - DNA, 21 bp, Artificial sequence
  SiRNA target sequence
aaatcaacaacaggtatgtcc

SEQ ID NO: 264572 - DNA, 21 bp, Artificial sequence
  SiRNA target sequence
aatcaacaacaggtatgtcca

SEQ ID NO: 264573 - DNA, 21 bp, Artificial sequence
  SiRNA target sequence
atcaacaacaggtatgtccat

SEQ ID NO: 264574 - DNA, 21 bp, Artificial sequence
  SiRNA target sequence
tcaacaacaggtatgtccatt

SEQ ID NO: 264575 - DNA, 21 bp, Artificial sequence
  SiRNA target sequence
caacaacaggtatgtccattc

SEQ ID NO: 264576 - DNA, 21 bp, Artificial sequence
  SiRNA target sequence
aacaacaggtatgtccattca

SEQ ID NO: 264577 - DNA, 21 bp, Artificial sequence
  SiRNA target sequence
acaacaggtatgtccattcaa

SEQ ID NO: 264578 - DNA, 21 bp, Artificial sequence
  SiRNA target sequence
caacaggtatgtccattcaaa

SEQ ID NO: 264579 - DNA, 21 bp, Artificial sequence
  SiRNA target sequence
aacaggtatgtccattcaaaa

SEQ ID NO: 264580 - DNA, 21 bp, Artificial sequence
  SiRNA target sequence
acaggtatgtccattcaaaat

SEQ ID NO: 264581 - DNA, 21 bp, Artificial sequence
  SiRNA target sequence
caggtatgtccattcaaaatg

SEQ ID NO: 264582 - DNA, 21 bp, Artificial sequence
  SiRNA target sequence
aggtatgtccattcaaaatgt

SEQ ID NO: 264583 - DNA, 21 bp, Artificial sequence
  SiRNA target sequence
ggtatgtccattcaaaatgtg

SEQ ID NO: 264584 - DNA, 21 bp, Artificial sequence
  SiRNA target sequence
gtatgtccattcaaaatgtgc

SEQ ID NO: 264585 - DNA, 21 bp, Artificial sequence
  SiRNA target sequence
tatgtccattcaaaatgtgcc

SEQ ID NO: 264586 - DNA, 21 bp, Artificial sequence
  SiRNA target sequence
atgtccattcaaaatgtgcct

SEQ ID NO: 264587 - DNA, 21 bp, Artificial sequence
  SiRNA target sequence
tgtccattcaaaatgtgcctg

SEQ ID NO: 264588 - DNA, 21 bp, Artificial sequence
  SiRNA target sequence
gtccattcaaaatgtgcctgc

SEQ ID NO: 264589 - DNA, 21 bp, Artificial sequence
  SiRNA target sequence
tccattcaaaatgtgcctgca

SEQ ID NO: 264590 - DNA, 21 bp, Artificial sequence
  SiRNA target sequence
ccattcaaaatgtgcctgcat

SEQ ID NO: 264591 - DNA, 21 bp, Artificial sequence
  SiRNA target sequence
cattcaaaatgtgcctgcatg

SEQ ID NO: 264592 - DNA, 21 bp, Artificial sequence
  SiRNA target sequence
attcaaaatgtgcctgcatgg

SEQ ID NO: 264593 - DNA, 21 bp, Artificial sequence
  SiRNA target sequence
ttcaaaatgtgcctgcatggg

SEQ ID NO: 264594 - DNA, 21 bp, Artificial sequence
  SiRNA target sequence
tcaaaatgtgcctgcatgggg

SEQ ID NO: 264595 - DNA, 21 bp, Artificial sequence
  SiRNA target sequence
caaaatgtgcctgcatgggga

SEQ ID NO: 264596 - DNA, 21 bp, Artificial sequence
  SiRNA target sequence
aaaatgtgcctgcatggggat

SEQ ID NO: 264597 - DNA, 21 bp, Artificial sequence
  SiRNA target sequence
aaatgtgcctgcatggggata

SEQ ID NO: 264598 - DNA, 21 bp, Artificial sequence
  SiRNA target sequence
aatgtgcctgcatggggatat

SEQ ID NO: 264599 - DNA, 21 bp, Artificial sequence
  SiRNA target sequence
atgtgcctgcatggggatatt

SEQ ID NO: 264600 - DNA, 21 bp, Artificial sequence
  SiRNA target sequence
tgtgcctgcatggggatattc

SEQ ID NO: 264601 - DNA, 21 bp, Artificial sequence
  SiRNA target sequence
gtgcctgcatggggatattct

SEQ ID NO: 264602 - DNA, 21 bp, Artificial sequence
  SiRNA target sequence
tgcctgcatggggatattctc

SEQ ID NO: 264603 - DNA, 21 bp, Artificial sequence
  SiRNA target sequence
gcctgcatggggatattctct

SEQ ID NO: 264604 - DNA, 21 bp, Artificial sequence
  SiRNA target sequence
cctgcatggggatattctctc

SEQ ID NO: 264605 - DNA, 21 bp, Artificial sequence
  SiRNA target sequence
ctgcatggggatattctctct

SEQ ID NO: 264606 - DNA, 21 bp, Artificial sequence
  SiRNA target sequence
tgcatggggatattctctcta

SEQ ID NO: 264607 - DNA, 21 bp, Artificial sequence
  SiRNA target sequence
gcatggggatattctctctat

SEQ ID NO: 264608 - DNA, 21 bp, Artificial sequence
  SiRNA target sequence
catggggatattctctctata

SEQ ID NO: 264609 - DNA, 21 bp, Artificial sequence
  SiRNA target sequence
atggggatattctctctataa

SEQ ID NO: 264610 - DNA, 21 bp, Artificial sequence
  SiRNA target sequence
tggggatattctctctataaa

SEQ ID NO: 264611 - DNA, 21 bp, Artificial sequence
  SiRNA target sequence
ggggatattctctctataaag

SEQ ID NO: 264612 - DNA, 21 bp, Artificial sequence
  SiRNA target sequence
gggatattctctctataaagg

SEQ ID NO: 264613 - DNA, 21 bp, Artificial sequence
  SiRNA target sequence
ggatattctctctataaaggc

SEQ ID NO: 264614 - DNA, 21 bp, Artificial sequence
  SiRNA target sequence
gatattctctctataaaggca

SEQ ID NO: 264615 - DNA, 21 bp, Artificial sequence
  SiRNA target sequence
atattctctctataaaggcat

SEQ ID NO: 264616 - DNA, 21 bp, Artificial sequence
  SiRNA target sequence
tattctctctataaaggcata

SEQ ID NO: 264617 - DNA, 21 bp, Artificial sequence
  SiRNA target sequence
attctctctataaaggcatac

SEQ ID NO: 264618 - DNA, 21 bp, Artificial sequence
  SiRNA target sequence
ttctctctataaaggcatacg

SEQ ID NO: 264619 - DNA, 21 bp, Artificial sequence
  SiRNA target sequence
tctctctataaaggcatacga

SEQ ID NO: 264620 - DNA, 21 bp, Artificial sequence
  SiRNA target sequence
ctctctataaaggcatacgat

SEQ ID NO: 264621 - DNA, 21 bp, Artificial sequence
  SiRNA target sequence
tctctataaaggcatacgata

SEQ ID NO: 264622 - DNA, 21 bp, Artificial sequence
  SiRNA target sequence
ctctataaaggcatacgatat

SEQ ID NO: 264623 - DNA, 21 bp, Artificial sequence
  SiRNA target sequence
tctataaaggcatacgatatg

SEQ ID NO: 264624 - DNA, 21 bp, Artificial sequence
  SiRNA target sequence
ctataaaggcatacgatatga

SEQ ID NO: 264625 - DNA, 21 bp, Artificial sequence
  SiRNA target sequence
tataaaggcatacgatatgag

SEQ ID NO: 264626 - DNA, 21 bp, Artificial sequence
  SiRNA target sequence
ataaaggcatacgatatgagc

SEQ ID NO: 264627 - DNA, 21 bp, Artificial sequence
  SiRNA target sequence
taaaggcatacgatatgagcg

SEQ ID NO: 264628 - DNA, 21 bp, Artificial sequence
  SiRNA target sequence
aaaggcatacgatatgagcgt

SEQ ID NO: 264629 - DNA, 21 bp, Artificial sequence
  SiRNA target sequence
aaggcatacgatatgagcgta

SEQ ID NO: 264630 - DNA, 21 bp, Artificial sequence
  SiRNA target sequence
aggcatacgatatgagcgtac

SEQ ID NO: 264631 - DNA, 21 bp, Artificial sequence
  SiRNA target sequence
ggcatacgatatgagcgtacc

SEQ ID NO: 264632 - DNA, 21 bp, Artificial sequence
  SiRNA target sequence
gcatacgatatgagcgtacca

SEQ ID NO: 264633 - DNA, 21 bp, Artificial sequence
  SiRNA target sequence
catacgatatgagcgtaccat

SEQ ID NO: 264634 - DNA, 21 bp, Artificial sequence
  SiRNA target sequence
atacgatatgagcgtaccatt

SEQ ID NO: 264635 - DNA, 21 bp, Artificial sequence
  SiRNA target sequence
tacgatatgagcgtaccattg

SEQ ID NO: 264636 - DNA, 21 bp, Artificial sequence
  SiRNA target sequence
acgatatgagcgtaccattgg

SEQ ID NO: 264637 - DNA, 21 bp, Artificial sequence
  SiRNA target sequence
cgatatgagcgtaccattggc

SEQ ID NO: 264638 - DNA, 21 bp, Artificial sequence
  SiRNA target sequence
gatatgagcgtaccattggct

SEQ ID NO: 264639 - DNA, 21 bp, Artificial sequence
  SiRNA target sequence
atatgagcgtaccattggctt

SEQ ID NO: 264640 - DNA, 21 bp, Artificial sequence
  SiRNA target sequence
tatgagcgtaccattggctta

SEQ ID NO: 264641 - DNA, 21 bp, Artificial sequence
  SiRNA target sequence
atgagcgtaccattggcttat

SEQ ID NO: 264642 - DNA, 21 bp, Artificial sequence
  SiRNA target sequence
tgagcgtaccattggcttatg

SEQ ID NO: 264643 - DNA, 21 bp, Artificial sequence
  SiRNA target sequence
gagcgtaccattggcttatga

SEQ ID NO: 264644 - DNA, 21 bp, Artificial sequence
  SiRNA target sequence
agcgtaccattggcttatgat

SEQ ID NO: 264645 - DNA, 21 bp, Artificial sequence
  SiRNA target sequence
gcgtaccattggcttatgatc

SEQ ID NO: 264646 - DNA, 21 bp, Artificial sequence
  SiRNA target sequence
cgtaccattggcttatgatcc

SEQ ID NO: 264647 - DNA, 21 bp, Artificial sequence
  SiRNA target sequence
gtaccattggcttatgatcct

SEQ ID NO: 264648 - DNA, 21 bp, Artificial sequence
  SiRNA target sequence
taccattggcttatgatccta

SEQ ID NO: 264649 - DNA, 21 bp, Artificial sequence
  SiRNA target sequence
accattggcttatgatcctaa

SEQ ID NO: 264650 - DNA, 21 bp, Artificial sequence
  SiRNA target sequence
ccattggcttatgatcctaat

SEQ ID NO: 264651 - DNA, 21 bp, Artificial sequence
  SiRNA target sequence
cattggcttatgatcctaata

SEQ ID NO: 264652 - DNA, 21 bp, Artificial sequence
  SiRNA target sequence
attggcttatgatcctaataa

SEQ ID NO: 264653 - DNA, 21 bp, Artificial sequence
  SiRNA target sequence
ttggcttatgatcctaataac

SEQ ID NO: 264654 - DNA, 21 bp, Artificial sequence
  SiRNA target sequence
tggcttatgatcctaataacg

SEQ ID NO: 264655 - DNA, 21 bp, Artificial sequence
  SiRNA target sequence
ggcttatgatcctaataacga

SEQ ID NO: 264656 - DNA, 21 bp, Artificial sequence
  SiRNA target sequence
gcttatgatcctaataacgaa

SEQ ID NO: 264657 - DNA, 21 bp, Artificial sequence
  SiRNA target sequence
cttatgatcctaataacgaac

SEQ ID NO: 264658 - DNA, 21 bp, Artificial sequence
  SiRNA target sequence
ttatgatcctaataacgaact

SEQ ID NO: 264659 - DNA, 21 bp, Artificial sequence
  SiRNA target sequence
tatgatcctaataacgaactt

SEQ ID NO: 264660 - DNA, 21 bp, Artificial sequence
  SiRNA target sequence
atgatcctaataacgaacttg

SEQ ID NO: 264661 - DNA, 21 bp, Artificial sequence
  SiRNA target sequence
tgatcctaataacgaacttgg

SEQ ID NO: 264662 - DNA, 21 bp, Artificial sequence
  SiRNA target sequence
gatcctaataacgaacttggt

SEQ ID NO: 264663 - DNA, 21 bp, Artificial sequence
  SiRNA target sequence
atcctaataacgaacttggtg

SEQ ID NO: 264664 - DNA, 21 bp, Artificial sequence
  SiRNA target sequence
tcctaataacgaacttggtga

SEQ ID NO: 264665 - DNA, 21 bp, Artificial sequence
  SiRNA target sequence
cctaataacgaacttggtgac

SEQ ID NO: 264666 - DNA, 21 bp, Artificial sequence
  SiRNA target sequence
ctaataacgaacttggtgact

SEQ ID NO: 264667 - DNA, 21 bp, Artificial sequence
  SiRNA target sequence
taataacgaacttggtgactt

SEQ ID NO: 264668 - DNA, 21 bp, Artificial sequence
  SiRNA target sequence
aataacgaacttggtgacttg

SEQ ID NO: 264669 - DNA, 21 bp, Artificial sequence
  SiRNA target sequence
ataacgaacttggtgacttga

SEQ ID NO: 264670 - DNA, 21 bp, Artificial sequence
  SiRNA target sequence
taacgaacttggtgacttgaa

SEQ ID NO: 264671 - DNA, 21 bp, Artificial sequence
  SiRNA target sequence
aacgaacttggtgacttgaag

SEQ ID NO: 264672 - DNA, 21 bp, Artificial sequence
  SiRNA target sequence
acgaacttggtgacttgaagg

SEQ ID NO: 264673 - DNA, 21 bp, Artificial sequence
  SiRNA target sequence
cgaacttggtgacttgaagga

SEQ ID NO: 264674 - DNA, 21 bp, Artificial sequence
  SiRNA target sequence
gaacttggtgacttgaaggat

SEQ ID NO: 264675 - DNA, 21 bp, Artificial sequence
  SiRNA target sequence
aacttggtgacttgaaggatg

SEQ ID NO: 264676 - DNA, 21 bp, Artificial sequence
  SiRNA target sequence
acttggtgacttgaaggatgt

SEQ ID NO: 264677 - DNA, 21 bp, Artificial sequence
  SiRNA target sequence
cttggtgacttgaaggatgtt

SEQ ID NO: 264678 - DNA, 21 bp, Artificial sequence
  SiRNA target sequence
ttggtgacttgaaggatgttt

SEQ ID NO: 264679 - DNA, 21 bp, Artificial sequence
  SiRNA target sequence
tggtgacttgaaggatgtttt

SEQ ID NO: 264680 - DNA, 21 bp, Artificial sequence
  SiRNA target sequence
ggtgacttgaaggatgttttt

SEQ ID NO: 264681 - DNA, 21 bp, Artificial sequence
  SiRNA target sequence
gtgacttgaaggatgtttttc

SEQ ID NO: 264682 - DNA, 21 bp, Artificial sequence
  SiRNA target sequence
tgacttgaaggatgtttttcc

SEQ ID NO: 264683 - DNA, 21 bp, Artificial sequence
  SiRNA target sequence
gacttgaaggatgtttttcct

SEQ ID NO: 264684 - DNA, 21 bp, Artificial sequence
  SiRNA target sequence
acttgaaggatgtttttcctt

SEQ ID NO: 264685 - DNA, 21 bp, Artificial sequence
  SiRNA target sequence
cttgaaggatgtttttccttc

SEQ ID NO: 264686 - DNA, 21 bp, Artificial sequence
  SiRNA target sequence
ttgaaggatgtttttccttct

SEQ ID NO: 264687 - DNA, 21 bp, Artificial sequence
  SiRNA target sequence
tgaaggatgtttttccttctg

SEQ ID NO: 264688 - DNA, 21 bp, Artificial sequence
  SiRNA target sequence
gaaggatgtttttccttctgc

SEQ ID NO: 264689 - DNA, 21 bp, Artificial sequence
  SiRNA target sequence
aaggatgtttttccttctgcg

SEQ ID NO: 264690 - DNA, 21 bp, Artificial sequence
  SiRNA target sequence
aggatgtttttccttctgcgg

SEQ ID NO: 264691 - DNA, 21 bp, Artificial sequence
  SiRNA target sequence
ggatgtttttccttctgcggt

SEQ ID NO: 264692 - DNA, 21 bp, Artificial sequence
  SiRNA target sequence
gatgtttttccttctgcggtt

SEQ ID NO: 264693 - DNA, 21 bp, Artificial sequence
  SiRNA target sequence
atgtttttccttctgcggttg

SEQ ID NO: 264694 - DNA, 21 bp, Artificial sequence
  SiRNA target sequence
tgtttttccttctgcggttga

SEQ ID NO: 264695 - DNA, 21 bp, Artificial sequence
  SiRNA target sequence
gtttttccttctgcggttgac

SEQ ID NO: 264696 - DNA, 21 bp, Artificial sequence
  SiRNA target sequence
tttttccttctgcggttgacg

SEQ ID NO: 264697 - DNA, 21 bp, Artificial sequence
  SiRNA target sequence
ttttccttctgcggttgacga

SEQ ID NO: 264698 - DNA, 21 bp, Artificial sequence
  SiRNA target sequence
tttccttctgcggttgacgaa

SEQ ID NO: 264699 - DNA, 21 bp, Artificial sequence
  SiRNA target sequence
ttccttctgcggttgacgaaa

SEQ ID NO: 264700 - DNA, 21 bp, Artificial sequence
  SiRNA target sequence
tccttctgcggttgacgaaat

SEQ ID NO: 264701 - DNA, 21 bp, Artificial sequence
  SiRNA target sequence
ccttctgcggttgacgaaatg

SEQ ID NO: 264702 - DNA, 21 bp, Artificial sequence
  SiRNA target sequence
cttctgcggttgacgaaatgg

SEQ ID NO: 264703 - DNA, 21 bp, Artificial sequence
  SiRNA target sequence
ttctgcggttgacgaaatggc

SEQ ID NO: 264704 - DNA, 21 bp, Artificial sequence
  SiRNA target sequence
tctgcggttgacgaaatggct

SEQ ID NO: 264705 - DNA, 21 bp, Artificial sequence
  SiRNA target sequence
ctgcggttgacgaaatggcta

SEQ ID NO: 264706 - DNA, 21 bp, Artificial sequence
  SiRNA target sequence
tgcggttgacgaaatggctac

SEQ ID NO: 264707 - DNA, 21 bp, Artificial sequence
  SiRNA target sequence
gcggttgacgaaatggctaca

SEQ ID NO: 264708 - DNA, 21 bp, Artificial sequence
  SiRNA target sequence
cggttgacgaaatggctacag

SEQ ID NO: 264709 - DNA, 21 bp, Artificial sequence
  SiRNA target sequence
ggttgacgaaatggctacagg

SEQ ID NO: 264710 - DNA, 21 bp, Artificial sequence
  SiRNA target sequence
gttgacgaaatggctacaggg

SEQ ID NO: 264711 - DNA, 21 bp, Artificial sequence
  SiRNA target sequence
ttgacgaaatggctacagggt

SEQ ID NO: 264712 - DNA, 21 bp, Artificial sequence
  SiRNA target sequence
tgacgaaatggctacagggta

SEQ ID NO: 264713 - DNA, 21 bp, Artificial sequence
  SiRNA target sequence
gacgaaatggctacagggtat

SEQ ID NO: 264714 - DNA, 21 bp, Artificial sequence
  SiRNA target sequence
acgaaatggctacagggtatg

SEQ ID NO: 264715 - DNA, 21 bp, Artificial sequence
  SiRNA target sequence
cgaaatggctacagggtatgt

SEQ ID NO: 264716 - DNA, 21 bp, Artificial sequence
  SiRNA target sequence
gaaatggctacagggtatgtt

SEQ ID NO: 264717 - DNA, 21 bp, Artificial sequence
  SiRNA target sequence
aaatggctacagggtatgttt

SEQ ID NO: 264718 - DNA, 21 bp, Artificial sequence
  SiRNA target sequence
aatggctacagggtatgtttg

SEQ ID NO: 264719 - DNA, 21 bp, Artificial sequence
  SiRNA target sequence
atggctacagggtatgtttgc

SEQ ID NO: 264720 - DNA, 21 bp, Artificial sequence
  SiRNA target sequence
tggctacagggtatgtttgcg

SEQ ID NO: 264721 - DNA, 21 bp, Artificial sequence
  SiRNA target sequence
ggctacagggtatgtttgcgg

SEQ ID NO: 264722 - DNA, 21 bp, Artificial sequence
  SiRNA target sequence
gctacagggtatgtttgcggc

SEQ ID NO: 264723 - DNA, 21 bp, Artificial sequence
  SiRNA target sequence
ctacagggtatgtttgcggca

SEQ ID NO: 264724 - DNA, 21 bp, Artificial sequence
  SiRNA target sequence
tacagggtatgtttgcggcaa

SEQ ID NO: 264725 - DNA, 21 bp, Artificial sequence
  SiRNA target sequence
acagggtatgtttgcggcaat

SEQ ID NO: 264726 - DNA, 21 bp, Artificial sequence
  SiRNA target sequence
cagggtatgtttgcggcaatc

SEQ ID NO: 264727 - DNA, 21 bp, Artificial sequence
  SiRNA target sequence
agggtatgtttgcggcaatcc

SEQ ID NO: 264728 - DNA, 21 bp, Artificial sequence
  SiRNA target sequence
gggtatgtttgcggcaatcca

SEQ ID NO: 264729 - DNA, 21 bp, Artificial sequence
  SiRNA target sequence
ggtatgtttgcggcaatccag

SEQ ID NO: 264730 - DNA, 21 bp, Artificial sequence
  SiRNA target sequence
gtatgtttgcggcaatccagc

SEQ ID NO: 264731 - DNA, 21 bp, Artificial sequence
  SiRNA target sequence
tatgtttgcggcaatccagcc

SEQ ID NO: 264732 - DNA, 21 bp, Artificial sequence
  SiRNA target sequence
atgtttgcggcaatccagccg

SEQ ID NO: 264733 - DNA, 21 bp, Artificial sequence
  SiRNA target sequence
tgtttgcggcaatccagccgt

SEQ ID NO: 264734 - DNA, 21 bp, Artificial sequence
  SiRNA target sequence
gtttgcggcaatccagccgtg

SEQ ID NO: 264735 - DNA, 21 bp, Artificial sequence
  SiRNA target sequence
tttgcggcaatccagccgtga

SEQ ID NO: 264736 - DNA, 21 bp, Artificial sequence
  SiRNA target sequence
ttgcggcaatccagccgtgaa

SEQ ID NO: 264737 - DNA, 21 bp, Artificial sequence
  SiRNA target sequence
tgcggcaatccagccgtgaaa

SEQ ID NO: 264738 - DNA, 21 bp, Artificial sequence
  SiRNA target sequence
gcggcaatccagccgtgaaac

SEQ ID NO: 264739 - DNA, 21 bp, Artificial sequence
  SiRNA target sequence
cggcaatccagccgtgaaaca

SEQ ID NO: 264740 - DNA, 21 bp, Artificial sequence
  SiRNA target sequence
ggcaatccagccgtgaaacat

SEQ ID NO: 264741 - DNA, 21 bp, Artificial sequence
  SiRNA target sequence
gcaatccagccgtgaaacatg

SEQ ID NO: 264742 - DNA, 21 bp, Artificial sequence
  SiRNA target sequence
caatccagccgtgaaacatgt

SEQ ID NO: 264743 - DNA, 21 bp, Artificial sequence
  SiRNA target sequence
aatccagccgtgaaacatgtt

SEQ ID NO: 264744 - DNA, 21 bp, Artificial sequence
  SiRNA target sequence
atccagccgtgaaacatgttc

SEQ ID NO: 264745 - DNA, 21 bp, Artificial sequence
  SiRNA target sequence
tccagccgtgaaacatgttct

SEQ ID NO: 264746 - DNA, 21 bp, Artificial sequence
  SiRNA target sequence
ccagccgtgaaacatgttctt

SEQ ID NO: 264747 - DNA, 21 bp, Artificial sequence
  SiRNA target sequence
cagccgtgaaacatgttctta

SEQ ID NO: 264748 - DNA, 21 bp, Artificial sequence
  SiRNA target sequence
agccgtgaaacatgttcttac

SEQ ID NO: 264749 - DNA, 21 bp, Artificial sequence
  SiRNA target sequence
gccgtgaaacatgttcttacc

SEQ ID NO: 264750 - DNA, 21 bp, Artificial sequence
  SiRNA target sequence
ccgtgaaacatgttcttacct

SEQ ID NO: 264751 - DNA, 21 bp, Artificial sequence
  SiRNA target sequence
cgtgaaacatgttcttacctg

SEQ ID NO: 264752 - DNA, 21 bp, Artificial sequence
  SiRNA target sequence
gtgaaacatgttcttacctgg

SEQ ID NO: 264753 - DNA, 21 bp, Artificial sequence
  SiRNA target sequence
tgaaacatgttcttacctgga

SEQ ID NO: 264754 - DNA, 21 bp, Artificial sequence
  SiRNA target sequence
gaaacatgttcttacctggaa

SEQ ID NO: 264755 - DNA, 21 bp, Artificial sequence
  SiRNA target sequence
aaacatgttcttacctggaag

SEQ ID NO: 264756 - DNA, 21 bp, Artificial sequence
  SiRNA target sequence
aacatgttcttacctggaaga

SEQ ID NO: 264757 - DNA, 21 bp, Artificial sequence
  SiRNA target sequence
acatgttcttacctggaagac

SEQ ID NO: 264758 - DNA, 21 bp, Artificial sequence
  SiRNA target sequence
catgttcttacctggaagacg

SEQ ID NO: 264759 - DNA, 21 bp, Artificial sequence
  SiRNA target sequence
atgttcttacctggaagacga

SEQ ID NO: 264760 - DNA, 21 bp, Artificial sequence
  SiRNA target sequence
tgttcttacctggaagacgac

SEQ ID NO: 264761 - DNA, 21 bp, Artificial sequence
  SiRNA target sequence
gttcttacctggaagacgact

SEQ ID NO: 264762 - DNA, 21 bp, Artificial sequence
  SiRNA target sequence
ttcttacctggaagacgactg

SEQ ID NO: 264763 - DNA, 21 bp, Artificial sequence
  SiRNA target sequence
tcttacctggaagacgactga

SEQ ID NO: 264764 - DNA, 21 bp, Artificial sequence
  SiRNA target sequence
cttacctggaagacgactgac

SEQ ID NO: 264765 - DNA, 21 bp, Artificial sequence
  SiRNA target sequence
ttacctggaagacgactgacg

SEQ ID NO: 264766 - DNA, 21 bp, Artificial sequence
  SiRNA target sequence
tacctggaagacgactgacgt

SEQ ID NO: 264767 - DNA, 21 bp, Artificial sequence
  SiRNA target sequence
acctggaagacgactgacgta

SEQ ID NO: 264768 - DNA, 21 bp, Artificial sequence
  SiRNA target sequence
cctggaagacgactgacgtaa

SEQ ID NO: 264769 - DNA, 21 bp, Artificial sequence
  SiRNA target sequence
ctggaagacgactgacgtaat

SEQ ID NO: 264770 - DNA, 21 bp, Artificial sequence
  SiRNA target sequence
tggaagacgactgacgtaatt

SEQ ID NO: 264771 - DNA, 21 bp, Artificial sequence
  SiRNA target sequence
ggaagacgactgacgtaattc

SEQ ID NO: 264772 - DNA, 21 bp, Artificial sequence
  SiRNA target sequence
gaagacgactgacgtaattca

SEQ ID NO: 264773 - DNA, 21 bp, Artificial sequence
  SiRNA target sequence
aagacgactgacgtaattcag

SEQ ID NO: 264774 - DNA, 21 bp, Artificial sequence
  SiRNA target sequence
agacgactgacgtaattcaga

SEQ ID NO: 264775 - DNA, 21 bp, Artificial sequence
  SiRNA target sequence
gacgactgacgtaattcagaa

SEQ ID NO: 264776 - DNA, 21 bp, Artificial sequence
  SiRNA target sequence
acgactgacgtaattcagaaa

SEQ ID NO: 264777 - DNA, 21 bp, Artificial sequence
  SiRNA target sequence
cgactgacgtaattcagaaac

SEQ ID NO: 264778 - DNA, 21 bp, Artificial sequence
  SiRNA target sequence
gactgacgtaattcagaaacc

SEQ ID NO: 264779 - DNA, 21 bp, Artificial sequence
  SiRNA target sequence
actgacgtaattcagaaacca

SEQ ID NO: 264780 - DNA, 21 bp, Artificial sequence
  SiRNA target sequence
ctgacgtaattcagaaaccaa

SEQ ID NO: 264781 - DNA, 21 bp, Artificial sequence
  SiRNA target sequence
tgacgtaattcagaaaccaat

SEQ ID NO: 264782 - DNA, 21 bp, Artificial sequence
  SiRNA target sequence
gacgtaattcagaaaccaata

SEQ ID NO: 264783 - DNA, 21 bp, Artificial sequence
  SiRNA target sequence
acgtaattcagaaaccaatag

SEQ ID NO: 264784 - DNA, 21 bp, Artificial sequence
  SiRNA target sequence
cgtaattcagaaaccaatagc

SEQ ID NO: 264785 - DNA, 21 bp, Artificial sequence
  SiRNA target sequence
gtaattcagaaaccaatagca

SEQ ID NO: 264786 - DNA, 21 bp, Artificial sequence
  SiRNA target sequence
taattcagaaaccaatagcaa

SEQ ID NO: 264787 - DNA, 21 bp, Artificial sequence
  SiRNA target sequence
aattcagaaaccaatagcaaa

SEQ ID NO: 264788 - DNA, 21 bp, Artificial sequence
  SiRNA target sequence
attcagaaaccaatagcaaac

SEQ ID NO: 264789 - DNA, 21 bp, Artificial sequence
  SiRNA target sequence
ttcagaaaccaatagcaaacg

SEQ ID NO: 264790 - DNA, 21 bp, Artificial sequence
  SiRNA target sequence
tcagaaaccaatagcaaacgg

SEQ ID NO: 264791 - DNA, 21 bp, Artificial sequence
  SiRNA target sequence
cagaaaccaatagcaaacgga

SEQ ID NO: 264792 - DNA, 21 bp, Artificial sequence
  SiRNA target sequence
agaaaccaatagcaaacggag

SEQ ID NO: 264793 - DNA, 21 bp, Artificial sequence
  SiRNA target sequence
gaaaccaatagcaaacggaga

SEQ ID NO: 264794 - DNA, 21 bp, Artificial sequence
  SiRNA target sequence
aaaccaatagcaaacggagat

SEQ ID NO: 264795 - DNA, 21 bp, Artificial sequence
  SiRNA target sequence
aaccaatagcaaacggagatg

SEQ ID NO: 264796 - DNA, 21 bp, Artificial sequence
  SiRNA target sequence
accaatagcaaacggagatga

SEQ ID NO: 264797 - DNA, 21 bp, Artificial sequence
  SiRNA target sequence
ccaatagcaaacggagatgat

SEQ ID NO: 264798 - DNA, 21 bp, Artificial sequence
  SiRNA target sequence
caatagcaaacggagatgatt

SEQ ID NO: 264799 - DNA, 21 bp, Artificial sequence
  SiRNA target sequence
aatagcaaacggagatgattg

SEQ ID NO: 264800 - DNA, 21 bp, Artificial sequence
  SiRNA target sequence
atagcaaacggagatgattgg

SEQ ID NO: 264801 - DNA, 21 bp, Artificial sequence
  SiRNA target sequence
tagcaaacggagatgattggg

SEQ ID NO: 264802 - DNA, 21 bp, Artificial sequence
  SiRNA target sequence
agcaaacggagatgattgggg

SEQ ID NO: 264803 - DNA, 21 bp, Artificial sequence
  SiRNA target sequence
gcaaacggagatgattggggt

SEQ ID NO: 264804 - DNA, 21 bp, Artificial sequence
  SiRNA target sequence
caaacggagatgattggggtg

SEQ ID NO: 264805 - DNA, 21 bp, Artificial sequence
  SiRNA target sequence
aaacggagatgattggggtgg

SEQ ID NO: 264806 - DNA, 21 bp, Artificial sequence
  SiRNA target sequence
aacggagatgattggggtgga

SEQ ID NO: 264807 - DNA, 21 bp, Artificial sequence
  SiRNA target sequence
acggagatgattggggtggag

SEQ ID NO: 264808 - DNA, 21 bp, Artificial sequence
  SiRNA target sequence
cggagatgattggggtggagt

SEQ ID NO: 264809 - DNA, 21 bp, Artificial sequence
  SiRNA target sequence
ggagatgattggggtggagtt

SEQ ID NO: 264810 - DNA, 21 bp, Artificial sequence
  SiRNA target sequence
gagatgattggggtggagtta

SEQ ID NO: 264811 - DNA, 21 bp, Artificial sequence
  SiRNA target sequence
agatgattggggtggagttat

SEQ ID NO: 264812 - DNA, 21 bp, Artificial sequence
  SiRNA target sequence
gatgattggggtggagttata

SEQ ID NO: 264813 - DNA, 21 bp, Artificial sequence
  SiRNA target sequence
atgattggggtggagttatac

SEQ ID NO: 264814 - DNA, 21 bp, Artificial sequence
  SiRNA target sequence
tgattggggtggagttatacc

SEQ ID NO: 264815 - DNA, 21 bp, Artificial sequence
  SiRNA target sequence
gattggggtggagttatacca

SEQ ID NO: 264816 - DNA, 21 bp, Artificial sequence
  SiRNA target sequence
attggggtggagttataccag

SEQ ID NO: 264817 - DNA, 21 bp, Artificial sequence
  SiRNA target sequence
ttggggtggagttataccagt

SEQ ID NO: 264818 - DNA, 21 bp, Artificial sequence
  SiRNA target sequence
tggggtggagttataccagtg

SEQ ID NO: 264819 - DNA, 21 bp, Artificial sequence
  SiRNA target sequence
ggggtggagttataccagtgg

SEQ ID NO: 264820 - DNA, 21 bp, Artificial sequence
  SiRNA target sequence
gggtggagttataccagtggg

SEQ ID NO: 264821 - DNA, 21 bp, Artificial sequence
  SiRNA target sequence
ggtggagttataccagtggga

SEQ ID NO: 264822 - DNA, 21 bp, Artificial sequence
  SiRNA target sequence
gtggagttataccagtgggaa

SEQ ID NO: 264823 - DNA, 21 bp, Artificial sequence
  SiRNA target sequence
tggagttataccagtgggaat

SEQ ID NO: 264824 - DNA, 21 bp, Artificial sequence
  SiRNA target sequence
ggagttataccagtgggaatg

SEQ ID NO: 264825 - DNA, 21 bp, Artificial sequence
  SiRNA target sequence
gagttataccagtgggaatgc

SEQ ID NO: 264826 - DNA, 21 bp, Artificial sequence
  SiRNA target sequence
agttataccagtgggaatgcc

SEQ ID NO: 264827 - DNA, 21 bp, Artificial sequence
  SiRNA target sequence
gttataccagtgggaatgcct

SEQ ID NO: 264828 - DNA, 21 bp, Artificial sequence
  SiRNA target sequence
ttataccagtgggaatgcctt

SEQ ID NO: 264829 - DNA, 21 bp, Artificial sequence
  SiRNA target sequence
tataccagtgggaatgccttg

SEQ ID NO: 264830 - DNA, 21 bp, Artificial sequence
  SiRNA target sequence
ataccagtgggaatgccttgt

SEQ ID NO: 264831 - DNA, 21 bp, Artificial sequence
  SiRNA target sequence
taccagtgggaatgccttgtt

SEQ ID NO: 264832 - DNA, 21 bp, Artificial sequence
  SiRNA target sequence
accagtgggaatgccttgtta

SEQ ID NO: 264833 - DNA, 21 bp, Artificial sequence
  SiRNA target sequence
ccagtgggaatgccttgttat

SEQ ID NO: 264834 - DNA, 21 bp, Artificial sequence
  SiRNA target sequence
cagtgggaatgccttgttatt

SEQ ID NO: 264835 - DNA, 21 bp, Artificial sequence
  SiRNA target sequence
agtgggaatgccttgttattc

SEQ ID NO: 264836 - DNA, 21 bp, Artificial sequence
  SiRNA target sequence
gtgggaatgccttgttattct

SEQ ID NO: 264837 - DNA, 21 bp, Artificial sequence
  SiRNA target sequence
tgggaatgccttgttattcta

SEQ ID NO: 264838 - DNA, 21 bp, Artificial sequence
  SiRNA target sequence
gggaatgccttgttattctaa

SEQ ID NO: 264839 - DNA, 21 bp, Artificial sequence
  SiRNA target sequence
ggaatgccttgttattctaaa

SEQ ID NO: 264840 - DNA, 21 bp, Artificial sequence
  SiRNA target sequence
gaatgccttgttattctaaat

SEQ ID NO: 264841 - DNA, 21 bp, Artificial sequence
  SiRNA target sequence
aatgccttgttattctaaatc

SEQ ID NO: 264842 - DNA, 21 bp, Artificial sequence
  SiRNA target sequence
atgccttgttattctaaatcc

SEQ ID NO: 264843 - DNA, 21 bp, Artificial sequence
  SiRNA target sequence
tgccttgttattctaaatcca

SEQ ID NO: 264844 - DNA, 21 bp, Artificial sequence
  SiRNA target sequence
gccttgttattctaaatccat

SEQ ID NO: 264845 - DNA, 21 bp, Artificial sequence
  SiRNA target sequence
ccttgttattctaaatccatt

SEQ ID NO: 264846 - DNA, 21 bp, Artificial sequence
  SiRNA target sequence
cttgttattctaaatccatta

SEQ ID NO: 264847 - DNA, 21 bp, Artificial sequence
  SiRNA target sequence
ttgttattctaaatccattag

SEQ ID NO: 264848 - DNA, 21 bp, Artificial sequence
  SiRNA target sequence
tgttattctaaatccattaga

SEQ ID NO: 264849 - DNA, 21 bp, Artificial sequence
  SiRNA target sequence
gttattctaaatccattagaa

SEQ ID NO: 264850 - DNA, 21 bp, Artificial sequence
  SiRNA target sequence
ttattctaaatccattagaat

SEQ ID NO: 264851 - DNA, 21 bp, Artificial sequence
  SiRNA target sequence
tattctaaatccattagaatt

SEQ ID NO: 264852 - DNA, 21 bp, Artificial sequence
  SiRNA target sequence
attctaaatccattagaatta

SEQ ID NO: 264853 - DNA, 21 bp, Artificial sequence
  SiRNA target sequence
ttctaaatccattagaattac

SEQ ID NO: 264854 - DNA, 21 bp, Artificial sequence
  SiRNA target sequence
tctaaatccattagaattaca

SEQ ID NO: 264855 - DNA, 21 bp, Artificial sequence
  SiRNA target sequence
ctaaatccattagaattacaa

SEQ ID NO: 264856 - DNA, 21 bp, Artificial sequence
  SiRNA target sequence
taaatccattagaattacaag

SEQ ID NO: 264857 - DNA, 21 bp, Artificial sequence
  SiRNA target sequence
aaatccattagaattacaagt

SEQ ID NO: 264858 - DNA, 21 bp, Artificial sequence
  SiRNA target sequence
aatccattagaattacaagta

SEQ ID NO: 264859 - DNA, 21 bp, Artificial sequence
  SiRNA target sequence
atccattagaattacaagtat

SEQ ID NO: 264860 - DNA, 21 bp, Artificial sequence
  SiRNA target sequence
tccattagaattacaagtatt

SEQ ID NO: 264861 - DNA, 21 bp, Artificial sequence
  SiRNA target sequence
ccattagaattacaagtattt

SEQ ID NO: 264862 - DNA, 21 bp, Artificial sequence
  SiRNA target sequence
cattagaattacaagtatttc

SEQ ID NO: 264863 - DNA, 21 bp, Artificial sequence
  SiRNA target sequence
attagaattacaagtatttca

SEQ ID NO: 264864 - DNA, 21 bp, Artificial sequence
  SiRNA target sequence
ttagaattacaagtatttcag

SEQ ID NO: 264865 - DNA, 21 bp, Artificial sequence
  SiRNA target sequence
tagaattacaagtatttcaga

SEQ ID NO: 264866 - DNA, 21 bp, Artificial sequence
  SiRNA target sequence
agaattacaagtatttcagaa

SEQ ID NO: 264867 - DNA, 21 bp, Artificial sequence
  SiRNA target sequence
gaattacaagtatttcagaaa

SEQ ID NO: 264868 - DNA, 21 bp, Artificial sequence
  SiRNA target sequence
aattacaagtatttcagaaac

SEQ ID NO: 264869 - DNA, 21 bp, Artificial sequence
  SiRNA target sequence
attacaagtatttcagaaacg

SEQ ID NO: 264870 - DNA, 21 bp, Artificial sequence
  SiRNA target sequence
ttacaagtatttcagaaacgg

SEQ ID NO: 264871 - DNA, 21 bp, Artificial sequence
  SiRNA target sequence
tacaagtatttcagaaacgga

SEQ ID NO: 264872 - DNA, 21 bp, Artificial sequence
  SiRNA target sequence
acaagtatttcagaaacggaa

SEQ ID NO: 264873 - DNA, 21 bp, Artificial sequence
  SiRNA target sequence
caagtatttcagaaacggaaa

SEQ ID NO: 264874 - DNA, 21 bp, Artificial sequence
  SiRNA target sequence
aagtatttcagaaacggaaaa

SEQ ID NO: 264875 - DNA, 21 bp, Artificial sequence
  SiRNA target sequence
agtatttcagaaacggaaaat

SEQ ID NO: 264876 - DNA, 21 bp, Artificial sequence
  SiRNA target sequence
gtatttcagaaacggaaaatc

SEQ ID NO: 264877 - DNA, 21 bp, Artificial sequence
  SiRNA target sequence
tatttcagaaacggaaaatcg

SEQ ID NO: 264878 - DNA, 21 bp, Artificial sequence
  SiRNA target sequence
atttcagaaacggaaaatcgt

SEQ ID NO: 264879 - DNA, 21 bp, Artificial sequence
  SiRNA target sequence
tttcagaaacggaaaatcgtg

SEQ ID NO: 264880 - DNA, 21 bp, Artificial sequence
  SiRNA target sequence
ttcagaaacggaaaatcgtga

SEQ ID NO: 264881 - DNA, 21 bp, Artificial sequence
  SiRNA target sequence
tcagaaacggaaaatcgtgaa

SEQ ID NO: 264882 - DNA, 21 bp, Artificial sequence
  SiRNA target sequence
cagaaacggaaaatcgtgaaa

SEQ ID NO: 264883 - DNA, 21 bp, Artificial sequence
  SiRNA target sequence
agaaacggaaaatcgtgaaac

SEQ ID NO: 264884 - DNA, 21 bp, Artificial sequence
  SiRNA target sequence
gaaacggaaaatcgtgaaact

SEQ ID NO: 264885 - DNA, 21 bp, Artificial sequence
  SiRNA target sequence
aaacggaaaatcgtgaaactg

SEQ ID NO: 264886 - DNA, 21 bp, Artificial sequence
  SiRNA target sequence
aacggaaaatcgtgaaactga

SEQ ID NO: 264887 - DNA, 21 bp, Artificial sequence
  SiRNA target sequence
acggaaaatcgtgaaactgaa

SEQ ID NO: 264888 - DNA, 21 bp, Artificial sequence
  SiRNA target sequence
cggaaaatcgtgaaactgaag

SEQ ID NO: 264889 - DNA, 21 bp, Artificial sequence
  SiRNA target sequence
ggaaaatcgtgaaactgaagt

SEQ ID NO: 264890 - DNA, 21 bp, Artificial sequence
  SiRNA target sequence
gaaaatcgtgaaactgaagtc

SEQ ID NO: 264891 - DNA, 21 bp, Artificial sequence
  SiRNA target sequence
aaaatcgtgaaactgaagtca

SEQ ID NO: 264892 - DNA, 21 bp, Artificial sequence
  SiRNA target sequence
aaatcgtgaaactgaagtcat

SEQ ID NO: 264893 - DNA, 21 bp, Artificial sequence
  SiRNA target sequence
aatcgtgaaactgaagtcata

SEQ ID NO: 264894 - DNA, 21 bp, Artificial sequence
  SiRNA target sequence
atcgtgaaactgaagtcatag

SEQ ID NO: 264895 - DNA, 21 bp, Artificial sequence
  SiRNA target sequence
tcgtgaaactgaagtcataga

SEQ ID NO: 264896 - DNA, 21 bp, Artificial sequence
  SiRNA target sequence
cgtgaaactgaagtcatagat

SEQ ID NO: 264897 - DNA, 21 bp, Artificial sequence
  SiRNA target sequence
gtgaaactgaagtcatagatg

SEQ ID NO: 264898 - DNA, 21 bp, Artificial sequence
  SiRNA target sequence
tgaaactgaagtcatagatgc

SEQ ID NO: 264899 - DNA, 21 bp, Artificial sequence
  SiRNA target sequence
gaaactgaagtcatagatgcc

SEQ ID NO: 264900 - DNA, 21 bp, Artificial sequence
  SiRNA target sequence
aaactgaagtcatagatgccg

SEQ ID NO: 264901 - DNA, 21 bp, Artificial sequence
  SiRNA target sequence
aactgaagtcatagatgccgc

SEQ ID NO: 264902 - DNA, 21 bp, Artificial sequence
  SiRNA target sequence
actgaagtcatagatgccgct

SEQ ID NO: 264903 - DNA, 21 bp, Artificial sequence
  SiRNA target sequence
ctgaagtcatagatgccgctc

SEQ ID NO: 264904 - DNA, 21 bp, Artificial sequence
  SiRNA target sequence
tgaagtcatagatgccgctcc

SEQ ID NO: 264905 - DNA, 21 bp, Artificial sequence
  SiRNA target sequence
gaagtcatagatgccgctcca

SEQ ID NO: 264906 - DNA, 21 bp, Artificial sequence
  SiRNA target sequence
aagtcatagatgccgctccat

SEQ ID NO: 264907 - DNA, 21 bp, Artificial sequence
  SiRNA target sequence
agtcatagatgccgctccatg

SEQ ID NO: 264908 - DNA, 21 bp, Artificial sequence
  SiRNA target sequence
gtcatagatgccgctccatgt

SEQ ID NO: 264909 - DNA, 21 bp, Artificial sequence
  SiRNA target sequence
tcatagatgccgctccatgtg

SEQ ID NO: 264910 - DNA, 21 bp, Artificial sequence
  SiRNA target sequence
catagatgccgctccatgtga

SEQ ID NO: 264911 - DNA, 21 bp, Artificial sequence
  SiRNA target sequence
atagatgccgctccatgtgaa

SEQ ID NO: 264912 - DNA, 21 bp, Artificial sequence
  SiRNA target sequence
tagatgccgctccatgtgaat

SEQ ID NO: 264913 - DNA, 21 bp, Artificial sequence
  SiRNA target sequence
agatgccgctccatgtgaata

SEQ ID NO: 264914 - DNA, 21 bp, Artificial sequence
  SiRNA target sequence
gatgccgctccatgtgaatat

SEQ ID NO: 264915 - DNA, 21 bp, Artificial sequence
  SiRNA target sequence
atgccgctccatgtgaatatg

SEQ ID NO: 264916 - DNA, 21 bp, Artificial sequence
  SiRNA target sequence
tgccgctccatgtgaatatgt

SEQ ID NO: 264917 - DNA, 21 bp, Artificial sequence
  SiRNA target sequence
gccgctccatgtgaatatgtt

SEQ ID NO: 264918 - DNA, 21 bp, Artificial sequence
  SiRNA target sequence
ccgctccatgtgaatatgttg

SEQ ID NO: 264919 - DNA, 21 bp, Artificial sequence
  SiRNA target sequence
cgctccatgtgaatatgttgc

SEQ ID NO: 264920 - DNA, 21 bp, Artificial sequence
  SiRNA target sequence
gctccatgtgaatatgttgct

SEQ ID NO: 264921 - DNA, 21 bp, Artificial sequence
  SiRNA target sequence
ctccatgtgaatatgttgcta

SEQ ID NO: 264922 - DNA, 21 bp, Artificial sequence
  SiRNA target sequence
tccatgtgaatatgttgctaa

SEQ ID NO: 264923 - DNA, 21 bp, Artificial sequence
  SiRNA target sequence
ccatgtgaatatgttgctaac

SEQ ID NO: 264924 - DNA, 21 bp, Artificial sequence
  SiRNA target sequence
catgtgaatatgttgctaaca

SEQ ID NO: 264925 - DNA, 21 bp, Artificial sequence
  SiRNA target sequence
atgtgaatatgttgctaacat

SEQ ID NO: 264926 - DNA, 21 bp, Artificial sequence
  SiRNA target sequence
tgtgaatatgttgctaacatg

SEQ ID NO: 264927 - DNA, 21 bp, Artificial sequence
  SiRNA target sequence
gtgaatatgttgctaacatgt

SEQ ID NO: 264928 - DNA, 21 bp, Artificial sequence
  SiRNA target sequence
tgaatatgttgctaacatgtt

SEQ ID NO: 264929 - DNA, 21 bp, Artificial sequence
  SiRNA target sequence
gaatatgttgctaacatgttc

SEQ ID NO: 264930 - DNA, 21 bp, Artificial sequence
  SiRNA target sequence
aatatgttgctaacatgttct

SEQ ID NO: 264931 - DNA, 21 bp, Artificial sequence
  SiRNA target sequence
atatgttgctaacatgttctc

SEQ ID NO: 264932 - DNA, 21 bp, Artificial sequence
  SiRNA target sequence
tatgttgctaacatgttctcg

SEQ ID NO: 264933 - DNA, 21 bp, Artificial sequence
  SiRNA target sequence
atgttgctaacatgttctcgt

SEQ ID NO: 264934 - DNA, 21 bp, Artificial sequence
  SiRNA target sequence
tgttgctaacatgttctcgta

SEQ ID NO: 264935 - DNA, 21 bp, Artificial sequence
  SiRNA target sequence
gttgctaacatgttctcgtat

SEQ ID NO: 264936 - DNA, 21 bp, Artificial sequence
  SiRNA target sequence
ttgctaacatgttctcgtatt

SEQ ID NO: 264937 - DNA, 21 bp, Artificial sequence
  SiRNA target sequence
tgctaacatgttctcgtattg

SEQ ID NO: 264938 - DNA, 21 bp, Artificial sequence
  SiRNA target sequence
gctaacatgttctcgtattgg

SEQ ID NO: 264939 - DNA, 21 bp, Artificial sequence
  SiRNA target sequence
ctaacatgttctcgtattggc

SEQ ID NO: 264940 - DNA, 21 bp, Artificial sequence
  SiRNA target sequence
taacatgttctcgtattggcg

SEQ ID NO: 264941 - DNA, 21 bp, Artificial sequence
  SiRNA target sequence
aacatgttctcgtattggcgt

SEQ ID NO: 264942 - DNA, 21 bp, Artificial sequence
  SiRNA target sequence
acatgttctcgtattggcgtg

SEQ ID NO: 264943 - DNA, 21 bp, Artificial sequence
  SiRNA target sequence
catgttctcgtattggcgtgc

SEQ ID NO: 264944 - DNA, 21 bp, Artificial sequence
  SiRNA target sequence
atgttctcgtattggcgtgca

SEQ ID NO: 264945 - DNA, 21 bp, Artificial sequence
  SiRNA target sequence
tgttctcgtattggcgtgcaa

SEQ ID NO: 264946 - DNA, 21 bp, Artificial sequence
  SiRNA target sequence
gttctcgtattggcgtgcaac

SEQ ID NO: 264947 - DNA, 21 bp, Artificial sequence
  SiRNA target sequence
ttctcgtattggcgtgcaact

SEQ ID NO: 264948 - DNA, 21 bp, Artificial sequence
  SiRNA target sequence
tctcgtattggcgtgcaacta

SEQ ID NO: 264949 - DNA, 21 bp, Artificial sequence
  SiRNA target sequence
ctcgtattggcgtgcaactat

SEQ ID NO: 264950 - DNA, 21 bp, Artificial sequence
  SiRNA target sequence
tcgtattggcgtgcaactatg

SEQ ID NO: 264951 - DNA, 21 bp, Artificial sequence
  SiRNA target sequence
cgtattggcgtgcaactatgt

SEQ ID NO: 264952 - DNA, 21 bp, Artificial sequence
  SiRNA target sequence
gtattggcgtgcaactatgtg

SEQ ID NO: 264953 - DNA, 21 bp, Artificial sequence
  SiRNA target sequence
tattggcgtgcaactatgtgt

SEQ ID NO: 264954 - DNA, 21 bp, Artificial sequence
  SiRNA target sequence
attggcgtgcaactatgtgtt

SEQ ID NO: 264955 - DNA, 21 bp, Artificial sequence
  SiRNA target sequence
ttggcgtgcaactatgtgtta

SEQ ID NO: 264956 - DNA, 21 bp, Artificial sequence
  SiRNA target sequence
tggcgtgcaactatgtgttat

SEQ ID NO: 264957 - DNA, 21 bp, Artificial sequence
  SiRNA target sequence
ggcgtgcaactatgtgttata

SEQ ID NO: 264958 - DNA, 21 bp, Artificial sequence
  SiRNA target sequence
gcgtgcaactatgtgttatag

SEQ ID NO: 264959 - DNA, 21 bp, Artificial sequence
  SiRNA target sequence
cgtgcaactatgtgttatagg

SEQ ID NO: 264960 - DNA, 21 bp, Artificial sequence
  SiRNA target sequence
gtgcaactatgtgttatagga

SEQ ID NO: 264961 - DNA, 21 bp, Artificial sequence
  SiRNA target sequence
tgcaactatgtgttataggat

SEQ ID NO: 264962 - DNA, 21 bp, Artificial sequence
  SiRNA target sequence
gcaactatgtgttataggatt

SEQ ID NO: 264963 - DNA, 21 bp, Artificial sequence
  SiRNA target sequence
caactatgtgttataggatta

SEQ ID NO: 264964 - DNA, 21 bp, Artificial sequence
  SiRNA target sequence
aactatgtgttataggattac

SEQ ID NO: 264965 - DNA, 21 bp, Artificial sequence
  SiRNA target sequence
actatgtgttataggattacc

SEQ ID NO: 264966 - DNA, 21 bp, Artificial sequence
  SiRNA target sequence
ctatgtgttataggattaccg

SEQ ID NO: 264967 - DNA, 21 bp, Artificial sequence
  SiRNA target sequence
tatgtgttataggattaccgt

SEQ ID NO: 264968 - DNA, 21 bp, Artificial sequence
  SiRNA target sequence
atgtgttataggattaccgtg

SEQ ID NO: 264969 - DNA, 21 bp, Artificial sequence
  SiRNA target sequence
tgtgttataggattaccgtgg

SEQ ID NO: 264970 - DNA, 21 bp, Artificial sequence
  SiRNA target sequence
gtgttataggattaccgtggt

SEQ ID NO: 264971 - DNA, 21 bp, Artificial sequence
  SiRNA target sequence
tgttataggattaccgtggtg

SEQ ID NO: 264972 - DNA, 21 bp, Artificial sequence
  SiRNA target sequence
gttataggattaccgtggtga

SEQ ID NO: 264973 - DNA, 21 bp, Artificial sequence
  SiRNA target sequence
ttataggattaccgtggtgaa

SEQ ID NO: 264974 - DNA, 21 bp, Artificial sequence
  SiRNA target sequence
tataggattaccgtggtgaaa

SEQ ID NO: 264975 - DNA, 21 bp, Artificial sequence
  SiRNA target sequence
ataggattaccgtggtgaaaa

SEQ ID NO: 264976 - DNA, 21 bp, Artificial sequence
  SiRNA target sequence
taggattaccgtggtgaaaac

SEQ ID NO: 264977 - DNA, 21 bp, Artificial sequence
  SiRNA target sequence
aggattaccgtggtgaaaaca

SEQ ID NO: 264978 - DNA, 21 bp, Artificial sequence
  SiRNA target sequence
ggattaccgtggtgaaaacag

SEQ ID NO: 264979 - DNA, 21 bp, Artificial sequence
  SiRNA target sequence
gattaccgtggtgaaaacagc

SEQ ID NO: 264980 - DNA, 21 bp, Artificial sequence
  SiRNA target sequence
attaccgtggtgaaaacagct

SEQ ID NO: 264981 - DNA, 21 bp, Artificial sequence
  SiRNA target sequence
ttaccgtggtgaaaacagctt

SEQ ID NO: 264982 - DNA, 21 bp, Artificial sequence
  SiRNA target sequence
taccgtggtgaaaacagcttt

SEQ ID NO: 264983 - DNA, 21 bp, Artificial sequence
  SiRNA target sequence
accgtggtgaaaacagctttt

SEQ ID NO: 264984 - DNA, 21 bp, Artificial sequence
  SiRNA target sequence
ccgtggtgaaaacagcttttc

SEQ ID NO: 264985 - DNA, 21 bp, Artificial sequence
  SiRNA target sequence
cgtggtgaaaacagcttttca

SEQ ID NO: 264986 - DNA, 21 bp, Artificial sequence
  SiRNA target sequence
gtggtgaaaacagcttttcat

SEQ ID NO: 264987 - DNA, 21 bp, Artificial sequence
  SiRNA target sequence
tggtgaaaacagcttttcata

SEQ ID NO: 264988 - DNA, 21 bp, Artificial sequence
  SiRNA target sequence
ggtgaaaacagcttttcatac

SEQ ID NO: 264989 - DNA, 21 bp, Artificial sequence
  SiRNA target sequence
gtgaaaacagcttttcatact

SEQ ID NO: 264990 - DNA, 21 bp, Artificial sequence
  SiRNA target sequence
tgaaaacagcttttcatactg

SEQ ID NO: 264991 - DNA, 21 bp, Artificial sequence
  SiRNA target sequence
gaaaacagcttttcatactgg

SEQ ID NO: 264992 - DNA, 21 bp, Artificial sequence
  SiRNA target sequence
aaaacagcttttcatactggc

SEQ ID NO: 264993 - DNA, 21 bp, Artificial sequence
  SiRNA target sequence
aaacagcttttcatactggca

SEQ ID NO: 264994 - DNA, 21 bp, Artificial sequence
  SiRNA target sequence
aacagcttttcatactggcag

SEQ ID NO: 264995 - DNA, 21 bp, Artificial sequence
  SiRNA target sequence
acagcttttcatactggcaga

SEQ ID NO: 264996 - DNA, 21 bp, Artificial sequence
  SiRNA target sequence
cagcttttcatactggcagac

SEQ ID NO: 264997 - DNA, 21 bp, Artificial sequence
  SiRNA target sequence
agcttttcatactggcagact

SEQ ID NO: 264998 - DNA, 21 bp, Artificial sequence
  SiRNA target sequence
gcttttcatactggcagactt

SEQ ID NO: 264999 - DNA, 21 bp, Artificial sequence
  SiRNA target sequence
cttttcatactggcagacttg

SEQ ID NO: 265000 - DNA, 21 bp, Artificial sequence
  SiRNA target sequence
ttttcatactggcagacttga

SEQ ID NO: 265001 - DNA, 21 bp, Artificial sequence
  SiRNA target sequence
tttcatactggcagacttgag

SEQ ID NO: 265002 - DNA, 21 bp, Artificial sequence
  SiRNA target sequence
ttcatactggcagacttgaga

SEQ ID NO: 265003 - DNA, 21 bp, Artificial sequence
  SiRNA target sequence
tcatactggcagacttgagat

SEQ ID NO: 265004 - DNA, 21 bp, Artificial sequence
  SiRNA target sequence
catactggcagacttgagatt

SEQ ID NO: 265005 - DNA, 21 bp, Artificial sequence
  SiRNA target sequence
atactggcagacttgagattt

SEQ ID NO: 265006 - DNA, 21 bp, Artificial sequence
  SiRNA target sequence
tactggcagacttgagatttt

SEQ ID NO: 265007 - DNA, 21 bp, Artificial sequence
  SiRNA target sequence
actggcagacttgagattttc

SEQ ID NO: 265008 - DNA, 21 bp, Artificial sequence
  SiRNA target sequence
ctggcagacttgagattttct

SEQ ID NO: 265009 - DNA, 21 bp, Artificial sequence
  SiRNA target sequence
tggcagacttgagattttctt

SEQ ID NO: 265010 - DNA, 21 bp, Artificial sequence
  SiRNA target sequence
ggcagacttgagattttcttt

SEQ ID NO: 265011 - DNA, 21 bp, Artificial sequence
  SiRNA target sequence
gcagacttgagattttctttg

SEQ ID NO: 265012 - DNA, 21 bp, Artificial sequence
  SiRNA target sequence
cagacttgagattttctttga

SEQ ID NO: 265013 - DNA, 21 bp, Artificial sequence
  SiRNA target sequence
agacttgagattttctttgaa

SEQ ID NO: 265014 - DNA, 21 bp, Artificial sequence
  SiRNA target sequence
gacttgagattttctttgaac

SEQ ID NO: 265015 - DNA, 21 bp, Artificial sequence
  SiRNA target sequence
acttgagattttctttgaacc

SEQ ID NO: 265016 - DNA, 21 bp, Artificial sequence
  SiRNA target sequence
cttgagattttctttgaacca

SEQ ID NO: 265017 - DNA, 21 bp, Artificial sequence
  SiRNA target sequence
ttgagattttctttgaaccag

SEQ ID NO: 265018 - DNA, 21 bp, Artificial sequence
  SiRNA target sequence
tgagattttctttgaaccagg

SEQ ID NO: 265019 - DNA, 21 bp, Artificial sequence
  SiRNA target sequence
gagattttctttgaaccagga

SEQ ID NO: 265020 - DNA, 21 bp, Artificial sequence
  SiRNA target sequence
agattttctttgaaccaggag

SEQ ID NO: 265021 - DNA, 21 bp, Artificial sequence
  SiRNA target sequence
gattttctttgaaccaggagt

SEQ ID NO: 265022 - DNA, 21 bp, Artificial sequence
  SiRNA target sequence
attttctttgaaccaggagtg

SEQ ID NO: 265023 - DNA, 21 bp, Artificial sequence
  SiRNA target sequence
ttttctttgaaccaggagtga

SEQ ID NO: 265024 - DNA, 21 bp, Artificial sequence
  SiRNA target sequence
tttctttgaaccaggagtgat

SEQ ID NO: 265025 - DNA, 21 bp, Artificial sequence
  SiRNA target sequence
ttctttgaaccaggagtgata

SEQ ID NO: 265026 - DNA, 21 bp, Artificial sequence
  SiRNA target sequence
tctttgaaccaggagtgatac

SEQ ID NO: 265027 - DNA, 21 bp, Artificial sequence
  SiRNA target sequence
ctttgaaccaggagtgatacc

SEQ ID NO: 265028 - DNA, 21 bp, Artificial sequence
  SiRNA target sequence
tttgaaccaggagtgataccc

SEQ ID NO: 265029 - DNA, 21 bp, Artificial sequence
  SiRNA target sequence
ttgaaccaggagtgatacccg

SEQ ID NO: 265030 - DNA, 21 bp, Artificial sequence
  SiRNA target sequence
tgaaccaggagtgatacccgt

SEQ ID NO: 265031 - DNA, 21 bp, Artificial sequence
  SiRNA target sequence
gaaccaggagtgatacccgtt

SEQ ID NO: 265032 - DNA, 21 bp, Artificial sequence
  SiRNA target sequence
aaccaggagtgatacccgtta

SEQ ID NO: 265033 - DNA, 21 bp, Artificial sequence
  SiRNA target sequence
accaggagtgatacccgttaa

SEQ ID NO: 265034 - DNA, 21 bp, Artificial sequence
  SiRNA target sequence
ccaggagtgatacccgttaaa

SEQ ID NO: 265035 - DNA, 21 bp, Artificial sequence
  SiRNA target sequence
caggagtgatacccgttaaac

SEQ ID NO: 265036 - DNA, 21 bp, Artificial sequence
  SiRNA target sequence
aggagtgatacccgttaaacc

SEQ ID NO: 265037 - DNA, 21 bp, Artificial sequence
  SiRNA target sequence
ggagtgatacccgttaaaccc

SEQ ID NO: 265038 - DNA, 21 bp, Artificial sequence
  SiRNA target sequence
gagtgatacccgttaaaccca

SEQ ID NO: 265039 - DNA, 21 bp, Artificial sequence
  SiRNA target sequence
agtgatacccgttaaacccac

SEQ ID NO: 265040 - DNA, 21 bp, Artificial sequence
  SiRNA target sequence
gtgatacccgttaaacccact

SEQ ID NO: 265041 - DNA, 21 bp, Artificial sequence
  SiRNA target sequence
tgatacccgttaaacccactg

SEQ ID NO: 265042 - DNA, 21 bp, Artificial sequence
  SiRNA target sequence
gatacccgttaaacccactgt

SEQ ID NO: 265043 - DNA, 21 bp, Artificial sequence
  SiRNA target sequence
atacccgttaaacccactgtt

SEQ ID NO: 265044 - DNA, 21 bp, Artificial sequence
  SiRNA target sequence
tacccgttaaacccactgtta

SEQ ID NO: 265045 - DNA, 21 bp, Artificial sequence
  SiRNA target sequence
acccgttaaacccactgttaa

SEQ ID NO: 265046 - DNA, 21 bp, Artificial sequence
  SiRNA target sequence
cccgttaaacccactgttaat

SEQ ID NO: 265047 - DNA, 21 bp, Artificial sequence
  SiRNA target sequence
ccgttaaacccactgttaata

SEQ ID NO: 265048 - DNA, 21 bp, Artificial sequence
  SiRNA target sequence
cgttaaacccactgttaataa

SEQ ID NO: 265049 - DNA, 21 bp, Artificial sequence
  SiRNA target sequence
gttaaacccactgttaataac

SEQ ID NO: 265050 - DNA, 21 bp, Artificial sequence
  SiRNA target sequence
ttaaacccactgttaataaca

SEQ ID NO: 265051 - DNA, 21 bp, Artificial sequence
  SiRNA target sequence
taaacccactgttaataacat

SEQ ID NO: 265052 - DNA, 21 bp, Artificial sequence
  SiRNA target sequence
aaacccactgttaataacatt

SEQ ID NO: 265053 - DNA, 21 bp, Artificial sequence
  SiRNA target sequence
aacccactgttaataacattg

SEQ ID NO: 265054 - DNA, 21 bp, Artificial sequence
  SiRNA target sequence
acccactgttaataacattgg

SEQ ID NO: 265055 - DNA, 21 bp, Artificial sequence
  SiRNA target sequence
cccactgttaataacattggg

SEQ ID NO: 265056 - DNA, 21 bp, Artificial sequence
  SiRNA target sequence
ccactgttaataacattgggc

SEQ ID NO: 265057 - DNA, 21 bp, Artificial sequence
  SiRNA target sequence
cactgttaataacattgggcc

SEQ ID NO: 265058 - DNA, 21 bp, Artificial sequence
  SiRNA target sequence
actgttaataacattgggcct

SEQ ID NO: 265059 - DNA, 21 bp, Artificial sequence
  SiRNA target sequence
ctgttaataacattgggcctg

SEQ ID NO: 265060 - DNA, 21 bp, Artificial sequence
  SiRNA target sequence
tgttaataacattgggcctga

SEQ ID NO: 265061 - DNA, 21 bp, Artificial sequence
  SiRNA target sequence
gttaataacattgggcctgat

SEQ ID NO: 265062 - DNA, 21 bp, Artificial sequence
  SiRNA target sequence
ttaataacattgggcctgatc

SEQ ID NO: 265063 - DNA, 21 bp, Artificial sequence
  SiRNA target sequence
taataacattgggcctgatca

SEQ ID NO: 265064 - DNA, 21 bp, Artificial sequence
  SiRNA target sequence
aataacattgggcctgatcag

SEQ ID NO: 265065 - DNA, 21 bp, Artificial sequence
  SiRNA target sequence
ataacattgggcctgatcagg

SEQ ID NO: 265066 - DNA, 21 bp, Artificial sequence
  SiRNA target sequence
taacattgggcctgatcagga

SEQ ID NO: 265067 - DNA, 21 bp, Artificial sequence
  SiRNA target sequence
aacattgggcctgatcaggat

SEQ ID NO: 265068 - DNA, 21 bp, Artificial sequence
  SiRNA target sequence
acattgggcctgatcaggatc

SEQ ID NO: 265069 - DNA, 21 bp, Artificial sequence
  SiRNA target sequence
cattgggcctgatcaggatca

SEQ ID NO: 265070 - DNA, 21 bp, Artificial sequence
  SiRNA target sequence
attgggcctgatcaggatcaa

SEQ ID NO: 265071 - DNA, 21 bp, Artificial sequence
  SiRNA target sequence
ttgggcctgatcaggatcaac

SEQ ID NO: 265072 - DNA, 21 bp, Artificial sequence
  SiRNA target sequence
tgggcctgatcaggatcaact

SEQ ID NO: 265073 - DNA, 21 bp, Artificial sequence
  SiRNA target sequence
gggcctgatcaggatcaactc

SEQ ID NO: 265074 - DNA, 21 bp, Artificial sequence
  SiRNA target sequence
ggcctgatcaggatcaactca

SEQ ID NO: 265075 - DNA, 21 bp, Artificial sequence
  SiRNA target sequence
gcctgatcaggatcaactcac

SEQ ID NO: 265076 - DNA, 21 bp, Artificial sequence
  SiRNA target sequence
cctgatcaggatcaactcaca

SEQ ID NO: 265077 - DNA, 21 bp, Artificial sequence
  SiRNA target sequence
ctgatcaggatcaactcacag

SEQ ID NO: 265078 - DNA, 21 bp, Artificial sequence
  SiRNA target sequence
tgatcaggatcaactcacagg

SEQ ID NO: 265079 - DNA, 21 bp, Artificial sequence
  SiRNA target sequence
gatcaggatcaactcacagga

SEQ ID NO: 265080 - DNA, 21 bp, Artificial sequence
  SiRNA target sequence
atcaggatcaactcacaggaa

SEQ ID NO: 265081 - DNA, 21 bp, Artificial sequence
  SiRNA target sequence
tcaggatcaactcacaggaac

SEQ ID NO: 265082 - DNA, 21 bp, Artificial sequence
  SiRNA target sequence
caggatcaactcacaggaacg

SEQ ID NO: 265083 - DNA, 21 bp, Artificial sequence
  SiRNA target sequence
aggatcaactcacaggaacgg

SEQ ID NO: 265084 - DNA, 21 bp, Artificial sequence
  SiRNA target sequence
ggatcaactcacaggaacggc

SEQ ID NO: 265085 - DNA, 21 bp, Artificial sequence
  SiRNA target sequence
gatcaactcacaggaacggcg

SEQ ID NO: 265086 - DNA, 21 bp, Artificial sequence
  SiRNA target sequence
atcaactcacaggaacggcgg

SEQ ID NO: 265087 - DNA, 21 bp, Artificial sequence
  SiRNA target sequence
tcaactcacaggaacggcggc

SEQ ID NO: 265088 - DNA, 21 bp, Artificial sequence
  SiRNA target sequence
caactcacaggaacggcggct

SEQ ID NO: 265089 - DNA, 21 bp, Artificial sequence
  SiRNA target sequence
aactcacaggaacggcggctc

SEQ ID NO: 265090 - DNA, 21 bp, Artificial sequence
  SiRNA target sequence
actcacaggaacggcggctcc

SEQ ID NO: 265091 - DNA, 21 bp, Artificial sequence
  SiRNA target sequence
ctcacaggaacggcggctcct

SEQ ID NO: 265092 - DNA, 21 bp, Artificial sequence
  SiRNA target sequence
tcacaggaacggcggctcctt

SEQ ID NO: 265093 - DNA, 21 bp, Artificial sequence
  SiRNA target sequence
cacaggaacggcggctccttc

SEQ ID NO: 265094 - DNA, 21 bp, Artificial sequence
  SiRNA target sequence
acaggaacggcggctccttcc

SEQ ID NO: 265095 - DNA, 21 bp, Artificial sequence
  SiRNA target sequence
caggaacggcggctccttccg

SEQ ID NO: 265096 - DNA, 21 bp, Artificial sequence
  SiRNA target sequence
aggaacggcggctccttccga

SEQ ID NO: 265097 - DNA, 21 bp, Artificial sequence
  SiRNA target sequence
ggaacggcggctccttccgat

SEQ ID NO: 265098 - DNA, 21 bp, Artificial sequence
  SiRNA target sequence
gaacggcggctccttccgata

SEQ ID NO: 265099 - DNA, 21 bp, Artificial sequence
  SiRNA target sequence
aacggcggctccttccgataa

SEQ ID NO: 265100 - DNA, 21 bp, Artificial sequence
  SiRNA target sequence
acggcggctccttccgataat

SEQ ID NO: 265101 - DNA, 21 bp, Artificial sequence
  SiRNA target sequence
cggcggctccttccgataata

SEQ ID NO: 265102 - DNA, 21 bp, Artificial sequence
  SiRNA target sequence
ggcggctccttccgataataa

SEQ ID NO: 265103 - DNA, 21 bp, Artificial sequence
  SiRNA target sequence
gcggctccttccgataataac

SEQ ID NO: 265104 - DNA, 21 bp, Artificial sequence
  SiRNA target sequence
cggctccttccgataataact

SEQ ID NO: 265105 - DNA, 21 bp, Artificial sequence
  SiRNA target sequence
ggctccttccgataataacta

SEQ ID NO: 265106 - DNA, 21 bp, Artificial sequence
  SiRNA target sequence
gctccttccgataataactat

SEQ ID NO: 265107 - DNA, 21 bp, Artificial sequence
  SiRNA target sequence
ctccttccgataataactata

SEQ ID NO: 265108 - DNA, 21 bp, Artificial sequence
  SiRNA target sequence
tccttccgataataactataa

SEQ ID NO: 265109 - DNA, 21 bp, Artificial sequence
  SiRNA target sequence
ccttccgataataactataag

SEQ ID NO: 265110 - DNA, 21 bp, Artificial sequence
  SiRNA target sequence
cttccgataataactataagt

SEQ ID NO: 265111 - DNA, 21 bp, Artificial sequence
  SiRNA target sequence
ttccgataataactataagta

SEQ ID NO: 265112 - DNA, 21 bp, Artificial sequence
  SiRNA target sequence
tccgataataactataagtac

SEQ ID NO: 265113 - DNA, 21 bp, Artificial sequence
  SiRNA target sequence
ccgataataactataagtaca

SEQ ID NO: 265114 - DNA, 21 bp, Artificial sequence
  SiRNA target sequence
cgataataactataagtacat

SEQ ID NO: 265115 - DNA, 21 bp, Artificial sequence
  SiRNA target sequence
gataataactataagtacatt

SEQ ID NO: 265116 - DNA, 21 bp, Artificial sequence
  SiRNA target sequence
ataataactataagtacattt

SEQ ID NO: 265117 - DNA, 21 bp, Artificial sequence
  SiRNA target sequence
taataactataagtacatttt

SEQ ID NO: 265118 - DNA, 21 bp, Artificial sequence
  SiRNA target sequence
aataactataagtacattttg

SEQ ID NO: 265119 - DNA, 21 bp, Artificial sequence
  SiRNA target sequence
ataactataagtacattttgg

SEQ ID NO: 265120 - DNA, 21 bp, Artificial sequence
  SiRNA target sequence
taactataagtacattttgga

SEQ ID NO: 265121 - DNA, 21 bp, Artificial sequence
  SiRNA target sequence
aactataagtacattttggac

SEQ ID NO: 265122 - DNA, 21 bp, Artificial sequence
  SiRNA target sequence
actataagtacattttggacc

SEQ ID NO: 265123 - DNA, 21 bp, Artificial sequence
  SiRNA target sequence
ctataagtacattttggacct

SEQ ID NO: 265124 - DNA, 21 bp, Artificial sequence
  SiRNA target sequence
tataagtacattttggacctg

SEQ ID NO: 265125 - DNA, 21 bp, Artificial sequence
  SiRNA target sequence
ataagtacattttggacctga

SEQ ID NO: 265126 - DNA, 21 bp, Artificial sequence
  SiRNA target sequence
taagtacattttggacctgac

SEQ ID NO: 265127 - DNA, 21 bp, Artificial sequence
  SiRNA target sequence
aagtacattttggacctgact

SEQ ID NO: 265128 - DNA, 21 bp, Artificial sequence
  SiRNA target sequence
agtacattttggacctgacta

SEQ ID NO: 265129 - DNA, 21 bp, Artificial sequence
  SiRNA target sequence
gtacattttggacctgactaa

SEQ ID NO: 265130 - DNA, 21 bp, Artificial sequence
  SiRNA target sequence
tacattttggacctgactaat

SEQ ID NO: 265131 - DNA, 21 bp, Artificial sequence
  SiRNA target sequence
acattttggacctgactaatg

SEQ ID NO: 265132 - DNA, 21 bp, Artificial sequence
  SiRNA target sequence
cattttggacctgactaatga

SEQ ID NO: 265133 - DNA, 21 bp, Artificial sequence
  SiRNA target sequence
attttggacctgactaatgat

SEQ ID NO: 265134 - DNA, 21 bp, Artificial sequence
  SiRNA target sequence
ttttggacctgactaatgata

SEQ ID NO: 265135 - DNA, 21 bp, Artificial sequence
  SiRNA target sequence
tttggacctgactaatgatac

SEQ ID NO: 265136 - DNA, 21 bp, Artificial sequence
  SiRNA target sequence
ttggacctgactaatgataca

SEQ ID NO: 265137 - DNA, 21 bp, Artificial sequence
  SiRNA target sequence
tggacctgactaatgatacag

SEQ ID NO: 265138 - DNA, 21 bp, Artificial sequence
  SiRNA target sequence
ggacctgactaatgatacaga

SEQ ID NO: 265139 - DNA, 21 bp, Artificial sequence
  SiRNA target sequence
gacctgactaatgatacagaa

SEQ ID NO: 265140 - DNA, 21 bp, Artificial sequence
  SiRNA target sequence
acctgactaatgatacagaag

SEQ ID NO: 265141 - DNA, 21 bp, Artificial sequence
  SiRNA target sequence
cctgactaatgatacagaagt

SEQ ID NO: 265142 - DNA, 21 bp, Artificial sequence
  SiRNA target sequence
ctgactaatgatacagaagtt

SEQ ID NO: 265143 - DNA, 21 bp, Artificial sequence
  SiRNA target sequence
tgactaatgatacagaagtta

SEQ ID NO: 265144 - DNA, 21 bp, Artificial sequence
  SiRNA target sequence
gactaatgatacagaagttac

SEQ ID NO: 265145 - DNA, 21 bp, Artificial sequence
  SiRNA target sequence
actaatgatacagaagttaca

SEQ ID NO: 265146 - DNA, 21 bp, Artificial sequence
  SiRNA target sequence
ctaatgatacagaagttacag

SEQ ID NO: 265147 - DNA, 21 bp, Artificial sequence
  SiRNA target sequence
taatgatacagaagttacagt

SEQ ID NO: 265148 - DNA, 21 bp, Artificial sequence
  SiRNA target sequence
aatgatacagaagttacagta

SEQ ID NO: 265149 - DNA, 21 bp, Artificial sequence
  SiRNA target sequence
atgatacagaagttacagtac

SEQ ID NO: 265150 - DNA, 21 bp, Artificial sequence
  SiRNA target sequence
tgatacagaagttacagtacg

SEQ ID NO: 265151 - DNA, 21 bp, Artificial sequence
  SiRNA target sequence
gatacagaagttacagtacgt

SEQ ID NO: 265152 - DNA, 21 bp, Artificial sequence
  SiRNA target sequence
atacagaagttacagtacgtg

SEQ ID NO: 265153 - DNA, 21 bp, Artificial sequence
  SiRNA target sequence
tacagaagttacagtacgtgt

SEQ ID NO: 265154 - DNA, 21 bp, Artificial sequence
  SiRNA target sequence
acagaagttacagtacgtgtt

SEQ ID NO: 265155 - DNA, 21 bp, Artificial sequence
  SiRNA target sequence
cagaagttacagtacgtgttc

SEQ ID NO: 265156 - DNA, 21 bp, Artificial sequence
  SiRNA target sequence
agaagttacagtacgtgttcc

SEQ ID NO: 265157 - DNA, 21 bp, Artificial sequence
  SiRNA target sequence
gaagttacagtacgtgttcct

SEQ ID NO: 265158 - DNA, 21 bp, Artificial sequence
  SiRNA target sequence
aagttacagtacgtgttcctt

SEQ ID NO: 265159 - DNA, 21 bp, Artificial sequence
  SiRNA target sequence
agttacagtacgtgttccttt

SEQ ID NO: 265160 - DNA, 21 bp, Artificial sequence
  SiRNA target sequence
gttacagtacgtgttcctttt

SEQ ID NO: 265161 - DNA, 21 bp, Artificial sequence
  SiRNA target sequence
ttacagtacgtgttccttttg

SEQ ID NO: 265162 - DNA, 21 bp, Artificial sequence
  SiRNA target sequence
tacagtacgtgttccttttgt

SEQ ID NO: 265163 - DNA, 21 bp, Artificial sequence
  SiRNA target sequence
acagtacgtgttccttttgtt

SEQ ID NO: 265164 - DNA, 21 bp, Artificial sequence
  SiRNA target sequence
cagtacgtgttccttttgttt

SEQ ID NO: 265165 - DNA, 21 bp, Artificial sequence
  SiRNA target sequence
agtacgtgttccttttgtttc

SEQ ID NO: 265166 - DNA, 21 bp, Artificial sequence
  SiRNA target sequence
gtacgtgttccttttgtttca

SEQ ID NO: 265167 - DNA, 21 bp, Artificial sequence
  SiRNA target sequence
tacgtgttccttttgtttcaa

SEQ ID NO: 265168 - DNA, 21 bp, Artificial sequence
  SiRNA target sequence
acgtgttccttttgtttcaaa

SEQ ID NO: 265169 - DNA, 21 bp, Artificial sequence
  SiRNA target sequence
cgtgttccttttgtttcaaat

SEQ ID NO: 265170 - DNA, 21 bp, Artificial sequence
  SiRNA target sequence
gtgttccttttgtttcaaata

SEQ ID NO: 265171 - DNA, 21 bp, Artificial sequence
  SiRNA target sequence
tgttccttttgtttcaaataa

SEQ ID NO: 265172 - DNA, 21 bp, Artificial sequence
  SiRNA target sequence
gttccttttgtttcaaataag

SEQ ID NO: 265173 - DNA, 21 bp, Artificial sequence
  SiRNA target sequence
ttccttttgtttcaaataaga

SEQ ID NO: 265174 - DNA, 21 bp, Artificial sequence
  SiRNA target sequence
tccttttgtttcaaataagat

SEQ ID NO: 265175 - DNA, 21 bp, Artificial sequence
  SiRNA target sequence
ccttttgtttcaaataagatg

SEQ ID NO: 265176 - DNA, 21 bp, Artificial sequence
  SiRNA target sequence
cttttgtttcaaataagatgt

SEQ ID NO: 265177 - DNA, 21 bp, Artificial sequence
  SiRNA target sequence
ttttgtttcaaataagatgtt

SEQ ID NO: 265178 - DNA, 21 bp, Artificial sequence
  SiRNA target sequence
tttgtttcaaataagatgttc

SEQ ID NO: 265179 - DNA, 21 bp, Artificial sequence
  SiRNA target sequence
ttgtttcaaataagatgttcc

SEQ ID NO: 265180 - DNA, 21 bp, Artificial sequence
  SiRNA target sequence
tgtttcaaataagatgttcct

SEQ ID NO: 265181 - DNA, 21 bp, Artificial sequence
  SiRNA target sequence
gtttcaaataagatgttcctt

SEQ ID NO: 265182 - DNA, 21 bp, Artificial sequence
  SiRNA target sequence
tttcaaataagatgttcctta

SEQ ID NO: 265183 - DNA, 21 bp, Artificial sequence
  SiRNA target sequence
ttcaaataagatgttccttaa

SEQ ID NO: 265184 - DNA, 21 bp, Artificial sequence
  SiRNA target sequence
tcaaataagatgttccttaag

SEQ ID NO: 265185 - DNA, 21 bp, Artificial sequence
  SiRNA target sequence
caaataagatgttccttaaga

SEQ ID NO: 265186 - DNA, 21 bp, Artificial sequence
  SiRNA target sequence
aaataagatgttccttaagac

SEQ ID NO: 265187 - DNA, 21 bp, Artificial sequence
  SiRNA target sequence
aataagatgttccttaagact

SEQ ID NO: 265188 - DNA, 21 bp, Artificial sequence
  SiRNA target sequence
ataagatgttccttaagactg

SEQ ID NO: 265189 - DNA, 21 bp, Artificial sequence
  SiRNA target sequence
taagatgttccttaagactgc

SEQ ID NO: 265190 - DNA, 21 bp, Artificial sequence
  SiRNA target sequence
aagatgttccttaagactgct

SEQ ID NO: 265191 - DNA, 21 bp, Artificial sequence
  SiRNA target sequence
agatgttccttaagactgctg

SEQ ID NO: 265192 - DNA, 21 bp, Artificial sequence
  SiRNA target sequence
gatgttccttaagactgctgg

SEQ ID NO: 265193 - DNA, 21 bp, Artificial sequence
  SiRNA target sequence
atgttccttaagactgctgga

SEQ ID NO: 265194 - DNA, 21 bp, Artificial sequence
  SiRNA target sequence
tgttccttaagactgctggaa

SEQ ID NO: 265195 - DNA, 21 bp, Artificial sequence
  SiRNA target sequence
gttccttaagactgctggaat

SEQ ID NO: 265196 - DNA, 21 bp, Artificial sequence
  SiRNA target sequence
ttccttaagactgctggaatc

SEQ ID NO: 265197 - DNA, 21 bp, Artificial sequence
  SiRNA target sequence
tccttaagactgctggaatct

SEQ ID NO: 265198 - DNA, 21 bp, Artificial sequence
  SiRNA target sequence
ccttaagactgctggaatcta

SEQ ID NO: 265199 - DNA, 21 bp, Artificial sequence
  SiRNA target sequence
cttaagactgctggaatctat

SEQ ID NO: 265200 - DNA, 21 bp, Artificial sequence
  SiRNA target sequence
ttaagactgctggaatctatg

SEQ ID NO: 265201 - DNA, 21 bp, Artificial sequence
  SiRNA target sequence
taagactgctggaatctatgg

SEQ ID NO: 265202 - DNA, 21 bp, Artificial sequence
  SiRNA target sequence
aagactgctggaatctatggt

SEQ ID NO: 265203 - DNA, 21 bp, Artificial sequence
  SiRNA target sequence
agactgctggaatctatggtg

SEQ ID NO: 265204 - DNA, 21 bp, Artificial sequence
  SiRNA target sequence
gactgctggaatctatggtgc

SEQ ID NO: 265205 - DNA, 21 bp, Artificial sequence
  SiRNA target sequence
actgctggaatctatggtgct

SEQ ID NO: 265206 - DNA, 21 bp, Artificial sequence
  SiRNA target sequence
ctgctggaatctatggtgcta

SEQ ID NO: 265207 - DNA, 21 bp, Artificial sequence
  SiRNA target sequence
tgctggaatctatggtgctaa

SEQ ID NO: 265208 - DNA, 21 bp, Artificial sequence
  SiRNA target sequence
gctggaatctatggtgctaac

SEQ ID NO: 265209 - DNA, 21 bp, Artificial sequence
  SiRNA target sequence
ctggaatctatggtgctaaca

SEQ ID NO: 265210 - DNA, 21 bp, Artificial sequence
  SiRNA target sequence
tggaatctatggtgctaacag

SEQ ID NO: 265211 - DNA, 21 bp, Artificial sequence
  SiRNA target sequence
ggaatctatggtgctaacagt

SEQ ID NO: 265212 - DNA, 21 bp, Artificial sequence
  SiRNA target sequence
gaatctatggtgctaacagtg

SEQ ID NO: 265213 - DNA, 21 bp, Artificial sequence
  SiRNA target sequence
aatctatggtgctaacagtga

SEQ ID NO: 265214 - DNA, 21 bp, Artificial sequence
  SiRNA target sequence
atctatggtgctaacagtgaa

SEQ ID NO: 265215 - DNA, 21 bp, Artificial sequence
  SiRNA target sequence
tctatggtgctaacagtgaaa

SEQ ID NO: 265216 - DNA, 21 bp, Artificial sequence
  SiRNA target sequence
ctatggtgctaacagtgaaaa

SEQ ID NO: 265217 - DNA, 21 bp, Artificial sequence
  SiRNA target sequence
tatggtgctaacagtgaaaat

SEQ ID NO: 265218 - DNA, 21 bp, Artificial sequence
  SiRNA target sequence
atggtgctaacagtgaaaata

SEQ ID NO: 265219 - DNA, 21 bp, Artificial sequence
  SiRNA target sequence
tggtgctaacagtgaaaataa

SEQ ID NO: 265220 - DNA, 21 bp, Artificial sequence
  SiRNA target sequence
ggtgctaacagtgaaaataac

SEQ ID NO: 265221 - DNA, 21 bp, Artificial sequence
  SiRNA target sequence
gtgctaacagtgaaaataact

SEQ ID NO: 265222 - DNA, 21 bp, Artificial sequence
  SiRNA target sequence
tgctaacagtgaaaataactg

SEQ ID NO: 265223 - DNA, 21 bp, Artificial sequence
  SiRNA target sequence
gctaacagtgaaaataactgg

SEQ ID NO: 265224 - DNA, 21 bp, Artificial sequence
  SiRNA target sequence
ctaacagtgaaaataactgga

SEQ ID NO: 265225 - DNA, 21 bp, Artificial sequence
  SiRNA target sequence
taacagtgaaaataactggaa

SEQ ID NO: 265226 - DNA, 21 bp, Artificial sequence
  SiRNA target sequence
aacagtgaaaataactggaac

SEQ ID NO: 265227 - DNA, 21 bp, Artificial sequence
  SiRNA target sequence
acagtgaaaataactggaact

SEQ ID NO: 265228 - DNA, 21 bp, Artificial sequence
  SiRNA target sequence
cagtgaaaataactggaactt

SEQ ID NO: 265229 - DNA, 21 bp, Artificial sequence
  SiRNA target sequence
agtgaaaataactggaacttt

SEQ ID NO: 265230 - DNA, 21 bp, Artificial sequence
  SiRNA target sequence
gtgaaaataactggaactttc

SEQ ID NO: 265231 - DNA, 21 bp, Artificial sequence
  SiRNA target sequence
tgaaaataactggaactttca

SEQ ID NO: 265232 - DNA, 21 bp, Artificial sequence
  SiRNA target sequence
gaaaataactggaactttcat

SEQ ID NO: 265233 - DNA, 21 bp, Artificial sequence
  SiRNA target sequence
aaaataactggaactttcatg

SEQ ID NO: 265234 - DNA, 21 bp, Artificial sequence
  SiRNA target sequence
aaataactggaactttcatga

SEQ ID NO: 265235 - DNA, 21 bp, Artificial sequence
  SiRNA target sequence
aataactggaactttcatgaa

SEQ ID NO: 265236 - DNA, 21 bp, Artificial sequence
  SiRNA target sequence
ataactggaactttcatgaat

SEQ ID NO: 265237 - DNA, 21 bp, Artificial sequence
  SiRNA target sequence
taactggaactttcatgaatc

SEQ ID NO: 265238 - DNA, 21 bp, Artificial sequence
  SiRNA target sequence
aactggaactttcatgaatcc

SEQ ID NO: 265239 - DNA, 21 bp, Artificial sequence
  SiRNA target sequence
actggaactttcatgaatcct

SEQ ID NO: 265240 - DNA, 21 bp, Artificial sequence
  SiRNA target sequence
ctggaactttcatgaatcctt

SEQ ID NO: 265241 - DNA, 21 bp, Artificial sequence
  SiRNA target sequence
tggaactttcatgaatccttt

SEQ ID NO: 265242 - DNA, 21 bp, Artificial sequence
  SiRNA target sequence
ggaactttcatgaatccttta

SEQ ID NO: 265243 - DNA, 21 bp, Artificial sequence
  SiRNA target sequence
gaactttcatgaatcctttag

SEQ ID NO: 265244 - DNA, 21 bp, Artificial sequence
  SiRNA target sequence
aactttcatgaatcctttagt

SEQ ID NO: 265245 - DNA, 21 bp, Artificial sequence
  SiRNA target sequence
actttcatgaatcctttagtg

SEQ ID NO: 265246 - DNA, 21 bp, Artificial sequence
  SiRNA target sequence
ctttcatgaatcctttagtgg

SEQ ID NO: 265247 - DNA, 21 bp, Artificial sequence
  SiRNA target sequence
tttcatgaatcctttagtgga

SEQ ID NO: 265248 - DNA, 21 bp, Artificial sequence
  SiRNA target sequence
ttcatgaatcctttagtggat

SEQ ID NO: 265249 - DNA, 21 bp, Artificial sequence
  SiRNA target sequence
tcatgaatcctttagtggatt

SEQ ID NO: 265250 - DNA, 21 bp, Artificial sequence
  SiRNA target sequence
catgaatcctttagtggattc

SEQ ID NO: 265251 - DNA, 21 bp, Artificial sequence
  SiRNA target sequence
atgaatcctttagtggattct

SEQ ID NO: 265252 - DNA, 21 bp, Artificial sequence
  SiRNA target sequence
tgaatcctttagtggattctt

SEQ ID NO: 265253 - DNA, 21 bp, Artificial sequence
  SiRNA target sequence
gaatcctttagtggattcttg

SEQ ID NO: 265254 - DNA, 21 bp, Artificial sequence
  SiRNA target sequence
aatcctttagtggattcttgt

SEQ ID NO: 265255 - DNA, 21 bp, Artificial sequence
  SiRNA target sequence
atcctttagtggattcttgtg

SEQ ID NO: 265256 - DNA, 21 bp, Artificial sequence
  SiRNA target sequence
tcctttagtggattcttgtgt

SEQ ID NO: 265257 - DNA, 21 bp, Artificial sequence
  SiRNA target sequence
cctttagtggattcttgtgta

SEQ ID NO: 265258 - DNA, 21 bp, Artificial sequence
  SiRNA target sequence
ctttagtggattcttgtgtat

SEQ ID NO: 265259 - DNA, 21 bp, Artificial sequence
  SiRNA target sequence
tttagtggattcttgtgtata

SEQ ID NO: 265260 - DNA, 21 bp, Artificial sequence
  SiRNA target sequence
ttagtggattcttgtgtataa

SEQ ID NO: 265261 - DNA, 21 bp, Artificial sequence
  SiRNA target sequence
tagtggattcttgtgtataag

SEQ ID NO: 265262 - DNA, 21 bp, Artificial sequence
  SiRNA target sequence
agtggattcttgtgtataaga

SEQ ID NO: 265263 - DNA, 21 bp, Artificial sequence
  SiRNA target sequence
gtggattcttgtgtataagac

SEQ ID NO: 265264 - DNA, 21 bp, Artificial sequence
  SiRNA target sequence
tggattcttgtgtataagacc

SEQ ID NO: 265265 - DNA, 21 bp, Artificial sequence
  SiRNA target sequence
ggattcttgtgtataagacca

SEQ ID NO: 265266 - DNA, 21 bp, Artificial sequence
  SiRNA target sequence
gattcttgtgtataagaccag

SEQ ID NO: 265267 - DNA, 21 bp, Artificial sequence
  SiRNA target sequence
attcttgtgtataagaccagt

SEQ ID NO: 265268 - DNA, 21 bp, Artificial sequence
  SiRNA target sequence
ttcttgtgtataagaccagtc

SEQ ID NO: 265269 - DNA, 21 bp, Artificial sequence
  SiRNA target sequence
tcttgtgtataagaccagtca

SEQ ID NO: 265270 - DNA, 21 bp, Artificial sequence
  SiRNA target sequence
cttgtgtataagaccagtcac

SEQ ID NO: 265271 - DNA, 21 bp, Artificial sequence
  SiRNA target sequence
ttgtgtataagaccagtcact

SEQ ID NO: 265272 - DNA, 21 bp, Artificial sequence
  SiRNA target sequence
tgtgtataagaccagtcacta

SEQ ID NO: 265273 - DNA, 21 bp, Artificial sequence
  SiRNA target sequence
gtgtataagaccagtcactaa

SEQ ID NO: 265274 - DNA, 21 bp, Artificial sequence
  SiRNA target sequence
tgtataagaccagtcactaaa

SEQ ID NO: 265275 - DNA, 21 bp, Artificial sequence
  SiRNA target sequence
gtataagaccagtcactaaat

SEQ ID NO: 265276 - DNA, 21 bp, Artificial sequence
  SiRNA target sequence
tataagaccagtcactaaatt

SEQ ID NO: 265277 - DNA, 21 bp, Artificial sequence
  SiRNA target sequence
ataagaccagtcactaaattg

SEQ ID NO: 265278 - DNA, 21 bp, Artificial sequence
  SiRNA target sequence
taagaccagtcactaaattga

SEQ ID NO: 265279 - DNA, 21 bp, Artificial sequence
  SiRNA target sequence
aagaccagtcactaaattgat

SEQ ID NO: 265280 - DNA, 21 bp, Artificial sequence
  SiRNA target sequence
agaccagtcactaaattgatg

SEQ ID NO: 265281 - DNA, 21 bp, Artificial sequence
  SiRNA target sequence
gaccagtcactaaattgatgg

SEQ ID NO: 265282 - DNA, 21 bp, Artificial sequence
  SiRNA target sequence
accagtcactaaattgatggc

SEQ ID NO: 265283 - DNA, 21 bp, Artificial sequence
  SiRNA target sequence
ccagtcactaaattgatggct

SEQ ID NO: 265284 - DNA, 21 bp, Artificial sequence
  SiRNA target sequence
cagtcactaaattgatggctc

SEQ ID NO: 265285 - DNA, 21 bp, Artificial sequence
  SiRNA target sequence
agtcactaaattgatggctcc

SEQ ID NO: 265286 - DNA, 21 bp, Artificial sequence
  SiRNA target sequence
gtcactaaattgatggctcct

SEQ ID NO: 265287 - DNA, 21 bp, Artificial sequence
  SiRNA target sequence
tcactaaattgatggctcctg

SEQ ID NO: 265288 - DNA, 21 bp, Artificial sequence
  SiRNA target sequence
cactaaattgatggctcctga

SEQ ID NO: 265289 - DNA, 21 bp, Artificial sequence
  SiRNA target sequence
actaaattgatggctcctgat

SEQ ID NO: 265290 - DNA, 21 bp, Artificial sequence
  SiRNA target sequence
ctaaattgatggctcctgata

SEQ ID NO: 265291 - DNA, 21 bp, Artificial sequence
  SiRNA target sequence
taaattgatggctcctgatac

SEQ ID NO: 265292 - DNA, 21 bp, Artificial sequence
  SiRNA target sequence
aaattgatggctcctgatact

SEQ ID NO: 265293 - DNA, 21 bp, Artificial sequence
  SiRNA target sequence
aattgatggctcctgatactg

SEQ ID NO: 265294 - DNA, 21 bp, Artificial sequence
  SiRNA target sequence
attgatggctcctgatactgt

SEQ ID NO: 265295 - DNA, 21 bp, Artificial sequence
  SiRNA target sequence
ttgatggctcctgatactgtg

SEQ ID NO: 265296 - DNA, 21 bp, Artificial sequence
  SiRNA target sequence
tgatggctcctgatactgtgt

SEQ ID NO: 265297 - DNA, 21 bp, Artificial sequence
  SiRNA target sequence
gatggctcctgatactgtgtc

SEQ ID NO: 265298 - DNA, 21 bp, Artificial sequence
  SiRNA target sequence
atggctcctgatactgtgtct

SEQ ID NO: 265299 - DNA, 21 bp, Artificial sequence
  SiRNA target sequence
tggctcctgatactgtgtctg

SEQ ID NO: 265300 - DNA, 21 bp, Artificial sequence
  SiRNA target sequence
ggctcctgatactgtgtctga

SEQ ID NO: 265301 - DNA, 21 bp, Artificial sequence
  SiRNA target sequence
gctcctgatactgtgtctgac

SEQ ID NO: 265302 - DNA, 21 bp, Artificial sequence
  SiRNA target sequence
ctcctgatactgtgtctgaca

SEQ ID NO: 265303 - DNA, 21 bp, Artificial sequence
  SiRNA target sequence
tcctgatactgtgtctgacaa

SEQ ID NO: 265304 - DNA, 21 bp, Artificial sequence
  SiRNA target sequence
cctgatactgtgtctgacaat

SEQ ID NO: 265305 - DNA, 21 bp, Artificial sequence
  SiRNA target sequence
ctgatactgtgtctgacaatg

SEQ ID NO: 265306 - DNA, 21 bp, Artificial sequence
  SiRNA target sequence
tgatactgtgtctgacaatgt

SEQ ID NO: 265307 - DNA, 21 bp, Artificial sequence
  SiRNA target sequence
gatactgtgtctgacaatgta

SEQ ID NO: 265308 - DNA, 21 bp, Artificial sequence
  SiRNA target sequence
atactgtgtctgacaatgtat

SEQ ID NO: 265309 - DNA, 21 bp, Artificial sequence
  SiRNA target sequence
tactgtgtctgacaatgtatc

SEQ ID NO: 265310 - DNA, 21 bp, Artificial sequence
  SiRNA target sequence
actgtgtctgacaatgtatct

SEQ ID NO: 265311 - DNA, 21 bp, Artificial sequence
  SiRNA target sequence
ctgtgtctgacaatgtatcta

SEQ ID NO: 265312 - DNA, 21 bp, Artificial sequence
  SiRNA target sequence
tgtgtctgacaatgtatctat

SEQ ID NO: 265313 - DNA, 21 bp, Artificial sequence
  SiRNA target sequence
gtgtctgacaatgtatctata

SEQ ID NO: 265314 - DNA, 21 bp, Artificial sequence
  SiRNA target sequence
tgtctgacaatgtatctatag

SEQ ID NO: 265315 - DNA, 21 bp, Artificial sequence
  SiRNA target sequence
gtctgacaatgtatctatagt

SEQ ID NO: 265316 - DNA, 21 bp, Artificial sequence
  SiRNA target sequence
tctgacaatgtatctatagtt

SEQ ID NO: 265317 - DNA, 21 bp, Artificial sequence
  SiRNA target sequence
ctgacaatgtatctatagttg

SEQ ID NO: 265318 - DNA, 21 bp, Artificial sequence
  SiRNA target sequence
tgacaatgtatctatagttgt

SEQ ID NO: 265319 - DNA, 21 bp, Artificial sequence
  SiRNA target sequence
gacaatgtatctatagttgtt

SEQ ID NO: 265320 - DNA, 21 bp, Artificial sequence
  SiRNA target sequence
acaatgtatctatagttgttt

SEQ ID NO: 265321 - DNA, 21 bp, Artificial sequence
  SiRNA target sequence
caatgtatctatagttgtttg

SEQ ID NO: 265322 - DNA, 21 bp, Artificial sequence
  SiRNA target sequence
aatgtatctatagttgtttgg

SEQ ID NO: 265323 - DNA, 21 bp, Artificial sequence
  SiRNA target sequence
atgtatctatagttgtttgga

SEQ ID NO: 265324 - DNA, 21 bp, Artificial sequence
  SiRNA target sequence
tgtatctatagttgtttggaa

SEQ ID NO: 265325 - DNA, 21 bp, Artificial sequence
  SiRNA target sequence
gtatctatagttgtttggaag

SEQ ID NO: 265326 - DNA, 21 bp, Artificial sequence
  SiRNA target sequence
tatctatagttgtttggaagt

SEQ ID NO: 265327 - DNA, 21 bp, Artificial sequence
  SiRNA target sequence
atctatagttgtttggaagtg

SEQ ID NO: 265328 - DNA, 21 bp, Artificial sequence
  SiRNA target sequence
tctatagttgtttggaagtgg

SEQ ID NO: 265329 - DNA, 21 bp, Artificial sequence
  SiRNA target sequence
ctatagttgtttggaagtggg

SEQ ID NO: 265330 - DNA, 21 bp, Artificial sequence
  SiRNA target sequence
tatagttgtttggaagtgggc

SEQ ID NO: 265331 - DNA, 21 bp, Artificial sequence
  SiRNA target sequence
atagttgtttggaagtgggca

SEQ ID NO: 265332 - DNA, 21 bp, Artificial sequence
  SiRNA target sequence
tagttgtttggaagtgggcag

SEQ ID NO: 265333 - DNA, 21 bp, Artificial sequence
  SiRNA target sequence
agttgtttggaagtgggcaga

SEQ ID NO: 265334 - DNA, 21 bp, Artificial sequence
  SiRNA target sequence
gttgtttggaagtgggcagaa

SEQ ID NO: 265335 - DNA, 21 bp, Artificial sequence
  SiRNA target sequence
ttgtttggaagtgggcagaag

SEQ ID NO: 265336 - DNA, 21 bp, Artificial sequence
  SiRNA target sequence
tgtttggaagtgggcagaaga

SEQ ID NO: 265337 - DNA, 21 bp, Artificial sequence
  SiRNA target sequence
gtttggaagtgggcagaagat

SEQ ID NO: 265338 - DNA, 21 bp, Artificial sequence
  SiRNA target sequence
tttggaagtgggcagaagatg

SEQ ID NO: 265339 - DNA, 21 bp, Artificial sequence
  SiRNA target sequence
ttggaagtgggcagaagatgt

SEQ ID NO: 265340 - DNA, 21 bp, Artificial sequence
  SiRNA target sequence
tggaagtgggcagaagatgta

SEQ ID NO: 265341 - DNA, 21 bp, Artificial sequence
  SiRNA target sequence
ggaagtgggcagaagatgtag

SEQ ID NO: 265342 - DNA, 21 bp, Artificial sequence
  SiRNA target sequence
gaagtgggcagaagatgtagt

SEQ ID NO: 265343 - DNA, 21 bp, Artificial sequence
  SiRNA target sequence
aagtgggcagaagatgtagta

SEQ ID NO: 265344 - DNA, 21 bp, Artificial sequence
  SiRNA target sequence
agtgggcagaagatgtagtag

SEQ ID NO: 265345 - DNA, 21 bp, Artificial sequence
  SiRNA target sequence
gtgggcagaagatgtagtagt

SEQ ID NO: 265346 - DNA, 21 bp, Artificial sequence
  SiRNA target sequence
tgggcagaagatgtagtagta

SEQ ID NO: 265347 - DNA, 21 bp, Artificial sequence
  SiRNA target sequence
gggcagaagatgtagtagtag

SEQ ID NO: 265348 - DNA, 21 bp, Artificial sequence
  SiRNA target sequence
ggcagaagatgtagtagtagt

SEQ ID NO: 265349 - DNA, 21 bp, Artificial sequence
  SiRNA target sequence
gcagaagatgtagtagtagta

SEQ ID NO: 265350 - DNA, 21 bp, Artificial sequence
  SiRNA target sequence
cagaagatgtagtagtagtag

SEQ ID NO: 265351 - DNA, 21 bp, Artificial sequence
  SiRNA target sequence
agaagatgtagtagtagtaga

SEQ ID NO: 265352 - DNA, 21 bp, Artificial sequence
  SiRNA target sequence
gaagatgtagtagtagtagaa

SEQ ID NO: 265353 - DNA, 21 bp, Artificial sequence
  SiRNA target sequence
aagatgtagtagtagtagaac

SEQ ID NO: 265354 - DNA, 21 bp, Artificial sequence
  SiRNA target sequence
agatgtagtagtagtagaacc

SEQ ID NO: 265355 - DNA, 21 bp, Artificial sequence
  SiRNA target sequence
gatgtagtagtagtagaaccg

SEQ ID NO: 265356 - DNA, 21 bp, Artificial sequence
  SiRNA target sequence
atgtagtagtagtagaaccga

SEQ ID NO: 265357 - DNA, 21 bp, Artificial sequence
  SiRNA target sequence
tgtagtagtagtagaaccgaa

SEQ ID NO: 265358 - DNA, 21 bp, Artificial sequence
  SiRNA target sequence
gtagtagtagtagaaccgaaa

SEQ ID NO: 265359 - DNA, 21 bp, Artificial sequence
  SiRNA target sequence
tagtagtagtagaaccgaaac

SEQ ID NO: 265360 - DNA, 21 bp, Artificial sequence
  SiRNA target sequence
agtagtagtagaaccgaaacc

SEQ ID NO: 265361 - DNA, 21 bp, Artificial sequence
  SiRNA target sequence
gtagtagtagaaccgaaacca

SEQ ID NO: 265362 - DNA, 21 bp, Artificial sequence
  SiRNA target sequence
tagtagtagaaccgaaaccat

SEQ ID NO: 265363 - DNA, 21 bp, Artificial sequence
  SiRNA target sequence
agtagtagaaccgaaaccatt

SEQ ID NO: 265364 - DNA, 21 bp, Artificial sequence
  SiRNA target sequence
gtagtagaaccgaaaccatta

SEQ ID NO: 265365 - DNA, 21 bp, Artificial sequence
  SiRNA target sequence
tagtagaaccgaaaccattaa

SEQ ID NO: 265366 - DNA, 21 bp, Artificial sequence
  SiRNA target sequence
agtagaaccgaaaccattaac

SEQ ID NO: 265367 - DNA, 21 bp, Artificial sequence
  SiRNA target sequence
gtagaaccgaaaccattaaca

SEQ ID NO: 265368 - DNA, 21 bp, Artificial sequence
  SiRNA target sequence
tagaaccgaaaccattaacat

SEQ ID NO: 265369 - DNA, 21 bp, Artificial sequence
  SiRNA target sequence
agaaccgaaaccattaacatc

SEQ ID NO: 265370 - DNA, 21 bp, Artificial sequence
  SiRNA target sequence
gaaccgaaaccattaacatcc

SEQ ID NO: 265371 - DNA, 21 bp, Artificial sequence
  SiRNA target sequence
aaccgaaaccattaacatccg

SEQ ID NO: 265372 - DNA, 21 bp, Artificial sequence
  SiRNA target sequence
accgaaaccattaacatccgg

SEQ ID NO: 265373 - DNA, 21 bp, Artificial sequence
  SiRNA target sequence
ccgaaaccattaacatccgga

SEQ ID NO: 265374 - DNA, 21 bp, Artificial sequence
  SiRNA target sequence
cgaaaccattaacatccggac

SEQ ID NO: 265375 - DNA, 21 bp, Artificial sequence
  SiRNA target sequence
gaaaccattaacatccggacc

SEQ ID NO: 265376 - DNA, 21 bp, Artificial sequence
  SiRNA target sequence
aaaccattaacatccggacca

SEQ ID NO: 265377 - DNA, 21 bp, Artificial sequence
  SiRNA target sequence
aaccattaacatccggaccaa

SEQ ID NO: 265378 - DNA, 21 bp, Artificial sequence
  SiRNA target sequence
accattaacatccggaccaac

SEQ ID NO: 265379 - DNA, 21 bp, Artificial sequence
  SiRNA target sequence
ccattaacatccggaccaacg

SEQ ID NO: 265380 - DNA, 21 bp, Artificial sequence
  SiRNA target sequence
cattaacatccggaccaacgc

SEQ ID NO: 265381 - DNA, 21 bp, Artificial sequence
  SiRNA target sequence
attaacatccggaccaacgca

SEQ ID NO: 265382 - DNA, 21 bp, Artificial sequence
  SiRNA target sequence
ttaacatccggaccaacgcaa

SEQ ID NO: 265383 - DNA, 21 bp, Artificial sequence
  SiRNA target sequence
taacatccggaccaacgcaag

SEQ ID NO: 265384 - DNA, 21 bp, Artificial sequence
  SiRNA target sequence
aacatccggaccaacgcaagt

SEQ ID NO: 265385 - DNA, 21 bp, Artificial sequence
  SiRNA target sequence
acatccggaccaacgcaagta

SEQ ID NO: 265386 - DNA, 21 bp, Artificial sequence
  SiRNA target sequence
catccggaccaacgcaagtat

SEQ ID NO: 265387 - DNA, 21 bp, Artificial sequence
  SiRNA target sequence
atccggaccaacgcaagtata

SEQ ID NO: 265388 - DNA, 21 bp, Artificial sequence
  SiRNA target sequence
tccggaccaacgcaagtatat

SEQ ID NO: 265389 - DNA, 21 bp, Artificial sequence
  SiRNA target sequence
ccggaccaacgcaagtatatc

SEQ ID NO: 265390 - DNA, 21 bp, Artificial sequence
  SiRNA target sequence
cggaccaacgcaagtatatcg

SEQ ID NO: 265391 - DNA, 21 bp, Artificial sequence
  SiRNA target sequence
ggaccaacgcaagtatatcga

SEQ ID NO: 265392 - DNA, 21 bp, Artificial sequence
  SiRNA target sequence
gaccaacgcaagtatatcgac

SEQ ID NO: 265393 - DNA, 21 bp, Artificial sequence
  SiRNA target sequence
accaacgcaagtatatcgacc

SEQ ID NO: 265394 - DNA, 21 bp, Artificial sequence
  SiRNA target sequence
ccaacgcaagtatatcgacca

SEQ ID NO: 265395 - DNA, 21 bp, Artificial sequence
  SiRNA target sequence
caacgcaagtatatcgaccac

SEQ ID NO: 265396 - DNA, 21 bp, Artificial sequence
  SiRNA target sequence
aacgcaagtatatcgaccacc

SEQ ID NO: 265397 - DNA, 21 bp, Artificial sequence
  SiRNA target sequence
acgcaagtatatcgaccaccc

SEQ ID NO: 265398 - DNA, 21 bp, Artificial sequence
  SiRNA target sequence
cgcaagtatatcgaccacccc

SEQ ID NO: 265399 - DNA, 21 bp, Artificial sequence
  SiRNA target sequence
gcaagtatatcgaccaccccc

SEQ ID NO: 265400 - DNA, 21 bp, Artificial sequence
  SiRNA target sequence
caagtatatcgaccaccccca

SEQ ID NO: 265401 - DNA, 21 bp, Artificial sequence
  SiRNA target sequence
aagtatatcgaccacccccaa

SEQ ID NO: 265402 - DNA, 21 bp, Artificial sequence
  SiRNA target sequence
agtatatcgaccacccccaac

SEQ ID NO: 265403 - DNA, 21 bp, Artificial sequence
  SiRNA target sequence
gtatatcgaccacccccaact

SEQ ID NO: 265404 - DNA, 21 bp, Artificial sequence
  SiRNA target sequence
tatatcgaccacccccaactg

SEQ ID NO: 265405 - DNA, 21 bp, Artificial sequence
  SiRNA target sequence
atatcgaccacccccaactgc

SEQ ID NO: 265406 - DNA, 21 bp, Artificial sequence
  SiRNA target sequence
tatcgaccacccccaactgct

SEQ ID NO: 265407 - DNA, 21 bp, Artificial sequence
  SiRNA target sequence
atcgaccacccccaactgctt

SEQ ID NO: 265408 - DNA, 21 bp, Artificial sequence
  SiRNA target sequence
tcgaccacccccaactgcttc

SEQ ID NO: 265409 - DNA, 21 bp, Artificial sequence
  SiRNA target sequence
cgaccacccccaactgcttca

SEQ ID NO: 265410 - DNA, 21 bp, Artificial sequence
  SiRNA target sequence
gaccacccccaactgcttcaa

SEQ ID NO: 265411 - DNA, 21 bp, Artificial sequence
  SiRNA target sequence
accacccccaactgcttcaac

SEQ ID NO: 265412 - DNA, 21 bp, Artificial sequence
  SiRNA target sequence
ccacccccaactgcttcaaca

SEQ ID NO: 265413 - DNA, 21 bp, Artificial sequence
  SiRNA target sequence
cacccccaactgcttcaacag

SEQ ID NO: 265414 - DNA, 21 bp, Artificial sequence
  SiRNA target sequence
acccccaactgcttcaacagc

SEQ ID NO: 265415 - DNA, 21 bp, Artificial sequence
  SiRNA target sequence
cccccaactgcttcaacagct

SEQ ID NO: 265416 - DNA, 21 bp, Artificial sequence
  SiRNA target sequence
ccccaactgcttcaacagctg

SEQ ID NO: 265417 - DNA, 21 bp, Artificial sequence
  SiRNA target sequence
cccaactgcttcaacagctgt

SEQ ID NO: 265418 - DNA, 21 bp, Artificial sequence
  SiRNA target sequence
ccaactgcttcaacagctgtt

SEQ ID NO: 265419 - DNA, 21 bp, Artificial sequence
  SiRNA target sequence
caactgcttcaacagctgttg

SEQ ID NO: 265420 - DNA, 21 bp, Artificial sequence
  SiRNA target sequence
aactgcttcaacagctgttga

SEQ ID NO: 265421 - DNA, 21 bp, Artificial sequence
  SiRNA target sequence
actgcttcaacagctgttgaa

SEQ ID NO: 265422 - DNA, 21 bp, Artificial sequence
  SiRNA target sequence
ctgcttcaacagctgttgaag

SEQ ID NO: 265423 - DNA, 21 bp, Artificial sequence
  SiRNA target sequence
tgcttcaacagctgttgaagt

SEQ ID NO: 265424 - DNA, 21 bp, Artificial sequence
  SiRNA target sequence
gcttcaacagctgttgaagtc

SEQ ID NO: 265425 - DNA, 21 bp, Artificial sequence
  SiRNA target sequence
cttcaacagctgttgaagtct

SEQ ID NO: 265426 - DNA, 21 bp, Artificial sequence
  SiRNA target sequence
ttcaacagctgttgaagtctt

SEQ ID NO: 265427 - DNA, 21 bp, Artificial sequence
  SiRNA target sequence
tcaacagctgttgaagtctta

SEQ ID NO: 265428 - DNA, 21 bp, Artificial sequence
  SiRNA target sequence
caacagctgttgaagtcttaa

SEQ ID NO: 265429 - DNA, 21 bp, Artificial sequence
  SiRNA target sequence
aacagctgttgaagtcttaaa

SEQ ID NO: 265430 - DNA, 21 bp, Artificial sequence
  SiRNA target sequence
acagctgttgaagtcttaaat

SEQ ID NO: 265431 - DNA, 21 bp, Artificial sequence
  SiRNA target sequence
cagctgttgaagtcttaaatg

SEQ ID NO: 265432 - DNA, 21 bp, Artificial sequence
  SiRNA target sequence
agctgttgaagtcttaaatgt

SEQ ID NO: 265433 - DNA, 21 bp, Artificial sequence
  SiRNA target sequence
gctgttgaagtcttaaatgta

SEQ ID NO: 265434 - DNA, 21 bp, Artificial sequence
  SiRNA target sequence
ctgttgaagtcttaaatgtag

SEQ ID NO: 265435 - DNA, 21 bp, Artificial sequence
  SiRNA target sequence
tgttgaagtcttaaatgtaga

SEQ ID NO: 265436 - DNA, 21 bp, Artificial sequence
  SiRNA target sequence
gttgaagtcttaaatgtagaa

SEQ ID NO: 265437 - DNA, 21 bp, Artificial sequence
  SiRNA target sequence
ttgaagtcttaaatgtagaac

SEQ ID NO: 265438 - DNA, 21 bp, Artificial sequence
  SiRNA target sequence
tgaagtcttaaatgtagaact

SEQ ID NO: 265439 - DNA, 21 bp, Artificial sequence
  SiRNA target sequence
gaagtcttaaatgtagaactt

SEQ ID NO: 265440 - DNA, 21 bp, Artificial sequence
  SiRNA target sequence
aagtcttaaatgtagaacttc

SEQ ID NO: 265441 - DNA, 21 bp, Artificial sequence
  SiRNA target sequence
agtcttaaatgtagaacttca

SEQ ID NO: 265442 - DNA, 21 bp, Artificial sequence
  SiRNA target sequence
gtcttaaatgtagaacttcaa

SEQ ID NO: 265443 - DNA, 21 bp, Artificial sequence
  SiRNA target sequence
tcttaaatgtagaacttcaaa

SEQ ID NO: 265444 - DNA, 21 bp, Artificial sequence
  SiRNA target sequence
cttaaatgtagaacttcaaat

SEQ ID NO: 265445 - DNA, 21 bp, Artificial sequence
  SiRNA target sequence
ttaaatgtagaacttcaaatt

SEQ ID NO: 265446 - DNA, 21 bp, Artificial sequence
  SiRNA target sequence
taaatgtagaacttcaaatta

SEQ ID NO: 265447 - DNA, 21 bp, Artificial sequence
  SiRNA target sequence
aaatgtagaacttcaaattaa

SEQ ID NO: 265448 - DNA, 21 bp, Artificial sequence
  SiRNA target sequence
aatgtagaacttcaaattaat

SEQ ID NO: 265449 - DNA, 21 bp, Artificial sequence
  SiRNA target sequence
atgtagaacttcaaattaata

SEQ ID NO: 265450 - DNA, 21 bp, Artificial sequence
  SiRNA target sequence
tgtagaacttcaaattaatat

SEQ ID NO: 265451 - DNA, 21 bp, Artificial sequence
  SiRNA target sequence
gtagaacttcaaattaatata

SEQ ID NO: 265452 - DNA, 21 bp, Artificial sequence
  SiRNA target sequence
tagaacttcaaattaatatag

SEQ ID NO: 265453 - DNA, 21 bp, Artificial sequence
  SiRNA target sequence
agaacttcaaattaatatagg

SEQ ID NO: 265454 - DNA, 21 bp, Artificial sequence
  SiRNA target sequence
gaacttcaaattaatataggt

SEQ ID NO: 265455 - DNA, 21 bp, Artificial sequence
  SiRNA target sequence
aacttcaaattaatataggta

SEQ ID NO: 265456 - DNA, 21 bp, Artificial sequence
  SiRNA target sequence
acttcaaattaatataggtaa

SEQ ID NO: 265457 - DNA, 21 bp, Artificial sequence
  SiRNA target sequence
cttcaaattaatataggtaat

SEQ ID NO: 265458 - DNA, 21 bp, Artificial sequence
  SiRNA target sequence
ttcaaattaatataggtaata

SEQ ID NO: 265459 - DNA, 21 bp, Artificial sequence
  SiRNA target sequence
tcaaattaatataggtaataa

SEQ ID NO: 265460 - DNA, 21 bp, Artificial sequence
  SiRNA target sequence
caaattaatataggtaataag

SEQ ID NO: 265461 - DNA, 21 bp, Artificial sequence
  SiRNA target sequence
aaattaatataggtaataaga

SEQ ID NO: 265462 - DNA, 21 bp, Artificial sequence
  SiRNA target sequence
aattaatataggtaataagac

SEQ ID NO: 265463 - DNA, 21 bp, Artificial sequence
  SiRNA target sequence
attaatataggtaataagact

SEQ ID NO: 265464 - DNA, 21 bp, Artificial sequence
  SiRNA target sequence
ttaatataggtaataagacta

SEQ ID NO: 265465 - DNA, 21 bp, Artificial sequence
  SiRNA target sequence
taatataggtaataagactaa

SEQ ID NO: 265466 - DNA, 21 bp, Artificial sequence
  SiRNA target sequence
aatataggtaataagactaac

SEQ ID NO: 265467 - DNA, 21 bp, Artificial sequence
  SiRNA target sequence
atataggtaataagactaacg

SEQ ID NO: 265468 - DNA, 21 bp, Artificial sequence
  SiRNA target sequence
tataggtaataagactaacga

SEQ ID NO: 265469 - DNA, 21 bp, Artificial sequence
  SiRNA target sequence
ataggtaataagactaacgaa

SEQ ID NO: 265470 - DNA, 21 bp, Artificial sequence
  SiRNA target sequence
taggtaataagactaacgaaa

SEQ ID NO: 265471 - DNA, 21 bp, Artificial sequence
  SiRNA target sequence
aggtaataagactaacgaaaa

SEQ ID NO: 265472 - DNA, 21 bp, Artificial sequence
  SiRNA target sequence
ggtaataagactaacgaaaat

SEQ ID NO: 265473 - DNA, 21 bp, Artificial sequence
  SiRNA target sequence
gtaataagactaacgaaaatg

SEQ ID NO: 265474 - DNA, 21 bp, Artificial sequence
  SiRNA target sequence
taataagactaacgaaaatgt

SEQ ID NO: 265475 - DNA, 21 bp, Artificial sequence
  SiRNA target sequence
aataagactaacgaaaatgta

SEQ ID NO: 265476 - DNA, 21 bp, Artificial sequence
  SiRNA target sequence
ataagactaacgaaaatgtaa

SEQ ID NO: 265477 - DNA, 21 bp, Artificial sequence
  SiRNA target sequence
taagactaacgaaaatgtaat

SEQ ID NO: 265478 - DNA, 21 bp, Artificial sequence
  SiRNA target sequence
aagactaacgaaaatgtaatc

SEQ ID NO: 265479 - DNA, 21 bp, Artificial sequence
  SiRNA target sequence
agactaacgaaaatgtaatct

SEQ ID NO: 265480 - DNA, 21 bp, Artificial sequence
  SiRNA target sequence
gactaacgaaaatgtaatctc

SEQ ID NO: 265481 - DNA, 21 bp, Artificial sequence
  SiRNA target sequence
actaacgaaaatgtaatctca

SEQ ID NO: 265482 - DNA, 21 bp, Artificial sequence
  SiRNA target sequence
ctaacgaaaatgtaatctcat

SEQ ID NO: 265483 - DNA, 21 bp, Artificial sequence
  SiRNA target sequence
taacgaaaatgtaatctcatt

SEQ ID NO: 265484 - DNA, 21 bp, Artificial sequence
  SiRNA target sequence
aacgaaaatgtaatctcattt

SEQ ID NO: 265485 - DNA, 21 bp, Artificial sequence
  SiRNA target sequence
acgaaaatgtaatctcatttt

SEQ ID NO: 265486 - DNA, 21 bp, Artificial sequence
  SiRNA target sequence
cgaaaatgtaatctcattttt

SEQ ID NO: 265487 - DNA, 21 bp, Artificial sequence
  SiRNA target sequence
gaaaatgtaatctcatttttt

SEQ ID NO: 265488 - DNA, 21 bp, Artificial sequence
  SiRNA target sequence
aaaatgtaatctcattttttg

SEQ ID NO: 265489 - DNA, 21 bp, Artificial sequence
  SiRNA target sequence
aaatgtaatctcattttttga

SEQ ID NO: 265490 - DNA, 21 bp, Artificial sequence
  SiRNA target sequence
aatgtaatctcattttttgac

SEQ ID NO: 265491 - DNA, 21 bp, Artificial sequence
  SiRNA target sequence
atgtaatctcattttttgact

SEQ ID NO: 265492 - DNA, 21 bp, Artificial sequence
  SiRNA target sequence
tgtaatctcattttttgactc

SEQ ID NO: 265493 - DNA, 21 bp, Artificial sequence
  SiRNA target sequence
gtaatctcattttttgactct

SEQ ID NO: 265494 - DNA, 21 bp, Artificial sequence
  SiRNA target sequence
taatctcattttttgactcta

SEQ ID NO: 265495 - DNA, 21 bp, Artificial sequence
  SiRNA target sequence
aatctcattttttgactctac

SEQ ID NO: 265496 - DNA, 21 bp, Artificial sequence
  SiRNA target sequence
atctcattttttgactctaca

SEQ ID NO: 265497 - DNA, 21 bp, Artificial sequence
  SiRNA target sequence
tctcattttttgactctacag

SEQ ID NO: 265498 - DNA, 21 bp, Artificial sequence
  SiRNA target sequence
ctcattttttgactctacaga

SEQ ID NO: 265499 - DNA, 21 bp, Artificial sequence
  SiRNA target sequence
tcattttttgactctacagat

SEQ ID NO: 265500 - DNA, 21 bp, Artificial sequence
  SiRNA target sequence
cattttttgactctacagatg

SEQ ID NO: 265501 - DNA, 21 bp, Artificial sequence
  SiRNA target sequence
attttttgactctacagatgc

SEQ ID NO: 265502 - DNA, 21 bp, Artificial sequence
  SiRNA target sequence
ttttttgactctacagatgct

SEQ ID NO: 265503 - DNA, 21 bp, Artificial sequence
  SiRNA target sequence
tttttgactctacagatgctg

SEQ ID NO: 265504 - DNA, 21 bp, Artificial sequence
  SiRNA target sequence
ttttgactctacagatgctga

SEQ ID NO: 265505 - DNA, 21 bp, Artificial sequence
  SiRNA target sequence
tttgactctacagatgctgaa

SEQ ID NO: 265506 - DNA, 21 bp, Artificial sequence
  SiRNA target sequence
ttgactctacagatgctgaaa

SEQ ID NO: 265507 - DNA, 21 bp, Artificial sequence
  SiRNA target sequence
tgactctacagatgctgaaac

SEQ ID NO: 265508 - DNA, 21 bp, Artificial sequence
  SiRNA target sequence
gactctacagatgctgaaaca

SEQ ID NO: 265509 - DNA, 21 bp, Artificial sequence
  SiRNA target sequence
actctacagatgctgaaacac

SEQ ID NO: 265510 - DNA, 21 bp, Artificial sequence
  SiRNA target sequence
ctctacagatgctgaaacaca

SEQ ID NO: 265511 - DNA, 21 bp, Artificial sequence
  SiRNA target sequence
tctacagatgctgaaacacaa

SEQ ID NO: 265512 - DNA, 21 bp, Artificial sequence
  SiRNA target sequence
ctacagatgctgaaacacaaa

SEQ ID NO: 265513 - DNA, 21 bp, Artificial sequence
  SiRNA target sequence
tacagatgctgaaacacaaaa

SEQ ID NO: 265514 - DNA, 21 bp, Artificial sequence
  SiRNA target sequence
acagatgctgaaacacaaaat

SEQ ID NO: 265515 - DNA, 21 bp, Artificial sequence
  SiRNA target sequence
cagatgctgaaacacaaaatc

SEQ ID NO: 265516 - DNA, 21 bp, Artificial sequence
  SiRNA target sequence
agatgctgaaacacaaaatca

SEQ ID NO: 265517 - DNA, 21 bp, Artificial sequence
  SiRNA target sequence
gatgctgaaacacaaaatcac

SEQ ID NO: 265518 - DNA, 21 bp, Artificial sequence
  SiRNA target sequence
atgctgaaacacaaaatcaca

SEQ ID NO: 265519 - DNA, 21 bp, Artificial sequence
  SiRNA target sequence
tgctgaaacacaaaatcacaa

SEQ ID NO: 265520 - DNA, 21 bp, Artificial sequence
  SiRNA target sequence
gctgaaacacaaaatcacaac

SEQ ID NO: 265521 - DNA, 21 bp, Artificial sequence
  SiRNA target sequence
ctgaaacacaaaatcacaacg

SEQ ID NO: 265522 - DNA, 21 bp, Artificial sequence
  SiRNA target sequence
tgaaacacaaaatcacaacgc

SEQ ID NO: 265523 - DNA, 21 bp, Artificial sequence
  SiRNA target sequence
gaaacacaaaatcacaacgct

SEQ ID NO: 265524 - DNA, 21 bp, Artificial sequence
  SiRNA target sequence
aaacacaaaatcacaacgctt

SEQ ID NO: 265525 - DNA, 21 bp, Artificial sequence
  SiRNA target sequence
aacacaaaatcacaacgcttt

SEQ ID NO: 265526 - DNA, 21 bp, Artificial sequence
  SiRNA target sequence
acacaaaatcacaacgcttta

SEQ ID NO: 265527 - DNA, 21 bp, Artificial sequence
  SiRNA target sequence
cacaaaatcacaacgctttaa

SEQ ID NO: 265528 - DNA, 21 bp, Artificial sequence
  SiRNA target sequence
acaaaatcacaacgctttaat

SEQ ID NO: 265529 - DNA, 21 bp, Artificial sequence
  SiRNA target sequence
caaaatcacaacgctttaatg

SEQ ID NO: 265530 - DNA, 21 bp, Artificial sequence
  SiRNA target sequence
aaaatcacaacgctttaatga

SEQ ID NO: 265531 - DNA, 21 bp, Artificial sequence
  SiRNA target sequence
aaatcacaacgctttaatgaa

SEQ ID NO: 265532 - DNA, 21 bp, Artificial sequence
  SiRNA target sequence
aatcacaacgctttaatgaaa

SEQ ID NO: 265533 - DNA, 21 bp, Artificial sequence
  SiRNA target sequence
atcacaacgctttaatgaaag

SEQ ID NO: 265534 - DNA, 21 bp, Artificial sequence
  SiRNA target sequence
tcacaacgctttaatgaaagg

SEQ ID NO: 265535 - DNA, 21 bp, Artificial sequence
  SiRNA target sequence
cacaacgctttaatgaaagga

SEQ ID NO: 265536 - DNA, 21 bp, Artificial sequence
  SiRNA target sequence
acaacgctttaatgaaaggat

SEQ ID NO: 265537 - DNA, 21 bp, Artificial sequence
  SiRNA target sequence
caacgctttaatgaaaggatg

SEQ ID NO: 265538 - DNA, 21 bp, Artificial sequence
  SiRNA target sequence
aacgctttaatgaaaggatgt

SEQ ID NO: 265539 - DNA, 21 bp, Artificial sequence
  SiRNA target sequence
acgctttaatgaaaggatgtg

SEQ ID NO: 265540 - DNA, 21 bp, Artificial sequence
  SiRNA target sequence
cgctttaatgaaaggatgtgg

SEQ ID NO: 265541 - DNA, 21 bp, Artificial sequence
  SiRNA target sequence
gctttaatgaaaggatgtggt

SEQ ID NO: 265542 - DNA, 21 bp, Artificial sequence
  SiRNA target sequence
ctttaatgaaaggatgtggtg

SEQ ID NO: 265543 - DNA, 21 bp, Artificial sequence
  SiRNA target sequence
tttaatgaaaggatgtggtga

SEQ ID NO: 265544 - DNA, 21 bp, Artificial sequence
  SiRNA target sequence
ttaatgaaaggatgtggtgag

SEQ ID NO: 265545 - DNA, 21 bp, Artificial sequence
  SiRNA target sequence
taatgaaaggatgtggtgagt

SEQ ID NO: 265546 - DNA, 21 bp, Artificial sequence
  SiRNA target sequence
aatgaaaggatgtggtgagtt

SEQ ID NO: 265547 - DNA, 21 bp, Artificial sequence
  SiRNA target sequence
atgaaaggatgtggtgagttt

SEQ ID NO: 265548 - DNA, 21 bp, Artificial sequence
  SiRNA target sequence
tgaaaggatgtggtgagttta

SEQ ID NO: 265549 - DNA, 21 bp, Artificial sequence
  SiRNA target sequence
gaaaggatgtggtgagtttat

SEQ ID NO: 265550 - DNA, 21 bp, Artificial sequence
  SiRNA target sequence
aaaggatgtggtgagtttatt

SEQ ID NO: 265551 - DNA, 21 bp, Artificial sequence
  SiRNA target sequence
aaggatgtggtgagtttattg

SEQ ID NO: 265552 - DNA, 21 bp, Artificial sequence
  SiRNA target sequence
aggatgtggtgagtttattgt

SEQ ID NO: 265553 - DNA, 21 bp, Artificial sequence
  SiRNA target sequence
ggatgtggtgagtttattgta

SEQ ID NO: 265554 - DNA, 21 bp, Artificial sequence
  SiRNA target sequence
gatgtggtgagtttattgtaa

SEQ ID NO: 265555 - DNA, 21 bp, Artificial sequence
  SiRNA target sequence
atgtggtgagtttattgtaaa

SEQ ID NO: 265556 - DNA, 21 bp, Artificial sequence
  SiRNA target sequence
tgtggtgagtttattgtaaac

SEQ ID NO: 265557 - DNA, 21 bp, Artificial sequence
  SiRNA target sequence
gtggtgagtttattgtaaact

SEQ ID NO: 265558 - DNA, 21 bp, Artificial sequence
  SiRNA target sequence
tggtgagtttattgtaaactt

SEQ ID NO: 265559 - DNA, 21 bp, Artificial sequence
  SiRNA target sequence
ggtgagtttattgtaaacttg

SEQ ID NO: 265560 - DNA, 21 bp, Artificial sequence
  SiRNA target sequence
gtgagtttattgtaaacttgc

SEQ ID NO: 265561 - DNA, 21 bp, Artificial sequence
  SiRNA target sequence
tgagtttattgtaaacttgcg

SEQ ID NO: 265562 - DNA, 21 bp, Artificial sequence
  SiRNA target sequence
gagtttattgtaaacttgcga

SEQ ID NO: 265563 - DNA, 21 bp, Artificial sequence
  SiRNA target sequence
agtttattgtaaacttgcgaa

SEQ ID NO: 265564 - DNA, 21 bp, Artificial sequence
  SiRNA target sequence
gtttattgtaaacttgcgaac

SEQ ID NO: 265565 - DNA, 21 bp, Artificial sequence
  SiRNA target sequence
tttattgtaaacttgcgaact

SEQ ID NO: 265566 - DNA, 21 bp, Artificial sequence
  SiRNA target sequence
ttattgtaaacttgcgaactc

SEQ ID NO: 265567 - DNA, 21 bp, Artificial sequence
  SiRNA target sequence
tattgtaaacttgcgaactct

SEQ ID NO: 265568 - DNA, 21 bp, Artificial sequence
  SiRNA target sequence
attgtaaacttgcgaactctt

SEQ ID NO: 265569 - DNA, 21 bp, Artificial sequence
  SiRNA target sequence
ttgtaaacttgcgaactcttc

SEQ ID NO: 265570 - DNA, 21 bp, Artificial sequence
  SiRNA target sequence
tgtaaacttgcgaactcttct

SEQ ID NO: 265571 - DNA, 21 bp, Artificial sequence
  SiRNA target sequence
gtaaacttgcgaactcttctc

SEQ ID NO: 265572 - DNA, 21 bp, Artificial sequence
  SiRNA target sequence
taaacttgcgaactcttctca

SEQ ID NO: 265573 - DNA, 21 bp, Artificial sequence
  SiRNA target sequence
aaacttgcgaactcttctcag

SEQ ID NO: 265574 - DNA, 21 bp, Artificial sequence
  SiRNA target sequence
aacttgcgaactcttctcaga

SEQ ID NO: 265575 - DNA, 21 bp, Artificial sequence
  SiRNA target sequence
acttgcgaactcttctcagaa

SEQ ID NO: 265576 - DNA, 21 bp, Artificial sequence
  SiRNA target sequence
cttgcgaactcttctcagaac

SEQ ID NO: 265577 - DNA, 21 bp, Artificial sequence
  SiRNA target sequence
ttgcgaactcttctcagaacc

SEQ ID NO: 265578 - DNA, 21 bp, Artificial sequence
  SiRNA target sequence
tgcgaactcttctcagaacct

SEQ ID NO: 265579 - DNA, 21 bp, Artificial sequence
  SiRNA target sequence
gcgaactcttctcagaacctt

SEQ ID NO: 265580 - DNA, 21 bp, Artificial sequence
  SiRNA target sequence
cgaactcttctcagaaccttt

SEQ ID NO: 265581 - DNA, 21 bp, Artificial sequence
  SiRNA target sequence
gaactcttctcagaaccttta

SEQ ID NO: 265582 - DNA, 21 bp, Artificial sequence
  SiRNA target sequence
aactcttctcagaacctttag

SEQ ID NO: 265583 - DNA, 21 bp, Artificial sequence
  SiRNA target sequence
actcttctcagaacctttaga

SEQ ID NO: 265584 - DNA, 21 bp, Artificial sequence
  SiRNA target sequence
ctcttctcagaacctttagaa

SEQ ID NO: 265585 - DNA, 21 bp, Artificial sequence
  SiRNA target sequence
tcttctcagaacctttagaac

SEQ ID NO: 265586 - DNA, 21 bp, Artificial sequence
  SiRNA target sequence
cttctcagaacctttagaaca

SEQ ID NO: 265587 - DNA, 21 bp, Artificial sequence
  SiRNA target sequence
ttctcagaacctttagaacaa

SEQ ID NO: 265588 - DNA, 21 bp, Artificial sequence
  SiRNA target sequence
tctcagaacctttagaacaat

SEQ ID NO: 265589 - DNA, 21 bp, Artificial sequence
  SiRNA target sequence
ctcagaacctttagaacaata

SEQ ID NO: 265590 - DNA, 21 bp, Artificial sequence
  SiRNA target sequence
tcagaacctttagaacaataa

SEQ ID NO: 265591 - DNA, 21 bp, Artificial sequence
  SiRNA target sequence
cagaacctttagaacaataac

SEQ ID NO: 265592 - DNA, 21 bp, Artificial sequence
  SiRNA target sequence
agaacctttagaacaataaca

SEQ ID NO: 265593 - DNA, 21 bp, Artificial sequence
  SiRNA target sequence
gaacctttagaacaataacag

SEQ ID NO: 265594 - DNA, 21 bp, Artificial sequence
  SiRNA target sequence
aacctttagaacaataacaga

SEQ ID NO: 265595 - DNA, 21 bp, Artificial sequence
  SiRNA target sequence
acctttagaacaataacagat

SEQ ID NO: 265596 - DNA, 21 bp, Artificial sequence
  SiRNA target sequence
cctttagaacaataacagata

SEQ ID NO: 265597 - DNA, 21 bp, Artificial sequence
  SiRNA target sequence
ctttagaacaataacagataa

SEQ ID NO: 265598 - DNA, 21 bp, Artificial sequence
  SiRNA target sequence
tttagaacaataacagataat

SEQ ID NO: 265599 - DNA, 21 bp, Artificial sequence
  SiRNA target sequence
ttagaacaataacagataatt

SEQ ID NO: 265600 - DNA, 21 bp, Artificial sequence
  SiRNA target sequence
tagaacaataacagataattg

SEQ ID NO: 265601 - DNA, 21 bp, Artificial sequence
  SiRNA target sequence
agaacaataacagataattgg

SEQ ID NO: 265602 - DNA, 21 bp, Artificial sequence
  SiRNA target sequence
gaacaataacagataattgga

SEQ ID NO: 265603 - DNA, 21 bp, Artificial sequence
  SiRNA target sequence
aacaataacagataattggat

SEQ ID NO: 265604 - DNA, 21 bp, Artificial sequence
  SiRNA target sequence
acaataacagataattggata

SEQ ID NO: 265605 - DNA, 21 bp, Artificial sequence
  SiRNA target sequence
caataacagataattggatat

SEQ ID NO: 265606 - DNA, 21 bp, Artificial sequence
  SiRNA target sequence
aataacagataattggatatt

SEQ ID NO: 265607 - DNA, 21 bp, Artificial sequence
  SiRNA target sequence
ataacagataattggatatta

SEQ ID NO: 265608 - DNA, 21 bp, Artificial sequence
  SiRNA target sequence
taacagataattggatattac

SEQ ID NO: 265609 - DNA, 21 bp, Artificial sequence
  SiRNA target sequence
aacagataattggatattaca

SEQ ID NO: 265610 - DNA, 21 bp, Artificial sequence
  SiRNA target sequence
acagataattggatattacaa

SEQ ID NO: 265611 - DNA, 21 bp, Artificial sequence
  SiRNA target sequence
cagataattggatattacaag

SEQ ID NO: 265612 - DNA, 21 bp, Artificial sequence
  SiRNA target sequence
agataattggatattacaagc

SEQ ID NO: 265613 - DNA, 21 bp, Artificial sequence
  SiRNA target sequence
gataattggatattacaagct

SEQ ID NO: 265614 - DNA, 21 bp, Artificial sequence
  SiRNA target sequence
ataattggatattacaagcta

SEQ ID NO: 265615 - DNA, 21 bp, Artificial sequence
  SiRNA target sequence
taattggatattacaagctaa

SEQ ID NO: 265616 - DNA, 21 bp, Artificial sequence
  SiRNA target sequence
aattggatattacaagctaat

SEQ ID NO: 265617 - DNA, 21 bp, Artificial sequence
  SiRNA target sequence
attggatattacaagctaata

SEQ ID NO: 265618 - DNA, 21 bp, Artificial sequence
  SiRNA target sequence
ttggatattacaagctaatac

SEQ ID NO: 265619 - DNA, 21 bp, Artificial sequence
  SiRNA target sequence
tggatattacaagctaatacc

SEQ ID NO: 265620 - DNA, 21 bp, Artificial sequence
  SiRNA target sequence
ggatattacaagctaatacca

SEQ ID NO: 265621 - DNA, 21 bp, Artificial sequence
  SiRNA target sequence
gatattacaagctaataccaa

SEQ ID NO: 265622 - DNA, 21 bp, Artificial sequence
  SiRNA target sequence
atattacaagctaataccaag

SEQ ID NO: 265623 - DNA, 21 bp, Artificial sequence
  SiRNA target sequence
tattacaagctaataccaaga

SEQ ID NO: 265624 - DNA, 21 bp, Artificial sequence
  SiRNA target sequence
attacaagctaataccaagac

SEQ ID NO: 265625 - DNA, 21 bp, Artificial sequence
  SiRNA target sequence
ttacaagctaataccaagaca

SEQ ID NO: 265626 - DNA, 21 bp, Artificial sequence
  SiRNA target sequence
tacaagctaataccaagacac

SEQ ID NO: 265627 - DNA, 21 bp, Artificial sequence
  SiRNA target sequence
acaagctaataccaagacacc

SEQ ID NO: 265628 - DNA, 21 bp, Artificial sequence
  SiRNA target sequence
caagctaataccaagacacca

SEQ ID NO: 265629 - DNA, 21 bp, Artificial sequence
  SiRNA target sequence
aagctaataccaagacaccaa

SEQ ID NO: 265630 - DNA, 21 bp, Artificial sequence
  SiRNA target sequence
agctaataccaagacaccaat

SEQ ID NO: 265631 - DNA, 21 bp, Artificial sequence
  SiRNA target sequence
gctaataccaagacaccaatc

SEQ ID NO: 265632 - DNA, 21 bp, Artificial sequence
  SiRNA target sequence
ctaataccaagacaccaatca

SEQ ID NO: 265633 - DNA, 21 bp, Artificial sequence
  SiRNA target sequence
taataccaagacaccaatcac

SEQ ID NO: 265634 - DNA, 21 bp, Artificial sequence
  SiRNA target sequence
aataccaagacaccaatcacg

SEQ ID NO: 265635 - DNA, 21 bp, Artificial sequence
  SiRNA target sequence
ataccaagacaccaatcacgg

SEQ ID NO: 265636 - DNA, 21 bp, Artificial sequence
  SiRNA target sequence
taccaagacaccaatcacgga

SEQ ID NO: 265637 - DNA, 21 bp, Artificial sequence
  SiRNA target sequence
accaagacaccaatcacggac

SEQ ID NO: 265638 - DNA, 21 bp, Artificial sequence
  SiRNA target sequence
ccaagacaccaatcacggacc

SEQ ID NO: 265639 - DNA, 21 bp, Artificial sequence
  SiRNA target sequence
caagacaccaatcacggacct

SEQ ID NO: 265640 - DNA, 21 bp, Artificial sequence
  SiRNA target sequence
aagacaccaatcacggacctc

SEQ ID NO: 265641 - DNA, 21 bp, Artificial sequence
  SiRNA target sequence
agacaccaatcacggacctca

SEQ ID NO: 265642 - DNA, 21 bp, Artificial sequence
  SiRNA target sequence
gacaccaatcacggacctcac

SEQ ID NO: 265643 - DNA, 21 bp, Artificial sequence
  SiRNA target sequence
acaccaatcacggacctcaca

SEQ ID NO: 265644 - DNA, 21 bp, Artificial sequence
  SiRNA target sequence
caccaatcacggacctcacaa

SEQ ID NO: 265645 - DNA, 21 bp, Artificial sequence
  SiRNA target sequence
accaatcacggacctcacaaa

SEQ ID NO: 265646 - DNA, 21 bp, Artificial sequence
  SiRNA target sequence
ccaatcacggacctcacaaac

SEQ ID NO: 265647 - DNA, 21 bp, Artificial sequence
  SiRNA target sequence
caatcacggacctcacaaaca

SEQ ID NO: 265648 - DNA, 21 bp, Artificial sequence
  SiRNA target sequence
aatcacggacctcacaaacac

SEQ ID NO: 265649 - DNA, 21 bp, Artificial sequence
  SiRNA target sequence
atcacggacctcacaaacacc

SEQ ID NO: 265650 - DNA, 21 bp, Artificial sequence
  SiRNA target sequence
tcacggacctcacaaacacca

SEQ ID NO: 265651 - DNA, 21 bp, Artificial sequence
  SiRNA target sequence
cacggacctcacaaacaccac

SEQ ID NO: 265652 - DNA, 21 bp, Artificial sequence
  SiRNA target sequence
acggacctcacaaacaccaca

SEQ ID NO: 265653 - DNA, 21 bp, Artificial sequence
  SiRNA target sequence
cggacctcacaaacaccacag

SEQ ID NO: 265654 - DNA, 21 bp, Artificial sequence
  SiRNA target sequence
ggacctcacaaacaccacaga

SEQ ID NO: 265655 - DNA, 21 bp, Artificial sequence
  SiRNA target sequence
gacctcacaaacaccacagat

SEQ ID NO: 265656 - DNA, 21 bp, Artificial sequence
  SiRNA target sequence
acctcacaaacaccacagatg

SEQ ID NO: 265657 - DNA, 21 bp, Artificial sequence
  SiRNA target sequence
cctcacaaacaccacagatgc

SEQ ID NO: 265658 - DNA, 21 bp, Artificial sequence
  SiRNA target sequence
ctcacaaacaccacagatgct

SEQ ID NO: 265659 - DNA, 21 bp, Artificial sequence
  SiRNA target sequence
tcacaaacaccacagatgctc

SEQ ID NO: 265660 - DNA, 21 bp, Artificial sequence
  SiRNA target sequence
cacaaacaccacagatgctca

SEQ ID NO: 265661 - DNA, 21 bp, Artificial sequence
  SiRNA target sequence
acaaacaccacagatgctcag

SEQ ID NO: 265662 - DNA, 21 bp, Artificial sequence
  SiRNA target sequence
caaacaccacagatgctcagg

SEQ ID NO: 265663 - DNA, 21 bp, Artificial sequence
  SiRNA target sequence
aaacaccacagatgctcaggg

SEQ ID NO: 265664 - DNA, 21 bp, Artificial sequence
  SiRNA target sequence
aacaccacagatgctcagggt

SEQ ID NO: 265665 - DNA, 21 bp, Artificial sequence
  SiRNA target sequence
acaccacagatgctcagggtc

SEQ ID NO: 265666 - DNA, 21 bp, Artificial sequence
  SiRNA target sequence
caccacagatgctcagggtcg

SEQ ID NO: 265667 - DNA, 21 bp, Artificial sequence
  SiRNA target sequence
accacagatgctcagggtcga

SEQ ID NO: 265668 - DNA, 21 bp, Artificial sequence
  SiRNA target sequence
ccacagatgctcagggtcgag

SEQ ID NO: 265669 - DNA, 21 bp, Artificial sequence
  SiRNA target sequence
cacagatgctcagggtcgaga

SEQ ID NO: 265670 - DNA, 21 bp, Artificial sequence
  SiRNA target sequence
acagatgctcagggtcgagac

SEQ ID NO: 265671 - DNA, 21 bp, Artificial sequence
  SiRNA target sequence
cagatgctcagggtcgagact

SEQ ID NO: 265672 - DNA, 21 bp, Artificial sequence
  SiRNA target sequence
agatgctcagggtcgagacta

SEQ ID NO: 265673 - DNA, 21 bp, Artificial sequence
  SiRNA target sequence
gatgctcagggtcgagactat

SEQ ID NO: 265674 - DNA, 21 bp, Artificial sequence
  SiRNA target sequence
atgctcagggtcgagactata

SEQ ID NO: 265675 - DNA, 21 bp, Artificial sequence
  SiRNA target sequence
tgctcagggtcgagactatat

SEQ ID NO: 265676 - DNA, 21 bp, Artificial sequence
  SiRNA target sequence
gctcagggtcgagactatatg

SEQ ID NO: 265677 - DNA, 21 bp, Artificial sequence
  SiRNA target sequence
ctcagggtcgagactatatgt

SEQ ID NO: 265678 - DNA, 21 bp, Artificial sequence
  SiRNA target sequence
tcagggtcgagactatatgtc

SEQ ID NO: 265679 - DNA, 21 bp, Artificial sequence
  SiRNA target sequence
cagggtcgagactatatgtct

SEQ ID NO: 265680 - DNA, 21 bp, Artificial sequence
  SiRNA target sequence
agggtcgagactatatgtctt

SEQ ID NO: 265681 - DNA, 21 bp, Artificial sequence
  SiRNA target sequence
gggtcgagactatatgtctta

SEQ ID NO: 265682 - DNA, 21 bp, Artificial sequence
  SiRNA target sequence
ggtcgagactatatgtcttac

SEQ ID NO: 265683 - DNA, 21 bp, Artificial sequence
  SiRNA target sequence
gtcgagactatatgtcttacc

SEQ ID NO: 265684 - DNA, 21 bp, Artificial sequence
  SiRNA target sequence
tcgagactatatgtcttacct

SEQ ID NO: 265685 - DNA, 21 bp, Artificial sequence
  SiRNA target sequence
cgagactatatgtcttacctg

SEQ ID NO: 265686 - DNA, 21 bp, Artificial sequence
  SiRNA target sequence
gagactatatgtcttacctgt

SEQ ID NO: 265687 - DNA, 21 bp, Artificial sequence
  SiRNA target sequence
agactatatgtcttacctgtc

SEQ ID NO: 265688 - DNA, 21 bp, Artificial sequence
  SiRNA target sequence
gactatatgtcttacctgtcc

SEQ ID NO: 265689 - DNA, 21 bp, Artificial sequence
  SiRNA target sequence
actatatgtcttacctgtcct

SEQ ID NO: 265690 - DNA, 21 bp, Artificial sequence
  SiRNA target sequence
ctatatgtcttacctgtccta

SEQ ID NO: 265691 - DNA, 21 bp, Artificial sequence
  SiRNA target sequence
tatatgtcttacctgtcctat

SEQ ID NO: 265692 - DNA, 21 bp, Artificial sequence
  SiRNA target sequence
atatgtcttacctgtcctatt

SEQ ID NO: 265693 - DNA, 21 bp, Artificial sequence
  SiRNA target sequence
tatgtcttacctgtcctattt

SEQ ID NO: 265694 - DNA, 21 bp, Artificial sequence
  SiRNA target sequence
atgtcttacctgtcctattta

SEQ ID NO: 265695 - DNA, 21 bp, Artificial sequence
  SiRNA target sequence
tgtcttacctgtcctatttat

SEQ ID NO: 265696 - DNA, 21 bp, Artificial sequence
  SiRNA target sequence
gtcttacctgtcctatttata

SEQ ID NO: 265697 - DNA, 21 bp, Artificial sequence
  SiRNA target sequence
tcttacctgtcctatttatac

SEQ ID NO: 265698 - DNA, 21 bp, Artificial sequence
  SiRNA target sequence
cttacctgtcctatttatacc

SEQ ID NO: 265699 - DNA, 21 bp, Artificial sequence
  SiRNA target sequence
ttacctgtcctatttataccg

SEQ ID NO: 265700 - DNA, 21 bp, Artificial sequence
  SiRNA target sequence
tacctgtcctatttataccga

SEQ ID NO: 265701 - DNA, 21 bp, Artificial sequence
  SiRNA target sequence
acctgtcctatttataccgat

SEQ ID NO: 265702 - DNA, 21 bp, Artificial sequence
  SiRNA target sequence
cctgtcctatttataccgatt

SEQ ID NO: 265703 - DNA, 21 bp, Artificial sequence
  SiRNA target sequence
ctgtcctatttataccgattt

SEQ ID NO: 265704 - DNA, 21 bp, Artificial sequence
  SiRNA target sequence
tgtcctatttataccgatttt

SEQ ID NO: 265705 - DNA, 21 bp, Artificial sequence
  SiRNA target sequence
gtcctatttataccgatttta

SEQ ID NO: 265706 - DNA, 21 bp, Artificial sequence
  SiRNA target sequence
tcctatttataccgattttat

SEQ ID NO: 265707 - DNA, 21 bp, Artificial sequence
  SiRNA target sequence
cctatttataccgattttatc

SEQ ID NO: 265708 - DNA, 21 bp, Artificial sequence
  SiRNA target sequence
ctatttataccgattttatcg

SEQ ID NO: 265709 - DNA, 21 bp, Artificial sequence
  SiRNA target sequence
tatttataccgattttatcga

SEQ ID NO: 265710 - DNA, 21 bp, Artificial sequence
  SiRNA target sequence
atttataccgattttatcgag

SEQ ID NO: 265711 - DNA, 21 bp, Artificial sequence
  SiRNA target sequence
tttataccgattttatcgagg

SEQ ID NO: 265712 - DNA, 21 bp, Artificial sequence
  SiRNA target sequence
ttataccgattttatcgagga

SEQ ID NO: 265713 - DNA, 21 bp, Artificial sequence
  SiRNA target sequence
tataccgattttatcgaggag

SEQ ID NO: 265714 - DNA, 21 bp, Artificial sequence
  SiRNA target sequence
ataccgattttatcgaggagg

SEQ ID NO: 265715 - DNA, 21 bp, Artificial sequence
  SiRNA target sequence
taccgattttatcgaggaggt

SEQ ID NO: 265716 - DNA, 21 bp, Artificial sequence
  SiRNA target sequence
accgattttatcgaggaggtc

SEQ ID NO: 265717 - DNA, 21 bp, Artificial sequence
  SiRNA target sequence
ccgattttatcgaggaggtcg

SEQ ID NO: 265718 - DNA, 21 bp, Artificial sequence
  SiRNA target sequence
cgattttatcgaggaggtcgg

SEQ ID NO: 265719 - DNA, 21 bp, Artificial sequence
  SiRNA target sequence
gattttatcgaggaggtcggc

SEQ ID NO: 265720 - DNA, 21 bp, Artificial sequence
  SiRNA target sequence
attttatcgaggaggtcggcg

SEQ ID NO: 265721 - DNA, 21 bp, Artificial sequence
  SiRNA target sequence
ttttatcgaggaggtcggcgt

SEQ ID NO: 265722 - DNA, 21 bp, Artificial sequence
  SiRNA target sequence
tttatcgaggaggtcggcgtt

SEQ ID NO: 265723 - DNA, 21 bp, Artificial sequence
  SiRNA target sequence
ttatcgaggaggtcggcgtta

SEQ ID NO: 265724 - DNA, 21 bp, Artificial sequence
  SiRNA target sequence
tatcgaggaggtcggcgttat

SEQ ID NO: 265725 - DNA, 21 bp, Artificial sequence
  SiRNA target sequence
atcgaggaggtcggcgttata

SEQ ID NO: 265726 - DNA, 21 bp, Artificial sequence
  SiRNA target sequence
tcgaggaggtcggcgttataa

SEQ ID NO: 265727 - DNA, 21 bp, Artificial sequence
  SiRNA target sequence
cgaggaggtcggcgttataaa

SEQ ID NO: 265728 - DNA, 21 bp, Artificial sequence
  SiRNA target sequence
gaggaggtcggcgttataaat

SEQ ID NO: 265729 - DNA, 21 bp, Artificial sequence
  SiRNA target sequence
aggaggtcggcgttataaatt

SEQ ID NO: 265730 - DNA, 21 bp, Artificial sequence
  SiRNA target sequence
ggaggtcggcgttataaattc

SEQ ID NO: 265731 - DNA, 21 bp, Artificial sequence
  SiRNA target sequence
gaggtcggcgttataaattct

SEQ ID NO: 265732 - DNA, 21 bp, Artificial sequence
  SiRNA target sequence
aggtcggcgttataaattctt

SEQ ID NO: 265733 - DNA, 21 bp, Artificial sequence
  SiRNA target sequence
ggtcggcgttataaattcttt

SEQ ID NO: 265734 - DNA, 21 bp, Artificial sequence
  SiRNA target sequence
gtcggcgttataaattcttta

SEQ ID NO: 265735 - DNA, 21 bp, Artificial sequence
  SiRNA target sequence
tcggcgttataaattctttaa

SEQ ID NO: 265736 - DNA, 21 bp, Artificial sequence
  SiRNA target sequence
cggcgttataaattctttaat

SEQ ID NO: 265737 - DNA, 21 bp, Artificial sequence
  SiRNA target sequence
ggcgttataaattctttaata

SEQ ID NO: 265738 - DNA, 21 bp, Artificial sequence
  SiRNA target sequence
gcgttataaattctttaatac

SEQ ID NO: 265739 - DNA, 21 bp, Artificial sequence
  SiRNA target sequence
cgttataaattctttaatacc

SEQ ID NO: 265740 - DNA, 21 bp, Artificial sequence
  SiRNA target sequence
gttataaattctttaatacca

SEQ ID NO: 265741 - DNA, 21 bp, Artificial sequence
  SiRNA target sequence
ttataaattctttaataccac

SEQ ID NO: 265742 - DNA, 21 bp, Artificial sequence
  SiRNA target sequence
tataaattctttaataccacc

SEQ ID NO: 265743 - DNA, 21 bp, Artificial sequence
  SiRNA target sequence
ataaattctttaataccaccc

SEQ ID NO: 265744 - DNA, 21 bp, Artificial sequence
  SiRNA target sequence
taaattctttaataccacccc

SEQ ID NO: 265745 - DNA, 21 bp, Artificial sequence
  SiRNA target sequence
aaattctttaataccacccct

SEQ ID NO: 265746 - DNA, 21 bp, Artificial sequence
  SiRNA target sequence
aattctttaataccacccctc

SEQ ID NO: 265747 - DNA, 21 bp, Artificial sequence
  SiRNA target sequence
attctttaataccacccctct

SEQ ID NO: 265748 - DNA, 21 bp, Artificial sequence
  SiRNA target sequence
ttctttaataccacccctctc

SEQ ID NO: 265749 - DNA, 21 bp, Artificial sequence
  SiRNA target sequence
tctttaataccacccctctca

SEQ ID NO: 265750 - DNA, 21 bp, Artificial sequence
  SiRNA target sequence
ctttaataccacccctctcaa

SEQ ID NO: 265751 - DNA, 21 bp, Artificial sequence
  SiRNA target sequence
tttaataccacccctctcaaa

SEQ ID NO: 265752 - DNA, 21 bp, Artificial sequence
  SiRNA target sequence
ttaataccacccctctcaaac

SEQ ID NO: 265753 - DNA, 21 bp, Artificial sequence
  SiRNA target sequence
taataccacccctctcaaaca

SEQ ID NO: 265754 - DNA, 21 bp, Artificial sequence
  SiRNA target sequence
aataccacccctctcaaacaa

SEQ ID NO: 265755 - DNA, 21 bp, Artificial sequence
  SiRNA target sequence
ataccacccctctcaaacaat

SEQ ID NO: 265756 - DNA, 21 bp, Artificial sequence
  SiRNA target sequence
taccacccctctcaaacaatc

SEQ ID NO: 265757 - DNA, 21 bp, Artificial sequence
  SiRNA target sequence
accacccctctcaaacaatct

SEQ ID NO: 265758 - DNA, 21 bp, Artificial sequence
  SiRNA target sequence
ccacccctctcaaacaatctc

SEQ ID NO: 265759 - DNA, 21 bp, Artificial sequence
  SiRNA target sequence
cacccctctcaaacaatctca

SEQ ID NO: 265760 - DNA, 21 bp, Artificial sequence
  SiRNA target sequence
acccctctcaaacaatctcaa

SEQ ID NO: 265761 - DNA, 21 bp, Artificial sequence
  SiRNA target sequence
cccctctcaaacaatctcaaa

SEQ ID NO: 265762 - DNA, 21 bp, Artificial sequence
  SiRNA target sequence
ccctctcaaacaatctcaaac

SEQ ID NO: 265763 - DNA, 21 bp, Artificial sequence
  SiRNA target sequence
cctctcaaacaatctcaaaca

SEQ ID NO: 265764 - DNA, 21 bp, Artificial sequence
  SiRNA target sequence
ctctcaaacaatctcaaacat

SEQ ID NO: 265765 - DNA, 21 bp, Artificial sequence
  SiRNA target sequence
tctcaaacaatctcaaacatg

SEQ ID NO: 265766 - DNA, 21 bp, Artificial sequence
  SiRNA target sequence
ctcaaacaatctcaaacatgc

SEQ ID NO: 265767 - DNA, 21 bp, Artificial sequence
  SiRNA target sequence
tcaaacaatctcaaacatgct

SEQ ID NO: 265768 - DNA, 21 bp, Artificial sequence
  SiRNA target sequence
caaacaatctcaaacatgcta

SEQ ID NO: 265769 - DNA, 21 bp, Artificial sequence
  SiRNA target sequence
aaacaatctcaaacatgctat

SEQ ID NO: 265770 - DNA, 21 bp, Artificial sequence
  SiRNA target sequence
aacaatctcaaacatgctata

SEQ ID NO: 265771 - DNA, 21 bp, Artificial sequence
  SiRNA target sequence
acaatctcaaacatgctatat

SEQ ID NO: 265772 - DNA, 21 bp, Artificial sequence
  SiRNA target sequence
caatctcaaacatgctatata

SEQ ID NO: 265773 - DNA, 21 bp, Artificial sequence
  SiRNA target sequence
aatctcaaacatgctatataa

SEQ ID NO: 265774 - DNA, 21 bp, Artificial sequence
  SiRNA target sequence
atctcaaacatgctatataag

SEQ ID NO: 265775 - DNA, 21 bp, Artificial sequence
  SiRNA target sequence
tctcaaacatgctatataaga

SEQ ID NO: 265776 - DNA, 21 bp, Artificial sequence
  SiRNA target sequence
ctcaaacatgctatataagaa

SEQ ID NO: 265777 - DNA, 21 bp, Artificial sequence
  SiRNA target sequence
tcaaacatgctatataagaag

SEQ ID NO: 265778 - DNA, 21 bp, Artificial sequence
  SiRNA target sequence
caaacatgctatataagaagc

SEQ ID NO: 265779 - DNA, 21 bp, Artificial sequence
  SiRNA target sequence
aaacatgctatataagaagct

SEQ ID NO: 265780 - DNA, 21 bp, Artificial sequence
  SiRNA target sequence
aacatgctatataagaagctt

SEQ ID NO: 265781 - DNA, 21 bp, Artificial sequence
  SiRNA target sequence
acatgctatataagaagcttt

SEQ ID NO: 265782 - DNA, 21 bp, Artificial sequence
  SiRNA target sequence
catgctatataagaagctttc

SEQ ID NO: 265783 - DNA, 21 bp, Artificial sequence
  SiRNA target sequence
atgctatataagaagctttct

SEQ ID NO: 265784 - DNA, 21 bp, Artificial sequence
  SiRNA target sequence
tgctatataagaagctttctt

SEQ ID NO: 265785 - DNA, 21 bp, Artificial sequence
  SiRNA target sequence
gctatataagaagctttctta

SEQ ID NO: 265786 - DNA, 21 bp, Artificial sequence
  SiRNA target sequence
ctatataagaagctttcttat

SEQ ID NO: 265787 - DNA, 21 bp, Artificial sequence
  SiRNA target sequence
tatataagaagctttcttata

SEQ ID NO: 265788 - DNA, 21 bp, Artificial sequence
  SiRNA target sequence
atataagaagctttcttatac

SEQ ID NO: 265789 - DNA, 21 bp, Artificial sequence
  SiRNA target sequence
tataagaagctttcttatacc

SEQ ID NO: 265790 - DNA, 21 bp, Artificial sequence
  SiRNA target sequence
ataagaagctttcttatacca

SEQ ID NO: 265791 - DNA, 21 bp, Artificial sequence
  SiRNA target sequence
taagaagctttcttataccac

SEQ ID NO: 265792 - DNA, 21 bp, Artificial sequence
  SiRNA target sequence
aagaagctttcttataccacg

SEQ ID NO: 265793 - DNA, 21 bp, Artificial sequence
  SiRNA target sequence
agaagctttcttataccacgt

SEQ ID NO: 265794 - DNA, 21 bp, Artificial sequence
  SiRNA target sequence
gaagctttcttataccacgta

SEQ ID NO: 265795 - DNA, 21 bp, Artificial sequence
  SiRNA target sequence
aagctttcttataccacgtaa

SEQ ID NO: 265796 - DNA, 21 bp, Artificial sequence
  SiRNA target sequence
agctttcttataccacgtaat

SEQ ID NO: 265797 - DNA, 21 bp, Artificial sequence
  SiRNA target sequence
gctttcttataccacgtaatt

SEQ ID NO: 265798 - DNA, 21 bp, Artificial sequence
  SiRNA target sequence
ctttcttataccacgtaatta

SEQ ID NO: 265799 - DNA, 21 bp, Artificial sequence
  SiRNA target sequence
tttcttataccacgtaattac

SEQ ID NO: 265800 - DNA, 21 bp, Artificial sequence
  SiRNA target sequence
ttcttataccacgtaattact

SEQ ID NO: 265801 - DNA, 21 bp, Artificial sequence
  SiRNA target sequence
tcttataccacgtaattactc

SEQ ID NO: 265802 - DNA, 21 bp, Artificial sequence
  SiRNA target sequence
cttataccacgtaattactca

SEQ ID NO: 265803 - DNA, 21 bp, Artificial sequence
  SiRNA target sequence
ttataccacgtaattactcag

SEQ ID NO: 265804 - DNA, 21 bp, Artificial sequence
  SiRNA target sequence
tataccacgtaattactcagc

SEQ ID NO: 265805 - DNA, 21 bp, Artificial sequence
  SiRNA target sequence
ataccacgtaattactcagct

SEQ ID NO: 265806 - DNA, 21 bp, Artificial sequence
  SiRNA target sequence
taccacgtaattactcagctg

SEQ ID NO: 265807 - DNA, 21 bp, Artificial sequence
  SiRNA target sequence
accacgtaattactcagctga

SEQ ID NO: 265808 - DNA, 21 bp, Artificial sequence
  SiRNA target sequence
ccacgtaattactcagctgat

SEQ ID NO: 265809 - DNA, 21 bp, Artificial sequence
  SiRNA target sequence
cacgtaattactcagctgatg

SEQ ID NO: 265810 - DNA, 21 bp, Artificial sequence
  SiRNA target sequence
acgtaattactcagctgatga

SEQ ID NO: 265811 - DNA, 21 bp, Artificial sequence
  SiRNA target sequence
cgtaattactcagctgatgaa

SEQ ID NO: 265812 - DNA, 21 bp, Artificial sequence
  SiRNA target sequence
gtaattactcagctgatgaaa

SEQ ID NO: 265813 - DNA, 21 bp, Artificial sequence
  SiRNA target sequence
taattactcagctgatgaaat

SEQ ID NO: 265814 - DNA, 21 bp, Artificial sequence
  SiRNA target sequence
aattactcagctgatgaaatt

SEQ ID NO: 265815 - DNA, 21 bp, Artificial sequence
  SiRNA target sequence
attactcagctgatgaaatta

SEQ ID NO: 265816 - DNA, 21 bp, Artificial sequence
  SiRNA target sequence
ttactcagctgatgaaattaa

SEQ ID NO: 265817 - DNA, 21 bp, Artificial sequence
  SiRNA target sequence
tactcagctgatgaaattaac

SEQ ID NO: 265818 - DNA, 21 bp, Artificial sequence
  SiRNA target sequence
actcagctgatgaaattaacg

SEQ ID NO: 265819 - DNA, 21 bp, Artificial sequence
  SiRNA target sequence
ctcagctgatgaaattaacgt

SEQ ID NO: 265820 - DNA, 21 bp, Artificial sequence
  SiRNA target sequence
tcagctgatgaaattaacgta

SEQ ID NO: 265821 - DNA, 21 bp, Artificial sequence
  SiRNA target sequence
cagctgatgaaattaacgtag

SEQ ID NO: 265822 - DNA, 21 bp, Artificial sequence
  SiRNA target sequence
agctgatgaaattaacgtaga

SEQ ID NO: 265823 - DNA, 21 bp, Artificial sequence
  SiRNA target sequence
gctgatgaaattaacgtagac

SEQ ID NO: 265824 - DNA, 21 bp, Artificial sequence
  SiRNA target sequence
ctgatgaaattaacgtagacg

SEQ ID NO: 265825 - DNA, 21 bp, Artificial sequence
  SiRNA target sequence
tgatgaaattaacgtagacgg

SEQ ID NO: 265826 - DNA, 21 bp, Artificial sequence
  SiRNA target sequence
gatgaaattaacgtagacgga

SEQ ID NO: 265827 - DNA, 21 bp, Artificial sequence
  SiRNA target sequence
atgaaattaacgtagacggac

SEQ ID NO: 265828 - DNA, 21 bp, Artificial sequence
  SiRNA target sequence
tgaaattaacgtagacggacc

SEQ ID NO: 265829 - DNA, 21 bp, Artificial sequence
  SiRNA target sequence
gaaattaacgtagacggacct

SEQ ID NO: 265830 - DNA, 21 bp, Artificial sequence
  SiRNA target sequence
aaattaacgtagacggacctt

SEQ ID NO: 265831 - DNA, 21 bp, Artificial sequence
  SiRNA target sequence
aattaacgtagacggaccttc

SEQ ID NO: 265832 - DNA, 21 bp, Artificial sequence
  SiRNA target sequence
attaacgtagacggaccttca

SEQ ID NO: 265833 - DNA, 21 bp, Artificial sequence
  SiRNA target sequence
ttaacgtagacggaccttcac

SEQ ID NO: 265834 - DNA, 21 bp, Artificial sequence
  SiRNA target sequence
taacgtagacggaccttcaca

SEQ ID NO: 265835 - DNA, 21 bp, Artificial sequence
  SiRNA target sequence
aacgtagacggaccttcacat

SEQ ID NO: 265836 - DNA, 21 bp, Artificial sequence
  SiRNA target sequence
acgtagacggaccttcacata

SEQ ID NO: 265837 - DNA, 21 bp, Artificial sequence
  SiRNA target sequence
cgtagacggaccttcacatat

SEQ ID NO: 265838 - DNA, 21 bp, Artificial sequence
  SiRNA target sequence
gtagacggaccttcacatata

SEQ ID NO: 265839 - DNA, 21 bp, Artificial sequence
  SiRNA target sequence
tagacggaccttcacatataa

SEQ ID NO: 265840 - DNA, 21 bp, Artificial sequence
  SiRNA target sequence
agacggaccttcacatataac

SEQ ID NO: 265841 - DNA, 21 bp, Artificial sequence
  SiRNA target sequence
gacggaccttcacatataaca

SEQ ID NO: 265842 - DNA, 21 bp, Artificial sequence
  SiRNA target sequence
acggaccttcacatataacat

SEQ ID NO: 265843 - DNA, 21 bp, Artificial sequence
  SiRNA target sequence
cggaccttcacatataacata

SEQ ID NO: 265844 - DNA, 21 bp, Artificial sequence
  SiRNA target sequence
ggaccttcacatataacatac

SEQ ID NO: 265845 - DNA, 21 bp, Artificial sequence
  SiRNA target sequence
gaccttcacatataacatacc

SEQ ID NO: 265846 - DNA, 21 bp, Artificial sequence
  SiRNA target sequence
accttcacatataacataccc

SEQ ID NO: 265847 - DNA, 21 bp, Artificial sequence
  SiRNA target sequence
ccttcacatataacatacccc

SEQ ID NO: 265848 - DNA, 21 bp, Artificial sequence
  SiRNA target sequence
cttcacatataacataccccg

SEQ ID NO: 265849 - DNA, 21 bp, Artificial sequence
  SiRNA target sequence
ttcacatataacataccccgt

SEQ ID NO: 265850 - DNA, 21 bp, Artificial sequence
  SiRNA target sequence
tcacatataacataccccgta

SEQ ID NO: 265851 - DNA, 21 bp, Artificial sequence
  SiRNA target sequence
cacatataacataccccgtaa

SEQ ID NO: 265852 - DNA, 21 bp, Artificial sequence
  SiRNA target sequence
acatataacataccccgtaat

SEQ ID NO: 265853 - DNA, 21 bp, Artificial sequence
  SiRNA target sequence
catataacataccccgtaatc

SEQ ID NO: 265854 - DNA, 21 bp, Artificial sequence
  SiRNA target sequence
atataacataccccgtaatca

SEQ ID NO: 265855 - DNA, 21 bp, Artificial sequence
  SiRNA target sequence
tataacataccccgtaatcaa

SEQ ID NO: 265856 - DNA, 21 bp, Artificial sequence
  SiRNA target sequence
ataacataccccgtaatcaat

SEQ ID NO: 265857 - DNA, 21 bp, Artificial sequence
  SiRNA target sequence
taacataccccgtaatcaatc

SEQ ID NO: 265858 - DNA, 21 bp, Artificial sequence
  SiRNA target sequence
aacataccccgtaatcaatcc

SEQ ID NO: 265859 - DNA, 21 bp, Artificial sequence
  SiRNA target sequence
acataccccgtaatcaatcct

SEQ ID NO: 265860 - DNA, 21 bp, Artificial sequence
  SiRNA target sequence
cataccccgtaatcaatcctg

SEQ ID NO: 265861 - DNA, 21 bp, Artificial sequence
  SiRNA target sequence
ataccccgtaatcaatcctgt

SEQ ID NO: 265862 - DNA, 21 bp, Artificial sequence
  SiRNA target sequence
taccccgtaatcaatcctgtg

SEQ ID NO: 265863 - DNA, 21 bp, Artificial sequence
  SiRNA target sequence
accccgtaatcaatcctgtgc

SEQ ID NO: 265864 - DNA, 21 bp, Artificial sequence
  SiRNA target sequence
ccccgtaatcaatcctgtgca

SEQ ID NO: 265865 - DNA, 21 bp, Artificial sequence
  SiRNA target sequence
cccgtaatcaatcctgtgcat

SEQ ID NO: 265866 - DNA, 21 bp, Artificial sequence
  SiRNA target sequence
ccgtaatcaatcctgtgcatg

SEQ ID NO: 265867 - DNA, 21 bp, Artificial sequence
  SiRNA target sequence
cgtaatcaatcctgtgcatga

SEQ ID NO: 265868 - DNA, 21 bp, Artificial sequence
  SiRNA target sequence
gtaatcaatcctgtgcatgaa

SEQ ID NO: 265869 - DNA, 21 bp, Artificial sequence
  SiRNA target sequence
taatcaatcctgtgcatgaag

SEQ ID NO: 265870 - DNA, 21 bp, Artificial sequence
  SiRNA target sequence
aatcaatcctgtgcatgaagt

SEQ ID NO: 265871 - DNA, 21 bp, Artificial sequence
  SiRNA target sequence
atcaatcctgtgcatgaagta

SEQ ID NO: 265872 - DNA, 21 bp, Artificial sequence
  SiRNA target sequence
tcaatcctgtgcatgaagtag

SEQ ID NO: 265873 - DNA, 21 bp, Artificial sequence
  SiRNA target sequence
caatcctgtgcatgaagtaga

SEQ ID NO: 265874 - DNA, 21 bp, Artificial sequence
  SiRNA target sequence
aatcctgtgcatgaagtagaa

SEQ ID NO: 265875 - DNA, 21 bp, Artificial sequence
  SiRNA target sequence
atcctgtgcatgaagtagaag

SEQ ID NO: 265876 - DNA, 21 bp, Artificial sequence
  SiRNA target sequence
tcctgtgcatgaagtagaagt

SEQ ID NO: 265877 - DNA, 21 bp, Artificial sequence
  SiRNA target sequence
cctgtgcatgaagtagaagtt

SEQ ID NO: 265878 - DNA, 21 bp, Artificial sequence
  SiRNA target sequence
ctgtgcatgaagtagaagttc

SEQ ID NO: 265879 - DNA, 21 bp, Artificial sequence
  SiRNA target sequence
tgtgcatgaagtagaagttcc

SEQ ID NO: 265880 - DNA, 21 bp, Artificial sequence
  SiRNA target sequence
gtgcatgaagtagaagttcca

SEQ ID NO: 265881 - DNA, 21 bp, Artificial sequence
  SiRNA target sequence
tgcatgaagtagaagttccat

SEQ ID NO: 265882 - DNA, 21 bp, Artificial sequence
  SiRNA target sequence
gcatgaagtagaagttccatt

SEQ ID NO: 265883 - DNA, 21 bp, Artificial sequence
  SiRNA target sequence
catgaagtagaagttccattc

SEQ ID NO: 265884 - DNA, 21 bp, Artificial sequence
  SiRNA target sequence
atgaagtagaagttccattct

SEQ ID NO: 265885 - DNA, 21 bp, Artificial sequence
  SiRNA target sequence
tgaagtagaagttccattcta

SEQ ID NO: 265886 - DNA, 21 bp, Artificial sequence
  SiRNA target sequence
gaagtagaagttccattctat

SEQ ID NO: 265887 - DNA, 21 bp, Artificial sequence
  SiRNA target sequence
aagtagaagttccattctatt

SEQ ID NO: 265888 - DNA, 21 bp, Artificial sequence
  SiRNA target sequence
agtagaagttccattctattc

SEQ ID NO: 265889 - DNA, 21 bp, Artificial sequence
  SiRNA target sequence
gtagaagttccattctattct

SEQ ID NO: 265890 - DNA, 21 bp, Artificial sequence
  SiRNA target sequence
tagaagttccattctattctc

SEQ ID NO: 265891 - DNA, 21 bp, Artificial sequence
  SiRNA target sequence
agaagttccattctattctca

SEQ ID NO: 265892 - DNA, 21 bp, Artificial sequence
  SiRNA target sequence
gaagttccattctattctcag

SEQ ID NO: 265893 - DNA, 21 bp, Artificial sequence
  SiRNA target sequence
aagttccattctattctcagt

SEQ ID NO: 265894 - DNA, 21 bp, Artificial sequence
  SiRNA target sequence
agttccattctattctcagta

SEQ ID NO: 265895 - DNA, 21 bp, Artificial sequence
  SiRNA target sequence
gttccattctattctcagtat

SEQ ID NO: 265896 - DNA, 21 bp, Artificial sequence
  SiRNA target sequence
ttccattctattctcagtata

SEQ ID NO: 265897 - DNA, 21 bp, Artificial sequence
  SiRNA target sequence
tccattctattctcagtatag

SEQ ID NO: 265898 - DNA, 21 bp, Artificial sequence
  SiRNA target sequence
ccattctattctcagtatagg

SEQ ID NO: 265899 - DNA, 21 bp, Artificial sequence
  SiRNA target sequence
cattctattctcagtatagga

SEQ ID NO: 265900 - DNA, 21 bp, Artificial sequence
  SiRNA target sequence
attctattctcagtataggaa

SEQ ID NO: 265901 - DNA, 21 bp, Artificial sequence
  SiRNA target sequence
ttctattctcagtataggaaa

SEQ ID NO: 265902 - DNA, 21 bp, Artificial sequence
  SiRNA target sequence
tctattctcagtataggaaaa

SEQ ID NO: 265903 - DNA, 21 bp, Artificial sequence
  SiRNA target sequence
ctattctcagtataggaaaat

SEQ ID NO: 265904 - DNA, 21 bp, Artificial sequence
  SiRNA target sequence
tattctcagtataggaaaata

SEQ ID NO: 265905 - DNA, 21 bp, Artificial sequence
  SiRNA target sequence
attctcagtataggaaaatac

SEQ ID NO: 265906 - DNA, 21 bp, Artificial sequence
  SiRNA target sequence
ttctcagtataggaaaatacc

SEQ ID NO: 265907 - DNA, 21 bp, Artificial sequence
  SiRNA target sequence
tctcagtataggaaaatacct

SEQ ID NO: 265908 - DNA, 21 bp, Artificial sequence
  SiRNA target sequence
ctcagtataggaaaataccta

SEQ ID NO: 265909 - DNA, 21 bp, Artificial sequence
  SiRNA target sequence
tcagtataggaaaatacctat

SEQ ID NO: 265910 - DNA, 21 bp, Artificial sequence
  SiRNA target sequence
cagtataggaaaatacctatc

SEQ ID NO: 265911 - DNA, 21 bp, Artificial sequence
  SiRNA target sequence
agtataggaaaatacctatcg

SEQ ID NO: 265912 - DNA, 21 bp, Artificial sequence
  SiRNA target sequence
gtataggaaaatacctatcgc

SEQ ID NO: 265913 - DNA, 21 bp, Artificial sequence
  SiRNA target sequence
tataggaaaatacctatcgct

SEQ ID NO: 265914 - DNA, 21 bp, Artificial sequence
  SiRNA target sequence
ataggaaaatacctatcgctt

SEQ ID NO: 265915 - DNA, 21 bp, Artificial sequence
  SiRNA target sequence
taggaaaatacctatcgcttc

SEQ ID NO: 265916 - DNA, 21 bp, Artificial sequence
  SiRNA target sequence
aggaaaatacctatcgcttca

SEQ ID NO: 265917 - DNA, 21 bp, Artificial sequence
  SiRNA target sequence
ggaaaatacctatcgcttcaa

SEQ ID NO: 265918 - DNA, 21 bp, Artificial sequence
  SiRNA target sequence
gaaaatacctatcgcttcaac

SEQ ID NO: 265919 - DNA, 21 bp, Artificial sequence
  SiRNA target sequence
aaaatacctatcgcttcaaca

SEQ ID NO: 265920 - DNA, 21 bp, Artificial sequence
  SiRNA target sequence
aaatacctatcgcttcaacat

SEQ ID NO: 265921 - DNA, 21 bp, Artificial sequence
  SiRNA target sequence
aatacctatcgcttcaacatc

SEQ ID NO: 265922 - DNA, 21 bp, Artificial sequence
  SiRNA target sequence
atacctatcgcttcaacatcg

SEQ ID NO: 265923 - DNA, 21 bp, Artificial sequence
  SiRNA target sequence
tacctatcgcttcaacatcgg

SEQ ID NO: 265924 - DNA, 21 bp, Artificial sequence
  SiRNA target sequence
acctatcgcttcaacatcgga

SEQ ID NO: 265925 - DNA, 21 bp, Artificial sequence
  SiRNA target sequence
cctatcgcttcaacatcggat

SEQ ID NO: 265926 - DNA, 21 bp, Artificial sequence
  SiRNA target sequence
ctatcgcttcaacatcggata

SEQ ID NO: 265927 - DNA, 21 bp, Artificial sequence
  SiRNA target sequence
tatcgcttcaacatcggataa

SEQ ID NO: 265928 - DNA, 21 bp, Artificial sequence
  SiRNA target sequence
atcgcttcaacatcggataaa

SEQ ID NO: 265929 - DNA, 21 bp, Artificial sequence
  SiRNA target sequence
tcgcttcaacatcggataaag

SEQ ID NO: 265930 - DNA, 21 bp, Artificial sequence
  SiRNA target sequence
cgcttcaacatcggataaagg

SEQ ID NO: 265931 - DNA, 21 bp, Artificial sequence
  SiRNA target sequence
gcttcaacatcggataaaggt

SEQ ID NO: 265932 - DNA, 21 bp, Artificial sequence
  SiRNA target sequence
cttcaacatcggataaaggtt

SEQ ID NO: 265933 - DNA, 21 bp, Artificial sequence
  SiRNA target sequence
ttcaacatcggataaaggtta

SEQ ID NO: 265934 - DNA, 21 bp, Artificial sequence
  SiRNA target sequence
tcaacatcggataaaggttat

SEQ ID NO: 265935 - DNA, 21 bp, Artificial sequence
  SiRNA target sequence
caacatcggataaaggttatg

SEQ ID NO: 265936 - DNA, 21 bp, Artificial sequence
  SiRNA target sequence
aacatcggataaaggttatga

SEQ ID NO: 265937 - DNA, 21 bp, Artificial sequence
  SiRNA target sequence
acatcggataaaggttatgat

SEQ ID NO: 265938 - DNA, 21 bp, Artificial sequence
  SiRNA target sequence
catcggataaaggttatgatt

SEQ ID NO: 265939 - DNA, 21 bp, Artificial sequence
  SiRNA target sequence
atcggataaaggttatgattc

SEQ ID NO: 265940 - DNA, 21 bp, Artificial sequence
  SiRNA target sequence
tcggataaaggttatgattcc

SEQ ID NO: 265941 - DNA, 21 bp, Artificial sequence
  SiRNA target sequence
cggataaaggttatgattcct

SEQ ID NO: 265942 - DNA, 21 bp, Artificial sequence
  SiRNA target sequence
ggataaaggttatgattcctc

SEQ ID NO: 265943 - DNA, 21 bp, Artificial sequence
  SiRNA target sequence
gataaaggttatgattcctct

SEQ ID NO: 265944 - DNA, 21 bp, Artificial sequence
  SiRNA target sequence
ataaaggttatgattcctctc

SEQ ID NO: 265945 - DNA, 21 bp, Artificial sequence
  SiRNA target sequence
taaaggttatgattcctctct

SEQ ID NO: 265946 - DNA, 21 bp, Artificial sequence
  SiRNA target sequence
aaaggttatgattcctctcta

SEQ ID NO: 265947 - DNA, 21 bp, Artificial sequence
  SiRNA target sequence
aaggttatgattcctctctaa

SEQ ID NO: 265948 - DNA, 21 bp, Artificial sequence
  SiRNA target sequence
aggttatgattcctctctaat

SEQ ID NO: 265949 - DNA, 21 bp, Artificial sequence
  SiRNA target sequence
ggttatgattcctctctaatg

SEQ ID NO: 265950 - DNA, 21 bp, Artificial sequence
  SiRNA target sequence
gttatgattcctctctaatgt

SEQ ID NO: 265951 - DNA, 21 bp, Artificial sequence
  SiRNA target sequence
ttatgattcctctctaatgta

SEQ ID NO: 265952 - DNA, 21 bp, Artificial sequence
  SiRNA target sequence
tatgattcctctctaatgtat

SEQ ID NO: 265953 - DNA, 21 bp, Artificial sequence
  SiRNA target sequence
atgattcctctctaatgtatt

SEQ ID NO: 265954 - DNA, 21 bp, Artificial sequence
  SiRNA target sequence
tgattcctctctaatgtattt

SEQ ID NO: 265955 - DNA, 21 bp, Artificial sequence
  SiRNA target sequence
gattcctctctaatgtatttt

SEQ ID NO: 265956 - DNA, 21 bp, Artificial sequence
  SiRNA target sequence
attcctctctaatgtattttt

SEQ ID NO: 265957 - DNA, 21 bp, Artificial sequence
  SiRNA target sequence
ttcctctctaatgtatttttc

SEQ ID NO: 265958 - DNA, 21 bp, Artificial sequence
  SiRNA target sequence
tcctctctaatgtatttttca

SEQ ID NO: 265959 - DNA, 21 bp, Artificial sequence
  SiRNA target sequence
cctctctaatgtatttttcaa

SEQ ID NO: 265960 - DNA, 21 bp, Artificial sequence
  SiRNA target sequence
ctctctaatgtatttttcaaa

SEQ ID NO: 265961 - DNA, 21 bp, Artificial sequence
  SiRNA target sequence
tctctaatgtatttttcaaat

SEQ ID NO: 265962 - DNA, 21 bp, Artificial sequence
  SiRNA target sequence
ctctaatgtatttttcaaata

SEQ ID NO: 265963 - DNA, 21 bp, Artificial sequence
  SiRNA target sequence
tctaatgtatttttcaaatac

SEQ ID NO: 265964 - DNA, 21 bp, Artificial sequence
  SiRNA target sequence
ctaatgtatttttcaaataca

SEQ ID NO: 265965 - DNA, 21 bp, Artificial sequence
  SiRNA target sequence
taatgtatttttcaaatacag

SEQ ID NO: 265966 - DNA, 21 bp, Artificial sequence
  SiRNA target sequence
aatgtatttttcaaatacagc

SEQ ID NO: 265967 - DNA, 21 bp, Artificial sequence
  SiRNA target sequence
atgtatttttcaaatacagca

SEQ ID NO: 265968 - DNA, 21 bp, Artificial sequence
  SiRNA target sequence
tgtatttttcaaatacagcaa

SEQ ID NO: 265969 - DNA, 21 bp, Artificial sequence
  SiRNA target sequence
gtatttttcaaatacagcaac

SEQ ID NO: 265970 - DNA, 21 bp, Artificial sequence
  SiRNA target sequence
tatttttcaaatacagcaaca

SEQ ID NO: 265971 - DNA, 21 bp, Artificial sequence
  SiRNA target sequence
atttttcaaatacagcaacaa

SEQ ID NO: 265972 - DNA, 21 bp, Artificial sequence
  SiRNA target sequence
tttttcaaatacagcaacaac

SEQ ID NO: 265973 - DNA, 21 bp, Artificial sequence
  SiRNA target sequence
ttttcaaatacagcaacaact

SEQ ID NO: 265974 - DNA, 21 bp, Artificial sequence
  SiRNA target sequence
tttcaaatacagcaacaactc

SEQ ID NO: 265975 - DNA, 21 bp, Artificial sequence
  SiRNA target sequence
ttcaaatacagcaacaactca

SEQ ID NO: 265976 - DNA, 21 bp, Artificial sequence
  SiRNA target sequence
tcaaatacagcaacaactcaa

SEQ ID NO: 265977 - DNA, 21 bp, Artificial sequence
  SiRNA target sequence
caaatacagcaacaactcaaa

SEQ ID NO: 265978 - DNA, 21 bp, Artificial sequence
  SiRNA target sequence
aaatacagcaacaactcaaat

SEQ ID NO: 265979 - DNA, 21 bp, Artificial sequence
  SiRNA target sequence
aatacagcaacaactcaaatt

SEQ ID NO: 265980 - DNA, 21 bp, Artificial sequence
  SiRNA target sequence
atacagcaacaactcaaattg

SEQ ID NO: 265981 - DNA, 21 bp, Artificial sequence
  SiRNA target sequence
tacagcaacaactcaaattgt

SEQ ID NO: 265982 - DNA, 21 bp, Artificial sequence
  SiRNA target sequence
acagcaacaactcaaattgtt

SEQ ID NO: 265983 - DNA, 21 bp, Artificial sequence
  SiRNA target sequence
cagcaacaactcaaattgttg

SEQ ID NO: 265984 - DNA, 21 bp, Artificial sequence
  SiRNA target sequence
agcaacaactcaaattgttgc

SEQ ID NO: 265985 - DNA, 21 bp, Artificial sequence
  SiRNA target sequence
gcaacaactcaaattgttgcc

SEQ ID NO: 265986 - DNA, 21 bp, Artificial sequence
  SiRNA target sequence
caacaactcaaattgttgcca

SEQ ID NO: 265987 - DNA, 21 bp, Artificial sequence
  SiRNA target sequence
aacaactcaaattgttgccag

SEQ ID NO: 265988 - DNA, 21 bp, Artificial sequence
  SiRNA target sequence
acaactcaaattgttgccaga

SEQ ID NO: 265989 - DNA, 21 bp, Artificial sequence
  SiRNA target sequence
caactcaaattgttgccagag

SEQ ID NO: 265990 - DNA, 21 bp, Artificial sequence
  SiRNA target sequence
aactcaaattgttgccagagc

SEQ ID NO: 265991 - DNA, 21 bp, Artificial sequence
  SiRNA target sequence
actcaaattgttgccagagca

SEQ ID NO: 265992 - DNA, 21 bp, Artificial sequence
  SiRNA target sequence
ctcaaattgttgccagagcag

SEQ ID NO: 265993 - DNA, 21 bp, Artificial sequence
  SiRNA target sequence
tcaaattgttgccagagcagg

SEQ ID NO: 265994 - DNA, 21 bp, Artificial sequence
  SiRNA target sequence
caaattgttgccagagcagga

SEQ ID NO: 265995 - DNA, 21 bp, Artificial sequence
  SiRNA target sequence
aaattgttgccagagcaggaa

SEQ ID NO: 265996 - DNA, 21 bp, Artificial sequence
  SiRNA target sequence
aattgttgccagagcaggaaa

SEQ ID NO: 265997 - DNA, 21 bp, Artificial sequence
  SiRNA target sequence
attgttgccagagcaggaaac

SEQ ID NO: 265998 - DNA, 21 bp, Artificial sequence
  SiRNA target sequence
ttgttgccagagcaggaaacg

SEQ ID NO: 265999 - DNA, 21 bp, Artificial sequence
  SiRNA target sequence
tgttgccagagcaggaaacga

SEQ ID NO: 266000 - DNA, 21 bp, Artificial sequence
  SiRNA target sequence
gttgccagagcaggaaacgat

SEQ ID NO: 266001 - DNA, 21 bp, Artificial sequence
  SiRNA target sequence
ttgccagagcaggaaacgatg

SEQ ID NO: 266002 - DNA, 21 bp, Artificial sequence
  SiRNA target sequence
tgccagagcaggaaacgatga

SEQ ID NO: 266003 - DNA, 21 bp, Artificial sequence
  SiRNA target sequence
gccagagcaggaaacgatgac

SEQ ID NO: 266004 - DNA, 21 bp, Artificial sequence
  SiRNA target sequence
ccagagcaggaaacgatgact

SEQ ID NO: 266005 - DNA, 21 bp, Artificial sequence
  SiRNA target sequence
cagagcaggaaacgatgactt

SEQ ID NO: 266006 - DNA, 21 bp, Artificial sequence
  SiRNA target sequence
agagcaggaaacgatgacttt

SEQ ID NO: 266007 - DNA, 21 bp, Artificial sequence
  SiRNA target sequence
gagcaggaaacgatgacttta

SEQ ID NO: 266008 - DNA, 21 bp, Artificial sequence
  SiRNA target sequence
agcaggaaacgatgactttac

SEQ ID NO: 266009 - DNA, 21 bp, Artificial sequence
  SiRNA target sequence
gcaggaaacgatgactttacc

SEQ ID NO: 266010 - DNA, 21 bp, Artificial sequence
  SiRNA target sequence
caggaaacgatgactttacct

SEQ ID NO: 266011 - DNA, 21 bp, Artificial sequence
  SiRNA target sequence
aggaaacgatgactttacctt

SEQ ID NO: 266012 - DNA, 21 bp, Artificial sequence
  SiRNA target sequence
ggaaacgatgactttaccttt

SEQ ID NO: 266013 - DNA, 21 bp, Artificial sequence
  SiRNA target sequence
gaaacgatgactttacctttg

SEQ ID NO: 266014 - DNA, 21 bp, Artificial sequence
  SiRNA target sequence
aaacgatgactttacctttgg

SEQ ID NO: 266015 - DNA, 21 bp, Artificial sequence
  SiRNA target sequence
aacgatgactttacctttggt

SEQ ID NO: 266016 - DNA, 21 bp, Artificial sequence
  SiRNA target sequence
acgatgactttacctttggtt

SEQ ID NO: 266017 - DNA, 21 bp, Artificial sequence
  SiRNA target sequence
cgatgactttacctttggttg

SEQ ID NO: 266018 - DNA, 21 bp, Artificial sequence
  SiRNA target sequence
gatgactttacctttggttgg

SEQ ID NO: 266019 - DNA, 21 bp, Artificial sequence
  SiRNA target sequence
atgactttacctttggttgga

SEQ ID NO: 266020 - DNA, 21 bp, Artificial sequence
  SiRNA target sequence
tgactttacctttggttggat

SEQ ID NO: 266021 - DNA, 21 bp, Artificial sequence
  SiRNA target sequence
gactttacctttggttggatg

SEQ ID NO: 266022 - DNA, 21 bp, Artificial sequence
  SiRNA target sequence
actttacctttggttggatga

SEQ ID NO: 266023 - DNA, 21 bp, Artificial sequence
  SiRNA target sequence
ctttacctttggttggatgat

SEQ ID NO: 266024 - DNA, 21 bp, Artificial sequence
  SiRNA target sequence
tttacctttggttggatgata

SEQ ID NO: 266025 - DNA, 21 bp, Artificial sequence
  SiRNA target sequence
ttacctttggttggatgatag

SEQ ID NO: 266026 - DNA, 21 bp, Artificial sequence
  SiRNA target sequence
tacctttggttggatgatagg

SEQ ID NO: 266027 - DNA, 21 bp, Artificial sequence
  SiRNA target sequence
acctttggttggatgataggt

SEQ ID NO: 266028 - DNA, 21 bp, Artificial sequence
  SiRNA target sequence
cctttggttggatgataggtc

SEQ ID NO: 266029 - DNA, 21 bp, Artificial sequence
  SiRNA target sequence
ctttggttggatgataggtcc

SEQ ID NO: 266030 - DNA, 21 bp, Artificial sequence
  SiRNA target sequence
tttggttggatgataggtcca

SEQ ID NO: 266031 - DNA, 21 bp, Artificial sequence
  SiRNA target sequence
ttggttggatgataggtccac

SEQ ID NO: 266032 - DNA, 21 bp, Artificial sequence
  SiRNA target sequence
tggttggatgataggtccacc

SEQ ID NO: 266033 - DNA, 21 bp, Artificial sequence
  SiRNA target sequence
ggttggatgataggtccaccc

SEQ ID NO: 266034 - DNA, 21 bp, Artificial sequence
  SiRNA target sequence
gttggatgataggtccacccc

SEQ ID NO: 266035 - DNA, 21 bp, Artificial sequence
  SiRNA target sequence
ttggatgataggtccacccca

SEQ ID NO: 266036 - DNA, 21 bp, Artificial sequence
  SiRNA target sequence
tggatgataggtccaccccag

SEQ ID NO: 266037 - DNA, 21 bp, Artificial sequence
  SiRNA target sequence
ggatgataggtccaccccagc

SEQ ID NO: 266038 - DNA, 21 bp, Artificial sequence
  SiRNA target sequence
gatgataggtccaccccagct

SEQ ID NO: 266039 - DNA, 21 bp, Artificial sequence
  SiRNA target sequence
atgataggtccaccccagcta

SEQ ID NO: 266040 - DNA, 21 bp, Artificial sequence
  SiRNA target sequence
tgataggtccaccccagctac

SEQ ID NO: 266041 - DNA, 21 bp, Artificial sequence
  SiRNA target sequence
gataggtccaccccagctaca

SEQ ID NO: 266042 - DNA, 21 bp, Artificial sequence
  SiRNA target sequence
ataggtccaccccagctacaa

SEQ ID NO: 266043 - DNA, 21 bp, Artificial sequence
  SiRNA target sequence
taggtccaccccagctacaag

SEQ ID NO: 266044 - DNA, 21 bp, Artificial sequence
  SiRNA target sequence
aggtccaccccagctacaagg

SEQ ID NO: 266045 - DNA, 21 bp, Artificial sequence
  SiRNA target sequence
ggtccaccccagctacaaggc

SEQ ID NO: 266046 - DNA, 21 bp, Artificial sequence
  SiRNA target sequence
gtccaccccagctacaaggcg

SEQ ID NO: 266047 - DNA, 21 bp, Artificial sequence
  SiRNA target sequence
tccaccccagctacaaggcga

SEQ ID NO: 266048 - DNA, 21 bp, Artificial sequence
  SiRNA target sequence
ccaccccagctacaaggcgaa

SEQ ID NO: 266049 - DNA, 21 bp, Artificial sequence
  SiRNA target sequence
caccccagctacaaggcgaat

SEQ ID NO: 266050 - DNA, 21 bp, Artificial sequence
  SiRNA target sequence
accccagctacaaggcgaatc

SEQ ID NO: 266051 - DNA, 21 bp, Artificial sequence
  SiRNA target sequence
ccccagctacaaggcgaatca

SEQ ID NO: 266052 - DNA, 21 bp, Artificial sequence
  SiRNA target sequence
cccagctacaaggcgaatcac

SEQ ID NO: 266053 - DNA, 21 bp, Artificial sequence
  SiRNA target sequence
ccagctacaaggcgaatcacg

SEQ ID NO: 266054 - DNA, 21 bp, Artificial sequence
  SiRNA target sequence
cagctacaaggcgaatcacgc

SEQ ID NO: 266055 - DNA, 21 bp, Artificial sequence
  SiRNA target sequence
agctacaaggcgaatcacgct

SEQ ID NO: 266056 - DNA, 21 bp, Artificial sequence
  SiRNA target sequence
gctacaaggcgaatcacgctc

SEQ ID NO: 266057 - DNA, 21 bp, Artificial sequence
  SiRNA target sequence
ctacaaggcgaatcacgctcc

SEQ ID NO: 266058 - DNA, 21 bp, Artificial sequence
  SiRNA target sequence
tacaaggcgaatcacgctccg

SEQ ID NO: 266059 - DNA, 21 bp, Artificial sequence
  SiRNA target sequence
acaaggcgaatcacgctccgt

SEQ ID NO: 266060 - DNA, 21 bp, Artificial sequence
  SiRNA target sequence
caaggcgaatcacgctccgta

SEQ ID NO: 266061 - DNA, 21 bp, Artificial sequence
  SiRNA target sequence
aaggcgaatcacgctccgtag

SEQ ID NO: 266062 - DNA, 21 bp, Artificial sequence
  SiRNA target sequence
aggcgaatcacgctccgtagc

SEQ ID NO: 266063 - DNA, 21 bp, Artificial sequence
  SiRNA target sequence
ggcgaatcacgctccgtagcc

SEQ ID NO: 266064 - DNA, 21 bp, Artificial sequence
  SiRNA target sequence
gcgaatcacgctccgtagccc

SEQ ID NO: 266065 - DNA, 21 bp, Artificial sequence
  SiRNA target sequence
cgaatcacgctccgtagcccc

SEQ ID NO: 266066 - DNA, 21 bp, Artificial sequence
  SiRNA target sequence
gaatcacgctccgtagccccc

SEQ ID NO: 266067 - DNA, 21 bp, Artificial sequence
  SiRNA target sequence
aatcacgctccgtagccccct

SEQ ID NO: 266068 - DNA, 21 bp, Artificial sequence
  SiRNA target sequence
atcacgctccgtagcccccta

SEQ ID NO: 266069 - DNA, 21 bp, Artificial sequence
  SiRNA target sequence
tcacgctccgtagccccctag

SEQ ID NO: 266070 - DNA, 21 bp, Artificial sequence
  SiRNA target sequence
cacgctccgtagccccctaga

SEQ ID NO: 266071 - DNA, 21 bp, Artificial sequence
  SiRNA target sequence
acgctccgtagccccctagat

SEQ ID NO: 266072 - DNA, 21 bp, Artificial sequence
  SiRNA target sequence
cgctccgtagccccctagatg

SEQ ID NO: 266073 - DNA, 21 bp, Artificial sequence
  SiRNA target sequence
gctccgtagccccctagatgt

SEQ ID NO: 266074 - DNA, 21 bp, Artificial sequence
  SiRNA target sequence
ctccgtagccccctagatgtg

SEQ ID NO: 266075 - DNA, 21 bp, Artificial sequence
  SiRNA target sequence
tccgtagccccctagatgtgc

SEQ ID NO: 266076 - DNA, 21 bp, Artificial sequence
  SiRNA target sequence
ccgtagccccctagatgtgca

SEQ ID NO: 266077 - DNA, 21 bp, Artificial sequence
  SiRNA target sequence
cgtagccccctagatgtgcac

SEQ ID NO: 266078 - DNA, 21 bp, Artificial sequence
  SiRNA target sequence
gtagccccctagatgtgcact

SEQ ID NO: 266079 - DNA, 21 bp, Artificial sequence
  SiRNA target sequence
tagccccctagatgtgcactg

SEQ ID NO: 266080 - DNA, 21 bp, Artificial sequence
  SiRNA target sequence
agccccctagatgtgcactgg

SEQ ID NO: 266081 - DNA, 21 bp, Artificial sequence
  SiRNA target sequence
gccccctagatgtgcactggg

SEQ ID NO: 266082 - DNA, 21 bp, Artificial sequence
  SiRNA target sequence
ccccctagatgtgcactggga

SEQ ID NO: 266083 - DNA, 21 bp, Artificial sequence
  SiRNA target sequence
cccctagatgtgcactgggag

SEQ ID NO: 266084 - DNA, 21 bp, Artificial sequence
  SiRNA target sequence
ccctagatgtgcactgggaga

SEQ ID NO: 266085 - DNA, 21 bp, Artificial sequence
  SiRNA target sequence
cctagatgtgcactgggagac

SEQ ID NO: 266086 - DNA, 21 bp, Artificial sequence
  SiRNA target sequence
ctagatgtgcactgggagaca

SEQ ID NO: 266087 - DNA, 21 bp, Artificial sequence
  SiRNA target sequence
tagatgtgcactgggagacag

SEQ ID NO: 266088 - DNA, 21 bp, Artificial sequence
  SiRNA target sequence
agatgtgcactgggagacaga

SEQ ID NO: 266089 - DNA, 21 bp, Artificial sequence
  SiRNA target sequence
gatgtgcactgggagacagac

SEQ ID NO: 266090 - DNA, 21 bp, Artificial sequence
  SiRNA target sequence
atgtgcactgggagacagaca

SEQ ID NO: 266091 - DNA, 21 bp, Artificial sequence
  SiRNA target sequence
tgtgcactgggagacagacaa

SEQ ID NO: 266092 - DNA, 21 bp, Artificial sequence
  SiRNA target sequence
gtgcactgggagacagacaaa

SEQ ID NO: 266093 - DNA, 21 bp, Artificial sequence
  SiRNA target sequence
tgcactgggagacagacaaat

SEQ ID NO: 266094 - DNA, 21 bp, Artificial sequence
  SiRNA target sequence
gcactgggagacagacaaatc

SEQ ID NO: 266095 - DNA, 21 bp, Artificial sequence
  SiRNA target sequence
cactgggagacagacaaatct

SEQ ID NO: 266096 - DNA, 21 bp, Artificial sequence
  SiRNA target sequence
actgggagacagacaaatctc

SEQ ID NO: 266097 - DNA, 21 bp, Artificial sequence
  SiRNA target sequence
ctgggagacagacaaatctcc

SEQ ID NO: 266098 - DNA, 21 bp, Artificial sequence
  SiRNA target sequence
tgggagacagacaaatctccc

SEQ ID NO: 266099 - DNA, 21 bp, Artificial sequence
  SiRNA target sequence
gggagacagacaaatctccct

SEQ ID NO: 266100 - DNA, 21 bp, Artificial sequence
  SiRNA target sequence
ggagacagacaaatctcccta

SEQ ID NO: 266101 - DNA, 21 bp, Artificial sequence
  SiRNA target sequence
gagacagacaaatctccctat

SEQ ID NO: 266102 - DNA, 21 bp, Artificial sequence
  SiRNA target sequence
agacagacaaatctccctatg

SEQ ID NO: 266103 - DNA, 21 bp, Artificial sequence
  SiRNA target sequence
gacagacaaatctccctatgt

SEQ ID NO: 266104 - DNA, 21 bp, Artificial sequence
  SiRNA target sequence
acagacaaatctccctatgta

SEQ ID NO: 266105 - DNA, 21 bp, Artificial sequence
  SiRNA target sequence
cagacaaatctccctatgtat

SEQ ID NO: 266106 - DNA, 21 bp, Artificial sequence
  SiRNA target sequence
agacaaatctccctatgtatg

SEQ ID NO: 266107 - DNA, 21 bp, Artificial sequence
  SiRNA target sequence
gacaaatctccctatgtatgg

SEQ ID NO: 266108 - DNA, 21 bp, Artificial sequence
  SiRNA target sequence
acaaatctccctatgtatggc

SEQ ID NO: 266109 - DNA, 21 bp, Artificial sequence
  SiRNA target sequence
caaatctccctatgtatggct

SEQ ID NO: 266110 - DNA, 21 bp, Artificial sequence
  SiRNA target sequence
aaatctccctatgtatggcta

SEQ ID NO: 266111 - DNA, 21 bp, Artificial sequence
  SiRNA target sequence
aatctccctatgtatggctat

SEQ ID NO: 266112 - DNA, 21 bp, Artificial sequence
  SiRNA target sequence
atctccctatgtatggctata

SEQ ID NO: 266113 - DNA, 21 bp, Artificial sequence
  SiRNA target sequence
tctccctatgtatggctatag

SEQ ID NO: 266114 - DNA, 21 bp, Artificial sequence
  SiRNA target sequence
ctccctatgtatggctatagt

SEQ ID NO: 266115 - DNA, 21 bp, Artificial sequence
  SiRNA target sequence
tccctatgtatggctatagtc

SEQ ID NO: 266116 - DNA, 21 bp, Artificial sequence
  SiRNA target sequence
ccctatgtatggctatagtct

SEQ ID NO: 266117 - DNA, 21 bp, Artificial sequence
  SiRNA target sequence
cctatgtatggctatagtcta

SEQ ID NO: 266118 - DNA, 21 bp, Artificial sequence
  SiRNA target sequence
ctatgtatggctatagtctaa

SEQ ID NO: 266119 - DNA, 21 bp, Artificial sequence
  SiRNA target sequence
tatgtatggctatagtctaaa

SEQ ID NO: 266120 - DNA, 21 bp, Artificial sequence
  SiRNA target sequence
atgtatggctatagtctaaat

SEQ ID NO: 266121 - DNA, 21 bp, Artificial sequence
  SiRNA target sequence
tgtatggctatagtctaaatt

SEQ ID NO: 266122 - DNA, 21 bp, Artificial sequence
  SiRNA target sequence
gtatggctatagtctaaattt

SEQ ID NO: 266123 - DNA, 21 bp, Artificial sequence
  SiRNA target sequence
tatggctatagtctaaatttt

SEQ ID NO: 266124 - DNA, 21 bp, Artificial sequence
  SiRNA target sequence
atggctatagtctaaattttt

SEQ ID NO: 266125 - DNA, 21 bp, Artificial sequence
  SiRNA target sequence
tggctatagtctaaatttttc

SEQ ID NO: 266126 - DNA, 21 bp, Artificial sequence
  SiRNA target sequence
ggctatagtctaaatttttca

SEQ ID NO: 266127 - DNA, 21 bp, Artificial sequence
  SiRNA target sequence
gctatagtctaaatttttcac

SEQ ID NO: 266128 - DNA, 21 bp, Artificial sequence
  SiRNA target sequence
ctatagtctaaatttttcaca

SEQ ID NO: 266129 - DNA, 21 bp, Artificial sequence
  SiRNA target sequence
tatagtctaaatttttcacaa

SEQ ID NO: 266130 - DNA, 21 bp, Artificial sequence
  SiRNA target sequence
atagtctaaatttttcacaaa

SEQ ID NO: 266131 - DNA, 21 bp, Artificial sequence
  SiRNA target sequence
tagtctaaatttttcacaaaa

SEQ ID NO: 266132 - DNA, 21 bp, Artificial sequence
  SiRNA target sequence
agtctaaatttttcacaaaat

SEQ ID NO: 266133 - DNA, 21 bp, Artificial sequence
  SiRNA target sequence
gtctaaatttttcacaaaatt

SEQ ID NO: 266134 - DNA, 21 bp, Artificial sequence
  SiRNA target sequence
tctaaatttttcacaaaattt

SEQ ID NO: 266135 - DNA, 21 bp, Artificial sequence
  SiRNA target sequence
ctaaatttttcacaaaatttc

SEQ ID NO: 266136 - DNA, 21 bp, Artificial sequence
  SiRNA target sequence
taaatttttcacaaaatttca

SEQ ID NO: 266137 - DNA, 21 bp, Artificial sequence
  SiRNA target sequence
aaatttttcacaaaatttcag

SEQ ID NO: 266138 - DNA, 21 bp, Artificial sequence
  SiRNA target sequence
aatttttcacaaaatttcagt

SEQ ID NO: 266139 - DNA, 21 bp, Artificial sequence
  SiRNA target sequence
atttttcacaaaatttcagtt

SEQ ID NO: 266140 - DNA, 21 bp, Artificial sequence
  SiRNA target sequence
tttttcacaaaatttcagttt

SEQ ID NO: 266141 - DNA, 21 bp, Artificial sequence
  SiRNA target sequence
ttttcacaaaatttcagttta

SEQ ID NO: 266142 - DNA, 21 bp, Artificial sequence
  SiRNA target sequence
tttcacaaaatttcagtttag

SEQ ID NO: 266143 - DNA, 21 bp, Artificial sequence
  SiRNA target sequence
ttcacaaaatttcagtttaga

SEQ ID NO: 266144 - DNA, 21 bp, Artificial sequence
  SiRNA target sequence
tcacaaaatttcagtttagac

SEQ ID NO: 266145 - DNA, 21 bp, Artificial sequence
  SiRNA target sequence
cacaaaatttcagtttagacc

SEQ ID NO: 266146 - DNA, 21 bp, Artificial sequence
  SiRNA target sequence
acaaaatttcagtttagaccg

SEQ ID NO: 266147 - DNA, 21 bp, Artificial sequence
  SiRNA target sequence
caaaatttcagtttagaccga

SEQ ID NO: 266148 - DNA, 21 bp, Artificial sequence
  SiRNA target sequence
aaaatttcagtttagaccgaa

SEQ ID NO: 266149 - DNA, 21 bp, Artificial sequence
  SiRNA target sequence
aaatttcagtttagaccgaaa

SEQ ID NO: 266150 - DNA, 21 bp, Artificial sequence
  SiRNA target sequence
aatttcagtttagaccgaaaa

SEQ ID NO: 266151 - DNA, 21 bp, Artificial sequence
  SiRNA target sequence
atttcagtttagaccgaaaac

SEQ ID NO: 266152 - DNA, 21 bp, Artificial sequence
  SiRNA target sequence
tttcagtttagaccgaaaacc

SEQ ID NO: 266153 - DNA, 21 bp, Artificial sequence
  SiRNA target sequence
ttcagtttagaccgaaaaccg

SEQ ID NO: 266154 - DNA, 21 bp, Artificial sequence
  SiRNA target sequence
tcagtttagaccgaaaaccga

SEQ ID NO: 266155 - DNA, 21 bp, Artificial sequence
  SiRNA target sequence
cagtttagaccgaaaaccgac

SEQ ID NO: 266156 - DNA, 21 bp, Artificial sequence
  SiRNA target sequence
agtttagaccgaaaaccgaca

SEQ ID NO: 266157 - DNA, 21 bp, Artificial sequence
  SiRNA target sequence
gtttagaccgaaaaccgacac

SEQ ID NO: 266158 - DNA, 21 bp, Artificial sequence
  SiRNA target sequence
tttagaccgaaaaccgacact

SEQ ID NO: 266159 - DNA, 21 bp, Artificial sequence
  SiRNA target sequence
ttagaccgaaaaccgacactt

SEQ ID NO: 266160 - DNA, 21 bp, Artificial sequence
  SiRNA target sequence
tagaccgaaaaccgacacttg

SEQ ID NO: 266161 - DNA, 21 bp, Artificial sequence
  SiRNA target sequence
agaccgaaaaccgacacttga

SEQ ID NO: 266162 - DNA, 21 bp, Artificial sequence
  SiRNA target sequence
gaccgaaaaccgacacttgaa

SEQ ID NO: 266163 - DNA, 21 bp, Artificial sequence
  SiRNA target sequence
accgaaaaccgacacttgaac

SEQ ID NO: 266164 - DNA, 21 bp, Artificial sequence
  SiRNA target sequence
ccgaaaaccgacacttgaact

SEQ ID NO: 266165 - DNA, 21 bp, Artificial sequence
  SiRNA target sequence
cgaaaaccgacacttgaactg

SEQ ID NO: 266166 - DNA, 21 bp, Artificial sequence
  SiRNA target sequence
gaaaaccgacacttgaactgg

SEQ ID NO: 266167 - DNA, 21 bp, Artificial sequence
  SiRNA target sequence
aaaaccgacacttgaactgga

SEQ ID NO: 266168 - DNA, 21 bp, Artificial sequence
  SiRNA target sequence
aaaccgacacttgaactggat

SEQ ID NO: 266169 - DNA, 21 bp, Artificial sequence
  SiRNA target sequence
aaccgacacttgaactggata

SEQ ID NO: 266170 - DNA, 21 bp, Artificial sequence
  SiRNA target sequence
accgacacttgaactggatat

SEQ ID NO: 266171 - DNA, 21 bp, Artificial sequence
  SiRNA target sequence
ccgacacttgaactggatata

SEQ ID NO: 266172 - DNA, 21 bp, Artificial sequence
  SiRNA target sequence
cgacacttgaactggatatag

SEQ ID NO: 266173 - DNA, 21 bp, Artificial sequence
  SiRNA target sequence
gacacttgaactggatatagt

SEQ ID NO: 266174 - DNA, 21 bp, Artificial sequence
  SiRNA target sequence
acacttgaactggatatagta

SEQ ID NO: 266175 - DNA, 21 bp, Artificial sequence
  SiRNA target sequence
cacttgaactggatatagtac

SEQ ID NO: 266176 - DNA, 21 bp, Artificial sequence
  SiRNA target sequence
acttgaactggatatagtaca

SEQ ID NO: 266177 - DNA, 21 bp, Artificial sequence
  SiRNA target sequence
cttgaactggatatagtacat

SEQ ID NO: 266178 - DNA, 21 bp, Artificial sequence
  SiRNA target sequence
ttgaactggatatagtacatt

SEQ ID NO: 266179 - DNA, 21 bp, Artificial sequence
  SiRNA target sequence
tgaactggatatagtacatta

SEQ ID NO: 266180 - DNA, 21 bp, Artificial sequence
  SiRNA target sequence
gaactggatatagtacattaa

SEQ ID NO: 266181 - DNA, 21 bp, Artificial sequence
  SiRNA target sequence
aactggatatagtacattaat

SEQ ID NO: 266182 - DNA, 21 bp, Artificial sequence
  SiRNA target sequence
actggatatagtacattaatg

SEQ ID NO: 266183 - DNA, 21 bp, Artificial sequence
  SiRNA target sequence
ctggatatagtacattaatgt

SEQ ID NO: 266184 - DNA, 21 bp, Artificial sequence
  SiRNA target sequence
tggatatagtacattaatgtc

SEQ ID NO: 266185 - DNA, 21 bp, Artificial sequence
  SiRNA target sequence
ggatatagtacattaatgtcc

SEQ ID NO: 266186 - DNA, 21 bp, Artificial sequence
  SiRNA target sequence
gatatagtacattaatgtcct

SEQ ID NO: 266187 - DNA, 21 bp, Artificial sequence
  SiRNA target sequence
atatagtacattaatgtcctg

SEQ ID NO: 266188 - DNA, 21 bp, Artificial sequence
  SiRNA target sequence
tatagtacattaatgtcctgc

SEQ ID NO: 266189 - DNA, 21 bp, Artificial sequence
  SiRNA target sequence
atagtacattaatgtcctgca

SEQ ID NO: 266190 - DNA, 21 bp, Artificial sequence
  SiRNA target sequence
tagtacattaatgtcctgcag

SEQ ID NO: 266191 - DNA, 21 bp, Artificial sequence
  SiRNA target sequence
agtacattaatgtcctgcagc

SEQ ID NO: 266192 - DNA, 21 bp, Artificial sequence
  SiRNA target sequence
gtacattaatgtcctgcagct

SEQ ID NO: 266193 - DNA, 21 bp, Artificial sequence
  SiRNA target sequence
tacattaatgtcctgcagcta

SEQ ID NO: 266194 - DNA, 21 bp, Artificial sequence
  SiRNA target sequence
acattaatgtcctgcagctaa

SEQ ID NO: 266195 - DNA, 21 bp, Artificial sequence
  SiRNA target sequence
cattaatgtcctgcagctaac

SEQ ID NO: 266196 - DNA, 21 bp, Artificial sequence
  SiRNA target sequence
attaatgtcctgcagctaaca

SEQ ID NO: 266197 - DNA, 21 bp, Artificial sequence
  SiRNA target sequence
ttaatgtcctgcagctaacac

SEQ ID NO: 266198 - DNA, 21 bp, Artificial sequence
  SiRNA target sequence
taatgtcctgcagctaacact

SEQ ID NO: 266199 - DNA, 21 bp, Artificial sequence
  SiRNA target sequence
aatgtcctgcagctaacactg

SEQ ID NO: 266200 - DNA, 21 bp, Artificial sequence
  SiRNA target sequence
atgtcctgcagctaacactgt

SEQ ID NO: 266201 - DNA, 21 bp, Artificial sequence
  SiRNA target sequence
tgtcctgcagctaacactgta

SEQ ID NO: 266202 - DNA, 21 bp, Artificial sequence
  SiRNA target sequence
gtcctgcagctaacactgtag

SEQ ID NO: 266203 - DNA, 21 bp, Artificial sequence
  SiRNA target sequence
tcctgcagctaacactgtagt

SEQ ID NO: 266204 - DNA, 21 bp, Artificial sequence
  SiRNA target sequence
cctgcagctaacactgtagtt

SEQ ID NO: 266205 - DNA, 21 bp, Artificial sequence
  SiRNA target sequence
ctgcagctaacactgtagttt

SEQ ID NO: 266206 - DNA, 21 bp, Artificial sequence
  SiRNA target sequence
tgcagctaacactgtagttta

SEQ ID NO: 266207 - DNA, 21 bp, Artificial sequence
  SiRNA target sequence
gcagctaacactgtagtttat

SEQ ID NO: 266208 - DNA, 21 bp, Artificial sequence
  SiRNA target sequence
cagctaacactgtagtttata

SEQ ID NO: 266209 - DNA, 21 bp, Artificial sequence
  SiRNA target sequence
agctaacactgtagtttatat

SEQ ID NO: 266210 - DNA, 21 bp, Artificial sequence
  SiRNA target sequence
gctaacactgtagtttatatc

SEQ ID NO: 266211 - DNA, 21 bp, Artificial sequence
  SiRNA target sequence
ctaacactgtagtttatatct

SEQ ID NO: 266212 - DNA, 21 bp, Artificial sequence
  SiRNA target sequence
taacactgtagtttatatcta

SEQ ID NO: 266213 - DNA, 21 bp, Artificial sequence
  SiRNA target sequence
aacactgtagtttatatctag

SEQ ID NO: 266214 - DNA, 21 bp, Artificial sequence
  SiRNA target sequence
acactgtagtttatatctagg

SEQ ID NO: 266215 - DNA, 21 bp, Artificial sequence
  SiRNA target sequence
cactgtagtttatatctaggt

SEQ ID NO: 266216 - DNA, 21 bp, Artificial sequence
  SiRNA target sequence
actgtagtttatatctaggta

SEQ ID NO: 266217 - DNA, 21 bp, Artificial sequence
  SiRNA target sequence
ctgtagtttatatctaggtag

SEQ ID NO: 266218 - DNA, 21 bp, Artificial sequence
  SiRNA target sequence
tgtagtttatatctaggtaga

SEQ ID NO: 266219 - DNA, 21 bp, Artificial sequence
  SiRNA target sequence
gtagtttatatctaggtagag

SEQ ID NO: 266220 - DNA, 21 bp, Artificial sequence
  SiRNA target sequence
tagtttatatctaggtagagt

SEQ ID NO: 266221 - DNA, 21 bp, Artificial sequence
  SiRNA target sequence
agtttatatctaggtagagtg

SEQ ID NO: 266222 - DNA, 21 bp, Artificial sequence
  SiRNA target sequence
gtttatatctaggtagagtgg

SEQ ID NO: 266223 - DNA, 21 bp, Artificial sequence
  SiRNA target sequence
tttatatctaggtagagtggg

SEQ ID NO: 266224 - DNA, 21 bp, Artificial sequence
  SiRNA target sequence
ttatatctaggtagagtgggc

SEQ ID NO: 266225 - DNA, 21 bp, Artificial sequence
  SiRNA target sequence
tatatctaggtagagtgggca

SEQ ID NO: 266226 - DNA, 21 bp, Artificial sequence
  SiRNA target sequence
atatctaggtagagtgggcaa

SEQ ID NO: 266227 - DNA, 21 bp, Artificial sequence
  SiRNA target sequence
tatctaggtagagtgggcaaa

SEQ ID NO: 266228 - DNA, 21 bp, Artificial sequence
  SiRNA target sequence
atctaggtagagtgggcaaaa

SEQ ID NO: 266229 - DNA, 21 bp, Artificial sequence
  SiRNA target sequence
tctaggtagagtgggcaaaat

SEQ ID NO: 266230 - DNA, 21 bp, Artificial sequence
  SiRNA target sequence
ctaggtagagtgggcaaaatt

SEQ ID NO: 266231 - DNA, 21 bp, Artificial sequence
  SiRNA target sequence
taggtagagtgggcaaaattt

SEQ ID NO: 266232 - DNA, 21 bp, Artificial sequence
  SiRNA target sequence
aggtagagtgggcaaaatttt

SEQ ID NO: 266233 - DNA, 21 bp, Artificial sequence
  SiRNA target sequence
ggtagagtgggcaaaattttc

SEQ ID NO: 266234 - DNA, 21 bp, Artificial sequence
  SiRNA target sequence
gtagagtgggcaaaattttcg

SEQ ID NO: 266235 - DNA, 21 bp, Artificial sequence
  SiRNA target sequence
tagagtgggcaaaattttcga

SEQ ID NO: 266236 - DNA, 21 bp, Artificial sequence
  SiRNA target sequence
agagtgggcaaaattttcgaa

SEQ ID NO: 266237 - DNA, 21 bp, Artificial sequence
  SiRNA target sequence
gagtgggcaaaattttcgaat

SEQ ID NO: 266238 - DNA, 21 bp, Artificial sequence
  SiRNA target sequence
agtgggcaaaattttcgaatt

SEQ ID NO: 266239 - DNA, 21 bp, Artificial sequence
  SiRNA target sequence
gtgggcaaaattttcgaatta

SEQ ID NO: 266240 - DNA, 21 bp, Artificial sequence
  SiRNA target sequence
tgggcaaaattttcgaattag

SEQ ID NO: 266241 - DNA, 21 bp, Artificial sequence
  SiRNA target sequence
gggcaaaattttcgaattagg

SEQ ID NO: 266242 - DNA, 21 bp, Artificial sequence
  SiRNA target sequence
ggcaaaattttcgaattaggt

SEQ ID NO: 266243 - DNA, 21 bp, Artificial sequence
  SiRNA target sequence
gcaaaattttcgaattaggta

SEQ ID NO: 266244 - DNA, 21 bp, Artificial sequence
  SiRNA target sequence
caaaattttcgaattaggtaa

SEQ ID NO: 266245 - DNA, 21 bp, Artificial sequence
  SiRNA target sequence
aaaattttcgaattaggtaaa

SEQ ID NO: 266246 - DNA, 21 bp, Artificial sequence
  SiRNA target sequence
aaattttcgaattaggtaaat

SEQ ID NO: 266247 - DNA, 21 bp, Artificial sequence
  SiRNA target sequence
aattttcgaattaggtaaatt

SEQ ID NO: 266248 - DNA, 21 bp, Artificial sequence
  SiRNA target sequence
attttcgaattaggtaaattt

SEQ ID NO: 266249 - DNA, 21 bp, Artificial sequence
  SiRNA target sequence
ttttcgaattaggtaaattta

SEQ ID NO: 266250 - DNA, 21 bp, Artificial sequence
  SiRNA target sequence
tttcgaattaggtaaatttaa

SEQ ID NO: 266251 - DNA, 21 bp, Artificial sequence
  SiRNA target sequence
ttcgaattaggtaaatttaaa

SEQ ID NO: 266252 - DNA, 21 bp, Artificial sequence
  SiRNA target sequence
tcgaattaggtaaatttaaaa

SEQ ID NO: 266253 - DNA, 21 bp, Artificial sequence
  SiRNA target sequence
cgaattaggtaaatttaaaaa

SEQ ID NO: 266254 - DNA, 21 bp, Artificial sequence
  SiRNA target sequence
gaattaggtaaatttaaaaaa

SEQ ID NO: 266255 - DNA, 21 bp, Artificial sequence
  SiRNA target sequence
aattaggtaaatttaaaaaaa

SEQ ID NO: 266256 - DNA, 21 bp, Artificial sequence
  SiRNA target sequence
attaggtaaatttaaaaaaaa

SEQ ID NO: 266257 - DNA, 21 bp, Artificial sequence
  SiRNA target sequence
ttaggtaaatttaaaaaaaaa

SEQ ID NO: 266258 - DNA, 21 bp, Artificial sequence
  SiRNA target sequence
taggtaaatttaaaaaaaaaa

SEQ ID NO: 266259 - DNA, 21 bp, Artificial sequence
  SiRNA target sequence
aggtaaatttaaaaaaaaaaa

SEQ ID NO: 266260 - DNA, 21 bp, Artificial sequence
  SiRNA target sequence
ggtaaatttaaaaaaaaaaaa

SEQ ID NO: 266261 - DNA, 21 bp, Artificial sequence
  SiRNA target sequence
cgatttatgccttccatagcg

SEQ ID NO: 266262 - DNA, 21 bp, Artificial sequence
  SiRNA target sequence
gatttatgccttccatagcga

SEQ ID NO: 266263 - DNA, 21 bp, Artificial sequence
  SiRNA target sequence
atttatgccttccatagcgaa

SEQ ID NO: 266264 - DNA, 21 bp, Artificial sequence
  SiRNA target sequence
tttatgccttccatagcgaat

SEQ ID NO: 266265 - DNA, 21 bp, Artificial sequence
  SiRNA target sequence
ttatgccttccatagcgaatt

SEQ ID NO: 266266 - DNA, 21 bp, Artificial sequence
  SiRNA target sequence
tatgccttccatagcgaatta

SEQ ID NO: 266267 - DNA, 21 bp, Artificial sequence
  SiRNA target sequence
atgccttccatagcgaattac

SEQ ID NO: 266268 - DNA, 21 bp, Artificial sequence
  SiRNA target sequence
tgccttccatagcgaattacg

SEQ ID NO: 266269 - DNA, 21 bp, Artificial sequence
  SiRNA target sequence
gccttccatagcgaattacgg

SEQ ID NO: 266270 - DNA, 21 bp, Artificial sequence
  SiRNA target sequence
ccttccatagcgaattacggt

SEQ ID NO: 266271 - DNA, 21 bp, Artificial sequence
  SiRNA target sequence
cttccatagcgaattacggtg

SEQ ID NO: 266272 - DNA, 21 bp, Artificial sequence
  SiRNA target sequence
ttccatagcgaattacggtgc

SEQ ID NO: 266273 - DNA, 21 bp, Artificial sequence
  SiRNA target sequence
tccatagcgaattacggtgca

SEQ ID NO: 266274 - DNA, 21 bp, Artificial sequence
  SiRNA target sequence
ccatagcgaattacggtgcaa

SEQ ID NO: 266275 - DNA, 21 bp, Artificial sequence
  SiRNA target sequence
catagcgaattacggtgcaac

SEQ ID NO: 266276 - DNA, 21 bp, Artificial sequence
  SiRNA target sequence
atagcgaattacggtgcaact

SEQ ID NO: 266277 - DNA, 21 bp, Artificial sequence
  SiRNA target sequence
tagcgaattacggtgcaacta

SEQ ID NO: 266278 - DNA, 21 bp, Artificial sequence
  SiRNA target sequence
agcgaattacggtgcaactaa

SEQ ID NO: 266279 - DNA, 21 bp, Artificial sequence
  SiRNA target sequence
gcgaattacggtgcaactaac

SEQ ID NO: 266280 - DNA, 21 bp, Artificial sequence
  SiRNA target sequence
cgaattacggtgcaactaaca

SEQ ID NO: 266281 - DNA, 21 bp, Artificial sequence
  SiRNA target sequence
gaattacggtgcaactaacaa

SEQ ID NO: 266282 - DNA, 21 bp, Artificial sequence
  SiRNA target sequence
aattacggtgcaactaacaat

SEQ ID NO: 266283 - DNA, 21 bp, Artificial sequence
  SiRNA target sequence
attacggtgcaactaacaatt

SEQ ID NO: 266284 - DNA, 21 bp, Artificial sequence
  SiRNA target sequence
ttacggtgcaactaacaattt

SEQ ID NO: 266285 - DNA, 21 bp, Artificial sequence
  SiRNA target sequence
tacggtgcaactaacaatttt

SEQ ID NO: 266286 - DNA, 21 bp, Artificial sequence
  SiRNA target sequence
acggtgcaactaacaatttta

SEQ ID NO: 266287 - DNA, 21 bp, Artificial sequence
  SiRNA target sequence
cggtgcaactaacaattttag

SEQ ID NO: 266288 - DNA, 21 bp, Artificial sequence
  SiRNA target sequence
ggtgcaactaacaattttaga

SEQ ID NO: 266289 - DNA, 21 bp, Artificial sequence
  SiRNA target sequence
gtgcaactaacaattttagat

SEQ ID NO: 266290 - DNA, 21 bp, Artificial sequence
  SiRNA target sequence
tgcaactaacaattttagata

SEQ ID NO: 266291 - DNA, 21 bp, Artificial sequence
  SiRNA target sequence
gcaactaacaattttagatag

SEQ ID NO: 266292 - DNA, 21 bp, Artificial sequence
  SiRNA target sequence
caactaacaattttagatagt

SEQ ID NO: 266293 - DNA, 21 bp, Artificial sequence
  SiRNA target sequence
aactaacaattttagatagta

SEQ ID NO: 266294 - DNA, 21 bp, Artificial sequence
  SiRNA target sequence
actaacaattttagatagtag

SEQ ID NO: 266295 - DNA, 21 bp, Artificial sequence
  SiRNA target sequence
ctaacaattttagatagtagc

SEQ ID NO: 266296 - DNA, 21 bp, Artificial sequence
  SiRNA target sequence
taacaattttagatagtagcc

SEQ ID NO: 266297 - DNA, 21 bp, Artificial sequence
  SiRNA target sequence
aacaattttagatagtagcca

SEQ ID NO: 266298 - DNA, 21 bp, Artificial sequence
  SiRNA target sequence
acaattttagatagtagccat

SEQ ID NO: 266299 - DNA, 21 bp, Artificial sequence
  SiRNA target sequence
caattttagatagtagccatg

SEQ ID NO: 266300 - DNA, 21 bp, Artificial sequence
  SiRNA target sequence
aattttagatagtagccatga

SEQ ID NO: 266301 - DNA, 21 bp, Artificial sequence
  SiRNA target sequence
attttagatagtagccatgaa

SEQ ID NO: 266302 - DNA, 21 bp, Artificial sequence
  SiRNA target sequence
ttttagatagtagccatgaac

SEQ ID NO: 266303 - DNA, 21 bp, Artificial sequence
  SiRNA target sequence
tttagatagtagccatgaaca

SEQ ID NO: 266304 - DNA, 21 bp, Artificial sequence
  SiRNA target sequence
ttagatagtagccatgaacaa

SEQ ID NO: 266305 - DNA, 21 bp, Artificial sequence
  SiRNA target sequence
tagatagtagccatgaacaaa

SEQ ID NO: 266306 - DNA, 21 bp, Artificial sequence
  SiRNA target sequence
agatagtagccatgaacaaac

SEQ ID NO: 266307 - DNA, 21 bp, Artificial sequence
  SiRNA target sequence
gatagtagccatgaacaaaca

SEQ ID NO: 266308 - DNA, 21 bp, Artificial sequence
  SiRNA target sequence
atagtagccatgaacaaacat

SEQ ID NO: 266309 - DNA, 21 bp, Artificial sequence
  SiRNA target sequence
tagtagccatgaacaaacatt

SEQ ID NO: 266310 - DNA, 21 bp, Artificial sequence
  SiRNA target sequence
agtagccatgaacaaacatta

SEQ ID NO: 266311 - DNA, 21 bp, Artificial sequence
  SiRNA target sequence
gtagccatgaacaaacattat

SEQ ID NO: 266312 - DNA, 21 bp, Artificial sequence
  SiRNA target sequence
tagccatgaacaaacattata

SEQ ID NO: 266313 - DNA, 21 bp, Artificial sequence
  SiRNA target sequence
agccatgaacaaacattatag

SEQ ID NO: 266314 - DNA, 21 bp, Artificial sequence
  SiRNA target sequence
gccatgaacaaacattatagt

SEQ ID NO: 266315 - DNA, 21 bp, Artificial sequence
  SiRNA target sequence
ccatgaacaaacattatagta

SEQ ID NO: 266316 - DNA, 21 bp, Artificial sequence
  SiRNA target sequence
catgaacaaacattatagtag

SEQ ID NO: 266317 - DNA, 21 bp, Artificial sequence
  SiRNA target sequence
atgaacaaacattatagtagc

SEQ ID NO: 266318 - DNA, 21 bp, Artificial sequence
  SiRNA target sequence
tgaacaaacattatagtagct

SEQ ID NO: 266319 - DNA, 21 bp, Artificial sequence
  SiRNA target sequence
gaacaaacattatagtagctc

SEQ ID NO: 266320 - DNA, 21 bp, Artificial sequence
  SiRNA target sequence
aacaaacattatagtagctca

SEQ ID NO: 266321 - DNA, 21 bp, Artificial sequence
  SiRNA target sequence
acaaacattatagtagctcac

SEQ ID NO: 266322 - DNA, 21 bp, Artificial sequence
  SiRNA target sequence
caaacattatagtagctcact

SEQ ID NO: 266323 - DNA, 21 bp, Artificial sequence
  SiRNA target sequence
aaacattatagtagctcacta

SEQ ID NO: 266324 - DNA, 21 bp, Artificial sequence
  SiRNA target sequence
aacattatagtagctcactac

SEQ ID NO: 266325 - DNA, 21 bp, Artificial sequence
  SiRNA target sequence
acattatagtagctcactacg

SEQ ID NO: 266326 - DNA, 21 bp, Artificial sequence
  SiRNA target sequence
cattatagtagctcactacgt

SEQ ID NO: 266327 - DNA, 21 bp, Artificial sequence
  SiRNA target sequence
attatagtagctcactacgta

SEQ ID NO: 266328 - DNA, 21 bp, Artificial sequence
  SiRNA target sequence
ttatagtagctcactacgtat

SEQ ID NO: 266329 - DNA, 21 bp, Artificial sequence
  SiRNA target sequence
tatagtagctcactacgtatt

SEQ ID NO: 266330 - DNA, 21 bp, Artificial sequence
  SiRNA target sequence
atagtagctcactacgtattg

SEQ ID NO: 266331 - DNA, 21 bp, Artificial sequence
  SiRNA target sequence
tagtagctcactacgtattga

SEQ ID NO: 266332 - DNA, 21 bp, Artificial sequence
  SiRNA target sequence
agtagctcactacgtattgat

SEQ ID NO: 266333 - DNA, 21 bp, Artificial sequence
  SiRNA target sequence
gtagctcactacgtattgatc

SEQ ID NO: 266334 - DNA, 21 bp, Artificial sequence
  SiRNA target sequence
tagctcactacgtattgatca

SEQ ID NO: 266335 - DNA, 21 bp, Artificial sequence
  SiRNA target sequence
agctcactacgtattgatcat

SEQ ID NO: 266336 - DNA, 21 bp, Artificial sequence
  SiRNA target sequence
gctcactacgtattgatcatt

SEQ ID NO: 266337 - DNA, 21 bp, Artificial sequence
  SiRNA target sequence
ctcactacgtattgatcattt

SEQ ID NO: 266338 - DNA, 21 bp, Artificial sequence
  SiRNA target sequence
tcactacgtattgatcatttt

SEQ ID NO: 266339 - DNA, 21 bp, Artificial sequence
  SiRNA target sequence
cactacgtattgatcattttt

SEQ ID NO: 266340 - DNA, 21 bp, Artificial sequence
  SiRNA target sequence
actacgtattgatcattttta

SEQ ID NO: 266341 - DNA, 21 bp, Artificial sequence
  SiRNA target sequence
ctacgtattgatcatttttat

SEQ ID NO: 266342 - DNA, 21 bp, Artificial sequence
  SiRNA target sequence
tacgtattgatcatttttata

SEQ ID NO: 266343 - DNA, 21 bp, Artificial sequence
  SiRNA target sequence
acgtattgatcatttttataa

SEQ ID NO: 266344 - DNA, 21 bp, Artificial sequence
  SiRNA target sequence
cgtattgatcatttttataat

SEQ ID NO: 266345 - DNA, 21 bp, Artificial sequence
  SiRNA target sequence
gtattgatcatttttataatg

SEQ ID NO: 266346 - DNA, 21 bp, Artificial sequence
  SiRNA target sequence
tattgatcatttttataatga

SEQ ID NO: 266347 - DNA, 21 bp, Artificial sequence
  SiRNA target sequence
attgatcatttttataatgac

SEQ ID NO: 266348 - DNA, 21 bp, Artificial sequence
  SiRNA target sequence
ttgatcatttttataatgact

SEQ ID NO: 266349 - DNA, 21 bp, Artificial sequence
  SiRNA target sequence
tgatcatttttataatgactt

SEQ ID NO: 266350 - DNA, 21 bp, Artificial sequence
  SiRNA target sequence
gatcatttttataatgacttg

SEQ ID NO: 266351 - DNA, 21 bp, Artificial sequence
  SiRNA target sequence
atcatttttataatgacttgc

SEQ ID NO: 266352 - DNA, 21 bp, Artificial sequence
  SiRNA target sequence
tcatttttataatgacttgcg

SEQ ID NO: 266353 - DNA, 21 bp, Artificial sequence
  SiRNA target sequence
catttttataatgacttgcgt

SEQ ID NO: 266354 - DNA, 21 bp, Artificial sequence
  SiRNA target sequence
atttttataatgacttgcgta

SEQ ID NO: 266355 - DNA, 21 bp, Artificial sequence
  SiRNA target sequence
tttttataatgacttgcgtag

SEQ ID NO: 266356 - DNA, 21 bp, Artificial sequence
  SiRNA target sequence
ttttataatgacttgcgtagc

SEQ ID NO: 266357 - DNA, 21 bp, Artificial sequence
  SiRNA target sequence
tttataatgacttgcgtagca

SEQ ID NO: 266358 - DNA, 21 bp, Artificial sequence
  SiRNA target sequence
ttataatgacttgcgtagcat

SEQ ID NO: 266359 - DNA, 21 bp, Artificial sequence
  SiRNA target sequence
tataatgacttgcgtagcatg

SEQ ID NO: 266360 - DNA, 21 bp, Artificial sequence
  SiRNA target sequence
ataatgacttgcgtagcatga

SEQ ID NO: 266361 - DNA, 21 bp, Artificial sequence
  SiRNA target sequence
taatgacttgcgtagcatgaa

SEQ ID NO: 266362 - DNA, 21 bp, Artificial sequence
  SiRNA target sequence
aatgacttgcgtagcatgaag

SEQ ID NO: 266363 - DNA, 21 bp, Artificial sequence
  SiRNA target sequence
atgacttgcgtagcatgaagc

SEQ ID NO: 266364 - DNA, 21 bp, Artificial sequence
  SiRNA target sequence
tgacttgcgtagcatgaagcg

SEQ ID NO: 266365 - DNA, 21 bp, Artificial sequence
  SiRNA target sequence
gacttgcgtagcatgaagcgc

SEQ ID NO: 266366 - DNA, 21 bp, Artificial sequence
  SiRNA target sequence
acttgcgtagcatgaagcgca

SEQ ID NO: 266367 - DNA, 21 bp, Artificial sequence
  SiRNA target sequence
cttgcgtagcatgaagcgcat

SEQ ID NO: 266368 - DNA, 21 bp, Artificial sequence
  SiRNA target sequence
ttgcgtagcatgaagcgcatg

SEQ ID NO: 266369 - DNA, 21 bp, Artificial sequence
  SiRNA target sequence
tgcgtagcatgaagcgcatgc

SEQ ID NO: 266370 - DNA, 21 bp, Artificial sequence
  SiRNA target sequence
gcgtagcatgaagcgcatgct

SEQ ID NO: 266371 - DNA, 21 bp, Artificial sequence
  SiRNA target sequence
cgtagcatgaagcgcatgctt

SEQ ID NO: 266372 - DNA, 21 bp, Artificial sequence
  SiRNA target sequence
gtagcatgaagcgcatgcttg

SEQ ID NO: 266373 - DNA, 21 bp, Artificial sequence
  SiRNA target sequence
tagcatgaagcgcatgcttgt

SEQ ID NO: 266374 - DNA, 21 bp, Artificial sequence
  SiRNA target sequence
agcatgaagcgcatgcttgta

SEQ ID NO: 266375 - DNA, 21 bp, Artificial sequence
  SiRNA target sequence
gcatgaagcgcatgcttgtag

SEQ ID NO: 266376 - DNA, 21 bp, Artificial sequence
  SiRNA target sequence
catgaagcgcatgcttgtagt

SEQ ID NO: 266377 - DNA, 21 bp, Artificial sequence
  SiRNA target sequence
atgaagcgcatgcttgtagtt

SEQ ID NO: 266378 - DNA, 21 bp, Artificial sequence
  SiRNA target sequence
tgaagcgcatgcttgtagttg

SEQ ID NO: 266379 - DNA, 21 bp, Artificial sequence
  SiRNA target sequence
gaagcgcatgcttgtagttgt

SEQ ID NO: 266380 - DNA, 21 bp, Artificial sequence
  SiRNA target sequence
aagcgcatgcttgtagttgta

SEQ ID NO: 266381 - DNA, 21 bp, Artificial sequence
  SiRNA target sequence
agcgcatgcttgtagttgtaa

SEQ ID NO: 266382 - DNA, 21 bp, Artificial sequence
  SiRNA target sequence
gcgcatgcttgtagttgtaac

SEQ ID NO: 266383 - DNA, 21 bp, Artificial sequence
  SiRNA target sequence
cgcatgcttgtagttgtaact

SEQ ID NO: 266384 - DNA, 21 bp, Artificial sequence
  SiRNA target sequence
gcatgcttgtagttgtaacta

SEQ ID NO: 266385 - DNA, 21 bp, Artificial sequence
  SiRNA target sequence
catgcttgtagttgtaactat

SEQ ID NO: 266386 - DNA, 21 bp, Artificial sequence
  SiRNA target sequence
atgcttgtagttgtaactatg

SEQ ID NO: 266387 - DNA, 21 bp, Artificial sequence
  SiRNA target sequence
tgcttgtagttgtaactatgt

SEQ ID NO: 266388 - DNA, 21 bp, Artificial sequence
  SiRNA target sequence
gcttgtagttgtaactatgtt

SEQ ID NO: 266389 - DNA, 21 bp, Artificial sequence
  SiRNA target sequence
cttgtagttgtaactatgtta

SEQ ID NO: 266390 - DNA, 21 bp, Artificial sequence
  SiRNA target sequence
ttgtagttgtaactatgttac

SEQ ID NO: 266391 - DNA, 21 bp, Artificial sequence
  SiRNA target sequence
tgtagttgtaactatgttact

SEQ ID NO: 266392 - DNA, 21 bp, Artificial sequence
  SiRNA target sequence
gtagttgtaactatgttactt

SEQ ID NO: 266393 - DNA, 21 bp, Artificial sequence
  SiRNA target sequence
tagttgtaactatgttacttt

SEQ ID NO: 266394 - DNA, 21 bp, Artificial sequence
  SiRNA target sequence
  misc_feature (21)..(21): n is a, c, g, or t
agttgtaactatgttactttn

SEQ ID NO: 266395 - DNA, 21 bp, Artificial sequence
  SiRNA target sequence
  misc_feature (20)..(20): n is a, c, g, or t
gttgtaactatgttactttnc

SEQ ID NO: 266396 - DNA, 21 bp, Artificial sequence
  SiRNA target sequence
  misc_feature (19)..(19): n is a, c, g, or t
ttgtaactatgttactttnca

SEQ ID NO: 266397 - DNA, 21 bp, Artificial sequence
  SiRNA target sequence
  misc_feature (18)..(18): n is a, c, g, or t
tgtaactatgttactttncaa

SEQ ID NO: 266398 - DNA, 21 bp, Artificial sequence
  SiRNA target sequence
  misc_feature (17)..(17): n is a, c, g, or t
gtaactatgttactttncaag

SEQ ID NO: 266399 - DNA, 21 bp, Artificial sequence
  SiRNA target sequence
  misc_feature (16)..(16): n is a, c, g, or t
taactatgttactttncaagt

SEQ ID NO: 266400 - DNA, 21 bp, Artificial sequence
  SiRNA target sequence
  misc_feature (15)..(15): n is a, c, g, or t
aactatgttactttncaagtt

SEQ ID NO: 266401 - DNA, 21 bp, Artificial sequence
  SiRNA target sequence
  misc_feature (14)..(14): n is a, c, g, or t
actatgttactttncaagttg

SEQ ID NO: 266402 - DNA, 21 bp, Artificial sequence
  SiRNA target sequence
  misc_feature (13)..(13): n is a, c, g, or t
ctatgttactttncaagttgg

SEQ ID NO: 266403 - DNA, 21 bp, Artificial sequence
  SiRNA target sequence
  misc_feature (12)..(12): n is a, c, g, or t
tatgttactttncaagttgga

SEQ ID NO: 266404 - DNA, 21 bp, Artificial sequence
  SiRNA target sequence
  misc_feature (11)..(11): n is a, c, g, or t
atgttactttncaagttggag

SEQ ID NO: 266405 - DNA, 21 bp, Artificial sequence
  SiRNA target sequence
  misc_feature (10)..(10): n is a, c, g, or t
tgttactttncaagttggagt

SEQ ID NO: 266406 - DNA, 21 bp, Artificial sequence
  SiRNA target sequence
  misc_feature (9)..(9): n is a, c, g, or t
gttactttncaagttggagtt

SEQ ID NO: 266407 - DNA, 21 bp, Artificial sequence
  SiRNA target sequence
  misc_feature (8)..(8): n is a, c, g, or t
ttactttncaagttggagttt

SEQ ID NO: 266408 - DNA, 21 bp, Artificial sequence
  SiRNA target sequence
  misc_feature (7)..(7): n is a, c, g, or t
tactttncaagttggagttta

SEQ ID NO: 266409 - DNA, 21 bp, Artificial sequence
  SiRNA target sequence
  misc_feature (6)..(6): n is a, c, g, or t
actttncaagttggagtttac

SEQ ID NO: 266410 - DNA, 21 bp, Artificial sequence
  SiRNA target sequence
  misc_feature (5)..(5): n is a, c, g, or t
ctttncaagttggagtttact

SEQ ID NO: 266411 - DNA, 21 bp, Artificial sequence
  SiRNA target sequence
  misc_feature (4)..(4): n is a, c, g, or t
tttncaagttggagtttacta

SEQ ID NO: 266412 - DNA, 21 bp, Artificial sequence
  SiRNA target sequence
  misc_feature (3)..(3): n is a, c, g, or t
ttncaagttggagtttactat

SEQ ID NO: 266413 - DNA, 21 bp, Artificial sequence
  SiRNA target sequence
  misc_feature (2)..(2): n is a, c, g, or t
  misc_feature (21)..(21): n is a, c, g, or t
tncaagttggagtttactatn

SEQ ID NO: 266414 - DNA, 21 bp, Artificial sequence
  SiRNA target sequence
  misc_feature (1)..(1): n is a, c, g, or t
  misc_feature (20)..(20): n is a, c, g, or t
ncaagttggagtttactatnt

SEQ ID NO: 266415 - DNA, 21 bp, Artificial sequence
  SiRNA target sequence
  misc_feature (19)..(19): n is a, c, g, or t
caagttggagtttactatntt

SEQ ID NO: 266416 - DNA, 21 bp, Artificial sequence
  SiRNA target sequence
  misc_feature (18)..(18): n is a, c, g, or t
aagttggagtttactatnttg

SEQ ID NO: 266417 - DNA, 21 bp, Artificial sequence
  SiRNA target sequence
  misc_feature (17)..(17): n is a, c, g, or t
agttggagtttactatnttgg

SEQ ID NO: 266418 - DNA, 21 bp, Artificial sequence
  SiRNA target sequence
  misc_feature (16)..(16): n is a, c, g, or t
gttggagtttactatnttgga

SEQ ID NO: 266419 - DNA, 21 bp, Artificial sequence
  SiRNA target sequence
  misc_feature (15)..(15): n is a, c, g, or t
ttggagtttactatnttggat

SEQ ID NO: 266420 - DNA, 21 bp, Artificial sequence
  SiRNA target sequence
  misc_feature (14)..(14): n is a, c, g, or t
tggagtttactatnttggatt

SEQ ID NO: 266421 - DNA, 21 bp, Artificial sequence
  SiRNA target sequence
  misc_feature (13)..(13): n is a, c, g, or t
ggagtttactatnttggatta

SEQ ID NO: 266422 - DNA, 21 bp, Artificial sequence
  SiRNA target sequence
  misc_feature (12)..(12): n is a, c, g, or t
gagtttactatnttggattat

SEQ ID NO: 266423 - DNA, 21 bp, Artificial sequence
  SiRNA target sequence
  misc_feature (11)..(11): n is a, c, g, or t
agtttactatnttggattatg

SEQ ID NO: 266424 - DNA, 21 bp, Artificial sequence
  SiRNA target sequence
  misc_feature (10)..(10): n is a, c, g, or t
gtttactatnttggattatga

SEQ ID NO: 266425 - DNA, 21 bp, Artificial sequence
  SiRNA target sequence
  misc_feature (9)..(9): n is a, c, g, or t
tttactatnttggattatgaa

SEQ ID NO: 266426 - DNA, 21 bp, Artificial sequence
  SiRNA target sequence
  misc_feature (8)..(8): n is a, c, g, or t
ttactatnttggattatgaat

SEQ ID NO: 266427 - DNA, 21 bp, Artificial sequence
  SiRNA target sequence
  misc_feature (7)..(7): n is a, c, g, or t
tactatnttggattatgaata

SEQ ID NO: 266428 - DNA, 21 bp, Artificial sequence
  SiRNA target sequence
  misc_feature (6)..(6): n is a, c, g, or t
actatnttggattatgaatat

SEQ ID NO: 266429 - DNA, 21 bp, Artificial sequence
  SiRNA target sequence
  misc_feature (5)..(5): n is a, c, g, or t
ctatnttggattatgaatatg

SEQ ID NO: 266430 - DNA, 21 bp, Artificial sequence
  SiRNA target sequence
  misc_feature (4)..(4): n is a, c, g, or t
tatnttggattatgaatatgt

SEQ ID NO: 266431 - DNA, 21 bp, Artificial sequence
  SiRNA target sequence
  misc_feature (3)..(3): n is a, c, g, or t
atnttggattatgaatatgtg

SEQ ID NO: 266432 - DNA, 21 bp, Artificial sequence
  SiRNA target sequence
  misc_feature (2)..(2): n is a, c, g, or t
tnttggattatgaatatgtgc

SEQ ID NO: 266433 - DNA, 21 bp, Artificial sequence
  SiRNA target sequence
  misc_feature (1)..(1): n is a, c, g, or t
nttggattatgaatatgtgca

SEQ ID NO: 266434 - DNA, 21 bp, Artificial sequence
  SiRNA target sequence
ttggattatgaatatgtgcac

SEQ ID NO: 266435 - DNA, 21 bp, Artificial sequence
  SiRNA target sequence
tggattatgaatatgtgcact

SEQ ID NO: 266436 - DNA, 21 bp, Artificial sequence
  SiRNA target sequence
ggattatgaatatgtgcactt

SEQ ID NO: 266437 - DNA, 21 bp, Artificial sequence
  SiRNA target sequence
gattatgaatatgtgcactta

SEQ ID NO: 266438 - DNA, 21 bp, Artificial sequence
  SiRNA target sequence
attatgaatatgtgcacttag

SEQ ID NO: 266439 - DNA, 21 bp, Artificial sequence
  SiRNA target sequence
ttatgaatatgtgcacttagt

SEQ ID NO: 266440 - DNA, 21 bp, Artificial sequence
  SiRNA target sequence
tatgaatatgtgcacttagtg

SEQ ID NO: 266441 - DNA, 21 bp, Artificial sequence
  SiRNA target sequence
atgaatatgtgcacttagtgt

SEQ ID NO: 266442 - DNA, 21 bp, Artificial sequence
  SiRNA target sequence
tgaatatgtgcacttagtgtc

SEQ ID NO: 266443 - DNA, 21 bp, Artificial sequence
  SiRNA target sequence
gaatatgtgcacttagtgtct

SEQ ID NO: 266444 - DNA, 21 bp, Artificial sequence
  SiRNA target sequence
aatatgtgcacttagtgtctg

SEQ ID NO: 266445 - DNA, 21 bp, Artificial sequence
  SiRNA target sequence
atatgtgcacttagtgtctgt

SEQ ID NO: 266446 - DNA, 21 bp, Artificial sequence
  SiRNA target sequence
tatgtgcacttagtgtctgta

SEQ ID NO: 266447 - DNA, 21 bp, Artificial sequence
  SiRNA target sequence
atgtgcacttagtgtctgtat

SEQ ID NO: 266448 - DNA, 21 bp, Artificial sequence
  SiRNA target sequence
tgtgcacttagtgtctgtatt

SEQ ID NO: 266449 - DNA, 21 bp, Artificial sequence
  SiRNA target sequence
gtgcacttagtgtctgtattt

SEQ ID NO: 266450 - DNA, 21 bp, Artificial sequence
  SiRNA target sequence
tgcacttagtgtctgtattta

SEQ ID NO: 266451 - DNA, 21 bp, Artificial sequence
  SiRNA target sequence
gcacttagtgtctgtatttat

SEQ ID NO: 266452 - DNA, 21 bp, Artificial sequence
  SiRNA target sequence
cacttagtgtctgtatttata

SEQ ID NO: 266453 - DNA, 21 bp, Artificial sequence
  SiRNA target sequence
acttagtgtctgtatttatag

SEQ ID NO: 266454 - DNA, 21 bp, Artificial sequence
  SiRNA target sequence
cttagtgtctgtatttatagt

SEQ ID NO: 266455 - DNA, 21 bp, Artificial sequence
  SiRNA target sequence
ttagtgtctgtatttatagtc

SEQ ID NO: 266456 - DNA, 21 bp, Artificial sequence
  SiRNA target sequence
tagtgtctgtatttatagtcg

SEQ ID NO: 266457 - DNA, 21 bp, Artificial sequence
  SiRNA target sequence
agtgtctgtatttatagtcgt

SEQ ID NO: 266458 - DNA, 21 bp, Artificial sequence
  SiRNA target sequence
gtgtctgtatttatagtcgtt

SEQ ID NO: 266459 - DNA, 21 bp, Artificial sequence
  SiRNA target sequence
tgtctgtatttatagtcgttt

SEQ ID NO: 266460 - DNA, 21 bp, Artificial sequence
  SiRNA target sequence
gtctgtatttatagtcgtttg

SEQ ID NO: 266461 - DNA, 21 bp, Artificial sequence
  SiRNA target sequence
tctgtatttatagtcgtttgt

SEQ ID NO: 266462 - DNA, 21 bp, Artificial sequence
  SiRNA target sequence
ctgtatttatagtcgtttgtg

SEQ ID NO: 266463 - DNA, 21 bp, Artificial sequence
  SiRNA target sequence
tgtatttatagtcgtttgtgg

SEQ ID NO: 266464 - DNA, 21 bp, Artificial sequence
  SiRNA target sequence
gtatttatagtcgtttgtggt

SEQ ID NO: 266465 - DNA, 21 bp, Artificial sequence
  SiRNA target sequence
tatttatagtcgtttgtggtt

SEQ ID NO: 266466 - DNA, 21 bp, Artificial sequence
  SiRNA target sequence
atttatagtcgtttgtggttc

SEQ ID NO: 266467 - DNA, 21 bp, Artificial sequence
  SiRNA target sequence
tttatagtcgtttgtggttca

SEQ ID NO: 266468 - DNA, 21 bp, Artificial sequence
  SiRNA target sequence
ttatagtcgtttgtggttcaa

SEQ ID NO: 266469 - DNA, 21 bp, Artificial sequence
  SiRNA target sequence
tatagtcgtttgtggttcaag

SEQ ID NO: 266470 - DNA, 21 bp, Artificial sequence
  SiRNA target sequence
atagtcgtttgtggttcaagg

SEQ ID NO: 266471 - DNA, 21 bp, Artificial sequence
  SiRNA target sequence
tagtcgtttgtggttcaaggt

SEQ ID NO: 266472 - DNA, 21 bp, Artificial sequence
  SiRNA target sequence
agtcgtttgtggttcaaggtt

SEQ ID NO: 266473 - DNA, 21 bp, Artificial sequence
  SiRNA target sequence
gtcgtttgtggttcaaggttt

SEQ ID NO: 266474 - DNA, 21 bp, Artificial sequence
  SiRNA target sequence
tcgtttgtggttcaaggtttt

SEQ ID NO: 266475 - DNA, 21 bp, Artificial sequence
  SiRNA target sequence
cgtttgtggttcaaggttttg

SEQ ID NO: 266476 - DNA, 21 bp, Artificial sequence
  SiRNA target sequence
gtttgtggttcaaggttttgt

SEQ ID NO: 266477 - DNA, 21 bp, Artificial sequence
  SiRNA target sequence
tttgtggttcaaggttttgtg

SEQ ID NO: 266478 - DNA, 21 bp, Artificial sequence
  SiRNA target sequence
ttgtggttcaaggttttgtgt

SEQ ID NO: 266479 - DNA, 21 bp, Artificial sequence
  SiRNA target sequence
tgtggttcaaggttttgtgtt

SEQ ID NO: 266480 - DNA, 21 bp, Artificial sequence
  SiRNA target sequence
gtggttcaaggttttgtgtta

SEQ ID NO: 266481 - DNA, 21 bp, Artificial sequence
  SiRNA target sequence
tggttcaaggttttgtgttag

SEQ ID NO: 266482 - DNA, 21 bp, Artificial sequence
  SiRNA target sequence
ggttcaaggttttgtgttagt

SEQ ID NO: 266483 - DNA, 21 bp, Artificial sequence
  SiRNA target sequence
gttcaaggttttgtgttagta

SEQ ID NO: 266484 - DNA, 21 bp, Artificial sequence
  SiRNA target sequence
ttcaaggttttgtgttagtag

SEQ ID NO: 266485 - DNA, 21 bp, Artificial sequence
  SiRNA target sequence
tcaaggttttgtgttagtagt

SEQ ID NO: 266486 - DNA, 21 bp, Artificial sequence
  SiRNA target sequence
caaggttttgtgttagtagta

SEQ ID NO: 266487 - DNA, 21 bp, Artificial sequence
  SiRNA target sequence
aaggttttgtgttagtagtac

SEQ ID NO: 266488 - DNA, 21 bp, Artificial sequence
  SiRNA target sequence
aggttttgtgttagtagtaca

SEQ ID NO: 266489 - DNA, 21 bp, Artificial sequence
  SiRNA target sequence
ggttttgtgttagtagtacac

SEQ ID NO: 266490 - DNA, 21 bp, Artificial sequence
  SiRNA target sequence
gttttgtgttagtagtacact

SEQ ID NO: 266491 - DNA, 21 bp, Artificial sequence
  SiRNA target sequence
ttttgtgttagtagtacactt

SEQ ID NO: 266492 - DNA, 21 bp, Artificial sequence
  SiRNA target sequence
tttgtgttagtagtacactta

SEQ ID NO: 266493 - DNA, 21 bp, Artificial sequence
  SiRNA target sequence
ttgtgttagtagtacacttat

SEQ ID NO: 266494 - DNA, 21 bp, Artificial sequence
  SiRNA target sequence
tgtgttagtagtacacttatg

SEQ ID NO: 266495 - DNA, 21 bp, Artificial sequence
  SiRNA target sequence
gtgttagtagtacacttatgt

SEQ ID NO: 266496 - DNA, 21 bp, Artificial sequence
  SiRNA target sequence
tgttagtagtacacttatgta

SEQ ID NO: 266497 - DNA, 21 bp, Artificial sequence
  SiRNA target sequence
gttagtagtacacttatgtat

SEQ ID NO: 266498 - DNA, 21 bp, Artificial sequence
  SiRNA target sequence
ttagtagtacacttatgtatg

SEQ ID NO: 266499 - DNA, 21 bp, Artificial sequence
  SiRNA target sequence
tagtagtacacttatgtatga

SEQ ID NO: 266500 - DNA, 21 bp, Artificial sequence
  SiRNA target sequence
agtagtacacttatgtatgaa

SEQ ID NO: 266501 - DNA, 21 bp, Artificial sequence
  SiRNA target sequence
gtagtacacttatgtatgaat

SEQ ID NO: 266502 - DNA, 21 bp, Artificial sequence
  SiRNA target sequence
tagtacacttatgtatgaatg

SEQ ID NO: 266503 - DNA, 21 bp, Artificial sequence
  SiRNA target sequence
agtacacttatgtatgaatgt

SEQ ID NO: 266504 - DNA, 21 bp, Artificial sequence
  SiRNA target sequence
gtacacttatgtatgaatgta

SEQ ID NO: 266505 - DNA, 21 bp, Artificial sequence
  SiRNA target sequence
  misc_feature (21)..(21): n is a, c, g, or t
tacacttatgtatgaatgtan

SEQ ID NO: 266506 - DNA, 21 bp, Artificial sequence
  SiRNA target sequence
  misc_feature (20)..(20): n is a, c, g, or t
acacttatgtatgaatgtanc

SEQ ID NO: 266507 - DNA, 21 bp, Artificial sequence
  SiRNA target sequence
  misc_feature (19)..(19): n is a, c, g, or t
cacttatgtatgaatgtanct

SEQ ID NO: 266508 - DNA, 21 bp, Artificial sequence
  SiRNA target sequence
  misc_feature (18)..(18): n is a, c, g, or t
acttatgtatgaatgtanctt

SEQ ID NO: 266509 - DNA, 21 bp, Artificial sequence
  SiRNA target sequence
  misc_feature (17)..(17): n is a, c, g, or t
cttatgtatgaatgtancttt

SEQ ID NO: 266510 - DNA, 21 bp, Artificial sequence
  SiRNA target sequence
  misc_feature (16)..(16): n is a, c, g, or t
ttatgtatgaatgtancttta

SEQ ID NO: 266511 - DNA, 21 bp, Artificial sequence
  SiRNA target sequence
  misc_feature (15)..(15): n is a, c, g, or t
tatgtatgaatgtanctttag

SEQ ID NO: 266512 - DNA, 21 bp, Artificial sequence
  SiRNA target sequence
  misc_feature (14)..(14): n is a, c, g, or t
atgtatgaatgtanctttagt

SEQ ID NO: 266513 - DNA, 21 bp, Artificial sequence
  SiRNA target sequence
  misc_feature (13)..(13): n is a, c, g, or t
tgtatgaatgtanctttagta

SEQ ID NO: 266514 - DNA, 21 bp, Artificial sequence
  SiRNA target sequence
  misc_feature (12)..(12): n is a, c, g, or t
gtatgaatgtanctttagtat

SEQ ID NO: 266515 - DNA, 21 bp, Artificial sequence
  SiRNA target sequence
  misc_feature (11)..(11): n is a, c, g, or t
tatgaatgtanctttagtatg

SEQ ID NO: 266516 - DNA, 21 bp, Artificial sequence
  SiRNA target sequence
  misc_feature (10)..(10): n is a, c, g, or t
atgaatgtanctttagtatga

SEQ ID NO: 266517 - DNA, 21 bp, Artificial sequence
  SiRNA target sequence
  misc_feature (9)..(9): n is a, c, g, or t
tgaatgtanctttagtatgaa

SEQ ID NO: 266518 - DNA, 21 bp, Artificial sequence
  SiRNA target sequence
  misc_feature (8)..(8): n is a, c, g, or t
gaatgtanctttagtatgaat

SEQ ID NO: 266519 - DNA, 21 bp, Artificial sequence
  SiRNA target sequence
  misc_feature (7)..(7): n is a, c, g, or t
aatgtanctttagtatgaatg

SEQ ID NO: 266520 - DNA, 21 bp, Artificial sequence
  SiRNA target sequence
  misc_feature (6)..(6): n is a, c, g, or t
atgtanctttagtatgaatgt

SEQ ID NO: 266521 - DNA, 21 bp, Artificial sequence
  SiRNA target sequence
  misc_feature (5)..(5): n is a, c, g, or t
tgtanctttagtatgaatgtt

SEQ ID NO: 266522 - DNA, 21 bp, Artificial sequence
  SiRNA target sequence
  misc_feature (4)..(4): n is a, c, g, or t
gtanctttagtatgaatgtta

SEQ ID NO: 266523 - DNA, 21 bp, Artificial sequence
  SiRNA target sequence
  misc_feature (3)..(3): n is a, c, g, or t
tanctttagtatgaatgttat

SEQ ID NO: 266524 - DNA, 21 bp, Artificial sequence
  SiRNA target sequence
  misc_feature (2)..(2): n is a, c, g, or t
anctttagtatgaatgttata

SEQ ID NO: 266525 - DNA, 21 bp, Artificial sequence
  SiRNA target sequence
  misc_feature (1)..(1): n is a, c, g, or t
nctttagtatgaatgttatag

SEQ ID NO: 266526 - DNA, 21 bp, Artificial sequence
  SiRNA target sequence
ctttagtatgaatgttataga

SEQ ID NO: 266527 - DNA, 21 bp, Artificial sequence
  SiRNA target sequence
tttagtatgaatgttatagaa

SEQ ID NO: 266528 - DNA, 21 bp, Artificial sequence
  SiRNA target sequence
ttagtatgaatgttatagaat

SEQ ID NO: 266529 - DNA, 21 bp, Artificial sequence
  SiRNA target sequence
tagtatgaatgttatagaatg

SEQ ID NO: 266530 - DNA, 21 bp, Artificial sequence
  SiRNA target sequence
agtatgaatgttatagaatga

SEQ ID NO: 266531 - DNA, 21 bp, Artificial sequence
  SiRNA target sequence
gtatgaatgttatagaatgac

SEQ ID NO: 266532 - DNA, 21 bp, Artificial sequence
  SiRNA target sequence
tatgaatgttatagaatgaca

SEQ ID NO: 266533 - DNA, 21 bp, Artificial sequence
  SiRNA target sequence
atgaatgttatagaatgacaa

SEQ ID NO: 266534 - DNA, 21 bp, Artificial sequence
  SiRNA target sequence
tgaatgttatagaatgacaat

SEQ ID NO: 266535 - DNA, 21 bp, Artificial sequence
  SiRNA target sequence
gaatgttatagaatgacaata

SEQ ID NO: 266536 - DNA, 21 bp, Artificial sequence
  SiRNA target sequence
aatgttatagaatgacaatat

SEQ ID NO: 266537 - DNA, 21 bp, Artificial sequence
  SiRNA target sequence
atgttatagaatgacaatatc

SEQ ID NO: 266538 - DNA, 21 bp, Artificial sequence
  SiRNA target sequence
tgttatagaatgacaatatcg

SEQ ID NO: 266539 - DNA, 21 bp, Artificial sequence
  SiRNA target sequence
gttatagaatgacaatatcga

SEQ ID NO: 266540 - DNA, 21 bp, Artificial sequence
  SiRNA target sequence
ttatagaatgacaatatcgaa

SEQ ID NO: 266541 - DNA, 21 bp, Artificial sequence
  SiRNA target sequence
  misc_feature (21)..(21): n is a, c, g, or t
tatagaatgacaatatcgaan

SEQ ID NO: 266542 - DNA, 21 bp, Artificial sequence
  SiRNA target sequence
  misc_feature (20)..(20): n is a, c, g, or t
atagaatgacaatatcgaang

SEQ ID NO: 266543 - DNA, 21 bp, Artificial sequence
  SiRNA target sequence
  misc_feature (19)..(19): n is a, c, g, or t
tagaatgacaatatcgaanga

SEQ ID NO: 266544 - DNA, 21 bp, Artificial sequence
  SiRNA target sequence
  misc_feature (18)..(18): n is a, c, g, or t
agaatgacaatatcgaangaa

SEQ ID NO: 266545 - DNA, 21 bp, Artificial sequence
  SiRNA target sequence
  misc_feature (17)..(17): n is a, c, g, or t
gaatgacaatatcgaangaaa

SEQ ID NO: 266546 - DNA, 21 bp, Artificial sequence
  SiRNA target sequence
  misc_feature (16)..(16): n is a, c, g, or t
aatgacaatatcgaangaaaa

SEQ ID NO: 266547 - DNA, 21 bp, Artificial sequence
  SiRNA target sequence
  misc_feature (15)..(15): n is a, c, g, or t
atgacaatatcgaangaaaaa

SEQ ID NO: 266548 - DNA, 21 bp, Artificial sequence
  SiRNA target sequence
  misc_feature (14)..(14): n is a, c, g, or t
tgacaatatcgaangaaaaat

SEQ ID NO: 266549 - DNA, 21 bp, Artificial sequence
  SiRNA target sequence
  misc_feature (13)..(13): n is a, c, g, or t
  misc_feature (21)..(21): n is a, c, g, or t
gacaatatcgaangaaaaatn

SEQ ID NO: 266550 - DNA, 21 bp, Artificial sequence
  SiRNA target sequence
  misc_feature (12)..(12): n is a, c, g, or t
  misc_feature (20)..(20): n is a, c, g, or t
acaatatcgaangaaaaatnt

SEQ ID NO: 266551 - DNA, 21 bp, Artificial sequence
  SiRNA target sequence
  misc_feature (11)..(11): n is a, c, g, or t
  misc_feature (19)..(19): n is a, c, g, or t
caatatcgaangaaaaatntt

SEQ ID NO: 266552 - DNA, 21 bp, Artificial sequence
  SiRNA target sequence
  misc_feature (10)..(10): n is a, c, g, or t
  misc_feature (18)..(18): n is a, c, g, or t
aatatcgaangaaaaatnttt

SEQ ID NO: 266553 - DNA, 21 bp, Artificial sequence
  SiRNA target sequence
  misc_feature (9)..(9): n is a, c, g, or t
  misc_feature (17)..(17): n is a, c, g, or t
atatcgaangaaaaatnttta

SEQ ID NO: 266554 - DNA, 21 bp, Artificial sequence
  SiRNA target sequence
  misc_feature (8)..(8): n is a, c, g, or t
  misc_feature (16)..(16): n is a, c, g, or t
tatcgaangaaaaatntttat

SEQ ID NO: 266555 - DNA, 21 bp, Artificial sequence
  SiRNA target sequence
  misc_feature (7)..(7): n is a, c, g, or t
  misc_feature (15)..(15): n is a, c, g, or t
atcgaangaaaaatntttata

SEQ ID NO: 266556 - DNA, 21 bp, Artificial sequence
  SiRNA target sequence
  misc_feature (6)..(6): n is a, c, g, or t
  misc_feature (14)..(14): n is a, c, g, or t
tcgaangaaaaatntttataa

SEQ ID NO: 266557 - DNA, 21 bp, Artificial sequence
  SiRNA target sequence
  misc_feature (5)..(5): n is a, c, g, or t
  misc_feature (13)..(13): n is a, c, g, or t
cgaangaaaaatntttataaa

SEQ ID NO: 266558 - DNA, 21 bp, Artificial sequence
  SiRNA target sequence
  misc_feature (4)..(4): n is a, c, g, or t
  misc_feature (12)..(12): n is a, c, g, or t
gaangaaaaatntttataaaa

SEQ ID NO: 266559 - DNA, 21 bp, Artificial sequence
  SiRNA target sequence
  misc_feature (3)..(3): n is a, c, g, or t
  misc_feature (11)..(11): n is a, c, g, or t
aangaaaaatntttataaaat

SEQ ID NO: 266560 - DNA, 21 bp, Artificial sequence
  SiRNA target sequence
  misc_feature (2)..(2): n is a, c, g, or t
  misc_feature (10)..(10): n is a, c, g, or t
angaaaaatntttataaaata

SEQ ID NO: 266561 - DNA, 21 bp, Artificial sequence
  SiRNA target sequence
  misc_feature (1)..(1): n is a, c, g, or t
  misc_feature (9)..(9): n is a, c, g, or t
ngaaaaatntttataaaatac

SEQ ID NO: 266562 - DNA, 21 bp, Artificial sequence
  SiRNA target sequence
  misc_feature (8)..(8): n is a, c, g, or t
gaaaaatntttataaaataca

SEQ ID NO: 266563 - DNA, 21 bp, Artificial sequence
  SiRNA target sequence
  misc_feature (7)..(7): n is a, c, g, or t
aaaaatntttataaaatacaa

SEQ ID NO: 266564 - DNA, 21 bp, Artificial sequence
  SiRNA target sequence
  misc_feature (6)..(6): n is a, c, g, or t
aaaatntttataaaatacaaa

SEQ ID NO: 266565 - DNA, 21 bp, Artificial sequence
  SiRNA target sequence
  misc_feature (5)..(5): n is a, c, g, or t
aaatntttataaaatacaaaa

SEQ ID NO: 266566 - DNA, 21 bp, Artificial sequence
  SiRNA target sequence
  misc_feature (4)..(4): n is a, c, g, or t
aatntttataaaatacaaaaa

SEQ ID NO: 266567 - DNA, 21 bp, Artificial sequence
  SiRNA target sequence
  misc_feature (3)..(3): n is a, c, g, or t
atntttataaaatacaaaaat

SEQ ID NO: 266568 - DNA, 21 bp, Artificial sequence
  SiRNA target sequence
  misc_feature (2)..(2): n is a, c, g, or t
tntttataaaatacaaaaata

SEQ ID NO: 266569 - DNA, 21 bp, Artificial sequence
  SiRNA target sequence
  misc_feature (1)..(1): n is a, c, g, or t
ntttataaaatacaaaaatat

SEQ ID NO: 266570 - DNA, 21 bp, Artificial sequence
  SiRNA target sequence
tttataaaatacaaaaatatt

SEQ ID NO: 266571 - DNA, 21 bp, Artificial sequence
  SiRNA target sequence
ttataaaatacaaaaatattg

SEQ ID NO: 266572 - DNA, 21 bp, Artificial sequence
  SiRNA target sequence
tataaaatacaaaaatattgt

SEQ ID NO: 266573 - DNA, 21 bp, Artificial sequence
  SiRNA target sequence
ataaaatacaaaaatattgtt

SEQ ID NO: 266574 - DNA, 21 bp, Artificial sequence
  SiRNA target sequence
taaaatacaaaaatattgttt

SEQ ID NO: 266575 - DNA, 21 bp, Artificial sequence
  SiRNA target sequence
aaaatacaaaaatattgtttt

SEQ ID NO: 266576 - DNA, 21 bp, Artificial sequence
  SiRNA target sequence
aaatacaaaaatattgttttt

SEQ ID NO: 266577 - DNA, 21 bp, Artificial sequence
  SiRNA target sequence
aatacaaaaatattgttttta

SEQ ID NO: 266578 - DNA, 21 bp, Artificial sequence
  SiRNA target sequence
atacaaaaatattgtttttat

SEQ ID NO: 266579 - DNA, 21 bp, Artificial sequence
  SiRNA target sequence
tacaaaaatattgtttttatt

SEQ ID NO: 266580 - DNA, 21 bp, Artificial sequence
  SiRNA target sequence
acaaaaatattgtttttatta

SEQ ID NO: 266581 - DNA, 21 bp, Artificial sequence
  SiRNA target sequence
caaaaatattgtttttattat

SEQ ID NO: 266582 - DNA, 21 bp, Artificial sequence
  SiRNA target sequence
aaaaatattgtttttattatt

SEQ ID NO: 266583 - DNA, 21 bp, Artificial sequence
  SiRNA target sequence
aaaatattgtttttattattt

SEQ ID NO: 266584 - DNA, 21 bp, Artificial sequence
  SiRNA target sequence
aaatattgtttttattatttc

SEQ ID NO: 266585 - DNA, 21 bp, Artificial sequence
  SiRNA target sequence
aatattgtttttattatttcg

SEQ ID NO: 266586 - DNA, 21 bp, Artificial sequence
  SiRNA target sequence
atattgtttttattatttcga

SEQ ID NO: 266587 - DNA, 21 bp, Artificial sequence
  SiRNA target sequence
tattgtttttattatttcgat

SEQ ID NO: 266588 - DNA, 21 bp, Artificial sequence
  SiRNA target sequence
attgtttttattatttcgata

SEQ ID NO: 266589 - DNA, 21 bp, Artificial sequence
  SiRNA target sequence
ttgtttttattatttcgatat

SEQ ID NO: 266590 - DNA, 21 bp, Artificial sequence
  SiRNA target sequence
tgtttttattatttcgatatg

SEQ ID NO: 266591 - DNA, 21 bp, Artificial sequence
  SiRNA target sequence
gtttttattatttcgatatgg

SEQ ID NO: 266592 - DNA, 21 bp, Artificial sequence
  SiRNA target sequence
tttttattatttcgatatggt

SEQ ID NO: 266593 - DNA, 21 bp, Artificial sequence
  SiRNA target sequence
ttttattatttcgatatggtg

SEQ ID NO: 266594 - DNA, 21 bp, Artificial sequence
  SiRNA target sequence
tttattatttcgatatggtgt

SEQ ID NO: 266595 - DNA, 21 bp, Artificial sequence
  SiRNA target sequence
ttattatttcgatatggtgtt

SEQ ID NO: 266596 - DNA, 21 bp, Artificial sequence
  SiRNA target sequence
tattatttcgatatggtgttt

SEQ ID NO: 266597 - DNA, 21 bp, Artificial sequence
  SiRNA target sequence
attatttcgatatggtgtttt

SEQ ID NO: 266598 - DNA, 21 bp, Artificial sequence
  SiRNA target sequence
ttatttcgatatggtgtttta

SEQ ID NO: 266599 - DNA, 21 bp, Artificial sequence
  SiRNA target sequence
tatttcgatatggtgttttat

SEQ ID NO: 266600 - DNA, 21 bp, Artificial sequence
  SiRNA target sequence
atttcgatatggtgttttata

SEQ ID NO: 266601 - DNA, 21 bp, Artificial sequence
  SiRNA target sequence
tttcgatatggtgttttatag

SEQ ID NO: 266602 - DNA, 21 bp, Artificial sequence
  SiRNA target sequence
ttcgatatggtgttttataga

SEQ ID NO: 266603 - DNA, 21 bp, Artificial sequence
  SiRNA target sequence
tcgatatggtgttttatagag

SEQ ID NO: 266604 - DNA, 21 bp, Artificial sequence
  SiRNA target sequence
cgatatggtgttttatagagt

SEQ ID NO: 266605 - DNA, 21 bp, Artificial sequence
  SiRNA target sequence
gatatggtgttttatagagta

SEQ ID NO: 266606 - DNA, 21 bp, Artificial sequence
  SiRNA target sequence
atatggtgttttatagagtag

SEQ ID NO: 266607 - DNA, 21 bp, Artificial sequence
  SiRNA target sequence
tatggtgttttatagagtaga

SEQ ID NO: 266608 - DNA, 21 bp, Artificial sequence
  SiRNA target sequence
atggtgttttatagagtagat

SEQ ID NO: 266609 - DNA, 21 bp, Artificial sequence
  SiRNA target sequence
tggtgttttatagagtagatt

SEQ ID NO: 266610 - DNA, 21 bp, Artificial sequence
  SiRNA target sequence
ggtgttttatagagtagattg

SEQ ID NO: 266611 - DNA, 21 bp, Artificial sequence
  SiRNA target sequence
gtgttttatagagtagattgc

SEQ ID NO: 266612 - DNA, 21 bp, Artificial sequence
  SiRNA target sequence
tgttttatagagtagattgcc

SEQ ID NO: 266613 - DNA, 21 bp, Artificial sequence
  SiRNA target sequence
gttttatagagtagattgcca

SEQ ID NO: 266614 - DNA, 21 bp, Artificial sequence
  SiRNA target sequence
ttttatagagtagattgccat

SEQ ID NO: 266615 - DNA, 21 bp, Artificial sequence
  SiRNA target sequence
tttatagagtagattgccatg

SEQ ID NO: 266616 - DNA, 21 bp, Artificial sequence
  SiRNA target sequence
ttatagagtagattgccatgt

SEQ ID NO: 266617 - DNA, 21 bp, Artificial sequence
  SiRNA target sequence
tatagagtagattgccatgtg

SEQ ID NO: 266618 - DNA, 21 bp, Artificial sequence
  SiRNA target sequence
atagagtagattgccatgtga

SEQ ID NO: 266619 - DNA, 21 bp, Artificial sequence
  SiRNA target sequence
tagagtagattgccatgtgac

SEQ ID NO: 266620 - DNA, 21 bp, Artificial sequence
  SiRNA target sequence
agagtagattgccatgtgacc

SEQ ID NO: 266621 - DNA, 21 bp, Artificial sequence
  SiRNA target sequence
gagtagattgccatgtgaccg

SEQ ID NO: 266622 - DNA, 21 bp, Artificial sequence
  SiRNA target sequence
agtagattgccatgtgaccgc

SEQ ID NO: 266623 - DNA, 21 bp, Artificial sequence
  SiRNA target sequence
gtagattgccatgtgaccgct

SEQ ID NO: 266624 - DNA, 21 bp, Artificial sequence
  SiRNA target sequence
tagattgccatgtgaccgctc

SEQ ID NO: 266625 - DNA, 21 bp, Artificial sequence
  SiRNA target sequence
  misc_feature (21)..(21): n is a, c, g, or t
agattgccatgtgaccgctcn

SEQ ID NO: 266626 - DNA, 21 bp, Artificial sequence
  SiRNA target sequence
  misc_feature (20)..(20): n is a, c, g, or t
gattgccatgtgaccgctcnt

SEQ ID NO: 266627 - DNA, 21 bp, Artificial sequence
  SiRNA target sequence
  misc_feature (19)..(19): n is a, c, g, or t
attgccatgtgaccgctcnta

SEQ ID NO: 266628 - DNA, 21 bp, Artificial sequence
  SiRNA target sequence
  misc_feature (18)..(18): n is a, c, g, or t
ttgccatgtgaccgctcntag

SEQ ID NO: 266629 - DNA, 21 bp, Artificial sequence
  SiRNA target sequence
  misc_feature (17)..(17): n is a, c, g, or t
tgccatgtgaccgctcntaga

SEQ ID NO: 266630 - DNA, 21 bp, Artificial sequence
  SiRNA target sequence
  misc_feature (16)..(16): n is a, c, g, or t
gccatgtgaccgctcntagaa

SEQ ID NO: 266631 - DNA, 21 bp, Artificial sequence
  SiRNA target sequence
  misc_feature (15)..(15): n is a, c, g, or t
ccatgtgaccgctcntagaag

SEQ ID NO: 266632 - DNA, 21 bp, Artificial sequence
  SiRNA target sequence
  misc_feature (14)..(14): n is a, c, g, or t
catgtgaccgctcntagaagt

SEQ ID NO: 266633 - DNA, 21 bp, Artificial sequence
  SiRNA target sequence
  misc_feature (13)..(13): n is a, c, g, or t
atgtgaccgctcntagaagtc

SEQ ID NO: 266634 - DNA, 21 bp, Artificial sequence
  SiRNA target sequence
  misc_feature (12)..(12): n is a, c, g, or t
tgtgaccgctcntagaagtcc

SEQ ID NO: 266635 - DNA, 21 bp, Artificial sequence
  SiRNA target sequence
  misc_feature (11)..(11): n is a, c, g, or t
gtgaccgctcntagaagtcca

SEQ ID NO: 266636 - DNA, 21 bp, Artificial sequence
  SiRNA target sequence
  misc_feature (10)..(10): n is a, c, g, or t
tgaccgctcntagaagtccat

SEQ ID NO: 266637 - DNA, 21 bp, Artificial sequence
  SiRNA target sequence
  misc_feature (9)..(9): n is a, c, g, or t
gaccgctcntagaagtccatt

SEQ ID NO: 266638 - DNA, 21 bp, Artificial sequence
  SiRNA target sequence
  misc_feature (8)..(8): n is a, c, g, or t
accgctcntagaagtccatta

SEQ ID NO: 266639 - DNA, 21 bp, Artificial sequence
  SiRNA target sequence
  misc_feature (7)..(7): n is a, c, g, or t
ccgctcntagaagtccattat

SEQ ID NO: 266640 - DNA, 21 bp, Artificial sequence
  SiRNA target sequence
  misc_feature (6)..(6): n is a, c, g, or t
cgctcntagaagtccattatg

SEQ ID NO: 266641 - DNA, 21 bp, Artificial sequence
  SiRNA target sequence
  misc_feature (5)..(5): n is a, c, g, or t
gctcntagaagtccattatgg

SEQ ID NO: 266642 - DNA, 21 bp, Artificial sequence
  SiRNA target sequence
  misc_feature (4)..(4): n is a, c, g, or t
ctcntagaagtccattatggt

SEQ ID NO: 266643 - DNA, 21 bp, Artificial sequence
  SiRNA target sequence
  misc_feature (3)..(3): n is a, c, g, or t
tcntagaagtccattatggtt

SEQ ID NO: 266644 - DNA, 21 bp, Artificial sequence
  SiRNA target sequence
  misc_feature (2)..(2): n is a, c, g, or t
cntagaagtccattatggttt

SEQ ID NO: 266645 - DNA, 21 bp, Artificial sequence
  SiRNA target sequence
  misc_feature (1)..(1): n is a, c, g, or t
ntagaagtccattatggttta

SEQ ID NO: 266646 - DNA, 21 bp, Artificial sequence
  SiRNA target sequence
tagaagtccattatggtttat

SEQ ID NO: 266647 - DNA, 21 bp, Artificial sequence
  SiRNA target sequence
agaagtccattatggtttatc

SEQ ID NO: 266648 - DNA, 21 bp, Artificial sequence
  SiRNA target sequence
gaagtccattatggtttatca

SEQ ID NO: 266649 - DNA, 21 bp, Artificial sequence
  SiRNA target sequence
aagtccattatggtttatcaa

SEQ ID NO: 266650 - DNA, 21 bp, Artificial sequence
  SiRNA target sequence
agtccattatggtttatcaat

SEQ ID NO: 266651 - DNA, 21 bp, Artificial sequence
  SiRNA target sequence
gtccattatggtttatcaatc

SEQ ID NO: 266652 - DNA, 21 bp, Artificial sequence
  SiRNA target sequence
tccattatggtttatcaatcg

SEQ ID NO: 266653 - DNA, 21 bp, Artificial sequence
  SiRNA target sequence
ccattatggtttatcaatcga

SEQ ID NO: 266654 - DNA, 21 bp, Artificial sequence
  SiRNA target sequence
cattatggtttatcaatcgaa

SEQ ID NO: 266655 - DNA, 21 bp, Artificial sequence
  SiRNA target sequence
attatggtttatcaatcgaag

SEQ ID NO: 266656 - DNA, 21 bp, Artificial sequence
  SiRNA target sequence
ttatggtttatcaatcgaagt

SEQ ID NO: 266657 - DNA, 21 bp, Artificial sequence
  SiRNA target sequence
tatggtttatcaatcgaagtt

SEQ ID NO: 266658 - DNA, 21 bp, Artificial sequence
  SiRNA target sequence
atggtttatcaatcgaagttg

SEQ ID NO: 266659 - DNA, 21 bp, Artificial sequence
  SiRNA target sequence
tggtttatcaatcgaagttga

SEQ ID NO: 266660 - DNA, 21 bp, Artificial sequence
  SiRNA target sequence
ggtttatcaatcgaagttgaa

SEQ ID NO: 266661 - DNA, 21 bp, Artificial sequence
  SiRNA target sequence
gtttatcaatcgaagttgaat

SEQ ID NO: 266662 - DNA, 21 bp, Artificial sequence
  SiRNA target sequence
tttatcaatcgaagttgaatg

SEQ ID NO: 266663 - DNA, 21 bp, Artificial sequence
  SiRNA target sequence
ttatcaatcgaagttgaatgt

SEQ ID NO: 266664 - DNA, 21 bp, Artificial sequence
  SiRNA target sequence
tatcaatcgaagttgaatgta

SEQ ID NO: 266665 - DNA, 21 bp, Artificial sequence
  SiRNA target sequence
atcaatcgaagttgaatgtat

SEQ ID NO: 266666 - DNA, 21 bp, Artificial sequence
  SiRNA target sequence
tcaatcgaagttgaatgtatt

SEQ ID NO: 266667 - DNA, 21 bp, Artificial sequence
  SiRNA target sequence
caatcgaagttgaatgtattt

SEQ ID NO: 266668 - DNA, 21 bp, Artificial sequence
  SiRNA target sequence
aatcgaagttgaatgtattta

SEQ ID NO: 266669 - DNA, 21 bp, Artificial sequence
  SiRNA target sequence
atcgaagttgaatgtatttat

SEQ ID NO: 266670 - DNA, 21 bp, Artificial sequence
  SiRNA target sequence
tcgaagttgaatgtatttata

SEQ ID NO: 266671 - DNA, 21 bp, Artificial sequence
  SiRNA target sequence
cgaagttgaatgtatttataa

SEQ ID NO: 266672 - DNA, 21 bp, Artificial sequence
  SiRNA target sequence
gaagttgaatgtatttataag

SEQ ID NO: 266673 - DNA, 21 bp, Artificial sequence
  SiRNA target sequence
  misc_feature (21)..(21): n is a, c, g, or t
aagttgaatgtatttataagn

SEQ ID NO: 266674 - DNA, 21 bp, Artificial sequence
  SiRNA target sequence
  misc_feature (20)..(20): n is a, c, g, or t
agttgaatgtatttataagna

SEQ ID NO: 266675 - DNA, 21 bp, Artificial sequence
  SiRNA target sequence
  misc_feature (19)..(19): n is a, c, g, or t
gttgaatgtatttataagnat

SEQ ID NO: 266676 - DNA, 21 bp, Artificial sequence
  SiRNA target sequence
  misc_feature (18)..(18): n is a, c, g, or t
ttgaatgtatttataagnata

SEQ ID NO: 266677 - DNA, 21 bp, Artificial sequence
  SiRNA target sequence
  misc_feature (17)..(17): n is a, c, g, or t
tgaatgtatttataagnatat

SEQ ID NO: 266678 - DNA, 21 bp, Artificial sequence
  SiRNA target sequence
  misc_feature (16)..(16): n is a, c, g, or t
gaatgtatttataagnatatt

SEQ ID NO: 266679 - DNA, 21 bp, Artificial sequence
  SiRNA target sequence
  misc_feature (15)..(15): n is a, c, g, or t
aatgtatttataagnatatta

SEQ ID NO: 266680 - DNA, 21 bp, Artificial sequence
  SiRNA target sequence
  misc_feature (14)..(14): n is a, c, g, or t
atgtatttataagnatattat

SEQ ID NO: 266681 - DNA, 21 bp, Artificial sequence
  SiRNA target sequence
  misc_feature (13)..(13): n is a, c, g, or t
tgtatttataagnatattata

SEQ ID NO: 266682 - DNA, 21 bp, Artificial sequence
  SiRNA target sequence
  misc_feature (12)..(12): n is a, c, g, or t
gtatttataagnatattatac

SEQ ID NO: 266683 - DNA, 21 bp, Artificial sequence
  SiRNA target sequence
  misc_feature (11)..(11): n is a, c, g, or t
tatttataagnatattatact

SEQ ID NO: 266684 - DNA, 21 bp, Artificial sequence
  SiRNA target sequence
  misc_feature (10)..(10): n is a, c, g, or t
atttataagnatattatactt

SEQ ID NO: 266685 - DNA, 21 bp, Artificial sequence
  SiRNA target sequence
  misc_feature (9)..(9): n is a, c, g, or t
tttataagnatattatactta

SEQ ID NO: 266686 - DNA, 21 bp, Artificial sequence
  SiRNA target sequence
  misc_feature (8)..(8): n is a, c, g, or t
ttataagnatattatacttaa

SEQ ID NO: 266687 - DNA, 21 bp, Artificial sequence
  SiRNA target sequence
  misc_feature (7)..(7): n is a, c, g, or t
tataagnatattatacttaat

SEQ ID NO: 266688 - DNA, 21 bp, Artificial sequence
  SiRNA target sequence
  misc_feature (6)..(6): n is a, c, g, or t
ataagnatattatacttaatt

SEQ ID NO: 266689 - DNA, 21 bp, Artificial sequence
  SiRNA target sequence
  misc_feature (5)..(5): n is a, c, g, or t
taagnatattatacttaatta

SEQ ID NO: 266690 - DNA, 21 bp, Artificial sequence
  SiRNA target sequence
  misc_feature (4)..(4): n is a, c, g, or t
aagnatattatacttaattag

SEQ ID NO: 266691 - DNA, 21 bp, Artificial sequence
  SiRNA target sequence
  misc_feature (3)..(3): n is a, c, g, or t
agnatattatacttaattagt

SEQ ID NO: 266692 - DNA, 21 bp, Artificial sequence
  SiRNA target sequence
  misc_feature (2)..(2): n is a, c, g, or t
gnatattatacttaattagta

SEQ ID NO: 266693 - DNA, 21 bp, Artificial sequence
  SiRNA target sequence
  misc_feature (1)..(1): n is a, c, g, or t
natattatacttaattagtaa

SEQ ID NO: 266694 - DNA, 21 bp, Artificial sequence
  SiRNA target sequence
atattatacttaattagtaat

SEQ ID NO: 266695 - DNA, 21 bp, Artificial sequence
  SiRNA target sequence
tattatacttaattagtaata

SEQ ID NO: 266696 - DNA, 21 bp, Artificial sequence
  SiRNA target sequence
attatacttaattagtaatat

SEQ ID NO: 266697 - DNA, 21 bp, Artificial sequence
  SiRNA target sequence
ttatacttaattagtaatatt

SEQ ID NO: 266698 - DNA, 21 bp, Artificial sequence
  SiRNA target sequence
tatacttaattagtaatatta

SEQ ID NO: 266699 - DNA, 21 bp, Artificial sequence
  SiRNA target sequence
atacttaattagtaatattag

SEQ ID NO: 266700 - DNA, 21 bp, Artificial sequence
  SiRNA target sequence
tacttaattagtaatattagt

SEQ ID NO: 266701 - DNA, 21 bp, Artificial sequence
  SiRNA target sequence
acttaattagtaatattagta

SEQ ID NO: 266702 - DNA, 21 bp, Artificial sequence
  SiRNA target sequence
cttaattagtaatattagtag

SEQ ID NO: 266703 - DNA, 21 bp, Artificial sequence
  SiRNA target sequence
ttaattagtaatattagtagt

SEQ ID NO: 266704 - DNA, 21 bp, Artificial sequence
  SiRNA target sequence
taattagtaatattagtagtc

SEQ ID NO: 266705 - DNA, 21 bp, Artificial sequence
  SiRNA target sequence
aattagtaatattagtagtcc

SEQ ID NO: 266706 - DNA, 21 bp, Artificial sequence
  SiRNA target sequence
attagtaatattagtagtccg

SEQ ID NO: 266707 - DNA, 21 bp, Artificial sequence
  SiRNA target sequence
ttagtaatattagtagtccgt

SEQ ID NO: 266708 - DNA, 21 bp, Artificial sequence
  SiRNA target sequence
tagtaatattagtagtccgta

SEQ ID NO: 266709 - DNA, 21 bp, Artificial sequence
  SiRNA target sequence
agtaatattagtagtccgtaa

SEQ ID NO: 266710 - DNA, 21 bp, Artificial sequence
  SiRNA target sequence
gtaatattagtagtccgtaac

SEQ ID NO: 266711 - DNA, 21 bp, Artificial sequence
  SiRNA target sequence
taatattagtagtccgtaact

SEQ ID NO: 266712 - DNA, 21 bp, Artificial sequence
  SiRNA target sequence
aatattagtagtccgtaacta

SEQ ID NO: 266713 - DNA, 21 bp, Artificial sequence
  SiRNA target sequence
atattagtagtccgtaactat

SEQ ID NO: 266714 - DNA, 21 bp, Artificial sequence
  SiRNA target sequence
tattagtagtccgtaactatt

SEQ ID NO: 266715 - DNA, 21 bp, Artificial sequence
  SiRNA target sequence
attagtagtccgtaactatta

SEQ ID NO: 266716 - DNA, 21 bp, Artificial sequence
  SiRNA target sequence
ttagtagtccgtaactattat

SEQ ID NO: 266717 - DNA, 21 bp, Artificial sequence
  SiRNA target sequence
tagtagtccgtaactattatc

SEQ ID NO: 266718 - DNA, 21 bp, Artificial sequence
  SiRNA target sequence
agtagtccgtaactattatca

SEQ ID NO: 266719 - DNA, 21 bp, Artificial sequence
  SiRNA target sequence
gtagtccgtaactattatcat

SEQ ID NO: 266720 - DNA, 21 bp, Artificial sequence
  SiRNA target sequence
tagtccgtaactattatcatc

SEQ ID NO: 266721 - DNA, 21 bp, Artificial sequence
  SiRNA target sequence
agtccgtaactattatcatcc

SEQ ID NO: 266722 - DNA, 21 bp, Artificial sequence
  SiRNA target sequence
gtccgtaactattatcatcct

SEQ ID NO: 266723 - DNA, 21 bp, Artificial sequence
  SiRNA target sequence
tccgtaactattatcatcctt

SEQ ID NO: 266724 - DNA, 21 bp, Artificial sequence
  SiRNA target sequence
ccgtaactattatcatccttt

SEQ ID NO: 266725 - DNA, 21 bp, Artificial sequence
  SiRNA target sequence
cgtaactattatcatcctttt

SEQ ID NO: 266726 - DNA, 21 bp, Artificial sequence
  SiRNA target sequence
gtaactattatcatccttttt

SEQ ID NO: 266727 - DNA, 21 bp, Artificial sequence
  SiRNA target sequence
taactattatcatcctttttc

SEQ ID NO: 266728 - DNA, 21 bp, Artificial sequence
  SiRNA target sequence
aactattatcatcctttttca

SEQ ID NO: 266729 - DNA, 21 bp, Artificial sequence
  SiRNA target sequence
actattatcatcctttttcag

SEQ ID NO: 266730 - DNA, 21 bp, Artificial sequence
  SiRNA target sequence
ctattatcatcctttttcagt

SEQ ID NO: 266731 - DNA, 21 bp, Artificial sequence
  SiRNA target sequence
tattatcatcctttttcagtt

SEQ ID NO: 266732 - DNA, 21 bp, Artificial sequence
  SiRNA target sequence
attatcatcctttttcagttt

SEQ ID NO: 266733 - DNA, 21 bp, Artificial sequence
  SiRNA target sequence
ttatcatcctttttcagtttg

SEQ ID NO: 266734 - DNA, 21 bp, Artificial sequence
  SiRNA target sequence
tatcatcctttttcagtttga

SEQ ID NO: 266735 - DNA, 21 bp, Artificial sequence
  SiRNA target sequence
atcatcctttttcagtttgat

SEQ ID NO: 266736 - DNA, 21 bp, Artificial sequence
  SiRNA target sequence
tcatcctttttcagtttgatg

SEQ ID NO: 266737 - DNA, 21 bp, Artificial sequence
  SiRNA target sequence
catcctttttcagtttgatgt

SEQ ID NO: 266738 - DNA, 21 bp, Artificial sequence
  SiRNA target sequence
atcctttttcagtttgatgtg

SEQ ID NO: 266739 - DNA, 21 bp, Artificial sequence
  SiRNA target sequence
tcctttttcagtttgatgtga

SEQ ID NO: 266740 - DNA, 21 bp, Artificial sequence
  SiRNA target sequence
cctttttcagtttgatgtgat

SEQ ID NO: 266741 - DNA, 21 bp, Artificial sequence
  SiRNA target sequence
ctttttcagtttgatgtgata

SEQ ID NO: 266742 - DNA, 21 bp, Artificial sequence
  SiRNA target sequence
tttttcagtttgatgtgataa

SEQ ID NO: 266743 - DNA, 21 bp, Artificial sequence
  SiRNA target sequence
ttttcagtttgatgtgataat

SEQ ID NO: 266744 - DNA, 21 bp, Artificial sequence
  SiRNA target sequence
tttcagtttgatgtgataata

SEQ ID NO: 266745 - DNA, 21 bp, Artificial sequence
  SiRNA target sequence
ttcagtttgatgtgataatag

SEQ ID NO: 266746 - DNA, 21 bp, Artificial sequence
  SiRNA target sequence
tcagtttgatgtgataataga

SEQ ID NO: 266747 - DNA, 21 bp, Artificial sequence
  SiRNA target sequence
cagtttgatgtgataatagac

SEQ ID NO: 266748 - DNA, 21 bp, Artificial sequence
  SiRNA target sequence
agtttgatgtgataatagacc

SEQ ID NO: 266749 - DNA, 21 bp, Artificial sequence
  SiRNA target sequence
gtttgatgtgataatagacca

SEQ ID NO: 266750 - DNA, 21 bp, Artificial sequence
  SiRNA target sequence
tttgatgtgataatagaccac

SEQ ID NO: 266751 - DNA, 21 bp, Artificial sequence
  SiRNA target sequence
ttgatgtgataatagaccact

SEQ ID NO: 266752 - DNA, 21 bp, Artificial sequence
  SiRNA target sequence
tgatgtgataatagaccactg

SEQ ID NO: 266753 - DNA, 21 bp, Artificial sequence
  SiRNA target sequence
gatgtgataatagaccactgc

SEQ ID NO: 266754 - DNA, 21 bp, Artificial sequence
  SiRNA target sequence
atgtgataatagaccactgca

SEQ ID NO: 266755 - DNA, 21 bp, Artificial sequence
  SiRNA target sequence
tgtgataatagaccactgcag

SEQ ID NO: 266756 - DNA, 21 bp, Artificial sequence
  SiRNA target sequence
gtgataatagaccactgcagt

SEQ ID NO: 266757 - DNA, 21 bp, Artificial sequence
  SiRNA target sequence
tgataatagaccactgcagta

SEQ ID NO: 266758 - DNA, 21 bp, Artificial sequence
  SiRNA target sequence
gataatagaccactgcagtat

SEQ ID NO: 266759 - DNA, 21 bp, Artificial sequence
  SiRNA target sequence
ataatagaccactgcagtatc

SEQ ID NO: 266760 - DNA, 21 bp, Artificial sequence
  SiRNA target sequence
taatagaccactgcagtatcg

SEQ ID NO: 266761 - DNA, 21 bp, Artificial sequence
  SiRNA target sequence
aatagaccactgcagtatcga

SEQ ID NO: 266762 - DNA, 21 bp, Artificial sequence
  SiRNA target sequence
atagaccactgcagtatcgag

SEQ ID NO: 266763 - DNA, 21 bp, Artificial sequence
  SiRNA target sequence
tagaccactgcagtatcgagt

SEQ ID NO: 266764 - DNA, 21 bp, Artificial sequence
  SiRNA target sequence
agaccactgcagtatcgagta

SEQ ID NO: 266765 - DNA, 21 bp, Artificial sequence
  SiRNA target sequence
gaccactgcagtatcgagtag

SEQ ID NO: 266766 - DNA, 21 bp, Artificial sequence
  SiRNA target sequence
accactgcagtatcgagtaga

SEQ ID NO: 266767 - DNA, 21 bp, Artificial sequence
  SiRNA target sequence
ccactgcagtatcgagtagag

SEQ ID NO: 266768 - DNA, 21 bp, Artificial sequence
  SiRNA target sequence
cactgcagtatcgagtagagt

SEQ ID NO: 266769 - DNA, 21 bp, Artificial sequence
  SiRNA target sequence
actgcagtatcgagtagagtt

SEQ ID NO: 266770 - DNA, 21 bp, Artificial sequence
  SiRNA target sequence
ctgcagtatcgagtagagttt

SEQ ID NO: 266771 - DNA, 21 bp, Artificial sequence
  SiRNA target sequence
tgcagtatcgagtagagtttc

SEQ ID NO: 266772 - DNA, 21 bp, Artificial sequence
  SiRNA target sequence
gcagtatcgagtagagtttcg

SEQ ID NO: 266773 - DNA, 21 bp, Artificial sequence
  SiRNA target sequence
cagtatcgagtagagtttcga

SEQ ID NO: 266774 - DNA, 21 bp, Artificial sequence
  SiRNA target sequence
agtatcgagtagagtttcgaa

SEQ ID NO: 266775 - DNA, 21 bp, Artificial sequence
  SiRNA target sequence
gtatcgagtagagtttcgaat

SEQ ID NO: 266776 - DNA, 21 bp, Artificial sequence
  SiRNA target sequence
tatcgagtagagtttcgaatg

SEQ ID NO: 266777 - DNA, 21 bp, Artificial sequence
  SiRNA target sequence
atcgagtagagtttcgaatgc

SEQ ID NO: 266778 - DNA, 21 bp, Artificial sequence
  SiRNA target sequence
tcgagtagagtttcgaatgcg

SEQ ID NO: 266779 - DNA, 21 bp, Artificial sequence
  SiRNA target sequence
cgagtagagtttcgaatgcgt

SEQ ID NO: 266780 - DNA, 21 bp, Artificial sequence
  SiRNA target sequence
gagtagagtttcgaatgcgta

SEQ ID NO: 266781 - DNA, 21 bp, Artificial sequence
  SiRNA target sequence
agtagagtttcgaatgcgtag

SEQ ID NO: 266782 - DNA, 21 bp, Artificial sequence
  SiRNA target sequence
gtagagtttcgaatgcgtagt

SEQ ID NO: 266783 - DNA, 21 bp, Artificial sequence
  SiRNA target sequence
tagagtttcgaatgcgtagtg

SEQ ID NO: 266784 - DNA, 21 bp, Artificial sequence
  SiRNA target sequence
agagtttcgaatgcgtagtgc

SEQ ID NO: 266785 - DNA, 21 bp, Artificial sequence
  SiRNA target sequence
gagtttcgaatgcgtagtgca

SEQ ID NO: 266786 - DNA, 21 bp, Artificial sequence
  SiRNA target sequence
agtttcgaatgcgtagtgcaa

SEQ ID NO: 266787 - DNA, 21 bp, Artificial sequence
  SiRNA target sequence
gtttcgaatgcgtagtgcaat

SEQ ID NO: 266788 - DNA, 21 bp, Artificial sequence
  SiRNA target sequence
tttcgaatgcgtagtgcaata

SEQ ID NO: 266789 - DNA, 21 bp, Artificial sequence
  SiRNA target sequence
ttcgaatgcgtagtgcaatag

SEQ ID NO: 266790 - DNA, 21 bp, Artificial sequence
  SiRNA target sequence
tcgaatgcgtagtgcaatagt

SEQ ID NO: 266791 - DNA, 21 bp, Artificial sequence
  SiRNA target sequence
cgaatgcgtagtgcaatagta

SEQ ID NO: 266792 - DNA, 21 bp, Artificial sequence
  SiRNA target sequence
gaatgcgtagtgcaatagtat

SEQ ID NO: 266793 - DNA, 21 bp, Artificial sequence
  SiRNA target sequence
aatgcgtagtgcaatagtata

SEQ ID NO: 266794 - DNA, 21 bp, Artificial sequence
  SiRNA target sequence
atgcgtagtgcaatagtataa

SEQ ID NO: 266795 - DNA, 21 bp, Artificial sequence
  SiRNA target sequence
tgcgtagtgcaatagtataat

SEQ ID NO: 266796 - DNA, 21 bp, Artificial sequence
  SiRNA target sequence
  misc_feature (21)..(21): n is a, c, g, or t
gcgtagtgcaatagtataatn

SEQ ID NO: 266797 - DNA, 21 bp, Artificial sequence
  SiRNA target sequence
  misc_feature (20)..(20): n is a, c, g, or t
cgtagtgcaatagtataatna

SEQ ID NO: 266798 - DNA, 21 bp, Artificial sequence
  SiRNA target sequence
  misc_feature (19)..(19): n is a, c, g, or t
gtagtgcaatagtataatnac

SEQ ID NO: 266799 - DNA, 21 bp, Artificial sequence
  SiRNA target sequence
  misc_feature (18)..(18): n is a, c, g, or t
tagtgcaatagtataatnact

SEQ ID NO: 266800 - DNA, 21 bp, Artificial sequence
  SiRNA target sequence
  misc_feature (17)..(17): n is a, c, g, or t
agtgcaatagtataatnactg

SEQ ID NO: 266801 - DNA, 21 bp, Artificial sequence
  SiRNA target sequence
  misc_feature (16)..(16): n is a, c, g, or t
gtgcaatagtataatnactgt

SEQ ID NO: 266802 - DNA, 21 bp, Artificial sequence
  SiRNA target sequence
  misc_feature (15)..(15): n is a, c, g, or t
tgcaatagtataatnactgtc

SEQ ID NO: 266803 - DNA, 21 bp, Artificial sequence
  SiRNA target sequence
  misc_feature (14)..(14): n is a, c, g, or t
gcaatagtataatnactgtca

SEQ ID NO: 266804 - DNA, 21 bp, Artificial sequence
  SiRNA target sequence
  misc_feature (13)..(13): n is a, c, g, or t
caatagtataatnactgtcac

SEQ ID NO: 266805 - DNA, 21 bp, Artificial sequence
  SiRNA target sequence
  misc_feature (12)..(12): n is a, c, g, or t
aatagtataatnactgtcacc

SEQ ID NO: 266806 - DNA, 21 bp, Artificial sequence
  SiRNA target sequence
  misc_feature (11)..(11): n is a, c, g, or t
atagtataatnactgtcaccg

SEQ ID NO: 266807 - DNA, 21 bp, Artificial sequence
  SiRNA target sequence
  misc_feature (10)..(10): n is a, c, g, or t
tagtataatnactgtcaccga

SEQ ID NO: 266808 - DNA, 21 bp, Artificial sequence
  SiRNA target sequence
  misc_feature (9)..(9): n is a, c, g, or t
agtataatnactgtcaccgac

SEQ ID NO: 266809 - DNA, 21 bp, Artificial sequence
  SiRNA target sequence
  misc_feature (8)..(8): n is a, c, g, or t
gtataatnactgtcaccgacc

SEQ ID NO: 266810 - DNA, 21 bp, Artificial sequence
  SiRNA target sequence
  misc_feature (7)..(7): n is a, c, g, or t
tataatnactgtcaccgacca

SEQ ID NO: 266811 - DNA, 21 bp, Artificial sequence
  SiRNA target sequence
  misc_feature (6)..(6): n is a, c, g, or t
ataatnactgtcaccgaccat

SEQ ID NO: 266812 - DNA, 21 bp, Artificial sequence
  SiRNA target sequence
  misc_feature (5)..(5): n is a, c, g, or t
taatnactgtcaccgaccatc

SEQ ID NO: 266813 - DNA, 21 bp, Artificial sequence
  SiRNA target sequence
  misc_feature (4)..(4): n is a, c, g, or t
aatnactgtcaccgaccatct

SEQ ID NO: 266814 - DNA, 21 bp, Artificial sequence
  SiRNA target sequence
  misc_feature (3)..(3): n is a, c, g, or t
atnactgtcaccgaccatcta

SEQ ID NO: 266815 - DNA, 21 bp, Artificial sequence
  SiRNA target sequence
  misc_feature (2)..(2): n is a, c, g, or t
tnactgtcaccgaccatctat

SEQ ID NO: 266816 - DNA, 21 bp, Artificial sequence
  SiRNA target sequence
  misc_feature (1)..(1): n is a, c, g, or t
nactgtcaccgaccatctatt

SEQ ID NO: 266817 - DNA, 21 bp, Artificial sequence
  SiRNA target sequence
actgtcaccgaccatctattg

SEQ ID NO: 266818 - DNA, 21 bp, Artificial sequence
  SiRNA target sequence
ctgtcaccgaccatctattgt

SEQ ID NO: 266819 - DNA, 21 bp, Artificial sequence
  SiRNA target sequence
tgtcaccgaccatctattgta

SEQ ID NO: 266820 - DNA, 21 bp, Artificial sequence
  SiRNA target sequence
gtcaccgaccatctattgtaa

SEQ ID NO: 266821 - DNA, 21 bp, Artificial sequence
  SiRNA target sequence
tcaccgaccatctattgtaat

SEQ ID NO: 266822 - DNA, 21 bp, Artificial sequence
  SiRNA target sequence
caccgaccatctattgtaatg

SEQ ID NO: 266823 - DNA, 21 bp, Artificial sequence
  SiRNA target sequence
accgaccatctattgtaatga

SEQ ID NO: 266824 - DNA, 21 bp, Artificial sequence
  SiRNA target sequence
ccgaccatctattgtaatgat

SEQ ID NO: 266825 - DNA, 21 bp, Artificial sequence
  SiRNA target sequence
cgaccatctattgtaatgata

SEQ ID NO: 266826 - DNA, 21 bp, Artificial sequence
  SiRNA target sequence
gaccatctattgtaatgatag

SEQ ID NO: 266827 - DNA, 21 bp, Artificial sequence
  SiRNA target sequence
accatctattgtaatgataga

SEQ ID NO: 266828 - DNA, 21 bp, Artificial sequence
  SiRNA target sequence
ccatctattgtaatgatagat

SEQ ID NO: 266829 - DNA, 21 bp, Artificial sequence
  SiRNA target sequence
catctattgtaatgatagatc

SEQ ID NO: 266830 - DNA, 21 bp, Artificial sequence
  SiRNA target sequence
atctattgtaatgatagatct

SEQ ID NO: 266831 - DNA, 21 bp, Artificial sequence
  SiRNA target sequence
tctattgtaatgatagatctg

SEQ ID NO: 266832 - DNA, 21 bp, Artificial sequence
  SiRNA target sequence
ctattgtaatgatagatctgt

SEQ ID NO: 266833 - DNA, 21 bp, Artificial sequence
  SiRNA target sequence
tattgtaatgatagatctgtc

SEQ ID NO: 266834 - DNA, 21 bp, Artificial sequence
  SiRNA target sequence
attgtaatgatagatctgtcg

SEQ ID NO: 266835 - DNA, 21 bp, Artificial sequence
  SiRNA target sequence
ttgtaatgatagatctgtcgg

SEQ ID NO: 266836 - DNA, 21 bp, Artificial sequence
  SiRNA target sequence
tgtaatgatagatctgtcgga

SEQ ID NO: 266837 - DNA, 21 bp, Artificial sequence
  SiRNA target sequence
gtaatgatagatctgtcggaa

SEQ ID NO: 266838 - DNA, 21 bp, Artificial sequence
  SiRNA target sequence
taatgatagatctgtcggaaa

SEQ ID NO: 266839 - DNA, 21 bp, Artificial sequence
  SiRNA target sequence
aatgatagatctgtcggaaac

SEQ ID NO: 266840 - DNA, 21 bp, Artificial sequence
  SiRNA target sequence
atgatagatctgtcggaaacc

SEQ ID NO: 266841 - DNA, 21 bp, Artificial sequence
  SiRNA target sequence
tgatagatctgtcggaaacca

SEQ ID NO: 266842 - DNA, 21 bp, Artificial sequence
  SiRNA target sequence
gatagatctgtcggaaaccat

SEQ ID NO: 266843 - DNA, 21 bp, Artificial sequence
  SiRNA target sequence
atagatctgtcggaaaccatt

SEQ ID NO: 266844 - DNA, 21 bp, Artificial sequence
  SiRNA target sequence
tagatctgtcggaaaccatta

SEQ ID NO: 266845 - DNA, 21 bp, Artificial sequence
  SiRNA target sequence
agatctgtcggaaaccattat

SEQ ID NO: 266846 - DNA, 21 bp, Artificial sequence
  SiRNA target sequence
gatctgtcggaaaccattatt

SEQ ID NO: 266847 - DNA, 21 bp, Artificial sequence
  SiRNA target sequence
atctgtcggaaaccattattt

SEQ ID NO: 266848 - DNA, 21 bp, Artificial sequence
  SiRNA target sequence
tctgtcggaaaccattattta

SEQ ID NO: 266849 - DNA, 21 bp, Artificial sequence
  SiRNA target sequence
ctgtcggaaaccattatttat

SEQ ID NO: 266850 - DNA, 21 bp, Artificial sequence
  SiRNA target sequence
tgtcggaaaccattatttatg

SEQ ID NO: 266851 - DNA, 21 bp, Artificial sequence
  SiRNA target sequence
gtcggaaaccattatttatga

SEQ ID NO: 266852 - DNA, 21 bp, Artificial sequence
  SiRNA target sequence
tcggaaaccattatttatgaa

SEQ ID NO: 266853 - DNA, 21 bp, Artificial sequence
  SiRNA target sequence
cggaaaccattatttatgaag

SEQ ID NO: 266854 - DNA, 21 bp, Artificial sequence
  SiRNA target sequence
ggaaaccattatttatgaagt

SEQ ID NO: 266855 - DNA, 21 bp, Artificial sequence
  SiRNA target sequence
gaaaccattatttatgaagtg

SEQ ID NO: 266856 - DNA, 21 bp, Artificial sequence
  SiRNA target sequence
aaaccattatttatgaagtga

SEQ ID NO: 266857 - DNA, 21 bp, Artificial sequence
  SiRNA target sequence
aaccattatttatgaagtgac

SEQ ID NO: 266858 - DNA, 21 bp, Artificial sequence
  SiRNA target sequence
accattatttatgaagtgact

SEQ ID NO: 266859 - DNA, 21 bp, Artificial sequence
  SiRNA target sequence
ccattatttatgaagtgacta

SEQ ID NO: 266860 - DNA, 21 bp, Artificial sequence
  SiRNA target sequence
cattatttatgaagtgactag

SEQ ID NO: 266861 - DNA, 21 bp, Artificial sequence
  SiRNA target sequence
attatttatgaagtgactagc

SEQ ID NO: 266862 - DNA, 21 bp, Artificial sequence
  SiRNA target sequence
ttatttatgaagtgactagca

SEQ ID NO: 266863 - DNA, 21 bp, Artificial sequence
  SiRNA target sequence
tatttatgaagtgactagcaa

SEQ ID NO: 266864 - DNA, 21 bp, Artificial sequence
  SiRNA target sequence
atttatgaagtgactagcaat

SEQ ID NO: 266865 - DNA, 21 bp, Artificial sequence
  SiRNA target sequence
tttatgaagtgactagcaatc

SEQ ID NO: 266866 - DNA, 21 bp, Artificial sequence
  SiRNA target sequence
ttatgaagtgactagcaatca

SEQ ID NO: 266867 - DNA, 21 bp, Artificial sequence
  SiRNA target sequence
tatgaagtgactagcaatcat

SEQ ID NO: 266868 - DNA, 21 bp, Artificial sequence
  SiRNA target sequence
atgaagtgactagcaatcatg

SEQ ID NO: 266869 - DNA, 21 bp, Artificial sequence
  SiRNA target sequence
tgaagtgactagcaatcatgg

SEQ ID NO: 266870 - DNA, 21 bp, Artificial sequence
  SiRNA target sequence
gaagtgactagcaatcatgga

SEQ ID NO: 266871 - DNA, 21 bp, Artificial sequence
  SiRNA target sequence
aagtgactagcaatcatggat

SEQ ID NO: 266872 - DNA, 21 bp, Artificial sequence
  SiRNA target sequence
agtgactagcaatcatggatt

SEQ ID NO: 266873 - DNA, 21 bp, Artificial sequence
  SiRNA target sequence
gtgactagcaatcatggatta

SEQ ID NO: 266874 - DNA, 21 bp, Artificial sequence
  SiRNA target sequence
tgactagcaatcatggattaa

SEQ ID NO: 266875 - DNA, 21 bp, Artificial sequence
  SiRNA target sequence
gactagcaatcatggattaaa

SEQ ID NO: 266876 - DNA, 21 bp, Artificial sequence
  SiRNA target sequence
actagcaatcatggattaaat

SEQ ID NO: 266877 - DNA, 21 bp, Artificial sequence
  SiRNA target sequence
ctagcaatcatggattaaatt

SEQ ID NO: 266878 - DNA, 21 bp, Artificial sequence
  SiRNA target sequence
tagcaatcatggattaaatta

SEQ ID NO: 266879 - DNA, 21 bp, Artificial sequence
  SiRNA target sequence
agcaatcatggattaaattag

SEQ ID NO: 266880 - DNA, 21 bp, Artificial sequence
  SiRNA target sequence
gcaatcatggattaaattaga

SEQ ID NO: 266881 - DNA, 21 bp, Artificial sequence
  SiRNA target sequence
caatcatggattaaattagat

SEQ ID NO: 266882 - DNA, 21 bp, Artificial sequence
  SiRNA target sequence
aatcatggattaaattagatg

SEQ ID NO: 266883 - DNA, 21 bp, Artificial sequence
  SiRNA target sequence
atcatggattaaattagatgg

SEQ ID NO: 266884 - DNA, 21 bp, Artificial sequence
  SiRNA target sequence
tcatggattaaattagatggt

SEQ ID NO: 266885 - DNA, 21 bp, Artificial sequence
  SiRNA target sequence
catggattaaattagatggta

SEQ ID NO: 266886 - DNA, 21 bp, Artificial sequence
  SiRNA target sequence
atggattaaattagatggtat

SEQ ID NO: 266887 - DNA, 21 bp, Artificial sequence
  SiRNA target sequence
tggattaaattagatggtatt

SEQ ID NO: 266888 - DNA, 21 bp, Artificial sequence
  SiRNA target sequence
ggattaaattagatggtattc

SEQ ID NO: 266889 - DNA, 21 bp, Artificial sequence
  SiRNA target sequence
gattaaattagatggtattct

SEQ ID NO: 266890 - DNA, 21 bp, Artificial sequence
  SiRNA target sequence
attaaattagatggtattcta

SEQ ID NO: 266891 - DNA, 21 bp, Artificial sequence
  SiRNA target sequence
ttaaattagatggtattctag

SEQ ID NO: 266892 - DNA, 21 bp, Artificial sequence
  SiRNA target sequence
taaattagatggtattctagt

SEQ ID NO: 266893 - DNA, 21 bp, Artificial sequence
  SiRNA target sequence
aaattagatggtattctagtt

SEQ ID NO: 266894 - DNA, 21 bp, Artificial sequence
  SiRNA target sequence
aattagatggtattctagttt

SEQ ID NO: 266895 - DNA, 21 bp, Artificial sequence
  SiRNA target sequence
attagatggtattctagttta

SEQ ID NO: 266896 - DNA, 21 bp, Artificial sequence
  SiRNA target sequence
ttagatggtattctagtttag

SEQ ID NO: 266897 - DNA, 21 bp, Artificial sequence
  SiRNA target sequence
tagatggtattctagtttaga

SEQ ID NO: 266898 - DNA, 21 bp, Artificial sequence
  SiRNA target sequence
agatggtattctagtttagag

SEQ ID NO: 266899 - DNA, 21 bp, Artificial sequence
  SiRNA target sequence
gatggtattctagtttagagg

SEQ ID NO: 266900 - DNA, 21 bp, Artificial sequence
  SiRNA target sequence
atggtattctagtttagaggt

SEQ ID NO: 266901 - DNA, 21 bp, Artificial sequence
  SiRNA target sequence
tggtattctagtttagaggtg

SEQ ID NO: 266902 - DNA, 21 bp, Artificial sequence
  SiRNA target sequence
ggtattctagtttagaggtga

SEQ ID NO: 266903 - DNA, 21 bp, Artificial sequence
  SiRNA target sequence
gtattctagtttagaggtgat

SEQ ID NO: 266904 - DNA, 21 bp, Artificial sequence
  SiRNA target sequence
tattctagtttagaggtgatt

SEQ ID NO: 266905 - DNA, 21 bp, Artificial sequence
  SiRNA target sequence
attctagtttagaggtgattc

SEQ ID NO: 266906 - DNA, 21 bp, Artificial sequence
  SiRNA target sequence
ttctagtttagaggtgattcg

SEQ ID NO: 266907 - DNA, 21 bp, Artificial sequence
  SiRNA target sequence
tctagtttagaggtgattcgg

SEQ ID NO: 266908 - DNA, 21 bp, Artificial sequence
  SiRNA target sequence
ctagtttagaggtgattcggc

SEQ ID NO: 266909 - DNA, 21 bp, Artificial sequence
  SiRNA target sequence
tagtttagaggtgattcggcg

SEQ ID NO: 266910 - DNA, 21 bp, Artificial sequence
  SiRNA target sequence
agtttagaggtgattcggcgc

SEQ ID NO: 266911 - DNA, 21 bp, Artificial sequence
  SiRNA target sequence
gtttagaggtgattcggcgct

SEQ ID NO: 266912 - DNA, 21 bp, Artificial sequence
  SiRNA target sequence
tttagaggtgattcggcgctg

SEQ ID NO: 266913 - DNA, 21 bp, Artificial sequence
  SiRNA target sequence
ttagaggtgattcggcgctgc

SEQ ID NO: 266914 - DNA, 21 bp, Artificial sequence
  SiRNA target sequence
tagaggtgattcggcgctgcg

SEQ ID NO: 266915 - DNA, 21 bp, Artificial sequence
  SiRNA target sequence
agaggtgattcggcgctgcgg

SEQ ID NO: 266916 - DNA, 21 bp, Artificial sequence
  SiRNA target sequence
gaggtgattcggcgctgcggt

SEQ ID NO: 266917 - DNA, 21 bp, Artificial sequence
  SiRNA target sequence
aggtgattcggcgctgcggtg

SEQ ID NO: 266918 - DNA, 21 bp, Artificial sequence
  SiRNA target sequence
ggtgattcggcgctgcggtgc

SEQ ID NO: 266919 - DNA, 21 bp, Artificial sequence
  SiRNA target sequence
gtgattcggcgctgcggtgcg

SEQ ID NO: 266920 - DNA, 21 bp, Artificial sequence
  SiRNA target sequence
tgattcggcgctgcggtgcga

SEQ ID NO: 266921 - DNA, 21 bp, Artificial sequence
  SiRNA target sequence
gattcggcgctgcggtgcgac

SEQ ID NO: 266922 - DNA, 21 bp, Artificial sequence
  SiRNA target sequence
attcggcgctgcggtgcgact

SEQ ID NO: 266923 - DNA, 21 bp, Artificial sequence
  SiRNA target sequence
ttcggcgctgcggtgcgactg

SEQ ID NO: 266924 - DNA, 21 bp, Artificial sequence
  SiRNA target sequence
tcggcgctgcggtgcgactga

SEQ ID NO: 266925 - DNA, 21 bp, Artificial sequence
  SiRNA target sequence
cggcgctgcggtgcgactgaa

SEQ ID NO: 266926 - DNA, 21 bp, Artificial sequence
  SiRNA target sequence
ggcgctgcggtgcgactgaaa

SEQ ID NO: 266927 - DNA, 21 bp, Artificial sequence
  SiRNA target sequence
gcgctgcggtgcgactgaaac

SEQ ID NO: 266928 - DNA, 21 bp, Artificial sequence
  SiRNA target sequence
cgctgcggtgcgactgaaact

SEQ ID NO: 266929 - DNA, 21 bp, Artificial sequence
  SiRNA target sequence
gctgcggtgcgactgaaactt

SEQ ID NO: 266930 - DNA, 21 bp, Artificial sequence
  SiRNA target sequence
ctgcggtgcgactgaaacttc

SEQ ID NO: 266931 - DNA, 21 bp, Artificial sequence
  SiRNA target sequence
tgcggtgcgactgaaacttct

SEQ ID NO: 266932 - DNA, 21 bp, Artificial sequence
  SiRNA target sequence
gcggtgcgactgaaacttcta

SEQ ID NO: 266933 - DNA, 21 bp, Artificial sequence
  SiRNA target sequence
cggtgcgactgaaacttctaa

SEQ ID NO: 266934 - DNA, 21 bp, Artificial sequence
  SiRNA target sequence
ggtgcgactgaaacttctaaa

SEQ ID NO: 266935 - DNA, 21 bp, Artificial sequence
  SiRNA target sequence
gtgcgactgaaacttctaaat

SEQ ID NO: 266936 - DNA, 21 bp, Artificial sequence
  SiRNA target sequence
tgcgactgaaacttctaaatt

SEQ ID NO: 266937 - DNA, 21 bp, Artificial sequence
  SiRNA target sequence
gcgactgaaacttctaaatta

SEQ ID NO: 266938 - DNA, 21 bp, Artificial sequence
  SiRNA target sequence
cgactgaaacttctaaattag

SEQ ID NO: 266939 - DNA, 21 bp, Artificial sequence
  SiRNA target sequence
gactgaaacttctaaattagc

SEQ ID NO: 266940 - DNA, 21 bp, Artificial sequence
  SiRNA target sequence
actgaaacttctaaattagca

SEQ ID NO: 266941 - DNA, 21 bp, Artificial sequence
  SiRNA target sequence
ctgaaacttctaaattagcat

SEQ ID NO: 266942 - DNA, 21 bp, Artificial sequence
  SiRNA target sequence
tgaaacttctaaattagcatg

SEQ ID NO: 266943 - DNA, 21 bp, Artificial sequence
  SiRNA target sequence
gaaacttctaaattagcatgt

SEQ ID NO: 266944 - DNA, 21 bp, Artificial sequence
  SiRNA target sequence
aaacttctaaattagcatgtc

SEQ ID NO: 266945 - DNA, 21 bp, Artificial sequence
  SiRNA target sequence
aacttctaaattagcatgtca

SEQ ID NO: 266946 - DNA, 21 bp, Artificial sequence
  SiRNA target sequence
acttctaaattagcatgtcag

SEQ ID NO: 266947 - DNA, 21 bp, Artificial sequence
  SiRNA target sequence
cttctaaattagcatgtcaga

SEQ ID NO: 266948 - DNA, 21 bp, Artificial sequence
  SiRNA target sequence
ttctaaattagcatgtcagat

SEQ ID NO: 266949 - DNA, 21 bp, Artificial sequence
  SiRNA target sequence
tctaaattagcatgtcagatt

SEQ ID NO: 266950 - DNA, 21 bp, Artificial sequence
  SiRNA target sequence
ctaaattagcatgtcagatta

SEQ ID NO: 266951 - DNA, 21 bp, Artificial sequence
  SiRNA target sequence
taaattagcatgtcagattat

SEQ ID NO: 266952 - DNA, 21 bp, Artificial sequence
  SiRNA target sequence
aaattagcatgtcagattata

SEQ ID NO: 266953 - DNA, 21 bp, Artificial sequence
  SiRNA target sequence
aattagcatgtcagattatat

SEQ ID NO: 266954 - DNA, 21 bp, Artificial sequence
  SiRNA target sequence
attagcatgtcagattatatt

SEQ ID NO: 266955 - DNA, 21 bp, Artificial sequence
  SiRNA target sequence
ttagcatgtcagattatatta

SEQ ID NO: 266956 - DNA, 21 bp, Artificial sequence
  SiRNA target sequence
tagcatgtcagattatattat

SEQ ID NO: 266957 - DNA, 21 bp, Artificial sequence
  SiRNA target sequence
agcatgtcagattatattatg

SEQ ID NO: 266958 - DNA, 21 bp, Artificial sequence
  SiRNA target sequence
gcatgtcagattatattatga

SEQ ID NO: 266959 - DNA, 21 bp, Artificial sequence
  SiRNA target sequence
catgtcagattatattatgaa

SEQ ID NO: 266960 - DNA, 21 bp, Artificial sequence
  SiRNA target sequence
atgtcagattatattatgaat

SEQ ID NO: 266961 - DNA, 21 bp, Artificial sequence
  SiRNA target sequence
tgtcagattatattatgaatg

SEQ ID NO: 266962 - DNA, 21 bp, Artificial sequence
  SiRNA target sequence
gtcagattatattatgaatgc

SEQ ID NO: 266963 - DNA, 21 bp, Artificial sequence
  SiRNA target sequence
tcagattatattatgaatgcg

SEQ ID NO: 266964 - DNA, 21 bp, Artificial sequence
  SiRNA target sequence
cagattatattatgaatgcgt

SEQ ID NO: 266965 - DNA, 21 bp, Artificial sequence
  SiRNA target sequence
agattatattatgaatgcgtt

SEQ ID NO: 266966 - DNA, 21 bp, Artificial sequence
  SiRNA target sequence
gattatattatgaatgcgtta

SEQ ID NO: 266967 - DNA, 21 bp, Artificial sequence
  SiRNA target sequence
attatattatgaatgcgttag

SEQ ID NO: 266968 - DNA, 21 bp, Artificial sequence
  SiRNA target sequence
ttatattatgaatgcgttagt

SEQ ID NO: 266969 - DNA, 21 bp, Artificial sequence
  SiRNA target sequence
tatattatgaatgcgttagta

SEQ ID NO: 266970 - DNA, 21 bp, Artificial sequence
  SiRNA target sequence
atattatgaatgcgttagtag

SEQ ID NO: 266971 - DNA, 21 bp, Artificial sequence
  SiRNA target sequence
tattatgaatgcgttagtagt

SEQ ID NO: 266972 - DNA, 21 bp, Artificial sequence
  SiRNA target sequence
attatgaatgcgttagtagta

SEQ ID NO: 266973 - DNA, 21 bp, Artificial sequence
  SiRNA target sequence
ttatgaatgcgttagtagtaa

SEQ ID NO: 266974 - DNA, 21 bp, Artificial sequence
  SiRNA target sequence
tatgaatgcgttagtagtaat

SEQ ID NO: 266975 - DNA, 21 bp, Artificial sequence
  SiRNA target sequence
atgaatgcgttagtagtaatt

SEQ ID NO: 266976 - DNA, 21 bp, Artificial sequence
  SiRNA target sequence
tgaatgcgttagtagtaattt

SEQ ID NO: 266977 - DNA, 21 bp, Artificial sequence
  SiRNA target sequence
gaatgcgttagtagtaatttc

SEQ ID NO: 266978 - DNA, 21 bp, Artificial sequence
  SiRNA target sequence
aatgcgttagtagtaatttct

SEQ ID NO: 266979 - DNA, 21 bp, Artificial sequence
  SiRNA target sequence
atgcgttagtagtaatttctg

SEQ ID NO: 266980 - DNA, 21 bp, Artificial sequence
  SiRNA target sequence
tgcgttagtagtaatttctgc

SEQ ID NO: 266981 - DNA, 21 bp, Artificial sequence
  SiRNA target sequence
gcgttagtagtaatttctgcg

SEQ ID NO: 266982 - DNA, 21 bp, Artificial sequence
  SiRNA target sequence
cgttagtagtaatttctgcga

SEQ ID NO: 266983 - DNA, 21 bp, Artificial sequence
  SiRNA target sequence
gttagtagtaatttctgcgat

SEQ ID NO: 266984 - DNA, 21 bp, Artificial sequence
  SiRNA target sequence
ttagtagtaatttctgcgata

SEQ ID NO: 266985 - DNA, 21 bp, Artificial sequence
  SiRNA target sequence
tagtagtaatttctgcgatag

SEQ ID NO: 266986 - DNA, 21 bp, Artificial sequence
  SiRNA target sequence
agtagtaatttctgcgataga

SEQ ID NO: 266987 - DNA, 21 bp, Artificial sequence
  SiRNA target sequence
gtagtaatttctgcgatagag

SEQ ID NO: 266988 - DNA, 21 bp, Artificial sequence
  SiRNA target sequence
tagtaatttctgcgatagagc

SEQ ID NO: 266989 - DNA, 21 bp, Artificial sequence
  SiRNA target sequence
agtaatttctgcgatagagct

SEQ ID NO: 266990 - DNA, 21 bp, Artificial sequence
  SiRNA target sequence
gtaatttctgcgatagagctg

SEQ ID NO: 266991 - DNA, 21 bp, Artificial sequence
  SiRNA target sequence
taatttctgcgatagagctgg

SEQ ID NO: 266992 - DNA, 21 bp, Artificial sequence
  SiRNA target sequence
aatttctgcgatagagctggg

SEQ ID NO: 266993 - DNA, 21 bp, Artificial sequence
  SiRNA target sequence
atttctgcgatagagctggga

SEQ ID NO: 266994 - DNA, 21 bp, Artificial sequence
  SiRNA target sequence
tttctgcgatagagctgggac

SEQ ID NO: 266995 - DNA, 21 bp, Artificial sequence
  SiRNA target sequence
ttctgcgatagagctgggacc

SEQ ID NO: 266996 - DNA, 21 bp, Artificial sequence
  SiRNA target sequence
tctgcgatagagctgggaccc

SEQ ID NO: 266997 - DNA, 21 bp, Artificial sequence
  SiRNA target sequence
ctgcgatagagctgggacccc

SEQ ID NO: 266998 - DNA, 21 bp, Artificial sequence
  SiRNA target sequence
tgcgatagagctgggacccct

SEQ ID NO: 266999 - DNA, 21 bp, Artificial sequence
  SiRNA target sequence
gcgatagagctgggacccctc

SEQ ID NO: 267000 - DNA, 21 bp, Artificial sequence
  SiRNA target sequence
cgatagagctgggacccctca

SEQ ID NO: 267001 - DNA, 21 bp, Artificial sequence
  SiRNA target sequence
gatagagctgggacccctcag

SEQ ID NO: 267002 - DNA, 21 bp, Artificial sequence
  SiRNA target sequence
atagagctgggacccctcagt

SEQ ID NO: 267003 - DNA, 21 bp, Artificial sequence
  SiRNA target sequence
tagagctgggacccctcagtc

SEQ ID NO: 267004 - DNA, 21 bp, Artificial sequence
  SiRNA target sequence
agagctgggacccctcagtct

SEQ ID NO: 267005 - DNA, 21 bp, Artificial sequence
  SiRNA target sequence
gagctgggacccctcagtctc

SEQ ID NO: 267006 - DNA, 21 bp, Artificial sequence
  SiRNA target sequence
agctgggacccctcagtctct

SEQ ID NO: 267007 - DNA, 21 bp, Artificial sequence
  SiRNA target sequence
gctgggacccctcagtctctc

SEQ ID NO: 267008 - DNA, 21 bp, Artificial sequence
  SiRNA target sequence
ctgggacccctcagtctctca

SEQ ID NO: 267009 - DNA, 21 bp, Artificial sequence
  SiRNA target sequence
tgggacccctcagtctctcag

SEQ ID NO: 267010 - DNA, 21 bp, Artificial sequence
  SiRNA target sequence
gggacccctcagtctctcagg

SEQ ID NO: 267011 - DNA, 21 bp, Artificial sequence
  SiRNA target sequence
ggacccctcagtctctcaggt

SEQ ID NO: 267012 - DNA, 21 bp, Artificial sequence
  SiRNA target sequence
gacccctcagtctctcaggta

SEQ ID NO: 267013 - DNA, 21 bp, Artificial sequence
  SiRNA target sequence
acccctcagtctctcaggtat

SEQ ID NO: 267014 - DNA, 21 bp, Artificial sequence
  SiRNA target sequence
cccctcagtctctcaggtatt

SEQ ID NO: 267015 - DNA, 21 bp, Artificial sequence
  SiRNA target sequence
ccctcagtctctcaggtattg

SEQ ID NO: 267016 - DNA, 21 bp, Artificial sequence
  SiRNA target sequence
cctcagtctctcaggtattgt

SEQ ID NO: 267017 - DNA, 21 bp, Artificial sequence
  SiRNA target sequence
ctcagtctctcaggtattgta

SEQ ID NO: 267018 - DNA, 21 bp, Artificial sequence
  SiRNA target sequence
tcagtctctcaggtattgtac

SEQ ID NO: 267019 - DNA, 21 bp, Artificial sequence
  SiRNA target sequence
cagtctctcaggtattgtacg

SEQ ID NO: 267020 - DNA, 21 bp, Artificial sequence
  SiRNA target sequence
agtctctcaggtattgtacga

SEQ ID NO: 267021 - DNA, 21 bp, Artificial sequence
  SiRNA target sequence
gtctctcaggtattgtacgag

SEQ ID NO: 267022 - DNA, 21 bp, Artificial sequence
  SiRNA target sequence
tctctcaggtattgtacgagg

SEQ ID NO: 267023 - DNA, 21 bp, Artificial sequence
  SiRNA target sequence
ctctcaggtattgtacgaggc

SEQ ID NO: 267024 - DNA, 21 bp, Artificial sequence
  SiRNA target sequence
tctcaggtattgtacgaggcg

SEQ ID NO: 267025 - DNA, 21 bp, Artificial sequence
  SiRNA target sequence
ctcaggtattgtacgaggcga

SEQ ID NO: 267026 - DNA, 21 bp, Artificial sequence
  SiRNA target sequence
tcaggtattgtacgaggcgaa

SEQ ID NO: 267027 - DNA, 21 bp, Artificial sequence
  SiRNA target sequence
caggtattgtacgaggcgaaa

SEQ ID NO: 267028 - DNA, 21 bp, Artificial sequence
  SiRNA target sequence
aggtattgtacgaggcgaaag

SEQ ID NO: 267029 - DNA, 21 bp, Artificial sequence
  SiRNA target sequence
ggtattgtacgaggcgaaagt

SEQ ID NO: 267030 - DNA, 21 bp, Artificial sequence
  SiRNA target sequence
gtattgtacgaggcgaaagtg

SEQ ID NO: 267031 - DNA, 21 bp, Artificial sequence
  SiRNA target sequence
tattgtacgaggcgaaagtgt

SEQ ID NO: 267032 - DNA, 21 bp, Artificial sequence
  SiRNA target sequence
attgtacgaggcgaaagtgtg

SEQ ID NO: 267033 - DNA, 21 bp, Artificial sequence
  SiRNA target sequence
ttgtacgaggcgaaagtgtga

SEQ ID NO: 267034 - DNA, 21 bp, Artificial sequence
  SiRNA target sequence
tgtacgaggcgaaagtgtgaa

SEQ ID NO: 267035 - DNA, 21 bp, Artificial sequence
  SiRNA target sequence
gtacgaggcgaaagtgtgaaa

SEQ ID NO: 267036 - DNA, 21 bp, Artificial sequence
  SiRNA target sequence
tacgaggcgaaagtgtgaaag

SEQ ID NO: 267037 - DNA, 21 bp, Artificial sequence
  SiRNA target sequence
acgaggcgaaagtgtgaaagt

SEQ ID NO: 267038 - DNA, 21 bp, Artificial sequence
  SiRNA target sequence
cgaggcgaaagtgtgaaagtt

SEQ ID NO: 267039 - DNA, 21 bp, Artificial sequence
  SiRNA target sequence
gaggcgaaagtgtgaaagttt

SEQ ID NO: 267040 - DNA, 21 bp, Artificial sequence
  SiRNA target sequence
aggcgaaagtgtgaaagtttt

SEQ ID NO: 267041 - DNA, 21 bp, Artificial sequence
  SiRNA target sequence
ggcgaaagtgtgaaagttttg

SEQ ID NO: 267042 - DNA, 21 bp, Artificial sequence
  SiRNA target sequence
gcgaaagtgtgaaagttttgt

SEQ ID NO: 267043 - DNA, 21 bp, Artificial sequence
  SiRNA target sequence
cgaaagtgtgaaagttttgta

SEQ ID NO: 267044 - DNA, 21 bp, Artificial sequence
  SiRNA target sequence
gaaagtgtgaaagttttgtat

SEQ ID NO: 267045 - DNA, 21 bp, Artificial sequence
  SiRNA target sequence
aaagtgtgaaagttttgtatg

SEQ ID NO: 267046 - DNA, 21 bp, Artificial sequence
  SiRNA target sequence
aagtgtgaaagttttgtatgt

SEQ ID NO: 267047 - DNA, 21 bp, Artificial sequence
  SiRNA target sequence
agtgtgaaagttttgtatgtg

SEQ ID NO: 267048 - DNA, 21 bp, Artificial sequence
  SiRNA target sequence
gtgtgaaagttttgtatgtgt

SEQ ID NO: 267049 - DNA, 21 bp, Artificial sequence
  SiRNA target sequence
tgtgaaagttttgtatgtgtt

SEQ ID NO: 267050 - DNA, 21 bp, Artificial sequence
  SiRNA target sequence
gtgaaagttttgtatgtgttt

SEQ ID NO: 267051 - DNA, 21 bp, Artificial sequence
  SiRNA target sequence
tgaaagttttgtatgtgtttt

SEQ ID NO: 267052 - DNA, 21 bp, Artificial sequence
  SiRNA target sequence
gaaagttttgtatgtgttttt

SEQ ID NO: 267053 - DNA, 21 bp, Artificial sequence
  SiRNA target sequence
aaagttttgtatgtgttttta

SEQ ID NO: 267054 - DNA, 21 bp, Artificial sequence
  SiRNA target sequence
aagttttgtatgtgtttttat

SEQ ID NO: 267055 - DNA, 21 bp, Artificial sequence
  SiRNA target sequence
agttttgtatgtgtttttata

SEQ ID NO: 267056 - DNA, 21 bp, Artificial sequence
  SiRNA target sequence
gttttgtatgtgtttttatat

SEQ ID NO: 267057 - DNA, 21 bp, Artificial sequence
  SiRNA target sequence
ttttgtatgtgtttttatatg

SEQ ID NO: 267058 - DNA, 21 bp, Artificial sequence
  SiRNA target sequence
tttgtatgtgtttttatatgt

SEQ ID NO: 267059 - DNA, 21 bp, Artificial sequence
  SiRNA target sequence
ttgtatgtgtttttatatgta

SEQ ID NO: 267060 - DNA, 21 bp, Artificial sequence
  SiRNA target sequence
tgtatgtgtttttatatgtac

SEQ ID NO: 267061 - DNA, 21 bp, Artificial sequence
  SiRNA target sequence
gtatgtgtttttatatgtacg

SEQ ID NO: 267062 - DNA, 21 bp, Artificial sequence
  SiRNA target sequence
tatgtgtttttatatgtacga

SEQ ID NO: 267063 - DNA, 21 bp, Artificial sequence
  SiRNA target sequence
atgtgtttttatatgtacgac

SEQ ID NO: 267064 - DNA, 21 bp, Artificial sequence
  SiRNA target sequence
tgtgtttttatatgtacgact

SEQ ID NO: 267065 - DNA, 21 bp, Artificial sequence
  SiRNA target sequence
gtgtttttatatgtacgactg

SEQ ID NO: 267066 - DNA, 21 bp, Artificial sequence
  SiRNA target sequence
tgtttttatatgtacgactgt

SEQ ID NO: 267067 - DNA, 21 bp, Artificial sequence
  SiRNA target sequence
gtttttatatgtacgactgta

SEQ ID NO: 267068 - DNA, 21 bp, Artificial sequence
  SiRNA target sequence
tttttatatgtacgactgtat

SEQ ID NO: 267069 - DNA, 21 bp, Artificial sequence
  SiRNA target sequence
ttttatatgtacgactgtatc

SEQ ID NO: 267070 - DNA, 21 bp, Artificial sequence
  SiRNA target sequence
tttatatgtacgactgtatcg

SEQ ID NO: 267071 - DNA, 21 bp, Artificial sequence
  SiRNA target sequence
ttatatgtacgactgtatcgg

SEQ ID NO: 267072 - DNA, 21 bp, Artificial sequence
  SiRNA target sequence
tatatgtacgactgtatcggg

SEQ ID NO: 267073 - DNA, 21 bp, Artificial sequence
  SiRNA target sequence
atatgtacgactgtatcggga

SEQ ID NO: 267074 - DNA, 21 bp, Artificial sequence
  SiRNA target sequence
tatgtacgactgtatcgggaa

SEQ ID NO: 267075 - DNA, 21 bp, Artificial sequence
  SiRNA target sequence
atgtacgactgtatcgggaat

SEQ ID NO: 267076 - DNA, 21 bp, Artificial sequence
  SiRNA target sequence
tgtacgactgtatcgggaatt

SEQ ID NO: 267077 - DNA, 21 bp, Artificial sequence
  SiRNA target sequence
gtacgactgtatcgggaattc

SEQ ID NO: 267078 - DNA, 21 bp, Artificial sequence
  SiRNA target sequence
tacgactgtatcgggaattcc

SEQ ID NO: 267079 - DNA, 21 bp, Artificial sequence
  SiRNA target sequence
acgactgtatcgggaattcct

SEQ ID NO: 267080 - DNA, 21 bp, Artificial sequence
  SiRNA target sequence
cgactgtatcgggaattcctt

SEQ ID NO: 267081 - DNA, 21 bp, Artificial sequence
  SiRNA target sequence
gactgtatcgggaattccttt

SEQ ID NO: 267082 - DNA, 21 bp, Artificial sequence
  SiRNA target sequence
actgtatcgggaattccttta

SEQ ID NO: 267083 - DNA, 21 bp, Artificial sequence
  SiRNA target sequence
ctgtatcgggaattcctttag

SEQ ID NO: 267084 - DNA, 21 bp, Artificial sequence
  SiRNA target sequence
tgtatcgggaattcctttagc

SEQ ID NO: 267085 - DNA, 21 bp, Artificial sequence
  SiRNA target sequence
gtatcgggaattcctttagca

SEQ ID NO: 267086 - DNA, 21 bp, Artificial sequence
  SiRNA target sequence
tatcgggaattcctttagcaa

SEQ ID NO: 267087 - DNA, 21 bp, Artificial sequence
  SiRNA target sequence
atcgggaattcctttagcaag

SEQ ID NO: 267088 - DNA, 21 bp, Artificial sequence
  SiRNA target sequence
tcgggaattcctttagcaaga

SEQ ID NO: 267089 - DNA, 21 bp, Artificial sequence
  SiRNA target sequence
cgggaattcctttagcaagaa

SEQ ID NO: 267090 - DNA, 21 bp, Artificial sequence
  SiRNA target sequence
gggaattcctttagcaagaat

SEQ ID NO: 267091 - DNA, 21 bp, Artificial sequence
  SiRNA target sequence
ggaattcctttagcaagaatc

SEQ ID NO: 267092 - DNA, 21 bp, Artificial sequence
  SiRNA target sequence
gaattcctttagcaagaatcc

SEQ ID NO: 267093 - DNA, 21 bp, Artificial sequence
  SiRNA target sequence
aattcctttagcaagaatcct

SEQ ID NO: 267094 - DNA, 21 bp, Artificial sequence
  SiRNA target sequence
attcctttagcaagaatcctt

SEQ ID NO: 267095 - DNA, 21 bp, Artificial sequence
  SiRNA target sequence
ttcctttagcaagaatccttt

SEQ ID NO: 267096 - DNA, 21 bp, Artificial sequence
  SiRNA target sequence
tcctttagcaagaatcctttt

SEQ ID NO: 267097 - DNA, 21 bp, Artificial sequence
  SiRNA target sequence
cctttagcaagaatcctttta

SEQ ID NO: 267098 - DNA, 21 bp, Artificial sequence
  SiRNA target sequence
ctttagcaagaatccttttaa

SEQ ID NO: 267099 - DNA, 21 bp, Artificial sequence
  SiRNA target sequence
tttagcaagaatccttttaat

SEQ ID NO: 267100 - DNA, 21 bp, Artificial sequence
  SiRNA target sequence
ttagcaagaatccttttaata

SEQ ID NO: 267101 - DNA, 21 bp, Artificial sequence
  SiRNA target sequence
tagcaagaatccttttaatac

SEQ ID NO: 267102 - DNA, 21 bp, Artificial sequence
  SiRNA target sequence
agcaagaatccttttaataca

SEQ ID NO: 267103 - DNA, 21 bp, Artificial sequence
  SiRNA target sequence
gcaagaatccttttaatacag

SEQ ID NO: 267104 - DNA, 21 bp, Artificial sequence
  SiRNA target sequence
caagaatccttttaatacagt

SEQ ID NO: 267105 - DNA, 21 bp, Artificial sequence
  SiRNA target sequence
aagaatccttttaatacagta

SEQ ID NO: 267106 - DNA, 21 bp, Artificial sequence
  SiRNA target sequence
agaatccttttaatacagtat

SEQ ID NO: 267107 - DNA, 21 bp, Artificial sequence
  SiRNA target sequence
gaatccttttaatacagtata

SEQ ID NO: 267108 - DNA, 21 bp, Artificial sequence
  SiRNA target sequence
aatccttttaatacagtataa

SEQ ID NO: 267109 - DNA, 21 bp, Artificial sequence
  SiRNA target sequence
atccttttaatacagtataat

SEQ ID NO: 267110 - DNA, 21 bp, Artificial sequence
  SiRNA target sequence
tccttttaatacagtataatt

SEQ ID NO: 267111 - DNA, 21 bp, Artificial sequence
  SiRNA target sequence
ccttttaatacagtataattt

SEQ ID NO: 267112 - DNA, 21 bp, Artificial sequence
  SiRNA target sequence
cttttaatacagtataatttg

SEQ ID NO: 267113 - DNA, 21 bp, Artificial sequence
  SiRNA target sequence
ttttaatacagtataatttgt

SEQ ID NO: 267114 - DNA, 21 bp, Artificial sequence
  SiRNA target sequence
tttaatacagtataatttgtg

SEQ ID NO: 267115 - DNA, 21 bp, Artificial sequence
  SiRNA target sequence
ttaatacagtataatttgtgc

SEQ ID NO: 267116 - DNA, 21 bp, Artificial sequence
  SiRNA target sequence
taatacagtataatttgtgct

SEQ ID NO: 267117 - DNA, 21 bp, Artificial sequence
  SiRNA target sequence
aatacagtataatttgtgcta

SEQ ID NO: 267118 - DNA, 21 bp, Artificial sequence
  SiRNA target sequence
atacagtataatttgtgctac

SEQ ID NO: 267119 - DNA, 21 bp, Artificial sequence
  SiRNA target sequence
tacagtataatttgtgctacg

SEQ ID NO: 267120 - DNA, 21 bp, Artificial sequence
  SiRNA target sequence
acagtataatttgtgctacgg

SEQ ID NO: 267121 - DNA, 21 bp, Artificial sequence
  SiRNA target sequence
cagtataatttgtgctacggt

SEQ ID NO: 267122 - DNA, 21 bp, Artificial sequence
  SiRNA target sequence
agtataatttgtgctacggta

SEQ ID NO: 267123 - DNA, 21 bp, Artificial sequence
  SiRNA target sequence
gtataatttgtgctacggtac

SEQ ID NO: 267124 - DNA, 21 bp, Artificial sequence
  SiRNA target sequence
tataatttgtgctacggtacg

SEQ ID NO: 267125 - DNA, 21 bp, Artificial sequence
  SiRNA target sequence
ataatttgtgctacggtacgt

SEQ ID NO: 267126 - DNA, 21 bp, Artificial sequence
  SiRNA target sequence
taatttgtgctacggtacgtt

SEQ ID NO: 267127 - DNA, 21 bp, Artificial sequence
  SiRNA target sequence
aatttgtgctacggtacgtta

SEQ ID NO: 267128 - DNA, 21 bp, Artificial sequence
  SiRNA target sequence
atttgtgctacggtacgttac

SEQ ID NO: 267129 - DNA, 21 bp, Artificial sequence
  SiRNA target sequence
tttgtgctacggtacgttacg

SEQ ID NO: 267130 - DNA, 21 bp, Artificial sequence
  SiRNA target sequence
ttgtgctacggtacgttacgt

SEQ ID NO: 267131 - DNA, 21 bp, Artificial sequence
  SiRNA target sequence
tgtgctacggtacgttacgtt

SEQ ID NO: 267132 - DNA, 21 bp, Artificial sequence
  SiRNA target sequence
gtgctacggtacgttacgttc

SEQ ID NO: 267133 - DNA, 21 bp, Artificial sequence
  SiRNA target sequence
tgctacggtacgttacgttcg

SEQ ID NO: 267134 - DNA, 21 bp, Artificial sequence
  SiRNA target sequence
gctacggtacgttacgttcgc

SEQ ID NO: 267135 - DNA, 21 bp, Artificial sequence
  SiRNA target sequence
ctacggtacgttacgttcgca

SEQ ID NO: 267136 - DNA, 21 bp, Artificial sequence
  SiRNA target sequence
tacggtacgttacgttcgcag

SEQ ID NO: 267137 - DNA, 21 bp, Artificial sequence
  SiRNA target sequence
acggtacgttacgttcgcagg

SEQ ID NO: 267138 - DNA, 21 bp, Artificial sequence
  SiRNA target sequence
cggtacgttacgttcgcaggg

SEQ ID NO: 267139 - DNA, 21 bp, Artificial sequence
  SiRNA target sequence
ggtacgttacgttcgcagggc

SEQ ID NO: 267140 - DNA, 21 bp, Artificial sequence
  SiRNA target sequence
gtacgttacgttcgcagggca

SEQ ID NO: 267141 - DNA, 21 bp, Artificial sequence
  SiRNA target sequence
tacgttacgttcgcagggcac

SEQ ID NO: 267142 - DNA, 21 bp, Artificial sequence
  SiRNA target sequence
acgttacgttcgcagggcacc

SEQ ID NO: 267143 - DNA, 21 bp, Artificial sequence
  SiRNA target sequence
cgttacgttcgcagggcaccc

SEQ ID NO: 267144 - DNA, 21 bp, Artificial sequence
  SiRNA target sequence
gttacgttcgcagggcacccg

SEQ ID NO: 267145 - DNA, 21 bp, Artificial sequence
  SiRNA target sequence
ttacgttcgcagggcacccgt

SEQ ID NO: 267146 - DNA, 21 bp, Artificial sequence
  SiRNA target sequence
tacgttcgcagggcacccgtt

SEQ ID NO: 267147 - DNA, 21 bp, Artificial sequence
  SiRNA target sequence
acgttcgcagggcacccgtta

SEQ ID NO: 267148 - DNA, 21 bp, Artificial sequence
  SiRNA target sequence
cgttcgcagggcacccgttaa

SEQ ID NO: 267149 - DNA, 21 bp, Artificial sequence
  SiRNA target sequence
gttcgcagggcacccgttaat

SEQ ID NO: 267150 - DNA, 21 bp, Artificial sequence
  SiRNA target sequence
ttcgcagggcacccgttaatg

SEQ ID NO: 267151 - DNA, 21 bp, Artificial sequence
  SiRNA target sequence
tcgcagggcacccgttaatgt

SEQ ID NO: 267152 - DNA, 21 bp, Artificial sequence
  SiRNA target sequence
cgcagggcacccgttaatgtc

SEQ ID NO: 267153 - DNA, 21 bp, Artificial sequence
  SiRNA target sequence
gcagggcacccgttaatgtct

SEQ ID NO: 267154 - DNA, 21 bp, Artificial sequence
  SiRNA target sequence
cagggcacccgttaatgtctc

SEQ ID NO: 267155 - DNA, 21 bp, Artificial sequence
  SiRNA target sequence
agggcacccgttaatgtctca

SEQ ID NO: 267156 - DNA, 21 bp, Artificial sequence
  SiRNA target sequence
gggcacccgttaatgtctcat

SEQ ID NO: 267157 - DNA, 21 bp, Artificial sequence
  SiRNA target sequence
ggcacccgttaatgtctcata

SEQ ID NO: 267158 - DNA, 21 bp, Artificial sequence
  SiRNA target sequence
gcacccgttaatgtctcatag

SEQ ID NO: 267159 - DNA, 21 bp, Artificial sequence
  SiRNA target sequence
cacccgttaatgtctcatagc

SEQ ID NO: 267160 - DNA, 21 bp, Artificial sequence
  SiRNA target sequence
acccgttaatgtctcatagcc

SEQ ID NO: 267161 - DNA, 21 bp, Artificial sequence
  SiRNA target sequence
cccgttaatgtctcatagccc

SEQ ID NO: 267162 - DNA, 21 bp, Artificial sequence
  SiRNA target sequence
ccgttaatgtctcatagccca

SEQ ID NO: 267163 - DNA, 21 bp, Artificial sequence
  SiRNA target sequence
cgttaatgtctcatagcccag

SEQ ID NO: 267164 - DNA, 21 bp, Artificial sequence
  SiRNA target sequence
gttaatgtctcatagcccaga

SEQ ID NO: 267165 - DNA, 21 bp, Artificial sequence
  SiRNA target sequence
ttaatgtctcatagcccagac

SEQ ID NO: 267166 - DNA, 21 bp, Artificial sequence
  SiRNA target sequence
taatgtctcatagcccagacg

SEQ ID NO: 267167 - DNA, 21 bp, Artificial sequence
  SiRNA target sequence
aatgtctcatagcccagacga

SEQ ID NO: 267168 - DNA, 21 bp, Artificial sequence
  SiRNA target sequence
atgtctcatagcccagacgat

SEQ ID NO: 267169 - DNA, 21 bp, Artificial sequence
  SiRNA target sequence
tgtctcatagcccagacgatg

SEQ ID NO: 267170 - DNA, 21 bp, Artificial sequence
  SiRNA target sequence
gtctcatagcccagacgatgg

SEQ ID NO: 267171 - DNA, 21 bp, Artificial sequence
  SiRNA target sequence
tctcatagcccagacgatggc

SEQ ID NO: 267172 - DNA, 21 bp, Artificial sequence
  SiRNA target sequence
ctcatagcccagacgatggcg

SEQ ID NO: 267173 - DNA, 21 bp, Artificial sequence
  SiRNA target sequence
tcatagcccagacgatggcgg

SEQ ID NO: 267174 - DNA, 21 bp, Artificial sequence
  SiRNA target sequence
catagcccagacgatggcgga

SEQ ID NO: 267175 - DNA, 21 bp, Artificial sequence
  SiRNA target sequence
atagcccagacgatggcggat

SEQ ID NO: 267176 - DNA, 21 bp, Artificial sequence
  SiRNA target sequence
tagcccagacgatggcggatg

SEQ ID NO: 267177 - DNA, 21 bp, Artificial sequence
  SiRNA target sequence
agcccagacgatggcggatgg

SEQ ID NO: 267178 - DNA, 21 bp, Artificial sequence
  SiRNA target sequence
gcccagacgatggcggatgga

SEQ ID NO: 267179 - DNA, 21 bp, Artificial sequence
  SiRNA target sequence
cccagacgatggcggatggaa

SEQ ID NO: 267180 - DNA, 21 bp, Artificial sequence
  SiRNA target sequence
ccagacgatggcggatggaaa

SEQ ID NO: 267181 - DNA, 21 bp, Artificial sequence
  SiRNA target sequence
cagacgatggcggatggaaag

SEQ ID NO: 267182 - DNA, 21 bp, Artificial sequence
  SiRNA target sequence
agacgatggcggatggaaaga

SEQ ID NO: 267183 - DNA, 21 bp, Artificial sequence
  SiRNA target sequence
gacgatggcggatggaaagac

SEQ ID NO: 267184 - DNA, 21 bp, Artificial sequence
  SiRNA target sequence
acgatggcggatggaaagaca

SEQ ID NO: 267185 - DNA, 21 bp, Artificial sequence
  SiRNA target sequence
cgatggcggatggaaagacat

SEQ ID NO: 267186 - DNA, 21 bp, Artificial sequence
  SiRNA target sequence
gatggcggatggaaagacatc

SEQ ID NO: 267187 - DNA, 21 bp, Artificial sequence
  SiRNA target sequence
atggcggatggaaagacatca

SEQ ID NO: 267188 - DNA, 21 bp, Artificial sequence
  SiRNA target sequence
tggcggatggaaagacatcat

SEQ ID NO: 267189 - DNA, 21 bp, Artificial sequence
  SiRNA target sequence
ggcggatggaaagacatcata

SEQ ID NO: 267190 - DNA, 21 bp, Artificial sequence
  SiRNA target sequence
gcggatggaaagacatcatat

SEQ ID NO: 267191 - DNA, 21 bp, Artificial sequence
  SiRNA target sequence
cggatggaaagacatcatatt

SEQ ID NO: 267192 - DNA, 21 bp, Artificial sequence
  SiRNA target sequence
ggatggaaagacatcatattt

SEQ ID NO: 267193 - DNA, 21 bp, Artificial sequence
  SiRNA target sequence
gatggaaagacatcatatttt

SEQ ID NO: 267194 - DNA, 21 bp, Artificial sequence
  SiRNA target sequence
atggaaagacatcatatttta

SEQ ID NO: 267195 - DNA, 21 bp, Artificial sequence
  SiRNA target sequence
tggaaagacatcatattttat

SEQ ID NO: 267196 - DNA, 21 bp, Artificial sequence
  SiRNA target sequence
ggaaagacatcatattttatt

SEQ ID NO: 267197 - DNA, 21 bp, Artificial sequence
  SiRNA target sequence
gaaagacatcatattttattt

SEQ ID NO: 267198 - DNA, 21 bp, Artificial sequence
  SiRNA target sequence
aaagacatcatattttatttt

SEQ ID NO: 267199 - DNA, 21 bp, Artificial sequence
  SiRNA target sequence
aagacatcatattttatttta

SEQ ID NO: 267200 - DNA, 21 bp, Artificial sequence
  SiRNA target sequence
agacatcatattttattttaa

SEQ ID NO: 267201 - DNA, 21 bp, Artificial sequence
  SiRNA target sequence
gacatcatattttattttaat

SEQ ID NO: 267202 - DNA, 21 bp, Artificial sequence
  SiRNA target sequence
acatcatattttattttaatg

SEQ ID NO: 267203 - DNA, 21 bp, Artificial sequence
  SiRNA target sequence
catcatattttattttaatgc

SEQ ID NO: 267204 - DNA, 21 bp, Artificial sequence
  SiRNA target sequence
atcatattttattttaatgct

SEQ ID NO: 267205 - DNA, 21 bp, Artificial sequence
  SiRNA target sequence
tcatattttattttaatgctg

SEQ ID NO: 267206 - DNA, 21 bp, Artificial sequence
  SiRNA target sequence
catattttattttaatgctgt

SEQ ID NO: 267207 - DNA, 21 bp, Artificial sequence
  SiRNA target sequence
atattttattttaatgctgtc

SEQ ID NO: 267208 - DNA, 21 bp, Artificial sequence
  SiRNA target sequence
tattttattttaatgctgtct

SEQ ID NO: 267209 - DNA, 21 bp, Artificial sequence
  SiRNA target sequence
attttattttaatgctgtctt

SEQ ID NO: 267210 - DNA, 21 bp, Artificial sequence
  SiRNA target sequence
ttttattttaatgctgtcttt

SEQ ID NO: 267211 - DNA, 21 bp, Artificial sequence
  SiRNA target sequence
tttattttaatgctgtcttta

SEQ ID NO: 267212 - DNA, 21 bp, Artificial sequence
  SiRNA target sequence
ttattttaatgctgtctttat

SEQ ID NO: 267213 - DNA, 21 bp, Artificial sequence
  SiRNA target sequence
tattttaatgctgtctttatt

SEQ ID NO: 267214 - DNA, 21 bp, Artificial sequence
  SiRNA target sequence
attttaatgctgtctttattg

SEQ ID NO: 267215 - DNA, 21 bp, Artificial sequence
  SiRNA target sequence
ttttaatgctgtctttattgc

SEQ ID NO: 267216 - DNA, 21 bp, Artificial sequence
  SiRNA target sequence
tttaatgctgtctttattgct

SEQ ID NO: 267217 - DNA, 21 bp, Artificial sequence
  SiRNA target sequence
ttaatgctgtctttattgctg

SEQ ID NO: 267218 - DNA, 21 bp, Artificial sequence
  SiRNA target sequence
taatgctgtctttattgctga

SEQ ID NO: 267219 - DNA, 21 bp, Artificial sequence
  SiRNA target sequence
aatgctgtctttattgctgat

SEQ ID NO: 267220 - DNA, 21 bp, Artificial sequence
  SiRNA target sequence
atgctgtctttattgctgatt

SEQ ID NO: 267221 - DNA, 21 bp, Artificial sequence
  SiRNA target sequence
tgctgtctttattgctgattt

SEQ ID NO: 267222 - DNA, 21 bp, Artificial sequence
  SiRNA target sequence
gctgtctttattgctgattta

SEQ ID NO: 267223 - DNA, 21 bp, Artificial sequence
  SiRNA target sequence
ctgtctttattgctgatttat

SEQ ID NO: 267224 - DNA, 21 bp, Artificial sequence
  SiRNA target sequence
tgtctttattgctgatttatt

SEQ ID NO: 267225 - DNA, 21 bp, Artificial sequence
  SiRNA target sequence
gtctttattgctgatttattt

SEQ ID NO: 267226 - DNA, 21 bp, Artificial sequence
  SiRNA target sequence
tctttattgctgatttatttt

SEQ ID NO: 267227 - DNA, 21 bp, Artificial sequence
  SiRNA target sequence
ctttattgctgatttattttg

SEQ ID NO: 267228 - DNA, 21 bp, Artificial sequence
  SiRNA target sequence
tttattgctgatttattttgc

SEQ ID NO: 267229 - DNA, 21 bp, Artificial sequence
  SiRNA target sequence
ttattgctgatttattttgct

SEQ ID NO: 267230 - DNA, 21 bp, Artificial sequence
  SiRNA target sequence
tattgctgatttattttgctg

SEQ ID NO: 267231 - DNA, 21 bp, Artificial sequence
  SiRNA target sequence
attgctgatttattttgctgt

SEQ ID NO: 267232 - DNA, 21 bp, Artificial sequence
  SiRNA target sequence
ttgctgatttattttgctgtt

SEQ ID NO: 267233 - DNA, 21 bp, Artificial sequence
  SiRNA target sequence
tgctgatttattttgctgttt

SEQ ID NO: 267234 - DNA, 21 bp, Artificial sequence
  SiRNA target sequence
gctgatttattttgctgtttt

SEQ ID NO: 267235 - DNA, 21 bp, Artificial sequence
  SiRNA target sequence
ctgatttattttgctgttttt

SEQ ID NO: 267236 - DNA, 21 bp, Artificial sequence
  SiRNA target sequence
tgatttattttgctgttttta

SEQ ID NO: 267237 - DNA, 21 bp, Artificial sequence
  SiRNA target sequence
gatttattttgctgtttttat

SEQ ID NO: 267238 - DNA, 21 bp, Artificial sequence
  SiRNA target sequence
atttattttgctgtttttatt

SEQ ID NO: 267239 - DNA, 21 bp, Artificial sequence
  SiRNA target sequence
tttattttgctgtttttattt

SEQ ID NO: 267240 - DNA, 21 bp, Artificial sequence
  SiRNA target sequence
ttattttgctgtttttatttg

SEQ ID NO: 267241 - DNA, 21 bp, Artificial sequence
  SiRNA target sequence
tattttgctgtttttatttgc

SEQ ID NO: 267242 - DNA, 21 bp, Artificial sequence
  SiRNA target sequence
attttgctgtttttatttgct

SEQ ID NO: 267243 - DNA, 21 bp, Artificial sequence
  SiRNA target sequence
ttttgctgtttttatttgcta

SEQ ID NO: 267244 - DNA, 21 bp, Artificial sequence
  SiRNA target sequence
tttgctgtttttatttgctat

SEQ ID NO: 267245 - DNA, 21 bp, Artificial sequence
  SiRNA target sequence
ttgctgtttttatttgctatt

SEQ ID NO: 267246 - DNA, 21 bp, Artificial sequence
  SiRNA target sequence
tgctgtttttatttgctattt

SEQ ID NO: 267247 - DNA, 21 bp, Artificial sequence
  SiRNA target sequence
gctgtttttatttgctatttt

SEQ ID NO: 267248 - DNA, 21 bp, Artificial sequence
  SiRNA target sequence
ctgtttttatttgctatttta

SEQ ID NO: 267249 - DNA, 21 bp, Artificial sequence
  SiRNA target sequence
tgtttttatttgctattttat

SEQ ID NO: 267250 - DNA, 21 bp, Artificial sequence
  SiRNA target sequence
gtttttatttgctattttata

SEQ ID NO: 267251 - DNA, 21 bp, Artificial sequence
  SiRNA target sequence
tttttatttgctattttatat

SEQ ID NO: 267252 - DNA, 21 bp, Artificial sequence
  SiRNA target sequence
ttttatttgctattttatatt

SEQ ID NO: 267253 - DNA, 21 bp, Artificial sequence
  SiRNA target sequence
tttatttgctattttatattt

SEQ ID NO: 267254 - DNA, 21 bp, Artificial sequence
  SiRNA target sequence
ttatttgctattttatatttg

SEQ ID NO: 267255 - DNA, 21 bp, Artificial sequence
  SiRNA target sequence
tatttgctattttatatttgc

SEQ ID NO: 267256 - DNA, 21 bp, Artificial sequence
  SiRNA target sequence
atttgctattttatatttgct

SEQ ID NO: 267257 - DNA, 21 bp, Artificial sequence
  SiRNA target sequence
tttgctattttatatttgcta

SEQ ID NO: 267258 - DNA, 21 bp, Artificial sequence
  SiRNA target sequence
ttgctattttatatttgctaa

SEQ ID NO: 267259 - DNA, 21 bp, Artificial sequence
  SiRNA target sequence
tgctattttatatttgctaat

SEQ ID NO: 267260 - DNA, 21 bp, Artificial sequence
  SiRNA target sequence
gctattttatatttgctaatt

SEQ ID NO: 267261 - DNA, 21 bp, Artificial sequence
  SiRNA target sequence
  misc_feature (21)..(21): n is a, c, g, or t
ctattttatatttgctaattn

SEQ ID NO: 267262 - DNA, 21 bp, Artificial sequence
  SiRNA target sequence
  misc_feature (20)..(20): n is a, c, g, or t
tattttatatttgctaattnt

SEQ ID NO: 267263 - DNA, 21 bp, Artificial sequence
  SiRNA target sequence
  misc_feature (19)..(19): n is a, c, g, or t
attttatatttgctaattntc

SEQ ID NO: 267264 - DNA, 21 bp, Artificial sequence
  SiRNA target sequence
  misc_feature (18)..(18): n is a, c, g, or t
ttttatatttgctaattntca

SEQ ID NO: 267265 - DNA, 21 bp, Artificial sequence
  SiRNA target sequence
  misc_feature (17)..(17): n is a, c, g, or t
tttatatttgctaattntcat

SEQ ID NO: 267266 - DNA, 21 bp, Artificial sequence
  SiRNA target sequence
  misc_feature (16)..(16): n is a, c, g, or t
ttatatttgctaattntcatt

SEQ ID NO: 267267 - DNA, 21 bp, Artificial sequence
  SiRNA target sequence
  misc_feature (15)..(15): n is a, c, g, or t
tatatttgctaattntcatta

SEQ ID NO: 267268 - DNA, 21 bp, Artificial sequence
  SiRNA target sequence
  misc_feature (14)..(14): n is a, c, g, or t
atatttgctaattntcattat

SEQ ID NO: 267269 - DNA, 21 bp, Artificial sequence
  SiRNA target sequence
  misc_feature (13)..(13): n is a, c, g, or t
tatttgctaattntcattatt

SEQ ID NO: 267270 - DNA, 21 bp, Artificial sequence
  SiRNA target sequence
  misc_feature (12)..(12): n is a, c, g, or t
atttgctaattntcattattg

SEQ ID NO: 267271 - DNA, 21 bp, Artificial sequence
  SiRNA target sequence
  misc_feature (11)..(11): n is a, c, g, or t
tttgctaattntcattattgc

SEQ ID NO: 267272 - DNA, 21 bp, Artificial sequence
  SiRNA target sequence
  misc_feature (10)..(10): n is a, c, g, or t
ttgctaattntcattattgcg

SEQ ID NO: 267273 - DNA, 21 bp, Artificial sequence
  SiRNA target sequence
  misc_feature (9)..(9): n is a, c, g, or t
tgctaattntcattattgcga

SEQ ID NO: 267274 - DNA, 21 bp, Artificial sequence
  SiRNA target sequence
  misc_feature (8)..(8): n is a, c, g, or t
gctaattntcattattgcgaa

SEQ ID NO: 267275 - DNA, 21 bp, Artificial sequence
  SiRNA target sequence
  misc_feature (7)..(7): n is a, c, g, or t
ctaattntcattattgcgaaa

SEQ ID NO: 267276 - DNA, 21 bp, Artificial sequence
  SiRNA target sequence
  misc_feature (6)..(6): n is a, c, g, or t
taattntcattattgcgaaat

SEQ ID NO: 267277 - DNA, 21 bp, Artificial sequence
  SiRNA target sequence
  misc_feature (5)..(5): n is a, c, g, or t
aattntcattattgcgaaata

SEQ ID NO: 267278 - DNA, 21 bp, Artificial sequence
  SiRNA target sequence
  misc_feature (4)..(4): n is a, c, g, or t
attntcattattgcgaaatat

SEQ ID NO: 267279 - DNA, 21 bp, Artificial sequence
  SiRNA target sequence
  misc_feature (3)..(3): n is a, c, g, or t
ttntcattattgcgaaatata

SEQ ID NO: 267280 - DNA, 21 bp, Artificial sequence
  SiRNA target sequence
  misc_feature (2)..(2): n is a, c, g, or t
tntcattattgcgaaatatat

SEQ ID NO: 267281 - DNA, 21 bp, Artificial sequence
  SiRNA target sequence
  misc_feature (1)..(1): n is a, c, g, or t
ntcattattgcgaaatatatt

SEQ ID NO: 267282 - DNA, 21 bp, Artificial sequence
  SiRNA target sequence
tcattattgcgaaatatatta

SEQ ID NO: 267283 - DNA, 21 bp, Artificial sequence
  SiRNA target sequence
cattattgcgaaatatattac

SEQ ID NO: 267284 - DNA, 21 bp, Artificial sequence
  SiRNA target sequence
attattgcgaaatatattaca

SEQ ID NO: 267285 - DNA, 21 bp, Artificial sequence
  SiRNA target sequence
ttattgcgaaatatattacat

SEQ ID NO: 267286 - DNA, 21 bp, Artificial sequence
  SiRNA target sequence
tattgcgaaatatattacatt

SEQ ID NO: 267287 - DNA, 21 bp, Artificial sequence
  SiRNA target sequence
attgcgaaatatattacattg

SEQ ID NO: 267288 - DNA, 21 bp, Artificial sequence
  SiRNA target sequence
ttgcgaaatatattacattgc

SEQ ID NO: 267289 - DNA, 21 bp, Artificial sequence
  SiRNA target sequence
tgcgaaatatattacattgct

SEQ ID NO: 267290 - DNA, 21 bp, Artificial sequence
  SiRNA target sequence
gcgaaatatattacattgcta

SEQ ID NO: 267291 - DNA, 21 bp, Artificial sequence
  SiRNA target sequence
cgaaatatattacattgctat

SEQ ID NO: 267292 - DNA, 21 bp, Artificial sequence
  SiRNA target sequence
gaaatatattacattgctatt

SEQ ID NO: 267293 - DNA, 21 bp, Artificial sequence
  SiRNA target sequence
aaatatattacattgctattt

SEQ ID NO: 267294 - DNA, 21 bp, Artificial sequence
  SiRNA target sequence
aatatattacattgctatttt

SEQ ID NO: 267295 - DNA, 21 bp, Artificial sequence
  SiRNA target sequence
atatattacattgctattttt

SEQ ID NO: 267296 - DNA, 21 bp, Artificial sequence
  SiRNA target sequence
tatattacattgctattttta

SEQ ID NO: 267297 - DNA, 21 bp, Artificial sequence
  SiRNA target sequence
atattacattgctatttttat

SEQ ID NO: 267298 - DNA, 21 bp, Artificial sequence
  SiRNA target sequence
tattacattgctatttttatt

SEQ ID NO: 267299 - DNA, 21 bp, Artificial sequence
  SiRNA target sequence
attacattgctatttttatta

SEQ ID NO: 267300 - DNA, 21 bp, Artificial sequence
  SiRNA target sequence
ttacattgctatttttattat

SEQ ID NO: 267301 - DNA, 21 bp, Artificial sequence
  SiRNA target sequence
tacattgctatttttattata

SEQ ID NO: 267302 - DNA, 21 bp, Artificial sequence
  SiRNA target sequence
acattgctatttttattatat

SEQ ID NO: 267303 - DNA, 21 bp, Artificial sequence
  SiRNA target sequence
cattgctatttttattatata

SEQ ID NO: 267304 - DNA, 21 bp, Artificial sequence
  SiRNA target sequence
attgctatttttattatatac

SEQ ID NO: 267305 - DNA, 21 bp, Artificial sequence
  SiRNA target sequence
ttgctatttttattatatacg

SEQ ID NO: 267306 - DNA, 21 bp, Artificial sequence
  SiRNA target sequence
tgctatttttattatatacgc

SEQ ID NO: 267307 - DNA, 21 bp, Artificial sequence
  SiRNA target sequence
gctatttttattatatacgct

SEQ ID NO: 267308 - DNA, 21 bp, Artificial sequence
  SiRNA target sequence
ctatttttattatatacgcta

SEQ ID NO: 267309 - DNA, 21 bp, Artificial sequence
  SiRNA target sequence
tatttttattatatacgctag

SEQ ID NO: 267310 - DNA, 21 bp, Artificial sequence
  SiRNA target sequence
atttttattatatacgctaga

SEQ ID NO: 267311 - DNA, 21 bp, Artificial sequence
  SiRNA target sequence
tttttattatatacgctagat

SEQ ID NO: 267312 - DNA, 21 bp, Artificial sequence
  SiRNA target sequence
ttttattatatacgctagatt

SEQ ID NO: 267313 - DNA, 21 bp, Artificial sequence
  SiRNA target sequence
tttattatatacgctagattc

SEQ ID NO: 267314 - DNA, 21 bp, Artificial sequence
  SiRNA target sequence
ttattatatacgctagattca

SEQ ID NO: 267315 - DNA, 21 bp, Artificial sequence
  SiRNA target sequence
tattatatacgctagattcaa

SEQ ID NO: 267316 - DNA, 21 bp, Artificial sequence
  SiRNA target sequence
attatatacgctagattcaat

SEQ ID NO: 267317 - DNA, 21 bp, Artificial sequence
  SiRNA target sequence
ttatatacgctagattcaatt

SEQ ID NO: 267318 - DNA, 21 bp, Artificial sequence
  SiRNA target sequence
tatatacgctagattcaattt

SEQ ID NO: 267319 - DNA, 21 bp, Artificial sequence
  SiRNA target sequence
atatacgctagattcaatttt

SEQ ID NO: 267320 - DNA, 21 bp, Artificial sequence
  SiRNA target sequence
tatacgctagattcaatttta

SEQ ID NO: 267321 - DNA, 21 bp, Artificial sequence
  SiRNA target sequence
atacgctagattcaattttat

SEQ ID NO: 267322 - DNA, 21 bp, Artificial sequence
  SiRNA target sequence
tacgctagattcaattttatt

SEQ ID NO: 267323 - DNA, 21 bp, Artificial sequence
  SiRNA target sequence
acgctagattcaattttattt

SEQ ID NO: 267324 - DNA, 21 bp, Artificial sequence
  SiRNA target sequence
cgctagattcaattttatttt

SEQ ID NO: 267325 - DNA, 21 bp, Artificial sequence
  SiRNA target sequence
gctagattcaattttattttt

SEQ ID NO: 267326 - DNA, 21 bp, Artificial sequence
  SiRNA target sequence
  misc_feature (21)..(21): n is a, c, g, or t
ctagattcaattttatttttn

SEQ ID NO: 267327 - DNA, 21 bp, Artificial sequence
  SiRNA target sequence
  misc_feature (20)..(20): n is a, c, g, or t
tagattcaattttatttttnc

SEQ ID NO: 267328 - DNA, 21 bp, Artificial sequence
  SiRNA target sequence
  misc_feature (19)..(19): n is a, c, g, or t
agattcaattttatttttnct

SEQ ID NO: 267329 - DNA, 21 bp, Artificial sequence
  SiRNA target sequence
  misc_feature (18)..(18): n is a, c, g, or t
gattcaattttatttttncta

SEQ ID NO: 267330 - DNA, 21 bp, Artificial sequence
  SiRNA target sequence
  misc_feature (17)..(17): n is a, c, g, or t
attcaattttatttttnctat

SEQ ID NO: 267331 - DNA, 21 bp, Artificial sequence
  SiRNA target sequence
  misc_feature (16)..(16): n is a, c, g, or t
ttcaattttatttttnctata

SEQ ID NO: 267332 - DNA, 21 bp, Artificial sequence
  SiRNA target sequence
  misc_feature (15)..(15): n is a, c, g, or t
tcaattttatttttnctatat

SEQ ID NO: 267333 - DNA, 21 bp, Artificial sequence
  SiRNA target sequence
  misc_feature (14)..(14): n is a, c, g, or t
caattttatttttnctatatt

SEQ ID NO: 267334 - DNA, 21 bp, Artificial sequence
  SiRNA target sequence
  misc_feature (13)..(13): n is a, c, g, or t
aattttatttttnctatattt

SEQ ID NO: 267335 - DNA, 21 bp, Artificial sequence
  SiRNA target sequence
  misc_feature (12)..(12): n is a, c, g, or t
attttatttttnctatatttt

SEQ ID NO: 267336 - DNA, 21 bp, Artificial sequence
  SiRNA target sequence
  misc_feature (11)..(11): n is a, c, g, or t
ttttatttttnctatattttc

SEQ ID NO: 267337 - DNA, 21 bp, Artificial sequence
  SiRNA target sequence
  misc_feature (10)..(10): n is a, c, g, or t
tttatttttnctatattttca

SEQ ID NO: 267338 - DNA, 21 bp, Artificial sequence
  SiRNA target sequence
  misc_feature (9)..(9): n is a, c, g, or t
ttatttttnctatattttcaa

SEQ ID NO: 267339 - DNA, 21 bp, Artificial sequence
  SiRNA target sequence
  misc_feature (8)..(8): n is a, c, g, or t
tatttttnctatattttcaat

SEQ ID NO: 267340 - DNA, 21 bp, Artificial sequence
  SiRNA target sequence
  misc_feature (7)..(7): n is a, c, g, or t
atttttnctatattttcaatt

SEQ ID NO: 267341 - DNA, 21 bp, Artificial sequence
  SiRNA target sequence
  misc_feature (6)..(6): n is a, c, g, or t
tttttnctatattttcaattt

SEQ ID NO: 267342 - DNA, 21 bp, Artificial sequence
  SiRNA target sequence
  misc_feature (5)..(5): n is a, c, g, or t
ttttnctatattttcaattta

SEQ ID NO: 267343 - DNA, 21 bp, Artificial sequence
  SiRNA target sequence
  misc_feature (4)..(4): n is a, c, g, or t
tttnctatattttcaatttaa

SEQ ID NO: 267344 - DNA, 21 bp, Artificial sequence
  SiRNA target sequence
  misc_feature (3)..(3): n is a, c, g, or t
ttnctatattttcaatttaat

SEQ ID NO: 267345 - DNA, 21 bp, Artificial sequence
  SiRNA target sequence
  misc_feature (2)..(2): n is a, c, g, or t
tnctatattttcaatttaatt

SEQ ID NO: 267346 - DNA, 21 bp, Artificial sequence
  SiRNA target sequence
  misc_feature (1)..(1): n is a, c, g, or t
nctatattttcaatttaattt

SEQ ID NO: 267347 - DNA, 21 bp, Artificial sequence
  SiRNA target sequence
ctatattttcaatttaatttt

SEQ ID NO: 267348 - DNA, 21 bp, Artificial sequence
  SiRNA target sequence
tatattttcaatttaattttg

SEQ ID NO: 267349 - DNA, 21 bp, Artificial sequence
  SiRNA target sequence
atattttcaatttaattttga

SEQ ID NO: 267350 - DNA, 21 bp, Artificial sequence
  SiRNA target sequence
tattttcaatttaattttgat

SEQ ID NO: 267351 - DNA, 21 bp, Artificial sequence
  SiRNA target sequence
attttcaatttaattttgatt

SEQ ID NO: 267352 - DNA, 21 bp, Artificial sequence
  SiRNA target sequence
ttttcaatttaattttgattt

SEQ ID NO: 267353 - DNA, 21 bp, Artificial sequence
  SiRNA target sequence
tttcaatttaattttgatttc

SEQ ID NO: 267354 - DNA, 21 bp, Artificial sequence
  SiRNA target sequence
ttcaatttaattttgatttcg

SEQ ID NO: 267355 - DNA, 21 bp, Artificial sequence
  SiRNA target sequence
tcaatttaattttgatttcga

SEQ ID NO: 267356 - DNA, 21 bp, Artificial sequence
  SiRNA target sequence
caatttaattttgatttcgaa

SEQ ID NO: 267357 - DNA, 21 bp, Artificial sequence
  SiRNA target sequence
aatttaattttgatttcgaag

SEQ ID NO: 267358 - DNA, 21 bp, Artificial sequence
  SiRNA target sequence
atttaattttgatttcgaagg

SEQ ID NO: 267359 - DNA, 21 bp, Artificial sequence
  SiRNA target sequence
tttaattttgatttcgaaggt

SEQ ID NO: 267360 - DNA, 21 bp, Artificial sequence
  SiRNA target sequence
ttaattttgatttcgaaggta

SEQ ID NO: 267361 - DNA, 21 bp, Artificial sequence
  SiRNA target sequence
taattttgatttcgaaggtaa

SEQ ID NO: 267362 - DNA, 21 bp, Artificial sequence
  SiRNA target sequence
aattttgatttcgaaggtaaa

SEQ ID NO: 267363 - DNA, 21 bp, Artificial sequence
  SiRNA target sequence
attttgatttcgaaggtaaat

SEQ ID NO: 267364 - DNA, 21 bp, Artificial sequence
  SiRNA target sequence
ttttgatttcgaaggtaaata

SEQ ID NO: 267365 - DNA, 21 bp, Artificial sequence
  SiRNA target sequence
tttgatttcgaaggtaaatat

SEQ ID NO: 267366 - DNA, 21 bp, Artificial sequence
  SiRNA target sequence
ttgatttcgaaggtaaatata

SEQ ID NO: 267367 - DNA, 21 bp, Artificial sequence
  SiRNA target sequence
tgatttcgaaggtaaatatat

SEQ ID NO: 267368 - DNA, 21 bp, Artificial sequence
  SiRNA target sequence
gatttcgaaggtaaatatata

SEQ ID NO: 267369 - DNA, 21 bp, Artificial sequence
  SiRNA target sequence
atttcgaaggtaaatatatat

SEQ ID NO: 267370 - DNA, 21 bp, Artificial sequence
  SiRNA target sequence
tttcgaaggtaaatatatata

SEQ ID NO: 267371 - DNA, 21 bp, Artificial sequence
  SiRNA target sequence
ttcgaaggtaaatatatataa

SEQ ID NO: 267372 - DNA, 21 bp, Artificial sequence
  SiRNA target sequence
tcgaaggtaaatatatataat

SEQ ID NO: 267373 - DNA, 21 bp, Artificial sequence
  SiRNA target sequence
cgaaggtaaatatatataatt

SEQ ID NO: 267374 - DNA, 21 bp, Artificial sequence
  SiRNA target sequence
  misc_feature (21)..(21): n is a, c, g, or t
gaaggtaaatatatataattn

SEQ ID NO: 267375 - DNA, 21 bp, Artificial sequence
  SiRNA target sequence
  misc_feature (20)..(20): n is a, c, g, or t
aaggtaaatatatataattna

SEQ ID NO: 267376 - DNA, 21 bp, Artificial sequence
  SiRNA target sequence
  misc_feature (19)..(19): n is a, c, g, or t
aggtaaatatatataattnat

SEQ ID NO: 267377 - DNA, 21 bp, Artificial sequence
  SiRNA target sequence
  misc_feature (18)..(18): n is a, c, g, or t
ggtaaatatatataattnatt

SEQ ID NO: 267378 - DNA, 21 bp, Artificial sequence
  SiRNA target sequence
  misc_feature (17)..(17): n is a, c, g, or t
gtaaatatatataattnatta

SEQ ID NO: 267379 - DNA, 21 bp, Artificial sequence
  SiRNA target sequence
  misc_feature (16)..(16): n is a, c, g, or t
taaatatatataattnattat

SEQ ID NO: 267380 - DNA, 21 bp, Artificial sequence
  SiRNA target sequence
  misc_feature (15)..(15): n is a, c, g, or t
aaatatatataattnattatt

SEQ ID NO: 267381 - DNA, 21 bp, Artificial sequence
  SiRNA target sequence
  misc_feature (14)..(14): n is a, c, g, or t
aatatatataattnattatta

SEQ ID NO: 267382 - DNA, 21 bp, Artificial sequence
  SiRNA target sequence
  misc_feature (13)..(13): n is a, c, g, or t
atatatataattnattattaa

SEQ ID NO: 267383 - DNA, 21 bp, Artificial sequence
  SiRNA target sequence
  misc_feature (12)..(12): n is a, c, g, or t
tatatataattnattattaaa

SEQ ID NO: 267384 - DNA, 21 bp, Artificial sequence
  SiRNA target sequence
  misc_feature (11)..(11): n is a, c, g, or t
atatataattnattattaaaa

SEQ ID NO: 267385 - DNA, 21 bp, Artificial sequence
  SiRNA target sequence
  misc_feature (10)..(10): n is a, c, g, or t
tatataattnattattaaaaa

SEQ ID NO: 267386 - DNA, 21 bp, Artificial sequence
  SiRNA target sequence
  misc_feature (9)..(9): n is a, c, g, or t
atataattnattattaaaaat

SEQ ID NO: 267387 - DNA, 21 bp, Artificial sequence
  SiRNA target sequence
  misc_feature (8)..(8): n is a, c, g, or t
tataattnattattaaaaatg

SEQ ID NO: 267388 - DNA, 21 bp, Artificial sequence
  SiRNA target sequence
  misc_feature (7)..(7): n is a, c, g, or t
ataattnattattaaaaatgg

SEQ ID NO: 267389 - DNA, 21 bp, Artificial sequence
  SiRNA target sequence
  misc_feature (6)..(6): n is a, c, g, or t
taattnattattaaaaatggc

SEQ ID NO: 267390 - DNA, 21 bp, Artificial sequence
  SiRNA target sequence
  misc_feature (5)..(5): n is a, c, g, or t
aattnattattaaaaatggcc

SEQ ID NO: 267391 - DNA, 21 bp, Artificial sequence
  SiRNA target sequence
  misc_feature (4)..(4): n is a, c, g, or t
attnattattaaaaatggcct

SEQ ID NO: 267392 - DNA, 21 bp, Artificial sequence
  SiRNA target sequence
  misc_feature (3)..(3): n is a, c, g, or t
ttnattattaaaaatggcctt

SEQ ID NO: 267393 - DNA, 21 bp, Artificial sequence
  SiRNA target sequence
  misc_feature (2)..(2): n is a, c, g, or t
tnattattaaaaatggccttt

SEQ ID NO: 267394 - DNA, 21 bp, Artificial sequence
  SiRNA target sequence
  misc_feature (1)..(1): n is a, c, g, or t
nattattaaaaatggccttta

SEQ ID NO: 267395 - DNA, 21 bp, Artificial sequence
  SiRNA target sequence
attattaaaaatggcctttag

SEQ ID NO: 267396 - DNA, 21 bp, Artificial sequence
  SiRNA target sequence
ttattaaaaatggcctttagt

SEQ ID NO: 267397 - DNA, 21 bp, Artificial sequence
  SiRNA target sequence
tattaaaaatggcctttagtt

SEQ ID NO: 267398 - DNA, 21 bp, Artificial sequence
  SiRNA target sequence
attaaaaatggcctttagttg

SEQ ID NO: 267399 - DNA, 21 bp, Artificial sequence
  SiRNA target sequence
ttaaaaatggcctttagttgt

SEQ ID NO: 267400 - DNA, 21 bp, Artificial sequence
  SiRNA target sequence
taaaaatggcctttagttgtg

SEQ ID NO: 267401 - DNA, 21 bp, Artificial sequence
  SiRNA target sequence
aaaaatggcctttagttgtgg

SEQ ID NO: 267402 - DNA, 21 bp, Artificial sequence
  SiRNA target sequence
aaaatggcctttagttgtgga

SEQ ID NO: 267403 - DNA, 21 bp, Artificial sequence
  SiRNA target sequence
aaatggcctttagttgtggaa

SEQ ID NO: 267404 - DNA, 21 bp, Artificial sequence
  SiRNA target sequence
aatggcctttagttgtggaac

SEQ ID NO: 267405 - DNA, 21 bp, Artificial sequence
  SiRNA target sequence
atggcctttagttgtggaact

SEQ ID NO: 267406 - DNA, 21 bp, Artificial sequence
  SiRNA target sequence
tggcctttagttgtggaactc

SEQ ID NO: 267407 - DNA, 21 bp, Artificial sequence
  SiRNA target sequence
ggcctttagttgtggaactct

SEQ ID NO: 267408 - DNA, 21 bp, Artificial sequence
  SiRNA target sequence
  misc_feature (21)..(21): n is a, c, g, or t
gcctttagttgtggaactctn

SEQ ID NO: 267409 - DNA, 21 bp, Artificial sequence
  SiRNA target sequence
  misc_feature (20)..(20): n is a, c, g, or t
cctttagttgtggaactctnt

SEQ ID NO: 267410 - DNA, 21 bp, Artificial sequence
  SiRNA target sequence
  misc_feature (19)..(19): n is a, c, g, or t
ctttagttgtggaactctntc

SEQ ID NO: 267411 - DNA, 21 bp, Artificial sequence
  SiRNA target sequence
  misc_feature (18)..(18): n is a, c, g, or t
tttagttgtggaactctntct

SEQ ID NO: 267412 - DNA, 21 bp, Artificial sequence
  SiRNA target sequence
  misc_feature (17)..(17): n is a, c, g, or t
ttagttgtggaactctntctt

SEQ ID NO: 267413 - DNA, 21 bp, Artificial sequence
  SiRNA target sequence
  misc_feature (16)..(16): n is a, c, g, or t
tagttgtggaactctntctta

SEQ ID NO: 267414 - DNA, 21 bp, Artificial sequence
  SiRNA target sequence
  misc_feature (15)..(15): n is a, c, g, or t
agttgtggaactctntcttac

SEQ ID NO: 267415 - DNA, 21 bp, Artificial sequence
  SiRNA target sequence
  misc_feature (14)..(14): n is a, c, g, or t
gttgtggaactctntcttact

SEQ ID NO: 267416 - DNA, 21 bp, Artificial sequence
  SiRNA target sequence
  misc_feature (13)..(13): n is a, c, g, or t
ttgtggaactctntcttactc

SEQ ID NO: 267417 - DNA, 21 bp, Artificial sequence
  SiRNA target sequence
  misc_feature (12)..(12): n is a, c, g, or t
tgtggaactctntcttactct

SEQ ID NO: 267418 - DNA, 21 bp, Artificial sequence
  SiRNA target sequence
  misc_feature (11)..(11): n is a, c, g, or t
gtggaactctntcttactctg

SEQ ID NO: 267419 - DNA, 21 bp, Artificial sequence
  SiRNA target sequence
  misc_feature (10)..(10): n is a, c, g, or t
tggaactctntcttactctgc

SEQ ID NO: 267420 - DNA, 21 bp, Artificial sequence
  SiRNA target sequence
  misc_feature (9)..(9): n is a, c, g, or t
ggaactctntcttactctgcc

SEQ ID NO: 267421 - DNA, 21 bp, Artificial sequence
  SiRNA target sequence
  misc_feature (8)..(8): n is a, c, g, or t
gaactctntcttactctgccg

SEQ ID NO: 267422 - DNA, 21 bp, Artificial sequence
  SiRNA target sequence
  misc_feature (7)..(7): n is a, c, g, or t
aactctntcttactctgccgt

SEQ ID NO: 267423 - DNA, 21 bp, Artificial sequence
  SiRNA target sequence
  misc_feature (6)..(6): n is a, c, g, or t
actctntcttactctgccgtc

SEQ ID NO: 267424 - DNA, 21 bp, Artificial sequence
  SiRNA target sequence
  misc_feature (5)..(5): n is a, c, g, or t
ctctntcttactctgccgtcg

SEQ ID NO: 267425 - DNA, 21 bp, Artificial sequence
  SiRNA target sequence
  misc_feature (4)..(4): n is a, c, g, or t
tctntcttactctgccgtcgc

SEQ ID NO: 267426 - DNA, 21 bp, Artificial sequence
  SiRNA target sequence
  misc_feature (3)..(3): n is a, c, g, or t
ctntcttactctgccgtcgcc

SEQ ID NO: 267427 - DNA, 21 bp, Artificial sequence
  SiRNA target sequence
  misc_feature (2)..(2): n is a, c, g, or t
tntcttactctgccgtcgccc

SEQ ID NO: 267428 - DNA, 21 bp, Artificial sequence
  SiRNA target sequence
  misc_feature (1)..(1): n is a, c, g, or t
ntcttactctgccgtcgccca

SEQ ID NO: 267429 - DNA, 21 bp, Artificial sequence
  SiRNA target sequence
tcttactctgccgtcgcccaa

SEQ ID NO: 267430 - DNA, 21 bp, Artificial sequence
  SiRNA target sequence
cttactctgccgtcgcccaag

SEQ ID NO: 267431 - DNA, 21 bp, Artificial sequence
  SiRNA target sequence
ttactctgccgtcgcccaagc

SEQ ID NO: 267432 - DNA, 21 bp, Artificial sequence
  SiRNA target sequence
tactctgccgtcgcccaagct

SEQ ID NO: 267433 - DNA, 21 bp, Artificial sequence
  SiRNA target sequence
actctgccgtcgcccaagctc

SEQ ID NO: 267434 - DNA, 21 bp, Artificial sequence
  SiRNA target sequence
ctctgccgtcgcccaagctcc

SEQ ID NO: 267435 - DNA, 21 bp, Artificial sequence
  SiRNA target sequence
tctgccgtcgcccaagctccg

SEQ ID NO: 267436 - DNA, 21 bp, Artificial sequence
  SiRNA target sequence
ctgccgtcgcccaagctccgt

SEQ ID NO: 267437 - DNA, 21 bp, Artificial sequence
  SiRNA target sequence
tgccgtcgcccaagctccgtc

SEQ ID NO: 267438 - DNA, 21 bp, Artificial sequence
  SiRNA target sequence
gccgtcgcccaagctccgtct

SEQ ID NO: 267439 - DNA, 21 bp, Artificial sequence
  SiRNA target sequence
ccgtcgcccaagctccgtctg

SEQ ID NO: 267440 - DNA, 21 bp, Artificial sequence
  SiRNA target sequence
cgtcgcccaagctccgtctgt

SEQ ID NO: 267441 - DNA, 21 bp, Artificial sequence
  SiRNA target sequence
gtcgcccaagctccgtctgtc

SEQ ID NO: 267442 - DNA, 21 bp, Artificial sequence
  SiRNA target sequence
tcgcccaagctccgtctgtcg

SEQ ID NO: 267443 - DNA, 21 bp, Artificial sequence
  SiRNA target sequence
cgcccaagctccgtctgtcgc

SEQ ID NO: 267444 - DNA, 21 bp, Artificial sequence
  SiRNA target sequence
  misc_feature (21)..(21): n is a, c, g, or t
gcccaagctccgtctgtcgcn

SEQ ID NO: 267445 - DNA, 21 bp, Artificial sequence
  SiRNA target sequence
  misc_feature (20)..(20): n is a, c, g, or t
cccaagctccgtctgtcgcnt

SEQ ID NO: 267446 - DNA, 21 bp, Artificial sequence
  SiRNA target sequence
  misc_feature (19)..(19): n is a, c, g, or t
ccaagctccgtctgtcgcnta

SEQ ID NO: 267447 - DNA, 21 bp, Artificial sequence
  SiRNA target sequence
  misc_feature (18)..(18): n is a, c, g, or t
caagctccgtctgtcgcntat

SEQ ID NO: 267448 - DNA, 21 bp, Artificial sequence
  SiRNA target sequence
  misc_feature (17)..(17): n is a, c, g, or t
aagctccgtctgtcgcntatg

SEQ ID NO: 267449 - DNA, 21 bp, Artificial sequence
  SiRNA target sequence
  misc_feature (16)..(16): n is a, c, g, or t
agctccgtctgtcgcntatgc

SEQ ID NO: 267450 - DNA, 21 bp, Artificial sequence
  SiRNA target sequence
  misc_feature (15)..(15): n is a, c, g, or t
gctccgtctgtcgcntatgca

SEQ ID NO: 267451 - DNA, 21 bp, Artificial sequence
  SiRNA target sequence
  misc_feature (14)..(14): n is a, c, g, or t
ctccgtctgtcgcntatgcac

SEQ ID NO: 267452 - DNA, 21 bp, Artificial sequence
  SiRNA target sequence
  misc_feature (13)..(13): n is a, c, g, or t
tccgtctgtcgcntatgcacc

SEQ ID NO: 267453 - DNA, 21 bp, Artificial sequence
  SiRNA target sequence
  misc_feature (12)..(12): n is a, c, g, or t
ccgtctgtcgcntatgcacct

SEQ ID NO: 267454 - DNA, 21 bp, Artificial sequence
  SiRNA target sequence
  misc_feature (11)..(11): n is a, c, g, or t
cgtctgtcgcntatgcacctc

SEQ ID NO: 267455 - DNA, 21 bp, Artificial sequence
  SiRNA target sequence
  misc_feature (10)..(10): n is a, c, g, or t
gtctgtcgcntatgcacctcg

SEQ ID NO: 267456 - DNA, 21 bp, Artificial sequence
  SiRNA target sequence
  misc_feature (9)..(9): n is a, c, g, or t
tctgtcgcntatgcacctcgt

SEQ ID NO: 267457 - DNA, 21 bp, Artificial sequence
  SiRNA target sequence
  misc_feature (8)..(8): n is a, c, g, or t
ctgtcgcntatgcacctcgta

SEQ ID NO: 267458 - DNA, 21 bp, Artificial sequence
  SiRNA target sequence
  misc_feature (7)..(7): n is a, c, g, or t
tgtcgcntatgcacctcgtac

SEQ ID NO: 267459 - DNA, 21 bp, Artificial sequence
  SiRNA target sequence
  misc_feature (6)..(6): n is a, c, g, or t
gtcgcntatgcacctcgtaca

SEQ ID NO: 267460 - DNA, 21 bp, Artificial sequence
  SiRNA target sequence
  misc_feature (5)..(5): n is a, c, g, or t
tcgcntatgcacctcgtacat

SEQ ID NO: 267461 - DNA, 21 bp, Artificial sequence
  SiRNA target sequence
  misc_feature (4)..(4): n is a, c, g, or t
cgcntatgcacctcgtacatg

SEQ ID NO: 267462 - DNA, 21 bp, Artificial sequence
  SiRNA target sequence
  misc_feature (3)..(3): n is a, c, g, or t
gcntatgcacctcgtacatgg

SEQ ID NO: 267463 - DNA, 21 bp, Artificial sequence
  SiRNA target sequence
  misc_feature (2)..(2): n is a, c, g, or t
cntatgcacctcgtacatggg

SEQ ID NO: 267464 - DNA, 21 bp, Artificial sequence
  SiRNA target sequence
  misc_feature (1)..(1): n is a, c, g, or t
ntatgcacctcgtacatggga

SEQ ID NO: 267465 - DNA, 21 bp, Artificial sequence
  SiRNA target sequence
tatgcacctcgtacatgggaa

SEQ ID NO: 267466 - DNA, 21 bp, Artificial sequence
  SiRNA target sequence
atgcacctcgtacatgggaag

SEQ ID NO: 267467 - DNA, 21 bp, Artificial sequence
  SiRNA target sequence
tgcacctcgtacatgggaagt

SEQ ID NO: 267468 - DNA, 21 bp, Artificial sequence
  SiRNA target sequence
gcacctcgtacatgggaagtt

SEQ ID NO: 267469 - DNA, 21 bp, Artificial sequence
  SiRNA target sequence
cacctcgtacatgggaagttg

SEQ ID NO: 267470 - DNA, 21 bp, Artificial sequence
  SiRNA target sequence
acctcgtacatgggaagttga

SEQ ID NO: 267471 - DNA, 21 bp, Artificial sequence
  SiRNA target sequence
cctcgtacatgggaagttgat

SEQ ID NO: 267472 - DNA, 21 bp, Artificial sequence
  SiRNA target sequence
ctcgtacatgggaagttgatg

SEQ ID NO: 267473 - DNA, 21 bp, Artificial sequence
  SiRNA target sequence
tcgtacatgggaagttgatga

SEQ ID NO: 267474 - DNA, 21 bp, Artificial sequence
  SiRNA target sequence
cgtacatgggaagttgatgaa

SEQ ID NO: 267475 - DNA, 21 bp, Artificial sequence
  SiRNA target sequence
gtacatgggaagttgatgaag

SEQ ID NO: 267476 - DNA, 21 bp, Artificial sequence
  SiRNA target sequence
tacatgggaagttgatgaagc

SEQ ID NO: 267477 - DNA, 21 bp, Artificial sequence
  SiRNA target sequence
acatgggaagttgatgaagct

SEQ ID NO: 267478 - DNA, 21 bp, Artificial sequence
  SiRNA target sequence
catgggaagttgatgaagcta

SEQ ID NO: 267479 - DNA, 21 bp, Artificial sequence
  SiRNA target sequence
atgggaagttgatgaagctag

SEQ ID NO: 267480 - DNA, 21 bp, Artificial sequence
  SiRNA target sequence
tgggaagttgatgaagctagg

SEQ ID NO: 267481 - DNA, 21 bp, Artificial sequence
  SiRNA target sequence
gggaagttgatgaagctaggc

SEQ ID NO: 267482 - DNA, 21 bp, Artificial sequence
  SiRNA target sequence
ggaagttgatgaagctaggcg

SEQ ID NO: 267483 - DNA, 21 bp, Artificial sequence
  SiRNA target sequence
gaagttgatgaagctaggcgg

SEQ ID NO: 267484 - DNA, 21 bp, Artificial sequence
  SiRNA target sequence
aagttgatgaagctaggcggc

SEQ ID NO: 267485 - DNA, 21 bp, Artificial sequence
  SiRNA target sequence
agttgatgaagctaggcggcg

SEQ ID NO: 267486 - DNA, 21 bp, Artificial sequence
  SiRNA target sequence
gttgatgaagctaggcggcgc

SEQ ID NO: 267487 - DNA, 21 bp, Artificial sequence
  SiRNA target sequence
ttgatgaagctaggcggcgcc

SEQ ID NO: 267488 - DNA, 21 bp, Artificial sequence
  SiRNA target sequence
tgatgaagctaggcggcgccg

SEQ ID NO: 267489 - DNA, 21 bp, Artificial sequence
  SiRNA target sequence
gatgaagctaggcggcgccga

SEQ ID NO: 267490 - DNA, 21 bp, Artificial sequence
  SiRNA target sequence
atgaagctaggcggcgccgag

SEQ ID NO: 267491 - DNA, 21 bp, Artificial sequence
  SiRNA target sequence
tgaagctaggcggcgccgagt

SEQ ID NO: 267492 - DNA, 21 bp, Artificial sequence
  SiRNA target sequence
gaagctaggcggcgccgagtc

SEQ ID NO: 267493 - DNA, 21 bp, Artificial sequence
  SiRNA target sequence
aagctaggcggcgccgagtca

SEQ ID NO: 267494 - DNA, 21 bp, Artificial sequence
  SiRNA target sequence
agctaggcggcgccgagtcat

SEQ ID NO: 267495 - DNA, 21 bp, Artificial sequence
  SiRNA target sequence
gctaggcggcgccgagtcatt

SEQ ID NO: 267496 - DNA, 21 bp, Artificial sequence
  SiRNA target sequence
ctaggcggcgccgagtcatta

SEQ ID NO: 267497 - DNA, 21 bp, Artificial sequence
  SiRNA target sequence
taggcggcgccgagtcattaa

SEQ ID NO: 267498 - DNA, 21 bp, Artificial sequence
  SiRNA target sequence
aggcggcgccgagtcattaaa

SEQ ID NO: 267499 - DNA, 21 bp, Artificial sequence
  SiRNA target sequence
ggcggcgccgagtcattaaac

SEQ ID NO: 267500 - DNA, 21 bp, Artificial sequence
  SiRNA target sequence
gcggcgccgagtcattaaacg

SEQ ID NO: 267501 - DNA, 21 bp, Artificial sequence
  SiRNA target sequence
cggcgccgagtcattaaacgt

SEQ ID NO: 267502 - DNA, 21 bp, Artificial sequence
  SiRNA target sequence
ggcgccgagtcattaaacgtt

SEQ ID NO: 267503 - DNA, 21 bp, Artificial sequence
  SiRNA target sequence
gcgccgagtcattaaacgttt

SEQ ID NO: 267504 - DNA, 21 bp, Artificial sequence
  SiRNA target sequence
cgccgagtcattaaacgtttg

SEQ ID NO: 267505 - DNA, 21 bp, Artificial sequence
  SiRNA target sequence
gccgagtcattaaacgtttgg

SEQ ID NO: 267506 - DNA, 21 bp, Artificial sequence
  SiRNA target sequence
ccgagtcattaaacgtttggc

SEQ ID NO: 267507 - DNA, 21 bp, Artificial sequence
  SiRNA target sequence
cgagtcattaaacgtttggcg

SEQ ID NO: 267508 - DNA, 21 bp, Artificial sequence
  SiRNA target sequence
gagtcattaaacgtttggcgc

SEQ ID NO: 267509 - DNA, 21 bp, Artificial sequence
  SiRNA target sequence
agtcattaaacgtttggcgct

SEQ ID NO: 267510 - DNA, 21 bp, Artificial sequence
  SiRNA target sequence
gtcattaaacgtttggcgctg

SEQ ID NO: 267511 - DNA, 21 bp, Artificial sequence
  SiRNA target sequence
tcattaaacgtttggcgctgg

SEQ ID NO: 267512 - DNA, 21 bp, Artificial sequence
  SiRNA target sequence
cattaaacgtttggcgctgga

SEQ ID NO: 267513 - DNA, 21 bp, Artificial sequence
  SiRNA target sequence
attaaacgtttggcgctggag

SEQ ID NO: 267514 - DNA, 21 bp, Artificial sequence
  SiRNA target sequence
ttaaacgtttggcgctggagc

SEQ ID NO: 267515 - DNA, 21 bp, Artificial sequence
  SiRNA target sequence
taaacgtttggcgctggagca

SEQ ID NO: 267516 - DNA, 21 bp, Artificial sequence
  SiRNA target sequence
aaacgtttggcgctggagcaa

SEQ ID NO: 267517 - DNA, 21 bp, Artificial sequence
  SiRNA target sequence
aacgtttggcgctggagcaag

SEQ ID NO: 267518 - DNA, 21 bp, Artificial sequence
  SiRNA target sequence
acgtttggcgctggagcaaga

SEQ ID NO: 267519 - DNA, 21 bp, Artificial sequence
  SiRNA target sequence
cgtttggcgctggagcaagaa

SEQ ID NO: 267520 - DNA, 21 bp, Artificial sequence
  SiRNA target sequence
gtttggcgctggagcaagaac

SEQ ID NO: 267521 - DNA, 21 bp, Artificial sequence
  SiRNA target sequence
tttggcgctggagcaagaacg

SEQ ID NO: 267522 - DNA, 21 bp, Artificial sequence
  SiRNA target sequence
ttggcgctggagcaagaacgt

SEQ ID NO: 267523 - DNA, 21 bp, Artificial sequence
  SiRNA target sequence
tggcgctggagcaagaacgta

SEQ ID NO: 267524 - DNA, 21 bp, Artificial sequence
  SiRNA target sequence
ggcgctggagcaagaacgtat

SEQ ID NO: 267525 - DNA, 21 bp, Artificial sequence
  SiRNA target sequence
gcgctggagcaagaacgtatt

SEQ ID NO: 267526 - DNA, 21 bp, Artificial sequence
  SiRNA target sequence
cgctggagcaagaacgtattc

SEQ ID NO: 267527 - DNA, 21 bp, Artificial sequence
  SiRNA target sequence
gctggagcaagaacgtattcg

SEQ ID NO: 267528 - DNA, 21 bp, Artificial sequence
  SiRNA target sequence
ctggagcaagaacgtattcgt

SEQ ID NO: 267529 - DNA, 21 bp, Artificial sequence
  SiRNA target sequence
tggagcaagaacgtattcgta

SEQ ID NO: 267530 - DNA, 21 bp, Artificial sequence
  SiRNA target sequence
ggagcaagaacgtattcgtaa

SEQ ID NO: 267531 - DNA, 21 bp, Artificial sequence
  SiRNA target sequence
gagcaagaacgtattcgtaac

SEQ ID NO: 267532 - DNA, 21 bp, Artificial sequence
  SiRNA target sequence
agcaagaacgtattcgtaacg

SEQ ID NO: 267533 - DNA, 21 bp, Artificial sequence
  SiRNA target sequence
gcaagaacgtattcgtaacgt

SEQ ID NO: 267534 - DNA, 21 bp, Artificial sequence
  SiRNA target sequence
caagaacgtattcgtaacgtt

SEQ ID NO: 267535 - DNA, 21 bp, Artificial sequence
  SiRNA target sequence
aagaacgtattcgtaacgttc

SEQ ID NO: 267536 - DNA, 21 bp, Artificial sequence
  SiRNA target sequence
agaacgtattcgtaacgttct

SEQ ID NO: 267537 - DNA, 21 bp, Artificial sequence
  SiRNA target sequence
gaacgtattcgtaacgttctt

SEQ ID NO: 267538 - DNA, 21 bp, Artificial sequence
  SiRNA target sequence
aacgtattcgtaacgttcttg

SEQ ID NO: 267539 - DNA, 21 bp, Artificial sequence
  SiRNA target sequence
acgtattcgtaacgttcttga

SEQ ID NO: 267540 - DNA, 21 bp, Artificial sequence
  SiRNA target sequence
cgtattcgtaacgttcttgac

SEQ ID NO: 267541 - DNA, 21 bp, Artificial sequence
  SiRNA target sequence
gtattcgtaacgttcttgacg

SEQ ID NO: 267542 - DNA, 21 bp, Artificial sequence
  SiRNA target sequence
tattcgtaacgttcttgacgt

SEQ ID NO: 267543 - DNA, 21 bp, Artificial sequence
  SiRNA target sequence
attcgtaacgttcttgacgtt

SEQ ID NO: 267544 - DNA, 21 bp, Artificial sequence
  SiRNA target sequence
ttcgtaacgttcttgacgttg

SEQ ID NO: 267545 - DNA, 21 bp, Artificial sequence
  SiRNA target sequence
tcgtaacgttcttgacgttgc

SEQ ID NO: 267546 - DNA, 21 bp, Artificial sequence
  SiRNA target sequence
cgtaacgttcttgacgttgcc

SEQ ID NO: 267547 - DNA, 21 bp, Artificial sequence
  SiRNA target sequence
gtaacgttcttgacgttgccg

SEQ ID NO: 267548 - DNA, 21 bp, Artificial sequence
  SiRNA target sequence
taacgttcttgacgttgccgt

SEQ ID NO: 267549 - DNA, 21 bp, Artificial sequence
  SiRNA target sequence
aacgttcttgacgttgccgtc

SEQ ID NO: 267550 - DNA, 21 bp, Artificial sequence
  SiRNA target sequence
acgttcttgacgttgccgtct

SEQ ID NO: 267551 - DNA, 21 bp, Artificial sequence
  SiRNA target sequence
cgttcttgacgttgccgtcta

SEQ ID NO: 267552 - DNA, 21 bp, Artificial sequence
  SiRNA target sequence
gttcttgacgttgccgtctat

SEQ ID NO: 267553 - DNA, 21 bp, Artificial sequence
  SiRNA target sequence
ttcttgacgttgccgtctatg

SEQ ID NO: 267554 - DNA, 21 bp, Artificial sequence
  SiRNA target sequence
tcttgacgttgccgtctatga

SEQ ID NO: 267555 - DNA, 21 bp, Artificial sequence
  SiRNA target sequence
cttgacgttgccgtctatgac

SEQ ID NO: 267556 - DNA, 21 bp, Artificial sequence
  SiRNA target sequence
ttgacgttgccgtctatgacc

SEQ ID NO: 267557 - DNA, 21 bp, Artificial sequence
  SiRNA target sequence
tgacgttgccgtctatgacca

SEQ ID NO: 267558 - DNA, 21 bp, Artificial sequence
  SiRNA target sequence
gacgttgccgtctatgaccag

SEQ ID NO: 267559 - DNA, 21 bp, Artificial sequence
  SiRNA target sequence
acgttgccgtctatgaccagg

SEQ ID NO: 267560 - DNA, 21 bp, Artificial sequence
  SiRNA target sequence
cgttgccgtctatgaccaggc

SEQ ID NO: 267561 - DNA, 21 bp, Artificial sequence
  SiRNA target sequence
gttgccgtctatgaccaggcg

SEQ ID NO: 267562 - DNA, 21 bp, Artificial sequence
  SiRNA target sequence
ttgccgtctatgaccaggcga

SEQ ID NO: 267563 - DNA, 21 bp, Artificial sequence
  SiRNA target sequence
tgccgtctatgaccaggcgac

SEQ ID NO: 267564 - DNA, 21 bp, Artificial sequence
  SiRNA target sequence
gccgtctatgaccaggcgaca

SEQ ID NO: 267565 - DNA, 21 bp, Artificial sequence
  SiRNA target sequence
ccgtctatgaccaggcgacat

SEQ ID NO: 267566 - DNA, 21 bp, Artificial sequence
  SiRNA target sequence
cgtctatgaccaggcgacatg

SEQ ID NO: 267567 - DNA, 21 bp, Artificial sequence
  SiRNA target sequence
gtctatgaccaggcgacatgg

SEQ ID NO: 267568 - DNA, 21 bp, Artificial sequence
  SiRNA target sequence
tctatgaccaggcgacatggg

SEQ ID NO: 267569 - DNA, 21 bp, Artificial sequence
  SiRNA target sequence
ctatgaccaggcgacatggga

SEQ ID NO: 267570 - DNA, 21 bp, Artificial sequence
  SiRNA target sequence
tatgaccaggcgacatgggaa

SEQ ID NO: 267571 - DNA, 21 bp, Artificial sequence
  SiRNA target sequence
atgaccaggcgacatgggaac

SEQ ID NO: 267572 - DNA, 21 bp, Artificial sequence
  SiRNA target sequence
tgaccaggcgacatgggaaca

SEQ ID NO: 267573 - DNA, 21 bp, Artificial sequence
  SiRNA target sequence
gaccaggcgacatgggaacag

SEQ ID NO: 267574 - DNA, 21 bp, Artificial sequence
  SiRNA target sequence
accaggcgacatgggaacagg

SEQ ID NO: 267575 - DNA, 21 bp, Artificial sequence
  SiRNA target sequence
ccaggcgacatgggaacagga

SEQ ID NO: 267576 - DNA, 21 bp, Artificial sequence
  SiRNA target sequence
caggcgacatgggaacaggag

SEQ ID NO: 267577 - DNA, 21 bp, Artificial sequence
  SiRNA target sequence
aggcgacatgggaacaggagg

SEQ ID NO: 267578 - DNA, 21 bp, Artificial sequence
  SiRNA target sequence
ggcgacatgggaacaggagga

SEQ ID NO: 267579 - DNA, 21 bp, Artificial sequence
  SiRNA target sequence
gcgacatgggaacaggaggac

SEQ ID NO: 267580 - DNA, 21 bp, Artificial sequence
  SiRNA target sequence
cgacatgggaacaggaggacg

SEQ ID NO: 267581 - DNA, 21 bp, Artificial sequence
  SiRNA target sequence
gacatgggaacaggaggacgc

SEQ ID NO: 267582 - DNA, 21 bp, Artificial sequence
  SiRNA target sequence
acatgggaacaggaggacgcg

SEQ ID NO: 267583 - DNA, 21 bp, Artificial sequence
  SiRNA target sequence
catgggaacaggaggacgcgc

SEQ ID NO: 267584 - DNA, 21 bp, Artificial sequence
  SiRNA target sequence
atgggaacaggaggacgcgcg

SEQ ID NO: 267585 - DNA, 21 bp, Artificial sequence
  SiRNA target sequence
tgggaacaggaggacgcgcgc

SEQ ID NO: 267586 - DNA, 21 bp, Artificial sequence
  SiRNA target sequence
gggaacaggaggacgcgcgcg

SEQ ID NO: 267587 - DNA, 21 bp, Artificial sequence
  SiRNA target sequence
ggaacaggaggacgcgcgcga

SEQ ID NO: 267588 - DNA, 21 bp, Artificial sequence
  SiRNA target sequence
gaacaggaggacgcgcgcgat

SEQ ID NO: 267589 - DNA, 21 bp, Artificial sequence
  SiRNA target sequence
aacaggaggacgcgcgcgata

SEQ ID NO: 267590 - DNA, 21 bp, Artificial sequence
  SiRNA target sequence
acaggaggacgcgcgcgataa

SEQ ID NO: 267591 - DNA, 21 bp, Artificial sequence
  SiRNA target sequence
caggaggacgcgcgcgataat

SEQ ID NO: 267592 - DNA, 21 bp, Artificial sequence
  SiRNA target sequence
aggaggacgcgcgcgataatg

SEQ ID NO: 267593 - DNA, 21 bp, Artificial sequence
  SiRNA target sequence
ggaggacgcgcgcgataatga

SEQ ID NO: 267594 - DNA, 21 bp, Artificial sequence
  SiRNA target sequence
gaggacgcgcgcgataatgag

SEQ ID NO: 267595 - DNA, 21 bp, Artificial sequence
  SiRNA target sequence
aggacgcgcgcgataatgagt

SEQ ID NO: 267596 - DNA, 21 bp, Artificial sequence
  SiRNA target sequence
ggacgcgcgcgataatgagtt

SEQ ID NO: 267597 - DNA, 21 bp, Artificial sequence
  SiRNA target sequence
gacgcgcgcgataatgagttc

SEQ ID NO: 267598 - DNA, 21 bp, Artificial sequence
  SiRNA target sequence
acgcgcgcgataatgagttcc

SEQ ID NO: 267599 - DNA, 21 bp, Artificial sequence
  SiRNA target sequence
cgcgcgcgataatgagttcct

SEQ ID NO: 267600 - DNA, 21 bp, Artificial sequence
  SiRNA target sequence
gcgcgcgataatgagttccta

SEQ ID NO: 267601 - DNA, 21 bp, Artificial sequence
  SiRNA target sequence
cgcgcgataatgagttcctaa

SEQ ID NO: 267602 - DNA, 21 bp, Artificial sequence
  SiRNA target sequence
gcgcgataatgagttcctaac

SEQ ID NO: 267603 - DNA, 21 bp, Artificial sequence
  SiRNA target sequence
cgcgataatgagttcctaacg

SEQ ID NO: 267604 - DNA, 21 bp, Artificial sequence
  SiRNA target sequence
gcgataatgagttcctaacgg

SEQ ID NO: 267605 - DNA, 21 bp, Artificial sequence
  SiRNA target sequence
cgataatgagttcctaacgga

SEQ ID NO: 267606 - DNA, 21 bp, Artificial sequence
  SiRNA target sequence
gataatgagttcctaacggaa

SEQ ID NO: 267607 - DNA, 21 bp, Artificial sequence
  SiRNA target sequence
ataatgagttcctaacggaac

SEQ ID NO: 267608 - DNA, 21 bp, Artificial sequence
  SiRNA target sequence
taatgagttcctaacggaaca

SEQ ID NO: 267609 - DNA, 21 bp, Artificial sequence
  SiRNA target sequence
aatgagttcctaacggaacaa

SEQ ID NO: 267610 - DNA, 21 bp, Artificial sequence
  SiRNA target sequence
atgagttcctaacggaacaat

SEQ ID NO: 267611 - DNA, 21 bp, Artificial sequence
  SiRNA target sequence
tgagttcctaacggaacaatt

SEQ ID NO: 267612 - DNA, 21 bp, Artificial sequence
  SiRNA target sequence
gagttcctaacggaacaatta

SEQ ID NO: 267613 - DNA, 21 bp, Artificial sequence
  SiRNA target sequence
agttcctaacggaacaattaa

SEQ ID NO: 267614 - DNA, 21 bp, Artificial sequence
  SiRNA target sequence
gttcctaacggaacaattaaa

SEQ ID NO: 267615 - DNA, 21 bp, Artificial sequence
  SiRNA target sequence
  misc_feature (21)..(21): n is a, c, g, or t
ttcctaacggaacaattaaan

SEQ ID NO: 267616 - DNA, 21 bp, Artificial sequence
  SiRNA target sequence
  misc_feature (20)..(20): n is a, c, g, or t
tcctaacggaacaattaaana

SEQ ID NO: 267617 - DNA, 21 bp, Artificial sequence
  SiRNA target sequence
  misc_feature (19)..(19): n is a, c, g, or t
cctaacggaacaattaaanaa

SEQ ID NO: 267618 - DNA, 21 bp, Artificial sequence
  SiRNA target sequence
  misc_feature (18)..(18): n is a, c, g, or t
ctaacggaacaattaaanaat

SEQ ID NO: 267619 - DNA, 21 bp, Artificial sequence
  SiRNA target sequence
  misc_feature (17)..(17): n is a, c, g, or t
taacggaacaattaaanaatt

SEQ ID NO: 267620 - DNA, 21 bp, Artificial sequence
  SiRNA target sequence
  misc_feature (16)..(16): n is a, c, g, or t
aacggaacaattaaanaattt

SEQ ID NO: 267621 - DNA, 21 bp, Artificial sequence
  SiRNA target sequence
  misc_feature (15)..(15): n is a, c, g, or t
acggaacaattaaanaattta

SEQ ID NO: 267622 - DNA, 21 bp, Artificial sequence
  SiRNA target sequence
  misc_feature (14)..(14): n is a, c, g, or t
cggaacaattaaanaatttat

SEQ ID NO: 267623 - DNA, 21 bp, Artificial sequence
  SiRNA target sequence
  misc_feature (13)..(13): n is a, c, g, or t
ggaacaattaaanaatttata

SEQ ID NO: 267624 - DNA, 21 bp, Artificial sequence
  SiRNA target sequence
  misc_feature (12)..(12): n is a, c, g, or t
gaacaattaaanaatttatat

SEQ ID NO: 267625 - DNA, 21 bp, Artificial sequence
  SiRNA target sequence
  misc_feature (11)..(11): n is a, c, g, or t
aacaattaaanaatttatata

SEQ ID NO: 267626 - DNA, 21 bp, Artificial sequence
  SiRNA target sequence
  misc_feature (10)..(10): n is a, c, g, or t
acaattaaanaatttatatac

SEQ ID NO: 267627 - DNA, 21 bp, Artificial sequence
  SiRNA target sequence
  misc_feature (9)..(9): n is a, c, g, or t
caattaaanaatttatatact

SEQ ID NO: 267628 - DNA, 21 bp, Artificial sequence
  SiRNA target sequence
  misc_feature (8)..(8): n is a, c, g, or t
aattaaanaatttatatacta

SEQ ID NO: 267629 - DNA, 21 bp, Artificial sequence
  SiRNA target sequence
  misc_feature (7)..(7): n is a, c, g, or t
attaaanaatttatatactat

SEQ ID NO: 267630 - DNA, 21 bp, Artificial sequence
  SiRNA target sequence
  misc_feature (6)..(6): n is a, c, g, or t
ttaaanaatttatatactatt

SEQ ID NO: 267631 - DNA, 21 bp, Artificial sequence
  SiRNA target sequence
  misc_feature (5)..(5): n is a, c, g, or t
taaanaatttatatactattt

SEQ ID NO: 267632 - DNA, 21 bp, Artificial sequence
  SiRNA target sequence
  misc_feature (4)..(4): n is a, c, g, or t
aaanaatttatatactattta

SEQ ID NO: 267633 - DNA, 21 bp, Artificial sequence
  SiRNA target sequence
  misc_feature (3)..(3): n is a, c, g, or t
aanaatttatatactatttat

SEQ ID NO: 267634 - DNA, 21 bp, Artificial sequence
  SiRNA target sequence
  misc_feature (2)..(2): n is a, c, g, or t
anaatttatatactatttatt

SEQ ID NO: 267635 - DNA, 21 bp, Artificial sequence
  SiRNA target sequence
  misc_feature (1)..(1): n is a, c, g, or t
naatttatatactatttattc

SEQ ID NO: 267636 - DNA, 21 bp, Artificial sequence
  SiRNA target sequence
aatttatatactatttattcg

SEQ ID NO: 267637 - DNA, 21 bp, Artificial sequence
  SiRNA target sequence
atttatatactatttattcga

SEQ ID NO: 267638 - DNA, 21 bp, Artificial sequence
  SiRNA target sequence
tttatatactatttattcgat

SEQ ID NO: 267639 - DNA, 21 bp, Artificial sequence
  SiRNA target sequence
ttatatactatttattcgatc

SEQ ID NO: 267640 - DNA, 21 bp, Artificial sequence
  SiRNA target sequence
tatatactatttattcgatcg

SEQ ID NO: 267641 - DNA, 21 bp, Artificial sequence
  SiRNA target sequence
atatactatttattcgatcgc

SEQ ID NO: 267642 - DNA, 21 bp, Artificial sequence
  SiRNA target sequence
tatactatttattcgatcgct

SEQ ID NO: 267643 - DNA, 21 bp, Artificial sequence
  SiRNA target sequence
atactatttattcgatcgctg

SEQ ID NO: 267644 - DNA, 21 bp, Artificial sequence
  SiRNA target sequence
tactatttattcgatcgctga

SEQ ID NO: 267645 - DNA, 21 bp, Artificial sequence
  SiRNA target sequence
actatttattcgatcgctgaa

SEQ ID NO: 267646 - DNA, 21 bp, Artificial sequence
  SiRNA target sequence
ctatttattcgatcgctgaac

SEQ ID NO: 267647 - DNA, 21 bp, Artificial sequence
  SiRNA target sequence
tatttattcgatcgctgaacg

SEQ ID NO: 267648 - DNA, 21 bp, Artificial sequence
  SiRNA target sequence
atttattcgatcgctgaacgt

SEQ ID NO: 267649 - DNA, 21 bp, Artificial sequence
  SiRNA target sequence
tttattcgatcgctgaacgtt

SEQ ID NO: 267650 - DNA, 21 bp, Artificial sequence
  SiRNA target sequence
ttattcgatcgctgaacgttg

SEQ ID NO: 267651 - DNA, 21 bp, Artificial sequence
  SiRNA target sequence
tattcgatcgctgaacgttgt

SEQ ID NO: 267652 - DNA, 21 bp, Artificial sequence
  SiRNA target sequence
attcgatcgctgaacgttgta

SEQ ID NO: 267653 - DNA, 21 bp, Artificial sequence
  SiRNA target sequence
ttcgatcgctgaacgttgtac

SEQ ID NO: 267654 - DNA, 21 bp, Artificial sequence
  SiRNA target sequence
tcgatcgctgaacgttgtacg

SEQ ID NO: 267655 - DNA, 21 bp, Artificial sequence
  SiRNA target sequence
cgatcgctgaacgttgtacgc

SEQ ID NO: 267656 - DNA, 21 bp, Artificial sequence
  SiRNA target sequence
gatcgctgaacgttgtacgcg

SEQ ID NO: 267657 - DNA, 21 bp, Artificial sequence
  SiRNA target sequence
atcgctgaacgttgtacgcgt

SEQ ID NO: 267658 - DNA, 21 bp, Artificial sequence
  SiRNA target sequence
tcgctgaacgttgtacgcgtc

SEQ ID NO: 267659 - DNA, 21 bp, Artificial sequence
  SiRNA target sequence
cgctgaacgttgtacgcgtcg

SEQ ID NO: 267660 - DNA, 21 bp, Artificial sequence
  SiRNA target sequence
gctgaacgttgtacgcgtcgg

SEQ ID NO: 267661 - DNA, 21 bp, Artificial sequence
  SiRNA target sequence
ctgaacgttgtacgcgtcggc

SEQ ID NO: 267662 - DNA, 21 bp, Artificial sequence
  SiRNA target sequence
tgaacgttgtacgcgtcggcc

SEQ ID NO: 267663 - DNA, 21 bp, Artificial sequence
  SiRNA target sequence
gaacgttgtacgcgtcggcct

SEQ ID NO: 267664 - DNA, 21 bp, Artificial sequence
  SiRNA target sequence
aacgttgtacgcgtcggccta

SEQ ID NO: 267665 - DNA, 21 bp, Artificial sequence
  SiRNA target sequence
acgttgtacgcgtcggcctat

SEQ ID NO: 267666 - DNA, 21 bp, Artificial sequence
  SiRNA target sequence
cgttgtacgcgtcggcctatc

SEQ ID NO: 267667 - DNA, 21 bp, Artificial sequence
  SiRNA target sequence
gttgtacgcgtcggcctatca

SEQ ID NO: 267668 - DNA, 21 bp, Artificial sequence
  SiRNA target sequence
ttgtacgcgtcggcctatcaa

SEQ ID NO: 267669 - DNA, 21 bp, Artificial sequence
  SiRNA target sequence
tgtacgcgtcggcctatcaaa

SEQ ID NO: 267670 - DNA, 21 bp, Artificial sequence
  SiRNA target sequence
gtacgcgtcggcctatcaaag

SEQ ID NO: 267671 - DNA, 21 bp, Artificial sequence
  SiRNA target sequence
tacgcgtcggcctatcaaaga

SEQ ID NO: 267672 - DNA, 21 bp, Artificial sequence
  SiRNA target sequence
acgcgtcggcctatcaaagag

SEQ ID NO: 267673 - DNA, 21 bp, Artificial sequence
  SiRNA target sequence
  misc_feature (21)..(21): n is a, c, g, or t
cgcgtcggcctatcaaagagn

SEQ ID NO: 267674 - DNA, 21 bp, Artificial sequence
  SiRNA target sequence
  misc_feature (20)..(20): n is a, c, g, or t
gcgtcggcctatcaaagagna

SEQ ID NO: 267675 - DNA, 21 bp, Artificial sequence
  SiRNA target sequence
  misc_feature (19)..(19): n is a, c, g, or t
cgtcggcctatcaaagagnac

SEQ ID NO: 267676 - DNA, 21 bp, Artificial sequence
  SiRNA target sequence
  misc_feature (18)..(18): n is a, c, g, or t
gtcggcctatcaaagagnact

SEQ ID NO: 267677 - DNA, 21 bp, Artificial sequence
  SiRNA target sequence
  misc_feature (17)..(17): n is a, c, g, or t
tcggcctatcaaagagnactc

SEQ ID NO: 267678 - DNA, 21 bp, Artificial sequence
  SiRNA target sequence
  misc_feature (16)..(16): n is a, c, g, or t
cggcctatcaaagagnactct

SEQ ID NO: 267679 - DNA, 21 bp, Artificial sequence
  SiRNA target sequence
  misc_feature (15)..(15): n is a, c, g, or t
ggcctatcaaagagnactctc

SEQ ID NO: 267680 - DNA, 21 bp, Artificial sequence
  SiRNA target sequence
  misc_feature (14)..(14): n is a, c, g, or t
gcctatcaaagagnactctcc

SEQ ID NO: 267681 - DNA, 21 bp, Artificial sequence
  SiRNA target sequence
  misc_feature (13)..(13): n is a, c, g, or t
cctatcaaagagnactctcct

SEQ ID NO: 267682 - DNA, 21 bp, Artificial sequence
  SiRNA target sequence
  misc_feature (12)..(12): n is a, c, g, or t
ctatcaaagagnactctccta

SEQ ID NO: 267683 - DNA, 21 bp, Artificial sequence
  SiRNA target sequence
  misc_feature (11)..(11): n is a, c, g, or t
tatcaaagagnactctcctat

SEQ ID NO: 267684 - DNA, 21 bp, Artificial sequence
  SiRNA target sequence
  misc_feature (10)..(10): n is a, c, g, or t
atcaaagagnactctcctata

SEQ ID NO: 267685 - DNA, 21 bp, Artificial sequence
  SiRNA target sequence
  misc_feature (9)..(9): n is a, c, g, or t
tcaaagagnactctcctatat

SEQ ID NO: 267686 - DNA, 21 bp, Artificial sequence
  SiRNA target sequence
  misc_feature (8)..(8): n is a, c, g, or t
caaagagnactctcctatatc

SEQ ID NO: 267687 - DNA, 21 bp, Artificial sequence
  SiRNA target sequence
  misc_feature (7)..(7): n is a, c, g, or t
aaagagnactctcctatatca

SEQ ID NO: 267688 - DNA, 21 bp, Artificial sequence
  SiRNA target sequence
  misc_feature (6)..(6): n is a, c, g, or t
aagagnactctcctatatcag

SEQ ID NO: 267689 - DNA, 21 bp, Artificial sequence
  SiRNA target sequence
  misc_feature (5)..(5): n is a, c, g, or t
agagnactctcctatatcagt

SEQ ID NO: 267690 - DNA, 21 bp, Artificial sequence
  SiRNA target sequence
  misc_feature (4)..(4): n is a, c, g, or t
gagnactctcctatatcagtt

SEQ ID NO: 267691 - DNA, 21 bp, Artificial sequence
  SiRNA target sequence
  misc_feature (3)..(3): n is a, c, g, or t
agnactctcctatatcagttt

SEQ ID NO: 267692 - DNA, 21 bp, Artificial sequence
  SiRNA target sequence
  misc_feature (2)..(2): n is a, c, g, or t
gnactctcctatatcagtttc

SEQ ID NO: 267693 - DNA, 21 bp, Artificial sequence
  SiRNA target sequence
  misc_feature (1)..(1): n is a, c, g, or t
nactctcctatatcagtttcg

SEQ ID NO: 267694 - DNA, 21 bp, Artificial sequence
  SiRNA target sequence
actctcctatatcagtttcga

SEQ ID NO: 267695 - DNA, 21 bp, Artificial sequence
  SiRNA target sequence
ctctcctatatcagtttcgaa

SEQ ID NO: 267696 - DNA, 21 bp, Artificial sequence
  SiRNA target sequence
tctcctatatcagtttcgaat

SEQ ID NO: 267697 - DNA, 21 bp, Artificial sequence
  SiRNA target sequence
ctcctatatcagtttcgaata

SEQ ID NO: 267698 - DNA, 21 bp, Artificial sequence
  SiRNA target sequence
tcctatatcagtttcgaatag

SEQ ID NO: 267699 - DNA, 21 bp, Artificial sequence
  SiRNA target sequence
cctatatcagtttcgaatagg

SEQ ID NO: 267700 - DNA, 21 bp, Artificial sequence
  SiRNA target sequence
ctatatcagtttcgaataggt

SEQ ID NO: 267701 - DNA, 21 bp, Artificial sequence
  SiRNA target sequence
tatatcagtttcgaataggtt

SEQ ID NO: 267702 - DNA, 21 bp, Artificial sequence
  SiRNA target sequence
atatcagtttcgaataggttt

SEQ ID NO: 267703 - DNA, 21 bp, Artificial sequence
  SiRNA target sequence
tatcagtttcgaataggtttg

SEQ ID NO: 267704 - DNA, 21 bp, Artificial sequence
  SiRNA target sequence
atcagtttcgaataggtttgc

SEQ ID NO: 267705 - DNA, 21 bp, Artificial sequence
  SiRNA target sequence
tcagtttcgaataggtttgct

SEQ ID NO: 267706 - DNA, 21 bp, Artificial sequence
  SiRNA target sequence
cagtttcgaataggtttgctc

SEQ ID NO: 267707 - DNA, 21 bp, Artificial sequence
  SiRNA target sequence
agtttcgaataggtttgctcc

SEQ ID NO: 267708 - DNA, 21 bp, Artificial sequence
  SiRNA target sequence
gtttcgaataggtttgctcca

SEQ ID NO: 267709 - DNA, 21 bp, Artificial sequence
  SiRNA target sequence
tttcgaataggtttgctccac

SEQ ID NO: 267710 - DNA, 21 bp, Artificial sequence
  SiRNA target sequence
ttcgaataggtttgctccact

SEQ ID NO: 267711 - DNA, 21 bp, Artificial sequence
  SiRNA target sequence
tcgaataggtttgctccactg

SEQ ID NO: 267712 - DNA, 21 bp, Artificial sequence
  SiRNA target sequence
cgaataggtttgctccactgg

SEQ ID NO: 267713 - DNA, 21 bp, Artificial sequence
  SiRNA target sequence
gaataggtttgctccactgga

SEQ ID NO: 267714 - DNA, 21 bp, Artificial sequence
  SiRNA target sequence
  misc_feature (21)..(21): n is a, c, g, or t
aataggtttgctccactggan

SEQ ID NO: 267715 - DNA, 21 bp, Artificial sequence
  SiRNA target sequence
  misc_feature (20)..(20): n is a, c, g, or t
ataggtttgctccactggant

SEQ ID NO: 267716 - DNA, 21 bp, Artificial sequence
  SiRNA target sequence
  misc_feature (19)..(19): n is a, c, g, or t
taggtttgctccactggantc

SEQ ID NO: 267717 - DNA, 21 bp, Artificial sequence
  SiRNA target sequence
  misc_feature (18)..(18): n is a, c, g, or t
aggtttgctccactggantcc

SEQ ID NO: 267718 - DNA, 21 bp, Artificial sequence
  SiRNA target sequence
  misc_feature (17)..(17): n is a, c, g, or t
ggtttgctccactggantccc

SEQ ID NO: 267719 - DNA, 21 bp, Artificial sequence
  SiRNA target sequence
  misc_feature (16)..(16): n is a, c, g, or t
gtttgctccactggantccct

SEQ ID NO: 267720 - DNA, 21 bp, Artificial sequence
  SiRNA target sequence
  misc_feature (15)..(15): n is a, c, g, or t
  misc_feature (21)..(21): n is a, c, g, or t
tttgctccactggantccctn

SEQ ID NO: 267721 - DNA, 21 bp, Artificial sequence
  SiRNA target sequence
  misc_feature (14)..(14): n is a, c, g, or t
  misc_feature (20)..(20): n is a, c, g, or t
ttgctccactggantccctna

SEQ ID NO: 267722 - DNA, 21 bp, Artificial sequence
  SiRNA target sequence
  misc_feature (13)..(13): n is a, c, g, or t
  misc_feature (19)..(19): n is a, c, g, or t
tgctccactggantccctnaa

SEQ ID NO: 267723 - DNA, 21 bp, Artificial sequence
  SiRNA target sequence
  misc_feature (12)..(12): n is a, c, g, or t
  misc_feature (18)..(18): n is a, c, g, or t
gctccactggantccctnaag

SEQ ID NO: 267724 - DNA, 21 bp, Artificial sequence
  SiRNA target sequence
  misc_feature (11)..(11): n is a, c, g, or t
  misc_feature (17)..(17): n is a, c, g, or t
ctccactggantccctnaagg

SEQ ID NO: 267725 - DNA, 21 bp, Artificial sequence
  SiRNA target sequence
  misc_feature (10)..(10): n is a, c, g, or t
  misc_feature (16)..(16): n is a, c, g, or t
tccactggantccctnaaggt

SEQ ID NO: 267726 - DNA, 21 bp, Artificial sequence
  SiRNA target sequence
  misc_feature (9)..(9): n is a, c, g, or t
  misc_feature (15)..(15): n is a, c, g, or t
ccactggantccctnaaggtc

SEQ ID NO: 267727 - DNA, 21 bp, Artificial sequence
  SiRNA target sequence
  misc_feature (8)..(8): n is a, c, g, or t
  misc_feature (14)..(14): n is a, c, g, or t
cactggantccctnaaggtcg

SEQ ID NO: 267728 - DNA, 21 bp, Artificial sequence
  SiRNA target sequence
  misc_feature (7)..(7): n is a, c, g, or t
  misc_feature (13)..(13): n is a, c, g, or t
actggantccctnaaggtcga

SEQ ID NO: 267729 - DNA, 21 bp, Artificial sequence
  SiRNA target sequence
  misc_feature (6)..(6): n is a, c, g, or t
  misc_feature (12)..(12): n is a, c, g, or t
ctggantccctnaaggtcgag

SEQ ID NO: 267730 - DNA, 21 bp, Artificial sequence
  SiRNA target sequence
  misc_feature (5)..(5): n is a, c, g, or t
  misc_feature (11)..(11): n is a, c, g, or t
tggantccctnaaggtcgagg

SEQ ID NO: 267731 - DNA, 21 bp, Artificial sequence
  SiRNA target sequence
  misc_feature (4)..(4): n is a, c, g, or t
  misc_feature (10)..(10): n is a, c, g, or t
ggantccctnaaggtcgaggt

SEQ ID NO: 267732 - DNA, 21 bp, Artificial sequence
  SiRNA target sequence
  misc_feature (3)..(3): n is a, c, g, or t
  misc_feature (9)..(9): n is a, c, g, or t
gantccctnaaggtcgaggtc

SEQ ID NO: 267733 - DNA, 21 bp, Artificial sequence
  SiRNA target sequence
  misc_feature (2)..(2): n is a, c, g, or t
  misc_feature (8)..(8): n is a, c, g, or t
antccctnaaggtcgaggtcg

SEQ ID NO: 267734 - DNA, 21 bp, Artificial sequence
  SiRNA target sequence
  misc_feature (1)..(1): n is a, c, g, or t
  misc_feature (7)..(7): n is a, c, g, or t
ntccctnaaggtcgaggtcgg

SEQ ID NO: 267735 - DNA, 21 bp, Artificial sequence
  SiRNA target sequence
  misc_feature (6)..(6): n is a, c, g, or t
tccctnaaggtcgaggtcggt

SEQ ID NO: 267736 - DNA, 21 bp, Artificial sequence
  SiRNA target sequence
  misc_feature (5)..(5): n is a, c, g, or t
ccctnaaggtcgaggtcggtc

SEQ ID NO: 267737 - DNA, 21 bp, Artificial sequence
  SiRNA target sequence
  misc_feature (4)..(4): n is a, c, g, or t
cctnaaggtcgaggtcggtca

SEQ ID NO: 267738 - DNA, 21 bp, Artificial sequence
  SiRNA target sequence
  misc_feature (3)..(3): n is a, c, g, or t
ctnaaggtcgaggtcggtcaa

SEQ ID NO: 267739 - DNA, 21 bp, Artificial sequence
  SiRNA target sequence
  misc_feature (2)..(2): n is a, c, g, or t
tnaaggtcgaggtcggtcaag

SEQ ID NO: 267740 - DNA, 21 bp, Artificial sequence
  SiRNA target sequence
  misc_feature (1)..(1): n is a, c, g, or t
naaggtcgaggtcggtcaaga

SEQ ID NO: 267741 - DNA, 21 bp, Artificial sequence
  SiRNA target sequence
aaggtcgaggtcggtcaagaa

SEQ ID NO: 267742 - DNA, 21 bp, Artificial sequence
  SiRNA target sequence
aggtcgaggtcggtcaagaag

SEQ ID NO: 267743 - DNA, 21 bp, Artificial sequence
  SiRNA target sequence
ggtcgaggtcggtcaagaagc

SEQ ID NO: 267744 - DNA, 21 bp, Artificial sequence
  SiRNA target sequence
gtcgaggtcggtcaagaagca

SEQ ID NO: 267745 - DNA, 21 bp, Artificial sequence
  SiRNA target sequence
  misc_feature (21)..(21): n is a, c, g, or t
tcgaggtcggtcaagaagcan

SEQ ID NO: 267746 - DNA, 21 bp, Artificial sequence
  SiRNA target sequence
  misc_feature (20)..(20): n is a, c, g, or t
cgaggtcggtcaagaagcang

SEQ ID NO: 267747 - DNA, 21 bp, Artificial sequence
  SiRNA target sequence
  misc_feature (19)..(19): n is a, c, g, or t
gaggtcggtcaagaagcangc

SEQ ID NO: 267748 - DNA, 21 bp, Artificial sequence
  SiRNA target sequence
  misc_feature (18)..(18): n is a, c, g, or t
aggtcggtcaagaagcangcg

SEQ ID NO: 267749 - DNA, 21 bp, Artificial sequence
  SiRNA target sequence
  misc_feature (17)..(17): n is a, c, g, or t
ggtcggtcaagaagcangcga

SEQ ID NO: 267750 - DNA, 21 bp, Artificial sequence
  SiRNA target sequence
  misc_feature (16)..(16): n is a, c, g, or t
gtcggtcaagaagcangcgaa

SEQ ID NO: 267751 - DNA, 21 bp, Artificial sequence
  SiRNA target sequence
  misc_feature (15)..(15): n is a, c, g, or t
tcggtcaagaagcangcgaat

SEQ ID NO: 267752 - DNA, 21 bp, Artificial sequence
  SiRNA target sequence
  misc_feature (14)..(14): n is a, c, g, or t
cggtcaagaagcangcgaatg

SEQ ID NO: 267753 - DNA, 21 bp, Artificial sequence
  SiRNA target sequence
  misc_feature (13)..(13): n is a, c, g, or t
ggtcaagaagcangcgaatgt

SEQ ID NO: 267754 - DNA, 21 bp, Artificial sequence
  SiRNA target sequence
  misc_feature (12)..(12): n is a, c, g, or t
gtcaagaagcangcgaatgta

SEQ ID NO: 267755 - DNA, 21 bp, Artificial sequence
  SiRNA target sequence
  misc_feature (11)..(11): n is a, c, g, or t
tcaagaagcangcgaatgtat

SEQ ID NO: 267756 - DNA, 21 bp, Artificial sequence
  SiRNA target sequence
  misc_feature (10)..(10): n is a, c, g, or t
  misc_feature (21)..(21): n is a, c, g, or t
caagaagcangcgaatgtatn

SEQ ID NO: 267757 - DNA, 21 bp, Artificial sequence
  SiRNA target sequence
  misc_feature (9)..(9): n is a, c, g, or t
  misc_feature (20)..(20): n is a, c, g, or t
aagaagcangcgaatgtatnt

SEQ ID NO: 267758 - DNA, 21 bp, Artificial sequence
  SiRNA target sequence
  misc_feature (8)..(8): n is a, c, g, or t
  misc_feature (19)..(19): n is a, c, g, or t
agaagcangcgaatgtatntt

SEQ ID NO: 267759 - DNA, 21 bp, Artificial sequence
  SiRNA target sequence
  misc_feature (7)..(7): n is a, c, g, or t
  misc_feature (18)..(18): n is a, c, g, or t
gaagcangcgaatgtatnttt

SEQ ID NO: 267760 - DNA, 21 bp, Artificial sequence
  SiRNA target sequence
  misc_feature (6)..(6): n is a, c, g, or t
  misc_feature (17)..(17): n is a, c, g, or t
aagcangcgaatgtatnttta

SEQ ID NO: 267761 - DNA, 21 bp, Artificial sequence
  SiRNA target sequence
  misc_feature (5)..(5): n is a, c, g, or t
  misc_feature (16)..(16): n is a, c, g, or t
agcangcgaatgtatntttaa

SEQ ID NO: 267762 - DNA, 21 bp, Artificial sequence
  SiRNA target sequence
  misc_feature (4)..(4): n is a, c, g, or t
  misc_feature (15)..(15): n is a, c, g, or t
gcangcgaatgtatntttaag

SEQ ID NO: 267763 - DNA, 21 bp, Artificial sequence
  SiRNA target sequence
  misc_feature (3)..(3): n is a, c, g, or t
  misc_feature (14)..(14): n is a, c, g, or t
cangcgaatgtatntttaaga

SEQ ID NO: 267764 - DNA, 21 bp, Artificial sequence
  SiRNA target sequence
  misc_feature (2)..(2): n is a, c, g, or t
  misc_feature (13)..(13): n is a, c, g, or t
angcgaatgtatntttaagaa

SEQ ID NO: 267765 - DNA, 21 bp, Artificial sequence
  SiRNA target sequence
  misc_feature (1)..(1): n is a, c, g, or t
  misc_feature (12)..(12): n is a, c, g, or t
ngcgaatgtatntttaagaaa

SEQ ID NO: 267766 - DNA, 21 bp, Artificial sequence
  SiRNA target sequence
  misc_feature (11)..(11): n is a, c, g, or t
gcgaatgtatntttaagaaac

SEQ ID NO: 267767 - DNA, 21 bp, Artificial sequence
  SiRNA target sequence
  misc_feature (10)..(10): n is a, c, g, or t
cgaatgtatntttaagaaacc

SEQ ID NO: 267768 - DNA, 21 bp, Artificial sequence
  SiRNA target sequence
  misc_feature (9)..(9): n is a, c, g, or t
gaatgtatntttaagaaacct

SEQ ID NO: 267769 - DNA, 21 bp, Artificial sequence
  SiRNA target sequence
  misc_feature (8)..(8): n is a, c, g, or t
aatgtatntttaagaaaccta

SEQ ID NO: 267770 - DNA, 21 bp, Artificial sequence
  SiRNA target sequence
  misc_feature (7)..(7): n is a, c, g, or t
atgtatntttaagaaacctaa

SEQ ID NO: 267771 - DNA, 21 bp, Artificial sequence
  SiRNA target sequence
  misc_feature (6)..(6): n is a, c, g, or t
tgtatntttaagaaacctaaa

SEQ ID NO: 267772 - DNA, 21 bp, Artificial sequence
  SiRNA target sequence
  misc_feature (5)..(5): n is a, c, g, or t
gtatntttaagaaacctaaat

SEQ ID NO: 267773 - DNA, 21 bp, Artificial sequence
  SiRNA target sequence
  misc_feature (4)..(4): n is a, c, g, or t
tatntttaagaaacctaaata

SEQ ID NO: 267774 - DNA, 21 bp, Artificial sequence
  SiRNA target sequence
  misc_feature (3)..(3): n is a, c, g, or t
atntttaagaaacctaaatat

SEQ ID NO: 267775 - DNA, 21 bp, Artificial sequence
  SiRNA target sequence
  misc_feature (2)..(2): n is a, c, g, or t
tntttaagaaacctaaatata

SEQ ID NO: 267776 - DNA, 21 bp, Artificial sequence
  SiRNA target sequence
  misc_feature (1)..(1): n is a, c, g, or t
ntttaagaaacctaaatatac

SEQ ID NO: 267777 - DNA, 21 bp, Artificial sequence
  SiRNA target sequence
tttaagaaacctaaatatacg

SEQ ID NO: 267778 - DNA, 21 bp, Artificial sequence
  SiRNA target sequence
ttaagaaacctaaatatacgc

SEQ ID NO: 267779 - DNA, 21 bp, Artificial sequence
  SiRNA target sequence
taagaaacctaaatatacgcg

SEQ ID NO: 267780 - DNA, 21 bp, Artificial sequence
  SiRNA target sequence
aagaaacctaaatatacgcgc

SEQ ID NO: 267781 - DNA, 21 bp, Artificial sequence
  SiRNA target sequence
  misc_feature (21)..(21): n is a, c, g, or t
agaaacctaaatatacgcgcn

SEQ ID NO: 267782 - DNA, 21 bp, Artificial sequence
  SiRNA target sequence
  misc_feature (20)..(20): n is a, c, g, or t
gaaacctaaatatacgcgcnt

SEQ ID NO: 267783 - DNA, 21 bp, Artificial sequence
  SiRNA target sequence
  misc_feature (19)..(19): n is a, c, g, or t
aaacctaaatatacgcgcntt

SEQ ID NO: 267784 - DNA, 21 bp, Artificial sequence
  SiRNA target sequence
  misc_feature (18)..(18): n is a, c, g, or t
aacctaaatatacgcgcnttt

SEQ ID NO: 267785 - DNA, 21 bp, Artificial sequence
  SiRNA target sequence
  misc_feature (17)..(17): n is a, c, g, or t
acctaaatatacgcgcntttg

SEQ ID NO: 267786 - DNA, 21 bp, Artificial sequence
  SiRNA target sequence
  misc_feature (16)..(16): n is a, c, g, or t
cctaaatatacgcgcntttgc

SEQ ID NO: 267787 - DNA, 21 bp, Artificial sequence
  SiRNA target sequence
  misc_feature (15)..(15): n is a, c, g, or t
ctaaatatacgcgcntttgca

SEQ ID NO: 267788 - DNA, 21 bp, Artificial sequence
  SiRNA target sequence
  misc_feature (14)..(14): n is a, c, g, or t
taaatatacgcgcntttgcaa

SEQ ID NO: 267789 - DNA, 21 bp, Artificial sequence
  SiRNA target sequence
  misc_feature (13)..(13): n is a, c, g, or t
aaatatacgcgcntttgcaag

SEQ ID NO: 267790 - DNA, 21 bp, Artificial sequence
  SiRNA target sequence
  misc_feature (12)..(12): n is a, c, g, or t
aatatacgcgcntttgcaaga

SEQ ID NO: 267791 - DNA, 21 bp, Artificial sequence
  SiRNA target sequence
  misc_feature (11)..(11): n is a, c, g, or t
atatacgcgcntttgcaagaa

SEQ ID NO: 267792 - DNA, 21 bp, Artificial sequence
  SiRNA target sequence
  misc_feature (10)..(10): n is a, c, g, or t
tatacgcgcntttgcaagaaa

SEQ ID NO: 267793 - DNA, 21 bp, Artificial sequence
  SiRNA target sequence
  misc_feature (9)..(9): n is a, c, g, or t
atacgcgcntttgcaagaaag

SEQ ID NO: 267794 - DNA, 21 bp, Artificial sequence
  SiRNA target sequence
  misc_feature (8)..(8): n is a, c, g, or t
tacgcgcntttgcaagaaagt

SEQ ID NO: 267795 - DNA, 21 bp, Artificial sequence
  SiRNA target sequence
  misc_feature (7)..(7): n is a, c, g, or t
acgcgcntttgcaagaaagtg

SEQ ID NO: 267796 - DNA, 21 bp, Artificial sequence
  SiRNA target sequence
  misc_feature (6)..(6): n is a, c, g, or t
cgcgcntttgcaagaaagtga

SEQ ID NO: 267797 - DNA, 21 bp, Artificial sequence
  SiRNA target sequence
  misc_feature (5)..(5): n is a, c, g, or t
gcgcntttgcaagaaagtgaa

SEQ ID NO: 267798 - DNA, 21 bp, Artificial sequence
  SiRNA target sequence
  misc_feature (4)..(4): n is a, c, g, or t
cgcntttgcaagaaagtgaag

SEQ ID NO: 267799 - DNA, 21 bp, Artificial sequence
  SiRNA target sequence
  misc_feature (3)..(3): n is a, c, g, or t
gcntttgcaagaaagtgaagc

SEQ ID NO: 267800 - DNA, 21 bp, Artificial sequence
  SiRNA target sequence
  misc_feature (2)..(2): n is a, c, g, or t
cntttgcaagaaagtgaagcg

SEQ ID NO: 267801 - DNA, 21 bp, Artificial sequence
  SiRNA target sequence
  misc_feature (1)..(1): n is a, c, g, or t
ntttgcaagaaagtgaagcgt

SEQ ID NO: 267802 - DNA, 21 bp, Artificial sequence
  SiRNA target sequence
tttgcaagaaagtgaagcgtg

SEQ ID NO: 267803 - DNA, 21 bp, Artificial sequence
  SiRNA target sequence
ttgcaagaaagtgaagcgtgt

SEQ ID NO: 267804 - DNA, 21 bp, Artificial sequence
  SiRNA target sequence
tgcaagaaagtgaagcgtgtt

SEQ ID NO: 267805 - DNA, 21 bp, Artificial sequence
  SiRNA target sequence
gcaagaaagtgaagcgtgttg

SEQ ID NO: 267806 - DNA, 21 bp, Artificial sequence
  SiRNA target sequence
caagaaagtgaagcgtgttgc

SEQ ID NO: 267807 - DNA, 21 bp, Artificial sequence
  SiRNA target sequence
aagaaagtgaagcgtgttgca

SEQ ID NO: 267808 - DNA, 21 bp, Artificial sequence
  SiRNA target sequence
agaaagtgaagcgtgttgcaa

SEQ ID NO: 267809 - DNA, 21 bp, Artificial sequence
  SiRNA target sequence
gaaagtgaagcgtgttgcaac

SEQ ID NO: 267810 - DNA, 21 bp, Artificial sequence
  SiRNA target sequence
aaagtgaagcgtgttgcaact

SEQ ID NO: 267811 - DNA, 21 bp, Artificial sequence
  SiRNA target sequence
aagtgaagcgtgttgcaactc

SEQ ID NO: 267812 - DNA, 21 bp, Artificial sequence
  SiRNA target sequence
agtgaagcgtgttgcaactcg

SEQ ID NO: 267813 - DNA, 21 bp, Artificial sequence
  SiRNA target sequence
gtgaagcgtgttgcaactcgc

SEQ ID NO: 267814 - DNA, 21 bp, Artificial sequence
  SiRNA target sequence
tgaagcgtgttgcaactcgct

SEQ ID NO: 267815 - DNA, 21 bp, Artificial sequence
  SiRNA target sequence
gaagcgtgttgcaactcgctt

SEQ ID NO: 267816 - DNA, 21 bp, Artificial sequence
  SiRNA target sequence
aagcgtgttgcaactcgcttc

SEQ ID NO: 267817 - DNA, 21 bp, Artificial sequence
  SiRNA target sequence
agcgtgttgcaactcgcttcg

SEQ ID NO: 267818 - DNA, 21 bp, Artificial sequence
  SiRNA target sequence
gcgtgttgcaactcgcttcgt

SEQ ID NO: 267819 - DNA, 21 bp, Artificial sequence
  SiRNA target sequence
cgtgttgcaactcgcttcgtt

SEQ ID NO: 267820 - DNA, 21 bp, Artificial sequence
  SiRNA target sequence
gtgttgcaactcgcttcgttc

SEQ ID NO: 267821 - DNA, 21 bp, Artificial sequence
  SiRNA target sequence
tgttgcaactcgcttcgttcg

SEQ ID NO: 267822 - DNA, 21 bp, Artificial sequence
  SiRNA target sequence
gttgcaactcgcttcgttcgt

SEQ ID NO: 267823 - DNA, 21 bp, Artificial sequence
  SiRNA target sequence
ttgcaactcgcttcgttcgtg

SEQ ID NO: 267824 - DNA, 21 bp, Artificial sequence
  SiRNA target sequence
tgcaactcgcttcgttcgtga

SEQ ID NO: 267825 - DNA, 21 bp, Artificial sequence
  SiRNA target sequence
gcaactcgcttcgttcgtgaa

SEQ ID NO: 267826 - DNA, 21 bp, Artificial sequence
  SiRNA target sequence
caactcgcttcgttcgtgaaa

SEQ ID NO: 267827 - DNA, 21 bp, Artificial sequence
  SiRNA target sequence
aactcgcttcgttcgtgaaaa

SEQ ID NO: 267828 - DNA, 21 bp, Artificial sequence
  SiRNA target sequence
actcgcttcgttcgtgaaaaa

SEQ ID NO: 267829 - DNA, 21 bp, Artificial sequence
  SiRNA target sequence
ctcgcttcgttcgtgaaaaag

SEQ ID NO: 267830 - DNA, 21 bp, Artificial sequence
  SiRNA target sequence
tcgcttcgttcgtgaaaaagt

SEQ ID NO: 267831 - DNA, 21 bp, Artificial sequence
  SiRNA target sequence
cgcttcgttcgtgaaaaagtt

SEQ ID NO: 267832 - DNA, 21 bp, Artificial sequence
  SiRNA target sequence
gcttcgttcgtgaaaaagttg

SEQ ID NO: 267833 - DNA, 21 bp, Artificial sequence
  SiRNA target sequence
cttcgttcgtgaaaaagttgt

SEQ ID NO: 267834 - DNA, 21 bp, Artificial sequence
  SiRNA target sequence
ttcgttcgtgaaaaagttgtt

SEQ ID NO: 267835 - DNA, 21 bp, Artificial sequence
  SiRNA target sequence
tcgttcgtgaaaaagttgttc

SEQ ID NO: 267836 - DNA, 21 bp, Artificial sequence
  SiRNA target sequence
cgttcgtgaaaaagttgttcg

SEQ ID NO: 267837 - DNA, 21 bp, Artificial sequence
  SiRNA target sequence
gttcgtgaaaaagttgttcgt

SEQ ID NO: 267838 - DNA, 21 bp, Artificial sequence
  SiRNA target sequence
ttcgtgaaaaagttgttcgtc

SEQ ID NO: 267839 - DNA, 21 bp, Artificial sequence
  SiRNA target sequence
tcgtgaaaaagttgttcgtcc

SEQ ID NO: 267840 - DNA, 21 bp, Artificial sequence
  SiRNA target sequence
cgtgaaaaagttgttcgtcct

SEQ ID NO: 267841 - DNA, 21 bp, Artificial sequence
  SiRNA target sequence
gtgaaaaagttgttcgtccta

SEQ ID NO: 267842 - DNA, 21 bp, Artificial sequence
  SiRNA target sequence
tgaaaaagttgttcgtcctat

SEQ ID NO: 267843 - DNA, 21 bp, Artificial sequence
  SiRNA target sequence
gaaaaagttgttcgtcctatg

SEQ ID NO: 267844 - DNA, 21 bp, Artificial sequence
  SiRNA target sequence
aaaaagttgttcgtcctatgt

SEQ ID NO: 267845 - DNA, 21 bp, Artificial sequence
  SiRNA target sequence
aaaagttgttcgtcctatgtg

SEQ ID NO: 267846 - DNA, 21 bp, Artificial sequence
  SiRNA target sequence
  misc_feature (21)..(21): n is a, c, g, or t
aaagttgttcgtcctatgtgn

SEQ ID NO: 267847 - DNA, 21 bp, Artificial sequence
  SiRNA target sequence
  misc_feature (20)..(20): n is a, c, g, or t
aagttgttcgtcctatgtgnt

SEQ ID NO: 267848 - DNA, 21 bp, Artificial sequence
  SiRNA target sequence
  misc_feature (19)..(19): n is a, c, g, or t
agttgttcgtcctatgtgntc

SEQ ID NO: 267849 - DNA, 21 bp, Artificial sequence
  SiRNA target sequence
  misc_feature (18)..(18): n is a, c, g, or t
  misc_feature (21)..(21): n is a, c, g, or t
gttgttcgtcctatgtgntcn

SEQ ID NO: 267850 - DNA, 21 bp, Artificial sequence
  SiRNA target sequence
  misc_feature (17)..(17): n is a, c, g, or t
  misc_feature (20)..(20): n is a, c, g, or t
ttgttcgtcctatgtgntcna

SEQ ID NO: 267851 - DNA, 21 bp, Artificial sequence
  SiRNA target sequence
  misc_feature (16)..(16): n is a, c, g, or t
  misc_feature (19)..(19): n is a, c, g, or t
tgttcgtcctatgtgntcnag

SEQ ID NO: 267852 - DNA, 21 bp, Artificial sequence
  SiRNA target sequence
  misc_feature (15)..(15): n is a, c, g, or t
  misc_feature (18)..(18): n is a, c, g, or t
gttcgtcctatgtgntcnaga

SEQ ID NO: 267853 - DNA, 21 bp, Artificial sequence
  SiRNA target sequence
  misc_feature (14)..(14): n is a, c, g, or t
  misc_feature (17)..(17): n is a, c, g, or t
ttcgtcctatgtgntcnagat

SEQ ID NO: 267854 - DNA, 21 bp, Artificial sequence
  SiRNA target sequence
  misc_feature (13)..(13): n is a, c, g, or t
  misc_feature (16)..(16): n is a, c, g, or t
tcgtcctatgtgntcnagatc

SEQ ID NO: 267855 - DNA, 21 bp, Artificial sequence
  SiRNA target sequence
  misc_feature (12)..(12): n is a, c, g, or t
  misc_feature (15)..(15): n is a, c, g, or t
cgtcctatgtgntcnagatcc

SEQ ID NO: 267856 - DNA, 21 bp, Artificial sequence
  SiRNA target sequence
  misc_feature (11)..(11): n is a, c, g, or t
  misc_feature (14)..(14): n is a, c, g, or t
gtcctatgtgntcnagatccc

SEQ ID NO: 267857 - DNA, 21 bp, Artificial sequence
  SiRNA target sequence
  misc_feature (10)..(10): n is a, c, g, or t
  misc_feature (13)..(13): n is a, c, g, or t
tcctatgtgntcnagatcccc

SEQ ID NO: 267858 - DNA, 21 bp, Artificial sequence
  SiRNA target sequence
  misc_feature (9)..(9): n is a, c, g, or t
  misc_feature (12)..(12): n is a, c, g, or t
cctatgtgntcnagatcccct

SEQ ID NO: 267859 - DNA, 21 bp, Artificial sequence
  SiRNA target sequence
  misc_feature (8)..(8): n is a, c, g, or t
  misc_feature (11)..(11): n is a, c, g, or t
ctatgtgntcnagatccccta

SEQ ID NO: 267860 - DNA, 21 bp, Artificial sequence
  SiRNA target sequence
  misc_feature (7)..(7): n is a, c, g, or t
  misc_feature (10)..(10): n is a, c, g, or t
tatgtgntcnagatcccctat

SEQ ID NO: 267861 - DNA, 21 bp, Artificial sequence
  SiRNA target sequence
  misc_feature (6)..(6): n is a, c, g, or t
  misc_feature (9)..(9): n is a, c, g, or t
atgtgntcnagatcccctatg

SEQ ID NO: 267862 - DNA, 21 bp, Artificial sequence
  SiRNA target sequence
  misc_feature (5)..(5): n is a, c, g, or t
  misc_feature (8)..(8): n is a, c, g, or t
tgtgntcnagatcccctatgc

SEQ ID NO: 267863 - DNA, 21 bp, Artificial sequence
  SiRNA target sequence
  misc_feature (4)..(4): n is a, c, g, or t
  misc_feature (7)..(7): n is a, c, g, or t
gtgntcnagatcccctatgct

SEQ ID NO: 267864 - DNA, 21 bp, Artificial sequence
  SiRNA target sequence
  misc_feature (3)..(3): n is a, c, g, or t
  misc_feature (6)..(6): n is a, c, g, or t
tgntcnagatcccctatgcta

SEQ ID NO: 267865 - DNA, 21 bp, Artificial sequence
  SiRNA target sequence
  misc_feature (2)..(2): n is a, c, g, or t
  misc_feature (5)..(5): n is a, c, g, or t
gntcnagatcccctatgctat

SEQ ID NO: 267866 - DNA, 21 bp, Artificial sequence
  SiRNA target sequence
  misc_feature (1)..(1): n is a, c, g, or t
  misc_feature (4)..(4): n is a, c, g, or t
ntcnagatcccctatgctatt

SEQ ID NO: 267867 - DNA, 21 bp, Artificial sequence
  SiRNA target sequence
  misc_feature (3)..(3): n is a, c, g, or t
tcnagatcccctatgctatta

SEQ ID NO: 267868 - DNA, 21 bp, Artificial sequence
  SiRNA target sequence
  misc_feature (2)..(2): n is a, c, g, or t
cnagatcccctatgctattat

SEQ ID NO: 267869 - DNA, 21 bp, Artificial sequence
  SiRNA target sequence
  misc_feature (1)..(1): n is a, c, g, or t
nagatcccctatgctattatt

SEQ ID NO: 267870 - DNA, 21 bp, Artificial sequence
  SiRNA target sequence
agatcccctatgctattattt

SEQ ID NO: 267871 - DNA, 21 bp, Artificial sequence
  SiRNA target sequence
gatcccctatgctattattta

SEQ ID NO: 267872 - DNA, 21 bp, Artificial sequence
  SiRNA target sequence
atcccctatgctattatttaa

SEQ ID NO: 267873 - DNA, 21 bp, Artificial sequence
  SiRNA target sequence
tcccctatgctattatttaag

SEQ ID NO: 267874 - DNA, 21 bp, Artificial sequence
  SiRNA target sequence
cccctatgctattatttaagc

SEQ ID NO: 267875 - DNA, 21 bp, Artificial sequence
  SiRNA target sequence
ccctatgctattatttaagct

SEQ ID NO: 267876 - DNA, 21 bp, Artificial sequence
  SiRNA target sequence
cctatgctattatttaagctt

SEQ ID NO: 267877 - DNA, 21 bp, Artificial sequence
  SiRNA target sequence
ctatgctattatttaagctta

SEQ ID NO: 267878 - DNA, 21 bp, Artificial sequence
  SiRNA target sequence
tatgctattatttaagcttaa

SEQ ID NO: 267879 - DNA, 21 bp, Artificial sequence
  SiRNA target sequence
atgctattatttaagcttaag

SEQ ID NO: 267880 - DNA, 21 bp, Artificial sequence
  SiRNA target sequence
tgctattatttaagcttaaga

SEQ ID NO: 267881 - DNA, 21 bp, Artificial sequence
  SiRNA target sequence
gctattatttaagcttaagaa

SEQ ID NO: 267882 - DNA, 21 bp, Artificial sequence
  SiRNA target sequence
ctattatttaagcttaagaaa

SEQ ID NO: 267883 - DNA, 21 bp, Artificial sequence
  SiRNA target sequence
tattatttaagcttaagaaaa

SEQ ID NO: 267884 - DNA, 21 bp, Artificial sequence
  SiRNA target sequence
attatttaagcttaagaaaat

SEQ ID NO: 267885 - DNA, 21 bp, Artificial sequence
  SiRNA target sequence
ttatttaagcttaagaaaatt

SEQ ID NO: 267886 - DNA, 21 bp, Artificial sequence
  SiRNA target sequence
tatttaagcttaagaaaatta

SEQ ID NO: 267887 - DNA, 21 bp, Artificial sequence
  SiRNA target sequence
atttaagcttaagaaaattat

SEQ ID NO: 267888 - DNA, 21 bp, Artificial sequence
  SiRNA target sequence
tttaagcttaagaaaattatt

SEQ ID NO: 267889 - DNA, 21 bp, Artificial sequence
  SiRNA target sequence
ttaagcttaagaaaattattt

SEQ ID NO: 267890 - DNA, 21 bp, Artificial sequence
  SiRNA target sequence
taagcttaagaaaattattta

SEQ ID NO: 267891 - DNA, 21 bp, Artificial sequence
  SiRNA target sequence
aagcttaagaaaattatttat

SEQ ID NO: 267892 - DNA, 21 bp, Artificial sequence
  SiRNA target sequence
agcttaagaaaattatttatg

SEQ ID NO: 267893 - DNA, 21 bp, Artificial sequence
  SiRNA target sequence
gcttaagaaaattatttatga

SEQ ID NO: 267894 - DNA, 21 bp, Artificial sequence
  SiRNA target sequence
cttaagaaaattatttatgat

SEQ ID NO: 267895 - DNA, 21 bp, Artificial sequence
  SiRNA target sequence
ttaagaaaattatttatgatt

SEQ ID NO: 267896 - DNA, 21 bp, Artificial sequence
  SiRNA target sequence
taagaaaattatttatgattt

SEQ ID NO: 267897 - DNA, 21 bp, Artificial sequence
  SiRNA target sequence
aagaaaattatttatgatttg

SEQ ID NO: 267898 - DNA, 21 bp, Artificial sequence
  SiRNA target sequence
agaaaattatttatgatttgc

SEQ ID NO: 267899 - DNA, 21 bp, Artificial sequence
  SiRNA target sequence
gaaaattatttatgatttgca

SEQ ID NO: 267900 - DNA, 21 bp, Artificial sequence
  SiRNA target sequence
aaaattatttatgatttgcat

SEQ ID NO: 267901 - DNA, 21 bp, Artificial sequence
  SiRNA target sequence
aaattatttatgatttgcatt

SEQ ID NO: 267902 - DNA, 21 bp, Artificial sequence
  SiRNA target sequence
aattatttatgatttgcattt

SEQ ID NO: 267903 - DNA, 21 bp, Artificial sequence
  SiRNA target sequence
attatttatgatttgcattta

SEQ ID NO: 267904 - DNA, 21 bp, Artificial sequence
  SiRNA target sequence
ttatttatgatttgcatttat

SEQ ID NO: 267905 - DNA, 21 bp, Artificial sequence
  SiRNA target sequence
tatttatgatttgcatttata

SEQ ID NO: 267906 - DNA, 21 bp, Artificial sequence
  SiRNA target sequence
atttatgatttgcatttatat

SEQ ID NO: 267907 - DNA, 21 bp, Artificial sequence
  SiRNA target sequence
tttatgatttgcatttatata

SEQ ID NO: 267908 - DNA, 21 bp, Artificial sequence
  SiRNA target sequence
ttatgatttgcatttatatag

SEQ ID NO: 267909 - DNA, 21 bp, Artificial sequence
  SiRNA target sequence
tatgatttgcatttatataga

SEQ ID NO: 267910 - DNA, 21 bp, Artificial sequence
  SiRNA target sequence
atgatttgcatttatatagat

SEQ ID NO: 267911 - DNA, 21 bp, Artificial sequence
  SiRNA target sequence
tgatttgcatttatatagatt

SEQ ID NO: 267912 - DNA, 21 bp, Artificial sequence
  SiRNA target sequence
gatttgcatttatatagatta

SEQ ID NO: 267913 - DNA, 21 bp, Artificial sequence
  SiRNA target sequence
atttgcatttatatagattaa

SEQ ID NO: 267914 - DNA, 21 bp, Artificial sequence
  SiRNA target sequence
tttgcatttatatagattaag

SEQ ID NO: 267915 - DNA, 21 bp, Artificial sequence
  SiRNA target sequence
ttgcatttatatagattaaga

SEQ ID NO: 267916 - DNA, 21 bp, Artificial sequence
  SiRNA target sequence
tgcatttatatagattaagaa

SEQ ID NO: 267917 - DNA, 21 bp, Artificial sequence
  SiRNA target sequence
gcatttatatagattaagaaa

SEQ ID NO: 267918 - DNA, 21 bp, Artificial sequence
  SiRNA target sequence
catttatatagattaagaaaa

SEQ ID NO: 267919 - DNA, 21 bp, Artificial sequence
  SiRNA target sequence
atttatatagattaagaaaac

SEQ ID NO: 267920 - DNA, 21 bp, Artificial sequence
  SiRNA target sequence
tttatatagattaagaaaaca

SEQ ID NO: 267921 - DNA, 21 bp, Artificial sequence
  SiRNA target sequence
ttatatagattaagaaaacag

SEQ ID NO: 267922 - DNA, 21 bp, Artificial sequence
  SiRNA target sequence
tatatagattaagaaaacaga

SEQ ID NO: 267923 - DNA, 21 bp, Artificial sequence
  SiRNA target sequence
atatagattaagaaaacagat

SEQ ID NO: 267924 - DNA, 21 bp, Artificial sequence
  SiRNA target sequence
tatagattaagaaaacagatt

SEQ ID NO: 267925 - DNA, 21 bp, Artificial sequence
  SiRNA target sequence
atagattaagaaaacagatta

SEQ ID NO: 267926 - DNA, 21 bp, Artificial sequence
  SiRNA target sequence
tagattaagaaaacagattag

SEQ ID NO: 267927 - DNA, 21 bp, Artificial sequence
  SiRNA target sequence
agattaagaaaacagattagg

SEQ ID NO: 267928 - DNA, 21 bp, Artificial sequence
  SiRNA target sequence
gattaagaaaacagattagga

SEQ ID NO: 267929 - DNA, 21 bp, Artificial sequence
  SiRNA target sequence
attaagaaaacagattaggat

SEQ ID NO: 267930 - DNA, 21 bp, Artificial sequence
  SiRNA target sequence
ttaagaaaacagattaggatg

SEQ ID NO: 267931 - DNA, 21 bp, Artificial sequence
  SiRNA target sequence
taagaaaacagattaggatgt

SEQ ID NO: 267932 - DNA, 21 bp, Artificial sequence
  SiRNA target sequence
aagaaaacagattaggatgtt

SEQ ID NO: 267933 - DNA, 21 bp, Artificial sequence
  SiRNA target sequence
agaaaacagattaggatgttg

SEQ ID NO: 267934 - DNA, 21 bp, Artificial sequence
  SiRNA target sequence
gaaaacagattaggatgttga

SEQ ID NO: 267935 - DNA, 21 bp, Artificial sequence
  SiRNA target sequence
aaaacagattaggatgttgag

SEQ ID NO: 267936 - DNA, 21 bp, Artificial sequence
  SiRNA target sequence
aaacagattaggatgttgaga

SEQ ID NO: 267937 - DNA, 21 bp, Artificial sequence
  SiRNA target sequence
aacagattaggatgttgagac

SEQ ID NO: 267938 - DNA, 21 bp, Artificial sequence
  SiRNA target sequence
acagattaggatgttgagacg

SEQ ID NO: 267939 - DNA, 21 bp, Artificial sequence
  SiRNA target sequence
cagattaggatgttgagacgt

SEQ ID NO: 267940 - DNA, 21 bp, Artificial sequence
  SiRNA target sequence
agattaggatgttgagacgtc

SEQ ID NO: 267941 - DNA, 21 bp, Artificial sequence
  SiRNA target sequence
gattaggatgttgagacgtca

SEQ ID NO: 267942 - DNA, 21 bp, Artificial sequence
  SiRNA target sequence
attaggatgttgagacgtcaa

SEQ ID NO: 267943 - DNA, 21 bp, Artificial sequence
  SiRNA target sequence
ttaggatgttgagacgtcaaa

SEQ ID NO: 267944 - DNA, 21 bp, Artificial sequence
  SiRNA target sequence
taggatgttgagacgtcaaaa

SEQ ID NO: 267945 - DNA, 21 bp, Artificial sequence
  SiRNA target sequence
aggatgttgagacgtcaaaaa

SEQ ID NO: 267946 - DNA, 21 bp, Artificial sequence
  SiRNA target sequence
ggatgttgagacgtcaaaaac

SEQ ID NO: 267947 - DNA, 21 bp, Artificial sequence
  SiRNA target sequence
gatgttgagacgtcaaaaaca

SEQ ID NO: 267948 - DNA, 21 bp, Artificial sequence
  SiRNA target sequence
atgttgagacgtcaaaaacag

SEQ ID NO: 267949 - DNA, 21 bp, Artificial sequence
  SiRNA target sequence
tgttgagacgtcaaaaacagc

SEQ ID NO: 267950 - DNA, 21 bp, Artificial sequence
  SiRNA target sequence
gttgagacgtcaaaaacagcg

SEQ ID NO: 267951 - DNA, 21 bp, Artificial sequence
  SiRNA target sequence
ttgagacgtcaaaaacagcgc

SEQ ID NO: 267952 - DNA, 21 bp, Artificial sequence
  SiRNA target sequence
tgagacgtcaaaaacagcgcg

SEQ ID NO: 267953 - DNA, 21 bp, Artificial sequence
  SiRNA target sequence
gagacgtcaaaaacagcgcga

SEQ ID NO: 267954 - DNA, 21 bp, Artificial sequence
  SiRNA target sequence
agacgtcaaaaacagcgcgat

SEQ ID NO: 267955 - DNA, 21 bp, Artificial sequence
  SiRNA target sequence
gacgtcaaaaacagcgcgatt

SEQ ID NO: 267956 - DNA, 21 bp, Artificial sequence
  SiRNA target sequence
acgtcaaaaacagcgcgatta

SEQ ID NO: 267957 - DNA, 21 bp, Artificial sequence
  SiRNA target sequence
cgtcaaaaacagcgcgattat

SEQ ID NO: 267958 - DNA, 21 bp, Artificial sequence
  SiRNA target sequence
gtcaaaaacagcgcgattatg

SEQ ID NO: 267959 - DNA, 21 bp, Artificial sequence
  SiRNA target sequence
tcaaaaacagcgcgattatga

SEQ ID NO: 267960 - DNA, 21 bp, Artificial sequence
  SiRNA target sequence
caaaaacagcgcgattatgag

SEQ ID NO: 267961 - DNA, 21 bp, Artificial sequence
  SiRNA target sequence
aaaaacagcgcgattatgagt

SEQ ID NO: 267962 - DNA, 21 bp, Artificial sequence
  SiRNA target sequence
aaaacagcgcgattatgagtt

SEQ ID NO: 267963 - DNA, 21 bp, Artificial sequence
  SiRNA target sequence
aaacagcgcgattatgagtta

SEQ ID NO: 267964 - DNA, 21 bp, Artificial sequence
  SiRNA target sequence
aacagcgcgattatgagttag

SEQ ID NO: 267965 - DNA, 21 bp, Artificial sequence
  SiRNA target sequence
acagcgcgattatgagttaga

SEQ ID NO: 267966 - DNA, 21 bp, Artificial sequence
  SiRNA target sequence
cagcgcgattatgagttagag

SEQ ID NO: 267967 - DNA, 21 bp, Artificial sequence
  SiRNA target sequence
agcgcgattatgagttagagt

SEQ ID NO: 267968 - DNA, 21 bp, Artificial sequence
  SiRNA target sequence
gcgcgattatgagttagagtg

SEQ ID NO: 267969 - DNA, 21 bp, Artificial sequence
  SiRNA target sequence
cgcgattatgagttagagtgt

SEQ ID NO: 267970 - DNA, 21 bp, Artificial sequence
  SiRNA target sequence
gcgattatgagttagagtgtg

SEQ ID NO: 267971 - DNA, 21 bp, Artificial sequence
  SiRNA target sequence
cgattatgagttagagtgtgt

SEQ ID NO: 267972 - DNA, 21 bp, Artificial sequence
  SiRNA target sequence
gattatgagttagagtgtgtc

SEQ ID NO: 267973 - DNA, 21 bp, Artificial sequence
  SiRNA target sequence
attatgagttagagtgtgtca

SEQ ID NO: 267974 - DNA, 21 bp, Artificial sequence
  SiRNA target sequence
ttatgagttagagtgtgtcac

SEQ ID NO: 267975 - DNA, 21 bp, Artificial sequence
  SiRNA target sequence
tatgagttagagtgtgtcact

SEQ ID NO: 267976 - DNA, 21 bp, Artificial sequence
  SiRNA target sequence
atgagttagagtgtgtcacta

SEQ ID NO: 267977 - DNA, 21 bp, Artificial sequence
  SiRNA target sequence
tgagttagagtgtgtcactaa

SEQ ID NO: 267978 - DNA, 21 bp, Artificial sequence
  SiRNA target sequence
gagttagagtgtgtcactaat

SEQ ID NO: 267979 - DNA, 21 bp, Artificial sequence
  SiRNA target sequence
agttagagtgtgtcactaatc

SEQ ID NO: 267980 - DNA, 21 bp, Artificial sequence
  SiRNA target sequence
gttagagtgtgtcactaatct

SEQ ID NO: 267981 - DNA, 21 bp, Artificial sequence
  SiRNA target sequence
ttagagtgtgtcactaatctg

SEQ ID NO: 267982 - DNA, 21 bp, Artificial sequence
  SiRNA target sequence
  misc_feature (21)..(21): n is a, c, g, or t
tagagtgtgtcactaatctgn

SEQ ID NO: 267983 - DNA, 21 bp, Artificial sequence
  SiRNA target sequence
  misc_feature (20)..(20): n is a, c, g, or t
agagtgtgtcactaatctgnt

SEQ ID NO: 267984 - DNA, 21 bp, Artificial sequence
  SiRNA target sequence
  misc_feature (19)..(19): n is a, c, g, or t
gagtgtgtcactaatctgnta

SEQ ID NO: 267985 - DNA, 21 bp, Artificial sequence
  SiRNA target sequence
  misc_feature (18)..(18): n is a, c, g, or t
agtgtgtcactaatctgntac

SEQ ID NO: 267986 - DNA, 21 bp, Artificial sequence
  SiRNA target sequence
  misc_feature (17)..(17): n is a, c, g, or t
gtgtgtcactaatctgntaca

SEQ ID NO: 267987 - DNA, 21 bp, Artificial sequence
  SiRNA target sequence
  misc_feature (16)..(16): n is a, c, g, or t
tgtgtcactaatctgntacaa

SEQ ID NO: 267988 - DNA, 21 bp, Artificial sequence
  SiRNA target sequence
  misc_feature (15)..(15): n is a, c, g, or t
gtgtcactaatctgntacaat

SEQ ID NO: 267989 - DNA, 21 bp, Artificial sequence
  SiRNA target sequence
  misc_feature (14)..(14): n is a, c, g, or t
tgtcactaatctgntacaatt

SEQ ID NO: 267990 - DNA, 21 bp, Artificial sequence
  SiRNA target sequence
  misc_feature (13)..(13): n is a, c, g, or t
gtcactaatctgntacaatta

SEQ ID NO: 267991 - DNA, 21 bp, Artificial sequence
  SiRNA target sequence
  misc_feature (12)..(12): n is a, c, g, or t
tcactaatctgntacaattat

SEQ ID NO: 267992 - DNA, 21 bp, Artificial sequence
  SiRNA target sequence
  misc_feature (11)..(11): n is a, c, g, or t
cactaatctgntacaattatc

SEQ ID NO: 267993 - DNA, 21 bp, Artificial sequence
  SiRNA target sequence
  misc_feature (10)..(10): n is a, c, g, or t
actaatctgntacaattatcg

SEQ ID NO: 267994 - DNA, 21 bp, Artificial sequence
  SiRNA target sequence
  misc_feature (9)..(9): n is a, c, g, or t
ctaatctgntacaattatcga

SEQ ID NO: 267995 - DNA, 21 bp, Artificial sequence
  SiRNA target sequence
  misc_feature (8)..(8): n is a, c, g, or t
taatctgntacaattatcgaa

SEQ ID NO: 267996 - DNA, 21 bp, Artificial sequence
  SiRNA target sequence
  misc_feature (7)..(7): n is a, c, g, or t
aatctgntacaattatcgaat

SEQ ID NO: 267997 - DNA, 21 bp, Artificial sequence
  SiRNA target sequence
  misc_feature (6)..(6): n is a, c, g, or t
atctgntacaattatcgaatc

SEQ ID NO: 267998 - DNA, 21 bp, Artificial sequence
  SiRNA target sequence
  misc_feature (5)..(5): n is a, c, g, or t
tctgntacaattatcgaatcc

SEQ ID NO: 267999 - DNA, 21 bp, Artificial sequence
  SiRNA target sequence
  misc_feature (4)..(4): n is a, c, g, or t
ctgntacaattatcgaatcca

SEQ ID NO: 268000 - DNA, 21 bp, Artificial sequence
  SiRNA target sequence
  misc_feature (3)..(3): n is a, c, g, or t
tgntacaattatcgaatccag

SEQ ID NO: 268001 - DNA, 21 bp, Artificial sequence
  SiRNA target sequence
  misc_feature (2)..(2): n is a, c, g, or t
gntacaattatcgaatccagt

SEQ ID NO: 268002 - DNA, 21 bp, Artificial sequence
  SiRNA target sequence
  misc_feature (1)..(1): n is a, c, g, or t
ntacaattatcgaatccagtg

SEQ ID NO: 268003 - DNA, 21 bp, Artificial sequence
  SiRNA target sequence
tacaattatcgaatccagtgc

SEQ ID NO: 268004 - DNA, 21 bp, Artificial sequence
  SiRNA target sequence
acaattatcgaatccagtgca

SEQ ID NO: 268005 - DNA, 21 bp, Artificial sequence
  SiRNA target sequence
caattatcgaatccagtgcag

SEQ ID NO: 268006 - DNA, 21 bp, Artificial sequence
  SiRNA target sequence
aattatcgaatccagtgcagg

SEQ ID NO: 268007 - DNA, 21 bp, Artificial sequence
  SiRNA target sequence
attatcgaatccagtgcaggc

SEQ ID NO: 268008 - DNA, 21 bp, Artificial sequence
  SiRNA target sequence
ttatcgaatccagtgcaggca

SEQ ID NO: 268009 - DNA, 21 bp, Artificial sequence
  SiRNA target sequence
tatcgaatccagtgcaggcaa

SEQ ID NO: 268010 - DNA, 21 bp, Artificial sequence
  SiRNA target sequence
atcgaatccagtgcaggcaaa

SEQ ID NO: 268011 - DNA, 21 bp, Artificial sequence
  SiRNA target sequence
tcgaatccagtgcaggcaaaa

SEQ ID NO: 268012 - DNA, 21 bp, Artificial sequence
  SiRNA target sequence
cgaatccagtgcaggcaaaac

SEQ ID NO: 268013 - DNA, 21 bp, Artificial sequence
  SiRNA target sequence
gaatccagtgcaggcaaaacc

SEQ ID NO: 268014 - DNA, 21 bp, Artificial sequence
  SiRNA target sequence
aatccagtgcaggcaaaacca

SEQ ID NO: 268015 - DNA, 21 bp, Artificial sequence
  SiRNA target sequence
atccagtgcaggcaaaaccag

SEQ ID NO: 268016 - DNA, 21 bp, Artificial sequence
  SiRNA target sequence
tccagtgcaggcaaaaccaga

SEQ ID NO: 268017 - DNA, 21 bp, Artificial sequence
  SiRNA target sequence
ccagtgcaggcaaaaccagag

SEQ ID NO: 268018 - DNA, 21 bp, Artificial sequence
  SiRNA target sequence
cagtgcaggcaaaaccagaga

SEQ ID NO: 268019 - DNA, 21 bp, Artificial sequence
  SiRNA target sequence
agtgcaggcaaaaccagagat

SEQ ID NO: 268020 - DNA, 21 bp, Artificial sequence
  SiRNA target sequence
gtgcaggcaaaaccagagatg

SEQ ID NO: 268021 - DNA, 21 bp, Artificial sequence
  SiRNA target sequence
tgcaggcaaaaccagagatgg

SEQ ID NO: 268022 - DNA, 21 bp, Artificial sequence
  SiRNA target sequence
gcaggcaaaaccagagatgga

SEQ ID NO: 268023 - DNA, 21 bp, Artificial sequence
  SiRNA target sequence
caggcaaaaccagagatggat

SEQ ID NO: 268024 - DNA, 21 bp, Artificial sequence
  SiRNA target sequence
aggcaaaaccagagatggata

SEQ ID NO: 268025 - DNA, 21 bp, Artificial sequence
  SiRNA target sequence
ggcaaaaccagagatggataa

SEQ ID NO: 268026 - DNA, 21 bp, Artificial sequence
  SiRNA target sequence
gcaaaaccagagatggataac

SEQ ID NO: 268027 - DNA, 21 bp, Artificial sequence
  SiRNA target sequence
caaaaccagagatggataacc

SEQ ID NO: 268028 - DNA, 21 bp, Artificial sequence
  SiRNA target sequence
aaaaccagagatggataaccc

SEQ ID NO: 268029 - DNA, 21 bp, Artificial sequence
  SiRNA target sequence
aaaccagagatggataaccct

SEQ ID NO: 268030 - DNA, 21 bp, Artificial sequence
  SiRNA target sequence
aaccagagatggataacccta

SEQ ID NO: 268031 - DNA, 21 bp, Artificial sequence
  SiRNA target sequence
accagagatggataaccctaa

SEQ ID NO: 268032 - DNA, 21 bp, Artificial sequence
  SiRNA target sequence
ccagagatggataaccctaat

SEQ ID NO: 268033 - DNA, 21 bp, Artificial sequence
  SiRNA target sequence
cagagatggataaccctaatc

SEQ ID NO: 268034 - DNA, 21 bp, Artificial sequence
  SiRNA target sequence
agagatggataaccctaatcc

SEQ ID NO: 268035 - DNA, 21 bp, Artificial sequence
  SiRNA target sequence
gagatggataaccctaatcca

SEQ ID NO: 268036 - DNA, 21 bp, Artificial sequence
  SiRNA target sequence
agatggataaccctaatccag

SEQ ID NO: 268037 - DNA, 21 bp, Artificial sequence
  SiRNA target sequence
gatggataaccctaatccagg

SEQ ID NO: 268038 - DNA, 21 bp, Artificial sequence
  SiRNA target sequence
atggataaccctaatccagga

SEQ ID NO: 268039 - DNA, 21 bp, Artificial sequence
  SiRNA target sequence
tggataaccctaatccaggac

SEQ ID NO: 268040 - DNA, 21 bp, Artificial sequence
  SiRNA target sequence
ggataaccctaatccaggacc

SEQ ID NO: 268041 - DNA, 21 bp, Artificial sequence
  SiRNA target sequence
gataaccctaatccaggacct

SEQ ID NO: 268042 - DNA, 21 bp, Artificial sequence
  SiRNA target sequence
ataaccctaatccaggacctg

SEQ ID NO: 268043 - DNA, 21 bp, Artificial sequence
  SiRNA target sequence
taaccctaatccaggacctga

SEQ ID NO: 268044 - DNA, 21 bp, Artificial sequence
  SiRNA target sequence
aaccctaatccaggacctgat

SEQ ID NO: 268045 - DNA, 21 bp, Artificial sequence
  SiRNA target sequence
accctaatccaggacctgatg

SEQ ID NO: 268046 - DNA, 21 bp, Artificial sequence
  SiRNA target sequence
ccctaatccaggacctgatgg

SEQ ID NO: 268047 - DNA, 21 bp, Artificial sequence
  SiRNA target sequence
cctaatccaggacctgatggc

SEQ ID NO: 268048 - DNA, 21 bp, Artificial sequence
  SiRNA target sequence
ctaatccaggacctgatggcg

SEQ ID NO: 268049 - DNA, 21 bp, Artificial sequence
  SiRNA target sequence
taatccaggacctgatggcga

SEQ ID NO: 268050 - DNA, 21 bp, Artificial sequence
  SiRNA target sequence
aatccaggacctgatggcgag

SEQ ID NO: 268051 - DNA, 21 bp, Artificial sequence
  SiRNA target sequence
atccaggacctgatggcgagg

SEQ ID NO: 268052 - DNA, 21 bp, Artificial sequence
  SiRNA target sequence
tccaggacctgatggcgaggg

SEQ ID NO: 268053 - DNA, 21 bp, Artificial sequence
  SiRNA target sequence
ccaggacctgatggcgagggt

SEQ ID NO: 268054 - DNA, 21 bp, Artificial sequence
  SiRNA target sequence
caggacctgatggcgagggtg

SEQ ID NO: 268055 - DNA, 21 bp, Artificial sequence
  SiRNA target sequence
aggacctgatggcgagggtga

SEQ ID NO: 268056 - DNA, 21 bp, Artificial sequence
  SiRNA target sequence
ggacctgatggcgagggtgaa

SEQ ID NO: 268057 - DNA, 21 bp, Artificial sequence
  SiRNA target sequence
gacctgatggcgagggtgaag

SEQ ID NO: 268058 - DNA, 21 bp, Artificial sequence
  SiRNA target sequence
acctgatggcgagggtgaagt

SEQ ID NO: 268059 - DNA, 21 bp, Artificial sequence
  SiRNA target sequence
cctgatggcgagggtgaagtt

SEQ ID NO: 268060 - DNA, 21 bp, Artificial sequence
  SiRNA target sequence
ctgatggcgagggtgaagttg

SEQ ID NO: 268061 - DNA, 21 bp, Artificial sequence
  SiRNA target sequence
tgatggcgagggtgaagttga

SEQ ID NO: 268062 - DNA, 21 bp, Artificial sequence
  SiRNA target sequence
gatggcgagggtgaagttgaa

SEQ ID NO: 268063 - DNA, 21 bp, Artificial sequence
  SiRNA target sequence
atggcgagggtgaagttgaat

SEQ ID NO: 268064 - DNA, 21 bp, Artificial sequence
  SiRNA target sequence
tggcgagggtgaagttgaatt

SEQ ID NO: 268065 - DNA, 21 bp, Artificial sequence
  SiRNA target sequence
ggcgagggtgaagttgaatta

SEQ ID NO: 268066 - DNA, 21 bp, Artificial sequence
  SiRNA target sequence
gcgagggtgaagttgaattag

SEQ ID NO: 268067 - DNA, 21 bp, Artificial sequence
  SiRNA target sequence
cgagggtgaagttgaattaga

SEQ ID NO: 268068 - DNA, 21 bp, Artificial sequence
  SiRNA target sequence
gagggtgaagttgaattagaa

SEQ ID NO: 268069 - DNA, 21 bp, Artificial sequence
  SiRNA target sequence
agggtgaagttgaattagaaa

SEQ ID NO: 268070 - DNA, 21 bp, Artificial sequence
  SiRNA target sequence
gggtgaagttgaattagaaaa

SEQ ID NO: 268071 - DNA, 21 bp, Artificial sequence
  SiRNA target sequence
ggtgaagttgaattagaaaag

SEQ ID NO: 268072 - DNA, 21 bp, Artificial sequence
  SiRNA target sequence
gtgaagttgaattagaaaagg

SEQ ID NO: 268073 - DNA, 21 bp, Artificial sequence
  SiRNA target sequence
tgaagttgaattagaaaagga

SEQ ID NO: 268074 - DNA, 21 bp, Artificial sequence
  SiRNA target sequence
gaagttgaattagaaaaggat

SEQ ID NO: 268075 - DNA, 21 bp, Artificial sequence
  SiRNA target sequence
aagttgaattagaaaaggata

SEQ ID NO: 268076 - DNA, 21 bp, Artificial sequence
  SiRNA target sequence
agttgaattagaaaaggatag

SEQ ID NO: 268077 - DNA, 21 bp, Artificial sequence
  SiRNA target sequence
gttgaattagaaaaggatagc

SEQ ID NO: 268078 - DNA, 21 bp, Artificial sequence
  SiRNA target sequence
ttgaattagaaaaggatagca

SEQ ID NO: 268079 - DNA, 21 bp, Artificial sequence
  SiRNA target sequence
tgaattagaaaaggatagcaa

SEQ ID NO: 268080 - DNA, 21 bp, Artificial sequence
  SiRNA target sequence
gaattagaaaaggatagcaat

SEQ ID NO: 268081 - DNA, 21 bp, Artificial sequence
  SiRNA target sequence
aattagaaaaggatagcaatg

SEQ ID NO: 268082 - DNA, 21 bp, Artificial sequence
  SiRNA target sequence
attagaaaaggatagcaatgt

SEQ ID NO: 268083 - DNA, 21 bp, Artificial sequence
  SiRNA target sequence
ttagaaaaggatagcaatgtt

SEQ ID NO: 268084 - DNA, 21 bp, Artificial sequence
  SiRNA target sequence
tagaaaaggatagcaatgttg

SEQ ID NO: 268085 - DNA, 21 bp, Artificial sequence
  SiRNA target sequence
agaaaaggatagcaatgttgt

SEQ ID NO: 268086 - DNA, 21 bp, Artificial sequence
  SiRNA target sequence
gaaaaggatagcaatgttgtt

SEQ ID NO: 268087 - DNA, 21 bp, Artificial sequence
  SiRNA target sequence
aaaaggatagcaatgttgttt

SEQ ID NO: 268088 - DNA, 21 bp, Artificial sequence
  SiRNA target sequence
aaaggatagcaatgttgtttt

SEQ ID NO: 268089 - DNA, 21 bp, Artificial sequence
  SiRNA target sequence
aaggatagcaatgttgtttta

SEQ ID NO: 268090 - DNA, 21 bp, Artificial sequence
  SiRNA target sequence
aggatagcaatgttgttttaa

SEQ ID NO: 268091 - DNA, 21 bp, Artificial sequence
  SiRNA target sequence
ggatagcaatgttgttttaac

SEQ ID NO: 268092 - DNA, 21 bp, Artificial sequence
  SiRNA target sequence
gatagcaatgttgttttaaca

SEQ ID NO: 268093 - DNA, 21 bp, Artificial sequence
  SiRNA target sequence
atagcaatgttgttttaacaa

SEQ ID NO: 268094 - DNA, 21 bp, Artificial sequence
  SiRNA target sequence
tagcaatgttgttttaacaac

SEQ ID NO: 268095 - DNA, 21 bp, Artificial sequence
  SiRNA target sequence
agcaatgttgttttaacaact

SEQ ID NO: 268096 - DNA, 21 bp, Artificial sequence
  SiRNA target sequence
gcaatgttgttttaacaactc

SEQ ID NO: 268097 - DNA, 21 bp, Artificial sequence
  SiRNA target sequence
caatgttgttttaacaactca

SEQ ID NO: 268098 - DNA, 21 bp, Artificial sequence
  SiRNA target sequence
aatgttgttttaacaactcag

SEQ ID NO: 268099 - DNA, 21 bp, Artificial sequence
  SiRNA target sequence
atgttgttttaacaactcagc

SEQ ID NO: 268100 - DNA, 21 bp, Artificial sequence
  SiRNA target sequence
tgttgttttaacaactcagcg

SEQ ID NO: 268101 - DNA, 21 bp, Artificial sequence
  SiRNA target sequence
gttgttttaacaactcagcga

SEQ ID NO: 268102 - DNA, 21 bp, Artificial sequence
  SiRNA target sequence
ttgttttaacaactcagcgag

SEQ ID NO: 268103 - DNA, 21 bp, Artificial sequence
  SiRNA target sequence
tgttttaacaactcagcgaga

SEQ ID NO: 268104 - DNA, 21 bp, Artificial sequence
  SiRNA target sequence
gttttaacaactcagcgagat

SEQ ID NO: 268105 - DNA, 21 bp, Artificial sequence
  SiRNA target sequence
ttttaacaactcagcgagatc

SEQ ID NO: 268106 - DNA, 21 bp, Artificial sequence
  SiRNA target sequence
tttaacaactcagcgagatcc

SEQ ID NO: 268107 - DNA, 21 bp, Artificial sequence
  SiRNA target sequence
ttaacaactcagcgagatcct

SEQ ID NO: 268108 - DNA, 21 bp, Artificial sequence
  SiRNA target sequence
taacaactcagcgagatccta

SEQ ID NO: 268109 - DNA, 21 bp, Artificial sequence
  SiRNA target sequence
aacaactcagcgagatcctag

SEQ ID NO: 268110 - DNA, 21 bp, Artificial sequence
  SiRNA target sequence
acaactcagcgagatcctagt

SEQ ID NO: 268111 - DNA, 21 bp, Artificial sequence
  SiRNA target sequence
caactcagcgagatcctagta

SEQ ID NO: 268112 - DNA, 21 bp, Artificial sequence
  SiRNA target sequence
aactcagcgagatcctagtac

SEQ ID NO: 268113 - DNA, 21 bp, Artificial sequence
  SiRNA target sequence
actcagcgagatcctagtaca

SEQ ID NO: 268114 - DNA, 21 bp, Artificial sequence
  SiRNA target sequence
ctcagcgagatcctagtacat

SEQ ID NO: 268115 - DNA, 21 bp, Artificial sequence
  SiRNA target sequence
tcagcgagatcctagtacatc

SEQ ID NO: 268116 - DNA, 21 bp, Artificial sequence
  SiRNA target sequence
cagcgagatcctagtacatct

SEQ ID NO: 268117 - DNA, 21 bp, Artificial sequence
  SiRNA target sequence
agcgagatcctagtacatcta

SEQ ID NO: 268118 - DNA, 21 bp, Artificial sequence
  SiRNA target sequence
gcgagatcctagtacatctat

SEQ ID NO: 268119 - DNA, 21 bp, Artificial sequence
  SiRNA target sequence
cgagatcctagtacatctatt

SEQ ID NO: 268120 - DNA, 21 bp, Artificial sequence
  SiRNA target sequence
gagatcctagtacatctattc

SEQ ID NO: 268121 - DNA, 21 bp, Artificial sequence
  SiRNA target sequence
agatcctagtacatctattcc

SEQ ID NO: 268122 - DNA, 21 bp, Artificial sequence
  SiRNA target sequence
gatcctagtacatctattcca

SEQ ID NO: 268123 - DNA, 21 bp, Artificial sequence
  SiRNA target sequence
atcctagtacatctattccag

SEQ ID NO: 268124 - DNA, 21 bp, Artificial sequence
  SiRNA target sequence
tcctagtacatctattccagc

SEQ ID NO: 268125 - DNA, 21 bp, Artificial sequence
  SiRNA target sequence
cctagtacatctattccagcg

SEQ ID NO: 268126 - DNA, 21 bp, Artificial sequence
  SiRNA target sequence
ctagtacatctattccagcgc

SEQ ID NO: 268127 - DNA, 21 bp, Artificial sequence
  SiRNA target sequence
tagtacatctattccagcgcc

SEQ ID NO: 268128 - DNA, 21 bp, Artificial sequence
  SiRNA target sequence
agtacatctattccagcgccg

SEQ ID NO: 268129 - DNA, 21 bp, Artificial sequence
  SiRNA target sequence
gtacatctattccagcgccgg

SEQ ID NO: 268130 - DNA, 21 bp, Artificial sequence
  SiRNA target sequence
tacatctattccagcgccggt

SEQ ID NO: 268131 - DNA, 21 bp, Artificial sequence
  SiRNA target sequence
acatctattccagcgccggtg

SEQ ID NO: 268132 - DNA, 21 bp, Artificial sequence
  SiRNA target sequence
catctattccagcgccggtga

SEQ ID NO: 268133 - DNA, 21 bp, Artificial sequence
  SiRNA target sequence
atctattccagcgccggtgag

SEQ ID NO: 268134 - DNA, 21 bp, Artificial sequence
  SiRNA target sequence
tctattccagcgccggtgagc

SEQ ID NO: 268135 - DNA, 21 bp, Artificial sequence
  SiRNA target sequence
ctattccagcgccggtgagcg

SEQ ID NO: 268136 - DNA, 21 bp, Artificial sequence
  SiRNA target sequence
tattccagcgccggtgagcgt

SEQ ID NO: 268137 - DNA, 21 bp, Artificial sequence
  SiRNA target sequence
attccagcgccggtgagcgta

SEQ ID NO: 268138 - DNA, 21 bp, Artificial sequence
  SiRNA target sequence
ttccagcgccggtgagcgtaa

SEQ ID NO: 268139 - DNA, 21 bp, Artificial sequence
  SiRNA target sequence
tccagcgccggtgagcgtaaa

SEQ ID NO: 268140 - DNA, 21 bp, Artificial sequence
  SiRNA target sequence
ccagcgccggtgagcgtaaaa

SEQ ID NO: 268141 - DNA, 21 bp, Artificial sequence
  SiRNA target sequence
cagcgccggtgagcgtaaaat

SEQ ID NO: 268142 - DNA, 21 bp, Artificial sequence
  SiRNA target sequence
agcgccggtgagcgtaaaatg

SEQ ID NO: 268143 - DNA, 21 bp, Artificial sequence
  SiRNA target sequence
gcgccggtgagcgtaaaatgg

SEQ ID NO: 268144 - DNA, 21 bp, Artificial sequence
  SiRNA target sequence
cgccggtgagcgtaaaatgga

SEQ ID NO: 268145 - DNA, 21 bp, Artificial sequence
  SiRNA target sequence
gccggtgagcgtaaaatggag

SEQ ID NO: 268146 - DNA, 21 bp, Artificial sequence
  SiRNA target sequence
ccggtgagcgtaaaatggagt

SEQ ID NO: 268147 - DNA, 21 bp, Artificial sequence
  SiRNA target sequence
cggtgagcgtaaaatggagta

SEQ ID NO: 268148 - DNA, 21 bp, Artificial sequence
  SiRNA target sequence
ggtgagcgtaaaatggagtag

SEQ ID NO: 268149 - DNA, 21 bp, Artificial sequence
  SiRNA target sequence
gtgagcgtaaaatggagtaga

SEQ ID NO: 268150 - DNA, 21 bp, Artificial sequence
  SiRNA target sequence
tgagcgtaaaatggagtagat

SEQ ID NO: 268151 - DNA, 21 bp, Artificial sequence
  SiRNA target sequence
gagcgtaaaatggagtagatg

SEQ ID NO: 268152 - DNA, 21 bp, Artificial sequence
  SiRNA target sequence
agcgtaaaatggagtagatgg

SEQ ID NO: 268153 - DNA, 21 bp, Artificial sequence
  SiRNA target sequence
gcgtaaaatggagtagatgga

SEQ ID NO: 268154 - DNA, 21 bp, Artificial sequence
  SiRNA target sequence
cgtaaaatggagtagatggac

SEQ ID NO: 268155 - DNA, 21 bp, Artificial sequence
  SiRNA target sequence
gtaaaatggagtagatggact

SEQ ID NO: 268156 - DNA, 21 bp, Artificial sequence
  SiRNA target sequence
taaaatggagtagatggacta

SEQ ID NO: 268157 - DNA, 21 bp, Artificial sequence
  SiRNA target sequence
aaaatggagtagatggactag

SEQ ID NO: 268158 - DNA, 21 bp, Artificial sequence
  SiRNA target sequence
aaatggagtagatggactagt

SEQ ID NO: 268159 - DNA, 21 bp, Artificial sequence
  SiRNA target sequence
aatggagtagatggactagta

SEQ ID NO: 268160 - DNA, 21 bp, Artificial sequence
  SiRNA target sequence
atggagtagatggactagtaa

SEQ ID NO: 268161 - DNA, 21 bp, Artificial sequence
  SiRNA target sequence
tggagtagatggactagtaat

SEQ ID NO: 268162 - DNA, 21 bp, Artificial sequence
  SiRNA target sequence
ggagtagatggactagtaatg

SEQ ID NO: 268163 - DNA, 21 bp, Artificial sequence
  SiRNA target sequence
gagtagatggactagtaatga

SEQ ID NO: 268164 - DNA, 21 bp, Artificial sequence
  SiRNA target sequence
agtagatggactagtaatgac

SEQ ID NO: 268165 - DNA, 21 bp, Artificial sequence
  SiRNA target sequence
gtagatggactagtaatgacg

SEQ ID NO: 268166 - DNA, 21 bp, Artificial sequence
  SiRNA target sequence
tagatggactagtaatgacgt

SEQ ID NO: 268167 - DNA, 21 bp, Artificial sequence
  SiRNA target sequence
agatggactagtaatgacgta

SEQ ID NO: 268168 - DNA, 21 bp, Artificial sequence
  SiRNA target sequence
gatggactagtaatgacgtag

SEQ ID NO: 268169 - DNA, 21 bp, Artificial sequence
  SiRNA target sequence
atggactagtaatgacgtagt

SEQ ID NO: 268170 - DNA, 21 bp, Artificial sequence
  SiRNA target sequence
tggactagtaatgacgtagta

SEQ ID NO: 268171 - DNA, 21 bp, Artificial sequence
  SiRNA target sequence
ggactagtaatgacgtagtag

SEQ ID NO: 268172 - DNA, 21 bp, Artificial sequence
  SiRNA target sequence
gactagtaatgacgtagtaga

SEQ ID NO: 268173 - DNA, 21 bp, Artificial sequence
  SiRNA target sequence
actagtaatgacgtagtagat

SEQ ID NO: 268174 - DNA, 21 bp, Artificial sequence
  SiRNA target sequence
ctagtaatgacgtagtagatg

SEQ ID NO: 268175 - DNA, 21 bp, Artificial sequence
  SiRNA target sequence
tagtaatgacgtagtagatga

SEQ ID NO: 268176 - DNA, 21 bp, Artificial sequence
  SiRNA target sequence
agtaatgacgtagtagatgat

SEQ ID NO: 268177 - DNA, 21 bp, Artificial sequence
  SiRNA target sequence
gtaatgacgtagtagatgatt

SEQ ID NO: 268178 - DNA, 21 bp, Artificial sequence
  SiRNA target sequence
taatgacgtagtagatgatta

SEQ ID NO: 268179 - DNA, 21 bp, Artificial sequence
  SiRNA target sequence
aatgacgtagtagatgattat

SEQ ID NO: 268180 - DNA, 21 bp, Artificial sequence
  SiRNA target sequence
atgacgtagtagatgattatg

SEQ ID NO: 268181 - DNA, 21 bp, Artificial sequence
  SiRNA target sequence
tgacgtagtagatgattatgc

SEQ ID NO: 268182 - DNA, 21 bp, Artificial sequence
  SiRNA target sequence
gacgtagtagatgattatgcc

SEQ ID NO: 268183 - DNA, 21 bp, Artificial sequence
  SiRNA target sequence
acgtagtagatgattatgcca

SEQ ID NO: 268184 - DNA, 21 bp, Artificial sequence
  SiRNA target sequence
cgtagtagatgattatgccac

SEQ ID NO: 268185 - DNA, 21 bp, Artificial sequence
  SiRNA target sequence
gtagtagatgattatgccaca

SEQ ID NO: 268186 - DNA, 21 bp, Artificial sequence
  SiRNA target sequence
tagtagatgattatgccacaa

SEQ ID NO: 268187 - DNA, 21 bp, Artificial sequence
  SiRNA target sequence
agtagatgattatgccacaat

SEQ ID NO: 268188 - DNA, 21 bp, Artificial sequence
  SiRNA target sequence
gtagatgattatgccacaatc

SEQ ID NO: 268189 - DNA, 21 bp, Artificial sequence
  SiRNA target sequence
tagatgattatgccacaatca

SEQ ID NO: 268190 - DNA, 21 bp, Artificial sequence
  SiRNA target sequence
agatgattatgccacaatcac

SEQ ID NO: 268191 - DNA, 21 bp, Artificial sequence
  SiRNA target sequence
gatgattatgccacaatcaca

SEQ ID NO: 268192 - DNA, 21 bp, Artificial sequence
  SiRNA target sequence
atgattatgccacaatcacat

SEQ ID NO: 268193 - DNA, 21 bp, Artificial sequence
  SiRNA target sequence
tgattatgccacaatcacatc

SEQ ID NO: 268194 - DNA, 21 bp, Artificial sequence
  SiRNA target sequence
gattatgccacaatcacatct

SEQ ID NO: 268195 - DNA, 21 bp, Artificial sequence
  SiRNA target sequence
attatgccacaatcacatctc

SEQ ID NO: 268196 - DNA, 21 bp, Artificial sequence
  SiRNA target sequence
ttatgccacaatcacatctcg

SEQ ID NO: 268197 - DNA, 21 bp, Artificial sequence
  SiRNA target sequence
tatgccacaatcacatctcga

SEQ ID NO: 268198 - DNA, 21 bp, Artificial sequence
  SiRNA target sequence
atgccacaatcacatctcgat

SEQ ID NO: 268199 - DNA, 21 bp, Artificial sequence
  SiRNA target sequence
tgccacaatcacatctcgatg

SEQ ID NO: 268200 - DNA, 21 bp, Artificial sequence
  SiRNA target sequence
gccacaatcacatctcgatgg

SEQ ID NO: 268201 - DNA, 21 bp, Artificial sequence
  SiRNA target sequence
ccacaatcacatctcgatggt

SEQ ID NO: 268202 - DNA, 21 bp, Artificial sequence
  SiRNA target sequence
cacaatcacatctcgatggta

SEQ ID NO: 268203 - DNA, 21 bp, Artificial sequence
  SiRNA target sequence
  misc_feature (21)..(21): n is a, c, g, or t
acaatcacatctcgatggtan

SEQ ID NO: 268204 - DNA, 21 bp, Artificial sequence
  SiRNA target sequence
  misc_feature (20)..(20): n is a, c, g, or t
caatcacatctcgatggtanc

SEQ ID NO: 268205 - DNA, 21 bp, Artificial sequence
  SiRNA target sequence
  misc_feature (19)..(19): n is a, c, g, or t
aatcacatctcgatggtanca

SEQ ID NO: 268206 - DNA, 21 bp, Artificial sequence
  SiRNA target sequence
  misc_feature (18)..(18): n is a, c, g, or t
atcacatctcgatggtancag

SEQ ID NO: 268207 - DNA, 21 bp, Artificial sequence
  SiRNA target sequence
  misc_feature (17)..(17): n is a, c, g, or t
tcacatctcgatggtancaga

SEQ ID NO: 268208 - DNA, 21 bp, Artificial sequence
  SiRNA target sequence
  misc_feature (16)..(16): n is a, c, g, or t
cacatctcgatggtancagat

SEQ ID NO: 268209 - DNA, 21 bp, Artificial sequence
  SiRNA target sequence
  misc_feature (15)..(15): n is a, c, g, or t
acatctcgatggtancagatt

SEQ ID NO: 268210 - DNA, 21 bp, Artificial sequence
  SiRNA target sequence
  misc_feature (14)..(14): n is a, c, g, or t
catctcgatggtancagattg

SEQ ID NO: 268211 - DNA, 21 bp, Artificial sequence
  SiRNA target sequence
  misc_feature (13)..(13): n is a, c, g, or t
atctcgatggtancagattgc

SEQ ID NO: 268212 - DNA, 21 bp, Artificial sequence
  SiRNA target sequence
  misc_feature (12)..(12): n is a, c, g, or t
tctcgatggtancagattgct

SEQ ID NO: 268213 - DNA, 21 bp, Artificial sequence
  SiRNA target sequence
  misc_feature (11)..(11): n is a, c, g, or t
ctcgatggtancagattgctg

SEQ ID NO: 268214 - DNA, 21 bp, Artificial sequence
  SiRNA target sequence
  misc_feature (10)..(10): n is a, c, g, or t
tcgatggtancagattgctga

SEQ ID NO: 268215 - DNA, 21 bp, Artificial sequence
  SiRNA target sequence
  misc_feature (9)..(9): n is a, c, g, or t
cgatggtancagattgctgaa

SEQ ID NO: 268216 - DNA, 21 bp, Artificial sequence
  SiRNA target sequence
  misc_feature (8)..(8): n is a, c, g, or t
gatggtancagattgctgaat

SEQ ID NO: 268217 - DNA, 21 bp, Artificial sequence
  SiRNA target sequence
  misc_feature (7)..(7): n is a, c, g, or t
atggtancagattgctgaatt

SEQ ID NO: 268218 - DNA, 21 bp, Artificial sequence
  SiRNA target sequence
  misc_feature (6)..(6): n is a, c, g, or t
tggtancagattgctgaattt

SEQ ID NO: 268219 - DNA, 21 bp, Artificial sequence
  SiRNA target sequence
  misc_feature (5)..(5): n is a, c, g, or t
ggtancagattgctgaatttg

SEQ ID NO: 268220 - DNA, 21 bp, Artificial sequence
  SiRNA target sequence
  misc_feature (4)..(4): n is a, c, g, or t
gtancagattgctgaatttgt

SEQ ID NO: 268221 - DNA, 21 bp, Artificial sequence
  SiRNA target sequence
  misc_feature (3)..(3): n is a, c, g, or t
tancagattgctgaatttgtt

SEQ ID NO: 268222 - DNA, 21 bp, Artificial sequence
  SiRNA target sequence
  misc_feature (2)..(2): n is a, c, g, or t
ancagattgctgaatttgttt

SEQ ID NO: 268223 - DNA, 21 bp, Artificial sequence
  SiRNA target sequence
  misc_feature (1)..(1): n is a, c, g, or t
ncagattgctgaatttgtttg

SEQ ID NO: 268224 - DNA, 21 bp, Artificial sequence
  SiRNA target sequence
cagattgctgaatttgtttgg

SEQ ID NO: 268225 - DNA, 21 bp, Artificial sequence
  SiRNA target sequence
agattgctgaatttgtttggt

SEQ ID NO: 268226 - DNA, 21 bp, Artificial sequence
  SiRNA target sequence
gattgctgaatttgtttggtc

SEQ ID NO: 268227 - DNA, 21 bp, Artificial sequence
  SiRNA target sequence
attgctgaatttgtttggtcg

SEQ ID NO: 268228 - DNA, 21 bp, Artificial sequence
  SiRNA target sequence
ttgctgaatttgtttggtcga

SEQ ID NO: 268229 - DNA, 21 bp, Artificial sequence
  SiRNA target sequence
tgctgaatttgtttggtcgaa

SEQ ID NO: 268230 - DNA, 21 bp, Artificial sequence
  SiRNA target sequence
gctgaatttgtttggtcgaag

SEQ ID NO: 268231 - DNA, 21 bp, Artificial sequence
  SiRNA target sequence
ctgaatttgtttggtcgaagg

SEQ ID NO: 268232 - DNA, 21 bp, Artificial sequence
  SiRNA target sequence
tgaatttgtttggtcgaagga

SEQ ID NO: 268233 - DNA, 21 bp, Artificial sequence
  SiRNA target sequence
gaatttgtttggtcgaaggat

SEQ ID NO: 268234 - DNA, 21 bp, Artificial sequence
  SiRNA target sequence
aatttgtttggtcgaaggatg

SEQ ID NO: 268235 - DNA, 21 bp, Artificial sequence
  SiRNA target sequence
atttgtttggtcgaaggatga

SEQ ID NO: 268236 - DNA, 21 bp, Artificial sequence
  SiRNA target sequence
tttgtttggtcgaaggatgat

SEQ ID NO: 268237 - DNA, 21 bp, Artificial sequence
  SiRNA target sequence
ttgtttggtcgaaggatgatc

SEQ ID NO: 268238 - DNA, 21 bp, Artificial sequence
  SiRNA target sequence
tgtttggtcgaaggatgatcc

SEQ ID NO: 268239 - DNA, 21 bp, Artificial sequence
  SiRNA target sequence
gtttggtcgaaggatgatcca

SEQ ID NO: 268240 - DNA, 21 bp, Artificial sequence
  SiRNA target sequence
tttggtcgaaggatgatccat

SEQ ID NO: 268241 - DNA, 21 bp, Artificial sequence
  SiRNA target sequence
ttggtcgaaggatgatccatt

SEQ ID NO: 268242 - DNA, 21 bp, Artificial sequence
  SiRNA target sequence
tggtcgaaggatgatccattt

SEQ ID NO: 268243 - DNA, 21 bp, Artificial sequence
  SiRNA target sequence
ggtcgaaggatgatccatttg

SEQ ID NO: 268244 - DNA, 21 bp, Artificial sequence
  SiRNA target sequence
gtcgaaggatgatccatttga

SEQ ID NO: 268245 - DNA, 21 bp, Artificial sequence
  SiRNA target sequence
tcgaaggatgatccatttgat

SEQ ID NO: 268246 - DNA, 21 bp, Artificial sequence
  SiRNA target sequence
cgaaggatgatccatttgata

SEQ ID NO: 268247 - DNA, 21 bp, Artificial sequence
  SiRNA target sequence
gaaggatgatccatttgataa

SEQ ID NO: 268248 - DNA, 21 bp, Artificial sequence
  SiRNA target sequence
aaggatgatccatttgataag

SEQ ID NO: 268249 - DNA, 21 bp, Artificial sequence
  SiRNA target sequence
aggatgatccatttgataagg

SEQ ID NO: 268250 - DNA, 21 bp, Artificial sequence
  SiRNA target sequence
ggatgatccatttgataagga

SEQ ID NO: 268251 - DNA, 21 bp, Artificial sequence
  SiRNA target sequence
gatgatccatttgataaggag

SEQ ID NO: 268252 - DNA, 21 bp, Artificial sequence
  SiRNA target sequence
atgatccatttgataaggagt

SEQ ID NO: 268253 - DNA, 21 bp, Artificial sequence
  SiRNA target sequence
tgatccatttgataaggagtt

SEQ ID NO: 268254 - DNA, 21 bp, Artificial sequence
  SiRNA target sequence
gatccatttgataaggagtta

SEQ ID NO: 268255 - DNA, 21 bp, Artificial sequence
  SiRNA target sequence
atccatttgataaggagttag

SEQ ID NO: 268256 - DNA, 21 bp, Artificial sequence
  SiRNA target sequence
tccatttgataaggagttagc

SEQ ID NO: 268257 - DNA, 21 bp, Artificial sequence
  SiRNA target sequence
ccatttgataaggagttagca

SEQ ID NO: 268258 - DNA, 21 bp, Artificial sequence
  SiRNA target sequence
catttgataaggagttagcac

SEQ ID NO: 268259 - DNA, 21 bp, Artificial sequence
  SiRNA target sequence
atttgataaggagttagcacg

SEQ ID NO: 268260 - DNA, 21 bp, Artificial sequence
  SiRNA target sequence
tttgataaggagttagcacgt

SEQ ID NO: 268261 - DNA, 21 bp, Artificial sequence
  SiRNA target sequence
ttgataaggagttagcacgtt

SEQ ID NO: 268262 - DNA, 21 bp, Artificial sequence
  SiRNA target sequence
tgataaggagttagcacgttt

SEQ ID NO: 268263 - DNA, 21 bp, Artificial sequence
  SiRNA target sequence
gataaggagttagcacgttta

SEQ ID NO: 268264 - DNA, 21 bp, Artificial sequence
  SiRNA target sequence
ataaggagttagcacgtttaa

SEQ ID NO: 268265 - DNA, 21 bp, Artificial sequence
  SiRNA target sequence
taaggagttagcacgtttaat

SEQ ID NO: 268266 - DNA, 21 bp, Artificial sequence
  SiRNA target sequence
aaggagttagcacgtttaatt

SEQ ID NO: 268267 - DNA, 21 bp, Artificial sequence
  SiRNA target sequence
aggagttagcacgtttaattt

SEQ ID NO: 268268 - DNA, 21 bp, Artificial sequence
  SiRNA target sequence
ggagttagcacgtttaatttt

SEQ ID NO: 268269 - DNA, 21 bp, Artificial sequence
  SiRNA target sequence
gagttagcacgtttaattttg

SEQ ID NO: 268270 - DNA, 21 bp, Artificial sequence
  SiRNA target sequence
agttagcacgtttaattttgc

SEQ ID NO: 268271 - DNA, 21 bp, Artificial sequence
  SiRNA target sequence
gttagcacgtttaattttgcc

SEQ ID NO: 268272 - DNA, 21 bp, Artificial sequence
  SiRNA target sequence
ttagcacgtttaattttgcct

SEQ ID NO: 268273 - DNA, 21 bp, Artificial sequence
  SiRNA target sequence
tagcacgtttaattttgcctc

SEQ ID NO: 268274 - DNA, 21 bp, Artificial sequence
  SiRNA target sequence
agcacgtttaattttgcctcg

SEQ ID NO: 268275 - DNA, 21 bp, Artificial sequence
  SiRNA target sequence
gcacgtttaattttgcctcgt

SEQ ID NO: 268276 - DNA, 21 bp, Artificial sequence
  SiRNA target sequence
cacgtttaattttgcctcgtg

SEQ ID NO: 268277 - DNA, 21 bp, Artificial sequence
  SiRNA target sequence
acgtttaattttgcctcgtgc

SEQ ID NO: 268278 - DNA, 21 bp, Artificial sequence
  SiRNA target sequence
cgtttaattttgcctcgtgct

SEQ ID NO: 268279 - DNA, 21 bp, Artificial sequence
  SiRNA target sequence
gtttaattttgcctcgtgctt

SEQ ID NO: 268280 - DNA, 21 bp, Artificial sequence
  SiRNA target sequence
tttaattttgcctcgtgcttt

SEQ ID NO: 268281 - DNA, 21 bp, Artificial sequence
  SiRNA target sequence
ttaattttgcctcgtgctttg

SEQ ID NO: 268282 - DNA, 21 bp, Artificial sequence
  SiRNA target sequence
taattttgcctcgtgctttgt

SEQ ID NO: 268283 - DNA, 21 bp, Artificial sequence
  SiRNA target sequence
aattttgcctcgtgctttgtt

SEQ ID NO: 268284 - DNA, 21 bp, Artificial sequence
  SiRNA target sequence
attttgcctcgtgctttgtta

SEQ ID NO: 268285 - DNA, 21 bp, Artificial sequence
  SiRNA target sequence
ttttgcctcgtgctttgttat

SEQ ID NO: 268286 - DNA, 21 bp, Artificial sequence
  SiRNA target sequence
tttgcctcgtgctttgttatc

SEQ ID NO: 268287 - DNA, 21 bp, Artificial sequence
  SiRNA target sequence
ttgcctcgtgctttgttatct

SEQ ID NO: 268288 - DNA, 21 bp, Artificial sequence
  SiRNA target sequence
tgcctcgtgctttgttatcta

SEQ ID NO: 268289 - DNA, 21 bp, Artificial sequence
  SiRNA target sequence
gcctcgtgctttgttatctag

SEQ ID NO: 268290 - DNA, 21 bp, Artificial sequence
  SiRNA target sequence
cctcgtgctttgttatctagt

SEQ ID NO: 268291 - DNA, 21 bp, Artificial sequence
  SiRNA target sequence
ctcgtgctttgttatctagta

SEQ ID NO: 268292 - DNA, 21 bp, Artificial sequence
  SiRNA target sequence
tcgtgctttgttatctagtat

SEQ ID NO: 268293 - DNA, 21 bp, Artificial sequence
  SiRNA target sequence
cgtgctttgttatctagtata

SEQ ID NO: 268294 - DNA, 21 bp, Artificial sequence
  SiRNA target sequence
gtgctttgttatctagtatag

SEQ ID NO: 268295 - DNA, 21 bp, Artificial sequence
  SiRNA target sequence
tgctttgttatctagtataga

SEQ ID NO: 268296 - DNA, 21 bp, Artificial sequence
  SiRNA target sequence
gctttgttatctagtatagag

SEQ ID NO: 268297 - DNA, 21 bp, Artificial sequence
  SiRNA target sequence
ctttgttatctagtatagagg

SEQ ID NO: 268298 - DNA, 21 bp, Artificial sequence
  SiRNA target sequence
tttgttatctagtatagaggc

SEQ ID NO: 268299 - DNA, 21 bp, Artificial sequence
  SiRNA target sequence
ttgttatctagtatagaggct

SEQ ID NO: 268300 - DNA, 21 bp, Artificial sequence
  SiRNA target sequence
tgttatctagtatagaggcta

SEQ ID NO: 268301 - DNA, 21 bp, Artificial sequence
  SiRNA target sequence
gttatctagtatagaggctaa

SEQ ID NO: 268302 - DNA, 21 bp, Artificial sequence
  SiRNA target sequence
ttatctagtatagaggctaat

SEQ ID NO: 268303 - DNA, 21 bp, Artificial sequence
  SiRNA target sequence
tatctagtatagaggctaatt

SEQ ID NO: 268304 - DNA, 21 bp, Artificial sequence
  SiRNA target sequence
atctagtatagaggctaattc

SEQ ID NO: 268305 - DNA, 21 bp, Artificial sequence
  SiRNA target sequence
tctagtatagaggctaattct

SEQ ID NO: 268306 - DNA, 21 bp, Artificial sequence
  SiRNA target sequence
ctagtatagaggctaattctg

SEQ ID NO: 268307 - DNA, 21 bp, Artificial sequence
  SiRNA target sequence
tagtatagaggctaattctga

SEQ ID NO: 268308 - DNA, 21 bp, Artificial sequence
  SiRNA target sequence
agtatagaggctaattctgat

SEQ ID NO: 268309 - DNA, 21 bp, Artificial sequence
  SiRNA target sequence
gtatagaggctaattctgatg

SEQ ID NO: 268310 - DNA, 21 bp, Artificial sequence
  SiRNA target sequence
tatagaggctaattctgatgc

SEQ ID NO: 268311 - DNA, 21 bp, Artificial sequence
  SiRNA target sequence
atagaggctaattctgatgct

SEQ ID NO: 268312 - DNA, 21 bp, Artificial sequence
  SiRNA target sequence
tagaggctaattctgatgcta

SEQ ID NO: 268313 - DNA, 21 bp, Artificial sequence
  SiRNA target sequence
agaggctaattctgatgctat

SEQ ID NO: 268314 - DNA, 21 bp, Artificial sequence
  SiRNA target sequence
gaggctaattctgatgctata

SEQ ID NO: 268315 - DNA, 21 bp, Artificial sequence
  SiRNA target sequence
aggctaattctgatgctatat

SEQ ID NO: 268316 - DNA, 21 bp, Artificial sequence
  SiRNA target sequence
ggctaattctgatgctatatg

SEQ ID NO: 268317 - DNA, 21 bp, Artificial sequence
  SiRNA target sequence
gctaattctgatgctatatgt

SEQ ID NO: 268318 - DNA, 21 bp, Artificial sequence
  SiRNA target sequence
ctaattctgatgctatatgtg

SEQ ID NO: 268319 - DNA, 21 bp, Artificial sequence
  SiRNA target sequence
taattctgatgctatatgtga

SEQ ID NO: 268320 - DNA, 21 bp, Artificial sequence
  SiRNA target sequence
aattctgatgctatatgtgat

SEQ ID NO: 268321 - DNA, 21 bp, Artificial sequence
  SiRNA target sequence
attctgatgctatatgtgatg

SEQ ID NO: 268322 - DNA, 21 bp, Artificial sequence
  SiRNA target sequence
ttctgatgctatatgtgatgt

SEQ ID NO: 268323 - DNA, 21 bp, Artificial sequence
  SiRNA target sequence
tctgatgctatatgtgatgtg

SEQ ID NO: 268324 - DNA, 21 bp, Artificial sequence
  SiRNA target sequence
ctgatgctatatgtgatgtgc

SEQ ID NO: 268325 - DNA, 21 bp, Artificial sequence
  SiRNA target sequence
tgatgctatatgtgatgtgcc

SEQ ID NO: 268326 - DNA, 21 bp, Artificial sequence
  SiRNA target sequence
gatgctatatgtgatgtgcct

SEQ ID NO: 268327 - DNA, 21 bp, Artificial sequence
  SiRNA target sequence
atgctatatgtgatgtgccta

SEQ ID NO: 268328 - DNA, 21 bp, Artificial sequence
  SiRNA target sequence
tgctatatgtgatgtgcctaa

SEQ ID NO: 268329 - DNA, 21 bp, Artificial sequence
  SiRNA target sequence
gctatatgtgatgtgcctaat

SEQ ID NO: 268330 - DNA, 21 bp, Artificial sequence
  SiRNA target sequence
ctatatgtgatgtgcctaata

SEQ ID NO: 268331 - DNA, 21 bp, Artificial sequence
  SiRNA target sequence
tatatgtgatgtgcctaatac

SEQ ID NO: 268332 - DNA, 21 bp, Artificial sequence
  SiRNA target sequence
atatgtgatgtgcctaatact

SEQ ID NO: 268333 - DNA, 21 bp, Artificial sequence
  SiRNA target sequence
tatgtgatgtgcctaatacta

SEQ ID NO: 268334 - DNA, 21 bp, Artificial sequence
  SiRNA target sequence
atgtgatgtgcctaatactat

SEQ ID NO: 268335 - DNA, 21 bp, Artificial sequence
  SiRNA target sequence
tgtgatgtgcctaatactatc

SEQ ID NO: 268336 - DNA, 21 bp, Artificial sequence
  SiRNA target sequence
gtgatgtgcctaatactatcc

SEQ ID NO: 268337 - DNA, 21 bp, Artificial sequence
  SiRNA target sequence
tgatgtgcctaatactatccc

SEQ ID NO: 268338 - DNA, 21 bp, Artificial sequence
  SiRNA target sequence
gatgtgcctaatactatccca

SEQ ID NO: 268339 - DNA, 21 bp, Artificial sequence
  SiRNA target sequence
atgtgcctaatactatcccat

SEQ ID NO: 268340 - DNA, 21 bp, Artificial sequence
  SiRNA target sequence
tgtgcctaatactatcccatt

SEQ ID NO: 268341 - DNA, 21 bp, Artificial sequence
  SiRNA target sequence
gtgcctaatactatcccattt

SEQ ID NO: 268342 - DNA, 21 bp, Artificial sequence
  SiRNA target sequence
tgcctaatactatcccattta

SEQ ID NO: 268343 - DNA, 21 bp, Artificial sequence
  SiRNA target sequence
gcctaatactatcccatttaa

SEQ ID NO: 268344 - DNA, 21 bp, Artificial sequence
  SiRNA target sequence
cctaatactatcccatttaag

SEQ ID NO: 268345 - DNA, 21 bp, Artificial sequence
  SiRNA target sequence
ctaatactatcccatttaagg

SEQ ID NO: 268346 - DNA, 21 bp, Artificial sequence
  SiRNA target sequence
taatactatcccatttaaggt

SEQ ID NO: 268347 - DNA, 21 bp, Artificial sequence
  SiRNA target sequence
aatactatcccatttaaggta

SEQ ID NO: 268348 - DNA, 21 bp, Artificial sequence
  SiRNA target sequence
atactatcccatttaaggtac

SEQ ID NO: 268349 - DNA, 21 bp, Artificial sequence
  SiRNA target sequence
tactatcccatttaaggtaca

SEQ ID NO: 268350 - DNA, 21 bp, Artificial sequence
  SiRNA target sequence
actatcccatttaaggtacac

SEQ ID NO: 268351 - DNA, 21 bp, Artificial sequence
  SiRNA target sequence
ctatcccatttaaggtacacg

SEQ ID NO: 268352 - DNA, 21 bp, Artificial sequence
  SiRNA target sequence
tatcccatttaaggtacacgc

SEQ ID NO: 268353 - DNA, 21 bp, Artificial sequence
  SiRNA target sequence
atcccatttaaggtacacgca

SEQ ID NO: 268354 - DNA, 21 bp, Artificial sequence
  SiRNA target sequence
tcccatttaaggtacacgcat

SEQ ID NO: 268355 - DNA, 21 bp, Artificial sequence
  SiRNA target sequence
cccatttaaggtacacgcata

SEQ ID NO: 268356 - DNA, 21 bp, Artificial sequence
  SiRNA target sequence
ccatttaaggtacacgcatat

SEQ ID NO: 268357 - DNA, 21 bp, Artificial sequence
  SiRNA target sequence
catttaaggtacacgcatatt

SEQ ID NO: 268358 - DNA, 21 bp, Artificial sequence
  SiRNA target sequence
atttaaggtacacgcatattg

SEQ ID NO: 268359 - DNA, 21 bp, Artificial sequence
  SiRNA target sequence
tttaaggtacacgcatattgg

SEQ ID NO: 268360 - DNA, 21 bp, Artificial sequence
  SiRNA target sequence
ttaaggtacacgcatattggc

SEQ ID NO: 268361 - DNA, 21 bp, Artificial sequence
  SiRNA target sequence
taaggtacacgcatattggcg

SEQ ID NO: 268362 - DNA, 21 bp, Artificial sequence
  SiRNA target sequence
aaggtacacgcatattggcga

SEQ ID NO: 268363 - DNA, 21 bp, Artificial sequence
  SiRNA target sequence
aggtacacgcatattggcgag

SEQ ID NO: 268364 - DNA, 21 bp, Artificial sequence
  SiRNA target sequence
ggtacacgcatattggcgagg

SEQ ID NO: 268365 - DNA, 21 bp, Artificial sequence
  SiRNA target sequence
gtacacgcatattggcgaggc

SEQ ID NO: 268366 - DNA, 21 bp, Artificial sequence
  SiRNA target sequence
tacacgcatattggcgaggcg

SEQ ID NO: 268367 - DNA, 21 bp, Artificial sequence
  SiRNA target sequence
acacgcatattggcgaggcga

SEQ ID NO: 268368 - DNA, 21 bp, Artificial sequence
  SiRNA target sequence
cacgcatattggcgaggcgat

SEQ ID NO: 268369 - DNA, 21 bp, Artificial sequence
  SiRNA target sequence
acgcatattggcgaggcgata

SEQ ID NO: 268370 - DNA, 21 bp, Artificial sequence
  SiRNA target sequence
cgcatattggcgaggcgatat

SEQ ID NO: 268371 - DNA, 21 bp, Artificial sequence
  SiRNA target sequence
gcatattggcgaggcgatatg

SEQ ID NO: 268372 - DNA, 21 bp, Artificial sequence
  SiRNA target sequence
catattggcgaggcgatatgg

SEQ ID NO: 268373 - DNA, 21 bp, Artificial sequence
  SiRNA target sequence
atattggcgaggcgatatgga

SEQ ID NO: 268374 - DNA, 21 bp, Artificial sequence
  SiRNA target sequence
tattggcgaggcgatatggaa

SEQ ID NO: 268375 - DNA, 21 bp, Artificial sequence
  SiRNA target sequence
attggcgaggcgatatggaag

SEQ ID NO: 268376 - DNA, 21 bp, Artificial sequence
  SiRNA target sequence
ttggcgaggcgatatggaagt

SEQ ID NO: 268377 - DNA, 21 bp, Artificial sequence
  SiRNA target sequence
tggcgaggcgatatggaagtt

SEQ ID NO: 268378 - DNA, 21 bp, Artificial sequence
  SiRNA target sequence
ggcgaggcgatatggaagtta

SEQ ID NO: 268379 - DNA, 21 bp, Artificial sequence
  SiRNA target sequence
gcgaggcgatatggaagttag

SEQ ID NO: 268380 - DNA, 21 bp, Artificial sequence
  SiRNA target sequence
cgaggcgatatggaagttaga

SEQ ID NO: 268381 - DNA, 21 bp, Artificial sequence
  SiRNA target sequence
gaggcgatatggaagttagag

SEQ ID NO: 268382 - DNA, 21 bp, Artificial sequence
  SiRNA target sequence
aggcgatatggaagttagagt

SEQ ID NO: 268383 - DNA, 21 bp, Artificial sequence
  SiRNA target sequence
ggcgatatggaagttagagtt

SEQ ID NO: 268384 - DNA, 21 bp, Artificial sequence
  SiRNA target sequence
gcgatatggaagttagagttc

SEQ ID NO: 268385 - DNA, 21 bp, Artificial sequence
  SiRNA target sequence
cgatatggaagttagagttca

SEQ ID NO: 268386 - DNA, 21 bp, Artificial sequence
  SiRNA target sequence
gatatggaagttagagttcaa

SEQ ID NO: 268387 - DNA, 21 bp, Artificial sequence
  SiRNA target sequence
atatggaagttagagttcaaa

SEQ ID NO: 268388 - DNA, 21 bp, Artificial sequence
  SiRNA target sequence
tatggaagttagagttcaaat

SEQ ID NO: 268389 - DNA, 21 bp, Artificial sequence
  SiRNA target sequence
atggaagttagagttcaaatt

SEQ ID NO: 268390 - DNA, 21 bp, Artificial sequence
  SiRNA target sequence
tggaagttagagttcaaatta

SEQ ID NO: 268391 - DNA, 21 bp, Artificial sequence
  SiRNA target sequence
ggaagttagagttcaaattaa

SEQ ID NO: 268392 - DNA, 21 bp, Artificial sequence
  SiRNA target sequence
gaagttagagttcaaattaat

SEQ ID NO: 268393 - DNA, 21 bp, Artificial sequence
  SiRNA target sequence
aagttagagttcaaattaatt

SEQ ID NO: 268394 - DNA, 21 bp, Artificial sequence
  SiRNA target sequence
agttagagttcaaattaattc

SEQ ID NO: 268395 - DNA, 21 bp, Artificial sequence
  SiRNA target sequence
gttagagttcaaattaattca

SEQ ID NO: 268396 - DNA, 21 bp, Artificial sequence
  SiRNA target sequence
ttagagttcaaattaattcaa

SEQ ID NO: 268397 - DNA, 21 bp, Artificial sequence
  SiRNA target sequence
tagagttcaaattaattcaaa

SEQ ID NO: 268398 - DNA, 21 bp, Artificial sequence
  SiRNA target sequence
agagttcaaattaattcaaat

SEQ ID NO: 268399 - DNA, 21 bp, Artificial sequence
  SiRNA target sequence
gagttcaaattaattcaaata

SEQ ID NO: 268400 - DNA, 21 bp, Artificial sequence
  SiRNA target sequence
agttcaaattaattcaaataa

SEQ ID NO: 268401 - DNA, 21 bp, Artificial sequence
  SiRNA target sequence
gttcaaattaattcaaataaa

SEQ ID NO: 268402 - DNA, 21 bp, Artificial sequence
  SiRNA target sequence
ttcaaattaattcaaataaat

SEQ ID NO: 268403 - DNA, 21 bp, Artificial sequence
  SiRNA target sequence
tcaaattaattcaaataaatt

SEQ ID NO: 268404 - DNA, 21 bp, Artificial sequence
  SiRNA target sequence
caaattaattcaaataaattc

SEQ ID NO: 268405 - DNA, 21 bp, Artificial sequence
  SiRNA target sequence
aaattaattcaaataaattcc

SEQ ID NO: 268406 - DNA, 21 bp, Artificial sequence
  SiRNA target sequence
aattaattcaaataaattcca

SEQ ID NO: 268407 - DNA, 21 bp, Artificial sequence
  SiRNA target sequence
attaattcaaataaattccaa

SEQ ID NO: 268408 - DNA, 21 bp, Artificial sequence
  SiRNA target sequence
ttaattcaaataaattccaag

SEQ ID NO: 268409 - DNA, 21 bp, Artificial sequence
  SiRNA target sequence
taattcaaataaattccaagt

SEQ ID NO: 268410 - DNA, 21 bp, Artificial sequence
  SiRNA target sequence
aattcaaataaattccaagtt

SEQ ID NO: 268411 - DNA, 21 bp, Artificial sequence
  SiRNA target sequence
attcaaataaattccaagttg

SEQ ID NO: 268412 - DNA, 21 bp, Artificial sequence
  SiRNA target sequence
ttcaaataaattccaagttgg

SEQ ID NO: 268413 - DNA, 21 bp, Artificial sequence
  SiRNA target sequence
tcaaataaattccaagttggt

SEQ ID NO: 268414 - DNA, 21 bp, Artificial sequence
  SiRNA target sequence
caaataaattccaagttggtc

SEQ ID NO: 268415 - DNA, 21 bp, Artificial sequence
  SiRNA target sequence
aaataaattccaagttggtca

SEQ ID NO: 268416 - DNA, 21 bp, Artificial sequence
  SiRNA target sequence
aataaattccaagttggtcaa

SEQ ID NO: 268417 - DNA, 21 bp, Artificial sequence
  SiRNA target sequence
ataaattccaagttggtcaat

SEQ ID NO: 268418 - DNA, 21 bp, Artificial sequence
  SiRNA target sequence
taaattccaagttggtcaatt

SEQ ID NO: 268419 - DNA, 21 bp, Artificial sequence
  SiRNA target sequence
aaattccaagttggtcaatta

SEQ ID NO: 268420 - DNA, 21 bp, Artificial sequence
  SiRNA target sequence
aattccaagttggtcaattac

SEQ ID NO: 268421 - DNA, 21 bp, Artificial sequence
  SiRNA target sequence
attccaagttggtcaattaca

SEQ ID NO: 268422 - DNA, 21 bp, Artificial sequence
  SiRNA target sequence
ttccaagttggtcaattacaa

SEQ ID NO: 268423 - DNA, 21 bp, Artificial sequence
  SiRNA target sequence
tccaagttggtcaattacaag

SEQ ID NO: 268424 - DNA, 21 bp, Artificial sequence
  SiRNA target sequence
ccaagttggtcaattacaagc

SEQ ID NO: 268425 - DNA, 21 bp, Artificial sequence
  SiRNA target sequence
caagttggtcaattacaagct

SEQ ID NO: 268426 - DNA, 21 bp, Artificial sequence
  SiRNA target sequence
aagttggtcaattacaagcta

SEQ ID NO: 268427 - DNA, 21 bp, Artificial sequence
  SiRNA target sequence
agttggtcaattacaagctac

SEQ ID NO: 268428 - DNA, 21 bp, Artificial sequence
  SiRNA target sequence
gttggtcaattacaagctact

SEQ ID NO: 268429 - DNA, 21 bp, Artificial sequence
  SiRNA target sequence
ttggtcaattacaagctactt

SEQ ID NO: 268430 - DNA, 21 bp, Artificial sequence
  SiRNA target sequence
tggtcaattacaagctacttg

SEQ ID NO: 268431 - DNA, 21 bp, Artificial sequence
  SiRNA target sequence
ggtcaattacaagctacttgg

SEQ ID NO: 268432 - DNA, 21 bp, Artificial sequence
  SiRNA target sequence
gtcaattacaagctacttggt

SEQ ID NO: 268433 - DNA, 21 bp, Artificial sequence
  SiRNA target sequence
tcaattacaagctacttggta

SEQ ID NO: 268434 - DNA, 21 bp, Artificial sequence
  SiRNA target sequence
caattacaagctacttggtat

SEQ ID NO: 268435 - DNA, 21 bp, Artificial sequence
  SiRNA target sequence
aattacaagctacttggtatt

SEQ ID NO: 268436 - DNA, 21 bp, Artificial sequence
  SiRNA target sequence
attacaagctacttggtatta

SEQ ID NO: 268437 - DNA, 21 bp, Artificial sequence
  SiRNA target sequence
ttacaagctacttggtattat

SEQ ID NO: 268438 - DNA, 21 bp, Artificial sequence
  SiRNA target sequence
tacaagctacttggtattatt

SEQ ID NO: 268439 - DNA, 21 bp, Artificial sequence
  SiRNA target sequence
acaagctacttggtattattc

SEQ ID NO: 268440 - DNA, 21 bp, Artificial sequence
  SiRNA target sequence
caagctacttggtattattcg

SEQ ID NO: 268441 - DNA, 21 bp, Artificial sequence
  SiRNA target sequence
aagctacttggtattattcgg

SEQ ID NO: 268442 - DNA, 21 bp, Artificial sequence
  SiRNA target sequence
agctacttggtattattcgga

SEQ ID NO: 268443 - DNA, 21 bp, Artificial sequence
  SiRNA target sequence
gctacttggtattattcggat

SEQ ID NO: 268444 - DNA, 21 bp, Artificial sequence
  SiRNA target sequence
ctacttggtattattcggatc

SEQ ID NO: 268445 - DNA, 21 bp, Artificial sequence
  SiRNA target sequence
tacttggtattattcggatca

SEQ ID NO: 268446 - DNA, 21 bp, Artificial sequence
  SiRNA target sequence
acttggtattattcggatcat

SEQ ID NO: 268447 - DNA, 21 bp, Artificial sequence
  SiRNA target sequence
cttggtattattcggatcatg

SEQ ID NO: 268448 - DNA, 21 bp, Artificial sequence
  SiRNA target sequence
ttggtattattcggatcatga

SEQ ID NO: 268449 - DNA, 21 bp, Artificial sequence
  SiRNA target sequence
tggtattattcggatcatgag

SEQ ID NO: 268450 - DNA, 21 bp, Artificial sequence
  SiRNA target sequence
ggtattattcggatcatgaga

SEQ ID NO: 268451 - DNA, 21 bp, Artificial sequence
  SiRNA target sequence
gtattattcggatcatgagaa

SEQ ID NO: 268452 - DNA, 21 bp, Artificial sequence
  SiRNA target sequence
tattattcggatcatgagaat

SEQ ID NO: 268453 - DNA, 21 bp, Artificial sequence
  SiRNA target sequence
attattcggatcatgagaatt

SEQ ID NO: 268454 - DNA, 21 bp, Artificial sequence
  SiRNA target sequence
ttattcggatcatgagaattt

SEQ ID NO: 268455 - DNA, 21 bp, Artificial sequence
  SiRNA target sequence
tattcggatcatgagaatttg

SEQ ID NO: 268456 - DNA, 21 bp, Artificial sequence
  SiRNA target sequence
attcggatcatgagaatttga

SEQ ID NO: 268457 - DNA, 21 bp, Artificial sequence
  SiRNA target sequence
ttcggatcatgagaatttgaa

SEQ ID NO: 268458 - DNA, 21 bp, Artificial sequence
  SiRNA target sequence
tcggatcatgagaatttgaat

SEQ ID NO: 268459 - DNA, 21 bp, Artificial sequence
  SiRNA target sequence
cggatcatgagaatttgaata

SEQ ID NO: 268460 - DNA, 21 bp, Artificial sequence
  SiRNA target sequence
ggatcatgagaatttgaatat

SEQ ID NO: 268461 - DNA, 21 bp, Artificial sequence
  SiRNA target sequence
gatcatgagaatttgaatata

SEQ ID NO: 268462 - DNA, 21 bp, Artificial sequence
  SiRNA target sequence
atcatgagaatttgaatatat

SEQ ID NO: 268463 - DNA, 21 bp, Artificial sequence
  SiRNA target sequence
tcatgagaatttgaatatatc

SEQ ID NO: 268464 - DNA, 21 bp, Artificial sequence
  SiRNA target sequence
catgagaatttgaatatatcg

SEQ ID NO: 268465 - DNA, 21 bp, Artificial sequence
  SiRNA target sequence
atgagaatttgaatatatcgt

SEQ ID NO: 268466 - DNA, 21 bp, Artificial sequence
  SiRNA target sequence
tgagaatttgaatatatcgtc

SEQ ID NO: 268467 - DNA, 21 bp, Artificial sequence
  SiRNA target sequence
gagaatttgaatatatcgtct

SEQ ID NO: 268468 - DNA, 21 bp, Artificial sequence
  SiRNA target sequence
agaatttgaatatatcgtcta

SEQ ID NO: 268469 - DNA, 21 bp, Artificial sequence
  SiRNA target sequence
gaatttgaatatatcgtctaa

SEQ ID NO: 268470 - DNA, 21 bp, Artificial sequence
  SiRNA target sequence
aatttgaatatatcgtctaag

SEQ ID NO: 268471 - DNA, 21 bp, Artificial sequence
  SiRNA target sequence
atttgaatatatcgtctaaga

SEQ ID NO: 268472 - DNA, 21 bp, Artificial sequence
  SiRNA target sequence
tttgaatatatcgtctaagag

SEQ ID NO: 268473 - DNA, 21 bp, Artificial sequence
  SiRNA target sequence
ttgaatatatcgtctaagaga

SEQ ID NO: 268474 - DNA, 21 bp, Artificial sequence
  SiRNA target sequence
tgaatatatcgtctaagagaa

SEQ ID NO: 268475 - DNA, 21 bp, Artificial sequence
  SiRNA target sequence
gaatatatcgtctaagagaag

SEQ ID NO: 268476 - DNA, 21 bp, Artificial sequence
  SiRNA target sequence
aatatatcgtctaagagaagc

SEQ ID NO: 268477 - DNA, 21 bp, Artificial sequence
  SiRNA target sequence
atatatcgtctaagagaagcg

SEQ ID NO: 268478 - DNA, 21 bp, Artificial sequence
  SiRNA target sequence
tatatcgtctaagagaagcgt

SEQ ID NO: 268479 - DNA, 21 bp, Artificial sequence
  SiRNA target sequence
atatcgtctaagagaagcgtt

SEQ ID NO: 268480 - DNA, 21 bp, Artificial sequence
  SiRNA target sequence
tatcgtctaagagaagcgttt

SEQ ID NO: 268481 - DNA, 21 bp, Artificial sequence
  SiRNA target sequence
atcgtctaagagaagcgttta

SEQ ID NO: 268482 - DNA, 21 bp, Artificial sequence
  SiRNA target sequence
tcgtctaagagaagcgtttat

SEQ ID NO: 268483 - DNA, 21 bp, Artificial sequence
  SiRNA target sequence
cgtctaagagaagcgtttatg

SEQ ID NO: 268484 - DNA, 21 bp, Artificial sequence
  SiRNA target sequence
gtctaagagaagcgtttatgg

SEQ ID NO: 268485 - DNA, 21 bp, Artificial sequence
  SiRNA target sequence
tctaagagaagcgtttatgga

SEQ ID NO: 268486 - DNA, 21 bp, Artificial sequence
  SiRNA target sequence
ctaagagaagcgtttatggat

SEQ ID NO: 268487 - DNA, 21 bp, Artificial sequence
  SiRNA target sequence
taagagaagcgtttatggatt

SEQ ID NO: 268488 - DNA, 21 bp, Artificial sequence
  SiRNA target sequence
aagagaagcgtttatggattt

SEQ ID NO: 268489 - DNA, 21 bp, Artificial sequence
  SiRNA target sequence
agagaagcgtttatggatttt

SEQ ID NO: 268490 - DNA, 21 bp, Artificial sequence
  SiRNA target sequence
gagaagcgtttatggattttc

SEQ ID NO: 268491 - DNA, 21 bp, Artificial sequence
  SiRNA target sequence
agaagcgtttatggattttca

SEQ ID NO: 268492 - DNA, 21 bp, Artificial sequence
  SiRNA target sequence
gaagcgtttatggattttcac

SEQ ID NO: 268493 - DNA, 21 bp, Artificial sequence
  SiRNA target sequence
aagcgtttatggattttcaca

SEQ ID NO: 268494 - DNA, 21 bp, Artificial sequence
  SiRNA target sequence
agcgtttatggattttcacaa

SEQ ID NO: 268495 - DNA, 21 bp, Artificial sequence
  SiRNA target sequence
gcgtttatggattttcacaaa

SEQ ID NO: 268496 - DNA, 21 bp, Artificial sequence
  SiRNA target sequence
cgtttatggattttcacaaat

SEQ ID NO: 268497 - DNA, 21 bp, Artificial sequence
  SiRNA target sequence
gtttatggattttcacaaatg

SEQ ID NO: 268498 - DNA, 21 bp, Artificial sequence
  SiRNA target sequence
tttatggattttcacaaatgg

SEQ ID NO: 268499 - DNA, 21 bp, Artificial sequence
  SiRNA target sequence
ttatggattttcacaaatgga

SEQ ID NO: 268500 - DNA, 21 bp, Artificial sequence
  SiRNA target sequence
tatggattttcacaaatggat

SEQ ID NO: 268501 - DNA, 21 bp, Artificial sequence
  SiRNA target sequence
atggattttcacaaatggatc

SEQ ID NO: 268502 - DNA, 21 bp, Artificial sequence
  SiRNA target sequence
tggattttcacaaatggatca

SEQ ID NO: 268503 - DNA, 21 bp, Artificial sequence
  SiRNA target sequence
ggattttcacaaatggatcat

SEQ ID NO: 268504 - DNA, 21 bp, Artificial sequence
  SiRNA target sequence
gattttcacaaatggatcatg

SEQ ID NO: 268505 - DNA, 21 bp, Artificial sequence
  SiRNA target sequence
attttcacaaatggatcatgc

SEQ ID NO: 268506 - DNA, 21 bp, Artificial sequence
  SiRNA target sequence
ttttcacaaatggatcatgct

SEQ ID NO: 268507 - DNA, 21 bp, Artificial sequence
  SiRNA target sequence
tttcacaaatggatcatgctt

SEQ ID NO: 268508 - DNA, 21 bp, Artificial sequence
  SiRNA target sequence
ttcacaaatggatcatgcttt

SEQ ID NO: 268509 - DNA, 21 bp, Artificial sequence
  SiRNA target sequence
tcacaaatggatcatgctttg

SEQ ID NO: 268510 - DNA, 21 bp, Artificial sequence
  SiRNA target sequence
cacaaatggatcatgctttga

SEQ ID NO: 268511 - DNA, 21 bp, Artificial sequence
  SiRNA target sequence
acaaatggatcatgctttgat

SEQ ID NO: 268512 - DNA, 21 bp, Artificial sequence
  SiRNA target sequence
caaatggatcatgctttgatt

SEQ ID NO: 268513 - DNA, 21 bp, Artificial sequence
  SiRNA target sequence
aaatggatcatgctttgatta

SEQ ID NO: 268514 - DNA, 21 bp, Artificial sequence
  SiRNA target sequence
aatggatcatgctttgattag

SEQ ID NO: 268515 - DNA, 21 bp, Artificial sequence
  SiRNA target sequence
atggatcatgctttgattagt

SEQ ID NO: 268516 - DNA, 21 bp, Artificial sequence
  SiRNA target sequence
tggatcatgctttgattagtg

SEQ ID NO: 268517 - DNA, 21 bp, Artificial sequence
  SiRNA target sequence
ggatcatgctttgattagtgc

SEQ ID NO: 268518 - DNA, 21 bp, Artificial sequence
  SiRNA target sequence
gatcatgctttgattagtgcg

SEQ ID NO: 268519 - DNA, 21 bp, Artificial sequence
  SiRNA target sequence
atcatgctttgattagtgcgt

SEQ ID NO: 268520 - DNA, 21 bp, Artificial sequence
  SiRNA target sequence
tcatgctttgattagtgcgtc

SEQ ID NO: 268521 - DNA, 21 bp, Artificial sequence
  SiRNA target sequence
catgctttgattagtgcgtca

SEQ ID NO: 268522 - DNA, 21 bp, Artificial sequence
  SiRNA target sequence
atgctttgattagtgcgtcag

SEQ ID NO: 268523 - DNA, 21 bp, Artificial sequence
  SiRNA target sequence
tgctttgattagtgcgtcagc

SEQ ID NO: 268524 - DNA, 21 bp, Artificial sequence
  SiRNA target sequence
gctttgattagtgcgtcagca

SEQ ID NO: 268525 - DNA, 21 bp, Artificial sequence
  SiRNA target sequence
ctttgattagtgcgtcagcaa

SEQ ID NO: 268526 - DNA, 21 bp, Artificial sequence
  SiRNA target sequence
tttgattagtgcgtcagcaag

SEQ ID NO: 268527 - DNA, 21 bp, Artificial sequence
  SiRNA target sequence
ttgattagtgcgtcagcaagt

SEQ ID NO: 268528 - DNA, 21 bp, Artificial sequence
  SiRNA target sequence
tgattagtgcgtcagcaagta

SEQ ID NO: 268529 - DNA, 21 bp, Artificial sequence
  SiRNA target sequence
gattagtgcgtcagcaagtaa

SEQ ID NO: 268530 - DNA, 21 bp, Artificial sequence
  SiRNA target sequence
attagtgcgtcagcaagtaat

SEQ ID NO: 268531 - DNA, 21 bp, Artificial sequence
  SiRNA target sequence
ttagtgcgtcagcaagtaatg

SEQ ID NO: 268532 - DNA, 21 bp, Artificial sequence
  SiRNA target sequence
tagtgcgtcagcaagtaatga

SEQ ID NO: 268533 - DNA, 21 bp, Artificial sequence
  SiRNA target sequence
agtgcgtcagcaagtaatgaa

SEQ ID NO: 268534 - DNA, 21 bp, Artificial sequence
  SiRNA target sequence
gtgcgtcagcaagtaatgaag

SEQ ID NO: 268535 - DNA, 21 bp, Artificial sequence
  SiRNA target sequence
tgcgtcagcaagtaatgaagc

SEQ ID NO: 268536 - DNA, 21 bp, Artificial sequence
  SiRNA target sequence
gcgtcagcaagtaatgaagca

SEQ ID NO: 268537 - DNA, 21 bp, Artificial sequence
  SiRNA target sequence
cgtcagcaagtaatgaagcaa

SEQ ID NO: 268538 - DNA, 21 bp, Artificial sequence
  SiRNA target sequence
gtcagcaagtaatgaagcaaa

SEQ ID NO: 268539 - DNA, 21 bp, Artificial sequence
  SiRNA target sequence
tcagcaagtaatgaagcaaaa

SEQ ID NO: 268540 - DNA, 21 bp, Artificial sequence
  SiRNA target sequence
cagcaagtaatgaagcaaaat

SEQ ID NO: 268541 - DNA, 21 bp, Artificial sequence
  SiRNA target sequence
agcaagtaatgaagcaaaatt

SEQ ID NO: 268542 - DNA, 21 bp, Artificial sequence
  SiRNA target sequence
gcaagtaatgaagcaaaatta

SEQ ID NO: 268543 - DNA, 21 bp, Artificial sequence
  SiRNA target sequence
caagtaatgaagcaaaattag

SEQ ID NO: 268544 - DNA, 21 bp, Artificial sequence
  SiRNA target sequence
aagtaatgaagcaaaattagt

SEQ ID NO: 268545 - DNA, 21 bp, Artificial sequence
  SiRNA target sequence
agtaatgaagcaaaattagtt

SEQ ID NO: 268546 - DNA, 21 bp, Artificial sequence
  SiRNA target sequence
gtaatgaagcaaaattagtta

SEQ ID NO: 268547 - DNA, 21 bp, Artificial sequence
  SiRNA target sequence
taatgaagcaaaattagttat

SEQ ID NO: 268548 - DNA, 21 bp, Artificial sequence
  SiRNA target sequence
aatgaagcaaaattagttatt

SEQ ID NO: 268549 - DNA, 21 bp, Artificial sequence
  SiRNA target sequence
atgaagcaaaattagttattc

SEQ ID NO: 268550 - DNA, 21 bp, Artificial sequence
  SiRNA target sequence
tgaagcaaaattagttattcc

SEQ ID NO: 268551 - DNA, 21 bp, Artificial sequence
  SiRNA target sequence
gaagcaaaattagttattcca

SEQ ID NO: 268552 - DNA, 21 bp, Artificial sequence
  SiRNA target sequence
aagcaaaattagttattccat

SEQ ID NO: 268553 - DNA, 21 bp, Artificial sequence
  SiRNA target sequence
agcaaaattagttattccata

SEQ ID NO: 268554 - DNA, 21 bp, Artificial sequence
  SiRNA target sequence
gcaaaattagttattccatat

SEQ ID NO: 268555 - DNA, 21 bp, Artificial sequence
  SiRNA target sequence
caaaattagttattccatata

SEQ ID NO: 268556 - DNA, 21 bp, Artificial sequence
  SiRNA target sequence
aaaattagttattccatataa

SEQ ID NO: 268557 - DNA, 21 bp, Artificial sequence
  SiRNA target sequence
aaattagttattccatataag

SEQ ID NO: 268558 - DNA, 21 bp, Artificial sequence
  SiRNA target sequence
aattagttattccatataagc

SEQ ID NO: 268559 - DNA, 21 bp, Artificial sequence
  SiRNA target sequence
attagttattccatataagca

SEQ ID NO: 268560 - DNA, 21 bp, Artificial sequence
  SiRNA target sequence
ttagttattccatataagcat

SEQ ID NO: 268561 - DNA, 21 bp, Artificial sequence
  SiRNA target sequence
tagttattccatataagcatg

SEQ ID NO: 268562 - DNA, 21 bp, Artificial sequence
  SiRNA target sequence
agttattccatataagcatgt

SEQ ID NO: 268563 - DNA, 21 bp, Artificial sequence
  SiRNA target sequence
gttattccatataagcatgtt

SEQ ID NO: 268564 - DNA, 21 bp, Artificial sequence
  SiRNA target sequence
ttattccatataagcatgttt

SEQ ID NO: 268565 - DNA, 21 bp, Artificial sequence
  SiRNA target sequence
tattccatataagcatgttta

SEQ ID NO: 268566 - DNA, 21 bp, Artificial sequence
  SiRNA target sequence
attccatataagcatgtttat

SEQ ID NO: 268567 - DNA, 21 bp, Artificial sequence
  SiRNA target sequence
ttccatataagcatgtttatc

SEQ ID NO: 268568 - DNA, 21 bp, Artificial sequence
  SiRNA target sequence
tccatataagcatgtttatcc

SEQ ID NO: 268569 - DNA, 21 bp, Artificial sequence
  SiRNA target sequence
ccatataagcatgtttatcca

SEQ ID NO: 268570 - DNA, 21 bp, Artificial sequence
  SiRNA target sequence
catataagcatgtttatccat

SEQ ID NO: 268571 - DNA, 21 bp, Artificial sequence
  SiRNA target sequence
atataagcatgtttatccatt

SEQ ID NO: 268572 - DNA, 21 bp, Artificial sequence
  SiRNA target sequence
tataagcatgtttatccattt

SEQ ID NO: 268573 - DNA, 21 bp, Artificial sequence
  SiRNA target sequence
ataagcatgtttatccatttt

SEQ ID NO: 268574 - DNA, 21 bp, Artificial sequence
  SiRNA target sequence
taagcatgtttatccattttt

SEQ ID NO: 268575 - DNA, 21 bp, Artificial sequence
  SiRNA target sequence
aagcatgtttatccattttta

SEQ ID NO: 268576 - DNA, 21 bp, Artificial sequence
  SiRNA target sequence
agcatgtttatccatttttac

SEQ ID NO: 268577 - DNA, 21 bp, Artificial sequence
  SiRNA target sequence
gcatgtttatccatttttacc

SEQ ID NO: 268578 - DNA, 21 bp, Artificial sequence
  SiRNA target sequence
catgtttatccatttttaccg

SEQ ID NO: 268579 - DNA, 21 bp, Artificial sequence
  SiRNA target sequence
atgtttatccatttttaccga

SEQ ID NO: 268580 - DNA, 21 bp, Artificial sequence
  SiRNA target sequence
tgtttatccatttttaccgac

SEQ ID NO: 268581 - DNA, 21 bp, Artificial sequence
  SiRNA target sequence
gtttatccatttttaccgaca

SEQ ID NO: 268582 - DNA, 21 bp, Artificial sequence
  SiRNA target sequence
tttatccatttttaccgacaa

SEQ ID NO: 268583 - DNA, 21 bp, Artificial sequence
  SiRNA target sequence
ttatccatttttaccgacaag

SEQ ID NO: 268584 - DNA, 21 bp, Artificial sequence
  SiRNA target sequence
tatccatttttaccgacaaga

SEQ ID NO: 268585 - DNA, 21 bp, Artificial sequence
  SiRNA target sequence
atccatttttaccgacaagaa

SEQ ID NO: 268586 - DNA, 21 bp, Artificial sequence
  SiRNA target sequence
tccatttttaccgacaagaat

SEQ ID NO: 268587 - DNA, 21 bp, Artificial sequence
  SiRNA target sequence
ccatttttaccgacaagaatt

SEQ ID NO: 268588 - DNA, 21 bp, Artificial sequence
  SiRNA target sequence
catttttaccgacaagaattg

SEQ ID NO: 268589 - DNA, 21 bp, Artificial sequence
  SiRNA target sequence
atttttaccgacaagaattgt

SEQ ID NO: 268590 - DNA, 21 bp, Artificial sequence
  SiRNA target sequence
tttttaccgacaagaattgtg

SEQ ID NO: 268591 - DNA, 21 bp, Artificial sequence
  SiRNA target sequence
ttttaccgacaagaattgtgc

SEQ ID NO: 268592 - DNA, 21 bp, Artificial sequence
  SiRNA target sequence
tttaccgacaagaattgtgcc

SEQ ID NO: 268593 - DNA, 21 bp, Artificial sequence
  SiRNA target sequence
ttaccgacaagaattgtgcca

SEQ ID NO: 268594 - DNA, 21 bp, Artificial sequence
  SiRNA target sequence
taccgacaagaattgtgccag

SEQ ID NO: 268595 - DNA, 21 bp, Artificial sequence
  SiRNA target sequence
accgacaagaattgtgccaga

SEQ ID NO: 268596 - DNA, 21 bp, Artificial sequence
  SiRNA target sequence
ccgacaagaattgtgccagat

SEQ ID NO: 268597 - DNA, 21 bp, Artificial sequence
  SiRNA target sequence
cgacaagaattgtgccagatt

SEQ ID NO: 268598 - DNA, 21 bp, Artificial sequence
  SiRNA target sequence
gacaagaattgtgccagattg

SEQ ID NO: 268599 - DNA, 21 bp, Artificial sequence
  SiRNA target sequence
acaagaattgtgccagattgg

SEQ ID NO: 268600 - DNA, 21 bp, Artificial sequence
  SiRNA target sequence
caagaattgtgccagattgga

SEQ ID NO: 268601 - DNA, 21 bp, Artificial sequence
  SiRNA target sequence
aagaattgtgccagattggac

SEQ ID NO: 268602 - DNA, 21 bp, Artificial sequence
  SiRNA target sequence
agaattgtgccagattggact

SEQ ID NO: 268603 - DNA, 21 bp, Artificial sequence
  SiRNA target sequence
gaattgtgccagattggacta

SEQ ID NO: 268604 - DNA, 21 bp, Artificial sequence
  SiRNA target sequence
aattgtgccagattggactac

SEQ ID NO: 268605 - DNA, 21 bp, Artificial sequence
  SiRNA target sequence
attgtgccagattggactact

SEQ ID NO: 268606 - DNA, 21 bp, Artificial sequence
  SiRNA target sequence
ttgtgccagattggactactg

SEQ ID NO: 268607 - DNA, 21 bp, Artificial sequence
  SiRNA target sequence
tgtgccagattggactactgg

SEQ ID NO: 268608 - DNA, 21 bp, Artificial sequence
  SiRNA target sequence
gtgccagattggactactggc

SEQ ID NO: 268609 - DNA, 21 bp, Artificial sequence
  SiRNA target sequence
tgccagattggactactggca

SEQ ID NO: 268610 - DNA, 21 bp, Artificial sequence
  SiRNA target sequence
gccagattggactactggcat

SEQ ID NO: 268611 - DNA, 21 bp, Artificial sequence
  SiRNA target sequence
ccagattggactactggcatt

SEQ ID NO: 268612 - DNA, 21 bp, Artificial sequence
  SiRNA target sequence
cagattggactactggcattt

SEQ ID NO: 268613 - DNA, 21 bp, Artificial sequence
  SiRNA target sequence
agattggactactggcatttt

SEQ ID NO: 268614 - DNA, 21 bp, Artificial sequence
  SiRNA target sequence
gattggactactggcatttta

SEQ ID NO: 268615 - DNA, 21 bp, Artificial sequence
  SiRNA target sequence
attggactactggcattttag

SEQ ID NO: 268616 - DNA, 21 bp, Artificial sequence
  SiRNA target sequence
ttggactactggcattttaga

SEQ ID NO: 268617 - DNA, 21 bp, Artificial sequence
  SiRNA target sequence
tggactactggcattttagat

SEQ ID NO: 268618 - DNA, 21 bp, Artificial sequence
  SiRNA target sequence
ggactactggcattttagata

SEQ ID NO: 268619 - DNA, 21 bp, Artificial sequence
  SiRNA target sequence
gactactggcattttagatat

SEQ ID NO: 268620 - DNA, 21 bp, Artificial sequence
  SiRNA target sequence
actactggcattttagatatg

SEQ ID NO: 268621 - DNA, 21 bp, Artificial sequence
  SiRNA target sequence
ctactggcattttagatatgg

SEQ ID NO: 268622 - DNA, 21 bp, Artificial sequence
  SiRNA target sequence
tactggcattttagatatggg

SEQ ID NO: 268623 - DNA, 21 bp, Artificial sequence
  SiRNA target sequence
actggcattttagatatgggt

SEQ ID NO: 268624 - DNA, 21 bp, Artificial sequence
  SiRNA target sequence
ctggcattttagatatgggtg

SEQ ID NO: 268625 - DNA, 21 bp, Artificial sequence
  SiRNA target sequence
tggcattttagatatgggtgc

SEQ ID NO: 268626 - DNA, 21 bp, Artificial sequence
  SiRNA target sequence
ggcattttagatatgggtgct

SEQ ID NO: 268627 - DNA, 21 bp, Artificial sequence
  SiRNA target sequence
gcattttagatatgggtgctt

SEQ ID NO: 268628 - DNA, 21 bp, Artificial sequence
  SiRNA target sequence
cattttagatatgggtgcttt

SEQ ID NO: 268629 - DNA, 21 bp, Artificial sequence
  SiRNA target sequence
attttagatatgggtgctttg

SEQ ID NO: 268630 - DNA, 21 bp, Artificial sequence
  SiRNA target sequence
ttttagatatgggtgctttga

SEQ ID NO: 268631 - DNA, 21 bp, Artificial sequence
  SiRNA target sequence
tttagatatgggtgctttgaa

SEQ ID NO: 268632 - DNA, 21 bp, Artificial sequence
  SiRNA target sequence
ttagatatgggtgctttgaac

SEQ ID NO: 268633 - DNA, 21 bp, Artificial sequence
  SiRNA target sequence
tagatatgggtgctttgaaca

SEQ ID NO: 268634 - DNA, 21 bp, Artificial sequence
  SiRNA target sequence
agatatgggtgctttgaacat

SEQ ID NO: 268635 - DNA, 21 bp, Artificial sequence
  SiRNA target sequence
gatatgggtgctttgaacatt

SEQ ID NO: 268636 - DNA, 21 bp, Artificial sequence
  SiRNA target sequence
atatgggtgctttgaacattc

SEQ ID NO: 268637 - DNA, 21 bp, Artificial sequence
  SiRNA target sequence
tatgggtgctttgaacattcg

SEQ ID NO: 268638 - DNA, 21 bp, Artificial sequence
  SiRNA target sequence
atgggtgctttgaacattcgt

SEQ ID NO: 268639 - DNA, 21 bp, Artificial sequence
  SiRNA target sequence
tgggtgctttgaacattcgtg

SEQ ID NO: 268640 - DNA, 21 bp, Artificial sequence
  SiRNA target sequence
gggtgctttgaacattcgtgt

SEQ ID NO: 268641 - DNA, 21 bp, Artificial sequence
  SiRNA target sequence
ggtgctttgaacattcgtgta

SEQ ID NO: 268642 - DNA, 21 bp, Artificial sequence
  SiRNA target sequence
gtgctttgaacattcgtgtaa

SEQ ID NO: 268643 - DNA, 21 bp, Artificial sequence
  SiRNA target sequence
tgctttgaacattcgtgtaat

SEQ ID NO: 268644 - DNA, 21 bp, Artificial sequence
  SiRNA target sequence
gctttgaacattcgtgtaatt

SEQ ID NO: 268645 - DNA, 21 bp, Artificial sequence
  SiRNA target sequence
ctttgaacattcgtgtaattg

SEQ ID NO: 268646 - DNA, 21 bp, Artificial sequence
  SiRNA target sequence
tttgaacattcgtgtaattgc

SEQ ID NO: 268647 - DNA, 21 bp, Artificial sequence
  SiRNA target sequence
ttgaacattcgtgtaattgct

SEQ ID NO: 268648 - DNA, 21 bp, Artificial sequence
  SiRNA target sequence
tgaacattcgtgtaattgctc

SEQ ID NO: 268649 - DNA, 21 bp, Artificial sequence
  SiRNA target sequence
gaacattcgtgtaattgctcc

SEQ ID NO: 268650 - DNA, 21 bp, Artificial sequence
  SiRNA target sequence
aacattcgtgtaattgctccc

SEQ ID NO: 268651 - DNA, 21 bp, Artificial sequence
  SiRNA target sequence
acattcgtgtaattgctccct

SEQ ID NO: 268652 - DNA, 21 bp, Artificial sequence
  SiRNA target sequence
cattcgtgtaattgctccctt

SEQ ID NO: 268653 - DNA, 21 bp, Artificial sequence
  SiRNA target sequence
attcgtgtaattgctccctta

SEQ ID NO: 268654 - DNA, 21 bp, Artificial sequence
  SiRNA target sequence
ttcgtgtaattgctcccttac

SEQ ID NO: 268655 - DNA, 21 bp, Artificial sequence
  SiRNA target sequence
tcgtgtaattgctcccttacg

SEQ ID NO: 268656 - DNA, 21 bp, Artificial sequence
  SiRNA target sequence
cgtgtaattgctcccttacgg

SEQ ID NO: 268657 - DNA, 21 bp, Artificial sequence
  SiRNA target sequence
gtgtaattgctcccttacgga

SEQ ID NO: 268658 - DNA, 21 bp, Artificial sequence
  SiRNA target sequence
tgtaattgctcccttacggat

SEQ ID NO: 268659 - DNA, 21 bp, Artificial sequence
  SiRNA target sequence
gtaattgctcccttacggatg

SEQ ID NO: 268660 - DNA, 21 bp, Artificial sequence
  SiRNA target sequence
taattgctcccttacggatga

SEQ ID NO: 268661 - DNA, 21 bp, Artificial sequence
  SiRNA target sequence
aattgctcccttacggatgag

SEQ ID NO: 268662 - DNA, 21 bp, Artificial sequence
  SiRNA target sequence
attgctcccttacggatgagt

SEQ ID NO: 268663 - DNA, 21 bp, Artificial sequence
  SiRNA target sequence
ttgctcccttacggatgagtg

SEQ ID NO: 268664 - DNA, 21 bp, Artificial sequence
  SiRNA target sequence
tgctcccttacggatgagtgc

SEQ ID NO: 268665 - DNA, 21 bp, Artificial sequence
  SiRNA target sequence
gctcccttacggatgagtgct

SEQ ID NO: 268666 - DNA, 21 bp, Artificial sequence
  SiRNA target sequence
ctcccttacggatgagtgcta

SEQ ID NO: 268667 - DNA, 21 bp, Artificial sequence
  SiRNA target sequence
tcccttacggatgagtgctac

SEQ ID NO: 268668 - DNA, 21 bp, Artificial sequence
  SiRNA target sequence
cccttacggatgagtgctact

SEQ ID NO: 268669 - DNA, 21 bp, Artificial sequence
  SiRNA target sequence
ccttacggatgagtgctactg

SEQ ID NO: 268670 - DNA, 21 bp, Artificial sequence
  SiRNA target sequence
cttacggatgagtgctactgg

SEQ ID NO: 268671 - DNA, 21 bp, Artificial sequence
  SiRNA target sequence
ttacggatgagtgctactggt

SEQ ID NO: 268672 - DNA, 21 bp, Artificial sequence
  SiRNA target sequence
tacggatgagtgctactggtc

SEQ ID NO: 268673 - DNA, 21 bp, Artificial sequence
  SiRNA target sequence
acggatgagtgctactggtcc

SEQ ID NO: 268674 - DNA, 21 bp, Artificial sequence
  SiRNA target sequence
cggatgagtgctactggtcca

SEQ ID NO: 268675 - DNA, 21 bp, Artificial sequence
  SiRNA target sequence
ggatgagtgctactggtccaa

SEQ ID NO: 268676 - DNA, 21 bp, Artificial sequence
  SiRNA target sequence
gatgagtgctactggtccaac

SEQ ID NO: 268677 - DNA, 21 bp, Artificial sequence
  SiRNA target sequence
atgagtgctactggtccaact

SEQ ID NO: 268678 - DNA, 21 bp, Artificial sequence
  SiRNA target sequence
tgagtgctactggtccaacta

SEQ ID NO: 268679 - DNA, 21 bp, Artificial sequence
  SiRNA target sequence
gagtgctactggtccaactac

SEQ ID NO: 268680 - DNA, 21 bp, Artificial sequence
  SiRNA target sequence
agtgctactggtccaactacc

SEQ ID NO: 268681 - DNA, 21 bp, Artificial sequence
  SiRNA target sequence
gtgctactggtccaactacct

SEQ ID NO: 268682 - DNA, 21 bp, Artificial sequence
  SiRNA target sequence
tgctactggtccaactacctg

SEQ ID NO: 268683 - DNA, 21 bp, Artificial sequence
  SiRNA target sequence
gctactggtccaactacctgt

SEQ ID NO: 268684 - DNA, 21 bp, Artificial sequence
  SiRNA target sequence
ctactggtccaactacctgta

SEQ ID NO: 268685 - DNA, 21 bp, Artificial sequence
  SiRNA target sequence
tactggtccaactacctgtaa

SEQ ID NO: 268686 - DNA, 21 bp, Artificial sequence
  SiRNA target sequence
actggtccaactacctgtaat

SEQ ID NO: 268687 - DNA, 21 bp, Artificial sequence
  SiRNA target sequence
ctggtccaactacctgtaatg

SEQ ID NO: 268688 - DNA, 21 bp, Artificial sequence
  SiRNA target sequence
tggtccaactacctgtaatgt

SEQ ID NO: 268689 - DNA, 21 bp, Artificial sequence
  SiRNA target sequence
ggtccaactacctgtaatgtc

SEQ ID NO: 268690 - DNA, 21 bp, Artificial sequence
  SiRNA target sequence
gtccaactacctgtaatgtcg

SEQ ID NO: 268691 - DNA, 21 bp, Artificial sequence
  SiRNA target sequence
tccaactacctgtaatgtcgt

SEQ ID NO: 268692 - DNA, 21 bp, Artificial sequence
  SiRNA target sequence
ccaactacctgtaatgtcgtc

SEQ ID NO: 268693 - DNA, 21 bp, Artificial sequence
  SiRNA target sequence
caactacctgtaatgtcgtcg

SEQ ID NO: 268694 - DNA, 21 bp, Artificial sequence
  SiRNA target sequence
aactacctgtaatgtcgtcgt

SEQ ID NO: 268695 - DNA, 21 bp, Artificial sequence
  SiRNA target sequence
actacctgtaatgtcgtcgtg

SEQ ID NO: 268696 - DNA, 21 bp, Artificial sequence
  SiRNA target sequence
ctacctgtaatgtcgtcgtgt

SEQ ID NO: 268697 - DNA, 21 bp, Artificial sequence
  SiRNA target sequence
tacctgtaatgtcgtcgtgtt

SEQ ID NO: 268698 - DNA, 21 bp, Artificial sequence
  SiRNA target sequence
acctgtaatgtcgtcgtgttt

SEQ ID NO: 268699 - DNA, 21 bp, Artificial sequence
  SiRNA target sequence
cctgtaatgtcgtcgtgttta

SEQ ID NO: 268700 - DNA, 21 bp, Artificial sequence
  SiRNA target sequence
ctgtaatgtcgtcgtgtttat

SEQ ID NO: 268701 - DNA, 21 bp, Artificial sequence
  SiRNA target sequence
tgtaatgtcgtcgtgtttatt

SEQ ID NO: 268702 - DNA, 21 bp, Artificial sequence
  SiRNA target sequence
gtaatgtcgtcgtgtttatta

SEQ ID NO: 268703 - DNA, 21 bp, Artificial sequence
  SiRNA target sequence
taatgtcgtcgtgtttattaa

SEQ ID NO: 268704 - DNA, 21 bp, Artificial sequence
  SiRNA target sequence
aatgtcgtcgtgtttattaaa

SEQ ID NO: 268705 - DNA, 21 bp, Artificial sequence
  SiRNA target sequence
atgtcgtcgtgtttattaaat

SEQ ID NO: 268706 - DNA, 21 bp, Artificial sequence
  SiRNA target sequence
tgtcgtcgtgtttattaaatt

SEQ ID NO: 268707 - DNA, 21 bp, Artificial sequence
  SiRNA target sequence
gtcgtcgtgtttattaaatta

SEQ ID NO: 268708 - DNA, 21 bp, Artificial sequence
  SiRNA target sequence
tcgtcgtgtttattaaattaa

SEQ ID NO: 268709 - DNA, 21 bp, Artificial sequence
  SiRNA target sequence
cgtcgtgtttattaaattaaa

SEQ ID NO: 268710 - DNA, 21 bp, Artificial sequence
  SiRNA target sequence
gtcgtgtttattaaattaaat

SEQ ID NO: 268711 - DNA, 21 bp, Artificial sequence
  SiRNA target sequence
tcgtgtttattaaattaaata

SEQ ID NO: 268712 - DNA, 21 bp, Artificial sequence
  SiRNA target sequence
cgtgtttattaaattaaataa

SEQ ID NO: 268713 - DNA, 21 bp, Artificial sequence
  SiRNA target sequence
gtgtttattaaattaaataac

SEQ ID NO: 268714 - DNA, 21 bp, Artificial sequence
  SiRNA target sequence
tgtttattaaattaaataaca

SEQ ID NO: 268715 - DNA, 21 bp, Artificial sequence
  SiRNA target sequence
gtttattaaattaaataacag

SEQ ID NO: 268716 - DNA, 21 bp, Artificial sequence
  SiRNA target sequence
tttattaaattaaataacagc

SEQ ID NO: 268717 - DNA, 21 bp, Artificial sequence
  SiRNA target sequence
ttattaaattaaataacagcg

SEQ ID NO: 268718 - DNA, 21 bp, Artificial sequence
  SiRNA target sequence
tattaaattaaataacagcga

SEQ ID NO: 268719 - DNA, 21 bp, Artificial sequence
  SiRNA target sequence
attaaattaaataacagcgag

SEQ ID NO: 268720 - DNA, 21 bp, Artificial sequence
  SiRNA target sequence
ttaaattaaataacagcgagt

SEQ ID NO: 268721 - DNA, 21 bp, Artificial sequence
  SiRNA target sequence
taaattaaataacagcgagtt

SEQ ID NO: 268722 - DNA, 21 bp, Artificial sequence
  SiRNA target sequence
aaattaaataacagcgagttt

SEQ ID NO: 268723 - DNA, 21 bp, Artificial sequence
  SiRNA target sequence
aattaaataacagcgagttta

SEQ ID NO: 268724 - DNA, 21 bp, Artificial sequence
  SiRNA target sequence
attaaataacagcgagtttac

SEQ ID NO: 268725 - DNA, 21 bp, Artificial sequence
  SiRNA target sequence
ttaaataacagcgagtttaca

SEQ ID NO: 268726 - DNA, 21 bp, Artificial sequence
  SiRNA target sequence
taaataacagcgagtttacag

SEQ ID NO: 268727 - DNA, 21 bp, Artificial sequence
  SiRNA target sequence
aaataacagcgagtttacagg

SEQ ID NO: 268728 - DNA, 21 bp, Artificial sequence
  SiRNA target sequence
aataacagcgagtttacaggg

SEQ ID NO: 268729 - DNA, 21 bp, Artificial sequence
  SiRNA target sequence
ataacagcgagtttacaggga

SEQ ID NO: 268730 - DNA, 21 bp, Artificial sequence
  SiRNA target sequence
taacagcgagtttacagggac

SEQ ID NO: 268731 - DNA, 21 bp, Artificial sequence
  SiRNA target sequence
aacagcgagtttacagggact

SEQ ID NO: 268732 - DNA, 21 bp, Artificial sequence
  SiRNA target sequence
acagcgagtttacagggactt

SEQ ID NO: 268733 - DNA, 21 bp, Artificial sequence
  SiRNA target sequence
cagcgagtttacagggacttc

SEQ ID NO: 268734 - DNA, 21 bp, Artificial sequence
  SiRNA target sequence
agcgagtttacagggacttct

SEQ ID NO: 268735 - DNA, 21 bp, Artificial sequence
  SiRNA target sequence
gcgagtttacagggacttctt

SEQ ID NO: 268736 - DNA, 21 bp, Artificial sequence
  SiRNA target sequence
cgagtttacagggacttcttc

SEQ ID NO: 268737 - DNA, 21 bp, Artificial sequence
  SiRNA target sequence
gagtttacagggacttcttct

SEQ ID NO: 268738 - DNA, 21 bp, Artificial sequence
  SiRNA target sequence
agtttacagggacttcttctg

SEQ ID NO: 268739 - DNA, 21 bp, Artificial sequence
  SiRNA target sequence
gtttacagggacttcttctgg

SEQ ID NO: 268740 - DNA, 21 bp, Artificial sequence
  SiRNA target sequence
tttacagggacttcttctggt

SEQ ID NO: 268741 - DNA, 21 bp, Artificial sequence
  SiRNA target sequence
ttacagggacttcttctggta

SEQ ID NO: 268742 - DNA, 21 bp, Artificial sequence
  SiRNA target sequence
tacagggacttcttctggtaa

SEQ ID NO: 268743 - DNA, 21 bp, Artificial sequence
  SiRNA target sequence
acagggacttcttctggtaag

SEQ ID NO: 268744 - DNA, 21 bp, Artificial sequence
  SiRNA target sequence
cagggacttcttctggtaagt

SEQ ID NO: 268745 - DNA, 21 bp, Artificial sequence
  SiRNA target sequence
agggacttcttctggtaagtt

SEQ ID NO: 268746 - DNA, 21 bp, Artificial sequence
  SiRNA target sequence
gggacttcttctggtaagttt

SEQ ID NO: 268747 - DNA, 21 bp, Artificial sequence
  SiRNA target sequence
ggacttcttctggtaagtttt

SEQ ID NO: 268748 - DNA, 21 bp, Artificial sequence
  SiRNA target sequence
gacttcttctggtaagtttta

SEQ ID NO: 268749 - DNA, 21 bp, Artificial sequence
  SiRNA target sequence
acttcttctggtaagttttat

SEQ ID NO: 268750 - DNA, 21 bp, Artificial sequence
  SiRNA target sequence
cttcttctggtaagttttatg

SEQ ID NO: 268751 - DNA, 21 bp, Artificial sequence
  SiRNA target sequence
ttcttctggtaagttttatgc

SEQ ID NO: 268752 - DNA, 21 bp, Artificial sequence
  SiRNA target sequence
tcttctggtaagttttatgcg

SEQ ID NO: 268753 - DNA, 21 bp, Artificial sequence
  SiRNA target sequence
cttctggtaagttttatgcga

SEQ ID NO: 268754 - DNA, 21 bp, Artificial sequence
  SiRNA target sequence
ttctggtaagttttatgcgag

SEQ ID NO: 268755 - DNA, 21 bp, Artificial sequence
  SiRNA target sequence
tctggtaagttttatgcgagc

SEQ ID NO: 268756 - DNA, 21 bp, Artificial sequence
  SiRNA target sequence
ctggtaagttttatgcgagcc

SEQ ID NO: 268757 - DNA, 21 bp, Artificial sequence
  SiRNA target sequence
tggtaagttttatgcgagcca

SEQ ID NO: 268758 - DNA, 21 bp, Artificial sequence
  SiRNA target sequence
ggtaagttttatgcgagccaa

SEQ ID NO: 268759 - DNA, 21 bp, Artificial sequence
  SiRNA target sequence
gtaagttttatgcgagccaaa

SEQ ID NO: 268760 - DNA, 21 bp, Artificial sequence
  SiRNA target sequence
taagttttatgcgagccaaat

SEQ ID NO: 268761 - DNA, 21 bp, Artificial sequence
  SiRNA target sequence
aagttttatgcgagccaaatc

SEQ ID NO: 268762 - DNA, 21 bp, Artificial sequence
  SiRNA target sequence
agttttatgcgagccaaatca

SEQ ID NO: 268763 - DNA, 21 bp, Artificial sequence
  SiRNA target sequence
gttttatgcgagccaaatcag

SEQ ID NO: 268764 - DNA, 21 bp, Artificial sequence
  SiRNA target sequence
ttttatgcgagccaaatcagg

SEQ ID NO: 268765 - DNA, 21 bp, Artificial sequence
  SiRNA target sequence
tttatgcgagccaaatcaggg

SEQ ID NO: 268766 - DNA, 21 bp, Artificial sequence
  SiRNA target sequence
ttatgcgagccaaatcagggc

SEQ ID NO: 268767 - DNA, 21 bp, Artificial sequence
  SiRNA target sequence
tatgcgagccaaatcagggca

SEQ ID NO: 268768 - DNA, 21 bp, Artificial sequence
  SiRNA target sequence
atgcgagccaaatcagggcaa

SEQ ID NO: 268769 - DNA, 21 bp, Artificial sequence
  SiRNA target sequence
tgcgagccaaatcagggcaaa

SEQ ID NO: 268770 - DNA, 21 bp, Artificial sequence
  SiRNA target sequence
gcgagccaaatcagggcaaaa

SEQ ID NO: 268771 - DNA, 21 bp, Artificial sequence
  SiRNA target sequence
cgagccaaatcagggcaaaac

SEQ ID NO: 268772 - DNA, 21 bp, Artificial sequence
  SiRNA target sequence
gagccaaatcagggcaaaacc

SEQ ID NO: 268773 - DNA, 21 bp, Artificial sequence
  SiRNA target sequence
agccaaatcagggcaaaacct

SEQ ID NO: 268774 - DNA, 21 bp, Artificial sequence
  SiRNA target sequence
gccaaatcagggcaaaacctg

SEQ ID NO: 268775 - DNA, 21 bp, Artificial sequence
  SiRNA target sequence
ccaaatcagggcaaaacctga

SEQ ID NO: 268776 - DNA, 21 bp, Artificial sequence
  SiRNA target sequence
caaatcagggcaaaacctgag

SEQ ID NO: 268777 - DNA, 21 bp, Artificial sequence
  SiRNA target sequence
aaatcagggcaaaacctgaga

SEQ ID NO: 268778 - DNA, 21 bp, Artificial sequence
  SiRNA target sequence
aatcagggcaaaacctgagat

SEQ ID NO: 268779 - DNA, 21 bp, Artificial sequence
  SiRNA target sequence
atcagggcaaaacctgagatg

SEQ ID NO: 268780 - DNA, 21 bp, Artificial sequence
  SiRNA target sequence
tcagggcaaaacctgagatgg

SEQ ID NO: 268781 - DNA, 21 bp, Artificial sequence
  SiRNA target sequence
cagggcaaaacctgagatgga

SEQ ID NO: 268782 - DNA, 21 bp, Artificial sequence
  SiRNA target sequence
agggcaaaacctgagatggat

SEQ ID NO: 268783 - DNA, 21 bp, Artificial sequence
  SiRNA target sequence
gggcaaaacctgagatggatc

SEQ ID NO: 268784 - DNA, 21 bp, Artificial sequence
  SiRNA target sequence
ggcaaaacctgagatggatcg

SEQ ID NO: 268785 - DNA, 21 bp, Artificial sequence
  SiRNA target sequence
gcaaaacctgagatggatcgt

SEQ ID NO: 268786 - DNA, 21 bp, Artificial sequence
  SiRNA target sequence
caaaacctgagatggatcgta

SEQ ID NO: 268787 - DNA, 21 bp, Artificial sequence
  SiRNA target sequence
aaaacctgagatggatcgtat

SEQ ID NO: 268788 - DNA, 21 bp, Artificial sequence
  SiRNA target sequence
aaacctgagatggatcgtata

SEQ ID NO: 268789 - DNA, 21 bp, Artificial sequence
  SiRNA target sequence
aacctgagatggatcgtatat

SEQ ID NO: 268790 - DNA, 21 bp, Artificial sequence
  SiRNA target sequence
acctgagatggatcgtatatt

SEQ ID NO: 268791 - DNA, 21 bp, Artificial sequence
  SiRNA target sequence
cctgagatggatcgtatatta

SEQ ID NO: 268792 - DNA, 21 bp, Artificial sequence
  SiRNA target sequence
ctgagatggatcgtatattaa

SEQ ID NO: 268793 - DNA, 21 bp, Artificial sequence
  SiRNA target sequence
tgagatggatcgtatattaaa

SEQ ID NO: 268794 - DNA, 21 bp, Artificial sequence
  SiRNA target sequence
gagatggatcgtatattaaat

SEQ ID NO: 268795 - DNA, 21 bp, Artificial sequence
  SiRNA target sequence
agatggatcgtatattaaatt

SEQ ID NO: 268796 - DNA, 21 bp, Artificial sequence
  SiRNA target sequence
gatggatcgtatattaaattt

SEQ ID NO: 268797 - DNA, 21 bp, Artificial sequence
  SiRNA target sequence
atggatcgtatattaaatttg

SEQ ID NO: 268798 - DNA, 21 bp, Artificial sequence
  SiRNA target sequence
tggatcgtatattaaatttgg

SEQ ID NO: 268799 - DNA, 21 bp, Artificial sequence
  SiRNA target sequence
ggatcgtatattaaatttggc

SEQ ID NO: 268800 - DNA, 21 bp, Artificial sequence
  SiRNA target sequence
gatcgtatattaaatttggca

SEQ ID NO: 268801 - DNA, 21 bp, Artificial sequence
  SiRNA target sequence
atcgtatattaaatttggcag

SEQ ID NO: 268802 - DNA, 21 bp, Artificial sequence
  SiRNA target sequence
tcgtatattaaatttggcaga

SEQ ID NO: 268803 - DNA, 21 bp, Artificial sequence
  SiRNA target sequence
cgtatattaaatttggcagag

SEQ ID NO: 268804 - DNA, 21 bp, Artificial sequence
  SiRNA target sequence
gtatattaaatttggcagagg

SEQ ID NO: 268805 - DNA, 21 bp, Artificial sequence
  SiRNA target sequence
tatattaaatttggcagaggg

SEQ ID NO: 268806 - DNA, 21 bp, Artificial sequence
  SiRNA target sequence
atattaaatttggcagaggga

SEQ ID NO: 268807 - DNA, 21 bp, Artificial sequence
  SiRNA target sequence
tattaaatttggcagagggat

SEQ ID NO: 268808 - DNA, 21 bp, Artificial sequence
  SiRNA target sequence
attaaatttggcagagggatt

SEQ ID NO: 268809 - DNA, 21 bp, Artificial sequence
  SiRNA target sequence
ttaaatttggcagagggattg

SEQ ID NO: 268810 - DNA, 21 bp, Artificial sequence
  SiRNA target sequence
taaatttggcagagggattgt

SEQ ID NO: 268811 - DNA, 21 bp, Artificial sequence
  SiRNA target sequence
aaatttggcagagggattgtt

SEQ ID NO: 268812 - DNA, 21 bp, Artificial sequence
  SiRNA target sequence
aatttggcagagggattgttg

SEQ ID NO: 268813 - DNA, 21 bp, Artificial sequence
  SiRNA target sequence
atttggcagagggattgttga

SEQ ID NO: 268814 - DNA, 21 bp, Artificial sequence
  SiRNA target sequence
tttggcagagggattgttgaa

SEQ ID NO: 268815 - DNA, 21 bp, Artificial sequence
  SiRNA target sequence
ttggcagagggattgttgaat

SEQ ID NO: 268816 - DNA, 21 bp, Artificial sequence
  SiRNA target sequence
tggcagagggattgttgaata

SEQ ID NO: 268817 - DNA, 21 bp, Artificial sequence
  SiRNA target sequence
ggcagagggattgttgaataa

SEQ ID NO: 268818 - DNA, 21 bp, Artificial sequence
  SiRNA target sequence
gcagagggattgttgaataac

SEQ ID NO: 268819 - DNA, 21 bp, Artificial sequence
  SiRNA target sequence
cagagggattgttgaataaca

SEQ ID NO: 268820 - DNA, 21 bp, Artificial sequence
  SiRNA target sequence
agagggattgttgaataacac

SEQ ID NO: 268821 - DNA, 21 bp, Artificial sequence
  SiRNA target sequence
gagggattgttgaataacacg

SEQ ID NO: 268822 - DNA, 21 bp, Artificial sequence
  SiRNA target sequence
agggattgttgaataacacga

SEQ ID NO: 268823 - DNA, 21 bp, Artificial sequence
  SiRNA target sequence
gggattgttgaataacacgat

SEQ ID NO: 268824 - DNA, 21 bp, Artificial sequence
  SiRNA target sequence
ggattgttgaataacacgatt

SEQ ID NO: 268825 - DNA, 21 bp, Artificial sequence
  SiRNA target sequence
gattgttgaataacacgattg

SEQ ID NO: 268826 - DNA, 21 bp, Artificial sequence
  SiRNA target sequence
attgttgaataacacgattgg

SEQ ID NO: 268827 - DNA, 21 bp, Artificial sequence
  SiRNA target sequence
ttgttgaataacacgattggt

SEQ ID NO: 268828 - DNA, 21 bp, Artificial sequence
  SiRNA target sequence
tgttgaataacacgattggtg

SEQ ID NO: 268829 - DNA, 21 bp, Artificial sequence
  SiRNA target sequence
gttgaataacacgattggtgg

SEQ ID NO: 268830 - DNA, 21 bp, Artificial sequence
  SiRNA target sequence
ttgaataacacgattggtggt

SEQ ID NO: 268831 - DNA, 21 bp, Artificial sequence
  SiRNA target sequence
tgaataacacgattggtggta

SEQ ID NO: 268832 - DNA, 21 bp, Artificial sequence
  SiRNA target sequence
gaataacacgattggtggtaa

SEQ ID NO: 268833 - DNA, 21 bp, Artificial sequence
  SiRNA target sequence
aataacacgattggtggtaat

SEQ ID NO: 268834 - DNA, 21 bp, Artificial sequence
  SiRNA target sequence
ataacacgattggtggtaata

SEQ ID NO: 268835 - DNA, 21 bp, Artificial sequence
  SiRNA target sequence
taacacgattggtggtaataa

SEQ ID NO: 268836 - DNA, 21 bp, Artificial sequence
  SiRNA target sequence
aacacgattggtggtaataat

SEQ ID NO: 268837 - DNA, 21 bp, Artificial sequence
  SiRNA target sequence
acacgattggtggtaataata

SEQ ID NO: 268838 - DNA, 21 bp, Artificial sequence
  SiRNA target sequence
cacgattggtggtaataatat

SEQ ID NO: 268839 - DNA, 21 bp, Artificial sequence
  SiRNA target sequence
acgattggtggtaataatatg

SEQ ID NO: 268840 - DNA, 21 bp, Artificial sequence
  SiRNA target sequence
cgattggtggtaataatatgg

SEQ ID NO: 268841 - DNA, 21 bp, Artificial sequence
  SiRNA target sequence
gattggtggtaataatatgga

SEQ ID NO: 268842 - DNA, 21 bp, Artificial sequence
  SiRNA target sequence
attggtggtaataatatggat

SEQ ID NO: 268843 - DNA, 21 bp, Artificial sequence
  SiRNA target sequence
ttggtggtaataatatggata

SEQ ID NO: 268844 - DNA, 21 bp, Artificial sequence
  SiRNA target sequence
tggtggtaataatatggataa

SEQ ID NO: 268845 - DNA, 21 bp, Artificial sequence
  SiRNA target sequence
ggtggtaataatatggataat

SEQ ID NO: 268846 - DNA, 21 bp, Artificial sequence
  SiRNA target sequence
gtggtaataatatggataatc

SEQ ID NO: 268847 - DNA, 21 bp, Artificial sequence
  SiRNA target sequence
tggtaataatatggataatcc

SEQ ID NO: 268848 - DNA, 21 bp, Artificial sequence
  SiRNA target sequence
ggtaataatatggataatcct

SEQ ID NO: 268849 - DNA, 21 bp, Artificial sequence
  SiRNA target sequence
gtaataatatggataatcctt

SEQ ID NO: 268850 - DNA, 21 bp, Artificial sequence
  SiRNA target sequence
taataatatggataatccttc

SEQ ID NO: 268851 - DNA, 21 bp, Artificial sequence
  SiRNA target sequence
aataatatggataatccttct

SEQ ID NO: 268852 - DNA, 21 bp, Artificial sequence
  SiRNA target sequence
ataatatggataatccttctt

SEQ ID NO: 268853 - DNA, 21 bp, Artificial sequence
  SiRNA target sequence
taatatggataatccttctta

SEQ ID NO: 268854 - DNA, 21 bp, Artificial sequence
  SiRNA target sequence
aatatggataatccttcttat

SEQ ID NO: 268855 - DNA, 21 bp, Artificial sequence
  SiRNA target sequence
atatggataatccttcttatc

SEQ ID NO: 268856 - DNA, 21 bp, Artificial sequence
  SiRNA target sequence
tatggataatccttcttatca

SEQ ID NO: 268857 - DNA, 21 bp, Artificial sequence
  SiRNA target sequence
atggataatccttcttatcaa

SEQ ID NO: 268858 - DNA, 21 bp, Artificial sequence
  SiRNA target sequence
tggataatccttcttatcaac

SEQ ID NO: 268859 - DNA, 21 bp, Artificial sequence
  SiRNA target sequence
ggataatccttcttatcaaca

SEQ ID NO: 268860 - DNA, 21 bp, Artificial sequence
  SiRNA target sequence
gataatccttcttatcaacaa

SEQ ID NO: 268861 - DNA, 21 bp, Artificial sequence
  SiRNA target sequence
ataatccttcttatcaacaat

SEQ ID NO: 268862 - DNA, 21 bp, Artificial sequence
  SiRNA target sequence
taatccttcttatcaacaatc

SEQ ID NO: 268863 - DNA, 21 bp, Artificial sequence
  SiRNA target sequence
aatccttcttatcaacaatct

SEQ ID NO: 268864 - DNA, 21 bp, Artificial sequence
  SiRNA target sequence
atccttcttatcaacaatctc

SEQ ID NO: 268865 - DNA, 21 bp, Artificial sequence
  SiRNA target sequence
tccttcttatcaacaatctcc

SEQ ID NO: 268866 - DNA, 21 bp, Artificial sequence
  SiRNA target sequence
ccttcttatcaacaatctcct

SEQ ID NO: 268867 - DNA, 21 bp, Artificial sequence
  SiRNA target sequence
cttcttatcaacaatctcctc

SEQ ID NO: 268868 - DNA, 21 bp, Artificial sequence
  SiRNA target sequence
ttcttatcaacaatctcctcg

SEQ ID NO: 268869 - DNA, 21 bp, Artificial sequence
  SiRNA target sequence
tcttatcaacaatctcctcgt

SEQ ID NO: 268870 - DNA, 21 bp, Artificial sequence
  SiRNA target sequence
cttatcaacaatctcctcgtc

SEQ ID NO: 268871 - DNA, 21 bp, Artificial sequence
  SiRNA target sequence
ttatcaacaatctcctcgtca

SEQ ID NO: 268872 - DNA, 21 bp, Artificial sequence
  SiRNA target sequence
tatcaacaatctcctcgtcat

SEQ ID NO: 268873 - DNA, 21 bp, Artificial sequence
  SiRNA target sequence
atcaacaatctcctcgtcatt

SEQ ID NO: 268874 - DNA, 21 bp, Artificial sequence
  SiRNA target sequence
tcaacaatctcctcgtcattt

SEQ ID NO: 268875 - DNA, 21 bp, Artificial sequence
  SiRNA target sequence
caacaatctcctcgtcatttt

SEQ ID NO: 268876 - DNA, 21 bp, Artificial sequence
  SiRNA target sequence
aacaatctcctcgtcattttg

SEQ ID NO: 268877 - DNA, 21 bp, Artificial sequence
  SiRNA target sequence
acaatctcctcgtcattttgt

SEQ ID NO: 268878 - DNA, 21 bp, Artificial sequence
  SiRNA target sequence
caatctcctcgtcattttgtc

SEQ ID NO: 268879 - DNA, 21 bp, Artificial sequence
  SiRNA target sequence
aatctcctcgtcattttgtcc

SEQ ID NO: 268880 - DNA, 21 bp, Artificial sequence
  SiRNA target sequence
atctcctcgtcattttgtccc

SEQ ID NO: 268881 - DNA, 21 bp, Artificial sequence
  SiRNA target sequence
tctcctcgtcattttgtcccg

SEQ ID NO: 268882 - DNA, 21 bp, Artificial sequence
  SiRNA target sequence
ctcctcgtcattttgtcccga

SEQ ID NO: 268883 - DNA, 21 bp, Artificial sequence
  SiRNA target sequence
tcctcgtcattttgtcccgac

SEQ ID NO: 268884 - DNA, 21 bp, Artificial sequence
  SiRNA target sequence
cctcgtcattttgtcccgact

SEQ ID NO: 268885 - DNA, 21 bp, Artificial sequence
  SiRNA target sequence
ctcgtcattttgtcccgactg

SEQ ID NO: 268886 - DNA, 21 bp, Artificial sequence
  SiRNA target sequence
tcgtcattttgtcccgactgg

SEQ ID NO: 268887 - DNA, 21 bp, Artificial sequence
  SiRNA target sequence
cgtcattttgtcccgactggt

SEQ ID NO: 268888 - DNA, 21 bp, Artificial sequence
  SiRNA target sequence
gtcattttgtcccgactggta

SEQ ID NO: 268889 - DNA, 21 bp, Artificial sequence
  SiRNA target sequence
tcattttgtcccgactggtat

SEQ ID NO: 268890 - DNA, 21 bp, Artificial sequence
  SiRNA target sequence
cattttgtcccgactggtatg

SEQ ID NO: 268891 - DNA, 21 bp, Artificial sequence
  SiRNA target sequence
attttgtcccgactggtatgc

SEQ ID NO: 268892 - DNA, 21 bp, Artificial sequence
  SiRNA target sequence
ttttgtcccgactggtatgca

SEQ ID NO: 268893 - DNA, 21 bp, Artificial sequence
  SiRNA target sequence
tttgtcccgactggtatgcac

SEQ ID NO: 268894 - DNA, 21 bp, Artificial sequence
  SiRNA target sequence
ttgtcccgactggtatgcaca

SEQ ID NO: 268895 - DNA, 21 bp, Artificial sequence
  SiRNA target sequence
tgtcccgactggtatgcacag

SEQ ID NO: 268896 - DNA, 21 bp, Artificial sequence
  SiRNA target sequence
gtcccgactggtatgcacagc

SEQ ID NO: 268897 - DNA, 21 bp, Artificial sequence
  SiRNA target sequence
tcccgactggtatgcacagct

SEQ ID NO: 268898 - DNA, 21 bp, Artificial sequence
  SiRNA target sequence
cccgactggtatgcacagctt

SEQ ID NO: 268899 - DNA, 21 bp, Artificial sequence
  SiRNA target sequence
ccgactggtatgcacagctta

SEQ ID NO: 268900 - DNA, 21 bp, Artificial sequence
  SiRNA target sequence
cgactggtatgcacagcttag

SEQ ID NO: 268901 - DNA, 21 bp, Artificial sequence
  SiRNA target sequence
gactggtatgcacagcttagc

SEQ ID NO: 268902 - DNA, 21 bp, Artificial sequence
  SiRNA target sequence
actggtatgcacagcttagct

SEQ ID NO: 268903 - DNA, 21 bp, Artificial sequence
  SiRNA target sequence
ctggtatgcacagcttagctt

SEQ ID NO: 268904 - DNA, 21 bp, Artificial sequence
  SiRNA target sequence
tggtatgcacagcttagcttt

SEQ ID NO: 268905 - DNA, 21 bp, Artificial sequence
  SiRNA target sequence
ggtatgcacagcttagcttta

SEQ ID NO: 268906 - DNA, 21 bp, Artificial sequence
  SiRNA target sequence
gtatgcacagcttagctttag

SEQ ID NO: 268907 - DNA, 21 bp, Artificial sequence
  SiRNA target sequence
tatgcacagcttagctttagg

SEQ ID NO: 268908 - DNA, 21 bp, Artificial sequence
  SiRNA target sequence
atgcacagcttagctttaggt

SEQ ID NO: 268909 - DNA, 21 bp, Artificial sequence
  SiRNA target sequence
tgcacagcttagctttaggta

SEQ ID NO: 268910 - DNA, 21 bp, Artificial sequence
  SiRNA target sequence
gcacagcttagctttaggtac

SEQ ID NO: 268911 - DNA, 21 bp, Artificial sequence
  SiRNA target sequence
cacagcttagctttaggtact

SEQ ID NO: 268912 - DNA, 21 bp, Artificial sequence
  SiRNA target sequence
acagcttagctttaggtacta

SEQ ID NO: 268913 - DNA, 21 bp, Artificial sequence
  SiRNA target sequence
cagcttagctttaggtactaa

SEQ ID NO: 268914 - DNA, 21 bp, Artificial sequence
  SiRNA target sequence
agcttagctttaggtactaat

SEQ ID NO: 268915 - DNA, 21 bp, Artificial sequence
  SiRNA target sequence
gcttagctttaggtactaatt

SEQ ID NO: 268916 - DNA, 21 bp, Artificial sequence
  SiRNA target sequence
cttagctttaggtactaattt

SEQ ID NO: 268917 - DNA, 21 bp, Artificial sequence
  SiRNA target sequence
ttagctttaggtactaattta

SEQ ID NO: 268918 - DNA, 21 bp, Artificial sequence
  SiRNA target sequence
tagctttaggtactaatttag

SEQ ID NO: 268919 - DNA, 21 bp, Artificial sequence
  SiRNA target sequence
agctttaggtactaatttagt

SEQ ID NO: 268920 - DNA, 21 bp, Artificial sequence
  SiRNA target sequence
gctttaggtactaatttagtt

SEQ ID NO: 268921 - DNA, 21 bp, Artificial sequence
  SiRNA target sequence
ctttaggtactaatttagttg

SEQ ID NO: 268922 - DNA, 21 bp, Artificial sequence
  SiRNA target sequence
tttaggtactaatttagttga

SEQ ID NO: 268923 - DNA, 21 bp, Artificial sequence
  SiRNA target sequence
ttaggtactaatttagttgaa

SEQ ID NO: 268924 - DNA, 21 bp, Artificial sequence
  SiRNA target sequence
taggtactaatttagttgaac

SEQ ID NO: 268925 - DNA, 21 bp, Artificial sequence
  SiRNA target sequence
aggtactaatttagttgaacc

SEQ ID NO: 268926 - DNA, 21 bp, Artificial sequence
  SiRNA target sequence
ggtactaatttagttgaacca

SEQ ID NO: 268927 - DNA, 21 bp, Artificial sequence
  SiRNA target sequence
gtactaatttagttgaaccat

SEQ ID NO: 268928 - DNA, 21 bp, Artificial sequence
  SiRNA target sequence
tactaatttagttgaaccatt

SEQ ID NO: 268929 - DNA, 21 bp, Artificial sequence
  SiRNA target sequence
actaatttagttgaaccatta

SEQ ID NO: 268930 - DNA, 21 bp, Artificial sequence
  SiRNA target sequence
ctaatttagttgaaccattac

SEQ ID NO: 268931 - DNA, 21 bp, Artificial sequence
  SiRNA target sequence
taatttagttgaaccattaca

SEQ ID NO: 268932 - DNA, 21 bp, Artificial sequence
  SiRNA target sequence
aatttagttgaaccattacat

SEQ ID NO: 268933 - DNA, 21 bp, Artificial sequence
  SiRNA target sequence
atttagttgaaccattacatg

SEQ ID NO: 268934 - DNA, 21 bp, Artificial sequence
  SiRNA target sequence
tttagttgaaccattacatgc

SEQ ID NO: 268935 - DNA, 21 bp, Artificial sequence
  SiRNA target sequence
ttagttgaaccattacatgca

SEQ ID NO: 268936 - DNA, 21 bp, Artificial sequence
  SiRNA target sequence
tagttgaaccattacatgcat

SEQ ID NO: 268937 - DNA, 21 bp, Artificial sequence
  SiRNA target sequence
agttgaaccattacatgcatt

SEQ ID NO: 268938 - DNA, 21 bp, Artificial sequence
  SiRNA target sequence
gttgaaccattacatgcatta

SEQ ID NO: 268939 - DNA, 21 bp, Artificial sequence
  SiRNA target sequence
ttgaaccattacatgcattac

SEQ ID NO: 268940 - DNA, 21 bp, Artificial sequence
  SiRNA target sequence
tgaaccattacatgcattacg

SEQ ID NO: 268941 - DNA, 21 bp, Artificial sequence
  SiRNA target sequence
gaaccattacatgcattacgt

SEQ ID NO: 268942 - DNA, 21 bp, Artificial sequence
  SiRNA target sequence
aaccattacatgcattacgtt

SEQ ID NO: 268943 - DNA, 21 bp, Artificial sequence
  SiRNA target sequence
accattacatgcattacgttt

SEQ ID NO: 268944 - DNA, 21 bp, Artificial sequence
  SiRNA target sequence
  misc_feature (21)..(21): n is a, c, g, or t
ccattacatgcattacgtttn

SEQ ID NO: 268945 - DNA, 21 bp, Artificial sequence
  SiRNA target sequence
  misc_feature (20)..(20): n is a, c, g, or t
cattacatgcattacgtttng

SEQ ID NO: 268946 - DNA, 21 bp, Artificial sequence
  SiRNA target sequence
  misc_feature (19)..(19): n is a, c, g, or t
attacatgcattacgtttnga

SEQ ID NO: 268947 - DNA, 21 bp, Artificial sequence
  SiRNA target sequence
  misc_feature (18)..(18): n is a, c, g, or t
ttacatgcattacgtttngat

SEQ ID NO: 268948 - DNA, 21 bp, Artificial sequence
  SiRNA target sequence
  misc_feature (17)..(17): n is a, c, g, or t
tacatgcattacgtttngatg

SEQ ID NO: 268949 - DNA, 21 bp, Artificial sequence
  SiRNA target sequence
  misc_feature (16)..(16): n is a, c, g, or t
acatgcattacgtttngatgc

SEQ ID NO: 268950 - DNA, 21 bp, Artificial sequence
  SiRNA target sequence
  misc_feature (15)..(15): n is a, c, g, or t
catgcattacgtttngatgca

SEQ ID NO: 268951 - DNA, 21 bp, Artificial sequence
  SiRNA target sequence
  misc_feature (14)..(14): n is a, c, g, or t
atgcattacgtttngatgcag

SEQ ID NO: 268952 - DNA, 21 bp, Artificial sequence
  SiRNA target sequence
  misc_feature (13)..(13): n is a, c, g, or t
tgcattacgtttngatgcagc

SEQ ID NO: 268953 - DNA, 21 bp, Artificial sequence
  SiRNA target sequence
  misc_feature (12)..(12): n is a, c, g, or t
gcattacgtttngatgcagcc

SEQ ID NO: 268954 - DNA, 21 bp, Artificial sequence
  SiRNA target sequence
  misc_feature (11)..(11): n is a, c, g, or t
cattacgtttngatgcagccg

SEQ ID NO: 268955 - DNA, 21 bp, Artificial sequence
  SiRNA target sequence
  misc_feature (10)..(10): n is a, c, g, or t
attacgtttngatgcagccgg

SEQ ID NO: 268956 - DNA, 21 bp, Artificial sequence
  SiRNA target sequence
  misc_feature (9)..(9): n is a, c, g, or t
ttacgtttngatgcagccggt

SEQ ID NO: 268957 - DNA, 21 bp, Artificial sequence
  SiRNA target sequence
  misc_feature (8)..(8): n is a, c, g, or t
tacgtttngatgcagccggta

SEQ ID NO: 268958 - DNA, 21 bp, Artificial sequence
  SiRNA target sequence
  misc_feature (7)..(7): n is a, c, g, or t
acgtttngatgcagccggtac

SEQ ID NO: 268959 - DNA, 21 bp, Artificial sequence
  SiRNA target sequence
  misc_feature (6)..(6): n is a, c, g, or t
cgtttngatgcagccggtacg

SEQ ID NO: 268960 - DNA, 21 bp, Artificial sequence
  SiRNA target sequence
  misc_feature (5)..(5): n is a, c, g, or t
gtttngatgcagccggtacga

SEQ ID NO: 268961 - DNA, 21 bp, Artificial sequence
  SiRNA target sequence
  misc_feature (4)..(4): n is a, c, g, or t
tttngatgcagccggtacgac

SEQ ID NO: 268962 - DNA, 21 bp, Artificial sequence
  SiRNA target sequence
  misc_feature (3)..(3): n is a, c, g, or t
ttngatgcagccggtacgaca

SEQ ID NO: 268963 - DNA, 21 bp, Artificial sequence
  SiRNA target sequence
  misc_feature (2)..(2): n is a, c, g, or t
tngatgcagccggtacgacac

SEQ ID NO: 268964 - DNA, 21 bp, Artificial sequence
  SiRNA target sequence
  misc_feature (1)..(1): n is a, c, g, or t
ngatgcagccggtacgacaca

SEQ ID NO: 268965 - DNA, 21 bp, Artificial sequence
  SiRNA target sequence
gatgcagccggtacgacacaa

SEQ ID NO: 268966 - DNA, 21 bp, Artificial sequence
  SiRNA target sequence
atgcagccggtacgacacaac

SEQ ID NO: 268967 - DNA, 21 bp, Artificial sequence
  SiRNA target sequence
tgcagccggtacgacacaaca

SEQ ID NO: 268968 - DNA, 21 bp, Artificial sequence
  SiRNA target sequence
gcagccggtacgacacaacat

SEQ ID NO: 268969 - DNA, 21 bp, Artificial sequence
  SiRNA target sequence
cagccggtacgacacaacatc

SEQ ID NO: 268970 - DNA, 21 bp, Artificial sequence
  SiRNA target sequence
agccggtacgacacaacatcc

SEQ ID NO: 268971 - DNA, 21 bp, Artificial sequence
  SiRNA target sequence
gccggtacgacacaacatcct

SEQ ID NO: 268972 - DNA, 21 bp, Artificial sequence
  SiRNA target sequence
ccggtacgacacaacatcctg

SEQ ID NO: 268973 - DNA, 21 bp, Artificial sequence
  SiRNA target sequence
cggtacgacacaacatcctgt

SEQ ID NO: 268974 - DNA, 21 bp, Artificial sequence
  SiRNA target sequence
ggtacgacacaacatcctgta

SEQ ID NO: 268975 - DNA, 21 bp, Artificial sequence
  SiRNA target sequence
gtacgacacaacatcctgtag

SEQ ID NO: 268976 - DNA, 21 bp, Artificial sequence
  SiRNA target sequence
tacgacacaacatcctgtagg

SEQ ID NO: 268977 - DNA, 21 bp, Artificial sequence
  SiRNA target sequence
acgacacaacatcctgtaggt

SEQ ID NO: 268978 - DNA, 21 bp, Artificial sequence
  SiRNA target sequence
cgacacaacatcctgtaggtt

SEQ ID NO: 268979 - DNA, 21 bp, Artificial sequence
  SiRNA target sequence
gacacaacatcctgtaggttg

SEQ ID NO: 268980 - DNA, 21 bp, Artificial sequence
  SiRNA target sequence
acacaacatcctgtaggttgt

SEQ ID NO: 268981 - DNA, 21 bp, Artificial sequence
  SiRNA target sequence
cacaacatcctgtaggttgtg

SEQ ID NO: 268982 - DNA, 21 bp, Artificial sequence
  SiRNA target sequence
acaacatcctgtaggttgtgc

SEQ ID NO: 268983 - DNA, 21 bp, Artificial sequence
  SiRNA target sequence
caacatcctgtaggttgtgct

SEQ ID NO: 268984 - DNA, 21 bp, Artificial sequence
  SiRNA target sequence
aacatcctgtaggttgtgctc

SEQ ID NO: 268985 - DNA, 21 bp, Artificial sequence
  SiRNA target sequence
acatcctgtaggttgtgctcc

SEQ ID NO: 268986 - DNA, 21 bp, Artificial sequence
  SiRNA target sequence
catcctgtaggttgtgctcct

SEQ ID NO: 268987 - DNA, 21 bp, Artificial sequence
  SiRNA target sequence
atcctgtaggttgtgctcctg

SEQ ID NO: 268988 - DNA, 21 bp, Artificial sequence
  SiRNA target sequence
tcctgtaggttgtgctcctga

SEQ ID NO: 268989 - DNA, 21 bp, Artificial sequence
  SiRNA target sequence
cctgtaggttgtgctcctgat

SEQ ID NO: 268990 - DNA, 21 bp, Artificial sequence
  SiRNA target sequence
ctgtaggttgtgctcctgatg

SEQ ID NO: 268991 - DNA, 21 bp, Artificial sequence
  SiRNA target sequence
tgtaggttgtgctcctgatga

SEQ ID NO: 268992 - DNA, 21 bp, Artificial sequence
  SiRNA target sequence
gtaggttgtgctcctgatgaa

SEQ ID NO: 268993 - DNA, 21 bp, Artificial sequence
  SiRNA target sequence
taggttgtgctcctgatgaag

SEQ ID NO: 268994 - DNA, 21 bp, Artificial sequence
  SiRNA target sequence
aggttgtgctcctgatgaaga

SEQ ID NO: 268995 - DNA, 21 bp, Artificial sequence
  SiRNA target sequence
ggttgtgctcctgatgaagat

SEQ ID NO: 268996 - DNA, 21 bp, Artificial sequence
  SiRNA target sequence
gttgtgctcctgatgaagata

SEQ ID NO: 268997 - DNA, 21 bp, Artificial sequence
  SiRNA target sequence
ttgtgctcctgatgaagatat

SEQ ID NO: 268998 - DNA, 21 bp, Artificial sequence
  SiRNA target sequence
tgtgctcctgatgaagatatg

SEQ ID NO: 268999 - DNA, 21 bp, Artificial sequence
  SiRNA target sequence
gtgctcctgatgaagatatga

SEQ ID NO: 269000 - DNA, 21 bp, Artificial sequence
  SiRNA target sequence
tgctcctgatgaagatatgac

SEQ ID NO: 269001 - DNA, 21 bp, Artificial sequence
  SiRNA target sequence
gctcctgatgaagatatgact

SEQ ID NO: 269002 - DNA, 21 bp, Artificial sequence
  SiRNA target sequence
ctcctgatgaagatatgactg

SEQ ID NO: 269003 - DNA, 21 bp, Artificial sequence
  SiRNA target sequence
tcctgatgaagatatgactgt

SEQ ID NO: 269004 - DNA, 21 bp, Artificial sequence
  SiRNA target sequence
cctgatgaagatatgactgta

SEQ ID NO: 269005 - DNA, 21 bp, Artificial sequence
  SiRNA target sequence
ctgatgaagatatgactgtat

SEQ ID NO: 269006 - DNA, 21 bp, Artificial sequence
  SiRNA target sequence
tgatgaagatatgactgtatc

SEQ ID NO: 269007 - DNA, 21 bp, Artificial sequence
  SiRNA target sequence
gatgaagatatgactgtatcc

SEQ ID NO: 269008 - DNA, 21 bp, Artificial sequence
  SiRNA target sequence
atgaagatatgactgtatcct

SEQ ID NO: 269009 - DNA, 21 bp, Artificial sequence
  SiRNA target sequence
tgaagatatgactgtatcctc

SEQ ID NO: 269010 - DNA, 21 bp, Artificial sequence
  SiRNA target sequence
gaagatatgactgtatcctcc

SEQ ID NO: 269011 - DNA, 21 bp, Artificial sequence
  SiRNA target sequence
aagatatgactgtatcctcca

SEQ ID NO: 269012 - DNA, 21 bp, Artificial sequence
  SiRNA target sequence
agatatgactgtatcctccat

SEQ ID NO: 269013 - DNA, 21 bp, Artificial sequence
  SiRNA target sequence
gatatgactgtatcctccatt

SEQ ID NO: 269014 - DNA, 21 bp, Artificial sequence
  SiRNA target sequence
atatgactgtatcctccattg

SEQ ID NO: 269015 - DNA, 21 bp, Artificial sequence
  SiRNA target sequence
tatgactgtatcctccattgc

SEQ ID NO: 269016 - DNA, 21 bp, Artificial sequence
  SiRNA target sequence
atgactgtatcctccattgca

SEQ ID NO: 269017 - DNA, 21 bp, Artificial sequence
  SiRNA target sequence
tgactgtatcctccattgcat

SEQ ID NO: 269018 - DNA, 21 bp, Artificial sequence
  SiRNA target sequence
gactgtatcctccattgcatc

SEQ ID NO: 269019 - DNA, 21 bp, Artificial sequence
  SiRNA target sequence
actgtatcctccattgcatct

SEQ ID NO: 269020 - DNA, 21 bp, Artificial sequence
  SiRNA target sequence
ctgtatcctccattgcatctc

SEQ ID NO: 269021 - DNA, 21 bp, Artificial sequence
  SiRNA target sequence
tgtatcctccattgcatctcg

SEQ ID NO: 269022 - DNA, 21 bp, Artificial sequence
  SiRNA target sequence
gtatcctccattgcatctcga

SEQ ID NO: 269023 - DNA, 21 bp, Artificial sequence
  SiRNA target sequence
tatcctccattgcatctcgat

SEQ ID NO: 269024 - DNA, 21 bp, Artificial sequence
  SiRNA target sequence
atcctccattgcatctcgata

SEQ ID NO: 269025 - DNA, 21 bp, Artificial sequence
  SiRNA target sequence
tcctccattgcatctcgatat

SEQ ID NO: 269026 - DNA, 21 bp, Artificial sequence
  SiRNA target sequence
cctccattgcatctcgatatg

SEQ ID NO: 269027 - DNA, 21 bp, Artificial sequence
  SiRNA target sequence
ctccattgcatctcgatatgg

SEQ ID NO: 269028 - DNA, 21 bp, Artificial sequence
  SiRNA target sequence
tccattgcatctcgatatgga

SEQ ID NO: 269029 - DNA, 21 bp, Artificial sequence
  SiRNA target sequence
ccattgcatctcgatatggac

SEQ ID NO: 269030 - DNA, 21 bp, Artificial sequence
  SiRNA target sequence
cattgcatctcgatatggact

SEQ ID NO: 269031 - DNA, 21 bp, Artificial sequence
  SiRNA target sequence
attgcatctcgatatggacta

SEQ ID NO: 269032 - DNA, 21 bp, Artificial sequence
  SiRNA target sequence
ttgcatctcgatatggactaa

SEQ ID NO: 269033 - DNA, 21 bp, Artificial sequence
  SiRNA target sequence
tgcatctcgatatggactaat

SEQ ID NO: 269034 - DNA, 21 bp, Artificial sequence
  SiRNA target sequence
gcatctcgatatggactaatt

SEQ ID NO: 269035 - DNA, 21 bp, Artificial sequence
  SiRNA target sequence
catctcgatatggactaatta

SEQ ID NO: 269036 - DNA, 21 bp, Artificial sequence
  SiRNA target sequence
atctcgatatggactaattag

SEQ ID NO: 269037 - DNA, 21 bp, Artificial sequence
  SiRNA target sequence
tctcgatatggactaattaga

SEQ ID NO: 269038 - DNA, 21 bp, Artificial sequence
  SiRNA target sequence
ctcgatatggactaattagac

SEQ ID NO: 269039 - DNA, 21 bp, Artificial sequence
  SiRNA target sequence
tcgatatggactaattagacg

SEQ ID NO: 269040 - DNA, 21 bp, Artificial sequence
  SiRNA target sequence
cgatatggactaattagacgg

SEQ ID NO: 269041 - DNA, 21 bp, Artificial sequence
  SiRNA target sequence
gatatggactaattagacggg

SEQ ID NO: 269042 - DNA, 21 bp, Artificial sequence
  SiRNA target sequence
atatggactaattagacgggt

SEQ ID NO: 269043 - DNA, 21 bp, Artificial sequence
  SiRNA target sequence
tatggactaattagacgggta

SEQ ID NO: 269044 - DNA, 21 bp, Artificial sequence
  SiRNA target sequence
atggactaattagacgggtac

SEQ ID NO: 269045 - DNA, 21 bp, Artificial sequence
  SiRNA target sequence
tggactaattagacgggtaca

SEQ ID NO: 269046 - DNA, 21 bp, Artificial sequence
  SiRNA target sequence
ggactaattagacgggtacaa

SEQ ID NO: 269047 - DNA, 21 bp, Artificial sequence
  SiRNA target sequence
gactaattagacgggtacaat

SEQ ID NO: 269048 - DNA, 21 bp, Artificial sequence
  SiRNA target sequence
actaattagacgggtacaatg

SEQ ID NO: 269049 - DNA, 21 bp, Artificial sequence
  SiRNA target sequence
ctaattagacgggtacaatgg

SEQ ID NO: 269050 - DNA, 21 bp, Artificial sequence
  SiRNA target sequence
taattagacgggtacaatgga

SEQ ID NO: 269051 - DNA, 21 bp, Artificial sequence
  SiRNA target sequence
aattagacgggtacaatggaa

SEQ ID NO: 269052 - DNA, 21 bp, Artificial sequence
  SiRNA target sequence
attagacgggtacaatggaag

SEQ ID NO: 269053 - DNA, 21 bp, Artificial sequence
  SiRNA target sequence
ttagacgggtacaatggaaga

SEQ ID NO: 269054 - DNA, 21 bp, Artificial sequence
  SiRNA target sequence
tagacgggtacaatggaagaa

SEQ ID NO: 269055 - DNA, 21 bp, Artificial sequence
  SiRNA target sequence
agacgggtacaatggaagaaa

SEQ ID NO: 269056 - DNA, 21 bp, Artificial sequence
  SiRNA target sequence
gacgggtacaatggaagaaag

SEQ ID NO: 269057 - DNA, 21 bp, Artificial sequence
  SiRNA target sequence
acgggtacaatggaagaaaga

SEQ ID NO: 269058 - DNA, 21 bp, Artificial sequence
  SiRNA target sequence
cgggtacaatggaagaaagat

SEQ ID NO: 269059 - DNA, 21 bp, Artificial sequence
  SiRNA target sequence
gggtacaatggaagaaagatc

SEQ ID NO: 269060 - DNA, 21 bp, Artificial sequence
  SiRNA target sequence
ggtacaatggaagaaagatca

SEQ ID NO: 269061 - DNA, 21 bp, Artificial sequence
  SiRNA target sequence
gtacaatggaagaaagatcat

SEQ ID NO: 269062 - DNA, 21 bp, Artificial sequence
  SiRNA target sequence
tacaatggaagaaagatcatg

SEQ ID NO: 269063 - DNA, 21 bp, Artificial sequence
  SiRNA target sequence
acaatggaagaaagatcatgc

SEQ ID NO: 269064 - DNA, 21 bp, Artificial sequence
  SiRNA target sequence
caatggaagaaagatcatgct

SEQ ID NO: 269065 - DNA, 21 bp, Artificial sequence
  SiRNA target sequence
aatggaagaaagatcatgcta

SEQ ID NO: 269066 - DNA, 21 bp, Artificial sequence
  SiRNA target sequence
atggaagaaagatcatgctaa

SEQ ID NO: 269067 - DNA, 21 bp, Artificial sequence
  SiRNA target sequence
tggaagaaagatcatgctaaa

SEQ ID NO: 269068 - DNA, 21 bp, Artificial sequence
  SiRNA target sequence
ggaagaaagatcatgctaaag

SEQ ID NO: 269069 - DNA, 21 bp, Artificial sequence
  SiRNA target sequence
gaagaaagatcatgctaaagg

SEQ ID NO: 269070 - DNA, 21 bp, Artificial sequence
  SiRNA target sequence
aagaaagatcatgctaaagga

SEQ ID NO: 269071 - DNA, 21 bp, Artificial sequence
  SiRNA target sequence
agaaagatcatgctaaaggat

SEQ ID NO: 269072 - DNA, 21 bp, Artificial sequence
  SiRNA target sequence
gaaagatcatgctaaaggatc

SEQ ID NO: 269073 - DNA, 21 bp, Artificial sequence
  SiRNA target sequence
aaagatcatgctaaaggatca

SEQ ID NO: 269074 - DNA, 21 bp, Artificial sequence
  SiRNA target sequence
aagatcatgctaaaggatcac

SEQ ID NO: 269075 - DNA, 21 bp, Artificial sequence
  SiRNA target sequence
agatcatgctaaaggatcact

SEQ ID NO: 269076 - DNA, 21 bp, Artificial sequence
  SiRNA target sequence
gatcatgctaaaggatcactt

SEQ ID NO: 269077 - DNA, 21 bp, Artificial sequence
  SiRNA target sequence
atcatgctaaaggatcacttt

SEQ ID NO: 269078 - DNA, 21 bp, Artificial sequence
  SiRNA target sequence
tcatgctaaaggatcactttt

SEQ ID NO: 269079 - DNA, 21 bp, Artificial sequence
  SiRNA target sequence
catgctaaaggatcacttttg

SEQ ID NO: 269080 - DNA, 21 bp, Artificial sequence
  SiRNA target sequence
atgctaaaggatcacttttgt

SEQ ID NO: 269081 - DNA, 21 bp, Artificial sequence
  SiRNA target sequence
tgctaaaggatcacttttgtt

SEQ ID NO: 269082 - DNA, 21 bp, Artificial sequence
  SiRNA target sequence
gctaaaggatcacttttgtta

SEQ ID NO: 269083 - DNA, 21 bp, Artificial sequence
  SiRNA target sequence
ctaaaggatcacttttgttac

SEQ ID NO: 269084 - DNA, 21 bp, Artificial sequence
  SiRNA target sequence
taaaggatcacttttgttaca

SEQ ID NO: 269085 - DNA, 21 bp, Artificial sequence
  SiRNA target sequence
aaaggatcacttttgttacaa

SEQ ID NO: 269086 - DNA, 21 bp, Artificial sequence
  SiRNA target sequence
aaggatcacttttgttacaat

SEQ ID NO: 269087 - DNA, 21 bp, Artificial sequence
  SiRNA target sequence
aggatcacttttgttacaatt

SEQ ID NO: 269088 - DNA, 21 bp, Artificial sequence
  SiRNA target sequence
ggatcacttttgttacaatta

SEQ ID NO: 269089 - DNA, 21 bp, Artificial sequence
  SiRNA target sequence
gatcacttttgttacaattag

SEQ ID NO: 269090 - DNA, 21 bp, Artificial sequence
  SiRNA target sequence
atcacttttgttacaattaga

SEQ ID NO: 269091 - DNA, 21 bp, Artificial sequence
  SiRNA target sequence
tcacttttgttacaattagat

SEQ ID NO: 269092 - DNA, 21 bp, Artificial sequence
  SiRNA target sequence
cacttttgttacaattagatg

SEQ ID NO: 269093 - DNA, 21 bp, Artificial sequence
  SiRNA target sequence
acttttgttacaattagatgc

SEQ ID NO: 269094 - DNA, 21 bp, Artificial sequence
  SiRNA target sequence
cttttgttacaattagatgct

SEQ ID NO: 269095 - DNA, 21 bp, Artificial sequence
  SiRNA target sequence
ttttgttacaattagatgctg

SEQ ID NO: 269096 - DNA, 21 bp, Artificial sequence
  SiRNA target sequence
tttgttacaattagatgctga

SEQ ID NO: 269097 - DNA, 21 bp, Artificial sequence
  SiRNA target sequence
ttgttacaattagatgctgat

SEQ ID NO: 269098 - DNA, 21 bp, Artificial sequence
  SiRNA target sequence
tgttacaattagatgctgatc

SEQ ID NO: 269099 - DNA, 21 bp, Artificial sequence
  SiRNA target sequence
gttacaattagatgctgatcc

SEQ ID NO: 269100 - DNA, 21 bp, Artificial sequence
  SiRNA target sequence
ttacaattagatgctgatcca

SEQ ID NO: 269101 - DNA, 21 bp, Artificial sequence
  SiRNA target sequence
tacaattagatgctgatccat

SEQ ID NO: 269102 - DNA, 21 bp, Artificial sequence
  SiRNA target sequence
acaattagatgctgatccatt

SEQ ID NO: 269103 - DNA, 21 bp, Artificial sequence
  SiRNA target sequence
caattagatgctgatccattt

SEQ ID NO: 269104 - DNA, 21 bp, Artificial sequence
  SiRNA target sequence
aattagatgctgatccatttg

SEQ ID NO: 269105 - DNA, 21 bp, Artificial sequence
  SiRNA target sequence
attagatgctgatccatttgt

SEQ ID NO: 269106 - DNA, 21 bp, Artificial sequence
  SiRNA target sequence
ttagatgctgatccatttgtg

SEQ ID NO: 269107 - DNA, 21 bp, Artificial sequence
  SiRNA target sequence
tagatgctgatccatttgtgg

SEQ ID NO: 269108 - DNA, 21 bp, Artificial sequence
  SiRNA target sequence
agatgctgatccatttgtgga

SEQ ID NO: 269109 - DNA, 21 bp, Artificial sequence
  SiRNA target sequence
gatgctgatccatttgtggag

SEQ ID NO: 269110 - DNA, 21 bp, Artificial sequence
  SiRNA target sequence
atgctgatccatttgtggagc

SEQ ID NO: 269111 - DNA, 21 bp, Artificial sequence
  SiRNA target sequence
tgctgatccatttgtggagca

SEQ ID NO: 269112 - DNA, 21 bp, Artificial sequence
  SiRNA target sequence
gctgatccatttgtggagcaa

SEQ ID NO: 269113 - DNA, 21 bp, Artificial sequence
  SiRNA target sequence
ctgatccatttgtggagcaaa

SEQ ID NO: 269114 - DNA, 21 bp, Artificial sequence
  SiRNA target sequence
tgatccatttgtggagcaaag

SEQ ID NO: 269115 - DNA, 21 bp, Artificial sequence
  SiRNA target sequence
gatccatttgtggagcaaaga

SEQ ID NO: 269116 - DNA, 21 bp, Artificial sequence
  SiRNA target sequence
atccatttgtggagcaaagaa

SEQ ID NO: 269117 - DNA, 21 bp, Artificial sequence
  SiRNA target sequence
tccatttgtggagcaaagaat

SEQ ID NO: 269118 - DNA, 21 bp, Artificial sequence
  SiRNA target sequence
ccatttgtggagcaaagaatt

SEQ ID NO: 269119 - DNA, 21 bp, Artificial sequence
  SiRNA target sequence
catttgtggagcaaagaattg

SEQ ID NO: 269120 - DNA, 21 bp, Artificial sequence
  SiRNA target sequence
atttgtggagcaaagaattga

SEQ ID NO: 269121 - DNA, 21 bp, Artificial sequence
  SiRNA target sequence
tttgtggagcaaagaattgaa

SEQ ID NO: 269122 - DNA, 21 bp, Artificial sequence
  SiRNA target sequence
ttgtggagcaaagaattgaag

SEQ ID NO: 269123 - DNA, 21 bp, Artificial sequence
  SiRNA target sequence
tgtggagcaaagaattgaagg

SEQ ID NO: 269124 - DNA, 21 bp, Artificial sequence
  SiRNA target sequence
gtggagcaaagaattgaaggt

SEQ ID NO: 269125 - DNA, 21 bp, Artificial sequence
  SiRNA target sequence
tggagcaaagaattgaaggta

SEQ ID NO: 269126 - DNA, 21 bp, Artificial sequence
  SiRNA target sequence
ggagcaaagaattgaaggtac

SEQ ID NO: 269127 - DNA, 21 bp, Artificial sequence
  SiRNA target sequence
gagcaaagaattgaaggtacg

SEQ ID NO: 269128 - DNA, 21 bp, Artificial sequence
  SiRNA target sequence
agcaaagaattgaaggtacga

SEQ ID NO: 269129 - DNA, 21 bp, Artificial sequence
  SiRNA target sequence
gcaaagaattgaaggtacgaa

SEQ ID NO: 269130 - DNA, 21 bp, Artificial sequence
  SiRNA target sequence
caaagaattgaaggtacgaat

SEQ ID NO: 269131 - DNA, 21 bp, Artificial sequence
  SiRNA target sequence
aaagaattgaaggtacgaatc

SEQ ID NO: 269132 - DNA, 21 bp, Artificial sequence
  SiRNA target sequence
aagaattgaaggtacgaatcc

SEQ ID NO: 269133 - DNA, 21 bp, Artificial sequence
  SiRNA target sequence
agaattgaaggtacgaatcca

SEQ ID NO: 269134 - DNA, 21 bp, Artificial sequence
  SiRNA target sequence
gaattgaaggtacgaatccaa

SEQ ID NO: 269135 - DNA, 21 bp, Artificial sequence
  SiRNA target sequence
aattgaaggtacgaatccaat

SEQ ID NO: 269136 - DNA, 21 bp, Artificial sequence
  SiRNA target sequence
attgaaggtacgaatccaata

SEQ ID NO: 269137 - DNA, 21 bp, Artificial sequence
  SiRNA target sequence
ttgaaggtacgaatccaatat

SEQ ID NO: 269138 - DNA, 21 bp, Artificial sequence
  SiRNA target sequence
tgaaggtacgaatccaatatc

SEQ ID NO: 269139 - DNA, 21 bp, Artificial sequence
  SiRNA target sequence
  misc_feature (21)..(21): n is a, c, g, or t
gaaggtacgaatccaatatcn

SEQ ID NO: 269140 - DNA, 21 bp, Artificial sequence
  SiRNA target sequence
  misc_feature (20)..(20): n is a, c, g, or t
aaggtacgaatccaatatcnt

SEQ ID NO: 269141 - DNA, 21 bp, Artificial sequence
  SiRNA target sequence
  misc_feature (19)..(19): n is a, c, g, or t
aggtacgaatccaatatcntt

SEQ ID NO: 269142 - DNA, 21 bp, Artificial sequence
  SiRNA target sequence
  misc_feature (18)..(18): n is a, c, g, or t
ggtacgaatccaatatcnttg

SEQ ID NO: 269143 - DNA, 21 bp, Artificial sequence
  SiRNA target sequence
  misc_feature (17)..(17): n is a, c, g, or t
gtacgaatccaatatcnttgt

SEQ ID NO: 269144 - DNA, 21 bp, Artificial sequence
  SiRNA target sequence
  misc_feature (16)..(16): n is a, c, g, or t
tacgaatccaatatcnttgta

SEQ ID NO: 269145 - DNA, 21 bp, Artificial sequence
  SiRNA target sequence
  misc_feature (15)..(15): n is a, c, g, or t
acgaatccaatatcnttgtat

SEQ ID NO: 269146 - DNA, 21 bp, Artificial sequence
  SiRNA target sequence
  misc_feature (14)..(14): n is a, c, g, or t
cgaatccaatatcnttgtatt

SEQ ID NO: 269147 - DNA, 21 bp, Artificial sequence
  SiRNA target sequence
  misc_feature (13)..(13): n is a, c, g, or t
gaatccaatatcnttgtattg

SEQ ID NO: 269148 - DNA, 21 bp, Artificial sequence
  SiRNA target sequence
  misc_feature (12)..(12): n is a, c, g, or t
aatccaatatcnttgtattgg

SEQ ID NO: 269149 - DNA, 21 bp, Artificial sequence
  SiRNA target sequence
  misc_feature (11)..(11): n is a, c, g, or t
atccaatatcnttgtattggt

SEQ ID NO: 269150 - DNA, 21 bp, Artificial sequence
  SiRNA target sequence
  misc_feature (10)..(10): n is a, c, g, or t
tccaatatcnttgtattggtt

SEQ ID NO: 269151 - DNA, 21 bp, Artificial sequence
  SiRNA target sequence
  misc_feature (9)..(9): n is a, c, g, or t
ccaatatcnttgtattggttc

SEQ ID NO: 269152 - DNA, 21 bp, Artificial sequence
  SiRNA target sequence
  misc_feature (8)..(8): n is a, c, g, or t
caatatcnttgtattggttcg

SEQ ID NO: 269153 - DNA, 21 bp, Artificial sequence
  SiRNA target sequence
  misc_feature (7)..(7): n is a, c, g, or t
aatatcnttgtattggttcgc

SEQ ID NO: 269154 - DNA, 21 bp, Artificial sequence
  SiRNA target sequence
  misc_feature (6)..(6): n is a, c, g, or t
atatcnttgtattggttcgca

SEQ ID NO: 269155 - DNA, 21 bp, Artificial sequence
  SiRNA target sequence
  misc_feature (5)..(5): n is a, c, g, or t
tatcnttgtattggttcgcac

SEQ ID NO: 269156 - DNA, 21 bp, Artificial sequence
  SiRNA target sequence
  misc_feature (4)..(4): n is a, c, g, or t
atcnttgtattggttcgcacc

SEQ ID NO: 269157 - DNA, 21 bp, Artificial sequence
  SiRNA target sequence
  misc_feature (3)..(3): n is a, c, g, or t
tcnttgtattggttcgcaccc

SEQ ID NO: 269158 - DNA, 21 bp, Artificial sequence
  SiRNA target sequence
  misc_feature (2)..(2): n is a, c, g, or t
cnttgtattggttcgcacccg

SEQ ID NO: 269159 - DNA, 21 bp, Artificial sequence
  SiRNA target sequence
  misc_feature (1)..(1): n is a, c, g, or t
nttgtattggttcgcacccgt

SEQ ID NO: 269160 - DNA, 21 bp, Artificial sequence
  SiRNA target sequence
ttgtattggttcgcacccgtg

SEQ ID NO: 269161 - DNA, 21 bp, Artificial sequence
  SiRNA target sequence
tgtattggttcgcacccgtgg

SEQ ID NO: 269162 - DNA, 21 bp, Artificial sequence
  SiRNA target sequence
gtattggttcgcacccgtggg

SEQ ID NO: 269163 - DNA, 21 bp, Artificial sequence
  SiRNA target sequence
tattggttcgcacccgtgggt

SEQ ID NO: 269164 - DNA, 21 bp, Artificial sequence
  SiRNA target sequence
attggttcgcacccgtgggtg

SEQ ID NO: 269165 - DNA, 21 bp, Artificial sequence
  SiRNA target sequence
ttggttcgcacccgtgggtgt

SEQ ID NO: 269166 - DNA, 21 bp, Artificial sequence
  SiRNA target sequence
tggttcgcacccgtgggtgta

SEQ ID NO: 269167 - DNA, 21 bp, Artificial sequence
  SiRNA target sequence
ggttcgcacccgtgggtgtag

SEQ ID NO: 269168 - DNA, 21 bp, Artificial sequence
  SiRNA target sequence
gttcgcacccgtgggtgtagt

SEQ ID NO: 269169 - DNA, 21 bp, Artificial sequence
  SiRNA target sequence
ttcgcacccgtgggtgtagta

SEQ ID NO: 269170 - DNA, 21 bp, Artificial sequence
  SiRNA target sequence
tcgcacccgtgggtgtagtat

SEQ ID NO: 269171 - DNA, 21 bp, Artificial sequence
  SiRNA target sequence
cgcacccgtgggtgtagtatc

SEQ ID NO: 269172 - DNA, 21 bp, Artificial sequence
  SiRNA target sequence
gcacccgtgggtgtagtatct

SEQ ID NO: 269173 - DNA, 21 bp, Artificial sequence
  SiRNA target sequence
cacccgtgggtgtagtatcta

SEQ ID NO: 269174 - DNA, 21 bp, Artificial sequence
  SiRNA target sequence
acccgtgggtgtagtatctag

SEQ ID NO: 269175 - DNA, 21 bp, Artificial sequence
  SiRNA target sequence
cccgtgggtgtagtatctagt

SEQ ID NO: 269176 - DNA, 21 bp, Artificial sequence
  SiRNA target sequence
ccgtgggtgtagtatctagta

SEQ ID NO: 269177 - DNA, 21 bp, Artificial sequence
  SiRNA target sequence
cgtgggtgtagtatctagtat

SEQ ID NO: 269178 - DNA, 21 bp, Artificial sequence
  SiRNA target sequence
gtgggtgtagtatctagtatg

SEQ ID NO: 269179 - DNA, 21 bp, Artificial sequence
  SiRNA target sequence
tgggtgtagtatctagtatgt

SEQ ID NO: 269180 - DNA, 21 bp, Artificial sequence
  SiRNA target sequence
gggtgtagtatctagtatgtt

SEQ ID NO: 269181 - DNA, 21 bp, Artificial sequence
  SiRNA target sequence
ggtgtagtatctagtatgttt

SEQ ID NO: 269182 - DNA, 21 bp, Artificial sequence
  SiRNA target sequence
gtgtagtatctagtatgttta

SEQ ID NO: 269183 - DNA, 21 bp, Artificial sequence
  SiRNA target sequence
tgtagtatctagtatgtttat

SEQ ID NO: 269184 - DNA, 21 bp, Artificial sequence
  SiRNA target sequence
gtagtatctagtatgtttatg

SEQ ID NO: 269185 - DNA, 21 bp, Artificial sequence
  SiRNA target sequence
tagtatctagtatgtttatgc

SEQ ID NO: 269186 - DNA, 21 bp, Artificial sequence
  SiRNA target sequence
agtatctagtatgtttatgca

SEQ ID NO: 269187 - DNA, 21 bp, Artificial sequence
  SiRNA target sequence
gtatctagtatgtttatgcaa

SEQ ID NO: 269188 - DNA, 21 bp, Artificial sequence
  SiRNA target sequence
tatctagtatgtttatgcaat

SEQ ID NO: 269189 - DNA, 21 bp, Artificial sequence
  SiRNA target sequence
atctagtatgtttatgcaatg

SEQ ID NO: 269190 - DNA, 21 bp, Artificial sequence
  SiRNA target sequence
tctagtatgtttatgcaatgg

SEQ ID NO: 269191 - DNA, 21 bp, Artificial sequence
  SiRNA target sequence
ctagtatgtttatgcaatggc

SEQ ID NO: 269192 - DNA, 21 bp, Artificial sequence
  SiRNA target sequence
tagtatgtttatgcaatggcg

SEQ ID NO: 269193 - DNA, 21 bp, Artificial sequence
  SiRNA target sequence
agtatgtttatgcaatggcgc

SEQ ID NO: 269194 - DNA, 21 bp, Artificial sequence
  SiRNA target sequence
gtatgtttatgcaatggcgcg

SEQ ID NO: 269195 - DNA, 21 bp, Artificial sequence
  SiRNA target sequence
tatgtttatgcaatggcgcgg

SEQ ID NO: 269196 - DNA, 21 bp, Artificial sequence
  SiRNA target sequence
atgtttatgcaatggcgcggt

SEQ ID NO: 269197 - DNA, 21 bp, Artificial sequence
  SiRNA target sequence
tgtttatgcaatggcgcggtt

SEQ ID NO: 269198 - DNA, 21 bp, Artificial sequence
  SiRNA target sequence
gtttatgcaatggcgcggttc

SEQ ID NO: 269199 - DNA, 21 bp, Artificial sequence
  SiRNA target sequence
tttatgcaatggcgcggttca

SEQ ID NO: 269200 - DNA, 21 bp, Artificial sequence
  SiRNA target sequence
ttatgcaatggcgcggttcat

SEQ ID NO: 269201 - DNA, 21 bp, Artificial sequence
  SiRNA target sequence
tatgcaatggcgcggttcatt

SEQ ID NO: 269202 - DNA, 21 bp, Artificial sequence
  SiRNA target sequence
atgcaatggcgcggttcatta

SEQ ID NO: 269203 - DNA, 21 bp, Artificial sequence
  SiRNA target sequence
tgcaatggcgcggttcattag

SEQ ID NO: 269204 - DNA, 21 bp, Artificial sequence
  SiRNA target sequence
gcaatggcgcggttcattaga

SEQ ID NO: 269205 - DNA, 21 bp, Artificial sequence
  SiRNA target sequence
caatggcgcggttcattagaa

SEQ ID NO: 269206 - DNA, 21 bp, Artificial sequence
  SiRNA target sequence
aatggcgcggttcattagaat

SEQ ID NO: 269207 - DNA, 21 bp, Artificial sequence
  SiRNA target sequence
atggcgcggttcattagaata

SEQ ID NO: 269208 - DNA, 21 bp, Artificial sequence
  SiRNA target sequence
tggcgcggttcattagaatat

SEQ ID NO: 269209 - DNA, 21 bp, Artificial sequence
  SiRNA target sequence
ggcgcggttcattagaatata

SEQ ID NO: 269210 - DNA, 21 bp, Artificial sequence
  SiRNA target sequence
gcgcggttcattagaatatag

SEQ ID NO: 269211 - DNA, 21 bp, Artificial sequence
  SiRNA target sequence
cgcggttcattagaatatagg

SEQ ID NO: 269212 - DNA, 21 bp, Artificial sequence
  SiRNA target sequence
gcggttcattagaatataggt

SEQ ID NO: 269213 - DNA, 21 bp, Artificial sequence
  SiRNA target sequence
cggttcattagaatataggtt

SEQ ID NO: 269214 - DNA, 21 bp, Artificial sequence
  SiRNA target sequence
ggttcattagaatataggttt

SEQ ID NO: 269215 - DNA, 21 bp, Artificial sequence
  SiRNA target sequence
gttcattagaatataggtttg

SEQ ID NO: 269216 - DNA, 21 bp, Artificial sequence
  SiRNA target sequence
ttcattagaatataggtttga

SEQ ID NO: 269217 - DNA, 21 bp, Artificial sequence
  SiRNA target sequence
tcattagaatataggtttgat

SEQ ID NO: 269218 - DNA, 21 bp, Artificial sequence
  SiRNA target sequence
cattagaatataggtttgata

SEQ ID NO: 269219 - DNA, 21 bp, Artificial sequence
  SiRNA target sequence
attagaatataggtttgatat

SEQ ID NO: 269220 - DNA, 21 bp, Artificial sequence
  SiRNA target sequence
ttagaatataggtttgatatt

SEQ ID NO: 269221 - DNA, 21 bp, Artificial sequence
  SiRNA target sequence
tagaatataggtttgatatta

SEQ ID NO: 269222 - DNA, 21 bp, Artificial sequence
  SiRNA target sequence
agaatataggtttgatattat

SEQ ID NO: 269223 - DNA, 21 bp, Artificial sequence
  SiRNA target sequence
gaatataggtttgatattata

SEQ ID NO: 269224 - DNA, 21 bp, Artificial sequence
  SiRNA target sequence
aatataggtttgatattatag

SEQ ID NO: 269225 - DNA, 21 bp, Artificial sequence
  SiRNA target sequence
atataggtttgatattatagc

SEQ ID NO: 269226 - DNA, 21 bp, Artificial sequence
  SiRNA target sequence
tataggtttgatattatagca

SEQ ID NO: 269227 - DNA, 21 bp, Artificial sequence
  SiRNA target sequence
ataggtttgatattatagcat

SEQ ID NO: 269228 - DNA, 21 bp, Artificial sequence
  SiRNA target sequence
taggtttgatattatagcatc

SEQ ID NO: 269229 - DNA, 21 bp, Artificial sequence
  SiRNA target sequence
aggtttgatattatagcatcc

SEQ ID NO: 269230 - DNA, 21 bp, Artificial sequence
  SiRNA target sequence
ggtttgatattatagcatccc

SEQ ID NO: 269231 - DNA, 21 bp, Artificial sequence
  SiRNA target sequence
gtttgatattatagcatccca

SEQ ID NO: 269232 - DNA, 21 bp, Artificial sequence
  SiRNA target sequence
tttgatattatagcatcccaa

SEQ ID NO: 269233 - DNA, 21 bp, Artificial sequence
  SiRNA target sequence
ttgatattatagcatcccaat

SEQ ID NO: 269234 - DNA, 21 bp, Artificial sequence
  SiRNA target sequence
tgatattatagcatcccaatt

SEQ ID NO: 269235 - DNA, 21 bp, Artificial sequence
  SiRNA target sequence
gatattatagcatcccaattt

SEQ ID NO: 269236 - DNA, 21 bp, Artificial sequence
  SiRNA target sequence
atattatagcatcccaatttc

SEQ ID NO: 269237 - DNA, 21 bp, Artificial sequence
  SiRNA target sequence
tattatagcatcccaatttca

SEQ ID NO: 269238 - DNA, 21 bp, Artificial sequence
  SiRNA target sequence
attatagcatcccaatttcat

SEQ ID NO: 269239 - DNA, 21 bp, Artificial sequence
  SiRNA target sequence
ttatagcatcccaatttcata

SEQ ID NO: 269240 - DNA, 21 bp, Artificial sequence
  SiRNA target sequence
tatagcatcccaatttcatac

SEQ ID NO: 269241 - DNA, 21 bp, Artificial sequence
  SiRNA target sequence
atagcatcccaatttcatact

SEQ ID NO: 269242 - DNA, 21 bp, Artificial sequence
  SiRNA target sequence
tagcatcccaatttcatactg

SEQ ID NO: 269243 - DNA, 21 bp, Artificial sequence
  SiRNA target sequence
agcatcccaatttcatactgg

SEQ ID NO: 269244 - DNA, 21 bp, Artificial sequence
  SiRNA target sequence
gcatcccaatttcatactggt

SEQ ID NO: 269245 - DNA, 21 bp, Artificial sequence
  SiRNA target sequence
catcccaatttcatactggta

SEQ ID NO: 269246 - DNA, 21 bp, Artificial sequence
  SiRNA target sequence
atcccaatttcatactggtag

SEQ ID NO: 269247 - DNA, 21 bp, Artificial sequence
  SiRNA target sequence
tcccaatttcatactggtagg

SEQ ID NO: 269248 - DNA, 21 bp, Artificial sequence
  SiRNA target sequence
cccaatttcatactggtaggt

SEQ ID NO: 269249 - DNA, 21 bp, Artificial sequence
  SiRNA target sequence
ccaatttcatactggtaggtt

SEQ ID NO: 269250 - DNA, 21 bp, Artificial sequence
  SiRNA target sequence
caatttcatactggtaggtta

SEQ ID NO: 269251 - DNA, 21 bp, Artificial sequence
  SiRNA target sequence
aatttcatactggtaggttaa

SEQ ID NO: 269252 - DNA, 21 bp, Artificial sequence
  SiRNA target sequence
atttcatactggtaggttaat

SEQ ID NO: 269253 - DNA, 21 bp, Artificial sequence
  SiRNA target sequence
tttcatactggtaggttaatt

SEQ ID NO: 269254 - DNA, 21 bp, Artificial sequence
  SiRNA target sequence
ttcatactggtaggttaattg

SEQ ID NO: 269255 - DNA, 21 bp, Artificial sequence
  SiRNA target sequence
tcatactggtaggttaattgt

SEQ ID NO: 269256 - DNA, 21 bp, Artificial sequence
  SiRNA target sequence
catactggtaggttaattgta

SEQ ID NO: 269257 - DNA, 21 bp, Artificial sequence
  SiRNA target sequence
atactggtaggttaattgtag

SEQ ID NO: 269258 - DNA, 21 bp, Artificial sequence
  SiRNA target sequence
tactggtaggttaattgtagg

SEQ ID NO: 269259 - DNA, 21 bp, Artificial sequence
  SiRNA target sequence
actggtaggttaattgtaggt

SEQ ID NO: 269260 - DNA, 21 bp, Artificial sequence
  SiRNA target sequence
ctggtaggttaattgtaggtt

SEQ ID NO: 269261 - DNA, 21 bp, Artificial sequence
  SiRNA target sequence
tggtaggttaattgtaggtta

SEQ ID NO: 269262 - DNA, 21 bp, Artificial sequence
  SiRNA target sequence
ggtaggttaattgtaggttat

SEQ ID NO: 269263 - DNA, 21 bp, Artificial sequence
  SiRNA target sequence
gtaggttaattgtaggttatg

SEQ ID NO: 269264 - DNA, 21 bp, Artificial sequence
  SiRNA target sequence
taggttaattgtaggttatgt

SEQ ID NO: 269265 - DNA, 21 bp, Artificial sequence
  SiRNA target sequence
aggttaattgtaggttatgtg

SEQ ID NO: 269266 - DNA, 21 bp, Artificial sequence
  SiRNA target sequence
ggttaattgtaggttatgtgc

SEQ ID NO: 269267 - DNA, 21 bp, Artificial sequence
  SiRNA target sequence
gttaattgtaggttatgtgcc

SEQ ID NO: 269268 - DNA, 21 bp, Artificial sequence
  SiRNA target sequence
ttaattgtaggttatgtgccc

SEQ ID NO: 269269 - DNA, 21 bp, Artificial sequence
  SiRNA target sequence
taattgtaggttatgtgcccg

SEQ ID NO: 269270 - DNA, 21 bp, Artificial sequence
  SiRNA target sequence
aattgtaggttatgtgcccgg

SEQ ID NO: 269271 - DNA, 21 bp, Artificial sequence
  SiRNA target sequence
attgtaggttatgtgcccggt

SEQ ID NO: 269272 - DNA, 21 bp, Artificial sequence
  SiRNA target sequence
ttgtaggttatgtgcccggtt

SEQ ID NO: 269273 - DNA, 21 bp, Artificial sequence
  SiRNA target sequence
tgtaggttatgtgcccggttt

SEQ ID NO: 269274 - DNA, 21 bp, Artificial sequence
  SiRNA target sequence
gtaggttatgtgcccggtttg

SEQ ID NO: 269275 - DNA, 21 bp, Artificial sequence
  SiRNA target sequence
taggttatgtgcccggtttga

SEQ ID NO: 269276 - DNA, 21 bp, Artificial sequence
  SiRNA target sequence
aggttatgtgcccggtttgac

SEQ ID NO: 269277 - DNA, 21 bp, Artificial sequence
  SiRNA target sequence
ggttatgtgcccggtttgaca

SEQ ID NO: 269278 - DNA, 21 bp, Artificial sequence
  SiRNA target sequence
gttatgtgcccggtttgacag

SEQ ID NO: 269279 - DNA, 21 bp, Artificial sequence
  SiRNA target sequence
ttatgtgcccggtttgacagc

SEQ ID NO: 269280 - DNA, 21 bp, Artificial sequence
  SiRNA target sequence
tatgtgcccggtttgacagca

SEQ ID NO: 269281 - DNA, 21 bp, Artificial sequence
  SiRNA target sequence
atgtgcccggtttgacagcat

SEQ ID NO: 269282 - DNA, 21 bp, Artificial sequence
  SiRNA target sequence
tgtgcccggtttgacagcatc

SEQ ID NO: 269283 - DNA, 21 bp, Artificial sequence
  SiRNA target sequence
gtgcccggtttgacagcatct

SEQ ID NO: 269284 - DNA, 21 bp, Artificial sequence
  SiRNA target sequence
tgcccggtttgacagcatctt

SEQ ID NO: 269285 - DNA, 21 bp, Artificial sequence
  SiRNA target sequence
gcccggtttgacagcatcttt

SEQ ID NO: 269286 - DNA, 21 bp, Artificial sequence
  SiRNA target sequence
cccggtttgacagcatctttg

SEQ ID NO: 269287 - DNA, 21 bp, Artificial sequence
  SiRNA target sequence
ccggtttgacagcatctttgc

SEQ ID NO: 269288 - DNA, 21 bp, Artificial sequence
  SiRNA target sequence
cggtttgacagcatctttgca

SEQ ID NO: 269289 - DNA, 21 bp, Artificial sequence
  SiRNA target sequence
ggtttgacagcatctttgcaa

SEQ ID NO: 269290 - DNA, 21 bp, Artificial sequence
  SiRNA target sequence
gtttgacagcatctttgcaac

SEQ ID NO: 269291 - DNA, 21 bp, Artificial sequence
  SiRNA target sequence
tttgacagcatctttgcaact

SEQ ID NO: 269292 - DNA, 21 bp, Artificial sequence
  SiRNA target sequence
ttgacagcatctttgcaactt

SEQ ID NO: 269293 - DNA, 21 bp, Artificial sequence
  SiRNA target sequence
tgacagcatctttgcaacttc

SEQ ID NO: 269294 - DNA, 21 bp, Artificial sequence
  SiRNA target sequence
gacagcatctttgcaacttca

SEQ ID NO: 269295 - DNA, 21 bp, Artificial sequence
  SiRNA target sequence
acagcatctttgcaacttcaa

SEQ ID NO: 269296 - DNA, 21 bp, Artificial sequence
  SiRNA target sequence
cagcatctttgcaacttcaaa

SEQ ID NO: 269297 - DNA, 21 bp, Artificial sequence
  SiRNA target sequence
agcatctttgcaacttcaaat

SEQ ID NO: 269298 - DNA, 21 bp, Artificial sequence
  SiRNA target sequence
gcatctttgcaacttcaaatg

SEQ ID NO: 269299 - DNA, 21 bp, Artificial sequence
  SiRNA target sequence
catctttgcaacttcaaatgg

SEQ ID NO: 269300 - DNA, 21 bp, Artificial sequence
  SiRNA target sequence
atctttgcaacttcaaatgga

SEQ ID NO: 269301 - DNA, 21 bp, Artificial sequence
  SiRNA target sequence
tctttgcaacttcaaatggac

SEQ ID NO: 269302 - DNA, 21 bp, Artificial sequence
  SiRNA target sequence
ctttgcaacttcaaatggact

SEQ ID NO: 269303 - DNA, 21 bp, Artificial sequence
  SiRNA target sequence
tttgcaacttcaaatggacta

SEQ ID NO: 269304 - DNA, 21 bp, Artificial sequence
  SiRNA target sequence
ttgcaacttcaaatggactat

SEQ ID NO: 269305 - DNA, 21 bp, Artificial sequence
  SiRNA target sequence
tgcaacttcaaatggactata

SEQ ID NO: 269306 - DNA, 21 bp, Artificial sequence
  SiRNA target sequence
gcaacttcaaatggactatat

SEQ ID NO: 269307 - DNA, 21 bp, Artificial sequence
  SiRNA target sequence
caacttcaaatggactatatg

SEQ ID NO: 269308 - DNA, 21 bp, Artificial sequence
  SiRNA target sequence
aacttcaaatggactatatga

SEQ ID NO: 269309 - DNA, 21 bp, Artificial sequence
  SiRNA target sequence
acttcaaatggactatatgaa

SEQ ID NO: 269310 - DNA, 21 bp, Artificial sequence
  SiRNA target sequence
cttcaaatggactatatgaaa

SEQ ID NO: 269311 - DNA, 21 bp, Artificial sequence
  SiRNA target sequence
ttcaaatggactatatgaaat

SEQ ID NO: 269312 - DNA, 21 bp, Artificial sequence
  SiRNA target sequence
tcaaatggactatatgaaatt

SEQ ID NO: 269313 - DNA, 21 bp, Artificial sequence
  SiRNA target sequence
caaatggactatatgaaattg

SEQ ID NO: 269314 - DNA, 21 bp, Artificial sequence
  SiRNA target sequence
aaatggactatatgaaattga

SEQ ID NO: 269315 - DNA, 21 bp, Artificial sequence
  SiRNA target sequence
aatggactatatgaaattgaa

SEQ ID NO: 269316 - DNA, 21 bp, Artificial sequence
  SiRNA target sequence
atggactatatgaaattgaag

SEQ ID NO: 269317 - DNA, 21 bp, Artificial sequence
  SiRNA target sequence
tggactatatgaaattgaagt

SEQ ID NO: 269318 - DNA, 21 bp, Artificial sequence
  SiRNA target sequence
ggactatatgaaattgaagtc

SEQ ID NO: 269319 - DNA, 21 bp, Artificial sequence
  SiRNA target sequence
gactatatgaaattgaagtca

SEQ ID NO: 269320 - DNA, 21 bp, Artificial sequence
  SiRNA target sequence
actatatgaaattgaagtcat

SEQ ID NO: 269321 - DNA, 21 bp, Artificial sequence
  SiRNA target sequence
ctatatgaaattgaagtcatc

SEQ ID NO: 269322 - DNA, 21 bp, Artificial sequence
  SiRNA target sequence
tatatgaaattgaagtcatcg

SEQ ID NO: 269323 - DNA, 21 bp, Artificial sequence
  SiRNA target sequence
atatgaaattgaagtcatcga

SEQ ID NO: 269324 - DNA, 21 bp, Artificial sequence
  SiRNA target sequence
tatgaaattgaagtcatcgag

SEQ ID NO: 269325 - DNA, 21 bp, Artificial sequence
  SiRNA target sequence
atgaaattgaagtcatcgagt

SEQ ID NO: 269326 - DNA, 21 bp, Artificial sequence
  SiRNA target sequence
tgaaattgaagtcatcgagtt

SEQ ID NO: 269327 - DNA, 21 bp, Artificial sequence
  SiRNA target sequence
gaaattgaagtcatcgagtta

SEQ ID NO: 269328 - DNA, 21 bp, Artificial sequence
  SiRNA target sequence
aaattgaagtcatcgagttat

SEQ ID NO: 269329 - DNA, 21 bp, Artificial sequence
  SiRNA target sequence
aattgaagtcatcgagttatg

SEQ ID NO: 269330 - DNA, 21 bp, Artificial sequence
  SiRNA target sequence
attgaagtcatcgagttatgt

SEQ ID NO: 269331 - DNA, 21 bp, Artificial sequence
  SiRNA target sequence
ttgaagtcatcgagttatgta

SEQ ID NO: 269332 - DNA, 21 bp, Artificial sequence
  SiRNA target sequence
tgaagtcatcgagttatgtag

SEQ ID NO: 269333 - DNA, 21 bp, Artificial sequence
  SiRNA target sequence
gaagtcatcgagttatgtagt

SEQ ID NO: 269334 - DNA, 21 bp, Artificial sequence
  SiRNA target sequence
aagtcatcgagttatgtagta

SEQ ID NO: 269335 - DNA, 21 bp, Artificial sequence
  SiRNA target sequence
agtcatcgagttatgtagtat

SEQ ID NO: 269336 - DNA, 21 bp, Artificial sequence
  SiRNA target sequence
gtcatcgagttatgtagtatt

SEQ ID NO: 269337 - DNA, 21 bp, Artificial sequence
  SiRNA target sequence
tcatcgagttatgtagtattt

SEQ ID NO: 269338 - DNA, 21 bp, Artificial sequence
  SiRNA target sequence
catcgagttatgtagtatttg

SEQ ID NO: 269339 - DNA, 21 bp, Artificial sequence
  SiRNA target sequence
atcgagttatgtagtatttga

SEQ ID NO: 269340 - DNA, 21 bp, Artificial sequence
  SiRNA target sequence
tcgagttatgtagtatttgat

SEQ ID NO: 269341 - DNA, 21 bp, Artificial sequence
  SiRNA target sequence
cgagttatgtagtatttgatt

SEQ ID NO: 269342 - DNA, 21 bp, Artificial sequence
  SiRNA target sequence
gagttatgtagtatttgattt

SEQ ID NO: 269343 - DNA, 21 bp, Artificial sequence
  SiRNA target sequence
agttatgtagtatttgattta

SEQ ID NO: 269344 - DNA, 21 bp, Artificial sequence
  SiRNA target sequence
gttatgtagtatttgatttac

SEQ ID NO: 269345 - DNA, 21 bp, Artificial sequence
  SiRNA target sequence
ttatgtagtatttgatttaca

SEQ ID NO: 269346 - DNA, 21 bp, Artificial sequence
  SiRNA target sequence
tatgtagtatttgatttacaa

SEQ ID NO: 269347 - DNA, 21 bp, Artificial sequence
  SiRNA target sequence
atgtagtatttgatttacaag

SEQ ID NO: 269348 - DNA, 21 bp, Artificial sequence
  SiRNA target sequence
tgtagtatttgatttacaaga

SEQ ID NO: 269349 - DNA, 21 bp, Artificial sequence
  SiRNA target sequence
gtagtatttgatttacaagaa

SEQ ID NO: 269350 - DNA, 21 bp, Artificial sequence
  SiRNA target sequence
tagtatttgatttacaagaaa

SEQ ID NO: 269351 - DNA, 21 bp, Artificial sequence
  SiRNA target sequence
agtatttgatttacaagaaag

SEQ ID NO: 269352 - DNA, 21 bp, Artificial sequence
  SiRNA target sequence
gtatttgatttacaagaaagt

SEQ ID NO: 269353 - DNA, 21 bp, Artificial sequence
  SiRNA target sequence
tatttgatttacaagaaagta

SEQ ID NO: 269354 - DNA, 21 bp, Artificial sequence
  SiRNA target sequence
atttgatttacaagaaagtaa

SEQ ID NO: 269355 - DNA, 21 bp, Artificial sequence
  SiRNA target sequence
tttgatttacaagaaagtaat

SEQ ID NO: 269356 - DNA, 21 bp, Artificial sequence
  SiRNA target sequence
ttgatttacaagaaagtaata

SEQ ID NO: 269357 - DNA, 21 bp, Artificial sequence
  SiRNA target sequence
tgatttacaagaaagtaatag

SEQ ID NO: 269358 - DNA, 21 bp, Artificial sequence
  SiRNA target sequence
gatttacaagaaagtaatagc

SEQ ID NO: 269359 - DNA, 21 bp, Artificial sequence
  SiRNA target sequence
atttacaagaaagtaatagct

SEQ ID NO: 269360 - DNA, 21 bp, Artificial sequence
  SiRNA target sequence
tttacaagaaagtaatagctt

SEQ ID NO: 269361 - DNA, 21 bp, Artificial sequence
  SiRNA target sequence
ttacaagaaagtaatagcttc

SEQ ID NO: 269362 - DNA, 21 bp, Artificial sequence
  SiRNA target sequence
tacaagaaagtaatagcttca

SEQ ID NO: 269363 - DNA, 21 bp, Artificial sequence
  SiRNA target sequence
acaagaaagtaatagcttcac

SEQ ID NO: 269364 - DNA, 21 bp, Artificial sequence
  SiRNA target sequence
caagaaagtaatagcttcact

SEQ ID NO: 269365 - DNA, 21 bp, Artificial sequence
  SiRNA target sequence
aagaaagtaatagcttcactt

SEQ ID NO: 269366 - DNA, 21 bp, Artificial sequence
  SiRNA target sequence
agaaagtaatagcttcacttt

SEQ ID NO: 269367 - DNA, 21 bp, Artificial sequence
  SiRNA target sequence
gaaagtaatagcttcactttt

SEQ ID NO: 269368 - DNA, 21 bp, Artificial sequence
  SiRNA target sequence
aaagtaatagcttcacttttg

SEQ ID NO: 269369 - DNA, 21 bp, Artificial sequence
  SiRNA target sequence
aagtaatagcttcacttttga

SEQ ID NO: 269370 - DNA, 21 bp, Artificial sequence
  SiRNA target sequence
agtaatagcttcacttttgag

SEQ ID NO: 269371 - DNA, 21 bp, Artificial sequence
  SiRNA target sequence
gtaatagcttcacttttgagg

SEQ ID NO: 269372 - DNA, 21 bp, Artificial sequence
  SiRNA target sequence
taatagcttcacttttgaggt

SEQ ID NO: 269373 - DNA, 21 bp, Artificial sequence
  SiRNA target sequence
aatagcttcacttttgaggtg

SEQ ID NO: 269374 - DNA, 21 bp, Artificial sequence
  SiRNA target sequence
atagcttcacttttgaggtgc

SEQ ID NO: 269375 - DNA, 21 bp, Artificial sequence
  SiRNA target sequence
tagcttcacttttgaggtgcc

SEQ ID NO: 269376 - DNA, 21 bp, Artificial sequence
  SiRNA target sequence
agcttcacttttgaggtgcca

SEQ ID NO: 269377 - DNA, 21 bp, Artificial sequence
  SiRNA target sequence
gcttcacttttgaggtgccat

SEQ ID NO: 269378 - DNA, 21 bp, Artificial sequence
  SiRNA target sequence
cttcacttttgaggtgccata

SEQ ID NO: 269379 - DNA, 21 bp, Artificial sequence
  SiRNA target sequence
  misc_feature (21)..(21): n is a, c, g, or t
ttcacttttgaggtgccatan

SEQ ID NO: 269380 - DNA, 21 bp, Artificial sequence
  SiRNA target sequence
  misc_feature (20)..(20): n is a, c, g, or t
tcacttttgaggtgccatang

SEQ ID NO: 269381 - DNA, 21 bp, Artificial sequence
  SiRNA target sequence
  misc_feature (19)..(19): n is a, c, g, or t
cacttttgaggtgccatangt

SEQ ID NO: 269382 - DNA, 21 bp, Artificial sequence
  SiRNA target sequence
  misc_feature (18)..(18): n is a, c, g, or t
acttttgaggtgccatangtt

SEQ ID NO: 269383 - DNA, 21 bp, Artificial sequence
  SiRNA target sequence
  misc_feature (17)..(17): n is a, c, g, or t
cttttgaggtgccatangttt

SEQ ID NO: 269384 - DNA, 21 bp, Artificial sequence
  SiRNA target sequence
  misc_feature (16)..(16): n is a, c, g, or t
ttttgaggtgccatangtttc

SEQ ID NO: 269385 - DNA, 21 bp, Artificial sequence
  SiRNA target sequence
  misc_feature (15)..(15): n is a, c, g, or t
tttgaggtgccatangtttca

SEQ ID NO: 269386 - DNA, 21 bp, Artificial sequence
  SiRNA target sequence
  misc_feature (14)..(14): n is a, c, g, or t
ttgaggtgccatangtttcat

SEQ ID NO: 269387 - DNA, 21 bp, Artificial sequence
  SiRNA target sequence
  misc_feature (13)..(13): n is a, c, g, or t
tgaggtgccatangtttcata

SEQ ID NO: 269388 - DNA, 21 bp, Artificial sequence
  SiRNA target sequence
  misc_feature (12)..(12): n is a, c, g, or t
gaggtgccatangtttcatat

SEQ ID NO: 269389 - DNA, 21 bp, Artificial sequence
  SiRNA target sequence
  misc_feature (11)..(11): n is a, c, g, or t
aggtgccatangtttcatata

SEQ ID NO: 269390 - DNA, 21 bp, Artificial sequence
  SiRNA target sequence
  misc_feature (10)..(10): n is a, c, g, or t
ggtgccatangtttcatatag

SEQ ID NO: 269391 - DNA, 21 bp, Artificial sequence
  SiRNA target sequence
  misc_feature (9)..(9): n is a, c, g, or t
gtgccatangtttcatataga

SEQ ID NO: 269392 - DNA, 21 bp, Artificial sequence
  SiRNA target sequence
  misc_feature (8)..(8): n is a, c, g, or t
tgccatangtttcatatagac

SEQ ID NO: 269393 - DNA, 21 bp, Artificial sequence
  SiRNA target sequence
  misc_feature (7)..(7): n is a, c, g, or t
gccatangtttcatatagacc

SEQ ID NO: 269394 - DNA, 21 bp, Artificial sequence
  SiRNA target sequence
  misc_feature (6)..(6): n is a, c, g, or t
ccatangtttcatatagacca

SEQ ID NO: 269395 - DNA, 21 bp, Artificial sequence
  SiRNA target sequence
  misc_feature (5)..(5): n is a, c, g, or t
catangtttcatatagaccat

SEQ ID NO: 269396 - DNA, 21 bp, Artificial sequence
  SiRNA target sequence
  misc_feature (4)..(4): n is a, c, g, or t
atangtttcatatagaccatg

SEQ ID NO: 269397 - DNA, 21 bp, Artificial sequence
  SiRNA target sequence
  misc_feature (3)..(3): n is a, c, g, or t
tangtttcatatagaccatgg

SEQ ID NO: 269398 - DNA, 21 bp, Artificial sequence
  SiRNA target sequence
  misc_feature (2)..(2): n is a, c, g, or t
angtttcatatagaccatggt

SEQ ID NO: 269399 - DNA, 21 bp, Artificial sequence
  SiRNA target sequence
  misc_feature (1)..(1): n is a, c, g, or t
ngtttcatatagaccatggtg

SEQ ID NO: 269400 - DNA, 21 bp, Artificial sequence
  SiRNA target sequence
gtttcatatagaccatggtgg

SEQ ID NO: 269401 - DNA, 21 bp, Artificial sequence
  SiRNA target sequence
tttcatatagaccatggtggg

SEQ ID NO: 269402 - DNA, 21 bp, Artificial sequence
  SiRNA target sequence
ttcatatagaccatggtgggt

SEQ ID NO: 269403 - DNA, 21 bp, Artificial sequence
  SiRNA target sequence
tcatatagaccatggtgggtg

SEQ ID NO: 269404 - DNA, 21 bp, Artificial sequence
  SiRNA target sequence
catatagaccatggtgggtgc

SEQ ID NO: 269405 - DNA, 21 bp, Artificial sequence
  SiRNA target sequence
atatagaccatggtgggtgcg

SEQ ID NO: 269406 - DNA, 21 bp, Artificial sequence
  SiRNA target sequence
tatagaccatggtgggtgcgt

SEQ ID NO: 269407 - DNA, 21 bp, Artificial sequence
  SiRNA target sequence
atagaccatggtgggtgcgta

SEQ ID NO: 269408 - DNA, 21 bp, Artificial sequence
  SiRNA target sequence
tagaccatggtgggtgcgtaa

SEQ ID NO: 269409 - DNA, 21 bp, Artificial sequence
  SiRNA target sequence
agaccatggtgggtgcgtaaa

SEQ ID NO: 269410 - DNA, 21 bp, Artificial sequence
  SiRNA target sequence
gaccatggtgggtgcgtaaat

SEQ ID NO: 269411 - DNA, 21 bp, Artificial sequence
  SiRNA target sequence
accatggtgggtgcgtaaata

SEQ ID NO: 269412 - DNA, 21 bp, Artificial sequence
  SiRNA target sequence
ccatggtgggtgcgtaaatat

SEQ ID NO: 269413 - DNA, 21 bp, Artificial sequence
  SiRNA target sequence
catggtgggtgcgtaaatatg

SEQ ID NO: 269414 - DNA, 21 bp, Artificial sequence
  SiRNA target sequence
atggtgggtgcgtaaatatgg

SEQ ID NO: 269415 - DNA, 21 bp, Artificial sequence
  SiRNA target sequence
tggtgggtgcgtaaatatggt

SEQ ID NO: 269416 - DNA, 21 bp, Artificial sequence
  SiRNA target sequence
ggtgggtgcgtaaatatggtg

SEQ ID NO: 269417 - DNA, 21 bp, Artificial sequence
  SiRNA target sequence
gtgggtgcgtaaatatggtgg

SEQ ID NO: 269418 - DNA, 21 bp, Artificial sequence
  SiRNA target sequence
  misc_feature (21)..(21): n is a, c, g, or t
tgggtgcgtaaatatggtggn

SEQ ID NO: 269419 - DNA, 21 bp, Artificial sequence
  SiRNA target sequence
  misc_feature (20)..(20): n is a, c, g, or t
gggtgcgtaaatatggtggna

SEQ ID NO: 269420 - DNA, 21 bp, Artificial sequence
  SiRNA target sequence
  misc_feature (19)..(19): n is a, c, g, or t
ggtgcgtaaatatggtggnaa

SEQ ID NO: 269421 - DNA, 21 bp, Artificial sequence
  SiRNA target sequence
  misc_feature (18)..(18): n is a, c, g, or t
gtgcgtaaatatggtggnaat

SEQ ID NO: 269422 - DNA, 21 bp, Artificial sequence
  SiRNA target sequence
  misc_feature (17)..(17): n is a, c, g, or t
tgcgtaaatatggtggnaatt

SEQ ID NO: 269423 - DNA, 21 bp, Artificial sequence
  SiRNA target sequence
  misc_feature (16)..(16): n is a, c, g, or t
gcgtaaatatggtggnaatta

SEQ ID NO: 269424 - DNA, 21 bp, Artificial sequence
  SiRNA target sequence
  misc_feature (15)..(15): n is a, c, g, or t
cgtaaatatggtggnaattat

SEQ ID NO: 269425 - DNA, 21 bp, Artificial sequence
  SiRNA target sequence
  misc_feature (14)..(14): n is a, c, g, or t
gtaaatatggtggnaattatt

SEQ ID NO: 269426 - DNA, 21 bp, Artificial sequence
  SiRNA target sequence
  misc_feature (13)..(13): n is a, c, g, or t
taaatatggtggnaattattt

SEQ ID NO: 269427 - DNA, 21 bp, Artificial sequence
  SiRNA target sequence
  misc_feature (12)..(12): n is a, c, g, or t
aaatatggtggnaattattta

SEQ ID NO: 269428 - DNA, 21 bp, Artificial sequence
  SiRNA target sequence
  misc_feature (11)..(11): n is a, c, g, or t
aatatggtggnaattatttac

SEQ ID NO: 269429 - DNA, 21 bp, Artificial sequence
  SiRNA target sequence
  misc_feature (10)..(10): n is a, c, g, or t
atatggtggnaattatttacc

SEQ ID NO: 269430 - DNA, 21 bp, Artificial sequence
  SiRNA target sequence
  misc_feature (9)..(9): n is a, c, g, or t
tatggtggnaattatttaccc

SEQ ID NO: 269431 - DNA, 21 bp, Artificial sequence
  SiRNA target sequence
  misc_feature (8)..(8): n is a, c, g, or t
atggtggnaattatttaccct

SEQ ID NO: 269432 - DNA, 21 bp, Artificial sequence
  SiRNA target sequence
  misc_feature (7)..(7): n is a, c, g, or t
tggtggnaattatttaccctc

SEQ ID NO: 269433 - DNA, 21 bp, Artificial sequence
  SiRNA target sequence
  misc_feature (6)..(6): n is a, c, g, or t
ggtggnaattatttaccctcg

SEQ ID NO: 269434 - DNA, 21 bp, Artificial sequence
  SiRNA target sequence
  misc_feature (5)..(5): n is a, c, g, or t
gtggnaattatttaccctcgt

SEQ ID NO: 269435 - DNA, 21 bp, Artificial sequence
  SiRNA target sequence
  misc_feature (4)..(4): n is a, c, g, or t
tggnaattatttaccctcgtc

SEQ ID NO: 269436 - DNA, 21 bp, Artificial sequence
  SiRNA target sequence
  misc_feature (3)..(3): n is a, c, g, or t
ggnaattatttaccctcgtca

SEQ ID NO: 269437 - DNA, 21 bp, Artificial sequence
  SiRNA target sequence
  misc_feature (2)..(2): n is a, c, g, or t
gnaattatttaccctcgtcaa

SEQ ID NO: 269438 - DNA, 21 bp, Artificial sequence
  SiRNA target sequence
  misc_feature (1)..(1): n is a, c, g, or t
naattatttaccctcgtcaac

SEQ ID NO: 269439 - DNA, 21 bp, Artificial sequence
  SiRNA target sequence
aattatttaccctcgtcaact

SEQ ID NO: 269440 - DNA, 21 bp, Artificial sequence
  SiRNA target sequence
attatttaccctcgtcaactg

SEQ ID NO: 269441 - DNA, 21 bp, Artificial sequence
  SiRNA target sequence
ttatttaccctcgtcaactga

SEQ ID NO: 269442 - DNA, 21 bp, Artificial sequence
  SiRNA target sequence
tatttaccctcgtcaactgac

SEQ ID NO: 269443 - DNA, 21 bp, Artificial sequence
  SiRNA target sequence
atttaccctcgtcaactgacg

SEQ ID NO: 269444 - DNA, 21 bp, Artificial sequence
  SiRNA target sequence
tttaccctcgtcaactgacgc

SEQ ID NO: 269445 - DNA, 21 bp, Artificial sequence
  SiRNA target sequence
ttaccctcgtcaactgacgct

SEQ ID NO: 269446 - DNA, 21 bp, Artificial sequence
  SiRNA target sequence
taccctcgtcaactgacgctc

SEQ ID NO: 269447 - DNA, 21 bp, Artificial sequence
  SiRNA target sequence
accctcgtcaactgacgctcc

SEQ ID NO: 269448 - DNA, 21 bp, Artificial sequence
  SiRNA target sequence
ccctcgtcaactgacgctcct

SEQ ID NO: 269449 - DNA, 21 bp, Artificial sequence
  SiRNA target sequence
cctcgtcaactgacgctccta

SEQ ID NO: 269450 - DNA, 21 bp, Artificial sequence
  SiRNA target sequence
ctcgtcaactgacgctcctag

SEQ ID NO: 269451 - DNA, 21 bp, Artificial sequence
  SiRNA target sequence
tcgtcaactgacgctcctagt

SEQ ID NO: 269452 - DNA, 21 bp, Artificial sequence
  SiRNA target sequence
cgtcaactgacgctcctagta

SEQ ID NO: 269453 - DNA, 21 bp, Artificial sequence
  SiRNA target sequence
gtcaactgacgctcctagtac

SEQ ID NO: 269454 - DNA, 21 bp, Artificial sequence
  SiRNA target sequence
tcaactgacgctcctagtaca

SEQ ID NO: 269455 - DNA, 21 bp, Artificial sequence
  SiRNA target sequence
caactgacgctcctagtacat

SEQ ID NO: 269456 - DNA, 21 bp, Artificial sequence
  SiRNA target sequence
aactgacgctcctagtacatt

SEQ ID NO: 269457 - DNA, 21 bp, Artificial sequence
  SiRNA target sequence
actgacgctcctagtacatta

SEQ ID NO: 269458 - DNA, 21 bp, Artificial sequence
  SiRNA target sequence
ctgacgctcctagtacattat

SEQ ID NO: 269459 - DNA, 21 bp, Artificial sequence
  SiRNA target sequence
tgacgctcctagtacattatt

SEQ ID NO: 269460 - DNA, 21 bp, Artificial sequence
  SiRNA target sequence
gacgctcctagtacattattt

SEQ ID NO: 269461 - DNA, 21 bp, Artificial sequence
  SiRNA target sequence
acgctcctagtacattattta

SEQ ID NO: 269462 - DNA, 21 bp, Artificial sequence
  SiRNA target sequence
cgctcctagtacattatttat

SEQ ID NO: 269463 - DNA, 21 bp, Artificial sequence
  SiRNA target sequence
gctcctagtacattatttatg

SEQ ID NO: 269464 - DNA, 21 bp, Artificial sequence
  SiRNA target sequence
ctcctagtacattatttatgt

SEQ ID NO: 269465 - DNA, 21 bp, Artificial sequence
  SiRNA target sequence
tcctagtacattatttatgta

SEQ ID NO: 269466 - DNA, 21 bp, Artificial sequence
  SiRNA target sequence
cctagtacattatttatgtat

SEQ ID NO: 269467 - DNA, 21 bp, Artificial sequence
  SiRNA target sequence
ctagtacattatttatgtatg

SEQ ID NO: 269468 - DNA, 21 bp, Artificial sequence
  SiRNA target sequence
tagtacattatttatgtatgt

SEQ ID NO: 269469 - DNA, 21 bp, Artificial sequence
  SiRNA target sequence
  misc_feature (21)..(21): n is a, c, g, or t
agtacattatttatgtatgtn

SEQ ID NO: 269470 - DNA, 21 bp, Artificial sequence
  SiRNA target sequence
  misc_feature (20)..(20): n is a, c, g, or t
gtacattatttatgtatgtnc

SEQ ID NO: 269471 - DNA, 21 bp, Artificial sequence
  SiRNA target sequence
  misc_feature (19)..(19): n is a, c, g, or t
tacattatttatgtatgtnca

SEQ ID NO: 269472 - DNA, 21 bp, Artificial sequence
  SiRNA target sequence
  misc_feature (18)..(18): n is a, c, g, or t
acattatttatgtatgtncag

SEQ ID NO: 269473 - DNA, 21 bp, Artificial sequence
  SiRNA target sequence
  misc_feature (17)..(17): n is a, c, g, or t
cattatttatgtatgtncagg

SEQ ID NO: 269474 - DNA, 21 bp, Artificial sequence
  SiRNA target sequence
  misc_feature (16)..(16): n is a, c, g, or t
attatttatgtatgtncaggt

SEQ ID NO: 269475 - DNA, 21 bp, Artificial sequence
  SiRNA target sequence
  misc_feature (15)..(15): n is a, c, g, or t
  misc_feature (21)..(21): n is a, c, g, or t
ttatttatgtatgtncaggtn

SEQ ID NO: 269476 - DNA, 21 bp, Artificial sequence
  SiRNA target sequence
  misc_feature (14)..(14): n is a, c, g, or t
  misc_feature (20)..(20): n is a, c, g, or t
tatttatgtatgtncaggtnc

SEQ ID NO: 269477 - DNA, 21 bp, Artificial sequence
  SiRNA target sequence
  misc_feature (13)..(13): n is a, c, g, or t
  misc_feature (19)..(19): n is a, c, g, or t
atttatgtatgtncaggtncc

SEQ ID NO: 269478 - DNA, 21 bp, Artificial sequence
  SiRNA target sequence
  misc_feature (12)..(12): n is a, c, g, or t
  misc_feature (18)..(18): n is a, c, g, or t
  misc_feature (21)..(21): n is a, c, g, or t
tttatgtatgtncaggtnccn

SEQ ID NO: 269479 - DNA, 21 bp, Artificial sequence
  SiRNA target sequence
  misc_feature (11)..(11): n is a, c, g, or t
  misc_feature (17)..(17): n is a, c, g, or t
  misc_feature (20)..(20): n is a, c, g, or t
ttatgtatgtncaggtnccnt

SEQ ID NO: 269480 - DNA, 21 bp, Artificial sequence
  SiRNA target sequence
  misc_feature (10)..(10): n is a, c, g, or t
  misc_feature (16)..(16): n is a, c, g, or t
  misc_feature (19)..(19): n is a, c, g, or t
tatgtatgtncaggtnccntt

SEQ ID NO: 269481 - DNA, 21 bp, Artificial sequence
  SiRNA target sequence
  misc_feature (9)..(9): n is a, c, g, or t
  misc_feature (15)..(15): n is a, c, g, or t
  misc_feature (18)..(18): n is a, c, g, or t
atgtatgtncaggtnccnttg

SEQ ID NO: 269482 - DNA, 21 bp, Artificial sequence
  SiRNA target sequence
  misc_feature (8)..(8): n is a, c, g, or t
  misc_feature (14)..(14): n is a, c, g, or t
  misc_feature (17)..(17): n is a, c, g, or t
tgtatgtncaggtnccnttga

SEQ ID NO: 269483 - DNA, 21 bp, Artificial sequence
  SiRNA target sequence
  misc_feature (7)..(7): n is a, c, g, or t
  misc_feature (13)..(13): n is a, c, g, or t
  misc_feature (16)..(16): n is a, c, g, or t
gtatgtncaggtnccnttgat

SEQ ID NO: 269484 - DNA, 21 bp, Artificial sequence
  SiRNA target sequence
  misc_feature (6)..(6): n is a, c, g, or t
  misc_feature (12)..(12): n is a, c, g, or t
  misc_feature (15)..(15): n is a, c, g, or t
tatgtncaggtnccnttgata

SEQ ID NO: 269485 - DNA, 21 bp, Artificial sequence
  SiRNA target sequence
  misc_feature (5)..(5): n is a, c, g, or t
  misc_feature (11)..(11): n is a, c, g, or t
  misc_feature (14)..(14): n is a, c, g, or t
atgtncaggtnccnttgatac

SEQ ID NO: 269486 - DNA, 21 bp, Artificial sequence
  SiRNA target sequence
  misc_feature (4)..(4): n is a, c, g, or t
  misc_feature (10)..(10): n is a, c, g, or t
  misc_feature (13)..(13): n is a, c, g, or t
tgtncaggtnccnttgatacc

SEQ ID NO: 269487 - DNA, 21 bp, Artificial sequence
  SiRNA target sequence
  misc_feature (3)..(3): n is a, c, g, or t
  misc_feature (9)..(9): n is a, c, g, or t
  misc_feature (12)..(12): n is a, c, g, or t
gtncaggtnccnttgatacct

SEQ ID NO: 269488 - DNA, 21 bp, Artificial sequence
  SiRNA target sequence
  misc_feature (2)..(2): n is a, c, g, or t
  misc_feature (8)..(8): n is a, c, g, or t
  misc_feature (11)..(11): n is a, c, g, or t
tncaggtnccnttgataccta

SEQ ID NO: 269489 - DNA, 21 bp, Artificial sequence
  SiRNA target sequence
  misc_feature (1)..(1): n is a, c, g, or t
  misc_feature (7)..(7): n is a, c, g, or t
  misc_feature (10)..(10): n is a, c, g, or t
ncaggtnccnttgatacctat

SEQ ID NO: 269490 - DNA, 21 bp, Artificial sequence
  SiRNA target sequence
  misc_feature (6)..(6): n is a, c, g, or t
  misc_feature (9)..(9): n is a, c, g, or t
caggtnccnttgatacctatg

SEQ ID NO: 269491 - DNA, 21 bp, Artificial sequence
  SiRNA target sequence
  misc_feature (5)..(5): n is a, c, g, or t
  misc_feature (8)..(8): n is a, c, g, or t
aggtnccnttgatacctatgg

SEQ ID NO: 269492 - DNA, 21 bp, Artificial sequence
  SiRNA target sequence
  misc_feature (4)..(4): n is a, c, g, or t
  misc_feature (7)..(7): n is a, c, g, or t
ggtnccnttgatacctatgga

SEQ ID NO: 269493 - DNA, 21 bp, Artificial sequence
  SiRNA target sequence
  misc_feature (3)..(3): n is a, c, g, or t
  misc_feature (6)..(6): n is a, c, g, or t
gtnccnttgatacctatggaa

SEQ ID NO: 269494 - DNA, 21 bp, Artificial sequence
  SiRNA target sequence
  misc_feature (2)..(2): n is a, c, g, or t
  misc_feature (5)..(5): n is a, c, g, or t
tnccnttgatacctatggaag

SEQ ID NO: 269495 - DNA, 21 bp, Artificial sequence
  SiRNA target sequence
  misc_feature (1)..(1): n is a, c, g, or t
  misc_feature (4)..(4): n is a, c, g, or t
nccnttgatacctatggaagc

SEQ ID NO: 269496 - DNA, 21 bp, Artificial sequence
  SiRNA target sequence
  misc_feature (3)..(3): n is a, c, g, or t
ccnttgatacctatggaagct

SEQ ID NO: 269497 - DNA, 21 bp, Artificial sequence
  SiRNA target sequence
  misc_feature (2)..(2): n is a, c, g, or t
cnttgatacctatggaagctg

SEQ ID NO: 269498 - DNA, 21 bp, Artificial sequence
  SiRNA target sequence
  misc_feature (1)..(1): n is a, c, g, or t
nttgatacctatggaagctgt

SEQ ID NO: 269499 - DNA, 21 bp, Artificial sequence
  SiRNA target sequence
ttgatacctatggaagctgtt

SEQ ID NO: 269500 - DNA, 21 bp, Artificial sequence
  SiRNA target sequence
tgatacctatggaagctgttt

SEQ ID NO: 269501 - DNA, 21 bp, Artificial sequence
  SiRNA target sequence
gatacctatggaagctgtttc

SEQ ID NO: 269502 - DNA, 21 bp, Artificial sequence
  SiRNA target sequence
atacctatggaagctgtttca

SEQ ID NO: 269503 - DNA, 21 bp, Artificial sequence
  SiRNA target sequence
tacctatggaagctgtttcag

SEQ ID NO: 269504 - DNA, 21 bp, Artificial sequence
  SiRNA target sequence
acctatggaagctgtttcaga

SEQ ID NO: 269505 - DNA, 21 bp, Artificial sequence
  SiRNA target sequence
cctatggaagctgtttcagat

SEQ ID NO: 269506 - DNA, 21 bp, Artificial sequence
  SiRNA target sequence
ctatggaagctgtttcagata

SEQ ID NO: 269507 - DNA, 21 bp, Artificial sequence
  SiRNA target sequence
tatggaagctgtttcagatac

SEQ ID NO: 269508 - DNA, 21 bp, Artificial sequence
  SiRNA target sequence
atggaagctgtttcagatact

SEQ ID NO: 269509 - DNA, 21 bp, Artificial sequence
  SiRNA target sequence
tggaagctgtttcagatacta

SEQ ID NO: 269510 - DNA, 21 bp, Artificial sequence
  SiRNA target sequence
ggaagctgtttcagatactat

SEQ ID NO: 269511 - DNA, 21 bp, Artificial sequence
  SiRNA target sequence
gaagctgtttcagatactatt

SEQ ID NO: 269512 - DNA, 21 bp, Artificial sequence
  SiRNA target sequence
aagctgtttcagatactattg

SEQ ID NO: 269513 - DNA, 21 bp, Artificial sequence
  SiRNA target sequence
agctgtttcagatactattga

SEQ ID NO: 269514 - DNA, 21 bp, Artificial sequence
  SiRNA target sequence
gctgtttcagatactattgat

SEQ ID NO: 269515 - DNA, 21 bp, Artificial sequence
  SiRNA target sequence
ctgtttcagatactattgata

SEQ ID NO: 269516 - DNA, 21 bp, Artificial sequence
  SiRNA target sequence
tgtttcagatactattgatat

SEQ ID NO: 269517 - DNA, 21 bp, Artificial sequence
  SiRNA target sequence
gtttcagatactattgatatc

SEQ ID NO: 269518 - DNA, 21 bp, Artificial sequence
  SiRNA target sequence
tttcagatactattgatatca

SEQ ID NO: 269519 - DNA, 21 bp, Artificial sequence
  SiRNA target sequence
ttcagatactattgatatcaa

SEQ ID NO: 269520 - DNA, 21 bp, Artificial sequence
  SiRNA target sequence
tcagatactattgatatcaat

SEQ ID NO: 269521 - DNA, 21 bp, Artificial sequence
  SiRNA target sequence
cagatactattgatatcaatg

SEQ ID NO: 269522 - DNA, 21 bp, Artificial sequence
  SiRNA target sequence
agatactattgatatcaatgt

SEQ ID NO: 269523 - DNA, 21 bp, Artificial sequence
  SiRNA target sequence
gatactattgatatcaatgtg

SEQ ID NO: 269524 - DNA, 21 bp, Artificial sequence
  SiRNA target sequence
atactattgatatcaatgtgt

SEQ ID NO: 269525 - DNA, 21 bp, Artificial sequence
  SiRNA target sequence
tactattgatatcaatgtgta

SEQ ID NO: 269526 - DNA, 21 bp, Artificial sequence
  SiRNA target sequence
actattgatatcaatgtgtac

SEQ ID NO: 269527 - DNA, 21 bp, Artificial sequence
  SiRNA target sequence
ctattgatatcaatgtgtacg

SEQ ID NO: 269528 - DNA, 21 bp, Artificial sequence
  SiRNA target sequence
tattgatatcaatgtgtacgt

SEQ ID NO: 269529 - DNA, 21 bp, Artificial sequence
  SiRNA target sequence
attgatatcaatgtgtacgta

SEQ ID NO: 269530 - DNA, 21 bp, Artificial sequence
  SiRNA target sequence
ttgatatcaatgtgtacgtac

SEQ ID NO: 269531 - DNA, 21 bp, Artificial sequence
  SiRNA target sequence
tgatatcaatgtgtacgtacg

SEQ ID NO: 269532 - DNA, 21 bp, Artificial sequence
  SiRNA target sequence
gatatcaatgtgtacgtacgg

SEQ ID NO: 269533 - DNA, 21 bp, Artificial sequence
  SiRNA target sequence
atatcaatgtgtacgtacggg

SEQ ID NO: 269534 - DNA, 21 bp, Artificial sequence
  SiRNA target sequence
tatcaatgtgtacgtacgggg

SEQ ID NO: 269535 - DNA, 21 bp, Artificial sequence
  SiRNA target sequence
atcaatgtgtacgtacggggc

SEQ ID NO: 269536 - DNA, 21 bp, Artificial sequence
  SiRNA target sequence
tcaatgtgtacgtacggggcg

SEQ ID NO: 269537 - DNA, 21 bp, Artificial sequence
  SiRNA target sequence
caatgtgtacgtacggggcgg

SEQ ID NO: 269538 - DNA, 21 bp, Artificial sequence
  SiRNA target sequence
aatgtgtacgtacggggcggt

SEQ ID NO: 269539 - DNA, 21 bp, Artificial sequence
  SiRNA target sequence
atgtgtacgtacggggcggta

SEQ ID NO: 269540 - DNA, 21 bp, Artificial sequence
  SiRNA target sequence
tgtgtacgtacggggcggtag

SEQ ID NO: 269541 - DNA, 21 bp, Artificial sequence
  SiRNA target sequence
gtgtacgtacggggcggtagt

SEQ ID NO: 269542 - DNA, 21 bp, Artificial sequence
  SiRNA target sequence
tgtacgtacggggcggtagtt

SEQ ID NO: 269543 - DNA, 21 bp, Artificial sequence
  SiRNA target sequence
gtacgtacggggcggtagttc

SEQ ID NO: 269544 - DNA, 21 bp, Artificial sequence
  SiRNA target sequence
tacgtacggggcggtagttca

SEQ ID NO: 269545 - DNA, 21 bp, Artificial sequence
  SiRNA target sequence
acgtacggggcggtagttcat

SEQ ID NO: 269546 - DNA, 21 bp, Artificial sequence
  SiRNA target sequence
cgtacggggcggtagttcatt

SEQ ID NO: 269547 - DNA, 21 bp, Artificial sequence
  SiRNA target sequence
gtacggggcggtagttcattt

SEQ ID NO: 269548 - DNA, 21 bp, Artificial sequence
  SiRNA target sequence
tacggggcggtagttcatttg

SEQ ID NO: 269549 - DNA, 21 bp, Artificial sequence
  SiRNA target sequence
acggggcggtagttcatttga

SEQ ID NO: 269550 - DNA, 21 bp, Artificial sequence
  SiRNA target sequence
cggggcggtagttcatttgaa

SEQ ID NO: 269551 - DNA, 21 bp, Artificial sequence
  SiRNA target sequence
ggggcggtagttcatttgaag

SEQ ID NO: 269552 - DNA, 21 bp, Artificial sequence
  SiRNA target sequence
gggcggtagttcatttgaagt

SEQ ID NO: 269553 - DNA, 21 bp, Artificial sequence
  SiRNA target sequence
ggcggtagttcatttgaagtt

SEQ ID NO: 269554 - DNA, 21 bp, Artificial sequence
  SiRNA target sequence
gcggtagttcatttgaagttt

SEQ ID NO: 269555 - DNA, 21 bp, Artificial sequence
  SiRNA target sequence
cggtagttcatttgaagtttg

SEQ ID NO: 269556 - DNA, 21 bp, Artificial sequence
  SiRNA target sequence
ggtagttcatttgaagtttgt

SEQ ID NO: 269557 - DNA, 21 bp, Artificial sequence
  SiRNA target sequence
gtagttcatttgaagtttgtg

SEQ ID NO: 269558 - DNA, 21 bp, Artificial sequence
  SiRNA target sequence
tagttcatttgaagtttgtgt

SEQ ID NO: 269559 - DNA, 21 bp, Artificial sequence
  SiRNA target sequence
agttcatttgaagtttgtgtt

SEQ ID NO: 269560 - DNA, 21 bp, Artificial sequence
  SiRNA target sequence
gttcatttgaagtttgtgttc

SEQ ID NO: 269561 - DNA, 21 bp, Artificial sequence
  SiRNA target sequence
ttcatttgaagtttgtgttcc

SEQ ID NO: 269562 - DNA, 21 bp, Artificial sequence
  SiRNA target sequence
tcatttgaagtttgtgttcca

SEQ ID NO: 269563 - DNA, 21 bp, Artificial sequence
  SiRNA target sequence
catttgaagtttgtgttccag

SEQ ID NO: 269564 - DNA, 21 bp, Artificial sequence
  SiRNA target sequence
atttgaagtttgtgttccagt

SEQ ID NO: 269565 - DNA, 21 bp, Artificial sequence
  SiRNA target sequence
tttgaagtttgtgttccagtc

SEQ ID NO: 269566 - DNA, 21 bp, Artificial sequence
  SiRNA target sequence
ttgaagtttgtgttccagtcc

SEQ ID NO: 269567 - DNA, 21 bp, Artificial sequence
  SiRNA target sequence
tgaagtttgtgttccagtcca

SEQ ID NO: 269568 - DNA, 21 bp, Artificial sequence
  SiRNA target sequence
gaagtttgtgttccagtccaa

SEQ ID NO: 269569 - DNA, 21 bp, Artificial sequence
  SiRNA target sequence
aagtttgtgttccagtccaac

SEQ ID NO: 269570 - DNA, 21 bp, Artificial sequence
  SiRNA target sequence
agtttgtgttccagtccaacc

SEQ ID NO: 269571 - DNA, 21 bp, Artificial sequence
  SiRNA target sequence
gtttgtgttccagtccaacct

SEQ ID NO: 269572 - DNA, 21 bp, Artificial sequence
  SiRNA target sequence
tttgtgttccagtccaaccta

SEQ ID NO: 269573 - DNA, 21 bp, Artificial sequence
  SiRNA target sequence
ttgtgttccagtccaacctag

SEQ ID NO: 269574 - DNA, 21 bp, Artificial sequence
  SiRNA target sequence
tgtgttccagtccaacctagt

SEQ ID NO: 269575 - DNA, 21 bp, Artificial sequence
  SiRNA target sequence
gtgttccagtccaacctagtt

SEQ ID NO: 269576 - DNA, 21 bp, Artificial sequence
  SiRNA target sequence
tgttccagtccaacctagttt

SEQ ID NO: 269577 - DNA, 21 bp, Artificial sequence
  SiRNA target sequence
gttccagtccaacctagttta

SEQ ID NO: 269578 - DNA, 21 bp, Artificial sequence
  SiRNA target sequence
ttccagtccaacctagtttag

SEQ ID NO: 269579 - DNA, 21 bp, Artificial sequence
  SiRNA target sequence
tccagtccaacctagtttagg

SEQ ID NO: 269580 - DNA, 21 bp, Artificial sequence
  SiRNA target sequence
ccagtccaacctagtttaggt

SEQ ID NO: 269581 - DNA, 21 bp, Artificial sequence
  SiRNA target sequence
cagtccaacctagtttaggtt

SEQ ID NO: 269582 - DNA, 21 bp, Artificial sequence
  SiRNA target sequence
agtccaacctagtttaggttt

SEQ ID NO: 269583 - DNA, 21 bp, Artificial sequence
  SiRNA target sequence
gtccaacctagtttaggtttg

SEQ ID NO: 269584 - DNA, 21 bp, Artificial sequence
  SiRNA target sequence
tccaacctagtttaggtttga

SEQ ID NO: 269585 - DNA, 21 bp, Artificial sequence
  SiRNA target sequence
ccaacctagtttaggtttgaa

SEQ ID NO: 269586 - DNA, 21 bp, Artificial sequence
  SiRNA target sequence
caacctagtttaggtttgaat

SEQ ID NO: 269587 - DNA, 21 bp, Artificial sequence
  SiRNA target sequence
aacctagtttaggtttgaatt

SEQ ID NO: 269588 - DNA, 21 bp, Artificial sequence
  SiRNA target sequence
acctagtttaggtttgaattg

SEQ ID NO: 269589 - DNA, 21 bp, Artificial sequence
  SiRNA target sequence
cctagtttaggtttgaattgg

SEQ ID NO: 269590 - DNA, 21 bp, Artificial sequence
  SiRNA target sequence
ctagtttaggtttgaattgga

SEQ ID NO: 269591 - DNA, 21 bp, Artificial sequence
  SiRNA target sequence
tagtttaggtttgaattggaa

SEQ ID NO: 269592 - DNA, 21 bp, Artificial sequence
  SiRNA target sequence
agtttaggtttgaattggaat

SEQ ID NO: 269593 - DNA, 21 bp, Artificial sequence
  SiRNA target sequence
gtttaggtttgaattggaata

SEQ ID NO: 269594 - DNA, 21 bp, Artificial sequence
  SiRNA target sequence
tttaggtttgaattggaatac

SEQ ID NO: 269595 - DNA, 21 bp, Artificial sequence
  SiRNA target sequence
ttaggtttgaattggaataca

SEQ ID NO: 269596 - DNA, 21 bp, Artificial sequence
  SiRNA target sequence
taggtttgaattggaatacag

SEQ ID NO: 269597 - DNA, 21 bp, Artificial sequence
  SiRNA target sequence
aggtttgaattggaatacaga

SEQ ID NO: 269598 - DNA, 21 bp, Artificial sequence
  SiRNA target sequence
ggtttgaattggaatacagac

SEQ ID NO: 269599 - DNA, 21 bp, Artificial sequence
  SiRNA target sequence
gtttgaattggaatacagact

SEQ ID NO: 269600 - DNA, 21 bp, Artificial sequence
  SiRNA target sequence
tttgaattggaatacagactt

SEQ ID NO: 269601 - DNA, 21 bp, Artificial sequence
  SiRNA target sequence
ttgaattggaatacagacttt

SEQ ID NO: 269602 - DNA, 21 bp, Artificial sequence
  SiRNA target sequence
tgaattggaatacagacttta

SEQ ID NO: 269603 - DNA, 21 bp, Artificial sequence
  SiRNA target sequence
gaattggaatacagactttat

SEQ ID NO: 269604 - DNA, 21 bp, Artificial sequence
  SiRNA target sequence
aattggaatacagactttatt

SEQ ID NO: 269605 - DNA, 21 bp, Artificial sequence
  SiRNA target sequence
attggaatacagactttattt

SEQ ID NO: 269606 - DNA, 21 bp, Artificial sequence
  SiRNA target sequence
ttggaatacagactttatttt

SEQ ID NO: 269607 - DNA, 21 bp, Artificial sequence
  SiRNA target sequence
tggaatacagactttatttta

SEQ ID NO: 269608 - DNA, 21 bp, Artificial sequence
  SiRNA target sequence
ggaatacagactttattttac

SEQ ID NO: 269609 - DNA, 21 bp, Artificial sequence
  SiRNA target sequence
gaatacagactttattttacg

SEQ ID NO: 269610 - DNA, 21 bp, Artificial sequence
  SiRNA target sequence
aatacagactttattttacgt

SEQ ID NO: 269611 - DNA, 21 bp, Artificial sequence
  SiRNA target sequence
atacagactttattttacgta

SEQ ID NO: 269612 - DNA, 21 bp, Artificial sequence
  SiRNA target sequence
tacagactttattttacgtaa

SEQ ID NO: 269613 - DNA, 21 bp, Artificial sequence
  SiRNA target sequence
acagactttattttacgtaat

SEQ ID NO: 269614 - DNA, 21 bp, Artificial sequence
  SiRNA target sequence
cagactttattttacgtaatg

SEQ ID NO: 269615 - DNA, 21 bp, Artificial sequence
  SiRNA target sequence
agactttattttacgtaatga

SEQ ID NO: 269616 - DNA, 21 bp, Artificial sequence
  SiRNA target sequence
  misc_feature (21)..(21): n is a, c, g, or t
gactttattttacgtaatgan

SEQ ID NO: 269617 - DNA, 21 bp, Artificial sequence
  SiRNA target sequence
  misc_feature (20)..(20): n is a, c, g, or t
actttattttacgtaatgang

SEQ ID NO: 269618 - DNA, 21 bp, Artificial sequence
  SiRNA target sequence
  misc_feature (19)..(19): n is a, c, g, or t
ctttattttacgtaatganga

SEQ ID NO: 269619 - DNA, 21 bp, Artificial sequence
  SiRNA target sequence
  misc_feature (18)..(18): n is a, c, g, or t
tttattttacgtaatgangaa

SEQ ID NO: 269620 - DNA, 21 bp, Artificial sequence
  SiRNA target sequence
  misc_feature (17)..(17): n is a, c, g, or t
ttattttacgtaatgangaag

SEQ ID NO: 269621 - DNA, 21 bp, Artificial sequence
  SiRNA target sequence
  misc_feature (16)..(16): n is a, c, g, or t
tattttacgtaatgangaaga

SEQ ID NO: 269622 - DNA, 21 bp, Artificial sequence
  SiRNA target sequence
  misc_feature (15)..(15): n is a, c, g, or t
attttacgtaatgangaagaa

SEQ ID NO: 269623 - DNA, 21 bp, Artificial sequence
  SiRNA target sequence
  misc_feature (14)..(14): n is a, c, g, or t
ttttacgtaatgangaagaat

SEQ ID NO: 269624 - DNA, 21 bp, Artificial sequence
  SiRNA target sequence
  misc_feature (13)..(13): n is a, c, g, or t
tttacgtaatgangaagaata

SEQ ID NO: 269625 - DNA, 21 bp, Artificial sequence
  SiRNA target sequence
  misc_feature (12)..(12): n is a, c, g, or t
ttacgtaatgangaagaatac

SEQ ID NO: 269626 - DNA, 21 bp, Artificial sequence
  SiRNA target sequence
  misc_feature (11)..(11): n is a, c, g, or t
tacgtaatgangaagaataca

SEQ ID NO: 269627 - DNA, 21 bp, Artificial sequence
  SiRNA target sequence
  misc_feature (10)..(10): n is a, c, g, or t
acgtaatgangaagaatacag

SEQ ID NO: 269628 - DNA, 21 bp, Artificial sequence
  SiRNA target sequence
  misc_feature (9)..(9): n is a, c, g, or t
cgtaatgangaagaatacagg

SEQ ID NO: 269629 - DNA, 21 bp, Artificial sequence
  SiRNA target sequence
  misc_feature (8)..(8): n is a, c, g, or t
gtaatgangaagaatacaggg

SEQ ID NO: 269630 - DNA, 21 bp, Artificial sequence
  SiRNA target sequence
  misc_feature (7)..(7): n is a, c, g, or t
taatgangaagaatacagggc

SEQ ID NO: 269631 - DNA, 21 bp, Artificial sequence
  SiRNA target sequence
  misc_feature (6)..(6): n is a, c, g, or t
aatgangaagaatacagggct

SEQ ID NO: 269632 - DNA, 21 bp, Artificial sequence
  SiRNA target sequence
  misc_feature (5)..(5): n is a, c, g, or t
atgangaagaatacagggcta

SEQ ID NO: 269633 - DNA, 21 bp, Artificial sequence
  SiRNA target sequence
  misc_feature (4)..(4): n is a, c, g, or t
tgangaagaatacagggctaa

SEQ ID NO: 269634 - DNA, 21 bp, Artificial sequence
  SiRNA target sequence
  misc_feature (3)..(3): n is a, c, g, or t
gangaagaatacagggctaag

SEQ ID NO: 269635 - DNA, 21 bp, Artificial sequence
  SiRNA target sequence
  misc_feature (2)..(2): n is a, c, g, or t
angaagaatacagggctaaga

SEQ ID NO: 269636 - DNA, 21 bp, Artificial sequence
  SiRNA target sequence
  misc_feature (1)..(1): n is a, c, g, or t
ngaagaatacagggctaagac

SEQ ID NO: 269637 - DNA, 21 bp, Artificial sequence
  SiRNA target sequence
gaagaatacagggctaagaca

SEQ ID NO: 269638 - DNA, 21 bp, Artificial sequence
  SiRNA target sequence
aagaatacagggctaagacag

SEQ ID NO: 269639 - DNA, 21 bp, Artificial sequence
  SiRNA target sequence
agaatacagggctaagacagg

SEQ ID NO: 269640 - DNA, 21 bp, Artificial sequence
  SiRNA target sequence
gaatacagggctaagacaggt

SEQ ID NO: 269641 - DNA, 21 bp, Artificial sequence
  SiRNA target sequence
aatacagggctaagacaggtt

SEQ ID NO: 269642 - DNA, 21 bp, Artificial sequence
  SiRNA target sequence
atacagggctaagacaggtta

SEQ ID NO: 269643 - DNA, 21 bp, Artificial sequence
  SiRNA target sequence
tacagggctaagacaggttat

SEQ ID NO: 269644 - DNA, 21 bp, Artificial sequence
  SiRNA target sequence
acagggctaagacaggttatg

SEQ ID NO: 269645 - DNA, 21 bp, Artificial sequence
  SiRNA target sequence
cagggctaagacaggttatgc

SEQ ID NO: 269646 - DNA, 21 bp, Artificial sequence
  SiRNA target sequence
agggctaagacaggttatgca

SEQ ID NO: 269647 - DNA, 21 bp, Artificial sequence
  SiRNA target sequence
gggctaagacaggttatgcac

SEQ ID NO: 269648 - DNA, 21 bp, Artificial sequence
  SiRNA target sequence
ggctaagacaggttatgcacc

SEQ ID NO: 269649 - DNA, 21 bp, Artificial sequence
  SiRNA target sequence
gctaagacaggttatgcacca

SEQ ID NO: 269650 - DNA, 21 bp, Artificial sequence
  SiRNA target sequence
ctaagacaggttatgcaccat

SEQ ID NO: 269651 - DNA, 21 bp, Artificial sequence
  SiRNA target sequence
taagacaggttatgcaccata

SEQ ID NO: 269652 - DNA, 21 bp, Artificial sequence
  SiRNA target sequence
aagacaggttatgcaccatat

SEQ ID NO: 269653 - DNA, 21 bp, Artificial sequence
  SiRNA target sequence
agacaggttatgcaccatatt

SEQ ID NO: 269654 - DNA, 21 bp, Artificial sequence
  SiRNA target sequence
gacaggttatgcaccatatta

SEQ ID NO: 269655 - DNA, 21 bp, Artificial sequence
  SiRNA target sequence
acaggttatgcaccatattat

SEQ ID NO: 269656 - DNA, 21 bp, Artificial sequence
  SiRNA target sequence
caggttatgcaccatattatg

SEQ ID NO: 269657 - DNA, 21 bp, Artificial sequence
  SiRNA target sequence
aggttatgcaccatattatgc

SEQ ID NO: 269658 - DNA, 21 bp, Artificial sequence
  SiRNA target sequence
ggttatgcaccatattatgct

SEQ ID NO: 269659 - DNA, 21 bp, Artificial sequence
  SiRNA target sequence
gttatgcaccatattatgctg

SEQ ID NO: 269660 - DNA, 21 bp, Artificial sequence
  SiRNA target sequence
ttatgcaccatattatgctgg

SEQ ID NO: 269661 - DNA, 21 bp, Artificial sequence
  SiRNA target sequence
tatgcaccatattatgctgga

SEQ ID NO: 269662 - DNA, 21 bp, Artificial sequence
  SiRNA target sequence
atgcaccatattatgctggag

SEQ ID NO: 269663 - DNA, 21 bp, Artificial sequence
  SiRNA target sequence
tgcaccatattatgctggagt

SEQ ID NO: 269664 - DNA, 21 bp, Artificial sequence
  SiRNA target sequence
gcaccatattatgctggagtg

SEQ ID NO: 269665 - DNA, 21 bp, Artificial sequence
  SiRNA target sequence
caccatattatgctggagtgt

SEQ ID NO: 269666 - DNA, 21 bp, Artificial sequence
  SiRNA target sequence
accatattatgctggagtgtg

SEQ ID NO: 269667 - DNA, 21 bp, Artificial sequence
  SiRNA target sequence
ccatattatgctggagtgtgg

SEQ ID NO: 269668 - DNA, 21 bp, Artificial sequence
  SiRNA target sequence
catattatgctggagtgtggc

SEQ ID NO: 269669 - DNA, 21 bp, Artificial sequence
  SiRNA target sequence
atattatgctggagtgtggca

SEQ ID NO: 269670 - DNA, 21 bp, Artificial sequence
  SiRNA target sequence
tattatgctggagtgtggcat

SEQ ID NO: 269671 - DNA, 21 bp, Artificial sequence
  SiRNA target sequence
attatgctggagtgtggcata

SEQ ID NO: 269672 - DNA, 21 bp, Artificial sequence
  SiRNA target sequence
ttatgctggagtgtggcatag

SEQ ID NO: 269673 - DNA, 21 bp, Artificial sequence
  SiRNA target sequence
tatgctggagtgtggcatagc

SEQ ID NO: 269674 - DNA, 21 bp, Artificial sequence
  SiRNA target sequence
atgctggagtgtggcatagct

SEQ ID NO: 269675 - DNA, 21 bp, Artificial sequence
  SiRNA target sequence
tgctggagtgtggcatagctt

SEQ ID NO: 269676 - DNA, 21 bp, Artificial sequence
  SiRNA target sequence
gctggagtgtggcatagcttc

SEQ ID NO: 269677 - DNA, 21 bp, Artificial sequence
  SiRNA target sequence
ctggagtgtggcatagcttca

SEQ ID NO: 269678 - DNA, 21 bp, Artificial sequence
  SiRNA target sequence
tggagtgtggcatagcttcaa

SEQ ID NO: 269679 - DNA, 21 bp, Artificial sequence
  SiRNA target sequence
ggagtgtggcatagcttcaat

SEQ ID NO: 269680 - DNA, 21 bp, Artificial sequence
  SiRNA target sequence
gagtgtggcatagcttcaata

SEQ ID NO: 269681 - DNA, 21 bp, Artificial sequence
  SiRNA target sequence
agtgtggcatagcttcaataa

SEQ ID NO: 269682 - DNA, 21 bp, Artificial sequence
  SiRNA target sequence
gtgtggcatagcttcaataat

SEQ ID NO: 269683 - DNA, 21 bp, Artificial sequence
  SiRNA target sequence
tgtggcatagcttcaataata

SEQ ID NO: 269684 - DNA, 21 bp, Artificial sequence
  SiRNA target sequence
gtggcatagcttcaataatag

SEQ ID NO: 269685 - DNA, 21 bp, Artificial sequence
  SiRNA target sequence
tggcatagcttcaataatagt

SEQ ID NO: 269686 - DNA, 21 bp, Artificial sequence
  SiRNA target sequence
ggcatagcttcaataatagta

SEQ ID NO: 269687 - DNA, 21 bp, Artificial sequence
  SiRNA target sequence
gcatagcttcaataatagtaa

SEQ ID NO: 269688 - DNA, 21 bp, Artificial sequence
  SiRNA target sequence
catagcttcaataatagtaat

SEQ ID NO: 269689 - DNA, 21 bp, Artificial sequence
  SiRNA target sequence
atagcttcaataatagtaatt

SEQ ID NO: 269690 - DNA, 21 bp, Artificial sequence
  SiRNA target sequence
tagcttcaataatagtaattc

SEQ ID NO: 269691 - DNA, 21 bp, Artificial sequence
  SiRNA target sequence
agcttcaataatagtaattct

SEQ ID NO: 269692 - DNA, 21 bp, Artificial sequence
  SiRNA target sequence
gcttcaataatagtaattctc

SEQ ID NO: 269693 - DNA, 21 bp, Artificial sequence
  SiRNA target sequence
cttcaataatagtaattctct

SEQ ID NO: 269694 - DNA, 21 bp, Artificial sequence
  SiRNA target sequence
ttcaataatagtaattctctt

SEQ ID NO: 269695 - DNA, 21 bp, Artificial sequence
  SiRNA target sequence
tcaataatagtaattctcttg

SEQ ID NO: 269696 - DNA, 21 bp, Artificial sequence
  SiRNA target sequence
caataatagtaattctcttgt

SEQ ID NO: 269697 - DNA, 21 bp, Artificial sequence
  SiRNA target sequence
aataatagtaattctcttgtt

SEQ ID NO: 269698 - DNA, 21 bp, Artificial sequence
  SiRNA target sequence
ataatagtaattctcttgttt

SEQ ID NO: 269699 - DNA, 21 bp, Artificial sequence
  SiRNA target sequence
taatagtaattctcttgtttt

SEQ ID NO: 269700 - DNA, 21 bp, Artificial sequence
  SiRNA target sequence
aatagtaattctcttgttttt

SEQ ID NO: 269701 - DNA, 21 bp, Artificial sequence
  SiRNA target sequence
atagtaattctcttgttttta

SEQ ID NO: 269702 - DNA, 21 bp, Artificial sequence
  SiRNA target sequence
tagtaattctcttgtttttag

SEQ ID NO: 269703 - DNA, 21 bp, Artificial sequence
  SiRNA target sequence
agtaattctcttgtttttagg

SEQ ID NO: 269704 - DNA, 21 bp, Artificial sequence
  SiRNA target sequence
gtaattctcttgtttttaggt

SEQ ID NO: 269705 - DNA, 21 bp, Artificial sequence
  SiRNA target sequence
taattctcttgtttttaggtg

SEQ ID NO: 269706 - DNA, 21 bp, Artificial sequence
  SiRNA target sequence
aattctcttgtttttaggtgg

SEQ ID NO: 269707 - DNA, 21 bp, Artificial sequence
  SiRNA target sequence
attctcttgtttttaggtggg

SEQ ID NO: 269708 - DNA, 21 bp, Artificial sequence
  SiRNA target sequence
ttctcttgtttttaggtgggg

SEQ ID NO: 269709 - DNA, 21 bp, Artificial sequence
  SiRNA target sequence
tctcttgtttttaggtgggga

SEQ ID NO: 269710 - DNA, 21 bp, Artificial sequence
  SiRNA target sequence
ctcttgtttttaggtggggat

SEQ ID NO: 269711 - DNA, 21 bp, Artificial sequence
  SiRNA target sequence
tcttgtttttaggtggggatc

SEQ ID NO: 269712 - DNA, 21 bp, Artificial sequence
  SiRNA target sequence
cttgtttttaggtggggatct

SEQ ID NO: 269713 - DNA, 21 bp, Artificial sequence
  SiRNA target sequence
ttgtttttaggtggggatctg

SEQ ID NO: 269714 - DNA, 21 bp, Artificial sequence
  SiRNA target sequence
  misc_feature (21)..(21): n is a, c, g, or t
tgtttttaggtggggatctgn

SEQ ID NO: 269715 - DNA, 21 bp, Artificial sequence
  SiRNA target sequence
  misc_feature (20)..(20): n is a, c, g, or t
gtttttaggtggggatctgnt

SEQ ID NO: 269716 - DNA, 21 bp, Artificial sequence
  SiRNA target sequence
  misc_feature (19)..(19): n is a, c, g, or t
tttttaggtggggatctgntt

SEQ ID NO: 269717 - DNA, 21 bp, Artificial sequence
  SiRNA target sequence
  misc_feature (18)..(18): n is a, c, g, or t
ttttaggtggggatctgnttc

SEQ ID NO: 269718 - DNA, 21 bp, Artificial sequence
  SiRNA target sequence
  misc_feature (17)..(17): n is a, c, g, or t
tttaggtggggatctgnttcc

SEQ ID NO: 269719 - DNA, 21 bp, Artificial sequence
  SiRNA target sequence
  misc_feature (16)..(16): n is a, c, g, or t
ttaggtggggatctgnttccg

SEQ ID NO: 269720 - DNA, 21 bp, Artificial sequence
  SiRNA target sequence
  misc_feature (15)..(15): n is a, c, g, or t
taggtggggatctgnttccga

SEQ ID NO: 269721 - DNA, 21 bp, Artificial sequence
  SiRNA target sequence
  misc_feature (14)..(14): n is a, c, g, or t
  misc_feature (21)..(21): n is a, c, g, or t
aggtggggatctgnttccgan

SEQ ID NO: 269722 - DNA, 21 bp, Artificial sequence
  SiRNA target sequence
  misc_feature (13)..(13): n is a, c, g, or t
  misc_feature (20)..(20): n is a, c, g, or t
ggtggggatctgnttccganc

SEQ ID NO: 269723 - DNA, 21 bp, Artificial sequence
  SiRNA target sequence
  misc_feature (12)..(12): n is a, c, g, or t
  misc_feature (19)..(19): n is a, c, g, or t
gtggggatctgnttccganca

SEQ ID NO: 269724 - DNA, 21 bp, Artificial sequence
  SiRNA target sequence
  misc_feature (11)..(11): n is a, c, g, or t
  misc_feature (18)..(18): n is a, c, g, or t
tggggatctgnttccgancaa

SEQ ID NO: 269725 - DNA, 21 bp, Artificial sequence
  SiRNA target sequence
  misc_feature (10)..(10): n is a, c, g, or t
  misc_feature (17)..(17): n is a, c, g, or t
ggggatctgnttccgancaaa

SEQ ID NO: 269726 - DNA, 21 bp, Artificial sequence
  SiRNA target sequence
  misc_feature (9)..(9): n is a, c, g, or t
  misc_feature (16)..(16): n is a, c, g, or t
gggatctgnttccgancaaat

SEQ ID NO: 269727 - DNA, 21 bp, Artificial sequence
  SiRNA target sequence
  misc_feature (8)..(8): n is a, c, g, or t
  misc_feature (15)..(15): n is a, c, g, or t
ggatctgnttccgancaaatt

SEQ ID NO: 269728 - DNA, 21 bp, Artificial sequence
  SiRNA target sequence
  misc_feature (7)..(7): n is a, c, g, or t
  misc_feature (14)..(14): n is a, c, g, or t
gatctgnttccgancaaattg

SEQ ID NO: 269729 - DNA, 21 bp, Artificial sequence
  SiRNA target sequence
  misc_feature (6)..(6): n is a, c, g, or t
  misc_feature (13)..(13): n is a, c, g, or t
atctgnttccgancaaattgc

SEQ ID NO: 269730 - DNA, 21 bp, Artificial sequence
  SiRNA target sequence
  misc_feature (5)..(5): n is a, c, g, or t
  misc_feature (12)..(12): n is a, c, g, or t
tctgnttccgancaaattgct

SEQ ID NO: 269731 - DNA, 21 bp, Artificial sequence
  SiRNA target sequence
  misc_feature (4)..(4): n is a, c, g, or t
  misc_feature (11)..(11): n is a, c, g, or t
ctgnttccgancaaattgctc

SEQ ID NO: 269732 - DNA, 21 bp, Artificial sequence
  SiRNA target sequence
  misc_feature (3)..(3): n is a, c, g, or t
  misc_feature (10)..(10): n is a, c, g, or t
tgnttccgancaaattgctca

SEQ ID NO: 269733 - DNA, 21 bp, Artificial sequence
  SiRNA target sequence
  misc_feature (2)..(2): n is a, c, g, or t
  misc_feature (9)..(9): n is a, c, g, or t
gnttccgancaaattgctcag

SEQ ID NO: 269734 - DNA, 21 bp, Artificial sequence
  SiRNA target sequence
  misc_feature (1)..(1): n is a, c, g, or t
  misc_feature (8)..(8): n is a, c, g, or t
nttccgancaaattgctcagt

SEQ ID NO: 269735 - DNA, 21 bp, Artificial sequence
  SiRNA target sequence
  misc_feature (7)..(7): n is a, c, g, or t
ttccgancaaattgctcagtg

SEQ ID NO: 269736 - DNA, 21 bp, Artificial sequence
  SiRNA target sequence
  misc_feature (6)..(6): n is a, c, g, or t
tccgancaaattgctcagtgg

SEQ ID NO: 269737 - DNA, 21 bp, Artificial sequence
  SiRNA target sequence
  misc_feature (5)..(5): n is a, c, g, or t
ccgancaaattgctcagtggc

SEQ ID NO: 269738 - DNA, 21 bp, Artificial sequence
  SiRNA target sequence
  misc_feature (4)..(4): n is a, c, g, or t
cgancaaattgctcagtggcc

SEQ ID NO: 269739 - DNA, 21 bp, Artificial sequence
  SiRNA target sequence
  misc_feature (3)..(3): n is a, c, g, or t
gancaaattgctcagtggccg

SEQ ID NO: 269740 - DNA, 21 bp, Artificial sequence
  SiRNA target sequence
  misc_feature (2)..(2): n is a, c, g, or t
ancaaattgctcagtggccga

SEQ ID NO: 269741 - DNA, 21 bp, Artificial sequence
  SiRNA target sequence
  misc_feature (1)..(1): n is a, c, g, or t
ncaaattgctcagtggccgac

SEQ ID NO: 269742 - DNA, 21 bp, Artificial sequence
  SiRNA target sequence
caaattgctcagtggccgaca

SEQ ID NO: 269743 - DNA, 21 bp, Artificial sequence
  SiRNA target sequence
aaattgctcagtggccgacaa

SEQ ID NO: 269744 - DNA, 21 bp, Artificial sequence
  SiRNA target sequence
aattgctcagtggccgacaat

SEQ ID NO: 269745 - DNA, 21 bp, Artificial sequence
  SiRNA target sequence
attgctcagtggccgacaatt

SEQ ID NO: 269746 - DNA, 21 bp, Artificial sequence
  SiRNA target sequence
ttgctcagtggccgacaattt

SEQ ID NO: 269747 - DNA, 21 bp, Artificial sequence
  SiRNA target sequence
tgctcagtggccgacaatttc

SEQ ID NO: 269748 - DNA, 21 bp, Artificial sequence
  SiRNA target sequence
gctcagtggccgacaatttca

SEQ ID NO: 269749 - DNA, 21 bp, Artificial sequence
  SiRNA target sequence
ctcagtggccgacaatttcag

SEQ ID NO: 269750 - DNA, 21 bp, Artificial sequence
  SiRNA target sequence
tcagtggccgacaatttcagt

SEQ ID NO: 269751 - DNA, 21 bp, Artificial sequence
  SiRNA target sequence
cagtggccgacaatttcagta

SEQ ID NO: 269752 - DNA, 21 bp, Artificial sequence
  SiRNA target sequence
agtggccgacaatttcagtac

SEQ ID NO: 269753 - DNA, 21 bp, Artificial sequence
  SiRNA target sequence
gtggccgacaatttcagtacc

SEQ ID NO: 269754 - DNA, 21 bp, Artificial sequence
  SiRNA target sequence
tggccgacaatttcagtacca

SEQ ID NO: 269755 - DNA, 21 bp, Artificial sequence
  SiRNA target sequence
ggccgacaatttcagtaccaa

SEQ ID NO: 269756 - DNA, 21 bp, Artificial sequence
  SiRNA target sequence
gccgacaatttcagtaccaag

SEQ ID NO: 269757 - DNA, 21 bp, Artificial sequence
  SiRNA target sequence
ccgacaatttcagtaccaaga

SEQ ID NO: 269758 - DNA, 21 bp, Artificial sequence
  SiRNA target sequence
cgacaatttcagtaccaagag

SEQ ID NO: 269759 - DNA, 21 bp, Artificial sequence
  SiRNA target sequence
gacaatttcagtaccaagagg

SEQ ID NO: 269760 - DNA, 21 bp, Artificial sequence
  SiRNA target sequence
acaatttcagtaccaagaggt

SEQ ID NO: 269761 - DNA, 21 bp, Artificial sequence
  SiRNA target sequence
caatttcagtaccaagaggtg

SEQ ID NO: 269762 - DNA, 21 bp, Artificial sequence
  SiRNA target sequence
aatttcagtaccaagaggtga

SEQ ID NO: 269763 - DNA, 21 bp, Artificial sequence
  SiRNA target sequence
atttcagtaccaagaggtgag

SEQ ID NO: 269764 - DNA, 21 bp, Artificial sequence
  SiRNA target sequence
tttcagtaccaagaggtgagc

SEQ ID NO: 269765 - DNA, 21 bp, Artificial sequence
  SiRNA target sequence
ttcagtaccaagaggtgagct

SEQ ID NO: 269766 - DNA, 21 bp, Artificial sequence
  SiRNA target sequence
tcagtaccaagaggtgagcta

SEQ ID NO: 269767 - DNA, 21 bp, Artificial sequence
  SiRNA target sequence
cagtaccaagaggtgagctag

SEQ ID NO: 269768 - DNA, 21 bp, Artificial sequence
  SiRNA target sequence
agtaccaagaggtgagctagc

SEQ ID NO: 269769 - DNA, 21 bp, Artificial sequence
  SiRNA target sequence
gtaccaagaggtgagctagct

SEQ ID NO: 269770 - DNA, 21 bp, Artificial sequence
  SiRNA target sequence
taccaagaggtgagctagctt

SEQ ID NO: 269771 - DNA, 21 bp, Artificial sequence
  SiRNA target sequence
accaagaggtgagctagcttt

SEQ ID NO: 269772 - DNA, 21 bp, Artificial sequence
  SiRNA target sequence
ccaagaggtgagctagctttc

SEQ ID NO: 269773 - DNA, 21 bp, Artificial sequence
  SiRNA target sequence
caagaggtgagctagctttct

SEQ ID NO: 269774 - DNA, 21 bp, Artificial sequence
  SiRNA target sequence
aagaggtgagctagctttctt

SEQ ID NO: 269775 - DNA, 21 bp, Artificial sequence
  SiRNA target sequence
agaggtgagctagctttctta

SEQ ID NO: 269776 - DNA, 21 bp, Artificial sequence
  SiRNA target sequence
gaggtgagctagctttcttac

SEQ ID NO: 269777 - DNA, 21 bp, Artificial sequence
  SiRNA target sequence
aggtgagctagctttcttacg

SEQ ID NO: 269778 - DNA, 21 bp, Artificial sequence
  SiRNA target sequence
ggtgagctagctttcttacga

SEQ ID NO: 269779 - DNA, 21 bp, Artificial sequence
  SiRNA target sequence
gtgagctagctttcttacgaa

SEQ ID NO: 269780 - DNA, 21 bp, Artificial sequence
  SiRNA target sequence
tgagctagctttcttacgaat

SEQ ID NO: 269781 - DNA, 21 bp, Artificial sequence
  SiRNA target sequence
gagctagctttcttacgaatt

SEQ ID NO: 269782 - DNA, 21 bp, Artificial sequence
  SiRNA target sequence
agctagctttcttacgaatta

SEQ ID NO: 269783 - DNA, 21 bp, Artificial sequence
  SiRNA target sequence
gctagctttcttacgaattaa

SEQ ID NO: 269784 - DNA, 21 bp, Artificial sequence
  SiRNA target sequence
ctagctttcttacgaattaag

SEQ ID NO: 269785 - DNA, 21 bp, Artificial sequence
  SiRNA target sequence
tagctttcttacgaattaagg

SEQ ID NO: 269786 - DNA, 21 bp, Artificial sequence
  SiRNA target sequence
agctttcttacgaattaagga

SEQ ID NO: 269787 - DNA, 21 bp, Artificial sequence
  SiRNA target sequence
gctttcttacgaattaaggat

SEQ ID NO: 269788 - DNA, 21 bp, Artificial sequence
  SiRNA target sequence
ctttcttacgaattaaggatg

SEQ ID NO: 269789 - DNA, 21 bp, Artificial sequence
  SiRNA target sequence
tttcttacgaattaaggatgg

SEQ ID NO: 269790 - DNA, 21 bp, Artificial sequence
  SiRNA target sequence
ttcttacgaattaaggatgga

SEQ ID NO: 269791 - DNA, 21 bp, Artificial sequence
  SiRNA target sequence
tcttacgaattaaggatggaa

SEQ ID NO: 269792 - DNA, 21 bp, Artificial sequence
  SiRNA target sequence
cttacgaattaaggatggaaa

SEQ ID NO: 269793 - DNA, 21 bp, Artificial sequence
  SiRNA target sequence
ttacgaattaaggatggaaag

SEQ ID NO: 269794 - DNA, 21 bp, Artificial sequence
  SiRNA target sequence
tacgaattaaggatggaaagc

SEQ ID NO: 269795 - DNA, 21 bp, Artificial sequence
  SiRNA target sequence
acgaattaaggatggaaagca

SEQ ID NO: 269796 - DNA, 21 bp, Artificial sequence
  SiRNA target sequence
cgaattaaggatggaaagcaa

SEQ ID NO: 269797 - DNA, 21 bp, Artificial sequence
  SiRNA target sequence
gaattaaggatggaaagcaag

SEQ ID NO: 269798 - DNA, 21 bp, Artificial sequence
  SiRNA target sequence
aattaaggatggaaagcaagc

SEQ ID NO: 269799 - DNA, 21 bp, Artificial sequence
  SiRNA target sequence
attaaggatggaaagcaagct

SEQ ID NO: 269800 - DNA, 21 bp, Artificial sequence
  SiRNA target sequence
ttaaggatggaaagcaagctg

SEQ ID NO: 269801 - DNA, 21 bp, Artificial sequence
  SiRNA target sequence
taaggatggaaagcaagctgc

SEQ ID NO: 269802 - DNA, 21 bp, Artificial sequence
  SiRNA target sequence
aaggatggaaagcaagctgct

SEQ ID NO: 269803 - DNA, 21 bp, Artificial sequence
  SiRNA target sequence
aggatggaaagcaagctgctg

SEQ ID NO: 269804 - DNA, 21 bp, Artificial sequence
  SiRNA target sequence
ggatggaaagcaagctgctgt

SEQ ID NO: 269805 - DNA, 21 bp, Artificial sequence
  SiRNA target sequence
gatggaaagcaagctgctgta

SEQ ID NO: 269806 - DNA, 21 bp, Artificial sequence
  SiRNA target sequence
atggaaagcaagctgctgtag

SEQ ID NO: 269807 - DNA, 21 bp, Artificial sequence
  SiRNA target sequence
tggaaagcaagctgctgtagg

SEQ ID NO: 269808 - DNA, 21 bp, Artificial sequence
  SiRNA target sequence
ggaaagcaagctgctgtagga

SEQ ID NO: 269809 - DNA, 21 bp, Artificial sequence
  SiRNA target sequence
gaaagcaagctgctgtaggaa

SEQ ID NO: 269810 - DNA, 21 bp, Artificial sequence
  SiRNA target sequence
aaagcaagctgctgtaggaac

SEQ ID NO: 269811 - DNA, 21 bp, Artificial sequence
  SiRNA target sequence
  misc_feature (21)..(21): n is a, c, g, or t
aagcaagctgctgtaggaacn

SEQ ID NO: 269812 - DNA, 21 bp, Artificial sequence
  SiRNA target sequence
  misc_feature (20)..(20): n is a, c, g, or t
agcaagctgctgtaggaacnc

SEQ ID NO: 269813 - DNA, 21 bp, Artificial sequence
  SiRNA target sequence
  misc_feature (19)..(19): n is a, c, g, or t
gcaagctgctgtaggaacnca

SEQ ID NO: 269814 - DNA, 21 bp, Artificial sequence
  SiRNA target sequence
  misc_feature (18)..(18): n is a, c, g, or t
caagctgctgtaggaacncaa

SEQ ID NO: 269815 - DNA, 21 bp, Artificial sequence
  SiRNA target sequence
  misc_feature (17)..(17): n is a, c, g, or t
aagctgctgtaggaacncaac

SEQ ID NO: 269816 - DNA, 21 bp, Artificial sequence
  SiRNA target sequence
  misc_feature (16)..(16): n is a, c, g, or t
agctgctgtaggaacncaacc

SEQ ID NO: 269817 - DNA, 21 bp, Artificial sequence
  SiRNA target sequence
  misc_feature (15)..(15): n is a, c, g, or t
gctgctgtaggaacncaacct

SEQ ID NO: 269818 - DNA, 21 bp, Artificial sequence
  SiRNA target sequence
  misc_feature (14)..(14): n is a, c, g, or t
ctgctgtaggaacncaacctt

SEQ ID NO: 269819 - DNA, 21 bp, Artificial sequence
  SiRNA target sequence
  misc_feature (13)..(13): n is a, c, g, or t
tgctgtaggaacncaaccttg

SEQ ID NO: 269820 - DNA, 21 bp, Artificial sequence
  SiRNA target sequence
  misc_feature (12)..(12): n is a, c, g, or t
gctgtaggaacncaaccttgg

SEQ ID NO: 269821 - DNA, 21 bp, Artificial sequence
  SiRNA target sequence
  misc_feature (11)..(11): n is a, c, g, or t
ctgtaggaacncaaccttggc

SEQ ID NO: 269822 - DNA, 21 bp, Artificial sequence
  SiRNA target sequence
  misc_feature (10)..(10): n is a, c, g, or t
tgtaggaacncaaccttggcg

SEQ ID NO: 269823 - DNA, 21 bp, Artificial sequence
  SiRNA target sequence
  misc_feature (9)..(9): n is a, c, g, or t
gtaggaacncaaccttggcgt

SEQ ID NO: 269824 - DNA, 21 bp, Artificial sequence
  SiRNA target sequence
  misc_feature (8)..(8): n is a, c, g, or t
taggaacncaaccttggcgta

SEQ ID NO: 269825 - DNA, 21 bp, Artificial sequence
  SiRNA target sequence
  misc_feature (7)..(7): n is a, c, g, or t
aggaacncaaccttggcgtac

SEQ ID NO: 269826 - DNA, 21 bp, Artificial sequence
  SiRNA target sequence
  misc_feature (6)..(6): n is a, c, g, or t
ggaacncaaccttggcgtacg

SEQ ID NO: 269827 - DNA, 21 bp, Artificial sequence
  SiRNA target sequence
  misc_feature (5)..(5): n is a, c, g, or t
gaacncaaccttggcgtacga

SEQ ID NO: 269828 - DNA, 21 bp, Artificial sequence
  SiRNA target sequence
  misc_feature (4)..(4): n is a, c, g, or t
aacncaaccttggcgtacgat

SEQ ID NO: 269829 - DNA, 21 bp, Artificial sequence
  SiRNA target sequence
  misc_feature (3)..(3): n is a, c, g, or t
acncaaccttggcgtacgatg

SEQ ID NO: 269830 - DNA, 21 bp, Artificial sequence
  SiRNA target sequence
  misc_feature (2)..(2): n is a, c, g, or t
cncaaccttggcgtacgatgg

SEQ ID NO: 269831 - DNA, 21 bp, Artificial sequence
  SiRNA target sequence
  misc_feature (1)..(1): n is a, c, g, or t
ncaaccttggcgtacgatggt

SEQ ID NO: 269832 - DNA, 21 bp, Artificial sequence
  SiRNA target sequence
caaccttggcgtacgatggtt

SEQ ID NO: 269833 - DNA, 21 bp, Artificial sequence
  SiRNA target sequence
aaccttggcgtacgatggttg

SEQ ID NO: 269834 - DNA, 21 bp, Artificial sequence
  SiRNA target sequence
accttggcgtacgatggttgt

SEQ ID NO: 269835 - DNA, 21 bp, Artificial sequence
  SiRNA target sequence
ccttggcgtacgatggttgtt

SEQ ID NO: 269836 - DNA, 21 bp, Artificial sequence
  SiRNA target sequence
cttggcgtacgatggttgttt

SEQ ID NO: 269837 - DNA, 21 bp, Artificial sequence
  SiRNA target sequence
ttggcgtacgatggttgtttg

SEQ ID NO: 269838 - DNA, 21 bp, Artificial sequence
  SiRNA target sequence
tggcgtacgatggttgtttgg

SEQ ID NO: 269839 - DNA, 21 bp, Artificial sequence
  SiRNA target sequence
ggcgtacgatggttgtttggc

SEQ ID NO: 269840 - DNA, 21 bp, Artificial sequence
  SiRNA target sequence
gcgtacgatggttgtttggcc

SEQ ID NO: 269841 - DNA, 21 bp, Artificial sequence
  SiRNA target sequence
cgtacgatggttgtttggcct

SEQ ID NO: 269842 - DNA, 21 bp, Artificial sequence
  SiRNA target sequence
gtacgatggttgtttggcctt

SEQ ID NO: 269843 - DNA, 21 bp, Artificial sequence
  SiRNA target sequence
tacgatggttgtttggccttc

SEQ ID NO: 269844 - DNA, 21 bp, Artificial sequence
  SiRNA target sequence
acgatggttgtttggccttct

SEQ ID NO: 269845 - DNA, 21 bp, Artificial sequence
  SiRNA target sequence
cgatggttgtttggccttctg

SEQ ID NO: 269846 - DNA, 21 bp, Artificial sequence
  SiRNA target sequence
gatggttgtttggccttctgg

SEQ ID NO: 269847 - DNA, 21 bp, Artificial sequence
  SiRNA target sequence
  misc_feature (21)..(21): n is a, c, g, or t
atggttgtttggccttctggn

SEQ ID NO: 269848 - DNA, 21 bp, Artificial sequence
  SiRNA target sequence
  misc_feature (20)..(20): n is a, c, g, or t
tggttgtttggccttctggnc

SEQ ID NO: 269849 - DNA, 21 bp, Artificial sequence
  SiRNA target sequence
  misc_feature (19)..(19): n is a, c, g, or t
ggttgtttggccttctggnca

SEQ ID NO: 269850 - DNA, 21 bp, Artificial sequence
  SiRNA target sequence
  misc_feature (18)..(18): n is a, c, g, or t
gttgtttggccttctggncat

SEQ ID NO: 269851 - DNA, 21 bp, Artificial sequence
  SiRNA target sequence
  misc_feature (17)..(17): n is a, c, g, or t
ttgtttggccttctggncatg

SEQ ID NO: 269852 - DNA, 21 bp, Artificial sequence
  SiRNA target sequence
  misc_feature (16)..(16): n is a, c, g, or t
tgtttggccttctggncatgg

SEQ ID NO: 269853 - DNA, 21 bp, Artificial sequence
  SiRNA target sequence
  misc_feature (15)..(15): n is a, c, g, or t
gtttggccttctggncatggt

SEQ ID NO: 269854 - DNA, 21 bp, Artificial sequence
  SiRNA target sequence
  misc_feature (14)..(14): n is a, c, g, or t
tttggccttctggncatggtt

SEQ ID NO: 269855 - DNA, 21 bp, Artificial sequence
  SiRNA target sequence
  misc_feature (13)..(13): n is a, c, g, or t
ttggccttctggncatggtta

SEQ ID NO: 269856 - DNA, 21 bp, Artificial sequence
  SiRNA target sequence
  misc_feature (12)..(12): n is a, c, g, or t
tggccttctggncatggttat

SEQ ID NO: 269857 - DNA, 21 bp, Artificial sequence
  SiRNA target sequence
  misc_feature (11)..(11): n is a, c, g, or t
ggccttctggncatggttata

SEQ ID NO: 269858 - DNA, 21 bp, Artificial sequence
  SiRNA target sequence
  misc_feature (10)..(10): n is a, c, g, or t
gccttctggncatggttataa

SEQ ID NO: 269859 - DNA, 21 bp, Artificial sequence
  SiRNA target sequence
  misc_feature (9)..(9): n is a, c, g, or t
ccttctggncatggttataat

SEQ ID NO: 269860 - DNA, 21 bp, Artificial sequence
  SiRNA target sequence
  misc_feature (8)..(8): n is a, c, g, or t
cttctggncatggttataata

SEQ ID NO: 269861 - DNA, 21 bp, Artificial sequence
  SiRNA target sequence
  misc_feature (7)..(7): n is a, c, g, or t
ttctggncatggttataatat

SEQ ID NO: 269862 - DNA, 21 bp, Artificial sequence
  SiRNA target sequence
  misc_feature (6)..(6): n is a, c, g, or t
tctggncatggttataatatt

SEQ ID NO: 269863 - DNA, 21 bp, Artificial sequence
  SiRNA target sequence
  misc_feature (5)..(5): n is a, c, g, or t
ctggncatggttataatattg

SEQ ID NO: 269864 - DNA, 21 bp, Artificial sequence
  SiRNA target sequence
  misc_feature (4)..(4): n is a, c, g, or t
tggncatggttataatattgg

SEQ ID NO: 269865 - DNA, 21 bp, Artificial sequence
  SiRNA target sequence
  misc_feature (3)..(3): n is a, c, g, or t
ggncatggttataatattggt

SEQ ID NO: 269866 - DNA, 21 bp, Artificial sequence
  SiRNA target sequence
  misc_feature (2)..(2): n is a, c, g, or t
gncatggttataatattggta

SEQ ID NO: 269867 - DNA, 21 bp, Artificial sequence
  SiRNA target sequence
  misc_feature (1)..(1): n is a, c, g, or t
ncatggttataatattggtat

SEQ ID NO: 269868 - DNA, 21 bp, Artificial sequence
  SiRNA target sequence
catggttataatattggtata

SEQ ID NO: 269869 - DNA, 21 bp, Artificial sequence
  SiRNA target sequence
atggttataatattggtatac

SEQ ID NO: 269870 - DNA, 21 bp, Artificial sequence
  SiRNA target sequence
tggttataatattggtatacc

SEQ ID NO: 269871 - DNA, 21 bp, Artificial sequence
  SiRNA target sequence
ggttataatattggtatacct

SEQ ID NO: 269872 - DNA, 21 bp, Artificial sequence
  SiRNA target sequence
gttataatattggtataccta

SEQ ID NO: 269873 - DNA, 21 bp, Artificial sequence
  SiRNA target sequence
ttataatattggtatacctac

SEQ ID NO: 269874 - DNA, 21 bp, Artificial sequence
  SiRNA target sequence
tataatattggtatacctacg

SEQ ID NO: 269875 - DNA, 21 bp, Artificial sequence
  SiRNA target sequence
ataatattggtatacctacgt

SEQ ID NO: 269876 - DNA, 21 bp, Artificial sequence
  SiRNA target sequence
taatattggtatacctacgta

SEQ ID NO: 269877 - DNA, 21 bp, Artificial sequence
  SiRNA target sequence
aatattggtatacctacgtat

SEQ ID NO: 269878 - DNA, 21 bp, Artificial sequence
  SiRNA target sequence
atattggtatacctacgtata

SEQ ID NO: 269879 - DNA, 21 bp, Artificial sequence
  SiRNA target sequence
tattggtatacctacgtataa

SEQ ID NO: 269880 - DNA, 21 bp, Artificial sequence
  SiRNA target sequence
attggtatacctacgtataat

SEQ ID NO: 269881 - DNA, 21 bp, Artificial sequence
  SiRNA target sequence
ttggtatacctacgtataatg

SEQ ID NO: 269882 - DNA, 21 bp, Artificial sequence
  SiRNA target sequence
tggtatacctacgtataatgc

SEQ ID NO: 269883 - DNA, 21 bp, Artificial sequence
  SiRNA target sequence
ggtatacctacgtataatgct

SEQ ID NO: 269884 - DNA, 21 bp, Artificial sequence
  SiRNA target sequence
gtatacctacgtataatgctg

SEQ ID NO: 269885 - DNA, 21 bp, Artificial sequence
  SiRNA target sequence
tatacctacgtataatgctga

SEQ ID NO: 269886 - DNA, 21 bp, Artificial sequence
  SiRNA target sequence
atacctacgtataatgctgaa

SEQ ID NO: 269887 - DNA, 21 bp, Artificial sequence
  SiRNA target sequence
tacctacgtataatgctgaac

SEQ ID NO: 269888 - DNA, 21 bp, Artificial sequence
  SiRNA target sequence
acctacgtataatgctgaacg

SEQ ID NO: 269889 - DNA, 21 bp, Artificial sequence
  SiRNA target sequence
cctacgtataatgctgaacga

SEQ ID NO: 269890 - DNA, 21 bp, Artificial sequence
  SiRNA target sequence
ctacgtataatgctgaacgag

SEQ ID NO: 269891 - DNA, 21 bp, Artificial sequence
  SiRNA target sequence
tacgtataatgctgaacgagc

SEQ ID NO: 269892 - DNA, 21 bp, Artificial sequence
  SiRNA target sequence
acgtataatgctgaacgagct

SEQ ID NO: 269893 - DNA, 21 bp, Artificial sequence
  SiRNA target sequence
cgtataatgctgaacgagctc

SEQ ID NO: 269894 - DNA, 21 bp, Artificial sequence
  SiRNA target sequence
gtataatgctgaacgagctcg

SEQ ID NO: 269895 - DNA, 21 bp, Artificial sequence
  SiRNA target sequence
tataatgctgaacgagctcgc

SEQ ID NO: 269896 - DNA, 21 bp, Artificial sequence
  SiRNA target sequence
ataatgctgaacgagctcgcc

SEQ ID NO: 269897 - DNA, 21 bp, Artificial sequence
  SiRNA target sequence
taatgctgaacgagctcgcca

SEQ ID NO: 269898 - DNA, 21 bp, Artificial sequence
  SiRNA target sequence
aatgctgaacgagctcgccag

SEQ ID NO: 269899 - DNA, 21 bp, Artificial sequence
  SiRNA target sequence
atgctgaacgagctcgccagc

SEQ ID NO: 269900 - DNA, 21 bp, Artificial sequence
  SiRNA target sequence
tgctgaacgagctcgccagct

SEQ ID NO: 269901 - DNA, 21 bp, Artificial sequence
  SiRNA target sequence
gctgaacgagctcgccagctt

SEQ ID NO: 269902 - DNA, 21 bp, Artificial sequence
  SiRNA target sequence
ctgaacgagctcgccagcttg

SEQ ID NO: 269903 - DNA, 21 bp, Artificial sequence
  SiRNA target sequence
tgaacgagctcgccagcttgc

SEQ ID NO: 269904 - DNA, 21 bp, Artificial sequence
  SiRNA target sequence
gaacgagctcgccagcttgca

SEQ ID NO: 269905 - DNA, 21 bp, Artificial sequence
  SiRNA target sequence
aacgagctcgccagcttgcac

SEQ ID NO: 269906 - DNA, 21 bp, Artificial sequence
  SiRNA target sequence
acgagctcgccagcttgcaca

SEQ ID NO: 269907 - DNA, 21 bp, Artificial sequence
  SiRNA target sequence
cgagctcgccagcttgcacaa

SEQ ID NO: 269908 - DNA, 21 bp, Artificial sequence
  SiRNA target sequence
gagctcgccagcttgcacaac

SEQ ID NO: 269909 - DNA, 21 bp, Artificial sequence
  SiRNA target sequence
agctcgccagcttgcacaaca

SEQ ID NO: 269910 - DNA, 21 bp, Artificial sequence
  SiRNA target sequence
gctcgccagcttgcacaacac

SEQ ID NO: 269911 - DNA, 21 bp, Artificial sequence
  SiRNA target sequence
ctcgccagcttgcacaacact

SEQ ID NO: 269912 - DNA, 21 bp, Artificial sequence
  SiRNA target sequence
tcgccagcttgcacaacactt

SEQ ID NO: 269913 - DNA, 21 bp, Artificial sequence
  SiRNA target sequence
cgccagcttgcacaacactta

SEQ ID NO: 269914 - DNA, 21 bp, Artificial sequence
  SiRNA target sequence
gccagcttgcacaacacttat

SEQ ID NO: 269915 - DNA, 21 bp, Artificial sequence
  SiRNA target sequence
ccagcttgcacaacacttata

SEQ ID NO: 269916 - DNA, 21 bp, Artificial sequence
  SiRNA target sequence
cagcttgcacaacacttatat

SEQ ID NO: 269917 - DNA, 21 bp, Artificial sequence
  SiRNA target sequence
agcttgcacaacacttatatg

SEQ ID NO: 269918 - DNA, 21 bp, Artificial sequence
  SiRNA target sequence
gcttgcacaacacttatatgg

SEQ ID NO: 269919 - DNA, 21 bp, Artificial sequence
  SiRNA target sequence
cttgcacaacacttatatggt

SEQ ID NO: 269920 - DNA, 21 bp, Artificial sequence
  SiRNA target sequence
ttgcacaacacttatatggtg

SEQ ID NO: 269921 - DNA, 21 bp, Artificial sequence
  SiRNA target sequence
tgcacaacacttatatggtgg

SEQ ID NO: 269922 - DNA, 21 bp, Artificial sequence
  SiRNA target sequence
gcacaacacttatatggtggt

SEQ ID NO: 269923 - DNA, 21 bp, Artificial sequence
  SiRNA target sequence
cacaacacttatatggtggtg

SEQ ID NO: 269924 - DNA, 21 bp, Artificial sequence
  SiRNA target sequence
acaacacttatatggtggtgg

SEQ ID NO: 269925 - DNA, 21 bp, Artificial sequence
  SiRNA target sequence
caacacttatatggtggtgga

SEQ ID NO: 269926 - DNA, 21 bp, Artificial sequence
  SiRNA target sequence
aacacttatatggtggtggat

SEQ ID NO: 269927 - DNA, 21 bp, Artificial sequence
  SiRNA target sequence
acacttatatggtggtggatc

SEQ ID NO: 269928 - DNA, 21 bp, Artificial sequence
  SiRNA target sequence
cacttatatggtggtggatca

SEQ ID NO: 269929 - DNA, 21 bp, Artificial sequence
  SiRNA target sequence
acttatatggtggtggatcat

SEQ ID NO: 269930 - DNA, 21 bp, Artificial sequence
  SiRNA target sequence
cttatatggtggtggatcatt

SEQ ID NO: 269931 - DNA, 21 bp, Artificial sequence
  SiRNA target sequence
ttatatggtggtggatcatta

SEQ ID NO: 269932 - DNA, 21 bp, Artificial sequence
  SiRNA target sequence
tatatggtggtggatcattaa

SEQ ID NO: 269933 - DNA, 21 bp, Artificial sequence
  SiRNA target sequence
atatggtggtggatcattaac

SEQ ID NO: 269934 - DNA, 21 bp, Artificial sequence
  SiRNA target sequence
tatggtggtggatcattaact

SEQ ID NO: 269935 - DNA, 21 bp, Artificial sequence
  SiRNA target sequence
atggtggtggatcattaactg

SEQ ID NO: 269936 - DNA, 21 bp, Artificial sequence
  SiRNA target sequence
tggtggtggatcattaactga

SEQ ID NO: 269937 - DNA, 21 bp, Artificial sequence
  SiRNA target sequence
ggtggtggatcattaactgat

SEQ ID NO: 269938 - DNA, 21 bp, Artificial sequence
  SiRNA target sequence
gtggtggatcattaactgatg

SEQ ID NO: 269939 - DNA, 21 bp, Artificial sequence
  SiRNA target sequence
tggtggatcattaactgatga

SEQ ID NO: 269940 - DNA, 21 bp, Artificial sequence
  SiRNA target sequence
ggtggatcattaactgatgag

SEQ ID NO: 269941 - DNA, 21 bp, Artificial sequence
  SiRNA target sequence
gtggatcattaactgatgaga

SEQ ID NO: 269942 - DNA, 21 bp, Artificial sequence
  SiRNA target sequence
tggatcattaactgatgagaa

SEQ ID NO: 269943 - DNA, 21 bp, Artificial sequence
  SiRNA target sequence
ggatcattaactgatgagaag

SEQ ID NO: 269944 - DNA, 21 bp, Artificial sequence
  SiRNA target sequence
gatcattaactgatgagaagg

SEQ ID NO: 269945 - DNA, 21 bp, Artificial sequence
  SiRNA target sequence
atcattaactgatgagaaggc

SEQ ID NO: 269946 - DNA, 21 bp, Artificial sequence
  SiRNA target sequence
tcattaactgatgagaaggcc

SEQ ID NO: 269947 - DNA, 21 bp, Artificial sequence
  SiRNA target sequence
cattaactgatgagaaggcca

SEQ ID NO: 269948 - DNA, 21 bp, Artificial sequence
  SiRNA target sequence
attaactgatgagaaggccaa

SEQ ID NO: 269949 - DNA, 21 bp, Artificial sequence
  SiRNA target sequence
ttaactgatgagaaggccaaa

SEQ ID NO: 269950 - DNA, 21 bp, Artificial sequence
  SiRNA target sequence
taactgatgagaaggccaaac

SEQ ID NO: 269951 - DNA, 21 bp, Artificial sequence
  SiRNA target sequence
aactgatgagaaggccaaaca

SEQ ID NO: 269952 - DNA, 21 bp, Artificial sequence
  SiRNA target sequence
actgatgagaaggccaaacaa

SEQ ID NO: 269953 - DNA, 21 bp, Artificial sequence
  SiRNA target sequence
ctgatgagaaggccaaacaat

SEQ ID NO: 269954 - DNA, 21 bp, Artificial sequence
  SiRNA target sequence
tgatgagaaggccaaacaatt

SEQ ID NO: 269955 - DNA, 21 bp, Artificial sequence
  SiRNA target sequence
gatgagaaggccaaacaatta

SEQ ID NO: 269956 - DNA, 21 bp, Artificial sequence
  SiRNA target sequence
atgagaaggccaaacaattat

SEQ ID NO: 269957 - DNA, 21 bp, Artificial sequence
  SiRNA target sequence
tgagaaggccaaacaattatt

SEQ ID NO: 269958 - DNA, 21 bp, Artificial sequence
  SiRNA target sequence
gagaaggccaaacaattattt

SEQ ID NO: 269959 - DNA, 21 bp, Artificial sequence
  SiRNA target sequence
agaaggccaaacaattatttg

SEQ ID NO: 269960 - DNA, 21 bp, Artificial sequence
  SiRNA target sequence
gaaggccaaacaattatttgt

SEQ ID NO: 269961 - DNA, 21 bp, Artificial sequence
  SiRNA target sequence
aaggccaaacaattatttgtt

SEQ ID NO: 269962 - DNA, 21 bp, Artificial sequence
  SiRNA target sequence
aggccaaacaattatttgttc

SEQ ID NO: 269963 - DNA, 21 bp, Artificial sequence
  SiRNA target sequence
ggccaaacaattatttgttcc

SEQ ID NO: 269964 - DNA, 21 bp, Artificial sequence
  SiRNA target sequence
gccaaacaattatttgttcct

SEQ ID NO: 269965 - DNA, 21 bp, Artificial sequence
  SiRNA target sequence
ccaaacaattatttgttcctg

SEQ ID NO: 269966 - DNA, 21 bp, Artificial sequence
  SiRNA target sequence
caaacaattatttgttcctgc

SEQ ID NO: 269967 - DNA, 21 bp, Artificial sequence
  SiRNA target sequence
aaacaattatttgttcctgct

SEQ ID NO: 269968 - DNA, 21 bp, Artificial sequence
  SiRNA target sequence
aacaattatttgttcctgcta

SEQ ID NO: 269969 - DNA, 21 bp, Artificial sequence
  SiRNA target sequence
acaattatttgttcctgctaa

SEQ ID NO: 269970 - DNA, 21 bp, Artificial sequence
  SiRNA target sequence
caattatttgttcctgctaat

SEQ ID NO: 269971 - DNA, 21 bp, Artificial sequence
  SiRNA target sequence
aattatttgttcctgctaatc

SEQ ID NO: 269972 - DNA, 21 bp, Artificial sequence
  SiRNA target sequence
attatttgttcctgctaatca

SEQ ID NO: 269973 - DNA, 21 bp, Artificial sequence
  SiRNA target sequence
ttatttgttcctgctaatcaa

SEQ ID NO: 269974 - DNA, 21 bp, Artificial sequence
  SiRNA target sequence
tatttgttcctgctaatcaac

SEQ ID NO: 269975 - DNA, 21 bp, Artificial sequence
  SiRNA target sequence
atttgttcctgctaatcaaca

SEQ ID NO: 269976 - DNA, 21 bp, Artificial sequence
  SiRNA target sequence
tttgttcctgctaatcaacaa

SEQ ID NO: 269977 - DNA, 21 bp, Artificial sequence
  SiRNA target sequence
ttgttcctgctaatcaacaag

SEQ ID NO: 269978 - DNA, 21 bp, Artificial sequence
  SiRNA target sequence
tgttcctgctaatcaacaagg

SEQ ID NO: 269979 - DNA, 21 bp, Artificial sequence
  SiRNA target sequence
gttcctgctaatcaacaagga

SEQ ID NO: 269980 - DNA, 21 bp, Artificial sequence
  SiRNA target sequence
ttcctgctaatcaacaaggac

SEQ ID NO: 269981 - DNA, 21 bp, Artificial sequence
  SiRNA target sequence
tcctgctaatcaacaaggacc

SEQ ID NO: 269982 - DNA, 21 bp, Artificial sequence
  SiRNA target sequence
cctgctaatcaacaaggacct

SEQ ID NO: 269983 - DNA, 21 bp, Artificial sequence
  SiRNA target sequence
ctgctaatcaacaaggacctg

SEQ ID NO: 269984 - DNA, 21 bp, Artificial sequence
  SiRNA target sequence
tgctaatcaacaaggacctgg

SEQ ID NO: 269985 - DNA, 21 bp, Artificial sequence
  SiRNA target sequence
gctaatcaacaaggacctggt

SEQ ID NO: 269986 - DNA, 21 bp, Artificial sequence
  SiRNA target sequence
ctaatcaacaaggacctggta

SEQ ID NO: 269987 - DNA, 21 bp, Artificial sequence
  SiRNA target sequence
taatcaacaaggacctggtaa

SEQ ID NO: 269988 - DNA, 21 bp, Artificial sequence
  SiRNA target sequence
aatcaacaaggacctggtaag

SEQ ID NO: 269989 - DNA, 21 bp, Artificial sequence
  SiRNA target sequence
atcaacaaggacctggtaagg

SEQ ID NO: 269990 - DNA, 21 bp, Artificial sequence
  SiRNA target sequence
tcaacaaggacctggtaaggt

SEQ ID NO: 269991 - DNA, 21 bp, Artificial sequence
  SiRNA target sequence
caacaaggacctggtaaggta

SEQ ID NO: 269992 - DNA, 21 bp, Artificial sequence
  SiRNA target sequence
aacaaggacctggtaaggtaa

SEQ ID NO: 269993 - DNA, 21 bp, Artificial sequence
  SiRNA target sequence
acaaggacctggtaaggtaag

SEQ ID NO: 269994 - DNA, 21 bp, Artificial sequence
  SiRNA target sequence
caaggacctggtaaggtaagt

SEQ ID NO: 269995 - DNA, 21 bp, Artificial sequence
  SiRNA target sequence
aaggacctggtaaggtaagta

SEQ ID NO: 269996 - DNA, 21 bp, Artificial sequence
  SiRNA target sequence
aggacctggtaaggtaagtaa

SEQ ID NO: 269997 - DNA, 21 bp, Artificial sequence
  SiRNA target sequence
ggacctggtaaggtaagtaat

SEQ ID NO: 269998 - DNA, 21 bp, Artificial sequence
  SiRNA target sequence
gacctggtaaggtaagtaatg

SEQ ID NO: 269999 - DNA, 21 bp, Artificial sequence
  SiRNA target sequence
acctggtaaggtaagtaatgg

SEQ ID NO: 270000 - DNA, 21 bp, Artificial sequence
  SiRNA target sequence
cctggtaaggtaagtaatgga

SEQ ID NO: 270001 - DNA, 21 bp, Artificial sequence
  SiRNA target sequence
ctggtaaggtaagtaatggaa

SEQ ID NO: 270002 - DNA, 21 bp, Artificial sequence
  SiRNA target sequence
tggtaaggtaagtaatggaaa

SEQ ID NO: 270003 - DNA, 21 bp, Artificial sequence
  SiRNA target sequence
ggtaaggtaagtaatggaaat

SEQ ID NO: 270004 - DNA, 21 bp, Artificial sequence
  SiRNA target sequence
gtaaggtaagtaatggaaatc

SEQ ID NO: 270005 - DNA, 21 bp, Artificial sequence
  SiRNA target sequence
taaggtaagtaatggaaatcc

SEQ ID NO: 270006 - DNA, 21 bp, Artificial sequence
  SiRNA target sequence
aaggtaagtaatggaaatccg

SEQ ID NO: 270007 - DNA, 21 bp, Artificial sequence
  SiRNA target sequence
aggtaagtaatggaaatccgg

SEQ ID NO: 270008 - DNA, 21 bp, Artificial sequence
  SiRNA target sequence
ggtaagtaatggaaatccggt

SEQ ID NO: 270009 - DNA, 21 bp, Artificial sequence
  SiRNA target sequence
gtaagtaatggaaatccggta

SEQ ID NO: 270010 - DNA, 21 bp, Artificial sequence
  SiRNA target sequence
taagtaatggaaatccggtat

SEQ ID NO: 270011 - DNA, 21 bp, Artificial sequence
  SiRNA target sequence
aagtaatggaaatccggtatg

SEQ ID NO: 270012 - DNA, 21 bp, Artificial sequence
  SiRNA target sequence
agtaatggaaatccggtatgg

SEQ ID NO: 270013 - DNA, 21 bp, Artificial sequence
  SiRNA target sequence
gtaatggaaatccggtatggg

SEQ ID NO: 270014 - DNA, 21 bp, Artificial sequence
  SiRNA target sequence
taatggaaatccggtatggga

SEQ ID NO: 270015 - DNA, 21 bp, Artificial sequence
  SiRNA target sequence
aatggaaatccggtatgggaa

SEQ ID NO: 270016 - DNA, 21 bp, Artificial sequence
  SiRNA target sequence
atggaaatccggtatgggaag

SEQ ID NO: 270017 - DNA, 21 bp, Artificial sequence
  SiRNA target sequence
tggaaatccggtatgggaagt

SEQ ID NO: 270018 - DNA, 21 bp, Artificial sequence
  SiRNA target sequence
ggaaatccggtatgggaagtc

SEQ ID NO: 270019 - DNA, 21 bp, Artificial sequence
  SiRNA target sequence
gaaatccggtatgggaagtca

SEQ ID NO: 270020 - DNA, 21 bp, Artificial sequence
  SiRNA target sequence
aaatccggtatgggaagtcat

SEQ ID NO: 270021 - DNA, 21 bp, Artificial sequence
  SiRNA target sequence
aatccggtatgggaagtcatg

SEQ ID NO: 270022 - DNA, 21 bp, Artificial sequence
  SiRNA target sequence
atccggtatgggaagtcatgc

SEQ ID NO: 270023 - DNA, 21 bp, Artificial sequence
  SiRNA target sequence
tccggtatgggaagtcatgcg

SEQ ID NO: 270024 - DNA, 21 bp, Artificial sequence
  SiRNA target sequence
ccggtatgggaagtcatgcgt

SEQ ID NO: 270025 - DNA, 21 bp, Artificial sequence
  SiRNA target sequence
cggtatgggaagtcatgcgtg

SEQ ID NO: 270026 - DNA, 21 bp, Artificial sequence
  SiRNA target sequence
ggtatgggaagtcatgcgtgc

SEQ ID NO: 270027 - DNA, 21 bp, Artificial sequence
  SiRNA target sequence
gtatgggaagtcatgcgtgca

SEQ ID NO: 270028 - DNA, 21 bp, Artificial sequence
  SiRNA target sequence
tatgggaagtcatgcgtgcac

SEQ ID NO: 270029 - DNA, 21 bp, Artificial sequence
  SiRNA target sequence
atgggaagtcatgcgtgcacc

SEQ ID NO: 270030 - DNA, 21 bp, Artificial sequence
  SiRNA target sequence
tgggaagtcatgcgtgcacca

SEQ ID NO: 270031 - DNA, 21 bp, Artificial sequence
  SiRNA target sequence
gggaagtcatgcgtgcaccat

SEQ ID NO: 270032 - DNA, 21 bp, Artificial sequence
  SiRNA target sequence
ggaagtcatgcgtgcaccatt

SEQ ID NO: 270033 - DNA, 21 bp, Artificial sequence
  SiRNA target sequence
gaagtcatgcgtgcaccattg

SEQ ID NO: 270034 - DNA, 21 bp, Artificial sequence
  SiRNA target sequence
aagtcatgcgtgcaccattgg

SEQ ID NO: 270035 - DNA, 21 bp, Artificial sequence
  SiRNA target sequence
agtcatgcgtgcaccattggc

SEQ ID NO: 270036 - DNA, 21 bp, Artificial sequence
  SiRNA target sequence
gtcatgcgtgcaccattggca

SEQ ID NO: 270037 - DNA, 21 bp, Artificial sequence
  SiRNA target sequence
tcatgcgtgcaccattggcaa

SEQ ID NO: 270038 - DNA, 21 bp, Artificial sequence
  SiRNA target sequence
catgcgtgcaccattggcaac

SEQ ID NO: 270039 - DNA, 21 bp, Artificial sequence
  SiRNA target sequence
atgcgtgcaccattggcaaca

SEQ ID NO: 270040 - DNA, 21 bp, Artificial sequence
  SiRNA target sequence
tgcgtgcaccattggcaacac

SEQ ID NO: 270041 - DNA, 21 bp, Artificial sequence
  SiRNA target sequence
gcgtgcaccattggcaacaca

SEQ ID NO: 270042 - DNA, 21 bp, Artificial sequence
  SiRNA target sequence
cgtgcaccattggcaacacag

SEQ ID NO: 270043 - DNA, 21 bp, Artificial sequence
  SiRNA target sequence
gtgcaccattggcaacacagc

SEQ ID NO: 270044 - DNA, 21 bp, Artificial sequence
  SiRNA target sequence
tgcaccattggcaacacagcg

SEQ ID NO: 270045 - DNA, 21 bp, Artificial sequence
  SiRNA target sequence
gcaccattggcaacacagcgt

SEQ ID NO: 270046 - DNA, 21 bp, Artificial sequence
  SiRNA target sequence
caccattggcaacacagcgtg

SEQ ID NO: 270047 - DNA, 21 bp, Artificial sequence
  SiRNA target sequence
accattggcaacacagcgtgc

SEQ ID NO: 270048 - DNA, 21 bp, Artificial sequence
  SiRNA target sequence
ccattggcaacacagcgtgcg

SEQ ID NO: 270049 - DNA, 21 bp, Artificial sequence
  SiRNA target sequence
cattggcaacacagcgtgcgc

SEQ ID NO: 270050 - DNA, 21 bp, Artificial sequence
  SiRNA target sequence
attggcaacacagcgtgcgca

SEQ ID NO: 270051 - DNA, 21 bp, Artificial sequence
  SiRNA target sequence
ttggcaacacagcgtgcgcat

SEQ ID NO: 270052 - DNA, 21 bp, Artificial sequence
  SiRNA target sequence
tggcaacacagcgtgcgcata

SEQ ID NO: 270053 - DNA, 21 bp, Artificial sequence
  SiRNA target sequence
ggcaacacagcgtgcgcatat

SEQ ID NO: 270054 - DNA, 21 bp, Artificial sequence
  SiRNA target sequence
gcaacacagcgtgcgcatatt

SEQ ID NO: 270055 - DNA, 21 bp, Artificial sequence
  SiRNA target sequence
caacacagcgtgcgcatattc

SEQ ID NO: 270056 - DNA, 21 bp, Artificial sequence
  SiRNA target sequence
aacacagcgtgcgcatattca

SEQ ID NO: 270057 - DNA, 21 bp, Artificial sequence
  SiRNA target sequence
acacagcgtgcgcatattcaa

SEQ ID NO: 270058 - DNA, 21 bp, Artificial sequence
  SiRNA target sequence
cacagcgtgcgcatattcaag

SEQ ID NO: 270059 - DNA, 21 bp, Artificial sequence
  SiRNA target sequence
acagcgtgcgcatattcaaga

SEQ ID NO: 270060 - DNA, 21 bp, Artificial sequence
  SiRNA target sequence
cagcgtgcgcatattcaagat

SEQ ID NO: 270061 - DNA, 21 bp, Artificial sequence
  SiRNA target sequence
agcgtgcgcatattcaagatt

SEQ ID NO: 270062 - DNA, 21 bp, Artificial sequence
  SiRNA target sequence
gcgtgcgcatattcaagattt

SEQ ID NO: 270063 - DNA, 21 bp, Artificial sequence
  SiRNA target sequence
cgtgcgcatattcaagatttt

SEQ ID NO: 270064 - DNA, 21 bp, Artificial sequence
  SiRNA target sequence
gtgcgcatattcaagattttg

SEQ ID NO: 270065 - DNA, 21 bp, Artificial sequence
  SiRNA target sequence
tgcgcatattcaagattttga

SEQ ID NO: 270066 - DNA, 21 bp, Artificial sequence
  SiRNA target sequence
gcgcatattcaagattttgaa

SEQ ID NO: 270067 - DNA, 21 bp, Artificial sequence
  SiRNA target sequence
cgcatattcaagattttgaat

SEQ ID NO: 270068 - DNA, 21 bp, Artificial sequence
  SiRNA target sequence
gcatattcaagattttgaatt

SEQ ID NO: 270069 - DNA, 21 bp, Artificial sequence
  SiRNA target sequence
catattcaagattttgaattt

SEQ ID NO: 270070 - DNA, 21 bp, Artificial sequence
  SiRNA target sequence
atattcaagattttgaattta

SEQ ID NO: 270071 - DNA, 21 bp, Artificial sequence
  SiRNA target sequence
tattcaagattttgaatttat

SEQ ID NO: 270072 - DNA, 21 bp, Artificial sequence
  SiRNA target sequence
attcaagattttgaatttatt

SEQ ID NO: 270073 - DNA, 21 bp, Artificial sequence
  SiRNA target sequence
ttcaagattttgaatttattg

SEQ ID NO: 270074 - DNA, 21 bp, Artificial sequence
  SiRNA target sequence
tcaagattttgaatttattga

SEQ ID NO: 270075 - DNA, 21 bp, Artificial sequence
  SiRNA target sequence
caagattttgaatttattgaa

SEQ ID NO: 270076 - DNA, 21 bp, Artificial sequence
  SiRNA target sequence
aagattttgaatttattgaag

SEQ ID NO: 270077 - DNA, 21 bp, Artificial sequence
  SiRNA target sequence
agattttgaatttattgaagc

SEQ ID NO: 270078 - DNA, 21 bp, Artificial sequence
  SiRNA target sequence
gattttgaatttattgaagct

SEQ ID NO: 270079 - DNA, 21 bp, Artificial sequence
  SiRNA target sequence
attttgaatttattgaagcta

SEQ ID NO: 270080 - DNA, 21 bp, Artificial sequence
  SiRNA target sequence
ttttgaatttattgaagctat

SEQ ID NO: 270081 - DNA, 21 bp, Artificial sequence
  SiRNA target sequence
tttgaatttattgaagctatt

SEQ ID NO: 270082 - DNA, 21 bp, Artificial sequence
  SiRNA target sequence
ttgaatttattgaagctattc

SEQ ID NO: 270083 - DNA, 21 bp, Artificial sequence
  SiRNA target sequence
tgaatttattgaagctattcc

SEQ ID NO: 270084 - DNA, 21 bp, Artificial sequence
  SiRNA target sequence
gaatttattgaagctattcca

SEQ ID NO: 270085 - DNA, 21 bp, Artificial sequence
  SiRNA target sequence
aatttattgaagctattccag

SEQ ID NO: 270086 - DNA, 21 bp, Artificial sequence
  SiRNA target sequence
atttattgaagctattccaga

SEQ ID NO: 270087 - DNA, 21 bp, Artificial sequence
  SiRNA target sequence
tttattgaagctattccagaa

SEQ ID NO: 270088 - DNA, 21 bp, Artificial sequence
  SiRNA target sequence
ttattgaagctattccagaag

SEQ ID NO: 270089 - DNA, 21 bp, Artificial sequence
  SiRNA target sequence
tattgaagctattccagaagg

SEQ ID NO: 270090 - DNA, 21 bp, Artificial sequence
  SiRNA target sequence
attgaagctattccagaagga

SEQ ID NO: 270091 - DNA, 21 bp, Artificial sequence
  SiRNA target sequence
ttgaagctattccagaaggag

SEQ ID NO: 270092 - DNA, 21 bp, Artificial sequence
  SiRNA target sequence
tgaagctattccagaaggaga

SEQ ID NO: 270093 - DNA, 21 bp, Artificial sequence
  SiRNA target sequence
gaagctattccagaaggagag

SEQ ID NO: 270094 - DNA, 21 bp, Artificial sequence
  SiRNA target sequence
aagctattccagaaggagagg

SEQ ID NO: 270095 - DNA, 21 bp, Artificial sequence
  SiRNA target sequence
agctattccagaaggagagga

SEQ ID NO: 270096 - DNA, 21 bp, Artificial sequence
  SiRNA target sequence
gctattccagaaggagaggag

SEQ ID NO: 270097 - DNA, 21 bp, Artificial sequence
  SiRNA target sequence
ctattccagaaggagaggagt

SEQ ID NO: 270098 - DNA, 21 bp, Artificial sequence
  SiRNA target sequence
tattccagaaggagaggagtc

SEQ ID NO: 270099 - DNA, 21 bp, Artificial sequence
  SiRNA target sequence
attccagaaggagaggagtct

SEQ ID NO: 270100 - DNA, 21 bp, Artificial sequence
  SiRNA target sequence
ttccagaaggagaggagtctc

SEQ ID NO: 270101 - DNA, 21 bp, Artificial sequence
  SiRNA target sequence
tccagaaggagaggagtctcg

SEQ ID NO: 270102 - DNA, 21 bp, Artificial sequence
  SiRNA target sequence
ccagaaggagaggagtctcgt

SEQ ID NO: 270103 - DNA, 21 bp, Artificial sequence
  SiRNA target sequence
cagaaggagaggagtctcgta

SEQ ID NO: 270104 - DNA, 21 bp, Artificial sequence
  SiRNA target sequence
agaaggagaggagtctcgtaa

SEQ ID NO: 270105 - DNA, 21 bp, Artificial sequence
  SiRNA target sequence
gaaggagaggagtctcgtaat

SEQ ID NO: 270106 - DNA, 21 bp, Artificial sequence
  SiRNA target sequence
aaggagaggagtctcgtaata

SEQ ID NO: 270107 - DNA, 21 bp, Artificial sequence
  SiRNA target sequence
aggagaggagtctcgtaatac

SEQ ID NO: 270108 - DNA, 21 bp, Artificial sequence
  SiRNA target sequence
ggagaggagtctcgtaatact

SEQ ID NO: 270109 - DNA, 21 bp, Artificial sequence
  SiRNA target sequence
gagaggagtctcgtaatacta

SEQ ID NO: 270110 - DNA, 21 bp, Artificial sequence
  SiRNA target sequence
agaggagtctcgtaatactac

SEQ ID NO: 270111 - DNA, 21 bp, Artificial sequence
  SiRNA target sequence
gaggagtctcgtaatactaca

SEQ ID NO: 270112 - DNA, 21 bp, Artificial sequence
  SiRNA target sequence
aggagtctcgtaatactacag

SEQ ID NO: 270113 - DNA, 21 bp, Artificial sequence
  SiRNA target sequence
ggagtctcgtaatactacagt

SEQ ID NO: 270114 - DNA, 21 bp, Artificial sequence
  SiRNA target sequence
gagtctcgtaatactacagtc

SEQ ID NO: 270115 - DNA, 21 bp, Artificial sequence
  SiRNA target sequence
agtctcgtaatactacagtct

SEQ ID NO: 270116 - DNA, 21 bp, Artificial sequence
  SiRNA target sequence
gtctcgtaatactacagtctt

SEQ ID NO: 270117 - DNA, 21 bp, Artificial sequence
  SiRNA target sequence
tctcgtaatactacagtcttg

SEQ ID NO: 270118 - DNA, 21 bp, Artificial sequence
  SiRNA target sequence
ctcgtaatactacagtcttgg

SEQ ID NO: 270119 - DNA, 21 bp, Artificial sequence
  SiRNA target sequence
tcgtaatactacagtcttgga

SEQ ID NO: 270120 - DNA, 21 bp, Artificial sequence
  SiRNA target sequence
cgtaatactacagtcttggat

SEQ ID NO: 270121 - DNA, 21 bp, Artificial sequence
  SiRNA target sequence
gtaatactacagtcttggata

SEQ ID NO: 270122 - DNA, 21 bp, Artificial sequence
  SiRNA target sequence
taatactacagtcttggatac

SEQ ID NO: 270123 - DNA, 21 bp, Artificial sequence
  SiRNA target sequence
aatactacagtcttggatacg

SEQ ID NO: 270124 - DNA, 21 bp, Artificial sequence
  SiRNA target sequence
atactacagtcttggatacga

SEQ ID NO: 270125 - DNA, 21 bp, Artificial sequence
  SiRNA target sequence
tactacagtcttggatacgac

SEQ ID NO: 270126 - DNA, 21 bp, Artificial sequence
  SiRNA target sequence
actacagtcttggatacgacc

SEQ ID NO: 270127 - DNA, 21 bp, Artificial sequence
  SiRNA target sequence
ctacagtcttggatacgacca

SEQ ID NO: 270128 - DNA, 21 bp, Artificial sequence
  SiRNA target sequence
tacagtcttggatacgaccac

SEQ ID NO: 270129 - DNA, 21 bp, Artificial sequence
  SiRNA target sequence
acagtcttggatacgaccact

SEQ ID NO: 270130 - DNA, 21 bp, Artificial sequence
  SiRNA target sequence
cagtcttggatacgaccacta

SEQ ID NO: 270131 - DNA, 21 bp, Artificial sequence
  SiRNA target sequence
agtcttggatacgaccactac

SEQ ID NO: 270132 - DNA, 21 bp, Artificial sequence
  SiRNA target sequence
gtcttggatacgaccactact

SEQ ID NO: 270133 - DNA, 21 bp, Artificial sequence
  SiRNA target sequence
tcttggatacgaccactactt

SEQ ID NO: 270134 - DNA, 21 bp, Artificial sequence
  SiRNA target sequence
cttggatacgaccactacttt

SEQ ID NO: 270135 - DNA, 21 bp, Artificial sequence
  SiRNA target sequence
ttggatacgaccactacttta

SEQ ID NO: 270136 - DNA, 21 bp, Artificial sequence
  SiRNA target sequence
tggatacgaccactactttac

SEQ ID NO: 270137 - DNA, 21 bp, Artificial sequence
  SiRNA target sequence
ggatacgaccactactttaca

SEQ ID NO: 270138 - DNA, 21 bp, Artificial sequence
  SiRNA target sequence
gatacgaccactactttacag

SEQ ID NO: 270139 - DNA, 21 bp, Artificial sequence
  SiRNA target sequence
atacgaccactactttacagt

SEQ ID NO: 270140 - DNA, 21 bp, Artificial sequence
  SiRNA target sequence
tacgaccactactttacagtc

SEQ ID NO: 270141 - DNA, 21 bp, Artificial sequence
  SiRNA target sequence
acgaccactactttacagtcg

SEQ ID NO: 270142 - DNA, 21 bp, Artificial sequence
  SiRNA target sequence
cgaccactactttacagtcga

SEQ ID NO: 270143 - DNA, 21 bp, Artificial sequence
  SiRNA target sequence
gaccactactttacagtcgag

SEQ ID NO: 270144 - DNA, 21 bp, Artificial sequence
  SiRNA target sequence
accactactttacagtcgagt

SEQ ID NO: 270145 - DNA, 21 bp, Artificial sequence
  SiRNA target sequence
ccactactttacagtcgagtg

SEQ ID NO: 270146 - DNA, 21 bp, Artificial sequence
  SiRNA target sequence
cactactttacagtcgagtgg

SEQ ID NO: 270147 - DNA, 21 bp, Artificial sequence
  SiRNA target sequence
actactttacagtcgagtgga

SEQ ID NO: 270148 - DNA, 21 bp, Artificial sequence
  SiRNA target sequence
ctactttacagtcgagtggat

SEQ ID NO: 270149 - DNA, 21 bp, Artificial sequence
  SiRNA target sequence
tactttacagtcgagtggatt

SEQ ID NO: 270150 - DNA, 21 bp, Artificial sequence
  SiRNA target sequence
actttacagtcgagtggattt

SEQ ID NO: 270151 - DNA, 21 bp, Artificial sequence
  SiRNA target sequence
ctttacagtcgagtggatttg

SEQ ID NO: 270152 - DNA, 21 bp, Artificial sequence
  SiRNA target sequence
tttacagtcgagtggatttgg

SEQ ID NO: 270153 - DNA, 21 bp, Artificial sequence
  SiRNA target sequence
ttacagtcgagtggatttggt

SEQ ID NO: 270154 - DNA, 21 bp, Artificial sequence
  SiRNA target sequence
tacagtcgagtggatttggtc

SEQ ID NO: 270155 - DNA, 21 bp, Artificial sequence
  SiRNA target sequence
acagtcgagtggatttggtcg

SEQ ID NO: 270156 - DNA, 21 bp, Artificial sequence
  SiRNA target sequence
cagtcgagtggatttggtcgc

SEQ ID NO: 270157 - DNA, 21 bp, Artificial sequence
  SiRNA target sequence
agtcgagtggatttggtcgcg

SEQ ID NO: 270158 - DNA, 21 bp, Artificial sequence
  SiRNA target sequence
gtcgagtggatttggtcgcgc

SEQ ID NO: 270159 - DNA, 21 bp, Artificial sequence
  SiRNA target sequence
  misc_feature (21)..(21): n is a, c, g, or t
tcgagtggatttggtcgcgcn

SEQ ID NO: 270160 - DNA, 21 bp, Artificial sequence
  SiRNA target sequence
  misc_feature (20)..(20): n is a, c, g, or t
cgagtggatttggtcgcgcnt

SEQ ID NO: 270161 - DNA, 21 bp, Artificial sequence
  SiRNA target sequence
  misc_feature (19)..(19): n is a, c, g, or t
gagtggatttggtcgcgcntt

SEQ ID NO: 270162 - DNA, 21 bp, Artificial sequence
  SiRNA target sequence
  misc_feature (18)..(18): n is a, c, g, or t
agtggatttggtcgcgcnttc

SEQ ID NO: 270163 - DNA, 21 bp, Artificial sequence
  SiRNA target sequence
  misc_feature (17)..(17): n is a, c, g, or t
gtggatttggtcgcgcnttct

SEQ ID NO: 270164 - DNA, 21 bp, Artificial sequence
  SiRNA target sequence
  misc_feature (16)..(16): n is a, c, g, or t
tggatttggtcgcgcnttctt

SEQ ID NO: 270165 - DNA, 21 bp, Artificial sequence
  SiRNA target sequence
  misc_feature (15)..(15): n is a, c, g, or t
ggatttggtcgcgcnttcttt

SEQ ID NO: 270166 - DNA, 21 bp, Artificial sequence
  SiRNA target sequence
  misc_feature (14)..(14): n is a, c, g, or t
gatttggtcgcgcnttctttg

SEQ ID NO: 270167 - DNA, 21 bp, Artificial sequence
  SiRNA target sequence
  misc_feature (13)..(13): n is a, c, g, or t
atttggtcgcgcnttctttgg

SEQ ID NO: 270168 - DNA, 21 bp, Artificial sequence
  SiRNA target sequence
  misc_feature (12)..(12): n is a, c, g, or t
tttggtcgcgcnttctttgga

SEQ ID NO: 270169 - DNA, 21 bp, Artificial sequence
  SiRNA target sequence
  misc_feature (11)..(11): n is a, c, g, or t
ttggtcgcgcnttctttggag

SEQ ID NO: 270170 - DNA, 21 bp, Artificial sequence
  SiRNA target sequence
  misc_feature (10)..(10): n is a, c, g, or t
tggtcgcgcnttctttggaga

SEQ ID NO: 270171 - DNA, 21 bp, Artificial sequence
  SiRNA target sequence
  misc_feature (9)..(9): n is a, c, g, or t
ggtcgcgcnttctttggagaa

SEQ ID NO: 270172 - DNA, 21 bp, Artificial sequence
  SiRNA target sequence
  misc_feature (8)..(8): n is a, c, g, or t
gtcgcgcnttctttggagaag

SEQ ID NO: 270173 - DNA, 21 bp, Artificial sequence
  SiRNA target sequence
  misc_feature (7)..(7): n is a, c, g, or t
tcgcgcnttctttggagaagc

SEQ ID NO: 270174 - DNA, 21 bp, Artificial sequence
  SiRNA target sequence
  misc_feature (6)..(6): n is a, c, g, or t
cgcgcnttctttggagaagct

SEQ ID NO: 270175 - DNA, 21 bp, Artificial sequence
  SiRNA target sequence
  misc_feature (5)..(5): n is a, c, g, or t
gcgcnttctttggagaagctt

SEQ ID NO: 270176 - DNA, 21 bp, Artificial sequence
  SiRNA target sequence
  misc_feature (4)..(4): n is a, c, g, or t
cgcnttctttggagaagcttt

SEQ ID NO: 270177 - DNA, 21 bp, Artificial sequence
  SiRNA target sequence
  misc_feature (3)..(3): n is a, c, g, or t
gcnttctttggagaagctttt

SEQ ID NO: 270178 - DNA, 21 bp, Artificial sequence
  SiRNA target sequence
  misc_feature (2)..(2): n is a, c, g, or t
cnttctttggagaagctttta

SEQ ID NO: 270179 - DNA, 21 bp, Artificial sequence
  SiRNA target sequence
  misc_feature (1)..(1): n is a, c, g, or t
nttctttggagaagcttttaa

SEQ ID NO: 270180 - DNA, 21 bp, Artificial sequence
  SiRNA target sequence
ttctttggagaagcttttaat

SEQ ID NO: 270181 - DNA, 21 bp, Artificial sequence
  SiRNA target sequence
tctttggagaagcttttaatg

SEQ ID NO: 270182 - DNA, 21 bp, Artificial sequence
  SiRNA target sequence
ctttggagaagcttttaatga

SEQ ID NO: 270183 - DNA, 21 bp, Artificial sequence
  SiRNA target sequence
  misc_feature (21)..(21): n is a, c, g, or t
tttggagaagcttttaatgan

SEQ ID NO: 270184 - DNA, 21 bp, Artificial sequence
  SiRNA target sequence
  misc_feature (20)..(20): n is a, c, g, or t
ttggagaagcttttaatganc

SEQ ID NO: 270185 - DNA, 21 bp, Artificial sequence
  SiRNA target sequence
  misc_feature (19)..(19): n is a, c, g, or t
tggagaagcttttaatganct

SEQ ID NO: 270186 - DNA, 21 bp, Artificial sequence
  SiRNA target sequence
  misc_feature (18)..(18): n is a, c, g, or t
ggagaagcttttaatganctt

SEQ ID NO: 270187 - DNA, 21 bp, Artificial sequence
  SiRNA target sequence
  misc_feature (17)..(17): n is a, c, g, or t
gagaagcttttaatganctta

SEQ ID NO: 270188 - DNA, 21 bp, Artificial sequence
  SiRNA target sequence
  misc_feature (16)..(16): n is a, c, g, or t
agaagcttttaatgancttaa

SEQ ID NO: 270189 - DNA, 21 bp, Artificial sequence
  SiRNA target sequence
  misc_feature (15)..(15): n is a, c, g, or t
gaagcttttaatgancttaaa

SEQ ID NO: 270190 - DNA, 21 bp, Artificial sequence
  SiRNA target sequence
  misc_feature (14)..(14): n is a, c, g, or t
aagcttttaatgancttaaaa

SEQ ID NO: 270191 - DNA, 21 bp, Artificial sequence
  SiRNA target sequence
  misc_feature (13)..(13): n is a, c, g, or t
agcttttaatgancttaaaac

SEQ ID NO: 270192 - DNA, 21 bp, Artificial sequence
  SiRNA target sequence
  misc_feature (12)..(12): n is a, c, g, or t
gcttttaatgancttaaaacg

SEQ ID NO: 270193 - DNA, 21 bp, Artificial sequence
  SiRNA target sequence
  misc_feature (11)..(11): n is a, c, g, or t
cttttaatgancttaaaacgt

SEQ ID NO: 270194 - DNA, 21 bp, Artificial sequence
  SiRNA target sequence
  misc_feature (10)..(10): n is a, c, g, or t
ttttaatgancttaaaacgtt

SEQ ID NO: 270195 - DNA, 21 bp, Artificial sequence
  SiRNA target sequence
  misc_feature (9)..(9): n is a, c, g, or t
tttaatgancttaaaacgtta

SEQ ID NO: 270196 - DNA, 21 bp, Artificial sequence
  SiRNA target sequence
  misc_feature (8)..(8): n is a, c, g, or t
ttaatgancttaaaacgttaa

SEQ ID NO: 270197 - DNA, 21 bp, Artificial sequence
  SiRNA target sequence
  misc_feature (7)..(7): n is a, c, g, or t
taatgancttaaaacgttaat

SEQ ID NO: 270198 - DNA, 21 bp, Artificial sequence
  SiRNA target sequence
  misc_feature (6)..(6): n is a, c, g, or t
aatgancttaaaacgttaatg

SEQ ID NO: 270199 - DNA, 21 bp, Artificial sequence
  SiRNA target sequence
  misc_feature (5)..(5): n is a, c, g, or t
atgancttaaaacgttaatgc

SEQ ID NO: 270200 - DNA, 21 bp, Artificial sequence
  SiRNA target sequence
  misc_feature (4)..(4): n is a, c, g, or t
tgancttaaaacgttaatgcg

SEQ ID NO: 270201 - DNA, 21 bp, Artificial sequence
  SiRNA target sequence
  misc_feature (3)..(3): n is a, c, g, or t
gancttaaaacgttaatgcga

SEQ ID NO: 270202 - DNA, 21 bp, Artificial sequence
  SiRNA target sequence
  misc_feature (2)..(2): n is a, c, g, or t
ancttaaaacgttaatgcgac

SEQ ID NO: 270203 - DNA, 21 bp, Artificial sequence
  SiRNA target sequence
  misc_feature (1)..(1): n is a, c, g, or t
ncttaaaacgttaatgcgacg

SEQ ID NO: 270204 - DNA, 21 bp, Artificial sequence
  SiRNA target sequence
cttaaaacgttaatgcgacga

SEQ ID NO: 270205 - DNA, 21 bp, Artificial sequence
  SiRNA target sequence
ttaaaacgttaatgcgacgat

SEQ ID NO: 270206 - DNA, 21 bp, Artificial sequence
  SiRNA target sequence
taaaacgttaatgcgacgata

SEQ ID NO: 270207 - DNA, 21 bp, Artificial sequence
  SiRNA target sequence
aaaacgttaatgcgacgatat

SEQ ID NO: 270208 - DNA, 21 bp, Artificial sequence
  SiRNA target sequence
aaacgttaatgcgacgatatc

SEQ ID NO: 270209 - DNA, 21 bp, Artificial sequence
  SiRNA target sequence
aacgttaatgcgacgatatca

SEQ ID NO: 270210 - DNA, 21 bp, Artificial sequence
  SiRNA target sequence
acgttaatgcgacgatatcaa

SEQ ID NO: 270211 - DNA, 21 bp, Artificial sequence
  SiRNA target sequence
cgttaatgcgacgatatcaat

SEQ ID NO: 270212 - DNA, 21 bp, Artificial sequence
  SiRNA target sequence
gttaatgcgacgatatcaatt

SEQ ID NO: 270213 - DNA, 21 bp, Artificial sequence
  SiRNA target sequence
ttaatgcgacgatatcaatta

SEQ ID NO: 270214 - DNA, 21 bp, Artificial sequence
  SiRNA target sequence
taatgcgacgatatcaattat

SEQ ID NO: 270215 - DNA, 21 bp, Artificial sequence
  SiRNA target sequence
aatgcgacgatatcaattata

SEQ ID NO: 270216 - DNA, 21 bp, Artificial sequence
  SiRNA target sequence
atgcgacgatatcaattatat

SEQ ID NO: 270217 - DNA, 21 bp, Artificial sequence
  SiRNA target sequence
tgcgacgatatcaattatatg

SEQ ID NO: 270218 - DNA, 21 bp, Artificial sequence
  SiRNA target sequence
gcgacgatatcaattatatgg

SEQ ID NO: 270219 - DNA, 21 bp, Artificial sequence
  SiRNA target sequence
cgacgatatcaattatatggt

SEQ ID NO: 270220 - DNA, 21 bp, Artificial sequence
  SiRNA target sequence
gacgatatcaattatatggtc

SEQ ID NO: 270221 - DNA, 21 bp, Artificial sequence
  SiRNA target sequence
acgatatcaattatatggtca

SEQ ID NO: 270222 - DNA, 21 bp, Artificial sequence
  SiRNA target sequence
cgatatcaattatatggtcaa

SEQ ID NO: 270223 - DNA, 21 bp, Artificial sequence
  SiRNA target sequence
gatatcaattatatggtcaat

SEQ ID NO: 270224 - DNA, 21 bp, Artificial sequence
  SiRNA target sequence
atatcaattatatggtcaatt

SEQ ID NO: 270225 - DNA, 21 bp, Artificial sequence
  SiRNA target sequence
tatcaattatatggtcaatta

SEQ ID NO: 270226 - DNA, 21 bp, Artificial sequence
  SiRNA target sequence
atcaattatatggtcaattat

SEQ ID NO: 270227 - DNA, 21 bp, Artificial sequence
  SiRNA target sequence
tcaattatatggtcaattatt

SEQ ID NO: 270228 - DNA, 21 bp, Artificial sequence
  SiRNA target sequence
caattatatggtcaattatta

SEQ ID NO: 270229 - DNA, 21 bp, Artificial sequence
  SiRNA target sequence
aattatatggtcaattattat

SEQ ID NO: 270230 - DNA, 21 bp, Artificial sequence
  SiRNA target sequence
attatatggtcaattattatt

SEQ ID NO: 270231 - DNA, 21 bp, Artificial sequence
  SiRNA target sequence
ttatatggtcaattattattg

SEQ ID NO: 270232 - DNA, 21 bp, Artificial sequence
  SiRNA target sequence
tatatggtcaattattattgt

SEQ ID NO: 270233 - DNA, 21 bp, Artificial sequence
  SiRNA target sequence
atatggtcaattattattgtc

SEQ ID NO: 270234 - DNA, 21 bp, Artificial sequence
  SiRNA target sequence
tatggtcaattattattgtcc

SEQ ID NO: 270235 - DNA, 21 bp, Artificial sequence
  SiRNA target sequence
atggtcaattattattgtccg

SEQ ID NO: 270236 - DNA, 21 bp, Artificial sequence
  SiRNA target sequence
tggtcaattattattgtccgt

SEQ ID NO: 270237 - DNA, 21 bp, Artificial sequence
  SiRNA target sequence
ggtcaattattattgtccgtt

SEQ ID NO: 270238 - DNA, 21 bp, Artificial sequence
  SiRNA target sequence
gtcaattattattgtccgtta

SEQ ID NO: 270239 - DNA, 21 bp, Artificial sequence
  SiRNA target sequence
tcaattattattgtccgttac

SEQ ID NO: 270240 - DNA, 21 bp, Artificial sequence
  SiRNA target sequence
caattattattgtccgttact

SEQ ID NO: 270241 - DNA, 21 bp, Artificial sequence
  SiRNA target sequence
aattattattgtccgttacta

SEQ ID NO: 270242 - DNA, 21 bp, Artificial sequence
  SiRNA target sequence
attattattgtccgttactac

SEQ ID NO: 270243 - DNA, 21 bp, Artificial sequence
  SiRNA target sequence
ttattattgtccgttactacg

SEQ ID NO: 270244 - DNA, 21 bp, Artificial sequence
  SiRNA target sequence
tattattgtccgttactacgg

SEQ ID NO: 270245 - DNA, 21 bp, Artificial sequence
  SiRNA target sequence
attattgtccgttactacgga

SEQ ID NO: 270246 - DNA, 21 bp, Artificial sequence
  SiRNA target sequence
ttattgtccgttactacggat

SEQ ID NO: 270247 - DNA, 21 bp, Artificial sequence
  SiRNA target sequence
tattgtccgttactacggata

SEQ ID NO: 270248 - DNA, 21 bp, Artificial sequence
  SiRNA target sequence
attgtccgttactacggataa

SEQ ID NO: 270249 - DNA, 21 bp, Artificial sequence
  SiRNA target sequence
ttgtccgttactacggataag

SEQ ID NO: 270250 - DNA, 21 bp, Artificial sequence
  SiRNA target sequence
tgtccgttactacggataagg

SEQ ID NO: 270251 - DNA, 21 bp, Artificial sequence
  SiRNA target sequence
gtccgttactacggataagga

SEQ ID NO: 270252 - DNA, 21 bp, Artificial sequence
  SiRNA target sequence
tccgttactacggataaggat

SEQ ID NO: 270253 - DNA, 21 bp, Artificial sequence
  SiRNA target sequence
ccgttactacggataaggata

SEQ ID NO: 270254 - DNA, 21 bp, Artificial sequence
  SiRNA target sequence
cgttactacggataaggatat

SEQ ID NO: 270255 - DNA, 21 bp, Artificial sequence
  SiRNA target sequence
gttactacggataaggatatt

SEQ ID NO: 270256 - DNA, 21 bp, Artificial sequence
  SiRNA target sequence
ttactacggataaggatattg

SEQ ID NO: 270257 - DNA, 21 bp, Artificial sequence
  SiRNA target sequence
tactacggataaggatattga

SEQ ID NO: 270258 - DNA, 21 bp, Artificial sequence
  SiRNA target sequence
actacggataaggatattgat

SEQ ID NO: 270259 - DNA, 21 bp, Artificial sequence
  SiRNA target sequence
ctacggataaggatattgatc

SEQ ID NO: 270260 - DNA, 21 bp, Artificial sequence
  SiRNA target sequence
tacggataaggatattgatca

SEQ ID NO: 270261 - DNA, 21 bp, Artificial sequence
  SiRNA target sequence
acggataaggatattgatcat

SEQ ID NO: 270262 - DNA, 21 bp, Artificial sequence
  SiRNA target sequence
cggataaggatattgatcatt

SEQ ID NO: 270263 - DNA, 21 bp, Artificial sequence
  SiRNA target sequence
ggataaggatattgatcattg

SEQ ID NO: 270264 - DNA, 21 bp, Artificial sequence
  SiRNA target sequence
gataaggatattgatcattgt

SEQ ID NO: 270265 - DNA, 21 bp, Artificial sequence
  SiRNA target sequence
ataaggatattgatcattgta

SEQ ID NO: 270266 - DNA, 21 bp, Artificial sequence
  SiRNA target sequence
taaggatattgatcattgtat

SEQ ID NO: 270267 - DNA, 21 bp, Artificial sequence
  SiRNA target sequence
aaggatattgatcattgtatg

SEQ ID NO: 270268 - DNA, 21 bp, Artificial sequence
  SiRNA target sequence
aggatattgatcattgtatgt

SEQ ID NO: 270269 - DNA, 21 bp, Artificial sequence
  SiRNA target sequence
ggatattgatcattgtatgtt

SEQ ID NO: 270270 - DNA, 21 bp, Artificial sequence
  SiRNA target sequence
gatattgatcattgtatgttt

SEQ ID NO: 270271 - DNA, 21 bp, Artificial sequence
  SiRNA target sequence
atattgatcattgtatgttta

SEQ ID NO: 270272 - DNA, 21 bp, Artificial sequence
  SiRNA target sequence
tattgatcattgtatgtttac

SEQ ID NO: 270273 - DNA, 21 bp, Artificial sequence
  SiRNA target sequence
attgatcattgtatgtttacc

SEQ ID NO: 270274 - DNA, 21 bp, Artificial sequence
  SiRNA target sequence
ttgatcattgtatgtttacct

SEQ ID NO: 270275 - DNA, 21 bp, Artificial sequence
  SiRNA target sequence
tgatcattgtatgtttacctt

SEQ ID NO: 270276 - DNA, 21 bp, Artificial sequence
  SiRNA target sequence
gatcattgtatgtttaccttc

SEQ ID NO: 270277 - DNA, 21 bp, Artificial sequence
  SiRNA target sequence
atcattgtatgtttaccttcc

SEQ ID NO: 270278 - DNA, 21 bp, Artificial sequence
  SiRNA target sequence
tcattgtatgtttaccttccc

SEQ ID NO: 270279 - DNA, 21 bp, Artificial sequence
  SiRNA target sequence
cattgtatgtttaccttccct

SEQ ID NO: 270280 - DNA, 21 bp, Artificial sequence
  SiRNA target sequence
attgtatgtttaccttccctt

SEQ ID NO: 270281 - DNA, 21 bp, Artificial sequence
  SiRNA target sequence
ttgtatgtttaccttcccttg

SEQ ID NO: 270282 - DNA, 21 bp, Artificial sequence
  SiRNA target sequence
tgtatgtttaccttcccttgt

SEQ ID NO: 270283 - DNA, 21 bp, Artificial sequence
  SiRNA target sequence
gtatgtttaccttcccttgtt

SEQ ID NO: 270284 - DNA, 21 bp, Artificial sequence
  SiRNA target sequence
tatgtttaccttcccttgttt

SEQ ID NO: 270285 - DNA, 21 bp, Artificial sequence
  SiRNA target sequence
atgtttaccttcccttgttta

SEQ ID NO: 270286 - DNA, 21 bp, Artificial sequence
  SiRNA target sequence
tgtttaccttcccttgtttac

SEQ ID NO: 270287 - DNA, 21 bp, Artificial sequence
  SiRNA target sequence
gtttaccttcccttgtttacc

SEQ ID NO: 270288 - DNA, 21 bp, Artificial sequence
  SiRNA target sequence
tttaccttcccttgtttacca

SEQ ID NO: 270289 - DNA, 21 bp, Artificial sequence
  SiRNA target sequence
ttaccttcccttgtttaccac

SEQ ID NO: 270290 - DNA, 21 bp, Artificial sequence
  SiRNA target sequence
taccttcccttgtttaccaca

SEQ ID NO: 270291 - DNA, 21 bp, Artificial sequence
  SiRNA target sequence
accttcccttgtttaccacaa

SEQ ID NO: 270292 - DNA, 21 bp, Artificial sequence
  SiRNA target sequence
ccttcccttgtttaccacaag

SEQ ID NO: 270293 - DNA, 21 bp, Artificial sequence
  SiRNA target sequence
cttcccttgtttaccacaagg

SEQ ID NO: 270294 - DNA, 21 bp, Artificial sequence
  SiRNA target sequence
ttcccttgtttaccacaaggg

SEQ ID NO: 270295 - DNA, 21 bp, Artificial sequence
  SiRNA target sequence
tcccttgtttaccacaagggt

SEQ ID NO: 270296 - DNA, 21 bp, Artificial sequence
  SiRNA target sequence
cccttgtttaccacaagggtt

SEQ ID NO: 270297 - DNA, 21 bp, Artificial sequence
  SiRNA target sequence
ccttgtttaccacaagggtta

SEQ ID NO: 270298 - DNA, 21 bp, Artificial sequence
  SiRNA target sequence
cttgtttaccacaagggttag

SEQ ID NO: 270299 - DNA, 21 bp, Artificial sequence
  SiRNA target sequence
ttgtttaccacaagggttagc

SEQ ID NO: 270300 - DNA, 21 bp, Artificial sequence
  SiRNA target sequence
tgtttaccacaagggttagcg

SEQ ID NO: 270301 - DNA, 21 bp, Artificial sequence
  SiRNA target sequence
gtttaccacaagggttagcgt

SEQ ID NO: 270302 - DNA, 21 bp, Artificial sequence
  SiRNA target sequence
tttaccacaagggttagcgtt

SEQ ID NO: 270303 - DNA, 21 bp, Artificial sequence
  SiRNA target sequence
ttaccacaagggttagcgtta

SEQ ID NO: 270304 - DNA, 21 bp, Artificial sequence
  SiRNA target sequence
taccacaagggttagcgttag

SEQ ID NO: 270305 - DNA, 21 bp, Artificial sequence
  SiRNA target sequence
accacaagggttagcgttaga

SEQ ID NO: 270306 - DNA, 21 bp, Artificial sequence
  SiRNA target sequence
ccacaagggttagcgttagac

SEQ ID NO: 270307 - DNA, 21 bp, Artificial sequence
  SiRNA target sequence
cacaagggttagcgttagaca

SEQ ID NO: 270308 - DNA, 21 bp, Artificial sequence
  SiRNA target sequence
acaagggttagcgttagacat

SEQ ID NO: 270309 - DNA, 21 bp, Artificial sequence
  SiRNA target sequence
caagggttagcgttagacatt

SEQ ID NO: 270310 - DNA, 21 bp, Artificial sequence
  SiRNA target sequence
aagggttagcgttagacattg

SEQ ID NO: 270311 - DNA, 21 bp, Artificial sequence
  SiRNA target sequence
agggttagcgttagacattgg

SEQ ID NO: 270312 - DNA, 21 bp, Artificial sequence
  SiRNA target sequence
gggttagcgttagacattggt

SEQ ID NO: 270313 - DNA, 21 bp, Artificial sequence
  SiRNA target sequence
ggttagcgttagacattggtt

SEQ ID NO: 270314 - DNA, 21 bp, Artificial sequence
  SiRNA target sequence
gttagcgttagacattggttc

SEQ ID NO: 270315 - DNA, 21 bp, Artificial sequence
  SiRNA target sequence
ttagcgttagacattggttct

SEQ ID NO: 270316 - DNA, 21 bp, Artificial sequence
  SiRNA target sequence
tagcgttagacattggttctg

SEQ ID NO: 270317 - DNA, 21 bp, Artificial sequence
  SiRNA target sequence
agcgttagacattggttctgc

SEQ ID NO: 270318 - DNA, 21 bp, Artificial sequence
  SiRNA target sequence
gcgttagacattggttctgct

SEQ ID NO: 270319 - DNA, 21 bp, Artificial sequence
  SiRNA target sequence
cgttagacattggttctgctg

SEQ ID NO: 270320 - DNA, 21 bp, Artificial sequence
  SiRNA target sequence
gttagacattggttctgctgg

SEQ ID NO: 270321 - DNA, 21 bp, Artificial sequence
  SiRNA target sequence
ttagacattggttctgctggc

SEQ ID NO: 270322 - DNA, 21 bp, Artificial sequence
  SiRNA target sequence
tagacattggttctgctggct

SEQ ID NO: 270323 - DNA, 21 bp, Artificial sequence
  SiRNA target sequence
agacattggttctgctggctc

SEQ ID NO: 270324 - DNA, 21 bp, Artificial sequence
  SiRNA target sequence
gacattggttctgctggctct

SEQ ID NO: 270325 - DNA, 21 bp, Artificial sequence
  SiRNA target sequence
acattggttctgctggctctc

SEQ ID NO: 270326 - DNA, 21 bp, Artificial sequence
  SiRNA target sequence
cattggttctgctggctctcc

SEQ ID NO: 270327 - DNA, 21 bp, Artificial sequence
  SiRNA target sequence
attggttctgctggctctcca

SEQ ID NO: 270328 - DNA, 21 bp, Artificial sequence
  SiRNA target sequence
ttggttctgctggctctccac

SEQ ID NO: 270329 - DNA, 21 bp, Artificial sequence
  SiRNA target sequence
tggttctgctggctctccaca

SEQ ID NO: 270330 - DNA, 21 bp, Artificial sequence
  SiRNA target sequence
ggttctgctggctctccacat

SEQ ID NO: 270331 - DNA, 21 bp, Artificial sequence
  SiRNA target sequence
gttctgctggctctccacatg

SEQ ID NO: 270332 - DNA, 21 bp, Artificial sequence
  SiRNA target sequence
ttctgctggctctccacatga

SEQ ID NO: 270333 - DNA, 21 bp, Artificial sequence
  SiRNA target sequence
tctgctggctctccacatgaa

SEQ ID NO: 270334 - DNA, 21 bp, Artificial sequence
  SiRNA target sequence
ctgctggctctccacatgaaa

SEQ ID NO: 270335 - DNA, 21 bp, Artificial sequence
  SiRNA target sequence
tgctggctctccacatgaaat

SEQ ID NO: 270336 - DNA, 21 bp, Artificial sequence
  SiRNA target sequence
gctggctctccacatgaaatc

SEQ ID NO: 270337 - DNA, 21 bp, Artificial sequence
  SiRNA target sequence
ctggctctccacatgaaatct

SEQ ID NO: 270338 - DNA, 21 bp, Artificial sequence
  SiRNA target sequence
tggctctccacatgaaatctt

SEQ ID NO: 270339 - DNA, 21 bp, Artificial sequence
  SiRNA target sequence
ggctctccacatgaaatcttt

SEQ ID NO: 270340 - DNA, 21 bp, Artificial sequence
  SiRNA target sequence
gctctccacatgaaatcttta

SEQ ID NO: 270341 - DNA, 21 bp, Artificial sequence
  SiRNA target sequence
ctctccacatgaaatctttaa

SEQ ID NO: 270342 - DNA, 21 bp, Artificial sequence
  SiRNA target sequence
tctccacatgaaatctttaat

SEQ ID NO: 270343 - DNA, 21 bp, Artificial sequence
  SiRNA target sequence
ctccacatgaaatctttaata

SEQ ID NO: 270344 - DNA, 21 bp, Artificial sequence
  SiRNA target sequence
tccacatgaaatctttaatag

SEQ ID NO: 270345 - DNA, 21 bp, Artificial sequence
  SiRNA target sequence
ccacatgaaatctttaataga

SEQ ID NO: 270346 - DNA, 21 bp, Artificial sequence
  SiRNA target sequence
cacatgaaatctttaatagat

SEQ ID NO: 270347 - DNA, 21 bp, Artificial sequence
  SiRNA target sequence
acatgaaatctttaatagatg

SEQ ID NO: 270348 - DNA, 21 bp, Artificial sequence
  SiRNA target sequence
catgaaatctttaatagatgt

SEQ ID NO: 270349 - DNA, 21 bp, Artificial sequence
  SiRNA target sequence
atgaaatctttaatagatgtc

SEQ ID NO: 270350 - DNA, 21 bp, Artificial sequence
  SiRNA target sequence
tgaaatctttaatagatgtcg

SEQ ID NO: 270351 - DNA, 21 bp, Artificial sequence
  SiRNA target sequence
gaaatctttaatagatgtcgt

SEQ ID NO: 270352 - DNA, 21 bp, Artificial sequence
  SiRNA target sequence
aaatctttaatagatgtcgtg

SEQ ID NO: 270353 - DNA, 21 bp, Artificial sequence
  SiRNA target sequence
aatctttaatagatgtcgtga

SEQ ID NO: 270354 - DNA, 21 bp, Artificial sequence
  SiRNA target sequence
atctttaatagatgtcgtgat

SEQ ID NO: 270355 - DNA, 21 bp, Artificial sequence
  SiRNA target sequence
tctttaatagatgtcgtgatg

SEQ ID NO: 270356 - DNA, 21 bp, Artificial sequence
  SiRNA target sequence
ctttaatagatgtcgtgatgg

SEQ ID NO: 270357 - DNA, 21 bp, Artificial sequence
  SiRNA target sequence
tttaatagatgtcgtgatggt

SEQ ID NO: 270358 - DNA, 21 bp, Artificial sequence
  SiRNA target sequence
ttaatagatgtcgtgatggta

SEQ ID NO: 270359 - DNA, 21 bp, Artificial sequence
  SiRNA target sequence
taatagatgtcgtgatggtat

SEQ ID NO: 270360 - DNA, 21 bp, Artificial sequence
  SiRNA target sequence
aatagatgtcgtgatggtatt

SEQ ID NO: 270361 - DNA, 21 bp, Artificial sequence
  SiRNA target sequence
atagatgtcgtgatggtatta

SEQ ID NO: 270362 - DNA, 21 bp, Artificial sequence
  SiRNA target sequence
tagatgtcgtgatggtattat

SEQ ID NO: 270363 - DNA, 21 bp, Artificial sequence
  SiRNA target sequence
agatgtcgtgatggtattata

SEQ ID NO: 270364 - DNA, 21 bp, Artificial sequence
  SiRNA target sequence
gatgtcgtgatggtattatac

SEQ ID NO: 270365 - DNA, 21 bp, Artificial sequence
  SiRNA target sequence
atgtcgtgatggtattatacc

SEQ ID NO: 270366 - DNA, 21 bp, Artificial sequence
  SiRNA target sequence
tgtcgtgatggtattatacca

SEQ ID NO: 270367 - DNA, 21 bp, Artificial sequence
  SiRNA target sequence
gtcgtgatggtattataccat

SEQ ID NO: 270368 - DNA, 21 bp, Artificial sequence
  SiRNA target sequence
tcgtgatggtattataccatt

SEQ ID NO: 270369 - DNA, 21 bp, Artificial sequence
  SiRNA target sequence
cgtgatggtattataccatta

SEQ ID NO: 270370 - DNA, 21 bp, Artificial sequence
  SiRNA target sequence
gtgatggtattataccattaa

SEQ ID NO: 270371 - DNA, 21 bp, Artificial sequence
  SiRNA target sequence
tgatggtattataccattaat

SEQ ID NO: 270372 - DNA, 21 bp, Artificial sequence
  SiRNA target sequence
gatggtattataccattaatt

SEQ ID NO: 270373 - DNA, 21 bp, Artificial sequence
  SiRNA target sequence
atggtattataccattaattg

SEQ ID NO: 270374 - DNA, 21 bp, Artificial sequence
  SiRNA target sequence
tggtattataccattaattgc

SEQ ID NO: 270375 - DNA, 21 bp, Artificial sequence
  SiRNA target sequence
ggtattataccattaattgca

SEQ ID NO: 270376 - DNA, 21 bp, Artificial sequence
  SiRNA target sequence
gtattataccattaattgcat

SEQ ID NO: 270377 - DNA, 21 bp, Artificial sequence
  SiRNA target sequence
tattataccattaattgcatc

SEQ ID NO: 270378 - DNA, 21 bp, Artificial sequence
  SiRNA target sequence
attataccattaattgcatct

SEQ ID NO: 270379 - DNA, 21 bp, Artificial sequence
  SiRNA target sequence
ttataccattaattgcatctg

SEQ ID NO: 270380 - DNA, 21 bp, Artificial sequence
  SiRNA target sequence
tataccattaattgcatctgg

SEQ ID NO: 270381 - DNA, 21 bp, Artificial sequence
  SiRNA target sequence
ataccattaattgcatctgga

SEQ ID NO: 270382 - DNA, 21 bp, Artificial sequence
  SiRNA target sequence
taccattaattgcatctggat

SEQ ID NO: 270383 - DNA, 21 bp, Artificial sequence
  SiRNA target sequence
accattaattgcatctggata

SEQ ID NO: 270384 - DNA, 21 bp, Artificial sequence
  SiRNA target sequence
ccattaattgcatctggatat

SEQ ID NO: 270385 - DNA, 21 bp, Artificial sequence
  SiRNA target sequence
cattaattgcatctggatata

SEQ ID NO: 270386 - DNA, 21 bp, Artificial sequence
  SiRNA target sequence
attaattgcatctggatatag

SEQ ID NO: 270387 - DNA, 21 bp, Artificial sequence
  SiRNA target sequence
ttaattgcatctggatataga

SEQ ID NO: 270388 - DNA, 21 bp, Artificial sequence
  SiRNA target sequence
taattgcatctggatatagat

SEQ ID NO: 270389 - DNA, 21 bp, Artificial sequence
  SiRNA target sequence
aattgcatctggatatagatt

SEQ ID NO: 270390 - DNA, 21 bp, Artificial sequence
  SiRNA target sequence
attgcatctggatatagattt

SEQ ID NO: 270391 - DNA, 21 bp, Artificial sequence
  SiRNA target sequence
ttgcatctggatatagatttt

SEQ ID NO: 270392 - DNA, 21 bp, Artificial sequence
  SiRNA target sequence
tgcatctggatatagatttta

SEQ ID NO: 270393 - DNA, 21 bp, Artificial sequence
  SiRNA target sequence
gcatctggatatagattttat

SEQ ID NO: 270394 - DNA, 21 bp, Artificial sequence
  SiRNA target sequence
catctggatatagattttata

SEQ ID NO: 270395 - DNA, 21 bp, Artificial sequence
  SiRNA target sequence
atctggatatagattttatag

SEQ ID NO: 270396 - DNA, 21 bp, Artificial sequence
  SiRNA target sequence
tctggatatagattttataga

SEQ ID NO: 270397 - DNA, 21 bp, Artificial sequence
  SiRNA target sequence
ctggatatagattttatagag

SEQ ID NO: 270398 - DNA, 21 bp, Artificial sequence
  SiRNA target sequence
tggatatagattttatagagg

SEQ ID NO: 270399 - DNA, 21 bp, Artificial sequence
  SiRNA target sequence
ggatatagattttatagagga

SEQ ID NO: 270400 - DNA, 21 bp, Artificial sequence
  SiRNA target sequence
gatatagattttatagaggag

SEQ ID NO: 270401 - DNA, 21 bp, Artificial sequence
  SiRNA target sequence
atatagattttatagaggaga

SEQ ID NO: 270402 - DNA, 21 bp, Artificial sequence
  SiRNA target sequence
tatagattttatagaggagat

SEQ ID NO: 270403 - DNA, 21 bp, Artificial sequence
  SiRNA target sequence
atagattttatagaggagatt

SEQ ID NO: 270404 - DNA, 21 bp, Artificial sequence
  SiRNA target sequence
tagattttatagaggagattt

SEQ ID NO: 270405 - DNA, 21 bp, Artificial sequence
  SiRNA target sequence
agattttatagaggagatttg

SEQ ID NO: 270406 - DNA, 21 bp, Artificial sequence
  SiRNA target sequence
gattttatagaggagatttgc

SEQ ID NO: 270407 - DNA, 21 bp, Artificial sequence
  SiRNA target sequence
attttatagaggagatttgcg

SEQ ID NO: 270408 - DNA, 21 bp, Artificial sequence
  SiRNA target sequence
ttttatagaggagatttgcgt

SEQ ID NO: 270409 - DNA, 21 bp, Artificial sequence
  SiRNA target sequence
tttatagaggagatttgcgtt

SEQ ID NO: 270410 - DNA, 21 bp, Artificial sequence
  SiRNA target sequence
ttatagaggagatttgcgtta

SEQ ID NO: 270411 - DNA, 21 bp, Artificial sequence
  SiRNA target sequence
tatagaggagatttgcgttat

SEQ ID NO: 270412 - DNA, 21 bp, Artificial sequence
  SiRNA target sequence
atagaggagatttgcgttata

SEQ ID NO: 270413 - DNA, 21 bp, Artificial sequence
  SiRNA target sequence
tagaggagatttgcgttataa

SEQ ID NO: 270414 - DNA, 21 bp, Artificial sequence
  SiRNA target sequence
agaggagatttgcgttataag

SEQ ID NO: 270415 - DNA, 21 bp, Artificial sequence
  SiRNA target sequence
gaggagatttgcgttataaga

SEQ ID NO: 270416 - DNA, 21 bp, Artificial sequence
  SiRNA target sequence
aggagatttgcgttataagat

SEQ ID NO: 270417 - DNA, 21 bp, Artificial sequence
  SiRNA target sequence
ggagatttgcgttataagatt

SEQ ID NO: 270418 - DNA, 21 bp, Artificial sequence
  SiRNA target sequence
gagatttgcgttataagattg

SEQ ID NO: 270419 - DNA, 21 bp, Artificial sequence
  SiRNA target sequence
agatttgcgttataagattgt

SEQ ID NO: 270420 - DNA, 21 bp, Artificial sequence
  SiRNA target sequence
gatttgcgttataagattgtt

SEQ ID NO: 270421 - DNA, 21 bp, Artificial sequence
  SiRNA target sequence
atttgcgttataagattgttt

SEQ ID NO: 270422 - DNA, 21 bp, Artificial sequence
  SiRNA target sequence
tttgcgttataagattgtttt

SEQ ID NO: 270423 - DNA, 21 bp, Artificial sequence
  SiRNA target sequence
ttgcgttataagattgttttt

SEQ ID NO: 270424 - DNA, 21 bp, Artificial sequence
  SiRNA target sequence
tgcgttataagattgtttttc

SEQ ID NO: 270425 - DNA, 21 bp, Artificial sequence
  SiRNA target sequence
gcgttataagattgtttttcc

SEQ ID NO: 270426 - DNA, 21 bp, Artificial sequence
  SiRNA target sequence
cgttataagattgtttttcca

SEQ ID NO: 270427 - DNA, 21 bp, Artificial sequence
  SiRNA target sequence
gttataagattgtttttccaa

SEQ ID NO: 270428 - DNA, 21 bp, Artificial sequence
  SiRNA target sequence
ttataagattgtttttccaag

SEQ ID NO: 270429 - DNA, 21 bp, Artificial sequence
  SiRNA target sequence
tataagattgtttttccaagt

SEQ ID NO: 270430 - DNA, 21 bp, Artificial sequence
  SiRNA target sequence
ataagattgtttttccaagta

SEQ ID NO: 270431 - DNA, 21 bp, Artificial sequence
  SiRNA target sequence
taagattgtttttccaagtaa

SEQ ID NO: 270432 - DNA, 21 bp, Artificial sequence
  SiRNA target sequence
aagattgtttttccaagtaat

SEQ ID NO: 270433 - DNA, 21 bp, Artificial sequence
  SiRNA target sequence
agattgtttttccaagtaatg

SEQ ID NO: 270434 - DNA, 21 bp, Artificial sequence
  SiRNA target sequence
gattgtttttccaagtaatgt

SEQ ID NO: 270435 - DNA, 21 bp, Artificial sequence
  SiRNA target sequence
attgtttttccaagtaatgtt

SEQ ID NO: 270436 - DNA, 21 bp, Artificial sequence
  SiRNA target sequence
ttgtttttccaagtaatgtta

SEQ ID NO: 270437 - DNA, 21 bp, Artificial sequence
  SiRNA target sequence
tgtttttccaagtaatgttaa

SEQ ID NO: 270438 - DNA, 21 bp, Artificial sequence
  SiRNA target sequence
gtttttccaagtaatgttaat

SEQ ID NO: 270439 - DNA, 21 bp, Artificial sequence
  SiRNA target sequence
tttttccaagtaatgttaata

SEQ ID NO: 270440 - DNA, 21 bp, Artificial sequence
  SiRNA target sequence
ttttccaagtaatgttaatag

SEQ ID NO: 270441 - DNA, 21 bp, Artificial sequence
  SiRNA target sequence
tttccaagtaatgttaatagc

SEQ ID NO: 270442 - DNA, 21 bp, Artificial sequence
  SiRNA target sequence
ttccaagtaatgttaatagca

SEQ ID NO: 270443 - DNA, 21 bp, Artificial sequence
  SiRNA target sequence
tccaagtaatgttaatagcaa

SEQ ID NO: 270444 - DNA, 21 bp, Artificial sequence
  SiRNA target sequence
ccaagtaatgttaatagcaac

SEQ ID NO: 270445 - DNA, 21 bp, Artificial sequence
  SiRNA target sequence
caagtaatgttaatagcaaca

SEQ ID NO: 270446 - DNA, 21 bp, Artificial sequence
  SiRNA target sequence
aagtaatgttaatagcaacat

SEQ ID NO: 270447 - DNA, 21 bp, Artificial sequence
  SiRNA target sequence
agtaatgttaatagcaacatt

SEQ ID NO: 270448 - DNA, 21 bp, Artificial sequence
  SiRNA target sequence
gtaatgttaatagcaacattt

SEQ ID NO: 270449 - DNA, 21 bp, Artificial sequence
  SiRNA target sequence
taatgttaatagcaacatttg

SEQ ID NO: 270450 - DNA, 21 bp, Artificial sequence
  SiRNA target sequence
aatgttaatagcaacatttgg

SEQ ID NO: 270451 - DNA, 21 bp, Artificial sequence
  SiRNA target sequence
atgttaatagcaacatttggg

SEQ ID NO: 270452 - DNA, 21 bp, Artificial sequence
  SiRNA target sequence
tgttaatagcaacatttgggt

SEQ ID NO: 270453 - DNA, 21 bp, Artificial sequence
  SiRNA target sequence
gttaatagcaacatttgggta

SEQ ID NO: 270454 - DNA, 21 bp, Artificial sequence
  SiRNA target sequence
ttaatagcaacatttgggtac

SEQ ID NO: 270455 - DNA, 21 bp, Artificial sequence
  SiRNA target sequence
taatagcaacatttgggtaca

SEQ ID NO: 270456 - DNA, 21 bp, Artificial sequence
  SiRNA target sequence
aatagcaacatttgggtacaa

SEQ ID NO: 270457 - DNA, 21 bp, Artificial sequence
  SiRNA target sequence
atagcaacatttgggtacaac

SEQ ID NO: 270458 - DNA, 21 bp, Artificial sequence
  SiRNA target sequence
tagcaacatttgggtacaaca

SEQ ID NO: 270459 - DNA, 21 bp, Artificial sequence
  SiRNA target sequence
agcaacatttgggtacaacat

SEQ ID NO: 270460 - DNA, 21 bp, Artificial sequence
  SiRNA target sequence
gcaacatttgggtacaacatc

SEQ ID NO: 270461 - DNA, 21 bp, Artificial sequence
  SiRNA target sequence
caacatttgggtacaacatcg

SEQ ID NO: 270462 - DNA, 21 bp, Artificial sequence
  SiRNA target sequence
aacatttgggtacaacatcga

SEQ ID NO: 270463 - DNA, 21 bp, Artificial sequence
  SiRNA target sequence
acatttgggtacaacatcgac

SEQ ID NO: 270464 - DNA, 21 bp, Artificial sequence
  SiRNA target sequence
catttgggtacaacatcgacc

SEQ ID NO: 270465 - DNA, 21 bp, Artificial sequence
  SiRNA target sequence
atttgggtacaacatcgaccg

SEQ ID NO: 270466 - DNA, 21 bp, Artificial sequence
  SiRNA target sequence
tttgggtacaacatcgaccgg

SEQ ID NO: 270467 - DNA, 21 bp, Artificial sequence
  SiRNA target sequence
ttgggtacaacatcgaccgga

SEQ ID NO: 270468 - DNA, 21 bp, Artificial sequence
  SiRNA target sequence
tgggtacaacatcgaccggat

SEQ ID NO: 270469 - DNA, 21 bp, Artificial sequence
  SiRNA target sequence
gggtacaacatcgaccggatc

SEQ ID NO: 270470 - DNA, 21 bp, Artificial sequence
  SiRNA target sequence
ggtacaacatcgaccggatcg

SEQ ID NO: 270471 - DNA, 21 bp, Artificial sequence
  SiRNA target sequence
gtacaacatcgaccggatcgt

SEQ ID NO: 270472 - DNA, 21 bp, Artificial sequence
  SiRNA target sequence
tacaacatcgaccggatcgta

SEQ ID NO: 270473 - DNA, 21 bp, Artificial sequence
  SiRNA target sequence
acaacatcgaccggatcgtag

SEQ ID NO: 270474 - DNA, 21 bp, Artificial sequence
  SiRNA target sequence
caacatcgaccggatcgtaga

SEQ ID NO: 270475 - DNA, 21 bp, Artificial sequence
  SiRNA target sequence
aacatcgaccggatcgtagac

SEQ ID NO: 270476 - DNA, 21 bp, Artificial sequence
  SiRNA target sequence
acatcgaccggatcgtagact

SEQ ID NO: 270477 - DNA, 21 bp, Artificial sequence
  SiRNA target sequence
catcgaccggatcgtagactg

SEQ ID NO: 270478 - DNA, 21 bp, Artificial sequence
  SiRNA target sequence
atcgaccggatcgtagactgg

SEQ ID NO: 270479 - DNA, 21 bp, Artificial sequence
  SiRNA target sequence
tcgaccggatcgtagactgga

SEQ ID NO: 270480 - DNA, 21 bp, Artificial sequence
  SiRNA target sequence
cgaccggatcgtagactggaa

SEQ ID NO: 270481 - DNA, 21 bp, Artificial sequence
  SiRNA target sequence
gaccggatcgtagactggaag

SEQ ID NO: 270482 - DNA, 21 bp, Artificial sequence
  SiRNA target sequence
accggatcgtagactggaagg

SEQ ID NO: 270483 - DNA, 21 bp, Artificial sequence
  SiRNA target sequence
ccggatcgtagactggaagga

SEQ ID NO: 270484 - DNA, 21 bp, Artificial sequence
  SiRNA target sequence
cggatcgtagactggaaggat

SEQ ID NO: 270485 - DNA, 21 bp, Artificial sequence
  SiRNA target sequence
ggatcgtagactggaaggatg

SEQ ID NO: 270486 - DNA, 21 bp, Artificial sequence
  SiRNA target sequence
gatcgtagactggaaggatgg

SEQ ID NO: 270487 - DNA, 21 bp, Artificial sequence
  SiRNA target sequence
atcgtagactggaaggatggt

SEQ ID NO: 270488 - DNA, 21 bp, Artificial sequence
  SiRNA target sequence
tcgtagactggaaggatggtc

SEQ ID NO: 270489 - DNA, 21 bp, Artificial sequence
  SiRNA target sequence
cgtagactggaaggatggtcc

SEQ ID NO: 270490 - DNA, 21 bp, Artificial sequence
  SiRNA target sequence
gtagactggaaggatggtccg

SEQ ID NO: 270491 - DNA, 21 bp, Artificial sequence
  SiRNA target sequence
tagactggaaggatggtccgc

SEQ ID NO: 270492 - DNA, 21 bp, Artificial sequence
  SiRNA target sequence
agactggaaggatggtccgcg

SEQ ID NO: 270493 - DNA, 21 bp, Artificial sequence
  SiRNA target sequence
gactggaaggatggtccgcgg

SEQ ID NO: 270494 - DNA, 21 bp, Artificial sequence
  SiRNA target sequence
actggaaggatggtccgcggc

SEQ ID NO: 270495 - DNA, 21 bp, Artificial sequence
  SiRNA target sequence
ctggaaggatggtccgcggct

SEQ ID NO: 270496 - DNA, 21 bp, Artificial sequence
  SiRNA target sequence
tggaaggatggtccgcggcta

SEQ ID NO: 270497 - DNA, 21 bp, Artificial sequence
  SiRNA target sequence
ggaaggatggtccgcggctaa

SEQ ID NO: 270498 - DNA, 21 bp, Artificial sequence
  SiRNA target sequence
gaaggatggtccgcggctaag

SEQ ID NO: 270499 - DNA, 21 bp, Artificial sequence
  SiRNA target sequence
aaggatggtccgcggctaaga

SEQ ID NO: 270500 - DNA, 21 bp, Artificial sequence
  SiRNA target sequence
aggatggtccgcggctaagat

SEQ ID NO: 270501 - DNA, 21 bp, Artificial sequence
  SiRNA target sequence
ggatggtccgcggctaagatt

SEQ ID NO: 270502 - DNA, 21 bp, Artificial sequence
  SiRNA target sequence
gatggtccgcggctaagattg

SEQ ID NO: 270503 - DNA, 21 bp, Artificial sequence
  SiRNA target sequence
atggtccgcggctaagattgt

SEQ ID NO: 270504 - DNA, 21 bp, Artificial sequence
  SiRNA target sequence
tggtccgcggctaagattgta

SEQ ID NO: 270505 - DNA, 21 bp, Artificial sequence
  SiRNA target sequence
ggtccgcggctaagattgtaa

SEQ ID NO: 270506 - DNA, 21 bp, Artificial sequence
  SiRNA target sequence
gtccgcggctaagattgtaaa

SEQ ID NO: 270507 - DNA, 21 bp, Artificial sequence
  SiRNA target sequence
tccgcggctaagattgtaaat

SEQ ID NO: 270508 - DNA, 21 bp, Artificial sequence
  SiRNA target sequence
ccgcggctaagattgtaaatt

SEQ ID NO: 270509 - DNA, 21 bp, Artificial sequence
  SiRNA target sequence
cgcggctaagattgtaaattg

SEQ ID NO: 270510 - DNA, 21 bp, Artificial sequence
  SiRNA target sequence
gcggctaagattgtaaattgt

SEQ ID NO: 270511 - DNA, 21 bp, Artificial sequence
  SiRNA target sequence
cggctaagattgtaaattgtg

SEQ ID NO: 270512 - DNA, 21 bp, Artificial sequence
  SiRNA target sequence
ggctaagattgtaaattgtga

SEQ ID NO: 270513 - DNA, 21 bp, Artificial sequence
  SiRNA target sequence
gctaagattgtaaattgtgat

SEQ ID NO: 270514 - DNA, 21 bp, Artificial sequence
  SiRNA target sequence
ctaagattgtaaattgtgatg

SEQ ID NO: 270515 - DNA, 21 bp, Artificial sequence
  SiRNA target sequence
taagattgtaaattgtgatgc

SEQ ID NO: 270516 - DNA, 21 bp, Artificial sequence
  SiRNA target sequence
aagattgtaaattgtgatgct

SEQ ID NO: 270517 - DNA, 21 bp, Artificial sequence
  SiRNA target sequence
agattgtaaattgtgatgctg

SEQ ID NO: 270518 - DNA, 21 bp, Artificial sequence
  SiRNA target sequence
gattgtaaattgtgatgctgt

SEQ ID NO: 270519 - DNA, 21 bp, Artificial sequence
  SiRNA target sequence
attgtaaattgtgatgctgtg

SEQ ID NO: 270520 - DNA, 21 bp, Artificial sequence
  SiRNA target sequence
ttgtaaattgtgatgctgtgt

SEQ ID NO: 270521 - DNA, 21 bp, Artificial sequence
  SiRNA target sequence
tgtaaattgtgatgctgtgtc

SEQ ID NO: 270522 - DNA, 21 bp, Artificial sequence
  SiRNA target sequence
gtaaattgtgatgctgtgtct

SEQ ID NO: 270523 - DNA, 21 bp, Artificial sequence
  SiRNA target sequence
taaattgtgatgctgtgtcta

SEQ ID NO: 270524 - DNA, 21 bp, Artificial sequence
  SiRNA target sequence
aaattgtgatgctgtgtctac

SEQ ID NO: 270525 - DNA, 21 bp, Artificial sequence
  SiRNA target sequence
aattgtgatgctgtgtctact

SEQ ID NO: 270526 - DNA, 21 bp, Artificial sequence
  SiRNA target sequence
attgtgatgctgtgtctactg

SEQ ID NO: 270527 - DNA, 21 bp, Artificial sequence
  SiRNA target sequence
ttgtgatgctgtgtctactgg

SEQ ID NO: 270528 - DNA, 21 bp, Artificial sequence
  SiRNA target sequence
tgtgatgctgtgtctactggt

SEQ ID NO: 270529 - DNA, 21 bp, Artificial sequence
  SiRNA target sequence
gtgatgctgtgtctactggtc

SEQ ID NO: 270530 - DNA, 21 bp, Artificial sequence
  SiRNA target sequence
tgatgctgtgtctactggtca

SEQ ID NO: 270531 - DNA, 21 bp, Artificial sequence
  SiRNA target sequence
gatgctgtgtctactggtcaa

SEQ ID NO: 270532 - DNA, 21 bp, Artificial sequence
  SiRNA target sequence
atgctgtgtctactggtcaag

SEQ ID NO: 270533 - DNA, 21 bp, Artificial sequence
  SiRNA target sequence
tgctgtgtctactggtcaagg

SEQ ID NO: 270534 - DNA, 21 bp, Artificial sequence
  SiRNA target sequence
gctgtgtctactggtcaaggg

SEQ ID NO: 270535 - DNA, 21 bp, Artificial sequence
  SiRNA target sequence
ctgtgtctactggtcaagggg

SEQ ID NO: 270536 - DNA, 21 bp, Artificial sequence
  SiRNA target sequence
tgtgtctactggtcaaggggt

SEQ ID NO: 270537 - DNA, 21 bp, Artificial sequence
  SiRNA target sequence
gtgtctactggtcaaggggtg

SEQ ID NO: 270538 - DNA, 21 bp, Artificial sequence
  SiRNA target sequence
tgtctactggtcaaggggtgt

SEQ ID NO: 270539 - DNA, 21 bp, Artificial sequence
  SiRNA target sequence
gtctactggtcaaggggtgta

SEQ ID NO: 270540 - DNA, 21 bp, Artificial sequence
  SiRNA target sequence
tctactggtcaaggggtgtat

SEQ ID NO: 270541 - DNA, 21 bp, Artificial sequence
  SiRNA target sequence
ctactggtcaaggggtgtata

SEQ ID NO: 270542 - DNA, 21 bp, Artificial sequence
  SiRNA target sequence
tactggtcaaggggtgtataa

SEQ ID NO: 270543 - DNA, 21 bp, Artificial sequence
  SiRNA target sequence
actggtcaaggggtgtataat

SEQ ID NO: 270544 - DNA, 21 bp, Artificial sequence
  SiRNA target sequence
ctggtcaaggggtgtataatc

SEQ ID NO: 270545 - DNA, 21 bp, Artificial sequence
  SiRNA target sequence
tggtcaaggggtgtataatca

SEQ ID NO: 270546 - DNA, 21 bp, Artificial sequence
  SiRNA target sequence
ggtcaaggggtgtataatcat

SEQ ID NO: 270547 - DNA, 21 bp, Artificial sequence
  SiRNA target sequence
gtcaaggggtgtataatcatg

SEQ ID NO: 270548 - DNA, 21 bp, Artificial sequence
  SiRNA target sequence
tcaaggggtgtataatcatgg

SEQ ID NO: 270549 - DNA, 21 bp, Artificial sequence
  SiRNA target sequence
caaggggtgtataatcatggt

SEQ ID NO: 270550 - DNA, 21 bp, Artificial sequence
  SiRNA target sequence
aaggggtgtataatcatggtt

SEQ ID NO: 270551 - DNA, 21 bp, Artificial sequence
  SiRNA target sequence
aggggtgtataatcatggtta

SEQ ID NO: 270552 - DNA, 21 bp, Artificial sequence
  SiRNA target sequence
ggggtgtataatcatggttat

SEQ ID NO: 270553 - DNA, 21 bp, Artificial sequence
  SiRNA target sequence
gggtgtataatcatggttatg

SEQ ID NO: 270554 - DNA, 21 bp, Artificial sequence
  SiRNA target sequence
ggtgtataatcatggttatgc

SEQ ID NO: 270555 - DNA, 21 bp, Artificial sequence
  SiRNA target sequence
gtgtataatcatggttatgct

SEQ ID NO: 270556 - DNA, 21 bp, Artificial sequence
  SiRNA target sequence
tgtataatcatggttatgcta

SEQ ID NO: 270557 - DNA, 21 bp, Artificial sequence
  SiRNA target sequence
gtataatcatggttatgctag

SEQ ID NO: 270558 - DNA, 21 bp, Artificial sequence
  SiRNA target sequence
tataatcatggttatgctagt

SEQ ID NO: 270559 - DNA, 21 bp, Artificial sequence
  SiRNA target sequence
ataatcatggttatgctagtc

SEQ ID NO: 270560 - DNA, 21 bp, Artificial sequence
  SiRNA target sequence
taatcatggttatgctagtca

SEQ ID NO: 270561 - DNA, 21 bp, Artificial sequence
  SiRNA target sequence
aatcatggttatgctagtcac

SEQ ID NO: 270562 - DNA, 21 bp, Artificial sequence
  SiRNA target sequence
atcatggttatgctagtcaca

SEQ ID NO: 270563 - DNA, 21 bp, Artificial sequence
  SiRNA target sequence
tcatggttatgctagtcacat

SEQ ID NO: 270564 - DNA, 21 bp, Artificial sequence
  SiRNA target sequence
catggttatgctagtcacatt

SEQ ID NO: 270565 - DNA, 21 bp, Artificial sequence
  SiRNA target sequence
atggttatgctagtcacattc

SEQ ID NO: 270566 - DNA, 21 bp, Artificial sequence
  SiRNA target sequence
tggttatgctagtcacattca

SEQ ID NO: 270567 - DNA, 21 bp, Artificial sequence
  SiRNA target sequence
ggttatgctagtcacattcaa

SEQ ID NO: 270568 - DNA, 21 bp, Artificial sequence
  SiRNA target sequence
gttatgctagtcacattcaaa

SEQ ID NO: 270569 - DNA, 21 bp, Artificial sequence
  SiRNA target sequence
ttatgctagtcacattcaaat

SEQ ID NO: 270570 - DNA, 21 bp, Artificial sequence
  SiRNA target sequence
tatgctagtcacattcaaatc

SEQ ID NO: 270571 - DNA, 21 bp, Artificial sequence
  SiRNA target sequence
atgctagtcacattcaaatca

SEQ ID NO: 270572 - DNA, 21 bp, Artificial sequence
  SiRNA target sequence
tgctagtcacattcaaatcac

SEQ ID NO: 270573 - DNA, 21 bp, Artificial sequence
  SiRNA target sequence
gctagtcacattcaaatcacg

SEQ ID NO: 270574 - DNA, 21 bp, Artificial sequence
  SiRNA target sequence
ctagtcacattcaaatcacgc

SEQ ID NO: 270575 - DNA, 21 bp, Artificial sequence
  SiRNA target sequence
tagtcacattcaaatcacgcg

SEQ ID NO: 270576 - DNA, 21 bp, Artificial sequence
  SiRNA target sequence
agtcacattcaaatcacgcgt

SEQ ID NO: 270577 - DNA, 21 bp, Artificial sequence
  SiRNA target sequence
gtcacattcaaatcacgcgtg

SEQ ID NO: 270578 - DNA, 21 bp, Artificial sequence
  SiRNA target sequence
tcacattcaaatcacgcgtgt

SEQ ID NO: 270579 - DNA, 21 bp, Artificial sequence
  SiRNA target sequence
cacattcaaatcacgcgtgta

SEQ ID NO: 270580 - DNA, 21 bp, Artificial sequence
  SiRNA target sequence
acattcaaatcacgcgtgtaa

SEQ ID NO: 270581 - DNA, 21 bp, Artificial sequence
  SiRNA target sequence
cattcaaatcacgcgtgtaaa

SEQ ID NO: 270582 - DNA, 21 bp, Artificial sequence
  SiRNA target sequence
attcaaatcacgcgtgtaaat

SEQ ID NO: 270583 - DNA, 21 bp, Artificial sequence
  SiRNA target sequence
ttcaaatcacgcgtgtaaata

SEQ ID NO: 270584 - DNA, 21 bp, Artificial sequence
  SiRNA target sequence
tcaaatcacgcgtgtaaataa

SEQ ID NO: 270585 - DNA, 21 bp, Artificial sequence
  SiRNA target sequence
caaatcacgcgtgtaaataat

SEQ ID NO: 270586 - DNA, 21 bp, Artificial sequence
  SiRNA target sequence
aaatcacgcgtgtaaataatg

SEQ ID NO: 270587 - DNA, 21 bp, Artificial sequence
  SiRNA target sequence
aatcacgcgtgtaaataatgt

SEQ ID NO: 270588 - DNA, 21 bp, Artificial sequence
  SiRNA target sequence
atcacgcgtgtaaataatgtt

SEQ ID NO: 270589 - DNA, 21 bp, Artificial sequence
  SiRNA target sequence
tcacgcgtgtaaataatgtta

SEQ ID NO: 270590 - DNA, 21 bp, Artificial sequence
  SiRNA target sequence
cacgcgtgtaaataatgttat

SEQ ID NO: 270591 - DNA, 21 bp, Artificial sequence
  SiRNA target sequence
acgcgtgtaaataatgttata

SEQ ID NO: 270592 - DNA, 21 bp, Artificial sequence
  SiRNA target sequence
cgcgtgtaaataatgttatag

SEQ ID NO: 270593 - DNA, 21 bp, Artificial sequence
  SiRNA target sequence
gcgtgtaaataatgttataga

SEQ ID NO: 270594 - DNA, 21 bp, Artificial sequence
  SiRNA target sequence
cgtgtaaataatgttatagaa

SEQ ID NO: 270595 - DNA, 21 bp, Artificial sequence
  SiRNA target sequence
gtgtaaataatgttatagaat

SEQ ID NO: 270596 - DNA, 21 bp, Artificial sequence
  SiRNA target sequence
tgtaaataatgttatagaatt

SEQ ID NO: 270597 - DNA, 21 bp, Artificial sequence
  SiRNA target sequence
gtaaataatgttatagaattg

SEQ ID NO: 270598 - DNA, 21 bp, Artificial sequence
  SiRNA target sequence
taaataatgttatagaattgg

SEQ ID NO: 270599 - DNA, 21 bp, Artificial sequence
  SiRNA target sequence
aaataatgttatagaattgga

SEQ ID NO: 270600 - DNA, 21 bp, Artificial sequence
  SiRNA target sequence
aataatgttatagaattggaa

SEQ ID NO: 270601 - DNA, 21 bp, Artificial sequence
  SiRNA target sequence
ataatgttatagaattggaag

SEQ ID NO: 270602 - DNA, 21 bp, Artificial sequence
  SiRNA target sequence
taatgttatagaattggaagt

SEQ ID NO: 270603 - DNA, 21 bp, Artificial sequence
  SiRNA target sequence
aatgttatagaattggaagtt

SEQ ID NO: 270604 - DNA, 21 bp, Artificial sequence
  SiRNA target sequence
atgttatagaattggaagttc

SEQ ID NO: 270605 - DNA, 21 bp, Artificial sequence
  SiRNA target sequence
tgttatagaattggaagttcc

SEQ ID NO: 270606 - DNA, 21 bp, Artificial sequence
  SiRNA target sequence
gttatagaattggaagttcca

SEQ ID NO: 270607 - DNA, 21 bp, Artificial sequence
  SiRNA target sequence
ttatagaattggaagttccat

SEQ ID NO: 270608 - DNA, 21 bp, Artificial sequence
  SiRNA target sequence
tatagaattggaagttccatt

SEQ ID NO: 270609 - DNA, 21 bp, Artificial sequence
  SiRNA target sequence
atagaattggaagttccattt

SEQ ID NO: 270610 - DNA, 21 bp, Artificial sequence
  SiRNA target sequence
tagaattggaagttccatttt

SEQ ID NO: 270611 - DNA, 21 bp, Artificial sequence
  SiRNA target sequence
agaattggaagttccatttta

SEQ ID NO: 270612 - DNA, 21 bp, Artificial sequence
  SiRNA target sequence
gaattggaagttccattttat

SEQ ID NO: 270613 - DNA, 21 bp, Artificial sequence
  SiRNA target sequence
aattggaagttccattttata

SEQ ID NO: 270614 - DNA, 21 bp, Artificial sequence
  SiRNA target sequence
attggaagttccattttataa

SEQ ID NO: 270615 - DNA, 21 bp, Artificial sequence
  SiRNA target sequence
ttggaagttccattttataat

SEQ ID NO: 270616 - DNA, 21 bp, Artificial sequence
  SiRNA target sequence
tggaagttccattttataatg

SEQ ID NO: 270617 - DNA, 21 bp, Artificial sequence
  SiRNA target sequence
ggaagttccattttataatgc

SEQ ID NO: 270618 - DNA, 21 bp, Artificial sequence
  SiRNA target sequence
gaagttccattttataatgct

SEQ ID NO: 270619 - DNA, 21 bp, Artificial sequence
  SiRNA target sequence
aagttccattttataatgcta

SEQ ID NO: 270620 - DNA, 21 bp, Artificial sequence
  SiRNA target sequence
agttccattttataatgctac

SEQ ID NO: 270621 - DNA, 21 bp, Artificial sequence
  SiRNA target sequence
gttccattttataatgctact

SEQ ID NO: 270622 - DNA, 21 bp, Artificial sequence
  SiRNA target sequence
ttccattttataatgctactt

SEQ ID NO: 270623 - DNA, 21 bp, Artificial sequence
  SiRNA target sequence
tccattttataatgctacttg

SEQ ID NO: 270624 - DNA, 21 bp, Artificial sequence
  SiRNA target sequence
ccattttataatgctacttgt

SEQ ID NO: 270625 - DNA, 21 bp, Artificial sequence
  SiRNA target sequence
cattttataatgctacttgtt

SEQ ID NO: 270626 - DNA, 21 bp, Artificial sequence
  SiRNA target sequence
attttataatgctacttgtta

SEQ ID NO: 270627 - DNA, 21 bp, Artificial sequence
  SiRNA target sequence
ttttataatgctacttgttat

SEQ ID NO: 270628 - DNA, 21 bp, Artificial sequence
  SiRNA target sequence
tttataatgctacttgttata

SEQ ID NO: 270629 - DNA, 21 bp, Artificial sequence
  SiRNA target sequence
ttataatgctacttgttataa

SEQ ID NO: 270630 - DNA, 21 bp, Artificial sequence
  SiRNA target sequence
tataatgctacttgttataat

SEQ ID NO: 270631 - DNA, 21 bp, Artificial sequence
  SiRNA target sequence
ataatgctacttgttataatt

SEQ ID NO: 270632 - DNA, 21 bp, Artificial sequence
  SiRNA target sequence
taatgctacttgttataatta

SEQ ID NO: 270633 - DNA, 21 bp, Artificial sequence
  SiRNA target sequence
aatgctacttgttataattat

SEQ ID NO: 270634 - DNA, 21 bp, Artificial sequence
  SiRNA target sequence
atgctacttgttataattatt

SEQ ID NO: 270635 - DNA, 21 bp, Artificial sequence
  SiRNA target sequence
tgctacttgttataattattt

SEQ ID NO: 270636 - DNA, 21 bp, Artificial sequence
  SiRNA target sequence
gctacttgttataattattta

SEQ ID NO: 270637 - DNA, 21 bp, Artificial sequence
  SiRNA target sequence
ctacttgttataattatttac

SEQ ID NO: 270638 - DNA, 21 bp, Artificial sequence
  SiRNA target sequence
tacttgttataattatttaca

SEQ ID NO: 270639 - DNA, 21 bp, Artificial sequence
  SiRNA target sequence
acttgttataattatttacag

SEQ ID NO: 270640 - DNA, 21 bp, Artificial sequence
  SiRNA target sequence
cttgttataattatttacagg

SEQ ID NO: 270641 - DNA, 21 bp, Artificial sequence
  SiRNA target sequence
ttgttataattatttacaggc

SEQ ID NO: 270642 - DNA, 21 bp, Artificial sequence
  SiRNA target sequence
tgttataattatttacaggcg

SEQ ID NO: 270643 - DNA, 21 bp, Artificial sequence
  SiRNA target sequence
gttataattatttacaggcgt

SEQ ID NO: 270644 - DNA, 21 bp, Artificial sequence
  SiRNA target sequence
ttataattatttacaggcgtt

SEQ ID NO: 270645 - DNA, 21 bp, Artificial sequence
  SiRNA target sequence
tataattatttacaggcgttt

SEQ ID NO: 270646 - DNA, 21 bp, Artificial sequence
  SiRNA target sequence
ataattatttacaggcgttta

SEQ ID NO: 270647 - DNA, 21 bp, Artificial sequence
  SiRNA target sequence
taattatttacaggcgtttaa

SEQ ID NO: 270648 - DNA, 21 bp, Artificial sequence
  SiRNA target sequence
aattatttacaggcgtttaat

SEQ ID NO: 270649 - DNA, 21 bp, Artificial sequence
  SiRNA target sequence
attatttacaggcgtttaatg

SEQ ID NO: 270650 - DNA, 21 bp, Artificial sequence
  SiRNA target sequence
ttatttacaggcgtttaatgc

SEQ ID NO: 270651 - DNA, 21 bp, Artificial sequence
  SiRNA target sequence
tatttacaggcgtttaatgcg

SEQ ID NO: 270652 - DNA, 21 bp, Artificial sequence
  SiRNA target sequence
atttacaggcgtttaatgcgt

SEQ ID NO: 270653 - DNA, 21 bp, Artificial sequence
  SiRNA target sequence
tttacaggcgtttaatgcgtc

SEQ ID NO: 270654 - DNA, 21 bp, Artificial sequence
  SiRNA target sequence
ttacaggcgtttaatgcgtct

SEQ ID NO: 270655 - DNA, 21 bp, Artificial sequence
  SiRNA target sequence
tacaggcgtttaatgcgtcta

SEQ ID NO: 270656 - DNA, 21 bp, Artificial sequence
  SiRNA target sequence
acaggcgtttaatgcgtctag

SEQ ID NO: 270657 - DNA, 21 bp, Artificial sequence
  SiRNA target sequence
caggcgtttaatgcgtctagc

SEQ ID NO: 270658 - DNA, 21 bp, Artificial sequence
  SiRNA target sequence
aggcgtttaatgcgtctagcg

SEQ ID NO: 270659 - DNA, 21 bp, Artificial sequence
  SiRNA target sequence
ggcgtttaatgcgtctagcgc

SEQ ID NO: 270660 - DNA, 21 bp, Artificial sequence
  SiRNA target sequence
gcgtttaatgcgtctagcgct

SEQ ID NO: 270661 - DNA, 21 bp, Artificial sequence
  SiRNA target sequence
cgtttaatgcgtctagcgctg

SEQ ID NO: 270662 - DNA, 21 bp, Artificial sequence
  SiRNA target sequence
gtttaatgcgtctagcgctgc

SEQ ID NO: 270663 - DNA, 21 bp, Artificial sequence
  SiRNA target sequence
tttaatgcgtctagcgctgca

SEQ ID NO: 270664 - DNA, 21 bp, Artificial sequence
  SiRNA target sequence
ttaatgcgtctagcgctgcat

SEQ ID NO: 270665 - DNA, 21 bp, Artificial sequence
  SiRNA target sequence
taatgcgtctagcgctgcatc

SEQ ID NO: 270666 - DNA, 21 bp, Artificial sequence
  SiRNA target sequence
aatgcgtctagcgctgcatct

SEQ ID NO: 270667 - DNA, 21 bp, Artificial sequence
  SiRNA target sequence
atgcgtctagcgctgcatcta

SEQ ID NO: 270668 - DNA, 21 bp, Artificial sequence
  SiRNA target sequence
tgcgtctagcgctgcatctag

SEQ ID NO: 270669 - DNA, 21 bp, Artificial sequence
  SiRNA target sequence
gcgtctagcgctgcatctagt

SEQ ID NO: 270670 - DNA, 21 bp, Artificial sequence
  SiRNA target sequence
cgtctagcgctgcatctagtt

SEQ ID NO: 270671 - DNA, 21 bp, Artificial sequence
  SiRNA target sequence
gtctagcgctgcatctagtta

SEQ ID NO: 270672 - DNA, 21 bp, Artificial sequence
  SiRNA target sequence
tctagcgctgcatctagttat

SEQ ID NO: 270673 - DNA, 21 bp, Artificial sequence
  SiRNA target sequence
ctagcgctgcatctagttatg

SEQ ID NO: 270674 - DNA, 21 bp, Artificial sequence
  SiRNA target sequence
tagcgctgcatctagttatgc

SEQ ID NO: 270675 - DNA, 21 bp, Artificial sequence
  SiRNA target sequence
agcgctgcatctagttatgca

SEQ ID NO: 270676 - DNA, 21 bp, Artificial sequence
  SiRNA target sequence
gcgctgcatctagttatgcag

SEQ ID NO: 270677 - DNA, 21 bp, Artificial sequence
  SiRNA target sequence
cgctgcatctagttatgcagt

SEQ ID NO: 270678 - DNA, 21 bp, Artificial sequence
  SiRNA target sequence
gctgcatctagttatgcagta

SEQ ID NO: 270679 - DNA, 21 bp, Artificial sequence
  SiRNA target sequence
ctgcatctagttatgcagtat

SEQ ID NO: 270680 - DNA, 21 bp, Artificial sequence
  SiRNA target sequence
tgcatctagttatgcagtatc

SEQ ID NO: 270681 - DNA, 21 bp, Artificial sequence
  SiRNA target sequence
gcatctagttatgcagtatct

SEQ ID NO: 270682 - DNA, 21 bp, Artificial sequence
  SiRNA target sequence
catctagttatgcagtatctt

SEQ ID NO: 270683 - DNA, 21 bp, Artificial sequence
  SiRNA target sequence
atctagttatgcagtatcttt

SEQ ID NO: 270684 - DNA, 21 bp, Artificial sequence
  SiRNA target sequence
tctagttatgcagtatcttta

SEQ ID NO: 270685 - DNA, 21 bp, Artificial sequence
  SiRNA target sequence
ctagttatgcagtatctttag

SEQ ID NO: 270686 - DNA, 21 bp, Artificial sequence
  SiRNA target sequence
tagttatgcagtatctttagg

SEQ ID NO: 270687 - DNA, 21 bp, Artificial sequence
  SiRNA target sequence
agttatgcagtatctttagga

SEQ ID NO: 270688 - DNA, 21 bp, Artificial sequence
  SiRNA target sequence
gttatgcagtatctttaggag

SEQ ID NO: 270689 - DNA, 21 bp, Artificial sequence
  SiRNA target sequence
ttatgcagtatctttaggaga

SEQ ID NO: 270690 - DNA, 21 bp, Artificial sequence
  SiRNA target sequence
tatgcagtatctttaggagaa

SEQ ID NO: 270691 - DNA, 21 bp, Artificial sequence
  SiRNA target sequence
atgcagtatctttaggagaaa

SEQ ID NO: 270692 - DNA, 21 bp, Artificial sequence
  SiRNA target sequence
tgcagtatctttaggagaaat

SEQ ID NO: 270693 - DNA, 21 bp, Artificial sequence
  SiRNA target sequence
gcagtatctttaggagaaata

SEQ ID NO: 270694 - DNA, 21 bp, Artificial sequence
  SiRNA target sequence
cagtatctttaggagaaatat

SEQ ID NO: 270695 - DNA, 21 bp, Artificial sequence
  SiRNA target sequence
agtatctttaggagaaatatc

SEQ ID NO: 270696 - DNA, 21 bp, Artificial sequence
  SiRNA target sequence
gtatctttaggagaaatatcg

SEQ ID NO: 270697 - DNA, 21 bp, Artificial sequence
  SiRNA target sequence
tatctttaggagaaatatcgg

SEQ ID NO: 270698 - DNA, 21 bp, Artificial sequence
  SiRNA target sequence
atctttaggagaaatatcggt

SEQ ID NO: 270699 - DNA, 21 bp, Artificial sequence
  SiRNA target sequence
tctttaggagaaatatcggtt

SEQ ID NO: 270700 - DNA, 21 bp, Artificial sequence
  SiRNA target sequence
ctttaggagaaatatcggttg

SEQ ID NO: 270701 - DNA, 21 bp, Artificial sequence
  SiRNA target sequence
tttaggagaaatatcggttgg

SEQ ID NO: 270702 - DNA, 21 bp, Artificial sequence
  SiRNA target sequence
ttaggagaaatatcggttggt

SEQ ID NO: 270703 - DNA, 21 bp, Artificial sequence
  SiRNA target sequence
taggagaaatatcggttggtt

SEQ ID NO: 270704 - DNA, 21 bp, Artificial sequence
  SiRNA target sequence
aggagaaatatcggttggttt

SEQ ID NO: 270705 - DNA, 21 bp, Artificial sequence
  SiRNA target sequence
ggagaaatatcggttggtttt

SEQ ID NO: 270706 - DNA, 21 bp, Artificial sequence
  SiRNA target sequence
gagaaatatcggttggttttc

SEQ ID NO: 270707 - DNA, 21 bp, Artificial sequence
  SiRNA target sequence
agaaatatcggttggttttca

SEQ ID NO: 270708 - DNA, 21 bp, Artificial sequence
  SiRNA target sequence
gaaatatcggttggttttcaa

SEQ ID NO: 270709 - DNA, 21 bp, Artificial sequence
  SiRNA target sequence
aaatatcggttggttttcaag

SEQ ID NO: 270710 - DNA, 21 bp, Artificial sequence
  SiRNA target sequence
aatatcggttggttttcaagc

SEQ ID NO: 270711 - DNA, 21 bp, Artificial sequence
  SiRNA target sequence
atatcggttggttttcaagct

SEQ ID NO: 270712 - DNA, 21 bp, Artificial sequence
  SiRNA target sequence
tatcggttggttttcaagcta

SEQ ID NO: 270713 - DNA, 21 bp, Artificial sequence
  SiRNA target sequence
atcggttggttttcaagctac

SEQ ID NO: 270714 - DNA, 21 bp, Artificial sequence
  SiRNA target sequence
tcggttggttttcaagctaca

SEQ ID NO: 270715 - DNA, 21 bp, Artificial sequence
  SiRNA target sequence
cggttggttttcaagctacaa

SEQ ID NO: 270716 - DNA, 21 bp, Artificial sequence
  SiRNA target sequence
ggttggttttcaagctacaag

SEQ ID NO: 270717 - DNA, 21 bp, Artificial sequence
  SiRNA target sequence
gttggttttcaagctacaagt

SEQ ID NO: 270718 - DNA, 21 bp, Artificial sequence
  SiRNA target sequence
ttggttttcaagctacaagtg

SEQ ID NO: 270719 - DNA, 21 bp, Artificial sequence
  SiRNA target sequence
tggttttcaagctacaagtga

SEQ ID NO: 270720 - DNA, 21 bp, Artificial sequence
  SiRNA target sequence
ggttttcaagctacaagtgat

SEQ ID NO: 270721 - DNA, 21 bp, Artificial sequence
  SiRNA target sequence
gttttcaagctacaagtgatg

SEQ ID NO: 270722 - DNA, 21 bp, Artificial sequence
  SiRNA target sequence
ttttcaagctacaagtgatga

SEQ ID NO: 270723 - DNA, 21 bp, Artificial sequence
  SiRNA target sequence
tttcaagctacaagtgatgat

SEQ ID NO: 270724 - DNA, 21 bp, Artificial sequence
  SiRNA target sequence
ttcaagctacaagtgatgata

SEQ ID NO: 270725 - DNA, 21 bp, Artificial sequence
  SiRNA target sequence
tcaagctacaagtgatgatat

SEQ ID NO: 270726 - DNA, 21 bp, Artificial sequence
  SiRNA target sequence
caagctacaagtgatgatatt

SEQ ID NO: 270727 - DNA, 21 bp, Artificial sequence
  SiRNA target sequence
aagctacaagtgatgatattg

SEQ ID NO: 270728 - DNA, 21 bp, Artificial sequence
  SiRNA target sequence
agctacaagtgatgatattgc

SEQ ID NO: 270729 - DNA, 21 bp, Artificial sequence
  SiRNA target sequence
gctacaagtgatgatattgca

SEQ ID NO: 270730 - DNA, 21 bp, Artificial sequence
  SiRNA target sequence
ctacaagtgatgatattgcat

SEQ ID NO: 270731 - DNA, 21 bp, Artificial sequence
  SiRNA target sequence
tacaagtgatgatattgcatc

SEQ ID NO: 270732 - DNA, 21 bp, Artificial sequence
  SiRNA target sequence
acaagtgatgatattgcatct

SEQ ID NO: 270733 - DNA, 21 bp, Artificial sequence
  SiRNA target sequence
caagtgatgatattgcatcta

SEQ ID NO: 270734 - DNA, 21 bp, Artificial sequence
  SiRNA target sequence
aagtgatgatattgcatctat

SEQ ID NO: 270735 - DNA, 21 bp, Artificial sequence
  SiRNA target sequence
agtgatgatattgcatctatt

SEQ ID NO: 270736 - DNA, 21 bp, Artificial sequence
  SiRNA target sequence
gtgatgatattgcatctattg

SEQ ID NO: 270737 - DNA, 21 bp, Artificial sequence
  SiRNA target sequence
tgatgatattgcatctattgt

SEQ ID NO: 270738 - DNA, 21 bp, Artificial sequence
  SiRNA target sequence
gatgatattgcatctattgtt

SEQ ID NO: 270739 - DNA, 21 bp, Artificial sequence
  SiRNA target sequence
atgatattgcatctattgtta

SEQ ID NO: 270740 - DNA, 21 bp, Artificial sequence
  SiRNA target sequence
tgatattgcatctattgttaa

SEQ ID NO: 270741 - DNA, 21 bp, Artificial sequence
  SiRNA target sequence
gatattgcatctattgttaac

SEQ ID NO: 270742 - DNA, 21 bp, Artificial sequence
  SiRNA target sequence
atattgcatctattgttaaca

SEQ ID NO: 270743 - DNA, 21 bp, Artificial sequence
  SiRNA target sequence
tattgcatctattgttaacaa

SEQ ID NO: 270744 - DNA, 21 bp, Artificial sequence
  SiRNA target sequence
attgcatctattgttaacaaa

SEQ ID NO: 270745 - DNA, 21 bp, Artificial sequence
  SiRNA target sequence
ttgcatctattgttaacaaac

SEQ ID NO: 270746 - DNA, 21 bp, Artificial sequence
  SiRNA target sequence
tgcatctattgttaacaaacc

SEQ ID NO: 270747 - DNA, 21 bp, Artificial sequence
  SiRNA target sequence
gcatctattgttaacaaacct

SEQ ID NO: 270748 - DNA, 21 bp, Artificial sequence
  SiRNA target sequence
catctattgttaacaaacctg

SEQ ID NO: 270749 - DNA, 21 bp, Artificial sequence
  SiRNA target sequence
atctattgttaacaaacctgt

SEQ ID NO: 270750 - DNA, 21 bp, Artificial sequence
  SiRNA target sequence
tctattgttaacaaacctgtt

SEQ ID NO: 270751 - DNA, 21 bp, Artificial sequence
  SiRNA target sequence
ctattgttaacaaacctgtta

SEQ ID NO: 270752 - DNA, 21 bp, Artificial sequence
  SiRNA target sequence
tattgttaacaaacctgttac

SEQ ID NO: 270753 - DNA, 21 bp, Artificial sequence
  SiRNA target sequence
attgttaacaaacctgttact

SEQ ID NO: 270754 - DNA, 21 bp, Artificial sequence
  SiRNA target sequence
ttgttaacaaacctgttacta

SEQ ID NO: 270755 - DNA, 21 bp, Artificial sequence
  SiRNA target sequence
tgttaacaaacctgttactat

SEQ ID NO: 270756 - DNA, 21 bp, Artificial sequence
  SiRNA target sequence
gttaacaaacctgttactatt

SEQ ID NO: 270757 - DNA, 21 bp, Artificial sequence
  SiRNA target sequence
ttaacaaacctgttactattt

SEQ ID NO: 270758 - DNA, 21 bp, Artificial sequence
  SiRNA target sequence
taacaaacctgttactattta

SEQ ID NO: 270759 - DNA, 21 bp, Artificial sequence
  SiRNA target sequence
aacaaacctgttactatttat

SEQ ID NO: 270760 - DNA, 21 bp, Artificial sequence
  SiRNA target sequence
acaaacctgttactatttatt

SEQ ID NO: 270761 - DNA, 21 bp, Artificial sequence
  SiRNA target sequence
caaacctgttactatttatta

SEQ ID NO: 270762 - DNA, 21 bp, Artificial sequence
  SiRNA target sequence
aaacctgttactatttattat

SEQ ID NO: 270763 - DNA, 21 bp, Artificial sequence
  SiRNA target sequence
aacctgttactatttattata

SEQ ID NO: 270764 - DNA, 21 bp, Artificial sequence
  SiRNA target sequence
acctgttactatttattatag

SEQ ID NO: 270765 - DNA, 21 bp, Artificial sequence
  SiRNA target sequence
cctgttactatttattatagt

SEQ ID NO: 270766 - DNA, 21 bp, Artificial sequence
  SiRNA target sequence
ctgttactatttattatagta

SEQ ID NO: 270767 - DNA, 21 bp, Artificial sequence
  SiRNA target sequence
tgttactatttattatagtat

SEQ ID NO: 270768 - DNA, 21 bp, Artificial sequence
  SiRNA target sequence
gttactatttattatagtatt

SEQ ID NO: 270769 - DNA, 21 bp, Artificial sequence
  SiRNA target sequence
ttactatttattatagtattg

SEQ ID NO: 270770 - DNA, 21 bp, Artificial sequence
  SiRNA target sequence
tactatttattatagtattgg

SEQ ID NO: 270771 - DNA, 21 bp, Artificial sequence
  SiRNA target sequence
actatttattatagtattgga

SEQ ID NO: 270772 - DNA, 21 bp, Artificial sequence
  SiRNA target sequence
ctatttattatagtattggag

SEQ ID NO: 270773 - DNA, 21 bp, Artificial sequence
  SiRNA target sequence
tatttattatagtattggaga

SEQ ID NO: 270774 - DNA, 21 bp, Artificial sequence
  SiRNA target sequence
atttattatagtattggagat

SEQ ID NO: 270775 - DNA, 21 bp, Artificial sequence
  SiRNA target sequence
tttattatagtattggagatg

SEQ ID NO: 270776 - DNA, 21 bp, Artificial sequence
  SiRNA target sequence
ttattatagtattggagatgg

SEQ ID NO: 270777 - DNA, 21 bp, Artificial sequence
  SiRNA target sequence
tattatagtattggagatggt

SEQ ID NO: 270778 - DNA, 21 bp, Artificial sequence
  SiRNA target sequence
attatagtattggagatggta

SEQ ID NO: 270779 - DNA, 21 bp, Artificial sequence
  SiRNA target sequence
ttatagtattggagatggtat

SEQ ID NO: 270780 - DNA, 21 bp, Artificial sequence
  SiRNA target sequence
tatagtattggagatggtatg

SEQ ID NO: 270781 - DNA, 21 bp, Artificial sequence
  SiRNA target sequence
atagtattggagatggtatgc

SEQ ID NO: 270782 - DNA, 21 bp, Artificial sequence
  SiRNA target sequence
tagtattggagatggtatgca

SEQ ID NO: 270783 - DNA, 21 bp, Artificial sequence
  SiRNA target sequence
agtattggagatggtatgcaa

SEQ ID NO: 270784 - DNA, 21 bp, Artificial sequence
  SiRNA target sequence
gtattggagatggtatgcaat

SEQ ID NO: 270785 - DNA, 21 bp, Artificial sequence
  SiRNA target sequence
tattggagatggtatgcaatt

SEQ ID NO: 270786 - DNA, 21 bp, Artificial sequence
  SiRNA target sequence
attggagatggtatgcaattt

SEQ ID NO: 270787 - DNA, 21 bp, Artificial sequence
  SiRNA target sequence
ttggagatggtatgcaatttt

SEQ ID NO: 270788 - DNA, 21 bp, Artificial sequence
  SiRNA target sequence
tggagatggtatgcaattttc

SEQ ID NO: 270789 - DNA, 21 bp, Artificial sequence
  SiRNA target sequence
ggagatggtatgcaattttct

SEQ ID NO: 270790 - DNA, 21 bp, Artificial sequence
  SiRNA target sequence
gagatggtatgcaattttctc

SEQ ID NO: 270791 - DNA, 21 bp, Artificial sequence
  SiRNA target sequence
agatggtatgcaattttctca

SEQ ID NO: 270792 - DNA, 21 bp, Artificial sequence
  SiRNA target sequence
gatggtatgcaattttctcag

SEQ ID NO: 270793 - DNA, 21 bp, Artificial sequence
  SiRNA target sequence
atggtatgcaattttctcagt

SEQ ID NO: 270794 - DNA, 21 bp, Artificial sequence
  SiRNA target sequence
tggtatgcaattttctcagtg

SEQ ID NO: 270795 - DNA, 21 bp, Artificial sequence
  SiRNA target sequence
ggtatgcaattttctcagtgg

SEQ ID NO: 270796 - DNA, 21 bp, Artificial sequence
  SiRNA target sequence
gtatgcaattttctcagtggg

SEQ ID NO: 270797 - DNA, 21 bp, Artificial sequence
  SiRNA target sequence
tatgcaattttctcagtgggt

SEQ ID NO: 270798 - DNA, 21 bp, Artificial sequence
  SiRNA target sequence
atgcaattttctcagtgggtt

SEQ ID NO: 270799 - DNA, 21 bp, Artificial sequence
  SiRNA target sequence
tgcaattttctcagtgggttg

SEQ ID NO: 270800 - DNA, 21 bp, Artificial sequence
  SiRNA target sequence
gcaattttctcagtgggttgg

SEQ ID NO: 270801 - DNA, 21 bp, Artificial sequence
  SiRNA target sequence
caattttctcagtgggttgga

SEQ ID NO: 270802 - DNA, 21 bp, Artificial sequence
  SiRNA target sequence
aattttctcagtgggttggat

SEQ ID NO: 270803 - DNA, 21 bp, Artificial sequence
  SiRNA target sequence
attttctcagtgggttggata

SEQ ID NO: 270804 - DNA, 21 bp, Artificial sequence
  SiRNA target sequence
ttttctcagtgggttggatat

SEQ ID NO: 270805 - DNA, 21 bp, Artificial sequence
  SiRNA target sequence
tttctcagtgggttggatatc

SEQ ID NO: 270806 - DNA, 21 bp, Artificial sequence
  SiRNA target sequence
ttctcagtgggttggatatca

SEQ ID NO: 270807 - DNA, 21 bp, Artificial sequence
  SiRNA target sequence
tctcagtgggttggatatcaa

SEQ ID NO: 270808 - DNA, 21 bp, Artificial sequence
  SiRNA target sequence
ctcagtgggttggatatcaac

SEQ ID NO: 270809 - DNA, 21 bp, Artificial sequence
  SiRNA target sequence
tcagtgggttggatatcaacc

SEQ ID NO: 270810 - DNA, 21 bp, Artificial sequence
  SiRNA target sequence
cagtgggttggatatcaaccg

SEQ ID NO: 270811 - DNA, 21 bp, Artificial sequence
  SiRNA target sequence
agtgggttggatatcaaccga

SEQ ID NO: 270812 - DNA, 21 bp, Artificial sequence
  SiRNA target sequence
gtgggttggatatcaaccgat

SEQ ID NO: 270813 - DNA, 21 bp, Artificial sequence
  SiRNA target sequence
tgggttggatatcaaccgatg

SEQ ID NO: 270814 - DNA, 21 bp, Artificial sequence
  SiRNA target sequence
gggttggatatcaaccgatga

SEQ ID NO: 270815 - DNA, 21 bp, Artificial sequence
  SiRNA target sequence
ggttggatatcaaccgatgat

SEQ ID NO: 270816 - DNA, 21 bp, Artificial sequence
  SiRNA target sequence
gttggatatcaaccgatgatg

SEQ ID NO: 270817 - DNA, 21 bp, Artificial sequence
  SiRNA target sequence
ttggatatcaaccgatgatga

SEQ ID NO: 270818 - DNA, 21 bp, Artificial sequence
  SiRNA target sequence
tggatatcaaccgatgatgat

SEQ ID NO: 270819 - DNA, 21 bp, Artificial sequence
  SiRNA target sequence
ggatatcaaccgatgatgatc

SEQ ID NO: 270820 - DNA, 21 bp, Artificial sequence
  SiRNA target sequence
gatatcaaccgatgatgatcc

SEQ ID NO: 270821 - DNA, 21 bp, Artificial sequence
  SiRNA target sequence
atatcaaccgatgatgatcct

SEQ ID NO: 270822 - DNA, 21 bp, Artificial sequence
  SiRNA target sequence
tatcaaccgatgatgatccta

SEQ ID NO: 270823 - DNA, 21 bp, Artificial sequence
  SiRNA target sequence
atcaaccgatgatgatcctag

SEQ ID NO: 270824 - DNA, 21 bp, Artificial sequence
  SiRNA target sequence
tcaaccgatgatgatcctaga

SEQ ID NO: 270825 - DNA, 21 bp, Artificial sequence
  SiRNA target sequence
caaccgatgatgatcctagat

SEQ ID NO: 270826 - DNA, 21 bp, Artificial sequence
  SiRNA target sequence
aaccgatgatgatcctagatc

SEQ ID NO: 270827 - DNA, 21 bp, Artificial sequence
  SiRNA target sequence
accgatgatgatcctagatca

SEQ ID NO: 270828 - DNA, 21 bp, Artificial sequence
  SiRNA target sequence
ccgatgatgatcctagatcag

SEQ ID NO: 270829 - DNA, 21 bp, Artificial sequence
  SiRNA target sequence
cgatgatgatcctagatcagc

SEQ ID NO: 270830 - DNA, 21 bp, Artificial sequence
  SiRNA target sequence
gatgatgatcctagatcagct

SEQ ID NO: 270831 - DNA, 21 bp, Artificial sequence
  SiRNA target sequence
  misc_feature (21)..(21): n is a, c, g, or t
atgatgatcctagatcagctn

SEQ ID NO: 270832 - DNA, 21 bp, Artificial sequence
  SiRNA target sequence
  misc_feature (20)..(20): n is a, c, g, or t
tgatgatcctagatcagctnc

SEQ ID NO: 270833 - DNA, 21 bp, Artificial sequence
  SiRNA target sequence
  misc_feature (19)..(19): n is a, c, g, or t
gatgatcctagatcagctncc

SEQ ID NO: 270834 - DNA, 21 bp, Artificial sequence
  SiRNA target sequence
  misc_feature (18)..(18): n is a, c, g, or t
atgatcctagatcagctncct

SEQ ID NO: 270835 - DNA, 21 bp, Artificial sequence
  SiRNA target sequence
  misc_feature (17)..(17): n is a, c, g, or t
tgatcctagatcagctncctg

SEQ ID NO: 270836 - DNA, 21 bp, Artificial sequence
  SiRNA target sequence
  misc_feature (16)..(16): n is a, c, g, or t
gatcctagatcagctncctgc

SEQ ID NO: 270837 - DNA, 21 bp, Artificial sequence
  SiRNA target sequence
  misc_feature (15)..(15): n is a, c, g, or t
atcctagatcagctncctgca

SEQ ID NO: 270838 - DNA, 21 bp, Artificial sequence
  SiRNA target sequence
  misc_feature (14)..(14): n is a, c, g, or t
tcctagatcagctncctgcac

SEQ ID NO: 270839 - DNA, 21 bp, Artificial sequence
  SiRNA target sequence
  misc_feature (13)..(13): n is a, c, g, or t
cctagatcagctncctgcacc

SEQ ID NO: 270840 - DNA, 21 bp, Artificial sequence
  SiRNA target sequence
  misc_feature (12)..(12): n is a, c, g, or t
ctagatcagctncctgcacca

SEQ ID NO: 270841 - DNA, 21 bp, Artificial sequence
  SiRNA target sequence
  misc_feature (11)..(11): n is a, c, g, or t
tagatcagctncctgcaccag

SEQ ID NO: 270842 - DNA, 21 bp, Artificial sequence
  SiRNA target sequence
  misc_feature (10)..(10): n is a, c, g, or t
agatcagctncctgcaccagt

SEQ ID NO: 270843 - DNA, 21 bp, Artificial sequence
  SiRNA target sequence
  misc_feature (9)..(9): n is a, c, g, or t
gatcagctncctgcaccagta

SEQ ID NO: 270844 - DNA, 21 bp, Artificial sequence
  SiRNA target sequence
  misc_feature (8)..(8): n is a, c, g, or t
atcagctncctgcaccagtag

SEQ ID NO: 270845 - DNA, 21 bp, Artificial sequence
  SiRNA target sequence
  misc_feature (7)..(7): n is a, c, g, or t
tcagctncctgcaccagtagt

SEQ ID NO: 270846 - DNA, 21 bp, Artificial sequence
  SiRNA target sequence
  misc_feature (6)..(6): n is a, c, g, or t
cagctncctgcaccagtagta

SEQ ID NO: 270847 - DNA, 21 bp, Artificial sequence
  SiRNA target sequence
  misc_feature (5)..(5): n is a, c, g, or t
agctncctgcaccagtagtaa

SEQ ID NO: 270848 - DNA, 21 bp, Artificial sequence
  SiRNA target sequence
  misc_feature (4)..(4): n is a, c, g, or t
gctncctgcaccagtagtaag

SEQ ID NO: 270849 - DNA, 21 bp, Artificial sequence
  SiRNA target sequence
  misc_feature (3)..(3): n is a, c, g, or t
ctncctgcaccagtagtaagg

SEQ ID NO: 270850 - DNA, 21 bp, Artificial sequence
  SiRNA target sequence
  misc_feature (2)..(2): n is a, c, g, or t
tncctgcaccagtagtaaggg

SEQ ID NO: 270851 - DNA, 21 bp, Artificial sequence
  SiRNA target sequence
  misc_feature (1)..(1): n is a, c, g, or t
ncctgcaccagtagtaagggc

SEQ ID NO: 270852 - DNA, 21 bp, Artificial sequence
  SiRNA target sequence
cctgcaccagtagtaagggcc

SEQ ID NO: 270853 - DNA, 21 bp, Artificial sequence
  SiRNA target sequence
ctgcaccagtagtaagggccg

SEQ ID NO: 270854 - DNA, 21 bp, Artificial sequence
  SiRNA target sequence
tgcaccagtagtaagggccgt

SEQ ID NO: 270855 - DNA, 21 bp, Artificial sequence
  SiRNA target sequence
gcaccagtagtaagggccgtg

SEQ ID NO: 270856 - DNA, 21 bp, Artificial sequence
  SiRNA target sequence
caccagtagtaagggccgtgc

SEQ ID NO: 270857 - DNA, 21 bp, Artificial sequence
  SiRNA target sequence
accagtagtaagggccgtgcc

SEQ ID NO: 270858 - DNA, 21 bp, Artificial sequence
  SiRNA target sequence
ccagtagtaagggccgtgcct

SEQ ID NO: 270859 - DNA, 21 bp, Artificial sequence
  SiRNA target sequence
cagtagtaagggccgtgcctg

SEQ ID NO: 270860 - DNA, 21 bp, Artificial sequence
  SiRNA target sequence
agtagtaagggccgtgcctga

SEQ ID NO: 270861 - DNA, 21 bp, Artificial sequence
  SiRNA target sequence
gtagtaagggccgtgcctgag

SEQ ID NO: 270862 - DNA, 21 bp, Artificial sequence
  SiRNA target sequence
tagtaagggccgtgcctgagg

SEQ ID NO: 270863 - DNA, 21 bp, Artificial sequence
  SiRNA target sequence
agtaagggccgtgcctgaggg

SEQ ID NO: 270864 - DNA, 21 bp, Artificial sequence
  SiRNA target sequence
gtaagggccgtgcctgagggc

SEQ ID NO: 270865 - DNA, 21 bp, Artificial sequence
  SiRNA target sequence
taagggccgtgcctgagggcc

SEQ ID NO: 270866 - DNA, 21 bp, Artificial sequence
  SiRNA target sequence
aagggccgtgcctgagggccc

SEQ ID NO: 270867 - DNA, 21 bp, Artificial sequence
  SiRNA target sequence
agggccgtgcctgagggccct

SEQ ID NO: 270868 - DNA, 21 bp, Artificial sequence
  SiRNA target sequence
gggccgtgcctgagggcccta

SEQ ID NO: 270869 - DNA, 21 bp, Artificial sequence
  SiRNA target sequence
ggccgtgcctgagggccctat

SEQ ID NO: 270870 - DNA, 21 bp, Artificial sequence
  SiRNA target sequence
gccgtgcctgagggccctatt

SEQ ID NO: 270871 - DNA, 21 bp, Artificial sequence
  SiRNA target sequence
ccgtgcctgagggccctattg

SEQ ID NO: 270872 - DNA, 21 bp, Artificial sequence
  SiRNA target sequence
cgtgcctgagggccctattgc

SEQ ID NO: 270873 - DNA, 21 bp, Artificial sequence
  SiRNA target sequence
gtgcctgagggccctattgcg

SEQ ID NO: 270874 - DNA, 21 bp, Artificial sequence
  SiRNA target sequence
tgcctgagggccctattgcga

SEQ ID NO: 270875 - DNA, 21 bp, Artificial sequence
  SiRNA target sequence
gcctgagggccctattgcgaa

SEQ ID NO: 270876 - DNA, 21 bp, Artificial sequence
  SiRNA target sequence
cctgagggccctattgcgaag

SEQ ID NO: 270877 - DNA, 21 bp, Artificial sequence
  SiRNA target sequence
ctgagggccctattgcgaaga

SEQ ID NO: 270878 - DNA, 21 bp, Artificial sequence
  SiRNA target sequence
tgagggccctattgcgaagat

SEQ ID NO: 270879 - DNA, 21 bp, Artificial sequence
  SiRNA target sequence
gagggccctattgcgaagatt

SEQ ID NO: 270880 - DNA, 21 bp, Artificial sequence
  SiRNA target sequence
agggccctattgcgaagatta

SEQ ID NO: 270881 - DNA, 21 bp, Artificial sequence
  SiRNA target sequence
gggccctattgcgaagattaa

SEQ ID NO: 270882 - DNA, 21 bp, Artificial sequence
  SiRNA target sequence
ggccctattgcgaagattaaa

SEQ ID NO: 270883 - DNA, 21 bp, Artificial sequence
  SiRNA target sequence
gccctattgcgaagattaaaa

SEQ ID NO: 270884 - DNA, 21 bp, Artificial sequence
  SiRNA target sequence
ccctattgcgaagattaaaaa

SEQ ID NO: 270885 - DNA, 21 bp, Artificial sequence
  SiRNA target sequence
cctattgcgaagattaaaaac

SEQ ID NO: 270886 - DNA, 21 bp, Artificial sequence
  SiRNA target sequence
ctattgcgaagattaaaaact

SEQ ID NO: 270887 - DNA, 21 bp, Artificial sequence
  SiRNA target sequence
tattgcgaagattaaaaactt

SEQ ID NO: 270888 - DNA, 21 bp, Artificial sequence
  SiRNA target sequence
attgcgaagattaaaaacttc

SEQ ID NO: 270889 - DNA, 21 bp, Artificial sequence
  SiRNA target sequence
ttgcgaagattaaaaacttct

SEQ ID NO: 270890 - DNA, 21 bp, Artificial sequence
  SiRNA target sequence
tgcgaagattaaaaacttctt

SEQ ID NO: 270891 - DNA, 21 bp, Artificial sequence
  SiRNA target sequence
gcgaagattaaaaacttcttc

SEQ ID NO: 270892 - DNA, 21 bp, Artificial sequence
  SiRNA target sequence
cgaagattaaaaacttcttcc

SEQ ID NO: 270893 - DNA, 21 bp, Artificial sequence
  SiRNA target sequence
gaagattaaaaacttcttcca

SEQ ID NO: 270894 - DNA, 21 bp, Artificial sequence
  SiRNA target sequence
aagattaaaaacttcttccat

SEQ ID NO: 270895 - DNA, 21 bp, Artificial sequence
  SiRNA target sequence
agattaaaaacttcttccatc

SEQ ID NO: 270896 - DNA, 21 bp, Artificial sequence
  SiRNA target sequence
gattaaaaacttcttccatca

SEQ ID NO: 270897 - DNA, 21 bp, Artificial sequence
  SiRNA target sequence
attaaaaacttcttccatcaa

SEQ ID NO: 270898 - DNA, 21 bp, Artificial sequence
  SiRNA target sequence
ttaaaaacttcttccatcaaa

SEQ ID NO: 270899 - DNA, 21 bp, Artificial sequence
  SiRNA target sequence
taaaaacttcttccatcaaac

SEQ ID NO: 270900 - DNA, 21 bp, Artificial sequence
  SiRNA target sequence
aaaaacttcttccatcaaaca

SEQ ID NO: 270901 - DNA, 21 bp, Artificial sequence
  SiRNA target sequence
aaaacttcttccatcaaacag

SEQ ID NO: 270902 - DNA, 21 bp, Artificial sequence
  SiRNA target sequence
aaacttcttccatcaaacagc

SEQ ID NO: 270903 - DNA, 21 bp, Artificial sequence
  SiRNA target sequence
aacttcttccatcaaacagcc

SEQ ID NO: 270904 - DNA, 21 bp, Artificial sequence
  SiRNA target sequence
acttcttccatcaaacagccg

SEQ ID NO: 270905 - DNA, 21 bp, Artificial sequence
  SiRNA target sequence
cttcttccatcaaacagccga

SEQ ID NO: 270906 - DNA, 21 bp, Artificial sequence
  SiRNA target sequence
  misc_feature (21)..(21): n is a, c, g, or t
ttcttccatcaaacagccgan

SEQ ID NO: 270907 - DNA, 21 bp, Artificial sequence
  SiRNA target sequence
  misc_feature (20)..(20): n is a, c, g, or t
tcttccatcaaacagccgang

SEQ ID NO: 270908 - DNA, 21 bp, Artificial sequence
  SiRNA target sequence
  misc_feature (19)..(19): n is a, c, g, or t
cttccatcaaacagccganga

SEQ ID NO: 270909 - DNA, 21 bp, Artificial sequence
  SiRNA target sequence
  misc_feature (18)..(18): n is a, c, g, or t
ttccatcaaacagccgangaa

SEQ ID NO: 270910 - DNA, 21 bp, Artificial sequence
  SiRNA target sequence
  misc_feature (17)..(17): n is a, c, g, or t
tccatcaaacagccgangaag

SEQ ID NO: 270911 - DNA, 21 bp, Artificial sequence
  SiRNA target sequence
  misc_feature (16)..(16): n is a, c, g, or t
ccatcaaacagccgangaagt

SEQ ID NO: 270912 - DNA, 21 bp, Artificial sequence
  SiRNA target sequence
  misc_feature (15)..(15): n is a, c, g, or t
catcaaacagccgangaagtt

SEQ ID NO: 270913 - DNA, 21 bp, Artificial sequence
  SiRNA target sequence
  misc_feature (14)..(14): n is a, c, g, or t
atcaaacagccgangaagtta

SEQ ID NO: 270914 - DNA, 21 bp, Artificial sequence
  SiRNA target sequence
  misc_feature (13)..(13): n is a, c, g, or t
tcaaacagccgangaagttag

SEQ ID NO: 270915 - DNA, 21 bp, Artificial sequence
  SiRNA target sequence
  misc_feature (12)..(12): n is a, c, g, or t
caaacagccgangaagttaga

SEQ ID NO: 270916 - DNA, 21 bp, Artificial sequence
  SiRNA target sequence
  misc_feature (11)..(11): n is a, c, g, or t
aaacagccgangaagttagag

SEQ ID NO: 270917 - DNA, 21 bp, Artificial sequence
  SiRNA target sequence
  misc_feature (10)..(10): n is a, c, g, or t
aacagccgangaagttagaga

SEQ ID NO: 270918 - DNA, 21 bp, Artificial sequence
  SiRNA target sequence
  misc_feature (9)..(9): n is a, c, g, or t
acagccgangaagttagagaa

SEQ ID NO: 270919 - DNA, 21 bp, Artificial sequence
  SiRNA target sequence
  misc_feature (8)..(8): n is a, c, g, or t
cagccgangaagttagagaag

SEQ ID NO: 270920 - DNA, 21 bp, Artificial sequence
  SiRNA target sequence
  misc_feature (7)..(7): n is a, c, g, or t
agccgangaagttagagaagc

SEQ ID NO: 270921 - DNA, 21 bp, Artificial sequence
  SiRNA target sequence
  misc_feature (6)..(6): n is a, c, g, or t
gccgangaagttagagaagct

SEQ ID NO: 270922 - DNA, 21 bp, Artificial sequence
  SiRNA target sequence
  misc_feature (5)..(5): n is a, c, g, or t
ccgangaagttagagaagctc

SEQ ID NO: 270923 - DNA, 21 bp, Artificial sequence
  SiRNA target sequence
  misc_feature (4)..(4): n is a, c, g, or t
cgangaagttagagaagctca

SEQ ID NO: 270924 - DNA, 21 bp, Artificial sequence
  SiRNA target sequence
  misc_feature (3)..(3): n is a, c, g, or t
gangaagttagagaagctcag

SEQ ID NO: 270925 - DNA, 21 bp, Artificial sequence
  SiRNA target sequence
  misc_feature (2)..(2): n is a, c, g, or t
angaagttagagaagctcagg

SEQ ID NO: 270926 - DNA, 21 bp, Artificial sequence
  SiRNA target sequence
  misc_feature (1)..(1): n is a, c, g, or t
ngaagttagagaagctcaggc

SEQ ID NO: 270927 - DNA, 21 bp, Artificial sequence
  SiRNA target sequence
gaagttagagaagctcaggca

SEQ ID NO: 270928 - DNA, 21 bp, Artificial sequence
  SiRNA target sequence
aagttagagaagctcaggcag

SEQ ID NO: 270929 - DNA, 21 bp, Artificial sequence
  SiRNA target sequence
agttagagaagctcaggcagc

SEQ ID NO: 270930 - DNA, 21 bp, Artificial sequence
  SiRNA target sequence
gttagagaagctcaggcagca

SEQ ID NO: 270931 - DNA, 21 bp, Artificial sequence
  SiRNA target sequence
ttagagaagctcaggcagcaa

SEQ ID NO: 270932 - DNA, 21 bp, Artificial sequence
  SiRNA target sequence
tagagaagctcaggcagcaaa

SEQ ID NO: 270933 - DNA, 21 bp, Artificial sequence
  SiRNA target sequence
agagaagctcaggcagcaaag

SEQ ID NO: 270934 - DNA, 21 bp, Artificial sequence
  SiRNA target sequence
gagaagctcaggcagcaaaga

SEQ ID NO: 270935 - DNA, 21 bp, Artificial sequence
  SiRNA target sequence
agaagctcaggcagcaaagat

SEQ ID NO: 270936 - DNA, 21 bp, Artificial sequence
  SiRNA target sequence
gaagctcaggcagcaaagatg

SEQ ID NO: 270937 - DNA, 21 bp, Artificial sequence
  SiRNA target sequence
aagctcaggcagcaaagatgc

SEQ ID NO: 270938 - DNA, 21 bp, Artificial sequence
  SiRNA target sequence
agctcaggcagcaaagatgcg

SEQ ID NO: 270939 - DNA, 21 bp, Artificial sequence
  SiRNA target sequence
gctcaggcagcaaagatgcgt

SEQ ID NO: 270940 - DNA, 21 bp, Artificial sequence
  SiRNA target sequence
ctcaggcagcaaagatgcgtg

SEQ ID NO: 270941 - DNA, 21 bp, Artificial sequence
  SiRNA target sequence
tcaggcagcaaagatgcgtga

SEQ ID NO: 270942 - DNA, 21 bp, Artificial sequence
  SiRNA target sequence
caggcagcaaagatgcgtgaa

SEQ ID NO: 270943 - DNA, 21 bp, Artificial sequence
  SiRNA target sequence
aggcagcaaagatgcgtgaag

SEQ ID NO: 270944 - DNA, 21 bp, Artificial sequence
  SiRNA target sequence
ggcagcaaagatgcgtgaaga

SEQ ID NO: 270945 - DNA, 21 bp, Artificial sequence
  SiRNA target sequence
gcagcaaagatgcgtgaagat

SEQ ID NO: 270946 - DNA, 21 bp, Artificial sequence
  SiRNA target sequence
cagcaaagatgcgtgaagata

SEQ ID NO: 270947 - DNA, 21 bp, Artificial sequence
  SiRNA target sequence
agcaaagatgcgtgaagatat

SEQ ID NO: 270948 - DNA, 21 bp, Artificial sequence
  SiRNA target sequence
gcaaagatgcgtgaagatatg

SEQ ID NO: 270949 - DNA, 21 bp, Artificial sequence
  SiRNA target sequence
caaagatgcgtgaagatatgg

SEQ ID NO: 270950 - DNA, 21 bp, Artificial sequence
  SiRNA target sequence
aaagatgcgtgaagatatggg

SEQ ID NO: 270951 - DNA, 21 bp, Artificial sequence
  SiRNA target sequence
aagatgcgtgaagatatgggt

SEQ ID NO: 270952 - DNA, 21 bp, Artificial sequence
  SiRNA target sequence
agatgcgtgaagatatgggta

SEQ ID NO: 270953 - DNA, 21 bp, Artificial sequence
  SiRNA target sequence
gatgcgtgaagatatgggtat

SEQ ID NO: 270954 - DNA, 21 bp, Artificial sequence
  SiRNA target sequence
atgcgtgaagatatgggtatg

SEQ ID NO: 270955 - DNA, 21 bp, Artificial sequence
  SiRNA target sequence
tgcgtgaagatatgggtatgg

SEQ ID NO: 270956 - DNA, 21 bp, Artificial sequence
  SiRNA target sequence
gcgtgaagatatgggtatggt

SEQ ID NO: 270957 - DNA, 21 bp, Artificial sequence
  SiRNA target sequence
cgtgaagatatgggtatggtt

SEQ ID NO: 270958 - DNA, 21 bp, Artificial sequence
  SiRNA target sequence
gtgaagatatgggtatggttg

SEQ ID NO: 270959 - DNA, 21 bp, Artificial sequence
  SiRNA target sequence
tgaagatatgggtatggttgt

SEQ ID NO: 270960 - DNA, 21 bp, Artificial sequence
  SiRNA target sequence
gaagatatgggtatggttgtc

SEQ ID NO: 270961 - DNA, 21 bp, Artificial sequence
  SiRNA target sequence
aagatatgggtatggttgtcc

SEQ ID NO: 270962 - DNA, 21 bp, Artificial sequence
  SiRNA target sequence
agatatgggtatggttgtcca

SEQ ID NO: 270963 - DNA, 21 bp, Artificial sequence
  SiRNA target sequence
gatatgggtatggttgtccaa

SEQ ID NO: 270964 - DNA, 21 bp, Artificial sequence
  SiRNA target sequence
atatgggtatggttgtccaag

SEQ ID NO: 270965 - DNA, 21 bp, Artificial sequence
  SiRNA target sequence
tatgggtatggttgtccaaga

SEQ ID NO: 270966 - DNA, 21 bp, Artificial sequence
  SiRNA target sequence
atgggtatggttgtccaagat

SEQ ID NO: 270967 - DNA, 21 bp, Artificial sequence
  SiRNA target sequence
tgggtatggttgtccaagatg

SEQ ID NO: 270968 - DNA, 21 bp, Artificial sequence
  SiRNA target sequence
gggtatggttgtccaagatgt

SEQ ID NO: 270969 - DNA, 21 bp, Artificial sequence
  SiRNA target sequence
ggtatggttgtccaagatgtt

SEQ ID NO: 270970 - DNA, 21 bp, Artificial sequence
  SiRNA target sequence
gtatggttgtccaagatgtta

SEQ ID NO: 270971 - DNA, 21 bp, Artificial sequence
  SiRNA target sequence
tatggttgtccaagatgttat

SEQ ID NO: 270972 - DNA, 21 bp, Artificial sequence
  SiRNA target sequence
atggttgtccaagatgttatt

SEQ ID NO: 270973 - DNA, 21 bp, Artificial sequence
  SiRNA target sequence
tggttgtccaagatgttattg

SEQ ID NO: 270974 - DNA, 21 bp, Artificial sequence
  SiRNA target sequence
ggttgtccaagatgttattgg

SEQ ID NO: 270975 - DNA, 21 bp, Artificial sequence
  SiRNA target sequence
gttgtccaagatgttattgga

SEQ ID NO: 270976 - DNA, 21 bp, Artificial sequence
  SiRNA target sequence
ttgtccaagatgttattggag

SEQ ID NO: 270977 - DNA, 21 bp, Artificial sequence
  SiRNA target sequence
tgtccaagatgttattggaga

SEQ ID NO: 270978 - DNA, 21 bp, Artificial sequence
  SiRNA target sequence
gtccaagatgttattggagaa

SEQ ID NO: 270979 - DNA, 21 bp, Artificial sequence
  SiRNA target sequence
tccaagatgttattggagaac

SEQ ID NO: 270980 - DNA, 21 bp, Artificial sequence
  SiRNA target sequence
ccaagatgttattggagaact

SEQ ID NO: 270981 - DNA, 21 bp, Artificial sequence
  SiRNA target sequence
caagatgttattggagaactt

SEQ ID NO: 270982 - DNA, 21 bp, Artificial sequence
  SiRNA target sequence
aagatgttattggagaactta

SEQ ID NO: 270983 - DNA, 21 bp, Artificial sequence
  SiRNA target sequence
agatgttattggagaacttag

SEQ ID NO: 270984 - DNA, 21 bp, Artificial sequence
  SiRNA target sequence
gatgttattggagaacttagc

SEQ ID NO: 270985 - DNA, 21 bp, Artificial sequence
  SiRNA target sequence
atgttattggagaacttagcc

SEQ ID NO: 270986 - DNA, 21 bp, Artificial sequence
  SiRNA target sequence
tgttattggagaacttagcca

SEQ ID NO: 270987 - DNA, 21 bp, Artificial sequence
  SiRNA target sequence
gttattggagaacttagccag

SEQ ID NO: 270988 - DNA, 21 bp, Artificial sequence
  SiRNA target sequence
ttattggagaacttagccagg

SEQ ID NO: 270989 - DNA, 21 bp, Artificial sequence
  SiRNA target sequence
tattggagaacttagccaggc

SEQ ID NO: 270990 - DNA, 21 bp, Artificial sequence
  SiRNA target sequence
  misc_feature (21)..(21): n is a, c, g, or t
attggagaacttagccaggcn

SEQ ID NO: 270991 - DNA, 21 bp, Artificial sequence
  SiRNA target sequence
  misc_feature (20)..(20): n is a, c, g, or t
ttggagaacttagccaggcna

SEQ ID NO: 270992 - DNA, 21 bp, Artificial sequence
  SiRNA target sequence
  misc_feature (19)..(19): n is a, c, g, or t
tggagaacttagccaggcnat

SEQ ID NO: 270993 - DNA, 21 bp, Artificial sequence
  SiRNA target sequence
  misc_feature (18)..(18): n is a, c, g, or t
ggagaacttagccaggcnata

SEQ ID NO: 270994 - DNA, 21 bp, Artificial sequence
  SiRNA target sequence
  misc_feature (17)..(17): n is a, c, g, or t
gagaacttagccaggcnatac

SEQ ID NO: 270995 - DNA, 21 bp, Artificial sequence
  SiRNA target sequence
  misc_feature (16)..(16): n is a, c, g, or t
agaacttagccaggcnatacc

SEQ ID NO: 270996 - DNA, 21 bp, Artificial sequence
  SiRNA target sequence
  misc_feature (15)..(15): n is a, c, g, or t
gaacttagccaggcnataccg

SEQ ID NO: 270997 - DNA, 21 bp, Artificial sequence
  SiRNA target sequence
  misc_feature (14)..(14): n is a, c, g, or t
aacttagccaggcnataccgg

SEQ ID NO: 270998 - DNA, 21 bp, Artificial sequence
  SiRNA target sequence
  misc_feature (13)..(13): n is a, c, g, or t
acttagccaggcnataccgga

SEQ ID NO: 270999 - DNA, 21 bp, Artificial sequence
  SiRNA target sequence
  misc_feature (12)..(12): n is a, c, g, or t
cttagccaggcnataccggat

SEQ ID NO: 271000 - DNA, 21 bp, Artificial sequence
  SiRNA target sequence
  misc_feature (11)..(11): n is a, c, g, or t
ttagccaggcnataccggatc

SEQ ID NO: 271001 - DNA, 21 bp, Artificial sequence
  SiRNA target sequence
  misc_feature (10)..(10): n is a, c, g, or t
tagccaggcnataccggatct

SEQ ID NO: 271002 - DNA, 21 bp, Artificial sequence
  SiRNA target sequence
  misc_feature (9)..(9): n is a, c, g, or t
agccaggcnataccggatctt

SEQ ID NO: 271003 - DNA, 21 bp, Artificial sequence
  SiRNA target sequence
  misc_feature (8)..(8): n is a, c, g, or t
gccaggcnataccggatcttc

SEQ ID NO: 271004 - DNA, 21 bp, Artificial sequence
  SiRNA target sequence
  misc_feature (7)..(7): n is a, c, g, or t
ccaggcnataccggatcttca

SEQ ID NO: 271005 - DNA, 21 bp, Artificial sequence
  SiRNA target sequence
  misc_feature (6)..(6): n is a, c, g, or t
caggcnataccggatcttcaa

SEQ ID NO: 271006 - DNA, 21 bp, Artificial sequence
  SiRNA target sequence
  misc_feature (5)..(5): n is a, c, g, or t
aggcnataccggatcttcaac

SEQ ID NO: 271007 - DNA, 21 bp, Artificial sequence
  SiRNA target sequence
  misc_feature (4)..(4): n is a, c, g, or t
ggcnataccggatcttcaaca

SEQ ID NO: 271008 - DNA, 21 bp, Artificial sequence
  SiRNA target sequence
  misc_feature (3)..(3): n is a, c, g, or t
gcnataccggatcttcaacaa

SEQ ID NO: 271009 - DNA, 21 bp, Artificial sequence
  SiRNA target sequence
  misc_feature (2)..(2): n is a, c, g, or t
cnataccggatcttcaacaac

SEQ ID NO: 271010 - DNA, 21 bp, Artificial sequence
  SiRNA target sequence
  misc_feature (1)..(1): n is a, c, g, or t
nataccggatcttcaacaacc

SEQ ID NO: 271011 - DNA, 21 bp, Artificial sequence
  SiRNA target sequence
ataccggatcttcaacaaccg

SEQ ID NO: 271012 - DNA, 21 bp, Artificial sequence
  SiRNA target sequence
taccggatcttcaacaaccgg

SEQ ID NO: 271013 - DNA, 21 bp, Artificial sequence
  SiRNA target sequence
accggatcttcaacaaccgga

SEQ ID NO: 271014 - DNA, 21 bp, Artificial sequence
  SiRNA target sequence
ccggatcttcaacaaccggag

SEQ ID NO: 271015 - DNA, 21 bp, Artificial sequence
  SiRNA target sequence
cggatcttcaacaaccggagg

SEQ ID NO: 271016 - DNA, 21 bp, Artificial sequence
  SiRNA target sequence
ggatcttcaacaaccggaggt

SEQ ID NO: 271017 - DNA, 21 bp, Artificial sequence
  SiRNA target sequence
gatcttcaacaaccggaggtt

SEQ ID NO: 271018 - DNA, 21 bp, Artificial sequence
  SiRNA target sequence
atcttcaacaaccggaggttc

SEQ ID NO: 271019 - DNA, 21 bp, Artificial sequence
  SiRNA target sequence
tcttcaacaaccggaggttca

SEQ ID NO: 271020 - DNA, 21 bp, Artificial sequence
  SiRNA target sequence
cttcaacaaccggaggttcaa

SEQ ID NO: 271021 - DNA, 21 bp, Artificial sequence
  SiRNA target sequence
ttcaacaaccggaggttcaag

SEQ ID NO: 271022 - DNA, 21 bp, Artificial sequence
  SiRNA target sequence
tcaacaaccggaggttcaagc

SEQ ID NO: 271023 - DNA, 21 bp, Artificial sequence
  SiRNA target sequence
caacaaccggaggttcaagca

SEQ ID NO: 271024 - DNA, 21 bp, Artificial sequence
  SiRNA target sequence
aacaaccggaggttcaagcaa

SEQ ID NO: 271025 - DNA, 21 bp, Artificial sequence
  SiRNA target sequence
acaaccggaggttcaagcaaa

SEQ ID NO: 271026 - DNA, 21 bp, Artificial sequence
  SiRNA target sequence
caaccggaggttcaagcaaat

SEQ ID NO: 271027 - DNA, 21 bp, Artificial sequence
  SiRNA target sequence
aaccggaggttcaagcaaatg

SEQ ID NO: 271028 - DNA, 21 bp, Artificial sequence
  SiRNA target sequence
accggaggttcaagcaaatgt

SEQ ID NO: 271029 - DNA, 21 bp, Artificial sequence
  SiRNA target sequence
ccggaggttcaagcaaatgtc

SEQ ID NO: 271030 - DNA, 21 bp, Artificial sequence
  SiRNA target sequence
cggaggttcaagcaaatgtct

SEQ ID NO: 271031 - DNA, 21 bp, Artificial sequence
  SiRNA target sequence
ggaggttcaagcaaatgtctt

SEQ ID NO: 271032 - DNA, 21 bp, Artificial sequence
  SiRNA target sequence
gaggttcaagcaaatgtcttc

SEQ ID NO: 271033 - DNA, 21 bp, Artificial sequence
  SiRNA target sequence
aggttcaagcaaatgtcttct

SEQ ID NO: 271034 - DNA, 21 bp, Artificial sequence
  SiRNA target sequence
ggttcaagcaaatgtcttctc

SEQ ID NO: 271035 - DNA, 21 bp, Artificial sequence
  SiRNA target sequence
gttcaagcaaatgtcttctca

SEQ ID NO: 271036 - DNA, 21 bp, Artificial sequence
  SiRNA target sequence
ttcaagcaaatgtcttctcac

SEQ ID NO: 271037 - DNA, 21 bp, Artificial sequence
  SiRNA target sequence
tcaagcaaatgtcttctcact

SEQ ID NO: 271038 - DNA, 21 bp, Artificial sequence
  SiRNA target sequence
caagcaaatgtcttctcactg

SEQ ID NO: 271039 - DNA, 21 bp, Artificial sequence
  SiRNA target sequence
aagcaaatgtcttctcactgg

SEQ ID NO: 271040 - DNA, 21 bp, Artificial sequence
  SiRNA target sequence
agcaaatgtcttctcactggt

SEQ ID NO: 271041 - DNA, 21 bp, Artificial sequence
  SiRNA target sequence
gcaaatgtcttctcactggtg

SEQ ID NO: 271042 - DNA, 21 bp, Artificial sequence
  SiRNA target sequence
caaatgtcttctcactggtgt

SEQ ID NO: 271043 - DNA, 21 bp, Artificial sequence
  SiRNA target sequence
aaatgtcttctcactggtgtc

SEQ ID NO: 271044 - DNA, 21 bp, Artificial sequence
  SiRNA target sequence
aatgtcttctcactggtgtct

SEQ ID NO: 271045 - DNA, 21 bp, Artificial sequence
  SiRNA target sequence
atgtcttctcactggtgtctc

SEQ ID NO: 271046 - DNA, 21 bp, Artificial sequence
  SiRNA target sequence
tgtcttctcactggtgtctca

SEQ ID NO: 271047 - DNA, 21 bp, Artificial sequence
  SiRNA target sequence
gtcttctcactggtgtctcag

SEQ ID NO: 271048 - DNA, 21 bp, Artificial sequence
  SiRNA target sequence
tcttctcactggtgtctcagt

SEQ ID NO: 271049 - DNA, 21 bp, Artificial sequence
  SiRNA target sequence
cttctcactggtgtctcagtt

SEQ ID NO: 271050 - DNA, 21 bp, Artificial sequence
  SiRNA target sequence
ttctcactggtgtctcagtta

SEQ ID NO: 271051 - DNA, 21 bp, Artificial sequence
  SiRNA target sequence
tctcactggtgtctcagttag

SEQ ID NO: 271052 - DNA, 21 bp, Artificial sequence
  SiRNA target sequence
ctcactggtgtctcagttagt

SEQ ID NO: 271053 - DNA, 21 bp, Artificial sequence
  SiRNA target sequence
tcactggtgtctcagttagtg

SEQ ID NO: 271054 - DNA, 21 bp, Artificial sequence
  SiRNA target sequence
cactggtgtctcagttagtgc

SEQ ID NO: 271055 - DNA, 21 bp, Artificial sequence
  SiRNA target sequence
actggtgtctcagttagtgca

SEQ ID NO: 271056 - DNA, 21 bp, Artificial sequence
  SiRNA target sequence
ctggtgtctcagttagtgcat

SEQ ID NO: 271057 - DNA, 21 bp, Artificial sequence
  SiRNA target sequence
tggtgtctcagttagtgcatg

SEQ ID NO: 271058 - DNA, 21 bp, Artificial sequence
  SiRNA target sequence
ggtgtctcagttagtgcatgc

SEQ ID NO: 271059 - DNA, 21 bp, Artificial sequence
  SiRNA target sequence
gtgtctcagttagtgcatgct

SEQ ID NO: 271060 - DNA, 21 bp, Artificial sequence
  SiRNA target sequence
tgtctcagttagtgcatgcta

SEQ ID NO: 271061 - DNA, 21 bp, Artificial sequence
  SiRNA target sequence
gtctcagttagtgcatgctat

SEQ ID NO: 271062 - DNA, 21 bp, Artificial sequence
  SiRNA target sequence
tctcagttagtgcatgctatt

SEQ ID NO: 271063 - DNA, 21 bp, Artificial sequence
  SiRNA target sequence
ctcagttagtgcatgctatta

SEQ ID NO: 271064 - DNA, 21 bp, Artificial sequence
  SiRNA target sequence
tcagttagtgcatgctattat

SEQ ID NO: 271065 - DNA, 21 bp, Artificial sequence
  SiRNA target sequence
cagttagtgcatgctattata

SEQ ID NO: 271066 - DNA, 21 bp, Artificial sequence
  SiRNA target sequence
agttagtgcatgctattatag

SEQ ID NO: 271067 - DNA, 21 bp, Artificial sequence
  SiRNA target sequence
gttagtgcatgctattatagg

SEQ ID NO: 271068 - DNA, 21 bp, Artificial sequence
  SiRNA target sequence
ttagtgcatgctattataggt

SEQ ID NO: 271069 - DNA, 21 bp, Artificial sequence
  SiRNA target sequence
tagtgcatgctattataggta

SEQ ID NO: 271070 - DNA, 21 bp, Artificial sequence
  SiRNA target sequence
agtgcatgctattataggtac

SEQ ID NO: 271071 - DNA, 21 bp, Artificial sequence
  SiRNA target sequence
gtgcatgctattataggtact

SEQ ID NO: 271072 - DNA, 21 bp, Artificial sequence
  SiRNA target sequence
tgcatgctattataggtacta

SEQ ID NO: 271073 - DNA, 21 bp, Artificial sequence
  SiRNA target sequence
gcatgctattataggtactag

SEQ ID NO: 271074 - DNA, 21 bp, Artificial sequence
  SiRNA target sequence
catgctattataggtactagt

SEQ ID NO: 271075 - DNA, 21 bp, Artificial sequence
  SiRNA target sequence
atgctattataggtactagtt

SEQ ID NO: 271076 - DNA, 21 bp, Artificial sequence
  SiRNA target sequence
tgctattataggtactagttt

SEQ ID NO: 271077 - DNA, 21 bp, Artificial sequence
  SiRNA target sequence
gctattataggtactagtttg

SEQ ID NO: 271078 - DNA, 21 bp, Artificial sequence
  SiRNA target sequence
ctattataggtactagtttga

SEQ ID NO: 271079 - DNA, 21 bp, Artificial sequence
  SiRNA target sequence
tattataggtactagtttgaa

SEQ ID NO: 271080 - DNA, 21 bp, Artificial sequence
  SiRNA target sequence
attataggtactagtttgaag

SEQ ID NO: 271081 - DNA, 21 bp, Artificial sequence
  SiRNA target sequence
ttataggtactagtttgaaga

SEQ ID NO: 271082 - DNA, 21 bp, Artificial sequence
  SiRNA target sequence
tataggtactagtttgaagac

SEQ ID NO: 271083 - DNA, 21 bp, Artificial sequence
  SiRNA target sequence
ataggtactagtttgaagaca

SEQ ID NO: 271084 - DNA, 21 bp, Artificial sequence
  SiRNA target sequence
taggtactagtttgaagacag

SEQ ID NO: 271085 - DNA, 21 bp, Artificial sequence
  SiRNA target sequence
aggtactagtttgaagacagt

SEQ ID NO: 271086 - DNA, 21 bp, Artificial sequence
  SiRNA target sequence
ggtactagtttgaagacagtt

SEQ ID NO: 271087 - DNA, 21 bp, Artificial sequence
  SiRNA target sequence
gtactagtttgaagacagttg

SEQ ID NO: 271088 - DNA, 21 bp, Artificial sequence
  SiRNA target sequence
tactagtttgaagacagttgc

SEQ ID NO: 271089 - DNA, 21 bp, Artificial sequence
  SiRNA target sequence
actagtttgaagacagttgct

SEQ ID NO: 271090 - DNA, 21 bp, Artificial sequence
  SiRNA target sequence
ctagtttgaagacagttgctt

SEQ ID NO: 271091 - DNA, 21 bp, Artificial sequence
  SiRNA target sequence
tagtttgaagacagttgcttg

SEQ ID NO: 271092 - DNA, 21 bp, Artificial sequence
  SiRNA target sequence
agtttgaagacagttgcttgg

SEQ ID NO: 271093 - DNA, 21 bp, Artificial sequence
  SiRNA target sequence
gtttgaagacagttgcttggg

SEQ ID NO: 271094 - DNA, 21 bp, Artificial sequence
  SiRNA target sequence
tttgaagacagttgcttgggc

SEQ ID NO: 271095 - DNA, 21 bp, Artificial sequence
  SiRNA target sequence
ttgaagacagttgcttgggcg

SEQ ID NO: 271096 - DNA, 21 bp, Artificial sequence
  SiRNA target sequence
tgaagacagttgcttgggcga

SEQ ID NO: 271097 - DNA, 21 bp, Artificial sequence
  SiRNA target sequence
gaagacagttgcttgggcgat

SEQ ID NO: 271098 - DNA, 21 bp, Artificial sequence
  SiRNA target sequence
aagacagttgcttgggcgatt

SEQ ID NO: 271099 - DNA, 21 bp, Artificial sequence
  SiRNA target sequence
agacagttgcttgggcgattg

SEQ ID NO: 271100 - DNA, 21 bp, Artificial sequence
  SiRNA target sequence
gacagttgcttgggcgattgt

SEQ ID NO: 271101 - DNA, 21 bp, Artificial sequence
  SiRNA target sequence
acagttgcttgggcgattgtt

SEQ ID NO: 271102 - DNA, 21 bp, Artificial sequence
  SiRNA target sequence
cagttgcttgggcgattgttt

SEQ ID NO: 271103 - DNA, 21 bp, Artificial sequence
  SiRNA target sequence
agttgcttgggcgattgtttc

SEQ ID NO: 271104 - DNA, 21 bp, Artificial sequence
  SiRNA target sequence
gttgcttgggcgattgtttcg

SEQ ID NO: 271105 - DNA, 21 bp, Artificial sequence
  SiRNA target sequence
ttgcttgggcgattgtttcga

SEQ ID NO: 271106 - DNA, 21 bp, Artificial sequence
  SiRNA target sequence
tgcttgggcgattgtttcgat

SEQ ID NO: 271107 - DNA, 21 bp, Artificial sequence
  SiRNA target sequence
gcttgggcgattgtttcgatt

SEQ ID NO: 271108 - DNA, 21 bp, Artificial sequence
  SiRNA target sequence
cttgggcgattgtttcgattt

SEQ ID NO: 271109 - DNA, 21 bp, Artificial sequence
  SiRNA target sequence
ttgggcgattgtttcgatttt

SEQ ID NO: 271110 - DNA, 21 bp, Artificial sequence
  SiRNA target sequence
tgggcgattgtttcgattttt

SEQ ID NO: 271111 - DNA, 21 bp, Artificial sequence
  SiRNA target sequence
gggcgattgtttcgatttttg

SEQ ID NO: 271112 - DNA, 21 bp, Artificial sequence
  SiRNA target sequence
ggcgattgtttcgatttttgt

SEQ ID NO: 271113 - DNA, 21 bp, Artificial sequence
  SiRNA target sequence
gcgattgtttcgatttttgtg

SEQ ID NO: 271114 - DNA, 21 bp, Artificial sequence
  SiRNA target sequence
cgattgtttcgatttttgtga

SEQ ID NO: 271115 - DNA, 21 bp, Artificial sequence
  SiRNA target sequence
gattgtttcgatttttgtgac

SEQ ID NO: 271116 - DNA, 21 bp, Artificial sequence
  SiRNA target sequence
attgtttcgatttttgtgact

SEQ ID NO: 271117 - DNA, 21 bp, Artificial sequence
  SiRNA target sequence
ttgtttcgatttttgtgactt

SEQ ID NO: 271118 - DNA, 21 bp, Artificial sequence
  SiRNA target sequence
tgtttcgatttttgtgacttt

SEQ ID NO: 271119 - DNA, 21 bp, Artificial sequence
  SiRNA target sequence
gtttcgatttttgtgacttta

SEQ ID NO: 271120 - DNA, 21 bp, Artificial sequence
  SiRNA target sequence
tttcgatttttgtgactttag

SEQ ID NO: 271121 - DNA, 21 bp, Artificial sequence
  SiRNA target sequence
ttcgatttttgtgactttagg

SEQ ID NO: 271122 - DNA, 21 bp, Artificial sequence
  SiRNA target sequence
tcgatttttgtgactttagga

SEQ ID NO: 271123 - DNA, 21 bp, Artificial sequence
  SiRNA target sequence
cgatttttgtgactttaggat

SEQ ID NO: 271124 - DNA, 21 bp, Artificial sequence
  SiRNA target sequence
gatttttgtgactttaggatt

SEQ ID NO: 271125 - DNA, 21 bp, Artificial sequence
  SiRNA target sequence
atttttgtgactttaggatta

SEQ ID NO: 271126 - DNA, 21 bp, Artificial sequence
  SiRNA target sequence
tttttgtgactttaggattaa

SEQ ID NO: 271127 - DNA, 21 bp, Artificial sequence
  SiRNA target sequence
ttttgtgactttaggattaat

SEQ ID NO: 271128 - DNA, 21 bp, Artificial sequence
  SiRNA target sequence
tttgtgactttaggattaatt

SEQ ID NO: 271129 - DNA, 21 bp, Artificial sequence
  SiRNA target sequence
ttgtgactttaggattaattg

SEQ ID NO: 271130 - DNA, 21 bp, Artificial sequence
  SiRNA target sequence
tgtgactttaggattaattgg

SEQ ID NO: 271131 - DNA, 21 bp, Artificial sequence
  SiRNA target sequence
gtgactttaggattaattgga

SEQ ID NO: 271132 - DNA, 21 bp, Artificial sequence
  SiRNA target sequence
tgactttaggattaattggac

SEQ ID NO: 271133 - DNA, 21 bp, Artificial sequence
  SiRNA target sequence
gactttaggattaattggacg

SEQ ID NO: 271134 - DNA, 21 bp, Artificial sequence
  SiRNA target sequence
actttaggattaattggacgc

SEQ ID NO: 271135 - DNA, 21 bp, Artificial sequence
  SiRNA target sequence
ctttaggattaattggacgcg

SEQ ID NO: 271136 - DNA, 21 bp, Artificial sequence
  SiRNA target sequence
tttaggattaattggacgcga

SEQ ID NO: 271137 - DNA, 21 bp, Artificial sequence
  SiRNA target sequence
ttaggattaattggacgcgaa

SEQ ID NO: 271138 - DNA, 21 bp, Artificial sequence
  SiRNA target sequence
taggattaattggacgcgaaa

SEQ ID NO: 271139 - DNA, 21 bp, Artificial sequence
  SiRNA target sequence
aggattaattggacgcgaaat

SEQ ID NO: 271140 - DNA, 21 bp, Artificial sequence
  SiRNA target sequence
ggattaattggacgcgaaatg

SEQ ID NO: 271141 - DNA, 21 bp, Artificial sequence
  SiRNA target sequence
gattaattggacgcgaaatga

SEQ ID NO: 271142 - DNA, 21 bp, Artificial sequence
  SiRNA target sequence
attaattggacgcgaaatgat

SEQ ID NO: 271143 - DNA, 21 bp, Artificial sequence
  SiRNA target sequence
ttaattggacgcgaaatgatg

SEQ ID NO: 271144 - DNA, 21 bp, Artificial sequence
  SiRNA target sequence
taattggacgcgaaatgatgc

SEQ ID NO: 271145 - DNA, 21 bp, Artificial sequence
  SiRNA target sequence
aattggacgcgaaatgatgca

SEQ ID NO: 271146 - DNA, 21 bp, Artificial sequence
  SiRNA target sequence
attggacgcgaaatgatgcat

SEQ ID NO: 271147 - DNA, 21 bp, Artificial sequence
  SiRNA target sequence
ttggacgcgaaatgatgcatt

SEQ ID NO: 271148 - DNA, 21 bp, Artificial sequence
  SiRNA target sequence
tggacgcgaaatgatgcattc

SEQ ID NO: 271149 - DNA, 21 bp, Artificial sequence
  SiRNA target sequence
ggacgcgaaatgatgcattca

SEQ ID NO: 271150 - DNA, 21 bp, Artificial sequence
  SiRNA target sequence
gacgcgaaatgatgcattcag

SEQ ID NO: 271151 - DNA, 21 bp, Artificial sequence
  SiRNA target sequence
acgcgaaatgatgcattcagt

SEQ ID NO: 271152 - DNA, 21 bp, Artificial sequence
  SiRNA target sequence
cgcgaaatgatgcattcagtt

SEQ ID NO: 271153 - DNA, 21 bp, Artificial sequence
  SiRNA target sequence
gcgaaatgatgcattcagtta

SEQ ID NO: 271154 - DNA, 21 bp, Artificial sequence
  SiRNA target sequence
cgaaatgatgcattcagttat

SEQ ID NO: 271155 - DNA, 21 bp, Artificial sequence
  SiRNA target sequence
gaaatgatgcattcagttatt

SEQ ID NO: 271156 - DNA, 21 bp, Artificial sequence
  SiRNA target sequence
aaatgatgcattcagttatta

SEQ ID NO: 271157 - DNA, 21 bp, Artificial sequence
  SiRNA target sequence
aatgatgcattcagttattac

SEQ ID NO: 271158 - DNA, 21 bp, Artificial sequence
  SiRNA target sequence
atgatgcattcagttattact

SEQ ID NO: 271159 - DNA, 21 bp, Artificial sequence
  SiRNA target sequence
tgatgcattcagttattactg

SEQ ID NO: 271160 - DNA, 21 bp, Artificial sequence
  SiRNA target sequence
gatgcattcagttattactgt

SEQ ID NO: 271161 - DNA, 21 bp, Artificial sequence
  SiRNA target sequence
atgcattcagttattactgta

SEQ ID NO: 271162 - DNA, 21 bp, Artificial sequence
  SiRNA target sequence
tgcattcagttattactgtag

SEQ ID NO: 271163 - DNA, 21 bp, Artificial sequence
  SiRNA target sequence
gcattcagttattactgtagt

SEQ ID NO: 271164 - DNA, 21 bp, Artificial sequence
  SiRNA target sequence
cattcagttattactgtagtc

SEQ ID NO: 271165 - DNA, 21 bp, Artificial sequence
  SiRNA target sequence
attcagttattactgtagtca

SEQ ID NO: 271166 - DNA, 21 bp, Artificial sequence
  SiRNA target sequence
ttcagttattactgtagtcaa

SEQ ID NO: 271167 - DNA, 21 bp, Artificial sequence
  SiRNA target sequence
tcagttattactgtagtcaag

SEQ ID NO: 271168 - DNA, 21 bp, Artificial sequence
  SiRNA target sequence
cagttattactgtagtcaagc

SEQ ID NO: 271169 - DNA, 21 bp, Artificial sequence
  SiRNA target sequence
agttattactgtagtcaagcg

SEQ ID NO: 271170 - DNA, 21 bp, Artificial sequence
  SiRNA target sequence
gttattactgtagtcaagcgg

SEQ ID NO: 271171 - DNA, 21 bp, Artificial sequence
  SiRNA target sequence
ttattactgtagtcaagcggt

SEQ ID NO: 271172 - DNA, 21 bp, Artificial sequence
  SiRNA target sequence
tattactgtagtcaagcggtt

SEQ ID NO: 271173 - DNA, 21 bp, Artificial sequence
  SiRNA target sequence
attactgtagtcaagcggtta

SEQ ID NO: 271174 - DNA, 21 bp, Artificial sequence
  SiRNA target sequence
ttactgtagtcaagcggttac

SEQ ID NO: 271175 - DNA, 21 bp, Artificial sequence
  SiRNA target sequence
tactgtagtcaagcggttact

SEQ ID NO: 271176 - DNA, 21 bp, Artificial sequence
  SiRNA target sequence
actgtagtcaagcggttactt

SEQ ID NO: 271177 - DNA, 21 bp, Artificial sequence
  SiRNA target sequence
ctgtagtcaagcggttacttg

SEQ ID NO: 271178 - DNA, 21 bp, Artificial sequence
  SiRNA target sequence
tgtagtcaagcggttacttga

SEQ ID NO: 271179 - DNA, 21 bp, Artificial sequence
  SiRNA target sequence
gtagtcaagcggttacttgag

SEQ ID NO: 271180 - DNA, 21 bp, Artificial sequence
  SiRNA target sequence
tagtcaagcggttacttgaga

SEQ ID NO: 271181 - DNA, 21 bp, Artificial sequence
  SiRNA target sequence
agtcaagcggttacttgagaa

SEQ ID NO: 271182 - DNA, 21 bp, Artificial sequence
  SiRNA target sequence
gtcaagcggttacttgagaaa

SEQ ID NO: 271183 - DNA, 21 bp, Artificial sequence
  SiRNA target sequence
tcaagcggttacttgagaaat

SEQ ID NO: 271184 - DNA, 21 bp, Artificial sequence
  SiRNA target sequence
caagcggttacttgagaaata

SEQ ID NO: 271185 - DNA, 21 bp, Artificial sequence
  SiRNA target sequence
aagcggttacttgagaaatat

SEQ ID NO: 271186 - DNA, 21 bp, Artificial sequence
  SiRNA target sequence
agcggttacttgagaaatatc

SEQ ID NO: 271187 - DNA, 21 bp, Artificial sequence
  SiRNA target sequence
gcggttacttgagaaatatca

SEQ ID NO: 271188 - DNA, 21 bp, Artificial sequence
  SiRNA target sequence
cggttacttgagaaatatcac

SEQ ID NO: 271189 - DNA, 21 bp, Artificial sequence
  SiRNA target sequence
ggttacttgagaaatatcact

SEQ ID NO: 271190 - DNA, 21 bp, Artificial sequence
  SiRNA target sequence
gttacttgagaaatatcactt

SEQ ID NO: 271191 - DNA, 21 bp, Artificial sequence
  SiRNA target sequence
ttacttgagaaatatcacttg

SEQ ID NO: 271192 - DNA, 21 bp, Artificial sequence
  SiRNA target sequence
tacttgagaaatatcacttgg

SEQ ID NO: 271193 - DNA, 21 bp, Artificial sequence
  SiRNA target sequence
acttgagaaatatcacttggc

SEQ ID NO: 271194 - DNA, 21 bp, Artificial sequence
  SiRNA target sequence
cttgagaaatatcacttggcg

SEQ ID NO: 271195 - DNA, 21 bp, Artificial sequence
  SiRNA target sequence
ttgagaaatatcacttggcga

SEQ ID NO: 271196 - DNA, 21 bp, Artificial sequence
  SiRNA target sequence
tgagaaatatcacttggcgac

SEQ ID NO: 271197 - DNA, 21 bp, Artificial sequence
  SiRNA target sequence
gagaaatatcacttggcgacg

SEQ ID NO: 271198 - DNA, 21 bp, Artificial sequence
  SiRNA target sequence
agaaatatcacttggcgacgc

SEQ ID NO: 271199 - DNA, 21 bp, Artificial sequence
  SiRNA target sequence
gaaatatcacttggcgacgca

SEQ ID NO: 271200 - DNA, 21 bp, Artificial sequence
  SiRNA target sequence
aaatatcacttggcgacgcaa

SEQ ID NO: 271201 - DNA, 21 bp, Artificial sequence
  SiRNA target sequence
aatatcacttggcgacgcaac

SEQ ID NO: 271202 - DNA, 21 bp, Artificial sequence
  SiRNA target sequence
atatcacttggcgacgcaacc

SEQ ID NO: 271203 - DNA, 21 bp, Artificial sequence
  SiRNA target sequence
tatcacttggcgacgcaaccc

SEQ ID NO: 271204 - DNA, 21 bp, Artificial sequence
  SiRNA target sequence
atcacttggcgacgcaacccc

SEQ ID NO: 271205 - DNA, 21 bp, Artificial sequence
  SiRNA target sequence
tcacttggcgacgcaacccca

SEQ ID NO: 271206 - DNA, 21 bp, Artificial sequence
  SiRNA target sequence
cacttggcgacgcaaccccag

SEQ ID NO: 271207 - DNA, 21 bp, Artificial sequence
  SiRNA target sequence
acttggcgacgcaaccccagg

SEQ ID NO: 271208 - DNA, 21 bp, Artificial sequence
  SiRNA target sequence
cttggcgacgcaaccccagga

SEQ ID NO: 271209 - DNA, 21 bp, Artificial sequence
  SiRNA target sequence
ttggcgacgcaaccccaggaa

SEQ ID NO: 271210 - DNA, 21 bp, Artificial sequence
  SiRNA target sequence
tggcgacgcaaccccaggaat

SEQ ID NO: 271211 - DNA, 21 bp, Artificial sequence
  SiRNA target sequence
ggcgacgcaaccccaggaatc

SEQ ID NO: 271212 - DNA, 21 bp, Artificial sequence
  SiRNA target sequence
gcgacgcaaccccaggaatcc

SEQ ID NO: 271213 - DNA, 21 bp, Artificial sequence
  SiRNA target sequence
cgacgcaaccccaggaatccg

SEQ ID NO: 271214 - DNA, 21 bp, Artificial sequence
  SiRNA target sequence
gacgcaaccccaggaatccgc

SEQ ID NO: 271215 - DNA, 21 bp, Artificial sequence
  SiRNA target sequence
acgcaaccccaggaatccgcc

SEQ ID NO: 271216 - DNA, 21 bp, Artificial sequence
  SiRNA target sequence
cgcaaccccaggaatccgcca

SEQ ID NO: 271217 - DNA, 21 bp, Artificial sequence
  SiRNA target sequence
gcaaccccaggaatccgccag

SEQ ID NO: 271218 - DNA, 21 bp, Artificial sequence
  SiRNA target sequence
caaccccaggaatccgccagt

SEQ ID NO: 271219 - DNA, 21 bp, Artificial sequence
  SiRNA target sequence
aaccccaggaatccgccagtt

SEQ ID NO: 271220 - DNA, 21 bp, Artificial sequence
  SiRNA target sequence
accccaggaatccgccagttc

SEQ ID NO: 271221 - DNA, 21 bp, Artificial sequence
  SiRNA target sequence
ccccaggaatccgccagttca

SEQ ID NO: 271222 - DNA, 21 bp, Artificial sequence
  SiRNA target sequence
cccaggaatccgccagttcaa

SEQ ID NO: 271223 - DNA, 21 bp, Artificial sequence
  SiRNA target sequence
ccaggaatccgccagttcaag

SEQ ID NO: 271224 - DNA, 21 bp, Artificial sequence
  SiRNA target sequence
caggaatccgccagttcaagt

SEQ ID NO: 271225 - DNA, 21 bp, Artificial sequence
  SiRNA target sequence
aggaatccgccagttcaagta

SEQ ID NO: 271226 - DNA, 21 bp, Artificial sequence
  SiRNA target sequence
ggaatccgccagttcaagtac

SEQ ID NO: 271227 - DNA, 21 bp, Artificial sequence
  SiRNA target sequence
gaatccgccagttcaagtact

SEQ ID NO: 271228 - DNA, 21 bp, Artificial sequence
  SiRNA target sequence
aatccgccagttcaagtactg

SEQ ID NO: 271229 - DNA, 21 bp, Artificial sequence
  SiRNA target sequence
atccgccagttcaagtactgt

SEQ ID NO: 271230 - DNA, 21 bp, Artificial sequence
  SiRNA target sequence
tccgccagttcaagtactgtt

SEQ ID NO: 271231 - DNA, 21 bp, Artificial sequence
  SiRNA target sequence
ccgccagttcaagtactgtta

SEQ ID NO: 271232 - DNA, 21 bp, Artificial sequence
  SiRNA target sequence
cgccagttcaagtactgttat

SEQ ID NO: 271233 - DNA, 21 bp, Artificial sequence
  SiRNA target sequence
gccagttcaagtactgttata

SEQ ID NO: 271234 - DNA, 21 bp, Artificial sequence
  SiRNA target sequence
ccagttcaagtactgttatat

SEQ ID NO: 271235 - DNA, 21 bp, Artificial sequence
  SiRNA target sequence
cagttcaagtactgttatatc

SEQ ID NO: 271236 - DNA, 21 bp, Artificial sequence
  SiRNA target sequence
agttcaagtactgttatatct

SEQ ID NO: 271237 - DNA, 21 bp, Artificial sequence
  SiRNA target sequence
gttcaagtactgttatatctg

SEQ ID NO: 271238 - DNA, 21 bp, Artificial sequence
  SiRNA target sequence
ttcaagtactgttatatctgc

SEQ ID NO: 271239 - DNA, 21 bp, Artificial sequence
  SiRNA target sequence
tcaagtactgttatatctgcc

SEQ ID NO: 271240 - DNA, 21 bp, Artificial sequence
  SiRNA target sequence
caagtactgttatatctgccg

SEQ ID NO: 271241 - DNA, 21 bp, Artificial sequence
  SiRNA target sequence
aagtactgttatatctgccgt

SEQ ID NO: 271242 - DNA, 21 bp, Artificial sequence
  SiRNA target sequence
agtactgttatatctgccgtt

SEQ ID NO: 271243 - DNA, 21 bp, Artificial sequence
  SiRNA target sequence
gtactgttatatctgccgttc

SEQ ID NO: 271244 - DNA, 21 bp, Artificial sequence
  SiRNA target sequence
tactgttatatctgccgttcc

SEQ ID NO: 271245 - DNA, 21 bp, Artificial sequence
  SiRNA target sequence
actgttatatctgccgttcca

SEQ ID NO: 271246 - DNA, 21 bp, Artificial sequence
  SiRNA target sequence
ctgttatatctgccgttccag

SEQ ID NO: 271247 - DNA, 21 bp, Artificial sequence
  SiRNA target sequence
tgttatatctgccgttccaga

SEQ ID NO: 271248 - DNA, 21 bp, Artificial sequence
  SiRNA target sequence
gttatatctgccgttccagaa

SEQ ID NO: 271249 - DNA, 21 bp, Artificial sequence
  SiRNA target sequence
ttatatctgccgttccagaag

SEQ ID NO: 271250 - DNA, 21 bp, Artificial sequence
  SiRNA target sequence
tatatctgccgttccagaagc

SEQ ID NO: 271251 - DNA, 21 bp, Artificial sequence
  SiRNA target sequence
atatctgccgttccagaagct

SEQ ID NO: 271252 - DNA, 21 bp, Artificial sequence
  SiRNA target sequence
tatctgccgttccagaagctc

SEQ ID NO: 271253 - DNA, 21 bp, Artificial sequence
  SiRNA target sequence
atctgccgttccagaagctcc

SEQ ID NO: 271254 - DNA, 21 bp, Artificial sequence
  SiRNA target sequence
tctgccgttccagaagctccc

SEQ ID NO: 271255 - DNA, 21 bp, Artificial sequence
  SiRNA target sequence
ctgccgttccagaagctccca

SEQ ID NO: 271256 - DNA, 21 bp, Artificial sequence
  SiRNA target sequence
tgccgttccagaagctcccaa

SEQ ID NO: 271257 - DNA, 21 bp, Artificial sequence
  SiRNA target sequence
gccgttccagaagctcccaat

SEQ ID NO: 271258 - DNA, 21 bp, Artificial sequence
  SiRNA target sequence
ccgttccagaagctcccaatg

SEQ ID NO: 271259 - DNA, 21 bp, Artificial sequence
  SiRNA target sequence
cgttccagaagctcccaatgc

SEQ ID NO: 271260 - DNA, 21 bp, Artificial sequence
  SiRNA target sequence
gttccagaagctcccaatgct

SEQ ID NO: 271261 - DNA, 21 bp, Artificial sequence
  SiRNA target sequence
ttccagaagctcccaatgctg

SEQ ID NO: 271262 - DNA, 21 bp, Artificial sequence
  SiRNA target sequence
tccagaagctcccaatgctga

SEQ ID NO: 271263 - DNA, 21 bp, Artificial sequence
  SiRNA target sequence
ccagaagctcccaatgctgaa

SEQ ID NO: 271264 - DNA, 21 bp, Artificial sequence
  SiRNA target sequence
cagaagctcccaatgctgaag

SEQ ID NO: 271265 - DNA, 21 bp, Artificial sequence
  SiRNA target sequence
agaagctcccaatgctgaagc

SEQ ID NO: 271266 - DNA, 21 bp, Artificial sequence
  SiRNA target sequence
gaagctcccaatgctgaagcg

SEQ ID NO: 271267 - DNA, 21 bp, Artificial sequence
  SiRNA target sequence
aagctcccaatgctgaagcgg

SEQ ID NO: 271268 - DNA, 21 bp, Artificial sequence
  SiRNA target sequence
agctcccaatgctgaagcgga

SEQ ID NO: 271269 - DNA, 21 bp, Artificial sequence
  SiRNA target sequence
gctcccaatgctgaagcggag

SEQ ID NO: 271270 - DNA, 21 bp, Artificial sequence
  SiRNA target sequence
ctcccaatgctgaagcggagg

SEQ ID NO: 271271 - DNA, 21 bp, Artificial sequence
  SiRNA target sequence
tcccaatgctgaagcggagga

SEQ ID NO: 271272 - DNA, 21 bp, Artificial sequence
  SiRNA target sequence
cccaatgctgaagcggaggag

SEQ ID NO: 271273 - DNA, 21 bp, Artificial sequence
  SiRNA target sequence
ccaatgctgaagcggaggagg

SEQ ID NO: 271274 - DNA, 21 bp, Artificial sequence
  SiRNA target sequence
caatgctgaagcggaggaggc

SEQ ID NO: 271275 - DNA, 21 bp, Artificial sequence
  SiRNA target sequence
aatgctgaagcggaggaggca

SEQ ID NO: 271276 - DNA, 21 bp, Artificial sequence
  SiRNA target sequence
atgctgaagcggaggaggcaa

SEQ ID NO: 271277 - DNA, 21 bp, Artificial sequence
  SiRNA target sequence
tgctgaagcggaggaggcaag

SEQ ID NO: 271278 - DNA, 21 bp, Artificial sequence
  SiRNA target sequence
gctgaagcggaggaggcaagt

SEQ ID NO: 271279 - DNA, 21 bp, Artificial sequence
  SiRNA target sequence
ctgaagcggaggaggcaagtg

SEQ ID NO: 271280 - DNA, 21 bp, Artificial sequence
  SiRNA target sequence
tgaagcggaggaggcaagtgc

SEQ ID NO: 271281 - DNA, 21 bp, Artificial sequence
  SiRNA target sequence
gaagcggaggaggcaagtgct

SEQ ID NO: 271282 - DNA, 21 bp, Artificial sequence
  SiRNA target sequence
aagcggaggaggcaagtgctt

SEQ ID NO: 271283 - DNA, 21 bp, Artificial sequence
  SiRNA target sequence
agcggaggaggcaagtgcttg

SEQ ID NO: 271284 - DNA, 21 bp, Artificial sequence
  SiRNA target sequence
gcggaggaggcaagtgcttgg

SEQ ID NO: 271285 - DNA, 21 bp, Artificial sequence
  SiRNA target sequence
cggaggaggcaagtgcttggg

SEQ ID NO: 271286 - DNA, 21 bp, Artificial sequence
  SiRNA target sequence
ggaggaggcaagtgcttgggt

SEQ ID NO: 271287 - DNA, 21 bp, Artificial sequence
  SiRNA target sequence
gaggaggcaagtgcttgggta

SEQ ID NO: 271288 - DNA, 21 bp, Artificial sequence
  SiRNA target sequence
aggaggcaagtgcttgggtat

SEQ ID NO: 271289 - DNA, 21 bp, Artificial sequence
  SiRNA target sequence
ggaggcaagtgcttgggtatc

SEQ ID NO: 271290 - DNA, 21 bp, Artificial sequence
  SiRNA target sequence
gaggcaagtgcttgggtatcc

SEQ ID NO: 271291 - DNA, 21 bp, Artificial sequence
  SiRNA target sequence
aggcaagtgcttgggtatcca

SEQ ID NO: 271292 - DNA, 21 bp, Artificial sequence
  SiRNA target sequence
ggcaagtgcttgggtatccat

SEQ ID NO: 271293 - DNA, 21 bp, Artificial sequence
  SiRNA target sequence
gcaagtgcttgggtatccatt

SEQ ID NO: 271294 - DNA, 21 bp, Artificial sequence
  SiRNA target sequence
caagtgcttgggtatccatta

SEQ ID NO: 271295 - DNA, 21 bp, Artificial sequence
  SiRNA target sequence
aagtgcttgggtatccattat

SEQ ID NO: 271296 - DNA, 21 bp, Artificial sequence
  SiRNA target sequence
agtgcttgggtatccattatt

SEQ ID NO: 271297 - DNA, 21 bp, Artificial sequence
  SiRNA target sequence
gtgcttgggtatccattattt

SEQ ID NO: 271298 - DNA, 21 bp, Artificial sequence
  SiRNA target sequence
tgcttgggtatccattattta

SEQ ID NO: 271299 - DNA, 21 bp, Artificial sequence
  SiRNA target sequence
gcttgggtatccattatttat

SEQ ID NO: 271300 - DNA, 21 bp, Artificial sequence
  SiRNA target sequence
cttgggtatccattatttata

SEQ ID NO: 271301 - DNA, 21 bp, Artificial sequence
  SiRNA target sequence
ttgggtatccattatttataa

SEQ ID NO: 271302 - DNA, 21 bp, Artificial sequence
  SiRNA target sequence
tgggtatccattatttataat

SEQ ID NO: 271303 - DNA, 21 bp, Artificial sequence
  SiRNA target sequence
gggtatccattatttataatg

SEQ ID NO: 271304 - DNA, 21 bp, Artificial sequence
  SiRNA target sequence
ggtatccattatttataatgg

SEQ ID NO: 271305 - DNA, 21 bp, Artificial sequence
  SiRNA target sequence
gtatccattatttataatggt

SEQ ID NO: 271306 - DNA, 21 bp, Artificial sequence
  SiRNA target sequence
tatccattatttataatggtg

SEQ ID NO: 271307 - DNA, 21 bp, Artificial sequence
  SiRNA target sequence
atccattatttataatggtgt

SEQ ID NO: 271308 - DNA, 21 bp, Artificial sequence
  SiRNA target sequence
tccattatttataatggtgtg

SEQ ID NO: 271309 - DNA, 21 bp, Artificial sequence
  SiRNA target sequence
ccattatttataatggtgtgt

SEQ ID NO: 271310 - DNA, 21 bp, Artificial sequence
  SiRNA target sequence
cattatttataatggtgtgtg

SEQ ID NO: 271311 - DNA, 21 bp, Artificial sequence
  SiRNA target sequence
attatttataatggtgtgtgt

SEQ ID NO: 271312 - DNA, 21 bp, Artificial sequence
  SiRNA target sequence
ttatttataatggtgtgtgta

SEQ ID NO: 271313 - DNA, 21 bp, Artificial sequence
  SiRNA target sequence
tatttataatggtgtgtgtaa

SEQ ID NO: 271314 - DNA, 21 bp, Artificial sequence
  SiRNA target sequence
atttataatggtgtgtgtaat

SEQ ID NO: 271315 - DNA, 21 bp, Artificial sequence
  SiRNA target sequence
tttataatggtgtgtgtaata

SEQ ID NO: 271316 - DNA, 21 bp, Artificial sequence
  SiRNA target sequence
ttataatggtgtgtgtaatat

SEQ ID NO: 271317 - DNA, 21 bp, Artificial sequence
  SiRNA target sequence
tataatggtgtgtgtaatatg

SEQ ID NO: 271318 - DNA, 21 bp, Artificial sequence
  SiRNA target sequence
ataatggtgtgtgtaatatgc

SEQ ID NO: 271319 - DNA, 21 bp, Artificial sequence
  SiRNA target sequence
taatggtgtgtgtaatatgct

SEQ ID NO: 271320 - DNA, 21 bp, Artificial sequence
  SiRNA target sequence
aatggtgtgtgtaatatgctt

SEQ ID NO: 271321 - DNA, 21 bp, Artificial sequence
  SiRNA target sequence
atggtgtgtgtaatatgctta

SEQ ID NO: 271322 - DNA, 21 bp, Artificial sequence
  SiRNA target sequence
tggtgtgtgtaatatgcttaa

SEQ ID NO: 271323 - DNA, 21 bp, Artificial sequence
  SiRNA target sequence
ggtgtgtgtaatatgcttaat

SEQ ID NO: 271324 - DNA, 21 bp, Artificial sequence
  SiRNA target sequence
gtgtgtgtaatatgcttaatg

SEQ ID NO: 271325 - DNA, 21 bp, Artificial sequence
  SiRNA target sequence
tgtgtgtaatatgcttaatgt

SEQ ID NO: 271326 - DNA, 21 bp, Artificial sequence
  SiRNA target sequence
  misc_feature (21)..(21): n is a, c, g, or t
gtgtgtaatatgcttaatgtn

SEQ ID NO: 271327 - DNA, 21 bp, Artificial sequence
  SiRNA target sequence
  misc_feature (20)..(20): n is a, c, g, or t
tgtgtaatatgcttaatgtng

SEQ ID NO: 271328 - DNA, 21 bp, Artificial sequence
  SiRNA target sequence
  misc_feature (19)..(19): n is a, c, g, or t
gtgtaatatgcttaatgtngc

SEQ ID NO: 271329 - DNA, 21 bp, Artificial sequence
  SiRNA target sequence
  misc_feature (18)..(18): n is a, c, g, or t
tgtaatatgcttaatgtngct

SEQ ID NO: 271330 - DNA, 21 bp, Artificial sequence
  SiRNA target sequence
  misc_feature (17)..(17): n is a, c, g, or t
gtaatatgcttaatgtngctg

SEQ ID NO: 271331 - DNA, 21 bp, Artificial sequence
  SiRNA target sequence
  misc_feature (16)..(16): n is a, c, g, or t
taatatgcttaatgtngctgc

SEQ ID NO: 271332 - DNA, 21 bp, Artificial sequence
  SiRNA target sequence
  misc_feature (15)..(15): n is a, c, g, or t
aatatgcttaatgtngctgct

SEQ ID NO: 271333 - DNA, 21 bp, Artificial sequence
  SiRNA target sequence
  misc_feature (14)..(14): n is a, c, g, or t
atatgcttaatgtngctgctc

SEQ ID NO: 271334 - DNA, 21 bp, Artificial sequence
  SiRNA target sequence
  misc_feature (13)..(13): n is a, c, g, or t
tatgcttaatgtngctgctca

SEQ ID NO: 271335 - DNA, 21 bp, Artificial sequence
  SiRNA target sequence
  misc_feature (12)..(12): n is a, c, g, or t
atgcttaatgtngctgctcaa

SEQ ID NO: 271336 - DNA, 21 bp, Artificial sequence
  SiRNA target sequence
  misc_feature (11)..(11): n is a, c, g, or t
tgcttaatgtngctgctcaaa

SEQ ID NO: 271337 - DNA, 21 bp, Artificial sequence
  SiRNA target sequence
  misc_feature (10)..(10): n is a, c, g, or t
gcttaatgtngctgctcaaaa

SEQ ID NO: 271338 - DNA, 21 bp, Artificial sequence
  SiRNA target sequence
  misc_feature (9)..(9): n is a, c, g, or t
cttaatgtngctgctcaaaaa

SEQ ID NO: 271339 - DNA, 21 bp, Artificial sequence
  SiRNA target sequence
  misc_feature (8)..(8): n is a, c, g, or t
ttaatgtngctgctcaaaaac

SEQ ID NO: 271340 - DNA, 21 bp, Artificial sequence
  SiRNA target sequence
  misc_feature (7)..(7): n is a, c, g, or t
taatgtngctgctcaaaaacc

SEQ ID NO: 271341 - DNA, 21 bp, Artificial sequence
  SiRNA target sequence
  misc_feature (6)..(6): n is a, c, g, or t
aatgtngctgctcaaaaaccg

SEQ ID NO: 271342 - DNA, 21 bp, Artificial sequence
  SiRNA target sequence
  misc_feature (5)..(5): n is a, c, g, or t
atgtngctgctcaaaaaccga

SEQ ID NO: 271343 - DNA, 21 bp, Artificial sequence
  SiRNA target sequence
  misc_feature (4)..(4): n is a, c, g, or t
tgtngctgctcaaaaaccgaa

SEQ ID NO: 271344 - DNA, 21 bp, Artificial sequence
  SiRNA target sequence
  misc_feature (3)..(3): n is a, c, g, or t
gtngctgctcaaaaaccgaaa

SEQ ID NO: 271345 - DNA, 21 bp, Artificial sequence
  SiRNA target sequence
  misc_feature (2)..(2): n is a, c, g, or t
tngctgctcaaaaaccgaaac

SEQ ID NO: 271346 - DNA, 21 bp, Artificial sequence
  SiRNA target sequence
  misc_feature (1)..(1): n is a, c, g, or t
ngctgctcaaaaaccgaaaca

SEQ ID NO: 271347 - DNA, 21 bp, Artificial sequence
  SiRNA target sequence
gctgctcaaaaaccgaaacaa

SEQ ID NO: 271348 - DNA, 21 bp, Artificial sequence
  SiRNA target sequence
ctgctcaaaaaccgaaacaat

SEQ ID NO: 271349 - DNA, 21 bp, Artificial sequence
  SiRNA target sequence
tgctcaaaaaccgaaacaatt

SEQ ID NO: 271350 - DNA, 21 bp, Artificial sequence
  SiRNA target sequence
gctcaaaaaccgaaacaattt

SEQ ID NO: 271351 - DNA, 21 bp, Artificial sequence
  SiRNA target sequence
ctcaaaaaccgaaacaattta

SEQ ID NO: 271352 - DNA, 21 bp, Artificial sequence
  SiRNA target sequence
tcaaaaaccgaaacaatttaa

SEQ ID NO: 271353 - DNA, 21 bp, Artificial sequence
  SiRNA target sequence
caaaaaccgaaacaatttaaa

SEQ ID NO: 271354 - DNA, 21 bp, Artificial sequence
  SiRNA target sequence
aaaaaccgaaacaatttaaag

SEQ ID NO: 271355 - DNA, 21 bp, Artificial sequence
  SiRNA target sequence
aaaaccgaaacaatttaaaga

SEQ ID NO: 271356 - DNA, 21 bp, Artificial sequence
  SiRNA target sequence
aaaccgaaacaatttaaagat

SEQ ID NO: 271357 - DNA, 21 bp, Artificial sequence
  SiRNA target sequence
aaccgaaacaatttaaagatt

SEQ ID NO: 271358 - DNA, 21 bp, Artificial sequence
  SiRNA target sequence
accgaaacaatttaaagattg

SEQ ID NO: 271359 - DNA, 21 bp, Artificial sequence
  SiRNA target sequence
ccgaaacaatttaaagattgg

SEQ ID NO: 271360 - DNA, 21 bp, Artificial sequence
  SiRNA target sequence
cgaaacaatttaaagattggg

SEQ ID NO: 271361 - DNA, 21 bp, Artificial sequence
  SiRNA target sequence
gaaacaatttaaagattgggt

SEQ ID NO: 271362 - DNA, 21 bp, Artificial sequence
  SiRNA target sequence
aaacaatttaaagattgggta

SEQ ID NO: 271363 - DNA, 21 bp, Artificial sequence
  SiRNA target sequence
aacaatttaaagattgggtaa

SEQ ID NO: 271364 - DNA, 21 bp, Artificial sequence
  SiRNA target sequence
acaatttaaagattgggtaaa

SEQ ID NO: 271365 - DNA, 21 bp, Artificial sequence
  SiRNA target sequence
caatttaaagattgggtaaaa

SEQ ID NO: 271366 - DNA, 21 bp, Artificial sequence
  SiRNA target sequence
aatttaaagattgggtaaaat

SEQ ID NO: 271367 - DNA, 21 bp, Artificial sequence
  SiRNA target sequence
atttaaagattgggtaaaatt

SEQ ID NO: 271368 - DNA, 21 bp, Artificial sequence
  SiRNA target sequence
tttaaagattgggtaaaatta

SEQ ID NO: 271369 - DNA, 21 bp, Artificial sequence
  SiRNA target sequence
ttaaagattgggtaaaattag

SEQ ID NO: 271370 - DNA, 21 bp, Artificial sequence
  SiRNA target sequence
taaagattgggtaaaattagc

SEQ ID NO: 271371 - DNA, 21 bp, Artificial sequence
  SiRNA target sequence
aaagattgggtaaaattagct

SEQ ID NO: 271372 - DNA, 21 bp, Artificial sequence
  SiRNA target sequence
aagattgggtaaaattagcta

SEQ ID NO: 271373 - DNA, 21 bp, Artificial sequence
  SiRNA target sequence
agattgggtaaaattagctac

SEQ ID NO: 271374 - DNA, 21 bp, Artificial sequence
  SiRNA target sequence
gattgggtaaaattagctact

SEQ ID NO: 271375 - DNA, 21 bp, Artificial sequence
  SiRNA target sequence
attgggtaaaattagctactg

SEQ ID NO: 271376 - DNA, 21 bp, Artificial sequence
  SiRNA target sequence
ttgggtaaaattagctactgt

SEQ ID NO: 271377 - DNA, 21 bp, Artificial sequence
  SiRNA target sequence
tgggtaaaattagctactgta

SEQ ID NO: 271378 - DNA, 21 bp, Artificial sequence
  SiRNA target sequence
gggtaaaattagctactgtag

SEQ ID NO: 271379 - DNA, 21 bp, Artificial sequence
  SiRNA target sequence
ggtaaaattagctactgtaga

SEQ ID NO: 271380 - DNA, 21 bp, Artificial sequence
  SiRNA target sequence
gtaaaattagctactgtagat

SEQ ID NO: 271381 - DNA, 21 bp, Artificial sequence
  SiRNA target sequence
taaaattagctactgtagatt

SEQ ID NO: 271382 - DNA, 21 bp, Artificial sequence
  SiRNA target sequence
aaaattagctactgtagattt

SEQ ID NO: 271383 - DNA, 21 bp, Artificial sequence
  SiRNA target sequence
aaattagctactgtagatttt

SEQ ID NO: 271384 - DNA, 21 bp, Artificial sequence
  SiRNA target sequence
aattagctactgtagatttta

SEQ ID NO: 271385 - DNA, 21 bp, Artificial sequence
  SiRNA target sequence
attagctactgtagattttag

SEQ ID NO: 271386 - DNA, 21 bp, Artificial sequence
  SiRNA target sequence
ttagctactgtagattttagt

SEQ ID NO: 271387 - DNA, 21 bp, Artificial sequence
  SiRNA target sequence
tagctactgtagattttagta

SEQ ID NO: 271388 - DNA, 21 bp, Artificial sequence
  SiRNA target sequence
agctactgtagattttagtaa

SEQ ID NO: 271389 - DNA, 21 bp, Artificial sequence
  SiRNA target sequence
gctactgtagattttagtaat

SEQ ID NO: 271390 - DNA, 21 bp, Artificial sequence
  SiRNA target sequence
ctactgtagattttagtaata

SEQ ID NO: 271391 - DNA, 21 bp, Artificial sequence
  SiRNA target sequence
tactgtagattttagtaataa

SEQ ID NO: 271392 - DNA, 21 bp, Artificial sequence
  SiRNA target sequence
actgtagattttagtaataat

SEQ ID NO: 271393 - DNA, 21 bp, Artificial sequence
  SiRNA target sequence
ctgtagattttagtaataatt

SEQ ID NO: 271394 - DNA, 21 bp, Artificial sequence
  SiRNA target sequence
tgtagattttagtaataattg

SEQ ID NO: 271395 - DNA, 21 bp, Artificial sequence
  SiRNA target sequence
gtagattttagtaataattgt

SEQ ID NO: 271396 - DNA, 21 bp, Artificial sequence
  SiRNA target sequence
tagattttagtaataattgta

SEQ ID NO: 271397 - DNA, 21 bp, Artificial sequence
  SiRNA target sequence
agattttagtaataattgtag

SEQ ID NO: 271398 - DNA, 21 bp, Artificial sequence
  SiRNA target sequence
gattttagtaataattgtaga

SEQ ID NO: 271399 - DNA, 21 bp, Artificial sequence
  SiRNA target sequence
attttagtaataattgtagag

SEQ ID NO: 271400 - DNA, 21 bp, Artificial sequence
  SiRNA target sequence
ttttagtaataattgtagagg

SEQ ID NO: 271401 - DNA, 21 bp, Artificial sequence
  SiRNA target sequence
tttagtaataattgtagaggt

SEQ ID NO: 271402 - DNA, 21 bp, Artificial sequence
  SiRNA target sequence
ttagtaataattgtagaggta

SEQ ID NO: 271403 - DNA, 21 bp, Artificial sequence
  SiRNA target sequence
tagtaataattgtagaggtag

SEQ ID NO: 271404 - DNA, 21 bp, Artificial sequence
  SiRNA target sequence
agtaataattgtagaggtagt

SEQ ID NO: 271405 - DNA, 21 bp, Artificial sequence
  SiRNA target sequence
gtaataattgtagaggtagta

SEQ ID NO: 271406 - DNA, 21 bp, Artificial sequence
  SiRNA target sequence
taataattgtagaggtagtaa

SEQ ID NO: 271407 - DNA, 21 bp, Artificial sequence
  SiRNA target sequence
aataattgtagaggtagtaac

SEQ ID NO: 271408 - DNA, 21 bp, Artificial sequence
  SiRNA target sequence
ataattgtagaggtagtaacc

SEQ ID NO: 271409 - DNA, 21 bp, Artificial sequence
  SiRNA target sequence
taattgtagaggtagtaacca

SEQ ID NO: 271410 - DNA, 21 bp, Artificial sequence
  SiRNA target sequence
aattgtagaggtagtaaccag

SEQ ID NO: 271411 - DNA, 21 bp, Artificial sequence
  SiRNA target sequence
attgtagaggtagtaaccagg

SEQ ID NO: 271412 - DNA, 21 bp, Artificial sequence
  SiRNA target sequence
ttgtagaggtagtaaccaggt

SEQ ID NO: 271413 - DNA, 21 bp, Artificial sequence
  SiRNA target sequence
tgtagaggtagtaaccaggta

SEQ ID NO: 271414 - DNA, 21 bp, Artificial sequence
  SiRNA target sequence
gtagaggtagtaaccaggtat

SEQ ID NO: 271415 - DNA, 21 bp, Artificial sequence
  SiRNA target sequence
tagaggtagtaaccaggtatt

SEQ ID NO: 271416 - DNA, 21 bp, Artificial sequence
  SiRNA target sequence
agaggtagtaaccaggtattt

SEQ ID NO: 271417 - DNA, 21 bp, Artificial sequence
  SiRNA target sequence
gaggtagtaaccaggtatttg

SEQ ID NO: 271418 - DNA, 21 bp, Artificial sequence
  SiRNA target sequence
aggtagtaaccaggtatttgt

SEQ ID NO: 271419 - DNA, 21 bp, Artificial sequence
  SiRNA target sequence
ggtagtaaccaggtatttgta

SEQ ID NO: 271420 - DNA, 21 bp, Artificial sequence
  SiRNA target sequence
gtagtaaccaggtatttgtat

SEQ ID NO: 271421 - DNA, 21 bp, Artificial sequence
  SiRNA target sequence
tagtaaccaggtatttgtatt

SEQ ID NO: 271422 - DNA, 21 bp, Artificial sequence
  SiRNA target sequence
agtaaccaggtatttgtattt

SEQ ID NO: 271423 - DNA, 21 bp, Artificial sequence
  SiRNA target sequence
gtaaccaggtatttgtatttt

SEQ ID NO: 271424 - DNA, 21 bp, Artificial sequence
  SiRNA target sequence
taaccaggtatttgtattttt

SEQ ID NO: 271425 - DNA, 21 bp, Artificial sequence
  SiRNA target sequence
aaccaggtatttgtatttttc

SEQ ID NO: 271426 - DNA, 21 bp, Artificial sequence
  SiRNA target sequence
accaggtatttgtatttttca

SEQ ID NO: 271427 - DNA, 21 bp, Artificial sequence
  SiRNA target sequence
ccaggtatttgtatttttcaa

SEQ ID NO: 271428 - DNA, 21 bp, Artificial sequence
  SiRNA target sequence
caggtatttgtatttttcaag

SEQ ID NO: 271429 - DNA, 21 bp, Artificial sequence
  SiRNA target sequence
aggtatttgtatttttcaaga

SEQ ID NO: 271430 - DNA, 21 bp, Artificial sequence
  SiRNA target sequence
ggtatttgtatttttcaagaa

SEQ ID NO: 271431 - DNA, 21 bp, Artificial sequence
  SiRNA target sequence
gtatttgtatttttcaagaat

SEQ ID NO: 271432 - DNA, 21 bp, Artificial sequence
  SiRNA target sequence
tatttgtatttttcaagaata

SEQ ID NO: 271433 - DNA, 21 bp, Artificial sequence
  SiRNA target sequence
atttgtatttttcaagaatac

SEQ ID NO: 271434 - DNA, 21 bp, Artificial sequence
  SiRNA target sequence
tttgtatttttcaagaataca

SEQ ID NO: 271435 - DNA, 21 bp, Artificial sequence
  SiRNA target sequence
ttgtatttttcaagaatacat

SEQ ID NO: 271436 - DNA, 21 bp, Artificial sequence
  SiRNA target sequence
tgtatttttcaagaatacatt

SEQ ID NO: 271437 - DNA, 21 bp, Artificial sequence
  SiRNA target sequence
gtatttttcaagaatacattt

SEQ ID NO: 271438 - DNA, 21 bp, Artificial sequence
  SiRNA target sequence
tatttttcaagaatacatttg

SEQ ID NO: 271439 - DNA, 21 bp, Artificial sequence
  SiRNA target sequence
atttttcaagaatacatttga

SEQ ID NO: 271440 - DNA, 21 bp, Artificial sequence
  SiRNA target sequence
tttttcaagaatacatttgaa

SEQ ID NO: 271441 - DNA, 21 bp, Artificial sequence
  SiRNA target sequence
ttttcaagaatacatttgaag

SEQ ID NO: 271442 - DNA, 21 bp, Artificial sequence
  SiRNA target sequence
tttcaagaatacatttgaagt

SEQ ID NO: 271443 - DNA, 21 bp, Artificial sequence
  SiRNA target sequence
ttcaagaatacatttgaagtg

SEQ ID NO: 271444 - DNA, 21 bp, Artificial sequence
  SiRNA target sequence
tcaagaatacatttgaagtgt

SEQ ID NO: 271445 - DNA, 21 bp, Artificial sequence
  SiRNA target sequence
caagaatacatttgaagtgtt

SEQ ID NO: 271446 - DNA, 21 bp, Artificial sequence
  SiRNA target sequence
aagaatacatttgaagtgttg

SEQ ID NO: 271447 - DNA, 21 bp, Artificial sequence
  SiRNA target sequence
agaatacatttgaagtgttga

SEQ ID NO: 271448 - DNA, 21 bp, Artificial sequence
  SiRNA target sequence
gaatacatttgaagtgttgaa

SEQ ID NO: 271449 - DNA, 21 bp, Artificial sequence
  SiRNA target sequence
aatacatttgaagtgttgaag

SEQ ID NO: 271450 - DNA, 21 bp, Artificial sequence
  SiRNA target sequence
atacatttgaagtgttgaaga

SEQ ID NO: 271451 - DNA, 21 bp, Artificial sequence
  SiRNA target sequence
tacatttgaagtgttgaagaa

SEQ ID NO: 271452 - DNA, 21 bp, Artificial sequence
  SiRNA target sequence
acatttgaagtgttgaagaaa

SEQ ID NO: 271453 - DNA, 21 bp, Artificial sequence
  SiRNA target sequence
catttgaagtgttgaagaaaa

SEQ ID NO: 271454 - DNA, 21 bp, Artificial sequence
  SiRNA target sequence
atttgaagtgttgaagaaaat

SEQ ID NO: 271455 - DNA, 21 bp, Artificial sequence
  SiRNA target sequence
tttgaagtgttgaagaaaatg

SEQ ID NO: 271456 - DNA, 21 bp, Artificial sequence
  SiRNA target sequence
ttgaagtgttgaagaaaatgt

SEQ ID NO: 271457 - DNA, 21 bp, Artificial sequence
  SiRNA target sequence
tgaagtgttgaagaaaatgtg

SEQ ID NO: 271458 - DNA, 21 bp, Artificial sequence
  SiRNA target sequence
gaagtgttgaagaaaatgtgg

SEQ ID NO: 271459 - DNA, 21 bp, Artificial sequence
  SiRNA target sequence
aagtgttgaagaaaatgtggg

SEQ ID NO: 271460 - DNA, 21 bp, Artificial sequence
  SiRNA target sequence
agtgttgaagaaaatgtgggg

SEQ ID NO: 271461 - DNA, 21 bp, Artificial sequence
  SiRNA target sequence
gtgttgaagaaaatgtggggt

SEQ ID NO: 271462 - DNA, 21 bp, Artificial sequence
  SiRNA target sequence
tgttgaagaaaatgtggggtt

SEQ ID NO: 271463 - DNA, 21 bp, Artificial sequence
  SiRNA target sequence
gttgaagaaaatgtggggtta

SEQ ID NO: 271464 - DNA, 21 bp, Artificial sequence
  SiRNA target sequence
ttgaagaaaatgtggggttat

SEQ ID NO: 271465 - DNA, 21 bp, Artificial sequence
  SiRNA target sequence
tgaagaaaatgtggggttatg

SEQ ID NO: 271466 - DNA, 21 bp, Artificial sequence
  SiRNA target sequence
gaagaaaatgtggggttatgt

SEQ ID NO: 271467 - DNA, 21 bp, Artificial sequence
  SiRNA target sequence
aagaaaatgtggggttatgta

SEQ ID NO: 271468 - DNA, 21 bp, Artificial sequence
  SiRNA target sequence
agaaaatgtggggttatgtat

SEQ ID NO: 271469 - DNA, 21 bp, Artificial sequence
  SiRNA target sequence
gaaaatgtggggttatgtatt

SEQ ID NO: 271470 - DNA, 21 bp, Artificial sequence
  SiRNA target sequence
aaaatgtggggttatgtattt

SEQ ID NO: 271471 - DNA, 21 bp, Artificial sequence
  SiRNA target sequence
aaatgtggggttatgtatttt

SEQ ID NO: 271472 - DNA, 21 bp, Artificial sequence
  SiRNA target sequence
aatgtggggttatgtattttg

SEQ ID NO: 271473 - DNA, 21 bp, Artificial sequence
  SiRNA target sequence
atgtggggttatgtattttgt

SEQ ID NO: 271474 - DNA, 21 bp, Artificial sequence
  SiRNA target sequence
tgtggggttatgtattttgtc

SEQ ID NO: 271475 - DNA, 21 bp, Artificial sequence
  SiRNA target sequence
gtggggttatgtattttgtca

SEQ ID NO: 271476 - DNA, 21 bp, Artificial sequence
  SiRNA target sequence
tggggttatgtattttgtcag

SEQ ID NO: 271477 - DNA, 21 bp, Artificial sequence
  SiRNA target sequence
ggggttatgtattttgtcaga

SEQ ID NO: 271478 - DNA, 21 bp, Artificial sequence
  SiRNA target sequence
gggttatgtattttgtcagag

SEQ ID NO: 271479 - DNA, 21 bp, Artificial sequence
  SiRNA target sequence
ggttatgtattttgtcagagt

SEQ ID NO: 271480 - DNA, 21 bp, Artificial sequence
  SiRNA target sequence
gttatgtattttgtcagagta

SEQ ID NO: 271481 - DNA, 21 bp, Artificial sequence
  SiRNA target sequence
ttatgtattttgtcagagtaa

SEQ ID NO: 271482 - DNA, 21 bp, Artificial sequence
  SiRNA target sequence
tatgtattttgtcagagtaat

SEQ ID NO: 271483 - DNA, 21 bp, Artificial sequence
  SiRNA target sequence
atgtattttgtcagagtaatc

SEQ ID NO: 271484 - DNA, 21 bp, Artificial sequence
  SiRNA target sequence
tgtattttgtcagagtaatcc

SEQ ID NO: 271485 - DNA, 21 bp, Artificial sequence
  SiRNA target sequence
gtattttgtcagagtaatcct

SEQ ID NO: 271486 - DNA, 21 bp, Artificial sequence
  SiRNA target sequence
tattttgtcagagtaatcctg

SEQ ID NO: 271487 - DNA, 21 bp, Artificial sequence
  SiRNA target sequence
attttgtcagagtaatcctgc

SEQ ID NO: 271488 - DNA, 21 bp, Artificial sequence
  SiRNA target sequence
ttttgtcagagtaatcctgca

SEQ ID NO: 271489 - DNA, 21 bp, Artificial sequence
  SiRNA target sequence
tttgtcagagtaatcctgcag

SEQ ID NO: 271490 - DNA, 21 bp, Artificial sequence
  SiRNA target sequence
ttgtcagagtaatcctgcagc

SEQ ID NO: 271491 - DNA, 21 bp, Artificial sequence
  SiRNA target sequence
tgtcagagtaatcctgcagcg

SEQ ID NO: 271492 - DNA, 21 bp, Artificial sequence
  SiRNA target sequence
gtcagagtaatcctgcagcgc

SEQ ID NO: 271493 - DNA, 21 bp, Artificial sequence
  SiRNA target sequence
tcagagtaatcctgcagcgcg

SEQ ID NO: 271494 - DNA, 21 bp, Artificial sequence
  SiRNA target sequence
cagagtaatcctgcagcgcgt

SEQ ID NO: 271495 - DNA, 21 bp, Artificial sequence
  SiRNA target sequence
agagtaatcctgcagcgcgtt

SEQ ID NO: 271496 - DNA, 21 bp, Artificial sequence
  SiRNA target sequence
gagtaatcctgcagcgcgttt

SEQ ID NO: 271497 - DNA, 21 bp, Artificial sequence
  SiRNA target sequence
agtaatcctgcagcgcgtttg

SEQ ID NO: 271498 - DNA, 21 bp, Artificial sequence
  SiRNA target sequence
gtaatcctgcagcgcgtttgt

SEQ ID NO: 271499 - DNA, 21 bp, Artificial sequence
  SiRNA target sequence
taatcctgcagcgcgtttgtt

SEQ ID NO: 271500 - DNA, 21 bp, Artificial sequence
  SiRNA target sequence
aatcctgcagcgcgtttgttg

SEQ ID NO: 271501 - DNA, 21 bp, Artificial sequence
  SiRNA target sequence
atcctgcagcgcgtttgttga

SEQ ID NO: 271502 - DNA, 21 bp, Artificial sequence
  SiRNA target sequence
tcctgcagcgcgtttgttgaa

SEQ ID NO: 271503 - DNA, 21 bp, Artificial sequence
  SiRNA target sequence
cctgcagcgcgtttgttgaaa

SEQ ID NO: 271504 - DNA, 21 bp, Artificial sequence
  SiRNA target sequence
ctgcagcgcgtttgttgaaag

SEQ ID NO: 271505 - DNA, 21 bp, Artificial sequence
  SiRNA target sequence
tgcagcgcgtttgttgaaagc

SEQ ID NO: 271506 - DNA, 21 bp, Artificial sequence
  SiRNA target sequence
gcagcgcgtttgttgaaagct

SEQ ID NO: 271507 - DNA, 21 bp, Artificial sequence
  SiRNA target sequence
cagcgcgtttgttgaaagctg

SEQ ID NO: 271508 - DNA, 21 bp, Artificial sequence
  SiRNA target sequence
agcgcgtttgttgaaagctgt

SEQ ID NO: 271509 - DNA, 21 bp, Artificial sequence
  SiRNA target sequence
gcgcgtttgttgaaagctgtg

SEQ ID NO: 271510 - DNA, 21 bp, Artificial sequence
  SiRNA target sequence
cgcgtttgttgaaagctgtga

SEQ ID NO: 271511 - DNA, 21 bp, Artificial sequence
  SiRNA target sequence
gcgtttgttgaaagctgtgaa

SEQ ID NO: 271512 - DNA, 21 bp, Artificial sequence
  SiRNA target sequence
cgtttgttgaaagctgtgaat

SEQ ID NO: 271513 - DNA, 21 bp, Artificial sequence
  SiRNA target sequence
gtttgttgaaagctgtgaatg

SEQ ID NO: 271514 - DNA, 21 bp, Artificial sequence
  SiRNA target sequence
tttgttgaaagctgtgaatga

SEQ ID NO: 271515 - DNA, 21 bp, Artificial sequence
  SiRNA target sequence
ttgttgaaagctgtgaatgac

SEQ ID NO: 271516 - DNA, 21 bp, Artificial sequence
  SiRNA target sequence
tgttgaaagctgtgaatgacg

SEQ ID NO: 271517 - DNA, 21 bp, Artificial sequence
  SiRNA target sequence
gttgaaagctgtgaatgacga

SEQ ID NO: 271518 - DNA, 21 bp, Artificial sequence
  SiRNA target sequence
ttgaaagctgtgaatgacgag

SEQ ID NO: 271519 - DNA, 21 bp, Artificial sequence
  SiRNA target sequence
tgaaagctgtgaatgacgagc

SEQ ID NO: 271520 - DNA, 21 bp, Artificial sequence
  SiRNA target sequence
gaaagctgtgaatgacgagcc

SEQ ID NO: 271521 - DNA, 21 bp, Artificial sequence
  SiRNA target sequence
aaagctgtgaatgacgagcct

SEQ ID NO: 271522 - DNA, 21 bp, Artificial sequence
  SiRNA target sequence
aagctgtgaatgacgagcctg

SEQ ID NO: 271523 - DNA, 21 bp, Artificial sequence
  SiRNA target sequence
agctgtgaatgacgagcctga

SEQ ID NO: 271524 - DNA, 21 bp, Artificial sequence
  SiRNA target sequence
gctgtgaatgacgagcctgag

SEQ ID NO: 271525 - DNA, 21 bp, Artificial sequence
  SiRNA target sequence
ctgtgaatgacgagcctgaga

SEQ ID NO: 271526 - DNA, 21 bp, Artificial sequence
  SiRNA target sequence
tgtgaatgacgagcctgagat

SEQ ID NO: 271527 - DNA, 21 bp, Artificial sequence
  SiRNA target sequence
gtgaatgacgagcctgagatt

SEQ ID NO: 271528 - DNA, 21 bp, Artificial sequence
  SiRNA target sequence
tgaatgacgagcctgagattt

SEQ ID NO: 271529 - DNA, 21 bp, Artificial sequence
  SiRNA target sequence
gaatgacgagcctgagatttt

SEQ ID NO: 271530 - DNA, 21 bp, Artificial sequence
  SiRNA target sequence
aatgacgagcctgagattttg

SEQ ID NO: 271531 - DNA, 21 bp, Artificial sequence
  SiRNA target sequence
atgacgagcctgagattttga

SEQ ID NO: 271532 - DNA, 21 bp, Artificial sequence
  SiRNA target sequence
tgacgagcctgagattttgaa

SEQ ID NO: 271533 - DNA, 21 bp, Artificial sequence
  SiRNA target sequence
gacgagcctgagattttgaaa

SEQ ID NO: 271534 - DNA, 21 bp, Artificial sequence
  SiRNA target sequence
acgagcctgagattttgaaag

SEQ ID NO: 271535 - DNA, 21 bp, Artificial sequence
  SiRNA target sequence
cgagcctgagattttgaaagc

SEQ ID NO: 271536 - DNA, 21 bp, Artificial sequence
  SiRNA target sequence
gagcctgagattttgaaagca

SEQ ID NO: 271537 - DNA, 21 bp, Artificial sequence
  SiRNA target sequence
agcctgagattttgaaagcat

SEQ ID NO: 271538 - DNA, 21 bp, Artificial sequence
  SiRNA target sequence
gcctgagattttgaaagcatg

SEQ ID NO: 271539 - DNA, 21 bp, Artificial sequence
  SiRNA target sequence
cctgagattttgaaagcatgg

SEQ ID NO: 271540 - DNA, 21 bp, Artificial sequence
  SiRNA target sequence
ctgagattttgaaagcatggg

SEQ ID NO: 271541 - DNA, 21 bp, Artificial sequence
  SiRNA target sequence
tgagattttgaaagcatgggt

SEQ ID NO: 271542 - DNA, 21 bp, Artificial sequence
  SiRNA target sequence
gagattttgaaagcatgggtg

SEQ ID NO: 271543 - DNA, 21 bp, Artificial sequence
  SiRNA target sequence
agattttgaaagcatgggtga

SEQ ID NO: 271544 - DNA, 21 bp, Artificial sequence
  SiRNA target sequence
gattttgaaagcatgggtgaa

SEQ ID NO: 271545 - DNA, 21 bp, Artificial sequence
  SiRNA target sequence
attttgaaagcatgggtgaag

SEQ ID NO: 271546 - DNA, 21 bp, Artificial sequence
  SiRNA target sequence
ttttgaaagcatgggtgaagg

SEQ ID NO: 271547 - DNA, 21 bp, Artificial sequence
  SiRNA target sequence
tttgaaagcatgggtgaagga

SEQ ID NO: 271548 - DNA, 21 bp, Artificial sequence
  SiRNA target sequence
ttgaaagcatgggtgaaggaa

SEQ ID NO: 271549 - DNA, 21 bp, Artificial sequence
  SiRNA target sequence
tgaaagcatgggtgaaggaat

SEQ ID NO: 271550 - DNA, 21 bp, Artificial sequence
  SiRNA target sequence
gaaagcatgggtgaaggaatg

SEQ ID NO: 271551 - DNA, 21 bp, Artificial sequence
  SiRNA target sequence
aaagcatgggtgaaggaatgt

SEQ ID NO: 271552 - DNA, 21 bp, Artificial sequence
  SiRNA target sequence
aagcatgggtgaaggaatgtc

SEQ ID NO: 271553 - DNA, 21 bp, Artificial sequence
  SiRNA target sequence
agcatgggtgaaggaatgtct

SEQ ID NO: 271554 - DNA, 21 bp, Artificial sequence
  SiRNA target sequence
gcatgggtgaaggaatgtctg

SEQ ID NO: 271555 - DNA, 21 bp, Artificial sequence
  SiRNA target sequence
catgggtgaaggaatgtctgt

SEQ ID NO: 271556 - DNA, 21 bp, Artificial sequence
  SiRNA target sequence
atgggtgaaggaatgtctgta

SEQ ID NO: 271557 - DNA, 21 bp, Artificial sequence
  SiRNA target sequence
tgggtgaaggaatgtctgtat

SEQ ID NO: 271558 - DNA, 21 bp, Artificial sequence
  SiRNA target sequence
gggtgaaggaatgtctgtatt

SEQ ID NO: 271559 - DNA, 21 bp, Artificial sequence
  SiRNA target sequence
ggtgaaggaatgtctgtattt

SEQ ID NO: 271560 - DNA, 21 bp, Artificial sequence
  SiRNA target sequence
gtgaaggaatgtctgtatttg

SEQ ID NO: 271561 - DNA, 21 bp, Artificial sequence
  SiRNA target sequence
tgaaggaatgtctgtatttgg

SEQ ID NO: 271562 - DNA, 21 bp, Artificial sequence
  SiRNA target sequence
gaaggaatgtctgtatttgga

SEQ ID NO: 271563 - DNA, 21 bp, Artificial sequence
  SiRNA target sequence
aaggaatgtctgtatttggat

SEQ ID NO: 271564 - DNA, 21 bp, Artificial sequence
  SiRNA target sequence
aggaatgtctgtatttggatg

SEQ ID NO: 271565 - DNA, 21 bp, Artificial sequence
  SiRNA target sequence
ggaatgtctgtatttggatga

SEQ ID NO: 271566 - DNA, 21 bp, Artificial sequence
  SiRNA target sequence
gaatgtctgtatttggatgat

SEQ ID NO: 271567 - DNA, 21 bp, Artificial sequence
  SiRNA target sequence
aatgtctgtatttggatgatc

SEQ ID NO: 271568 - DNA, 21 bp, Artificial sequence
  SiRNA target sequence
atgtctgtatttggatgatcc

SEQ ID NO: 271569 - DNA, 21 bp, Artificial sequence
  SiRNA target sequence
tgtctgtatttggatgatccc

SEQ ID NO: 271570 - DNA, 21 bp, Artificial sequence
  SiRNA target sequence
gtctgtatttggatgatccca

SEQ ID NO: 271571 - DNA, 21 bp, Artificial sequence
  SiRNA target sequence
tctgtatttggatgatcccaa

SEQ ID NO: 271572 - DNA, 21 bp, Artificial sequence
  SiRNA target sequence
ctgtatttggatgatcccaaa

SEQ ID NO: 271573 - DNA, 21 bp, Artificial sequence
  SiRNA target sequence
tgtatttggatgatcccaaat

SEQ ID NO: 271574 - DNA, 21 bp, Artificial sequence
  SiRNA target sequence
gtatttggatgatcccaaatt

SEQ ID NO: 271575 - DNA, 21 bp, Artificial sequence
  SiRNA target sequence
tatttggatgatcccaaattc

SEQ ID NO: 271576 - DNA, 21 bp, Artificial sequence
  SiRNA target sequence
atttggatgatcccaaattca

SEQ ID NO: 271577 - DNA, 21 bp, Artificial sequence
  SiRNA target sequence
tttggatgatcccaaattcag

SEQ ID NO: 271578 - DNA, 21 bp, Artificial sequence
  SiRNA target sequence
ttggatgatcccaaattcaga

SEQ ID NO: 271579 - DNA, 21 bp, Artificial sequence
  SiRNA target sequence
tggatgatcccaaattcagaa

SEQ ID NO: 271580 - DNA, 21 bp, Artificial sequence
  SiRNA target sequence
ggatgatcccaaattcagaat

SEQ ID NO: 271581 - DNA, 21 bp, Artificial sequence
  SiRNA target sequence
gatgatcccaaattcagaatg

SEQ ID NO: 271582 - DNA, 21 bp, Artificial sequence
  SiRNA target sequence
atgatcccaaattcagaatgc

SEQ ID NO: 271583 - DNA, 21 bp, Artificial sequence
  SiRNA target sequence
tgatcccaaattcagaatgcg

SEQ ID NO: 271584 - DNA, 21 bp, Artificial sequence
  SiRNA target sequence
gatcccaaattcagaatgcgt

SEQ ID NO: 271585 - DNA, 21 bp, Artificial sequence
  SiRNA target sequence
atcccaaattcagaatgcgtc

SEQ ID NO: 271586 - DNA, 21 bp, Artificial sequence
  SiRNA target sequence
tcccaaattcagaatgcgtcg

SEQ ID NO: 271587 - DNA, 21 bp, Artificial sequence
  SiRNA target sequence
cccaaattcagaatgcgtcga

SEQ ID NO: 271588 - DNA, 21 bp, Artificial sequence
  SiRNA target sequence
ccaaattcagaatgcgtcgag

SEQ ID NO: 271589 - DNA, 21 bp, Artificial sequence
  SiRNA target sequence
caaattcagaatgcgtcgagc

SEQ ID NO: 271590 - DNA, 21 bp, Artificial sequence
  SiRNA target sequence
aaattcagaatgcgtcgagcg

SEQ ID NO: 271591 - DNA, 21 bp, Artificial sequence
  SiRNA target sequence
aattcagaatgcgtcgagcgc

SEQ ID NO: 271592 - DNA, 21 bp, Artificial sequence
  SiRNA target sequence
attcagaatgcgtcgagcgca

SEQ ID NO: 271593 - DNA, 21 bp, Artificial sequence
  SiRNA target sequence
ttcagaatgcgtcgagcgcat

SEQ ID NO: 271594 - DNA, 21 bp, Artificial sequence
  SiRNA target sequence
tcagaatgcgtcgagcgcatg

SEQ ID NO: 271595 - DNA, 21 bp, Artificial sequence
  SiRNA target sequence
cagaatgcgtcgagcgcatga

SEQ ID NO: 271596 - DNA, 21 bp, Artificial sequence
  SiRNA target sequence
agaatgcgtcgagcgcatgat

SEQ ID NO: 271597 - DNA, 21 bp, Artificial sequence
  SiRNA target sequence
gaatgcgtcgagcgcatgatc

SEQ ID NO: 271598 - DNA, 21 bp, Artificial sequence
  SiRNA target sequence
aatgcgtcgagcgcatgatca

SEQ ID NO: 271599 - DNA, 21 bp, Artificial sequence
  SiRNA target sequence
atgcgtcgagcgcatgatcaa

SEQ ID NO: 271600 - DNA, 21 bp, Artificial sequence
  SiRNA target sequence
tgcgtcgagcgcatgatcaag

SEQ ID NO: 271601 - DNA, 21 bp, Artificial sequence
  SiRNA target sequence
gcgtcgagcgcatgatcaaga

SEQ ID NO: 271602 - DNA, 21 bp, Artificial sequence
  SiRNA target sequence
cgtcgagcgcatgatcaagag

SEQ ID NO: 271603 - DNA, 21 bp, Artificial sequence
  SiRNA target sequence
gtcgagcgcatgatcaagagt

SEQ ID NO: 271604 - DNA, 21 bp, Artificial sequence
  SiRNA target sequence
tcgagcgcatgatcaagagta

SEQ ID NO: 271605 - DNA, 21 bp, Artificial sequence
  SiRNA target sequence
cgagcgcatgatcaagagtat

SEQ ID NO: 271606 - DNA, 21 bp, Artificial sequence
  SiRNA target sequence
gagcgcatgatcaagagtata

SEQ ID NO: 271607 - DNA, 21 bp, Artificial sequence
  SiRNA target sequence
agcgcatgatcaagagtatat

SEQ ID NO: 271608 - DNA, 21 bp, Artificial sequence
  SiRNA target sequence
gcgcatgatcaagagtatatc

SEQ ID NO: 271609 - DNA, 21 bp, Artificial sequence
  SiRNA target sequence
cgcatgatcaagagtatatcg

SEQ ID NO: 271610 - DNA, 21 bp, Artificial sequence
  SiRNA target sequence
gcatgatcaagagtatatcga

SEQ ID NO: 271611 - DNA, 21 bp, Artificial sequence
  SiRNA target sequence
catgatcaagagtatatcgag

SEQ ID NO: 271612 - DNA, 21 bp, Artificial sequence
  SiRNA target sequence
atgatcaagagtatatcgaga

SEQ ID NO: 271613 - DNA, 21 bp, Artificial sequence
  SiRNA target sequence
tgatcaagagtatatcgagag

SEQ ID NO: 271614 - DNA, 21 bp, Artificial sequence
  SiRNA target sequence
gatcaagagtatatcgagaga

SEQ ID NO: 271615 - DNA, 21 bp, Artificial sequence
  SiRNA target sequence
atcaagagtatatcgagagag

SEQ ID NO: 271616 - DNA, 21 bp, Artificial sequence
  SiRNA target sequence
tcaagagtatatcgagagagt

SEQ ID NO: 271617 - DNA, 21 bp, Artificial sequence
  SiRNA target sequence
caagagtatatcgagagagtg

SEQ ID NO: 271618 - DNA, 21 bp, Artificial sequence
  SiRNA target sequence
aagagtatatcgagagagtgt

SEQ ID NO: 271619 - DNA, 21 bp, Artificial sequence
  SiRNA target sequence
agagtatatcgagagagtgtt

SEQ ID NO: 271620 - DNA, 21 bp, Artificial sequence
  SiRNA target sequence
gagtatatcgagagagtgttt

SEQ ID NO: 271621 - DNA, 21 bp, Artificial sequence
  SiRNA target sequence
agtatatcgagagagtgtttg

SEQ ID NO: 271622 - DNA, 21 bp, Artificial sequence
  SiRNA target sequence
gtatatcgagagagtgtttgc

SEQ ID NO: 271623 - DNA, 21 bp, Artificial sequence
  SiRNA target sequence
tatatcgagagagtgtttgcg

SEQ ID NO: 271624 - DNA, 21 bp, Artificial sequence
  SiRNA target sequence
atatcgagagagtgtttgcgg

SEQ ID NO: 271625 - DNA, 21 bp, Artificial sequence
  SiRNA target sequence
tatcgagagagtgtttgcggc

SEQ ID NO: 271626 - DNA, 21 bp, Artificial sequence
  SiRNA target sequence
atcgagagagtgtttgcggca

SEQ ID NO: 271627 - DNA, 21 bp, Artificial sequence
  SiRNA target sequence
tcgagagagtgtttgcggcac

SEQ ID NO: 271628 - DNA, 21 bp, Artificial sequence
  SiRNA target sequence
cgagagagtgtttgcggcaca

SEQ ID NO: 271629 - DNA, 21 bp, Artificial sequence
  SiRNA target sequence
gagagagtgtttgcggcacat

SEQ ID NO: 271630 - DNA, 21 bp, Artificial sequence
  SiRNA target sequence
agagagtgtttgcggcacatt

SEQ ID NO: 271631 - DNA, 21 bp, Artificial sequence
  SiRNA target sequence
gagagtgtttgcggcacattc

SEQ ID NO: 271632 - DNA, 21 bp, Artificial sequence
  SiRNA target sequence
agagtgtttgcggcacattca

SEQ ID NO: 271633 - DNA, 21 bp, Artificial sequence
  SiRNA target sequence
gagtgtttgcggcacattcat

SEQ ID NO: 271634 - DNA, 21 bp, Artificial sequence
  SiRNA target sequence
agtgtttgcggcacattcata

SEQ ID NO: 271635 - DNA, 21 bp, Artificial sequence
  SiRNA target sequence
gtgtttgcggcacattcatat

SEQ ID NO: 271636 - DNA, 21 bp, Artificial sequence
  SiRNA target sequence
tgtttgcggcacattcatatg

SEQ ID NO: 271637 - DNA, 21 bp, Artificial sequence
  SiRNA target sequence
gtttgcggcacattcatatgg

SEQ ID NO: 271638 - DNA, 21 bp, Artificial sequence
  SiRNA target sequence
tttgcggcacattcatatgga

SEQ ID NO: 271639 - DNA, 21 bp, Artificial sequence
  SiRNA target sequence
ttgcggcacattcatatggac

SEQ ID NO: 271640 - DNA, 21 bp, Artificial sequence
  SiRNA target sequence
tgcggcacattcatatggaca

SEQ ID NO: 271641 - DNA, 21 bp, Artificial sequence
  SiRNA target sequence
gcggcacattcatatggacaa

SEQ ID NO: 271642 - DNA, 21 bp, Artificial sequence
  SiRNA target sequence
cggcacattcatatggacaaa

SEQ ID NO: 271643 - DNA, 21 bp, Artificial sequence
  SiRNA target sequence
ggcacattcatatggacaaat

SEQ ID NO: 271644 - DNA, 21 bp, Artificial sequence
  SiRNA target sequence
gcacattcatatggacaaatt

SEQ ID NO: 271645 - DNA, 21 bp, Artificial sequence
  SiRNA target sequence
cacattcatatggacaaattt

SEQ ID NO: 271646 - DNA, 21 bp, Artificial sequence
  SiRNA target sequence
acattcatatggacaaatttt

SEQ ID NO: 271647 - DNA, 21 bp, Artificial sequence
  SiRNA target sequence
cattcatatggacaaattttg

SEQ ID NO: 271648 - DNA, 21 bp, Artificial sequence
  SiRNA target sequence
attcatatggacaaattttgc

SEQ ID NO: 271649 - DNA, 21 bp, Artificial sequence
  SiRNA target sequence
ttcatatggacaaattttgct

SEQ ID NO: 271650 - DNA, 21 bp, Artificial sequence
  SiRNA target sequence
tcatatggacaaattttgcta

SEQ ID NO: 271651 - DNA, 21 bp, Artificial sequence
  SiRNA target sequence
catatggacaaattttgctac

SEQ ID NO: 271652 - DNA, 21 bp, Artificial sequence
  SiRNA target sequence
atatggacaaattttgctaca

SEQ ID NO: 271653 - DNA, 21 bp, Artificial sequence
  SiRNA target sequence
tatggacaaattttgctacat

SEQ ID NO: 271654 - DNA, 21 bp, Artificial sequence
  SiRNA target sequence
atggacaaattttgctacatg

SEQ ID NO: 271655 - DNA, 21 bp, Artificial sequence
  SiRNA target sequence
tggacaaattttgctacatga

SEQ ID NO: 271656 - DNA, 21 bp, Artificial sequence
  SiRNA target sequence
ggacaaattttgctacatgat

SEQ ID NO: 271657 - DNA, 21 bp, Artificial sequence
  SiRNA target sequence
gacaaattttgctacatgatt

SEQ ID NO: 271658 - DNA, 21 bp, Artificial sequence
  SiRNA target sequence
acaaattttgctacatgattt

SEQ ID NO: 271659 - DNA, 21 bp, Artificial sequence
  SiRNA target sequence
caaattttgctacatgattta

SEQ ID NO: 271660 - DNA, 21 bp, Artificial sequence
  SiRNA target sequence
aaattttgctacatgatttaa

SEQ ID NO: 271661 - DNA, 21 bp, Artificial sequence
  SiRNA target sequence
aattttgctacatgatttaac

SEQ ID NO: 271662 - DNA, 21 bp, Artificial sequence
  SiRNA target sequence
attttgctacatgatttaact

SEQ ID NO: 271663 - DNA, 21 bp, Artificial sequence
  SiRNA target sequence
ttttgctacatgatttaactg

SEQ ID NO: 271664 - DNA, 21 bp, Artificial sequence
  SiRNA target sequence
tttgctacatgatttaactgc

SEQ ID NO: 271665 - DNA, 21 bp, Artificial sequence
  SiRNA target sequence
ttgctacatgatttaactgct

SEQ ID NO: 271666 - DNA, 21 bp, Artificial sequence
  SiRNA target sequence
tgctacatgatttaactgctg

SEQ ID NO: 271667 - DNA, 21 bp, Artificial sequence
  SiRNA target sequence
gctacatgatttaactgctga

SEQ ID NO: 271668 - DNA, 21 bp, Artificial sequence
  SiRNA target sequence
ctacatgatttaactgctgaa

SEQ ID NO: 271669 - DNA, 21 bp, Artificial sequence
  SiRNA target sequence
tacatgatttaactgctgaaa

SEQ ID NO: 271670 - DNA, 21 bp, Artificial sequence
  SiRNA target sequence
acatgatttaactgctgaaat

SEQ ID NO: 271671 - DNA, 21 bp, Artificial sequence
  SiRNA target sequence
catgatttaactgctgaaatg

SEQ ID NO: 271672 - DNA, 21 bp, Artificial sequence
  SiRNA target sequence
atgatttaactgctgaaatga

SEQ ID NO: 271673 - DNA, 21 bp, Artificial sequence
  SiRNA target sequence
tgatttaactgctgaaatgaa

SEQ ID NO: 271674 - DNA, 21 bp, Artificial sequence
  SiRNA target sequence
gatttaactgctgaaatgaat

SEQ ID NO: 271675 - DNA, 21 bp, Artificial sequence
  SiRNA target sequence
atttaactgctgaaatgaatc

SEQ ID NO: 271676 - DNA, 21 bp, Artificial sequence
  SiRNA target sequence
tttaactgctgaaatgaatca

SEQ ID NO: 271677 - DNA, 21 bp, Artificial sequence
  SiRNA target sequence
ttaactgctgaaatgaatcaa

SEQ ID NO: 271678 - DNA, 21 bp, Artificial sequence
  SiRNA target sequence
taactgctgaaatgaatcaat

SEQ ID NO: 271679 - DNA, 21 bp, Artificial sequence
  SiRNA target sequence
aactgctgaaatgaatcaatc

SEQ ID NO: 271680 - DNA, 21 bp, Artificial sequence
  SiRNA target sequence
actgctgaaatgaatcaatca

SEQ ID NO: 271681 - DNA, 21 bp, Artificial sequence
  SiRNA target sequence
ctgctgaaatgaatcaatcac

SEQ ID NO: 271682 - DNA, 21 bp, Artificial sequence
  SiRNA target sequence
tgctgaaatgaatcaatcacg

SEQ ID NO: 271683 - DNA, 21 bp, Artificial sequence
  SiRNA target sequence
gctgaaatgaatcaatcacga

SEQ ID NO: 271684 - DNA, 21 bp, Artificial sequence
  SiRNA target sequence
ctgaaatgaatcaatcacgaa

SEQ ID NO: 271685 - DNA, 21 bp, Artificial sequence
  SiRNA target sequence
tgaaatgaatcaatcacgaaa

SEQ ID NO: 271686 - DNA, 21 bp, Artificial sequence
  SiRNA target sequence
gaaatgaatcaatcacgaaat

SEQ ID NO: 271687 - DNA, 21 bp, Artificial sequence
  SiRNA target sequence
aaatgaatcaatcacgaaatt

SEQ ID NO: 271688 - DNA, 21 bp, Artificial sequence
  SiRNA target sequence
aatgaatcaatcacgaaattt

SEQ ID NO: 271689 - DNA, 21 bp, Artificial sequence
  SiRNA target sequence
atgaatcaatcacgaaatttg

SEQ ID NO: 271690 - DNA, 21 bp, Artificial sequence
  SiRNA target sequence
tgaatcaatcacgaaatttga

SEQ ID NO: 271691 - DNA, 21 bp, Artificial sequence
  SiRNA target sequence
gaatcaatcacgaaatttgag

SEQ ID NO: 271692 - DNA, 21 bp, Artificial sequence
  SiRNA target sequence
aatcaatcacgaaatttgagt

SEQ ID NO: 271693 - DNA, 21 bp, Artificial sequence
  SiRNA target sequence
atcaatcacgaaatttgagtg

SEQ ID NO: 271694 - DNA, 21 bp, Artificial sequence
  SiRNA target sequence
tcaatcacgaaatttgagtgt

SEQ ID NO: 271695 - DNA, 21 bp, Artificial sequence
  SiRNA target sequence
caatcacgaaatttgagtgtg

SEQ ID NO: 271696 - DNA, 21 bp, Artificial sequence
  SiRNA target sequence
aatcacgaaatttgagtgtgt

SEQ ID NO: 271697 - DNA, 21 bp, Artificial sequence
  SiRNA target sequence
atcacgaaatttgagtgtgtt

SEQ ID NO: 271698 - DNA, 21 bp, Artificial sequence
  SiRNA target sequence
tcacgaaatttgagtgtgttt

SEQ ID NO: 271699 - DNA, 21 bp, Artificial sequence
  SiRNA target sequence
cacgaaatttgagtgtgttta

SEQ ID NO: 271700 - DNA, 21 bp, Artificial sequence
  SiRNA target sequence
acgaaatttgagtgtgtttac

SEQ ID NO: 271701 - DNA, 21 bp, Artificial sequence
  SiRNA target sequence
cgaaatttgagtgtgtttaca

SEQ ID NO: 271702 - DNA, 21 bp, Artificial sequence
  SiRNA target sequence
gaaatttgagtgtgtttacac

SEQ ID NO: 271703 - DNA, 21 bp, Artificial sequence
  SiRNA target sequence
aaatttgagtgtgtttacacg

SEQ ID NO: 271704 - DNA, 21 bp, Artificial sequence
  SiRNA target sequence
aatttgagtgtgtttacacgt

SEQ ID NO: 271705 - DNA, 21 bp, Artificial sequence
  SiRNA target sequence
atttgagtgtgtttacacgtg

SEQ ID NO: 271706 - DNA, 21 bp, Artificial sequence
  SiRNA target sequence
tttgagtgtgtttacacgtgt

SEQ ID NO: 271707 - DNA, 21 bp, Artificial sequence
  SiRNA target sequence
ttgagtgtgtttacacgtgtg

SEQ ID NO: 271708 - DNA, 21 bp, Artificial sequence
  SiRNA target sequence
tgagtgtgtttacacgtgtgt

SEQ ID NO: 271709 - DNA, 21 bp, Artificial sequence
  SiRNA target sequence
gagtgtgtttacacgtgtgta

SEQ ID NO: 271710 - DNA, 21 bp, Artificial sequence
  SiRNA target sequence
agtgtgtttacacgtgtgtat

SEQ ID NO: 271711 - DNA, 21 bp, Artificial sequence
  SiRNA target sequence
gtgtgtttacacgtgtgtatg

SEQ ID NO: 271712 - DNA, 21 bp, Artificial sequence
  SiRNA target sequence
tgtgtttacacgtgtgtatga

SEQ ID NO: 271713 - DNA, 21 bp, Artificial sequence
  SiRNA target sequence
gtgtttacacgtgtgtatgat

SEQ ID NO: 271714 - DNA, 21 bp, Artificial sequence
  SiRNA target sequence
tgtttacacgtgtgtatgatc

SEQ ID NO: 271715 - DNA, 21 bp, Artificial sequence
  SiRNA target sequence
gtttacacgtgtgtatgatca

SEQ ID NO: 271716 - DNA, 21 bp, Artificial sequence
  SiRNA target sequence
tttacacgtgtgtatgatcaa

SEQ ID NO: 271717 - DNA, 21 bp, Artificial sequence
  SiRNA target sequence
ttacacgtgtgtatgatcaaa

SEQ ID NO: 271718 - DNA, 21 bp, Artificial sequence
  SiRNA target sequence
tacacgtgtgtatgatcaaat

SEQ ID NO: 271719 - DNA, 21 bp, Artificial sequence
  SiRNA target sequence
acacgtgtgtatgatcaaatt

SEQ ID NO: 271720 - DNA, 21 bp, Artificial sequence
  SiRNA target sequence
cacgtgtgtatgatcaaattt

SEQ ID NO: 271721 - DNA, 21 bp, Artificial sequence
  SiRNA target sequence
acgtgtgtatgatcaaatttc

SEQ ID NO: 271722 - DNA, 21 bp, Artificial sequence
  SiRNA target sequence
cgtgtgtatgatcaaatttca

SEQ ID NO: 271723 - DNA, 21 bp, Artificial sequence
  SiRNA target sequence
gtgtgtatgatcaaatttcaa

SEQ ID NO: 271724 - DNA, 21 bp, Artificial sequence
  SiRNA target sequence
tgtgtatgatcaaatttcaaa

SEQ ID NO: 271725 - DNA, 21 bp, Artificial sequence
  SiRNA target sequence
gtgtatgatcaaatttcaaaa

SEQ ID NO: 271726 - DNA, 21 bp, Artificial sequence
  SiRNA target sequence
tgtatgatcaaatttcaaaat

SEQ ID NO: 271727 - DNA, 21 bp, Artificial sequence
  SiRNA target sequence
gtatgatcaaatttcaaaatt

SEQ ID NO: 271728 - DNA, 21 bp, Artificial sequence
  SiRNA target sequence
tatgatcaaatttcaaaattg

SEQ ID NO: 271729 - DNA, 21 bp, Artificial sequence
  SiRNA target sequence
atgatcaaatttcaaaattga

SEQ ID NO: 271730 - DNA, 21 bp, Artificial sequence
  SiRNA target sequence
tgatcaaatttcaaaattgaa

SEQ ID NO: 271731 - DNA, 21 bp, Artificial sequence
  SiRNA target sequence
gatcaaatttcaaaattgaag

SEQ ID NO: 271732 - DNA, 21 bp, Artificial sequence
  SiRNA target sequence
atcaaatttcaaaattgaaga

SEQ ID NO: 271733 - DNA, 21 bp, Artificial sequence
  SiRNA target sequence
tcaaatttcaaaattgaagac

SEQ ID NO: 271734 - DNA, 21 bp, Artificial sequence
  SiRNA target sequence
caaatttcaaaattgaagacc

SEQ ID NO: 271735 - DNA, 21 bp, Artificial sequence
  SiRNA target sequence
aaatttcaaaattgaagaccg

SEQ ID NO: 271736 - DNA, 21 bp, Artificial sequence
  SiRNA target sequence
aatttcaaaattgaagaccga

SEQ ID NO: 271737 - DNA, 21 bp, Artificial sequence
  SiRNA target sequence
atttcaaaattgaagaccgat

SEQ ID NO: 271738 - DNA, 21 bp, Artificial sequence
  SiRNA target sequence
tttcaaaattgaagaccgatc

SEQ ID NO: 271739 - DNA, 21 bp, Artificial sequence
  SiRNA target sequence
ttcaaaattgaagaccgatct

SEQ ID NO: 271740 - DNA, 21 bp, Artificial sequence
  SiRNA target sequence
tcaaaattgaagaccgatctt

SEQ ID NO: 271741 - DNA, 21 bp, Artificial sequence
  SiRNA target sequence
caaaattgaagaccgatctta

SEQ ID NO: 271742 - DNA, 21 bp, Artificial sequence
  SiRNA target sequence
aaaattgaagaccgatcttat

SEQ ID NO: 271743 - DNA, 21 bp, Artificial sequence
  SiRNA target sequence
aaattgaagaccgatcttatg

SEQ ID NO: 271744 - DNA, 21 bp, Artificial sequence
  SiRNA target sequence
aattgaagaccgatcttatgg

SEQ ID NO: 271745 - DNA, 21 bp, Artificial sequence
  SiRNA target sequence
attgaagaccgatcttatgga

SEQ ID NO: 271746 - DNA, 21 bp, Artificial sequence
  SiRNA target sequence
ttgaagaccgatcttatggaa

SEQ ID NO: 271747 - DNA, 21 bp, Artificial sequence
  SiRNA target sequence
tgaagaccgatcttatggaaa

SEQ ID NO: 271748 - DNA, 21 bp, Artificial sequence
  SiRNA target sequence
gaagaccgatcttatggaaat

SEQ ID NO: 271749 - DNA, 21 bp, Artificial sequence
  SiRNA target sequence
aagaccgatcttatggaaatg

SEQ ID NO: 271750 - DNA, 21 bp, Artificial sequence
  SiRNA target sequence
agaccgatcttatggaaatgg

SEQ ID NO: 271751 - DNA, 21 bp, Artificial sequence
  SiRNA target sequence
gaccgatcttatggaaatggg

SEQ ID NO: 271752 - DNA, 21 bp, Artificial sequence
  SiRNA target sequence
accgatcttatggaaatggga

SEQ ID NO: 271753 - DNA, 21 bp, Artificial sequence
  SiRNA target sequence
ccgatcttatggaaatgggat

SEQ ID NO: 271754 - DNA, 21 bp, Artificial sequence
  SiRNA target sequence
cgatcttatggaaatgggatc

SEQ ID NO: 271755 - DNA, 21 bp, Artificial sequence
  SiRNA target sequence
gatcttatggaaatgggatcg

SEQ ID NO: 271756 - DNA, 21 bp, Artificial sequence
  SiRNA target sequence
atcttatggaaatgggatcga

SEQ ID NO: 271757 - DNA, 21 bp, Artificial sequence
  SiRNA target sequence
tcttatggaaatgggatcgaa

SEQ ID NO: 271758 - DNA, 21 bp, Artificial sequence
  SiRNA target sequence
cttatggaaatgggatcgaat

SEQ ID NO: 271759 - DNA, 21 bp, Artificial sequence
  SiRNA target sequence
ttatggaaatgggatcgaatc

SEQ ID NO: 271760 - DNA, 21 bp, Artificial sequence
  SiRNA target sequence
tatggaaatgggatcgaatcc

SEQ ID NO: 271761 - DNA, 21 bp, Artificial sequence
  SiRNA target sequence
atggaaatgggatcgaatcca

SEQ ID NO: 271762 - DNA, 21 bp, Artificial sequence
  SiRNA target sequence
tggaaatgggatcgaatccat

SEQ ID NO: 271763 - DNA, 21 bp, Artificial sequence
  SiRNA target sequence
ggaaatgggatcgaatccata

SEQ ID NO: 271764 - DNA, 21 bp, Artificial sequence
  SiRNA target sequence
gaaatgggatcgaatccatat

SEQ ID NO: 271765 - DNA, 21 bp, Artificial sequence
  SiRNA target sequence
aaatgggatcgaatccatata

SEQ ID NO: 271766 - DNA, 21 bp, Artificial sequence
  SiRNA target sequence
aatgggatcgaatccatatat

SEQ ID NO: 271767 - DNA, 21 bp, Artificial sequence
  SiRNA target sequence
atgggatcgaatccatatata

SEQ ID NO: 271768 - DNA, 21 bp, Artificial sequence
  SiRNA target sequence
tgggatcgaatccatatataa

SEQ ID NO: 271769 - DNA, 21 bp, Artificial sequence
  SiRNA target sequence
gggatcgaatccatatataag

SEQ ID NO: 271770 - DNA, 21 bp, Artificial sequence
  SiRNA target sequence
ggatcgaatccatatataagg

SEQ ID NO: 271771 - DNA, 21 bp, Artificial sequence
  SiRNA target sequence
gatcgaatccatatataaggc

SEQ ID NO: 271772 - DNA, 21 bp, Artificial sequence
  SiRNA target sequence
atcgaatccatatataaggcg

SEQ ID NO: 271773 - DNA, 21 bp, Artificial sequence
  SiRNA target sequence
tcgaatccatatataaggcgt

SEQ ID NO: 271774 - DNA, 21 bp, Artificial sequence
  SiRNA target sequence
cgaatccatatataaggcgtg

SEQ ID NO: 271775 - DNA, 21 bp, Artificial sequence
  SiRNA target sequence
gaatccatatataaggcgtga

SEQ ID NO: 271776 - DNA, 21 bp, Artificial sequence
  SiRNA target sequence
aatccatatataaggcgtgaa

SEQ ID NO: 271777 - DNA, 21 bp, Artificial sequence
  SiRNA target sequence
atccatatataaggcgtgaat

SEQ ID NO: 271778 - DNA, 21 bp, Artificial sequence
  SiRNA target sequence
tccatatataaggcgtgaatg

SEQ ID NO: 271779 - DNA, 21 bp, Artificial sequence
  SiRNA target sequence
ccatatataaggcgtgaatgt

SEQ ID NO: 271780 - DNA, 21 bp, Artificial sequence
  SiRNA target sequence
catatataaggcgtgaatgtt

SEQ ID NO: 271781 - DNA, 21 bp, Artificial sequence
  SiRNA target sequence
atatataaggcgtgaatgttt

SEQ ID NO: 271782 - DNA, 21 bp, Artificial sequence
  SiRNA target sequence
tatataaggcgtgaatgtttt

SEQ ID NO: 271783 - DNA, 21 bp, Artificial sequence
  SiRNA target sequence
atataaggcgtgaatgtttta

SEQ ID NO: 271784 - DNA, 21 bp, Artificial sequence
  SiRNA target sequence
tataaggcgtgaatgttttac

SEQ ID NO: 271785 - DNA, 21 bp, Artificial sequence
  SiRNA target sequence
ataaggcgtgaatgttttacg

SEQ ID NO: 271786 - DNA, 21 bp, Artificial sequence
  SiRNA target sequence
taaggcgtgaatgttttacga

SEQ ID NO: 271787 - DNA, 21 bp, Artificial sequence
  SiRNA target sequence
aaggcgtgaatgttttacgat

SEQ ID NO: 271788 - DNA, 21 bp, Artificial sequence
  SiRNA target sequence
aggcgtgaatgttttacgata

SEQ ID NO: 271789 - DNA, 21 bp, Artificial sequence
  SiRNA target sequence
ggcgtgaatgttttacgatat

SEQ ID NO: 271790 - DNA, 21 bp, Artificial sequence
  SiRNA target sequence
gcgtgaatgttttacgatatg

SEQ ID NO: 271791 - DNA, 21 bp, Artificial sequence
  SiRNA target sequence
cgtgaatgttttacgatatgc

SEQ ID NO: 271792 - DNA, 21 bp, Artificial sequence
  SiRNA target sequence
gtgaatgttttacgatatgca

SEQ ID NO: 271793 - DNA, 21 bp, Artificial sequence
  SiRNA target sequence
tgaatgttttacgatatgcat

SEQ ID NO: 271794 - DNA, 21 bp, Artificial sequence
  SiRNA target sequence
gaatgttttacgatatgcatg

SEQ ID NO: 271795 - DNA, 21 bp, Artificial sequence
  SiRNA target sequence
aatgttttacgatatgcatgt

SEQ ID NO: 271796 - DNA, 21 bp, Artificial sequence
  SiRNA target sequence
atgttttacgatatgcatgtg

SEQ ID NO: 271797 - DNA, 21 bp, Artificial sequence
  SiRNA target sequence
tgttttacgatatgcatgtgt

SEQ ID NO: 271798 - DNA, 21 bp, Artificial sequence
  SiRNA target sequence
gttttacgatatgcatgtgtg

SEQ ID NO: 271799 - DNA, 21 bp, Artificial sequence
  SiRNA target sequence
ttttacgatatgcatgtgtgg

SEQ ID NO: 271800 - DNA, 21 bp, Artificial sequence
  SiRNA target sequence
tttacgatatgcatgtgtggt

SEQ ID NO: 271801 - DNA, 21 bp, Artificial sequence
  SiRNA target sequence
ttacgatatgcatgtgtggtg

SEQ ID NO: 271802 - DNA, 21 bp, Artificial sequence
  SiRNA target sequence
tacgatatgcatgtgtggtgc

SEQ ID NO: 271803 - DNA, 21 bp, Artificial sequence
  SiRNA target sequence
acgatatgcatgtgtggtgca

SEQ ID NO: 271804 - DNA, 21 bp, Artificial sequence
  SiRNA target sequence
cgatatgcatgtgtggtgcat

SEQ ID NO: 271805 - DNA, 21 bp, Artificial sequence
  SiRNA target sequence
gatatgcatgtgtggtgcatc

SEQ ID NO: 271806 - DNA, 21 bp, Artificial sequence
  SiRNA target sequence
atatgcatgtgtggtgcatct

SEQ ID NO: 271807 - DNA, 21 bp, Artificial sequence
  SiRNA target sequence
tatgcatgtgtggtgcatctg

SEQ ID NO: 271808 - DNA, 21 bp, Artificial sequence
  SiRNA target sequence
atgcatgtgtggtgcatctgg

SEQ ID NO: 271809 - DNA, 21 bp, Artificial sequence
  SiRNA target sequence
tgcatgtgtggtgcatctgga

SEQ ID NO: 271810 - DNA, 21 bp, Artificial sequence
  SiRNA target sequence
gcatgtgtggtgcatctggaa

SEQ ID NO: 271811 - DNA, 21 bp, Artificial sequence
  SiRNA target sequence
catgtgtggtgcatctggaat

SEQ ID NO: 271812 - DNA, 21 bp, Artificial sequence
  SiRNA target sequence
atgtgtggtgcatctggaatt

SEQ ID NO: 271813 - DNA, 21 bp, Artificial sequence
  SiRNA target sequence
tgtgtggtgcatctggaattg

SEQ ID NO: 271814 - DNA, 21 bp, Artificial sequence
  SiRNA target sequence
gtgtggtgcatctggaattgg

SEQ ID NO: 271815 - DNA, 21 bp, Artificial sequence
  SiRNA target sequence
tgtggtgcatctggaattgga

SEQ ID NO: 271816 - DNA, 21 bp, Artificial sequence
  SiRNA target sequence
gtggtgcatctggaattggaa

SEQ ID NO: 271817 - DNA, 21 bp, Artificial sequence
  SiRNA target sequence
tggtgcatctggaattggaaa

SEQ ID NO: 271818 - DNA, 21 bp, Artificial sequence
  SiRNA target sequence
ggtgcatctggaattggaaaa

SEQ ID NO: 271819 - DNA, 21 bp, Artificial sequence
  SiRNA target sequence
gtgcatctggaattggaaaat

SEQ ID NO: 271820 - DNA, 21 bp, Artificial sequence
  SiRNA target sequence
tgcatctggaattggaaaatc

SEQ ID NO: 271821 - DNA, 21 bp, Artificial sequence
  SiRNA target sequence
gcatctggaattggaaaatca

SEQ ID NO: 271822 - DNA, 21 bp, Artificial sequence
  SiRNA target sequence
catctggaattggaaaatcat

SEQ ID NO: 271823 - DNA, 21 bp, Artificial sequence
  SiRNA target sequence
atctggaattggaaaatcata

SEQ ID NO: 271824 - DNA, 21 bp, Artificial sequence
  SiRNA target sequence
tctggaattggaaaatcatat

SEQ ID NO: 271825 - DNA, 21 bp, Artificial sequence
  SiRNA target sequence
ctggaattggaaaatcatatt

SEQ ID NO: 271826 - DNA, 21 bp, Artificial sequence
  SiRNA target sequence
tggaattggaaaatcatattt

SEQ ID NO: 271827 - DNA, 21 bp, Artificial sequence
  SiRNA target sequence
ggaattggaaaatcatatttg

SEQ ID NO: 271828 - DNA, 21 bp, Artificial sequence
  SiRNA target sequence
gaattggaaaatcatatttga

SEQ ID NO: 271829 - DNA, 21 bp, Artificial sequence
  SiRNA target sequence
aattggaaaatcatatttgac

SEQ ID NO: 271830 - DNA, 21 bp, Artificial sequence
  SiRNA target sequence
attggaaaatcatatttgacc

SEQ ID NO: 271831 - DNA, 21 bp, Artificial sequence
  SiRNA target sequence
ttggaaaatcatatttgaccg

SEQ ID NO: 271832 - DNA, 21 bp, Artificial sequence
  SiRNA target sequence
tggaaaatcatatttgaccga

SEQ ID NO: 271833 - DNA, 21 bp, Artificial sequence
  SiRNA target sequence
ggaaaatcatatttgaccgat

SEQ ID NO: 271834 - DNA, 21 bp, Artificial sequence
  SiRNA target sequence
gaaaatcatatttgaccgatt

SEQ ID NO: 271835 - DNA, 21 bp, Artificial sequence
  SiRNA target sequence
aaaatcatatttgaccgattc

SEQ ID NO: 271836 - DNA, 21 bp, Artificial sequence
  SiRNA target sequence
aaatcatatttgaccgattct

SEQ ID NO: 271837 - DNA, 21 bp, Artificial sequence
  SiRNA target sequence
aatcatatttgaccgattctt

SEQ ID NO: 271838 - DNA, 21 bp, Artificial sequence
  SiRNA target sequence
atcatatttgaccgattcttt

SEQ ID NO: 271839 - DNA, 21 bp, Artificial sequence
  SiRNA target sequence
tcatatttgaccgattcttta

SEQ ID NO: 271840 - DNA, 21 bp, Artificial sequence
  SiRNA target sequence
catatttgaccgattctttat

SEQ ID NO: 271841 - DNA, 21 bp, Artificial sequence
  SiRNA target sequence
atatttgaccgattctttatg

SEQ ID NO: 271842 - DNA, 21 bp, Artificial sequence
  SiRNA target sequence
tatttgaccgattctttatgc

SEQ ID NO: 271843 - DNA, 21 bp, Artificial sequence
  SiRNA target sequence
atttgaccgattctttatgca

SEQ ID NO: 271844 - DNA, 21 bp, Artificial sequence
  SiRNA target sequence
tttgaccgattctttatgcag

SEQ ID NO: 271845 - DNA, 21 bp, Artificial sequence
  SiRNA target sequence
ttgaccgattctttatgcagc

SEQ ID NO: 271846 - DNA, 21 bp, Artificial sequence
  SiRNA target sequence
tgaccgattctttatgcagcg

SEQ ID NO: 271847 - DNA, 21 bp, Artificial sequence
  SiRNA target sequence
gaccgattctttatgcagcga

SEQ ID NO: 271848 - DNA, 21 bp, Artificial sequence
  SiRNA target sequence
accgattctttatgcagcgag

SEQ ID NO: 271849 - DNA, 21 bp, Artificial sequence
  SiRNA target sequence
ccgattctttatgcagcgagc

SEQ ID NO: 271850 - DNA, 21 bp, Artificial sequence
  SiRNA target sequence
cgattctttatgcagcgagct

SEQ ID NO: 271851 - DNA, 21 bp, Artificial sequence
  SiRNA target sequence
gattctttatgcagcgagctc

SEQ ID NO: 271852 - DNA, 21 bp, Artificial sequence
  SiRNA target sequence
attctttatgcagcgagctct

SEQ ID NO: 271853 - DNA, 21 bp, Artificial sequence
  SiRNA target sequence
ttctttatgcagcgagctctt

SEQ ID NO: 271854 - DNA, 21 bp, Artificial sequence
  SiRNA target sequence
tctttatgcagcgagctctta

SEQ ID NO: 271855 - DNA, 21 bp, Artificial sequence
  SiRNA target sequence
ctttatgcagcgagctcttac

SEQ ID NO: 271856 - DNA, 21 bp, Artificial sequence
  SiRNA target sequence
tttatgcagcgagctcttacg

SEQ ID NO: 271857 - DNA, 21 bp, Artificial sequence
  SiRNA target sequence
ttatgcagcgagctcttacgt

SEQ ID NO: 271858 - DNA, 21 bp, Artificial sequence
  SiRNA target sequence
tatgcagcgagctcttacgtg

SEQ ID NO: 271859 - DNA, 21 bp, Artificial sequence
  SiRNA target sequence
atgcagcgagctcttacgtgc

SEQ ID NO: 271860 - DNA, 21 bp, Artificial sequence
  SiRNA target sequence
tgcagcgagctcttacgtgcg

SEQ ID NO: 271861 - DNA, 21 bp, Artificial sequence
  SiRNA target sequence
gcagcgagctcttacgtgcga

SEQ ID NO: 271862 - DNA, 21 bp, Artificial sequence
  SiRNA target sequence
cagcgagctcttacgtgcgag

SEQ ID NO: 271863 - DNA, 21 bp, Artificial sequence
  SiRNA target sequence
agcgagctcttacgtgcgagt

SEQ ID NO: 271864 - DNA, 21 bp, Artificial sequence
  SiRNA target sequence
gcgagctcttacgtgcgagtc

SEQ ID NO: 271865 - DNA, 21 bp, Artificial sequence
  SiRNA target sequence
cgagctcttacgtgcgagtcg

SEQ ID NO: 271866 - DNA, 21 bp, Artificial sequence
  SiRNA target sequence
gagctcttacgtgcgagtcgt

SEQ ID NO: 271867 - DNA, 21 bp, Artificial sequence
  SiRNA target sequence
agctcttacgtgcgagtcgta

SEQ ID NO: 271868 - DNA, 21 bp, Artificial sequence
  SiRNA target sequence
gctcttacgtgcgagtcgtac

SEQ ID NO: 271869 - DNA, 21 bp, Artificial sequence
  SiRNA target sequence
ctcttacgtgcgagtcgtact

SEQ ID NO: 271870 - DNA, 21 bp, Artificial sequence
  SiRNA target sequence
tcttacgtgcgagtcgtactc

SEQ ID NO: 271871 - DNA, 21 bp, Artificial sequence
  SiRNA target sequence
cttacgtgcgagtcgtactcc

SEQ ID NO: 271872 - DNA, 21 bp, Artificial sequence
  SiRNA target sequence
ttacgtgcgagtcgtactcct

SEQ ID NO: 271873 - DNA, 21 bp, Artificial sequence
  SiRNA target sequence
tacgtgcgagtcgtactcctg

SEQ ID NO: 271874 - DNA, 21 bp, Artificial sequence
  SiRNA target sequence
acgtgcgagtcgtactcctgt

SEQ ID NO: 271875 - DNA, 21 bp, Artificial sequence
  SiRNA target sequence
cgtgcgagtcgtactcctgtg

SEQ ID NO: 271876 - DNA, 21 bp, Artificial sequence
  SiRNA target sequence
gtgcgagtcgtactcctgtga

SEQ ID NO: 271877 - DNA, 21 bp, Artificial sequence
  SiRNA target sequence
tgcgagtcgtactcctgtgac

SEQ ID NO: 271878 - DNA, 21 bp, Artificial sequence
  SiRNA target sequence
gcgagtcgtactcctgtgaca

SEQ ID NO: 271879 - DNA, 21 bp, Artificial sequence
  SiRNA target sequence
cgagtcgtactcctgtgacaa

SEQ ID NO: 271880 - DNA, 21 bp, Artificial sequence
  SiRNA target sequence
gagtcgtactcctgtgacaac

SEQ ID NO: 271881 - DNA, 21 bp, Artificial sequence
  SiRNA target sequence
agtcgtactcctgtgacaaca

SEQ ID NO: 271882 - DNA, 21 bp, Artificial sequence
  SiRNA target sequence
gtcgtactcctgtgacaacag

SEQ ID NO: 271883 - DNA, 21 bp, Artificial sequence
  SiRNA target sequence
tcgtactcctgtgacaacagg

SEQ ID NO: 271884 - DNA, 21 bp, Artificial sequence
  SiRNA target sequence
cgtactcctgtgacaacaggc

SEQ ID NO: 271885 - DNA, 21 bp, Artificial sequence
  SiRNA target sequence
gtactcctgtgacaacaggca

SEQ ID NO: 271886 - DNA, 21 bp, Artificial sequence
  SiRNA target sequence
tactcctgtgacaacaggcat

SEQ ID NO: 271887 - DNA, 21 bp, Artificial sequence
  SiRNA target sequence
actcctgtgacaacaggcata

SEQ ID NO: 271888 - DNA, 21 bp, Artificial sequence
  SiRNA target sequence
ctcctgtgacaacaggcataa

SEQ ID NO: 271889 - DNA, 21 bp, Artificial sequence
  SiRNA target sequence
tcctgtgacaacaggcataaa

SEQ ID NO: 271890 - DNA, 21 bp, Artificial sequence
  SiRNA target sequence
cctgtgacaacaggcataaaa

SEQ ID NO: 271891 - DNA, 21 bp, Artificial sequence
  SiRNA target sequence
ctgtgacaacaggcataaaat

SEQ ID NO: 271892 - DNA, 21 bp, Artificial sequence
  SiRNA target sequence
tgtgacaacaggcataaaatg

SEQ ID NO: 271893 - DNA, 21 bp, Artificial sequence
  SiRNA target sequence
gtgacaacaggcataaaatgt

SEQ ID NO: 271894 - DNA, 21 bp, Artificial sequence
  SiRNA target sequence
tgacaacaggcataaaatgtg

SEQ ID NO: 271895 - DNA, 21 bp, Artificial sequence
  SiRNA target sequence
gacaacaggcataaaatgtgt

SEQ ID NO: 271896 - DNA, 21 bp, Artificial sequence
  SiRNA target sequence
acaacaggcataaaatgtgtt

SEQ ID NO: 271897 - DNA, 21 bp, Artificial sequence
  SiRNA target sequence
caacaggcataaaatgtgttg

SEQ ID NO: 271898 - DNA, 21 bp, Artificial sequence
  SiRNA target sequence
aacaggcataaaatgtgttgt

SEQ ID NO: 271899 - DNA, 21 bp, Artificial sequence
  SiRNA target sequence
acaggcataaaatgtgttgtt

SEQ ID NO: 271900 - DNA, 21 bp, Artificial sequence
  SiRNA target sequence
caggcataaaatgtgttgtta

SEQ ID NO: 271901 - DNA, 21 bp, Artificial sequence
  SiRNA target sequence
aggcataaaatgtgttgttaa

SEQ ID NO: 271902 - DNA, 21 bp, Artificial sequence
  SiRNA target sequence
ggcataaaatgtgttgttaat

SEQ ID NO: 271903 - DNA, 21 bp, Artificial sequence
  SiRNA target sequence
gcataaaatgtgttgttaatc

SEQ ID NO: 271904 - DNA, 21 bp, Artificial sequence
  SiRNA target sequence
cataaaatgtgttgttaatcc

SEQ ID NO: 271905 - DNA, 21 bp, Artificial sequence
  SiRNA target sequence
ataaaatgtgttgttaatcca

SEQ ID NO: 271906 - DNA, 21 bp, Artificial sequence
  SiRNA target sequence
taaaatgtgttgttaatccat

SEQ ID NO: 271907 - DNA, 21 bp, Artificial sequence
  SiRNA target sequence
aaaatgtgttgttaatccatt

SEQ ID NO: 271908 - DNA, 21 bp, Artificial sequence
  SiRNA target sequence
aaatgtgttgttaatccatta

SEQ ID NO: 271909 - DNA, 21 bp, Artificial sequence
  SiRNA target sequence
aatgtgttgttaatccattat

SEQ ID NO: 271910 - DNA, 21 bp, Artificial sequence
  SiRNA target sequence
atgtgttgttaatccattatc

SEQ ID NO: 271911 - DNA, 21 bp, Artificial sequence
  SiRNA target sequence
tgtgttgttaatccattatct

SEQ ID NO: 271912 - DNA, 21 bp, Artificial sequence
  SiRNA target sequence
gtgttgttaatccattatctg

SEQ ID NO: 271913 - DNA, 21 bp, Artificial sequence
  SiRNA target sequence
tgttgttaatccattatctga

SEQ ID NO: 271914 - DNA, 21 bp, Artificial sequence
  SiRNA target sequence
gttgttaatccattatctgat

SEQ ID NO: 271915 - DNA, 21 bp, Artificial sequence
  SiRNA target sequence
ttgttaatccattatctgatt

SEQ ID NO: 271916 - DNA, 21 bp, Artificial sequence
  SiRNA target sequence
tgttaatccattatctgatta

SEQ ID NO: 271917 - DNA, 21 bp, Artificial sequence
  SiRNA target sequence
gttaatccattatctgattat

SEQ ID NO: 271918 - DNA, 21 bp, Artificial sequence
  SiRNA target sequence
ttaatccattatctgattatt

SEQ ID NO: 271919 - DNA, 21 bp, Artificial sequence
  SiRNA target sequence
taatccattatctgattattg

SEQ ID NO: 271920 - DNA, 21 bp, Artificial sequence
  SiRNA target sequence
aatccattatctgattattgg

SEQ ID NO: 271921 - DNA, 21 bp, Artificial sequence
  SiRNA target sequence
atccattatctgattattggg

SEQ ID NO: 271922 - DNA, 21 bp, Artificial sequence
  SiRNA target sequence
tccattatctgattattggga

SEQ ID NO: 271923 - DNA, 21 bp, Artificial sequence
  SiRNA target sequence
ccattatctgattattgggat

SEQ ID NO: 271924 - DNA, 21 bp, Artificial sequence
  SiRNA target sequence
cattatctgattattgggatc

SEQ ID NO: 271925 - DNA, 21 bp, Artificial sequence
  SiRNA target sequence
attatctgattattgggatca

SEQ ID NO: 271926 - DNA, 21 bp, Artificial sequence
  SiRNA target sequence
ttatctgattattgggatcaa

SEQ ID NO: 271927 - DNA, 21 bp, Artificial sequence
  SiRNA target sequence
tatctgattattgggatcaat

SEQ ID NO: 271928 - DNA, 21 bp, Artificial sequence
  SiRNA target sequence
atctgattattgggatcaatg

SEQ ID NO: 271929 - DNA, 21 bp, Artificial sequence
  SiRNA target sequence
tctgattattgggatcaatgt

SEQ ID NO: 271930 - DNA, 21 bp, Artificial sequence
  SiRNA target sequence
ctgattattgggatcaatgtg

SEQ ID NO: 271931 - DNA, 21 bp, Artificial sequence
  SiRNA target sequence
tgattattgggatcaatgtga

SEQ ID NO: 271932 - DNA, 21 bp, Artificial sequence
  SiRNA target sequence
gattattgggatcaatgtgat

SEQ ID NO: 271933 - DNA, 21 bp, Artificial sequence
  SiRNA target sequence
attattgggatcaatgtgatt

SEQ ID NO: 271934 - DNA, 21 bp, Artificial sequence
  SiRNA target sequence
ttattgggatcaatgtgattt

SEQ ID NO: 271935 - DNA, 21 bp, Artificial sequence
  SiRNA target sequence
tattgggatcaatgtgatttt

SEQ ID NO: 271936 - DNA, 21 bp, Artificial sequence
  SiRNA target sequence
attgggatcaatgtgattttc

SEQ ID NO: 271937 - DNA, 21 bp, Artificial sequence
  SiRNA target sequence
ttgggatcaatgtgattttca

SEQ ID NO: 271938 - DNA, 21 bp, Artificial sequence
  SiRNA target sequence
tgggatcaatgtgattttcag

SEQ ID NO: 271939 - DNA, 21 bp, Artificial sequence
  SiRNA target sequence
gggatcaatgtgattttcagc

SEQ ID NO: 271940 - DNA, 21 bp, Artificial sequence
  SiRNA target sequence
ggatcaatgtgattttcagcc

SEQ ID NO: 271941 - DNA, 21 bp, Artificial sequence
  SiRNA target sequence
gatcaatgtgattttcagcct

SEQ ID NO: 271942 - DNA, 21 bp, Artificial sequence
  SiRNA target sequence
atcaatgtgattttcagcctg

SEQ ID NO: 271943 - DNA, 21 bp, Artificial sequence
  SiRNA target sequence
tcaatgtgattttcagcctgt

SEQ ID NO: 271944 - DNA, 21 bp, Artificial sequence
  SiRNA target sequence
caatgtgattttcagcctgtt

SEQ ID NO: 271945 - DNA, 21 bp, Artificial sequence
  SiRNA target sequence
aatgtgattttcagcctgttt

SEQ ID NO: 271946 - DNA, 21 bp, Artificial sequence
  SiRNA target sequence
atgtgattttcagcctgtttt

SEQ ID NO: 271947 - DNA, 21 bp, Artificial sequence
  SiRNA target sequence
tgtgattttcagcctgttttg

SEQ ID NO: 271948 - DNA, 21 bp, Artificial sequence
  SiRNA target sequence
gtgattttcagcctgttttgt

SEQ ID NO: 271949 - DNA, 21 bp, Artificial sequence
  SiRNA target sequence
tgattttcagcctgttttgtg

SEQ ID NO: 271950 - DNA, 21 bp, Artificial sequence
  SiRNA target sequence
gattttcagcctgttttgtgc

SEQ ID NO: 271951 - DNA, 21 bp, Artificial sequence
  SiRNA target sequence
attttcagcctgttttgtgcg

SEQ ID NO: 271952 - DNA, 21 bp, Artificial sequence
  SiRNA target sequence
ttttcagcctgttttgtgcgt

SEQ ID NO: 271953 - DNA, 21 bp, Artificial sequence
  SiRNA target sequence
tttcagcctgttttgtgcgtt

SEQ ID NO: 271954 - DNA, 21 bp, Artificial sequence
  SiRNA target sequence
ttcagcctgttttgtgcgttg

SEQ ID NO: 271955 - DNA, 21 bp, Artificial sequence
  SiRNA target sequence
tcagcctgttttgtgcgttga

SEQ ID NO: 271956 - DNA, 21 bp, Artificial sequence
  SiRNA target sequence
cagcctgttttgtgcgttgac

SEQ ID NO: 271957 - DNA, 21 bp, Artificial sequence
  SiRNA target sequence
agcctgttttgtgcgttgacg

SEQ ID NO: 271958 - DNA, 21 bp, Artificial sequence
  SiRNA target sequence
gcctgttttgtgcgttgacga

SEQ ID NO: 271959 - DNA, 21 bp, Artificial sequence
  SiRNA target sequence
cctgttttgtgcgttgacgat

SEQ ID NO: 271960 - DNA, 21 bp, Artificial sequence
  SiRNA target sequence
ctgttttgtgcgttgacgata

SEQ ID NO: 271961 - DNA, 21 bp, Artificial sequence
  SiRNA target sequence
tgttttgtgcgttgacgatat

SEQ ID NO: 271962 - DNA, 21 bp, Artificial sequence
  SiRNA target sequence
gttttgtgcgttgacgatatg

SEQ ID NO: 271963 - DNA, 21 bp, Artificial sequence
  SiRNA target sequence
ttttgtgcgttgacgatatgt

SEQ ID NO: 271964 - DNA, 21 bp, Artificial sequence
  SiRNA target sequence
tttgtgcgttgacgatatgtg

SEQ ID NO: 271965 - DNA, 21 bp, Artificial sequence
  SiRNA target sequence
ttgtgcgttgacgatatgtgg

SEQ ID NO: 271966 - DNA, 21 bp, Artificial sequence
  SiRNA target sequence
tgtgcgttgacgatatgtgga

SEQ ID NO: 271967 - DNA, 21 bp, Artificial sequence
  SiRNA target sequence
gtgcgttgacgatatgtggag

SEQ ID NO: 271968 - DNA, 21 bp, Artificial sequence
  SiRNA target sequence
tgcgttgacgatatgtggagt

SEQ ID NO: 271969 - DNA, 21 bp, Artificial sequence
  SiRNA target sequence
gcgttgacgatatgtggagtg

SEQ ID NO: 271970 - DNA, 21 bp, Artificial sequence
  SiRNA target sequence
cgttgacgatatgtggagtgt

SEQ ID NO: 271971 - DNA, 21 bp, Artificial sequence
  SiRNA target sequence
gttgacgatatgtggagtgtt

SEQ ID NO: 271972 - DNA, 21 bp, Artificial sequence
  SiRNA target sequence
ttgacgatatgtggagtgttg

SEQ ID NO: 271973 - DNA, 21 bp, Artificial sequence
  SiRNA target sequence
tgacgatatgtggagtgttga

SEQ ID NO: 271974 - DNA, 21 bp, Artificial sequence
  SiRNA target sequence
gacgatatgtggagtgttgaa

SEQ ID NO: 271975 - DNA, 21 bp, Artificial sequence
  SiRNA target sequence
acgatatgtggagtgttgaaa

SEQ ID NO: 271976 - DNA, 21 bp, Artificial sequence
  SiRNA target sequence
cgatatgtggagtgttgaaac

SEQ ID NO: 271977 - DNA, 21 bp, Artificial sequence
  SiRNA target sequence
gatatgtggagtgttgaaaca

SEQ ID NO: 271978 - DNA, 21 bp, Artificial sequence
  SiRNA target sequence
atatgtggagtgttgaaacat

SEQ ID NO: 271979 - DNA, 21 bp, Artificial sequence
  SiRNA target sequence
tatgtggagtgttgaaacatc

SEQ ID NO: 271980 - DNA, 21 bp, Artificial sequence
  SiRNA target sequence
atgtggagtgttgaaacatct

SEQ ID NO: 271981 - DNA, 21 bp, Artificial sequence
  SiRNA target sequence
tgtggagtgttgaaacatcta

SEQ ID NO: 271982 - DNA, 21 bp, Artificial sequence
  SiRNA target sequence
gtggagtgttgaaacatctac

SEQ ID NO: 271983 - DNA, 21 bp, Artificial sequence
  SiRNA target sequence
tggagtgttgaaacatctact

SEQ ID NO: 271984 - DNA, 21 bp, Artificial sequence
  SiRNA target sequence
ggagtgttgaaacatctacta

SEQ ID NO: 271985 - DNA, 21 bp, Artificial sequence
  SiRNA target sequence
gagtgttgaaacatctactac

SEQ ID NO: 271986 - DNA, 21 bp, Artificial sequence
  SiRNA target sequence
agtgttgaaacatctactacg

SEQ ID NO: 271987 - DNA, 21 bp, Artificial sequence
  SiRNA target sequence
gtgttgaaacatctactacgc

SEQ ID NO: 271988 - DNA, 21 bp, Artificial sequence
  SiRNA target sequence
tgttgaaacatctactacgct

SEQ ID NO: 271989 - DNA, 21 bp, Artificial sequence
  SiRNA target sequence
  misc_feature (21)..(21): n is a, c, g, or t
gttgaaacatctactacgctn

SEQ ID NO: 271990 - DNA, 21 bp, Artificial sequence
  SiRNA target sequence
  misc_feature (20)..(20): n is a, c, g, or t
ttgaaacatctactacgctng

SEQ ID NO: 271991 - DNA, 21 bp, Artificial sequence
  SiRNA target sequence
  misc_feature (19)..(19): n is a, c, g, or t
tgaaacatctactacgctnga

SEQ ID NO: 271992 - DNA, 21 bp, Artificial sequence
  SiRNA target sequence
  misc_feature (18)..(18): n is a, c, g, or t
gaaacatctactacgctngat

SEQ ID NO: 271993 - DNA, 21 bp, Artificial sequence
  SiRNA target sequence
  misc_feature (17)..(17): n is a, c, g, or t
aaacatctactacgctngata

SEQ ID NO: 271994 - DNA, 21 bp, Artificial sequence
  SiRNA target sequence
  misc_feature (16)..(16): n is a, c, g, or t
aacatctactacgctngataa

SEQ ID NO: 271995 - DNA, 21 bp, Artificial sequence
  SiRNA target sequence
  misc_feature (15)..(15): n is a, c, g, or t
acatctactacgctngataag

SEQ ID NO: 271996 - DNA, 21 bp, Artificial sequence
  SiRNA target sequence
  misc_feature (14)..(14): n is a, c, g, or t
catctactacgctngataagc

SEQ ID NO: 271997 - DNA, 21 bp, Artificial sequence
  SiRNA target sequence
  misc_feature (13)..(13): n is a, c, g, or t
atctactacgctngataagca

SEQ ID NO: 271998 - DNA, 21 bp, Artificial sequence
  SiRNA target sequence
  misc_feature (12)..(12): n is a, c, g, or t
tctactacgctngataagcag

SEQ ID NO: 271999 - DNA, 21 bp, Artificial sequence
  SiRNA target sequence
  misc_feature (11)..(11): n is a, c, g, or t
ctactacgctngataagcagt

SEQ ID NO: 272000 - DNA, 21 bp, Artificial sequence
  SiRNA target sequence
  misc_feature (10)..(10): n is a, c, g, or t
tactacgctngataagcagtt

SEQ ID NO: 272001 - DNA, 21 bp, Artificial sequence
  SiRNA target sequence
  misc_feature (9)..(9): n is a, c, g, or t
actacgctngataagcagttg

SEQ ID NO: 272002 - DNA, 21 bp, Artificial sequence
  SiRNA target sequence
  misc_feature (8)..(8): n is a, c, g, or t
ctacgctngataagcagttga

SEQ ID NO: 272003 - DNA, 21 bp, Artificial sequence
  SiRNA target sequence
  misc_feature (7)..(7): n is a, c, g, or t
tacgctngataagcagttgaa

SEQ ID NO: 272004 - DNA, 21 bp, Artificial sequence
  SiRNA target sequence
  misc_feature (6)..(6): n is a, c, g, or t
acgctngataagcagttgaat

SEQ ID NO: 272005 - DNA, 21 bp, Artificial sequence
  SiRNA target sequence
  misc_feature (5)..(5): n is a, c, g, or t
cgctngataagcagttgaata

SEQ ID NO: 272006 - DNA, 21 bp, Artificial sequence
  SiRNA target sequence
  misc_feature (4)..(4): n is a, c, g, or t
gctngataagcagttgaatat

SEQ ID NO: 272007 - DNA, 21 bp, Artificial sequence
  SiRNA target sequence
  misc_feature (3)..(3): n is a, c, g, or t
ctngataagcagttgaatatg

SEQ ID NO: 272008 - DNA, 21 bp, Artificial sequence
  SiRNA target sequence
  misc_feature (2)..(2): n is a, c, g, or t
tngataagcagttgaatatgc

SEQ ID NO: 272009 - DNA, 21 bp, Artificial sequence
  SiRNA target sequence
  misc_feature (1)..(1): n is a, c, g, or t
ngataagcagttgaatatgct

SEQ ID NO: 272010 - DNA, 21 bp, Artificial sequence
  SiRNA target sequence
gataagcagttgaatatgctt

SEQ ID NO: 272011 - DNA, 21 bp, Artificial sequence
  SiRNA target sequence
ataagcagttgaatatgcttt

SEQ ID NO: 272012 - DNA, 21 bp, Artificial sequence
  SiRNA target sequence
taagcagttgaatatgctttt

SEQ ID NO: 272013 - DNA, 21 bp, Artificial sequence
  SiRNA target sequence
aagcagttgaatatgcttttc

SEQ ID NO: 272014 - DNA, 21 bp, Artificial sequence
  SiRNA target sequence
agcagttgaatatgcttttcc

SEQ ID NO: 272015 - DNA, 21 bp, Artificial sequence
  SiRNA target sequence
gcagttgaatatgcttttcca

SEQ ID NO: 272016 - DNA, 21 bp, Artificial sequence
  SiRNA target sequence
cagttgaatatgcttttccag

SEQ ID NO: 272017 - DNA, 21 bp, Artificial sequence
  SiRNA target sequence
agttgaatatgcttttccagg

SEQ ID NO: 272018 - DNA, 21 bp, Artificial sequence
  SiRNA target sequence
gttgaatatgcttttccaggt

SEQ ID NO: 272019 - DNA, 21 bp, Artificial sequence
  SiRNA target sequence
ttgaatatgcttttccaggtc

SEQ ID NO: 272020 - DNA, 21 bp, Artificial sequence
  SiRNA target sequence
tgaatatgcttttccaggtcc

SEQ ID NO: 272021 - DNA, 21 bp, Artificial sequence
  SiRNA target sequence
gaatatgcttttccaggtcca

SEQ ID NO: 272022 - DNA, 21 bp, Artificial sequence
  SiRNA target sequence
aatatgcttttccaggtccat

SEQ ID NO: 272023 - DNA, 21 bp, Artificial sequence
  SiRNA target sequence
atatgcttttccaggtccatt

SEQ ID NO: 272024 - DNA, 21 bp, Artificial sequence
  SiRNA target sequence
tatgcttttccaggtccattc

SEQ ID NO: 272025 - DNA, 21 bp, Artificial sequence
  SiRNA target sequence
atgcttttccaggtccattcc

SEQ ID NO: 272026 - DNA, 21 bp, Artificial sequence
  SiRNA target sequence
tgcttttccaggtccattccc

SEQ ID NO: 272027 - DNA, 21 bp, Artificial sequence
  SiRNA target sequence
gcttttccaggtccattcccc

SEQ ID NO: 272028 - DNA, 21 bp, Artificial sequence
  SiRNA target sequence
cttttccaggtccattcccct

SEQ ID NO: 272029 - DNA, 21 bp, Artificial sequence
  SiRNA target sequence
ttttccaggtccattccccta

SEQ ID NO: 272030 - DNA, 21 bp, Artificial sequence
  SiRNA target sequence
tttccaggtccattcccctat

SEQ ID NO: 272031 - DNA, 21 bp, Artificial sequence
  SiRNA target sequence
ttccaggtccattcccctatc

SEQ ID NO: 272032 - DNA, 21 bp, Artificial sequence
  SiRNA target sequence
tccaggtccattcccctatcg

SEQ ID NO: 272033 - DNA, 21 bp, Artificial sequence
  SiRNA target sequence
ccaggtccattcccctatcgt

SEQ ID NO: 272034 - DNA, 21 bp, Artificial sequence
  SiRNA target sequence
caggtccattcccctatcgtg

SEQ ID NO: 272035 - DNA, 21 bp, Artificial sequence
  SiRNA target sequence
aggtccattcccctatcgtgc

SEQ ID NO: 272036 - DNA, 21 bp, Artificial sequence
  SiRNA target sequence
ggtccattcccctatcgtgct

SEQ ID NO: 272037 - DNA, 21 bp, Artificial sequence
  SiRNA target sequence
gtccattcccctatcgtgctt

SEQ ID NO: 272038 - DNA, 21 bp, Artificial sequence
  SiRNA target sequence
tccattcccctatcgtgcttt

SEQ ID NO: 272039 - DNA, 21 bp, Artificial sequence
  SiRNA target sequence
ccattcccctatcgtgctttc

SEQ ID NO: 272040 - DNA, 21 bp, Artificial sequence
  SiRNA target sequence
cattcccctatcgtgctttct

SEQ ID NO: 272041 - DNA, 21 bp, Artificial sequence
  SiRNA target sequence
attcccctatcgtgctttctc

SEQ ID NO: 272042 - DNA, 21 bp, Artificial sequence
  SiRNA target sequence
ttcccctatcgtgctttctcc

SEQ ID NO: 272043 - DNA, 21 bp, Artificial sequence
  SiRNA target sequence
tcccctatcgtgctttctcct

SEQ ID NO: 272044 - DNA, 21 bp, Artificial sequence
  SiRNA target sequence
cccctatcgtgctttctcctc

SEQ ID NO: 272045 - DNA, 21 bp, Artificial sequence
  SiRNA target sequence
ccctatcgtgctttctcctcc

SEQ ID NO: 272046 - DNA, 21 bp, Artificial sequence
  SiRNA target sequence
cctatcgtgctttctcctcct

SEQ ID NO: 272047 - DNA, 21 bp, Artificial sequence
  SiRNA target sequence
ctatcgtgctttctcctccta

SEQ ID NO: 272048 - DNA, 21 bp, Artificial sequence
  SiRNA target sequence
tatcgtgctttctcctcctaa

SEQ ID NO: 272049 - DNA, 21 bp, Artificial sequence
  SiRNA target sequence
atcgtgctttctcctcctaaa

SEQ ID NO: 272050 - DNA, 21 bp, Artificial sequence
  SiRNA target sequence
tcgtgctttctcctcctaaag

SEQ ID NO: 272051 - DNA, 21 bp, Artificial sequence
  SiRNA target sequence
cgtgctttctcctcctaaagc

SEQ ID NO: 272052 - DNA, 21 bp, Artificial sequence
  SiRNA target sequence
gtgctttctcctcctaaagct

SEQ ID NO: 272053 - DNA, 21 bp, Artificial sequence
  SiRNA target sequence
tgctttctcctcctaaagctg

SEQ ID NO: 272054 - DNA, 21 bp, Artificial sequence
  SiRNA target sequence
gctttctcctcctaaagctga

SEQ ID NO: 272055 - DNA, 21 bp, Artificial sequence
  SiRNA target sequence
ctttctcctcctaaagctgat

SEQ ID NO: 272056 - DNA, 21 bp, Artificial sequence
  SiRNA target sequence
tttctcctcctaaagctgatt

SEQ ID NO: 272057 - DNA, 21 bp, Artificial sequence
  SiRNA target sequence
ttctcctcctaaagctgattt

SEQ ID NO: 272058 - DNA, 21 bp, Artificial sequence
  SiRNA target sequence
tctcctcctaaagctgattta

SEQ ID NO: 272059 - DNA, 21 bp, Artificial sequence
  SiRNA target sequence
ctcctcctaaagctgatttag

SEQ ID NO: 272060 - DNA, 21 bp, Artificial sequence
  SiRNA target sequence
tcctcctaaagctgatttaga

SEQ ID NO: 272061 - DNA, 21 bp, Artificial sequence
  SiRNA target sequence
cctcctaaagctgatttagaa

SEQ ID NO: 272062 - DNA, 21 bp, Artificial sequence
  SiRNA target sequence
ctcctaaagctgatttagaag

SEQ ID NO: 272063 - DNA, 21 bp, Artificial sequence
  SiRNA target sequence
tcctaaagctgatttagaagg

SEQ ID NO: 272064 - DNA, 21 bp, Artificial sequence
  SiRNA target sequence
cctaaagctgatttagaaggt

SEQ ID NO: 272065 - DNA, 21 bp, Artificial sequence
  SiRNA target sequence
ctaaagctgatttagaaggta

SEQ ID NO: 272066 - DNA, 21 bp, Artificial sequence
  SiRNA target sequence
taaagctgatttagaaggtaa

SEQ ID NO: 272067 - DNA, 21 bp, Artificial sequence
  SiRNA target sequence
aaagctgatttagaaggtaag

SEQ ID NO: 272068 - DNA, 21 bp, Artificial sequence
  SiRNA target sequence
aagctgatttagaaggtaaga

SEQ ID NO: 272069 - DNA, 21 bp, Artificial sequence
  SiRNA target sequence
agctgatttagaaggtaagaa

SEQ ID NO: 272070 - DNA, 21 bp, Artificial sequence
  SiRNA target sequence
gctgatttagaaggtaagaaa

SEQ ID NO: 272071 - DNA, 21 bp, Artificial sequence
  SiRNA target sequence
ctgatttagaaggtaagaaaa

SEQ ID NO: 272072 - DNA, 21 bp, Artificial sequence
  SiRNA target sequence
tgatttagaaggtaagaaaat

SEQ ID NO: 272073 - DNA, 21 bp, Artificial sequence
  SiRNA target sequence
gatttagaaggtaagaaaatg

SEQ ID NO: 272074 - DNA, 21 bp, Artificial sequence
  SiRNA target sequence
atttagaaggtaagaaaatgc

SEQ ID NO: 272075 - DNA, 21 bp, Artificial sequence
  SiRNA target sequence
tttagaaggtaagaaaatgcg

SEQ ID NO: 272076 - DNA, 21 bp, Artificial sequence
  SiRNA target sequence
ttagaaggtaagaaaatgcga

SEQ ID NO: 272077 - DNA, 21 bp, Artificial sequence
  SiRNA target sequence
tagaaggtaagaaaatgcgat

SEQ ID NO: 272078 - DNA, 21 bp, Artificial sequence
  SiRNA target sequence
agaaggtaagaaaatgcgata

SEQ ID NO: 272079 - DNA, 21 bp, Artificial sequence
  SiRNA target sequence
gaaggtaagaaaatgcgatat

SEQ ID NO: 272080 - DNA, 21 bp, Artificial sequence
  SiRNA target sequence
aaggtaagaaaatgcgatata

SEQ ID NO: 272081 - DNA, 21 bp, Artificial sequence
  SiRNA target sequence
aggtaagaaaatgcgatataa

SEQ ID NO: 272082 - DNA, 21 bp, Artificial sequence
  SiRNA target sequence
ggtaagaaaatgcgatataac

SEQ ID NO: 272083 - DNA, 21 bp, Artificial sequence
  SiRNA target sequence
gtaagaaaatgcgatataacc

SEQ ID NO: 272084 - DNA, 21 bp, Artificial sequence
  SiRNA target sequence
taagaaaatgcgatataaccc

SEQ ID NO: 272085 - DNA, 21 bp, Artificial sequence
  SiRNA target sequence
aagaaaatgcgatataacccg

SEQ ID NO: 272086 - DNA, 21 bp, Artificial sequence
  SiRNA target sequence
agaaaatgcgatataacccgg

SEQ ID NO: 272087 - DNA, 21 bp, Artificial sequence
  SiRNA target sequence
gaaaatgcgatataacccgga

SEQ ID NO: 272088 - DNA, 21 bp, Artificial sequence
  SiRNA target sequence
aaaatgcgatataacccggaa

SEQ ID NO: 272089 - DNA, 21 bp, Artificial sequence
  SiRNA target sequence
aaatgcgatataacccggaaa

SEQ ID NO: 272090 - DNA, 21 bp, Artificial sequence
  SiRNA target sequence
aatgcgatataacccggaaat

SEQ ID NO: 272091 - DNA, 21 bp, Artificial sequence
  SiRNA target sequence
atgcgatataacccggaaata

SEQ ID NO: 272092 - DNA, 21 bp, Artificial sequence
  SiRNA target sequence
tgcgatataacccggaaatat

SEQ ID NO: 272093 - DNA, 21 bp, Artificial sequence
  SiRNA target sequence
gcgatataacccggaaatatt

SEQ ID NO: 272094 - DNA, 21 bp, Artificial sequence
  SiRNA target sequence
cgatataacccggaaatattc

SEQ ID NO: 272095 - DNA, 21 bp, Artificial sequence
  SiRNA target sequence
gatataacccggaaatattca

SEQ ID NO: 272096 - DNA, 21 bp, Artificial sequence
  SiRNA target sequence
atataacccggaaatattcat

SEQ ID NO: 272097 - DNA, 21 bp, Artificial sequence
  SiRNA target sequence
tataacccggaaatattcata

SEQ ID NO: 272098 - DNA, 21 bp, Artificial sequence
  SiRNA target sequence
ataacccggaaatattcatat

SEQ ID NO: 272099 - DNA, 21 bp, Artificial sequence
  SiRNA target sequence
taacccggaaatattcatata

SEQ ID NO: 272100 - DNA, 21 bp, Artificial sequence
  SiRNA target sequence
aacccggaaatattcatatac

SEQ ID NO: 272101 - DNA, 21 bp, Artificial sequence
  SiRNA target sequence
acccggaaatattcatataca

SEQ ID NO: 272102 - DNA, 21 bp, Artificial sequence
  SiRNA target sequence
cccggaaatattcatatacaa

SEQ ID NO: 272103 - DNA, 21 bp, Artificial sequence
  SiRNA target sequence
ccggaaatattcatatacaat

SEQ ID NO: 272104 - DNA, 21 bp, Artificial sequence
  SiRNA target sequence
cggaaatattcatatacaata

SEQ ID NO: 272105 - DNA, 21 bp, Artificial sequence
  SiRNA target sequence
ggaaatattcatatacaatac

SEQ ID NO: 272106 - DNA, 21 bp, Artificial sequence
  SiRNA target sequence
gaaatattcatatacaatacg

SEQ ID NO: 272107 - DNA, 21 bp, Artificial sequence
  SiRNA target sequence
aaatattcatatacaatacga

SEQ ID NO: 272108 - DNA, 21 bp, Artificial sequence
  SiRNA target sequence
aatattcatatacaatacgaa

SEQ ID NO: 272109 - DNA, 21 bp, Artificial sequence
  SiRNA target sequence
atattcatatacaatacgaat

SEQ ID NO: 272110 - DNA, 21 bp, Artificial sequence
  SiRNA target sequence
tattcatatacaatacgaata

SEQ ID NO: 272111 - DNA, 21 bp, Artificial sequence
  SiRNA target sequence
attcatatacaatacgaataa

SEQ ID NO: 272112 - DNA, 21 bp, Artificial sequence
  SiRNA target sequence
ttcatatacaatacgaataaa

SEQ ID NO: 272113 - DNA, 21 bp, Artificial sequence
  SiRNA target sequence
tcatatacaatacgaataaac

SEQ ID NO: 272114 - DNA, 21 bp, Artificial sequence
  SiRNA target sequence
catatacaatacgaataaacc

SEQ ID NO: 272115 - DNA, 21 bp, Artificial sequence
  SiRNA target sequence
atatacaatacgaataaacct

SEQ ID NO: 272116 - DNA, 21 bp, Artificial sequence
  SiRNA target sequence
tatacaatacgaataaacctt

SEQ ID NO: 272117 - DNA, 21 bp, Artificial sequence
  SiRNA target sequence
atacaatacgaataaaccttt

SEQ ID NO: 272118 - DNA, 21 bp, Artificial sequence
  SiRNA target sequence
tacaatacgaataaacctttc

SEQ ID NO: 272119 - DNA, 21 bp, Artificial sequence
  SiRNA target sequence
acaatacgaataaacctttcc

SEQ ID NO: 272120 - DNA, 21 bp, Artificial sequence
  SiRNA target sequence
caatacgaataaacctttccc

SEQ ID NO: 272121 - DNA, 21 bp, Artificial sequence
  SiRNA target sequence
aatacgaataaacctttcccg

SEQ ID NO: 272122 - DNA, 21 bp, Artificial sequence
  SiRNA target sequence
atacgaataaacctttcccga

SEQ ID NO: 272123 - DNA, 21 bp, Artificial sequence
  SiRNA target sequence
tacgaataaacctttcccgag

SEQ ID NO: 272124 - DNA, 21 bp, Artificial sequence
  SiRNA target sequence
acgaataaacctttcccgagg

SEQ ID NO: 272125 - DNA, 21 bp, Artificial sequence
  SiRNA target sequence
cgaataaacctttcccgaggt

SEQ ID NO: 272126 - DNA, 21 bp, Artificial sequence
  SiRNA target sequence
gaataaacctttcccgaggtt

SEQ ID NO: 272127 - DNA, 21 bp, Artificial sequence
  SiRNA target sequence
aataaacctttcccgaggttt

SEQ ID NO: 272128 - DNA, 21 bp, Artificial sequence
  SiRNA target sequence
ataaacctttcccgaggtttg

SEQ ID NO: 272129 - DNA, 21 bp, Artificial sequence
  SiRNA target sequence
taaacctttcccgaggtttga

SEQ ID NO: 272130 - DNA, 21 bp, Artificial sequence
  SiRNA target sequence
aaacctttcccgaggtttgat

SEQ ID NO: 272131 - DNA, 21 bp, Artificial sequence
  SiRNA target sequence
aacctttcccgaggtttgatc

SEQ ID NO: 272132 - DNA, 21 bp, Artificial sequence
  SiRNA target sequence
acctttcccgaggtttgatcg

SEQ ID NO: 272133 - DNA, 21 bp, Artificial sequence
  SiRNA target sequence
cctttcccgaggtttgatcgt

SEQ ID NO: 272134 - DNA, 21 bp, Artificial sequence
  SiRNA target sequence
ctttcccgaggtttgatcgta

SEQ ID NO: 272135 - DNA, 21 bp, Artificial sequence
  SiRNA target sequence
tttcccgaggtttgatcgtat

SEQ ID NO: 272136 - DNA, 21 bp, Artificial sequence
  SiRNA target sequence
ttcccgaggtttgatcgtatt

SEQ ID NO: 272137 - DNA, 21 bp, Artificial sequence
  SiRNA target sequence
tcccgaggtttgatcgtattg

SEQ ID NO: 272138 - DNA, 21 bp, Artificial sequence
  SiRNA target sequence
cccgaggtttgatcgtattgc

SEQ ID NO: 272139 - DNA, 21 bp, Artificial sequence
  SiRNA target sequence
ccgaggtttgatcgtattgct

SEQ ID NO: 272140 - DNA, 21 bp, Artificial sequence
  SiRNA target sequence
cgaggtttgatcgtattgcta

SEQ ID NO: 272141 - DNA, 21 bp, Artificial sequence
  SiRNA target sequence
gaggtttgatcgtattgctat

SEQ ID NO: 272142 - DNA, 21 bp, Artificial sequence
  SiRNA target sequence
aggtttgatcgtattgctatg

SEQ ID NO: 272143 - DNA, 21 bp, Artificial sequence
  SiRNA target sequence
ggtttgatcgtattgctatgg

SEQ ID NO: 272144 - DNA, 21 bp, Artificial sequence
  SiRNA target sequence
gtttgatcgtattgctatgga

SEQ ID NO: 272145 - DNA, 21 bp, Artificial sequence
  SiRNA target sequence
tttgatcgtattgctatggaa

SEQ ID NO: 272146 - DNA, 21 bp, Artificial sequence
  SiRNA target sequence
ttgatcgtattgctatggaag

SEQ ID NO: 272147 - DNA, 21 bp, Artificial sequence
  SiRNA target sequence
tgatcgtattgctatggaagc

SEQ ID NO: 272148 - DNA, 21 bp, Artificial sequence
  SiRNA target sequence
gatcgtattgctatggaagct

SEQ ID NO: 272149 - DNA, 21 bp, Artificial sequence
  SiRNA target sequence
atcgtattgctatggaagcta

SEQ ID NO: 272150 - DNA, 21 bp, Artificial sequence
  SiRNA target sequence
tcgtattgctatggaagctat

SEQ ID NO: 272151 - DNA, 21 bp, Artificial sequence
  SiRNA target sequence
cgtattgctatggaagctatt

SEQ ID NO: 272152 - DNA, 21 bp, Artificial sequence
  SiRNA target sequence
gtattgctatggaagctattt

SEQ ID NO: 272153 - DNA, 21 bp, Artificial sequence
  SiRNA target sequence
tattgctatggaagctattta

SEQ ID NO: 272154 - DNA, 21 bp, Artificial sequence
  SiRNA target sequence
attgctatggaagctatttat

SEQ ID NO: 272155 - DNA, 21 bp, Artificial sequence
  SiRNA target sequence
ttgctatggaagctatttatc

SEQ ID NO: 272156 - DNA, 21 bp, Artificial sequence
  SiRNA target sequence
tgctatggaagctatttatcg

SEQ ID NO: 272157 - DNA, 21 bp, Artificial sequence
  SiRNA target sequence
gctatggaagctatttatcgg

SEQ ID NO: 272158 - DNA, 21 bp, Artificial sequence
  SiRNA target sequence
ctatggaagctatttatcggc

SEQ ID NO: 272159 - DNA, 21 bp, Artificial sequence
  SiRNA target sequence
tatggaagctatttatcggcg

SEQ ID NO: 272160 - DNA, 21 bp, Artificial sequence
  SiRNA target sequence
atggaagctatttatcggcgt

SEQ ID NO: 272161 - DNA, 21 bp, Artificial sequence
  SiRNA target sequence
tggaagctatttatcggcgta

SEQ ID NO: 272162 - DNA, 21 bp, Artificial sequence
  SiRNA target sequence
ggaagctatttatcggcgtag

SEQ ID NO: 272163 - DNA, 21 bp, Artificial sequence
  SiRNA target sequence
gaagctatttatcggcgtaga

SEQ ID NO: 272164 - DNA, 21 bp, Artificial sequence
  SiRNA target sequence
aagctatttatcggcgtagaa

SEQ ID NO: 272165 - DNA, 21 bp, Artificial sequence
  SiRNA target sequence
agctatttatcggcgtagaaa

SEQ ID NO: 272166 - DNA, 21 bp, Artificial sequence
  SiRNA target sequence
gctatttatcggcgtagaaat

SEQ ID NO: 272167 - DNA, 21 bp, Artificial sequence
  SiRNA target sequence
ctatttatcggcgtagaaatg

SEQ ID NO: 272168 - DNA, 21 bp, Artificial sequence
  SiRNA target sequence
tatttatcggcgtagaaatgt

SEQ ID NO: 272169 - DNA, 21 bp, Artificial sequence
  SiRNA target sequence
atttatcggcgtagaaatgtt

SEQ ID NO: 272170 - DNA, 21 bp, Artificial sequence
  SiRNA target sequence
tttatcggcgtagaaatgttt

SEQ ID NO: 272171 - DNA, 21 bp, Artificial sequence
  SiRNA target sequence
ttatcggcgtagaaatgtttt

SEQ ID NO: 272172 - DNA, 21 bp, Artificial sequence
  SiRNA target sequence
tatcggcgtagaaatgttttg

SEQ ID NO: 272173 - DNA, 21 bp, Artificial sequence
  SiRNA target sequence
atcggcgtagaaatgttttga

SEQ ID NO: 272174 - DNA, 21 bp, Artificial sequence
  SiRNA target sequence
tcggcgtagaaatgttttgat

SEQ ID NO: 272175 - DNA, 21 bp, Artificial sequence
  SiRNA target sequence
cggcgtagaaatgttttgatt

SEQ ID NO: 272176 - DNA, 21 bp, Artificial sequence
  SiRNA target sequence
ggcgtagaaatgttttgattg

SEQ ID NO: 272177 - DNA, 21 bp, Artificial sequence
  SiRNA target sequence
gcgtagaaatgttttgattga

SEQ ID NO: 272178 - DNA, 21 bp, Artificial sequence
  SiRNA target sequence
cgtagaaatgttttgattgaa

SEQ ID NO: 272179 - DNA, 21 bp, Artificial sequence
  SiRNA target sequence
gtagaaatgttttgattgaat

SEQ ID NO: 272180 - DNA, 21 bp, Artificial sequence
  SiRNA target sequence
tagaaatgttttgattgaatg

SEQ ID NO: 272181 - DNA, 21 bp, Artificial sequence
  SiRNA target sequence
agaaatgttttgattgaatgt

SEQ ID NO: 272182 - DNA, 21 bp, Artificial sequence
  SiRNA target sequence
gaaatgttttgattgaatgta

SEQ ID NO: 272183 - DNA, 21 bp, Artificial sequence
  SiRNA target sequence
aaatgttttgattgaatgtaa

SEQ ID NO: 272184 - DNA, 21 bp, Artificial sequence
  SiRNA target sequence
aatgttttgattgaatgtaaa

SEQ ID NO: 272185 - DNA, 21 bp, Artificial sequence
  SiRNA target sequence
atgttttgattgaatgtaaag

SEQ ID NO: 272186 - DNA, 21 bp, Artificial sequence
  SiRNA target sequence
tgttttgattgaatgtaaagc

SEQ ID NO: 272187 - DNA, 21 bp, Artificial sequence
  SiRNA target sequence
gttttgattgaatgtaaagcg

SEQ ID NO: 272188 - DNA, 21 bp, Artificial sequence
  SiRNA target sequence
ttttgattgaatgtaaagcga

SEQ ID NO: 272189 - DNA, 21 bp, Artificial sequence
  SiRNA target sequence
tttgattgaatgtaaagcgag

SEQ ID NO: 272190 - DNA, 21 bp, Artificial sequence
  SiRNA target sequence
ttgattgaatgtaaagcgagt

SEQ ID NO: 272191 - DNA, 21 bp, Artificial sequence
  SiRNA target sequence
tgattgaatgtaaagcgagtg

SEQ ID NO: 272192 - DNA, 21 bp, Artificial sequence
  SiRNA target sequence
gattgaatgtaaagcgagtga

SEQ ID NO: 272193 - DNA, 21 bp, Artificial sequence
  SiRNA target sequence
attgaatgtaaagcgagtgaa

SEQ ID NO: 272194 - DNA, 21 bp, Artificial sequence
  SiRNA target sequence
ttgaatgtaaagcgagtgaag

SEQ ID NO: 272195 - DNA, 21 bp, Artificial sequence
  SiRNA target sequence
tgaatgtaaagcgagtgaaga

SEQ ID NO: 272196 - DNA, 21 bp, Artificial sequence
  SiRNA target sequence
gaatgtaaagcgagtgaagag

SEQ ID NO: 272197 - DNA, 21 bp, Artificial sequence
  SiRNA target sequence
aatgtaaagcgagtgaagaga

SEQ ID NO: 272198 - DNA, 21 bp, Artificial sequence
  SiRNA target sequence
atgtaaagcgagtgaagagaa

SEQ ID NO: 272199 - DNA, 21 bp, Artificial sequence
  SiRNA target sequence
tgtaaagcgagtgaagagaag

SEQ ID NO: 272200 - DNA, 21 bp, Artificial sequence
  SiRNA target sequence
gtaaagcgagtgaagagaaga

SEQ ID NO: 272201 - DNA, 21 bp, Artificial sequence
  SiRNA target sequence
taaagcgagtgaagagaagaa

SEQ ID NO: 272202 - DNA, 21 bp, Artificial sequence
  SiRNA target sequence
aaagcgagtgaagagaagaag

SEQ ID NO: 272203 - DNA, 21 bp, Artificial sequence
  SiRNA target sequence
aagcgagtgaagagaagaagc

SEQ ID NO: 272204 - DNA, 21 bp, Artificial sequence
  SiRNA target sequence
agcgagtgaagagaagaagcg

SEQ ID NO: 272205 - DNA, 21 bp, Artificial sequence
  SiRNA target sequence
gcgagtgaagagaagaagcga

SEQ ID NO: 272206 - DNA, 21 bp, Artificial sequence
  SiRNA target sequence
cgagtgaagagaagaagcgag

SEQ ID NO: 272207 - DNA, 21 bp, Artificial sequence
  SiRNA target sequence
gagtgaagagaagaagcgagg

SEQ ID NO: 272208 - DNA, 21 bp, Artificial sequence
  SiRNA target sequence
agtgaagagaagaagcgagga

SEQ ID NO: 272209 - DNA, 21 bp, Artificial sequence
  SiRNA target sequence
gtgaagagaagaagcgaggat

SEQ ID NO: 272210 - DNA, 21 bp, Artificial sequence
  SiRNA target sequence
tgaagagaagaagcgaggatg

SEQ ID NO: 272211 - DNA, 21 bp, Artificial sequence
  SiRNA target sequence
gaagagaagaagcgaggatgt

SEQ ID NO: 272212 - DNA, 21 bp, Artificial sequence
  SiRNA target sequence
aagagaagaagcgaggatgta

SEQ ID NO: 272213 - DNA, 21 bp, Artificial sequence
  SiRNA target sequence
agagaagaagcgaggatgtaa

SEQ ID NO: 272214 - DNA, 21 bp, Artificial sequence
  SiRNA target sequence
gagaagaagcgaggatgtaag

SEQ ID NO: 272215 - DNA, 21 bp, Artificial sequence
  SiRNA target sequence
agaagaagcgaggatgtaagc

SEQ ID NO: 272216 - DNA, 21 bp, Artificial sequence
  SiRNA target sequence
gaagaagcgaggatgtaagca

SEQ ID NO: 272217 - DNA, 21 bp, Artificial sequence
  SiRNA target sequence
aagaagcgaggatgtaagcat

SEQ ID NO: 272218 - DNA, 21 bp, Artificial sequence
  SiRNA target sequence
agaagcgaggatgtaagcatt

SEQ ID NO: 272219 - DNA, 21 bp, Artificial sequence
  SiRNA target sequence
gaagcgaggatgtaagcattg

SEQ ID NO: 272220 - DNA, 21 bp, Artificial sequence
  SiRNA target sequence
aagcgaggatgtaagcattgt

SEQ ID NO: 272221 - DNA, 21 bp, Artificial sequence
  SiRNA target sequence
agcgaggatgtaagcattgtg

SEQ ID NO: 272222 - DNA, 21 bp, Artificial sequence
  SiRNA target sequence
gcgaggatgtaagcattgtga

SEQ ID NO: 272223 - DNA, 21 bp, Artificial sequence
  SiRNA target sequence
cgaggatgtaagcattgtgag

SEQ ID NO: 272224 - DNA, 21 bp, Artificial sequence
  SiRNA target sequence
gaggatgtaagcattgtgaga

SEQ ID NO: 272225 - DNA, 21 bp, Artificial sequence
  SiRNA target sequence
aggatgtaagcattgtgagaa

SEQ ID NO: 272226 - DNA, 21 bp, Artificial sequence
  SiRNA target sequence
ggatgtaagcattgtgagaat

SEQ ID NO: 272227 - DNA, 21 bp, Artificial sequence
  SiRNA target sequence
gatgtaagcattgtgagaatg

SEQ ID NO: 272228 - DNA, 21 bp, Artificial sequence
  SiRNA target sequence
atgtaagcattgtgagaatga

SEQ ID NO: 272229 - DNA, 21 bp, Artificial sequence
  SiRNA target sequence
tgtaagcattgtgagaatgat

SEQ ID NO: 272230 - DNA, 21 bp, Artificial sequence
  SiRNA target sequence
gtaagcattgtgagaatgata

SEQ ID NO: 272231 - DNA, 21 bp, Artificial sequence
  SiRNA target sequence
taagcattgtgagaatgatat

SEQ ID NO: 272232 - DNA, 21 bp, Artificial sequence
  SiRNA target sequence
aagcattgtgagaatgatatt

SEQ ID NO: 272233 - DNA, 21 bp, Artificial sequence
  SiRNA target sequence
agcattgtgagaatgatattc

SEQ ID NO: 272234 - DNA, 21 bp, Artificial sequence
  SiRNA target sequence
gcattgtgagaatgatattcc

SEQ ID NO: 272235 - DNA, 21 bp, Artificial sequence
  SiRNA target sequence
cattgtgagaatgatattcct

SEQ ID NO: 272236 - DNA, 21 bp, Artificial sequence
  SiRNA target sequence
attgtgagaatgatattccta

SEQ ID NO: 272237 - DNA, 21 bp, Artificial sequence
  SiRNA target sequence
ttgtgagaatgatattcctat

SEQ ID NO: 272238 - DNA, 21 bp, Artificial sequence
  SiRNA target sequence
tgtgagaatgatattcctatt

SEQ ID NO: 272239 - DNA, 21 bp, Artificial sequence
  SiRNA target sequence
gtgagaatgatattcctattg

SEQ ID NO: 272240 - DNA, 21 bp, Artificial sequence
  SiRNA target sequence
tgagaatgatattcctattgc

SEQ ID NO: 272241 - DNA, 21 bp, Artificial sequence
  SiRNA target sequence
gagaatgatattcctattgct

SEQ ID NO: 272242 - DNA, 21 bp, Artificial sequence
  SiRNA target sequence
agaatgatattcctattgctg

SEQ ID NO: 272243 - DNA, 21 bp, Artificial sequence
  SiRNA target sequence
gaatgatattcctattgctga

SEQ ID NO: 272244 - DNA, 21 bp, Artificial sequence
  SiRNA target sequence
aatgatattcctattgctgaa

SEQ ID NO: 272245 - DNA, 21 bp, Artificial sequence
  SiRNA target sequence
atgatattcctattgctgaat

SEQ ID NO: 272246 - DNA, 21 bp, Artificial sequence
  SiRNA target sequence
tgatattcctattgctgaatg

SEQ ID NO: 272247 - DNA, 21 bp, Artificial sequence
  SiRNA target sequence
gatattcctattgctgaatgt

SEQ ID NO: 272248 - DNA, 21 bp, Artificial sequence
  SiRNA target sequence
atattcctattgctgaatgta

SEQ ID NO: 272249 - DNA, 21 bp, Artificial sequence
  SiRNA target sequence
tattcctattgctgaatgtag

SEQ ID NO: 272250 - DNA, 21 bp, Artificial sequence
  SiRNA target sequence
attcctattgctgaatgtagt

SEQ ID NO: 272251 - DNA, 21 bp, Artificial sequence
  SiRNA target sequence
ttcctattgctgaatgtagtc

SEQ ID NO: 272252 - DNA, 21 bp, Artificial sequence
  SiRNA target sequence
tcctattgctgaatgtagtcc

SEQ ID NO: 272253 - DNA, 21 bp, Artificial sequence
  SiRNA target sequence
cctattgctgaatgtagtcct

SEQ ID NO: 272254 - DNA, 21 bp, Artificial sequence
  SiRNA target sequence
ctattgctgaatgtagtccta

SEQ ID NO: 272255 - DNA, 21 bp, Artificial sequence
  SiRNA target sequence
tattgctgaatgtagtcctaa

SEQ ID NO: 272256 - DNA, 21 bp, Artificial sequence
  SiRNA target sequence
attgctgaatgtagtcctaag

SEQ ID NO: 272257 - DNA, 21 bp, Artificial sequence
  SiRNA target sequence
ttgctgaatgtagtcctaaga

SEQ ID NO: 272258 - DNA, 21 bp, Artificial sequence
  SiRNA target sequence
tgctgaatgtagtcctaagat

SEQ ID NO: 272259 - DNA, 21 bp, Artificial sequence
  SiRNA target sequence
gctgaatgtagtcctaagatg

SEQ ID NO: 272260 - DNA, 21 bp, Artificial sequence
  SiRNA target sequence
ctgaatgtagtcctaagatgt

SEQ ID NO: 272261 - DNA, 21 bp, Artificial sequence
  SiRNA target sequence
tgaatgtagtcctaagatgtt

SEQ ID NO: 272262 - DNA, 21 bp, Artificial sequence
  SiRNA target sequence
gaatgtagtcctaagatgttg

SEQ ID NO: 272263 - DNA, 21 bp, Artificial sequence
  SiRNA target sequence
aatgtagtcctaagatgttga

SEQ ID NO: 272264 - DNA, 21 bp, Artificial sequence
  SiRNA target sequence
atgtagtcctaagatgttgaa

SEQ ID NO: 272265 - DNA, 21 bp, Artificial sequence
  SiRNA target sequence
tgtagtcctaagatgttgaaa

SEQ ID NO: 272266 - DNA, 21 bp, Artificial sequence
  SiRNA target sequence
gtagtcctaagatgttgaaag

SEQ ID NO: 272267 - DNA, 21 bp, Artificial sequence
  SiRNA target sequence
tagtcctaagatgttgaaaga

SEQ ID NO: 272268 - DNA, 21 bp, Artificial sequence
  SiRNA target sequence
agtcctaagatgttgaaagat

SEQ ID NO: 272269 - DNA, 21 bp, Artificial sequence
  SiRNA target sequence
gtcctaagatgttgaaagatt

SEQ ID NO: 272270 - DNA, 21 bp, Artificial sequence
  SiRNA target sequence
tcctaagatgttgaaagattt

SEQ ID NO: 272271 - DNA, 21 bp, Artificial sequence
  SiRNA target sequence
cctaagatgttgaaagatttt

SEQ ID NO: 272272 - DNA, 21 bp, Artificial sequence
  SiRNA target sequence
ctaagatgttgaaagattttc

SEQ ID NO: 272273 - DNA, 21 bp, Artificial sequence
  SiRNA target sequence
taagatgttgaaagattttca

SEQ ID NO: 272274 - DNA, 21 bp, Artificial sequence
  SiRNA target sequence
aagatgttgaaagattttcat

SEQ ID NO: 272275 - DNA, 21 bp, Artificial sequence
  SiRNA target sequence
agatgttgaaagattttcatc

SEQ ID NO: 272276 - DNA, 21 bp, Artificial sequence
  SiRNA target sequence
gatgttgaaagattttcatca

SEQ ID NO: 272277 - DNA, 21 bp, Artificial sequence
  SiRNA target sequence
atgttgaaagattttcatcat

SEQ ID NO: 272278 - DNA, 21 bp, Artificial sequence
  SiRNA target sequence
tgttgaaagattttcatcata

SEQ ID NO: 272279 - DNA, 21 bp, Artificial sequence
  SiRNA target sequence
gttgaaagattttcatcatat

SEQ ID NO: 272280 - DNA, 21 bp, Artificial sequence
  SiRNA target sequence
ttgaaagattttcatcatatt

SEQ ID NO: 272281 - DNA, 21 bp, Artificial sequence
  SiRNA target sequence
tgaaagattttcatcatatta

SEQ ID NO: 272282 - DNA, 21 bp, Artificial sequence
  SiRNA target sequence
gaaagattttcatcatattaa

SEQ ID NO: 272283 - DNA, 21 bp, Artificial sequence
  SiRNA target sequence
aaagattttcatcatattaaa

SEQ ID NO: 272284 - DNA, 21 bp, Artificial sequence
  SiRNA target sequence
aagattttcatcatattaaat

SEQ ID NO: 272285 - DNA, 21 bp, Artificial sequence
  SiRNA target sequence
agattttcatcatattaaatt

SEQ ID NO: 272286 - DNA, 21 bp, Artificial sequence
  SiRNA target sequence
gattttcatcatattaaattt

SEQ ID NO: 272287 - DNA, 21 bp, Artificial sequence
  SiRNA target sequence
attttcatcatattaaattta

SEQ ID NO: 272288 - DNA, 21 bp, Artificial sequence
  SiRNA target sequence
ttttcatcatattaaatttag

SEQ ID NO: 272289 - DNA, 21 bp, Artificial sequence
  SiRNA target sequence
tttcatcatattaaatttagg

SEQ ID NO: 272290 - DNA, 21 bp, Artificial sequence
  SiRNA target sequence
ttcatcatattaaatttaggt

SEQ ID NO: 272291 - DNA, 21 bp, Artificial sequence
  SiRNA target sequence
tcatcatattaaatttaggta

SEQ ID NO: 272292 - DNA, 21 bp, Artificial sequence
  SiRNA target sequence
catcatattaaatttaggtat

SEQ ID NO: 272293 - DNA, 21 bp, Artificial sequence
  SiRNA target sequence
atcatattaaatttaggtatg

SEQ ID NO: 272294 - DNA, 21 bp, Artificial sequence
  SiRNA target sequence
tcatattaaatttaggtatgc

SEQ ID NO: 272295 - DNA, 21 bp, Artificial sequence
  SiRNA target sequence
catattaaatttaggtatgcg

SEQ ID NO: 272296 - DNA, 21 bp, Artificial sequence
  SiRNA target sequence
atattaaatttaggtatgcgc

SEQ ID NO: 272297 - DNA, 21 bp, Artificial sequence
  SiRNA target sequence
tattaaatttaggtatgcgca

SEQ ID NO: 272298 - DNA, 21 bp, Artificial sequence
  SiRNA target sequence
attaaatttaggtatgcgcat

SEQ ID NO: 272299 - DNA, 21 bp, Artificial sequence
  SiRNA target sequence
ttaaatttaggtatgcgcatg

SEQ ID NO: 272300 - DNA, 21 bp, Artificial sequence
  SiRNA target sequence
taaatttaggtatgcgcatga

SEQ ID NO: 272301 - DNA, 21 bp, Artificial sequence
  SiRNA target sequence
aaatttaggtatgcgcatgat

SEQ ID NO: 272302 - DNA, 21 bp, Artificial sequence
  SiRNA target sequence
aatttaggtatgcgcatgatg

SEQ ID NO: 272303 - DNA, 21 bp, Artificial sequence
  SiRNA target sequence
atttaggtatgcgcatgatgt

SEQ ID NO: 272304 - DNA, 21 bp, Artificial sequence
  SiRNA target sequence
tttaggtatgcgcatgatgta

SEQ ID NO: 272305 - DNA, 21 bp, Artificial sequence
  SiRNA target sequence
ttaggtatgcgcatgatgtat

SEQ ID NO: 272306 - DNA, 21 bp, Artificial sequence
  SiRNA target sequence
taggtatgcgcatgatgtatg

SEQ ID NO: 272307 - DNA, 21 bp, Artificial sequence
  SiRNA target sequence
aggtatgcgcatgatgtatgt

SEQ ID NO: 272308 - DNA, 21 bp, Artificial sequence
  SiRNA target sequence
ggtatgcgcatgatgtatgta

SEQ ID NO: 272309 - DNA, 21 bp, Artificial sequence
  SiRNA target sequence
gtatgcgcatgatgtatgtaa

SEQ ID NO: 272310 - DNA, 21 bp, Artificial sequence
  SiRNA target sequence
tatgcgcatgatgtatgtaat

SEQ ID NO: 272311 - DNA, 21 bp, Artificial sequence
  SiRNA target sequence
atgcgcatgatgtatgtaatt

SEQ ID NO: 272312 - DNA, 21 bp, Artificial sequence
  SiRNA target sequence
tgcgcatgatgtatgtaattc

SEQ ID NO: 272313 - DNA, 21 bp, Artificial sequence
  SiRNA target sequence
gcgcatgatgtatgtaattcc

SEQ ID NO: 272314 - DNA, 21 bp, Artificial sequence
  SiRNA target sequence
cgcatgatgtatgtaattccg

SEQ ID NO: 272315 - DNA, 21 bp, Artificial sequence
  SiRNA target sequence
gcatgatgtatgtaattccga

SEQ ID NO: 272316 - DNA, 21 bp, Artificial sequence
  SiRNA target sequence
catgatgtatgtaattccgag

SEQ ID NO: 272317 - DNA, 21 bp, Artificial sequence
  SiRNA target sequence
atgatgtatgtaattccgaga

SEQ ID NO: 272318 - DNA, 21 bp, Artificial sequence
  SiRNA target sequence
tgatgtatgtaattccgagac

SEQ ID NO: 272319 - DNA, 21 bp, Artificial sequence
  SiRNA target sequence
gatgtatgtaattccgagacc

SEQ ID NO: 272320 - DNA, 21 bp, Artificial sequence
  SiRNA target sequence
atgtatgtaattccgagacca

SEQ ID NO: 272321 - DNA, 21 bp, Artificial sequence
  SiRNA target sequence
tgtatgtaattccgagaccac

SEQ ID NO: 272322 - DNA, 21 bp, Artificial sequence
  SiRNA target sequence
gtatgtaattccgagaccaca

SEQ ID NO: 272323 - DNA, 21 bp, Artificial sequence
  SiRNA target sequence
tatgtaattccgagaccacat

SEQ ID NO: 272324 - DNA, 21 bp, Artificial sequence
  SiRNA target sequence
atgtaattccgagaccacatg

SEQ ID NO: 272325 - DNA, 21 bp, Artificial sequence
  SiRNA target sequence
tgtaattccgagaccacatgg

SEQ ID NO: 272326 - DNA, 21 bp, Artificial sequence
  SiRNA target sequence
gtaattccgagaccacatggt

SEQ ID NO: 272327 - DNA, 21 bp, Artificial sequence
  SiRNA target sequence
taattccgagaccacatggtc

SEQ ID NO: 272328 - DNA, 21 bp, Artificial sequence
  SiRNA target sequence
aattccgagaccacatggtct

SEQ ID NO: 272329 - DNA, 21 bp, Artificial sequence
  SiRNA target sequence
attccgagaccacatggtctg

SEQ ID NO: 272330 - DNA, 21 bp, Artificial sequence
  SiRNA target sequence
ttccgagaccacatggtctga

SEQ ID NO: 272331 - DNA, 21 bp, Artificial sequence
  SiRNA target sequence
tccgagaccacatggtctgaa

SEQ ID NO: 272332 - DNA, 21 bp, Artificial sequence
  SiRNA target sequence
ccgagaccacatggtctgaat

SEQ ID NO: 272333 - DNA, 21 bp, Artificial sequence
  SiRNA target sequence
cgagaccacatggtctgaatg

SEQ ID NO: 272334 - DNA, 21 bp, Artificial sequence
  SiRNA target sequence
gagaccacatggtctgaatgg

SEQ ID NO: 272335 - DNA, 21 bp, Artificial sequence
  SiRNA target sequence
agaccacatggtctgaatgga

SEQ ID NO: 272336 - DNA, 21 bp, Artificial sequence
  SiRNA target sequence
gaccacatggtctgaatggat

SEQ ID NO: 272337 - DNA, 21 bp, Artificial sequence
  SiRNA target sequence
accacatggtctgaatggatg

SEQ ID NO: 272338 - DNA, 21 bp, Artificial sequence
  SiRNA target sequence
ccacatggtctgaatggatga

SEQ ID NO: 272339 - DNA, 21 bp, Artificial sequence
  SiRNA target sequence
cacatggtctgaatggatgac

SEQ ID NO: 272340 - DNA, 21 bp, Artificial sequence
  SiRNA target sequence
acatggtctgaatggatgacg

SEQ ID NO: 272341 - DNA, 21 bp, Artificial sequence
  SiRNA target sequence
catggtctgaatggatgacgt

SEQ ID NO: 272342 - DNA, 21 bp, Artificial sequence
  SiRNA target sequence
atggtctgaatggatgacgta

SEQ ID NO: 272343 - DNA, 21 bp, Artificial sequence
  SiRNA target sequence
tggtctgaatggatgacgtat

SEQ ID NO: 272344 - DNA, 21 bp, Artificial sequence
  SiRNA target sequence
ggtctgaatggatgacgtata

SEQ ID NO: 272345 - DNA, 21 bp, Artificial sequence
  SiRNA target sequence
gtctgaatggatgacgtataa

SEQ ID NO: 272346 - DNA, 21 bp, Artificial sequence
  SiRNA target sequence
tctgaatggatgacgtataat

SEQ ID NO: 272347 - DNA, 21 bp, Artificial sequence
  SiRNA target sequence
ctgaatggatgacgtataatg

SEQ ID NO: 272348 - DNA, 21 bp, Artificial sequence
  SiRNA target sequence
tgaatggatgacgtataatga

SEQ ID NO: 272349 - DNA, 21 bp, Artificial sequence
  SiRNA target sequence
gaatggatgacgtataatgaa

SEQ ID NO: 272350 - DNA, 21 bp, Artificial sequence
  SiRNA target sequence
aatggatgacgtataatgaat

SEQ ID NO: 272351 - DNA, 21 bp, Artificial sequence
  SiRNA target sequence
atggatgacgtataatgaatt

SEQ ID NO: 272352 - DNA, 21 bp, Artificial sequence
  SiRNA target sequence
tggatgacgtataatgaattt

SEQ ID NO: 272353 - DNA, 21 bp, Artificial sequence
  SiRNA target sequence
ggatgacgtataatgaatttc

SEQ ID NO: 272354 - DNA, 21 bp, Artificial sequence
  SiRNA target sequence
gatgacgtataatgaatttct

SEQ ID NO: 272355 - DNA, 21 bp, Artificial sequence
  SiRNA target sequence
atgacgtataatgaatttctt

SEQ ID NO: 272356 - DNA, 21 bp, Artificial sequence
  SiRNA target sequence
tgacgtataatgaatttcttg

SEQ ID NO: 272357 - DNA, 21 bp, Artificial sequence
  SiRNA target sequence
gacgtataatgaatttcttga

SEQ ID NO: 272358 - DNA, 21 bp, Artificial sequence
  SiRNA target sequence
acgtataatgaatttcttgaa

SEQ ID NO: 272359 - DNA, 21 bp, Artificial sequence
  SiRNA target sequence
cgtataatgaatttcttgaat

SEQ ID NO: 272360 - DNA, 21 bp, Artificial sequence
  SiRNA target sequence
gtataatgaatttcttgaatg

SEQ ID NO: 272361 - DNA, 21 bp, Artificial sequence
  SiRNA target sequence
tataatgaatttcttgaatgg

SEQ ID NO: 272362 - DNA, 21 bp, Artificial sequence
  SiRNA target sequence
ataatgaatttcttgaatgga

SEQ ID NO: 272363 - DNA, 21 bp, Artificial sequence
  SiRNA target sequence
taatgaatttcttgaatggat

SEQ ID NO: 272364 - DNA, 21 bp, Artificial sequence
  SiRNA target sequence
aatgaatttcttgaatggata

SEQ ID NO: 272365 - DNA, 21 bp, Artificial sequence
  SiRNA target sequence
atgaatttcttgaatggataa

SEQ ID NO: 272366 - DNA, 21 bp, Artificial sequence
  SiRNA target sequence
tgaatttcttgaatggataac

SEQ ID NO: 272367 - DNA, 21 bp, Artificial sequence
  SiRNA target sequence
gaatttcttgaatggataact

SEQ ID NO: 272368 - DNA, 21 bp, Artificial sequence
  SiRNA target sequence
aatttcttgaatggataactc

SEQ ID NO: 272369 - DNA, 21 bp, Artificial sequence
  SiRNA target sequence
atttcttgaatggataactcc

SEQ ID NO: 272370 - DNA, 21 bp, Artificial sequence
  SiRNA target sequence
tttcttgaatggataactcct

SEQ ID NO: 272371 - DNA, 21 bp, Artificial sequence
  SiRNA target sequence
ttcttgaatggataactcctg

SEQ ID NO: 272372 - DNA, 21 bp, Artificial sequence
  SiRNA target sequence
tcttgaatggataactcctgt

SEQ ID NO: 272373 - DNA, 21 bp, Artificial sequence
  SiRNA target sequence
cttgaatggataactcctgtg

SEQ ID NO: 272374 - DNA, 21 bp, Artificial sequence
  SiRNA target sequence
ttgaatggataactcctgtgt

SEQ ID NO: 272375 - DNA, 21 bp, Artificial sequence
  SiRNA target sequence
tgaatggataactcctgtgta

SEQ ID NO: 272376 - DNA, 21 bp, Artificial sequence
  SiRNA target sequence
gaatggataactcctgtgtat

SEQ ID NO: 272377 - DNA, 21 bp, Artificial sequence
  SiRNA target sequence
aatggataactcctgtgtata

SEQ ID NO: 272378 - DNA, 21 bp, Artificial sequence
  SiRNA target sequence
atggataactcctgtgtatat

SEQ ID NO: 272379 - DNA, 21 bp, Artificial sequence
  SiRNA target sequence
tggataactcctgtgtatatg

SEQ ID NO: 272380 - DNA, 21 bp, Artificial sequence
  SiRNA target sequence
ggataactcctgtgtatatgg

SEQ ID NO: 272381 - DNA, 21 bp, Artificial sequence
  SiRNA target sequence
gataactcctgtgtatatggc

SEQ ID NO: 272382 - DNA, 21 bp, Artificial sequence
  SiRNA target sequence
ataactcctgtgtatatggct

SEQ ID NO: 272383 - DNA, 21 bp, Artificial sequence
  SiRNA target sequence
taactcctgtgtatatggcta

SEQ ID NO: 272384 - DNA, 21 bp, Artificial sequence
  SiRNA target sequence
aactcctgtgtatatggctaa

SEQ ID NO: 272385 - DNA, 21 bp, Artificial sequence
  SiRNA target sequence
actcctgtgtatatggctaac

SEQ ID NO: 272386 - DNA, 21 bp, Artificial sequence
  SiRNA target sequence
ctcctgtgtatatggctaacc

SEQ ID NO: 272387 - DNA, 21 bp, Artificial sequence
  SiRNA target sequence
tcctgtgtatatggctaaccg

SEQ ID NO: 272388 - DNA, 21 bp, Artificial sequence
  SiRNA target sequence
cctgtgtatatggctaaccgt

SEQ ID NO: 272389 - DNA, 21 bp, Artificial sequence
  SiRNA target sequence
ctgtgtatatggctaaccgtc

SEQ ID NO: 272390 - DNA, 21 bp, Artificial sequence
  SiRNA target sequence
tgtgtatatggctaaccgtcg

SEQ ID NO: 272391 - DNA, 21 bp, Artificial sequence
  SiRNA target sequence
gtgtatatggctaaccgtcgt

SEQ ID NO: 272392 - DNA, 21 bp, Artificial sequence
  SiRNA target sequence
tgtatatggctaaccgtcgta

SEQ ID NO: 272393 - DNA, 21 bp, Artificial sequence
  SiRNA target sequence
gtatatggctaaccgtcgtaa

SEQ ID NO: 272394 - DNA, 21 bp, Artificial sequence
  SiRNA target sequence
tatatggctaaccgtcgtaag

SEQ ID NO: 272395 - DNA, 21 bp, Artificial sequence
  SiRNA target sequence
atatggctaaccgtcgtaagg

SEQ ID NO: 272396 - DNA, 21 bp, Artificial sequence
  SiRNA target sequence
tatggctaaccgtcgtaaggc

SEQ ID NO: 272397 - DNA, 21 bp, Artificial sequence
  SiRNA target sequence
atggctaaccgtcgtaaggcg

SEQ ID NO: 272398 - DNA, 21 bp, Artificial sequence
  SiRNA target sequence
tggctaaccgtcgtaaggcga

SEQ ID NO: 272399 - DNA, 21 bp, Artificial sequence
  SiRNA target sequence
ggctaaccgtcgtaaggcgaa

SEQ ID NO: 272400 - DNA, 21 bp, Artificial sequence
  SiRNA target sequence
gctaaccgtcgtaaggcgaat

SEQ ID NO: 272401 - DNA, 21 bp, Artificial sequence
  SiRNA target sequence
ctaaccgtcgtaaggcgaatg

SEQ ID NO: 272402 - DNA, 21 bp, Artificial sequence
  SiRNA target sequence
taaccgtcgtaaggcgaatga

SEQ ID NO: 272403 - DNA, 21 bp, Artificial sequence
  SiRNA target sequence
aaccgtcgtaaggcgaatgaa

SEQ ID NO: 272404 - DNA, 21 bp, Artificial sequence
  SiRNA target sequence
accgtcgtaaggcgaatgaat

SEQ ID NO: 272405 - DNA, 21 bp, Artificial sequence
  SiRNA target sequence
ccgtcgtaaggcgaatgaatc

SEQ ID NO: 272406 - DNA, 21 bp, Artificial sequence
  SiRNA target sequence
cgtcgtaaggcgaatgaatcg

SEQ ID NO: 272407 - DNA, 21 bp, Artificial sequence
  SiRNA target sequence
gtcgtaaggcgaatgaatcgt

SEQ ID NO: 272408 - DNA, 21 bp, Artificial sequence
  SiRNA target sequence
tcgtaaggcgaatgaatcgtt

SEQ ID NO: 272409 - DNA, 21 bp, Artificial sequence
  SiRNA target sequence
cgtaaggcgaatgaatcgttt

SEQ ID NO: 272410 - DNA, 21 bp, Artificial sequence
  SiRNA target sequence
gtaaggcgaatgaatcgttta

SEQ ID NO: 272411 - DNA, 21 bp, Artificial sequence
  SiRNA target sequence
taaggcgaatgaatcgtttaa

SEQ ID NO: 272412 - DNA, 21 bp, Artificial sequence
  SiRNA target sequence
aaggcgaatgaatcgtttaag

SEQ ID NO: 272413 - DNA, 21 bp, Artificial sequence
  SiRNA target sequence
aggcgaatgaatcgtttaaga

SEQ ID NO: 272414 - DNA, 21 bp, Artificial sequence
  SiRNA target sequence
ggcgaatgaatcgtttaagat

SEQ ID NO: 272415 - DNA, 21 bp, Artificial sequence
  SiRNA target sequence
gcgaatgaatcgtttaagatg

SEQ ID NO: 272416 - DNA, 21 bp, Artificial sequence
  SiRNA target sequence
cgaatgaatcgtttaagatgc

SEQ ID NO: 272417 - DNA, 21 bp, Artificial sequence
  SiRNA target sequence
gaatgaatcgtttaagatgcg

SEQ ID NO: 272418 - DNA, 21 bp, Artificial sequence
  SiRNA target sequence
aatgaatcgtttaagatgcgt

SEQ ID NO: 272419 - DNA, 21 bp, Artificial sequence
  SiRNA target sequence
atgaatcgtttaagatgcgtg

SEQ ID NO: 272420 - DNA, 21 bp, Artificial sequence
  SiRNA target sequence
tgaatcgtttaagatgcgtgt

SEQ ID NO: 272421 - DNA, 21 bp, Artificial sequence
  SiRNA target sequence
gaatcgtttaagatgcgtgtg

SEQ ID NO: 272422 - DNA, 21 bp, Artificial sequence
  SiRNA target sequence
aatcgtttaagatgcgtgtgg

SEQ ID NO: 272423 - DNA, 21 bp, Artificial sequence
  SiRNA target sequence
atcgtttaagatgcgtgtgga

SEQ ID NO: 272424 - DNA, 21 bp, Artificial sequence
  SiRNA target sequence
tcgtttaagatgcgtgtggat

SEQ ID NO: 272425 - DNA, 21 bp, Artificial sequence
  SiRNA target sequence
cgtttaagatgcgtgtggatg

SEQ ID NO: 272426 - DNA, 21 bp, Artificial sequence
  SiRNA target sequence
gtttaagatgcgtgtggatga

SEQ ID NO: 272427 - DNA, 21 bp, Artificial sequence
  SiRNA target sequence
tttaagatgcgtgtggatgaa

SEQ ID NO: 272428 - DNA, 21 bp, Artificial sequence
  SiRNA target sequence
ttaagatgcgtgtggatgaaa

SEQ ID NO: 272429 - DNA, 21 bp, Artificial sequence
  SiRNA target sequence
taagatgcgtgtggatgaaat

SEQ ID NO: 272430 - DNA, 21 bp, Artificial sequence
  SiRNA target sequence
aagatgcgtgtggatgaaatg

SEQ ID NO: 272431 - DNA, 21 bp, Artificial sequence
  SiRNA target sequence
agatgcgtgtggatgaaatgc

SEQ ID NO: 272432 - DNA, 21 bp, Artificial sequence
  SiRNA target sequence
gatgcgtgtggatgaaatgca

SEQ ID NO: 272433 - DNA, 21 bp, Artificial sequence
  SiRNA target sequence
atgcgtgtggatgaaatgcaa

SEQ ID NO: 272434 - DNA, 21 bp, Artificial sequence
  SiRNA target sequence
tgcgtgtggatgaaatgcaaa

SEQ ID NO: 272435 - DNA, 21 bp, Artificial sequence
  SiRNA target sequence
gcgtgtggatgaaatgcaaat

SEQ ID NO: 272436 - DNA, 21 bp, Artificial sequence
  SiRNA target sequence
cgtgtggatgaaatgcaaatg

SEQ ID NO: 272437 - DNA, 21 bp, Artificial sequence
  SiRNA target sequence
gtgtggatgaaatgcaaatgt

SEQ ID NO: 272438 - DNA, 21 bp, Artificial sequence
  SiRNA target sequence
tgtggatgaaatgcaaatgtt

SEQ ID NO: 272439 - DNA, 21 bp, Artificial sequence
  SiRNA target sequence
gtggatgaaatgcaaatgtta

SEQ ID NO: 272440 - DNA, 21 bp, Artificial sequence
  SiRNA target sequence
tggatgaaatgcaaatgttac

SEQ ID NO: 272441 - DNA, 21 bp, Artificial sequence
  SiRNA target sequence
ggatgaaatgcaaatgttacg

SEQ ID NO: 272442 - DNA, 21 bp, Artificial sequence
  SiRNA target sequence
gatgaaatgcaaatgttacgt

SEQ ID NO: 272443 - DNA, 21 bp, Artificial sequence
  SiRNA target sequence
atgaaatgcaaatgttacgta

SEQ ID NO: 272444 - DNA, 21 bp, Artificial sequence
  SiRNA target sequence
tgaaatgcaaatgttacgtat

SEQ ID NO: 272445 - DNA, 21 bp, Artificial sequence
  SiRNA target sequence
gaaatgcaaatgttacgtatg

SEQ ID NO: 272446 - DNA, 21 bp, Artificial sequence
  SiRNA target sequence
aaatgcaaatgttacgtatgg

SEQ ID NO: 272447 - DNA, 21 bp, Artificial sequence
  SiRNA target sequence
aatgcaaatgttacgtatgga

SEQ ID NO: 272448 - DNA, 21 bp, Artificial sequence
  SiRNA target sequence
atgcaaatgttacgtatggat

SEQ ID NO: 272449 - DNA, 21 bp, Artificial sequence
  SiRNA target sequence
tgcaaatgttacgtatggatg

SEQ ID NO: 272450 - DNA, 21 bp, Artificial sequence
  SiRNA target sequence
gcaaatgttacgtatggatga

SEQ ID NO: 272451 - DNA, 21 bp, Artificial sequence
  SiRNA target sequence
caaatgttacgtatggatgaa

SEQ ID NO: 272452 - DNA, 21 bp, Artificial sequence
  SiRNA target sequence
aaatgttacgtatggatgaac

SEQ ID NO: 272453 - DNA, 21 bp, Artificial sequence
  SiRNA target sequence
aatgttacgtatggatgaacc

SEQ ID NO: 272454 - DNA, 21 bp, Artificial sequence
  SiRNA target sequence
atgttacgtatggatgaacca

SEQ ID NO: 272455 - DNA, 21 bp, Artificial sequence
  SiRNA target sequence
tgttacgtatggatgaaccat

SEQ ID NO: 272456 - DNA, 21 bp, Artificial sequence
  SiRNA target sequence
gttacgtatggatgaaccatt

SEQ ID NO: 272457 - DNA, 21 bp, Artificial sequence
  SiRNA target sequence
ttacgtatggatgaaccattg

SEQ ID NO: 272458 - DNA, 21 bp, Artificial sequence
  SiRNA target sequence
tacgtatggatgaaccattgg

SEQ ID NO: 272459 - DNA, 21 bp, Artificial sequence
  SiRNA target sequence
acgtatggatgaaccattgga

SEQ ID NO: 272460 - DNA, 21 bp, Artificial sequence
  SiRNA target sequence
cgtatggatgaaccattggaa

SEQ ID NO: 272461 - DNA, 21 bp, Artificial sequence
  SiRNA target sequence
gtatggatgaaccattggaag

SEQ ID NO: 272462 - DNA, 21 bp, Artificial sequence
  SiRNA target sequence
tatggatgaaccattggaagg

SEQ ID NO: 272463 - DNA, 21 bp, Artificial sequence
  SiRNA target sequence
atggatgaaccattggaaggt

SEQ ID NO: 272464 - DNA, 21 bp, Artificial sequence
  SiRNA target sequence
tggatgaaccattggaaggtg

SEQ ID NO: 272465 - DNA, 21 bp, Artificial sequence
  SiRNA target sequence
ggatgaaccattggaaggtga

SEQ ID NO: 272466 - DNA, 21 bp, Artificial sequence
  SiRNA target sequence
gatgaaccattggaaggtgat

SEQ ID NO: 272467 - DNA, 21 bp, Artificial sequence
  SiRNA target sequence
atgaaccattggaaggtgata

SEQ ID NO: 272468 - DNA, 21 bp, Artificial sequence
  SiRNA target sequence
tgaaccattggaaggtgataa

SEQ ID NO: 272469 - DNA, 21 bp, Artificial sequence
  SiRNA target sequence
gaaccattggaaggtgataat

SEQ ID NO: 272470 - DNA, 21 bp, Artificial sequence
  SiRNA target sequence
aaccattggaaggtgataata

SEQ ID NO: 272471 - DNA, 21 bp, Artificial sequence
  SiRNA target sequence
accattggaaggtgataatat

SEQ ID NO: 272472 - DNA, 21 bp, Artificial sequence
  SiRNA target sequence
ccattggaaggtgataatatt

SEQ ID NO: 272473 - DNA, 21 bp, Artificial sequence
  SiRNA target sequence
cattggaaggtgataatattc

SEQ ID NO: 272474 - DNA, 21 bp, Artificial sequence
  SiRNA target sequence
attggaaggtgataatattct

SEQ ID NO: 272475 - DNA, 21 bp, Artificial sequence
  SiRNA target sequence
ttggaaggtgataatattctc

SEQ ID NO: 272476 - DNA, 21 bp, Artificial sequence
  SiRNA target sequence
tggaaggtgataatattctca

SEQ ID NO: 272477 - DNA, 21 bp, Artificial sequence
  SiRNA target sequence
ggaaggtgataatattctcaa

SEQ ID NO: 272478 - DNA, 21 bp, Artificial sequence
  SiRNA target sequence
gaaggtgataatattctcaat

SEQ ID NO: 272479 - DNA, 21 bp, Artificial sequence
  SiRNA target sequence
aaggtgataatattctcaata

SEQ ID NO: 272480 - DNA, 21 bp, Artificial sequence
  SiRNA target sequence
aggtgataatattctcaataa

SEQ ID NO: 272481 - DNA, 21 bp, Artificial sequence
  SiRNA target sequence
ggtgataatattctcaataag

SEQ ID NO: 272482 - DNA, 21 bp, Artificial sequence
  SiRNA target sequence
gtgataatattctcaataagt

SEQ ID NO: 272483 - DNA, 21 bp, Artificial sequence
  SiRNA target sequence
tgataatattctcaataagta

SEQ ID NO: 272484 - DNA, 21 bp, Artificial sequence
  SiRNA target sequence
gataatattctcaataagtat

SEQ ID NO: 272485 - DNA, 21 bp, Artificial sequence
  SiRNA target sequence
ataatattctcaataagtatg

SEQ ID NO: 272486 - DNA, 21 bp, Artificial sequence
  SiRNA target sequence
taatattctcaataagtatgt

SEQ ID NO: 272487 - DNA, 21 bp, Artificial sequence
  SiRNA target sequence
aatattctcaataagtatgtt

SEQ ID NO: 272488 - DNA, 21 bp, Artificial sequence
  SiRNA target sequence
atattctcaataagtatgttg

SEQ ID NO: 272489 - DNA, 21 bp, Artificial sequence
  SiRNA target sequence
tattctcaataagtatgttga

SEQ ID NO: 272490 - DNA, 21 bp, Artificial sequence
  SiRNA target sequence
attctcaataagtatgttgaa

SEQ ID NO: 272491 - DNA, 21 bp, Artificial sequence
  SiRNA target sequence
ttctcaataagtatgttgaag

SEQ ID NO: 272492 - DNA, 21 bp, Artificial sequence
  SiRNA target sequence
tctcaataagtatgttgaagt

SEQ ID NO: 272493 - DNA, 21 bp, Artificial sequence
  SiRNA target sequence
ctcaataagtatgttgaagtt

SEQ ID NO: 272494 - DNA, 21 bp, Artificial sequence
  SiRNA target sequence
tcaataagtatgttgaagtta

SEQ ID NO: 272495 - DNA, 21 bp, Artificial sequence
  SiRNA target sequence
caataagtatgttgaagttaa

SEQ ID NO: 272496 - DNA, 21 bp, Artificial sequence
  SiRNA target sequence
aataagtatgttgaagttaat

SEQ ID NO: 272497 - DNA, 21 bp, Artificial sequence
  SiRNA target sequence
ataagtatgttgaagttaatc

SEQ ID NO: 272498 - DNA, 21 bp, Artificial sequence
  SiRNA target sequence
taagtatgttgaagttaatca

SEQ ID NO: 272499 - DNA, 21 bp, Artificial sequence
  SiRNA target sequence
aagtatgttgaagttaatcag

SEQ ID NO: 272500 - DNA, 21 bp, Artificial sequence
  SiRNA target sequence
agtatgttgaagttaatcagc

SEQ ID NO: 272501 - DNA, 21 bp, Artificial sequence
  SiRNA target sequence
gtatgttgaagttaatcagcg

SEQ ID NO: 272502 - DNA, 21 bp, Artificial sequence
  SiRNA target sequence
tatgttgaagttaatcagcgc

SEQ ID NO: 272503 - DNA, 21 bp, Artificial sequence
  SiRNA target sequence
atgttgaagttaatcagcgct

SEQ ID NO: 272504 - DNA, 21 bp, Artificial sequence
  SiRNA target sequence
tgttgaagttaatcagcgctt

SEQ ID NO: 272505 - DNA, 21 bp, Artificial sequence
  SiRNA target sequence
gttgaagttaatcagcgctta

SEQ ID NO: 272506 - DNA, 21 bp, Artificial sequence
  SiRNA target sequence
ttgaagttaatcagcgcttag

SEQ ID NO: 272507 - DNA, 21 bp, Artificial sequence
  SiRNA target sequence
tgaagttaatcagcgcttagt

SEQ ID NO: 272508 - DNA, 21 bp, Artificial sequence
  SiRNA target sequence
gaagttaatcagcgcttagtg

SEQ ID NO: 272509 - DNA, 21 bp, Artificial sequence
  SiRNA target sequence
aagttaatcagcgcttagtgg

SEQ ID NO: 272510 - DNA, 21 bp, Artificial sequence
  SiRNA target sequence
agttaatcagcgcttagtgga

SEQ ID NO: 272511 - DNA, 21 bp, Artificial sequence
  SiRNA target sequence
gttaatcagcgcttagtggag

SEQ ID NO: 272512 - DNA, 21 bp, Artificial sequence
  SiRNA target sequence
ttaatcagcgcttagtggagg

SEQ ID NO: 272513 - DNA, 21 bp, Artificial sequence
  SiRNA target sequence
taatcagcgcttagtggagga

SEQ ID NO: 272514 - DNA, 21 bp, Artificial sequence
  SiRNA target sequence
aatcagcgcttagtggaggaa

SEQ ID NO: 272515 - DNA, 21 bp, Artificial sequence
  SiRNA target sequence
atcagcgcttagtggaggaaa

SEQ ID NO: 272516 - DNA, 21 bp, Artificial sequence
  SiRNA target sequence
tcagcgcttagtggaggaaat

SEQ ID NO: 272517 - DNA, 21 bp, Artificial sequence
  SiRNA target sequence
cagcgcttagtggaggaaatg

SEQ ID NO: 272518 - DNA, 21 bp, Artificial sequence
  SiRNA target sequence
agcgcttagtggaggaaatga

SEQ ID NO: 272519 - DNA, 21 bp, Artificial sequence
  SiRNA target sequence
gcgcttagtggaggaaatgaa

SEQ ID NO: 272520 - DNA, 21 bp, Artificial sequence
  SiRNA target sequence
cgcttagtggaggaaatgaag

SEQ ID NO: 272521 - DNA, 21 bp, Artificial sequence
  SiRNA target sequence
gcttagtggaggaaatgaagg

SEQ ID NO: 272522 - DNA, 21 bp, Artificial sequence
  SiRNA target sequence
cttagtggaggaaatgaaggc

SEQ ID NO: 272523 - DNA, 21 bp, Artificial sequence
  SiRNA target sequence
ttagtggaggaaatgaaggca

SEQ ID NO: 272524 - DNA, 21 bp, Artificial sequence
  SiRNA target sequence
tagtggaggaaatgaaggcat

SEQ ID NO: 272525 - DNA, 21 bp, Artificial sequence
  SiRNA target sequence
agtggaggaaatgaaggcatt

SEQ ID NO: 272526 - DNA, 21 bp, Artificial sequence
  SiRNA target sequence
gtggaggaaatgaaggcattt

SEQ ID NO: 272527 - DNA, 21 bp, Artificial sequence
  SiRNA target sequence
tggaggaaatgaaggcattta

SEQ ID NO: 272528 - DNA, 21 bp, Artificial sequence
  SiRNA target sequence
ggaggaaatgaaggcatttaa

SEQ ID NO: 272529 - DNA, 21 bp, Artificial sequence
  SiRNA target sequence
gaggaaatgaaggcatttaag

SEQ ID NO: 272530 - DNA, 21 bp, Artificial sequence
  SiRNA target sequence
aggaaatgaaggcatttaagg

SEQ ID NO: 272531 - DNA, 21 bp, Artificial sequence
  SiRNA target sequence
ggaaatgaaggcatttaagga

SEQ ID NO: 272532 - DNA, 21 bp, Artificial sequence
  SiRNA target sequence
gaaatgaaggcatttaaggag

SEQ ID NO: 272533 - DNA, 21 bp, Artificial sequence
  SiRNA target sequence
aaatgaaggcatttaaggagc

SEQ ID NO: 272534 - DNA, 21 bp, Artificial sequence
  SiRNA target sequence
aatgaaggcatttaaggagcg

SEQ ID NO: 272535 - DNA, 21 bp, Artificial sequence
  SiRNA target sequence
atgaaggcatttaaggagcgt

SEQ ID NO: 272536 - DNA, 21 bp, Artificial sequence
  SiRNA target sequence
tgaaggcatttaaggagcgta

SEQ ID NO: 272537 - DNA, 21 bp, Artificial sequence
  SiRNA target sequence
gaaggcatttaaggagcgtac

SEQ ID NO: 272538 - DNA, 21 bp, Artificial sequence
  SiRNA target sequence
aaggcatttaaggagcgtaca

SEQ ID NO: 272539 - DNA, 21 bp, Artificial sequence
  SiRNA target sequence
aggcatttaaggagcgtacac

SEQ ID NO: 272540 - DNA, 21 bp, Artificial sequence
  SiRNA target sequence
ggcatttaaggagcgtacact

SEQ ID NO: 272541 - DNA, 21 bp, Artificial sequence
  SiRNA target sequence
gcatttaaggagcgtacacta

SEQ ID NO: 272542 - DNA, 21 bp, Artificial sequence
  SiRNA target sequence
catttaaggagcgtacactat

SEQ ID NO: 272543 - DNA, 21 bp, Artificial sequence
  SiRNA target sequence
atttaaggagcgtacactatg

SEQ ID NO: 272544 - DNA, 21 bp, Artificial sequence
  SiRNA target sequence
tttaaggagcgtacactatgg

SEQ ID NO: 272545 - DNA, 21 bp, Artificial sequence
  SiRNA target sequence
ttaaggagcgtacactatggt

SEQ ID NO: 272546 - DNA, 21 bp, Artificial sequence
  SiRNA target sequence
taaggagcgtacactatggtc

SEQ ID NO: 272547 - DNA, 21 bp, Artificial sequence
  SiRNA target sequence
aaggagcgtacactatggtca

SEQ ID NO: 272548 - DNA, 21 bp, Artificial sequence
  SiRNA target sequence
aggagcgtacactatggtcag

SEQ ID NO: 272549 - DNA, 21 bp, Artificial sequence
  SiRNA target sequence
ggagcgtacactatggtcaga

SEQ ID NO: 272550 - DNA, 21 bp, Artificial sequence
  SiRNA target sequence
gagcgtacactatggtcagat

SEQ ID NO: 272551 - DNA, 21 bp, Artificial sequence
  SiRNA target sequence
agcgtacactatggtcagatt

SEQ ID NO: 272552 - DNA, 21 bp, Artificial sequence
  SiRNA target sequence
gcgtacactatggtcagattt

SEQ ID NO: 272553 - DNA, 21 bp, Artificial sequence
  SiRNA target sequence
cgtacactatggtcagattta

SEQ ID NO: 272554 - DNA, 21 bp, Artificial sequence
  SiRNA target sequence
gtacactatggtcagatttac

SEQ ID NO: 272555 - DNA, 21 bp, Artificial sequence
  SiRNA target sequence
tacactatggtcagatttaca

SEQ ID NO: 272556 - DNA, 21 bp, Artificial sequence
  SiRNA target sequence
acactatggtcagatttacat

SEQ ID NO: 272557 - DNA, 21 bp, Artificial sequence
  SiRNA target sequence
cactatggtcagatttacatc

SEQ ID NO: 272558 - DNA, 21 bp, Artificial sequence
  SiRNA target sequence
actatggtcagatttacatcg

SEQ ID NO: 272559 - DNA, 21 bp, Artificial sequence
  SiRNA target sequence
ctatggtcagatttacatcgc

SEQ ID NO: 272560 - DNA, 21 bp, Artificial sequence
  SiRNA target sequence
tatggtcagatttacatcgcg

SEQ ID NO: 272561 - DNA, 21 bp, Artificial sequence
  SiRNA target sequence
atggtcagatttacatcgcgt

SEQ ID NO: 272562 - DNA, 21 bp, Artificial sequence
  SiRNA target sequence
tggtcagatttacatcgcgta

SEQ ID NO: 272563 - DNA, 21 bp, Artificial sequence
  SiRNA target sequence
ggtcagatttacatcgcgtag

SEQ ID NO: 272564 - DNA, 21 bp, Artificial sequence
  SiRNA target sequence
gtcagatttacatcgcgtagg

SEQ ID NO: 272565 - DNA, 21 bp, Artificial sequence
  SiRNA target sequence
tcagatttacatcgcgtaggt

SEQ ID NO: 272566 - DNA, 21 bp, Artificial sequence
  SiRNA target sequence
cagatttacatcgcgtaggtg

SEQ ID NO: 272567 - DNA, 21 bp, Artificial sequence
  SiRNA target sequence
agatttacatcgcgtaggtgc

SEQ ID NO: 272568 - DNA, 21 bp, Artificial sequence
  SiRNA target sequence
gatttacatcgcgtaggtgcg

SEQ ID NO: 272569 - DNA, 21 bp, Artificial sequence
  SiRNA target sequence
atttacatcgcgtaggtgcgg

SEQ ID NO: 272570 - DNA, 21 bp, Artificial sequence
  SiRNA target sequence
tttacatcgcgtaggtgcgga

SEQ ID NO: 272571 - DNA, 21 bp, Artificial sequence
  SiRNA target sequence
ttacatcgcgtaggtgcggaa

SEQ ID NO: 272572 - DNA, 21 bp, Artificial sequence
  SiRNA target sequence
tacatcgcgtaggtgcggaaa

SEQ ID NO: 272573 - DNA, 21 bp, Artificial sequence
  SiRNA target sequence
acatcgcgtaggtgcggaaat

SEQ ID NO: 272574 - DNA, 21 bp, Artificial sequence
  SiRNA target sequence
catcgcgtaggtgcggaaatt

SEQ ID NO: 272575 - DNA, 21 bp, Artificial sequence
  SiRNA target sequence
atcgcgtaggtgcggaaatta

SEQ ID NO: 272576 - DNA, 21 bp, Artificial sequence
  SiRNA target sequence
tcgcgtaggtgcggaaattag

SEQ ID NO: 272577 - DNA, 21 bp, Artificial sequence
  SiRNA target sequence
cgcgtaggtgcggaaattagt

SEQ ID NO: 272578 - DNA, 21 bp, Artificial sequence
  SiRNA target sequence
gcgtaggtgcggaaattagtg

SEQ ID NO: 272579 - DNA, 21 bp, Artificial sequence
  SiRNA target sequence
cgtaggtgcggaaattagtgc

SEQ ID NO: 272580 - DNA, 21 bp, Artificial sequence
  SiRNA target sequence
gtaggtgcggaaattagtgcg

SEQ ID NO: 272581 - DNA, 21 bp, Artificial sequence
  SiRNA target sequence
taggtgcggaaattagtgcgt

SEQ ID NO: 272582 - DNA, 21 bp, Artificial sequence
  SiRNA target sequence
aggtgcggaaattagtgcgtc

SEQ ID NO: 272583 - DNA, 21 bp, Artificial sequence
  SiRNA target sequence
ggtgcggaaattagtgcgtca

SEQ ID NO: 272584 - DNA, 21 bp, Artificial sequence
  SiRNA target sequence
gtgcggaaattagtgcgtcag

SEQ ID NO: 272585 - DNA, 21 bp, Artificial sequence
  SiRNA target sequence
tgcggaaattagtgcgtcagt

SEQ ID NO: 272586 - DNA, 21 bp, Artificial sequence
  SiRNA target sequence
gcggaaattagtgcgtcagtt

SEQ ID NO: 272587 - DNA, 21 bp, Artificial sequence
  SiRNA target sequence
cggaaattagtgcgtcagtta

SEQ ID NO: 272588 - DNA, 21 bp, Artificial sequence
  SiRNA target sequence
ggaaattagtgcgtcagttaa

SEQ ID NO: 272589 - DNA, 21 bp, Artificial sequence
  SiRNA target sequence
gaaattagtgcgtcagttaag

SEQ ID NO: 272590 - DNA, 21 bp, Artificial sequence
  SiRNA target sequence
aaattagtgcgtcagttaaga

SEQ ID NO: 272591 - DNA, 21 bp, Artificial sequence
  SiRNA target sequence
aattagtgcgtcagttaagaa

SEQ ID NO: 272592 - DNA, 21 bp, Artificial sequence
  SiRNA target sequence
attagtgcgtcagttaagaaa

SEQ ID NO: 272593 - DNA, 21 bp, Artificial sequence
  SiRNA target sequence
ttagtgcgtcagttaagaaag

SEQ ID NO: 272594 - DNA, 21 bp, Artificial sequence
  SiRNA target sequence
tagtgcgtcagttaagaaagc

SEQ ID NO: 272595 - DNA, 21 bp, Artificial sequence
  SiRNA target sequence
agtgcgtcagttaagaaagct

SEQ ID NO: 272596 - DNA, 21 bp, Artificial sequence
  SiRNA target sequence
gtgcgtcagttaagaaagctt

SEQ ID NO: 272597 - DNA, 21 bp, Artificial sequence
  SiRNA target sequence
tgcgtcagttaagaaagcttt

SEQ ID NO: 272598 - DNA, 21 bp, Artificial sequence
  SiRNA target sequence
gcgtcagttaagaaagcttta

SEQ ID NO: 272599 - DNA, 21 bp, Artificial sequence
  SiRNA target sequence
cgtcagttaagaaagctttac

SEQ ID NO: 272600 - DNA, 21 bp, Artificial sequence
  SiRNA target sequence
gtcagttaagaaagctttacc

SEQ ID NO: 272601 - DNA, 21 bp, Artificial sequence
  SiRNA target sequence
tcagttaagaaagctttacca

SEQ ID NO: 272602 - DNA, 21 bp, Artificial sequence
  SiRNA target sequence
cagttaagaaagctttaccaa

SEQ ID NO: 272603 - DNA, 21 bp, Artificial sequence
  SiRNA target sequence
agttaagaaagctttaccaac

SEQ ID NO: 272604 - DNA, 21 bp, Artificial sequence
  SiRNA target sequence
gttaagaaagctttaccaacc

SEQ ID NO: 272605 - DNA, 21 bp, Artificial sequence
  SiRNA target sequence
ttaagaaagctttaccaacca

SEQ ID NO: 272606 - DNA, 21 bp, Artificial sequence
  SiRNA target sequence
taagaaagctttaccaaccat

SEQ ID NO: 272607 - DNA, 21 bp, Artificial sequence
  SiRNA target sequence
aagaaagctttaccaaccatt

SEQ ID NO: 272608 - DNA, 21 bp, Artificial sequence
  SiRNA target sequence
agaaagctttaccaaccattt

SEQ ID NO: 272609 - DNA, 21 bp, Artificial sequence
  SiRNA target sequence
gaaagctttaccaaccatttc

SEQ ID NO: 272610 - DNA, 21 bp, Artificial sequence
  SiRNA target sequence
aaagctttaccaaccatttcc

SEQ ID NO: 272611 - DNA, 21 bp, Artificial sequence
  SiRNA target sequence
aagctttaccaaccatttcca

SEQ ID NO: 272612 - DNA, 21 bp, Artificial sequence
  SiRNA target sequence
agctttaccaaccatttccat

SEQ ID NO: 272613 - DNA, 21 bp, Artificial sequence
  SiRNA target sequence
gctttaccaaccatttccata

SEQ ID NO: 272614 - DNA, 21 bp, Artificial sequence
  SiRNA target sequence
ctttaccaaccatttccataa

SEQ ID NO: 272615 - DNA, 21 bp, Artificial sequence
  SiRNA target sequence
tttaccaaccatttccataac

SEQ ID NO: 272616 - DNA, 21 bp, Artificial sequence
  SiRNA target sequence
ttaccaaccatttccataacc

SEQ ID NO: 272617 - DNA, 21 bp, Artificial sequence
  SiRNA target sequence
taccaaccatttccataaccg

SEQ ID NO: 272618 - DNA, 21 bp, Artificial sequence
  SiRNA target sequence
accaaccatttccataaccga

SEQ ID NO: 272619 - DNA, 21 bp, Artificial sequence
  SiRNA target sequence
ccaaccatttccataaccgaa

SEQ ID NO: 272620 - DNA, 21 bp, Artificial sequence
  SiRNA target sequence
caaccatttccataaccgaaa

SEQ ID NO: 272621 - DNA, 21 bp, Artificial sequence
  SiRNA target sequence
aaccatttccataaccgaaaa

SEQ ID NO: 272622 - DNA, 21 bp, Artificial sequence
  SiRNA target sequence
accatttccataaccgaaaaa

SEQ ID NO: 272623 - DNA, 21 bp, Artificial sequence
  SiRNA target sequence
  misc_feature (21)..(21): n is a, c, g, or t
ccatttccataaccgaaaaan

SEQ ID NO: 272624 - DNA, 21 bp, Artificial sequence
  SiRNA target sequence
  misc_feature (20)..(20): n is a, c, g, or t
catttccataaccgaaaaant

SEQ ID NO: 272625 - DNA, 21 bp, Artificial sequence
  SiRNA target sequence
  misc_feature (19)..(19): n is a, c, g, or t
atttccataaccgaaaaanta

SEQ ID NO: 272626 - DNA, 21 bp, Artificial sequence
  SiRNA target sequence
  misc_feature (18)..(18): n is a, c, g, or t
tttccataaccgaaaaantac

SEQ ID NO: 272627 - DNA, 21 bp, Artificial sequence
  SiRNA target sequence
  misc_feature (17)..(17): n is a, c, g, or t
ttccataaccgaaaaantacc

SEQ ID NO: 272628 - DNA, 21 bp, Artificial sequence
  SiRNA target sequence
  misc_feature (16)..(16): n is a, c, g, or t
tccataaccgaaaaantacca

SEQ ID NO: 272629 - DNA, 21 bp, Artificial sequence
  SiRNA target sequence
  misc_feature (15)..(15): n is a, c, g, or t
ccataaccgaaaaantaccac

SEQ ID NO: 272630 - DNA, 21 bp, Artificial sequence
  SiRNA target sequence
  misc_feature (14)..(14): n is a, c, g, or t
cataaccgaaaaantaccaca

SEQ ID NO: 272631 - DNA, 21 bp, Artificial sequence
  SiRNA target sequence
  misc_feature (13)..(13): n is a, c, g, or t
ataaccgaaaaantaccacat

SEQ ID NO: 272632 - DNA, 21 bp, Artificial sequence
  SiRNA target sequence
  misc_feature (12)..(12): n is a, c, g, or t
taaccgaaaaantaccacatt

SEQ ID NO: 272633 - DNA, 21 bp, Artificial sequence
  SiRNA target sequence
  misc_feature (11)..(11): n is a, c, g, or t
aaccgaaaaantaccacattg

SEQ ID NO: 272634 - DNA, 21 bp, Artificial sequence
  SiRNA target sequence
  misc_feature (10)..(10): n is a, c, g, or t
accgaaaaantaccacattgg

SEQ ID NO: 272635 - DNA, 21 bp, Artificial sequence
  SiRNA target sequence
  misc_feature (9)..(9): n is a, c, g, or t
ccgaaaaantaccacattgga

SEQ ID NO: 272636 - DNA, 21 bp, Artificial sequence
  SiRNA target sequence
  misc_feature (8)..(8): n is a, c, g, or t
cgaaaaantaccacattggac

SEQ ID NO: 272637 - DNA, 21 bp, Artificial sequence
  SiRNA target sequence
  misc_feature (7)..(7): n is a, c, g, or t
gaaaaantaccacattggact

SEQ ID NO: 272638 - DNA, 21 bp, Artificial sequence
  SiRNA target sequence
  misc_feature (6)..(6): n is a, c, g, or t
aaaaantaccacattggactg

SEQ ID NO: 272639 - DNA, 21 bp, Artificial sequence
  SiRNA target sequence
  misc_feature (5)..(5): n is a, c, g, or t
aaaantaccacattggactgt

SEQ ID NO: 272640 - DNA, 21 bp, Artificial sequence
  SiRNA target sequence
  misc_feature (4)..(4): n is a, c, g, or t
aaantaccacattggactgtt

SEQ ID NO: 272641 - DNA, 21 bp, Artificial sequence
  SiRNA target sequence
  misc_feature (3)..(3): n is a, c, g, or t
aantaccacattggactgttc

SEQ ID NO: 272642 - DNA, 21 bp, Artificial sequence
  SiRNA target sequence
  misc_feature (2)..(2): n is a, c, g, or t
antaccacattggactgttca

SEQ ID NO: 272643 - DNA, 21 bp, Artificial sequence
  SiRNA target sequence
  misc_feature (1)..(1): n is a, c, g, or t
ntaccacattggactgttcaa

SEQ ID NO: 272644 - DNA, 21 bp, Artificial sequence
  SiRNA target sequence
taccacattggactgttcaat

SEQ ID NO: 272645 - DNA, 21 bp, Artificial sequence
  SiRNA target sequence
accacattggactgttcaatg

SEQ ID NO: 272646 - DNA, 21 bp, Artificial sequence
  SiRNA target sequence
ccacattggactgttcaatgt

SEQ ID NO: 272647 - DNA, 21 bp, Artificial sequence
  SiRNA target sequence
cacattggactgttcaatgtg

SEQ ID NO: 272648 - DNA, 21 bp, Artificial sequence
  SiRNA target sequence
acattggactgttcaatgtgg

SEQ ID NO: 272649 - DNA, 21 bp, Artificial sequence
  SiRNA target sequence
cattggactgttcaatgtggt

SEQ ID NO: 272650 - DNA, 21 bp, Artificial sequence
  SiRNA target sequence
attggactgttcaatgtggta

SEQ ID NO: 272651 - DNA, 21 bp, Artificial sequence
  SiRNA target sequence
ttggactgttcaatgtggtat

SEQ ID NO: 272652 - DNA, 21 bp, Artificial sequence
  SiRNA target sequence
tggactgttcaatgtggtatt

SEQ ID NO: 272653 - DNA, 21 bp, Artificial sequence
  SiRNA target sequence
ggactgttcaatgtggtattg

SEQ ID NO: 272654 - DNA, 21 bp, Artificial sequence
  SiRNA target sequence
gactgttcaatgtggtattgc

SEQ ID NO: 272655 - DNA, 21 bp, Artificial sequence
  SiRNA target sequence
actgttcaatgtggtattgct

SEQ ID NO: 272656 - DNA, 21 bp, Artificial sequence
  SiRNA target sequence
ctgttcaatgtggtattgcta

SEQ ID NO: 272657 - DNA, 21 bp, Artificial sequence
  SiRNA target sequence
tgttcaatgtggtattgctaa

SEQ ID NO: 272658 - DNA, 21 bp, Artificial sequence
  SiRNA target sequence
gttcaatgtggtattgctaaa

SEQ ID NO: 272659 - DNA, 21 bp, Artificial sequence
  SiRNA target sequence
ttcaatgtggtattgctaaac

SEQ ID NO: 272660 - DNA, 21 bp, Artificial sequence
  SiRNA target sequence
tcaatgtggtattgctaaacc

SEQ ID NO: 272661 - DNA, 21 bp, Artificial sequence
  SiRNA target sequence
caatgtggtattgctaaacct

SEQ ID NO: 272662 - DNA, 21 bp, Artificial sequence
  SiRNA target sequence
aatgtggtattgctaaacctg

SEQ ID NO: 272663 - DNA, 21 bp, Artificial sequence
  SiRNA target sequence
atgtggtattgctaaacctga

SEQ ID NO: 272664 - DNA, 21 bp, Artificial sequence
  SiRNA target sequence
  misc_feature (21)..(21): n is a, c, g, or t
tgtggtattgctaaacctgan

SEQ ID NO: 272665 - DNA, 21 bp, Artificial sequence
  SiRNA target sequence
  misc_feature (20)..(20): n is a, c, g, or t
gtggtattgctaaacctgana

SEQ ID NO: 272666 - DNA, 21 bp, Artificial sequence
  SiRNA target sequence
  misc_feature (19)..(19): n is a, c, g, or t
tggtattgctaaacctganat

SEQ ID NO: 272667 - DNA, 21 bp, Artificial sequence
  SiRNA target sequence
  misc_feature (18)..(18): n is a, c, g, or t
ggtattgctaaacctganatg

SEQ ID NO: 272668 - DNA, 21 bp, Artificial sequence
  SiRNA target sequence
  misc_feature (17)..(17): n is a, c, g, or t
gtattgctaaacctganatgg

SEQ ID NO: 272669 - DNA, 21 bp, Artificial sequence
  SiRNA target sequence
  misc_feature (16)..(16): n is a, c, g, or t
tattgctaaacctganatgga

SEQ ID NO: 272670 - DNA, 21 bp, Artificial sequence
  SiRNA target sequence
  misc_feature (15)..(15): n is a, c, g, or t
attgctaaacctganatggac

SEQ ID NO: 272671 - DNA, 21 bp, Artificial sequence
  SiRNA target sequence
  misc_feature (14)..(14): n is a, c, g, or t
ttgctaaacctganatggacc

SEQ ID NO: 272672 - DNA, 21 bp, Artificial sequence
  SiRNA target sequence
  misc_feature (13)..(13): n is a, c, g, or t
tgctaaacctganatggacca

SEQ ID NO: 272673 - DNA, 21 bp, Artificial sequence
  SiRNA target sequence
  misc_feature (12)..(12): n is a, c, g, or t
gctaaacctganatggaccat

SEQ ID NO: 272674 - DNA, 21 bp, Artificial sequence
  SiRNA target sequence
  misc_feature (11)..(11): n is a, c, g, or t
ctaaacctganatggaccatg

SEQ ID NO: 272675 - DNA, 21 bp, Artificial sequence
  SiRNA target sequence
  misc_feature (10)..(10): n is a, c, g, or t
taaacctganatggaccatgc

SEQ ID NO: 272676 - DNA, 21 bp, Artificial sequence
  SiRNA target sequence
  misc_feature (9)..(9): n is a, c, g, or t
aaacctganatggaccatgct

SEQ ID NO: 272677 - DNA, 21 bp, Artificial sequence
  SiRNA target sequence
  misc_feature (8)..(8): n is a, c, g, or t
aacctganatggaccatgctt

SEQ ID NO: 272678 - DNA, 21 bp, Artificial sequence
  SiRNA target sequence
  misc_feature (7)..(7): n is a, c, g, or t
acctganatggaccatgctta

SEQ ID NO: 272679 - DNA, 21 bp, Artificial sequence
  SiRNA target sequence
  misc_feature (6)..(6): n is a, c, g, or t
cctganatggaccatgcttat

SEQ ID NO: 272680 - DNA, 21 bp, Artificial sequence
  SiRNA target sequence
  misc_feature (5)..(5): n is a, c, g, or t
ctganatggaccatgcttatg

SEQ ID NO: 272681 - DNA, 21 bp, Artificial sequence
  SiRNA target sequence
  misc_feature (4)..(4): n is a, c, g, or t
tganatggaccatgcttatga

SEQ ID NO: 272682 - DNA, 21 bp, Artificial sequence
  SiRNA target sequence
  misc_feature (3)..(3): n is a, c, g, or t
ganatggaccatgcttatgag

SEQ ID NO: 272683 - DNA, 21 bp, Artificial sequence
  SiRNA target sequence
  misc_feature (2)..(2): n is a, c, g, or t
anatggaccatgcttatgagg

SEQ ID NO: 272684 - DNA, 21 bp, Artificial sequence
  SiRNA target sequence
  misc_feature (1)..(1): n is a, c, g, or t
natggaccatgcttatgaggt

SEQ ID NO: 272685 - DNA, 21 bp, Artificial sequence
  SiRNA target sequence
atggaccatgcttatgaggtt

SEQ ID NO: 272686 - DNA, 21 bp, Artificial sequence
  SiRNA target sequence
tggaccatgcttatgaggtta

SEQ ID NO: 272687 - DNA, 21 bp, Artificial sequence
  SiRNA target sequence
ggaccatgcttatgaggttat

SEQ ID NO: 272688 - DNA, 21 bp, Artificial sequence
  SiRNA target sequence
gaccatgcttatgaggttatg

SEQ ID NO: 272689 - DNA, 21 bp, Artificial sequence
  SiRNA target sequence
accatgcttatgaggttatga

SEQ ID NO: 272690 - DNA, 21 bp, Artificial sequence
  SiRNA target sequence
ccatgcttatgaggttatgag

SEQ ID NO: 272691 - DNA, 21 bp, Artificial sequence
  SiRNA target sequence
catgcttatgaggttatgagt

SEQ ID NO: 272692 - DNA, 21 bp, Artificial sequence
  SiRNA target sequence
atgcttatgaggttatgagtt

SEQ ID NO: 272693 - DNA, 21 bp, Artificial sequence
  SiRNA target sequence
tgcttatgaggttatgagttc

SEQ ID NO: 272694 - DNA, 21 bp, Artificial sequence
  SiRNA target sequence
gcttatgaggttatgagttcg

SEQ ID NO: 272695 - DNA, 21 bp, Artificial sequence
  SiRNA target sequence
cttatgaggttatgagttcgt

SEQ ID NO: 272696 - DNA, 21 bp, Artificial sequence
  SiRNA target sequence
ttatgaggttatgagttcgta

SEQ ID NO: 272697 - DNA, 21 bp, Artificial sequence
  SiRNA target sequence
tatgaggttatgagttcgtat

SEQ ID NO: 272698 - DNA, 21 bp, Artificial sequence
  SiRNA target sequence
atgaggttatgagttcgtatg

SEQ ID NO: 272699 - DNA, 21 bp, Artificial sequence
  SiRNA target sequence
tgaggttatgagttcgtatgc

SEQ ID NO: 272700 - DNA, 21 bp, Artificial sequence
  SiRNA target sequence
gaggttatgagttcgtatgca

SEQ ID NO: 272701 - DNA, 21 bp, Artificial sequence
  SiRNA target sequence
aggttatgagttcgtatgcag

SEQ ID NO: 272702 - DNA, 21 bp, Artificial sequence
  SiRNA target sequence
ggttatgagttcgtatgcagc

SEQ ID NO: 272703 - DNA, 21 bp, Artificial sequence
  SiRNA target sequence
gttatgagttcgtatgcagct

SEQ ID NO: 272704 - DNA, 21 bp, Artificial sequence
  SiRNA target sequence
ttatgagttcgtatgcagctg

SEQ ID NO: 272705 - DNA, 21 bp, Artificial sequence
  SiRNA target sequence
tatgagttcgtatgcagctgg

SEQ ID NO: 272706 - DNA, 21 bp, Artificial sequence
  SiRNA target sequence
atgagttcgtatgcagctgga

SEQ ID NO: 272707 - DNA, 21 bp, Artificial sequence
  SiRNA target sequence
tgagttcgtatgcagctggaa

SEQ ID NO: 272708 - DNA, 21 bp, Artificial sequence
  SiRNA target sequence
gagttcgtatgcagctggaat

SEQ ID NO: 272709 - DNA, 21 bp, Artificial sequence
  SiRNA target sequence
agttcgtatgcagctggaatg

SEQ ID NO: 272710 - DNA, 21 bp, Artificial sequence
  SiRNA target sequence
gttcgtatgcagctggaatga

SEQ ID NO: 272711 - DNA, 21 bp, Artificial sequence
  SiRNA target sequence
ttcgtatgcagctggaatgaa

SEQ ID NO: 272712 - DNA, 21 bp, Artificial sequence
  SiRNA target sequence
tcgtatgcagctggaatgaat

SEQ ID NO: 272713 - DNA, 21 bp, Artificial sequence
  SiRNA target sequence
cgtatgcagctggaatgaatg

SEQ ID NO: 272714 - DNA, 21 bp, Artificial sequence
  SiRNA target sequence
gtatgcagctggaatgaatgc

SEQ ID NO: 272715 - DNA, 21 bp, Artificial sequence
  SiRNA target sequence
tatgcagctggaatgaatgca

SEQ ID NO: 272716 - DNA, 21 bp, Artificial sequence
  SiRNA target sequence
atgcagctggaatgaatgcag

SEQ ID NO: 272717 - DNA, 21 bp, Artificial sequence
  SiRNA target sequence
tgcagctggaatgaatgcaga

SEQ ID NO: 272718 - DNA, 21 bp, Artificial sequence
  SiRNA target sequence
gcagctggaatgaatgcagag

SEQ ID NO: 272719 - DNA, 21 bp, Artificial sequence
  SiRNA target sequence
cagctggaatgaatgcagaga

SEQ ID NO: 272720 - DNA, 21 bp, Artificial sequence
  SiRNA target sequence
agctggaatgaatgcagagat

SEQ ID NO: 272721 - DNA, 21 bp, Artificial sequence
  SiRNA target sequence
gctggaatgaatgcagagatt

SEQ ID NO: 272722 - DNA, 21 bp, Artificial sequence
  SiRNA target sequence
ctggaatgaatgcagagattg

SEQ ID NO: 272723 - DNA, 21 bp, Artificial sequence
  SiRNA target sequence
tggaatgaatgcagagattga

SEQ ID NO: 272724 - DNA, 21 bp, Artificial sequence
  SiRNA target sequence
ggaatgaatgcagagattgaa

SEQ ID NO: 272725 - DNA, 21 bp, Artificial sequence
  SiRNA target sequence
gaatgaatgcagagattgaag

SEQ ID NO: 272726 - DNA, 21 bp, Artificial sequence
  SiRNA target sequence
aatgaatgcagagattgaagc

SEQ ID NO: 272727 - DNA, 21 bp, Artificial sequence
  SiRNA target sequence
atgaatgcagagattgaagcg

SEQ ID NO: 272728 - DNA, 21 bp, Artificial sequence
  SiRNA target sequence
tgaatgcagagattgaagcgc

SEQ ID NO: 272729 - DNA, 21 bp, Artificial sequence
  SiRNA target sequence
gaatgcagagattgaagcgca

SEQ ID NO: 272730 - DNA, 21 bp, Artificial sequence
  SiRNA target sequence
aatgcagagattgaagcgcat

SEQ ID NO: 272731 - DNA, 21 bp, Artificial sequence
  SiRNA target sequence
atgcagagattgaagcgcatg

SEQ ID NO: 272732 - DNA, 21 bp, Artificial sequence
  SiRNA target sequence
tgcagagattgaagcgcatga

SEQ ID NO: 272733 - DNA, 21 bp, Artificial sequence
  SiRNA target sequence
gcagagattgaagcgcatgaa

SEQ ID NO: 272734 - DNA, 21 bp, Artificial sequence
  SiRNA target sequence
cagagattgaagcgcatgaac

SEQ ID NO: 272735 - DNA, 21 bp, Artificial sequence
  SiRNA target sequence
agagattgaagcgcatgaaca

SEQ ID NO: 272736 - DNA, 21 bp, Artificial sequence
  SiRNA target sequence
gagattgaagcgcatgaacaa

SEQ ID NO: 272737 - DNA, 21 bp, Artificial sequence
  SiRNA target sequence
agattgaagcgcatgaacaag

SEQ ID NO: 272738 - DNA, 21 bp, Artificial sequence
  SiRNA target sequence
gattgaagcgcatgaacaagt

SEQ ID NO: 272739 - DNA, 21 bp, Artificial sequence
  SiRNA target sequence
attgaagcgcatgaacaagtt

SEQ ID NO: 272740 - DNA, 21 bp, Artificial sequence
  SiRNA target sequence
ttgaagcgcatgaacaagttc

SEQ ID NO: 272741 - DNA, 21 bp, Artificial sequence
  SiRNA target sequence
tgaagcgcatgaacaagttcg

SEQ ID NO: 272742 - DNA, 21 bp, Artificial sequence
  SiRNA target sequence
gaagcgcatgaacaagttcgg

SEQ ID NO: 272743 - DNA, 21 bp, Artificial sequence
  SiRNA target sequence
aagcgcatgaacaagttcggc

SEQ ID NO: 272744 - DNA, 21 bp, Artificial sequence
  SiRNA target sequence
agcgcatgaacaagttcggcg

SEQ ID NO: 272745 - DNA, 21 bp, Artificial sequence
  SiRNA target sequence
gcgcatgaacaagttcggcgt

SEQ ID NO: 272746 - DNA, 21 bp, Artificial sequence
  SiRNA target sequence
cgcatgaacaagttcggcgtt

SEQ ID NO: 272747 - DNA, 21 bp, Artificial sequence
  SiRNA target sequence
gcatgaacaagttcggcgttc

SEQ ID NO: 272748 - DNA, 21 bp, Artificial sequence
  SiRNA target sequence
  misc_feature (21)..(21): n is a, c, g, or t
catgaacaagttcggcgttcn

SEQ ID NO: 272749 - DNA, 21 bp, Artificial sequence
  SiRNA target sequence
  misc_feature (20)..(20): n is a, c, g, or t
atgaacaagttcggcgttcnt

SEQ ID NO: 272750 - DNA, 21 bp, Artificial sequence
  SiRNA target sequence
  misc_feature (19)..(19): n is a, c, g, or t
tgaacaagttcggcgttcntc

SEQ ID NO: 272751 - DNA, 21 bp, Artificial sequence
  SiRNA target sequence
  misc_feature (18)..(18): n is a, c, g, or t
gaacaagttcggcgttcntca

SEQ ID NO: 272752 - DNA, 21 bp, Artificial sequence
  SiRNA target sequence
  misc_feature (17)..(17): n is a, c, g, or t
aacaagttcggcgttcntcag

SEQ ID NO: 272753 - DNA, 21 bp, Artificial sequence
  SiRNA target sequence
  misc_feature (16)..(16): n is a, c, g, or t
acaagttcggcgttcntcagt

SEQ ID NO: 272754 - DNA, 21 bp, Artificial sequence
  SiRNA target sequence
  misc_feature (15)..(15): n is a, c, g, or t
caagttcggcgttcntcagtg

SEQ ID NO: 272755 - DNA, 21 bp, Artificial sequence
  SiRNA target sequence
  misc_feature (14)..(14): n is a, c, g, or t
aagttcggcgttcntcagtgg

SEQ ID NO: 272756 - DNA, 21 bp, Artificial sequence
  SiRNA target sequence
  misc_feature (13)..(13): n is a, c, g, or t
agttcggcgttcntcagtgga

SEQ ID NO: 272757 - DNA, 21 bp, Artificial sequence
  SiRNA target sequence
  misc_feature (12)..(12): n is a, c, g, or t
gttcggcgttcntcagtggaa

SEQ ID NO: 272758 - DNA, 21 bp, Artificial sequence
  SiRNA target sequence
  misc_feature (11)..(11): n is a, c, g, or t
ttcggcgttcntcagtggaat

SEQ ID NO: 272759 - DNA, 21 bp, Artificial sequence
  SiRNA target sequence
  misc_feature (10)..(10): n is a, c, g, or t
tcggcgttcntcagtggaatg

SEQ ID NO: 272760 - DNA, 21 bp, Artificial sequence
  SiRNA target sequence
  misc_feature (9)..(9): n is a, c, g, or t
cggcgttcntcagtggaatgt

SEQ ID NO: 272761 - DNA, 21 bp, Artificial sequence
  SiRNA target sequence
  misc_feature (8)..(8): n is a, c, g, or t
ggcgttcntcagtggaatgtc

SEQ ID NO: 272762 - DNA, 21 bp, Artificial sequence
  SiRNA target sequence
  misc_feature (7)..(7): n is a, c, g, or t
gcgttcntcagtggaatgtca

SEQ ID NO: 272763 - DNA, 21 bp, Artificial sequence
  SiRNA target sequence
  misc_feature (6)..(6): n is a, c, g, or t
cgttcntcagtggaatgtcaa

SEQ ID NO: 272764 - DNA, 21 bp, Artificial sequence
  SiRNA target sequence
  misc_feature (5)..(5): n is a, c, g, or t
gttcntcagtggaatgtcaat

SEQ ID NO: 272765 - DNA, 21 bp, Artificial sequence
  SiRNA target sequence
  misc_feature (4)..(4): n is a, c, g, or t
ttcntcagtggaatgtcaatt

SEQ ID NO: 272766 - DNA, 21 bp, Artificial sequence
  SiRNA target sequence
  misc_feature (3)..(3): n is a, c, g, or t
tcntcagtggaatgtcaattt

SEQ ID NO: 272767 - DNA, 21 bp, Artificial sequence
  SiRNA target sequence
  misc_feature (2)..(2): n is a, c, g, or t
cntcagtggaatgtcaatttg

SEQ ID NO: 272768 - DNA, 21 bp, Artificial sequence
  SiRNA target sequence
  misc_feature (1)..(1): n is a, c, g, or t
ntcagtggaatgtcaatttgc

SEQ ID NO: 272769 - DNA, 21 bp, Artificial sequence
  SiRNA target sequence
tcagtggaatgtcaatttgca

SEQ ID NO: 272770 - DNA, 21 bp, Artificial sequence
  SiRNA target sequence
cagtggaatgtcaatttgcag

SEQ ID NO: 272771 - DNA, 21 bp, Artificial sequence
  SiRNA target sequence
agtggaatgtcaatttgcaga

SEQ ID NO: 272772 - DNA, 21 bp, Artificial sequence
  SiRNA target sequence
gtggaatgtcaatttgcagag

SEQ ID NO: 272773 - DNA, 21 bp, Artificial sequence
  SiRNA target sequence
tggaatgtcaatttgcagagc

SEQ ID NO: 272774 - DNA, 21 bp, Artificial sequence
  SiRNA target sequence
ggaatgtcaatttgcagagcc

SEQ ID NO: 272775 - DNA, 21 bp, Artificial sequence
  SiRNA target sequence
gaatgtcaatttgcagagcct

SEQ ID NO: 272776 - DNA, 21 bp, Artificial sequence
  SiRNA target sequence
aatgtcaatttgcagagcctc

SEQ ID NO: 272777 - DNA, 21 bp, Artificial sequence
  SiRNA target sequence
atgtcaatttgcagagcctca

SEQ ID NO: 272778 - DNA, 21 bp, Artificial sequence
  SiRNA target sequence
tgtcaatttgcagagcctcaa

SEQ ID NO: 272779 - DNA, 21 bp, Artificial sequence
  SiRNA target sequence
gtcaatttgcagagcctcaag

SEQ ID NO: 272780 - DNA, 21 bp, Artificial sequence
  SiRNA target sequence
tcaatttgcagagcctcaagc

SEQ ID NO: 272781 - DNA, 21 bp, Artificial sequence
  SiRNA target sequence
caatttgcagagcctcaagct

SEQ ID NO: 272782 - DNA, 21 bp, Artificial sequence
  SiRNA target sequence
  misc_feature (21)..(21): n is a, c, g, or t
aatttgcagagcctcaagctn

SEQ ID NO: 272783 - DNA, 21 bp, Artificial sequence
  SiRNA target sequence
  misc_feature (20)..(20): n is a, c, g, or t
atttgcagagcctcaagctnc

SEQ ID NO: 272784 - DNA, 21 bp, Artificial sequence
  SiRNA target sequence
  misc_feature (19)..(19): n is a, c, g, or t
tttgcagagcctcaagctnca

SEQ ID NO: 272785 - DNA, 21 bp, Artificial sequence
  SiRNA target sequence
  misc_feature (18)..(18): n is a, c, g, or t
ttgcagagcctcaagctncaa

SEQ ID NO: 272786 - DNA, 21 bp, Artificial sequence
  SiRNA target sequence
  misc_feature (17)..(17): n is a, c, g, or t
tgcagagcctcaagctncaag

SEQ ID NO: 272787 - DNA, 21 bp, Artificial sequence
  SiRNA target sequence
  misc_feature (16)..(16): n is a, c, g, or t
gcagagcctcaagctncaaga

SEQ ID NO: 272788 - DNA, 21 bp, Artificial sequence
  SiRNA target sequence
  misc_feature (15)..(15): n is a, c, g, or t
cagagcctcaagctncaagaa

SEQ ID NO: 272789 - DNA, 21 bp, Artificial sequence
  SiRNA target sequence
  misc_feature (14)..(14): n is a, c, g, or t
agagcctcaagctncaagaaa

SEQ ID NO: 272790 - DNA, 21 bp, Artificial sequence
  SiRNA target sequence
  misc_feature (13)..(13): n is a, c, g, or t
  misc_feature (21)..(21): n is a, c, g, or t
gagcctcaagctncaagaaan

SEQ ID NO: 272791 - DNA, 21 bp, Artificial sequence
  SiRNA target sequence
  misc_feature (12)..(12): n is a, c, g, or t
  misc_feature (20)..(20): n is a, c, g, or t
agcctcaagctncaagaaanc

SEQ ID NO: 272792 - DNA, 21 bp, Artificial sequence
  SiRNA target sequence
  misc_feature (11)..(11): n is a, c, g, or t
  misc_feature (19)..(19): n is a, c, g, or t
gcctcaagctncaagaaancc

SEQ ID NO: 272793 - DNA, 21 bp, Artificial sequence
  SiRNA target sequence
  misc_feature (10)..(10): n is a, c, g, or t
  misc_feature (18)..(18): n is a, c, g, or t
cctcaagctncaagaaancct

SEQ ID NO: 272794 - DNA, 21 bp, Artificial sequence
  SiRNA target sequence
  misc_feature (9)..(9): n is a, c, g, or t
  misc_feature (17)..(17): n is a, c, g, or t
ctcaagctncaagaaancctg

SEQ ID NO: 272795 - DNA, 21 bp, Artificial sequence
  SiRNA target sequence
  misc_feature (8)..(8): n is a, c, g, or t
  misc_feature (16)..(16): n is a, c, g, or t
tcaagctncaagaaancctga

SEQ ID NO: 272796 - DNA, 21 bp, Artificial sequence
  SiRNA target sequence
  misc_feature (7)..(7): n is a, c, g, or t
  misc_feature (15)..(15): n is a, c, g, or t
caagctncaagaaancctgat

SEQ ID NO: 272797 - DNA, 21 bp, Artificial sequence
  SiRNA target sequence
  misc_feature (6)..(6): n is a, c, g, or t
  misc_feature (14)..(14): n is a, c, g, or t
aagctncaagaaancctgatg

SEQ ID NO: 272798 - DNA, 21 bp, Artificial sequence
  SiRNA target sequence
  misc_feature (5)..(5): n is a, c, g, or t
  misc_feature (13)..(13): n is a, c, g, or t
agctncaagaaancctgatga

SEQ ID NO: 272799 - DNA, 21 bp, Artificial sequence
  SiRNA target sequence
  misc_feature (4)..(4): n is a, c, g, or t
  misc_feature (12)..(12): n is a, c, g, or t
gctncaagaaancctgatgat

SEQ ID NO: 272800 - DNA, 21 bp, Artificial sequence
  SiRNA target sequence
  misc_feature (3)..(3): n is a, c, g, or t
  misc_feature (11)..(11): n is a, c, g, or t
ctncaagaaancctgatgatg

SEQ ID NO: 272801 - DNA, 21 bp, Artificial sequence
  SiRNA target sequence
  misc_feature (2)..(2): n is a, c, g, or t
  misc_feature (10)..(10): n is a, c, g, or t
tncaagaaancctgatgatga

SEQ ID NO: 272802 - DNA, 21 bp, Artificial sequence
  SiRNA target sequence
  misc_feature (1)..(1): n is a, c, g, or t
  misc_feature (9)..(9): n is a, c, g, or t
ncaagaaancctgatgatgaa

SEQ ID NO: 272803 - DNA, 21 bp, Artificial sequence
  SiRNA target sequence
  misc_feature (8)..(8): n is a, c, g, or t
caagaaancctgatgatgaag

SEQ ID NO: 272804 - DNA, 21 bp, Artificial sequence
  SiRNA target sequence
  misc_feature (7)..(7): n is a, c, g, or t
aagaaancctgatgatgaagg

SEQ ID NO: 272805 - DNA, 21 bp, Artificial sequence
  SiRNA target sequence
  misc_feature (6)..(6): n is a, c, g, or t
agaaancctgatgatgaagga

SEQ ID NO: 272806 - DNA, 21 bp, Artificial sequence
  SiRNA target sequence
  misc_feature (5)..(5): n is a, c, g, or t
gaaancctgatgatgaaggac

SEQ ID NO: 272807 - DNA, 21 bp, Artificial sequence
  SiRNA target sequence
  misc_feature (4)..(4): n is a, c, g, or t
aaancctgatgatgaaggacc

SEQ ID NO: 272808 - DNA, 21 bp, Artificial sequence
  SiRNA target sequence
  misc_feature (3)..(3): n is a, c, g, or t
aancctgatgatgaaggacca

SEQ ID NO: 272809 - DNA, 21 bp, Artificial sequence
  SiRNA target sequence
  misc_feature (2)..(2): n is a, c, g, or t
ancctgatgatgaaggaccaa

SEQ ID NO: 272810 - DNA, 21 bp, Artificial sequence
  SiRNA target sequence
  misc_feature (1)..(1): n is a, c, g, or t
ncctgatgatgaaggaccaac

SEQ ID NO: 272811 - DNA, 21 bp, Artificial sequence
  SiRNA target sequence
cctgatgatgaaggaccaacc

SEQ ID NO: 272812 - DNA, 21 bp, Artificial sequence
  SiRNA target sequence
ctgatgatgaaggaccaacca

SEQ ID NO: 272813 - DNA, 21 bp, Artificial sequence
  SiRNA target sequence
tgatgatgaaggaccaaccat

SEQ ID NO: 272814 - DNA, 21 bp, Artificial sequence
  SiRNA target sequence
gatgatgaaggaccaaccata

SEQ ID NO: 272815 - DNA, 21 bp, Artificial sequence
  SiRNA target sequence
atgatgaaggaccaaccatag

SEQ ID NO: 272816 - DNA, 21 bp, Artificial sequence
  SiRNA target sequence
tgatgaaggaccaaccataga

SEQ ID NO: 272817 - DNA, 21 bp, Artificial sequence
  SiRNA target sequence
gatgaaggaccaaccatagat

SEQ ID NO: 272818 - DNA, 21 bp, Artificial sequence
  SiRNA target sequence
atgaaggaccaaccatagatg

SEQ ID NO: 272819 - DNA, 21 bp, Artificial sequence
  SiRNA target sequence
tgaaggaccaaccatagatga

SEQ ID NO: 272820 - DNA, 21 bp, Artificial sequence
  SiRNA target sequence
gaaggaccaaccatagatgaa

SEQ ID NO: 272821 - DNA, 21 bp, Artificial sequence
  SiRNA target sequence
aaggaccaaccatagatgaag

SEQ ID NO: 272822 - DNA, 21 bp, Artificial sequence
  SiRNA target sequence
aggaccaaccatagatgaaga

SEQ ID NO: 272823 - DNA, 21 bp, Artificial sequence
  SiRNA target sequence
ggaccaaccatagatgaagaa

SEQ ID NO: 272824 - DNA, 21 bp, Artificial sequence
  SiRNA target sequence
gaccaaccatagatgaagaac

SEQ ID NO: 272825 - DNA, 21 bp, Artificial sequence
  SiRNA target sequence
accaaccatagatgaagaact

SEQ ID NO: 272826 - DNA, 21 bp, Artificial sequence
  SiRNA target sequence
ccaaccatagatgaagaactt

SEQ ID NO: 272827 - DNA, 21 bp, Artificial sequence
  SiRNA target sequence
caaccatagatgaagaactta

SEQ ID NO: 272828 - DNA, 21 bp, Artificial sequence
  SiRNA target sequence
aaccatagatgaagaacttat

SEQ ID NO: 272829 - DNA, 21 bp, Artificial sequence
  SiRNA target sequence
accatagatgaagaacttatg

SEQ ID NO: 272830 - DNA, 21 bp, Artificial sequence
  SiRNA target sequence
ccatagatgaagaacttatgg

SEQ ID NO: 272831 - DNA, 21 bp, Artificial sequence
  SiRNA target sequence
catagatgaagaacttatggg

SEQ ID NO: 272832 - DNA, 21 bp, Artificial sequence
  SiRNA target sequence
atagatgaagaacttatgggc

SEQ ID NO: 272833 - DNA, 21 bp, Artificial sequence
  SiRNA target sequence
tagatgaagaacttatgggcg

SEQ ID NO: 272834 - DNA, 21 bp, Artificial sequence
  SiRNA target sequence
agatgaagaacttatgggcga

SEQ ID NO: 272835 - DNA, 21 bp, Artificial sequence
  SiRNA target sequence
gatgaagaacttatgggcgac

SEQ ID NO: 272836 - DNA, 21 bp, Artificial sequence
  SiRNA target sequence
atgaagaacttatgggcgaca

SEQ ID NO: 272837 - DNA, 21 bp, Artificial sequence
  SiRNA target sequence
tgaagaacttatgggcgacac

SEQ ID NO: 272838 - DNA, 21 bp, Artificial sequence
  SiRNA target sequence
gaagaacttatgggcgacact

SEQ ID NO: 272839 - DNA, 21 bp, Artificial sequence
  SiRNA target sequence
aagaacttatgggcgacactg

SEQ ID NO: 272840 - DNA, 21 bp, Artificial sequence
  SiRNA target sequence
agaacttatgggcgacactga

SEQ ID NO: 272841 - DNA, 21 bp, Artificial sequence
  SiRNA target sequence
gaacttatgggcgacactgaa

SEQ ID NO: 272842 - DNA, 21 bp, Artificial sequence
  SiRNA target sequence
aacttatgggcgacactgaat

SEQ ID NO: 272843 - DNA, 21 bp, Artificial sequence
  SiRNA target sequence
acttatgggcgacactgaatt

SEQ ID NO: 272844 - DNA, 21 bp, Artificial sequence
  SiRNA target sequence
cttatgggcgacactgaattc

SEQ ID NO: 272845 - DNA, 21 bp, Artificial sequence
  SiRNA target sequence
ttatgggcgacactgaattca

SEQ ID NO: 272846 - DNA, 21 bp, Artificial sequence
  SiRNA target sequence
tatgggcgacactgaattcac

SEQ ID NO: 272847 - DNA, 21 bp, Artificial sequence
  SiRNA target sequence
atgggcgacactgaattcaca

SEQ ID NO: 272848 - DNA, 21 bp, Artificial sequence
  SiRNA target sequence
tgggcgacactgaattcacat

SEQ ID NO: 272849 - DNA, 21 bp, Artificial sequence
  SiRNA target sequence
gggcgacactgaattcacatc

SEQ ID NO: 272850 - DNA, 21 bp, Artificial sequence
  SiRNA target sequence
ggcgacactgaattcacatca

SEQ ID NO: 272851 - DNA, 21 bp, Artificial sequence
  SiRNA target sequence
gcgacactgaattcacatcac

SEQ ID NO: 272852 - DNA, 21 bp, Artificial sequence
  SiRNA target sequence
cgacactgaattcacatcaca

SEQ ID NO: 272853 - DNA, 21 bp, Artificial sequence
  SiRNA target sequence
gacactgaattcacatcacag

SEQ ID NO: 272854 - DNA, 21 bp, Artificial sequence
  SiRNA target sequence
acactgaattcacatcacagg

SEQ ID NO: 272855 - DNA, 21 bp, Artificial sequence
  SiRNA target sequence
cactgaattcacatcacaggc

SEQ ID NO: 272856 - DNA, 21 bp, Artificial sequence
  SiRNA target sequence
actgaattcacatcacaggct

SEQ ID NO: 272857 - DNA, 21 bp, Artificial sequence
  SiRNA target sequence
ctgaattcacatcacaggctc

SEQ ID NO: 272858 - DNA, 21 bp, Artificial sequence
  SiRNA target sequence
tgaattcacatcacaggctct

SEQ ID NO: 272859 - DNA, 21 bp, Artificial sequence
  SiRNA target sequence
gaattcacatcacaggctcta

SEQ ID NO: 272860 - DNA, 21 bp, Artificial sequence
  SiRNA target sequence
aattcacatcacaggctctag

SEQ ID NO: 272861 - DNA, 21 bp, Artificial sequence
  SiRNA target sequence
attcacatcacaggctctaga

SEQ ID NO: 272862 - DNA, 21 bp, Artificial sequence
  SiRNA target sequence
ttcacatcacaggctctagaa

SEQ ID NO: 272863 - DNA, 21 bp, Artificial sequence
  SiRNA target sequence
tcacatcacaggctctagaac

SEQ ID NO: 272864 - DNA, 21 bp, Artificial sequence
  SiRNA target sequence
cacatcacaggctctagaacg

SEQ ID NO: 272865 - DNA, 21 bp, Artificial sequence
  SiRNA target sequence
acatcacaggctctagaacgt

SEQ ID NO: 272866 - DNA, 21 bp, Artificial sequence
  SiRNA target sequence
catcacaggctctagaacgtc

SEQ ID NO: 272867 - DNA, 21 bp, Artificial sequence
  SiRNA target sequence
atcacaggctctagaacgtct

SEQ ID NO: 272868 - DNA, 21 bp, Artificial sequence
  SiRNA target sequence
tcacaggctctagaacgtctt

SEQ ID NO: 272869 - DNA, 21 bp, Artificial sequence
  SiRNA target sequence
cacaggctctagaacgtcttg

SEQ ID NO: 272870 - DNA, 21 bp, Artificial sequence
  SiRNA target sequence
acaggctctagaacgtcttgt

SEQ ID NO: 272871 - DNA, 21 bp, Artificial sequence
  SiRNA target sequence
caggctctagaacgtcttgtg

SEQ ID NO: 272872 - DNA, 21 bp, Artificial sequence
  SiRNA target sequence
aggctctagaacgtcttgtgg

SEQ ID NO: 272873 - DNA, 21 bp, Artificial sequence
  SiRNA target sequence
ggctctagaacgtcttgtgga

SEQ ID NO: 272874 - DNA, 21 bp, Artificial sequence
  SiRNA target sequence
gctctagaacgtcttgtggat

SEQ ID NO: 272875 - DNA, 21 bp, Artificial sequence
  SiRNA target sequence
ctctagaacgtcttgtggatg

SEQ ID NO: 272876 - DNA, 21 bp, Artificial sequence
  SiRNA target sequence
tctagaacgtcttgtggatga

SEQ ID NO: 272877 - DNA, 21 bp, Artificial sequence
  SiRNA target sequence
ctagaacgtcttgtggatgaa

SEQ ID NO: 272878 - DNA, 21 bp, Artificial sequence
  SiRNA target sequence
tagaacgtcttgtggatgaag

SEQ ID NO: 272879 - DNA, 21 bp, Artificial sequence
  SiRNA target sequence
agaacgtcttgtggatgaagg

SEQ ID NO: 272880 - DNA, 21 bp, Artificial sequence
  SiRNA target sequence
gaacgtcttgtggatgaaggt

SEQ ID NO: 272881 - DNA, 21 bp, Artificial sequence
  SiRNA target sequence
aacgtcttgtggatgaaggtt

SEQ ID NO: 272882 - DNA, 21 bp, Artificial sequence
  SiRNA target sequence
acgtcttgtggatgaaggtta

SEQ ID NO: 272883 - DNA, 21 bp, Artificial sequence
  SiRNA target sequence
cgtcttgtggatgaaggttat

SEQ ID NO: 272884 - DNA, 21 bp, Artificial sequence
  SiRNA target sequence
gtcttgtggatgaaggttata

SEQ ID NO: 272885 - DNA, 21 bp, Artificial sequence
  SiRNA target sequence
tcttgtggatgaaggttatat

SEQ ID NO: 272886 - DNA, 21 bp, Artificial sequence
  SiRNA target sequence
cttgtggatgaaggttatata

SEQ ID NO: 272887 - DNA, 21 bp, Artificial sequence
  SiRNA target sequence
ttgtggatgaaggttatataa

SEQ ID NO: 272888 - DNA, 21 bp, Artificial sequence
  SiRNA target sequence
tgtggatgaaggttatataac

SEQ ID NO: 272889 - DNA, 21 bp, Artificial sequence
  SiRNA target sequence
gtggatgaaggttatataact

SEQ ID NO: 272890 - DNA, 21 bp, Artificial sequence
  SiRNA target sequence
tggatgaaggttatataactg

SEQ ID NO: 272891 - DNA, 21 bp, Artificial sequence
  SiRNA target sequence
ggatgaaggttatataactgg

SEQ ID NO: 272892 - DNA, 21 bp, Artificial sequence
  SiRNA target sequence
gatgaaggttatataactgga

SEQ ID NO: 272893 - DNA, 21 bp, Artificial sequence
  SiRNA target sequence
atgaaggttatataactggaa

SEQ ID NO: 272894 - DNA, 21 bp, Artificial sequence
  SiRNA target sequence
tgaaggttatataactggaaa

SEQ ID NO: 272895 - DNA, 21 bp, Artificial sequence
  SiRNA target sequence
gaaggttatataactggaaaa

SEQ ID NO: 272896 - DNA, 21 bp, Artificial sequence
  SiRNA target sequence
aaggttatataactggaaaac

SEQ ID NO: 272897 - DNA, 21 bp, Artificial sequence
  SiRNA target sequence
aggttatataactggaaaaca

SEQ ID NO: 272898 - DNA, 21 bp, Artificial sequence
  SiRNA target sequence
ggttatataactggaaaacag

SEQ ID NO: 272899 - DNA, 21 bp, Artificial sequence
  SiRNA target sequence
gttatataactggaaaacaga

SEQ ID NO: 272900 - DNA, 21 bp, Artificial sequence
  SiRNA target sequence
ttatataactggaaaacagaa

SEQ ID NO: 272901 - DNA, 21 bp, Artificial sequence
  SiRNA target sequence
tatataactggaaaacagaag

SEQ ID NO: 272902 - DNA, 21 bp, Artificial sequence
  SiRNA target sequence
atataactggaaaacagaaga

SEQ ID NO: 272903 - DNA, 21 bp, Artificial sequence
  SiRNA target sequence
tataactggaaaacagaagaa

SEQ ID NO: 272904 - DNA, 21 bp, Artificial sequence
  SiRNA target sequence
ataactggaaaacagaagaaa

SEQ ID NO: 272905 - DNA, 21 bp, Artificial sequence
  SiRNA target sequence
taactggaaaacagaagaaat

SEQ ID NO: 272906 - DNA, 21 bp, Artificial sequence
  SiRNA target sequence
aactggaaaacagaagaaata

SEQ ID NO: 272907 - DNA, 21 bp, Artificial sequence
  SiRNA target sequence
actggaaaacagaagaaatat

SEQ ID NO: 272908 - DNA, 21 bp, Artificial sequence
  SiRNA target sequence
ctggaaaacagaagaaatata

SEQ ID NO: 272909 - DNA, 21 bp, Artificial sequence
  SiRNA target sequence
tggaaaacagaagaaatatat

SEQ ID NO: 272910 - DNA, 21 bp, Artificial sequence
  SiRNA target sequence
ggaaaacagaagaaatatata

SEQ ID NO: 272911 - DNA, 21 bp, Artificial sequence
  SiRNA target sequence
gaaaacagaagaaatatatag

SEQ ID NO: 272912 - DNA, 21 bp, Artificial sequence
  SiRNA target sequence
aaaacagaagaaatatatagc

SEQ ID NO: 272913 - DNA, 21 bp, Artificial sequence
  SiRNA target sequence
aaacagaagaaatatatagct

SEQ ID NO: 272914 - DNA, 21 bp, Artificial sequence
  SiRNA target sequence
aacagaagaaatatatagcta

SEQ ID NO: 272915 - DNA, 21 bp, Artificial sequence
  SiRNA target sequence
acagaagaaatatatagctat

SEQ ID NO: 272916 - DNA, 21 bp, Artificial sequence
  SiRNA target sequence
cagaagaaatatatagctatg

SEQ ID NO: 272917 - DNA, 21 bp, Artificial sequence
  SiRNA target sequence
agaagaaatatatagctatgt

SEQ ID NO: 272918 - DNA, 21 bp, Artificial sequence
  SiRNA target sequence
gaagaaatatatagctatgtg

SEQ ID NO: 272919 - DNA, 21 bp, Artificial sequence
  SiRNA target sequence
aagaaatatatagctatgtgg

SEQ ID NO: 272920 - DNA, 21 bp, Artificial sequence
  SiRNA target sequence
agaaatatatagctatgtggt

SEQ ID NO: 272921 - DNA, 21 bp, Artificial sequence
  SiRNA target sequence
gaaatatatagctatgtggtg

SEQ ID NO: 272922 - DNA, 21 bp, Artificial sequence
  SiRNA target sequence
aaatatatagctatgtggtgt

SEQ ID NO: 272923 - DNA, 21 bp, Artificial sequence
  SiRNA target sequence
aatatatagctatgtggtgta

SEQ ID NO: 272924 - DNA, 21 bp, Artificial sequence
  SiRNA target sequence
atatatagctatgtggtgtag

SEQ ID NO: 272925 - DNA, 21 bp, Artificial sequence
  SiRNA target sequence
tatatagctatgtggtgtagt

SEQ ID NO: 272926 - DNA, 21 bp, Artificial sequence
  SiRNA target sequence
atatagctatgtggtgtagta

SEQ ID NO: 272927 - DNA, 21 bp, Artificial sequence
  SiRNA target sequence
tatagctatgtggtgtagtaa

SEQ ID NO: 272928 - DNA, 21 bp, Artificial sequence
  SiRNA target sequence
atagctatgtggtgtagtaag

SEQ ID NO: 272929 - DNA, 21 bp, Artificial sequence
  SiRNA target sequence
tagctatgtggtgtagtaagc

SEQ ID NO: 272930 - DNA, 21 bp, Artificial sequence
  SiRNA target sequence
agctatgtggtgtagtaagcg

SEQ ID NO: 272931 - DNA, 21 bp, Artificial sequence
  SiRNA target sequence
gctatgtggtgtagtaagcgt

SEQ ID NO: 272932 - DNA, 21 bp, Artificial sequence
  SiRNA target sequence
ctatgtggtgtagtaagcgtc

SEQ ID NO: 272933 - DNA, 21 bp, Artificial sequence
  SiRNA target sequence
tatgtggtgtagtaagcgtcg

SEQ ID NO: 272934 - DNA, 21 bp, Artificial sequence
  SiRNA target sequence
atgtggtgtagtaagcgtcgt

SEQ ID NO: 272935 - DNA, 21 bp, Artificial sequence
  SiRNA target sequence
tgtggtgtagtaagcgtcgtg

SEQ ID NO: 272936 - DNA, 21 bp, Artificial sequence
  SiRNA target sequence
gtggtgtagtaagcgtcgtga

SEQ ID NO: 272937 - DNA, 21 bp, Artificial sequence
  SiRNA target sequence
tggtgtagtaagcgtcgtgaa

SEQ ID NO: 272938 - DNA, 21 bp, Artificial sequence
  SiRNA target sequence
ggtgtagtaagcgtcgtgaac

SEQ ID NO: 272939 - DNA, 21 bp, Artificial sequence
  SiRNA target sequence
gtgtagtaagcgtcgtgaaca

SEQ ID NO: 272940 - DNA, 21 bp, Artificial sequence
  SiRNA target sequence
tgtagtaagcgtcgtgaacat

SEQ ID NO: 272941 - DNA, 21 bp, Artificial sequence
  SiRNA target sequence
gtagtaagcgtcgtgaacata

SEQ ID NO: 272942 - DNA, 21 bp, Artificial sequence
  SiRNA target sequence
tagtaagcgtcgtgaacatac

SEQ ID NO: 272943 - DNA, 21 bp, Artificial sequence
  SiRNA target sequence
agtaagcgtcgtgaacatact

SEQ ID NO: 272944 - DNA, 21 bp, Artificial sequence
  SiRNA target sequence
gtaagcgtcgtgaacatactg

SEQ ID NO: 272945 - DNA, 21 bp, Artificial sequence
  SiRNA target sequence
taagcgtcgtgaacatactgc

SEQ ID NO: 272946 - DNA, 21 bp, Artificial sequence
  SiRNA target sequence
aagcgtcgtgaacatactgct

SEQ ID NO: 272947 - DNA, 21 bp, Artificial sequence
  SiRNA target sequence
agcgtcgtgaacatactgctg

SEQ ID NO: 272948 - DNA, 21 bp, Artificial sequence
  SiRNA target sequence
gcgtcgtgaacatactgctga

SEQ ID NO: 272949 - DNA, 21 bp, Artificial sequence
  SiRNA target sequence
cgtcgtgaacatactgctgac

SEQ ID NO: 272950 - DNA, 21 bp, Artificial sequence
  SiRNA target sequence
gtcgtgaacatactgctgact

SEQ ID NO: 272951 - DNA, 21 bp, Artificial sequence
  SiRNA target sequence
tcgtgaacatactgctgactt

SEQ ID NO: 272952 - DNA, 21 bp, Artificial sequence
  SiRNA target sequence
cgtgaacatactgctgacttt

SEQ ID NO: 272953 - DNA, 21 bp, Artificial sequence
  SiRNA target sequence
gtgaacatactgctgactttg

SEQ ID NO: 272954 - DNA, 21 bp, Artificial sequence
  SiRNA target sequence
tgaacatactgctgactttga

SEQ ID NO: 272955 - DNA, 21 bp, Artificial sequence
  SiRNA target sequence
gaacatactgctgactttgat

SEQ ID NO: 272956 - DNA, 21 bp, Artificial sequence
  SiRNA target sequence
aacatactgctgactttgatc

SEQ ID NO: 272957 - DNA, 21 bp, Artificial sequence
  SiRNA target sequence
acatactgctgactttgatct

SEQ ID NO: 272958 - DNA, 21 bp, Artificial sequence
  SiRNA target sequence
catactgctgactttgatctt

SEQ ID NO: 272959 - DNA, 21 bp, Artificial sequence
  SiRNA target sequence
atactgctgactttgatcttg

SEQ ID NO: 272960 - DNA, 21 bp, Artificial sequence
  SiRNA target sequence
tactgctgactttgatcttgt

SEQ ID NO: 272961 - DNA, 21 bp, Artificial sequence
  SiRNA target sequence
actgctgactttgatcttgtg

SEQ ID NO: 272962 - DNA, 21 bp, Artificial sequence
  SiRNA target sequence
ctgctgactttgatcttgtgt

SEQ ID NO: 272963 - DNA, 21 bp, Artificial sequence
  SiRNA target sequence
tgctgactttgatcttgtgtg

SEQ ID NO: 272964 - DNA, 21 bp, Artificial sequence
  SiRNA target sequence
gctgactttgatcttgtgtgg

SEQ ID NO: 272965 - DNA, 21 bp, Artificial sequence
  SiRNA target sequence
ctgactttgatcttgtgtgga

SEQ ID NO: 272966 - DNA, 21 bp, Artificial sequence
  SiRNA target sequence
tgactttgatcttgtgtggac

SEQ ID NO: 272967 - DNA, 21 bp, Artificial sequence
  SiRNA target sequence
gactttgatcttgtgtggact

SEQ ID NO: 272968 - DNA, 21 bp, Artificial sequence
  SiRNA target sequence
actttgatcttgtgtggactg

SEQ ID NO: 272969 - DNA, 21 bp, Artificial sequence
  SiRNA target sequence
ctttgatcttgtgtggactga

SEQ ID NO: 272970 - DNA, 21 bp, Artificial sequence
  SiRNA target sequence
tttgatcttgtgtggactgat

SEQ ID NO: 272971 - DNA, 21 bp, Artificial sequence
  SiRNA target sequence
ttgatcttgtgtggactgata

SEQ ID NO: 272972 - DNA, 21 bp, Artificial sequence
  SiRNA target sequence
tgatcttgtgtggactgataa

SEQ ID NO: 272973 - DNA, 21 bp, Artificial sequence
  SiRNA target sequence
gatcttgtgtggactgataat

SEQ ID NO: 272974 - DNA, 21 bp, Artificial sequence
  SiRNA target sequence
atcttgtgtggactgataatt

SEQ ID NO: 272975 - DNA, 21 bp, Artificial sequence
  SiRNA target sequence
tcttgtgtggactgataattt

SEQ ID NO: 272976 - DNA, 21 bp, Artificial sequence
  SiRNA target sequence
cttgtgtggactgataatttg

SEQ ID NO: 272977 - DNA, 21 bp, Artificial sequence
  SiRNA target sequence
ttgtgtggactgataatttgc

SEQ ID NO: 272978 - DNA, 21 bp, Artificial sequence
  SiRNA target sequence
tgtgtggactgataatttgcg

SEQ ID NO: 272979 - DNA, 21 bp, Artificial sequence
  SiRNA target sequence
gtgtggactgataatttgcgt

SEQ ID NO: 272980 - DNA, 21 bp, Artificial sequence
  SiRNA target sequence
tgtggactgataatttgcgtg

SEQ ID NO: 272981 - DNA, 21 bp, Artificial sequence
  SiRNA target sequence
gtggactgataatttgcgtgt

SEQ ID NO: 272982 - DNA, 21 bp, Artificial sequence
  SiRNA target sequence
tggactgataatttgcgtgtg

SEQ ID NO: 272983 - DNA, 21 bp, Artificial sequence
  SiRNA target sequence
ggactgataatttgcgtgtgt

SEQ ID NO: 272984 - DNA, 21 bp, Artificial sequence
  SiRNA target sequence
gactgataatttgcgtgtgtt

SEQ ID NO: 272985 - DNA, 21 bp, Artificial sequence
  SiRNA target sequence
actgataatttgcgtgtgtta

SEQ ID NO: 272986 - DNA, 21 bp, Artificial sequence
  SiRNA target sequence
ctgataatttgcgtgtgttaa

SEQ ID NO: 272987 - DNA, 21 bp, Artificial sequence
  SiRNA target sequence
tgataatttgcgtgtgttaag

SEQ ID NO: 272988 - DNA, 21 bp, Artificial sequence
  SiRNA target sequence
gataatttgcgtgtgttaagt

SEQ ID NO: 272989 - DNA, 21 bp, Artificial sequence
  SiRNA target sequence
ataatttgcgtgtgttaagtg

SEQ ID NO: 272990 - DNA, 21 bp, Artificial sequence
  SiRNA target sequence
taatttgcgtgtgttaagtgc

SEQ ID NO: 272991 - DNA, 21 bp, Artificial sequence
  SiRNA target sequence
aatttgcgtgtgttaagtgcg

SEQ ID NO: 272992 - DNA, 21 bp, Artificial sequence
  SiRNA target sequence
atttgcgtgtgttaagtgcgt

SEQ ID NO: 272993 - DNA, 21 bp, Artificial sequence
  SiRNA target sequence
tttgcgtgtgttaagtgcgta

SEQ ID NO: 272994 - DNA, 21 bp, Artificial sequence
  SiRNA target sequence
ttgcgtgtgttaagtgcgtat

SEQ ID NO: 272995 - DNA, 21 bp, Artificial sequence
  SiRNA target sequence
tgcgtgtgttaagtgcgtatg

SEQ ID NO: 272996 - DNA, 21 bp, Artificial sequence
  SiRNA target sequence
gcgtgtgttaagtgcgtatgt

SEQ ID NO: 272997 - DNA, 21 bp, Artificial sequence
  SiRNA target sequence
cgtgtgttaagtgcgtatgtg

SEQ ID NO: 272998 - DNA, 21 bp, Artificial sequence
  SiRNA target sequence
gtgtgttaagtgcgtatgtgc

SEQ ID NO: 272999 - DNA, 21 bp, Artificial sequence
  SiRNA target sequence
tgtgttaagtgcgtatgtgca

SEQ ID NO: 273000 - DNA, 21 bp, Artificial sequence
  SiRNA target sequence
gtgttaagtgcgtatgtgcat

SEQ ID NO: 273001 - DNA, 21 bp, Artificial sequence
  SiRNA target sequence
tgttaagtgcgtatgtgcatg

SEQ ID NO: 273002 - DNA, 21 bp, Artificial sequence
  SiRNA target sequence
gttaagtgcgtatgtgcatga

SEQ ID NO: 273003 - DNA, 21 bp, Artificial sequence
  SiRNA target sequence
ttaagtgcgtatgtgcatgaa

SEQ ID NO: 273004 - DNA, 21 bp, Artificial sequence
  SiRNA target sequence
taagtgcgtatgtgcatgaac

SEQ ID NO: 273005 - DNA, 21 bp, Artificial sequence
  SiRNA target sequence
aagtgcgtatgtgcatgaacg

SEQ ID NO: 273006 - DNA, 21 bp, Artificial sequence
  SiRNA target sequence
agtgcgtatgtgcatgaacgt

SEQ ID NO: 273007 - DNA, 21 bp, Artificial sequence
  SiRNA target sequence
gtgcgtatgtgcatgaacgtt

SEQ ID NO: 273008 - DNA, 21 bp, Artificial sequence
  SiRNA target sequence
tgcgtatgtgcatgaacgttc

SEQ ID NO: 273009 - DNA, 21 bp, Artificial sequence
  SiRNA target sequence
gcgtatgtgcatgaacgttca

SEQ ID NO: 273010 - DNA, 21 bp, Artificial sequence
  SiRNA target sequence
cgtatgtgcatgaacgttcat

SEQ ID NO: 273011 - DNA, 21 bp, Artificial sequence
  SiRNA target sequence
gtatgtgcatgaacgttcatc

SEQ ID NO: 273012 - DNA, 21 bp, Artificial sequence
  SiRNA target sequence
tatgtgcatgaacgttcatct

SEQ ID NO: 273013 - DNA, 21 bp, Artificial sequence
  SiRNA target sequence
atgtgcatgaacgttcatctt

SEQ ID NO: 273014 - DNA, 21 bp, Artificial sequence
  SiRNA target sequence
tgtgcatgaacgttcatcttc

SEQ ID NO: 273015 - DNA, 21 bp, Artificial sequence
  SiRNA target sequence
gtgcatgaacgttcatcttca

SEQ ID NO: 273016 - DNA, 21 bp, Artificial sequence
  SiRNA target sequence
tgcatgaacgttcatcttcaa

SEQ ID NO: 273017 - DNA, 21 bp, Artificial sequence
  SiRNA target sequence
gcatgaacgttcatcttcaac

SEQ ID NO: 273018 - DNA, 21 bp, Artificial sequence
  SiRNA target sequence
catgaacgttcatcttcaact

SEQ ID NO: 273019 - DNA, 21 bp, Artificial sequence
  SiRNA target sequence
atgaacgttcatcttcaactc

SEQ ID NO: 273020 - DNA, 21 bp, Artificial sequence
  SiRNA target sequence
tgaacgttcatcttcaactcg

SEQ ID NO: 273021 - DNA, 21 bp, Artificial sequence
  SiRNA target sequence
gaacgttcatcttcaactcgg

SEQ ID NO: 273022 - DNA, 21 bp, Artificial sequence
  SiRNA target sequence
aacgttcatcttcaactcggc

SEQ ID NO: 273023 - DNA, 21 bp, Artificial sequence
  SiRNA target sequence
acgttcatcttcaactcggct

SEQ ID NO: 273024 - DNA, 21 bp, Artificial sequence
  SiRNA target sequence
cgttcatcttcaactcggctt

SEQ ID NO: 273025 - DNA, 21 bp, Artificial sequence
  SiRNA target sequence
gttcatcttcaactcggcttt

SEQ ID NO: 273026 - DNA, 21 bp, Artificial sequence
  SiRNA target sequence
ttcatcttcaactcggctttc

SEQ ID NO: 273027 - DNA, 21 bp, Artificial sequence
  SiRNA target sequence
tcatcttcaactcggctttct

SEQ ID NO: 273028 - DNA, 21 bp, Artificial sequence
  SiRNA target sequence
catcttcaactcggctttcta

SEQ ID NO: 273029 - DNA, 21 bp, Artificial sequence
  SiRNA target sequence
atcttcaactcggctttctac

SEQ ID NO: 273030 - DNA, 21 bp, Artificial sequence
  SiRNA target sequence
tcttcaactcggctttctacg

SEQ ID NO: 273031 - DNA, 21 bp, Artificial sequence
  SiRNA target sequence
cttcaactcggctttctacgg

SEQ ID NO: 273032 - DNA, 21 bp, Artificial sequence
  SiRNA target sequence
ttcaactcggctttctacgga

SEQ ID NO: 273033 - DNA, 21 bp, Artificial sequence
  SiRNA target sequence
tcaactcggctttctacggat

SEQ ID NO: 273034 - DNA, 21 bp, Artificial sequence
  SiRNA target sequence
caactcggctttctacggatg

SEQ ID NO: 273035 - DNA, 21 bp, Artificial sequence
  SiRNA target sequence
aactcggctttctacggatga

SEQ ID NO: 273036 - DNA, 21 bp, Artificial sequence
  SiRNA target sequence
actcggctttctacggatgac

SEQ ID NO: 273037 - DNA, 21 bp, Artificial sequence
  SiRNA target sequence
ctcggctttctacggatgacg

SEQ ID NO: 273038 - DNA, 21 bp, Artificial sequence
  SiRNA target sequence
tcggctttctacggatgacgt

SEQ ID NO: 273039 - DNA, 21 bp, Artificial sequence
  SiRNA target sequence
cggctttctacggatgacgtc

SEQ ID NO: 273040 - DNA, 21 bp, Artificial sequence
  SiRNA target sequence
ggctttctacggatgacgtca

SEQ ID NO: 273041 - DNA, 21 bp, Artificial sequence
  SiRNA target sequence
gctttctacggatgacgtcaa

SEQ ID NO: 273042 - DNA, 21 bp, Artificial sequence
  SiRNA target sequence
ctttctacggatgacgtcaag

SEQ ID NO: 273043 - DNA, 21 bp, Artificial sequence
  SiRNA target sequence
tttctacggatgacgtcaagt

SEQ ID NO: 273044 - DNA, 21 bp, Artificial sequence
  SiRNA target sequence
ttctacggatgacgtcaagtt

SEQ ID NO: 273045 - DNA, 21 bp, Artificial sequence
  SiRNA target sequence
tctacggatgacgtcaagtta

SEQ ID NO: 273046 - DNA, 21 bp, Artificial sequence
  SiRNA target sequence
ctacggatgacgtcaagttat

SEQ ID NO: 273047 - DNA, 21 bp, Artificial sequence
  SiRNA target sequence
tacggatgacgtcaagttata

SEQ ID NO: 273048 - DNA, 21 bp, Artificial sequence
  SiRNA target sequence
acggatgacgtcaagttatat

SEQ ID NO: 273049 - DNA, 21 bp, Artificial sequence
  SiRNA target sequence
cggatgacgtcaagttatata

SEQ ID NO: 273050 - DNA, 21 bp, Artificial sequence
  SiRNA target sequence
ggatgacgtcaagttatataa

SEQ ID NO: 273051 - DNA, 21 bp, Artificial sequence
  SiRNA target sequence
gatgacgtcaagttatataaa

SEQ ID NO: 273052 - DNA, 21 bp, Artificial sequence
  SiRNA target sequence
atgacgtcaagttatataaaa

SEQ ID NO: 273053 - DNA, 21 bp, Artificial sequence
  SiRNA target sequence
tgacgtcaagttatataaaac

SEQ ID NO: 273054 - DNA, 21 bp, Artificial sequence
  SiRNA target sequence
gacgtcaagttatataaaacg

SEQ ID NO: 273055 - DNA, 21 bp, Artificial sequence
  SiRNA target sequence
acgtcaagttatataaaacga

SEQ ID NO: 273056 - DNA, 21 bp, Artificial sequence
  SiRNA target sequence
cgtcaagttatataaaacgat

SEQ ID NO: 273057 - DNA, 21 bp, Artificial sequence
  SiRNA target sequence
gtcaagttatataaaacgatt

SEQ ID NO: 273058 - DNA, 21 bp, Artificial sequence
  SiRNA target sequence
tcaagttatataaaacgatta

SEQ ID NO: 273059 - DNA, 21 bp, Artificial sequence
  SiRNA target sequence
caagttatataaaacgattag

SEQ ID NO: 273060 - DNA, 21 bp, Artificial sequence
  SiRNA target sequence
aagttatataaaacgattagc

SEQ ID NO: 273061 - DNA, 21 bp, Artificial sequence
  SiRNA target sequence
agttatataaaacgattagca

SEQ ID NO: 273062 - DNA, 21 bp, Artificial sequence
  SiRNA target sequence
gttatataaaacgattagcat

SEQ ID NO: 273063 - DNA, 21 bp, Artificial sequence
  SiRNA target sequence
ttatataaaacgattagcatg

SEQ ID NO: 273064 - DNA, 21 bp, Artificial sequence
  SiRNA target sequence
tatataaaacgattagcatgt

SEQ ID NO: 273065 - DNA, 21 bp, Artificial sequence
  SiRNA target sequence
atataaaacgattagcatgtt

SEQ ID NO: 273066 - DNA, 21 bp, Artificial sequence
  SiRNA target sequence
tataaaacgattagcatgtta

SEQ ID NO: 273067 - DNA, 21 bp, Artificial sequence
  SiRNA target sequence
ataaaacgattagcatgttac

SEQ ID NO: 273068 - DNA, 21 bp, Artificial sequence
  SiRNA target sequence
taaaacgattagcatgttaca

SEQ ID NO: 273069 - DNA, 21 bp, Artificial sequence
  SiRNA target sequence
aaaacgattagcatgttacat

SEQ ID NO: 273070 - DNA, 21 bp, Artificial sequence
  SiRNA target sequence
aaacgattagcatgttacatc

SEQ ID NO: 273071 - DNA, 21 bp, Artificial sequence
  SiRNA target sequence
aacgattagcatgttacatca

SEQ ID NO: 273072 - DNA, 21 bp, Artificial sequence
  SiRNA target sequence
acgattagcatgttacatcaa

SEQ ID NO: 273073 - DNA, 21 bp, Artificial sequence
  SiRNA target sequence
cgattagcatgttacatcaaa

SEQ ID NO: 273074 - DNA, 21 bp, Artificial sequence
  SiRNA target sequence
gattagcatgttacatcaaaa

SEQ ID NO: 273075 - DNA, 21 bp, Artificial sequence
  SiRNA target sequence
attagcatgttacatcaaaag

SEQ ID NO: 273076 - DNA, 21 bp, Artificial sequence
  SiRNA target sequence
ttagcatgttacatcaaaagt

SEQ ID NO: 273077 - DNA, 21 bp, Artificial sequence
  SiRNA target sequence
tagcatgttacatcaaaagta

SEQ ID NO: 273078 - DNA, 21 bp, Artificial sequence
  SiRNA target sequence
agcatgttacatcaaaagtat

SEQ ID NO: 273079 - DNA, 21 bp, Artificial sequence
  SiRNA target sequence
gcatgttacatcaaaagtatg

SEQ ID NO: 273080 - DNA, 21 bp, Artificial sequence
  SiRNA target sequence
catgttacatcaaaagtatga

SEQ ID NO: 273081 - DNA, 21 bp, Artificial sequence
  SiRNA target sequence
atgttacatcaaaagtatgat

SEQ ID NO: 273082 - DNA, 21 bp, Artificial sequence
  SiRNA target sequence
tgttacatcaaaagtatgata

SEQ ID NO: 273083 - DNA, 21 bp, Artificial sequence
  SiRNA target sequence
gttacatcaaaagtatgatac

SEQ ID NO: 273084 - DNA, 21 bp, Artificial sequence
  SiRNA target sequence
ttacatcaaaagtatgatacc

SEQ ID NO: 273085 - DNA, 21 bp, Artificial sequence
  SiRNA target sequence
tacatcaaaagtatgatacca

SEQ ID NO: 273086 - DNA, 21 bp, Artificial sequence
  SiRNA target sequence
acatcaaaagtatgataccac

SEQ ID NO: 273087 - DNA, 21 bp, Artificial sequence
  SiRNA target sequence
catcaaaagtatgataccaca

SEQ ID NO: 273088 - DNA, 21 bp, Artificial sequence
  SiRNA target sequence
atcaaaagtatgataccacag

SEQ ID NO: 273089 - DNA, 21 bp, Artificial sequence
  SiRNA target sequence
tcaaaagtatgataccacaga

SEQ ID NO: 273090 - DNA, 21 bp, Artificial sequence
  SiRNA target sequence
caaaagtatgataccacagag

SEQ ID NO: 273091 - DNA, 21 bp, Artificial sequence
  SiRNA target sequence
aaaagtatgataccacagagt

SEQ ID NO: 273092 - DNA, 21 bp, Artificial sequence
  SiRNA target sequence
aaagtatgataccacagagtg

SEQ ID NO: 273093 - DNA, 21 bp, Artificial sequence
  SiRNA target sequence
aagtatgataccacagagtgt

SEQ ID NO: 273094 - DNA, 21 bp, Artificial sequence
  SiRNA target sequence
agtatgataccacagagtgtg

SEQ ID NO: 273095 - DNA, 21 bp, Artificial sequence
  SiRNA target sequence
gtatgataccacagagtgtgc

SEQ ID NO: 273096 - DNA, 21 bp, Artificial sequence
  SiRNA target sequence
tatgataccacagagtgtgct

SEQ ID NO: 273097 - DNA, 21 bp, Artificial sequence
  SiRNA target sequence
atgataccacagagtgtgcta

SEQ ID NO: 273098 - DNA, 21 bp, Artificial sequence
  SiRNA target sequence
tgataccacagagtgtgctaa

SEQ ID NO: 273099 - DNA, 21 bp, Artificial sequence
  SiRNA target sequence
gataccacagagtgtgctaaa

SEQ ID NO: 273100 - DNA, 21 bp, Artificial sequence
  SiRNA target sequence
ataccacagagtgtgctaaat

SEQ ID NO: 273101 - DNA, 21 bp, Artificial sequence
  SiRNA target sequence
taccacagagtgtgctaaatg

SEQ ID NO: 273102 - DNA, 21 bp, Artificial sequence
  SiRNA target sequence
accacagagtgtgctaaatgt

SEQ ID NO: 273103 - DNA, 21 bp, Artificial sequence
  SiRNA target sequence
ccacagagtgtgctaaatgtc

SEQ ID NO: 273104 - DNA, 21 bp, Artificial sequence
  SiRNA target sequence
cacagagtgtgctaaatgtca

SEQ ID NO: 273105 - DNA, 21 bp, Artificial sequence
  SiRNA target sequence
acagagtgtgctaaatgtcaa

SEQ ID NO: 273106 - DNA, 21 bp, Artificial sequence
  SiRNA target sequence
cagagtgtgctaaatgtcaac

SEQ ID NO: 273107 - DNA, 21 bp, Artificial sequence
  SiRNA target sequence
agagtgtgctaaatgtcaaca

SEQ ID NO: 273108 - DNA, 21 bp, Artificial sequence
  SiRNA target sequence
gagtgtgctaaatgtcaacat

SEQ ID NO: 273109 - DNA, 21 bp, Artificial sequence
  SiRNA target sequence
agtgtgctaaatgtcaacatt

SEQ ID NO: 273110 - DNA, 21 bp, Artificial sequence
  SiRNA target sequence
gtgtgctaaatgtcaacattg

SEQ ID NO: 273111 - DNA, 21 bp, Artificial sequence
  SiRNA target sequence
tgtgctaaatgtcaacattgg

SEQ ID NO: 273112 - DNA, 21 bp, Artificial sequence
  SiRNA target sequence
gtgctaaatgtcaacattggt

SEQ ID NO: 273113 - DNA, 21 bp, Artificial sequence
  SiRNA target sequence
tgctaaatgtcaacattggta

SEQ ID NO: 273114 - DNA, 21 bp, Artificial sequence
  SiRNA target sequence
gctaaatgtcaacattggtat

SEQ ID NO: 273115 - DNA, 21 bp, Artificial sequence
  SiRNA target sequence
ctaaatgtcaacattggtatg

SEQ ID NO: 273116 - DNA, 21 bp, Artificial sequence
  SiRNA target sequence
taaatgtcaacattggtatgc

SEQ ID NO: 273117 - DNA, 21 bp, Artificial sequence
  SiRNA target sequence
aaatgtcaacattggtatgct

SEQ ID NO: 273118 - DNA, 21 bp, Artificial sequence
  SiRNA target sequence
aatgtcaacattggtatgctc

SEQ ID NO: 273119 - DNA, 21 bp, Artificial sequence
  SiRNA target sequence
atgtcaacattggtatgctcc

SEQ ID NO: 273120 - DNA, 21 bp, Artificial sequence
  SiRNA target sequence
tgtcaacattggtatgctccg

SEQ ID NO: 273121 - DNA, 21 bp, Artificial sequence
  SiRNA target sequence
gtcaacattggtatgctccgt

SEQ ID NO: 273122 - DNA, 21 bp, Artificial sequence
  SiRNA target sequence
tcaacattggtatgctccgtt

SEQ ID NO: 273123 - DNA, 21 bp, Artificial sequence
  SiRNA target sequence
caacattggtatgctccgttg

SEQ ID NO: 273124 - DNA, 21 bp, Artificial sequence
  SiRNA target sequence
aacattggtatgctccgttga

SEQ ID NO: 273125 - DNA, 21 bp, Artificial sequence
  SiRNA target sequence
acattggtatgctccgttgac

SEQ ID NO: 273126 - DNA, 21 bp, Artificial sequence
  SiRNA target sequence
cattggtatgctccgttgact

SEQ ID NO: 273127 - DNA, 21 bp, Artificial sequence
  SiRNA target sequence
attggtatgctccgttgactg

SEQ ID NO: 273128 - DNA, 21 bp, Artificial sequence
  SiRNA target sequence
ttggtatgctccgttgactga

SEQ ID NO: 273129 - DNA, 21 bp, Artificial sequence
  SiRNA target sequence
tggtatgctccgttgactgat

SEQ ID NO: 273130 - DNA, 21 bp, Artificial sequence
  SiRNA target sequence
ggtatgctccgttgactgata

SEQ ID NO: 273131 - DNA, 21 bp, Artificial sequence
  SiRNA target sequence
gtatgctccgttgactgatat

SEQ ID NO: 273132 - DNA, 21 bp, Artificial sequence
  SiRNA target sequence
tatgctccgttgactgatatc

SEQ ID NO: 273133 - DNA, 21 bp, Artificial sequence
  SiRNA target sequence
atgctccgttgactgatatct

SEQ ID NO: 273134 - DNA, 21 bp, Artificial sequence
  SiRNA target sequence
tgctccgttgactgatatcta

SEQ ID NO: 273135 - DNA, 21 bp, Artificial sequence
  SiRNA target sequence
gctccgttgactgatatctat

SEQ ID NO: 273136 - DNA, 21 bp, Artificial sequence
  SiRNA target sequence
ctccgttgactgatatctatg

SEQ ID NO: 273137 - DNA, 21 bp, Artificial sequence
  SiRNA target sequence
tccgttgactgatatctatgt

SEQ ID NO: 273138 - DNA, 21 bp, Artificial sequence
  SiRNA target sequence
ccgttgactgatatctatgtt

SEQ ID NO: 273139 - DNA, 21 bp, Artificial sequence
  SiRNA target sequence
cgttgactgatatctatgttg

SEQ ID NO: 273140 - DNA, 21 bp, Artificial sequence
  SiRNA target sequence
gttgactgatatctatgttga

SEQ ID NO: 273141 - DNA, 21 bp, Artificial sequence
  SiRNA target sequence
ttgactgatatctatgttgat

SEQ ID NO: 273142 - DNA, 21 bp, Artificial sequence
  SiRNA target sequence
tgactgatatctatgttgatg

SEQ ID NO: 273143 - DNA, 21 bp, Artificial sequence
  SiRNA target sequence
gactgatatctatgttgatga

SEQ ID NO: 273144 - DNA, 21 bp, Artificial sequence
  SiRNA target sequence
actgatatctatgttgatgac

SEQ ID NO: 273145 - DNA, 21 bp, Artificial sequence
  SiRNA target sequence
ctgatatctatgttgatgaca

SEQ ID NO: 273146 - DNA, 21 bp, Artificial sequence
  SiRNA target sequence
tgatatctatgttgatgacaa

SEQ ID NO: 273147 - DNA, 21 bp, Artificial sequence
  SiRNA target sequence
gatatctatgttgatgacaag

SEQ ID NO: 273148 - DNA, 21 bp, Artificial sequence
  SiRNA target sequence
atatctatgttgatgacaaga

SEQ ID NO: 273149 - DNA, 21 bp, Artificial sequence
  SiRNA target sequence
tatctatgttgatgacaagaa

SEQ ID NO: 273150 - DNA, 21 bp, Artificial sequence
  SiRNA target sequence
atctatgttgatgacaagaaa

SEQ ID NO: 273151 - DNA, 21 bp, Artificial sequence
  SiRNA target sequence
tctatgttgatgacaagaaat

SEQ ID NO: 273152 - DNA, 21 bp, Artificial sequence
  SiRNA target sequence
ctatgttgatgacaagaaatt

SEQ ID NO: 273153 - DNA, 21 bp, Artificial sequence
  SiRNA target sequence
tatgttgatgacaagaaattg

SEQ ID NO: 273154 - DNA, 21 bp, Artificial sequence
  SiRNA target sequence
atgttgatgacaagaaattgt

SEQ ID NO: 273155 - DNA, 21 bp, Artificial sequence
  SiRNA target sequence
tgttgatgacaagaaattgtt

SEQ ID NO: 273156 - DNA, 21 bp, Artificial sequence
  SiRNA target sequence
  misc_feature (21)..(21): n is a, c, g, or t
gttgatgacaagaaattgttn

SEQ ID NO: 273157 - DNA, 21 bp, Artificial sequence
  SiRNA target sequence
  misc_feature (20)..(20): n is a, c, g, or t
ttgatgacaagaaattgttnt

SEQ ID NO: 273158 - DNA, 21 bp, Artificial sequence
  SiRNA target sequence
  misc_feature (19)..(19): n is a, c, g, or t
tgatgacaagaaattgttntg

SEQ ID NO: 273159 - DNA, 21 bp, Artificial sequence
  SiRNA target sequence
  misc_feature (18)..(18): n is a, c, g, or t
gatgacaagaaattgttntgg

SEQ ID NO: 273160 - DNA, 21 bp, Artificial sequence
  SiRNA target sequence
  misc_feature (17)..(17): n is a, c, g, or t
atgacaagaaattgttntggt

SEQ ID NO: 273161 - DNA, 21 bp, Artificial sequence
  SiRNA target sequence
  misc_feature (16)..(16): n is a, c, g, or t
tgacaagaaattgttntggtg

SEQ ID NO: 273162 - DNA, 21 bp, Artificial sequence
  SiRNA target sequence
  misc_feature (15)..(15): n is a, c, g, or t
gacaagaaattgttntggtgt

SEQ ID NO: 273163 - DNA, 21 bp, Artificial sequence
  SiRNA target sequence
  misc_feature (14)..(14): n is a, c, g, or t
acaagaaattgttntggtgtc

SEQ ID NO: 273164 - DNA, 21 bp, Artificial sequence
  SiRNA target sequence
  misc_feature (13)..(13): n is a, c, g, or t
caagaaattgttntggtgtca

SEQ ID NO: 273165 - DNA, 21 bp, Artificial sequence
  SiRNA target sequence
  misc_feature (12)..(12): n is a, c, g, or t
aagaaattgttntggtgtcag

SEQ ID NO: 273166 - DNA, 21 bp, Artificial sequence
  SiRNA target sequence
  misc_feature (11)..(11): n is a, c, g, or t
agaaattgttntggtgtcaga

SEQ ID NO: 273167 - DNA, 21 bp, Artificial sequence
  SiRNA target sequence
  misc_feature (10)..(10): n is a, c, g, or t
gaaattgttntggtgtcagaa

SEQ ID NO: 273168 - DNA, 21 bp, Artificial sequence
  SiRNA target sequence
  misc_feature (9)..(9): n is a, c, g, or t
aaattgttntggtgtcagaaa

SEQ ID NO: 273169 - DNA, 21 bp, Artificial sequence
  SiRNA target sequence
  misc_feature (8)..(8): n is a, c, g, or t
aattgttntggtgtcagaaag

SEQ ID NO: 273170 - DNA, 21 bp, Artificial sequence
  SiRNA target sequence
  misc_feature (7)..(7): n is a, c, g, or t
attgttntggtgtcagaaaga

SEQ ID NO: 273171 - DNA, 21 bp, Artificial sequence
  SiRNA target sequence
  misc_feature (6)..(6): n is a, c, g, or t
ttgttntggtgtcagaaagag

SEQ ID NO: 273172 - DNA, 21 bp, Artificial sequence
  SiRNA target sequence
  misc_feature (5)..(5): n is a, c, g, or t
tgttntggtgtcagaaagaga

SEQ ID NO: 273173 - DNA, 21 bp, Artificial sequence
  SiRNA target sequence
  misc_feature (4)..(4): n is a, c, g, or t
gttntggtgtcagaaagagaa

SEQ ID NO: 273174 - DNA, 21 bp, Artificial sequence
  SiRNA target sequence
  misc_feature (3)..(3): n is a, c, g, or t
ttntggtgtcagaaagagaaa

SEQ ID NO: 273175 - DNA, 21 bp, Artificial sequence
  SiRNA target sequence
  misc_feature (2)..(2): n is a, c, g, or t
tntggtgtcagaaagagaaaa

SEQ ID NO: 273176 - DNA, 21 bp, Artificial sequence
  SiRNA target sequence
  misc_feature (1)..(1): n is a, c, g, or t
ntggtgtcagaaagagaaaaa

SEQ ID NO: 273177 - DNA, 21 bp, Artificial sequence
  SiRNA target sequence
tggtgtcagaaagagaaaaag

SEQ ID NO: 273178 - DNA, 21 bp, Artificial sequence
  SiRNA target sequence
ggtgtcagaaagagaaaaaga

SEQ ID NO: 273179 - DNA, 21 bp, Artificial sequence
  SiRNA target sequence
gtgtcagaaagagaaaaagac

SEQ ID NO: 273180 - DNA, 21 bp, Artificial sequence
  SiRNA target sequence
tgtcagaaagagaaaaagaca

SEQ ID NO: 273181 - DNA, 21 bp, Artificial sequence
  SiRNA target sequence
gtcagaaagagaaaaagacac

SEQ ID NO: 273182 - DNA, 21 bp, Artificial sequence
  SiRNA target sequence
tcagaaagagaaaaagacact

SEQ ID NO: 273183 - DNA, 21 bp, Artificial sequence
  SiRNA target sequence
cagaaagagaaaaagacactt

SEQ ID NO: 273184 - DNA, 21 bp, Artificial sequence
  SiRNA target sequence
agaaagagaaaaagacactta

SEQ ID NO: 273185 - DNA, 21 bp, Artificial sequence
  SiRNA target sequence
gaaagagaaaaagacacttat

SEQ ID NO: 273186 - DNA, 21 bp, Artificial sequence
  SiRNA target sequence
aaagagaaaaagacacttatt

SEQ ID NO: 273187 - DNA, 21 bp, Artificial sequence
  SiRNA target sequence
aagagaaaaagacacttattg

SEQ ID NO: 273188 - DNA, 21 bp, Artificial sequence
  SiRNA target sequence
agagaaaaagacacttattga

SEQ ID NO: 273189 - DNA, 21 bp, Artificial sequence
  SiRNA target sequence
gagaaaaagacacttattgat

SEQ ID NO: 273190 - DNA, 21 bp, Artificial sequence
  SiRNA target sequence
agaaaaagacacttattgatg

SEQ ID NO: 273191 - DNA, 21 bp, Artificial sequence
  SiRNA target sequence
gaaaaagacacttattgatgt

SEQ ID NO: 273192 - DNA, 21 bp, Artificial sequence
  SiRNA target sequence
aaaaagacacttattgatgtc

SEQ ID NO: 273193 - DNA, 21 bp, Artificial sequence
  SiRNA target sequence
aaaagacacttattgatgtcc

SEQ ID NO: 273194 - DNA, 21 bp, Artificial sequence
  SiRNA target sequence
aaagacacttattgatgtccg

SEQ ID NO: 273195 - DNA, 21 bp, Artificial sequence
  SiRNA target sequence
aagacacttattgatgtccga

SEQ ID NO: 273196 - DNA, 21 bp, Artificial sequence
  SiRNA target sequence
agacacttattgatgtccgaa

SEQ ID NO: 273197 - DNA, 21 bp, Artificial sequence
  SiRNA target sequence
gacacttattgatgtccgaaa

SEQ ID NO: 273198 - DNA, 21 bp, Artificial sequence
  SiRNA target sequence
acacttattgatgtccgaaaa

SEQ ID NO: 273199 - DNA, 21 bp, Artificial sequence
  SiRNA target sequence
cacttattgatgtccgaaaat

SEQ ID NO: 273200 - DNA, 21 bp, Artificial sequence
  SiRNA target sequence
acttattgatgtccgaaaatt

SEQ ID NO: 273201 - DNA, 21 bp, Artificial sequence
  SiRNA target sequence
cttattgatgtccgaaaattg

SEQ ID NO: 273202 - DNA, 21 bp, Artificial sequence
  SiRNA target sequence
ttattgatgtccgaaaattgt

SEQ ID NO: 273203 - DNA, 21 bp, Artificial sequence
  SiRNA target sequence
tattgatgtccgaaaattgtc

SEQ ID NO: 273204 - DNA, 21 bp, Artificial sequence
  SiRNA target sequence
attgatgtccgaaaattgtcg

SEQ ID NO: 273205 - DNA, 21 bp, Artificial sequence
  SiRNA target sequence
ttgatgtccgaaaattgtcga

SEQ ID NO: 273206 - DNA, 21 bp, Artificial sequence
  SiRNA target sequence
tgatgtccgaaaattgtcgaa

SEQ ID NO: 273207 - DNA, 21 bp, Artificial sequence
  SiRNA target sequence
gatgtccgaaaattgtcgaaa

SEQ ID NO: 273208 - DNA, 21 bp, Artificial sequence
  SiRNA target sequence
atgtccgaaaattgtcgaaag

SEQ ID NO: 273209 - DNA, 21 bp, Artificial sequence
  SiRNA target sequence
tgtccgaaaattgtcgaaaga

SEQ ID NO: 273210 - DNA, 21 bp, Artificial sequence
  SiRNA target sequence
gtccgaaaattgtcgaaagaa

SEQ ID NO: 273211 - DNA, 21 bp, Artificial sequence
  SiRNA target sequence
tccgaaaattgtcgaaagaag

SEQ ID NO: 273212 - DNA, 21 bp, Artificial sequence
  SiRNA target sequence
ccgaaaattgtcgaaagaaga

SEQ ID NO: 273213 - DNA, 21 bp, Artificial sequence
  SiRNA target sequence
cgaaaattgtcgaaagaagat

SEQ ID NO: 273214 - DNA, 21 bp, Artificial sequence
  SiRNA target sequence
gaaaattgtcgaaagaagatg

SEQ ID NO: 273215 - DNA, 21 bp, Artificial sequence
  SiRNA target sequence
aaaattgtcgaaagaagatgt

SEQ ID NO: 273216 - DNA, 21 bp, Artificial sequence
  SiRNA target sequence
aaattgtcgaaagaagatgtg

SEQ ID NO: 273217 - DNA, 21 bp, Artificial sequence
  SiRNA target sequence
aattgtcgaaagaagatgtga

SEQ ID NO: 273218 - DNA, 21 bp, Artificial sequence
  SiRNA target sequence
attgtcgaaagaagatgtgac

SEQ ID NO: 273219 - DNA, 21 bp, Artificial sequence
  SiRNA target sequence
ttgtcgaaagaagatgtgact

SEQ ID NO: 273220 - DNA, 21 bp, Artificial sequence
  SiRNA target sequence
tgtcgaaagaagatgtgactg

SEQ ID NO: 273221 - DNA, 21 bp, Artificial sequence
  SiRNA target sequence
gtcgaaagaagatgtgactgt

SEQ ID NO: 273222 - DNA, 21 bp, Artificial sequence
  SiRNA target sequence
tcgaaagaagatgtgactgtt

SEQ ID NO: 273223 - DNA, 21 bp, Artificial sequence
  SiRNA target sequence
cgaaagaagatgtgactgttc

SEQ ID NO: 273224 - DNA, 21 bp, Artificial sequence
  SiRNA target sequence
gaaagaagatgtgactgttca

SEQ ID NO: 273225 - DNA, 21 bp, Artificial sequence
  SiRNA target sequence
aaagaagatgtgactgttcaa

SEQ ID NO: 273226 - DNA, 21 bp, Artificial sequence
  SiRNA target sequence
aagaagatgtgactgttcaat

SEQ ID NO: 273227 - DNA, 21 bp, Artificial sequence
  SiRNA target sequence
agaagatgtgactgttcaatc

SEQ ID NO: 273228 - DNA, 21 bp, Artificial sequence
  SiRNA target sequence
  misc_feature (21)..(21): n is a, c, g, or t
gaagatgtgactgttcaatcn

SEQ ID NO: 273229 - DNA, 21 bp, Artificial sequence
  SiRNA target sequence
  misc_feature (20)..(20): n is a, c, g, or t
aagatgtgactgttcaatcna

SEQ ID NO: 273230 - DNA, 21 bp, Artificial sequence
  SiRNA target sequence
  misc_feature (19)..(19): n is a, c, g, or t
agatgtgactgttcaatcnaa

SEQ ID NO: 273231 - DNA, 21 bp, Artificial sequence
  SiRNA target sequence
  misc_feature (18)..(18): n is a, c, g, or t
gatgtgactgttcaatcnaaa

SEQ ID NO: 273232 - DNA, 21 bp, Artificial sequence
  SiRNA target sequence
  misc_feature (17)..(17): n is a, c, g, or t
atgtgactgttcaatcnaaat

SEQ ID NO: 273233 - DNA, 21 bp, Artificial sequence
  SiRNA target sequence
  misc_feature (16)..(16): n is a, c, g, or t
tgtgactgttcaatcnaaatt

SEQ ID NO: 273234 - DNA, 21 bp, Artificial sequence
  SiRNA target sequence
  misc_feature (15)..(15): n is a, c, g, or t
gtgactgttcaatcnaaattg

SEQ ID NO: 273235 - DNA, 21 bp, Artificial sequence
  SiRNA target sequence
  misc_feature (14)..(14): n is a, c, g, or t
  misc_feature (21)..(21): n is a, c, g, or t
tgactgttcaatcnaaattgn

SEQ ID NO: 273236 - DNA, 21 bp, Artificial sequence
  SiRNA target sequence
  misc_feature (13)..(13): n is a, c, g, or t
  misc_feature (20)..(20): n is a, c, g, or t
gactgttcaatcnaaattgnt

SEQ ID NO: 273237 - DNA, 21 bp, Artificial sequence
  SiRNA target sequence
  misc_feature (12)..(12): n is a, c, g, or t
  misc_feature (19)..(19): n is a, c, g, or t
actgttcaatcnaaattgntt

SEQ ID NO: 273238 - DNA, 21 bp, Artificial sequence
  SiRNA target sequence
  misc_feature (11)..(11): n is a, c, g, or t
  misc_feature (18)..(18): n is a, c, g, or t
ctgttcaatcnaaattgntta

SEQ ID NO: 273239 - DNA, 21 bp, Artificial sequence
  SiRNA target sequence
  misc_feature (10)..(10): n is a, c, g, or t
  misc_feature (17)..(17): n is a, c, g, or t
tgttcaatcnaaattgnttaa

SEQ ID NO: 273240 - DNA, 21 bp, Artificial sequence
  SiRNA target sequence
  misc_feature (9)..(9): n is a, c, g, or t
  misc_feature (16)..(16): n is a, c, g, or t
gttcaatcnaaattgnttaat

SEQ ID NO: 273241 - DNA, 21 bp, Artificial sequence
  SiRNA target sequence
  misc_feature (8)..(8): n is a, c, g, or t
  misc_feature (15)..(15): n is a, c, g, or t
ttcaatcnaaattgnttaatt

SEQ ID NO: 273242 - DNA, 21 bp, Artificial sequence
  SiRNA target sequence
  misc_feature (7)..(7): n is a, c, g, or t
  misc_feature (14)..(14): n is a, c, g, or t
tcaatcnaaattgnttaattt

SEQ ID NO: 273243 - DNA, 21 bp, Artificial sequence
  SiRNA target sequence
  misc_feature (6)..(6): n is a, c, g, or t
  misc_feature (13)..(13): n is a, c, g, or t
caatcnaaattgnttaattta

SEQ ID NO: 273244 - DNA, 21 bp, Artificial sequence
  SiRNA target sequence
  misc_feature (5)..(5): n is a, c, g, or t
  misc_feature (12)..(12): n is a, c, g, or t
aatcnaaattgnttaatttat

SEQ ID NO: 273245 - DNA, 21 bp, Artificial sequence
  SiRNA target sequence
  misc_feature (4)..(4): n is a, c, g, or t
  misc_feature (11)..(11): n is a, c, g, or t
atcnaaattgnttaatttatc

SEQ ID NO: 273246 - DNA, 21 bp, Artificial sequence
  SiRNA target sequence
  misc_feature (3)..(3): n is a, c, g, or t
  misc_feature (10)..(10): n is a, c, g, or t
tcnaaattgnttaatttatct

SEQ ID NO: 273247 - DNA, 21 bp, Artificial sequence
  SiRNA target sequence
  misc_feature (2)..(2): n is a, c, g, or t
  misc_feature (9)..(9): n is a, c, g, or t
cnaaattgnttaatttatctg

SEQ ID NO: 273248 - DNA, 21 bp, Artificial sequence
  SiRNA target sequence
  misc_feature (1)..(1): n is a, c, g, or t
  misc_feature (8)..(8): n is a, c, g, or t
naaattgnttaatttatctgt

SEQ ID NO: 273249 - DNA, 21 bp, Artificial sequence
  SiRNA target sequence
  misc_feature (7)..(7): n is a, c, g, or t
aaattgnttaatttatctgtt

SEQ ID NO: 273250 - DNA, 21 bp, Artificial sequence
  SiRNA target sequence
  misc_feature (6)..(6): n is a, c, g, or t
aattgnttaatttatctgttc

SEQ ID NO: 273251 - DNA, 21 bp, Artificial sequence
  SiRNA target sequence
  misc_feature (5)..(5): n is a, c, g, or t
attgnttaatttatctgttcc

SEQ ID NO: 273252 - DNA, 21 bp, Artificial sequence
  SiRNA target sequence
  misc_feature (4)..(4): n is a, c, g, or t
ttgnttaatttatctgttcct

SEQ ID NO: 273253 - DNA, 21 bp, Artificial sequence
  SiRNA target sequence
  misc_feature (3)..(3): n is a, c, g, or t
tgnttaatttatctgttcctt

SEQ ID NO: 273254 - DNA, 21 bp, Artificial sequence
  SiRNA target sequence
  misc_feature (2)..(2): n is a, c, g, or t
gnttaatttatctgttccttg

SEQ ID NO: 273255 - DNA, 21 bp, Artificial sequence
  SiRNA target sequence
  misc_feature (1)..(1): n is a, c, g, or t
nttaatttatctgttccttgt

SEQ ID NO: 273256 - DNA, 21 bp, Artificial sequence
  SiRNA target sequence
ttaatttatctgttccttgtg

SEQ ID NO: 273257 - DNA, 21 bp, Artificial sequence
  SiRNA target sequence
taatttatctgttccttgtgg

SEQ ID NO: 273258 - DNA, 21 bp, Artificial sequence
  SiRNA target sequence
aatttatctgttccttgtggt

SEQ ID NO: 273259 - DNA, 21 bp, Artificial sequence
  SiRNA target sequence
atttatctgttccttgtggtg

SEQ ID NO: 273260 - DNA, 21 bp, Artificial sequence
  SiRNA target sequence
tttatctgttccttgtggtga

SEQ ID NO: 273261 - DNA, 21 bp, Artificial sequence
  SiRNA target sequence
ttatctgttccttgtggtgaa

SEQ ID NO: 273262 - DNA, 21 bp, Artificial sequence
  SiRNA target sequence
tatctgttccttgtggtgaag

SEQ ID NO: 273263 - DNA, 21 bp, Artificial sequence
  SiRNA target sequence
atctgttccttgtggtgaagt

SEQ ID NO: 273264 - DNA, 21 bp, Artificial sequence
  SiRNA target sequence
  misc_feature (21)..(21): n is a, c, g, or t
tctgttccttgtggtgaagtn

SEQ ID NO: 273265 - DNA, 21 bp, Artificial sequence
  SiRNA target sequence
  misc_feature (20)..(20): n is a, c, g, or t
ctgttccttgtggtgaagtnt

SEQ ID NO: 273266 - DNA, 21 bp, Artificial sequence
  SiRNA target sequence
  misc_feature (19)..(19): n is a, c, g, or t
tgttccttgtggtgaagtntg

SEQ ID NO: 273267 - DNA, 21 bp, Artificial sequence
  SiRNA target sequence
  misc_feature (18)..(18): n is a, c, g, or t
gttccttgtggtgaagtntgt

SEQ ID NO: 273268 - DNA, 21 bp, Artificial sequence
  SiRNA target sequence
  misc_feature (17)..(17): n is a, c, g, or t
ttccttgtggtgaagtntgta

SEQ ID NO: 273269 - DNA, 21 bp, Artificial sequence
  SiRNA target sequence
  misc_feature (16)..(16): n is a, c, g, or t
tccttgtggtgaagtntgtat

SEQ ID NO: 273270 - DNA, 21 bp, Artificial sequence
  SiRNA target sequence
  misc_feature (15)..(15): n is a, c, g, or t
ccttgtggtgaagtntgtatg

SEQ ID NO: 273271 - DNA, 21 bp, Artificial sequence
  SiRNA target sequence
  misc_feature (14)..(14): n is a, c, g, or t
cttgtggtgaagtntgtatgt

SEQ ID NO: 273272 - DNA, 21 bp, Artificial sequence
  SiRNA target sequence
  misc_feature (13)..(13): n is a, c, g, or t
ttgtggtgaagtntgtatgtt

SEQ ID NO: 273273 - DNA, 21 bp, Artificial sequence
  SiRNA target sequence
  misc_feature (12)..(12): n is a, c, g, or t
tgtggtgaagtntgtatgtta

SEQ ID NO: 273274 - DNA, 21 bp, Artificial sequence
  SiRNA target sequence
  misc_feature (11)..(11): n is a, c, g, or t
gtggtgaagtntgtatgttac

SEQ ID NO: 273275 - DNA, 21 bp, Artificial sequence
  SiRNA target sequence
  misc_feature (10)..(10): n is a, c, g, or t
tggtgaagtntgtatgttaca

SEQ ID NO: 273276 - DNA, 21 bp, Artificial sequence
  SiRNA target sequence
  misc_feature (9)..(9): n is a, c, g, or t
ggtgaagtntgtatgttacat

SEQ ID NO: 273277 - DNA, 21 bp, Artificial sequence
  SiRNA target sequence
  misc_feature (8)..(8): n is a, c, g, or t
gtgaagtntgtatgttacatt

SEQ ID NO: 273278 - DNA, 21 bp, Artificial sequence
  SiRNA target sequence
  misc_feature (7)..(7): n is a, c, g, or t
tgaagtntgtatgttacattc

SEQ ID NO: 273279 - DNA, 21 bp, Artificial sequence
  SiRNA target sequence
  misc_feature (6)..(6): n is a, c, g, or t
gaagtntgtatgttacattca

SEQ ID NO: 273280 - DNA, 21 bp, Artificial sequence
  SiRNA target sequence
  misc_feature (5)..(5): n is a, c, g, or t
aagtntgtatgttacattcaa

SEQ ID NO: 273281 - DNA, 21 bp, Artificial sequence
  SiRNA target sequence
  misc_feature (4)..(4): n is a, c, g, or t
agtntgtatgttacattcaaa

SEQ ID NO: 273282 - DNA, 21 bp, Artificial sequence
  SiRNA target sequence
  misc_feature (3)..(3): n is a, c, g, or t
gtntgtatgttacattcaaaa

SEQ ID NO: 273283 - DNA, 21 bp, Artificial sequence
  SiRNA target sequence
  misc_feature (2)..(2): n is a, c, g, or t
tntgtatgttacattcaaaat

SEQ ID NO: 273284 - DNA, 21 bp, Artificial sequence
  SiRNA target sequence
  misc_feature (1)..(1): n is a, c, g, or t
ntgtatgttacattcaaaata

SEQ ID NO: 273285 - DNA, 21 bp, Artificial sequence
  SiRNA target sequence
tgtatgttacattcaaaatat

SEQ ID NO: 273286 - DNA, 21 bp, Artificial sequence
  SiRNA target sequence
gtatgttacattcaaaatatt

SEQ ID NO: 273287 - DNA, 21 bp, Artificial sequence
  SiRNA target sequence
tatgttacattcaaaatattt

SEQ ID NO: 273288 - DNA, 21 bp, Artificial sequence
  SiRNA target sequence
  misc_feature (21)..(21): n is a, c, g, or t
atgttacattcaaaatatttn

SEQ ID NO: 273289 - DNA, 21 bp, Artificial sequence
  SiRNA target sequence
  misc_feature (20)..(20): n is a, c, g, or t
tgttacattcaaaatatttna

SEQ ID NO: 273290 - DNA, 21 bp, Artificial sequence
  SiRNA target sequence
  misc_feature (19)..(19): n is a, c, g, or t
gttacattcaaaatatttnaa

SEQ ID NO: 273291 - DNA, 21 bp, Artificial sequence
  SiRNA target sequence
  misc_feature (18)..(18): n is a, c, g, or t
ttacattcaaaatatttnaat

SEQ ID NO: 273292 - DNA, 21 bp, Artificial sequence
  SiRNA target sequence
  misc_feature (17)..(17): n is a, c, g, or t
tacattcaaaatatttnaatt

SEQ ID NO: 273293 - DNA, 21 bp, Artificial sequence
  SiRNA target sequence
  misc_feature (16)..(16): n is a, c, g, or t
acattcaaaatatttnaatta

SEQ ID NO: 273294 - DNA, 21 bp, Artificial sequence
  SiRNA target sequence
  misc_feature (15)..(15): n is a, c, g, or t
cattcaaaatatttnaattat

SEQ ID NO: 273295 - DNA, 21 bp, Artificial sequence
  SiRNA target sequence
  misc_feature (14)..(14): n is a, c, g, or t
attcaaaatatttnaattatc

SEQ ID NO: 273296 - DNA, 21 bp, Artificial sequence
  SiRNA target sequence
  misc_feature (13)..(13): n is a, c, g, or t
ttcaaaatatttnaattatct

SEQ ID NO: 273297 - DNA, 21 bp, Artificial sequence
  SiRNA target sequence
  misc_feature (12)..(12): n is a, c, g, or t
tcaaaatatttnaattatctt

SEQ ID NO: 273298 - DNA, 21 bp, Artificial sequence
  SiRNA target sequence
  misc_feature (11)..(11): n is a, c, g, or t
caaaatatttnaattatcttt

SEQ ID NO: 273299 - DNA, 21 bp, Artificial sequence
  SiRNA target sequence
  misc_feature (10)..(10): n is a, c, g, or t
aaaatatttnaattatctttt

SEQ ID NO: 273300 - DNA, 21 bp, Artificial sequence
  SiRNA target sequence
  misc_feature (9)..(9): n is a, c, g, or t
aaatatttnaattatcttttc

SEQ ID NO: 273301 - DNA, 21 bp, Artificial sequence
  SiRNA target sequence
  misc_feature (8)..(8): n is a, c, g, or t
aatatttnaattatcttttcc

SEQ ID NO: 273302 - DNA, 21 bp, Artificial sequence
  SiRNA target sequence
  misc_feature (7)..(7): n is a, c, g, or t
atatttnaattatcttttcca

SEQ ID NO: 273303 - DNA, 21 bp, Artificial sequence
  SiRNA target sequence
  misc_feature (6)..(6): n is a, c, g, or t
tatttnaattatcttttccat

SEQ ID NO: 273304 - DNA, 21 bp, Artificial sequence
  SiRNA target sequence
  misc_feature (5)..(5): n is a, c, g, or t
atttnaattatcttttccata

SEQ ID NO: 273305 - DNA, 21 bp, Artificial sequence
  SiRNA target sequence
  misc_feature (4)..(4): n is a, c, g, or t
tttnaattatcttttccataa

SEQ ID NO: 273306 - DNA, 21 bp, Artificial sequence
  SiRNA target sequence
  misc_feature (3)..(3): n is a, c, g, or t
ttnaattatcttttccataaa

SEQ ID NO: 273307 - DNA, 21 bp, Artificial sequence
  SiRNA target sequence
  misc_feature (2)..(2): n is a, c, g, or t
tnaattatcttttccataaag

SEQ ID NO: 273308 - DNA, 21 bp, Artificial sequence
  SiRNA target sequence
  misc_feature (1)..(1): n is a, c, g, or t
naattatcttttccataaagc

SEQ ID NO: 273309 - DNA, 21 bp, Artificial sequence
  SiRNA target sequence
aattatcttttccataaagca

SEQ ID NO: 273310 - DNA, 21 bp, Artificial sequence
  SiRNA target sequence
attatcttttccataaagcat

SEQ ID NO: 273311 - DNA, 21 bp, Artificial sequence
  SiRNA target sequence
ttatcttttccataaagcatg

SEQ ID NO: 273312 - DNA, 21 bp, Artificial sequence
  SiRNA target sequence
tatcttttccataaagcatgg

SEQ ID NO: 273313 - DNA, 21 bp, Artificial sequence
  SiRNA target sequence
atcttttccataaagcatggt

SEQ ID NO: 273314 - DNA, 21 bp, Artificial sequence
  SiRNA target sequence
tcttttccataaagcatggtt

SEQ ID NO: 273315 - DNA, 21 bp, Artificial sequence
  SiRNA target sequence
cttttccataaagcatggttg

SEQ ID NO: 273316 - DNA, 21 bp, Artificial sequence
  SiRNA target sequence
ttttccataaagcatggttgt

SEQ ID NO: 273317 - DNA, 21 bp, Artificial sequence
  SiRNA target sequence
tttccataaagcatggttgtt

SEQ ID NO: 273318 - DNA, 21 bp, Artificial sequence
  SiRNA target sequence
ttccataaagcatggttgttt

SEQ ID NO: 273319 - DNA, 21 bp, Artificial sequence
  SiRNA target sequence
tccataaagcatggttgtttg

SEQ ID NO: 273320 - DNA, 21 bp, Artificial sequence
  SiRNA target sequence
ccataaagcatggttgtttga

SEQ ID NO: 273321 - DNA, 21 bp, Artificial sequence
  SiRNA target sequence
cataaagcatggttgtttgag

SEQ ID NO: 273322 - DNA, 21 bp, Artificial sequence
  SiRNA target sequence
ataaagcatggttgtttgaga

SEQ ID NO: 273323 - DNA, 21 bp, Artificial sequence
  SiRNA target sequence
taaagcatggttgtttgagaa

SEQ ID NO: 273324 - DNA, 21 bp, Artificial sequence
  SiRNA target sequence
aaagcatggttgtttgagaac

SEQ ID NO: 273325 - DNA, 21 bp, Artificial sequence
  SiRNA target sequence
aagcatggttgtttgagaacc

SEQ ID NO: 273326 - DNA, 21 bp, Artificial sequence
  SiRNA target sequence
agcatggttgtttgagaaccc

SEQ ID NO: 273327 - DNA, 21 bp, Artificial sequence
  SiRNA target sequence
gcatggttgtttgagaaccca

SEQ ID NO: 273328 - DNA, 21 bp, Artificial sequence
  SiRNA target sequence
catggttgtttgagaacccaa

SEQ ID NO: 273329 - DNA, 21 bp, Artificial sequence
  SiRNA target sequence
atggttgtttgagaacccaac

SEQ ID NO: 273330 - DNA, 21 bp, Artificial sequence
  SiRNA target sequence
tggttgtttgagaacccaact

SEQ ID NO: 273331 - DNA, 21 bp, Artificial sequence
  SiRNA target sequence
ggttgtttgagaacccaactt

SEQ ID NO: 273332 - DNA, 21 bp, Artificial sequence
  SiRNA target sequence
gttgtttgagaacccaacttg

SEQ ID NO: 273333 - DNA, 21 bp, Artificial sequence
  SiRNA target sequence
ttgtttgagaacccaacttgg

SEQ ID NO: 273334 - DNA, 21 bp, Artificial sequence
  SiRNA target sequence
tgtttgagaacccaacttggc

SEQ ID NO: 273335 - DNA, 21 bp, Artificial sequence
  SiRNA target sequence
gtttgagaacccaacttggcg

SEQ ID NO: 273336 - DNA, 21 bp, Artificial sequence
  SiRNA target sequence
tttgagaacccaacttggcgc

SEQ ID NO: 273337 - DNA, 21 bp, Artificial sequence
  SiRNA target sequence
ttgagaacccaacttggcgcc

SEQ ID NO: 273338 - DNA, 21 bp, Artificial sequence
  SiRNA target sequence
tgagaacccaacttggcgcct

SEQ ID NO: 273339 - DNA, 21 bp, Artificial sequence
  SiRNA target sequence
gagaacccaacttggcgccta

SEQ ID NO: 273340 - DNA, 21 bp, Artificial sequence
  SiRNA target sequence
agaacccaacttggcgcctaa

SEQ ID NO: 273341 - DNA, 21 bp, Artificial sequence
  SiRNA target sequence
gaacccaacttggcgcctaat

SEQ ID NO: 273342 - DNA, 21 bp, Artificial sequence
  SiRNA target sequence
aacccaacttggcgcctaata

SEQ ID NO: 273343 - DNA, 21 bp, Artificial sequence
  SiRNA target sequence
acccaacttggcgcctaatat

SEQ ID NO: 273344 - DNA, 21 bp, Artificial sequence
  SiRNA target sequence
cccaacttggcgcctaatata

SEQ ID NO: 273345 - DNA, 21 bp, Artificial sequence
  SiRNA target sequence
ccaacttggcgcctaatatat

SEQ ID NO: 273346 - DNA, 21 bp, Artificial sequence
  SiRNA target sequence
caacttggcgcctaatatata

SEQ ID NO: 273347 - DNA, 21 bp, Artificial sequence
  SiRNA target sequence
aacttggcgcctaatatataa

SEQ ID NO: 273348 - DNA, 21 bp, Artificial sequence
  SiRNA target sequence
acttggcgcctaatatataat

SEQ ID NO: 273349 - DNA, 21 bp, Artificial sequence
  SiRNA target sequence
cttggcgcctaatatataatg

SEQ ID NO: 273350 - DNA, 21 bp, Artificial sequence
  SiRNA target sequence
ttggcgcctaatatataatgg

SEQ ID NO: 273351 - DNA, 21 bp, Artificial sequence
  SiRNA target sequence
tggcgcctaatatataatggt

SEQ ID NO: 273352 - DNA, 21 bp, Artificial sequence
  SiRNA target sequence
ggcgcctaatatataatggta

SEQ ID NO: 273353 - DNA, 21 bp, Artificial sequence
  SiRNA target sequence
gcgcctaatatataatggtac

SEQ ID NO: 273354 - DNA, 21 bp, Artificial sequence
  SiRNA target sequence
cgcctaatatataatggtacc

SEQ ID NO: 273355 - DNA, 21 bp, Artificial sequence
  SiRNA target sequence
gcctaatatataatggtacca

SEQ ID NO: 273356 - DNA, 21 bp, Artificial sequence
  SiRNA target sequence
cctaatatataatggtaccaa

SEQ ID NO: 273357 - DNA, 21 bp, Artificial sequence
  SiRNA target sequence
ctaatatataatggtaccaag

SEQ ID NO: 273358 - DNA, 21 bp, Artificial sequence
  SiRNA target sequence
taatatataatggtaccaaga

SEQ ID NO: 273359 - DNA, 21 bp, Artificial sequence
  SiRNA target sequence
aatatataatggtaccaagaa

SEQ ID NO: 273360 - DNA, 21 bp, Artificial sequence
  SiRNA target sequence
atatataatggtaccaagaag

SEQ ID NO: 273361 - DNA, 21 bp, Artificial sequence
  SiRNA target sequence
tatataatggtaccaagaagg

SEQ ID NO: 273362 - DNA, 21 bp, Artificial sequence
  SiRNA target sequence
atataatggtaccaagaaggg

SEQ ID NO: 273363 - DNA, 21 bp, Artificial sequence
  SiRNA target sequence
tataatggtaccaagaagggt

SEQ ID NO: 273364 - DNA, 21 bp, Artificial sequence
  SiRNA target sequence
ataatggtaccaagaagggta

SEQ ID NO: 273365 - DNA, 21 bp, Artificial sequence
  SiRNA target sequence
taatggtaccaagaagggtat

SEQ ID NO: 273366 - DNA, 21 bp, Artificial sequence
  SiRNA target sequence
aatggtaccaagaagggtatg

SEQ ID NO: 273367 - DNA, 21 bp, Artificial sequence
  SiRNA target sequence
atggtaccaagaagggtatgc

SEQ ID NO: 273368 - DNA, 21 bp, Artificial sequence
  SiRNA target sequence
tggtaccaagaagggtatgcc

SEQ ID NO: 273369 - DNA, 21 bp, Artificial sequence
  SiRNA target sequence
ggtaccaagaagggtatgccc

SEQ ID NO: 273370 - DNA, 21 bp, Artificial sequence
  SiRNA target sequence
gtaccaagaagggtatgcccg

SEQ ID NO: 273371 - DNA, 21 bp, Artificial sequence
  SiRNA target sequence
taccaagaagggtatgcccga

SEQ ID NO: 273372 - DNA, 21 bp, Artificial sequence
  SiRNA target sequence
accaagaagggtatgcccgag

SEQ ID NO: 273373 - DNA, 21 bp, Artificial sequence
  SiRNA target sequence
ccaagaagggtatgcccgagt

SEQ ID NO: 273374 - DNA, 21 bp, Artificial sequence
  SiRNA target sequence
caagaagggtatgcccgagta

SEQ ID NO: 273375 - DNA, 21 bp, Artificial sequence
  SiRNA target sequence
aagaagggtatgcccgagtac

SEQ ID NO: 273376 - DNA, 21 bp, Artificial sequence
  SiRNA target sequence
agaagggtatgcccgagtact

SEQ ID NO: 273377 - DNA, 21 bp, Artificial sequence
  SiRNA target sequence
gaagggtatgcccgagtactt

SEQ ID NO: 273378 - DNA, 21 bp, Artificial sequence
  SiRNA target sequence
aagggtatgcccgagtacttt

SEQ ID NO: 273379 - DNA, 21 bp, Artificial sequence
  SiRNA target sequence
agggtatgcccgagtacttta

SEQ ID NO: 273380 - DNA, 21 bp, Artificial sequence
  SiRNA target sequence
gggtatgcccgagtactttat

SEQ ID NO: 273381 - DNA, 21 bp, Artificial sequence
  SiRNA target sequence
ggtatgcccgagtactttatg

SEQ ID NO: 273382 - DNA, 21 bp, Artificial sequence
  SiRNA target sequence
gtatgcccgagtactttatga

SEQ ID NO: 273383 - DNA, 21 bp, Artificial sequence
  SiRNA target sequence
tatgcccgagtactttatgaa

SEQ ID NO: 273384 - DNA, 21 bp, Artificial sequence
  SiRNA target sequence
atgcccgagtactttatgaat

SEQ ID NO: 273385 - DNA, 21 bp, Artificial sequence
  SiRNA target sequence
tgcccgagtactttatgaatt

SEQ ID NO: 273386 - DNA, 21 bp, Artificial sequence
  SiRNA target sequence
gcccgagtactttatgaattg

SEQ ID NO: 273387 - DNA, 21 bp, Artificial sequence
  SiRNA target sequence
cccgagtactttatgaattgt

SEQ ID NO: 273388 - DNA, 21 bp, Artificial sequence
  SiRNA target sequence
ccgagtactttatgaattgtg

SEQ ID NO: 273389 - DNA, 21 bp, Artificial sequence
  SiRNA target sequence
cgagtactttatgaattgtgt

SEQ ID NO: 273390 - DNA, 21 bp, Artificial sequence
  SiRNA target sequence
gagtactttatgaattgtgtg

SEQ ID NO: 273391 - DNA, 21 bp, Artificial sequence
  SiRNA target sequence
agtactttatgaattgtgtgg

SEQ ID NO: 273392 - DNA, 21 bp, Artificial sequence
  SiRNA target sequence
gtactttatgaattgtgtgga

SEQ ID NO: 273393 - DNA, 21 bp, Artificial sequence
  SiRNA target sequence
tactttatgaattgtgtggat

SEQ ID NO: 273394 - DNA, 21 bp, Artificial sequence
  SiRNA target sequence
actttatgaattgtgtggatg

SEQ ID NO: 273395 - DNA, 21 bp, Artificial sequence
  SiRNA target sequence
ctttatgaattgtgtggatga

SEQ ID NO: 273396 - DNA, 21 bp, Artificial sequence
  SiRNA target sequence
tttatgaattgtgtggatgaa

SEQ ID NO: 273397 - DNA, 21 bp, Artificial sequence
  SiRNA target sequence
ttatgaattgtgtggatgaaa

SEQ ID NO: 273398 - DNA, 21 bp, Artificial sequence
  SiRNA target sequence
tatgaattgtgtggatgaaat

SEQ ID NO: 273399 - DNA, 21 bp, Artificial sequence
  SiRNA target sequence
atgaattgtgtggatgaaatt

SEQ ID NO: 273400 - DNA, 21 bp, Artificial sequence
  SiRNA target sequence
tgaattgtgtggatgaaattt

SEQ ID NO: 273401 - DNA, 21 bp, Artificial sequence
  SiRNA target sequence
gaattgtgtggatgaaatttc

SEQ ID NO: 273402 - DNA, 21 bp, Artificial sequence
  SiRNA target sequence
aattgtgtggatgaaatttca

SEQ ID NO: 273403 - DNA, 21 bp, Artificial sequence
  SiRNA target sequence
attgtgtggatgaaatttcat

SEQ ID NO: 273404 - DNA, 21 bp, Artificial sequence
  SiRNA target sequence
ttgtgtggatgaaatttcatt

SEQ ID NO: 273405 - DNA, 21 bp, Artificial sequence
  SiRNA target sequence
tgtgtggatgaaatttcatta

SEQ ID NO: 273406 - DNA, 21 bp, Artificial sequence
  SiRNA target sequence
gtgtggatgaaatttcattag

SEQ ID NO: 273407 - DNA, 21 bp, Artificial sequence
  SiRNA target sequence
tgtggatgaaatttcattaga

SEQ ID NO: 273408 - DNA, 21 bp, Artificial sequence
  SiRNA target sequence
gtggatgaaatttcattagat

SEQ ID NO: 273409 - DNA, 21 bp, Artificial sequence
  SiRNA target sequence
tggatgaaatttcattagatt

SEQ ID NO: 273410 - DNA, 21 bp, Artificial sequence
  SiRNA target sequence
ggatgaaatttcattagattc

SEQ ID NO: 273411 - DNA, 21 bp, Artificial sequence
  SiRNA target sequence
gatgaaatttcattagattcc

SEQ ID NO: 273412 - DNA, 21 bp, Artificial sequence
  SiRNA target sequence
atgaaatttcattagattcca

SEQ ID NO: 273413 - DNA, 21 bp, Artificial sequence
  SiRNA target sequence
tgaaatttcattagattccaa

SEQ ID NO: 273414 - DNA, 21 bp, Artificial sequence
  SiRNA target sequence
gaaatttcattagattccaaa

SEQ ID NO: 273415 - DNA, 21 bp, Artificial sequence
  SiRNA target sequence
aaatttcattagattccaaat

SEQ ID NO: 273416 - DNA, 21 bp, Artificial sequence
  SiRNA target sequence
aatttcattagattccaaatt

SEQ ID NO: 273417 - DNA, 21 bp, Artificial sequence
  SiRNA target sequence
atttcattagattccaaattt

SEQ ID NO: 273418 - DNA, 21 bp, Artificial sequence
  SiRNA target sequence
tttcattagattccaaatttg

SEQ ID NO: 273419 - DNA, 21 bp, Artificial sequence
  SiRNA target sequence
ttcattagattccaaatttgg

SEQ ID NO: 273420 - DNA, 21 bp, Artificial sequence
  SiRNA target sequence
tcattagattccaaatttggt

SEQ ID NO: 273421 - DNA, 21 bp, Artificial sequence
  SiRNA target sequence
cattagattccaaatttggta

SEQ ID NO: 273422 - DNA, 21 bp, Artificial sequence
  SiRNA target sequence
attagattccaaatttggtaa

SEQ ID NO: 273423 - DNA, 21 bp, Artificial sequence
  SiRNA target sequence
ttagattccaaatttggtaaa

SEQ ID NO: 273424 - DNA, 21 bp, Artificial sequence
  SiRNA target sequence
tagattccaaatttggtaaag

SEQ ID NO: 273425 - DNA, 21 bp, Artificial sequence
  SiRNA target sequence
agattccaaatttggtaaagt

SEQ ID NO: 273426 - DNA, 21 bp, Artificial sequence
  SiRNA target sequence
gattccaaatttggtaaagtg

SEQ ID NO: 273427 - DNA, 21 bp, Artificial sequence
  SiRNA target sequence
attccaaatttggtaaagtga

SEQ ID NO: 273428 - DNA, 21 bp, Artificial sequence
  SiRNA target sequence
ttccaaatttggtaaagtgaa

SEQ ID NO: 273429 - DNA, 21 bp, Artificial sequence
  SiRNA target sequence
tccaaatttggtaaagtgaaa

SEQ ID NO: 273430 - DNA, 21 bp, Artificial sequence
  SiRNA target sequence
ccaaatttggtaaagtgaaag

SEQ ID NO: 273431 - DNA, 21 bp, Artificial sequence
  SiRNA target sequence
caaatttggtaaagtgaaagt

SEQ ID NO: 273432 - DNA, 21 bp, Artificial sequence
  SiRNA target sequence
aaatttggtaaagtgaaagtg

SEQ ID NO: 273433 - DNA, 21 bp, Artificial sequence
  SiRNA target sequence
aatttggtaaagtgaaagtgt

SEQ ID NO: 273434 - DNA, 21 bp, Artificial sequence
  SiRNA target sequence
atttggtaaagtgaaagtgtg

SEQ ID NO: 273435 - DNA, 21 bp, Artificial sequence
  SiRNA target sequence
tttggtaaagtgaaagtgtgg

SEQ ID NO: 273436 - DNA, 21 bp, Artificial sequence
  SiRNA target sequence
ttggtaaagtgaaagtgtggt

SEQ ID NO: 273437 - DNA, 21 bp, Artificial sequence
  SiRNA target sequence
tggtaaagtgaaagtgtggtt

SEQ ID NO: 273438 - DNA, 21 bp, Artificial sequence
  SiRNA target sequence
ggtaaagtgaaagtgtggttg

SEQ ID NO: 273439 - DNA, 21 bp, Artificial sequence
  SiRNA target sequence
gtaaagtgaaagtgtggttgc

SEQ ID NO: 273440 - DNA, 21 bp, Artificial sequence
  SiRNA target sequence
taaagtgaaagtgtggttgca

SEQ ID NO: 273441 - DNA, 21 bp, Artificial sequence
  SiRNA target sequence
aaagtgaaagtgtggttgcaa

SEQ ID NO: 273442 - DNA, 21 bp, Artificial sequence
  SiRNA target sequence
aagtgaaagtgtggttgcaag

SEQ ID NO: 273443 - DNA, 21 bp, Artificial sequence
  SiRNA target sequence
agtgaaagtgtggttgcaagc

SEQ ID NO: 273444 - DNA, 21 bp, Artificial sequence
  SiRNA target sequence
gtgaaagtgtggttgcaagcg

SEQ ID NO: 273445 - DNA, 21 bp, Artificial sequence
  SiRNA target sequence
tgaaagtgtggttgcaagcga

SEQ ID NO: 273446 - DNA, 21 bp, Artificial sequence
  SiRNA target sequence
gaaagtgtggttgcaagcgat

SEQ ID NO: 273447 - DNA, 21 bp, Artificial sequence
  SiRNA target sequence
aaagtgtggttgcaagcgatc

SEQ ID NO: 273448 - DNA, 21 bp, Artificial sequence
  SiRNA target sequence
aagtgtggttgcaagcgatca

SEQ ID NO: 273449 - DNA, 21 bp, Artificial sequence
  SiRNA target sequence
agtgtggttgcaagcgatcat

SEQ ID NO: 273450 - DNA, 21 bp, Artificial sequence
  SiRNA target sequence
gtgtggttgcaagcgatcatt

SEQ ID NO: 273451 - DNA, 21 bp, Artificial sequence
  SiRNA target sequence
tgtggttgcaagcgatcattg

SEQ ID NO: 273452 - DNA, 21 bp, Artificial sequence
  SiRNA target sequence
gtggttgcaagcgatcattga

SEQ ID NO: 273453 - DNA, 21 bp, Artificial sequence
  SiRNA target sequence
tggttgcaagcgatcattgat

SEQ ID NO: 273454 - DNA, 21 bp, Artificial sequence
  SiRNA target sequence
ggttgcaagcgatcattgata

SEQ ID NO: 273455 - DNA, 21 bp, Artificial sequence
  SiRNA target sequence
gttgcaagcgatcattgataa

SEQ ID NO: 273456 - DNA, 21 bp, Artificial sequence
  SiRNA target sequence
ttgcaagcgatcattgataag

SEQ ID NO: 273457 - DNA, 21 bp, Artificial sequence
  SiRNA target sequence
tgcaagcgatcattgataagt

SEQ ID NO: 273458 - DNA, 21 bp, Artificial sequence
  SiRNA target sequence
gcaagcgatcattgataagta

SEQ ID NO: 273459 - DNA, 21 bp, Artificial sequence
  SiRNA target sequence
caagcgatcattgataagtat

SEQ ID NO: 273460 - DNA, 21 bp, Artificial sequence
  SiRNA target sequence
aagcgatcattgataagtatt

SEQ ID NO: 273461 - DNA, 21 bp, Artificial sequence
  SiRNA target sequence
agcgatcattgataagtattt

SEQ ID NO: 273462 - DNA, 21 bp, Artificial sequence
  SiRNA target sequence
gcgatcattgataagtattta

SEQ ID NO: 273463 - DNA, 21 bp, Artificial sequence
  SiRNA target sequence
cgatcattgataagtatttaa

SEQ ID NO: 273464 - DNA, 21 bp, Artificial sequence
  SiRNA target sequence
gatcattgataagtatttaac

SEQ ID NO: 273465 - DNA, 21 bp, Artificial sequence
  SiRNA target sequence
atcattgataagtatttaact

SEQ ID NO: 273466 - DNA, 21 bp, Artificial sequence
  SiRNA target sequence
tcattgataagtatttaactc

SEQ ID NO: 273467 - DNA, 21 bp, Artificial sequence
  SiRNA target sequence
cattgataagtatttaactcg

SEQ ID NO: 273468 - DNA, 21 bp, Artificial sequence
  SiRNA target sequence
attgataagtatttaactcgt

SEQ ID NO: 273469 - DNA, 21 bp, Artificial sequence
  SiRNA target sequence
ttgataagtatttaactcgtc

SEQ ID NO: 273470 - DNA, 21 bp, Artificial sequence
  SiRNA target sequence
tgataagtatttaactcgtcc

SEQ ID NO: 273471 - DNA, 21 bp, Artificial sequence
  SiRNA target sequence
gataagtatttaactcgtccc

SEQ ID NO: 273472 - DNA, 21 bp, Artificial sequence
  SiRNA target sequence
ataagtatttaactcgtcccg

SEQ ID NO: 273473 - DNA, 21 bp, Artificial sequence
  SiRNA target sequence
taagtatttaactcgtcccgt

SEQ ID NO: 273474 - DNA, 21 bp, Artificial sequence
  SiRNA target sequence
aagtatttaactcgtcccgtg

SEQ ID NO: 273475 - DNA, 21 bp, Artificial sequence
  SiRNA target sequence
agtatttaactcgtcccgtga

SEQ ID NO: 273476 - DNA, 21 bp, Artificial sequence
  SiRNA target sequence
gtatttaactcgtcccgtgaa

SEQ ID NO: 273477 - DNA, 21 bp, Artificial sequence
  SiRNA target sequence
tatttaactcgtcccgtgaaa

SEQ ID NO: 273478 - DNA, 21 bp, Artificial sequence
  SiRNA target sequence
atttaactcgtcccgtgaaaa

SEQ ID NO: 273479 - DNA, 21 bp, Artificial sequence
  SiRNA target sequence
tttaactcgtcccgtgaaaat

SEQ ID NO: 273480 - DNA, 21 bp, Artificial sequence
  SiRNA target sequence
ttaactcgtcccgtgaaaatg

SEQ ID NO: 273481 - DNA, 21 bp, Artificial sequence
  SiRNA target sequence
taactcgtcccgtgaaaatga

SEQ ID NO: 273482 - DNA, 21 bp, Artificial sequence
  SiRNA target sequence
aactcgtcccgtgaaaatgat

SEQ ID NO: 273483 - DNA, 21 bp, Artificial sequence
  SiRNA target sequence
actcgtcccgtgaaaatgatt

SEQ ID NO: 273484 - DNA, 21 bp, Artificial sequence
  SiRNA target sequence
ctcgtcccgtgaaaatgattc

SEQ ID NO: 273485 - DNA, 21 bp, Artificial sequence
  SiRNA target sequence
tcgtcccgtgaaaatgattcg

SEQ ID NO: 273486 - DNA, 21 bp, Artificial sequence
  SiRNA target sequence
cgtcccgtgaaaatgattcgt

SEQ ID NO: 273487 - DNA, 21 bp, Artificial sequence
  SiRNA target sequence
gtcccgtgaaaatgattcgtg

SEQ ID NO: 273488 - DNA, 21 bp, Artificial sequence
  SiRNA target sequence
tcccgtgaaaatgattcgtga

SEQ ID NO: 273489 - DNA, 21 bp, Artificial sequence
  SiRNA target sequence
cccgtgaaaatgattcgtgat

SEQ ID NO: 273490 - DNA, 21 bp, Artificial sequence
  SiRNA target sequence
ccgtgaaaatgattcgtgatt

SEQ ID NO: 273491 - DNA, 21 bp, Artificial sequence
  SiRNA target sequence
cgtgaaaatgattcgtgattt

SEQ ID NO: 273492 - DNA, 21 bp, Artificial sequence
  SiRNA target sequence
gtgaaaatgattcgtgatttt

SEQ ID NO: 273493 - DNA, 21 bp, Artificial sequence
  SiRNA target sequence
tgaaaatgattcgtgattttc

SEQ ID NO: 273494 - DNA, 21 bp, Artificial sequence
  SiRNA target sequence
gaaaatgattcgtgattttct

SEQ ID NO: 273495 - DNA, 21 bp, Artificial sequence
  SiRNA target sequence
aaaatgattcgtgattttctt

SEQ ID NO: 273496 - DNA, 21 bp, Artificial sequence
  SiRNA target sequence
aaatgattcgtgattttcttt

SEQ ID NO: 273497 - DNA, 21 bp, Artificial sequence
  SiRNA target sequence
aatgattcgtgattttctttt

SEQ ID NO: 273498 - DNA, 21 bp, Artificial sequence
  SiRNA target sequence
atgattcgtgattttcttttc

SEQ ID NO: 273499 - DNA, 21 bp, Artificial sequence
  SiRNA target sequence
tgattcgtgattttcttttca

SEQ ID NO: 273500 - DNA, 21 bp, Artificial sequence
  SiRNA target sequence
gattcgtgattttcttttcaa

SEQ ID NO: 273501 - DNA, 21 bp, Artificial sequence
  SiRNA target sequence
attcgtgattttcttttcaag

SEQ ID NO: 273502 - DNA, 21 bp, Artificial sequence
  SiRNA target sequence
ttcgtgattttcttttcaagt

SEQ ID NO: 273503 - DNA, 21 bp, Artificial sequence
  SiRNA target sequence
tcgtgattttcttttcaagtg

SEQ ID NO: 273504 - DNA, 21 bp, Artificial sequence
  SiRNA target sequence
cgtgattttcttttcaagtgg

SEQ ID NO: 273505 - DNA, 21 bp, Artificial sequence
  SiRNA target sequence
gtgattttcttttcaagtggt

SEQ ID NO: 273506 - DNA, 21 bp, Artificial sequence
  SiRNA target sequence
tgattttcttttcaagtggtg

SEQ ID NO: 273507 - DNA, 21 bp, Artificial sequence
  SiRNA target sequence
gattttcttttcaagtggtgg

SEQ ID NO: 273508 - DNA, 21 bp, Artificial sequence
  SiRNA target sequence
attttcttttcaagtggtggc

SEQ ID NO: 273509 - DNA, 21 bp, Artificial sequence
  SiRNA target sequence
ttttcttttcaagtggtggcc

SEQ ID NO: 273510 - DNA, 21 bp, Artificial sequence
  SiRNA target sequence
tttcttttcaagtggtggccg

SEQ ID NO: 273511 - DNA, 21 bp, Artificial sequence
  SiRNA target sequence
ttcttttcaagtggtggccgc

SEQ ID NO: 273512 - DNA, 21 bp, Artificial sequence
  SiRNA target sequence
tcttttcaagtggtggccgca

SEQ ID NO: 273513 - DNA, 21 bp, Artificial sequence
  SiRNA target sequence
cttttcaagtggtggccgcaa

SEQ ID NO: 273514 - DNA, 21 bp, Artificial sequence
  SiRNA target sequence
ttttcaagtggtggccgcaag

SEQ ID NO: 273515 - DNA, 21 bp, Artificial sequence
  SiRNA target sequence
tttcaagtggtggccgcaagt

SEQ ID NO: 273516 - DNA, 21 bp, Artificial sequence
  SiRNA target sequence
ttcaagtggtggccgcaagtt

SEQ ID NO: 273517 - DNA, 21 bp, Artificial sequence
  SiRNA target sequence
tcaagtggtggccgcaagttg

SEQ ID NO: 273518 - DNA, 21 bp, Artificial sequence
  SiRNA target sequence
caagtggtggccgcaagttgc

SEQ ID NO: 273519 - DNA, 21 bp, Artificial sequence
  SiRNA target sequence
aagtggtggccgcaagttgcg

SEQ ID NO: 273520 - DNA, 21 bp, Artificial sequence
  SiRNA target sequence
agtggtggccgcaagttgcgt

SEQ ID NO: 273521 - DNA, 21 bp, Artificial sequence
  SiRNA target sequence
gtggtggccgcaagttgcgta

SEQ ID NO: 273522 - DNA, 21 bp, Artificial sequence
  SiRNA target sequence
tggtggccgcaagttgcgtat

SEQ ID NO: 273523 - DNA, 21 bp, Artificial sequence
  SiRNA target sequence
ggtggccgcaagttgcgtatg

SEQ ID NO: 273524 - DNA, 21 bp, Artificial sequence
  SiRNA target sequence
gtggccgcaagttgcgtatgt

SEQ ID NO: 273525 - DNA, 21 bp, Artificial sequence
  SiRNA target sequence
tggccgcaagttgcgtatgtg

SEQ ID NO: 273526 - DNA, 21 bp, Artificial sequence
  SiRNA target sequence
ggccgcaagttgcgtatgtgt

SEQ ID NO: 273527 - DNA, 21 bp, Artificial sequence
  SiRNA target sequence
gccgcaagttgcgtatgtgtt

SEQ ID NO: 273528 - DNA, 21 bp, Artificial sequence
  SiRNA target sequence
ccgcaagttgcgtatgtgttg

SEQ ID NO: 273529 - DNA, 21 bp, Artificial sequence
  SiRNA target sequence
cgcaagttgcgtatgtgttga

SEQ ID NO: 273530 - DNA, 21 bp, Artificial sequence
  SiRNA target sequence
gcaagttgcgtatgtgttgag

SEQ ID NO: 273531 - DNA, 21 bp, Artificial sequence
  SiRNA target sequence
caagttgcgtatgtgttgagc

SEQ ID NO: 273532 - DNA, 21 bp, Artificial sequence
  SiRNA target sequence
aagttgcgtatgtgttgagct

SEQ ID NO: 273533 - DNA, 21 bp, Artificial sequence
  SiRNA target sequence
agttgcgtatgtgttgagctt

SEQ ID NO: 273534 - DNA, 21 bp, Artificial sequence
  SiRNA target sequence
gttgcgtatgtgttgagcttg

SEQ ID NO: 273535 - DNA, 21 bp, Artificial sequence
  SiRNA target sequence
ttgcgtatgtgttgagcttgc

SEQ ID NO: 273536 - DNA, 21 bp, Artificial sequence
  SiRNA target sequence
tgcgtatgtgttgagcttgct

SEQ ID NO: 273537 - DNA, 21 bp, Artificial sequence
  SiRNA target sequence
gcgtatgtgttgagcttgcta

SEQ ID NO: 273538 - DNA, 21 bp, Artificial sequence
  SiRNA target sequence
cgtatgtgttgagcttgctag

SEQ ID NO: 273539 - DNA, 21 bp, Artificial sequence
  SiRNA target sequence
gtatgtgttgagcttgctagg

SEQ ID NO: 273540 - DNA, 21 bp, Artificial sequence
  SiRNA target sequence
tatgtgttgagcttgctaggt

SEQ ID NO: 273541 - DNA, 21 bp, Artificial sequence
  SiRNA target sequence
atgtgttgagcttgctaggta

SEQ ID NO: 273542 - DNA, 21 bp, Artificial sequence
  SiRNA target sequence
tgtgttgagcttgctaggtat

SEQ ID NO: 273543 - DNA, 21 bp, Artificial sequence
  SiRNA target sequence
gtgttgagcttgctaggtata

SEQ ID NO: 273544 - DNA, 21 bp, Artificial sequence
  SiRNA target sequence
tgttgagcttgctaggtataa

SEQ ID NO: 273545 - DNA, 21 bp, Artificial sequence
  SiRNA target sequence
gttgagcttgctaggtataat

SEQ ID NO: 273546 - DNA, 21 bp, Artificial sequence
  SiRNA target sequence
  misc_feature (21)..(21): n is a, c, g, or t
ttgagcttgctaggtataatn

SEQ ID NO: 273547 - DNA, 21 bp, Artificial sequence
  SiRNA target sequence
  misc_feature (20)..(20): n is a, c, g, or t
tgagcttgctaggtataatng

SEQ ID NO: 273548 - DNA, 21 bp, Artificial sequence
  SiRNA target sequence
  misc_feature (19)..(19): n is a, c, g, or t
gagcttgctaggtataatngg

SEQ ID NO: 273549 - DNA, 21 bp, Artificial sequence
  SiRNA target sequence
  misc_feature (18)..(18): n is a, c, g, or t
agcttgctaggtataatnggt

SEQ ID NO: 273550 - DNA, 21 bp, Artificial sequence
  SiRNA target sequence
  misc_feature (17)..(17): n is a, c, g, or t
gcttgctaggtataatnggta

SEQ ID NO: 273551 - DNA, 21 bp, Artificial sequence
  SiRNA target sequence
  misc_feature (16)..(16): n is a, c, g, or t
cttgctaggtataatnggtat

SEQ ID NO: 273552 - DNA, 21 bp, Artificial sequence
  SiRNA target sequence
  misc_feature (15)..(15): n is a, c, g, or t
ttgctaggtataatnggtata

SEQ ID NO: 273553 - DNA, 21 bp, Artificial sequence
  SiRNA target sequence
  misc_feature (14)..(14): n is a, c, g, or t
tgctaggtataatnggtataa

SEQ ID NO: 273554 - DNA, 21 bp, Artificial sequence
  SiRNA target sequence
  misc_feature (13)..(13): n is a, c, g, or t
gctaggtataatnggtataac

SEQ ID NO: 273555 - DNA, 21 bp, Artificial sequence
  SiRNA target sequence
  misc_feature (12)..(12): n is a, c, g, or t
ctaggtataatnggtataact

SEQ ID NO: 273556 - DNA, 21 bp, Artificial sequence
  SiRNA target sequence
  misc_feature (11)..(11): n is a, c, g, or t
taggtataatnggtataactg

SEQ ID NO: 273557 - DNA, 21 bp, Artificial sequence
  SiRNA target sequence
  misc_feature (10)..(10): n is a, c, g, or t
aggtataatnggtataactgc

SEQ ID NO: 273558 - DNA, 21 bp, Artificial sequence
  SiRNA target sequence
  misc_feature (9)..(9): n is a, c, g, or t
ggtataatnggtataactgcg

SEQ ID NO: 273559 - DNA, 21 bp, Artificial sequence
  SiRNA target sequence
  misc_feature (8)..(8): n is a, c, g, or t
gtataatnggtataactgcgt

SEQ ID NO: 273560 - DNA, 21 bp, Artificial sequence
  SiRNA target sequence
  misc_feature (7)..(7): n is a, c, g, or t
tataatnggtataactgcgta

SEQ ID NO: 273561 - DNA, 21 bp, Artificial sequence
  SiRNA target sequence
  misc_feature (6)..(6): n is a, c, g, or t
ataatnggtataactgcgtat

SEQ ID NO: 273562 - DNA, 21 bp, Artificial sequence
  SiRNA target sequence
  misc_feature (5)..(5): n is a, c, g, or t
taatnggtataactgcgtatg

SEQ ID NO: 273563 - DNA, 21 bp, Artificial sequence
  SiRNA target sequence
  misc_feature (4)..(4): n is a, c, g, or t
aatnggtataactgcgtatga

SEQ ID NO: 273564 - DNA, 21 bp, Artificial sequence
  SiRNA target sequence
  misc_feature (3)..(3): n is a, c, g, or t
atnggtataactgcgtatgaa

SEQ ID NO: 273565 - DNA, 21 bp, Artificial sequence
  SiRNA target sequence
  misc_feature (2)..(2): n is a, c, g, or t
tnggtataactgcgtatgaaa

SEQ ID NO: 273566 - DNA, 21 bp, Artificial sequence
  SiRNA target sequence
  misc_feature (1)..(1): n is a, c, g, or t
nggtataactgcgtatgaaat

SEQ ID NO: 273567 - DNA, 21 bp, Artificial sequence
  SiRNA target sequence
ggtataactgcgtatgaaatg

SEQ ID NO: 273568 - DNA, 21 bp, Artificial sequence
  SiRNA target sequence
gtataactgcgtatgaaatga

SEQ ID NO: 273569 - DNA, 21 bp, Artificial sequence
  SiRNA target sequence
tataactgcgtatgaaatgag

SEQ ID NO: 273570 - DNA, 21 bp, Artificial sequence
  SiRNA target sequence
ataactgcgtatgaaatgaga

SEQ ID NO: 273571 - DNA, 21 bp, Artificial sequence
  SiRNA target sequence
taactgcgtatgaaatgagaa

SEQ ID NO: 273572 - DNA, 21 bp, Artificial sequence
  SiRNA target sequence
aactgcgtatgaaatgagaaa

SEQ ID NO: 273573 - DNA, 21 bp, Artificial sequence
  SiRNA target sequence
actgcgtatgaaatgagaaat

SEQ ID NO: 273574 - DNA, 21 bp, Artificial sequence
  SiRNA target sequence
ctgcgtatgaaatgagaaatc

SEQ ID NO: 273575 - DNA, 21 bp, Artificial sequence
  SiRNA target sequence
tgcgtatgaaatgagaaatcc

SEQ ID NO: 273576 - DNA, 21 bp, Artificial sequence
  SiRNA target sequence
gcgtatgaaatgagaaatccg

SEQ ID NO: 273577 - DNA, 21 bp, Artificial sequence
  SiRNA target sequence
cgtatgaaatgagaaatccga

SEQ ID NO: 273578 - DNA, 21 bp, Artificial sequence
  SiRNA target sequence
gtatgaaatgagaaatccgaa

SEQ ID NO: 273579 - DNA, 21 bp, Artificial sequence
  SiRNA target sequence
tatgaaatgagaaatccgaaa

SEQ ID NO: 273580 - DNA, 21 bp, Artificial sequence
  SiRNA target sequence
atgaaatgagaaatccgaaac

SEQ ID NO: 273581 - DNA, 21 bp, Artificial sequence
  SiRNA target sequence
tgaaatgagaaatccgaaacc

SEQ ID NO: 273582 - DNA, 21 bp, Artificial sequence
  SiRNA target sequence
gaaatgagaaatccgaaacca

SEQ ID NO: 273583 - DNA, 21 bp, Artificial sequence
  SiRNA target sequence
aaatgagaaatccgaaaccaa

SEQ ID NO: 273584 - DNA, 21 bp, Artificial sequence
  SiRNA target sequence
aatgagaaatccgaaaccaac

SEQ ID NO: 273585 - DNA, 21 bp, Artificial sequence
  SiRNA target sequence
atgagaaatccgaaaccaact

SEQ ID NO: 273586 - DNA, 21 bp, Artificial sequence
  SiRNA target sequence
tgagaaatccgaaaccaactt

SEQ ID NO: 273587 - DNA, 21 bp, Artificial sequence
  SiRNA target sequence
gagaaatccgaaaccaacttc

SEQ ID NO: 273588 - DNA, 21 bp, Artificial sequence
  SiRNA target sequence
agaaatccgaaaccaacttct

SEQ ID NO: 273589 - DNA, 21 bp, Artificial sequence
  SiRNA target sequence
gaaatccgaaaccaacttctg

SEQ ID NO: 273590 - DNA, 21 bp, Artificial sequence
  SiRNA target sequence
aaatccgaaaccaacttctga

SEQ ID NO: 273591 - DNA, 21 bp, Artificial sequence
  SiRNA target sequence
aatccgaaaccaacttctgag

SEQ ID NO: 273592 - DNA, 21 bp, Artificial sequence
  SiRNA target sequence
atccgaaaccaacttctgagg

SEQ ID NO: 273593 - DNA, 21 bp, Artificial sequence
  SiRNA target sequence
tccgaaaccaacttctgagga

SEQ ID NO: 273594 - DNA, 21 bp, Artificial sequence
  SiRNA target sequence
ccgaaaccaacttctgaggaa

SEQ ID NO: 273595 - DNA, 21 bp, Artificial sequence
  SiRNA target sequence
cgaaaccaacttctgaggaat

SEQ ID NO: 273596 - DNA, 21 bp, Artificial sequence
  SiRNA target sequence
gaaaccaacttctgaggaatt

SEQ ID NO: 273597 - DNA, 21 bp, Artificial sequence
  SiRNA target sequence
aaaccaacttctgaggaatta

SEQ ID NO: 273598 - DNA, 21 bp, Artificial sequence
  SiRNA target sequence
aaccaacttctgaggaattag

SEQ ID NO: 273599 - DNA, 21 bp, Artificial sequence
  SiRNA target sequence
accaacttctgaggaattagc

SEQ ID NO: 273600 - DNA, 21 bp, Artificial sequence
  SiRNA target sequence
ccaacttctgaggaattagct

SEQ ID NO: 273601 - DNA, 21 bp, Artificial sequence
  SiRNA target sequence
caacttctgaggaattagctg

SEQ ID NO: 273602 - DNA, 21 bp, Artificial sequence
  SiRNA target sequence
aacttctgaggaattagctga

SEQ ID NO: 273603 - DNA, 21 bp, Artificial sequence
  SiRNA target sequence
acttctgaggaattagctgat

SEQ ID NO: 273604 - DNA, 21 bp, Artificial sequence
  SiRNA target sequence
cttctgaggaattagctgatc

SEQ ID NO: 273605 - DNA, 21 bp, Artificial sequence
  SiRNA target sequence
ttctgaggaattagctgatca

SEQ ID NO: 273606 - DNA, 21 bp, Artificial sequence
  SiRNA target sequence
tctgaggaattagctgatcat

SEQ ID NO: 273607 - DNA, 21 bp, Artificial sequence
  SiRNA target sequence
ctgaggaattagctgatcatt

SEQ ID NO: 273608 - DNA, 21 bp, Artificial sequence
  SiRNA target sequence
tgaggaattagctgatcatta

SEQ ID NO: 273609 - DNA, 21 bp, Artificial sequence
  SiRNA target sequence
gaggaattagctgatcattat

SEQ ID NO: 273610 - DNA, 21 bp, Artificial sequence
  SiRNA target sequence
aggaattagctgatcattatg

SEQ ID NO: 273611 - DNA, 21 bp, Artificial sequence
  SiRNA target sequence
ggaattagctgatcattatgt

SEQ ID NO: 273612 - DNA, 21 bp, Artificial sequence
  SiRNA target sequence
gaattagctgatcattatgtg

SEQ ID NO: 273613 - DNA, 21 bp, Artificial sequence
  SiRNA target sequence
aattagctgatcattatgtga

SEQ ID NO: 273614 - DNA, 21 bp, Artificial sequence
  SiRNA target sequence
attagctgatcattatgtgaa

SEQ ID NO: 273615 - DNA, 21 bp, Artificial sequence
  SiRNA target sequence
ttagctgatcattatgtgaat

SEQ ID NO: 273616 - DNA, 21 bp, Artificial sequence
  SiRNA target sequence
tagctgatcattatgtgaata

SEQ ID NO: 273617 - DNA, 21 bp, Artificial sequence
  SiRNA target sequence
agctgatcattatgtgaatag

SEQ ID NO: 273618 - DNA, 21 bp, Artificial sequence
  SiRNA target sequence
gctgatcattatgtgaatagg

SEQ ID NO: 273619 - DNA, 21 bp, Artificial sequence
  SiRNA target sequence
ctgatcattatgtgaataggc

SEQ ID NO: 273620 - DNA, 21 bp, Artificial sequence
  SiRNA target sequence
tgatcattatgtgaataggca

SEQ ID NO: 273621 - DNA, 21 bp, Artificial sequence
  SiRNA target sequence
gatcattatgtgaataggcat

SEQ ID NO: 273622 - DNA, 21 bp, Artificial sequence
  SiRNA target sequence
atcattatgtgaataggcatt

SEQ ID NO: 273623 - DNA, 21 bp, Artificial sequence
  SiRNA target sequence
tcattatgtgaataggcattg

SEQ ID NO: 273624 - DNA, 21 bp, Artificial sequence
  SiRNA target sequence
cattatgtgaataggcattgt

SEQ ID NO: 273625 - DNA, 21 bp, Artificial sequence
  SiRNA target sequence
attatgtgaataggcattgta

SEQ ID NO: 273626 - DNA, 21 bp, Artificial sequence
  SiRNA target sequence
ttatgtgaataggcattgtag

SEQ ID NO: 273627 - DNA, 21 bp, Artificial sequence
  SiRNA target sequence
tatgtgaataggcattgtagc

SEQ ID NO: 273628 - DNA, 21 bp, Artificial sequence
  SiRNA target sequence
atgtgaataggcattgtagct

SEQ ID NO: 273629 - DNA, 21 bp, Artificial sequence
  SiRNA target sequence
tgtgaataggcattgtagctc

SEQ ID NO: 273630 - DNA, 21 bp, Artificial sequence
  SiRNA target sequence
gtgaataggcattgtagctct

SEQ ID NO: 273631 - DNA, 21 bp, Artificial sequence
  SiRNA target sequence
tgaataggcattgtagctctg

SEQ ID NO: 273632 - DNA, 21 bp, Artificial sequence
  SiRNA target sequence
gaataggcattgtagctctga

SEQ ID NO: 273633 - DNA, 21 bp, Artificial sequence
  SiRNA target sequence
aataggcattgtagctctgat

SEQ ID NO: 273634 - DNA, 21 bp, Artificial sequence
  SiRNA target sequence
ataggcattgtagctctgatt

SEQ ID NO: 273635 - DNA, 21 bp, Artificial sequence
  SiRNA target sequence
taggcattgtagctctgattt

SEQ ID NO: 273636 - DNA, 21 bp, Artificial sequence
  SiRNA target sequence
aggcattgtagctctgatttt

SEQ ID NO: 273637 - DNA, 21 bp, Artificial sequence
  SiRNA target sequence
ggcattgtagctctgattttt

SEQ ID NO: 273638 - DNA, 21 bp, Artificial sequence
  SiRNA target sequence
gcattgtagctctgatttttg

SEQ ID NO: 273639 - DNA, 21 bp, Artificial sequence
  SiRNA target sequence
cattgtagctctgatttttgg

SEQ ID NO: 273640 - DNA, 21 bp, Artificial sequence
  SiRNA target sequence
attgtagctctgatttttggt

SEQ ID NO: 273641 - DNA, 21 bp, Artificial sequence
  SiRNA target sequence
ttgtagctctgatttttggtc

SEQ ID NO: 273642 - DNA, 21 bp, Artificial sequence
  SiRNA target sequence
tgtagctctgatttttggtca

SEQ ID NO: 273643 - DNA, 21 bp, Artificial sequence
  SiRNA target sequence
gtagctctgatttttggtcac

SEQ ID NO: 273644 - DNA, 21 bp, Artificial sequence
  SiRNA target sequence
tagctctgatttttggtcacc

SEQ ID NO: 273645 - DNA, 21 bp, Artificial sequence
  SiRNA target sequence
agctctgatttttggtcacca

SEQ ID NO: 273646 - DNA, 21 bp, Artificial sequence
  SiRNA target sequence
gctctgatttttggtcaccag

SEQ ID NO: 273647 - DNA, 21 bp, Artificial sequence
  SiRNA target sequence
ctctgatttttggtcaccagg

SEQ ID NO: 273648 - DNA, 21 bp, Artificial sequence
  SiRNA target sequence
tctgatttttggtcaccagga

SEQ ID NO: 273649 - DNA, 21 bp, Artificial sequence
  SiRNA target sequence
ctgatttttggtcaccaggac

SEQ ID NO: 273650 - DNA, 21 bp, Artificial sequence
  SiRNA target sequence
tgatttttggtcaccaggact

SEQ ID NO: 273651 - DNA, 21 bp, Artificial sequence
  SiRNA target sequence
gatttttggtcaccaggactg

SEQ ID NO: 273652 - DNA, 21 bp, Artificial sequence
  SiRNA target sequence
atttttggtcaccaggactgg

SEQ ID NO: 273653 - DNA, 21 bp, Artificial sequence
  SiRNA target sequence
tttttggtcaccaggactggc

SEQ ID NO: 273654 - DNA, 21 bp, Artificial sequence
  SiRNA target sequence
ttttggtcaccaggactggca

SEQ ID NO: 273655 - DNA, 21 bp, Artificial sequence
  SiRNA target sequence
tttggtcaccaggactggcat

SEQ ID NO: 273656 - DNA, 21 bp, Artificial sequence
  SiRNA target sequence
ttggtcaccaggactggcatc

SEQ ID NO: 273657 - DNA, 21 bp, Artificial sequence
  SiRNA target sequence
tggtcaccaggactggcatca

SEQ ID NO: 273658 - DNA, 21 bp, Artificial sequence
  SiRNA target sequence
ggtcaccaggactggcatcac

SEQ ID NO: 273659 - DNA, 21 bp, Artificial sequence
  SiRNA target sequence
gtcaccaggactggcatcacc

SEQ ID NO: 273660 - DNA, 21 bp, Artificial sequence
  SiRNA target sequence
tcaccaggactggcatcacct

SEQ ID NO: 273661 - DNA, 21 bp, Artificial sequence
  SiRNA target sequence
caccaggactggcatcacctc

SEQ ID NO: 273662 - DNA, 21 bp, Artificial sequence
  SiRNA target sequence
accaggactggcatcacctca

SEQ ID NO: 273663 - DNA, 21 bp, Artificial sequence
  SiRNA target sequence
ccaggactggcatcacctcaa

SEQ ID NO: 273664 - DNA, 21 bp, Artificial sequence
  SiRNA target sequence
caggactggcatcacctcaag

SEQ ID NO: 273665 - DNA, 21 bp, Artificial sequence
  SiRNA target sequence
aggactggcatcacctcaagg

SEQ ID NO: 273666 - DNA, 21 bp, Artificial sequence
  SiRNA target sequence
ggactggcatcacctcaagga

SEQ ID NO: 273667 - DNA, 21 bp, Artificial sequence
  SiRNA target sequence
gactggcatcacctcaaggat

SEQ ID NO: 273668 - DNA, 21 bp, Artificial sequence
  SiRNA target sequence
actggcatcacctcaaggatt

SEQ ID NO: 273669 - DNA, 21 bp, Artificial sequence
  SiRNA target sequence
ctggcatcacctcaaggattg

SEQ ID NO: 273670 - DNA, 21 bp, Artificial sequence
  SiRNA target sequence
tggcatcacctcaaggattga

SEQ ID NO: 273671 - DNA, 21 bp, Artificial sequence
  SiRNA target sequence
ggcatcacctcaaggattgaa

SEQ ID NO: 273672 - DNA, 21 bp, Artificial sequence
  SiRNA target sequence
gcatcacctcaaggattgaaa

SEQ ID NO: 273673 - DNA, 21 bp, Artificial sequence
  SiRNA target sequence
catcacctcaaggattgaaat

SEQ ID NO: 273674 - DNA, 21 bp, Artificial sequence
  SiRNA target sequence
atcacctcaaggattgaaata

SEQ ID NO: 273675 - DNA, 21 bp, Artificial sequence
  SiRNA target sequence
tcacctcaaggattgaaatat

SEQ ID NO: 273676 - DNA, 21 bp, Artificial sequence
  SiRNA target sequence
cacctcaaggattgaaatata

SEQ ID NO: 273677 - DNA, 21 bp, Artificial sequence
  SiRNA target sequence
acctcaaggattgaaatatag

SEQ ID NO: 273678 - DNA, 21 bp, Artificial sequence
  SiRNA target sequence
cctcaaggattgaaatatagt

SEQ ID NO: 273679 - DNA, 21 bp, Artificial sequence
  SiRNA target sequence
ctcaaggattgaaatatagtg

SEQ ID NO: 273680 - DNA, 21 bp, Artificial sequence
  SiRNA target sequence
tcaaggattgaaatatagtga

SEQ ID NO: 273681 - DNA, 21 bp, Artificial sequence
  SiRNA target sequence
caaggattgaaatatagtgaa

SEQ ID NO: 273682 - DNA, 21 bp, Artificial sequence
  SiRNA target sequence
aaggattgaaatatagtgaag

SEQ ID NO: 273683 - DNA, 21 bp, Artificial sequence
  SiRNA target sequence
aggattgaaatatagtgaagc

SEQ ID NO: 273684 - DNA, 21 bp, Artificial sequence
  SiRNA target sequence
ggattgaaatatagtgaagca

SEQ ID NO: 273685 - DNA, 21 bp, Artificial sequence
  SiRNA target sequence
gattgaaatatagtgaagcag

SEQ ID NO: 273686 - DNA, 21 bp, Artificial sequence
  SiRNA target sequence
attgaaatatagtgaagcagt

SEQ ID NO: 273687 - DNA, 21 bp, Artificial sequence
  SiRNA target sequence
ttgaaatatagtgaagcagta

SEQ ID NO: 273688 - DNA, 21 bp, Artificial sequence
  SiRNA target sequence
tgaaatatagtgaagcagtaa

SEQ ID NO: 273689 - DNA, 21 bp, Artificial sequence
  SiRNA target sequence
gaaatatagtgaagcagtaac

SEQ ID NO: 273690 - DNA, 21 bp, Artificial sequence
  SiRNA target sequence
aaatatagtgaagcagtaaca

SEQ ID NO: 273691 - DNA, 21 bp, Artificial sequence
  SiRNA target sequence
aatatagtgaagcagtaacag

SEQ ID NO: 273692 - DNA, 21 bp, Artificial sequence
  SiRNA target sequence
atatagtgaagcagtaacagt

SEQ ID NO: 273693 - DNA, 21 bp, Artificial sequence
  SiRNA target sequence
tatagtgaagcagtaacagta

SEQ ID NO: 273694 - DNA, 21 bp, Artificial sequence
  SiRNA target sequence
atagtgaagcagtaacagtaa

SEQ ID NO: 273695 - DNA, 21 bp, Artificial sequence
  SiRNA target sequence
tagtgaagcagtaacagtaaa

SEQ ID NO: 273696 - DNA, 21 bp, Artificial sequence
  SiRNA target sequence
agtgaagcagtaacagtaaag

SEQ ID NO: 273697 - DNA, 21 bp, Artificial sequence
  SiRNA target sequence
gtgaagcagtaacagtaaagg

SEQ ID NO: 273698 - DNA, 21 bp, Artificial sequence
  SiRNA target sequence
tgaagcagtaacagtaaaggc

SEQ ID NO: 273699 - DNA, 21 bp, Artificial sequence
  SiRNA target sequence
gaagcagtaacagtaaaggca

SEQ ID NO: 273700 - DNA, 21 bp, Artificial sequence
  SiRNA target sequence
aagcagtaacagtaaaggcac

SEQ ID NO: 273701 - DNA, 21 bp, Artificial sequence
  SiRNA target sequence
agcagtaacagtaaaggcacc

SEQ ID NO: 273702 - DNA, 21 bp, Artificial sequence
  SiRNA target sequence
gcagtaacagtaaaggcacct

SEQ ID NO: 273703 - DNA, 21 bp, Artificial sequence
  SiRNA target sequence
cagtaacagtaaaggcaccta

SEQ ID NO: 273704 - DNA, 21 bp, Artificial sequence
  SiRNA target sequence
agtaacagtaaaggcacctag

SEQ ID NO: 273705 - DNA, 21 bp, Artificial sequence
  SiRNA target sequence
gtaacagtaaaggcacctaga

SEQ ID NO: 273706 - DNA, 21 bp, Artificial sequence
  SiRNA target sequence
taacagtaaaggcacctagaa

SEQ ID NO: 273707 - DNA, 21 bp, Artificial sequence
  SiRNA target sequence
aacagtaaaggcacctagaat

SEQ ID NO: 273708 - DNA, 21 bp, Artificial sequence
  SiRNA target sequence
acagtaaaggcacctagaatc

SEQ ID NO: 273709 - DNA, 21 bp, Artificial sequence
  SiRNA target sequence
cagtaaaggcacctagaatcc

SEQ ID NO: 273710 - DNA, 21 bp, Artificial sequence
  SiRNA target sequence
agtaaaggcacctagaatcca

SEQ ID NO: 273711 - DNA, 21 bp, Artificial sequence
  SiRNA target sequence
gtaaaggcacctagaatccat

SEQ ID NO: 273712 - DNA, 21 bp, Artificial sequence
  SiRNA target sequence
taaaggcacctagaatccata

SEQ ID NO: 273713 - DNA, 21 bp, Artificial sequence
  SiRNA target sequence
aaaggcacctagaatccatag

SEQ ID NO: 273714 - DNA, 21 bp, Artificial sequence
  SiRNA target sequence
aaggcacctagaatccataga

SEQ ID NO: 273715 - DNA, 21 bp, Artificial sequence
  SiRNA target sequence
aggcacctagaatccatagat

SEQ ID NO: 273716 - DNA, 21 bp, Artificial sequence
  SiRNA target sequence
ggcacctagaatccatagatt

SEQ ID NO: 273717 - DNA, 21 bp, Artificial sequence
  SiRNA target sequence
gcacctagaatccatagattg

SEQ ID NO: 273718 - DNA, 21 bp, Artificial sequence
  SiRNA target sequence
cacctagaatccatagattgc

SEQ ID NO: 273719 - DNA, 21 bp, Artificial sequence
  SiRNA target sequence
acctagaatccatagattgcc

SEQ ID NO: 273720 - DNA, 21 bp, Artificial sequence
  SiRNA target sequence
cctagaatccatagattgcca

SEQ ID NO: 273721 - DNA, 21 bp, Artificial sequence
  SiRNA target sequence
ctagaatccatagattgccag

SEQ ID NO: 273722 - DNA, 21 bp, Artificial sequence
  SiRNA target sequence
tagaatccatagattgccagt

SEQ ID NO: 273723 - DNA, 21 bp, Artificial sequence
  SiRNA target sequence
agaatccatagattgccagtt

SEQ ID NO: 273724 - DNA, 21 bp, Artificial sequence
  SiRNA target sequence
gaatccatagattgccagtta

SEQ ID NO: 273725 - DNA, 21 bp, Artificial sequence
  SiRNA target sequence
aatccatagattgccagttac

SEQ ID NO: 273726 - DNA, 21 bp, Artificial sequence
  SiRNA target sequence
atccatagattgccagttact

SEQ ID NO: 273727 - DNA, 21 bp, Artificial sequence
  SiRNA target sequence
tccatagattgccagttacta

SEQ ID NO: 273728 - DNA, 21 bp, Artificial sequence
  SiRNA target sequence
ccatagattgccagttactac

SEQ ID NO: 273729 - DNA, 21 bp, Artificial sequence
  SiRNA target sequence
catagattgccagttactact

SEQ ID NO: 273730 - DNA, 21 bp, Artificial sequence
  SiRNA target sequence
atagattgccagttactacta

SEQ ID NO: 273731 - DNA, 21 bp, Artificial sequence
  SiRNA target sequence
tagattgccagttactactaa

SEQ ID NO: 273732 - DNA, 21 bp, Artificial sequence
  SiRNA target sequence
agattgccagttactactaag

SEQ ID NO: 273733 - DNA, 21 bp, Artificial sequence
  SiRNA target sequence
gattgccagttactactaagc

SEQ ID NO: 273734 - DNA, 21 bp, Artificial sequence
  SiRNA target sequence
attgccagttactactaagcc

SEQ ID NO: 273735 - DNA, 21 bp, Artificial sequence
  SiRNA target sequence
ttgccagttactactaagcct

SEQ ID NO: 273736 - DNA, 21 bp, Artificial sequence
  SiRNA target sequence
tgccagttactactaagcctc

SEQ ID NO: 273737 - DNA, 21 bp, Artificial sequence
  SiRNA target sequence
gccagttactactaagcctca

SEQ ID NO: 273738 - DNA, 21 bp, Artificial sequence
  SiRNA target sequence
ccagttactactaagcctcag

SEQ ID NO: 273739 - DNA, 21 bp, Artificial sequence
  SiRNA target sequence
cagttactactaagcctcagg

SEQ ID NO: 273740 - DNA, 21 bp, Artificial sequence
  SiRNA target sequence
agttactactaagcctcaggg

SEQ ID NO: 273741 - DNA, 21 bp, Artificial sequence
  SiRNA target sequence
gttactactaagcctcaggga

SEQ ID NO: 273742 - DNA, 21 bp, Artificial sequence
  SiRNA target sequence
ttactactaagcctcagggat

SEQ ID NO: 273743 - DNA, 21 bp, Artificial sequence
  SiRNA target sequence
tactactaagcctcagggatc

SEQ ID NO: 273744 - DNA, 21 bp, Artificial sequence
  SiRNA target sequence
actactaagcctcagggatca

SEQ ID NO: 273745 - DNA, 21 bp, Artificial sequence
  SiRNA target sequence
ctactaagcctcagggatcaa

SEQ ID NO: 273746 - DNA, 21 bp, Artificial sequence
  SiRNA target sequence
tactaagcctcagggatcaac

SEQ ID NO: 273747 - DNA, 21 bp, Artificial sequence
  SiRNA target sequence
actaagcctcagggatcaaca

SEQ ID NO: 273748 - DNA, 21 bp, Artificial sequence
  SiRNA target sequence
ctaagcctcagggatcaacac

SEQ ID NO: 273749 - DNA, 21 bp, Artificial sequence
  SiRNA target sequence
taagcctcagggatcaacaca

SEQ ID NO: 273750 - DNA, 21 bp, Artificial sequence
  SiRNA target sequence
aagcctcagggatcaacacaa

SEQ ID NO: 273751 - DNA, 21 bp, Artificial sequence
  SiRNA target sequence
agcctcagggatcaacacaac

SEQ ID NO: 273752 - DNA, 21 bp, Artificial sequence
  SiRNA target sequence
gcctcagggatcaacacaaca

SEQ ID NO: 273753 - DNA, 21 bp, Artificial sequence
  SiRNA target sequence
cctcagggatcaacacaacaa

SEQ ID NO: 273754 - DNA, 21 bp, Artificial sequence
  SiRNA target sequence
ctcagggatcaacacaacaag

SEQ ID NO: 273755 - DNA, 21 bp, Artificial sequence
  SiRNA target sequence
tcagggatcaacacaacaagt

SEQ ID NO: 273756 - DNA, 21 bp, Artificial sequence
  SiRNA target sequence
cagggatcaacacaacaagta

SEQ ID NO: 273757 - DNA, 21 bp, Artificial sequence
  SiRNA target sequence
agggatcaacacaacaagtag

SEQ ID NO: 273758 - DNA, 21 bp, Artificial sequence
  SiRNA target sequence
gggatcaacacaacaagtaga

SEQ ID NO: 273759 - DNA, 21 bp, Artificial sequence
  SiRNA target sequence
ggatcaacacaacaagtagac

SEQ ID NO: 273760 - DNA, 21 bp, Artificial sequence
  SiRNA target sequence
gatcaacacaacaagtagacg

SEQ ID NO: 273761 - DNA, 21 bp, Artificial sequence
  SiRNA target sequence
atcaacacaacaagtagacgc

SEQ ID NO: 273762 - DNA, 21 bp, Artificial sequence
  SiRNA target sequence
tcaacacaacaagtagacgct

SEQ ID NO: 273763 - DNA, 21 bp, Artificial sequence
  SiRNA target sequence
caacacaacaagtagacgctg

SEQ ID NO: 273764 - DNA, 21 bp, Artificial sequence
  SiRNA target sequence
aacacaacaagtagacgctgc

SEQ ID NO: 273765 - DNA, 21 bp, Artificial sequence
  SiRNA target sequence
acacaacaagtagacgctgct

SEQ ID NO: 273766 - DNA, 21 bp, Artificial sequence
  SiRNA target sequence
cacaacaagtagacgctgctg

SEQ ID NO: 273767 - DNA, 21 bp, Artificial sequence
  SiRNA target sequence
acaacaagtagacgctgctgt

SEQ ID NO: 273768 - DNA, 21 bp, Artificial sequence
  SiRNA target sequence
caacaagtagacgctgctgtg

SEQ ID NO: 273769 - DNA, 21 bp, Artificial sequence
  SiRNA target sequence
aacaagtagacgctgctgtga

SEQ ID NO: 273770 - DNA, 21 bp, Artificial sequence
  SiRNA target sequence
acaagtagacgctgctgtgaa

SEQ ID NO: 273771 - DNA, 21 bp, Artificial sequence
  SiRNA target sequence
caagtagacgctgctgtgaat

SEQ ID NO: 273772 - DNA, 21 bp, Artificial sequence
  SiRNA target sequence
aagtagacgctgctgtgaata

SEQ ID NO: 273773 - DNA, 21 bp, Artificial sequence
  SiRNA target sequence
agtagacgctgctgtgaataa

SEQ ID NO: 273774 - DNA, 21 bp, Artificial sequence
  SiRNA target sequence
gtagacgctgctgtgaataaa

SEQ ID NO: 273775 - DNA, 21 bp, Artificial sequence
  SiRNA target sequence
tagacgctgctgtgaataaaa

SEQ ID NO: 273776 - DNA, 21 bp, Artificial sequence
  SiRNA target sequence
agacgctgctgtgaataaaat

SEQ ID NO: 273777 - DNA, 21 bp, Artificial sequence
  SiRNA target sequence
gacgctgctgtgaataaaatt

SEQ ID NO: 273778 - DNA, 21 bp, Artificial sequence
  SiRNA target sequence
acgctgctgtgaataaaattt

SEQ ID NO: 273779 - DNA, 21 bp, Artificial sequence
  SiRNA target sequence
cgctgctgtgaataaaatttt

SEQ ID NO: 273780 - DNA, 21 bp, Artificial sequence
  SiRNA target sequence
gctgctgtgaataaaatttta

SEQ ID NO: 273781 - DNA, 21 bp, Artificial sequence
  SiRNA target sequence
ctgctgtgaataaaattttac

SEQ ID NO: 273782 - DNA, 21 bp, Artificial sequence
  SiRNA target sequence
tgctgtgaataaaattttaca

SEQ ID NO: 273783 - DNA, 21 bp, Artificial sequence
  SiRNA target sequence
gctgtgaataaaattttacag

SEQ ID NO: 273784 - DNA, 21 bp, Artificial sequence
  SiRNA target sequence
ctgtgaataaaattttacaga

SEQ ID NO: 273785 - DNA, 21 bp, Artificial sequence
  SiRNA target sequence
tgtgaataaaattttacagaa

SEQ ID NO: 273786 - DNA, 21 bp, Artificial sequence
  SiRNA target sequence
  misc_feature (21)..(21): n is a, c, g, or t
gtgaataaaattttacagaan

SEQ ID NO: 273787 - DNA, 21 bp, Artificial sequence
  SiRNA target sequence
  misc_feature (20)..(20): n is a, c, g, or t
tgaataaaattttacagaana

SEQ ID NO: 273788 - DNA, 21 bp, Artificial sequence
  SiRNA target sequence
  misc_feature (19)..(19): n is a, c, g, or t
gaataaaattttacagaanat

SEQ ID NO: 273789 - DNA, 21 bp, Artificial sequence
  SiRNA target sequence
  misc_feature (18)..(18): n is a, c, g, or t
aataaaattttacagaanatg

SEQ ID NO: 273790 - DNA, 21 bp, Artificial sequence
  SiRNA target sequence
  misc_feature (17)..(17): n is a, c, g, or t
ataaaattttacagaanatgg

SEQ ID NO: 273791 - DNA, 21 bp, Artificial sequence
  SiRNA target sequence
  misc_feature (16)..(16): n is a, c, g, or t
taaaattttacagaanatggt

SEQ ID NO: 273792 - DNA, 21 bp, Artificial sequence
  SiRNA target sequence
  misc_feature (15)..(15): n is a, c, g, or t
aaaattttacagaanatggtt

SEQ ID NO: 273793 - DNA, 21 bp, Artificial sequence
  SiRNA target sequence
  misc_feature (14)..(14): n is a, c, g, or t
aaattttacagaanatggttt

SEQ ID NO: 273794 - DNA, 21 bp, Artificial sequence
  SiRNA target sequence
  misc_feature (13)..(13): n is a, c, g, or t
aattttacagaanatggttta

SEQ ID NO: 273795 - DNA, 21 bp, Artificial sequence
  SiRNA target sequence
  misc_feature (12)..(12): n is a, c, g, or t
attttacagaanatggtttac

SEQ ID NO: 273796 - DNA, 21 bp, Artificial sequence
  SiRNA target sequence
  misc_feature (11)..(11): n is a, c, g, or t
ttttacagaanatggtttaca

SEQ ID NO: 273797 - DNA, 21 bp, Artificial sequence
  SiRNA target sequence
  misc_feature (10)..(10): n is a, c, g, or t
tttacagaanatggtttacat

SEQ ID NO: 273798 - DNA, 21 bp, Artificial sequence
  SiRNA target sequence
  misc_feature (9)..(9): n is a, c, g, or t
ttacagaanatggtttacatt

SEQ ID NO: 273799 - DNA, 21 bp, Artificial sequence
  SiRNA target sequence
  misc_feature (8)..(8): n is a, c, g, or t
tacagaanatggtttacattg

SEQ ID NO: 273800 - DNA, 21 bp, Artificial sequence
  SiRNA target sequence
  misc_feature (7)..(7): n is a, c, g, or t
acagaanatggtttacattgg

SEQ ID NO: 273801 - DNA, 21 bp, Artificial sequence
  SiRNA target sequence
  misc_feature (6)..(6): n is a, c, g, or t
cagaanatggtttacattggt

SEQ ID NO: 273802 - DNA, 21 bp, Artificial sequence
  SiRNA target sequence
  misc_feature (5)..(5): n is a, c, g, or t
agaanatggtttacattggtg

SEQ ID NO: 273803 - DNA, 21 bp, Artificial sequence
  SiRNA target sequence
  misc_feature (4)..(4): n is a, c, g, or t
gaanatggtttacattggtgt

SEQ ID NO: 273804 - DNA, 21 bp, Artificial sequence
  SiRNA target sequence
  misc_feature (3)..(3): n is a, c, g, or t
aanatggtttacattggtgtt

SEQ ID NO: 273805 - DNA, 21 bp, Artificial sequence
  SiRNA target sequence
  misc_feature (2)..(2): n is a, c, g, or t
anatggtttacattggtgttg

SEQ ID NO: 273806 - DNA, 21 bp, Artificial sequence
  SiRNA target sequence
  misc_feature (1)..(1): n is a, c, g, or t
natggtttacattggtgttgt

SEQ ID NO: 273807 - DNA, 21 bp, Artificial sequence
  SiRNA target sequence
atggtttacattggtgttgtt

SEQ ID NO: 273808 - DNA, 21 bp, Artificial sequence
  SiRNA target sequence
tggtttacattggtgttgttt

SEQ ID NO: 273809 - DNA, 21 bp, Artificial sequence
  SiRNA target sequence
ggtttacattggtgttgtttt

SEQ ID NO: 273810 - DNA, 21 bp, Artificial sequence
  SiRNA target sequence
gtttacattggtgttgttttc

SEQ ID NO: 273811 - DNA, 21 bp, Artificial sequence
  SiRNA target sequence
tttacattggtgttgttttcc

SEQ ID NO: 273812 - DNA, 21 bp, Artificial sequence
  SiRNA target sequence
ttacattggtgttgttttccc

SEQ ID NO: 273813 - DNA, 21 bp, Artificial sequence
  SiRNA target sequence
tacattggtgttgttttccca

SEQ ID NO: 273814 - DNA, 21 bp, Artificial sequence
  SiRNA target sequence
acattggtgttgttttcccaa

SEQ ID NO: 273815 - DNA, 21 bp, Artificial sequence
  SiRNA target sequence
cattggtgttgttttcccaaa

SEQ ID NO: 273816 - DNA, 21 bp, Artificial sequence
  SiRNA target sequence
attggtgttgttttcccaaaa

SEQ ID NO: 273817 - DNA, 21 bp, Artificial sequence
  SiRNA target sequence
ttggtgttgttttcccaaaag

SEQ ID NO: 273818 - DNA, 21 bp, Artificial sequence
  SiRNA target sequence
tggtgttgttttcccaaaagt

SEQ ID NO: 273819 - DNA, 21 bp, Artificial sequence
  SiRNA target sequence
ggtgttgttttcccaaaagtg

SEQ ID NO: 273820 - DNA, 21 bp, Artificial sequence
  SiRNA target sequence
gtgttgttttcccaaaagtgc

SEQ ID NO: 273821 - DNA, 21 bp, Artificial sequence
  SiRNA target sequence
tgttgttttcccaaaagtgcc

SEQ ID NO: 273822 - DNA, 21 bp, Artificial sequence
  SiRNA target sequence
gttgttttcccaaaagtgcct

SEQ ID NO: 273823 - DNA, 21 bp, Artificial sequence
  SiRNA target sequence
ttgttttcccaaaagtgcctg

SEQ ID NO: 273824 - DNA, 21 bp, Artificial sequence
  SiRNA target sequence
tgttttcccaaaagtgcctgg

SEQ ID NO: 273825 - DNA, 21 bp, Artificial sequence
  SiRNA target sequence
gttttcccaaaagtgcctggt

SEQ ID NO: 273826 - DNA, 21 bp, Artificial sequence
  SiRNA target sequence
ttttcccaaaagtgcctggta

SEQ ID NO: 273827 - DNA, 21 bp, Artificial sequence
  SiRNA target sequence
tttcccaaaagtgcctggtag

SEQ ID NO: 273828 - DNA, 21 bp, Artificial sequence
  SiRNA target sequence
ttcccaaaagtgcctggtagt

SEQ ID NO: 273829 - DNA, 21 bp, Artificial sequence
  SiRNA target sequence
tcccaaaagtgcctggtagta

SEQ ID NO: 273830 - DNA, 21 bp, Artificial sequence
  SiRNA target sequence
cccaaaagtgcctggtagtaa

SEQ ID NO: 273831 - DNA, 21 bp, Artificial sequence
  SiRNA target sequence
ccaaaagtgcctggtagtaag

SEQ ID NO: 273832 - DNA, 21 bp, Artificial sequence
  SiRNA target sequence
caaaagtgcctggtagtaagt

SEQ ID NO: 273833 - DNA, 21 bp, Artificial sequence
  SiRNA target sequence
aaaagtgcctggtagtaagtg

SEQ ID NO: 273834 - DNA, 21 bp, Artificial sequence
  SiRNA target sequence
aaagtgcctggtagtaagtgg

SEQ ID NO: 273835 - DNA, 21 bp, Artificial sequence
  SiRNA target sequence
aagtgcctggtagtaagtggc

SEQ ID NO: 273836 - DNA, 21 bp, Artificial sequence
  SiRNA target sequence
agtgcctggtagtaagtggcg

SEQ ID NO: 273837 - DNA, 21 bp, Artificial sequence
  SiRNA target sequence
gtgcctggtagtaagtggcga

SEQ ID NO: 273838 - DNA, 21 bp, Artificial sequence
  SiRNA target sequence
tgcctggtagtaagtggcgag

SEQ ID NO: 273839 - DNA, 21 bp, Artificial sequence
  SiRNA target sequence
gcctggtagtaagtggcgaga

SEQ ID NO: 273840 - DNA, 21 bp, Artificial sequence
  SiRNA target sequence
cctggtagtaagtggcgagat

SEQ ID NO: 273841 - DNA, 21 bp, Artificial sequence
  SiRNA target sequence
ctggtagtaagtggcgagata

SEQ ID NO: 273842 - DNA, 21 bp, Artificial sequence
  SiRNA target sequence
tggtagtaagtggcgagatat

SEQ ID NO: 273843 - DNA, 21 bp, Artificial sequence
  SiRNA target sequence
ggtagtaagtggcgagatatt

SEQ ID NO: 273844 - DNA, 21 bp, Artificial sequence
  SiRNA target sequence
gtagtaagtggcgagatatta

SEQ ID NO: 273845 - DNA, 21 bp, Artificial sequence
  SiRNA target sequence
tagtaagtggcgagatattaa

SEQ ID NO: 273846 - DNA, 21 bp, Artificial sequence
  SiRNA target sequence
agtaagtggcgagatattaat

SEQ ID NO: 273847 - DNA, 21 bp, Artificial sequence
  SiRNA target sequence
gtaagtggcgagatattaatt

SEQ ID NO: 273848 - DNA, 21 bp, Artificial sequence
  SiRNA target sequence
taagtggcgagatattaattt

SEQ ID NO: 273849 - DNA, 21 bp, Artificial sequence
  SiRNA target sequence
aagtggcgagatattaatttt

SEQ ID NO: 273850 - DNA, 21 bp, Artificial sequence
  SiRNA target sequence
agtggcgagatattaatttta

SEQ ID NO: 273851 - DNA, 21 bp, Artificial sequence
  SiRNA target sequence
gtggcgagatattaattttag

SEQ ID NO: 273852 - DNA, 21 bp, Artificial sequence
  SiRNA target sequence
tggcgagatattaattttagg

SEQ ID NO: 273853 - DNA, 21 bp, Artificial sequence
  SiRNA target sequence
ggcgagatattaattttaggt

SEQ ID NO: 273854 - DNA, 21 bp, Artificial sequence
  SiRNA target sequence
gcgagatattaattttaggtg

SEQ ID NO: 273855 - DNA, 21 bp, Artificial sequence
  SiRNA target sequence
cgagatattaattttaggtgt

SEQ ID NO: 273856 - DNA, 21 bp, Artificial sequence
  SiRNA target sequence
gagatattaattttaggtgtc

SEQ ID NO: 273857 - DNA, 21 bp, Artificial sequence
  SiRNA target sequence
agatattaattttaggtgtct

SEQ ID NO: 273858 - DNA, 21 bp, Artificial sequence
  SiRNA target sequence
gatattaattttaggtgtctt

SEQ ID NO: 273859 - DNA, 21 bp, Artificial sequence
  SiRNA target sequence
atattaattttaggtgtctta

SEQ ID NO: 273860 - DNA, 21 bp, Artificial sequence
  SiRNA target sequence
tattaattttaggtgtcttat

SEQ ID NO: 273861 - DNA, 21 bp, Artificial sequence
  SiRNA target sequence
attaattttaggtgtcttatg

SEQ ID NO: 273862 - DNA, 21 bp, Artificial sequence
  SiRNA target sequence
ttaattttaggtgtcttatgc

SEQ ID NO: 273863 - DNA, 21 bp, Artificial sequence
  SiRNA target sequence
taattttaggtgtcttatgct

SEQ ID NO: 273864 - DNA, 21 bp, Artificial sequence
  SiRNA target sequence
aattttaggtgtcttatgctt

SEQ ID NO: 273865 - DNA, 21 bp, Artificial sequence
  SiRNA target sequence
attttaggtgtcttatgcttc

SEQ ID NO: 273866 - DNA, 21 bp, Artificial sequence
  SiRNA target sequence
ttttaggtgtcttatgcttca

SEQ ID NO: 273867 - DNA, 21 bp, Artificial sequence
  SiRNA target sequence
tttaggtgtcttatgcttcat

SEQ ID NO: 273868 - DNA, 21 bp, Artificial sequence
  SiRNA target sequence
ttaggtgtcttatgcttcata

SEQ ID NO: 273869 - DNA, 21 bp, Artificial sequence
  SiRNA target sequence
taggtgtcttatgcttcataa

SEQ ID NO: 273870 - DNA, 21 bp, Artificial sequence
  SiRNA target sequence
aggtgtcttatgcttcataat

SEQ ID NO: 273871 - DNA, 21 bp, Artificial sequence
  SiRNA target sequence
ggtgtcttatgcttcataata

SEQ ID NO: 273872 - DNA, 21 bp, Artificial sequence
  SiRNA target sequence
gtgtcttatgcttcataatag

SEQ ID NO: 273873 - DNA, 21 bp, Artificial sequence
  SiRNA target sequence
tgtcttatgcttcataatagg

SEQ ID NO: 273874 - DNA, 21 bp, Artificial sequence
  SiRNA target sequence
gtcttatgcttcataataggc

SEQ ID NO: 273875 - DNA, 21 bp, Artificial sequence
  SiRNA target sequence
tcttatgcttcataataggca

SEQ ID NO: 273876 - DNA, 21 bp, Artificial sequence
  SiRNA target sequence
cttatgcttcataataggcaa

SEQ ID NO: 273877 - DNA, 21 bp, Artificial sequence
  SiRNA target sequence
ttatgcttcataataggcaat

SEQ ID NO: 273878 - DNA, 21 bp, Artificial sequence
  SiRNA target sequence
tatgcttcataataggcaatg

SEQ ID NO: 273879 - DNA, 21 bp, Artificial sequence
  SiRNA target sequence
atgcttcataataggcaatgt

SEQ ID NO: 273880 - DNA, 21 bp, Artificial sequence
  SiRNA target sequence
tgcttcataataggcaatgtt

SEQ ID NO: 273881 - DNA, 21 bp, Artificial sequence
  SiRNA target sequence
gcttcataataggcaatgttt

SEQ ID NO: 273882 - DNA, 21 bp, Artificial sequence
  SiRNA target sequence
cttcataataggcaatgttta

SEQ ID NO: 273883 - DNA, 21 bp, Artificial sequence
  SiRNA target sequence
ttcataataggcaatgtttaa

SEQ ID NO: 273884 - DNA, 21 bp, Artificial sequence
  SiRNA target sequence
tcataataggcaatgtttaat

SEQ ID NO: 273885 - DNA, 21 bp, Artificial sequence
  SiRNA target sequence
cataataggcaatgtttaatg

SEQ ID NO: 273886 - DNA, 21 bp, Artificial sequence
  SiRNA target sequence
ataataggcaatgtttaatgt

SEQ ID NO: 273887 - DNA, 21 bp, Artificial sequence
  SiRNA target sequence
taataggcaatgtttaatgtt

SEQ ID NO: 273888 - DNA, 21 bp, Artificial sequence
  SiRNA target sequence
aataggcaatgtttaatgttg

SEQ ID NO: 273889 - DNA, 21 bp, Artificial sequence
  SiRNA target sequence
ataggcaatgtttaatgttga

SEQ ID NO: 273890 - DNA, 21 bp, Artificial sequence
  SiRNA target sequence
taggcaatgtttaatgttgag

SEQ ID NO: 273891 - DNA, 21 bp, Artificial sequence
  SiRNA target sequence
aggcaatgtttaatgttgagg

SEQ ID NO: 273892 - DNA, 21 bp, Artificial sequence
  SiRNA target sequence
ggcaatgtttaatgttgaggc

SEQ ID NO: 273893 - DNA, 21 bp, Artificial sequence
  SiRNA target sequence
gcaatgtttaatgttgaggca

SEQ ID NO: 273894 - DNA, 21 bp, Artificial sequence
  SiRNA target sequence
caatgtttaatgttgaggcat

SEQ ID NO: 273895 - DNA, 21 bp, Artificial sequence
  SiRNA target sequence
aatgtttaatgttgaggcatt

SEQ ID NO: 273896 - DNA, 21 bp, Artificial sequence
  SiRNA target sequence
atgtttaatgttgaggcatta

SEQ ID NO: 273897 - DNA, 21 bp, Artificial sequence
  SiRNA target sequence
tgtttaatgttgaggcattat

SEQ ID NO: 273898 - DNA, 21 bp, Artificial sequence
  SiRNA target sequence
gtttaatgttgaggcattata

SEQ ID NO: 273899 - DNA, 21 bp, Artificial sequence
  SiRNA target sequence
tttaatgttgaggcattatat

SEQ ID NO: 273900 - DNA, 21 bp, Artificial sequence
  SiRNA target sequence
ttaatgttgaggcattatatt

SEQ ID NO: 273901 - DNA, 21 bp, Artificial sequence
  SiRNA target sequence
taatgttgaggcattatattg

SEQ ID NO: 273902 - DNA, 21 bp, Artificial sequence
  SiRNA target sequence
aatgttgaggcattatattga

SEQ ID NO: 273903 - DNA, 21 bp, Artificial sequence
  SiRNA target sequence
atgttgaggcattatattgag

SEQ ID NO: 273904 - DNA, 21 bp, Artificial sequence
  SiRNA target sequence
tgttgaggcattatattgagt

SEQ ID NO: 273905 - DNA, 21 bp, Artificial sequence
  SiRNA target sequence
gttgaggcattatattgagtc

SEQ ID NO: 273906 - DNA, 21 bp, Artificial sequence
  SiRNA target sequence
  misc_feature (21)..(21): n is a, c, g, or t
ttgaggcattatattgagtcn

SEQ ID NO: 273907 - DNA, 21 bp, Artificial sequence
  SiRNA target sequence
  misc_feature (20)..(20): n is a, c, g, or t
tgaggcattatattgagtcna

SEQ ID NO: 273908 - DNA, 21 bp, Artificial sequence
  SiRNA target sequence
  misc_feature (19)..(19): n is a, c, g, or t
gaggcattatattgagtcnac

SEQ ID NO: 273909 - DNA, 21 bp, Artificial sequence
  SiRNA target sequence
  misc_feature (18)..(18): n is a, c, g, or t
aggcattatattgagtcnact

SEQ ID NO: 273910 - DNA, 21 bp, Artificial sequence
  SiRNA target sequence
  misc_feature (17)..(17): n is a, c, g, or t
ggcattatattgagtcnactg

SEQ ID NO: 273911 - DNA, 21 bp, Artificial sequence
  SiRNA target sequence
  misc_feature (16)..(16): n is a, c, g, or t
gcattatattgagtcnactgc

SEQ ID NO: 273912 - DNA, 21 bp, Artificial sequence
  SiRNA target sequence
  misc_feature (15)..(15): n is a, c, g, or t
cattatattgagtcnactgct

SEQ ID NO: 273913 - DNA, 21 bp, Artificial sequence
  SiRNA target sequence
  misc_feature (14)..(14): n is a, c, g, or t
attatattgagtcnactgctg

SEQ ID NO: 273914 - DNA, 21 bp, Artificial sequence
  SiRNA target sequence
  misc_feature (13)..(13): n is a, c, g, or t
ttatattgagtcnactgctgc

SEQ ID NO: 273915 - DNA, 21 bp, Artificial sequence
  SiRNA target sequence
  misc_feature (12)..(12): n is a, c, g, or t
tatattgagtcnactgctgcc

SEQ ID NO: 273916 - DNA, 21 bp, Artificial sequence
  SiRNA target sequence
  misc_feature (11)..(11): n is a, c, g, or t
atattgagtcnactgctgcct

SEQ ID NO: 273917 - DNA, 21 bp, Artificial sequence
  SiRNA target sequence
  misc_feature (10)..(10): n is a, c, g, or t
tattgagtcnactgctgcctt

SEQ ID NO: 273918 - DNA, 21 bp, Artificial sequence
  SiRNA target sequence
  misc_feature (9)..(9): n is a, c, g, or t
attgagtcnactgctgccttt

SEQ ID NO: 273919 - DNA, 21 bp, Artificial sequence
  SiRNA target sequence
  misc_feature (8)..(8): n is a, c, g, or t
ttgagtcnactgctgcctttc

SEQ ID NO: 273920 - DNA, 21 bp, Artificial sequence
  SiRNA target sequence
  misc_feature (7)..(7): n is a, c, g, or t
tgagtcnactgctgcctttcc

SEQ ID NO: 273921 - DNA, 21 bp, Artificial sequence
  SiRNA target sequence
  misc_feature (6)..(6): n is a, c, g, or t
gagtcnactgctgcctttcct

SEQ ID NO: 273922 - DNA, 21 bp, Artificial sequence
  SiRNA target sequence
  misc_feature (5)..(5): n is a, c, g, or t
agtcnactgctgcctttcctg

SEQ ID NO: 273923 - DNA, 21 bp, Artificial sequence
  SiRNA target sequence
  misc_feature (4)..(4): n is a, c, g, or t
gtcnactgctgcctttcctga

SEQ ID NO: 273924 - DNA, 21 bp, Artificial sequence
  SiRNA target sequence
  misc_feature (3)..(3): n is a, c, g, or t
tcnactgctgcctttcctgag

SEQ ID NO: 273925 - DNA, 21 bp, Artificial sequence
  SiRNA target sequence
  misc_feature (2)..(2): n is a, c, g, or t
cnactgctgcctttcctgagg

SEQ ID NO: 273926 - DNA, 21 bp, Artificial sequence
  SiRNA target sequence
  misc_feature (1)..(1): n is a, c, g, or t
nactgctgcctttcctgaggg

SEQ ID NO: 273927 - DNA, 21 bp, Artificial sequence
  SiRNA target sequence
actgctgcctttcctgaggga

SEQ ID NO: 273928 - DNA, 21 bp, Artificial sequence
  SiRNA target sequence
ctgctgcctttcctgagggaa

SEQ ID NO: 273929 - DNA, 21 bp, Artificial sequence
  SiRNA target sequence
tgctgcctttcctgagggaac

SEQ ID NO: 273930 - DNA, 21 bp, Artificial sequence
  SiRNA target sequence
gctgcctttcctgagggaacc

SEQ ID NO: 273931 - DNA, 21 bp, Artificial sequence
  SiRNA target sequence
ctgcctttcctgagggaacca

SEQ ID NO: 273932 - DNA, 21 bp, Artificial sequence
  SiRNA target sequence
tgcctttcctgagggaaccaa

SEQ ID NO: 273933 - DNA, 21 bp, Artificial sequence
  SiRNA target sequence
gcctttcctgagggaaccaag

SEQ ID NO: 273934 - DNA, 21 bp, Artificial sequence
  SiRNA target sequence
cctttcctgagggaaccaagt

SEQ ID NO: 273935 - DNA, 21 bp, Artificial sequence
  SiRNA target sequence
ctttcctgagggaaccaagta

SEQ ID NO: 273936 - DNA, 21 bp, Artificial sequence
  SiRNA target sequence
tttcctgagggaaccaagtac

SEQ ID NO: 273937 - DNA, 21 bp, Artificial sequence
  SiRNA target sequence
ttcctgagggaaccaagtact

SEQ ID NO: 273938 - DNA, 21 bp, Artificial sequence
  SiRNA target sequence
tcctgagggaaccaagtacta

SEQ ID NO: 273939 - DNA, 21 bp, Artificial sequence
  SiRNA target sequence
cctgagggaaccaagtactat

SEQ ID NO: 273940 - DNA, 21 bp, Artificial sequence
  SiRNA target sequence
ctgagggaaccaagtactatt

SEQ ID NO: 273941 - DNA, 21 bp, Artificial sequence
  SiRNA target sequence
tgagggaaccaagtactattt

SEQ ID NO: 273942 - DNA, 21 bp, Artificial sequence
  SiRNA target sequence
  misc_feature (21)..(21): n is a, c, g, or t
gagggaaccaagtactatttn

SEQ ID NO: 273943 - DNA, 21 bp, Artificial sequence
  SiRNA target sequence
  misc_feature (20)..(20): n is a, c, g, or t
agggaaccaagtactatttna

SEQ ID NO: 273944 - DNA, 21 bp, Artificial sequence
  SiRNA target sequence
  misc_feature (19)..(19): n is a, c, g, or t
gggaaccaagtactatttnaa

SEQ ID NO: 273945 - DNA, 21 bp, Artificial sequence
  SiRNA target sequence
  misc_feature (18)..(18): n is a, c, g, or t
ggaaccaagtactatttnaag

SEQ ID NO: 273946 - DNA, 21 bp, Artificial sequence
  SiRNA target sequence
  misc_feature (17)..(17): n is a, c, g, or t
gaaccaagtactatttnaagt

SEQ ID NO: 273947 - DNA, 21 bp, Artificial sequence
  SiRNA target sequence
  misc_feature (16)..(16): n is a, c, g, or t
aaccaagtactatttnaagta

SEQ ID NO: 273948 - DNA, 21 bp, Artificial sequence
  SiRNA target sequence
  misc_feature (15)..(15): n is a, c, g, or t
accaagtactatttnaagtat

SEQ ID NO: 273949 - DNA, 21 bp, Artificial sequence
  SiRNA target sequence
  misc_feature (14)..(14): n is a, c, g, or t
ccaagtactatttnaagtata

SEQ ID NO: 273950 - DNA, 21 bp, Artificial sequence
  SiRNA target sequence
  misc_feature (13)..(13): n is a, c, g, or t
caagtactatttnaagtatat

SEQ ID NO: 273951 - DNA, 21 bp, Artificial sequence
  SiRNA target sequence
  misc_feature (12)..(12): n is a, c, g, or t
aagtactatttnaagtatatt

SEQ ID NO: 273952 - DNA, 21 bp, Artificial sequence
  SiRNA target sequence
  misc_feature (11)..(11): n is a, c, g, or t
agtactatttnaagtatattc

SEQ ID NO: 273953 - DNA, 21 bp, Artificial sequence
  SiRNA target sequence
  misc_feature (10)..(10): n is a, c, g, or t
gtactatttnaagtatattca

SEQ ID NO: 273954 - DNA, 21 bp, Artificial sequence
  SiRNA target sequence
  misc_feature (9)..(9): n is a, c, g, or t
tactatttnaagtatattcat

SEQ ID NO: 273955 - DNA, 21 bp, Artificial sequence
  SiRNA target sequence
  misc_feature (8)..(8): n is a, c, g, or t
actatttnaagtatattcata

SEQ ID NO: 273956 - DNA, 21 bp, Artificial sequence
  SiRNA target sequence
  misc_feature (7)..(7): n is a, c, g, or t
ctatttnaagtatattcataa

SEQ ID NO: 273957 - DNA, 21 bp, Artificial sequence
  SiRNA target sequence
  misc_feature (6)..(6): n is a, c, g, or t
tatttnaagtatattcataat

SEQ ID NO: 273958 - DNA, 21 bp, Artificial sequence
  SiRNA target sequence
  misc_feature (5)..(5): n is a, c, g, or t
atttnaagtatattcataatc

SEQ ID NO: 273959 - DNA, 21 bp, Artificial sequence
  SiRNA target sequence
  misc_feature (4)..(4): n is a, c, g, or t
tttnaagtatattcataatca

SEQ ID NO: 273960 - DNA, 21 bp, Artificial sequence
  SiRNA target sequence
  misc_feature (3)..(3): n is a, c, g, or t
ttnaagtatattcataatcaa

SEQ ID NO: 273961 - DNA, 21 bp, Artificial sequence
  SiRNA target sequence
  misc_feature (2)..(2): n is a, c, g, or t
tnaagtatattcataatcaag

SEQ ID NO: 273962 - DNA, 21 bp, Artificial sequence
  SiRNA target sequence
  misc_feature (1)..(1): n is a, c, g, or t
naagtatattcataatcaaga

SEQ ID NO: 273963 - DNA, 21 bp, Artificial sequence
  SiRNA target sequence
aagtatattcataatcaagag

SEQ ID NO: 273964 - DNA, 21 bp, Artificial sequence
  SiRNA target sequence
agtatattcataatcaagaga

SEQ ID NO: 273965 - DNA, 21 bp, Artificial sequence
  SiRNA target sequence
gtatattcataatcaagagac

SEQ ID NO: 273966 - DNA, 21 bp, Artificial sequence
  SiRNA target sequence
tatattcataatcaagagact

SEQ ID NO: 273967 - DNA, 21 bp, Artificial sequence
  SiRNA target sequence
atattcataatcaagagacta

SEQ ID NO: 273968 - DNA, 21 bp, Artificial sequence
  SiRNA target sequence
tattcataatcaagagactag

SEQ ID NO: 273969 - DNA, 21 bp, Artificial sequence
  SiRNA target sequence
attcataatcaagagactaga

SEQ ID NO: 273970 - DNA, 21 bp, Artificial sequence
  SiRNA target sequence
ttcataatcaagagactagaa

SEQ ID NO: 273971 - DNA, 21 bp, Artificial sequence
  SiRNA target sequence
tcataatcaagagactagaat

SEQ ID NO: 273972 - DNA, 21 bp, Artificial sequence
  SiRNA target sequence
cataatcaagagactagaatg

SEQ ID NO: 273973 - DNA, 21 bp, Artificial sequence
  SiRNA target sequence
ataatcaagagactagaatgt

SEQ ID NO: 273974 - DNA, 21 bp, Artificial sequence
  SiRNA target sequence
taatcaagagactagaatgtc

SEQ ID NO: 273975 - DNA, 21 bp, Artificial sequence
  SiRNA target sequence
aatcaagagactagaatgtct

SEQ ID NO: 273976 - DNA, 21 bp, Artificial sequence
  SiRNA target sequence
atcaagagactagaatgtctg

SEQ ID NO: 273977 - DNA, 21 bp, Artificial sequence
  SiRNA target sequence
tcaagagactagaatgtctgg

SEQ ID NO: 273978 - DNA, 21 bp, Artificial sequence
  SiRNA target sequence
caagagactagaatgtctggt

SEQ ID NO: 273979 - DNA, 21 bp, Artificial sequence
  SiRNA target sequence
aagagactagaatgtctggtg

SEQ ID NO: 273980 - DNA, 21 bp, Artificial sequence
  SiRNA target sequence
agagactagaatgtctggtga

SEQ ID NO: 273981 - DNA, 21 bp, Artificial sequence
  SiRNA target sequence
gagactagaatgtctggtgat

SEQ ID NO: 273982 - DNA, 21 bp, Artificial sequence
  SiRNA target sequence
agactagaatgtctggtgata

SEQ ID NO: 273983 - DNA, 21 bp, Artificial sequence
  SiRNA target sequence
gactagaatgtctggtgatat

SEQ ID NO: 273984 - DNA, 21 bp, Artificial sequence
  SiRNA target sequence
actagaatgtctggtgatatt

SEQ ID NO: 273985 - DNA, 21 bp, Artificial sequence
  SiRNA target sequence
ctagaatgtctggtgatattt

SEQ ID NO: 273986 - DNA, 21 bp, Artificial sequence
  SiRNA target sequence
tagaatgtctggtgatatttc

SEQ ID NO: 273987 - DNA, 21 bp, Artificial sequence
  SiRNA target sequence
agaatgtctggtgatatttct

SEQ ID NO: 273988 - DNA, 21 bp, Artificial sequence
  SiRNA target sequence
gaatgtctggtgatatttctg

SEQ ID NO: 273989 - DNA, 21 bp, Artificial sequence
  SiRNA target sequence
aatgtctggtgatatttctgg

SEQ ID NO: 273990 - DNA, 21 bp, Artificial sequence
  SiRNA target sequence
atgtctggtgatatttctggt

SEQ ID NO: 273991 - DNA, 21 bp, Artificial sequence
  SiRNA target sequence
tgtctggtgatatttctggta

SEQ ID NO: 273992 - DNA, 21 bp, Artificial sequence
  SiRNA target sequence
gtctggtgatatttctggtat

SEQ ID NO: 273993 - DNA, 21 bp, Artificial sequence
  SiRNA target sequence
tctggtgatatttctggtatt

SEQ ID NO: 273994 - DNA, 21 bp, Artificial sequence
  SiRNA target sequence
ctggtgatatttctggtattg

SEQ ID NO: 273995 - DNA, 21 bp, Artificial sequence
  SiRNA target sequence
tggtgatatttctggtattga

SEQ ID NO: 273996 - DNA, 21 bp, Artificial sequence
  SiRNA target sequence
ggtgatatttctggtattgaa

SEQ ID NO: 273997 - DNA, 21 bp, Artificial sequence
  SiRNA target sequence
gtgatatttctggtattgaaa

SEQ ID NO: 273998 - DNA, 21 bp, Artificial sequence
  SiRNA target sequence
tgatatttctggtattgaaat

SEQ ID NO: 273999 - DNA, 21 bp, Artificial sequence
  SiRNA target sequence
gatatttctggtattgaaatt

SEQ ID NO: 274000 - DNA, 21 bp, Artificial sequence
  SiRNA target sequence
atatttctggtattgaaattg

SEQ ID NO: 274001 - DNA, 21 bp, Artificial sequence
  SiRNA target sequence
tatttctggtattgaaattga

SEQ ID NO: 274002 - DNA, 21 bp, Artificial sequence
  SiRNA target sequence
atttctggtattgaaattgat

SEQ ID NO: 274003 - DNA, 21 bp, Artificial sequence
  SiRNA target sequence
tttctggtattgaaattgatt

SEQ ID NO: 274004 - DNA, 21 bp, Artificial sequence
  SiRNA target sequence
ttctggtattgaaattgattt

SEQ ID NO: 274005 - DNA, 21 bp, Artificial sequence
  SiRNA target sequence
tctggtattgaaattgatttg

SEQ ID NO: 274006 - DNA, 21 bp, Artificial sequence
  SiRNA target sequence
ctggtattgaaattgatttgt

SEQ ID NO: 274007 - DNA, 21 bp, Artificial sequence
  SiRNA target sequence
tggtattgaaattgatttgtt

SEQ ID NO: 274008 - DNA, 21 bp, Artificial sequence
  SiRNA target sequence
ggtattgaaattgatttgttg

SEQ ID NO: 274009 - DNA, 21 bp, Artificial sequence
  SiRNA target sequence
gtattgaaattgatttgttga

SEQ ID NO: 274010 - DNA, 21 bp, Artificial sequence
  SiRNA target sequence
tattgaaattgatttgttgaa

SEQ ID NO: 274011 - DNA, 21 bp, Artificial sequence
  SiRNA target sequence
attgaaattgatttgttgaat

SEQ ID NO: 274012 - DNA, 21 bp, Artificial sequence
  SiRNA target sequence
ttgaaattgatttgttgaatt

SEQ ID NO: 274013 - DNA, 21 bp, Artificial sequence
  SiRNA target sequence
tgaaattgatttgttgaattt

SEQ ID NO: 274014 - DNA, 21 bp, Artificial sequence
  SiRNA target sequence
gaaattgatttgttgaattta

SEQ ID NO: 274015 - DNA, 21 bp, Artificial sequence
  SiRNA target sequence
aaattgatttgttgaatttac

SEQ ID NO: 274016 - DNA, 21 bp, Artificial sequence
  SiRNA target sequence
aattgatttgttgaatttacc

SEQ ID NO: 274017 - DNA, 21 bp, Artificial sequence
  SiRNA target sequence
attgatttgttgaatttacct

SEQ ID NO: 274018 - DNA, 21 bp, Artificial sequence
  SiRNA target sequence
ttgatttgttgaatttaccta

SEQ ID NO: 274019 - DNA, 21 bp, Artificial sequence
  SiRNA target sequence
tgatttgttgaatttacctag

SEQ ID NO: 274020 - DNA, 21 bp, Artificial sequence
  SiRNA target sequence
gatttgttgaatttacctaga

SEQ ID NO: 274021 - DNA, 21 bp, Artificial sequence
  SiRNA target sequence
atttgttgaatttacctagat

SEQ ID NO: 274022 - DNA, 21 bp, Artificial sequence
  SiRNA target sequence
tttgttgaatttacctagatt

SEQ ID NO: 274023 - DNA, 21 bp, Artificial sequence
  SiRNA target sequence
ttgttgaatttacctagattg

SEQ ID NO: 274024 - DNA, 21 bp, Artificial sequence
  SiRNA target sequence
tgttgaatttacctagattgt

SEQ ID NO: 274025 - DNA, 21 bp, Artificial sequence
  SiRNA target sequence
gttgaatttacctagattgta

SEQ ID NO: 274026 - DNA, 21 bp, Artificial sequence
  SiRNA target sequence
ttgaatttacctagattgtat

SEQ ID NO: 274027 - DNA, 21 bp, Artificial sequence
  SiRNA target sequence
tgaatttacctagattgtatt

SEQ ID NO: 274028 - DNA, 21 bp, Artificial sequence
  SiRNA target sequence
gaatttacctagattgtatta

SEQ ID NO: 274029 - DNA, 21 bp, Artificial sequence
  SiRNA target sequence
aatttacctagattgtattat

SEQ ID NO: 274030 - DNA, 21 bp, Artificial sequence
  SiRNA target sequence
atttacctagattgtattatg

SEQ ID NO: 274031 - DNA, 21 bp, Artificial sequence
  SiRNA target sequence
tttacctagattgtattatgg

SEQ ID NO: 274032 - DNA, 21 bp, Artificial sequence
  SiRNA target sequence
ttacctagattgtattatggt

SEQ ID NO: 274033 - DNA, 21 bp, Artificial sequence
  SiRNA target sequence
tacctagattgtattatggtg

SEQ ID NO: 274034 - DNA, 21 bp, Artificial sequence
  SiRNA target sequence
acctagattgtattatggtgg

SEQ ID NO: 274035 - DNA, 21 bp, Artificial sequence
  SiRNA target sequence
cctagattgtattatggtggt

SEQ ID NO: 274036 - DNA, 21 bp, Artificial sequence
  SiRNA target sequence
ctagattgtattatggtggtc

SEQ ID NO: 274037 - DNA, 21 bp, Artificial sequence
  SiRNA target sequence
tagattgtattatggtggtct

SEQ ID NO: 274038 - DNA, 21 bp, Artificial sequence
  SiRNA target sequence
agattgtattatggtggtctc

SEQ ID NO: 274039 - DNA, 21 bp, Artificial sequence
  SiRNA target sequence
gattgtattatggtggtctcg

SEQ ID NO: 274040 - DNA, 21 bp, Artificial sequence
  SiRNA target sequence
attgtattatggtggtctcgc

SEQ ID NO: 274041 - DNA, 21 bp, Artificial sequence
  SiRNA target sequence
ttgtattatggtggtctcgcg

SEQ ID NO: 274042 - DNA, 21 bp, Artificial sequence
  SiRNA target sequence
tgtattatggtggtctcgcgg

SEQ ID NO: 274043 - DNA, 21 bp, Artificial sequence
  SiRNA target sequence
gtattatggtggtctcgcggg

SEQ ID NO: 274044 - DNA, 21 bp, Artificial sequence
  SiRNA target sequence
tattatggtggtctcgcggga

SEQ ID NO: 274045 - DNA, 21 bp, Artificial sequence
  SiRNA target sequence
attatggtggtctcgcgggag

SEQ ID NO: 274046 - DNA, 21 bp, Artificial sequence
  SiRNA target sequence
ttatggtggtctcgcgggaga

SEQ ID NO: 274047 - DNA, 21 bp, Artificial sequence
  SiRNA target sequence
tatggtggtctcgcgggagag

SEQ ID NO: 274048 - DNA, 21 bp, Artificial sequence
  SiRNA target sequence
atggtggtctcgcgggagagg

SEQ ID NO: 274049 - DNA, 21 bp, Artificial sequence
  SiRNA target sequence
tggtggtctcgcgggagagga

SEQ ID NO: 274050 - DNA, 21 bp, Artificial sequence
  SiRNA target sequence
ggtggtctcgcgggagaggag

SEQ ID NO: 274051 - DNA, 21 bp, Artificial sequence
  SiRNA target sequence
gtggtctcgcgggagaggagt

SEQ ID NO: 274052 - DNA, 21 bp, Artificial sequence
  SiRNA target sequence
tggtctcgcgggagaggagtc

SEQ ID NO: 274053 - DNA, 21 bp, Artificial sequence
  SiRNA target sequence
ggtctcgcgggagaggagtca

SEQ ID NO: 274054 - DNA, 21 bp, Artificial sequence
  SiRNA target sequence
gtctcgcgggagaggagtcat

SEQ ID NO: 274055 - DNA, 21 bp, Artificial sequence
  SiRNA target sequence
tctcgcgggagaggagtcatt

SEQ ID NO: 274056 - DNA, 21 bp, Artificial sequence
  SiRNA target sequence
ctcgcgggagaggagtcattt

SEQ ID NO: 274057 - DNA, 21 bp, Artificial sequence
  SiRNA target sequence
tcgcgggagaggagtcatttg

SEQ ID NO: 274058 - DNA, 21 bp, Artificial sequence
  SiRNA target sequence
cgcgggagaggagtcatttga

SEQ ID NO: 274059 - DNA, 21 bp, Artificial sequence
  SiRNA target sequence
gcgggagaggagtcatttgat

SEQ ID NO: 274060 - DNA, 21 bp, Artificial sequence
  SiRNA target sequence
cgggagaggagtcatttgata

SEQ ID NO: 274061 - DNA, 21 bp, Artificial sequence
  SiRNA target sequence
gggagaggagtcatttgatag

SEQ ID NO: 274062 - DNA, 21 bp, Artificial sequence
  SiRNA target sequence
ggagaggagtcatttgatagc

SEQ ID NO: 274063 - DNA, 21 bp, Artificial sequence
  SiRNA target sequence
gagaggagtcatttgatagca

SEQ ID NO: 274064 - DNA, 21 bp, Artificial sequence
  SiRNA target sequence
agaggagtcatttgatagcaa

SEQ ID NO: 274065 - DNA, 21 bp, Artificial sequence
  SiRNA target sequence
gaggagtcatttgatagcaat

SEQ ID NO: 274066 - DNA, 21 bp, Artificial sequence
  SiRNA target sequence
aggagtcatttgatagcaata

SEQ ID NO: 274067 - DNA, 21 bp, Artificial sequence
  SiRNA target sequence
ggagtcatttgatagcaatat

SEQ ID NO: 274068 - DNA, 21 bp, Artificial sequence
  SiRNA target sequence
gagtcatttgatagcaatatc

SEQ ID NO: 274069 - DNA, 21 bp, Artificial sequence
  SiRNA target sequence
agtcatttgatagcaatatcg

SEQ ID NO: 274070 - DNA, 21 bp, Artificial sequence
  SiRNA target sequence
gtcatttgatagcaatatcgt

SEQ ID NO: 274071 - DNA, 21 bp, Artificial sequence
  SiRNA target sequence
tcatttgatagcaatatcgtg

SEQ ID NO: 274072 - DNA, 21 bp, Artificial sequence
  SiRNA target sequence
catttgatagcaatatcgtgc

SEQ ID NO: 274073 - DNA, 21 bp, Artificial sequence
  SiRNA target sequence
atttgatagcaatatcgtgct

SEQ ID NO: 274074 - DNA, 21 bp, Artificial sequence
  SiRNA target sequence
tttgatagcaatatcgtgctt

SEQ ID NO: 274075 - DNA, 21 bp, Artificial sequence
  SiRNA target sequence
ttgatagcaatatcgtgcttg

SEQ ID NO: 274076 - DNA, 21 bp, Artificial sequence
  SiRNA target sequence
tgatagcaatatcgtgcttgt

SEQ ID NO: 274077 - DNA, 21 bp, Artificial sequence
  SiRNA target sequence
gatagcaatatcgtgcttgtg

SEQ ID NO: 274078 - DNA, 21 bp, Artificial sequence
  SiRNA target sequence
atagcaatatcgtgcttgtga

SEQ ID NO: 274079 - DNA, 21 bp, Artificial sequence
  SiRNA target sequence
tagcaatatcgtgcttgtgac

SEQ ID NO: 274080 - DNA, 21 bp, Artificial sequence
  SiRNA target sequence
agcaatatcgtgcttgtgact

SEQ ID NO: 274081 - DNA, 21 bp, Artificial sequence
  SiRNA target sequence
gcaatatcgtgcttgtgacta

SEQ ID NO: 274082 - DNA, 21 bp, Artificial sequence
  SiRNA target sequence
caatatcgtgcttgtgactat

SEQ ID NO: 274083 - DNA, 21 bp, Artificial sequence
  SiRNA target sequence
aatatcgtgcttgtgactatg

SEQ ID NO: 274084 - DNA, 21 bp, Artificial sequence
  SiRNA target sequence
atatcgtgcttgtgactatgc

SEQ ID NO: 274085 - DNA, 21 bp, Artificial sequence
  SiRNA target sequence
tatcgtgcttgtgactatgcc

SEQ ID NO: 274086 - DNA, 21 bp, Artificial sequence
  SiRNA target sequence
atcgtgcttgtgactatgcct

SEQ ID NO: 274087 - DNA, 21 bp, Artificial sequence
  SiRNA target sequence
tcgtgcttgtgactatgccta

SEQ ID NO: 274088 - DNA, 21 bp, Artificial sequence
  SiRNA target sequence
cgtgcttgtgactatgcctaa

SEQ ID NO: 274089 - DNA, 21 bp, Artificial sequence
  SiRNA target sequence
gtgcttgtgactatgcctaat

SEQ ID NO: 274090 - DNA, 21 bp, Artificial sequence
  SiRNA target sequence
tgcttgtgactatgcctaatc

SEQ ID NO: 274091 - DNA, 21 bp, Artificial sequence
  SiRNA target sequence
gcttgtgactatgcctaatcg

SEQ ID NO: 274092 - DNA, 21 bp, Artificial sequence
  SiRNA target sequence
cttgtgactatgcctaatcgt

SEQ ID NO: 274093 - DNA, 21 bp, Artificial sequence
  SiRNA target sequence
ttgtgactatgcctaatcgta

SEQ ID NO: 274094 - DNA, 21 bp, Artificial sequence
  SiRNA target sequence
tgtgactatgcctaatcgtat

SEQ ID NO: 274095 - DNA, 21 bp, Artificial sequence
  SiRNA target sequence
gtgactatgcctaatcgtatt

SEQ ID NO: 274096 - DNA, 21 bp, Artificial sequence
  SiRNA target sequence
tgactatgcctaatcgtattc

SEQ ID NO: 274097 - DNA, 21 bp, Artificial sequence
  SiRNA target sequence
gactatgcctaatcgtattcc

SEQ ID NO: 274098 - DNA, 21 bp, Artificial sequence
  SiRNA target sequence
actatgcctaatcgtattcct

SEQ ID NO: 274099 - DNA, 21 bp, Artificial sequence
  SiRNA target sequence
ctatgcctaatcgtattcctg

SEQ ID NO: 274100 - DNA, 21 bp, Artificial sequence
  SiRNA target sequence
tatgcctaatcgtattcctga

SEQ ID NO: 274101 - DNA, 21 bp, Artificial sequence
  SiRNA target sequence
atgcctaatcgtattcctgag

SEQ ID NO: 274102 - DNA, 21 bp, Artificial sequence
  SiRNA target sequence
tgcctaatcgtattcctgagt

SEQ ID NO: 274103 - DNA, 21 bp, Artificial sequence
  SiRNA target sequence
gcctaatcgtattcctgagtg

SEQ ID NO: 274104 - DNA, 21 bp, Artificial sequence
  SiRNA target sequence
cctaatcgtattcctgagtgt

SEQ ID NO: 274105 - DNA, 21 bp, Artificial sequence
  SiRNA target sequence
ctaatcgtattcctgagtgta

SEQ ID NO: 274106 - DNA, 21 bp, Artificial sequence
  SiRNA target sequence
taatcgtattcctgagtgtaa

SEQ ID NO: 274107 - DNA, 21 bp, Artificial sequence
  SiRNA target sequence
aatcgtattcctgagtgtaag

SEQ ID NO: 274108 - DNA, 21 bp, Artificial sequence
  SiRNA target sequence
atcgtattcctgagtgtaaga

SEQ ID NO: 274109 - DNA, 21 bp, Artificial sequence
  SiRNA target sequence
tcgtattcctgagtgtaagag

SEQ ID NO: 274110 - DNA, 21 bp, Artificial sequence
  SiRNA target sequence
cgtattcctgagtgtaagagc

SEQ ID NO: 274111 - DNA, 21 bp, Artificial sequence
  SiRNA target sequence
gtattcctgagtgtaagagca

SEQ ID NO: 274112 - DNA, 21 bp, Artificial sequence
  SiRNA target sequence
tattcctgagtgtaagagcat

SEQ ID NO: 274113 - DNA, 21 bp, Artificial sequence
  SiRNA target sequence
attcctgagtgtaagagcatt

SEQ ID NO: 274114 - DNA, 21 bp, Artificial sequence
  SiRNA target sequence
ttcctgagtgtaagagcatta

SEQ ID NO: 274115 - DNA, 21 bp, Artificial sequence
  SiRNA target sequence
tcctgagtgtaagagcattat

SEQ ID NO: 274116 - DNA, 21 bp, Artificial sequence
  SiRNA target sequence
cctgagtgtaagagcattatt

SEQ ID NO: 274117 - DNA, 21 bp, Artificial sequence
  SiRNA target sequence
ctgagtgtaagagcattatta

SEQ ID NO: 274118 - DNA, 21 bp, Artificial sequence
  SiRNA target sequence
tgagtgtaagagcattattaa

SEQ ID NO: 274119 - DNA, 21 bp, Artificial sequence
  SiRNA target sequence
gagtgtaagagcattattaaa

SEQ ID NO: 274120 - DNA, 21 bp, Artificial sequence
  SiRNA target sequence
agtgtaagagcattattaaat

SEQ ID NO: 274121 - DNA, 21 bp, Artificial sequence
  SiRNA target sequence
gtgtaagagcattattaaatt

SEQ ID NO: 274122 - DNA, 21 bp, Artificial sequence
  SiRNA target sequence
tgtaagagcattattaaattt

SEQ ID NO: 274123 - DNA, 21 bp, Artificial sequence
  SiRNA target sequence
gtaagagcattattaaattta

SEQ ID NO: 274124 - DNA, 21 bp, Artificial sequence
  SiRNA target sequence
taagagcattattaaatttat

SEQ ID NO: 274125 - DNA, 21 bp, Artificial sequence
  SiRNA target sequence
aagagcattattaaatttata

SEQ ID NO: 274126 - DNA, 21 bp, Artificial sequence
  SiRNA target sequence
agagcattattaaatttatag

SEQ ID NO: 274127 - DNA, 21 bp, Artificial sequence
  SiRNA target sequence
gagcattattaaatttatagc

SEQ ID NO: 274128 - DNA, 21 bp, Artificial sequence
  SiRNA target sequence
agcattattaaatttatagcg

SEQ ID NO: 274129 - DNA, 21 bp, Artificial sequence
  SiRNA target sequence
gcattattaaatttatagcgt

SEQ ID NO: 274130 - DNA, 21 bp, Artificial sequence
  SiRNA target sequence
cattattaaatttatagcgtc

SEQ ID NO: 274131 - DNA, 21 bp, Artificial sequence
  SiRNA target sequence
attattaaatttatagcgtca

SEQ ID NO: 274132 - DNA, 21 bp, Artificial sequence
  SiRNA target sequence
ttattaaatttatagcgtcac

SEQ ID NO: 274133 - DNA, 21 bp, Artificial sequence
  SiRNA target sequence
tattaaatttatagcgtcaca

SEQ ID NO: 274134 - DNA, 21 bp, Artificial sequence
  SiRNA target sequence
attaaatttatagcgtcacat

SEQ ID NO: 274135 - DNA, 21 bp, Artificial sequence
  SiRNA target sequence
ttaaatttatagcgtcacata

SEQ ID NO: 274136 - DNA, 21 bp, Artificial sequence
  SiRNA target sequence
taaatttatagcgtcacataa

SEQ ID NO: 274137 - DNA, 21 bp, Artificial sequence
  SiRNA target sequence
aaatttatagcgtcacataat

SEQ ID NO: 274138 - DNA, 21 bp, Artificial sequence
  SiRNA target sequence
aatttatagcgtcacataatg

SEQ ID NO: 274139 - DNA, 21 bp, Artificial sequence
  SiRNA target sequence
atttatagcgtcacataatga

SEQ ID NO: 274140 - DNA, 21 bp, Artificial sequence
  SiRNA target sequence
tttatagcgtcacataatgaa

SEQ ID NO: 274141 - DNA, 21 bp, Artificial sequence
  SiRNA target sequence
ttatagcgtcacataatgaac

SEQ ID NO: 274142 - DNA, 21 bp, Artificial sequence
  SiRNA target sequence
tatagcgtcacataatgaaca

SEQ ID NO: 274143 - DNA, 21 bp, Artificial sequence
  SiRNA target sequence
atagcgtcacataatgaacat

SEQ ID NO: 274144 - DNA, 21 bp, Artificial sequence
  SiRNA target sequence
tagcgtcacataatgaacata

SEQ ID NO: 274145 - DNA, 21 bp, Artificial sequence
  SiRNA target sequence
agcgtcacataatgaacatat

SEQ ID NO: 274146 - DNA, 21 bp, Artificial sequence
  SiRNA target sequence
gcgtcacataatgaacatata

SEQ ID NO: 274147 - DNA, 21 bp, Artificial sequence
  SiRNA target sequence
cgtcacataatgaacatatac

SEQ ID NO: 274148 - DNA, 21 bp, Artificial sequence
  SiRNA target sequence
gtcacataatgaacatatacg

SEQ ID NO: 274149 - DNA, 21 bp, Artificial sequence
  SiRNA target sequence
tcacataatgaacatatacgt

SEQ ID NO: 274150 - DNA, 21 bp, Artificial sequence
  SiRNA target sequence
cacataatgaacatatacgtg

SEQ ID NO: 274151 - DNA, 21 bp, Artificial sequence
  SiRNA target sequence
acataatgaacatatacgtgc

SEQ ID NO: 274152 - DNA, 21 bp, Artificial sequence
  SiRNA target sequence
cataatgaacatatacgtgct

SEQ ID NO: 274153 - DNA, 21 bp, Artificial sequence
  SiRNA target sequence
ataatgaacatatacgtgctc

SEQ ID NO: 274154 - DNA, 21 bp, Artificial sequence
  SiRNA target sequence
taatgaacatatacgtgctca

SEQ ID NO: 274155 - DNA, 21 bp, Artificial sequence
  SiRNA target sequence
aatgaacatatacgtgctcag

SEQ ID NO: 274156 - DNA, 21 bp, Artificial sequence
  SiRNA target sequence
atgaacatatacgtgctcaga

SEQ ID NO: 274157 - DNA, 21 bp, Artificial sequence
  SiRNA target sequence
tgaacatatacgtgctcagaa

SEQ ID NO: 274158 - DNA, 21 bp, Artificial sequence
  SiRNA target sequence
gaacatatacgtgctcagaat

SEQ ID NO: 274159 - DNA, 21 bp, Artificial sequence
  SiRNA target sequence
aacatatacgtgctcagaatg

SEQ ID NO: 274160 - DNA, 21 bp, Artificial sequence
  SiRNA target sequence
acatatacgtgctcagaatga

SEQ ID NO: 274161 - DNA, 21 bp, Artificial sequence
  SiRNA target sequence
catatacgtgctcagaatgat

SEQ ID NO: 274162 - DNA, 21 bp, Artificial sequence
  SiRNA target sequence
atatacgtgctcagaatgatg

SEQ ID NO: 274163 - DNA, 21 bp, Artificial sequence
  SiRNA target sequence
tatacgtgctcagaatgatgg

SEQ ID NO: 274164 - DNA, 21 bp, Artificial sequence
  SiRNA target sequence
atacgtgctcagaatgatgga

SEQ ID NO: 274165 - DNA, 21 bp, Artificial sequence
  SiRNA target sequence
tacgtgctcagaatgatggag

SEQ ID NO: 274166 - DNA, 21 bp, Artificial sequence
  SiRNA target sequence
acgtgctcagaatgatggagt

SEQ ID NO: 274167 - DNA, 21 bp, Artificial sequence
  SiRNA target sequence
cgtgctcagaatgatggagtg

SEQ ID NO: 274168 - DNA, 21 bp, Artificial sequence
  SiRNA target sequence
gtgctcagaatgatggagtgt

SEQ ID NO: 274169 - DNA, 21 bp, Artificial sequence
  SiRNA target sequence
tgctcagaatgatggagtgtt

SEQ ID NO: 274170 - DNA, 21 bp, Artificial sequence
  SiRNA target sequence
gctcagaatgatggagtgtta

SEQ ID NO: 274171 - DNA, 21 bp, Artificial sequence
  SiRNA target sequence
ctcagaatgatggagtgttag

SEQ ID NO: 274172 - DNA, 21 bp, Artificial sequence
  SiRNA target sequence
tcagaatgatggagtgttagt

SEQ ID NO: 274173 - DNA, 21 bp, Artificial sequence
  SiRNA target sequence
cagaatgatggagtgttagta

SEQ ID NO: 274174 - DNA, 21 bp, Artificial sequence
  SiRNA target sequence
agaatgatggagtgttagtaa

SEQ ID NO: 274175 - DNA, 21 bp, Artificial sequence
  SiRNA target sequence
gaatgatggagtgttagtaac

SEQ ID NO: 274176 - DNA, 21 bp, Artificial sequence
  SiRNA target sequence
aatgatggagtgttagtaact

SEQ ID NO: 274177 - DNA, 21 bp, Artificial sequence
  SiRNA target sequence
atgatggagtgttagtaactg

SEQ ID NO: 274178 - DNA, 21 bp, Artificial sequence
  SiRNA target sequence
tgatggagtgttagtaactgg

SEQ ID NO: 274179 - DNA, 21 bp, Artificial sequence
  SiRNA target sequence
gatggagtgttagtaactggc

SEQ ID NO: 274180 - DNA, 21 bp, Artificial sequence
  SiRNA target sequence
atggagtgttagtaactggcg

SEQ ID NO: 274181 - DNA, 21 bp, Artificial sequence
  SiRNA target sequence
tggagtgttagtaactggcga

SEQ ID NO: 274182 - DNA, 21 bp, Artificial sequence
  SiRNA target sequence
ggagtgttagtaactggcgac

SEQ ID NO: 274183 - DNA, 21 bp, Artificial sequence
  SiRNA target sequence
gagtgttagtaactggcgacc

SEQ ID NO: 274184 - DNA, 21 bp, Artificial sequence
  SiRNA target sequence
agtgttagtaactggcgacca

SEQ ID NO: 274185 - DNA, 21 bp, Artificial sequence
  SiRNA target sequence
gtgttagtaactggcgaccat

SEQ ID NO: 274186 - DNA, 21 bp, Artificial sequence
  SiRNA target sequence
tgttagtaactggcgaccata

SEQ ID NO: 274187 - DNA, 21 bp, Artificial sequence
  SiRNA target sequence
gttagtaactggcgaccatac

SEQ ID NO: 274188 - DNA, 21 bp, Artificial sequence
  SiRNA target sequence
ttagtaactggcgaccatact

SEQ ID NO: 274189 - DNA, 21 bp, Artificial sequence
  SiRNA target sequence
tagtaactggcgaccatactc

SEQ ID NO: 274190 - DNA, 21 bp, Artificial sequence
  SiRNA target sequence
agtaactggcgaccatactca

SEQ ID NO: 274191 - DNA, 21 bp, Artificial sequence
  SiRNA target sequence
gtaactggcgaccatactcag

SEQ ID NO: 274192 - DNA, 21 bp, Artificial sequence
  SiRNA target sequence
taactggcgaccatactcagt

SEQ ID NO: 274193 - DNA, 21 bp, Artificial sequence
  SiRNA target sequence
aactggcgaccatactcagtt

SEQ ID NO: 274194 - DNA, 21 bp, Artificial sequence
  SiRNA target sequence
actggcgaccatactcagtta

SEQ ID NO: 274195 - DNA, 21 bp, Artificial sequence
  SiRNA target sequence
ctggcgaccatactcagttat

SEQ ID NO: 274196 - DNA, 21 bp, Artificial sequence
  SiRNA target sequence
tggcgaccatactcagttatt

SEQ ID NO: 274197 - DNA, 21 bp, Artificial sequence
  SiRNA target sequence
ggcgaccatactcagttattg

SEQ ID NO: 274198 - DNA, 21 bp, Artificial sequence
  SiRNA target sequence
gcgaccatactcagttattgg

SEQ ID NO: 274199 - DNA, 21 bp, Artificial sequence
  SiRNA target sequence
cgaccatactcagttattggc

SEQ ID NO: 274200 - DNA, 21 bp, Artificial sequence
  SiRNA target sequence
gaccatactcagttattggct

SEQ ID NO: 274201 - DNA, 21 bp, Artificial sequence
  SiRNA target sequence
accatactcagttattggctt

SEQ ID NO: 274202 - DNA, 21 bp, Artificial sequence
  SiRNA target sequence
ccatactcagttattggcttt

SEQ ID NO: 274203 - DNA, 21 bp, Artificial sequence
  SiRNA target sequence
catactcagttattggctttc

SEQ ID NO: 274204 - DNA, 21 bp, Artificial sequence
  SiRNA target sequence
atactcagttattggctttcg

SEQ ID NO: 274205 - DNA, 21 bp, Artificial sequence
  SiRNA target sequence
tactcagttattggctttcga

SEQ ID NO: 274206 - DNA, 21 bp, Artificial sequence
  SiRNA target sequence
actcagttattggctttcgag

SEQ ID NO: 274207 - DNA, 21 bp, Artificial sequence
  SiRNA target sequence
ctcagttattggctttcgaga

SEQ ID NO: 274208 - DNA, 21 bp, Artificial sequence
  SiRNA target sequence
tcagttattggctttcgagaa

SEQ ID NO: 274209 - DNA, 21 bp, Artificial sequence
  SiRNA target sequence
cagttattggctttcgagaat

SEQ ID NO: 274210 - DNA, 21 bp, Artificial sequence
  SiRNA target sequence
agttattggctttcgagaata

SEQ ID NO: 274211 - DNA, 21 bp, Artificial sequence
  SiRNA target sequence
gttattggctttcgagaataa

SEQ ID NO: 274212 - DNA, 21 bp, Artificial sequence
  SiRNA target sequence
ttattggctttcgagaataat

SEQ ID NO: 274213 - DNA, 21 bp, Artificial sequence
  SiRNA target sequence
tattggctttcgagaataata

SEQ ID NO: 274214 - DNA, 21 bp, Artificial sequence
  SiRNA target sequence
attggctttcgagaataataa

SEQ ID NO: 274215 - DNA, 21 bp, Artificial sequence
  SiRNA target sequence
ttggctttcgagaataataat

SEQ ID NO: 274216 - DNA, 21 bp, Artificial sequence
  SiRNA target sequence
tggctttcgagaataataata

SEQ ID NO: 274217 - DNA, 21 bp, Artificial sequence
  SiRNA target sequence
ggctttcgagaataataataa

SEQ ID NO: 274218 - DNA, 21 bp, Artificial sequence
  SiRNA target sequence
gctttcgagaataataataag

SEQ ID NO: 274219 - DNA, 21 bp, Artificial sequence
  SiRNA target sequence
ctttcgagaataataataaga

SEQ ID NO: 274220 - DNA, 21 bp, Artificial sequence
  SiRNA target sequence
tttcgagaataataataagac

SEQ ID NO: 274221 - DNA, 21 bp, Artificial sequence
  SiRNA target sequence
ttcgagaataataataagacc

SEQ ID NO: 274222 - DNA, 21 bp, Artificial sequence
  SiRNA target sequence
tcgagaataataataagaccc

SEQ ID NO: 274223 - DNA, 21 bp, Artificial sequence
  SiRNA target sequence
cgagaataataataagacccc

SEQ ID NO: 274224 - DNA, 21 bp, Artificial sequence
  SiRNA target sequence
gagaataataataagacccca

SEQ ID NO: 274225 - DNA, 21 bp, Artificial sequence
  SiRNA target sequence
agaataataataagaccccaa

SEQ ID NO: 274226 - DNA, 21 bp, Artificial sequence
  SiRNA target sequence
gaataataataagaccccaat

SEQ ID NO: 274227 - DNA, 21 bp, Artificial sequence
  SiRNA target sequence
aataataataagaccccaata

SEQ ID NO: 274228 - DNA, 21 bp, Artificial sequence
  SiRNA target sequence
ataataataagaccccaataa

SEQ ID NO: 274229 - DNA, 21 bp, Artificial sequence
  SiRNA target sequence
taataataagaccccaataag

SEQ ID NO: 274230 - DNA, 21 bp, Artificial sequence
  SiRNA target sequence
aataataagaccccaataagt

SEQ ID NO: 274231 - DNA, 21 bp, Artificial sequence
  SiRNA target sequence
ataataagaccccaataagta

SEQ ID NO: 274232 - DNA, 21 bp, Artificial sequence
  SiRNA target sequence
taataagaccccaataagtat

SEQ ID NO: 274233 - DNA, 21 bp, Artificial sequence
  SiRNA target sequence
aataagaccccaataagtatc

SEQ ID NO: 274234 - DNA, 21 bp, Artificial sequence
  SiRNA target sequence
ataagaccccaataagtatca

SEQ ID NO: 274235 - DNA, 21 bp, Artificial sequence
  SiRNA target sequence
taagaccccaataagtatcaa

SEQ ID NO: 274236 - DNA, 21 bp, Artificial sequence
  SiRNA target sequence
aagaccccaataagtatcaac

SEQ ID NO: 274237 - DNA, 21 bp, Artificial sequence
  SiRNA target sequence
agaccccaataagtatcaacg

SEQ ID NO: 274238 - DNA, 21 bp, Artificial sequence
  SiRNA target sequence
gaccccaataagtatcaacgc

SEQ ID NO: 274239 - DNA, 21 bp, Artificial sequence
  SiRNA target sequence
accccaataagtatcaacgct

SEQ ID NO: 274240 - DNA, 21 bp, Artificial sequence
  SiRNA target sequence
ccccaataagtatcaacgctg

SEQ ID NO: 274241 - DNA, 21 bp, Artificial sequence
  SiRNA target sequence
cccaataagtatcaacgctga

SEQ ID NO: 274242 - DNA, 21 bp, Artificial sequence
  SiRNA target sequence
ccaataagtatcaacgctgat

SEQ ID NO: 274243 - DNA, 21 bp, Artificial sequence
  SiRNA target sequence
caataagtatcaacgctgatg

SEQ ID NO: 274244 - DNA, 21 bp, Artificial sequence
  SiRNA target sequence
aataagtatcaacgctgatgg

SEQ ID NO: 274245 - DNA, 21 bp, Artificial sequence
  SiRNA target sequence
ataagtatcaacgctgatggt

SEQ ID NO: 274246 - DNA, 21 bp, Artificial sequence
  SiRNA target sequence
taagtatcaacgctgatggtt

SEQ ID NO: 274247 - DNA, 21 bp, Artificial sequence
  SiRNA target sequence
aagtatcaacgctgatggttt

SEQ ID NO: 274248 - DNA, 21 bp, Artificial sequence
  SiRNA target sequence
agtatcaacgctgatggtttg

SEQ ID NO: 274249 - DNA, 21 bp, Artificial sequence
  SiRNA target sequence
gtatcaacgctgatggtttgt

SEQ ID NO: 274250 - DNA, 21 bp, Artificial sequence
  SiRNA target sequence
tatcaacgctgatggtttgta

SEQ ID NO: 274251 - DNA, 21 bp, Artificial sequence
  SiRNA target sequence
atcaacgctgatggtttgtat

SEQ ID NO: 274252 - DNA, 21 bp, Artificial sequence
  SiRNA target sequence
tcaacgctgatggtttgtatg

SEQ ID NO: 274253 - DNA, 21 bp, Artificial sequence
  SiRNA target sequence
caacgctgatggtttgtatga

SEQ ID NO: 274254 - DNA, 21 bp, Artificial sequence
  SiRNA target sequence
aacgctgatggtttgtatgag

SEQ ID NO: 274255 - DNA, 21 bp, Artificial sequence
  SiRNA target sequence
acgctgatggtttgtatgagg

SEQ ID NO: 274256 - DNA, 21 bp, Artificial sequence
  SiRNA target sequence
cgctgatggtttgtatgaggt

SEQ ID NO: 274257 - DNA, 21 bp, Artificial sequence
  SiRNA target sequence
gctgatggtttgtatgaggtt

SEQ ID NO: 274258 - DNA, 21 bp, Artificial sequence
  SiRNA target sequence
ctgatggtttgtatgaggtta

SEQ ID NO: 274259 - DNA, 21 bp, Artificial sequence
  SiRNA target sequence
tgatggtttgtatgaggttat

SEQ ID NO: 274260 - DNA, 21 bp, Artificial sequence
  SiRNA target sequence
gatggtttgtatgaggttata

SEQ ID NO: 274261 - DNA, 21 bp, Artificial sequence
  SiRNA target sequence
atggtttgtatgaggttatac

SEQ ID NO: 274262 - DNA, 21 bp, Artificial sequence
  SiRNA target sequence
tggtttgtatgaggttatact

SEQ ID NO: 274263 - DNA, 21 bp, Artificial sequence
  SiRNA target sequence
ggtttgtatgaggttatactt

SEQ ID NO: 274264 - DNA, 21 bp, Artificial sequence
  SiRNA target sequence
gtttgtatgaggttatacttc

SEQ ID NO: 274265 - DNA, 21 bp, Artificial sequence
  SiRNA target sequence
tttgtatgaggttatacttca

SEQ ID NO: 274266 - DNA, 21 bp, Artificial sequence
  SiRNA target sequence
ttgtatgaggttatacttcaa

SEQ ID NO: 274267 - DNA, 21 bp, Artificial sequence
  SiRNA target sequence
tgtatgaggttatacttcaag

SEQ ID NO: 274268 - DNA, 21 bp, Artificial sequence
  SiRNA target sequence
gtatgaggttatacttcaagg

SEQ ID NO: 274269 - DNA, 21 bp, Artificial sequence
  SiRNA target sequence
tatgaggttatacttcaagga

SEQ ID NO: 274270 - DNA, 21 bp, Artificial sequence
  SiRNA target sequence
atgaggttatacttcaaggag

SEQ ID NO: 274271 - DNA, 21 bp, Artificial sequence
  SiRNA target sequence
tgaggttatacttcaaggagt

SEQ ID NO: 274272 - DNA, 21 bp, Artificial sequence
  SiRNA target sequence
gaggttatacttcaaggagta

SEQ ID NO: 274273 - DNA, 21 bp, Artificial sequence
  SiRNA target sequence
aggttatacttcaaggagtat

SEQ ID NO: 274274 - DNA, 21 bp, Artificial sequence
  SiRNA target sequence
ggttatacttcaaggagtata

SEQ ID NO: 274275 - DNA, 21 bp, Artificial sequence
  SiRNA target sequence
gttatacttcaaggagtatat

SEQ ID NO: 274276 - DNA, 21 bp, Artificial sequence
  SiRNA target sequence
ttatacttcaaggagtatata

SEQ ID NO: 274277 - DNA, 21 bp, Artificial sequence
  SiRNA target sequence
tatacttcaaggagtatatac

SEQ ID NO: 274278 - DNA, 21 bp, Artificial sequence
  SiRNA target sequence
atacttcaaggagtatatact

SEQ ID NO: 274279 - DNA, 21 bp, Artificial sequence
  SiRNA target sequence
tacttcaaggagtatatactt

SEQ ID NO: 274280 - DNA, 21 bp, Artificial sequence
  SiRNA target sequence
acttcaaggagtatatactta

SEQ ID NO: 274281 - DNA, 21 bp, Artificial sequence
  SiRNA target sequence
cttcaaggagtatatacttat

SEQ ID NO: 274282 - DNA, 21 bp, Artificial sequence
  SiRNA target sequence
ttcaaggagtatatacttatc

SEQ ID NO: 274283 - DNA, 21 bp, Artificial sequence
  SiRNA target sequence
tcaaggagtatatacttatcc

SEQ ID NO: 274284 - DNA, 21 bp, Artificial sequence
  SiRNA target sequence
caaggagtatatacttatcca

SEQ ID NO: 274285 - DNA, 21 bp, Artificial sequence
  SiRNA target sequence
aaggagtatatacttatccat

SEQ ID NO: 274286 - DNA, 21 bp, Artificial sequence
  SiRNA target sequence
aggagtatatacttatccata

SEQ ID NO: 274287 - DNA, 21 bp, Artificial sequence
  SiRNA target sequence
ggagtatatacttatccatac

SEQ ID NO: 274288 - DNA, 21 bp, Artificial sequence
  SiRNA target sequence
gagtatatacttatccatacc

SEQ ID NO: 274289 - DNA, 21 bp, Artificial sequence
  SiRNA target sequence
agtatatacttatccatacca

SEQ ID NO: 274290 - DNA, 21 bp, Artificial sequence
  SiRNA target sequence
gtatatacttatccataccat

SEQ ID NO: 274291 - DNA, 21 bp, Artificial sequence
  SiRNA target sequence
tatatacttatccataccatg

SEQ ID NO: 274292 - DNA, 21 bp, Artificial sequence
  SiRNA target sequence
atatacttatccataccatgg

SEQ ID NO: 274293 - DNA, 21 bp, Artificial sequence
  SiRNA target sequence
tatacttatccataccatggc

SEQ ID NO: 274294 - DNA, 21 bp, Artificial sequence
  SiRNA target sequence
atacttatccataccatggcg

SEQ ID NO: 274295 - DNA, 21 bp, Artificial sequence
  SiRNA target sequence
tacttatccataccatggcga

SEQ ID NO: 274296 - DNA, 21 bp, Artificial sequence
  SiRNA target sequence
acttatccataccatggcgat

SEQ ID NO: 274297 - DNA, 21 bp, Artificial sequence
  SiRNA target sequence
cttatccataccatggcgatg

SEQ ID NO: 274298 - DNA, 21 bp, Artificial sequence
  SiRNA target sequence
ttatccataccatggcgatgg

SEQ ID NO: 274299 - DNA, 21 bp, Artificial sequence
  SiRNA target sequence
tatccataccatggcgatggt

SEQ ID NO: 274300 - DNA, 21 bp, Artificial sequence
  SiRNA target sequence
atccataccatggcgatggtg

SEQ ID NO: 274301 - DNA, 21 bp, Artificial sequence
  SiRNA target sequence
tccataccatggcgatggtgt

SEQ ID NO: 274302 - DNA, 21 bp, Artificial sequence
  SiRNA target sequence
ccataccatggcgatggtgtt

SEQ ID NO: 274303 - DNA, 21 bp, Artificial sequence
  SiRNA target sequence
cataccatggcgatggtgttt

SEQ ID NO: 274304 - DNA, 21 bp, Artificial sequence
  SiRNA target sequence
ataccatggcgatggtgtttg

SEQ ID NO: 274305 - DNA, 21 bp, Artificial sequence
  SiRNA target sequence
taccatggcgatggtgtttgt

SEQ ID NO: 274306 - DNA, 21 bp, Artificial sequence
  SiRNA target sequence
accatggcgatggtgtttgtg

SEQ ID NO: 274307 - DNA, 21 bp, Artificial sequence
  SiRNA target sequence
ccatggcgatggtgtttgtgg

SEQ ID NO: 274308 - DNA, 21 bp, Artificial sequence
  SiRNA target sequence
catggcgatggtgtttgtggt

SEQ ID NO: 274309 - DNA, 21 bp, Artificial sequence
  SiRNA target sequence
atggcgatggtgtttgtggtt

SEQ ID NO: 274310 - DNA, 21 bp, Artificial sequence
  SiRNA target sequence
tggcgatggtgtttgtggttc

SEQ ID NO: 274311 - DNA, 21 bp, Artificial sequence
  SiRNA target sequence
ggcgatggtgtttgtggttcg

SEQ ID NO: 274312 - DNA, 21 bp, Artificial sequence
  SiRNA target sequence
gcgatggtgtttgtggttcga

SEQ ID NO: 274313 - DNA, 21 bp, Artificial sequence
  SiRNA target sequence
cgatggtgtttgtggttcgat

SEQ ID NO: 274314 - DNA, 21 bp, Artificial sequence
  SiRNA target sequence
gatggtgtttgtggttcgata

SEQ ID NO: 274315 - DNA, 21 bp, Artificial sequence
  SiRNA target sequence
atggtgtttgtggttcgatat

SEQ ID NO: 274316 - DNA, 21 bp, Artificial sequence
  SiRNA target sequence
tggtgtttgtggttcgatatt

SEQ ID NO: 274317 - DNA, 21 bp, Artificial sequence
  SiRNA target sequence
ggtgtttgtggttcgatattg

SEQ ID NO: 274318 - DNA, 21 bp, Artificial sequence
  SiRNA target sequence
gtgtttgtggttcgatattgc

SEQ ID NO: 274319 - DNA, 21 bp, Artificial sequence
  SiRNA target sequence
tgtttgtggttcgatattgct

SEQ ID NO: 274320 - DNA, 21 bp, Artificial sequence
  SiRNA target sequence
gtttgtggttcgatattgctg

SEQ ID NO: 274321 - DNA, 21 bp, Artificial sequence
  SiRNA target sequence
tttgtggttcgatattgctgt

SEQ ID NO: 274322 - DNA, 21 bp, Artificial sequence
  SiRNA target sequence
ttgtggttcgatattgctgtc

SEQ ID NO: 274323 - DNA, 21 bp, Artificial sequence
  SiRNA target sequence
tgtggttcgatattgctgtct

SEQ ID NO: 274324 - DNA, 21 bp, Artificial sequence
  SiRNA target sequence
gtggttcgatattgctgtctc

SEQ ID NO: 274325 - DNA, 21 bp, Artificial sequence
  SiRNA target sequence
tggttcgatattgctgtctcg

SEQ ID NO: 274326 - DNA, 21 bp, Artificial sequence
  SiRNA target sequence
ggttcgatattgctgtctcgg

SEQ ID NO: 274327 - DNA, 21 bp, Artificial sequence
  SiRNA target sequence
gttcgatattgctgtctcgga

SEQ ID NO: 274328 - DNA, 21 bp, Artificial sequence
  SiRNA target sequence
ttcgatattgctgtctcggaa

SEQ ID NO: 274329 - DNA, 21 bp, Artificial sequence
  SiRNA target sequence
tcgatattgctgtctcggaat

SEQ ID NO: 274330 - DNA, 21 bp, Artificial sequence
  SiRNA target sequence
cgatattgctgtctcggaatt

SEQ ID NO: 274331 - DNA, 21 bp, Artificial sequence
  SiRNA target sequence
gatattgctgtctcggaattt

SEQ ID NO: 274332 - DNA, 21 bp, Artificial sequence
  SiRNA target sequence
atattgctgtctcggaattta

SEQ ID NO: 274333 - DNA, 21 bp, Artificial sequence
  SiRNA target sequence
tattgctgtctcggaatttac

SEQ ID NO: 274334 - DNA, 21 bp, Artificial sequence
  SiRNA target sequence
attgctgtctcggaatttaca

SEQ ID NO: 274335 - DNA, 21 bp, Artificial sequence
  SiRNA target sequence
ttgctgtctcggaatttacaa

SEQ ID NO: 274336 - DNA, 21 bp, Artificial sequence
  SiRNA target sequence
tgctgtctcggaatttacaac

SEQ ID NO: 274337 - DNA, 21 bp, Artificial sequence
  SiRNA target sequence
gctgtctcggaatttacaacg

SEQ ID NO: 274338 - DNA, 21 bp, Artificial sequence
  SiRNA target sequence
ctgtctcggaatttacaacgg

SEQ ID NO: 274339 - DNA, 21 bp, Artificial sequence
  SiRNA target sequence
tgtctcggaatttacaacggc

SEQ ID NO: 274340 - DNA, 21 bp, Artificial sequence
  SiRNA target sequence
gtctcggaatttacaacggcc

SEQ ID NO: 274341 - DNA, 21 bp, Artificial sequence
  SiRNA target sequence
tctcggaatttacaacggcca

SEQ ID NO: 274342 - DNA, 21 bp, Artificial sequence
  SiRNA target sequence
ctcggaatttacaacggccaa

SEQ ID NO: 274343 - DNA, 21 bp, Artificial sequence
  SiRNA target sequence
tcggaatttacaacggccaat

SEQ ID NO: 274344 - DNA, 21 bp, Artificial sequence
  SiRNA target sequence
cggaatttacaacggccaatt

SEQ ID NO: 274345 - DNA, 21 bp, Artificial sequence
  SiRNA target sequence
ggaatttacaacggccaatta

SEQ ID NO: 274346 - DNA, 21 bp, Artificial sequence
  SiRNA target sequence
gaatttacaacggccaattat

SEQ ID NO: 274347 - DNA, 21 bp, Artificial sequence
  SiRNA target sequence
aatttacaacggccaattata

SEQ ID NO: 274348 - DNA, 21 bp, Artificial sequence
  SiRNA target sequence
atttacaacggccaattatag

SEQ ID NO: 274349 - DNA, 21 bp, Artificial sequence
  SiRNA target sequence
tttacaacggccaattatagg

SEQ ID NO: 274350 - DNA, 21 bp, Artificial sequence
  SiRNA target sequence
ttacaacggccaattataggt

SEQ ID NO: 274351 - DNA, 21 bp, Artificial sequence
  SiRNA target sequence
tacaacggccaattataggta

SEQ ID NO: 274352 - DNA, 21 bp, Artificial sequence
  SiRNA target sequence
acaacggccaattataggtat

SEQ ID NO: 274353 - DNA, 21 bp, Artificial sequence
  SiRNA target sequence
caacggccaattataggtatc

SEQ ID NO: 274354 - DNA, 21 bp, Artificial sequence
  SiRNA target sequence
aacggccaattataggtatcc

SEQ ID NO: 274355 - DNA, 21 bp, Artificial sequence
  SiRNA target sequence
acggccaattataggtatcca

SEQ ID NO: 274356 - DNA, 21 bp, Artificial sequence
  SiRNA target sequence
cggccaattataggtatccat

SEQ ID NO: 274357 - DNA, 21 bp, Artificial sequence
  SiRNA target sequence
ggccaattataggtatccatg

SEQ ID NO: 274358 - DNA, 21 bp, Artificial sequence
  SiRNA target sequence
gccaattataggtatccatgt

SEQ ID NO: 274359 - DNA, 21 bp, Artificial sequence
  SiRNA target sequence
ccaattataggtatccatgtt

SEQ ID NO: 274360 - DNA, 21 bp, Artificial sequence
  SiRNA target sequence
caattataggtatccatgttg

SEQ ID NO: 274361 - DNA, 21 bp, Artificial sequence
  SiRNA target sequence
aattataggtatccatgttgc

SEQ ID NO: 274362 - DNA, 21 bp, Artificial sequence
  SiRNA target sequence
attataggtatccatgttgct

SEQ ID NO: 274363 - DNA, 21 bp, Artificial sequence
  SiRNA target sequence
ttataggtatccatgttgctg

SEQ ID NO: 274364 - DNA, 21 bp, Artificial sequence
  SiRNA target sequence
tataggtatccatgttgctgg

SEQ ID NO: 274365 - DNA, 21 bp, Artificial sequence
  SiRNA target sequence
ataggtatccatgttgctggt

SEQ ID NO: 274366 - DNA, 21 bp, Artificial sequence
  SiRNA target sequence
taggtatccatgttgctggta

SEQ ID NO: 274367 - DNA, 21 bp, Artificial sequence
  SiRNA target sequence
aggtatccatgttgctggtac

SEQ ID NO: 274368 - DNA, 21 bp, Artificial sequence
  SiRNA target sequence
ggtatccatgttgctggtact

SEQ ID NO: 274369 - DNA, 21 bp, Artificial sequence
  SiRNA target sequence
gtatccatgttgctggtactg

SEQ ID NO: 274370 - DNA, 21 bp, Artificial sequence
  SiRNA target sequence
tatccatgttgctggtactga

SEQ ID NO: 274371 - DNA, 21 bp, Artificial sequence
  SiRNA target sequence
atccatgttgctggtactgaa

SEQ ID NO: 274372 - DNA, 21 bp, Artificial sequence
  SiRNA target sequence
tccatgttgctggtactgaag

SEQ ID NO: 274373 - DNA, 21 bp, Artificial sequence
  SiRNA target sequence
ccatgttgctggtactgaagg

SEQ ID NO: 274374 - DNA, 21 bp, Artificial sequence
  SiRNA target sequence
catgttgctggtactgaagga

SEQ ID NO: 274375 - DNA, 21 bp, Artificial sequence
  SiRNA target sequence
atgttgctggtactgaaggat

SEQ ID NO: 274376 - DNA, 21 bp, Artificial sequence
  SiRNA target sequence
tgttgctggtactgaaggatt

SEQ ID NO: 274377 - DNA, 21 bp, Artificial sequence
  SiRNA target sequence
gttgctggtactgaaggattg

SEQ ID NO: 274378 - DNA, 21 bp, Artificial sequence
  SiRNA target sequence
ttgctggtactgaaggattgc

SEQ ID NO: 274379 - DNA, 21 bp, Artificial sequence
  SiRNA target sequence
tgctggtactgaaggattgca

SEQ ID NO: 274380 - DNA, 21 bp, Artificial sequence
  SiRNA target sequence
gctggtactgaaggattgcat

SEQ ID NO: 274381 - DNA, 21 bp, Artificial sequence
  SiRNA target sequence
ctggtactgaaggattgcatg

SEQ ID NO: 274382 - DNA, 21 bp, Artificial sequence
  SiRNA target sequence
tggtactgaaggattgcatgg

SEQ ID NO: 274383 - DNA, 21 bp, Artificial sequence
  SiRNA target sequence
ggtactgaaggattgcatggc

SEQ ID NO: 274384 - DNA, 21 bp, Artificial sequence
  SiRNA target sequence
gtactgaaggattgcatggct

SEQ ID NO: 274385 - DNA, 21 bp, Artificial sequence
  SiRNA target sequence
tactgaaggattgcatggctt

SEQ ID NO: 274386 - DNA, 21 bp, Artificial sequence
  SiRNA target sequence
actgaaggattgcatggcttt

SEQ ID NO: 274387 - DNA, 21 bp, Artificial sequence
  SiRNA target sequence
ctgaaggattgcatggctttg

SEQ ID NO: 274388 - DNA, 21 bp, Artificial sequence
  SiRNA target sequence
tgaaggattgcatggctttgg

SEQ ID NO: 274389 - DNA, 21 bp, Artificial sequence
  SiRNA target sequence
gaaggattgcatggctttgga

SEQ ID NO: 274390 - DNA, 21 bp, Artificial sequence
  SiRNA target sequence
aaggattgcatggctttggag

SEQ ID NO: 274391 - DNA, 21 bp, Artificial sequence
  SiRNA target sequence
aggattgcatggctttggagt

SEQ ID NO: 274392 - DNA, 21 bp, Artificial sequence
  SiRNA target sequence
  misc_feature (21)..(21): n is a, c, g, or t
ggattgcatggctttggagtn

SEQ ID NO: 274393 - DNA, 21 bp, Artificial sequence
  SiRNA target sequence
  misc_feature (20)..(20): n is a, c, g, or t
gattgcatggctttggagtng

SEQ ID NO: 274394 - DNA, 21 bp, Artificial sequence
  SiRNA target sequence
  misc_feature (19)..(19): n is a, c, g, or t
attgcatggctttggagtngc

SEQ ID NO: 274395 - DNA, 21 bp, Artificial sequence
  SiRNA target sequence
  misc_feature (18)..(18): n is a, c, g, or t
ttgcatggctttggagtngct

SEQ ID NO: 274396 - DNA, 21 bp, Artificial sequence
  SiRNA target sequence
  misc_feature (17)..(17): n is a, c, g, or t
tgcatggctttggagtngctg

SEQ ID NO: 274397 - DNA, 21 bp, Artificial sequence
  SiRNA target sequence
  misc_feature (16)..(16): n is a, c, g, or t
gcatggctttggagtngctga

SEQ ID NO: 274398 - DNA, 21 bp, Artificial sequence
  SiRNA target sequence
  misc_feature (15)..(15): n is a, c, g, or t
catggctttggagtngctgaa

SEQ ID NO: 274399 - DNA, 21 bp, Artificial sequence
  SiRNA target sequence
  misc_feature (14)..(14): n is a, c, g, or t
atggctttggagtngctgaac

SEQ ID NO: 274400 - DNA, 21 bp, Artificial sequence
  SiRNA target sequence
  misc_feature (13)..(13): n is a, c, g, or t
tggctttggagtngctgaacc

SEQ ID NO: 274401 - DNA, 21 bp, Artificial sequence
  SiRNA target sequence
  misc_feature (12)..(12): n is a, c, g, or t
ggctttggagtngctgaacca

SEQ ID NO: 274402 - DNA, 21 bp, Artificial sequence
  SiRNA target sequence
  misc_feature (11)..(11): n is a, c, g, or t
  misc_feature (21)..(21): n is a, c, g, or t
gctttggagtngctgaaccan

SEQ ID NO: 274403 - DNA, 21 bp, Artificial sequence
  SiRNA target sequence
  misc_feature (10)..(10): n is a, c, g, or t
  misc_feature (20)..(20): n is a, c, g, or t
ctttggagtngctgaaccant

SEQ ID NO: 274404 - DNA, 21 bp, Artificial sequence
  SiRNA target sequence
  misc_feature (9)..(9): n is a, c, g, or t
  misc_feature (19)..(19): n is a, c, g, or t
tttggagtngctgaaccantg

SEQ ID NO: 274405 - DNA, 21 bp, Artificial sequence
  SiRNA target sequence
  misc_feature (8)..(8): n is a, c, g, or t
  misc_feature (18)..(18): n is a, c, g, or t
ttggagtngctgaaccantgg

SEQ ID NO: 274406 - DNA, 21 bp, Artificial sequence
  SiRNA target sequence
  misc_feature (7)..(7): n is a, c, g, or t
  misc_feature (17)..(17): n is a, c, g, or t
tggagtngctgaaccantggt

SEQ ID NO: 274407 - DNA, 21 bp, Artificial sequence
  SiRNA target sequence
  misc_feature (6)..(6): n is a, c, g, or t
  misc_feature (16)..(16): n is a, c, g, or t
ggagtngctgaaccantggta

SEQ ID NO: 274408 - DNA, 21 bp, Artificial sequence
  SiRNA target sequence
  misc_feature (5)..(5): n is a, c, g, or t
  misc_feature (15)..(15): n is a, c, g, or t
gagtngctgaaccantggtac

SEQ ID NO: 274409 - DNA, 21 bp, Artificial sequence
  SiRNA target sequence
  misc_feature (4)..(4): n is a, c, g, or t
  misc_feature (14)..(14): n is a, c, g, or t
agtngctgaaccantggtaca

SEQ ID NO: 274410 - DNA, 21 bp, Artificial sequence
  SiRNA target sequence
  misc_feature (3)..(3): n is a, c, g, or t
  misc_feature (13)..(13): n is a, c, g, or t
gtngctgaaccantggtacat

SEQ ID NO: 274411 - DNA, 21 bp, Artificial sequence
  SiRNA target sequence
  misc_feature (2)..(2): n is a, c, g, or t
  misc_feature (12)..(12): n is a, c, g, or t
tngctgaaccantggtacatg

SEQ ID NO: 274412 - DNA, 21 bp, Artificial sequence
  SiRNA target sequence
  misc_feature (1)..(1): n is a, c, g, or t
  misc_feature (11)..(11): n is a, c, g, or t
ngctgaaccantggtacatga

SEQ ID NO: 274413 - DNA, 21 bp, Artificial sequence
  SiRNA target sequence
  misc_feature (10)..(10): n is a, c, g, or t
gctgaaccantggtacatgaa

SEQ ID NO: 274414 - DNA, 21 bp, Artificial sequence
  SiRNA target sequence
  misc_feature (9)..(9): n is a, c, g, or t
ctgaaccantggtacatgaaa

SEQ ID NO: 274415 - DNA, 21 bp, Artificial sequence
  SiRNA target sequence
  misc_feature (8)..(8): n is a, c, g, or t
tgaaccantggtacatgaaat

SEQ ID NO: 274416 - DNA, 21 bp, Artificial sequence
  SiRNA target sequence
  misc_feature (7)..(7): n is a, c, g, or t
gaaccantggtacatgaaatg

SEQ ID NO: 274417 - DNA, 21 bp, Artificial sequence
  SiRNA target sequence
  misc_feature (6)..(6): n is a, c, g, or t
aaccantggtacatgaaatgt

SEQ ID NO: 274418 - DNA, 21 bp, Artificial sequence
  SiRNA target sequence
  misc_feature (5)..(5): n is a, c, g, or t
accantggtacatgaaatgtt

SEQ ID NO: 274419 - DNA, 21 bp, Artificial sequence
  SiRNA target sequence
  misc_feature (4)..(4): n is a, c, g, or t
ccantggtacatgaaatgttc

SEQ ID NO: 274420 - DNA, 21 bp, Artificial sequence
  SiRNA target sequence
  misc_feature (3)..(3): n is a, c, g, or t
cantggtacatgaaatgttca

SEQ ID NO: 274421 - DNA, 21 bp, Artificial sequence
  SiRNA target sequence
  misc_feature (2)..(2): n is a, c, g, or t
antggtacatgaaatgttcac

SEQ ID NO: 274422 - DNA, 21 bp, Artificial sequence
  SiRNA target sequence
  misc_feature (1)..(1): n is a, c, g, or t
ntggtacatgaaatgttcacc

SEQ ID NO: 274423 - DNA, 21 bp, Artificial sequence
  SiRNA target sequence
tggtacatgaaatgttcaccg

SEQ ID NO: 274424 - DNA, 21 bp, Artificial sequence
  SiRNA target sequence
ggtacatgaaatgttcaccgg

SEQ ID NO: 274425 - DNA, 21 bp, Artificial sequence
  SiRNA target sequence
gtacatgaaatgttcaccggt

SEQ ID NO: 274426 - DNA, 21 bp, Artificial sequence
  SiRNA target sequence
tacatgaaatgttcaccggta

SEQ ID NO: 274427 - DNA, 21 bp, Artificial sequence
  SiRNA target sequence
acatgaaatgttcaccggtaa

SEQ ID NO: 274428 - DNA, 21 bp, Artificial sequence
  SiRNA target sequence
catgaaatgttcaccggtaaa

SEQ ID NO: 274429 - DNA, 21 bp, Artificial sequence
  SiRNA target sequence
atgaaatgttcaccggtaaag

SEQ ID NO: 274430 - DNA, 21 bp, Artificial sequence
  SiRNA target sequence
tgaaatgttcaccggtaaagc

SEQ ID NO: 274431 - DNA, 21 bp, Artificial sequence
  SiRNA target sequence
gaaatgttcaccggtaaagca

SEQ ID NO: 274432 - DNA, 21 bp, Artificial sequence
  SiRNA target sequence
aaatgttcaccggtaaagcaa

SEQ ID NO: 274433 - DNA, 21 bp, Artificial sequence
  SiRNA target sequence
aatgttcaccggtaaagcaat

SEQ ID NO: 274434 - DNA, 21 bp, Artificial sequence
  SiRNA target sequence
atgttcaccggtaaagcaatc

SEQ ID NO: 274435 - DNA, 21 bp, Artificial sequence
  SiRNA target sequence
tgttcaccggtaaagcaatcg

SEQ ID NO: 274436 - DNA, 21 bp, Artificial sequence
  SiRNA target sequence
gttcaccggtaaagcaatcga

SEQ ID NO: 274437 - DNA, 21 bp, Artificial sequence
  SiRNA target sequence
ttcaccggtaaagcaatcgag

SEQ ID NO: 274438 - DNA, 21 bp, Artificial sequence
  SiRNA target sequence
tcaccggtaaagcaatcgaga

SEQ ID NO: 274439 - DNA, 21 bp, Artificial sequence
  SiRNA target sequence
caccggtaaagcaatcgagag

SEQ ID NO: 274440 - DNA, 21 bp, Artificial sequence
  SiRNA target sequence
accggtaaagcaatcgagagt

SEQ ID NO: 274441 - DNA, 21 bp, Artificial sequence
  SiRNA target sequence
ccggtaaagcaatcgagagtg

SEQ ID NO: 274442 - DNA, 21 bp, Artificial sequence
  SiRNA target sequence
cggtaaagcaatcgagagtga

SEQ ID NO: 274443 - DNA, 21 bp, Artificial sequence
  SiRNA target sequence
ggtaaagcaatcgagagtgaa

SEQ ID NO: 274444 - DNA, 21 bp, Artificial sequence
  SiRNA target sequence
gtaaagcaatcgagagtgaaa

SEQ ID NO: 274445 - DNA, 21 bp, Artificial sequence
  SiRNA target sequence
taaagcaatcgagagtgaaag

SEQ ID NO: 274446 - DNA, 21 bp, Artificial sequence
  SiRNA target sequence
aaagcaatcgagagtgaaaga

SEQ ID NO: 274447 - DNA, 21 bp, Artificial sequence
  SiRNA target sequence
aagcaatcgagagtgaaagag

SEQ ID NO: 274448 - DNA, 21 bp, Artificial sequence
  SiRNA target sequence
agcaatcgagagtgaaagaga

SEQ ID NO: 274449 - DNA, 21 bp, Artificial sequence
  SiRNA target sequence
gcaatcgagagtgaaagagag

SEQ ID NO: 274450 - DNA, 21 bp, Artificial sequence
  SiRNA target sequence
caatcgagagtgaaagagagc

SEQ ID NO: 274451 - DNA, 21 bp, Artificial sequence
  SiRNA target sequence
aatcgagagtgaaagagagcc

SEQ ID NO: 274452 - DNA, 21 bp, Artificial sequence
  SiRNA target sequence
atcgagagtgaaagagagccg

SEQ ID NO: 274453 - DNA, 21 bp, Artificial sequence
  SiRNA target sequence
tcgagagtgaaagagagccgt

SEQ ID NO: 274454 - DNA, 21 bp, Artificial sequence
  SiRNA target sequence
cgagagtgaaagagagccgta

SEQ ID NO: 274455 - DNA, 21 bp, Artificial sequence
  SiRNA target sequence
gagagtgaaagagagccgtat

SEQ ID NO: 274456 - DNA, 21 bp, Artificial sequence
  SiRNA target sequence
agagtgaaagagagccgtatg

SEQ ID NO: 274457 - DNA, 21 bp, Artificial sequence
  SiRNA target sequence
gagtgaaagagagccgtatga

SEQ ID NO: 274458 - DNA, 21 bp, Artificial sequence
  SiRNA target sequence
agtgaaagagagccgtatgat

SEQ ID NO: 274459 - DNA, 21 bp, Artificial sequence
  SiRNA target sequence
gtgaaagagagccgtatgatc

SEQ ID NO: 274460 - DNA, 21 bp, Artificial sequence
  SiRNA target sequence
tgaaagagagccgtatgatcg

SEQ ID NO: 274461 - DNA, 21 bp, Artificial sequence
  SiRNA target sequence
gaaagagagccgtatgatcgt

SEQ ID NO: 274462 - DNA, 21 bp, Artificial sequence
  SiRNA target sequence
aaagagagccgtatgatcgtg

SEQ ID NO: 274463 - DNA, 21 bp, Artificial sequence
  SiRNA target sequence
aagagagccgtatgatcgtgt

SEQ ID NO: 274464 - DNA, 21 bp, Artificial sequence
  SiRNA target sequence
agagagccgtatgatcgtgtg

SEQ ID NO: 274465 - DNA, 21 bp, Artificial sequence
  SiRNA target sequence
gagagccgtatgatcgtgtgt

SEQ ID NO: 274466 - DNA, 21 bp, Artificial sequence
  SiRNA target sequence
agagccgtatgatcgtgtgta

SEQ ID NO: 274467 - DNA, 21 bp, Artificial sequence
  SiRNA target sequence
gagccgtatgatcgtgtgtat

SEQ ID NO: 274468 - DNA, 21 bp, Artificial sequence
  SiRNA target sequence
agccgtatgatcgtgtgtatg

SEQ ID NO: 274469 - DNA, 21 bp, Artificial sequence
  SiRNA target sequence
gccgtatgatcgtgtgtatga

SEQ ID NO: 274470 - DNA, 21 bp, Artificial sequence
  SiRNA target sequence
ccgtatgatcgtgtgtatgaa

SEQ ID NO: 274471 - DNA, 21 bp, Artificial sequence
  SiRNA target sequence
cgtatgatcgtgtgtatgaac

SEQ ID NO: 274472 - DNA, 21 bp, Artificial sequence
  SiRNA target sequence
gtatgatcgtgtgtatgaact

SEQ ID NO: 274473 - DNA, 21 bp, Artificial sequence
  SiRNA target sequence
tatgatcgtgtgtatgaactt

SEQ ID NO: 274474 - DNA, 21 bp, Artificial sequence
  SiRNA target sequence
atgatcgtgtgtatgaacttc

SEQ ID NO: 274475 - DNA, 21 bp, Artificial sequence
  SiRNA target sequence
tgatcgtgtgtatgaacttcc

SEQ ID NO: 274476 - DNA, 21 bp, Artificial sequence
  SiRNA target sequence
gatcgtgtgtatgaacttccg

SEQ ID NO: 274477 - DNA, 21 bp, Artificial sequence
  SiRNA target sequence
atcgtgtgtatgaacttccgt

SEQ ID NO: 274478 - DNA, 21 bp, Artificial sequence
  SiRNA target sequence
tcgtgtgtatgaacttccgtt

SEQ ID NO: 274479 - DNA, 21 bp, Artificial sequence
  SiRNA target sequence
cgtgtgtatgaacttccgttg

SEQ ID NO: 274480 - DNA, 21 bp, Artificial sequence
  SiRNA target sequence
gtgtgtatgaacttccgttgc

SEQ ID NO: 274481 - DNA, 21 bp, Artificial sequence
  SiRNA target sequence
tgtgtatgaacttccgttgcg

SEQ ID NO: 274482 - DNA, 21 bp, Artificial sequence
  SiRNA target sequence
gtgtatgaacttccgttgcgt

SEQ ID NO: 274483 - DNA, 21 bp, Artificial sequence
  SiRNA target sequence
tgtatgaacttccgttgcgtg

SEQ ID NO: 274484 - DNA, 21 bp, Artificial sequence
  SiRNA target sequence
gtatgaacttccgttgcgtga

SEQ ID NO: 274485 - DNA, 21 bp, Artificial sequence
  SiRNA target sequence
tatgaacttccgttgcgtgaa

SEQ ID NO: 274486 - DNA, 21 bp, Artificial sequence
  SiRNA target sequence
atgaacttccgttgcgtgaat

SEQ ID NO: 274487 - DNA, 21 bp, Artificial sequence
  SiRNA target sequence
tgaacttccgttgcgtgaatt

SEQ ID NO: 274488 - DNA, 21 bp, Artificial sequence
  SiRNA target sequence
gaacttccgttgcgtgaatta

SEQ ID NO: 274489 - DNA, 21 bp, Artificial sequence
  SiRNA target sequence
aacttccgttgcgtgaattag

SEQ ID NO: 274490 - DNA, 21 bp, Artificial sequence
  SiRNA target sequence
acttccgttgcgtgaattaga

SEQ ID NO: 274491 - DNA, 21 bp, Artificial sequence
  SiRNA target sequence
cttccgttgcgtgaattagat

SEQ ID NO: 274492 - DNA, 21 bp, Artificial sequence
  SiRNA target sequence
ttccgttgcgtgaattagatg

SEQ ID NO: 274493 - DNA, 21 bp, Artificial sequence
  SiRNA target sequence
tccgttgcgtgaattagatga

SEQ ID NO: 274494 - DNA, 21 bp, Artificial sequence
  SiRNA target sequence
ccgttgcgtgaattagatgaa

SEQ ID NO: 274495 - DNA, 21 bp, Artificial sequence
  SiRNA target sequence
cgttgcgtgaattagatgaat

SEQ ID NO: 274496 - DNA, 21 bp, Artificial sequence
  SiRNA target sequence
gttgcgtgaattagatgaatc

SEQ ID NO: 274497 - DNA, 21 bp, Artificial sequence
  SiRNA target sequence
ttgcgtgaattagatgaatct

SEQ ID NO: 274498 - DNA, 21 bp, Artificial sequence
  SiRNA target sequence
tgcgtgaattagatgaatctg

SEQ ID NO: 274499 - DNA, 21 bp, Artificial sequence
  SiRNA target sequence
gcgtgaattagatgaatctga

SEQ ID NO: 274500 - DNA, 21 bp, Artificial sequence
  SiRNA target sequence
cgtgaattagatgaatctgat

SEQ ID NO: 274501 - DNA, 21 bp, Artificial sequence
  SiRNA target sequence
gtgaattagatgaatctgata

SEQ ID NO: 274502 - DNA, 21 bp, Artificial sequence
  SiRNA target sequence
tgaattagatgaatctgatat

SEQ ID NO: 274503 - DNA, 21 bp, Artificial sequence
  SiRNA target sequence
gaattagatgaatctgatatt

SEQ ID NO: 274504 - DNA, 21 bp, Artificial sequence
  SiRNA target sequence
aattagatgaatctgatattg

SEQ ID NO: 274505 - DNA, 21 bp, Artificial sequence
  SiRNA target sequence
attagatgaatctgatattgg

SEQ ID NO: 274506 - DNA, 21 bp, Artificial sequence
  SiRNA target sequence
ttagatgaatctgatattggt

SEQ ID NO: 274507 - DNA, 21 bp, Artificial sequence
  SiRNA target sequence
tagatgaatctgatattggtt

SEQ ID NO: 274508 - DNA, 21 bp, Artificial sequence
  SiRNA target sequence
agatgaatctgatattggttt

SEQ ID NO: 274509 - DNA, 21 bp, Artificial sequence
  SiRNA target sequence
gatgaatctgatattggttta

SEQ ID NO: 274510 - DNA, 21 bp, Artificial sequence
  SiRNA target sequence
atgaatctgatattggtttag

SEQ ID NO: 274511 - DNA, 21 bp, Artificial sequence
  SiRNA target sequence
tgaatctgatattggtttaga

SEQ ID NO: 274512 - DNA, 21 bp, Artificial sequence
  SiRNA target sequence
gaatctgatattggtttagat

SEQ ID NO: 274513 - DNA, 21 bp, Artificial sequence
  SiRNA target sequence
aatctgatattggtttagata

SEQ ID NO: 274514 - DNA, 21 bp, Artificial sequence
  SiRNA target sequence
atctgatattggtttagatac

SEQ ID NO: 274515 - DNA, 21 bp, Artificial sequence
  SiRNA target sequence
tctgatattggtttagatacc

SEQ ID NO: 274516 - DNA, 21 bp, Artificial sequence
  SiRNA target sequence
ctgatattggtttagataccg

SEQ ID NO: 274517 - DNA, 21 bp, Artificial sequence
  SiRNA target sequence
tgatattggtttagataccga

SEQ ID NO: 274518 - DNA, 21 bp, Artificial sequence
  SiRNA target sequence
gatattggtttagataccgat

SEQ ID NO: 274519 - DNA, 21 bp, Artificial sequence
  SiRNA target sequence
atattggtttagataccgatt

SEQ ID NO: 274520 - DNA, 21 bp, Artificial sequence
  SiRNA target sequence
tattggtttagataccgattt

SEQ ID NO: 274521 - DNA, 21 bp, Artificial sequence
  SiRNA target sequence
attggtttagataccgattta

SEQ ID NO: 274522 - DNA, 21 bp, Artificial sequence
  SiRNA target sequence
ttggtttagataccgatttat

SEQ ID NO: 274523 - DNA, 21 bp, Artificial sequence
  SiRNA target sequence
tggtttagataccgatttata

SEQ ID NO: 274524 - DNA, 21 bp, Artificial sequence
  SiRNA target sequence
ggtttagataccgatttatat

SEQ ID NO: 274525 - DNA, 21 bp, Artificial sequence
  SiRNA target sequence
gtttagataccgatttatatc

SEQ ID NO: 274526 - DNA, 21 bp, Artificial sequence
  SiRNA target sequence
tttagataccgatttatatcc

SEQ ID NO: 274527 - DNA, 21 bp, Artificial sequence
  SiRNA target sequence
ttagataccgatttatatccg

SEQ ID NO: 274528 - DNA, 21 bp, Artificial sequence
  SiRNA target sequence
tagataccgatttatatccga

SEQ ID NO: 274529 - DNA, 21 bp, Artificial sequence
  SiRNA target sequence
agataccgatttatatccgat

SEQ ID NO: 274530 - DNA, 21 bp, Artificial sequence
  SiRNA target sequence
gataccgatttatatccgatt

SEQ ID NO: 274531 - DNA, 21 bp, Artificial sequence
  SiRNA target sequence
ataccgatttatatccgattg

SEQ ID NO: 274532 - DNA, 21 bp, Artificial sequence
  SiRNA target sequence
taccgatttatatccgattgg

SEQ ID NO: 274533 - DNA, 21 bp, Artificial sequence
  SiRNA target sequence
accgatttatatccgattggt

SEQ ID NO: 274534 - DNA, 21 bp, Artificial sequence
  SiRNA target sequence
ccgatttatatccgattggta

SEQ ID NO: 274535 - DNA, 21 bp, Artificial sequence
  SiRNA target sequence
cgatttatatccgattggtag

SEQ ID NO: 274536 - DNA, 21 bp, Artificial sequence
  SiRNA target sequence
gatttatatccgattggtaga

SEQ ID NO: 274537 - DNA, 21 bp, Artificial sequence
  SiRNA target sequence
atttatatccgattggtagag

SEQ ID NO: 274538 - DNA, 21 bp, Artificial sequence
  SiRNA target sequence
tttatatccgattggtagagt

SEQ ID NO: 274539 - DNA, 21 bp, Artificial sequence
  SiRNA target sequence
ttatatccgattggtagagtg

SEQ ID NO: 274540 - DNA, 21 bp, Artificial sequence
  SiRNA target sequence
tatatccgattggtagagtgg

SEQ ID NO: 274541 - DNA, 21 bp, Artificial sequence
  SiRNA target sequence
atatccgattggtagagtgga

SEQ ID NO: 274542 - DNA, 21 bp, Artificial sequence
  SiRNA target sequence
tatccgattggtagagtggat

SEQ ID NO: 274543 - DNA, 21 bp, Artificial sequence
  SiRNA target sequence
atccgattggtagagtggatg

SEQ ID NO: 274544 - DNA, 21 bp, Artificial sequence
  SiRNA target sequence
tccgattggtagagtggatgc

SEQ ID NO: 274545 - DNA, 21 bp, Artificial sequence
  SiRNA target sequence
ccgattggtagagtggatgca

SEQ ID NO: 274546 - DNA, 21 bp, Artificial sequence
  SiRNA target sequence
cgattggtagagtggatgcaa

SEQ ID NO: 274547 - DNA, 21 bp, Artificial sequence
  SiRNA target sequence
gattggtagagtggatgcaaa

SEQ ID NO: 274548 - DNA, 21 bp, Artificial sequence
  SiRNA target sequence
attggtagagtggatgcaaag

SEQ ID NO: 274549 - DNA, 21 bp, Artificial sequence
  SiRNA target sequence
ttggtagagtggatgcaaagt

SEQ ID NO: 274550 - DNA, 21 bp, Artificial sequence
  SiRNA target sequence
tggtagagtggatgcaaagtt

SEQ ID NO: 274551 - DNA, 21 bp, Artificial sequence
  SiRNA target sequence
ggtagagtggatgcaaagtta

SEQ ID NO: 274552 - DNA, 21 bp, Artificial sequence
  SiRNA target sequence
gtagagtggatgcaaagttag

SEQ ID NO: 274553 - DNA, 21 bp, Artificial sequence
  SiRNA target sequence
tagagtggatgcaaagttagc

SEQ ID NO: 274554 - DNA, 21 bp, Artificial sequence
  SiRNA target sequence
agagtggatgcaaagttagct

SEQ ID NO: 274555 - DNA, 21 bp, Artificial sequence
  SiRNA target sequence
gagtggatgcaaagttagctc

SEQ ID NO: 274556 - DNA, 21 bp, Artificial sequence
  SiRNA target sequence
agtggatgcaaagttagctca

SEQ ID NO: 274557 - DNA, 21 bp, Artificial sequence
  SiRNA target sequence
gtggatgcaaagttagctcat

SEQ ID NO: 274558 - DNA, 21 bp, Artificial sequence
  SiRNA target sequence
tggatgcaaagttagctcatg

SEQ ID NO: 274559 - DNA, 21 bp, Artificial sequence
  SiRNA target sequence
ggatgcaaagttagctcatgc

SEQ ID NO: 274560 - DNA, 21 bp, Artificial sequence
  SiRNA target sequence
gatgcaaagttagctcatgct

SEQ ID NO: 274561 - DNA, 21 bp, Artificial sequence
  SiRNA target sequence
atgcaaagttagctcatgctc

SEQ ID NO: 274562 - DNA, 21 bp, Artificial sequence
  SiRNA target sequence
tgcaaagttagctcatgctca

SEQ ID NO: 274563 - DNA, 21 bp, Artificial sequence
  SiRNA target sequence
gcaaagttagctcatgctcaa

SEQ ID NO: 274564 - DNA, 21 bp, Artificial sequence
  SiRNA target sequence
caaagttagctcatgctcaaa

SEQ ID NO: 274565 - DNA, 21 bp, Artificial sequence
  SiRNA target sequence
aaagttagctcatgctcaaag

SEQ ID NO: 274566 - DNA, 21 bp, Artificial sequence
  SiRNA target sequence
aagttagctcatgctcaaagc

SEQ ID NO: 274567 - DNA, 21 bp, Artificial sequence
  SiRNA target sequence
agttagctcatgctcaaagcc

SEQ ID NO: 274568 - DNA, 21 bp, Artificial sequence
  SiRNA target sequence
gttagctcatgctcaaagccc

SEQ ID NO: 274569 - DNA, 21 bp, Artificial sequence
  SiRNA target sequence
ttagctcatgctcaaagccct

SEQ ID NO: 274570 - DNA, 21 bp, Artificial sequence
  SiRNA target sequence
tagctcatgctcaaagccctt

SEQ ID NO: 274571 - DNA, 21 bp, Artificial sequence
  SiRNA target sequence
agctcatgctcaaagcccttc

SEQ ID NO: 274572 - DNA, 21 bp, Artificial sequence
  SiRNA target sequence
gctcatgctcaaagcccttct

SEQ ID NO: 274573 - DNA, 21 bp, Artificial sequence
  SiRNA target sequence
ctcatgctcaaagcccttcta

SEQ ID NO: 274574 - DNA, 21 bp, Artificial sequence
  SiRNA target sequence
tcatgctcaaagcccttctac

SEQ ID NO: 274575 - DNA, 21 bp, Artificial sequence
  SiRNA target sequence
catgctcaaagcccttctact

SEQ ID NO: 274576 - DNA, 21 bp, Artificial sequence
  SiRNA target sequence
atgctcaaagcccttctactg

SEQ ID NO: 274577 - DNA, 21 bp, Artificial sequence
  SiRNA target sequence
tgctcaaagcccttctactgg

SEQ ID NO: 274578 - DNA, 21 bp, Artificial sequence
  SiRNA target sequence
gctcaaagcccttctactggg

SEQ ID NO: 274579 - DNA, 21 bp, Artificial sequence
  SiRNA target sequence
ctcaaagcccttctactggga

SEQ ID NO: 274580 - DNA, 21 bp, Artificial sequence
  SiRNA target sequence
tcaaagcccttctactgggat

SEQ ID NO: 274581 - DNA, 21 bp, Artificial sequence
  SiRNA target sequence
caaagcccttctactgggatc

SEQ ID NO: 274582 - DNA, 21 bp, Artificial sequence
  SiRNA target sequence
aaagcccttctactgggatca

SEQ ID NO: 274583 - DNA, 21 bp, Artificial sequence
  SiRNA target sequence
aagcccttctactgggatcaa

SEQ ID NO: 274584 - DNA, 21 bp, Artificial sequence
  SiRNA target sequence
agcccttctactgggatcaaa

SEQ ID NO: 274585 - DNA, 21 bp, Artificial sequence
  SiRNA target sequence
gcccttctactgggatcaaaa

SEQ ID NO: 274586 - DNA, 21 bp, Artificial sequence
  SiRNA target sequence
cccttctactgggatcaaaaa

SEQ ID NO: 274587 - DNA, 21 bp, Artificial sequence
  SiRNA target sequence
ccttctactgggatcaaaaag

SEQ ID NO: 274588 - DNA, 21 bp, Artificial sequence
  SiRNA target sequence
cttctactgggatcaaaaaga

SEQ ID NO: 274589 - DNA, 21 bp, Artificial sequence
  SiRNA target sequence
ttctactgggatcaaaaagac

SEQ ID NO: 274590 - DNA, 21 bp, Artificial sequence
  SiRNA target sequence
tctactgggatcaaaaagacg

SEQ ID NO: 274591 - DNA, 21 bp, Artificial sequence
  SiRNA target sequence
ctactgggatcaaaaagacgc

SEQ ID NO: 274592 - DNA, 21 bp, Artificial sequence
  SiRNA target sequence
tactgggatcaaaaagacgct

SEQ ID NO: 274593 - DNA, 21 bp, Artificial sequence
  SiRNA target sequence
actgggatcaaaaagacgctt

SEQ ID NO: 274594 - DNA, 21 bp, Artificial sequence
  SiRNA target sequence
ctgggatcaaaaagacgctta

SEQ ID NO: 274595 - DNA, 21 bp, Artificial sequence
  SiRNA target sequence
tgggatcaaaaagacgcttat

SEQ ID NO: 274596 - DNA, 21 bp, Artificial sequence
  SiRNA target sequence
gggatcaaaaagacgcttatc

SEQ ID NO: 274597 - DNA, 21 bp, Artificial sequence
  SiRNA target sequence
ggatcaaaaagacgcttatcc

SEQ ID NO: 274598 - DNA, 21 bp, Artificial sequence
  SiRNA target sequence
gatcaaaaagacgcttatcca

SEQ ID NO: 274599 - DNA, 21 bp, Artificial sequence
  SiRNA target sequence
atcaaaaagacgcttatccat

SEQ ID NO: 274600 - DNA, 21 bp, Artificial sequence
  SiRNA target sequence
tcaaaaagacgcttatccatg

SEQ ID NO: 274601 - DNA, 21 bp, Artificial sequence
  SiRNA target sequence
caaaaagacgcttatccatgg

SEQ ID NO: 274602 - DNA, 21 bp, Artificial sequence
  SiRNA target sequence
aaaaagacgcttatccatgga

SEQ ID NO: 274603 - DNA, 21 bp, Artificial sequence
  SiRNA target sequence
aaaagacgcttatccatggaa

SEQ ID NO: 274604 - DNA, 21 bp, Artificial sequence
  SiRNA target sequence
aaagacgcttatccatggaac

SEQ ID NO: 274605 - DNA, 21 bp, Artificial sequence
  SiRNA target sequence
aagacgcttatccatggaaca

SEQ ID NO: 274606 - DNA, 21 bp, Artificial sequence
  SiRNA target sequence
agacgcttatccatggaacat

SEQ ID NO: 274607 - DNA, 21 bp, Artificial sequence
  SiRNA target sequence
gacgcttatccatggaacatt

SEQ ID NO: 274608 - DNA, 21 bp, Artificial sequence
  SiRNA target sequence
acgcttatccatggaacattt

SEQ ID NO: 274609 - DNA, 21 bp, Artificial sequence
  SiRNA target sequence
cgcttatccatggaacatttg

SEQ ID NO: 274610 - DNA, 21 bp, Artificial sequence
  SiRNA target sequence
gcttatccatggaacatttga

SEQ ID NO: 274611 - DNA, 21 bp, Artificial sequence
  SiRNA target sequence
cttatccatggaacatttgat

SEQ ID NO: 274612 - DNA, 21 bp, Artificial sequence
  SiRNA target sequence
ttatccatggaacatttgatg

SEQ ID NO: 274613 - DNA, 21 bp, Artificial sequence
  SiRNA target sequence
tatccatggaacatttgatgt

SEQ ID NO: 274614 - DNA, 21 bp, Artificial sequence
  SiRNA target sequence
atccatggaacatttgatgta

SEQ ID NO: 274615 - DNA, 21 bp, Artificial sequence
  SiRNA target sequence
tccatggaacatttgatgtaa

SEQ ID NO: 274616 - DNA, 21 bp, Artificial sequence
  SiRNA target sequence
ccatggaacatttgatgtaag

SEQ ID NO: 274617 - DNA, 21 bp, Artificial sequence
  SiRNA target sequence
catggaacatttgatgtaagg

SEQ ID NO: 274618 - DNA, 21 bp, Artificial sequence
  SiRNA target sequence
atggaacatttgatgtaagga

SEQ ID NO: 274619 - DNA, 21 bp, Artificial sequence
  SiRNA target sequence
tggaacatttgatgtaaggac

SEQ ID NO: 274620 - DNA, 21 bp, Artificial sequence
  SiRNA target sequence
ggaacatttgatgtaaggact

SEQ ID NO: 274621 - DNA, 21 bp, Artificial sequence
  SiRNA target sequence
gaacatttgatgtaaggactg

SEQ ID NO: 274622 - DNA, 21 bp, Artificial sequence
  SiRNA target sequence
aacatttgatgtaaggactga

SEQ ID NO: 274623 - DNA, 21 bp, Artificial sequence
  SiRNA target sequence
acatttgatgtaaggactgaa

SEQ ID NO: 274624 - DNA, 21 bp, Artificial sequence
  SiRNA target sequence
catttgatgtaaggactgaac

SEQ ID NO: 274625 - DNA, 21 bp, Artificial sequence
  SiRNA target sequence
atttgatgtaaggactgaacc

SEQ ID NO: 274626 - DNA, 21 bp, Artificial sequence
  SiRNA target sequence
tttgatgtaaggactgaacca

SEQ ID NO: 274627 - DNA, 21 bp, Artificial sequence
  SiRNA target sequence
ttgatgtaaggactgaaccaa

SEQ ID NO: 274628 - DNA, 21 bp, Artificial sequence
  SiRNA target sequence
tgatgtaaggactgaaccaaa

SEQ ID NO: 274629 - DNA, 21 bp, Artificial sequence
  SiRNA target sequence
gatgtaaggactgaaccaaat

SEQ ID NO: 274630 - DNA, 21 bp, Artificial sequence
  SiRNA target sequence
atgtaaggactgaaccaaatc

SEQ ID NO: 274631 - DNA, 21 bp, Artificial sequence
  SiRNA target sequence
tgtaaggactgaaccaaatcc

SEQ ID NO: 274632 - DNA, 21 bp, Artificial sequence
  SiRNA target sequence
gtaaggactgaaccaaatccg

SEQ ID NO: 274633 - DNA, 21 bp, Artificial sequence
  SiRNA target sequence
taaggactgaaccaaatccga

SEQ ID NO: 274634 - DNA, 21 bp, Artificial sequence
  SiRNA target sequence
aaggactgaaccaaatccgat

SEQ ID NO: 274635 - DNA, 21 bp, Artificial sequence
  SiRNA target sequence
aggactgaaccaaatccgatg

SEQ ID NO: 274636 - DNA, 21 bp, Artificial sequence
  SiRNA target sequence
ggactgaaccaaatccgatgt

SEQ ID NO: 274637 - DNA, 21 bp, Artificial sequence
  SiRNA target sequence
gactgaaccaaatccgatgtc

SEQ ID NO: 274638 - DNA, 21 bp, Artificial sequence
  SiRNA target sequence
actgaaccaaatccgatgtcg

SEQ ID NO: 274639 - DNA, 21 bp, Artificial sequence
  SiRNA target sequence
ctgaaccaaatccgatgtcgt

SEQ ID NO: 274640 - DNA, 21 bp, Artificial sequence
  SiRNA target sequence
tgaaccaaatccgatgtcgtc

SEQ ID NO: 274641 - DNA, 21 bp, Artificial sequence
  SiRNA target sequence
gaaccaaatccgatgtcgtca

SEQ ID NO: 274642 - DNA, 21 bp, Artificial sequence
  SiRNA target sequence
aaccaaatccgatgtcgtcac

SEQ ID NO: 274643 - DNA, 21 bp, Artificial sequence
  SiRNA target sequence
accaaatccgatgtcgtcacg

SEQ ID NO: 274644 - DNA, 21 bp, Artificial sequence
  SiRNA target sequence
ccaaatccgatgtcgtcacgt

SEQ ID NO: 274645 - DNA, 21 bp, Artificial sequence
  SiRNA target sequence
caaatccgatgtcgtcacgtg

SEQ ID NO: 274646 - DNA, 21 bp, Artificial sequence
  SiRNA target sequence
aaatccgatgtcgtcacgtga

SEQ ID NO: 274647 - DNA, 21 bp, Artificial sequence
  SiRNA target sequence
aatccgatgtcgtcacgtgat

SEQ ID NO: 274648 - DNA, 21 bp, Artificial sequence
  SiRNA target sequence
atccgatgtcgtcacgtgatc

SEQ ID NO: 274649 - DNA, 21 bp, Artificial sequence
  SiRNA target sequence
tccgatgtcgtcacgtgatcc

SEQ ID NO: 274650 - DNA, 21 bp, Artificial sequence
  SiRNA target sequence
ccgatgtcgtcacgtgatcca

SEQ ID NO: 274651 - DNA, 21 bp, Artificial sequence
  SiRNA target sequence
cgatgtcgtcacgtgatccaa

SEQ ID NO: 274652 - DNA, 21 bp, Artificial sequence
  SiRNA target sequence
gatgtcgtcacgtgatccaag

SEQ ID NO: 274653 - DNA, 21 bp, Artificial sequence
  SiRNA target sequence
atgtcgtcacgtgatccaaga

SEQ ID NO: 274654 - DNA, 21 bp, Artificial sequence
  SiRNA target sequence
tgtcgtcacgtgatccaagaa

SEQ ID NO: 274655 - DNA, 21 bp, Artificial sequence
  SiRNA target sequence
gtcgtcacgtgatccaagaat

SEQ ID NO: 274656 - DNA, 21 bp, Artificial sequence
  SiRNA target sequence
tcgtcacgtgatccaagaata

SEQ ID NO: 274657 - DNA, 21 bp, Artificial sequence
  SiRNA target sequence
cgtcacgtgatccaagaatag

SEQ ID NO: 274658 - DNA, 21 bp, Artificial sequence
  SiRNA target sequence
gtcacgtgatccaagaatagc

SEQ ID NO: 274659 - DNA, 21 bp, Artificial sequence
  SiRNA target sequence
tcacgtgatccaagaatagcg

SEQ ID NO: 274660 - DNA, 21 bp, Artificial sequence
  SiRNA target sequence
cacgtgatccaagaatagcgc

SEQ ID NO: 274661 - DNA, 21 bp, Artificial sequence
  SiRNA target sequence
acgtgatccaagaatagcgcc

SEQ ID NO: 274662 - DNA, 21 bp, Artificial sequence
  SiRNA target sequence
cgtgatccaagaatagcgccg

SEQ ID NO: 274663 - DNA, 21 bp, Artificial sequence
  SiRNA target sequence
gtgatccaagaatagcgccgc

SEQ ID NO: 274664 - DNA, 21 bp, Artificial sequence
  SiRNA target sequence
tgatccaagaatagcgccgca

SEQ ID NO: 274665 - DNA, 21 bp, Artificial sequence
  SiRNA target sequence
gatccaagaatagcgccgcat

SEQ ID NO: 274666 - DNA, 21 bp, Artificial sequence
  SiRNA target sequence
atccaagaatagcgccgcatg

SEQ ID NO: 274667 - DNA, 21 bp, Artificial sequence
  SiRNA target sequence
tccaagaatagcgccgcatga

SEQ ID NO: 274668 - DNA, 21 bp, Artificial sequence
  SiRNA target sequence
ccaagaatagcgccgcatgat

SEQ ID NO: 274669 - DNA, 21 bp, Artificial sequence
  SiRNA target sequence
caagaatagcgccgcatgatc

SEQ ID NO: 274670 - DNA, 21 bp, Artificial sequence
  SiRNA target sequence
aagaatagcgccgcatgatcc

SEQ ID NO: 274671 - DNA, 21 bp, Artificial sequence
  SiRNA target sequence
agaatagcgccgcatgatcct

SEQ ID NO: 274672 - DNA, 21 bp, Artificial sequence
  SiRNA target sequence
gaatagcgccgcatgatcctt

SEQ ID NO: 274673 - DNA, 21 bp, Artificial sequence
  SiRNA target sequence
aatagcgccgcatgatccttt

SEQ ID NO: 274674 - DNA, 21 bp, Artificial sequence
  SiRNA target sequence
atagcgccgcatgatcctttg

SEQ ID NO: 274675 - DNA, 21 bp, Artificial sequence
  SiRNA target sequence
tagcgccgcatgatcctttga

SEQ ID NO: 274676 - DNA, 21 bp, Artificial sequence
  SiRNA target sequence
agcgccgcatgatcctttgaa

SEQ ID NO: 274677 - DNA, 21 bp, Artificial sequence
  SiRNA target sequence
gcgccgcatgatcctttgaag

SEQ ID NO: 274678 - DNA, 21 bp, Artificial sequence
  SiRNA target sequence
cgccgcatgatcctttgaagt

SEQ ID NO: 274679 - DNA, 21 bp, Artificial sequence
  SiRNA target sequence
gccgcatgatcctttgaagtt

SEQ ID NO: 274680 - DNA, 21 bp, Artificial sequence
  SiRNA target sequence
ccgcatgatcctttgaagtta

SEQ ID NO: 274681 - DNA, 21 bp, Artificial sequence
  SiRNA target sequence
cgcatgatcctttgaagttag

SEQ ID NO: 274682 - DNA, 21 bp, Artificial sequence
  SiRNA target sequence
gcatgatcctttgaagttagg

SEQ ID NO: 274683 - DNA, 21 bp, Artificial sequence
  SiRNA target sequence
catgatcctttgaagttaggg

SEQ ID NO: 274684 - DNA, 21 bp, Artificial sequence
  SiRNA target sequence
atgatcctttgaagttagggt

SEQ ID NO: 274685 - DNA, 21 bp, Artificial sequence
  SiRNA target sequence
tgatcctttgaagttagggtg

SEQ ID NO: 274686 - DNA, 21 bp, Artificial sequence
  SiRNA target sequence
gatcctttgaagttagggtgt

SEQ ID NO: 274687 - DNA, 21 bp, Artificial sequence
  SiRNA target sequence
atcctttgaagttagggtgtg

SEQ ID NO: 274688 - DNA, 21 bp, Artificial sequence
  SiRNA target sequence
tcctttgaagttagggtgtga

SEQ ID NO: 274689 - DNA, 21 bp, Artificial sequence
  SiRNA target sequence
cctttgaagttagggtgtgaa

SEQ ID NO: 274690 - DNA, 21 bp, Artificial sequence
  SiRNA target sequence
ctttgaagttagggtgtgaaa

SEQ ID NO: 274691 - DNA, 21 bp, Artificial sequence
  SiRNA target sequence
tttgaagttagggtgtgaaaa

SEQ ID NO: 274692 - DNA, 21 bp, Artificial sequence
  SiRNA target sequence
ttgaagttagggtgtgaaaag

SEQ ID NO: 274693 - DNA, 21 bp, Artificial sequence
  SiRNA target sequence
tgaagttagggtgtgaaaagc

SEQ ID NO: 274694 - DNA, 21 bp, Artificial sequence
  SiRNA target sequence
gaagttagggtgtgaaaagca

SEQ ID NO: 274695 - DNA, 21 bp, Artificial sequence
  SiRNA target sequence
aagttagggtgtgaaaagcat

SEQ ID NO: 274696 - DNA, 21 bp, Artificial sequence
  SiRNA target sequence
agttagggtgtgaaaagcatg

SEQ ID NO: 274697 - DNA, 21 bp, Artificial sequence
  SiRNA target sequence
gttagggtgtgaaaagcatgg

SEQ ID NO: 274698 - DNA, 21 bp, Artificial sequence
  SiRNA target sequence
ttagggtgtgaaaagcatggt

SEQ ID NO: 274699 - DNA, 21 bp, Artificial sequence
  SiRNA target sequence
tagggtgtgaaaagcatggta

SEQ ID NO: 274700 - DNA, 21 bp, Artificial sequence
  SiRNA target sequence
agggtgtgaaaagcatggtat

SEQ ID NO: 274701 - DNA, 21 bp, Artificial sequence
  SiRNA target sequence
gggtgtgaaaagcatggtatg

SEQ ID NO: 274702 - DNA, 21 bp, Artificial sequence
  SiRNA target sequence
ggtgtgaaaagcatggtatgc

SEQ ID NO: 274703 - DNA, 21 bp, Artificial sequence
  SiRNA target sequence
gtgtgaaaagcatggtatgcc

SEQ ID NO: 274704 - DNA, 21 bp, Artificial sequence
  SiRNA target sequence
tgtgaaaagcatggtatgcct

SEQ ID NO: 274705 - DNA, 21 bp, Artificial sequence
  SiRNA target sequence
gtgaaaagcatggtatgcctt

SEQ ID NO: 274706 - DNA, 21 bp, Artificial sequence
  SiRNA target sequence
tgaaaagcatggtatgccttg

SEQ ID NO: 274707 - DNA, 21 bp, Artificial sequence
  SiRNA target sequence
gaaaagcatggtatgccttgt

SEQ ID NO: 274708 - DNA, 21 bp, Artificial sequence
  SiRNA target sequence
aaaagcatggtatgccttgtt

SEQ ID NO: 274709 - DNA, 21 bp, Artificial sequence
  SiRNA target sequence
aaagcatggtatgccttgttc

SEQ ID NO: 274710 - DNA, 21 bp, Artificial sequence
  SiRNA target sequence
aagcatggtatgccttgttca

SEQ ID NO: 274711 - DNA, 21 bp, Artificial sequence
  SiRNA target sequence
agcatggtatgccttgttcac

SEQ ID NO: 274712 - DNA, 21 bp, Artificial sequence
  SiRNA target sequence
gcatggtatgccttgttcacc

SEQ ID NO: 274713 - DNA, 21 bp, Artificial sequence
  SiRNA target sequence
catggtatgccttgttcaccg

SEQ ID NO: 274714 - DNA, 21 bp, Artificial sequence
  SiRNA target sequence
atggtatgccttgttcaccgt

SEQ ID NO: 274715 - DNA, 21 bp, Artificial sequence
  SiRNA target sequence
tggtatgccttgttcaccgtt

SEQ ID NO: 274716 - DNA, 21 bp, Artificial sequence
  SiRNA target sequence
ggtatgccttgttcaccgttt

SEQ ID NO: 274717 - DNA, 21 bp, Artificial sequence
  SiRNA target sequence
gtatgccttgttcaccgttta

SEQ ID NO: 274718 - DNA, 21 bp, Artificial sequence
  SiRNA target sequence
tatgccttgttcaccgtttaa

SEQ ID NO: 274719 - DNA, 21 bp, Artificial sequence
  SiRNA target sequence
atgccttgttcaccgtttaat

SEQ ID NO: 274720 - DNA, 21 bp, Artificial sequence
  SiRNA target sequence
tgccttgttcaccgtttaata

SEQ ID NO: 274721 - DNA, 21 bp, Artificial sequence
  SiRNA target sequence
gccttgttcaccgtttaatag

SEQ ID NO: 274722 - DNA, 21 bp, Artificial sequence
  SiRNA target sequence
ccttgttcaccgtttaatagg

SEQ ID NO: 274723 - DNA, 21 bp, Artificial sequence
  SiRNA target sequence
cttgttcaccgtttaatagga

SEQ ID NO: 274724 - DNA, 21 bp, Artificial sequence
  SiRNA target sequence
ttgttcaccgtttaataggaa

SEQ ID NO: 274725 - DNA, 21 bp, Artificial sequence
  SiRNA target sequence
tgttcaccgtttaataggaaa

SEQ ID NO: 274726 - DNA, 21 bp, Artificial sequence
  SiRNA target sequence
gttcaccgtttaataggaaac

SEQ ID NO: 274727 - DNA, 21 bp, Artificial sequence
  SiRNA target sequence
ttcaccgtttaataggaaaca

SEQ ID NO: 274728 - DNA, 21 bp, Artificial sequence
  SiRNA target sequence
tcaccgtttaataggaaacat

SEQ ID NO: 274729 - DNA, 21 bp, Artificial sequence
  SiRNA target sequence
caccgtttaataggaaacatc

SEQ ID NO: 274730 - DNA, 21 bp, Artificial sequence
  SiRNA target sequence
accgtttaataggaaacatct

SEQ ID NO: 274731 - DNA, 21 bp, Artificial sequence
  SiRNA target sequence
ccgtttaataggaaacatctg

SEQ ID NO: 274732 - DNA, 21 bp, Artificial sequence
  SiRNA target sequence
cgtttaataggaaacatctgg

SEQ ID NO: 274733 - DNA, 21 bp, Artificial sequence
  SiRNA target sequence
gtttaataggaaacatctgga

SEQ ID NO: 274734 - DNA, 21 bp, Artificial sequence
  SiRNA target sequence
tttaataggaaacatctggaa

SEQ ID NO: 274735 - DNA, 21 bp, Artificial sequence
  SiRNA target sequence
ttaataggaaacatctggaat

SEQ ID NO: 274736 - DNA, 21 bp, Artificial sequence
  SiRNA target sequence
taataggaaacatctggaatt

SEQ ID NO: 274737 - DNA, 21 bp, Artificial sequence
  SiRNA target sequence
aataggaaacatctggaatta

SEQ ID NO: 274738 - DNA, 21 bp, Artificial sequence
  SiRNA target sequence
ataggaaacatctggaattag

SEQ ID NO: 274739 - DNA, 21 bp, Artificial sequence
  SiRNA target sequence
taggaaacatctggaattagc

SEQ ID NO: 274740 - DNA, 21 bp, Artificial sequence
  SiRNA target sequence
aggaaacatctggaattagcg

SEQ ID NO: 274741 - DNA, 21 bp, Artificial sequence
  SiRNA target sequence
ggaaacatctggaattagcga

SEQ ID NO: 274742 - DNA, 21 bp, Artificial sequence
  SiRNA target sequence
gaaacatctggaattagcgac

SEQ ID NO: 274743 - DNA, 21 bp, Artificial sequence
  SiRNA target sequence
aaacatctggaattagcgaca

SEQ ID NO: 274744 - DNA, 21 bp, Artificial sequence
  SiRNA target sequence
aacatctggaattagcgacaa

SEQ ID NO: 274745 - DNA, 21 bp, Artificial sequence
  SiRNA target sequence
acatctggaattagcgacaaa

SEQ ID NO: 274746 - DNA, 21 bp, Artificial sequence
  SiRNA target sequence
catctggaattagcgacaaat

SEQ ID NO: 274747 - DNA, 21 bp, Artificial sequence
  SiRNA target sequence
atctggaattagcgacaaatc

SEQ ID NO: 274748 - DNA, 21 bp, Artificial sequence
  SiRNA target sequence
tctggaattagcgacaaatca

SEQ ID NO: 274749 - DNA, 21 bp, Artificial sequence
  SiRNA target sequence
ctggaattagcgacaaatcat

SEQ ID NO: 274750 - DNA, 21 bp, Artificial sequence
  SiRNA target sequence
tggaattagcgacaaatcatt

SEQ ID NO: 274751 - DNA, 21 bp, Artificial sequence
  SiRNA target sequence
ggaattagcgacaaatcattt

SEQ ID NO: 274752 - DNA, 21 bp, Artificial sequence
  SiRNA target sequence
gaattagcgacaaatcatttg

SEQ ID NO: 274753 - DNA, 21 bp, Artificial sequence
  SiRNA target sequence
aattagcgacaaatcatttga

SEQ ID NO: 274754 - DNA, 21 bp, Artificial sequence
  SiRNA target sequence
attagcgacaaatcatttgaa

SEQ ID NO: 274755 - DNA, 21 bp, Artificial sequence
  SiRNA target sequence
ttagcgacaaatcatttgaaa

SEQ ID NO: 274756 - DNA, 21 bp, Artificial sequence
  SiRNA target sequence
tagcgacaaatcatttgaaag

SEQ ID NO: 274757 - DNA, 21 bp, Artificial sequence
  SiRNA target sequence
agcgacaaatcatttgaaaga

SEQ ID NO: 274758 - DNA, 21 bp, Artificial sequence
  SiRNA target sequence
gcgacaaatcatttgaaagaa

SEQ ID NO: 274759 - DNA, 21 bp, Artificial sequence
  SiRNA target sequence
cgacaaatcatttgaaagaaa

SEQ ID NO: 274760 - DNA, 21 bp, Artificial sequence
  SiRNA target sequence
gacaaatcatttgaaagaaaa

SEQ ID NO: 274761 - DNA, 21 bp, Artificial sequence
  SiRNA target sequence
acaaatcatttgaaagaaaaa

SEQ ID NO: 274762 - DNA, 21 bp, Artificial sequence
  SiRNA target sequence
caaatcatttgaaagaaaaat

SEQ ID NO: 274763 - DNA, 21 bp, Artificial sequence
  SiRNA target sequence
aaatcatttgaaagaaaaatt

SEQ ID NO: 274764 - DNA, 21 bp, Artificial sequence
  SiRNA target sequence
aatcatttgaaagaaaaatta

SEQ ID NO: 274765 - DNA, 21 bp, Artificial sequence
  SiRNA target sequence
atcatttgaaagaaaaattag

SEQ ID NO: 274766 - DNA, 21 bp, Artificial sequence
  SiRNA target sequence
tcatttgaaagaaaaattagt

SEQ ID NO: 274767 - DNA, 21 bp, Artificial sequence
  SiRNA target sequence
catttgaaagaaaaattagtt

SEQ ID NO: 274768 - DNA, 21 bp, Artificial sequence
  SiRNA target sequence
atttgaaagaaaaattagttt

SEQ ID NO: 274769 - DNA, 21 bp, Artificial sequence
  SiRNA target sequence
tttgaaagaaaaattagtttc

SEQ ID NO: 274770 - DNA, 21 bp, Artificial sequence
  SiRNA target sequence
ttgaaagaaaaattagtttca

SEQ ID NO: 274771 - DNA, 21 bp, Artificial sequence
  SiRNA target sequence
tgaaagaaaaattagtttcag

SEQ ID NO: 274772 - DNA, 21 bp, Artificial sequence
  SiRNA target sequence
gaaagaaaaattagtttcagt

SEQ ID NO: 274773 - DNA, 21 bp, Artificial sequence
  SiRNA target sequence
aaagaaaaattagtttcagta

SEQ ID NO: 274774 - DNA, 21 bp, Artificial sequence
  SiRNA target sequence
aagaaaaattagtttcagtag

SEQ ID NO: 274775 - DNA, 21 bp, Artificial sequence
  SiRNA target sequence
agaaaaattagtttcagtagt

SEQ ID NO: 274776 - DNA, 21 bp, Artificial sequence
  SiRNA target sequence
gaaaaattagtttcagtagtt

SEQ ID NO: 274777 - DNA, 21 bp, Artificial sequence
  SiRNA target sequence
aaaaattagtttcagtagtta

SEQ ID NO: 274778 - DNA, 21 bp, Artificial sequence
  SiRNA target sequence
aaaattagtttcagtagttaa

SEQ ID NO: 274779 - DNA, 21 bp, Artificial sequence
  SiRNA target sequence
aaattagtttcagtagttaaa

SEQ ID NO: 274780 - DNA, 21 bp, Artificial sequence
  SiRNA target sequence
aattagtttcagtagttaaac

SEQ ID NO: 274781 - DNA, 21 bp, Artificial sequence
  SiRNA target sequence
attagtttcagtagttaaacc

SEQ ID NO: 274782 - DNA, 21 bp, Artificial sequence
  SiRNA target sequence
ttagtttcagtagttaaacca

SEQ ID NO: 274783 - DNA, 21 bp, Artificial sequence
  SiRNA target sequence
tagtttcagtagttaaaccaa

SEQ ID NO: 274784 - DNA, 21 bp, Artificial sequence
  SiRNA target sequence
agtttcagtagttaaaccaat

SEQ ID NO: 274785 - DNA, 21 bp, Artificial sequence
  SiRNA target sequence
gtttcagtagttaaaccaata

SEQ ID NO: 274786 - DNA, 21 bp, Artificial sequence
  SiRNA target sequence
tttcagtagttaaaccaataa

SEQ ID NO: 274787 - DNA, 21 bp, Artificial sequence
  SiRNA target sequence
ttcagtagttaaaccaataaa

SEQ ID NO: 274788 - DNA, 21 bp, Artificial sequence
  SiRNA target sequence
tcagtagttaaaccaataaat

SEQ ID NO: 274789 - DNA, 21 bp, Artificial sequence
  SiRNA target sequence
cagtagttaaaccaataaatg

SEQ ID NO: 274790 - DNA, 21 bp, Artificial sequence
  SiRNA target sequence
agtagttaaaccaataaatgg

SEQ ID NO: 274791 - DNA, 21 bp, Artificial sequence
  SiRNA target sequence
gtagttaaaccaataaatggt

SEQ ID NO: 274792 - DNA, 21 bp, Artificial sequence
  SiRNA target sequence
tagttaaaccaataaatggtt

SEQ ID NO: 274793 - DNA, 21 bp, Artificial sequence
  SiRNA target sequence
agttaaaccaataaatggttg

SEQ ID NO: 274794 - DNA, 21 bp, Artificial sequence
  SiRNA target sequence
gttaaaccaataaatggttgc

SEQ ID NO: 274795 - DNA, 21 bp, Artificial sequence
  SiRNA target sequence
ttaaaccaataaatggttgca

SEQ ID NO: 274796 - DNA, 21 bp, Artificial sequence
  SiRNA target sequence
taaaccaataaatggttgcaa

SEQ ID NO: 274797 - DNA, 21 bp, Artificial sequence
  SiRNA target sequence
aaaccaataaatggttgcaag

SEQ ID NO: 274798 - DNA, 21 bp, Artificial sequence
  SiRNA target sequence
aaccaataaatggttgcaaga

SEQ ID NO: 274799 - DNA, 21 bp, Artificial sequence
  SiRNA target sequence
accaataaatggttgcaagat

SEQ ID NO: 274800 - DNA, 21 bp, Artificial sequence
  SiRNA target sequence
ccaataaatggttgcaagatt

SEQ ID NO: 274801 - DNA, 21 bp, Artificial sequence
  SiRNA target sequence
caataaatggttgcaagatta

SEQ ID NO: 274802 - DNA, 21 bp, Artificial sequence
  SiRNA target sequence
aataaatggttgcaagattag

SEQ ID NO: 274803 - DNA, 21 bp, Artificial sequence
  SiRNA target sequence
ataaatggttgcaagattaga

SEQ ID NO: 274804 - DNA, 21 bp, Artificial sequence
  SiRNA target sequence
taaatggttgcaagattagaa

SEQ ID NO: 274805 - DNA, 21 bp, Artificial sequence
  SiRNA target sequence
aaatggttgcaagattagaag

SEQ ID NO: 274806 - DNA, 21 bp, Artificial sequence
  SiRNA target sequence
aatggttgcaagattagaagt

SEQ ID NO: 274807 - DNA, 21 bp, Artificial sequence
  SiRNA target sequence
atggttgcaagattagaagtt

SEQ ID NO: 274808 - DNA, 21 bp, Artificial sequence
  SiRNA target sequence
tggttgcaagattagaagttt

SEQ ID NO: 274809 - DNA, 21 bp, Artificial sequence
  SiRNA target sequence
ggttgcaagattagaagtttg

SEQ ID NO: 274810 - DNA, 21 bp, Artificial sequence
  SiRNA target sequence
gttgcaagattagaagtttgc

SEQ ID NO: 274811 - DNA, 21 bp, Artificial sequence
  SiRNA target sequence
ttgcaagattagaagtttgca

SEQ ID NO: 274812 - DNA, 21 bp, Artificial sequence
  SiRNA target sequence
tgcaagattagaagtttgcaa

SEQ ID NO: 274813 - DNA, 21 bp, Artificial sequence
  SiRNA target sequence
gcaagattagaagtttgcaag

SEQ ID NO: 274814 - DNA, 21 bp, Artificial sequence
  SiRNA target sequence
caagattagaagtttgcaaga

SEQ ID NO: 274815 - DNA, 21 bp, Artificial sequence
  SiRNA target sequence
aagattagaagtttgcaagat

SEQ ID NO: 274816 - DNA, 21 bp, Artificial sequence
  SiRNA target sequence
agattagaagtttgcaagatg

SEQ ID NO: 274817 - DNA, 21 bp, Artificial sequence
  SiRNA target sequence
gattagaagtttgcaagatgc

SEQ ID NO: 274818 - DNA, 21 bp, Artificial sequence
  SiRNA target sequence
attagaagtttgcaagatgct

SEQ ID NO: 274819 - DNA, 21 bp, Artificial sequence
  SiRNA target sequence
  misc_feature (21)..(21): n is a, c, g, or t
ttagaagtttgcaagatgctn

SEQ ID NO: 274820 - DNA, 21 bp, Artificial sequence
  SiRNA target sequence
  misc_feature (20)..(20): n is a, c, g, or t
tagaagtttgcaagatgctnt

SEQ ID NO: 274821 - DNA, 21 bp, Artificial sequence
  SiRNA target sequence
  misc_feature (19)..(19): n is a, c, g, or t
agaagtttgcaagatgctnta

SEQ ID NO: 274822 - DNA, 21 bp, Artificial sequence
  SiRNA target sequence
  misc_feature (18)..(18): n is a, c, g, or t
gaagtttgcaagatgctntat

SEQ ID NO: 274823 - DNA, 21 bp, Artificial sequence
  SiRNA target sequence
  misc_feature (17)..(17): n is a, c, g, or t
aagtttgcaagatgctntatg

SEQ ID NO: 274824 - DNA, 21 bp, Artificial sequence
  SiRNA target sequence
  misc_feature (16)..(16): n is a, c, g, or t
agtttgcaagatgctntatgt

SEQ ID NO: 274825 - DNA, 21 bp, Artificial sequence
  SiRNA target sequence
  misc_feature (15)..(15): n is a, c, g, or t
gtttgcaagatgctntatgtg

SEQ ID NO: 274826 - DNA, 21 bp, Artificial sequence
  SiRNA target sequence
  misc_feature (14)..(14): n is a, c, g, or t
tttgcaagatgctntatgtgg

SEQ ID NO: 274827 - DNA, 21 bp, Artificial sequence
  SiRNA target sequence
  misc_feature (13)..(13): n is a, c, g, or t
ttgcaagatgctntatgtggt

SEQ ID NO: 274828 - DNA, 21 bp, Artificial sequence
  SiRNA target sequence
  misc_feature (12)..(12): n is a, c, g, or t
tgcaagatgctntatgtggtg

SEQ ID NO: 274829 - DNA, 21 bp, Artificial sequence
  SiRNA target sequence
  misc_feature (11)..(11): n is a, c, g, or t
gcaagatgctntatgtggtgt

SEQ ID NO: 274830 - DNA, 21 bp, Artificial sequence
  SiRNA target sequence
  misc_feature (10)..(10): n is a, c, g, or t
caagatgctntatgtggtgtg

SEQ ID NO: 274831 - DNA, 21 bp, Artificial sequence
  SiRNA target sequence
  misc_feature (9)..(9): n is a, c, g, or t
aagatgctntatgtggtgtgc

SEQ ID NO: 274832 - DNA, 21 bp, Artificial sequence
  SiRNA target sequence
  misc_feature (8)..(8): n is a, c, g, or t
agatgctntatgtggtgtgcc

SEQ ID NO: 274833 - DNA, 21 bp, Artificial sequence
  SiRNA target sequence
  misc_feature (7)..(7): n is a, c, g, or t
gatgctntatgtggtgtgcct

SEQ ID NO: 274834 - DNA, 21 bp, Artificial sequence
  SiRNA target sequence
  misc_feature (6)..(6): n is a, c, g, or t
atgctntatgtggtgtgcctg

SEQ ID NO: 274835 - DNA, 21 bp, Artificial sequence
  SiRNA target sequence
  misc_feature (5)..(5): n is a, c, g, or t
tgctntatgtggtgtgcctgg

SEQ ID NO: 274836 - DNA, 21 bp, Artificial sequence
  SiRNA target sequence
  misc_feature (4)..(4): n is a, c, g, or t
gctntatgtggtgtgcctggt

SEQ ID NO: 274837 - DNA, 21 bp, Artificial sequence
  SiRNA target sequence
  misc_feature (3)..(3): n is a, c, g, or t
ctntatgtggtgtgcctggtt

SEQ ID NO: 274838 - DNA, 21 bp, Artificial sequence
  SiRNA target sequence
  misc_feature (2)..(2): n is a, c, g, or t
tntatgtggtgtgcctggttt

SEQ ID NO: 274839 - DNA, 21 bp, Artificial sequence
  SiRNA target sequence
  misc_feature (1)..(1): n is a, c, g, or t
ntatgtggtgtgcctggttta

SEQ ID NO: 274840 - DNA, 21 bp, Artificial sequence
  SiRNA target sequence
tatgtggtgtgcctggtttag

SEQ ID NO: 274841 - DNA, 21 bp, Artificial sequence
  SiRNA target sequence
atgtggtgtgcctggtttaga

SEQ ID NO: 274842 - DNA, 21 bp, Artificial sequence
  SiRNA target sequence
tgtggtgtgcctggtttagat

SEQ ID NO: 274843 - DNA, 21 bp, Artificial sequence
  SiRNA target sequence
gtggtgtgcctggtttagatg

SEQ ID NO: 274844 - DNA, 21 bp, Artificial sequence
  SiRNA target sequence
tggtgtgcctggtttagatgg

SEQ ID NO: 274845 - DNA, 21 bp, Artificial sequence
  SiRNA target sequence
ggtgtgcctggtttagatggg

SEQ ID NO: 274846 - DNA, 21 bp, Artificial sequence
  SiRNA target sequence
gtgtgcctggtttagatgggt

SEQ ID NO: 274847 - DNA, 21 bp, Artificial sequence
  SiRNA target sequence
tgtgcctggtttagatgggtt

SEQ ID NO: 274848 - DNA, 21 bp, Artificial sequence
  SiRNA target sequence
gtgcctggtttagatgggttt

SEQ ID NO: 274849 - DNA, 21 bp, Artificial sequence
  SiRNA target sequence
tgcctggtttagatgggtttg

SEQ ID NO: 274850 - DNA, 21 bp, Artificial sequence
  SiRNA target sequence
gcctggtttagatgggtttga

SEQ ID NO: 274851 - DNA, 21 bp, Artificial sequence
  SiRNA target sequence
cctggtttagatgggtttgat

SEQ ID NO: 274852 - DNA, 21 bp, Artificial sequence
  SiRNA target sequence
ctggtttagatgggtttgatt

SEQ ID NO: 274853 - DNA, 21 bp, Artificial sequence
  SiRNA target sequence
tggtttagatgggtttgattc

SEQ ID NO: 274854 - DNA, 21 bp, Artificial sequence
  SiRNA target sequence
ggtttagatgggtttgattcg

SEQ ID NO: 274855 - DNA, 21 bp, Artificial sequence
  SiRNA target sequence
gtttagatgggtttgattcga

SEQ ID NO: 274856 - DNA, 21 bp, Artificial sequence
  SiRNA target sequence
tttagatgggtttgattcgat

SEQ ID NO: 274857 - DNA, 21 bp, Artificial sequence
  SiRNA target sequence
ttagatgggtttgattcgata

SEQ ID NO: 274858 - DNA, 21 bp, Artificial sequence
  SiRNA target sequence
tagatgggtttgattcgatat

SEQ ID NO: 274859 - DNA, 21 bp, Artificial sequence
  SiRNA target sequence
agatgggtttgattcgatatc

SEQ ID NO: 274860 - DNA, 21 bp, Artificial sequence
  SiRNA target sequence
gatgggtttgattcgatatct

SEQ ID NO: 274861 - DNA, 21 bp, Artificial sequence
  SiRNA target sequence
atgggtttgattcgatatctt

SEQ ID NO: 274862 - DNA, 21 bp, Artificial sequence
  SiRNA target sequence
tgggtttgattcgatatcttg

SEQ ID NO: 274863 - DNA, 21 bp, Artificial sequence
  SiRNA target sequence
gggtttgattcgatatcttgg

SEQ ID NO: 274864 - DNA, 21 bp, Artificial sequence
  SiRNA target sequence
ggtttgattcgatatcttgga

SEQ ID NO: 274865 - DNA, 21 bp, Artificial sequence
  SiRNA target sequence
gtttgattcgatatcttggaa

SEQ ID NO: 274866 - DNA, 21 bp, Artificial sequence
  SiRNA target sequence
tttgattcgatatcttggaat

SEQ ID NO: 274867 - DNA, 21 bp, Artificial sequence
  SiRNA target sequence
ttgattcgatatcttggaata

SEQ ID NO: 274868 - DNA, 21 bp, Artificial sequence
  SiRNA target sequence
tgattcgatatcttggaatac

SEQ ID NO: 274869 - DNA, 21 bp, Artificial sequence
  SiRNA target sequence
gattcgatatcttggaatact

SEQ ID NO: 274870 - DNA, 21 bp, Artificial sequence
  SiRNA target sequence
attcgatatcttggaatacta

SEQ ID NO: 274871 - DNA, 21 bp, Artificial sequence
  SiRNA target sequence
ttcgatatcttggaatactag

SEQ ID NO: 274872 - DNA, 21 bp, Artificial sequence
  SiRNA target sequence
tcgatatcttggaatactagt

SEQ ID NO: 274873 - DNA, 21 bp, Artificial sequence
  SiRNA target sequence
cgatatcttggaatactagtg

SEQ ID NO: 274874 - DNA, 21 bp, Artificial sequence
  SiRNA target sequence
gatatcttggaatactagtgc

SEQ ID NO: 274875 - DNA, 21 bp, Artificial sequence
  SiRNA target sequence
atatcttggaatactagtgct

SEQ ID NO: 274876 - DNA, 21 bp, Artificial sequence
  SiRNA target sequence
tatcttggaatactagtgctg

SEQ ID NO: 274877 - DNA, 21 bp, Artificial sequence
  SiRNA target sequence
atcttggaatactagtgctgg

SEQ ID NO: 274878 - DNA, 21 bp, Artificial sequence
  SiRNA target sequence
tcttggaatactagtgctggt

SEQ ID NO: 274879 - DNA, 21 bp, Artificial sequence
  SiRNA target sequence
cttggaatactagtgctggtt

SEQ ID NO: 274880 - DNA, 21 bp, Artificial sequence
  SiRNA target sequence
ttggaatactagtgctggttt

SEQ ID NO: 274881 - DNA, 21 bp, Artificial sequence
  SiRNA target sequence
tggaatactagtgctggtttt

SEQ ID NO: 274882 - DNA, 21 bp, Artificial sequence
  SiRNA target sequence
ggaatactagtgctggttttc

SEQ ID NO: 274883 - DNA, 21 bp, Artificial sequence
  SiRNA target sequence
gaatactagtgctggttttcc

SEQ ID NO: 274884 - DNA, 21 bp, Artificial sequence
  SiRNA target sequence
aatactagtgctggttttcct

SEQ ID NO: 274885 - DNA, 21 bp, Artificial sequence
  SiRNA target sequence
atactagtgctggttttcctt

SEQ ID NO: 274886 - DNA, 21 bp, Artificial sequence
  SiRNA target sequence
tactagtgctggttttccttt

SEQ ID NO: 274887 - DNA, 21 bp, Artificial sequence
  SiRNA target sequence
actagtgctggttttcctttg

SEQ ID NO: 274888 - DNA, 21 bp, Artificial sequence
  SiRNA target sequence
ctagtgctggttttcctttgt

SEQ ID NO: 274889 - DNA, 21 bp, Artificial sequence
  SiRNA target sequence
tagtgctggttttcctttgtc

SEQ ID NO: 274890 - DNA, 21 bp, Artificial sequence
  SiRNA target sequence
agtgctggttttcctttgtct

SEQ ID NO: 274891 - DNA, 21 bp, Artificial sequence
  SiRNA target sequence
gtgctggttttcctttgtctt

SEQ ID NO: 274892 - DNA, 21 bp, Artificial sequence
  SiRNA target sequence
tgctggttttcctttgtcttc

SEQ ID NO: 274893 - DNA, 21 bp, Artificial sequence
  SiRNA target sequence
gctggttttcctttgtcttca

SEQ ID NO: 274894 - DNA, 21 bp, Artificial sequence
  SiRNA target sequence
ctggttttcctttgtcttcat

SEQ ID NO: 274895 - DNA, 21 bp, Artificial sequence
  SiRNA target sequence
tggttttcctttgtcttcatt

SEQ ID NO: 274896 - DNA, 21 bp, Artificial sequence
  SiRNA target sequence
ggttttcctttgtcttcatta

SEQ ID NO: 274897 - DNA, 21 bp, Artificial sequence
  SiRNA target sequence
gttttcctttgtcttcattaa

SEQ ID NO: 274898 - DNA, 21 bp, Artificial sequence
  SiRNA target sequence
ttttcctttgtcttcattaaa

SEQ ID NO: 274899 - DNA, 21 bp, Artificial sequence
  SiRNA target sequence
tttcctttgtcttcattaaag

SEQ ID NO: 274900 - DNA, 21 bp, Artificial sequence
  SiRNA target sequence
ttcctttgtcttcattaaagc

SEQ ID NO: 274901 - DNA, 21 bp, Artificial sequence
  SiRNA target sequence
tcctttgtcttcattaaagcc

SEQ ID NO: 274902 - DNA, 21 bp, Artificial sequence
  SiRNA target sequence
cctttgtcttcattaaagcca

SEQ ID NO: 274903 - DNA, 21 bp, Artificial sequence
  SiRNA target sequence
ctttgtcttcattaaagccac

SEQ ID NO: 274904 - DNA, 21 bp, Artificial sequence
  SiRNA target sequence
tttgtcttcattaaagccacc

SEQ ID NO: 274905 - DNA, 21 bp, Artificial sequence
  SiRNA target sequence
ttgtcttcattaaagccacct

SEQ ID NO: 274906 - DNA, 21 bp, Artificial sequence
  SiRNA target sequence
tgtcttcattaaagccacctg

SEQ ID NO: 274907 - DNA, 21 bp, Artificial sequence
  SiRNA target sequence
gtcttcattaaagccacctgg

SEQ ID NO: 274908 - DNA, 21 bp, Artificial sequence
  SiRNA target sequence
tcttcattaaagccacctgga

SEQ ID NO: 274909 - DNA, 21 bp, Artificial sequence
  SiRNA target sequence
cttcattaaagccacctggaa

SEQ ID NO: 274910 - DNA, 21 bp, Artificial sequence
  SiRNA target sequence
ttcattaaagccacctggaac

SEQ ID NO: 274911 - DNA, 21 bp, Artificial sequence
  SiRNA target sequence
tcattaaagccacctggaaca

SEQ ID NO: 274912 - DNA, 21 bp, Artificial sequence
  SiRNA target sequence
cattaaagccacctggaacat

SEQ ID NO: 274913 - DNA, 21 bp, Artificial sequence
  SiRNA target sequence
attaaagccacctggaacatc

SEQ ID NO: 274914 - DNA, 21 bp, Artificial sequence
  SiRNA target sequence
ttaaagccacctggaacatca

SEQ ID NO: 274915 - DNA, 21 bp, Artificial sequence
  SiRNA target sequence
taaagccacctggaacatcag

SEQ ID NO: 274916 - DNA, 21 bp, Artificial sequence
  SiRNA target sequence
aaagccacctggaacatcagg

SEQ ID NO: 274917 - DNA, 21 bp, Artificial sequence
  SiRNA target sequence
  misc_feature (21)..(21): n is a, c, g, or t
aagccacctggaacatcaggn

SEQ ID NO: 274918 - DNA, 21 bp, Artificial sequence
  SiRNA target sequence
  misc_feature (20)..(20): n is a, c, g, or t
agccacctggaacatcaggna

SEQ ID NO: 274919 - DNA, 21 bp, Artificial sequence
  SiRNA target sequence
  misc_feature (19)..(19): n is a, c, g, or t
gccacctggaacatcaggnaa

SEQ ID NO: 274920 - DNA, 21 bp, Artificial sequence
  SiRNA target sequence
  misc_feature (18)..(18): n is a, c, g, or t
ccacctggaacatcaggnaag

SEQ ID NO: 274921 - DNA, 21 bp, Artificial sequence
  SiRNA target sequence
  misc_feature (17)..(17): n is a, c, g, or t
cacctggaacatcaggnaagc

SEQ ID NO: 274922 - DNA, 21 bp, Artificial sequence
  SiRNA target sequence
  misc_feature (16)..(16): n is a, c, g, or t
acctggaacatcaggnaagcg

SEQ ID NO: 274923 - DNA, 21 bp, Artificial sequence
  SiRNA target sequence
  misc_feature (15)..(15): n is a, c, g, or t
cctggaacatcaggnaagcga

SEQ ID NO: 274924 - DNA, 21 bp, Artificial sequence
  SiRNA target sequence
  misc_feature (14)..(14): n is a, c, g, or t
ctggaacatcaggnaagcgat

SEQ ID NO: 274925 - DNA, 21 bp, Artificial sequence
  SiRNA target sequence
  misc_feature (13)..(13): n is a, c, g, or t
tggaacatcaggnaagcgatg

SEQ ID NO: 274926 - DNA, 21 bp, Artificial sequence
  SiRNA target sequence
  misc_feature (12)..(12): n is a, c, g, or t
ggaacatcaggnaagcgatgg

SEQ ID NO: 274927 - DNA, 21 bp, Artificial sequence
  SiRNA target sequence
  misc_feature (11)..(11): n is a, c, g, or t
gaacatcaggnaagcgatggt

SEQ ID NO: 274928 - DNA, 21 bp, Artificial sequence
  SiRNA target sequence
  misc_feature (10)..(10): n is a, c, g, or t
aacatcaggnaagcgatggtt

SEQ ID NO: 274929 - DNA, 21 bp, Artificial sequence
  SiRNA target sequence
  misc_feature (9)..(9): n is a, c, g, or t
acatcaggnaagcgatggttg

SEQ ID NO: 274930 - DNA, 21 bp, Artificial sequence
  SiRNA target sequence
  misc_feature (8)..(8): n is a, c, g, or t
catcaggnaagcgatggttgt

SEQ ID NO: 274931 - DNA, 21 bp, Artificial sequence
  SiRNA target sequence
  misc_feature (7)..(7): n is a, c, g, or t
atcaggnaagcgatggttgtt

SEQ ID NO: 274932 - DNA, 21 bp, Artificial sequence
  SiRNA target sequence
  misc_feature (6)..(6): n is a, c, g, or t
tcaggnaagcgatggttgttt

SEQ ID NO: 274933 - DNA, 21 bp, Artificial sequence
  SiRNA target sequence
  misc_feature (5)..(5): n is a, c, g, or t
caggnaagcgatggttgtttg

SEQ ID NO: 274934 - DNA, 21 bp, Artificial sequence
  SiRNA target sequence
  misc_feature (4)..(4): n is a, c, g, or t
aggnaagcgatggttgtttga

SEQ ID NO: 274935 - DNA, 21 bp, Artificial sequence
  SiRNA target sequence
  misc_feature (3)..(3): n is a, c, g, or t
  misc_feature (21)..(21): n is a, c, g, or t
ggnaagcgatggttgtttgan

SEQ ID NO: 274936 - DNA, 21 bp, Artificial sequence
  SiRNA target sequence
  misc_feature (2)..(2): n is a, c, g, or t
  misc_feature (20)..(20): n is a, c, g, or t
gnaagcgatggttgtttgana

SEQ ID NO: 274937 - DNA, 21 bp, Artificial sequence
  SiRNA target sequence
  misc_feature (1)..(1): n is a, c, g, or t
  misc_feature (19)..(19): n is a, c, g, or t
naagcgatggttgtttganat

SEQ ID NO: 274938 - DNA, 21 bp, Artificial sequence
  SiRNA target sequence
  misc_feature (18)..(18): n is a, c, g, or t
aagcgatggttgtttganatt

SEQ ID NO: 274939 - DNA, 21 bp, Artificial sequence
  SiRNA target sequence
  misc_feature (17)..(17): n is a, c, g, or t
agcgatggttgtttganattg

SEQ ID NO: 274940 - DNA, 21 bp, Artificial sequence
  SiRNA target sequence
  misc_feature (16)..(16): n is a, c, g, or t
gcgatggttgtttganattga

SEQ ID NO: 274941 - DNA, 21 bp, Artificial sequence
  SiRNA target sequence
  misc_feature (15)..(15): n is a, c, g, or t
cgatggttgtttganattgag

SEQ ID NO: 274942 - DNA, 21 bp, Artificial sequence
  SiRNA target sequence
  misc_feature (14)..(14): n is a, c, g, or t
gatggttgtttganattgagc

SEQ ID NO: 274943 - DNA, 21 bp, Artificial sequence
  SiRNA target sequence
  misc_feature (13)..(13): n is a, c, g, or t
atggttgtttganattgagct

SEQ ID NO: 274944 - DNA, 21 bp, Artificial sequence
  SiRNA target sequence
  misc_feature (12)..(12): n is a, c, g, or t
tggttgtttganattgagcta

SEQ ID NO: 274945 - DNA, 21 bp, Artificial sequence
  SiRNA target sequence
  misc_feature (11)..(11): n is a, c, g, or t
ggttgtttganattgagctac

SEQ ID NO: 274946 - DNA, 21 bp, Artificial sequence
  SiRNA target sequence
  misc_feature (10)..(10): n is a, c, g, or t
gttgtttganattgagctaca

SEQ ID NO: 274947 - DNA, 21 bp, Artificial sequence
  SiRNA target sequence
  misc_feature (9)..(9): n is a, c, g, or t
ttgtttganattgagctacaa

SEQ ID NO: 274948 - DNA, 21 bp, Artificial sequence
  SiRNA target sequence
  misc_feature (8)..(8): n is a, c, g, or t
tgtttganattgagctacaag

SEQ ID NO: 274949 - DNA, 21 bp, Artificial sequence
  SiRNA target sequence
  misc_feature (7)..(7): n is a, c, g, or t
gtttganattgagctacaaga

SEQ ID NO: 274950 - DNA, 21 bp, Artificial sequence
  SiRNA target sequence
  misc_feature (6)..(6): n is a, c, g, or t
  misc_feature (21)..(21): n is a, c, g, or t
tttganattgagctacaagan

SEQ ID NO: 274951 - DNA, 21 bp, Artificial sequence
  SiRNA target sequence
  misc_feature (5)..(5): n is a, c, g, or t
  misc_feature (20)..(20): n is a, c, g, or t
ttganattgagctacaagant

SEQ ID NO: 274952 - DNA, 21 bp, Artificial sequence
  SiRNA target sequence
  misc_feature (4)..(4): n is a, c, g, or t
  misc_feature (19)..(19): n is a, c, g, or t
tganattgagctacaagantc

SEQ ID NO: 274953 - DNA, 21 bp, Artificial sequence
  SiRNA target sequence
  misc_feature (3)..(3): n is a, c, g, or t
  misc_feature (18)..(18): n is a, c, g, or t
ganattgagctacaagantcg

SEQ ID NO: 274954 - DNA, 21 bp, Artificial sequence
  SiRNA target sequence
  misc_feature (2)..(2): n is a, c, g, or t
  misc_feature (17)..(17): n is a, c, g, or t
anattgagctacaagantcgg

SEQ ID NO: 274955 - DNA, 21 bp, Artificial sequence
  SiRNA target sequence
  misc_feature (1)..(1): n is a, c, g, or t
  misc_feature (16)..(16): n is a, c, g, or t
nattgagctacaagantcggg

SEQ ID NO: 274956 - DNA, 21 bp, Artificial sequence
  SiRNA target sequence
  misc_feature (15)..(15): n is a, c, g, or t
attgagctacaagantcggga

SEQ ID NO: 274957 - DNA, 21 bp, Artificial sequence
  SiRNA target sequence
  misc_feature (14)..(14): n is a, c, g, or t
ttgagctacaagantcgggat

SEQ ID NO: 274958 - DNA, 21 bp, Artificial sequence
  SiRNA target sequence
  misc_feature (13)..(13): n is a, c, g, or t
tgagctacaagantcgggatg

SEQ ID NO: 274959 - DNA, 21 bp, Artificial sequence
  SiRNA target sequence
  misc_feature (12)..(12): n is a, c, g, or t
gagctacaagantcgggatgt

SEQ ID NO: 274960 - DNA, 21 bp, Artificial sequence
  SiRNA target sequence
  misc_feature (11)..(11): n is a, c, g, or t
agctacaagantcgggatgtt

SEQ ID NO: 274961 - DNA, 21 bp, Artificial sequence
  SiRNA target sequence
  misc_feature (10)..(10): n is a, c, g, or t
gctacaagantcgggatgtta

SEQ ID NO: 274962 - DNA, 21 bp, Artificial sequence
  SiRNA target sequence
  misc_feature (9)..(9): n is a, c, g, or t
ctacaagantcgggatgttat

SEQ ID NO: 274963 - DNA, 21 bp, Artificial sequence
  SiRNA target sequence
  misc_feature (8)..(8): n is a, c, g, or t
tacaagantcgggatgttatc

SEQ ID NO: 274964 - DNA, 21 bp, Artificial sequence
  SiRNA target sequence
  misc_feature (7)..(7): n is a, c, g, or t
acaagantcgggatgttatct

SEQ ID NO: 274965 - DNA, 21 bp, Artificial sequence
  SiRNA target sequence
  misc_feature (6)..(6): n is a, c, g, or t
caagantcgggatgttatctc

SEQ ID NO: 274966 - DNA, 21 bp, Artificial sequence
  SiRNA target sequence
  misc_feature (5)..(5): n is a, c, g, or t
  misc_feature (21)..(21): n is a, c, g, or t
aagantcgggatgttatctcn

SEQ ID NO: 274967 - DNA, 21 bp, Artificial sequence
  SiRNA target sequence
  misc_feature (4)..(4): n is a, c, g, or t
  misc_feature (20)..(20): n is a, c, g, or t
agantcgggatgttatctcnt

SEQ ID NO: 274968 - DNA, 21 bp, Artificial sequence
  SiRNA target sequence
  misc_feature (3)..(3): n is a, c, g, or t
  misc_feature (19)..(19): n is a, c, g, or t
gantcgggatgttatctcntg

SEQ ID NO: 274969 - DNA, 21 bp, Artificial sequence
  SiRNA target sequence
  misc_feature (2)..(2): n is a, c, g, or t
  misc_feature (18)..(18): n is a, c, g, or t
antcgggatgttatctcntgc

SEQ ID NO: 274970 - DNA, 21 bp, Artificial sequence
  SiRNA target sequence
  misc_feature (1)..(1): n is a, c, g, or t
  misc_feature (17)..(17): n is a, c, g, or t
ntcgggatgttatctcntgcg

SEQ ID NO: 274971 - DNA, 21 bp, Artificial sequence
  SiRNA target sequence
  misc_feature (16)..(16): n is a, c, g, or t
tcgggatgttatctcntgcgt

SEQ ID NO: 274972 - DNA, 21 bp, Artificial sequence
  SiRNA target sequence
  misc_feature (15)..(15): n is a, c, g, or t
cgggatgttatctcntgcgtg

SEQ ID NO: 274973 - DNA, 21 bp, Artificial sequence
  SiRNA target sequence
  misc_feature (14)..(14): n is a, c, g, or t
gggatgttatctcntgcgtgg

SEQ ID NO: 274974 - DNA, 21 bp, Artificial sequence
  SiRNA target sequence
  misc_feature (13)..(13): n is a, c, g, or t
ggatgttatctcntgcgtgga

SEQ ID NO: 274975 - DNA, 21 bp, Artificial sequence
  SiRNA target sequence
  misc_feature (12)..(12): n is a, c, g, or t
gatgttatctcntgcgtggaa

SEQ ID NO: 274976 - DNA, 21 bp, Artificial sequence
  SiRNA target sequence
  misc_feature (11)..(11): n is a, c, g, or t
atgttatctcntgcgtggaat

SEQ ID NO: 274977 - DNA, 21 bp, Artificial sequence
  SiRNA target sequence
  misc_feature (10)..(10): n is a, c, g, or t
tgttatctcntgcgtggaatg

SEQ ID NO: 274978 - DNA, 21 bp, Artificial sequence
  SiRNA target sequence
  misc_feature (9)..(9): n is a, c, g, or t
gttatctcntgcgtggaatgc

SEQ ID NO: 274979 - DNA, 21 bp, Artificial sequence
  SiRNA target sequence
  misc_feature (8)..(8): n is a, c, g, or t
ttatctcntgcgtggaatgcg

SEQ ID NO: 274980 - DNA, 21 bp, Artificial sequence
  SiRNA target sequence
  misc_feature (7)..(7): n is a, c, g, or t
tatctcntgcgtggaatgcgt

SEQ ID NO: 274981 - DNA, 21 bp, Artificial sequence
  SiRNA target sequence
  misc_feature (6)..(6): n is a, c, g, or t
atctcntgcgtggaatgcgtc

SEQ ID NO: 274982 - DNA, 21 bp, Artificial sequence
  SiRNA target sequence
  misc_feature (5)..(5): n is a, c, g, or t
tctcntgcgtggaatgcgtcc

SEQ ID NO: 274983 - DNA, 21 bp, Artificial sequence
  SiRNA target sequence
  misc_feature (4)..(4): n is a, c, g, or t
ctcntgcgtggaatgcgtccc

SEQ ID NO: 274984 - DNA, 21 bp, Artificial sequence
  SiRNA target sequence
  misc_feature (3)..(3): n is a, c, g, or t
tcntgcgtggaatgcgtcccg

SEQ ID NO: 274985 - DNA, 21 bp, Artificial sequence
  SiRNA target sequence
  misc_feature (2)..(2): n is a, c, g, or t
cntgcgtggaatgcgtcccga

SEQ ID NO: 274986 - DNA, 21 bp, Artificial sequence
  SiRNA target sequence
  misc_feature (1)..(1): n is a, c, g, or t
ntgcgtggaatgcgtcccgaa

SEQ ID NO: 274987 - DNA, 21 bp, Artificial sequence
  SiRNA target sequence
tgcgtggaatgcgtcccgaac

SEQ ID NO: 274988 - DNA, 21 bp, Artificial sequence
  SiRNA target sequence
gcgtggaatgcgtcccgaact

SEQ ID NO: 274989 - DNA, 21 bp, Artificial sequence
  SiRNA target sequence
cgtggaatgcgtcccgaactt

SEQ ID NO: 274990 - DNA, 21 bp, Artificial sequence
  SiRNA target sequence
gtggaatgcgtcccgaacttg

SEQ ID NO: 274991 - DNA, 21 bp, Artificial sequence
  SiRNA target sequence
tggaatgcgtcccgaacttga

SEQ ID NO: 274992 - DNA, 21 bp, Artificial sequence
  SiRNA target sequence
ggaatgcgtcccgaacttgag

SEQ ID NO: 274993 - DNA, 21 bp, Artificial sequence
  SiRNA target sequence
gaatgcgtcccgaacttgaga

SEQ ID NO: 274994 - DNA, 21 bp, Artificial sequence
  SiRNA target sequence
aatgcgtcccgaacttgagat

SEQ ID NO: 274995 - DNA, 21 bp, Artificial sequence
  SiRNA target sequence
atgcgtcccgaacttgagatt

SEQ ID NO: 274996 - DNA, 21 bp, Artificial sequence
  SiRNA target sequence
tgcgtcccgaacttgagattc

SEQ ID NO: 274997 - DNA, 21 bp, Artificial sequence
  SiRNA target sequence
gcgtcccgaacttgagattca

SEQ ID NO: 274998 - DNA, 21 bp, Artificial sequence
  SiRNA target sequence
cgtcccgaacttgagattcaa

SEQ ID NO: 274999 - DNA, 21 bp, Artificial sequence
  SiRNA target sequence
gtcccgaacttgagattcaat

SEQ ID NO: 275000 - DNA, 21 bp, Artificial sequence
  SiRNA target sequence
tcccgaacttgagattcaatt

SEQ ID NO: 275001 - DNA, 21 bp, Artificial sequence
  SiRNA target sequence
cccgaacttgagattcaatta

SEQ ID NO: 275002 - DNA, 21 bp, Artificial sequence
  SiRNA target sequence
ccgaacttgagattcaattat

SEQ ID NO: 275003 - DNA, 21 bp, Artificial sequence
  SiRNA target sequence
cgaacttgagattcaattatc

SEQ ID NO: 275004 - DNA, 21 bp, Artificial sequence
  SiRNA target sequence
gaacttgagattcaattatca

SEQ ID NO: 275005 - DNA, 21 bp, Artificial sequence
  SiRNA target sequence
aacttgagattcaattatcaa

SEQ ID NO: 275006 - DNA, 21 bp, Artificial sequence
  SiRNA target sequence
acttgagattcaattatcaac

SEQ ID NO: 275007 - DNA, 21 bp, Artificial sequence
  SiRNA target sequence
cttgagattcaattatcaacg

SEQ ID NO: 275008 - DNA, 21 bp, Artificial sequence
  SiRNA target sequence
ttgagattcaattatcaacga

SEQ ID NO: 275009 - DNA, 21 bp, Artificial sequence
  SiRNA target sequence
tgagattcaattatcaacgac

SEQ ID NO: 275010 - DNA, 21 bp, Artificial sequence
  SiRNA target sequence
gagattcaattatcaacgaca

SEQ ID NO: 275011 - DNA, 21 bp, Artificial sequence
  SiRNA target sequence
agattcaattatcaacgacac

SEQ ID NO: 275012 - DNA, 21 bp, Artificial sequence
  SiRNA target sequence
gattcaattatcaacgacaca

SEQ ID NO: 275013 - DNA, 21 bp, Artificial sequence
  SiRNA target sequence
attcaattatcaacgacacag

SEQ ID NO: 275014 - DNA, 21 bp, Artificial sequence
  SiRNA target sequence
ttcaattatcaacgacacagt

SEQ ID NO: 275015 - DNA, 21 bp, Artificial sequence
  SiRNA target sequence
tcaattatcaacgacacagtt

SEQ ID NO: 275016 - DNA, 21 bp, Artificial sequence
  SiRNA target sequence
caattatcaacgacacagtta

SEQ ID NO: 275017 - DNA, 21 bp, Artificial sequence
  SiRNA target sequence
aattatcaacgacacagttaa

SEQ ID NO: 275018 - DNA, 21 bp, Artificial sequence
  SiRNA target sequence
attatcaacgacacagttaat

SEQ ID NO: 275019 - DNA, 21 bp, Artificial sequence
  SiRNA target sequence
ttatcaacgacacagttaatg

SEQ ID NO: 275020 - DNA, 21 bp, Artificial sequence
  SiRNA target sequence
tatcaacgacacagttaatga

SEQ ID NO: 275021 - DNA, 21 bp, Artificial sequence
  SiRNA target sequence
atcaacgacacagttaatgag

SEQ ID NO: 275022 - DNA, 21 bp, Artificial sequence
  SiRNA target sequence
tcaacgacacagttaatgagg

SEQ ID NO: 275023 - DNA, 21 bp, Artificial sequence
  SiRNA target sequence
caacgacacagttaatgagga

SEQ ID NO: 275024 - DNA, 21 bp, Artificial sequence
  SiRNA target sequence
aacgacacagttaatgaggaa

SEQ ID NO: 275025 - DNA, 21 bp, Artificial sequence
  SiRNA target sequence
acgacacagttaatgaggaaa

SEQ ID NO: 275026 - DNA, 21 bp, Artificial sequence
  SiRNA target sequence
cgacacagttaatgaggaaaa

SEQ ID NO: 275027 - DNA, 21 bp, Artificial sequence
  SiRNA target sequence
gacacagttaatgaggaaaaa

SEQ ID NO: 275028 - DNA, 21 bp, Artificial sequence
  SiRNA target sequence
acacagttaatgaggaaaaag

SEQ ID NO: 275029 - DNA, 21 bp, Artificial sequence
  SiRNA target sequence
cacagttaatgaggaaaaagg

SEQ ID NO: 275030 - DNA, 21 bp, Artificial sequence
  SiRNA target sequence
acagttaatgaggaaaaaggg

SEQ ID NO: 275031 - DNA, 21 bp, Artificial sequence
  SiRNA target sequence
cagttaatgaggaaaaaggga

SEQ ID NO: 275032 - DNA, 21 bp, Artificial sequence
  SiRNA target sequence
agttaatgaggaaaaagggaa

SEQ ID NO: 275033 - DNA, 21 bp, Artificial sequence
  SiRNA target sequence
gttaatgaggaaaaagggaat

SEQ ID NO: 275034 - DNA, 21 bp, Artificial sequence
  SiRNA target sequence
ttaatgaggaaaaagggaata

SEQ ID NO: 275035 - DNA, 21 bp, Artificial sequence
  SiRNA target sequence
taatgaggaaaaagggaataa

SEQ ID NO: 275036 - DNA, 21 bp, Artificial sequence
  SiRNA target sequence
aatgaggaaaaagggaataaa

SEQ ID NO: 275037 - DNA, 21 bp, Artificial sequence
  SiRNA target sequence
atgaggaaaaagggaataaaa

SEQ ID NO: 275038 - DNA, 21 bp, Artificial sequence
  SiRNA target sequence
tgaggaaaaagggaataaaac

SEQ ID NO: 275039 - DNA, 21 bp, Artificial sequence
  SiRNA target sequence
gaggaaaaagggaataaaacc

SEQ ID NO: 275040 - DNA, 21 bp, Artificial sequence
  SiRNA target sequence
aggaaaaagggaataaaacct

SEQ ID NO: 275041 - DNA, 21 bp, Artificial sequence
  SiRNA target sequence
ggaaaaagggaataaaacctc

SEQ ID NO: 275042 - DNA, 21 bp, Artificial sequence
  SiRNA target sequence
gaaaaagggaataaaacctca

SEQ ID NO: 275043 - DNA, 21 bp, Artificial sequence
  SiRNA target sequence
aaaaagggaataaaacctcac

SEQ ID NO: 275044 - DNA, 21 bp, Artificial sequence
  SiRNA target sequence
aaaagggaataaaacctcaca

SEQ ID NO: 275045 - DNA, 21 bp, Artificial sequence
  SiRNA target sequence
aaagggaataaaacctcacac

SEQ ID NO: 275046 - DNA, 21 bp, Artificial sequence
  SiRNA target sequence
aagggaataaaacctcacact

SEQ ID NO: 275047 - DNA, 21 bp, Artificial sequence
  SiRNA target sequence
agggaataaaacctcacacta

SEQ ID NO: 275048 - DNA, 21 bp, Artificial sequence
  SiRNA target sequence
gggaataaaacctcacactat

SEQ ID NO: 275049 - DNA, 21 bp, Artificial sequence
  SiRNA target sequence
ggaataaaacctcacactata

SEQ ID NO: 275050 - DNA, 21 bp, Artificial sequence
  SiRNA target sequence
gaataaaacctcacactatat

SEQ ID NO: 275051 - DNA, 21 bp, Artificial sequence
  SiRNA target sequence
aataaaacctcacactatatt

SEQ ID NO: 275052 - DNA, 21 bp, Artificial sequence
  SiRNA target sequence
ataaaacctcacactatattc

SEQ ID NO: 275053 - DNA, 21 bp, Artificial sequence
  SiRNA target sequence
taaaacctcacactatattca

SEQ ID NO: 275054 - DNA, 21 bp, Artificial sequence
  SiRNA target sequence
aaaacctcacactatattcac

SEQ ID NO: 275055 - DNA, 21 bp, Artificial sequence
  SiRNA target sequence
aaacctcacactatattcacg

SEQ ID NO: 275056 - DNA, 21 bp, Artificial sequence
  SiRNA target sequence
aacctcacactatattcacgg

SEQ ID NO: 275057 - DNA, 21 bp, Artificial sequence
  SiRNA target sequence
acctcacactatattcacgga

SEQ ID NO: 275058 - DNA, 21 bp, Artificial sequence
  SiRNA target sequence
cctcacactatattcacggat

SEQ ID NO: 275059 - DNA, 21 bp, Artificial sequence
  SiRNA target sequence
ctcacactatattcacggatt

SEQ ID NO: 275060 - DNA, 21 bp, Artificial sequence
  SiRNA target sequence
tcacactatattcacggattg

SEQ ID NO: 275061 - DNA, 21 bp, Artificial sequence
  SiRNA target sequence
cacactatattcacggattgt

SEQ ID NO: 275062 - DNA, 21 bp, Artificial sequence
  SiRNA target sequence
acactatattcacggattgtt

SEQ ID NO: 275063 - DNA, 21 bp, Artificial sequence
  SiRNA target sequence
cactatattcacggattgttt

SEQ ID NO: 275064 - DNA, 21 bp, Artificial sequence
  SiRNA target sequence
actatattcacggattgtttg

SEQ ID NO: 275065 - DNA, 21 bp, Artificial sequence
  SiRNA target sequence
ctatattcacggattgtttga

SEQ ID NO: 275066 - DNA, 21 bp, Artificial sequence
  SiRNA target sequence
tatattcacggattgtttgaa

SEQ ID NO: 275067 - DNA, 21 bp, Artificial sequence
  SiRNA target sequence
atattcacggattgtttgaaa

SEQ ID NO: 275068 - DNA, 21 bp, Artificial sequence
  SiRNA target sequence
tattcacggattgtttgaaag

SEQ ID NO: 275069 - DNA, 21 bp, Artificial sequence
  SiRNA target sequence
attcacggattgtttgaaaga

SEQ ID NO: 275070 - DNA, 21 bp, Artificial sequence
  SiRNA target sequence
ttcacggattgtttgaaagat

SEQ ID NO: 275071 - DNA, 21 bp, Artificial sequence
  SiRNA target sequence
tcacggattgtttgaaagata

SEQ ID NO: 275072 - DNA, 21 bp, Artificial sequence
  SiRNA target sequence
cacggattgtttgaaagatac

SEQ ID NO: 275073 - DNA, 21 bp, Artificial sequence
  SiRNA target sequence
acggattgtttgaaagatact

SEQ ID NO: 275074 - DNA, 21 bp, Artificial sequence
  SiRNA target sequence
cggattgtttgaaagatactt

SEQ ID NO: 275075 - DNA, 21 bp, Artificial sequence
  SiRNA target sequence
ggattgtttgaaagatacttg

SEQ ID NO: 275076 - DNA, 21 bp, Artificial sequence
  SiRNA target sequence
gattgtttgaaagatacttgt

SEQ ID NO: 275077 - DNA, 21 bp, Artificial sequence
  SiRNA target sequence
attgtttgaaagatacttgtt

SEQ ID NO: 275078 - DNA, 21 bp, Artificial sequence
  SiRNA target sequence
ttgtttgaaagatacttgttt

SEQ ID NO: 275079 - DNA, 21 bp, Artificial sequence
  SiRNA target sequence
tgtttgaaagatacttgtttg

SEQ ID NO: 275080 - DNA, 21 bp, Artificial sequence
  SiRNA target sequence
gtttgaaagatacttgtttgc

SEQ ID NO: 275081 - DNA, 21 bp, Artificial sequence
  SiRNA target sequence
tttgaaagatacttgtttgcc

SEQ ID NO: 275082 - DNA, 21 bp, Artificial sequence
  SiRNA target sequence
ttgaaagatacttgtttgcct

SEQ ID NO: 275083 - DNA, 21 bp, Artificial sequence
  SiRNA target sequence
tgaaagatacttgtttgcctg

SEQ ID NO: 275084 - DNA, 21 bp, Artificial sequence
  SiRNA target sequence
gaaagatacttgtttgcctgt

SEQ ID NO: 275085 - DNA, 21 bp, Artificial sequence
  SiRNA target sequence
aaagatacttgtttgcctgtt

SEQ ID NO: 275086 - DNA, 21 bp, Artificial sequence
  SiRNA target sequence
aagatacttgtttgcctgttg

SEQ ID NO: 275087 - DNA, 21 bp, Artificial sequence
  SiRNA target sequence
agatacttgtttgcctgttga

SEQ ID NO: 275088 - DNA, 21 bp, Artificial sequence
  SiRNA target sequence
gatacttgtttgcctgttgaa

SEQ ID NO: 275089 - DNA, 21 bp, Artificial sequence
  SiRNA target sequence
atacttgtttgcctgttgaaa

SEQ ID NO: 275090 - DNA, 21 bp, Artificial sequence
  SiRNA target sequence
tacttgtttgcctgttgaaaa

SEQ ID NO: 275091 - DNA, 21 bp, Artificial sequence
  SiRNA target sequence
acttgtttgcctgttgaaaaa

SEQ ID NO: 275092 - DNA, 21 bp, Artificial sequence
  SiRNA target sequence
cttgtttgcctgttgaaaaat

SEQ ID NO: 275093 - DNA, 21 bp, Artificial sequence
  SiRNA target sequence
ttgtttgcctgttgaaaaatg

SEQ ID NO: 275094 - DNA, 21 bp, Artificial sequence
  SiRNA target sequence
tgtttgcctgttgaaaaatgt

SEQ ID NO: 275095 - DNA, 21 bp, Artificial sequence
  SiRNA target sequence
gtttgcctgttgaaaaatgta

SEQ ID NO: 275096 - DNA, 21 bp, Artificial sequence
  SiRNA target sequence
tttgcctgttgaaaaatgtag

SEQ ID NO: 275097 - DNA, 21 bp, Artificial sequence
  SiRNA target sequence
ttgcctgttgaaaaatgtaga

SEQ ID NO: 275098 - DNA, 21 bp, Artificial sequence
  SiRNA target sequence
tgcctgttgaaaaatgtagaa

SEQ ID NO: 275099 - DNA, 21 bp, Artificial sequence
  SiRNA target sequence
gcctgttgaaaaatgtagaat

SEQ ID NO: 275100 - DNA, 21 bp, Artificial sequence
  SiRNA target sequence
cctgttgaaaaatgtagaata

SEQ ID NO: 275101 - DNA, 21 bp, Artificial sequence
  SiRNA target sequence
ctgttgaaaaatgtagaatac

SEQ ID NO: 275102 - DNA, 21 bp, Artificial sequence
  SiRNA target sequence
tgttgaaaaatgtagaatacc

SEQ ID NO: 275103 - DNA, 21 bp, Artificial sequence
  SiRNA target sequence
gttgaaaaatgtagaatacct

SEQ ID NO: 275104 - DNA, 21 bp, Artificial sequence
  SiRNA target sequence
ttgaaaaatgtagaatacctg

SEQ ID NO: 275105 - DNA, 21 bp, Artificial sequence
  SiRNA target sequence
tgaaaaatgtagaatacctgg

SEQ ID NO: 275106 - DNA, 21 bp, Artificial sequence
  SiRNA target sequence
gaaaaatgtagaatacctggt

SEQ ID NO: 275107 - DNA, 21 bp, Artificial sequence
  SiRNA target sequence
aaaaatgtagaatacctggta

SEQ ID NO: 275108 - DNA, 21 bp, Artificial sequence
  SiRNA target sequence
aaaatgtagaatacctggtaa

SEQ ID NO: 275109 - DNA, 21 bp, Artificial sequence
  SiRNA target sequence
aaatgtagaatacctggtaag

SEQ ID NO: 275110 - DNA, 21 bp, Artificial sequence
  SiRNA target sequence
aatgtagaatacctggtaaga

SEQ ID NO: 275111 - DNA, 21 bp, Artificial sequence
  SiRNA target sequence
atgtagaatacctggtaagac

SEQ ID NO: 275112 - DNA, 21 bp, Artificial sequence
  SiRNA target sequence
tgtagaatacctggtaagact

SEQ ID NO: 275113 - DNA, 21 bp, Artificial sequence
  SiRNA target sequence
gtagaatacctggtaagacta

SEQ ID NO: 275114 - DNA, 21 bp, Artificial sequence
  SiRNA target sequence
tagaatacctggtaagactag

SEQ ID NO: 275115 - DNA, 21 bp, Artificial sequence
  SiRNA target sequence
agaatacctggtaagactaga

SEQ ID NO: 275116 - DNA, 21 bp, Artificial sequence
  SiRNA target sequence
gaatacctggtaagactagaa

SEQ ID NO: 275117 - DNA, 21 bp, Artificial sequence
  SiRNA target sequence
aatacctggtaagactagaat

SEQ ID NO: 275118 - DNA, 21 bp, Artificial sequence
  SiRNA target sequence
atacctggtaagactagaata

SEQ ID NO: 275119 - DNA, 21 bp, Artificial sequence
  SiRNA target sequence
tacctggtaagactagaatat

SEQ ID NO: 275120 - DNA, 21 bp, Artificial sequence
  SiRNA target sequence
acctggtaagactagaatatt

SEQ ID NO: 275121 - DNA, 21 bp, Artificial sequence
  SiRNA target sequence
cctggtaagactagaatattt

SEQ ID NO: 275122 - DNA, 21 bp, Artificial sequence
  SiRNA target sequence
ctggtaagactagaatattta

SEQ ID NO: 275123 - DNA, 21 bp, Artificial sequence
  SiRNA target sequence
tggtaagactagaatatttag

SEQ ID NO: 275124 - DNA, 21 bp, Artificial sequence
  SiRNA target sequence
ggtaagactagaatatttagt

SEQ ID NO: 275125 - DNA, 21 bp, Artificial sequence
  SiRNA target sequence
gtaagactagaatatttagta

SEQ ID NO: 275126 - DNA, 21 bp, Artificial sequence
  SiRNA target sequence
taagactagaatatttagtat

SEQ ID NO: 275127 - DNA, 21 bp, Artificial sequence
  SiRNA target sequence
aagactagaatatttagtata

SEQ ID NO: 275128 - DNA, 21 bp, Artificial sequence
  SiRNA target sequence
agactagaatatttagtataa

SEQ ID NO: 275129 - DNA, 21 bp, Artificial sequence
  SiRNA target sequence
gactagaatatttagtataag

SEQ ID NO: 275130 - DNA, 21 bp, Artificial sequence
  SiRNA target sequence
actagaatatttagtataagt

SEQ ID NO: 275131 - DNA, 21 bp, Artificial sequence
  SiRNA target sequence
ctagaatatttagtataagtc

SEQ ID NO: 275132 - DNA, 21 bp, Artificial sequence
  SiRNA target sequence
tagaatatttagtataagtcc

SEQ ID NO: 275133 - DNA, 21 bp, Artificial sequence
  SiRNA target sequence
agaatatttagtataagtccg

SEQ ID NO: 275134 - DNA, 21 bp, Artificial sequence
  SiRNA target sequence
gaatatttagtataagtccgg

SEQ ID NO: 275135 - DNA, 21 bp, Artificial sequence
  SiRNA target sequence
aatatttagtataagtccggt

SEQ ID NO: 275136 - DNA, 21 bp, Artificial sequence
  SiRNA target sequence
atatttagtataagtccggta

SEQ ID NO: 275137 - DNA, 21 bp, Artificial sequence
  SiRNA target sequence
tatttagtataagtccggtac

SEQ ID NO: 275138 - DNA, 21 bp, Artificial sequence
  SiRNA target sequence
atttagtataagtccggtaca

SEQ ID NO: 275139 - DNA, 21 bp, Artificial sequence
  SiRNA target sequence
tttagtataagtccggtacag

SEQ ID NO: 275140 - DNA, 21 bp, Artificial sequence
  SiRNA target sequence
ttagtataagtccggtacagt

SEQ ID NO: 275141 - DNA, 21 bp, Artificial sequence
  SiRNA target sequence
tagtataagtccggtacagtt

SEQ ID NO: 275142 - DNA, 21 bp, Artificial sequence
  SiRNA target sequence
agtataagtccggtacagttt

SEQ ID NO: 275143 - DNA, 21 bp, Artificial sequence
  SiRNA target sequence
gtataagtccggtacagttta

SEQ ID NO: 275144 - DNA, 21 bp, Artificial sequence
  SiRNA target sequence
tataagtccggtacagtttac

SEQ ID NO: 275145 - DNA, 21 bp, Artificial sequence
  SiRNA target sequence
ataagtccggtacagtttacc

SEQ ID NO: 275146 - DNA, 21 bp, Artificial sequence
  SiRNA target sequence
taagtccggtacagtttacca

SEQ ID NO: 275147 - DNA, 21 bp, Artificial sequence
  SiRNA target sequence
aagtccggtacagtttaccat

SEQ ID NO: 275148 - DNA, 21 bp, Artificial sequence
  SiRNA target sequence
agtccggtacagtttaccata

SEQ ID NO: 275149 - DNA, 21 bp, Artificial sequence
  SiRNA target sequence
gtccggtacagtttaccatac

SEQ ID NO: 275150 - DNA, 21 bp, Artificial sequence
  SiRNA target sequence
tccggtacagtttaccatacc

SEQ ID NO: 275151 - DNA, 21 bp, Artificial sequence
  SiRNA target sequence
ccggtacagtttaccataccg

SEQ ID NO: 275152 - DNA, 21 bp, Artificial sequence
  SiRNA target sequence
cggtacagtttaccataccgt

SEQ ID NO: 275153 - DNA, 21 bp, Artificial sequence
  SiRNA target sequence
ggtacagtttaccataccgtt

SEQ ID NO: 275154 - DNA, 21 bp, Artificial sequence
  SiRNA target sequence
gtacagtttaccataccgttt

SEQ ID NO: 275155 - DNA, 21 bp, Artificial sequence
  SiRNA target sequence
tacagtttaccataccgtttc

SEQ ID NO: 275156 - DNA, 21 bp, Artificial sequence
  SiRNA target sequence
acagtttaccataccgtttcg

SEQ ID NO: 275157 - DNA, 21 bp, Artificial sequence
  SiRNA target sequence
cagtttaccataccgtttcga

SEQ ID NO: 275158 - DNA, 21 bp, Artificial sequence
  SiRNA target sequence
agtttaccataccgtttcgac

SEQ ID NO: 275159 - DNA, 21 bp, Artificial sequence
  SiRNA target sequence
gtttaccataccgtttcgaca

SEQ ID NO: 275160 - DNA, 21 bp, Artificial sequence
  SiRNA target sequence
tttaccataccgtttcgacag

SEQ ID NO: 275161 - DNA, 21 bp, Artificial sequence
  SiRNA target sequence
ttaccataccgtttcgacagt

SEQ ID NO: 275162 - DNA, 21 bp, Artificial sequence
  SiRNA target sequence
taccataccgtttcgacagta

SEQ ID NO: 275163 - DNA, 21 bp, Artificial sequence
  SiRNA target sequence
accataccgtttcgacagtat

SEQ ID NO: 275164 - DNA, 21 bp, Artificial sequence
  SiRNA target sequence
ccataccgtttcgacagtatt

SEQ ID NO: 275165 - DNA, 21 bp, Artificial sequence
  SiRNA target sequence
cataccgtttcgacagtatta

SEQ ID NO: 275166 - DNA, 21 bp, Artificial sequence
  SiRNA target sequence
ataccgtttcgacagtattac

SEQ ID NO: 275167 - DNA, 21 bp, Artificial sequence
  SiRNA target sequence
taccgtttcgacagtattact

SEQ ID NO: 275168 - DNA, 21 bp, Artificial sequence
  SiRNA target sequence
accgtttcgacagtattactt

SEQ ID NO: 275169 - DNA, 21 bp, Artificial sequence
  SiRNA target sequence
ccgtttcgacagtattactta

SEQ ID NO: 275170 - DNA, 21 bp, Artificial sequence
  SiRNA target sequence
cgtttcgacagtattacttag

SEQ ID NO: 275171 - DNA, 21 bp, Artificial sequence
  SiRNA target sequence
gtttcgacagtattacttaga

SEQ ID NO: 275172 - DNA, 21 bp, Artificial sequence
  SiRNA target sequence
tttcgacagtattacttagac

SEQ ID NO: 275173 - DNA, 21 bp, Artificial sequence
  SiRNA target sequence
ttcgacagtattacttagact

SEQ ID NO: 275174 - DNA, 21 bp, Artificial sequence
  SiRNA target sequence
tcgacagtattacttagactt

SEQ ID NO: 275175 - DNA, 21 bp, Artificial sequence
  SiRNA target sequence
cgacagtattacttagacttt

SEQ ID NO: 275176 - DNA, 21 bp, Artificial sequence
  SiRNA target sequence
gacagtattacttagacttta

SEQ ID NO: 275177 - DNA, 21 bp, Artificial sequence
  SiRNA target sequence
acagtattacttagactttat

SEQ ID NO: 275178 - DNA, 21 bp, Artificial sequence
  SiRNA target sequence
cagtattacttagactttatg

SEQ ID NO: 275179 - DNA, 21 bp, Artificial sequence
  SiRNA target sequence
agtattacttagactttatgg

SEQ ID NO: 275180 - DNA, 21 bp, Artificial sequence
  SiRNA target sequence
gtattacttagactttatggc

SEQ ID NO: 275181 - DNA, 21 bp, Artificial sequence
  SiRNA target sequence
tattacttagactttatggca

SEQ ID NO: 275182 - DNA, 21 bp, Artificial sequence
  SiRNA target sequence
attacttagactttatggcat

SEQ ID NO: 275183 - DNA, 21 bp, Artificial sequence
  SiRNA target sequence
ttacttagactttatggcatc

SEQ ID NO: 275184 - DNA, 21 bp, Artificial sequence
  SiRNA target sequence
tacttagactttatggcatcc

SEQ ID NO: 275185 - DNA, 21 bp, Artificial sequence
  SiRNA target sequence
acttagactttatggcatcct

SEQ ID NO: 275186 - DNA, 21 bp, Artificial sequence
  SiRNA target sequence
cttagactttatggcatccta

SEQ ID NO: 275187 - DNA, 21 bp, Artificial sequence
  SiRNA target sequence
ttagactttatggcatcctat

SEQ ID NO: 275188 - DNA, 21 bp, Artificial sequence
  SiRNA target sequence
tagactttatggcatcctatc

SEQ ID NO: 275189 - DNA, 21 bp, Artificial sequence
  SiRNA target sequence
agactttatggcatcctatcg

SEQ ID NO: 275190 - DNA, 21 bp, Artificial sequence
  SiRNA target sequence
gactttatggcatcctatcga

SEQ ID NO: 275191 - DNA, 21 bp, Artificial sequence
  SiRNA target sequence
actttatggcatcctatcgag

SEQ ID NO: 275192 - DNA, 21 bp, Artificial sequence
  SiRNA target sequence
ctttatggcatcctatcgagc

SEQ ID NO: 275193 - DNA, 21 bp, Artificial sequence
  SiRNA target sequence
tttatggcatcctatcgagct

SEQ ID NO: 275194 - DNA, 21 bp, Artificial sequence
  SiRNA target sequence
ttatggcatcctatcgagctg

SEQ ID NO: 275195 - DNA, 21 bp, Artificial sequence
  SiRNA target sequence
tatggcatcctatcgagctgc

SEQ ID NO: 275196 - DNA, 21 bp, Artificial sequence
  SiRNA target sequence
atggcatcctatcgagctgca

SEQ ID NO: 275197 - DNA, 21 bp, Artificial sequence
  SiRNA target sequence
tggcatcctatcgagctgcac

SEQ ID NO: 275198 - DNA, 21 bp, Artificial sequence
  SiRNA target sequence
ggcatcctatcgagctgcacg

SEQ ID NO: 275199 - DNA, 21 bp, Artificial sequence
  SiRNA target sequence
gcatcctatcgagctgcacga

SEQ ID NO: 275200 - DNA, 21 bp, Artificial sequence
  SiRNA target sequence
catcctatcgagctgcacgac

SEQ ID NO: 275201 - DNA, 21 bp, Artificial sequence
  SiRNA target sequence
atcctatcgagctgcacgact

SEQ ID NO: 275202 - DNA, 21 bp, Artificial sequence
  SiRNA target sequence
tcctatcgagctgcacgactt

SEQ ID NO: 275203 - DNA, 21 bp, Artificial sequence
  SiRNA target sequence
cctatcgagctgcacgactta

SEQ ID NO: 275204 - DNA, 21 bp, Artificial sequence
  SiRNA target sequence
ctatcgagctgcacgacttaa

SEQ ID NO: 275205 - DNA, 21 bp, Artificial sequence
  SiRNA target sequence
tatcgagctgcacgacttaat

SEQ ID NO: 275206 - DNA, 21 bp, Artificial sequence
  SiRNA target sequence
atcgagctgcacgacttaatg

SEQ ID NO: 275207 - DNA, 21 bp, Artificial sequence
  SiRNA target sequence
tcgagctgcacgacttaatgc

SEQ ID NO: 275208 - DNA, 21 bp, Artificial sequence
  SiRNA target sequence
cgagctgcacgacttaatgct

SEQ ID NO: 275209 - DNA, 21 bp, Artificial sequence
  SiRNA target sequence
gagctgcacgacttaatgctg

SEQ ID NO: 275210 - DNA, 21 bp, Artificial sequence
  SiRNA target sequence
agctgcacgacttaatgctga

SEQ ID NO: 275211 - DNA, 21 bp, Artificial sequence
  SiRNA target sequence
gctgcacgacttaatgctgag

SEQ ID NO: 275212 - DNA, 21 bp, Artificial sequence
  SiRNA target sequence
ctgcacgacttaatgctgagc

SEQ ID NO: 275213 - DNA, 21 bp, Artificial sequence
  SiRNA target sequence
tgcacgacttaatgctgagca

SEQ ID NO: 275214 - DNA, 21 bp, Artificial sequence
  SiRNA target sequence
gcacgacttaatgctgagcat

SEQ ID NO: 275215 - DNA, 21 bp, Artificial sequence
  SiRNA target sequence
cacgacttaatgctgagcatg

SEQ ID NO: 275216 - DNA, 21 bp, Artificial sequence
  SiRNA target sequence
acgacttaatgctgagcatgg

SEQ ID NO: 275217 - DNA, 21 bp, Artificial sequence
  SiRNA target sequence
cgacttaatgctgagcatggt

SEQ ID NO: 275218 - DNA, 21 bp, Artificial sequence
  SiRNA target sequence
gacttaatgctgagcatggta

SEQ ID NO: 275219 - DNA, 21 bp, Artificial sequence
  SiRNA target sequence
acttaatgctgagcatggtat

SEQ ID NO: 275220 - DNA, 21 bp, Artificial sequence
  SiRNA target sequence
cttaatgctgagcatggtatt

SEQ ID NO: 275221 - DNA, 21 bp, Artificial sequence
  SiRNA target sequence
ttaatgctgagcatggtattg

SEQ ID NO: 275222 - DNA, 21 bp, Artificial sequence
  SiRNA target sequence
taatgctgagcatggtattgg

SEQ ID NO: 275223 - DNA, 21 bp, Artificial sequence
  SiRNA target sequence
aatgctgagcatggtattggt

SEQ ID NO: 275224 - DNA, 21 bp, Artificial sequence
  SiRNA target sequence
atgctgagcatggtattggta

SEQ ID NO: 275225 - DNA, 21 bp, Artificial sequence
  SiRNA target sequence
tgctgagcatggtattggtat

SEQ ID NO: 275226 - DNA, 21 bp, Artificial sequence
  SiRNA target sequence
gctgagcatggtattggtatt

SEQ ID NO: 275227 - DNA, 21 bp, Artificial sequence
  SiRNA target sequence
ctgagcatggtattggtattg

SEQ ID NO: 275228 - DNA, 21 bp, Artificial sequence
  SiRNA target sequence
tgagcatggtattggtattga

SEQ ID NO: 275229 - DNA, 21 bp, Artificial sequence
  SiRNA target sequence
gagcatggtattggtattgat

SEQ ID NO: 275230 - DNA, 21 bp, Artificial sequence
  SiRNA target sequence
agcatggtattggtattgatg

SEQ ID NO: 275231 - DNA, 21 bp, Artificial sequence
  SiRNA target sequence
gcatggtattggtattgatgt

SEQ ID NO: 275232 - DNA, 21 bp, Artificial sequence
  SiRNA target sequence
catggtattggtattgatgtt

SEQ ID NO: 275233 - DNA, 21 bp, Artificial sequence
  SiRNA target sequence
atggtattggtattgatgtta

SEQ ID NO: 275234 - DNA, 21 bp, Artificial sequence
  SiRNA target sequence
tggtattggtattgatgttaa

SEQ ID NO: 275235 - DNA, 21 bp, Artificial sequence
  SiRNA target sequence
ggtattggtattgatgttaac

SEQ ID NO: 275236 - DNA, 21 bp, Artificial sequence
  SiRNA target sequence
gtattggtattgatgttaaca

SEQ ID NO: 275237 - DNA, 21 bp, Artificial sequence
  SiRNA target sequence
tattggtattgatgttaacag

SEQ ID NO: 275238 - DNA, 21 bp, Artificial sequence
  SiRNA target sequence
attggtattgatgttaacagc

SEQ ID NO: 275239 - DNA, 21 bp, Artificial sequence
  SiRNA target sequence
ttggtattgatgttaacagct

SEQ ID NO: 275240 - DNA, 21 bp, Artificial sequence
  SiRNA target sequence
tggtattgatgttaacagctt

SEQ ID NO: 275241 - DNA, 21 bp, Artificial sequence
  SiRNA target sequence
ggtattgatgttaacagctta

SEQ ID NO: 275242 - DNA, 21 bp, Artificial sequence
  SiRNA target sequence
gtattgatgttaacagcttag

SEQ ID NO: 275243 - DNA, 21 bp, Artificial sequence
  SiRNA target sequence
tattgatgttaacagcttaga

SEQ ID NO: 275244 - DNA, 21 bp, Artificial sequence
  SiRNA target sequence
attgatgttaacagcttagag

SEQ ID NO: 275245 - DNA, 21 bp, Artificial sequence
  SiRNA target sequence
ttgatgttaacagcttagagt

SEQ ID NO: 275246 - DNA, 21 bp, Artificial sequence
  SiRNA target sequence
tgatgttaacagcttagagtg

SEQ ID NO: 275247 - DNA, 21 bp, Artificial sequence
  SiRNA target sequence
gatgttaacagcttagagtgg

SEQ ID NO: 275248 - DNA, 21 bp, Artificial sequence
  SiRNA target sequence
atgttaacagcttagagtgga

SEQ ID NO: 275249 - DNA, 21 bp, Artificial sequence
  SiRNA target sequence
tgttaacagcttagagtggac

SEQ ID NO: 275250 - DNA, 21 bp, Artificial sequence
  SiRNA target sequence
gttaacagcttagagtggaca

SEQ ID NO: 275251 - DNA, 21 bp, Artificial sequence
  SiRNA target sequence
ttaacagcttagagtggacaa

SEQ ID NO: 275252 - DNA, 21 bp, Artificial sequence
  SiRNA target sequence
taacagcttagagtggacaaa

SEQ ID NO: 275253 - DNA, 21 bp, Artificial sequence
  SiRNA target sequence
aacagcttagagtggacaaat

SEQ ID NO: 275254 - DNA, 21 bp, Artificial sequence
  SiRNA target sequence
acagcttagagtggacaaatt

SEQ ID NO: 275255 - DNA, 21 bp, Artificial sequence
  SiRNA target sequence
cagcttagagtggacaaattt

SEQ ID NO: 275256 - DNA, 21 bp, Artificial sequence
  SiRNA target sequence
agcttagagtggacaaatttg

SEQ ID NO: 275257 - DNA, 21 bp, Artificial sequence
  SiRNA target sequence
gcttagagtggacaaatttgg

SEQ ID NO: 275258 - DNA, 21 bp, Artificial sequence
  SiRNA target sequence
cttagagtggacaaatttggc

SEQ ID NO: 275259 - DNA, 21 bp, Artificial sequence
  SiRNA target sequence
ttagagtggacaaatttggca

SEQ ID NO: 275260 - DNA, 21 bp, Artificial sequence
  SiRNA target sequence
tagagtggacaaatttggcaa

SEQ ID NO: 275261 - DNA, 21 bp, Artificial sequence
  SiRNA target sequence
agagtggacaaatttggcaac

SEQ ID NO: 275262 - DNA, 21 bp, Artificial sequence
  SiRNA target sequence
gagtggacaaatttggcaaca

SEQ ID NO: 275263 - DNA, 21 bp, Artificial sequence
  SiRNA target sequence
agtggacaaatttggcaacaa

SEQ ID NO: 275264 - DNA, 21 bp, Artificial sequence
  SiRNA target sequence
gtggacaaatttggcaacaag

SEQ ID NO: 275265 - DNA, 21 bp, Artificial sequence
  SiRNA target sequence
tggacaaatttggcaacaagg

SEQ ID NO: 275266 - DNA, 21 bp, Artificial sequence
  SiRNA target sequence
ggacaaatttggcaacaaggt

SEQ ID NO: 275267 - DNA, 21 bp, Artificial sequence
  SiRNA target sequence
gacaaatttggcaacaaggtt

SEQ ID NO: 275268 - DNA, 21 bp, Artificial sequence
  SiRNA target sequence
acaaatttggcaacaaggttg

SEQ ID NO: 275269 - DNA, 21 bp, Artificial sequence
  SiRNA target sequence
caaatttggcaacaaggttgt

SEQ ID NO: 275270 - DNA, 21 bp, Artificial sequence
  SiRNA target sequence
aaatttggcaacaaggttgtc

SEQ ID NO: 275271 - DNA, 21 bp, Artificial sequence
  SiRNA target sequence
aatttggcaacaaggttgtct

SEQ ID NO: 275272 - DNA, 21 bp, Artificial sequence
  SiRNA target sequence
atttggcaacaaggttgtcta

SEQ ID NO: 275273 - DNA, 21 bp, Artificial sequence
  SiRNA target sequence
tttggcaacaaggttgtctaa

SEQ ID NO: 275274 - DNA, 21 bp, Artificial sequence
  SiRNA target sequence
ttggcaacaaggttgtctaag

SEQ ID NO: 275275 - DNA, 21 bp, Artificial sequence
  SiRNA target sequence
tggcaacaaggttgtctaagt

SEQ ID NO: 275276 - DNA, 21 bp, Artificial sequence
  SiRNA target sequence
  misc_feature (21)..(21): n is a, c, g, or t
ggcaacaaggttgtctaagtn

SEQ ID NO: 275277 - DNA, 21 bp, Artificial sequence
  SiRNA target sequence
  misc_feature (20)..(20): n is a, c, g, or t
gcaacaaggttgtctaagtnt

SEQ ID NO: 275278 - DNA, 21 bp, Artificial sequence
  SiRNA target sequence
  misc_feature (19)..(19): n is a, c, g, or t
caacaaggttgtctaagtntg

SEQ ID NO: 275279 - DNA, 21 bp, Artificial sequence
  SiRNA target sequence
  misc_feature (18)..(18): n is a, c, g, or t
aacaaggttgtctaagtntgg

SEQ ID NO: 275280 - DNA, 21 bp, Artificial sequence
  SiRNA target sequence
  misc_feature (17)..(17): n is a, c, g, or t
acaaggttgtctaagtntggc

SEQ ID NO: 275281 - DNA, 21 bp, Artificial sequence
  SiRNA target sequence
  misc_feature (16)..(16): n is a, c, g, or t
caaggttgtctaagtntggca

SEQ ID NO: 275282 - DNA, 21 bp, Artificial sequence
  SiRNA target sequence
  misc_feature (15)..(15): n is a, c, g, or t
aaggttgtctaagtntggcac

SEQ ID NO: 275283 - DNA, 21 bp, Artificial sequence
  SiRNA target sequence
  misc_feature (14)..(14): n is a, c, g, or t
aggttgtctaagtntggcact

SEQ ID NO: 275284 - DNA, 21 bp, Artificial sequence
  SiRNA target sequence
  misc_feature (13)..(13): n is a, c, g, or t
ggttgtctaagtntggcactc

SEQ ID NO: 275285 - DNA, 21 bp, Artificial sequence
  SiRNA target sequence
  misc_feature (12)..(12): n is a, c, g, or t
gttgtctaagtntggcactca

SEQ ID NO: 275286 - DNA, 21 bp, Artificial sequence
  SiRNA target sequence
  misc_feature (11)..(11): n is a, c, g, or t
ttgtctaagtntggcactcac

SEQ ID NO: 275287 - DNA, 21 bp, Artificial sequence
  SiRNA target sequence
  misc_feature (10)..(10): n is a, c, g, or t
tgtctaagtntggcactcaca

SEQ ID NO: 275288 - DNA, 21 bp, Artificial sequence
  SiRNA target sequence
  misc_feature (9)..(9): n is a, c, g, or t
gtctaagtntggcactcacat

SEQ ID NO: 275289 - DNA, 21 bp, Artificial sequence
  SiRNA target sequence
  misc_feature (8)..(8): n is a, c, g, or t
tctaagtntggcactcacatc

SEQ ID NO: 275290 - DNA, 21 bp, Artificial sequence
  SiRNA target sequence
  misc_feature (7)..(7): n is a, c, g, or t
ctaagtntggcactcacatcg

SEQ ID NO: 275291 - DNA, 21 bp, Artificial sequence
  SiRNA target sequence
  misc_feature (6)..(6): n is a, c, g, or t
taagtntggcactcacatcgt

SEQ ID NO: 275292 - DNA, 21 bp, Artificial sequence
  SiRNA target sequence
  misc_feature (5)..(5): n is a, c, g, or t
aagtntggcactcacatcgtg

SEQ ID NO: 275293 - DNA, 21 bp, Artificial sequence
  SiRNA target sequence
  misc_feature (4)..(4): n is a, c, g, or t
agtntggcactcacatcgtga

SEQ ID NO: 275294 - DNA, 21 bp, Artificial sequence
  SiRNA target sequence
  misc_feature (3)..(3): n is a, c, g, or t
gtntggcactcacatcgtgac

SEQ ID NO: 275295 - DNA, 21 bp, Artificial sequence
  SiRNA target sequence
  misc_feature (2)..(2): n is a, c, g, or t
tntggcactcacatcgtgaca

SEQ ID NO: 275296 - DNA, 21 bp, Artificial sequence
  SiRNA target sequence
  misc_feature (1)..(1): n is a, c, g, or t
ntggcactcacatcgtgacag

SEQ ID NO: 275297 - DNA, 21 bp, Artificial sequence
  SiRNA target sequence
tggcactcacatcgtgacagg

SEQ ID NO: 275298 - DNA, 21 bp, Artificial sequence
  SiRNA target sequence
ggcactcacatcgtgacagga

SEQ ID NO: 275299 - DNA, 21 bp, Artificial sequence
  SiRNA target sequence
gcactcacatcgtgacaggag

SEQ ID NO: 275300 - DNA, 21 bp, Artificial sequence
  SiRNA target sequence
cactcacatcgtgacaggaga

SEQ ID NO: 275301 - DNA, 21 bp, Artificial sequence
  SiRNA target sequence
actcacatcgtgacaggagat

SEQ ID NO: 275302 - DNA, 21 bp, Artificial sequence
  SiRNA target sequence
ctcacatcgtgacaggagatt

SEQ ID NO: 275303 - DNA, 21 bp, Artificial sequence
  SiRNA target sequence
tcacatcgtgacaggagatta

SEQ ID NO: 275304 - DNA, 21 bp, Artificial sequence
  SiRNA target sequence
cacatcgtgacaggagattat

SEQ ID NO: 275305 - DNA, 21 bp, Artificial sequence
  SiRNA target sequence
acatcgtgacaggagattata

SEQ ID NO: 275306 - DNA, 21 bp, Artificial sequence
  SiRNA target sequence
catcgtgacaggagattataa

SEQ ID NO: 275307 - DNA, 21 bp, Artificial sequence
  SiRNA target sequence
atcgtgacaggagattataag

SEQ ID NO: 275308 - DNA, 21 bp, Artificial sequence
  SiRNA target sequence
tcgtgacaggagattataaga

SEQ ID NO: 275309 - DNA, 21 bp, Artificial sequence
  SiRNA target sequence
cgtgacaggagattataagaa

SEQ ID NO: 275310 - DNA, 21 bp, Artificial sequence
  SiRNA target sequence
gtgacaggagattataagaat

SEQ ID NO: 275311 - DNA, 21 bp, Artificial sequence
  SiRNA target sequence
tgacaggagattataagaatt

SEQ ID NO: 275312 - DNA, 21 bp, Artificial sequence
  SiRNA target sequence
gacaggagattataagaattt

SEQ ID NO: 275313 - DNA, 21 bp, Artificial sequence
  SiRNA target sequence
acaggagattataagaatttt

SEQ ID NO: 275314 - DNA, 21 bp, Artificial sequence
  SiRNA target sequence
caggagattataagaattttg

SEQ ID NO: 275315 - DNA, 21 bp, Artificial sequence
  SiRNA target sequence
aggagattataagaattttgg

SEQ ID NO: 275316 - DNA, 21 bp, Artificial sequence
  SiRNA target sequence
ggagattataagaattttggt

SEQ ID NO: 275317 - DNA, 21 bp, Artificial sequence
  SiRNA target sequence
gagattataagaattttggtc

SEQ ID NO: 275318 - DNA, 21 bp, Artificial sequence
  SiRNA target sequence
agattataagaattttggtcc

SEQ ID NO: 275319 - DNA, 21 bp, Artificial sequence
  SiRNA target sequence
gattataagaattttggtcct

SEQ ID NO: 275320 - DNA, 21 bp, Artificial sequence
  SiRNA target sequence
attataagaattttggtcctg

SEQ ID NO: 275321 - DNA, 21 bp, Artificial sequence
  SiRNA target sequence
ttataagaattttggtcctgg

SEQ ID NO: 275322 - DNA, 21 bp, Artificial sequence
  SiRNA target sequence
tataagaattttggtcctggg

SEQ ID NO: 275323 - DNA, 21 bp, Artificial sequence
  SiRNA target sequence
ataagaattttggtcctgggt

SEQ ID NO: 275324 - DNA, 21 bp, Artificial sequence
  SiRNA target sequence
taagaattttggtcctgggtt

SEQ ID NO: 275325 - DNA, 21 bp, Artificial sequence
  SiRNA target sequence
aagaattttggtcctgggtta

SEQ ID NO: 275326 - DNA, 21 bp, Artificial sequence
  SiRNA target sequence
agaattttggtcctgggttag

SEQ ID NO: 275327 - DNA, 21 bp, Artificial sequence
  SiRNA target sequence
gaattttggtcctgggttaga

SEQ ID NO: 275328 - DNA, 21 bp, Artificial sequence
  SiRNA target sequence
aattttggtcctgggttagat

SEQ ID NO: 275329 - DNA, 21 bp, Artificial sequence
  SiRNA target sequence
attttggtcctgggttagatt

SEQ ID NO: 275330 - DNA, 21 bp, Artificial sequence
  SiRNA target sequence
ttttggtcctgggttagattc

SEQ ID NO: 275331 - DNA, 21 bp, Artificial sequence
  SiRNA target sequence
tttggtcctgggttagattcc

SEQ ID NO: 275332 - DNA, 21 bp, Artificial sequence
  SiRNA target sequence
ttggtcctgggttagattccg

SEQ ID NO: 275333 - DNA, 21 bp, Artificial sequence
  SiRNA target sequence
tggtcctgggttagattccga

SEQ ID NO: 275334 - DNA, 21 bp, Artificial sequence
  SiRNA target sequence
ggtcctgggttagattccgat

SEQ ID NO: 275335 - DNA, 21 bp, Artificial sequence
  SiRNA target sequence
gtcctgggttagattccgatg

SEQ ID NO: 275336 - DNA, 21 bp, Artificial sequence
  SiRNA target sequence
tcctgggttagattccgatgt

SEQ ID NO: 275337 - DNA, 21 bp, Artificial sequence
  SiRNA target sequence
cctgggttagattccgatgtt

SEQ ID NO: 275338 - DNA, 21 bp, Artificial sequence
  SiRNA target sequence
ctgggttagattccgatgttg

SEQ ID NO: 275339 - DNA, 21 bp, Artificial sequence
  SiRNA target sequence
tgggttagattccgatgttgc

SEQ ID NO: 275340 - DNA, 21 bp, Artificial sequence
  SiRNA target sequence
gggttagattccgatgttgca

SEQ ID NO: 275341 - DNA, 21 bp, Artificial sequence
  SiRNA target sequence
ggttagattccgatgttgcag

SEQ ID NO: 275342 - DNA, 21 bp, Artificial sequence
  SiRNA target sequence
gttagattccgatgttgcagc

SEQ ID NO: 275343 - DNA, 21 bp, Artificial sequence
  SiRNA target sequence
ttagattccgatgttgcagct

SEQ ID NO: 275344 - DNA, 21 bp, Artificial sequence
  SiRNA target sequence
tagattccgatgttgcagctt

SEQ ID NO: 275345 - DNA, 21 bp, Artificial sequence
  SiRNA target sequence
agattccgatgttgcagcttc

SEQ ID NO: 275346 - DNA, 21 bp, Artificial sequence
  SiRNA target sequence
gattccgatgttgcagcttca

SEQ ID NO: 275347 - DNA, 21 bp, Artificial sequence
  SiRNA target sequence
attccgatgttgcagcttcag

SEQ ID NO: 275348 - DNA, 21 bp, Artificial sequence
  SiRNA target sequence
ttccgatgttgcagcttcagc

SEQ ID NO: 275349 - DNA, 21 bp, Artificial sequence
  SiRNA target sequence
tccgatgttgcagcttcagcg

SEQ ID NO: 275350 - DNA, 21 bp, Artificial sequence
  SiRNA target sequence
ccgatgttgcagcttcagcgt

SEQ ID NO: 275351 - DNA, 21 bp, Artificial sequence
  SiRNA target sequence
cgatgttgcagcttcagcgtt

SEQ ID NO: 275352 - DNA, 21 bp, Artificial sequence
  SiRNA target sequence
gatgttgcagcttcagcgttc

SEQ ID NO: 275353 - DNA, 21 bp, Artificial sequence
  SiRNA target sequence
atgttgcagcttcagcgttcg

SEQ ID NO: 275354 - DNA, 21 bp, Artificial sequence
  SiRNA target sequence
tgttgcagcttcagcgttcga

SEQ ID NO: 275355 - DNA, 21 bp, Artificial sequence
  SiRNA target sequence
gttgcagcttcagcgttcgaa

SEQ ID NO: 275356 - DNA, 21 bp, Artificial sequence
  SiRNA target sequence
ttgcagcttcagcgttcgaaa

SEQ ID NO: 275357 - DNA, 21 bp, Artificial sequence
  SiRNA target sequence
tgcagcttcagcgttcgaaat

SEQ ID NO: 275358 - DNA, 21 bp, Artificial sequence
  SiRNA target sequence
gcagcttcagcgttcgaaatt

SEQ ID NO: 275359 - DNA, 21 bp, Artificial sequence
  SiRNA target sequence
cagcttcagcgttcgaaatta

SEQ ID NO: 275360 - DNA, 21 bp, Artificial sequence
  SiRNA target sequence
agcttcagcgttcgaaattat

SEQ ID NO: 275361 - DNA, 21 bp, Artificial sequence
  SiRNA target sequence
gcttcagcgttcgaaattatt

SEQ ID NO: 275362 - DNA, 21 bp, Artificial sequence
  SiRNA target sequence
cttcagcgttcgaaattatta

SEQ ID NO: 275363 - DNA, 21 bp, Artificial sequence
  SiRNA target sequence
ttcagcgttcgaaattattat

SEQ ID NO: 275364 - DNA, 21 bp, Artificial sequence
  SiRNA target sequence
tcagcgttcgaaattattatc

SEQ ID NO: 275365 - DNA, 21 bp, Artificial sequence
  SiRNA target sequence
cagcgttcgaaattattatcg

SEQ ID NO: 275366 - DNA, 21 bp, Artificial sequence
  SiRNA target sequence
agcgttcgaaattattatcga

SEQ ID NO: 275367 - DNA, 21 bp, Artificial sequence
  SiRNA target sequence
gcgttcgaaattattatcgac

SEQ ID NO: 275368 - DNA, 21 bp, Artificial sequence
  SiRNA target sequence
cgttcgaaattattatcgact

SEQ ID NO: 275369 - DNA, 21 bp, Artificial sequence
  SiRNA target sequence
gttcgaaattattatcgactg

SEQ ID NO: 275370 - DNA, 21 bp, Artificial sequence
  SiRNA target sequence
ttcgaaattattatcgactgg

SEQ ID NO: 275371 - DNA, 21 bp, Artificial sequence
  SiRNA target sequence
tcgaaattattatcgactggg

SEQ ID NO: 275372 - DNA, 21 bp, Artificial sequence
  SiRNA target sequence
cgaaattattatcgactgggt

SEQ ID NO: 275373 - DNA, 21 bp, Artificial sequence
  SiRNA target sequence
gaaattattatcgactgggta

SEQ ID NO: 275374 - DNA, 21 bp, Artificial sequence
  SiRNA target sequence
aaattattatcgactgggtat

SEQ ID NO: 275375 - DNA, 21 bp, Artificial sequence
  SiRNA target sequence
aattattatcgactgggtatt

SEQ ID NO: 275376 - DNA, 21 bp, Artificial sequence
  SiRNA target sequence
attattatcgactgggtatta

SEQ ID NO: 275377 - DNA, 21 bp, Artificial sequence
  SiRNA target sequence
ttattatcgactgggtattac

SEQ ID NO: 275378 - DNA, 21 bp, Artificial sequence
  SiRNA target sequence
tattatcgactgggtattaca

SEQ ID NO: 275379 - DNA, 21 bp, Artificial sequence
  SiRNA target sequence
attatcgactgggtattacat

SEQ ID NO: 275380 - DNA, 21 bp, Artificial sequence
  SiRNA target sequence
ttatcgactgggtattacatt

SEQ ID NO: 275381 - DNA, 21 bp, Artificial sequence
  SiRNA target sequence
tatcgactgggtattacatta

SEQ ID NO: 275382 - DNA, 21 bp, Artificial sequence
  SiRNA target sequence
atcgactgggtattacattac

SEQ ID NO: 275383 - DNA, 21 bp, Artificial sequence
  SiRNA target sequence
tcgactgggtattacattaca

SEQ ID NO: 275384 - DNA, 21 bp, Artificial sequence
  SiRNA target sequence
cgactgggtattacattacac

SEQ ID NO: 275385 - DNA, 21 bp, Artificial sequence
  SiRNA target sequence
gactgggtattacattacacc

SEQ ID NO: 275386 - DNA, 21 bp, Artificial sequence
  SiRNA target sequence
actgggtattacattacaccg

SEQ ID NO: 275387 - DNA, 21 bp, Artificial sequence
  SiRNA target sequence
ctgggtattacattacaccga

SEQ ID NO: 275388 - DNA, 21 bp, Artificial sequence
  SiRNA target sequence
tgggtattacattacaccgaa

SEQ ID NO: 275389 - DNA, 21 bp, Artificial sequence
  SiRNA target sequence
gggtattacattacaccgaag

SEQ ID NO: 275390 - DNA, 21 bp, Artificial sequence
  SiRNA target sequence
ggtattacattacaccgaaga

SEQ ID NO: 275391 - DNA, 21 bp, Artificial sequence
  SiRNA target sequence
gtattacattacaccgaagaa

SEQ ID NO: 275392 - DNA, 21 bp, Artificial sequence
  SiRNA target sequence
tattacattacaccgaagaag

SEQ ID NO: 275393 - DNA, 21 bp, Artificial sequence
  SiRNA target sequence
attacattacaccgaagaaga

SEQ ID NO: 275394 - DNA, 21 bp, Artificial sequence
  SiRNA target sequence
ttacattacaccgaagaagat

SEQ ID NO: 275395 - DNA, 21 bp, Artificial sequence
  SiRNA target sequence
tacattacaccgaagaagata

SEQ ID NO: 275396 - DNA, 21 bp, Artificial sequence
  SiRNA target sequence
acattacaccgaagaagataa

SEQ ID NO: 275397 - DNA, 21 bp, Artificial sequence
  SiRNA target sequence
cattacaccgaagaagataat

SEQ ID NO: 275398 - DNA, 21 bp, Artificial sequence
  SiRNA target sequence
attacaccgaagaagataata

SEQ ID NO: 275399 - DNA, 21 bp, Artificial sequence
  SiRNA target sequence
ttacaccgaagaagataataa

SEQ ID NO: 275400 - DNA, 21 bp, Artificial sequence
  SiRNA target sequence
tacaccgaagaagataataaa

SEQ ID NO: 275401 - DNA, 21 bp, Artificial sequence
  SiRNA target sequence
acaccgaagaagataataaag

SEQ ID NO: 275402 - DNA, 21 bp, Artificial sequence
  SiRNA target sequence
caccgaagaagataataaaga

SEQ ID NO: 275403 - DNA, 21 bp, Artificial sequence
  SiRNA target sequence
  misc_feature (21)..(21): n is a, c, g, or t
accgaagaagataataaagan

SEQ ID NO: 275404 - DNA, 21 bp, Artificial sequence
  SiRNA target sequence
  misc_feature (20)..(20): n is a, c, g, or t
ccgaagaagataataaagang

SEQ ID NO: 275405 - DNA, 21 bp, Artificial sequence
  SiRNA target sequence
  misc_feature (19)..(19): n is a, c, g, or t
cgaagaagataataaaganga

SEQ ID NO: 275406 - DNA, 21 bp, Artificial sequence
  SiRNA target sequence
  misc_feature (18)..(18): n is a, c, g, or t
gaagaagataataaagangaa

SEQ ID NO: 275407 - DNA, 21 bp, Artificial sequence
  SiRNA target sequence
  misc_feature (17)..(17): n is a, c, g, or t
aagaagataataaagangaaa

SEQ ID NO: 275408 - DNA, 21 bp, Artificial sequence
  SiRNA target sequence
  misc_feature (16)..(16): n is a, c, g, or t
agaagataataaagangaaat

SEQ ID NO: 275409 - DNA, 21 bp, Artificial sequence
  SiRNA target sequence
  misc_feature (15)..(15): n is a, c, g, or t
gaagataataaagangaaatg

SEQ ID NO: 275410 - DNA, 21 bp, Artificial sequence
  SiRNA target sequence
  misc_feature (14)..(14): n is a, c, g, or t
aagataataaagangaaatga

SEQ ID NO: 275411 - DNA, 21 bp, Artificial sequence
  SiRNA target sequence
  misc_feature (13)..(13): n is a, c, g, or t
agataataaagangaaatgaa

SEQ ID NO: 275412 - DNA, 21 bp, Artificial sequence
  SiRNA target sequence
  misc_feature (12)..(12): n is a, c, g, or t
gataataaagangaaatgaag

SEQ ID NO: 275413 - DNA, 21 bp, Artificial sequence
  SiRNA target sequence
  misc_feature (11)..(11): n is a, c, g, or t
ataataaagangaaatgaagc

SEQ ID NO: 275414 - DNA, 21 bp, Artificial sequence
  SiRNA target sequence
  misc_feature (10)..(10): n is a, c, g, or t
taataaagangaaatgaagcg

SEQ ID NO: 275415 - DNA, 21 bp, Artificial sequence
  SiRNA target sequence
  misc_feature (9)..(9): n is a, c, g, or t
aataaagangaaatgaagcga

SEQ ID NO: 275416 - DNA, 21 bp, Artificial sequence
  SiRNA target sequence
  misc_feature (8)..(8): n is a, c, g, or t
ataaagangaaatgaagcgag

SEQ ID NO: 275417 - DNA, 21 bp, Artificial sequence
  SiRNA target sequence
  misc_feature (7)..(7): n is a, c, g, or t
taaagangaaatgaagcgagt

SEQ ID NO: 275418 - DNA, 21 bp, Artificial sequence
  SiRNA target sequence
  misc_feature (6)..(6): n is a, c, g, or t
aaagangaaatgaagcgagta

SEQ ID NO: 275419 - DNA, 21 bp, Artificial sequence
  SiRNA target sequence
  misc_feature (5)..(5): n is a, c, g, or t
aagangaaatgaagcgagtaa

SEQ ID NO: 275420 - DNA, 21 bp, Artificial sequence
  SiRNA target sequence
  misc_feature (4)..(4): n is a, c, g, or t
agangaaatgaagcgagtaat

SEQ ID NO: 275421 - DNA, 21 bp, Artificial sequence
  SiRNA target sequence
  misc_feature (3)..(3): n is a, c, g, or t
gangaaatgaagcgagtaatg

SEQ ID NO: 275422 - DNA, 21 bp, Artificial sequence
  SiRNA target sequence
  misc_feature (2)..(2): n is a, c, g, or t
angaaatgaagcgagtaatgt

SEQ ID NO: 275423 - DNA, 21 bp, Artificial sequence
  SiRNA target sequence
  misc_feature (1)..(1): n is a, c, g, or t
ngaaatgaagcgagtaatgtg

SEQ ID NO: 275424 - DNA, 21 bp, Artificial sequence
  SiRNA target sequence
gaaatgaagcgagtaatgtgg

SEQ ID NO: 275425 - DNA, 21 bp, Artificial sequence
  SiRNA target sequence
aaatgaagcgagtaatgtgga

SEQ ID NO: 275426 - DNA, 21 bp, Artificial sequence
  SiRNA target sequence
aatgaagcgagtaatgtggac

SEQ ID NO: 275427 - DNA, 21 bp, Artificial sequence
  SiRNA target sequence
atgaagcgagtaatgtggacc

SEQ ID NO: 275428 - DNA, 21 bp, Artificial sequence
  SiRNA target sequence
tgaagcgagtaatgtggacca

SEQ ID NO: 275429 - DNA, 21 bp, Artificial sequence
  SiRNA target sequence
gaagcgagtaatgtggaccat

SEQ ID NO: 275430 - DNA, 21 bp, Artificial sequence
  SiRNA target sequence
aagcgagtaatgtggaccatg

SEQ ID NO: 275431 - DNA, 21 bp, Artificial sequence
  SiRNA target sequence
agcgagtaatgtggaccatgg

SEQ ID NO: 275432 - DNA, 21 bp, Artificial sequence
  SiRNA target sequence
gcgagtaatgtggaccatggc

SEQ ID NO: 275433 - DNA, 21 bp, Artificial sequence
  SiRNA target sequence
cgagtaatgtggaccatggcg

SEQ ID NO: 275434 - DNA, 21 bp, Artificial sequence
  SiRNA target sequence
gagtaatgtggaccatggcgc

SEQ ID NO: 275435 - DNA, 21 bp, Artificial sequence
  SiRNA target sequence
agtaatgtggaccatggcgca

SEQ ID NO: 275436 - DNA, 21 bp, Artificial sequence
  SiRNA target sequence
gtaatgtggaccatggcgcaa

SEQ ID NO: 275437 - DNA, 21 bp, Artificial sequence
  SiRNA target sequence
taatgtggaccatggcgcaag

SEQ ID NO: 275438 - DNA, 21 bp, Artificial sequence
  SiRNA target sequence
aatgtggaccatggcgcaaga

SEQ ID NO: 275439 - DNA, 21 bp, Artificial sequence
  SiRNA target sequence
atgtggaccatggcgcaagag

SEQ ID NO: 275440 - DNA, 21 bp, Artificial sequence
  SiRNA target sequence
tgtggaccatggcgcaagaga

SEQ ID NO: 275441 - DNA, 21 bp, Artificial sequence
  SiRNA target sequence
gtggaccatggcgcaagagat

SEQ ID NO: 275442 - DNA, 21 bp, Artificial sequence
  SiRNA target sequence
tggaccatggcgcaagagatc

SEQ ID NO: 275443 - DNA, 21 bp, Artificial sequence
  SiRNA target sequence
ggaccatggcgcaagagatct

SEQ ID NO: 275444 - DNA, 21 bp, Artificial sequence
  SiRNA target sequence
gaccatggcgcaagagatctt

SEQ ID NO: 275445 - DNA, 21 bp, Artificial sequence
  SiRNA target sequence
accatggcgcaagagatctta

SEQ ID NO: 275446 - DNA, 21 bp, Artificial sequence
  SiRNA target sequence
ccatggcgcaagagatcttag

SEQ ID NO: 275447 - DNA, 21 bp, Artificial sequence
  SiRNA target sequence
catggcgcaagagatcttagc

SEQ ID NO: 275448 - DNA, 21 bp, Artificial sequence
  SiRNA target sequence
atggcgcaagagatcttagcg

SEQ ID NO: 275449 - DNA, 21 bp, Artificial sequence
  SiRNA target sequence
tggcgcaagagatcttagcgc

SEQ ID NO: 275450 - DNA, 21 bp, Artificial sequence
  SiRNA target sequence
ggcgcaagagatcttagcgcc

SEQ ID NO: 275451 - DNA, 21 bp, Artificial sequence
  SiRNA target sequence
gcgcaagagatcttagcgcct

SEQ ID NO: 275452 - DNA, 21 bp, Artificial sequence
  SiRNA target sequence
cgcaagagatcttagcgccta

SEQ ID NO: 275453 - DNA, 21 bp, Artificial sequence
  SiRNA target sequence
gcaagagatcttagcgcctag

SEQ ID NO: 275454 - DNA, 21 bp, Artificial sequence
  SiRNA target sequence
caagagatcttagcgcctagt

SEQ ID NO: 275455 - DNA, 21 bp, Artificial sequence
  SiRNA target sequence
aagagatcttagcgcctagtc

SEQ ID NO: 275456 - DNA, 21 bp, Artificial sequence
  SiRNA target sequence
agagatcttagcgcctagtca

SEQ ID NO: 275457 - DNA, 21 bp, Artificial sequence
  SiRNA target sequence
gagatcttagcgcctagtcat

SEQ ID NO: 275458 - DNA, 21 bp, Artificial sequence
  SiRNA target sequence
agatcttagcgcctagtcatc

SEQ ID NO: 275459 - DNA, 21 bp, Artificial sequence
  SiRNA target sequence
gatcttagcgcctagtcatct

SEQ ID NO: 275460 - DNA, 21 bp, Artificial sequence
  SiRNA target sequence
atcttagcgcctagtcatcta

SEQ ID NO: 275461 - DNA, 21 bp, Artificial sequence
  SiRNA target sequence
tcttagcgcctagtcatctat

SEQ ID NO: 275462 - DNA, 21 bp, Artificial sequence
  SiRNA target sequence
cttagcgcctagtcatctata

SEQ ID NO: 275463 - DNA, 21 bp, Artificial sequence
  SiRNA target sequence
ttagcgcctagtcatctatat

SEQ ID NO: 275464 - DNA, 21 bp, Artificial sequence
  SiRNA target sequence
tagcgcctagtcatctatatc

SEQ ID NO: 275465 - DNA, 21 bp, Artificial sequence
  SiRNA target sequence
agcgcctagtcatctatatcg

SEQ ID NO: 275466 - DNA, 21 bp, Artificial sequence
  SiRNA target sequence
gcgcctagtcatctatatcgc

SEQ ID NO: 275467 - DNA, 21 bp, Artificial sequence
  SiRNA target sequence
cgcctagtcatctatatcgcg

SEQ ID NO: 275468 - DNA, 21 bp, Artificial sequence
  SiRNA target sequence
gcctagtcatctatatcgcga

SEQ ID NO: 275469 - DNA, 21 bp, Artificial sequence
  SiRNA target sequence
cctagtcatctatatcgcgac

SEQ ID NO: 275470 - DNA, 21 bp, Artificial sequence
  SiRNA target sequence
  misc_feature (21)..(21): n is a, c, g, or t
ctagtcatctatatcgcgacn

SEQ ID NO: 275471 - DNA, 21 bp, Artificial sequence
  SiRNA target sequence
  misc_feature (20)..(20): n is a, c, g, or t
tagtcatctatatcgcgacnt

SEQ ID NO: 275472 - DNA, 21 bp, Artificial sequence
  SiRNA target sequence
  misc_feature (19)..(19): n is a, c, g, or t
agtcatctatatcgcgacntg

SEQ ID NO: 275473 - DNA, 21 bp, Artificial sequence
  SiRNA target sequence
  misc_feature (18)..(18): n is a, c, g, or t
gtcatctatatcgcgacntgg

SEQ ID NO: 275474 - DNA, 21 bp, Artificial sequence
  SiRNA target sequence
  misc_feature (17)..(17): n is a, c, g, or t
tcatctatatcgcgacntggt

SEQ ID NO: 275475 - DNA, 21 bp, Artificial sequence
  SiRNA target sequence
  misc_feature (16)..(16): n is a, c, g, or t
catctatatcgcgacntggtg

SEQ ID NO: 275476 - DNA, 21 bp, Artificial sequence
  SiRNA target sequence
  misc_feature (15)..(15): n is a, c, g, or t
atctatatcgcgacntggtgt

SEQ ID NO: 275477 - DNA, 21 bp, Artificial sequence
  SiRNA target sequence
  misc_feature (14)..(14): n is a, c, g, or t
tctatatcgcgacntggtgta

SEQ ID NO: 275478 - DNA, 21 bp, Artificial sequence
  SiRNA target sequence
  misc_feature (13)..(13): n is a, c, g, or t
ctatatcgcgacntggtgtac

SEQ ID NO: 275479 - DNA, 21 bp, Artificial sequence
  SiRNA target sequence
  misc_feature (12)..(12): n is a, c, g, or t
tatatcgcgacntggtgtacc

SEQ ID NO: 275480 - DNA, 21 bp, Artificial sequence
  SiRNA target sequence
  misc_feature (11)..(11): n is a, c, g, or t
atatcgcgacntggtgtaccg

SEQ ID NO: 275481 - DNA, 21 bp, Artificial sequence
  SiRNA target sequence
  misc_feature (10)..(10): n is a, c, g, or t
tatcgcgacntggtgtaccga

SEQ ID NO: 275482 - DNA, 21 bp, Artificial sequence
  SiRNA target sequence
  misc_feature (9)..(9): n is a, c, g, or t
atcgcgacntggtgtaccgag

SEQ ID NO: 275483 - DNA, 21 bp, Artificial sequence
  SiRNA target sequence
  misc_feature (8)..(8): n is a, c, g, or t
tcgcgacntggtgtaccgagt

SEQ ID NO: 275484 - DNA, 21 bp, Artificial sequence
  SiRNA target sequence
  misc_feature (7)..(7): n is a, c, g, or t
cgcgacntggtgtaccgagta

SEQ ID NO: 275485 - DNA, 21 bp, Artificial sequence
  SiRNA target sequence
  misc_feature (6)..(6): n is a, c, g, or t
gcgacntggtgtaccgagtac

SEQ ID NO: 275486 - DNA, 21 bp, Artificial sequence
  SiRNA target sequence
  misc_feature (5)..(5): n is a, c, g, or t
cgacntggtgtaccgagtacc

SEQ ID NO: 275487 - DNA, 21 bp, Artificial sequence
  SiRNA target sequence
  misc_feature (4)..(4): n is a, c, g, or t
gacntggtgtaccgagtacct

SEQ ID NO: 275488 - DNA, 21 bp, Artificial sequence
  SiRNA target sequence
  misc_feature (3)..(3): n is a, c, g, or t
acntggtgtaccgagtacctt

SEQ ID NO: 275489 - DNA, 21 bp, Artificial sequence
  SiRNA target sequence
  misc_feature (2)..(2): n is a, c, g, or t
cntggtgtaccgagtaccttg

SEQ ID NO: 275490 - DNA, 21 bp, Artificial sequence
  SiRNA target sequence
  misc_feature (1)..(1): n is a, c, g, or t
ntggtgtaccgagtaccttgt

SEQ ID NO: 275491 - DNA, 21 bp, Artificial sequence
  SiRNA target sequence
tggtgtaccgagtaccttgtg

SEQ ID NO: 275492 - DNA, 21 bp, Artificial sequence
  SiRNA target sequence
ggtgtaccgagtaccttgtgg

SEQ ID NO: 275493 - DNA, 21 bp, Artificial sequence
  SiRNA target sequence
gtgtaccgagtaccttgtgga

SEQ ID NO: 275494 - DNA, 21 bp, Artificial sequence
  SiRNA target sequence
tgtaccgagtaccttgtggaa

SEQ ID NO: 275495 - DNA, 21 bp, Artificial sequence
  SiRNA target sequence
gtaccgagtaccttgtggaat

SEQ ID NO: 275496 - DNA, 21 bp, Artificial sequence
  SiRNA target sequence
taccgagtaccttgtggaatt

SEQ ID NO: 275497 - DNA, 21 bp, Artificial sequence
  SiRNA target sequence
accgagtaccttgtggaattc

SEQ ID NO: 275498 - DNA, 21 bp, Artificial sequence
  SiRNA target sequence
ccgagtaccttgtggaattcc

SEQ ID NO: 275499 - DNA, 21 bp, Artificial sequence
  SiRNA target sequence
cgagtaccttgtggaattcca

SEQ ID NO: 275500 - DNA, 21 bp, Artificial sequence
  SiRNA target sequence
gagtaccttgtggaattccat

SEQ ID NO: 275501 - DNA, 21 bp, Artificial sequence
  SiRNA target sequence
agtaccttgtggaattccatc

SEQ ID NO: 275502 - DNA, 21 bp, Artificial sequence
  SiRNA target sequence
gtaccttgtggaattccatca

SEQ ID NO: 275503 - DNA, 21 bp, Artificial sequence
  SiRNA target sequence
taccttgtggaattccatcag

SEQ ID NO: 275504 - DNA, 21 bp, Artificial sequence
  SiRNA target sequence
accttgtggaattccatcagg

SEQ ID NO: 275505 - DNA, 21 bp, Artificial sequence
  SiRNA target sequence
ccttgtggaattccatcaggt

SEQ ID NO: 275506 - DNA, 21 bp, Artificial sequence
  SiRNA target sequence
cttgtggaattccatcaggtt

SEQ ID NO: 275507 - DNA, 21 bp, Artificial sequence
  SiRNA target sequence
ttgtggaattccatcaggttc

SEQ ID NO: 275508 - DNA, 21 bp, Artificial sequence
  SiRNA target sequence
tgtggaattccatcaggttct

SEQ ID NO: 275509 - DNA, 21 bp, Artificial sequence
  SiRNA target sequence
gtggaattccatcaggttctc

SEQ ID NO: 275510 - DNA, 21 bp, Artificial sequence
  SiRNA target sequence
tggaattccatcaggttctcc

SEQ ID NO: 275511 - DNA, 21 bp, Artificial sequence
  SiRNA target sequence
ggaattccatcaggttctcca

SEQ ID NO: 275512 - DNA, 21 bp, Artificial sequence
  SiRNA target sequence
gaattccatcaggttctccaa

SEQ ID NO: 275513 - DNA, 21 bp, Artificial sequence
  SiRNA target sequence
aattccatcaggttctccaat

SEQ ID NO: 275514 - DNA, 21 bp, Artificial sequence
  SiRNA target sequence
attccatcaggttctccaata

SEQ ID NO: 275515 - DNA, 21 bp, Artificial sequence
  SiRNA target sequence
ttccatcaggttctccaataa

SEQ ID NO: 275516 - DNA, 21 bp, Artificial sequence
  SiRNA target sequence
tccatcaggttctccaataac

SEQ ID NO: 275517 - DNA, 21 bp, Artificial sequence
  SiRNA target sequence
ccatcaggttctccaataacg

SEQ ID NO: 275518 - DNA, 21 bp, Artificial sequence
  SiRNA target sequence
catcaggttctccaataacgg

SEQ ID NO: 275519 - DNA, 21 bp, Artificial sequence
  SiRNA target sequence
atcaggttctccaataacgga

SEQ ID NO: 275520 - DNA, 21 bp, Artificial sequence
  SiRNA target sequence
tcaggttctccaataacggac

SEQ ID NO: 275521 - DNA, 21 bp, Artificial sequence
  SiRNA target sequence
caggttctccaataacggaca

SEQ ID NO: 275522 - DNA, 21 bp, Artificial sequence
  SiRNA target sequence
aggttctccaataacggacat

SEQ ID NO: 275523 - DNA, 21 bp, Artificial sequence
  SiRNA target sequence
ggttctccaataacggacata

SEQ ID NO: 275524 - DNA, 21 bp, Artificial sequence
  SiRNA target sequence
gttctccaataacggacatat

SEQ ID NO: 275525 - DNA, 21 bp, Artificial sequence
  SiRNA target sequence
ttctccaataacggacatatt

SEQ ID NO: 275526 - DNA, 21 bp, Artificial sequence
  SiRNA target sequence
tctccaataacggacatattg

SEQ ID NO: 275527 - DNA, 21 bp, Artificial sequence
  SiRNA target sequence
ctccaataacggacatattga

SEQ ID NO: 275528 - DNA, 21 bp, Artificial sequence
  SiRNA target sequence
tccaataacggacatattgaa

SEQ ID NO: 275529 - DNA, 21 bp, Artificial sequence
  SiRNA target sequence
  misc_feature (21)..(21): n is a, c, g, or t
ccaataacggacatattgaan

SEQ ID NO: 275530 - DNA, 21 bp, Artificial sequence
  SiRNA target sequence
  misc_feature (20)..(20): n is a, c, g, or t
caataacggacatattgaana

SEQ ID NO: 275531 - DNA, 21 bp, Artificial sequence
  SiRNA target sequence
  misc_feature (19)..(19): n is a, c, g, or t
aataacggacatattgaanac

SEQ ID NO: 275532 - DNA, 21 bp, Artificial sequence
  SiRNA target sequence
  misc_feature (18)..(18): n is a, c, g, or t
ataacggacatattgaanaca

SEQ ID NO: 275533 - DNA, 21 bp, Artificial sequence
  SiRNA target sequence
  misc_feature (17)..(17): n is a, c, g, or t
taacggacatattgaanacaa

SEQ ID NO: 275534 - DNA, 21 bp, Artificial sequence
  SiRNA target sequence
  misc_feature (16)..(16): n is a, c, g, or t
aacggacatattgaanacaat

SEQ ID NO: 275535 - DNA, 21 bp, Artificial sequence
  SiRNA target sequence
  misc_feature (15)..(15): n is a, c, g, or t
acggacatattgaanacaatt

SEQ ID NO: 275536 - DNA, 21 bp, Artificial sequence
  SiRNA target sequence
  misc_feature (14)..(14): n is a, c, g, or t
cggacatattgaanacaattt

SEQ ID NO: 275537 - DNA, 21 bp, Artificial sequence
  SiRNA target sequence
  misc_feature (13)..(13): n is a, c, g, or t
ggacatattgaanacaatttc

SEQ ID NO: 275538 - DNA, 21 bp, Artificial sequence
  SiRNA target sequence
  misc_feature (12)..(12): n is a, c, g, or t
gacatattgaanacaatttca

SEQ ID NO: 275539 - DNA, 21 bp, Artificial sequence
  SiRNA target sequence
  misc_feature (11)..(11): n is a, c, g, or t
acatattgaanacaatttcaa

SEQ ID NO: 275540 - DNA, 21 bp, Artificial sequence
  SiRNA target sequence
  misc_feature (10)..(10): n is a, c, g, or t
catattgaanacaatttcaaa

SEQ ID NO: 275541 - DNA, 21 bp, Artificial sequence
  SiRNA target sequence
  misc_feature (9)..(9): n is a, c, g, or t
atattgaanacaatttcaaat

SEQ ID NO: 275542 - DNA, 21 bp, Artificial sequence
  SiRNA target sequence
  misc_feature (8)..(8): n is a, c, g, or t
tattgaanacaatttcaaatt

SEQ ID NO: 275543 - DNA, 21 bp, Artificial sequence
  SiRNA target sequence
  misc_feature (7)..(7): n is a, c, g, or t
attgaanacaatttcaaattg

SEQ ID NO: 275544 - DNA, 21 bp, Artificial sequence
  SiRNA target sequence
  misc_feature (6)..(6): n is a, c, g, or t
ttgaanacaatttcaaattgt

SEQ ID NO: 275545 - DNA, 21 bp, Artificial sequence
  SiRNA target sequence
  misc_feature (5)..(5): n is a, c, g, or t
tgaanacaatttcaaattgtt

SEQ ID NO: 275546 - DNA, 21 bp, Artificial sequence
  SiRNA target sequence
  misc_feature (4)..(4): n is a, c, g, or t
gaanacaatttcaaattgttt

SEQ ID NO: 275547 - DNA, 21 bp, Artificial sequence
  SiRNA target sequence
  misc_feature (3)..(3): n is a, c, g, or t
aanacaatttcaaattgtttg

SEQ ID NO: 275548 - DNA, 21 bp, Artificial sequence
  SiRNA target sequence
  misc_feature (2)..(2): n is a, c, g, or t
anacaatttcaaattgtttgt

SEQ ID NO: 275549 - DNA, 21 bp, Artificial sequence
  SiRNA target sequence
  misc_feature (1)..(1): n is a, c, g, or t
nacaatttcaaattgtttgtt

SEQ ID NO: 275550 - DNA, 21 bp, Artificial sequence
  SiRNA target sequence
acaatttcaaattgtttgtta

SEQ ID NO: 275551 - DNA, 21 bp, Artificial sequence
  SiRNA target sequence
caatttcaaattgtttgttaa

SEQ ID NO: 275552 - DNA, 21 bp, Artificial sequence
  SiRNA target sequence
aatttcaaattgtttgttaat

SEQ ID NO: 275553 - DNA, 21 bp, Artificial sequence
  SiRNA target sequence
atttcaaattgtttgttaatt

SEQ ID NO: 275554 - DNA, 21 bp, Artificial sequence
  SiRNA target sequence
tttcaaattgtttgttaatta

SEQ ID NO: 275555 - DNA, 21 bp, Artificial sequence
  SiRNA target sequence
ttcaaattgtttgttaattag

SEQ ID NO: 275556 - DNA, 21 bp, Artificial sequence
  SiRNA target sequence
tcaaattgtttgttaattagg

SEQ ID NO: 275557 - DNA, 21 bp, Artificial sequence
  SiRNA target sequence
caaattgtttgttaattaggt

SEQ ID NO: 275558 - DNA, 21 bp, Artificial sequence
  SiRNA target sequence
aaattgtttgttaattaggtt

SEQ ID NO: 275559 - DNA, 21 bp, Artificial sequence
  SiRNA target sequence
aattgtttgttaattaggtta

SEQ ID NO: 275560 - DNA, 21 bp, Artificial sequence
  SiRNA target sequence
attgtttgttaattaggttag

SEQ ID NO: 275561 - DNA, 21 bp, Artificial sequence
  SiRNA target sequence
ttgtttgttaattaggttagc

SEQ ID NO: 275562 - DNA, 21 bp, Artificial sequence
  SiRNA target sequence
tgtttgttaattaggttagct

SEQ ID NO: 275563 - DNA, 21 bp, Artificial sequence
  SiRNA target sequence
gtttgttaattaggttagctt

SEQ ID NO: 275564 - DNA, 21 bp, Artificial sequence
  SiRNA target sequence
tttgttaattaggttagcttg

SEQ ID NO: 275565 - DNA, 21 bp, Artificial sequence
  SiRNA target sequence
ttgttaattaggttagcttgg

SEQ ID NO: 275566 - DNA, 21 bp, Artificial sequence
  SiRNA target sequence
tgttaattaggttagcttggt

SEQ ID NO: 275567 - DNA, 21 bp, Artificial sequence
  SiRNA target sequence
gttaattaggttagcttggtt

SEQ ID NO: 275568 - DNA, 21 bp, Artificial sequence
  SiRNA target sequence
ttaattaggttagcttggtta

SEQ ID NO: 275569 - DNA, 21 bp, Artificial sequence
  SiRNA target sequence
taattaggttagcttggttag

SEQ ID NO: 275570 - DNA, 21 bp, Artificial sequence
  SiRNA target sequence
aattaggttagcttggttagg

SEQ ID NO: 275571 - DNA, 21 bp, Artificial sequence
  SiRNA target sequence
attaggttagcttggttaggt

SEQ ID NO: 275572 - DNA, 21 bp, Artificial sequence
  SiRNA target sequence
ttaggttagcttggttaggta

SEQ ID NO: 275573 - DNA, 21 bp, Artificial sequence
  SiRNA target sequence
taggttagcttggttaggtat

SEQ ID NO: 275574 - DNA, 21 bp, Artificial sequence
  SiRNA target sequence
aggttagcttggttaggtatt

SEQ ID NO: 275575 - DNA, 21 bp, Artificial sequence
  SiRNA target sequence
ggttagcttggttaggtatta

SEQ ID NO: 275576 - DNA, 21 bp, Artificial sequence
  SiRNA target sequence
gttagcttggttaggtattac

SEQ ID NO: 275577 - DNA, 21 bp, Artificial sequence
  SiRNA target sequence
ttagcttggttaggtattact

SEQ ID NO: 275578 - DNA, 21 bp, Artificial sequence
  SiRNA target sequence
tagcttggttaggtattactg

SEQ ID NO: 275579 - DNA, 21 bp, Artificial sequence
  SiRNA target sequence
agcttggttaggtattactga

SEQ ID NO: 275580 - DNA, 21 bp, Artificial sequence
  SiRNA target sequence
gcttggttaggtattactgac

SEQ ID NO: 275581 - DNA, 21 bp, Artificial sequence
  SiRNA target sequence
cttggttaggtattactgact

SEQ ID NO: 275582 - DNA, 21 bp, Artificial sequence
  SiRNA target sequence
ttggttaggtattactgactt

SEQ ID NO: 275583 - DNA, 21 bp, Artificial sequence
  SiRNA target sequence
tggttaggtattactgacttg

SEQ ID NO: 275584 - DNA, 21 bp, Artificial sequence
  SiRNA target sequence
ggttaggtattactgacttgc

SEQ ID NO: 275585 - DNA, 21 bp, Artificial sequence
  SiRNA target sequence
gttaggtattactgacttgcc

SEQ ID NO: 275586 - DNA, 21 bp, Artificial sequence
  SiRNA target sequence
ttaggtattactgacttgcct

SEQ ID NO: 275587 - DNA, 21 bp, Artificial sequence
  SiRNA target sequence
taggtattactgacttgcctt

SEQ ID NO: 275588 - DNA, 21 bp, Artificial sequence
  SiRNA target sequence
aggtattactgacttgccttt

SEQ ID NO: 275589 - DNA, 21 bp, Artificial sequence
  SiRNA target sequence
ggtattactgacttgcctttg

SEQ ID NO: 275590 - DNA, 21 bp, Artificial sequence
  SiRNA target sequence
gtattactgacttgcctttgt

SEQ ID NO: 275591 - DNA, 21 bp, Artificial sequence
  SiRNA target sequence
tattactgacttgcctttgtc

SEQ ID NO: 275592 - DNA, 21 bp, Artificial sequence
  SiRNA target sequence
attactgacttgcctttgtcc

SEQ ID NO: 275593 - DNA, 21 bp, Artificial sequence
  SiRNA target sequence
ttactgacttgcctttgtccg

SEQ ID NO: 275594 - DNA, 21 bp, Artificial sequence
  SiRNA target sequence
tactgacttgcctttgtccga

SEQ ID NO: 275595 - DNA, 21 bp, Artificial sequence
  SiRNA target sequence
actgacttgcctttgtccgag

SEQ ID NO: 275596 - DNA, 21 bp, Artificial sequence
  SiRNA target sequence
ctgacttgcctttgtccgagt

SEQ ID NO: 275597 - DNA, 21 bp, Artificial sequence
  SiRNA target sequence
tgacttgcctttgtccgagtt

SEQ ID NO: 275598 - DNA, 21 bp, Artificial sequence
  SiRNA target sequence
gacttgcctttgtccgagttc

SEQ ID NO: 275599 - DNA, 21 bp, Artificial sequence
  SiRNA target sequence
acttgcctttgtccgagttct

SEQ ID NO: 275600 - DNA, 21 bp, Artificial sequence
  SiRNA target sequence
cttgcctttgtccgagttctc

SEQ ID NO: 275601 - DNA, 21 bp, Artificial sequence
  SiRNA target sequence
ttgcctttgtccgagttctct

SEQ ID NO: 275602 - DNA, 21 bp, Artificial sequence
  SiRNA target sequence
tgcctttgtccgagttctctc

SEQ ID NO: 275603 - DNA, 21 bp, Artificial sequence
  SiRNA target sequence
gcctttgtccgagttctctca

SEQ ID NO: 275604 - DNA, 21 bp, Artificial sequence
  SiRNA target sequence
cctttgtccgagttctctcaa

SEQ ID NO: 275605 - DNA, 21 bp, Artificial sequence
  SiRNA target sequence
ctttgtccgagttctctcaaa

SEQ ID NO: 275606 - DNA, 21 bp, Artificial sequence
  SiRNA target sequence
tttgtccgagttctctcaaaa

SEQ ID NO: 275607 - DNA, 21 bp, Artificial sequence
  SiRNA target sequence
ttgtccgagttctctcaaaat

SEQ ID NO: 275608 - DNA, 21 bp, Artificial sequence
  SiRNA target sequence
tgtccgagttctctcaaaatg

SEQ ID NO: 275609 - DNA, 21 bp, Artificial sequence
  SiRNA target sequence
gtccgagttctctcaaaatgt

SEQ ID NO: 275610 - DNA, 21 bp, Artificial sequence
  SiRNA target sequence
tccgagttctctcaaaatgtt

SEQ ID NO: 275611 - DNA, 21 bp, Artificial sequence
  SiRNA target sequence
ccgagttctctcaaaatgttg

SEQ ID NO: 275612 - DNA, 21 bp, Artificial sequence
  SiRNA target sequence
cgagttctctcaaaatgttgt

SEQ ID NO: 275613 - DNA, 21 bp, Artificial sequence
  SiRNA target sequence
gagttctctcaaaatgttgtt

SEQ ID NO: 275614 - DNA, 21 bp, Artificial sequence
  SiRNA target sequence
agttctctcaaaatgttgttc

SEQ ID NO: 275615 - DNA, 21 bp, Artificial sequence
  SiRNA target sequence
gttctctcaaaatgttgttct

SEQ ID NO: 275616 - DNA, 21 bp, Artificial sequence
  SiRNA target sequence
ttctctcaaaatgttgttctt

SEQ ID NO: 275617 - DNA, 21 bp, Artificial sequence
  SiRNA target sequence
tctctcaaaatgttgttcttg

SEQ ID NO: 275618 - DNA, 21 bp, Artificial sequence
  SiRNA target sequence
ctctcaaaatgttgttcttgt

SEQ ID NO: 275619 - DNA, 21 bp, Artificial sequence
  SiRNA target sequence
tctcaaaatgttgttcttgtc

SEQ ID NO: 275620 - DNA, 21 bp, Artificial sequence
  SiRNA target sequence
ctcaaaatgttgttcttgtct

SEQ ID NO: 275621 - DNA, 21 bp, Artificial sequence
  SiRNA target sequence
tcaaaatgttgttcttgtctg

SEQ ID NO: 275622 - DNA, 21 bp, Artificial sequence
  SiRNA target sequence
caaaatgttgttcttgtctgt

SEQ ID NO: 275623 - DNA, 21 bp, Artificial sequence
  SiRNA target sequence
aaaatgttgttcttgtctgtt

SEQ ID NO: 275624 - DNA, 21 bp, Artificial sequence
  SiRNA target sequence
aaatgttgttcttgtctgtta

SEQ ID NO: 275625 - DNA, 21 bp, Artificial sequence
  SiRNA target sequence
aatgttgttcttgtctgttat

SEQ ID NO: 275626 - DNA, 21 bp, Artificial sequence
  SiRNA target sequence
atgttgttcttgtctgttatg

SEQ ID NO: 275627 - DNA, 21 bp, Artificial sequence
  SiRNA target sequence
tgttgttcttgtctgttatgg

SEQ ID NO: 275628 - DNA, 21 bp, Artificial sequence
  SiRNA target sequence
gttgttcttgtctgttatggc

SEQ ID NO: 275629 - DNA, 21 bp, Artificial sequence
  SiRNA target sequence
ttgttcttgtctgttatggcg

SEQ ID NO: 275630 - DNA, 21 bp, Artificial sequence
  SiRNA target sequence
tgttcttgtctgttatggcga

SEQ ID NO: 275631 - DNA, 21 bp, Artificial sequence
  SiRNA target sequence
gttcttgtctgttatggcgac

SEQ ID NO: 275632 - DNA, 21 bp, Artificial sequence
  SiRNA target sequence
ttcttgtctgttatggcgacg

SEQ ID NO: 275633 - DNA, 21 bp, Artificial sequence
  SiRNA target sequence
tcttgtctgttatggcgacga

SEQ ID NO: 275634 - DNA, 21 bp, Artificial sequence
  SiRNA target sequence
cttgtctgttatggcgacgat

SEQ ID NO: 275635 - DNA, 21 bp, Artificial sequence
  SiRNA target sequence
ttgtctgttatggcgacgatc

SEQ ID NO: 275636 - DNA, 21 bp, Artificial sequence
  SiRNA target sequence
tgtctgttatggcgacgatct

SEQ ID NO: 275637 - DNA, 21 bp, Artificial sequence
  SiRNA target sequence
gtctgttatggcgacgatctt

SEQ ID NO: 275638 - DNA, 21 bp, Artificial sequence
  SiRNA target sequence
tctgttatggcgacgatctta

SEQ ID NO: 275639 - DNA, 21 bp, Artificial sequence
  SiRNA target sequence
ctgttatggcgacgatcttat

SEQ ID NO: 275640 - DNA, 21 bp, Artificial sequence
  SiRNA target sequence
tgttatggcgacgatcttatc

SEQ ID NO: 275641 - DNA, 21 bp, Artificial sequence
  SiRNA target sequence
gttatggcgacgatcttatca

SEQ ID NO: 275642 - DNA, 21 bp, Artificial sequence
  SiRNA target sequence
ttatggcgacgatcttatcat

SEQ ID NO: 275643 - DNA, 21 bp, Artificial sequence
  SiRNA target sequence
tatggcgacgatcttatcatg

SEQ ID NO: 275644 - DNA, 21 bp, Artificial sequence
  SiRNA target sequence
atggcgacgatcttatcatga

SEQ ID NO: 275645 - DNA, 21 bp, Artificial sequence
  SiRNA target sequence
tggcgacgatcttatcatgaa

SEQ ID NO: 275646 - DNA, 21 bp, Artificial sequence
  SiRNA target sequence
ggcgacgatcttatcatgaat

SEQ ID NO: 275647 - DNA, 21 bp, Artificial sequence
  SiRNA target sequence
gcgacgatcttatcatgaatg

SEQ ID NO: 275648 - DNA, 21 bp, Artificial sequence
  SiRNA target sequence
cgacgatcttatcatgaatgt

SEQ ID NO: 275649 - DNA, 21 bp, Artificial sequence
  SiRNA target sequence
gacgatcttatcatgaatgtt

SEQ ID NO: 275650 - DNA, 21 bp, Artificial sequence
  SiRNA target sequence
acgatcttatcatgaatgtta

SEQ ID NO: 275651 - DNA, 21 bp, Artificial sequence
  SiRNA target sequence
cgatcttatcatgaatgttag

SEQ ID NO: 275652 - DNA, 21 bp, Artificial sequence
  SiRNA target sequence
  misc_feature (21)..(21): n is a, c, g, or t
gatcttatcatgaatgttagn

SEQ ID NO: 275653 - DNA, 21 bp, Artificial sequence
  SiRNA target sequence
  misc_feature (20)..(20): n is a, c, g, or t
atcttatcatgaatgttagng

SEQ ID NO: 275654 - DNA, 21 bp, Artificial sequence
  SiRNA target sequence
  misc_feature (19)..(19): n is a, c, g, or t
tcttatcatgaatgttagnga

SEQ ID NO: 275655 - DNA, 21 bp, Artificial sequence
  SiRNA target sequence
  misc_feature (18)..(18): n is a, c, g, or t
cttatcatgaatgttagngat

SEQ ID NO: 275656 - DNA, 21 bp, Artificial sequence
  SiRNA target sequence
  misc_feature (17)..(17): n is a, c, g, or t
ttatcatgaatgttagngata

SEQ ID NO: 275657 - DNA, 21 bp, Artificial sequence
  SiRNA target sequence
  misc_feature (16)..(16): n is a, c, g, or t
tatcatgaatgttagngataa

SEQ ID NO: 275658 - DNA, 21 bp, Artificial sequence
  SiRNA target sequence
  misc_feature (15)..(15): n is a, c, g, or t
atcatgaatgttagngataac

SEQ ID NO: 275659 - DNA, 21 bp, Artificial sequence
  SiRNA target sequence
  misc_feature (14)..(14): n is a, c, g, or t
tcatgaatgttagngataaca

SEQ ID NO: 275660 - DNA, 21 bp, Artificial sequence
  SiRNA target sequence
  misc_feature (13)..(13): n is a, c, g, or t
catgaatgttagngataacat

SEQ ID NO: 275661 - DNA, 21 bp, Artificial sequence
  SiRNA target sequence
  misc_feature (12)..(12): n is a, c, g, or t
atgaatgttagngataacatg

SEQ ID NO: 275662 - DNA, 21 bp, Artificial sequence
  SiRNA target sequence
  misc_feature (11)..(11): n is a, c, g, or t
tgaatgttagngataacatga

SEQ ID NO: 275663 - DNA, 21 bp, Artificial sequence
  SiRNA target sequence
  misc_feature (10)..(10): n is a, c, g, or t
gaatgttagngataacatgat

SEQ ID NO: 275664 - DNA, 21 bp, Artificial sequence
  SiRNA target sequence
  misc_feature (9)..(9): n is a, c, g, or t
aatgttagngataacatgatt

SEQ ID NO: 275665 - DNA, 21 bp, Artificial sequence
  SiRNA target sequence
  misc_feature (8)..(8): n is a, c, g, or t
atgttagngataacatgattg

SEQ ID NO: 275666 - DNA, 21 bp, Artificial sequence
  SiRNA target sequence
  misc_feature (7)..(7): n is a, c, g, or t
tgttagngataacatgattga

SEQ ID NO: 275667 - DNA, 21 bp, Artificial sequence
  SiRNA target sequence
  misc_feature (6)..(6): n is a, c, g, or t
gttagngataacatgattgat

SEQ ID NO: 275668 - DNA, 21 bp, Artificial sequence
  SiRNA target sequence
  misc_feature (5)..(5): n is a, c, g, or t
ttagngataacatgattgata

SEQ ID NO: 275669 - DNA, 21 bp, Artificial sequence
  SiRNA target sequence
  misc_feature (4)..(4): n is a, c, g, or t
tagngataacatgattgataa

SEQ ID NO: 275670 - DNA, 21 bp, Artificial sequence
  SiRNA target sequence
  misc_feature (3)..(3): n is a, c, g, or t
agngataacatgattgataag

SEQ ID NO: 275671 - DNA, 21 bp, Artificial sequence
  SiRNA target sequence
  misc_feature (2)..(2): n is a, c, g, or t
gngataacatgattgataagt

SEQ ID NO: 275672 - DNA, 21 bp, Artificial sequence
  SiRNA target sequence
  misc_feature (1)..(1): n is a, c, g, or t
ngataacatgattgataagtt

SEQ ID NO: 275673 - DNA, 21 bp, Artificial sequence
  SiRNA target sequence
gataacatgattgataagttt

SEQ ID NO: 275674 - DNA, 21 bp, Artificial sequence
  SiRNA target sequence
ataacatgattgataagttta

SEQ ID NO: 275675 - DNA, 21 bp, Artificial sequence
  SiRNA target sequence
taacatgattgataagtttaa

SEQ ID NO: 275676 - DNA, 21 bp, Artificial sequence
  SiRNA target sequence
aacatgattgataagtttaat

SEQ ID NO: 275677 - DNA, 21 bp, Artificial sequence
  SiRNA target sequence
acatgattgataagtttaatg

SEQ ID NO: 275678 - DNA, 21 bp, Artificial sequence
  SiRNA target sequence
catgattgataagtttaatgc

SEQ ID NO: 275679 - DNA, 21 bp, Artificial sequence
  SiRNA target sequence
atgattgataagtttaatgcc

SEQ ID NO: 275680 - DNA, 21 bp, Artificial sequence
  SiRNA target sequence
tgattgataagtttaatgccg

SEQ ID NO: 275681 - DNA, 21 bp, Artificial sequence
  SiRNA target sequence
gattgataagtttaatgccgt

SEQ ID NO: 275682 - DNA, 21 bp, Artificial sequence
  SiRNA target sequence
attgataagtttaatgccgtg

SEQ ID NO: 275683 - DNA, 21 bp, Artificial sequence
  SiRNA target sequence
ttgataagtttaatgccgtga

SEQ ID NO: 275684 - DNA, 21 bp, Artificial sequence
  SiRNA target sequence
tgataagtttaatgccgtgac

SEQ ID NO: 275685 - DNA, 21 bp, Artificial sequence
  SiRNA target sequence
gataagtttaatgccgtgacg

SEQ ID NO: 275686 - DNA, 21 bp, Artificial sequence
  SiRNA target sequence
ataagtttaatgccgtgacga

SEQ ID NO: 275687 - DNA, 21 bp, Artificial sequence
  SiRNA target sequence
taagtttaatgccgtgacgat

SEQ ID NO: 275688 - DNA, 21 bp, Artificial sequence
  SiRNA target sequence
aagtttaatgccgtgacgata

SEQ ID NO: 275689 - DNA, 21 bp, Artificial sequence
  SiRNA target sequence
agtttaatgccgtgacgatag

SEQ ID NO: 275690 - DNA, 21 bp, Artificial sequence
  SiRNA target sequence
gtttaatgccgtgacgatagg

SEQ ID NO: 275691 - DNA, 21 bp, Artificial sequence
  SiRNA target sequence
tttaatgccgtgacgatagga

SEQ ID NO: 275692 - DNA, 21 bp, Artificial sequence
  SiRNA target sequence
ttaatgccgtgacgataggaa

SEQ ID NO: 275693 - DNA, 21 bp, Artificial sequence
  SiRNA target sequence
taatgccgtgacgataggaaa

SEQ ID NO: 275694 - DNA, 21 bp, Artificial sequence
  SiRNA target sequence
aatgccgtgacgataggaaaa

SEQ ID NO: 275695 - DNA, 21 bp, Artificial sequence
  SiRNA target sequence
atgccgtgacgataggaaaat

SEQ ID NO: 275696 - DNA, 21 bp, Artificial sequence
  SiRNA target sequence
tgccgtgacgataggaaaatt

SEQ ID NO: 275697 - DNA, 21 bp, Artificial sequence
  SiRNA target sequence
gccgtgacgataggaaaattc

SEQ ID NO: 275698 - DNA, 21 bp, Artificial sequence
  SiRNA target sequence
ccgtgacgataggaaaattct

SEQ ID NO: 275699 - DNA, 21 bp, Artificial sequence
  SiRNA target sequence
cgtgacgataggaaaattctt

SEQ ID NO: 275700 - DNA, 21 bp, Artificial sequence
  SiRNA target sequence
gtgacgataggaaaattcttt

SEQ ID NO: 275701 - DNA, 21 bp, Artificial sequence
  SiRNA target sequence
tgacgataggaaaattctttt

SEQ ID NO: 275702 - DNA, 21 bp, Artificial sequence
  SiRNA target sequence
gacgataggaaaattcttttc

SEQ ID NO: 275703 - DNA, 21 bp, Artificial sequence
  SiRNA target sequence
acgataggaaaattcttttca

SEQ ID NO: 275704 - DNA, 21 bp, Artificial sequence
  SiRNA target sequence
cgataggaaaattcttttcac

SEQ ID NO: 275705 - DNA, 21 bp, Artificial sequence
  SiRNA target sequence
gataggaaaattcttttcaca

SEQ ID NO: 275706 - DNA, 21 bp, Artificial sequence
  SiRNA target sequence
ataggaaaattcttttcacaa

SEQ ID NO: 275707 - DNA, 21 bp, Artificial sequence
  SiRNA target sequence
taggaaaattcttttcacaat

SEQ ID NO: 275708 - DNA, 21 bp, Artificial sequence
  SiRNA target sequence
aggaaaattcttttcacaata

SEQ ID NO: 275709 - DNA, 21 bp, Artificial sequence
  SiRNA target sequence
ggaaaattcttttcacaatat

SEQ ID NO: 275710 - DNA, 21 bp, Artificial sequence
  SiRNA target sequence
gaaaattcttttcacaatata

SEQ ID NO: 275711 - DNA, 21 bp, Artificial sequence
  SiRNA target sequence
aaaattcttttcacaatataa

SEQ ID NO: 275712 - DNA, 21 bp, Artificial sequence
  SiRNA target sequence
aaattcttttcacaatataag

SEQ ID NO: 275713 - DNA, 21 bp, Artificial sequence
  SiRNA target sequence
aattcttttcacaatataaga

SEQ ID NO: 275714 - DNA, 21 bp, Artificial sequence
  SiRNA target sequence
attcttttcacaatataagat

SEQ ID NO: 275715 - DNA, 21 bp, Artificial sequence
  SiRNA target sequence
ttcttttcacaatataagatg

SEQ ID NO: 275716 - DNA, 21 bp, Artificial sequence
  SiRNA target sequence
tcttttcacaatataagatgg

SEQ ID NO: 275717 - DNA, 21 bp, Artificial sequence
  SiRNA target sequence
cttttcacaatataagatgga

SEQ ID NO: 275718 - DNA, 21 bp, Artificial sequence
  SiRNA target sequence
ttttcacaatataagatggaa

SEQ ID NO: 275719 - DNA, 21 bp, Artificial sequence
  SiRNA target sequence
tttcacaatataagatggaat

SEQ ID NO: 275720 - DNA, 21 bp, Artificial sequence
  SiRNA target sequence
ttcacaatataagatggaatt

SEQ ID NO: 275721 - DNA, 21 bp, Artificial sequence
  SiRNA target sequence
tcacaatataagatggaattt

SEQ ID NO: 275722 - DNA, 21 bp, Artificial sequence
  SiRNA target sequence
cacaatataagatggaattta

SEQ ID NO: 275723 - DNA, 21 bp, Artificial sequence
  SiRNA target sequence
acaatataagatggaatttac

SEQ ID NO: 275724 - DNA, 21 bp, Artificial sequence
  SiRNA target sequence
caatataagatggaatttacg

SEQ ID NO: 275725 - DNA, 21 bp, Artificial sequence
  SiRNA target sequence
aatataagatggaatttacgg

SEQ ID NO: 275726 - DNA, 21 bp, Artificial sequence
  SiRNA target sequence
atataagatggaatttacgga

SEQ ID NO: 275727 - DNA, 21 bp, Artificial sequence
  SiRNA target sequence
tataagatggaatttacggat

SEQ ID NO: 275728 - DNA, 21 bp, Artificial sequence
  SiRNA target sequence
ataagatggaatttacggatc

SEQ ID NO: 275729 - DNA, 21 bp, Artificial sequence
  SiRNA target sequence
taagatggaatttacggatca

SEQ ID NO: 275730 - DNA, 21 bp, Artificial sequence
  SiRNA target sequence
aagatggaatttacggatcag

SEQ ID NO: 275731 - DNA, 21 bp, Artificial sequence
  SiRNA target sequence
agatggaatttacggatcagg

SEQ ID NO: 275732 - DNA, 21 bp, Artificial sequence
  SiRNA target sequence
gatggaatttacggatcagga

SEQ ID NO: 275733 - DNA, 21 bp, Artificial sequence
  SiRNA target sequence
atggaatttacggatcaggat

SEQ ID NO: 275734 - DNA, 21 bp, Artificial sequence
  SiRNA target sequence
tggaatttacggatcaggata

SEQ ID NO: 275735 - DNA, 21 bp, Artificial sequence
  SiRNA target sequence
ggaatttacggatcaggataa

SEQ ID NO: 275736 - DNA, 21 bp, Artificial sequence
  SiRNA target sequence
gaatttacggatcaggataaa

SEQ ID NO: 275737 - DNA, 21 bp, Artificial sequence
  SiRNA target sequence
aatttacggatcaggataaat

SEQ ID NO: 275738 - DNA, 21 bp, Artificial sequence
  SiRNA target sequence
atttacggatcaggataaatc

SEQ ID NO: 275739 - DNA, 21 bp, Artificial sequence
  SiRNA target sequence
tttacggatcaggataaatca

SEQ ID NO: 275740 - DNA, 21 bp, Artificial sequence
  SiRNA target sequence
ttacggatcaggataaatcag

SEQ ID NO: 275741 - DNA, 21 bp, Artificial sequence
  SiRNA target sequence
tacggatcaggataaatcagg

SEQ ID NO: 275742 - DNA, 21 bp, Artificial sequence
  SiRNA target sequence
acggatcaggataaatcagga

SEQ ID NO: 275743 - DNA, 21 bp, Artificial sequence
  SiRNA target sequence
cggatcaggataaatcaggaa

SEQ ID NO: 275744 - DNA, 21 bp, Artificial sequence
  SiRNA target sequence
ggatcaggataaatcaggaaa

SEQ ID NO: 275745 - DNA, 21 bp, Artificial sequence
  SiRNA target sequence
gatcaggataaatcaggaaat

SEQ ID NO: 275746 - DNA, 21 bp, Artificial sequence
  SiRNA target sequence
atcaggataaatcaggaaata

SEQ ID NO: 275747 - DNA, 21 bp, Artificial sequence
  SiRNA target sequence
tcaggataaatcaggaaatac

SEQ ID NO: 275748 - DNA, 21 bp, Artificial sequence
  SiRNA target sequence
caggataaatcaggaaatact

SEQ ID NO: 275749 - DNA, 21 bp, Artificial sequence
  SiRNA target sequence
aggataaatcaggaaatactg

SEQ ID NO: 275750 - DNA, 21 bp, Artificial sequence
  SiRNA target sequence
ggataaatcaggaaatactgt

SEQ ID NO: 275751 - DNA, 21 bp, Artificial sequence
  SiRNA target sequence
gataaatcaggaaatactgta

SEQ ID NO: 275752 - DNA, 21 bp, Artificial sequence
  SiRNA target sequence
ataaatcaggaaatactgtaa

SEQ ID NO: 275753 - DNA, 21 bp, Artificial sequence
  SiRNA target sequence
taaatcaggaaatactgtaaa

SEQ ID NO: 275754 - DNA, 21 bp, Artificial sequence
  SiRNA target sequence
aaatcaggaaatactgtaaag

SEQ ID NO: 275755 - DNA, 21 bp, Artificial sequence
  SiRNA target sequence
aatcaggaaatactgtaaagt

SEQ ID NO: 275756 - DNA, 21 bp, Artificial sequence
  SiRNA target sequence
atcaggaaatactgtaaagtg

SEQ ID NO: 275757 - DNA, 21 bp, Artificial sequence
  SiRNA target sequence
tcaggaaatactgtaaagtgg

SEQ ID NO: 275758 - DNA, 21 bp, Artificial sequence
  SiRNA target sequence
caggaaatactgtaaagtggc

SEQ ID NO: 275759 - DNA, 21 bp, Artificial sequence
  SiRNA target sequence
aggaaatactgtaaagtggcg

SEQ ID NO: 275760 - DNA, 21 bp, Artificial sequence
  SiRNA target sequence
ggaaatactgtaaagtggcgg

SEQ ID NO: 275761 - DNA, 21 bp, Artificial sequence
  SiRNA target sequence
gaaatactgtaaagtggcgga

SEQ ID NO: 275762 - DNA, 21 bp, Artificial sequence
  SiRNA target sequence
aaatactgtaaagtggcggac

SEQ ID NO: 275763 - DNA, 21 bp, Artificial sequence
  SiRNA target sequence
aatactgtaaagtggcggacg

SEQ ID NO: 275764 - DNA, 21 bp, Artificial sequence
  SiRNA target sequence
atactgtaaagtggcggacgt

SEQ ID NO: 275765 - DNA, 21 bp, Artificial sequence
  SiRNA target sequence
tactgtaaagtggcggacgtt

SEQ ID NO: 275766 - DNA, 21 bp, Artificial sequence
  SiRNA target sequence
actgtaaagtggcggacgtta

SEQ ID NO: 275767 - DNA, 21 bp, Artificial sequence
  SiRNA target sequence
ctgtaaagtggcggacgttac

SEQ ID NO: 275768 - DNA, 21 bp, Artificial sequence
  SiRNA target sequence
tgtaaagtggcggacgttaca

SEQ ID NO: 275769 - DNA, 21 bp, Artificial sequence
  SiRNA target sequence
gtaaagtggcggacgttacag

SEQ ID NO: 275770 - DNA, 21 bp, Artificial sequence
  SiRNA target sequence
taaagtggcggacgttacaga

SEQ ID NO: 275771 - DNA, 21 bp, Artificial sequence
  SiRNA target sequence
aaagtggcggacgttacagac

SEQ ID NO: 275772 - DNA, 21 bp, Artificial sequence
  SiRNA target sequence
aagtggcggacgttacagact

SEQ ID NO: 275773 - DNA, 21 bp, Artificial sequence
  SiRNA target sequence
agtggcggacgttacagactg

SEQ ID NO: 275774 - DNA, 21 bp, Artificial sequence
  SiRNA target sequence
gtggcggacgttacagactgc

SEQ ID NO: 275775 - DNA, 21 bp, Artificial sequence
  SiRNA target sequence
tggcggacgttacagactgct

SEQ ID NO: 275776 - DNA, 21 bp, Artificial sequence
  SiRNA target sequence
ggcggacgttacagactgcta

SEQ ID NO: 275777 - DNA, 21 bp, Artificial sequence
  SiRNA target sequence
gcggacgttacagactgctac

SEQ ID NO: 275778 - DNA, 21 bp, Artificial sequence
  SiRNA target sequence
cggacgttacagactgctact

SEQ ID NO: 275779 - DNA, 21 bp, Artificial sequence
  SiRNA target sequence
ggacgttacagactgctactt

SEQ ID NO: 275780 - DNA, 21 bp, Artificial sequence
  SiRNA target sequence
gacgttacagactgctacttt

SEQ ID NO: 275781 - DNA, 21 bp, Artificial sequence
  SiRNA target sequence
acgttacagactgctactttc

SEQ ID NO: 275782 - DNA, 21 bp, Artificial sequence
  SiRNA target sequence
cgttacagactgctactttct

SEQ ID NO: 275783 - DNA, 21 bp, Artificial sequence
  SiRNA target sequence
gttacagactgctactttctt

SEQ ID NO: 275784 - DNA, 21 bp, Artificial sequence
  SiRNA target sequence
ttacagactgctactttctta

SEQ ID NO: 275785 - DNA, 21 bp, Artificial sequence
  SiRNA target sequence
tacagactgctactttcttaa

SEQ ID NO: 275786 - DNA, 21 bp, Artificial sequence
  SiRNA target sequence
acagactgctactttcttaaa

SEQ ID NO: 275787 - DNA, 21 bp, Artificial sequence
  SiRNA target sequence
cagactgctactttcttaaaa

SEQ ID NO: 275788 - DNA, 21 bp, Artificial sequence
  SiRNA target sequence
agactgctactttcttaaaac

SEQ ID NO: 275789 - DNA, 21 bp, Artificial sequence
  SiRNA target sequence
gactgctactttcttaaaaca

SEQ ID NO: 275790 - DNA, 21 bp, Artificial sequence
  SiRNA target sequence
actgctactttcttaaaacat

SEQ ID NO: 275791 - DNA, 21 bp, Artificial sequence
  SiRNA target sequence
ctgctactttcttaaaacatg

SEQ ID NO: 275792 - DNA, 21 bp, Artificial sequence
  SiRNA target sequence
tgctactttcttaaaacatgg

SEQ ID NO: 275793 - DNA, 21 bp, Artificial sequence
  SiRNA target sequence
gctactttcttaaaacatggg

SEQ ID NO: 275794 - DNA, 21 bp, Artificial sequence
  SiRNA target sequence
ctactttcttaaaacatgggt

SEQ ID NO: 275795 - DNA, 21 bp, Artificial sequence
  SiRNA target sequence
tactttcttaaaacatgggtt

SEQ ID NO: 275796 - DNA, 21 bp, Artificial sequence
  SiRNA target sequence
actttcttaaaacatgggttc

SEQ ID NO: 275797 - DNA, 21 bp, Artificial sequence
  SiRNA target sequence
ctttcttaaaacatgggttct

SEQ ID NO: 275798 - DNA, 21 bp, Artificial sequence
  SiRNA target sequence
tttcttaaaacatgggttctt

SEQ ID NO: 275799 - DNA, 21 bp, Artificial sequence
  SiRNA target sequence
ttcttaaaacatgggttctta

SEQ ID NO: 275800 - DNA, 21 bp, Artificial sequence
  SiRNA target sequence
tcttaaaacatgggttcttaa

SEQ ID NO: 275801 - DNA, 21 bp, Artificial sequence
  SiRNA target sequence
cttaaaacatgggttcttaaa

SEQ ID NO: 275802 - DNA, 21 bp, Artificial sequence
  SiRNA target sequence
ttaaaacatgggttcttaaaa

SEQ ID NO: 275803 - DNA, 21 bp, Artificial sequence
  SiRNA target sequence
taaaacatgggttcttaaaac

SEQ ID NO: 275804 - DNA, 21 bp, Artificial sequence
  SiRNA target sequence
aaaacatgggttcttaaaaca

SEQ ID NO: 275805 - DNA, 21 bp, Artificial sequence
  SiRNA target sequence
aaacatgggttcttaaaacat

SEQ ID NO: 275806 - DNA, 21 bp, Artificial sequence
  SiRNA target sequence
aacatgggttcttaaaacatc

SEQ ID NO: 275807 - DNA, 21 bp, Artificial sequence
  SiRNA target sequence
acatgggttcttaaaacatcc

SEQ ID NO: 275808 - DNA, 21 bp, Artificial sequence
  SiRNA target sequence
catgggttcttaaaacatcca

SEQ ID NO: 275809 - DNA, 21 bp, Artificial sequence
  SiRNA target sequence
atgggttcttaaaacatccaa

SEQ ID NO: 275810 - DNA, 21 bp, Artificial sequence
  SiRNA target sequence
tgggttcttaaaacatccaac

SEQ ID NO: 275811 - DNA, 21 bp, Artificial sequence
  SiRNA target sequence
gggttcttaaaacatccaact

SEQ ID NO: 275812 - DNA, 21 bp, Artificial sequence
  SiRNA target sequence
ggttcttaaaacatccaacta

SEQ ID NO: 275813 - DNA, 21 bp, Artificial sequence
  SiRNA target sequence
gttcttaaaacatccaactag

SEQ ID NO: 275814 - DNA, 21 bp, Artificial sequence
  SiRNA target sequence
ttcttaaaacatccaactaga

SEQ ID NO: 275815 - DNA, 21 bp, Artificial sequence
  SiRNA target sequence
tcttaaaacatccaactagac

SEQ ID NO: 275816 - DNA, 21 bp, Artificial sequence
  SiRNA target sequence
cttaaaacatccaactagacc

SEQ ID NO: 275817 - DNA, 21 bp, Artificial sequence
  SiRNA target sequence
ttaaaacatccaactagacct

SEQ ID NO: 275818 - DNA, 21 bp, Artificial sequence
  SiRNA target sequence
taaaacatccaactagacctg

SEQ ID NO: 275819 - DNA, 21 bp, Artificial sequence
  SiRNA target sequence
aaaacatccaactagacctgt

SEQ ID NO: 275820 - DNA, 21 bp, Artificial sequence
  SiRNA target sequence
aaacatccaactagacctgtg

SEQ ID NO: 275821 - DNA, 21 bp, Artificial sequence
  SiRNA target sequence
aacatccaactagacctgtgt

SEQ ID NO: 275822 - DNA, 21 bp, Artificial sequence
  SiRNA target sequence
acatccaactagacctgtgtt

SEQ ID NO: 275823 - DNA, 21 bp, Artificial sequence
  SiRNA target sequence
catccaactagacctgtgttt

SEQ ID NO: 275824 - DNA, 21 bp, Artificial sequence
  SiRNA target sequence
atccaactagacctgtgtttc

SEQ ID NO: 275825 - DNA, 21 bp, Artificial sequence
  SiRNA target sequence
tccaactagacctgtgtttct

SEQ ID NO: 275826 - DNA, 21 bp, Artificial sequence
  SiRNA target sequence
ccaactagacctgtgtttcta

SEQ ID NO: 275827 - DNA, 21 bp, Artificial sequence
  SiRNA target sequence
caactagacctgtgtttctag

SEQ ID NO: 275828 - DNA, 21 bp, Artificial sequence
  SiRNA target sequence
aactagacctgtgtttctagc

SEQ ID NO: 275829 - DNA, 21 bp, Artificial sequence
  SiRNA target sequence
actagacctgtgtttctagct

SEQ ID NO: 275830 - DNA, 21 bp, Artificial sequence
  SiRNA target sequence
ctagacctgtgtttctagcta

SEQ ID NO: 275831 - DNA, 21 bp, Artificial sequence
  SiRNA target sequence
tagacctgtgtttctagctaa

SEQ ID NO: 275832 - DNA, 21 bp, Artificial sequence
  SiRNA target sequence
agacctgtgtttctagctaac

SEQ ID NO: 275833 - DNA, 21 bp, Artificial sequence
  SiRNA target sequence
gacctgtgtttctagctaacc

SEQ ID NO: 275834 - DNA, 21 bp, Artificial sequence
  SiRNA target sequence
acctgtgtttctagctaacct

SEQ ID NO: 275835 - DNA, 21 bp, Artificial sequence
  SiRNA target sequence
cctgtgtttctagctaacctg

SEQ ID NO: 275836 - DNA, 21 bp, Artificial sequence
  SiRNA target sequence
ctgtgtttctagctaacctgg

SEQ ID NO: 275837 - DNA, 21 bp, Artificial sequence
  SiRNA target sequence
tgtgtttctagctaacctgga

SEQ ID NO: 275838 - DNA, 21 bp, Artificial sequence
  SiRNA target sequence
gtgtttctagctaacctggac

SEQ ID NO: 275839 - DNA, 21 bp, Artificial sequence
  SiRNA target sequence
tgtttctagctaacctggaca

SEQ ID NO: 275840 - DNA, 21 bp, Artificial sequence
  SiRNA target sequence
gtttctagctaacctggacaa

SEQ ID NO: 275841 - DNA, 21 bp, Artificial sequence
  SiRNA target sequence
tttctagctaacctggacaag

SEQ ID NO: 275842 - DNA, 21 bp, Artificial sequence
  SiRNA target sequence
ttctagctaacctggacaagg

SEQ ID NO: 275843 - DNA, 21 bp, Artificial sequence
  SiRNA target sequence
tctagctaacctggacaaggt

SEQ ID NO: 275844 - DNA, 21 bp, Artificial sequence
  SiRNA target sequence
ctagctaacctggacaaggtc

SEQ ID NO: 275845 - DNA, 21 bp, Artificial sequence
  SiRNA target sequence
tagctaacctggacaaggtct

SEQ ID NO: 275846 - DNA, 21 bp, Artificial sequence
  SiRNA target sequence
agctaacctggacaaggtctc

SEQ ID NO: 275847 - DNA, 21 bp, Artificial sequence
  SiRNA target sequence
gctaacctggacaaggtctcg

SEQ ID NO: 275848 - DNA, 21 bp, Artificial sequence
  SiRNA target sequence
ctaacctggacaaggtctcgg

SEQ ID NO: 275849 - DNA, 21 bp, Artificial sequence
  SiRNA target sequence
taacctggacaaggtctcggt

SEQ ID NO: 275850 - DNA, 21 bp, Artificial sequence
  SiRNA target sequence
aacctggacaaggtctcggta

SEQ ID NO: 275851 - DNA, 21 bp, Artificial sequence
  SiRNA target sequence
acctggacaaggtctcggtag

SEQ ID NO: 275852 - DNA, 21 bp, Artificial sequence
  SiRNA target sequence
cctggacaaggtctcggtaga

SEQ ID NO: 275853 - DNA, 21 bp, Artificial sequence
  SiRNA target sequence
ctggacaaggtctcggtagaa

SEQ ID NO: 275854 - DNA, 21 bp, Artificial sequence
  SiRNA target sequence
tggacaaggtctcggtagaag

SEQ ID NO: 275855 - DNA, 21 bp, Artificial sequence
  SiRNA target sequence
ggacaaggtctcggtagaagg

SEQ ID NO: 275856 - DNA, 21 bp, Artificial sequence
  SiRNA target sequence
gacaaggtctcggtagaagga

SEQ ID NO: 275857 - DNA, 21 bp, Artificial sequence
  SiRNA target sequence
acaaggtctcggtagaaggaa

SEQ ID NO: 275858 - DNA, 21 bp, Artificial sequence
  SiRNA target sequence
caaggtctcggtagaaggaac

SEQ ID NO: 275859 - DNA, 21 bp, Artificial sequence
  SiRNA target sequence
aaggtctcggtagaaggaacg

SEQ ID NO: 275860 - DNA, 21 bp, Artificial sequence
  SiRNA target sequence
aggtctcggtagaaggaacga

SEQ ID NO: 275861 - DNA, 21 bp, Artificial sequence
  SiRNA target sequence
ggtctcggtagaaggaacgac

SEQ ID NO: 275862 - DNA, 21 bp, Artificial sequence
  SiRNA target sequence
gtctcggtagaaggaacgacg

SEQ ID NO: 275863 - DNA, 21 bp, Artificial sequence
  SiRNA target sequence
tctcggtagaaggaacgacga

SEQ ID NO: 275864 - DNA, 21 bp, Artificial sequence
  SiRNA target sequence
ctcggtagaaggaacgacgaa

SEQ ID NO: 275865 - DNA, 21 bp, Artificial sequence
  SiRNA target sequence
tcggtagaaggaacgacgaat

SEQ ID NO: 275866 - DNA, 21 bp, Artificial sequence
  SiRNA target sequence
cggtagaaggaacgacgaatt

SEQ ID NO: 275867 - DNA, 21 bp, Artificial sequence
  SiRNA target sequence
ggtagaaggaacgacgaattg

SEQ ID NO: 275868 - DNA, 21 bp, Artificial sequence
  SiRNA target sequence
gtagaaggaacgacgaattgg

SEQ ID NO: 275869 - DNA, 21 bp, Artificial sequence
  SiRNA target sequence
tagaaggaacgacgaattgga

SEQ ID NO: 275870 - DNA, 21 bp, Artificial sequence
  SiRNA target sequence
agaaggaacgacgaattggac

SEQ ID NO: 275871 - DNA, 21 bp, Artificial sequence
  SiRNA target sequence
gaaggaacgacgaattggact

SEQ ID NO: 275872 - DNA, 21 bp, Artificial sequence
  SiRNA target sequence
aaggaacgacgaattggactc

SEQ ID NO: 275873 - DNA, 21 bp, Artificial sequence
  SiRNA target sequence
aggaacgacgaattggactca

SEQ ID NO: 275874 - DNA, 21 bp, Artificial sequence
  SiRNA target sequence
ggaacgacgaattggactcat

SEQ ID NO: 275875 - DNA, 21 bp, Artificial sequence
  SiRNA target sequence
gaacgacgaattggactcatg

SEQ ID NO: 275876 - DNA, 21 bp, Artificial sequence
  SiRNA target sequence
aacgacgaattggactcatgc

SEQ ID NO: 275877 - DNA, 21 bp, Artificial sequence
  SiRNA target sequence
acgacgaattggactcatgct

SEQ ID NO: 275878 - DNA, 21 bp, Artificial sequence
  SiRNA target sequence
cgacgaattggactcatgctc

SEQ ID NO: 275879 - DNA, 21 bp, Artificial sequence
  SiRNA target sequence
gacgaattggactcatgctcg

SEQ ID NO: 275880 - DNA, 21 bp, Artificial sequence
  SiRNA target sequence
acgaattggactcatgctcga

SEQ ID NO: 275881 - DNA, 21 bp, Artificial sequence
  SiRNA target sequence
cgaattggactcatgctcgag

SEQ ID NO: 275882 - DNA, 21 bp, Artificial sequence
  SiRNA target sequence
gaattggactcatgctcgagg

SEQ ID NO: 275883 - DNA, 21 bp, Artificial sequence
  SiRNA target sequence
aattggactcatgctcgagga

SEQ ID NO: 275884 - DNA, 21 bp, Artificial sequence
  SiRNA target sequence
attggactcatgctcgaggat

SEQ ID NO: 275885 - DNA, 21 bp, Artificial sequence
  SiRNA target sequence
ttggactcatgctcgaggatt

SEQ ID NO: 275886 - DNA, 21 bp, Artificial sequence
  SiRNA target sequence
tggactcatgctcgaggattg

SEQ ID NO: 275887 - DNA, 21 bp, Artificial sequence
  SiRNA target sequence
ggactcatgctcgaggattgg

SEQ ID NO: 275888 - DNA, 21 bp, Artificial sequence
  SiRNA target sequence
gactcatgctcgaggattggg

SEQ ID NO: 275889 - DNA, 21 bp, Artificial sequence
  SiRNA target sequence
actcatgctcgaggattgggt

SEQ ID NO: 275890 - DNA, 21 bp, Artificial sequence
  SiRNA target sequence
ctcatgctcgaggattgggtc

SEQ ID NO: 275891 - DNA, 21 bp, Artificial sequence
  SiRNA target sequence
tcatgctcgaggattgggtcg

SEQ ID NO: 275892 - DNA, 21 bp, Artificial sequence
  SiRNA target sequence
catgctcgaggattgggtcgt

SEQ ID NO: 275893 - DNA, 21 bp, Artificial sequence
  SiRNA target sequence
atgctcgaggattgggtcgtc

SEQ ID NO: 275894 - DNA, 21 bp, Artificial sequence
  SiRNA target sequence
tgctcgaggattgggtcgtcg

SEQ ID NO: 275895 - DNA, 21 bp, Artificial sequence
  SiRNA target sequence
gctcgaggattgggtcgtcgt

SEQ ID NO: 275896 - DNA, 21 bp, Artificial sequence
  SiRNA target sequence
ctcgaggattgggtcgtcgta

SEQ ID NO: 275897 - DNA, 21 bp, Artificial sequence
  SiRNA target sequence
tcgaggattgggtcgtcgtac

SEQ ID NO: 275898 - DNA, 21 bp, Artificial sequence
  SiRNA target sequence
cgaggattgggtcgtcgtaca

SEQ ID NO: 275899 - DNA, 21 bp, Artificial sequence
  SiRNA target sequence
gaggattgggtcgtcgtacag

SEQ ID NO: 275900 - DNA, 21 bp, Artificial sequence
  SiRNA target sequence
aggattgggtcgtcgtacagc

SEQ ID NO: 275901 - DNA, 21 bp, Artificial sequence
  SiRNA target sequence
ggattgggtcgtcgtacagca

SEQ ID NO: 275902 - DNA, 21 bp, Artificial sequence
  SiRNA target sequence
gattgggtcgtcgtacagcaa

SEQ ID NO: 275903 - DNA, 21 bp, Artificial sequence
  SiRNA target sequence
attgggtcgtcgtacagcaac

SEQ ID NO: 275904 - DNA, 21 bp, Artificial sequence
  SiRNA target sequence
ttgggtcgtcgtacagcaacc

SEQ ID NO: 275905 - DNA, 21 bp, Artificial sequence
  SiRNA target sequence
tgggtcgtcgtacagcaacca

SEQ ID NO: 275906 - DNA, 21 bp, Artificial sequence
  SiRNA target sequence
gggtcgtcgtacagcaaccat

SEQ ID NO: 275907 - DNA, 21 bp, Artificial sequence
  SiRNA target sequence
ggtcgtcgtacagcaaccata

SEQ ID NO: 275908 - DNA, 21 bp, Artificial sequence
  SiRNA target sequence
gtcgtcgtacagcaaccatag

SEQ ID NO: 275909 - DNA, 21 bp, Artificial sequence
  SiRNA target sequence
tcgtcgtacagcaaccataga

SEQ ID NO: 275910 - DNA, 21 bp, Artificial sequence
  SiRNA target sequence
cgtcgtacagcaaccatagaa

SEQ ID NO: 275911 - DNA, 21 bp, Artificial sequence
  SiRNA target sequence
gtcgtacagcaaccatagaaa

SEQ ID NO: 275912 - DNA, 21 bp, Artificial sequence
  SiRNA target sequence
tcgtacagcaaccatagaaaa

SEQ ID NO: 275913 - DNA, 21 bp, Artificial sequence
  SiRNA target sequence
cgtacagcaaccatagaaaat

SEQ ID NO: 275914 - DNA, 21 bp, Artificial sequence
  SiRNA target sequence
gtacagcaaccatagaaaatg

SEQ ID NO: 275915 - DNA, 21 bp, Artificial sequence
  SiRNA target sequence
tacagcaaccatagaaaatgc

SEQ ID NO: 275916 - DNA, 21 bp, Artificial sequence
  SiRNA target sequence
acagcaaccatagaaaatgct

SEQ ID NO: 275917 - DNA, 21 bp, Artificial sequence
  SiRNA target sequence
cagcaaccatagaaaatgcta

SEQ ID NO: 275918 - DNA, 21 bp, Artificial sequence
  SiRNA target sequence
agcaaccatagaaaatgctaa

SEQ ID NO: 275919 - DNA, 21 bp, Artificial sequence
  SiRNA target sequence
gcaaccatagaaaatgctaaa

SEQ ID NO: 275920 - DNA, 21 bp, Artificial sequence
  SiRNA target sequence
caaccatagaaaatgctaaac

SEQ ID NO: 275921 - DNA, 21 bp, Artificial sequence
  SiRNA target sequence
aaccatagaaaatgctaaaca

SEQ ID NO: 275922 - DNA, 21 bp, Artificial sequence
  SiRNA target sequence
accatagaaaatgctaaacaa

SEQ ID NO: 275923 - DNA, 21 bp, Artificial sequence
  SiRNA target sequence
ccatagaaaatgctaaacaag

SEQ ID NO: 275924 - DNA, 21 bp, Artificial sequence
  SiRNA target sequence
catagaaaatgctaaacaagc

SEQ ID NO: 275925 - DNA, 21 bp, Artificial sequence
  SiRNA target sequence
atagaaaatgctaaacaagcg

SEQ ID NO: 275926 - DNA, 21 bp, Artificial sequence
  SiRNA target sequence
tagaaaatgctaaacaagcgt

SEQ ID NO: 275927 - DNA, 21 bp, Artificial sequence
  SiRNA target sequence
agaaaatgctaaacaagcgtt

SEQ ID NO: 275928 - DNA, 21 bp, Artificial sequence
  SiRNA target sequence
gaaaatgctaaacaagcgtta

SEQ ID NO: 275929 - DNA, 21 bp, Artificial sequence
  SiRNA target sequence
aaaatgctaaacaagcgttag

SEQ ID NO: 275930 - DNA, 21 bp, Artificial sequence
  SiRNA target sequence
aaatgctaaacaagcgttaga

SEQ ID NO: 275931 - DNA, 21 bp, Artificial sequence
  SiRNA target sequence
aatgctaaacaagcgttagag

SEQ ID NO: 275932 - DNA, 21 bp, Artificial sequence
  SiRNA target sequence
atgctaaacaagcgttagagt

SEQ ID NO: 275933 - DNA, 21 bp, Artificial sequence
  SiRNA target sequence
tgctaaacaagcgttagagtt

SEQ ID NO: 275934 - DNA, 21 bp, Artificial sequence
  SiRNA target sequence
gctaaacaagcgttagagtta

SEQ ID NO: 275935 - DNA, 21 bp, Artificial sequence
  SiRNA target sequence
ctaaacaagcgttagagttag

SEQ ID NO: 275936 - DNA, 21 bp, Artificial sequence
  SiRNA target sequence
taaacaagcgttagagttagc

SEQ ID NO: 275937 - DNA, 21 bp, Artificial sequence
  SiRNA target sequence
aaacaagcgttagagttagca

SEQ ID NO: 275938 - DNA, 21 bp, Artificial sequence
  SiRNA target sequence
aacaagcgttagagttagcat

SEQ ID NO: 275939 - DNA, 21 bp, Artificial sequence
  SiRNA target sequence
acaagcgttagagttagcatt

SEQ ID NO: 275940 - DNA, 21 bp, Artificial sequence
  SiRNA target sequence
caagcgttagagttagcattt

SEQ ID NO: 275941 - DNA, 21 bp, Artificial sequence
  SiRNA target sequence
aagcgttagagttagcatttg

SEQ ID NO: 275942 - DNA, 21 bp, Artificial sequence
  SiRNA target sequence
agcgttagagttagcatttgg

SEQ ID NO: 275943 - DNA, 21 bp, Artificial sequence
  SiRNA target sequence
gcgttagagttagcatttggg

SEQ ID NO: 275944 - DNA, 21 bp, Artificial sequence
  SiRNA target sequence
cgttagagttagcatttgggt

SEQ ID NO: 275945 - DNA, 21 bp, Artificial sequence
  SiRNA target sequence
gttagagttagcatttgggtg

SEQ ID NO: 275946 - DNA, 21 bp, Artificial sequence
  SiRNA target sequence
ttagagttagcatttgggtgg

SEQ ID NO: 275947 - DNA, 21 bp, Artificial sequence
  SiRNA target sequence
tagagttagcatttgggtggg

SEQ ID NO: 275948 - DNA, 21 bp, Artificial sequence
  SiRNA target sequence
agagttagcatttgggtgggg

SEQ ID NO: 275949 - DNA, 21 bp, Artificial sequence
  SiRNA target sequence
gagttagcatttgggtggggt

SEQ ID NO: 275950 - DNA, 21 bp, Artificial sequence
  SiRNA target sequence
agttagcatttgggtggggtc

SEQ ID NO: 275951 - DNA, 21 bp, Artificial sequence
  SiRNA target sequence
gttagcatttgggtggggtcc

SEQ ID NO: 275952 - DNA, 21 bp, Artificial sequence
  SiRNA target sequence
ttagcatttgggtggggtcct

SEQ ID NO: 275953 - DNA, 21 bp, Artificial sequence
  SiRNA target sequence
tagcatttgggtggggtcctg

SEQ ID NO: 275954 - DNA, 21 bp, Artificial sequence
  SiRNA target sequence
agcatttgggtggggtcctga

SEQ ID NO: 275955 - DNA, 21 bp, Artificial sequence
  SiRNA target sequence
gcatttgggtggggtcctgaa

SEQ ID NO: 275956 - DNA, 21 bp, Artificial sequence
  SiRNA target sequence
catttgggtggggtcctgaat

SEQ ID NO: 275957 - DNA, 21 bp, Artificial sequence
  SiRNA target sequence
atttgggtggggtcctgaata

SEQ ID NO: 275958 - DNA, 21 bp, Artificial sequence
  SiRNA target sequence
tttgggtggggtcctgaatat

SEQ ID NO: 275959 - DNA, 21 bp, Artificial sequence
  SiRNA target sequence
ttgggtggggtcctgaatatt

SEQ ID NO: 275960 - DNA, 21 bp, Artificial sequence
  SiRNA target sequence
tgggtggggtcctgaatattt

SEQ ID NO: 275961 - DNA, 21 bp, Artificial sequence
  SiRNA target sequence
gggtggggtcctgaatatttt

SEQ ID NO: 275962 - DNA, 21 bp, Artificial sequence
  SiRNA target sequence
ggtggggtcctgaatatttta

SEQ ID NO: 275963 - DNA, 21 bp, Artificial sequence
  SiRNA target sequence
gtggggtcctgaatattttaa

SEQ ID NO: 275964 - DNA, 21 bp, Artificial sequence
  SiRNA target sequence
tggggtcctgaatattttaat

SEQ ID NO: 275965 - DNA, 21 bp, Artificial sequence
  SiRNA target sequence
ggggtcctgaatattttaatt

SEQ ID NO: 275966 - DNA, 21 bp, Artificial sequence
  SiRNA target sequence
gggtcctgaatattttaatta

SEQ ID NO: 275967 - DNA, 21 bp, Artificial sequence
  SiRNA target sequence
ggtcctgaatattttaattat

SEQ ID NO: 275968 - DNA, 21 bp, Artificial sequence
  SiRNA target sequence
gtcctgaatattttaattatg

SEQ ID NO: 275969 - DNA, 21 bp, Artificial sequence
  SiRNA target sequence
tcctgaatattttaattatgt

SEQ ID NO: 275970 - DNA, 21 bp, Artificial sequence
  SiRNA target sequence
cctgaatattttaattatgtc

SEQ ID NO: 275971 - DNA, 21 bp, Artificial sequence
  SiRNA target sequence
ctgaatattttaattatgtca

SEQ ID NO: 275972 - DNA, 21 bp, Artificial sequence
  SiRNA target sequence
tgaatattttaattatgtcag

SEQ ID NO: 275973 - DNA, 21 bp, Artificial sequence
  SiRNA target sequence
gaatattttaattatgtcaga

SEQ ID NO: 275974 - DNA, 21 bp, Artificial sequence
  SiRNA target sequence
aatattttaattatgtcagaa

SEQ ID NO: 275975 - DNA, 21 bp, Artificial sequence
  SiRNA target sequence
atattttaattatgtcagaaa

SEQ ID NO: 275976 - DNA, 21 bp, Artificial sequence
  SiRNA target sequence
tattttaattatgtcagaaat

SEQ ID NO: 275977 - DNA, 21 bp, Artificial sequence
  SiRNA target sequence
attttaattatgtcagaaata

SEQ ID NO: 275978 - DNA, 21 bp, Artificial sequence
  SiRNA target sequence
ttttaattatgtcagaaatac

SEQ ID NO: 275979 - DNA, 21 bp, Artificial sequence
  SiRNA target sequence
tttaattatgtcagaaatacc

SEQ ID NO: 275980 - DNA, 21 bp, Artificial sequence
  SiRNA target sequence
ttaattatgtcagaaatacca

SEQ ID NO: 275981 - DNA, 21 bp, Artificial sequence
  SiRNA target sequence
taattatgtcagaaataccat

SEQ ID NO: 275982 - DNA, 21 bp, Artificial sequence
  SiRNA target sequence
aattatgtcagaaataccatt

SEQ ID NO: 275983 - DNA, 21 bp, Artificial sequence
  SiRNA target sequence
attatgtcagaaataccatta

SEQ ID NO: 275984 - DNA, 21 bp, Artificial sequence
  SiRNA target sequence
ttatgtcagaaataccattaa

SEQ ID NO: 275985 - DNA, 21 bp, Artificial sequence
  SiRNA target sequence
tatgtcagaaataccattaaa

SEQ ID NO: 275986 - DNA, 21 bp, Artificial sequence
  SiRNA target sequence
atgtcagaaataccattaaaa

SEQ ID NO: 275987 - DNA, 21 bp, Artificial sequence
  SiRNA target sequence
tgtcagaaataccattaaaat

SEQ ID NO: 275988 - DNA, 21 bp, Artificial sequence
  SiRNA target sequence
gtcagaaataccattaaaatg

SEQ ID NO: 275989 - DNA, 21 bp, Artificial sequence
  SiRNA target sequence
tcagaaataccattaaaatgg

SEQ ID NO: 275990 - DNA, 21 bp, Artificial sequence
  SiRNA target sequence
cagaaataccattaaaatggc

SEQ ID NO: 275991 - DNA, 21 bp, Artificial sequence
  SiRNA target sequence
agaaataccattaaaatggct

SEQ ID NO: 275992 - DNA, 21 bp, Artificial sequence
  SiRNA target sequence
gaaataccattaaaatggctt

SEQ ID NO: 275993 - DNA, 21 bp, Artificial sequence
  SiRNA target sequence
aaataccattaaaatggcttt

SEQ ID NO: 275994 - DNA, 21 bp, Artificial sequence
  SiRNA target sequence
aataccattaaaatggctttt

SEQ ID NO: 275995 - DNA, 21 bp, Artificial sequence
  SiRNA target sequence
ataccattaaaatggcttttg

SEQ ID NO: 275996 - DNA, 21 bp, Artificial sequence
  SiRNA target sequence
taccattaaaatggcttttga

SEQ ID NO: 275997 - DNA, 21 bp, Artificial sequence
  SiRNA target sequence
accattaaaatggcttttgac

SEQ ID NO: 275998 - DNA, 21 bp, Artificial sequence
  SiRNA target sequence
ccattaaaatggcttttgaca

SEQ ID NO: 275999 - DNA, 21 bp, Artificial sequence
  SiRNA target sequence
cattaaaatggcttttgacaa

SEQ ID NO: 276000 - DNA, 21 bp, Artificial sequence
  SiRNA target sequence
attaaaatggcttttgacaag

SEQ ID NO: 276001 - DNA, 21 bp, Artificial sequence
  SiRNA target sequence
ttaaaatggcttttgacaagt

SEQ ID NO: 276002 - DNA, 21 bp, Artificial sequence
  SiRNA target sequence
taaaatggcttttgacaagtt

SEQ ID NO: 276003 - DNA, 21 bp, Artificial sequence
  SiRNA target sequence
aaaatggcttttgacaagttg

SEQ ID NO: 276004 - DNA, 21 bp, Artificial sequence
  SiRNA target sequence
aaatggcttttgacaagttgg

SEQ ID NO: 276005 - DNA, 21 bp, Artificial sequence
  SiRNA target sequence
aatggcttttgacaagttggg

SEQ ID NO: 276006 - DNA, 21 bp, Artificial sequence
  SiRNA target sequence
atggcttttgacaagttgggt

SEQ ID NO: 276007 - DNA, 21 bp, Artificial sequence
  SiRNA target sequence
tggcttttgacaagttgggta

SEQ ID NO: 276008 - DNA, 21 bp, Artificial sequence
  SiRNA target sequence
ggcttttgacaagttgggtat

SEQ ID NO: 276009 - DNA, 21 bp, Artificial sequence
  SiRNA target sequence
gcttttgacaagttgggtatt

SEQ ID NO: 276010 - DNA, 21 bp, Artificial sequence
  SiRNA target sequence
cttttgacaagttgggtattt

SEQ ID NO: 276011 - DNA, 21 bp, Artificial sequence
  SiRNA target sequence
ttttgacaagttgggtattta

SEQ ID NO: 276012 - DNA, 21 bp, Artificial sequence
  SiRNA target sequence
tttgacaagttgggtatttat

SEQ ID NO: 276013 - DNA, 21 bp, Artificial sequence
  SiRNA target sequence
ttgacaagttgggtatttatg

SEQ ID NO: 276014 - DNA, 21 bp, Artificial sequence
  SiRNA target sequence
tgacaagttgggtatttatga

SEQ ID NO: 276015 - DNA, 21 bp, Artificial sequence
  SiRNA target sequence
gacaagttgggtatttatgag

SEQ ID NO: 276016 - DNA, 21 bp, Artificial sequence
  SiRNA target sequence
acaagttgggtatttatgagg

SEQ ID NO: 276017 - DNA, 21 bp, Artificial sequence
  SiRNA target sequence
caagttgggtatttatgagga

SEQ ID NO: 276018 - DNA, 21 bp, Artificial sequence
  SiRNA target sequence
aagttgggtatttatgaggac

SEQ ID NO: 276019 - DNA, 21 bp, Artificial sequence
  SiRNA target sequence
agttgggtatttatgaggacc

SEQ ID NO: 276020 - DNA, 21 bp, Artificial sequence
  SiRNA target sequence
gttgggtatttatgaggacct

SEQ ID NO: 276021 - DNA, 21 bp, Artificial sequence
  SiRNA target sequence
ttgggtatttatgaggacctt

SEQ ID NO: 276022 - DNA, 21 bp, Artificial sequence
  SiRNA target sequence
tgggtatttatgaggacctta

SEQ ID NO: 276023 - DNA, 21 bp, Artificial sequence
  SiRNA target sequence
gggtatttatgaggaccttat

SEQ ID NO: 276024 - DNA, 21 bp, Artificial sequence
  SiRNA target sequence
ggtatttatgaggaccttatc

SEQ ID NO: 276025 - DNA, 21 bp, Artificial sequence
  SiRNA target sequence
gtatttatgaggaccttatca

SEQ ID NO: 276026 - DNA, 21 bp, Artificial sequence
  SiRNA target sequence
tatttatgaggaccttatcac

SEQ ID NO: 276027 - DNA, 21 bp, Artificial sequence
  SiRNA target sequence
atttatgaggaccttatcaca

SEQ ID NO: 276028 - DNA, 21 bp, Artificial sequence
  SiRNA target sequence
tttatgaggaccttatcacat

SEQ ID NO: 276029 - DNA, 21 bp, Artificial sequence
  SiRNA target sequence
ttatgaggaccttatcacatg

SEQ ID NO: 276030 - DNA, 21 bp, Artificial sequence
  SiRNA target sequence
tatgaggaccttatcacatgg

SEQ ID NO: 276031 - DNA, 21 bp, Artificial sequence
  SiRNA target sequence
atgaggaccttatcacatggg

SEQ ID NO: 276032 - DNA, 21 bp, Artificial sequence
  SiRNA target sequence
tgaggaccttatcacatggga

SEQ ID NO: 276033 - DNA, 21 bp, Artificial sequence
  SiRNA target sequence
gaggaccttatcacatgggaa

SEQ ID NO: 276034 - DNA, 21 bp, Artificial sequence
  SiRNA target sequence
aggaccttatcacatgggaag

SEQ ID NO: 276035 - DNA, 21 bp, Artificial sequence
  SiRNA target sequence
ggaccttatcacatgggaaga

SEQ ID NO: 276036 - DNA, 21 bp, Artificial sequence
  SiRNA target sequence
gaccttatcacatgggaagaa

SEQ ID NO: 276037 - DNA, 21 bp, Artificial sequence
  SiRNA target sequence
accttatcacatgggaagaaa

SEQ ID NO: 276038 - DNA, 21 bp, Artificial sequence
  SiRNA target sequence
ccttatcacatgggaagaaat

SEQ ID NO: 276039 - DNA, 21 bp, Artificial sequence
  SiRNA target sequence
cttatcacatgggaagaaatg

SEQ ID NO: 276040 - DNA, 21 bp, Artificial sequence
  SiRNA target sequence
ttatcacatgggaagaaatgg

SEQ ID NO: 276041 - DNA, 21 bp, Artificial sequence
  SiRNA target sequence
tatcacatgggaagaaatgga

SEQ ID NO: 276042 - DNA, 21 bp, Artificial sequence
  SiRNA target sequence
atcacatgggaagaaatggat

SEQ ID NO: 276043 - DNA, 21 bp, Artificial sequence
  SiRNA target sequence
tcacatgggaagaaatggatg

SEQ ID NO: 276044 - DNA, 21 bp, Artificial sequence
  SiRNA target sequence
cacatgggaagaaatggatgt

SEQ ID NO: 276045 - DNA, 21 bp, Artificial sequence
  SiRNA target sequence
acatgggaagaaatggatgtt

SEQ ID NO: 276046 - DNA, 21 bp, Artificial sequence
  SiRNA target sequence
catgggaagaaatggatgtta

SEQ ID NO: 276047 - DNA, 21 bp, Artificial sequence
  SiRNA target sequence
atgggaagaaatggatgttag

SEQ ID NO: 276048 - DNA, 21 bp, Artificial sequence
  SiRNA target sequence
tgggaagaaatggatgttaga

SEQ ID NO: 276049 - DNA, 21 bp, Artificial sequence
  SiRNA target sequence
gggaagaaatggatgttagat

SEQ ID NO: 276050 - DNA, 21 bp, Artificial sequence
  SiRNA target sequence
ggaagaaatggatgttagatg

SEQ ID NO: 276051 - DNA, 21 bp, Artificial sequence
  SiRNA target sequence
gaagaaatggatgttagatgt

SEQ ID NO: 276052 - DNA, 21 bp, Artificial sequence
  SiRNA target sequence
aagaaatggatgttagatgtt

SEQ ID NO: 276053 - DNA, 21 bp, Artificial sequence
  SiRNA target sequence
agaaatggatgttagatgtta

SEQ ID NO: 276054 - DNA, 21 bp, Artificial sequence
  SiRNA target sequence
gaaatggatgttagatgttac

SEQ ID NO: 276055 - DNA, 21 bp, Artificial sequence
  SiRNA target sequence
aaatggatgttagatgttacg

SEQ ID NO: 276056 - DNA, 21 bp, Artificial sequence
  SiRNA target sequence
aatggatgttagatgttacgc

SEQ ID NO: 276057 - DNA, 21 bp, Artificial sequence
  SiRNA target sequence
atggatgttagatgttacgct

SEQ ID NO: 276058 - DNA, 21 bp, Artificial sequence
  SiRNA target sequence
tggatgttagatgttacgcta

SEQ ID NO: 276059 - DNA, 21 bp, Artificial sequence
  SiRNA target sequence
ggatgttagatgttacgctag

SEQ ID NO: 276060 - DNA, 21 bp, Artificial sequence
  SiRNA target sequence
gatgttagatgttacgctagt

SEQ ID NO: 276061 - DNA, 21 bp, Artificial sequence
  SiRNA target sequence
atgttagatgttacgctagtg

SEQ ID NO: 276062 - DNA, 21 bp, Artificial sequence
  SiRNA target sequence
tgttagatgttacgctagtgc

SEQ ID NO: 276063 - DNA, 21 bp, Artificial sequence
  SiRNA target sequence
gttagatgttacgctagtgcg

SEQ ID NO: 276064 - DNA, 21 bp, Artificial sequence
  SiRNA target sequence
ttagatgttacgctagtgcgt

SEQ ID NO: 276065 - DNA, 21 bp, Artificial sequence
  SiRNA target sequence
tagatgttacgctagtgcgta

SEQ ID NO: 276066 - DNA, 21 bp, Artificial sequence
  SiRNA target sequence
agatgttacgctagtgcgtaa

SEQ ID NO: 276067 - DNA, 21 bp, Artificial sequence
  SiRNA target sequence
gatgttacgctagtgcgtaat

SEQ ID NO: 276068 - DNA, 21 bp, Artificial sequence
  SiRNA target sequence
atgttacgctagtgcgtaata

SEQ ID NO: 276069 - DNA, 21 bp, Artificial sequence
  SiRNA target sequence
tgttacgctagtgcgtaatat

SEQ ID NO: 276070 - DNA, 21 bp, Artificial sequence
  SiRNA target sequence
gttacgctagtgcgtaatatt

SEQ ID NO: 276071 - DNA, 21 bp, Artificial sequence
  SiRNA target sequence
ttacgctagtgcgtaatatta

SEQ ID NO: 276072 - DNA, 21 bp, Artificial sequence
  SiRNA target sequence
tacgctagtgcgtaatattaa

SEQ ID NO: 276073 - DNA, 21 bp, Artificial sequence
  SiRNA target sequence
acgctagtgcgtaatattaaa

SEQ ID NO: 276074 - DNA, 21 bp, Artificial sequence
  SiRNA target sequence
cgctagtgcgtaatattaaat

SEQ ID NO: 276075 - DNA, 21 bp, Artificial sequence
  SiRNA target sequence
gctagtgcgtaatattaaatt

SEQ ID NO: 276076 - DNA, 21 bp, Artificial sequence
  SiRNA target sequence
ctagtgcgtaatattaaattt

SEQ ID NO: 276077 - DNA, 21 bp, Artificial sequence
  SiRNA target sequence
tagtgcgtaatattaaatttt

SEQ ID NO: 276078 - DNA, 21 bp, Artificial sequence
  SiRNA target sequence
agtgcgtaatattaaatttta

SEQ ID NO: 276079 - DNA, 21 bp, Artificial sequence
  SiRNA target sequence
gtgcgtaatattaaattttaa

SEQ ID NO: 276080 - DNA, 21 bp, Artificial sequence
  SiRNA target sequence
tgcgtaatattaaattttaaa

SEQ ID NO: 276081 - DNA, 21 bp, Artificial sequence
  SiRNA target sequence
gcgtaatattaaattttaaat

SEQ ID NO: 276082 - DNA, 21 bp, Artificial sequence
  SiRNA target sequence
cgtaatattaaattttaaata

SEQ ID NO: 276083 - DNA, 21 bp, Artificial sequence
  SiRNA target sequence
gtaatattaaattttaaatac

SEQ ID NO: 276084 - DNA, 21 bp, Artificial sequence
  SiRNA target sequence
taatattaaattttaaatact

SEQ ID NO: 276085 - DNA, 21 bp, Artificial sequence
  SiRNA target sequence
aatattaaattttaaatactc

SEQ ID NO: 276086 - DNA, 21 bp, Artificial sequence
  SiRNA target sequence
atattaaattttaaatactca

SEQ ID NO: 276087 - DNA, 21 bp, Artificial sequence
  SiRNA target sequence
tattaaattttaaatactcat

SEQ ID NO: 276088 - DNA, 21 bp, Artificial sequence
  SiRNA target sequence
attaaattttaaatactcatt

SEQ ID NO: 276089 - DNA, 21 bp, Artificial sequence
  SiRNA target sequence
ttaaattttaaatactcatta

SEQ ID NO: 276090 - DNA, 21 bp, Artificial sequence
  SiRNA target sequence
taaattttaaatactcattaa

SEQ ID NO: 276091 - DNA, 21 bp, Artificial sequence
  SiRNA target sequence
aaattttaaatactcattaat

SEQ ID NO: 276092 - DNA, 21 bp, Artificial sequence
  SiRNA target sequence
aattttaaatactcattaatt

SEQ ID NO: 276093 - DNA, 21 bp, Artificial sequence
  SiRNA target sequence
attttaaatactcattaattt

SEQ ID NO: 276094 - DNA, 21 bp, Artificial sequence
  SiRNA target sequence
ttttaaatactcattaatttt

SEQ ID NO: 276095 - DNA, 21 bp, Artificial sequence
  SiRNA target sequence
tttaaatactcattaatttta

SEQ ID NO: 276096 - DNA, 21 bp, Artificial sequence
  SiRNA target sequence
ttaaatactcattaattttaa

SEQ ID NO: 276097 - DNA, 21 bp, Artificial sequence
  SiRNA target sequence
taaatactcattaattttaat

SEQ ID NO: 276098 - DNA, 21 bp, Artificial sequence
  SiRNA target sequence
aaatactcattaattttaatt

SEQ ID NO: 276099 - DNA, 21 bp, Artificial sequence
  SiRNA target sequence
aatactcattaattttaattt

SEQ ID NO: 276100 - DNA, 21 bp, Artificial sequence
  SiRNA target sequence
atactcattaattttaatttt

SEQ ID NO: 276101 - DNA, 21 bp, Artificial sequence
  SiRNA target sequence
tactcattaattttaatttta

SEQ ID NO: 276102 - DNA, 21 bp, Artificial sequence
  SiRNA target sequence
actcattaattttaattttat

SEQ ID NO: 276103 - DNA, 21 bp, Artificial sequence
  SiRNA target sequence
ctcattaattttaattttatt

SEQ ID NO: 276104 - DNA, 21 bp, Artificial sequence
  SiRNA target sequence
tcattaattttaattttattt

SEQ ID NO: 276105 - DNA, 21 bp, Artificial sequence
  SiRNA target sequence
cattaattttaattttatttt

SEQ ID NO: 276106 - DNA, 21 bp, Artificial sequence
  SiRNA target sequence
attaattttaattttatttta

SEQ ID NO: 276107 - DNA, 21 bp, Artificial sequence
  SiRNA target sequence
ttaattttaattttattttag

SEQ ID NO: 276108 - DNA, 21 bp, Artificial sequence
  SiRNA target sequence
taattttaattttattttagg

SEQ ID NO: 276109 - DNA, 21 bp, Artificial sequence
  SiRNA target sequence
aattttaattttattttaggt

SEQ ID NO: 276110 - DNA, 21 bp, Artificial sequence
  SiRNA target sequence
attttaattttattttaggtt

SEQ ID NO: 276111 - DNA, 21 bp, Artificial sequence
  SiRNA target sequence
ttttaattttattttaggtta

SEQ ID NO: 276112 - DNA, 21 bp, Artificial sequence
  SiRNA target sequence
tttaattttattttaggttat

SEQ ID NO: 276113 - DNA, 21 bp, Artificial sequence
  SiRNA target sequence
ttaattttattttaggttatt

SEQ ID NO: 276114 - DNA, 21 bp, Artificial sequence
  SiRNA target sequence
taattttattttaggttattg

SEQ ID NO: 276115 - DNA, 21 bp, Artificial sequence
  SiRNA target sequence
aattttattttaggttattgg

SEQ ID NO: 276116 - DNA, 21 bp, Artificial sequence
  SiRNA target sequence
attttattttaggttattgga

SEQ ID NO: 276117 - DNA, 21 bp, Artificial sequence
  SiRNA target sequence
ttttattttaggttattggaa

SEQ ID NO: 276118 - DNA, 21 bp, Artificial sequence
  SiRNA target sequence
tttattttaggttattggaat

SEQ ID NO: 276119 - DNA, 21 bp, Artificial sequence
  SiRNA target sequence
ttattttaggttattggaatt

SEQ ID NO: 276120 - DNA, 21 bp, Artificial sequence
  SiRNA target sequence
tattttaggttattggaattg

SEQ ID NO: 276121 - DNA, 21 bp, Artificial sequence
  SiRNA target sequence
attttaggttattggaattga

SEQ ID NO: 276122 - DNA, 21 bp, Artificial sequence
  SiRNA target sequence
ttttaggttattggaattgag

SEQ ID NO: 276123 - DNA, 21 bp, Artificial sequence
  SiRNA target sequence
tttaggttattggaattgagg

SEQ ID NO: 276124 - DNA, 21 bp, Artificial sequence
  SiRNA target sequence
ttaggttattggaattgaggg

SEQ ID NO: 276125 - DNA, 21 bp, Artificial sequence
  SiRNA target sequence
taggttattggaattgaggga

SEQ ID NO: 276126 - DNA, 21 bp, Artificial sequence
  SiRNA target sequence
aggttattggaattgagggaa

SEQ ID NO: 276127 - DNA, 21 bp, Artificial sequence
  SiRNA target sequence
ggttattggaattgagggaag

SEQ ID NO: 276128 - DNA, 21 bp, Artificial sequence
  SiRNA target sequence
gttattggaattgagggaagt

SEQ ID NO: 276129 - DNA, 21 bp, Artificial sequence
  SiRNA target sequence
ttattggaattgagggaagta

SEQ ID NO: 276130 - DNA, 21 bp, Artificial sequence
  SiRNA target sequence
tattggaattgagggaagtac

SEQ ID NO: 276131 - DNA, 21 bp, Artificial sequence
  SiRNA target sequence
attggaattgagggaagtacc

SEQ ID NO: 276132 - DNA, 21 bp, Artificial sequence
  SiRNA target sequence
ttggaattgagggaagtacca

SEQ ID NO: 276133 - DNA, 21 bp, Artificial sequence
  SiRNA target sequence
tggaattgagggaagtaccac

SEQ ID NO: 276134 - DNA, 21 bp, Artificial sequence
  SiRNA target sequence
ggaattgagggaagtaccacc

SEQ ID NO: 276135 - DNA, 21 bp, Artificial sequence
  SiRNA target sequence
gaattgagggaagtaccaccc

SEQ ID NO: 276136 - DNA, 21 bp, Artificial sequence
  SiRNA target sequence
aattgagggaagtaccacccc

SEQ ID NO: 276137 - DNA, 21 bp, Artificial sequence
  SiRNA target sequence
attgagggaagtaccaccccc

SEQ ID NO: 276138 - DNA, 21 bp, Artificial sequence
  SiRNA target sequence
ttgagggaagtaccacccccc

SEQ ID NO: 276139 - DNA, 21 bp, Artificial sequence
  SiRNA target sequence
tgagggaagtaccacccccca

SEQ ID NO: 276140 - DNA, 21 bp, Artificial sequence
  SiRNA target sequence
gagggaagtaccaccccccaa

SEQ ID NO: 276141 - DNA, 21 bp, Artificial sequence
  SiRNA target sequence
agggaagtaccaccccccaag

SEQ ID NO: 276142 - DNA, 21 bp, Artificial sequence
  SiRNA target sequence
gggaagtaccaccccccaaga

SEQ ID NO: 276143 - DNA, 21 bp, Artificial sequence
  SiRNA target sequence
ggaagtaccaccccccaagac

SEQ ID NO: 276144 - DNA, 21 bp, Artificial sequence
  SiRNA target sequence
gaagtaccaccccccaagacc

SEQ ID NO: 276145 - DNA, 21 bp, Artificial sequence
  SiRNA target sequence
aagtaccaccccccaagacct

SEQ ID NO: 276146 - DNA, 21 bp, Artificial sequence
  SiRNA target sequence
agtaccaccccccaagacctt

SEQ ID NO: 276147 - DNA, 21 bp, Artificial sequence
  SiRNA target sequence
gtaccaccccccaagaccttc

SEQ ID NO: 276148 - DNA, 21 bp, Artificial sequence
  SiRNA target sequence
taccaccccccaagaccttcg

SEQ ID NO: 276149 - DNA, 21 bp, Artificial sequence
  SiRNA target sequence
accaccccccaagaccttcgt

SEQ ID NO: 276150 - DNA, 21 bp, Artificial sequence
  SiRNA target sequence
ccaccccccaagaccttcgtt

SEQ ID NO: 276151 - DNA, 21 bp, Artificial sequence
  SiRNA target sequence
caccccccaagaccttcgttt

SEQ ID NO: 276152 - DNA, 21 bp, Artificial sequence
  SiRNA target sequence
accccccaagaccttcgtttt

SEQ ID NO: 276153 - DNA, 21 bp, Artificial sequence
  SiRNA target sequence
ccccccaagaccttcgtttta

SEQ ID NO: 276154 - DNA, 21 bp, Artificial sequence
  SiRNA target sequence
cccccaagaccttcgttttaa

SEQ ID NO: 276155 - DNA, 21 bp, Artificial sequence
  SiRNA target sequence
ccccaagaccttcgttttaaa

SEQ ID NO: 276156 - DNA, 21 bp, Artificial sequence
  SiRNA target sequence
cccaagaccttcgttttaaat

SEQ ID NO: 276157 - DNA, 21 bp, Artificial sequence
  SiRNA target sequence
ccaagaccttcgttttaaatc

SEQ ID NO: 276158 - DNA, 21 bp, Artificial sequence
  SiRNA target sequence
caagaccttcgttttaaatct

SEQ ID NO: 276159 - DNA, 21 bp, Artificial sequence
  SiRNA target sequence
aagaccttcgttttaaatcta

SEQ ID NO: 276160 - DNA, 21 bp, Artificial sequence
  SiRNA target sequence
agaccttcgttttaaatctac

SEQ ID NO: 276161 - DNA, 21 bp, Artificial sequence
  SiRNA target sequence
gaccttcgttttaaatctact

SEQ ID NO: 276162 - DNA, 21 bp, Artificial sequence
  SiRNA target sequence
accttcgttttaaatctacta

SEQ ID NO: 276163 - DNA, 21 bp, Artificial sequence
  SiRNA target sequence
ccttcgttttaaatctactaa

SEQ ID NO: 276164 - DNA, 21 bp, Artificial sequence
  SiRNA target sequence
cttcgttttaaatctactaag

SEQ ID NO: 276165 - DNA, 21 bp, Artificial sequence
  SiRNA target sequence
ttcgttttaaatctactaaga

SEQ ID NO: 276166 - DNA, 21 bp, Artificial sequence
  SiRNA target sequence
tcgttttaaatctactaagag

SEQ ID NO: 276167 - DNA, 21 bp, Artificial sequence
  SiRNA target sequence
cgttttaaatctactaagagg

SEQ ID NO: 276168 - DNA, 21 bp, Artificial sequence
  SiRNA target sequence
gttttaaatctactaagagga

SEQ ID NO: 276169 - DNA, 21 bp, Artificial sequence
  SiRNA target sequence
ttttaaatctactaagaggag

SEQ ID NO: 276170 - DNA, 21 bp, Artificial sequence
  SiRNA target sequence
tttaaatctactaagaggagt

SEQ ID NO: 276171 - DNA, 21 bp, Artificial sequence
  SiRNA target sequence
ttaaatctactaagaggagta

SEQ ID NO: 276172 - DNA, 21 bp, Artificial sequence
  SiRNA target sequence
taaatctactaagaggagtaa

SEQ ID NO: 276173 - DNA, 21 bp, Artificial sequence
  SiRNA target sequence
aaatctactaagaggagtaaa

SEQ ID NO: 276174 - DNA, 21 bp, Artificial sequence
  SiRNA target sequence
aatctactaagaggagtaaac

SEQ ID NO: 276175 - DNA, 21 bp, Artificial sequence
  SiRNA target sequence
atctactaagaggagtaaacc

SEQ ID NO: 276176 - DNA, 21 bp, Artificial sequence
  SiRNA target sequence
tctactaagaggagtaaacct

SEQ ID NO: 276177 - DNA, 21 bp, Artificial sequence
  SiRNA target sequence
ctactaagaggagtaaaccta

SEQ ID NO: 276178 - DNA, 21 bp, Artificial sequence
  SiRNA target sequence
tactaagaggagtaaacctat

SEQ ID NO: 276179 - DNA, 21 bp, Artificial sequence
  SiRNA target sequence
actaagaggagtaaacctata

SEQ ID NO: 276180 - DNA, 21 bp, Artificial sequence
  SiRNA target sequence
ctaagaggagtaaacctatat

SEQ ID NO: 276181 - DNA, 21 bp, Artificial sequence
  SiRNA target sequence
taagaggagtaaacctatata

SEQ ID NO: 276182 - DNA, 21 bp, Artificial sequence
  SiRNA target sequence
aagaggagtaaacctatatat

SEQ ID NO: 276183 - DNA, 21 bp, Artificial sequence
  SiRNA target sequence
agaggagtaaacctatatata

SEQ ID NO: 276184 - DNA, 21 bp, Artificial sequence
  SiRNA target sequence
gaggagtaaacctatatataa

SEQ ID NO: 276185 - DNA, 21 bp, Artificial sequence
  SiRNA target sequence
aggagtaaacctatatataag

SEQ ID NO: 276186 - DNA, 21 bp, Artificial sequence
  SiRNA target sequence
ggagtaaacctatatataaga

SEQ ID NO: 276187 - DNA, 21 bp, Artificial sequence
  SiRNA target sequence
gagtaaacctatatataagag

SEQ ID NO: 276188 - DNA, 21 bp, Artificial sequence
  SiRNA target sequence
agtaaacctatatataagagt

SEQ ID NO: 276189 - DNA, 21 bp, Artificial sequence
  SiRNA target sequence
gtaaacctatatataagagtc

SEQ ID NO: 276190 - DNA, 21 bp, Artificial sequence
  SiRNA target sequence
taaacctatatataagagtct

SEQ ID NO: 276191 - DNA, 21 bp, Artificial sequence
  SiRNA target sequence
aaacctatatataagagtcta

SEQ ID NO: 276192 - DNA, 21 bp, Artificial sequence
  SiRNA target sequence
aacctatatataagagtctaa

SEQ ID NO: 276193 - DNA, 21 bp, Artificial sequence
  SiRNA target sequence
acctatatataagagtctaaa

SEQ ID NO: 276194 - DNA, 21 bp, Artificial sequence
  SiRNA target sequence
cctatatataagagtctaaag

SEQ ID NO: 276195 - DNA, 21 bp, Artificial sequence
  SiRNA target sequence
ctatatataagagtctaaaga

SEQ ID NO: 276196 - DNA, 21 bp, Artificial sequence
  SiRNA target sequence
tatatataagagtctaaagac

SEQ ID NO: 276197 - DNA, 21 bp, Artificial sequence
  SiRNA target sequence
atatataagagtctaaagaca

SEQ ID NO: 276198 - DNA, 21 bp, Artificial sequence
  SiRNA target sequence
tatataagagtctaaagacag

SEQ ID NO: 276199 - DNA, 21 bp, Artificial sequence
  SiRNA target sequence
atataagagtctaaagacaga

SEQ ID NO: 276200 - DNA, 21 bp, Artificial sequence
  SiRNA target sequence
tataagagtctaaagacagag

SEQ ID NO: 276201 - DNA, 21 bp, Artificial sequence
  SiRNA target sequence
ataagagtctaaagacagagt

SEQ ID NO: 276202 - DNA, 21 bp, Artificial sequence
  SiRNA target sequence
taagagtctaaagacagagtg

SEQ ID NO: 276203 - DNA, 21 bp, Artificial sequence
  SiRNA target sequence
aagagtctaaagacagagtgg

SEQ ID NO: 276204 - DNA, 21 bp, Artificial sequence
  SiRNA target sequence
agagtctaaagacagagtgga

SEQ ID NO: 276205 - DNA, 21 bp, Artificial sequence
  SiRNA target sequence
gagtctaaagacagagtggat

SEQ ID NO: 276206 - DNA, 21 bp, Artificial sequence
  SiRNA target sequence
agtctaaagacagagtggatt

SEQ ID NO: 276207 - DNA, 21 bp, Artificial sequence
  SiRNA target sequence
gtctaaagacagagtggatta

SEQ ID NO: 276208 - DNA, 21 bp, Artificial sequence
  SiRNA target sequence
tctaaagacagagtggattag

SEQ ID NO: 276209 - DNA, 21 bp, Artificial sequence
  SiRNA target sequence
ctaaagacagagtggattaga

SEQ ID NO: 276210 - DNA, 21 bp, Artificial sequence
  SiRNA target sequence
taaagacagagtggattagac

SEQ ID NO: 276211 - DNA, 21 bp, Artificial sequence
  SiRNA target sequence
aaagacagagtggattagacc

SEQ ID NO: 276212 - DNA, 21 bp, Artificial sequence
  SiRNA target sequence
aagacagagtggattagacca

SEQ ID NO: 276213 - DNA, 21 bp, Artificial sequence
  SiRNA target sequence
agacagagtggattagaccat

SEQ ID NO: 276214 - DNA, 21 bp, Artificial sequence
  SiRNA target sequence
gacagagtggattagaccatc

SEQ ID NO: 276215 - DNA, 21 bp, Artificial sequence
  SiRNA target sequence
acagagtggattagaccatca

SEQ ID NO: 276216 - DNA, 21 bp, Artificial sequence
  SiRNA target sequence
cagagtggattagaccatcat

SEQ ID NO: 276217 - DNA, 21 bp, Artificial sequence
  SiRNA target sequence
agagtggattagaccatcatc

SEQ ID NO: 276218 - DNA, 21 bp, Artificial sequence
  SiRNA target sequence
gagtggattagaccatcatct

SEQ ID NO: 276219 - DNA, 21 bp, Artificial sequence
  SiRNA target sequence
agtggattagaccatcatctt

SEQ ID NO: 276220 - DNA, 21 bp, Artificial sequence
  SiRNA target sequence
gtggattagaccatcatcttt

SEQ ID NO: 276221 - DNA, 21 bp, Artificial sequence
  SiRNA target sequence
tggattagaccatcatcttta

SEQ ID NO: 276222 - DNA, 21 bp, Artificial sequence
  SiRNA target sequence
ggattagaccatcatctttag

SEQ ID NO: 276223 - DNA, 21 bp, Artificial sequence
  SiRNA target sequence
gattagaccatcatctttagc

SEQ ID NO: 276224 - DNA, 21 bp, Artificial sequence
  SiRNA target sequence
attagaccatcatctttagct

SEQ ID NO: 276225 - DNA, 21 bp, Artificial sequence
  SiRNA target sequence
ttagaccatcatctttagctt

SEQ ID NO: 276226 - DNA, 21 bp, Artificial sequence
  SiRNA target sequence
tagaccatcatctttagctta

SEQ ID NO: 276227 - DNA, 21 bp, Artificial sequence
  SiRNA target sequence
agaccatcatctttagcttat

SEQ ID NO: 276228 - DNA, 21 bp, Artificial sequence
  SiRNA target sequence
gaccatcatctttagcttata

SEQ ID NO: 276229 - DNA, 21 bp, Artificial sequence
  SiRNA target sequence
accatcatctttagcttatat

SEQ ID NO: 276230 - DNA, 21 bp, Artificial sequence
  SiRNA target sequence
ccatcatctttagcttatata

SEQ ID NO: 276231 - DNA, 21 bp, Artificial sequence
  SiRNA target sequence
catcatctttagcttatatac

SEQ ID NO: 276232 - DNA, 21 bp, Artificial sequence
  SiRNA target sequence
atcatctttagcttatatacg

SEQ ID NO: 276233 - DNA, 21 bp, Artificial sequence
  SiRNA target sequence
tcatctttagcttatatacgg

SEQ ID NO: 276234 - DNA, 21 bp, Artificial sequence
  SiRNA target sequence
catctttagcttatatacggg

SEQ ID NO: 276235 - DNA, 21 bp, Artificial sequence
  SiRNA target sequence
atctttagcttatatacgggg

SEQ ID NO: 276236 - DNA, 21 bp, Artificial sequence
  SiRNA target sequence
tctttagcttatatacgggga

SEQ ID NO: 276237 - DNA, 21 bp, Artificial sequence
  SiRNA target sequence
ctttagcttatatacggggaa

SEQ ID NO: 276238 - DNA, 21 bp, Artificial sequence
  SiRNA target sequence
tttagcttatatacggggaag

SEQ ID NO: 276239 - DNA, 21 bp, Artificial sequence
  SiRNA target sequence
ttagcttatatacggggaagg

SEQ ID NO: 276240 - DNA, 21 bp, Artificial sequence
  SiRNA target sequence
tagcttatatacggggaaggt

SEQ ID NO: 276241 - DNA, 21 bp, Artificial sequence
  SiRNA target sequence
agcttatatacggggaaggtt

SEQ ID NO: 276242 - DNA, 21 bp, Artificial sequence
  SiRNA target sequence
gcttatatacggggaaggttg

SEQ ID NO: 276243 - DNA, 21 bp, Artificial sequence
  SiRNA target sequence
cttatatacggggaaggttga

SEQ ID NO: 276244 - DNA, 21 bp, Artificial sequence
  SiRNA target sequence
ttatatacggggaaggttgag

SEQ ID NO: 276245 - DNA, 21 bp, Artificial sequence
  SiRNA target sequence
tatatacggggaaggttgagt

SEQ ID NO: 276246 - DNA, 21 bp, Artificial sequence
  SiRNA target sequence
atatacggggaaggttgagtt

SEQ ID NO: 276247 - DNA, 21 bp, Artificial sequence
  SiRNA target sequence
tatacggggaaggttgagttg

SEQ ID NO: 276248 - DNA, 21 bp, Artificial sequence
  SiRNA target sequence
atacggggaaggttgagttgc

SEQ ID NO: 276249 - DNA, 21 bp, Artificial sequence
  SiRNA target sequence
tacggggaaggttgagttgcc

SEQ ID NO: 276250 - DNA, 21 bp, Artificial sequence
  SiRNA target sequence
acggggaaggttgagttgcct

SEQ ID NO: 276251 - DNA, 21 bp, Artificial sequence
  SiRNA target sequence
cggggaaggttgagttgcctc

SEQ ID NO: 276252 - DNA, 21 bp, Artificial sequence
  SiRNA target sequence
ggggaaggttgagttgcctct

SEQ ID NO: 276253 - DNA, 21 bp, Artificial sequence
  SiRNA target sequence
gggaaggttgagttgcctcta

SEQ ID NO: 276254 - DNA, 21 bp, Artificial sequence
  SiRNA target sequence
ggaaggttgagttgcctctaa

SEQ ID NO: 276255 - DNA, 21 bp, Artificial sequence
  SiRNA target sequence
gaaggttgagttgcctctaaa

SEQ ID NO: 276256 - DNA, 21 bp, Artificial sequence
  SiRNA target sequence
aaggttgagttgcctctaaag

SEQ ID NO: 276257 - DNA, 21 bp, Artificial sequence
  SiRNA target sequence
aggttgagttgcctctaaaga

SEQ ID NO: 276258 - DNA, 21 bp, Artificial sequence
  SiRNA target sequence
ggttgagttgcctctaaagac

SEQ ID NO: 276259 - DNA, 21 bp, Artificial sequence
  SiRNA target sequence
gttgagttgcctctaaagact

SEQ ID NO: 276260 - DNA, 21 bp, Artificial sequence
  SiRNA target sequence
ttgagttgcctctaaagactc

SEQ ID NO: 276261 - DNA, 21 bp, Artificial sequence
  SiRNA target sequence
tgagttgcctctaaagactca

SEQ ID NO: 276262 - DNA, 21 bp, Artificial sequence
  SiRNA target sequence
gagttgcctctaaagactcag

SEQ ID NO: 276263 - DNA, 21 bp, Artificial sequence
  SiRNA target sequence
agttgcctctaaagactcagc

SEQ ID NO: 276264 - DNA, 21 bp, Artificial sequence
  SiRNA target sequence
gttgcctctaaagactcagct

SEQ ID NO: 276265 - DNA, 21 bp, Artificial sequence
  SiRNA target sequence
ttgcctctaaagactcagctc

SEQ ID NO: 276266 - DNA, 21 bp, Artificial sequence
  SiRNA target sequence
tgcctctaaagactcagctcc

SEQ ID NO: 276267 - DNA, 21 bp, Artificial sequence
  SiRNA target sequence
gcctctaaagactcagctcca

SEQ ID NO: 276268 - DNA, 21 bp, Artificial sequence
  SiRNA target sequence
cctctaaagactcagctccat

SEQ ID NO: 276269 - DNA, 21 bp, Artificial sequence
  SiRNA target sequence
ctctaaagactcagctccata

SEQ ID NO: 276270 - DNA, 21 bp, Artificial sequence
  SiRNA target sequence
tctaaagactcagctccatag

SEQ ID NO: 276271 - DNA, 21 bp, Artificial sequence
  SiRNA target sequence
ctaaagactcagctccatagt

SEQ ID NO: 276272 - DNA, 21 bp, Artificial sequence
  SiRNA target sequence
taaagactcagctccatagta

SEQ ID NO: 276273 - DNA, 21 bp, Artificial sequence
  SiRNA target sequence
aaagactcagctccatagtag

SEQ ID NO: 276274 - DNA, 21 bp, Artificial sequence
  SiRNA target sequence
aagactcagctccatagtaga

SEQ ID NO: 276275 - DNA, 21 bp, Artificial sequence
  SiRNA target sequence
agactcagctccatagtagag

SEQ ID NO: 276276 - DNA, 21 bp, Artificial sequence
  SiRNA target sequence
gactcagctccatagtagagt

SEQ ID NO: 276277 - DNA, 21 bp, Artificial sequence
  SiRNA target sequence
actcagctccatagtagagta

SEQ ID NO: 276278 - DNA, 21 bp, Artificial sequence
  SiRNA target sequence
ctcagctccatagtagagtag

SEQ ID NO: 276279 - DNA, 21 bp, Artificial sequence
  SiRNA target sequence
tcagctccatagtagagtagt

SEQ ID NO: 276280 - DNA, 21 bp, Artificial sequence
  SiRNA target sequence
cagctccatagtagagtagtt

SEQ ID NO: 276281 - DNA, 21 bp, Artificial sequence
  SiRNA target sequence
agctccatagtagagtagttt

SEQ ID NO: 276282 - DNA, 21 bp, Artificial sequence
  SiRNA target sequence
gctccatagtagagtagtttt

SEQ ID NO: 276283 - DNA, 21 bp, Artificial sequence
  SiRNA target sequence
ctccatagtagagtagtttta

SEQ ID NO: 276284 - DNA, 21 bp, Artificial sequence
  SiRNA target sequence
tccatagtagagtagttttaa

SEQ ID NO: 276285 - DNA, 21 bp, Artificial sequence
  SiRNA target sequence
ccatagtagagtagttttaat

SEQ ID NO: 276286 - DNA, 21 bp, Artificial sequence
  SiRNA target sequence
catagtagagtagttttaatt

SEQ ID NO: 276287 - DNA, 21 bp, Artificial sequence
  SiRNA target sequence
atagtagagtagttttaatta

SEQ ID NO: 276288 - DNA, 21 bp, Artificial sequence
  SiRNA target sequence
tagtagagtagttttaattac

SEQ ID NO: 276289 - DNA, 21 bp, Artificial sequence
  SiRNA target sequence
agtagagtagttttaattacg

SEQ ID NO: 276290 - DNA, 21 bp, Artificial sequence
  SiRNA target sequence
gtagagtagttttaattacga

SEQ ID NO: 276291 - DNA, 21 bp, Artificial sequence
  SiRNA target sequence
tagagtagttttaattacgat

SEQ ID NO: 276292 - DNA, 21 bp, Artificial sequence
  SiRNA target sequence
agagtagttttaattacgatt

SEQ ID NO: 276293 - DNA, 21 bp, Artificial sequence
  SiRNA target sequence
gagtagttttaattacgatta

SEQ ID NO: 276294 - DNA, 21 bp, Artificial sequence
  SiRNA target sequence
agtagttttaattacgattaa

SEQ ID NO: 276295 - DNA, 21 bp, Artificial sequence
  SiRNA target sequence
gtagttttaattacgattaaa

SEQ ID NO: 276296 - DNA, 21 bp, Artificial sequence
  SiRNA target sequence
tagttttaattacgattaaag

SEQ ID NO: 276297 - DNA, 21 bp, Artificial sequence
  SiRNA target sequence
agttttaattacgattaaagt

SEQ ID NO: 276298 - DNA, 21 bp, Artificial sequence
  SiRNA target sequence
gttttaattacgattaaagtg

SEQ ID NO: 276299 - DNA, 21 bp, Artificial sequence
  SiRNA target sequence
ttttaattacgattaaagtgg

SEQ ID NO: 276300 - DNA, 21 bp, Artificial sequence
  SiRNA target sequence
tttaattacgattaaagtggt

SEQ ID NO: 276301 - DNA, 21 bp, Artificial sequence
  SiRNA target sequence
ttaattacgattaaagtggta

SEQ ID NO: 276302 - DNA, 21 bp, Artificial sequence
  SiRNA target sequence
taattacgattaaagtggtac

SEQ ID NO: 276303 - DNA, 21 bp, Artificial sequence
  SiRNA target sequence
aattacgattaaagtggtact

SEQ ID NO: 276304 - DNA, 21 bp, Artificial sequence
  SiRNA target sequence
attacgattaaagtggtactc

SEQ ID NO: 276305 - DNA, 21 bp, Artificial sequence
  SiRNA target sequence
ttacgattaaagtggtactct

SEQ ID NO: 276306 - DNA, 21 bp, Artificial sequence
  SiRNA target sequence
tacgattaaagtggtactcta

SEQ ID NO: 276307 - DNA, 21 bp, Artificial sequence
  SiRNA target sequence
acgattaaagtggtactctag

SEQ ID NO: 276308 - DNA, 21 bp, Artificial sequence
  SiRNA target sequence
cgattaaagtggtactctagg

SEQ ID NO: 276309 - DNA, 21 bp, Artificial sequence
  SiRNA target sequence
gattaaagtggtactctaggt

SEQ ID NO: 276310 - DNA, 21 bp, Artificial sequence
  SiRNA target sequence
attaaagtggtactctaggtt

SEQ ID NO: 276311 - DNA, 21 bp, Artificial sequence
  SiRNA target sequence
ttaaagtggtactctaggtta

SEQ ID NO: 276312 - DNA, 21 bp, Artificial sequence
  SiRNA target sequence
taaagtggtactctaggttag

SEQ ID NO: 276313 - DNA, 21 bp, Artificial sequence
  SiRNA target sequence
aaagtggtactctaggttagg

SEQ ID NO: 276314 - DNA, 21 bp, Artificial sequence
  SiRNA target sequence
aagtggtactctaggttaggt

SEQ ID NO: 276315 - DNA, 21 bp, Artificial sequence
  SiRNA target sequence
agtggtactctaggttaggtg

SEQ ID NO: 276316 - DNA, 21 bp, Artificial sequence
  SiRNA target sequence
gtggtactctaggttaggtgt

SEQ ID NO: 276317 - DNA, 21 bp, Artificial sequence
  SiRNA target sequence
tggtactctaggttaggtgtt

SEQ ID NO: 276318 - DNA, 21 bp, Artificial sequence
  SiRNA target sequence
ggtactctaggttaggtgtta

SEQ ID NO: 276319 - DNA, 21 bp, Artificial sequence
  SiRNA target sequence
gtactctaggttaggtgttac

SEQ ID NO: 276320 - DNA, 21 bp, Artificial sequence
  SiRNA target sequence
tactctaggttaggtgttact

SEQ ID NO: 276321 - DNA, 21 bp, Artificial sequence
  SiRNA target sequence
actctaggttaggtgttactc

SEQ ID NO: 276322 - DNA, 21 bp, Artificial sequence
  SiRNA target sequence
ctctaggttaggtgttactcg

SEQ ID NO: 276323 - DNA, 21 bp, Artificial sequence
  SiRNA target sequence
tctaggttaggtgttactcgc

SEQ ID NO: 276324 - DNA, 21 bp, Artificial sequence
  SiRNA target sequence
ctaggttaggtgttactcgcg

SEQ ID NO: 276325 - DNA, 21 bp, Artificial sequence
  SiRNA target sequence
taggttaggtgttactcgcgt

SEQ ID NO: 276326 - DNA, 21 bp, Artificial sequence
  SiRNA target sequence
aggttaggtgttactcgcgta

SEQ ID NO: 276327 - DNA, 21 bp, Artificial sequence
  SiRNA target sequence
ggttaggtgttactcgcgtat

SEQ ID NO: 276328 - DNA, 21 bp, Artificial sequence
  SiRNA target sequence
gttaggtgttactcgcgtatt

SEQ ID NO: 276329 - DNA, 21 bp, Artificial sequence
  SiRNA target sequence
ttaggtgttactcgcgtatta

SEQ ID NO: 276330 - DNA, 21 bp, Artificial sequence
  SiRNA target sequence
taggtgttactcgcgtattat

SEQ ID NO: 276331 - DNA, 21 bp, Artificial sequence
  SiRNA target sequence
aggtgttactcgcgtattatc

SEQ ID NO: 276332 - DNA, 21 bp, Artificial sequence
  SiRNA target sequence
ggtgttactcgcgtattatca

SEQ ID NO: 276333 - DNA, 21 bp, Artificial sequence
  SiRNA target sequence
gtgttactcgcgtattatcaa

SEQ ID NO: 276334 - DNA, 21 bp, Artificial sequence
  SiRNA target sequence
tgttactcgcgtattatcaac

SEQ ID NO: 276335 - DNA, 21 bp, Artificial sequence
  SiRNA target sequence
gttactcgcgtattatcaact

SEQ ID NO: 276336 - DNA, 21 bp, Artificial sequence
  SiRNA target sequence
ttactcgcgtattatcaacta

SEQ ID NO: 276337 - DNA, 21 bp, Artificial sequence
  SiRNA target sequence
tactcgcgtattatcaactag

SEQ ID NO: 276338 - DNA, 21 bp, Artificial sequence
  SiRNA target sequence
actcgcgtattatcaactagt

SEQ ID NO: 276339 - DNA, 21 bp, Artificial sequence
  SiRNA target sequence
ctcgcgtattatcaactagtg

SEQ ID NO: 276340 - DNA, 21 bp, Artificial sequence
  SiRNA target sequence
tcgcgtattatcaactagtgg

SEQ ID NO: 276341 - DNA, 21 bp, Artificial sequence
  SiRNA target sequence
cgcgtattatcaactagtggt

SEQ ID NO: 276342 - DNA, 21 bp, Artificial sequence
  SiRNA target sequence
gcgtattatcaactagtggta

SEQ ID NO: 276343 - DNA, 21 bp, Artificial sequence
  SiRNA target sequence
cgtattatcaactagtggtaa

SEQ ID NO: 276344 - DNA, 21 bp, Artificial sequence
  SiRNA target sequence
gtattatcaactagtggtaat

SEQ ID NO: 276345 - DNA, 21 bp, Artificial sequence
  SiRNA target sequence
tattatcaactagtggtaatg

SEQ ID NO: 276346 - DNA, 21 bp, Artificial sequence
  SiRNA target sequence
attatcaactagtggtaatgc

SEQ ID NO: 276347 - DNA, 21 bp, Artificial sequence
  SiRNA target sequence
ttatcaactagtggtaatgcg

SEQ ID NO: 276348 - DNA, 21 bp, Artificial sequence
  SiRNA target sequence
tatcaactagtggtaatgcgt

SEQ ID NO: 276349 - DNA, 21 bp, Artificial sequence
  SiRNA target sequence
atcaactagtggtaatgcgtc

SEQ ID NO: 276350 - DNA, 21 bp, Artificial sequence
  SiRNA target sequence
tcaactagtggtaatgcgtcc

SEQ ID NO: 276351 - DNA, 21 bp, Artificial sequence
  SiRNA target sequence
caactagtggtaatgcgtcct

SEQ ID NO: 276352 - DNA, 21 bp, Artificial sequence
  SiRNA target sequence
aactagtggtaatgcgtccta

SEQ ID NO: 276353 - DNA, 21 bp, Artificial sequence
  SiRNA target sequence
actagtggtaatgcgtcctaa

SEQ ID NO: 276354 - DNA, 21 bp, Artificial sequence
  SiRNA target sequence
ctagtggtaatgcgtcctaat

SEQ ID NO: 276355 - DNA, 21 bp, Artificial sequence
  SiRNA target sequence
tagtggtaatgcgtcctaatt

SEQ ID NO: 276356 - DNA, 21 bp, Artificial sequence
  SiRNA target sequence
agtggtaatgcgtcctaattt

SEQ ID NO: 276357 - DNA, 21 bp, Artificial sequence
  SiRNA target sequence
gtggtaatgcgtcctaatttt

SEQ ID NO: 276358 - DNA, 21 bp, Artificial sequence
  SiRNA target sequence
tggtaatgcgtcctaatttta

SEQ ID NO: 276359 - DNA, 21 bp, Artificial sequence
  SiRNA target sequence
ggtaatgcgtcctaattttag

SEQ ID NO: 276360 - DNA, 21 bp, Artificial sequence
  SiRNA target sequence
gtaatgcgtcctaattttagt

SEQ ID NO: 276361 - DNA, 21 bp, Artificial sequence
  SiRNA target sequence
taatgcgtcctaattttagta

SEQ ID NO: 276362 - DNA, 21 bp, Artificial sequence
  SiRNA target sequence
aatgcgtcctaattttagtat

SEQ ID NO: 276363 - DNA, 21 bp, Artificial sequence
  SiRNA target sequence
atgcgtcctaattttagtata

SEQ ID NO: 276364 - DNA, 21 bp, Artificial sequence
  SiRNA target sequence
tgcgtcctaattttagtatag

SEQ ID NO: 276365 - DNA, 21 bp, Artificial sequence
  SiRNA target sequence
gcgtcctaattttagtatagt

SEQ ID NO: 276366 - DNA, 21 bp, Artificial sequence
  SiRNA target sequence
cgtcctaattttagtatagtt

SEQ ID NO: 276367 - DNA, 21 bp, Artificial sequence
  SiRNA target sequence
gtcctaattttagtatagttt

SEQ ID NO: 276368 - DNA, 21 bp, Artificial sequence
  SiRNA target sequence
tcctaattttagtatagtttt

SEQ ID NO: 276369 - DNA, 21 bp, Artificial sequence
  SiRNA target sequence
cctaattttagtatagtttta

SEQ ID NO: 276370 - DNA, 21 bp, Artificial sequence
  SiRNA target sequence
ctaattttagtatagttttaa

SEQ ID NO: 276371 - DNA, 21 bp, Artificial sequence
  SiRNA target sequence
taattttagtatagttttaac

SEQ ID NO: 276372 - DNA, 21 bp, Artificial sequence
  SiRNA target sequence
aattttagtatagttttaacc

SEQ ID NO: 276373 - DNA, 21 bp, Artificial sequence
  SiRNA target sequence
attttagtatagttttaacca

SEQ ID NO: 276374 - DNA, 21 bp, Artificial sequence
  SiRNA target sequence
ttttagtatagttttaaccat

SEQ ID NO: 276375 - DNA, 21 bp, Artificial sequence
  SiRNA target sequence
tttagtatagttttaaccata

SEQ ID NO: 276376 - DNA, 21 bp, Artificial sequence
  SiRNA target sequence
ttagtatagttttaaccataa

SEQ ID NO: 276377 - DNA, 21 bp, Artificial sequence
  SiRNA target sequence
tagtatagttttaaccataat

SEQ ID NO: 276378 - DNA, 21 bp, Artificial sequence
  SiRNA target sequence
agtatagttttaaccataata

SEQ ID NO: 276379 - DNA, 21 bp, Artificial sequence
  SiRNA target sequence
gtatagttttaaccataatag

SEQ ID NO: 276380 - DNA, 21 bp, Artificial sequence
  SiRNA target sequence
tatagttttaaccataatagt

SEQ ID NO: 276381 - DNA, 21 bp, Artificial sequence
  SiRNA target sequence
catatcaagtgggttaaagcc

SEQ ID NO: 276382 - DNA, 21 bp, Artificial sequence
  SiRNA target sequence
atatcaagtgggttaaagccc

SEQ ID NO: 276383 - DNA, 21 bp, Artificial sequence
  SiRNA target sequence
tatcaagtgggttaaagcccc

SEQ ID NO: 276384 - DNA, 21 bp, Artificial sequence
  SiRNA target sequence
atcaagtgggttaaagccccg

SEQ ID NO: 276385 - DNA, 21 bp, Artificial sequence
  SiRNA target sequence
tcaagtgggttaaagccccgt

SEQ ID NO: 276386 - DNA, 21 bp, Artificial sequence
  SiRNA target sequence
caagtgggttaaagccccgta

SEQ ID NO: 276387 - DNA, 21 bp, Artificial sequence
  SiRNA target sequence
aagtgggttaaagccccgtat

SEQ ID NO: 276388 - DNA, 21 bp, Artificial sequence
  SiRNA target sequence
agtgggttaaagccccgtatg

SEQ ID NO: 276389 - DNA, 21 bp, Artificial sequence
  SiRNA target sequence
gtgggttaaagccccgtatgc

SEQ ID NO: 276390 - DNA, 21 bp, Artificial sequence
  SiRNA target sequence
tgggttaaagccccgtatgct

SEQ ID NO: 276391 - DNA, 21 bp, Artificial sequence
  SiRNA target sequence
gggttaaagccccgtatgctt

SEQ ID NO: 276392 - DNA, 21 bp, Artificial sequence
  SiRNA target sequence
ggttaaagccccgtatgcttg

SEQ ID NO: 276393 - DNA, 21 bp, Artificial sequence
  SiRNA target sequence
gttaaagccccgtatgcttgg

SEQ ID NO: 276394 - DNA, 21 bp, Artificial sequence
  SiRNA target sequence
ttaaagccccgtatgcttgga

SEQ ID NO: 276395 - DNA, 21 bp, Artificial sequence
  SiRNA target sequence
taaagccccgtatgcttggag

SEQ ID NO: 276396 - DNA, 21 bp, Artificial sequence
  SiRNA target sequence
aaagccccgtatgcttggaga

SEQ ID NO: 276397 - DNA, 21 bp, Artificial sequence
  SiRNA target sequence
aagccccgtatgcttggagac

SEQ ID NO: 276398 - DNA, 21 bp, Artificial sequence
  SiRNA target sequence
agccccgtatgcttggagacc

SEQ ID NO: 276399 - DNA, 21 bp, Artificial sequence
  SiRNA target sequence
gccccgtatgcttggagacca

SEQ ID NO: 276400 - DNA, 21 bp, Artificial sequence
  SiRNA target sequence
ccccgtatgcttggagaccag

SEQ ID NO: 276401 - DNA, 21 bp, Artificial sequence
  SiRNA target sequence
cccgtatgcttggagaccagg

SEQ ID NO: 276402 - DNA, 21 bp, Artificial sequence
  SiRNA target sequence
ccgtatgcttggagaccaggt

SEQ ID NO: 276403 - DNA, 21 bp, Artificial sequence
  SiRNA target sequence
cgtatgcttggagaccaggtt

SEQ ID NO: 276404 - DNA, 21 bp, Artificial sequence
  SiRNA target sequence
gtatgcttggagaccaggttt

SEQ ID NO: 276405 - DNA, 21 bp, Artificial sequence
  SiRNA target sequence
tatgcttggagaccaggtttg

SEQ ID NO: 276406 - DNA, 21 bp, Artificial sequence
  SiRNA target sequence
atgcttggagaccaggtttgt

SEQ ID NO: 276407 - DNA, 21 bp, Artificial sequence
  SiRNA target sequence
tgcttggagaccaggtttgtt

SEQ ID NO: 276408 - DNA, 21 bp, Artificial sequence
  SiRNA target sequence
gcttggagaccaggtttgttt

SEQ ID NO: 276409 - DNA, 21 bp, Artificial sequence
  SiRNA target sequence
cttggagaccaggtttgtttg

SEQ ID NO: 276410 - DNA, 21 bp, Artificial sequence
  SiRNA target sequence
ttggagaccaggtttgtttgc

SEQ ID NO: 276411 - DNA, 21 bp, Artificial sequence
  SiRNA target sequence
tggagaccaggtttgtttgcc

SEQ ID NO: 276412 - DNA, 21 bp, Artificial sequence
  SiRNA target sequence
ggagaccaggtttgtttgccg

SEQ ID NO: 276413 - DNA, 21 bp, Artificial sequence
  SiRNA target sequence
gagaccaggtttgtttgccga

SEQ ID NO: 276414 - DNA, 21 bp, Artificial sequence
  SiRNA target sequence
agaccaggtttgtttgccgac

SEQ ID NO: 276415 - DNA, 21 bp, Artificial sequence
  SiRNA target sequence
gaccaggtttgtttgccgact

SEQ ID NO: 276416 - DNA, 21 bp, Artificial sequence
  SiRNA target sequence
accaggtttgtttgccgactt

SEQ ID NO: 276417 - DNA, 21 bp, Artificial sequence
  SiRNA target sequence
ccaggtttgtttgccgactta

SEQ ID NO: 276418 - DNA, 21 bp, Artificial sequence
  SiRNA target sequence
caggtttgtttgccgacttac

SEQ ID NO: 276419 - DNA, 21 bp, Artificial sequence
  SiRNA target sequence
aggtttgtttgccgacttacg

SEQ ID NO: 276420 - DNA, 21 bp, Artificial sequence
  SiRNA target sequence
ggtttgtttgccgacttacgg

SEQ ID NO: 276421 - DNA, 21 bp, Artificial sequence
  SiRNA target sequence
gtttgtttgccgacttacgga

SEQ ID NO: 276422 - DNA, 21 bp, Artificial sequence
  SiRNA target sequence
tttgtttgccgacttacggaa

SEQ ID NO: 276423 - DNA, 21 bp, Artificial sequence
  SiRNA target sequence
ttgtttgccgacttacggaat

SEQ ID NO: 276424 - DNA, 21 bp, Artificial sequence
  SiRNA target sequence
tgtttgccgacttacggaatg

SEQ ID NO: 276425 - DNA, 21 bp, Artificial sequence
  SiRNA target sequence
gtttgccgacttacggaatgt

SEQ ID NO: 276426 - DNA, 21 bp, Artificial sequence
  SiRNA target sequence
tttgccgacttacggaatgtc

SEQ ID NO: 276427 - DNA, 21 bp, Artificial sequence
  SiRNA target sequence
ttgccgacttacggaatgtcg

SEQ ID NO: 276428 - DNA, 21 bp, Artificial sequence
  SiRNA target sequence
tgccgacttacggaatgtcgt

SEQ ID NO: 276429 - DNA, 21 bp, Artificial sequence
  SiRNA target sequence
gccgacttacggaatgtcgtt

SEQ ID NO: 276430 - DNA, 21 bp, Artificial sequence
  SiRNA target sequence
ccgacttacggaatgtcgtta

SEQ ID NO: 276431 - DNA, 21 bp, Artificial sequence
  SiRNA target sequence
cgacttacggaatgtcgttaa

SEQ ID NO: 276432 - DNA, 21 bp, Artificial sequence
  SiRNA target sequence
gacttacggaatgtcgttaaa

SEQ ID NO: 276433 - DNA, 21 bp, Artificial sequence
  SiRNA target sequence
acttacggaatgtcgttaaac

SEQ ID NO: 276434 - DNA, 21 bp, Artificial sequence
  SiRNA target sequence
cttacggaatgtcgttaaact

SEQ ID NO: 276435 - DNA, 21 bp, Artificial sequence
  SiRNA target sequence
ttacggaatgtcgttaaactc

SEQ ID NO: 276436 - DNA, 21 bp, Artificial sequence
  SiRNA target sequence
tacggaatgtcgttaaactct

SEQ ID NO: 276437 - DNA, 21 bp, Artificial sequence
  SiRNA target sequence
acggaatgtcgttaaactcta

SEQ ID NO: 276438 - DNA, 21 bp, Artificial sequence
  SiRNA target sequence
cggaatgtcgttaaactctag

SEQ ID NO: 276439 - DNA, 21 bp, Artificial sequence
  SiRNA target sequence
ggaatgtcgttaaactctagg

SEQ ID NO: 276440 - DNA, 21 bp, Artificial sequence
  SiRNA target sequence
gaatgtcgttaaactctaggc

SEQ ID NO: 276441 - DNA, 21 bp, Artificial sequence
  SiRNA target sequence
aatgtcgttaaactctaggct

SEQ ID NO: 276442 - DNA, 21 bp, Artificial sequence
  SiRNA target sequence
atgtcgttaaactctaggctt

SEQ ID NO: 276443 - DNA, 21 bp, Artificial sequence
  SiRNA target sequence
tgtcgttaaactctaggcttt

SEQ ID NO: 276444 - DNA, 21 bp, Artificial sequence
  SiRNA target sequence
gtcgttaaactctaggctttc

SEQ ID NO: 276445 - DNA, 21 bp, Artificial sequence
  SiRNA target sequence
tcgttaaactctaggctttcc

SEQ ID NO: 276446 - DNA, 21 bp, Artificial sequence
  SiRNA target sequence
cgttaaactctaggctttccg

SEQ ID NO: 276447 - DNA, 21 bp, Artificial sequence
  SiRNA target sequence
gttaaactctaggctttccgg

SEQ ID NO: 276448 - DNA, 21 bp, Artificial sequence
  SiRNA target sequence
ttaaactctaggctttccgga

SEQ ID NO: 276449 - DNA, 21 bp, Artificial sequence
  SiRNA target sequence
taaactctaggctttccggat

SEQ ID NO: 276450 - DNA, 21 bp, Artificial sequence
  SiRNA target sequence
aaactctaggctttccggatg

SEQ ID NO: 276451 - DNA, 21 bp, Artificial sequence
  SiRNA target sequence
aactctaggctttccggatgg

SEQ ID NO: 276452 - DNA, 21 bp, Artificial sequence
  SiRNA target sequence
actctaggctttccggatggc

SEQ ID NO: 276453 - DNA, 21 bp, Artificial sequence
  SiRNA target sequence
ctctaggctttccggatggct

SEQ ID NO: 276454 - DNA, 21 bp, Artificial sequence
  SiRNA target sequence
tctaggctttccggatggctt

SEQ ID NO: 276455 - DNA, 21 bp, Artificial sequence
  SiRNA target sequence
ctaggctttccggatggcttc

SEQ ID NO: 276456 - DNA, 21 bp, Artificial sequence
  SiRNA target sequence
taggctttccggatggcttct

SEQ ID NO: 276457 - DNA, 21 bp, Artificial sequence
  SiRNA target sequence
aggctttccggatggcttcta

SEQ ID NO: 276458 - DNA, 21 bp, Artificial sequence
  SiRNA target sequence
ggctttccggatggcttctaa

SEQ ID NO: 276459 - DNA, 21 bp, Artificial sequence
  SiRNA target sequence
gctttccggatggcttctaat

SEQ ID NO: 276460 - DNA, 21 bp, Artificial sequence
  SiRNA target sequence
ctttccggatggcttctaatt

SEQ ID NO: 276461 - DNA, 21 bp, Artificial sequence
  SiRNA target sequence
tttccggatggcttctaatta

SEQ ID NO: 276462 - DNA, 21 bp, Artificial sequence
  SiRNA target sequence
ttccggatggcttctaattat

SEQ ID NO: 276463 - DNA, 21 bp, Artificial sequence
  SiRNA target sequence
tccggatggcttctaattatc

SEQ ID NO: 276464 - DNA, 21 bp, Artificial sequence
  SiRNA target sequence
ccggatggcttctaattatcc

SEQ ID NO: 276465 - DNA, 21 bp, Artificial sequence
  SiRNA target sequence
cggatggcttctaattatccg

SEQ ID NO: 276466 - DNA, 21 bp, Artificial sequence
  SiRNA target sequence
ggatggcttctaattatccga

SEQ ID NO: 276467 - DNA, 21 bp, Artificial sequence
  SiRNA target sequence
gatggcttctaattatccgag

SEQ ID NO: 276468 - DNA, 21 bp, Artificial sequence
  SiRNA target sequence
atggcttctaattatccgagg

SEQ ID NO: 276469 - DNA, 21 bp, Artificial sequence
  SiRNA target sequence
tggcttctaattatccgaggc

SEQ ID NO: 276470 - DNA, 21 bp, Artificial sequence
  SiRNA target sequence
ggcttctaattatccgaggcc

SEQ ID NO: 276471 - DNA, 21 bp, Artificial sequence
  SiRNA target sequence
gcttctaattatccgaggccc

SEQ ID NO: 276472 - DNA, 21 bp, Artificial sequence
  SiRNA target sequence
cttctaattatccgaggcccg

SEQ ID NO: 276473 - DNA, 21 bp, Artificial sequence
  SiRNA target sequence
ttctaattatccgaggcccgt

SEQ ID NO: 276474 - DNA, 21 bp, Artificial sequence
  SiRNA target sequence
tctaattatccgaggcccgta

SEQ ID NO: 276475 - DNA, 21 bp, Artificial sequence
  SiRNA target sequence
ctaattatccgaggcccgtac

SEQ ID NO: 276476 - DNA, 21 bp, Artificial sequence
  SiRNA target sequence
taattatccgaggcccgtacg

SEQ ID NO: 276477 - DNA, 21 bp, Artificial sequence
  SiRNA target sequence
aattatccgaggcccgtacgt

SEQ ID NO: 276478 - DNA, 21 bp, Artificial sequence
  SiRNA target sequence
attatccgaggcccgtacgtg

SEQ ID NO: 276479 - DNA, 21 bp, Artificial sequence
  SiRNA target sequence
ttatccgaggcccgtacgtgg

SEQ ID NO: 276480 - DNA, 21 bp, Artificial sequence
  SiRNA target sequence
tatccgaggcccgtacgtggg

SEQ ID NO: 276481 - DNA, 21 bp, Artificial sequence
  SiRNA target sequence
atccgaggcccgtacgtgggc

SEQ ID NO: 276482 - DNA, 21 bp, Artificial sequence
  SiRNA target sequence
tccgaggcccgtacgtgggct

SEQ ID NO: 276483 - DNA, 21 bp, Artificial sequence
  SiRNA target sequence
ccgaggcccgtacgtgggctc

SEQ ID NO: 276484 - DNA, 21 bp, Artificial sequence
  SiRNA target sequence
cgaggcccgtacgtgggctcg

SEQ ID NO: 276485 - DNA, 21 bp, Artificial sequence
  SiRNA target sequence
gaggcccgtacgtgggctcga

SEQ ID NO: 276486 - DNA, 21 bp, Artificial sequence
  SiRNA target sequence
aggcccgtacgtgggctcgaa

SEQ ID NO: 276487 - DNA, 21 bp, Artificial sequence
  SiRNA target sequence
ggcccgtacgtgggctcgaag

SEQ ID NO: 276488 - DNA, 21 bp, Artificial sequence
  SiRNA target sequence
gcccgtacgtgggctcgaagt

SEQ ID NO: 276489 - DNA, 21 bp, Artificial sequence
  SiRNA target sequence
cccgtacgtgggctcgaagtt

SEQ ID NO: 276490 - DNA, 21 bp, Artificial sequence
  SiRNA target sequence
ccgtacgtgggctcgaagttt

SEQ ID NO: 276491 - DNA, 21 bp, Artificial sequence
  SiRNA target sequence
cgtacgtgggctcgaagttta

SEQ ID NO: 276492 - DNA, 21 bp, Artificial sequence
  SiRNA target sequence
gtacgtgggctcgaagtttag

SEQ ID NO: 276493 - DNA, 21 bp, Artificial sequence
  SiRNA target sequence
tacgtgggctcgaagtttagt

SEQ ID NO: 276494 - DNA, 21 bp, Artificial sequence
  SiRNA target sequence
acgtgggctcgaagtttagta

SEQ ID NO: 276495 - DNA, 21 bp, Artificial sequence
  SiRNA target sequence
cgtgggctcgaagtttagtag

SEQ ID NO: 276496 - DNA, 21 bp, Artificial sequence
  SiRNA target sequence
gtgggctcgaagtttagtaga

SEQ ID NO: 276497 - DNA, 21 bp, Artificial sequence
  SiRNA target sequence
tgggctcgaagtttagtagag

SEQ ID NO: 276498 - DNA, 21 bp, Artificial sequence
  SiRNA target sequence
gggctcgaagtttagtagaga

SEQ ID NO: 276499 - DNA, 21 bp, Artificial sequence
  SiRNA target sequence
ggctcgaagtttagtagagag

SEQ ID NO: 276500 - DNA, 21 bp, Artificial sequence
  SiRNA target sequence
gctcgaagtttagtagagagt

SEQ ID NO: 276501 - DNA, 21 bp, Artificial sequence
  SiRNA target sequence
ctcgaagtttagtagagagta

SEQ ID NO: 276502 - DNA, 21 bp, Artificial sequence
  SiRNA target sequence
tcgaagtttagtagagagtac

SEQ ID NO: 276503 - DNA, 21 bp, Artificial sequence
  SiRNA target sequence
cgaagtttagtagagagtacg

SEQ ID NO: 276504 - DNA, 21 bp, Artificial sequence
  SiRNA target sequence
gaagtttagtagagagtacgc

SEQ ID NO: 276505 - DNA, 21 bp, Artificial sequence
  SiRNA target sequence
aagtttagtagagagtacgcg

SEQ ID NO: 276506 - DNA, 21 bp, Artificial sequence
  SiRNA target sequence
agtttagtagagagtacgcgt

SEQ ID NO: 276507 - DNA, 21 bp, Artificial sequence
  SiRNA target sequence
gtttagtagagagtacgcgta

SEQ ID NO: 276508 - DNA, 21 bp, Artificial sequence
  SiRNA target sequence
tttagtagagagtacgcgtac

SEQ ID NO: 276509 - DNA, 21 bp, Artificial sequence
  SiRNA target sequence
ttagtagagagtacgcgtaca

SEQ ID NO: 276510 - DNA, 21 bp, Artificial sequence
  SiRNA target sequence
tagtagagagtacgcgtacaa

SEQ ID NO: 276511 - DNA, 21 bp, Artificial sequence
  SiRNA target sequence
agtagagagtacgcgtacaaa

SEQ ID NO: 276512 - DNA, 21 bp, Artificial sequence
  SiRNA target sequence
gtagagagtacgcgtacaaaa

SEQ ID NO: 276513 - DNA, 21 bp, Artificial sequence
  SiRNA target sequence
tagagagtacgcgtacaaaag

SEQ ID NO: 276514 - DNA, 21 bp, Artificial sequence
  SiRNA target sequence
agagagtacgcgtacaaaagt

SEQ ID NO: 276515 - DNA, 21 bp, Artificial sequence
  SiRNA target sequence
gagagtacgcgtacaaaagtc

SEQ ID NO: 276516 - DNA, 21 bp, Artificial sequence
  SiRNA target sequence
agagtacgcgtacaaaagtcc

SEQ ID NO: 276517 - DNA, 21 bp, Artificial sequence
  SiRNA target sequence
gagtacgcgtacaaaagtcct

SEQ ID NO: 276518 - DNA, 21 bp, Artificial sequence
  SiRNA target sequence
agtacgcgtacaaaagtccta

SEQ ID NO: 276519 - DNA, 21 bp, Artificial sequence
  SiRNA target sequence
gtacgcgtacaaaagtcctag

SEQ ID NO: 276520 - DNA, 21 bp, Artificial sequence
  SiRNA target sequence
tacgcgtacaaaagtcctagt

SEQ ID NO: 276521 - DNA, 21 bp, Artificial sequence
  SiRNA target sequence
acgcgtacaaaagtcctagtt

SEQ ID NO: 276522 - DNA, 21 bp, Artificial sequence
  SiRNA target sequence
cgcgtacaaaagtcctagttg

SEQ ID NO: 276523 - DNA, 21 bp, Artificial sequence
  SiRNA target sequence
gcgtacaaaagtcctagttgt

SEQ ID NO: 276524 - DNA, 21 bp, Artificial sequence
  SiRNA target sequence
cgtacaaaagtcctagttgtt

SEQ ID NO: 276525 - DNA, 21 bp, Artificial sequence
  SiRNA target sequence
gtacaaaagtcctagttgttt

SEQ ID NO: 276526 - DNA, 21 bp, Artificial sequence
  SiRNA target sequence
tacaaaagtcctagttgtttt

SEQ ID NO: 276527 - DNA, 21 bp, Artificial sequence
  SiRNA target sequence
acaaaagtcctagttgttttc

SEQ ID NO: 276528 - DNA, 21 bp, Artificial sequence
  SiRNA target sequence
caaaagtcctagttgttttca

SEQ ID NO: 276529 - DNA, 21 bp, Artificial sequence
  SiRNA target sequence
aaaagtcctagttgttttcat

SEQ ID NO: 276530 - DNA, 21 bp, Artificial sequence
  SiRNA target sequence
aaagtcctagttgttttcata

SEQ ID NO: 276531 - DNA, 21 bp, Artificial sequence
  SiRNA target sequence
aagtcctagttgttttcatac

SEQ ID NO: 276532 - DNA, 21 bp, Artificial sequence
  SiRNA target sequence
agtcctagttgttttcataca

SEQ ID NO: 276533 - DNA, 21 bp, Artificial sequence
  SiRNA target sequence
gtcctagttgttttcatacat

SEQ ID NO: 276534 - DNA, 21 bp, Artificial sequence
  SiRNA target sequence
tcctagttgttttcatacatc

SEQ ID NO: 276535 - DNA, 21 bp, Artificial sequence
  SiRNA target sequence
cctagttgttttcatacatca

SEQ ID NO: 276536 - DNA, 21 bp, Artificial sequence
  SiRNA target sequence
ctagttgttttcatacatcaa

SEQ ID NO: 276537 - DNA, 21 bp, Artificial sequence
  SiRNA target sequence
tagttgttttcatacatcaag

SEQ ID NO: 276538 - DNA, 21 bp, Artificial sequence
  SiRNA target sequence
agttgttttcatacatcaagt

SEQ ID NO: 276539 - DNA, 21 bp, Artificial sequence
  SiRNA target sequence
gttgttttcatacatcaagtg

SEQ ID NO: 276540 - DNA, 21 bp, Artificial sequence
  SiRNA target sequence
ttgttttcatacatcaagtgg

SEQ ID NO: 276541 - DNA, 21 bp, Artificial sequence
  SiRNA target sequence
tgttttcatacatcaagtggg

SEQ ID NO: 276542 - DNA, 21 bp, Artificial sequence
  SiRNA target sequence
gttttcatacatcaagtgggt

SEQ ID NO: 276543 - DNA, 21 bp, Artificial sequence
  SiRNA target sequence
ttttcatacatcaagtgggtt

SEQ ID NO: 276544 - DNA, 21 bp, Artificial sequence
  SiRNA target sequence
tttcatacatcaagtgggttg

SEQ ID NO: 276545 - DNA, 21 bp, Artificial sequence
  SiRNA target sequence
ttcatacatcaagtgggttga

SEQ ID NO: 276546 - DNA, 21 bp, Artificial sequence
  SiRNA target sequence
tcatacatcaagtgggttgaa

SEQ ID NO: 276547 - DNA, 21 bp, Artificial sequence
  SiRNA target sequence
catacatcaagtgggttgaaa

SEQ ID NO: 276548 - DNA, 21 bp, Artificial sequence
  SiRNA target sequence
atacatcaagtgggttgaaag

SEQ ID NO: 276549 - DNA, 21 bp, Artificial sequence
  SiRNA target sequence
tacatcaagtgggttgaaagc

SEQ ID NO: 276550 - DNA, 21 bp, Artificial sequence
  SiRNA target sequence
acatcaagtgggttgaaagcc

SEQ ID NO: 276551 - DNA, 21 bp, Artificial sequence
  SiRNA target sequence
catcaagtgggttgaaagccc

SEQ ID NO: 276552 - DNA, 21 bp, Artificial sequence
  SiRNA target sequence
atcaagtgggttgaaagcccc

SEQ ID NO: 276553 - DNA, 21 bp, Artificial sequence
  SiRNA target sequence
tcaagtgggttgaaagccccg

SEQ ID NO: 276554 - DNA, 21 bp, Artificial sequence
  SiRNA target sequence
caagtgggttgaaagccccgt

SEQ ID NO: 276555 - DNA, 21 bp, Artificial sequence
  SiRNA target sequence
aagtgggttgaaagccccgtg

SEQ ID NO: 276556 - DNA, 21 bp, Artificial sequence
  SiRNA target sequence
agtgggttgaaagccccgtgt

SEQ ID NO: 276557 - DNA, 21 bp, Artificial sequence
  SiRNA target sequence
gtgggttgaaagccccgtgta

SEQ ID NO: 276558 - DNA, 21 bp, Artificial sequence
  SiRNA target sequence
tgggttgaaagccccgtgtac

SEQ ID NO: 276559 - DNA, 21 bp, Artificial sequence
  SiRNA target sequence
gggttgaaagccccgtgtact

SEQ ID NO: 276560 - DNA, 21 bp, Artificial sequence
  SiRNA target sequence
ggttgaaagccccgtgtactt

SEQ ID NO: 276561 - DNA, 21 bp, Artificial sequence
  SiRNA target sequence
gttgaaagccccgtgtacttg

SEQ ID NO: 276562 - DNA, 21 bp, Artificial sequence
  SiRNA target sequence
ttgaaagccccgtgtacttgg

SEQ ID NO: 276563 - DNA, 21 bp, Artificial sequence
  SiRNA target sequence
tgaaagccccgtgtacttgga

SEQ ID NO: 276564 - DNA, 21 bp, Artificial sequence
  SiRNA target sequence
gaaagccccgtgtacttggag

SEQ ID NO: 276565 - DNA, 21 bp, Artificial sequence
  SiRNA target sequence
aaagccccgtgtacttggagg

SEQ ID NO: 276566 - DNA, 21 bp, Artificial sequence
  SiRNA target sequence
aagccccgtgtacttggaggc

SEQ ID NO: 276567 - DNA, 21 bp, Artificial sequence
  SiRNA target sequence
agccccgtgtacttggaggct

SEQ ID NO: 276568 - DNA, 21 bp, Artificial sequence
  SiRNA target sequence
gccccgtgtacttggaggcta

SEQ ID NO: 276569 - DNA, 21 bp, Artificial sequence
  SiRNA target sequence
ccccgtgtacttggaggctag

SEQ ID NO: 276570 - DNA, 21 bp, Artificial sequence
  SiRNA target sequence
cccgtgtacttggaggctagg

SEQ ID NO: 276571 - DNA, 21 bp, Artificial sequence
  SiRNA target sequence
ccgtgtacttggaggctaggc

SEQ ID NO: 276572 - DNA, 21 bp, Artificial sequence
  SiRNA target sequence
cgtgtacttggaggctaggca

SEQ ID NO: 276573 - DNA, 21 bp, Artificial sequence
  SiRNA target sequence
gtgtacttggaggctaggcag

SEQ ID NO: 276574 - DNA, 21 bp, Artificial sequence
  SiRNA target sequence
tgtacttggaggctaggcagc

SEQ ID NO: 276575 - DNA, 21 bp, Artificial sequence
  SiRNA target sequence
gtacttggaggctaggcagca

SEQ ID NO: 276576 - DNA, 21 bp, Artificial sequence
  SiRNA target sequence
tacttggaggctaggcagcac

SEQ ID NO: 276577 - DNA, 21 bp, Artificial sequence
  SiRNA target sequence
acttggaggctaggcagcacg

SEQ ID NO: 276578 - DNA, 21 bp, Artificial sequence
  SiRNA target sequence
cttggaggctaggcagcacga

SEQ ID NO: 276579 - DNA, 21 bp, Artificial sequence
  SiRNA target sequence
ttggaggctaggcagcacgat

SEQ ID NO: 276580 - DNA, 21 bp, Artificial sequence
  SiRNA target sequence
tggaggctaggcagcacgatt

SEQ ID NO: 276581 - DNA, 21 bp, Artificial sequence
  SiRNA target sequence
ggaggctaggcagcacgatta

SEQ ID NO: 276582 - DNA, 21 bp, Artificial sequence
  SiRNA target sequence
gaggctaggcagcacgattac

SEQ ID NO: 276583 - DNA, 21 bp, Artificial sequence
  SiRNA target sequence
aggctaggcagcacgattaca

SEQ ID NO: 276584 - DNA, 21 bp, Artificial sequence
  SiRNA target sequence
ggctaggcagcacgattacag

SEQ ID NO: 276585 - DNA, 21 bp, Artificial sequence
  SiRNA target sequence
gctaggcagcacgattacagt

SEQ ID NO: 276586 - DNA, 21 bp, Artificial sequence
  SiRNA target sequence
ctaggcagcacgattacagta

SEQ ID NO: 276587 - DNA, 21 bp, Artificial sequence
  SiRNA target sequence
taggcagcacgattacagtag

SEQ ID NO: 276588 - DNA, 21 bp, Artificial sequence
  SiRNA target sequence
aggcagcacgattacagtagc

SEQ ID NO: 276589 - DNA, 21 bp, Artificial sequence
  SiRNA target sequence
ggcagcacgattacagtagcc

SEQ ID NO: 276590 - DNA, 21 bp, Artificial sequence
  SiRNA target sequence
gcagcacgattacagtagcct

SEQ ID NO: 276591 - DNA, 21 bp, Artificial sequence
  SiRNA target sequence
cagcacgattacagtagcctg

SEQ ID NO: 276592 - DNA, 21 bp, Artificial sequence
  SiRNA target sequence
agcacgattacagtagcctgt

SEQ ID NO: 276593 - DNA, 21 bp, Artificial sequence
  SiRNA target sequence
gcacgattacagtagcctgta

SEQ ID NO: 276594 - DNA, 21 bp, Artificial sequence
  SiRNA target sequence
cacgattacagtagcctgtac

SEQ ID NO: 276595 - DNA, 21 bp, Artificial sequence
  SiRNA target sequence
acgattacagtagcctgtact

SEQ ID NO: 276596 - DNA, 21 bp, Artificial sequence
  SiRNA target sequence
cgattacagtagcctgtacta

SEQ ID NO: 276597 - DNA, 21 bp, Artificial sequence
  SiRNA target sequence
gattacagtagcctgtactac

SEQ ID NO: 276598 - DNA, 21 bp, Artificial sequence
  SiRNA target sequence
attacagtagcctgtactacc

SEQ ID NO: 276599 - DNA, 21 bp, Artificial sequence
  SiRNA target sequence
ttacagtagcctgtactacct

SEQ ID NO: 276600 - DNA, 21 bp, Artificial sequence
  SiRNA target sequence
tacagtagcctgtactacctg

SEQ ID NO: 276601 - DNA, 21 bp, Artificial sequence
  SiRNA target sequence
acagtagcctgtactacctga

SEQ ID NO: 276602 - DNA, 21 bp, Artificial sequence
  SiRNA target sequence
cagtagcctgtactacctgaa

SEQ ID NO: 276603 - DNA, 21 bp, Artificial sequence
  SiRNA target sequence
agtagcctgtactacctgaag

SEQ ID NO: 276604 - DNA, 21 bp, Artificial sequence
  SiRNA target sequence
gtagcctgtactacctgaagc

SEQ ID NO: 276605 - DNA, 21 bp, Artificial sequence
  SiRNA target sequence
tagcctgtactacctgaagca

SEQ ID NO: 276606 - DNA, 21 bp, Artificial sequence
  SiRNA target sequence
agcctgtactacctgaagcat

SEQ ID NO: 276607 - DNA, 21 bp, Artificial sequence
  SiRNA target sequence
gcctgtactacctgaagcatg

SEQ ID NO: 276608 - DNA, 21 bp, Artificial sequence
  SiRNA target sequence
cctgtactacctgaagcatgt

SEQ ID NO: 276609 - DNA, 21 bp, Artificial sequence
  SiRNA target sequence
ctgtactacctgaagcatgta

SEQ ID NO: 276610 - DNA, 21 bp, Artificial sequence
  SiRNA target sequence
tgtactacctgaagcatgtag

SEQ ID NO: 276611 - DNA, 21 bp, Artificial sequence
  SiRNA target sequence
gtactacctgaagcatgtagt

SEQ ID NO: 276612 - DNA, 21 bp, Artificial sequence
  SiRNA target sequence
tactacctgaagcatgtagta

SEQ ID NO: 276613 - DNA, 21 bp, Artificial sequence
  SiRNA target sequence
actacctgaagcatgtagtaa

SEQ ID NO: 276614 - DNA, 21 bp, Artificial sequence
  SiRNA target sequence
ctacctgaagcatgtagtaaa

SEQ ID NO: 276615 - DNA, 21 bp, Artificial sequence
  SiRNA target sequence
tacctgaagcatgtagtaaaa

SEQ ID NO: 276616 - DNA, 21 bp, Artificial sequence
  SiRNA target sequence
acctgaagcatgtagtaaaac

SEQ ID NO: 276617 - DNA, 21 bp, Artificial sequence
  SiRNA target sequence
cctgaagcatgtagtaaaact

SEQ ID NO: 276618 - DNA, 21 bp, Artificial sequence
  SiRNA target sequence
ctgaagcatgtagtaaaactg

SEQ ID NO: 276619 - DNA, 21 bp, Artificial sequence
  SiRNA target sequence
tgaagcatgtagtaaaactgc

SEQ ID NO: 276620 - DNA, 21 bp, Artificial sequence
  SiRNA target sequence
gaagcatgtagtaaaactgca

SEQ ID NO: 276621 - DNA, 21 bp, Artificial sequence
  SiRNA target sequence
aagcatgtagtaaaactgcac

SEQ ID NO: 276622 - DNA, 21 bp, Artificial sequence
  SiRNA target sequence
agcatgtagtaaaactgcaca

SEQ ID NO: 276623 - DNA, 21 bp, Artificial sequence
  SiRNA target sequence
gcatgtagtaaaactgcacag

SEQ ID NO: 276624 - DNA, 21 bp, Artificial sequence
  SiRNA target sequence
catgtagtaaaactgcacagt

SEQ ID NO: 276625 - DNA, 21 bp, Artificial sequence
  SiRNA target sequence
atgtagtaaaactgcacagtt

SEQ ID NO: 276626 - DNA, 21 bp, Artificial sequence
  SiRNA target sequence
tgtagtaaaactgcacagttg

SEQ ID NO: 276627 - DNA, 21 bp, Artificial sequence
  SiRNA target sequence
gtagtaaaactgcacagttga

SEQ ID NO: 276628 - DNA, 21 bp, Artificial sequence
  SiRNA target sequence
tagtaaaactgcacagttgaa

SEQ ID NO: 276629 - DNA, 21 bp, Artificial sequence
  SiRNA target sequence
agtaaaactgcacagttgaac

SEQ ID NO: 276630 - DNA, 21 bp, Artificial sequence
  SiRNA target sequence
gtaaaactgcacagttgaaca

SEQ ID NO: 276631 - DNA, 21 bp, Artificial sequence
  SiRNA target sequence
taaaactgcacagttgaacat

SEQ ID NO: 276632 - DNA, 21 bp, Artificial sequence
  SiRNA target sequence
aaaactgcacagttgaacatt

SEQ ID NO: 276633 - DNA, 21 bp, Artificial sequence
  SiRNA target sequence
aaactgcacagttgaacattg

SEQ ID NO: 276634 - DNA, 21 bp, Artificial sequence
  SiRNA target sequence
aactgcacagttgaacattgt

SEQ ID NO: 276635 - DNA, 21 bp, Artificial sequence
  SiRNA target sequence
actgcacagttgaacattgtc

SEQ ID NO: 276636 - DNA, 21 bp, Artificial sequence
  SiRNA target sequence
ctgcacagttgaacattgtca

SEQ ID NO: 276637 - DNA, 21 bp, Artificial sequence
  SiRNA target sequence
tgcacagttgaacattgtcac

SEQ ID NO: 276638 - DNA, 21 bp, Artificial sequence
  SiRNA target sequence
gcacagttgaacattgtcaca

SEQ ID NO: 276639 - DNA, 21 bp, Artificial sequence
  SiRNA target sequence
cacagttgaacattgtcacaa

SEQ ID NO: 276640 - DNA, 21 bp, Artificial sequence
  SiRNA target sequence
acagttgaacattgtcacaaa

SEQ ID NO: 276641 - DNA, 21 bp, Artificial sequence
  SiRNA target sequence
cagttgaacattgtcacaaac

SEQ ID NO: 276642 - DNA, 21 bp, Artificial sequence
  SiRNA target sequence
agttgaacattgtcacaaacg

SEQ ID NO: 276643 - DNA, 21 bp, Artificial sequence
  SiRNA target sequence
gttgaacattgtcacaaacgg

SEQ ID NO: 276644 - DNA, 21 bp, Artificial sequence
  SiRNA target sequence
ttgaacattgtcacaaacggg

SEQ ID NO: 276645 - DNA, 21 bp, Artificial sequence
  SiRNA target sequence
tgaacattgtcacaaacgggc

SEQ ID NO: 276646 - DNA, 21 bp, Artificial sequence
  SiRNA target sequence
gaacattgtcacaaacgggct

SEQ ID NO: 276647 - DNA, 21 bp, Artificial sequence
  SiRNA target sequence
aacattgtcacaaacgggctg

SEQ ID NO: 276648 - DNA, 21 bp, Artificial sequence
  SiRNA target sequence
acattgtcacaaacgggctga

SEQ ID NO: 276649 - DNA, 21 bp, Artificial sequence
  SiRNA target sequence
cattgtcacaaacgggctgat

SEQ ID NO: 276650 - DNA, 21 bp, Artificial sequence
  SiRNA target sequence
attgtcacaaacgggctgata

SEQ ID NO: 276651 - DNA, 21 bp, Artificial sequence
  SiRNA target sequence
ttgtcacaaacgggctgatag

SEQ ID NO: 276652 - DNA, 21 bp, Artificial sequence
  SiRNA target sequence
tgtcacaaacgggctgatagc

SEQ ID NO: 276653 - DNA, 21 bp, Artificial sequence
  SiRNA target sequence
gtcacaaacgggctgatagcg

SEQ ID NO: 276654 - DNA, 21 bp, Artificial sequence
  SiRNA target sequence
tcacaaacgggctgatagcgt

SEQ ID NO: 276655 - DNA, 21 bp, Artificial sequence
  SiRNA target sequence
cacaaacgggctgatagcgta

SEQ ID NO: 276656 - DNA, 21 bp, Artificial sequence
  SiRNA target sequence
acaaacgggctgatagcgtat

SEQ ID NO: 276657 - DNA, 21 bp, Artificial sequence
  SiRNA target sequence
caaacgggctgatagcgtata

SEQ ID NO: 276658 - DNA, 21 bp, Artificial sequence
  SiRNA target sequence
aaacgggctgatagcgtatag

SEQ ID NO: 276659 - DNA, 21 bp, Artificial sequence
  SiRNA target sequence
aacgggctgatagcgtatagc

SEQ ID NO: 276660 - DNA, 21 bp, Artificial sequence
  SiRNA target sequence
acgggctgatagcgtatagct

SEQ ID NO: 276661 - DNA, 21 bp, Artificial sequence
  SiRNA target sequence
cgggctgatagcgtatagctg

SEQ ID NO: 276662 - DNA, 21 bp, Artificial sequence
  SiRNA target sequence
gggctgatagcgtatagctgg

SEQ ID NO: 276663 - DNA, 21 bp, Artificial sequence
  SiRNA target sequence
ggctgatagcgtatagctgga

SEQ ID NO: 276664 - DNA, 21 bp, Artificial sequence
  SiRNA target sequence
gctgatagcgtatagctggat

SEQ ID NO: 276665 - DNA, 21 bp, Artificial sequence
  SiRNA target sequence
ctgatagcgtatagctggatt

SEQ ID NO: 276666 - DNA, 21 bp, Artificial sequence
  SiRNA target sequence
tgatagcgtatagctggattg

SEQ ID NO: 276667 - DNA, 21 bp, Artificial sequence
  SiRNA target sequence
gatagcgtatagctggattgt

SEQ ID NO: 276668 - DNA, 21 bp, Artificial sequence
  SiRNA target sequence
atagcgtatagctggattgtt

SEQ ID NO: 276669 - DNA, 21 bp, Artificial sequence
  SiRNA target sequence
tagcgtatagctggattgttg

SEQ ID NO: 276670 - DNA, 21 bp, Artificial sequence
  SiRNA target sequence
agcgtatagctggattgttga

SEQ ID NO: 276671 - DNA, 21 bp, Artificial sequence
  SiRNA target sequence
gcgtatagctggattgttgag

SEQ ID NO: 276672 - DNA, 21 bp, Artificial sequence
  SiRNA target sequence
cgtatagctggattgttgaga

SEQ ID NO: 276673 - DNA, 21 bp, Artificial sequence
  SiRNA target sequence
gtatagctggattgttgagag

SEQ ID NO: 276674 - DNA, 21 bp, Artificial sequence
  SiRNA target sequence
tatagctggattgttgagaga

SEQ ID NO: 276675 - DNA, 21 bp, Artificial sequence
  SiRNA target sequence
atagctggattgttgagagat

SEQ ID NO: 276676 - DNA, 21 bp, Artificial sequence
  SiRNA target sequence
tagctggattgttgagagata

SEQ ID NO: 276677 - DNA, 21 bp, Artificial sequence
  SiRNA target sequence
agctggattgttgagagatag

SEQ ID NO: 276678 - DNA, 21 bp, Artificial sequence
  SiRNA target sequence
gctggattgttgagagatagc

SEQ ID NO: 276679 - DNA, 21 bp, Artificial sequence
  SiRNA target sequence
ctggattgttgagagatagca

SEQ ID NO: 276680 - DNA, 21 bp, Artificial sequence
  SiRNA target sequence
tggattgttgagagatagcat

SEQ ID NO: 276681 - DNA, 21 bp, Artificial sequence
  SiRNA target sequence
ggattgttgagagatagcatc

SEQ ID NO: 276682 - DNA, 21 bp, Artificial sequence
  SiRNA target sequence
gattgttgagagatagcatct

SEQ ID NO: 276683 - DNA, 21 bp, Artificial sequence
  SiRNA target sequence
attgttgagagatagcatctt

SEQ ID NO: 276684 - DNA, 21 bp, Artificial sequence
  SiRNA target sequence
ttgttgagagatagcatcttg

SEQ ID NO: 276685 - DNA, 21 bp, Artificial sequence
  SiRNA target sequence
tgttgagagatagcatcttgc

SEQ ID NO: 276686 - DNA, 21 bp, Artificial sequence
  SiRNA target sequence
gttgagagatagcatcttgcg

SEQ ID NO: 276687 - DNA, 21 bp, Artificial sequence
  SiRNA target sequence
ttgagagatagcatcttgcgg

SEQ ID NO: 276688 - DNA, 21 bp, Artificial sequence
  SiRNA target sequence
tgagagatagcatcttgcggg

SEQ ID NO: 276689 - DNA, 21 bp, Artificial sequence
  SiRNA target sequence
gagagatagcatcttgcggga

SEQ ID NO: 276690 - DNA, 21 bp, Artificial sequence
  SiRNA target sequence
agagatagcatcttgcgggat

SEQ ID NO: 276691 - DNA, 21 bp, Artificial sequence
  SiRNA target sequence
gagatagcatcttgcgggatg

SEQ ID NO: 276692 - DNA, 21 bp, Artificial sequence
  SiRNA target sequence
agatagcatcttgcgggatgt

SEQ ID NO: 276693 - DNA, 21 bp, Artificial sequence
  SiRNA target sequence
gatagcatcttgcgggatgtg

SEQ ID NO: 276694 - DNA, 21 bp, Artificial sequence
  SiRNA target sequence
atagcatcttgcgggatgtga

SEQ ID NO: 276695 - DNA, 21 bp, Artificial sequence
  SiRNA target sequence
tagcatcttgcgggatgtgaa

SEQ ID NO: 276696 - DNA, 21 bp, Artificial sequence
  SiRNA target sequence
agcatcttgcgggatgtgaaa

SEQ ID NO: 276697 - DNA, 21 bp, Artificial sequence
  SiRNA target sequence
gcatcttgcgggatgtgaaag

SEQ ID NO: 276698 - DNA, 21 bp, Artificial sequence
  SiRNA target sequence
catcttgcgggatgtgaaaga

SEQ ID NO: 276699 - DNA, 21 bp, Artificial sequence
  SiRNA target sequence
atcttgcgggatgtgaaagag

SEQ ID NO: 276700 - DNA, 21 bp, Artificial sequence
  SiRNA target sequence
tcttgcgggatgtgaaagagc

SEQ ID NO: 276701 - DNA, 21 bp, Artificial sequence
  SiRNA target sequence
cttgcgggatgtgaaagagca

SEQ ID NO: 276702 - DNA, 21 bp, Artificial sequence
  SiRNA target sequence
ttgcgggatgtgaaagagcat

SEQ ID NO: 276703 - DNA, 21 bp, Artificial sequence
  SiRNA target sequence
tgcgggatgtgaaagagcatg

SEQ ID NO: 276704 - DNA, 21 bp, Artificial sequence
  SiRNA target sequence
gcgggatgtgaaagagcatgt

SEQ ID NO: 276705 - DNA, 21 bp, Artificial sequence
  SiRNA target sequence
cgggatgtgaaagagcatgtt

SEQ ID NO: 276706 - DNA, 21 bp, Artificial sequence
  SiRNA target sequence
gggatgtgaaagagcatgtta

SEQ ID NO: 276707 - DNA, 21 bp, Artificial sequence
  SiRNA target sequence
ggatgtgaaagagcatgttag

SEQ ID NO: 276708 - DNA, 21 bp, Artificial sequence
  SiRNA target sequence
gatgtgaaagagcatgttaga

SEQ ID NO: 276709 - DNA, 21 bp, Artificial sequence
  SiRNA target sequence
atgtgaaagagcatgttagac

SEQ ID NO: 276710 - DNA, 21 bp, Artificial sequence
  SiRNA target sequence
tgtgaaagagcatgttagaca

SEQ ID NO: 276711 - DNA, 21 bp, Artificial sequence
  SiRNA target sequence
gtgaaagagcatgttagacat

SEQ ID NO: 276712 - DNA, 21 bp, Artificial sequence
  SiRNA target sequence
tgaaagagcatgttagacatg

SEQ ID NO: 276713 - DNA, 21 bp, Artificial sequence
  SiRNA target sequence
gaaagagcatgttagacatgt

SEQ ID NO: 276714 - DNA, 21 bp, Artificial sequence
  SiRNA target sequence
aaagagcatgttagacatgta

SEQ ID NO: 276715 - DNA, 21 bp, Artificial sequence
  SiRNA target sequence
aagagcatgttagacatgtat

SEQ ID NO: 276716 - DNA, 21 bp, Artificial sequence
  SiRNA target sequence
agagcatgttagacatgtatt

SEQ ID NO: 276717 - DNA, 21 bp, Artificial sequence
  SiRNA target sequence
gagcatgttagacatgtatta

SEQ ID NO: 276718 - DNA, 21 bp, Artificial sequence
  SiRNA target sequence
agcatgttagacatgtattat

SEQ ID NO: 276719 - DNA, 21 bp, Artificial sequence
  SiRNA target sequence
gcatgttagacatgtattatg

SEQ ID NO: 276720 - DNA, 21 bp, Artificial sequence
  SiRNA target sequence
catgttagacatgtattatgg

SEQ ID NO: 276721 - DNA, 21 bp, Artificial sequence
  SiRNA target sequence
atgttagacatgtattatggc

SEQ ID NO: 276722 - DNA, 21 bp, Artificial sequence
  SiRNA target sequence
tgttagacatgtattatggct

SEQ ID NO: 276723 - DNA, 21 bp, Artificial sequence
  SiRNA target sequence
gttagacatgtattatggctt

SEQ ID NO: 276724 - DNA, 21 bp, Artificial sequence
  SiRNA target sequence
ttagacatgtattatggcttt

SEQ ID NO: 276725 - DNA, 21 bp, Artificial sequence
  SiRNA target sequence
tagacatgtattatggctttt

SEQ ID NO: 276726 - DNA, 21 bp, Artificial sequence
  SiRNA target sequence
agacatgtattatggcttttc

SEQ ID NO: 276727 - DNA, 21 bp, Artificial sequence
  SiRNA target sequence
gacatgtattatggcttttct

SEQ ID NO: 276728 - DNA, 21 bp, Artificial sequence
  SiRNA target sequence
acatgtattatggcttttctc

SEQ ID NO: 276729 - DNA, 21 bp, Artificial sequence
  SiRNA target sequence
catgtattatggcttttctca

SEQ ID NO: 276730 - DNA, 21 bp, Artificial sequence
  SiRNA target sequence
atgtattatggcttttctcaa

SEQ ID NO: 276731 - DNA, 21 bp, Artificial sequence
  SiRNA target sequence
tgtattatggcttttctcaat

SEQ ID NO: 276732 - DNA, 21 bp, Artificial sequence
  SiRNA target sequence
gtattatggcttttctcaata

SEQ ID NO: 276733 - DNA, 21 bp, Artificial sequence
  SiRNA target sequence
tattatggcttttctcaatac

SEQ ID NO: 276734 - DNA, 21 bp, Artificial sequence
  SiRNA target sequence
attatggcttttctcaatacg

SEQ ID NO: 276735 - DNA, 21 bp, Artificial sequence
  SiRNA target sequence
ttatggcttttctcaatacgc

SEQ ID NO: 276736 - DNA, 21 bp, Artificial sequence
  SiRNA target sequence
tatggcttttctcaatacgca

SEQ ID NO: 276737 - DNA, 21 bp, Artificial sequence
  SiRNA target sequence
atggcttttctcaatacgcag

SEQ ID NO: 276738 - DNA, 21 bp, Artificial sequence
  SiRNA target sequence
tggcttttctcaatacgcagt

SEQ ID NO: 276739 - DNA, 21 bp, Artificial sequence
  SiRNA target sequence
ggcttttctcaatacgcagtc

SEQ ID NO: 276740 - DNA, 21 bp, Artificial sequence
  SiRNA target sequence
gcttttctcaatacgcagtct

SEQ ID NO: 276741 - DNA, 21 bp, Artificial sequence
  SiRNA target sequence
cttttctcaatacgcagtctt

SEQ ID NO: 276742 - DNA, 21 bp, Artificial sequence
  SiRNA target sequence
ttttctcaatacgcagtcttt

SEQ ID NO: 276743 - DNA, 21 bp, Artificial sequence
  SiRNA target sequence
tttctcaatacgcagtctttg

SEQ ID NO: 276744 - DNA, 21 bp, Artificial sequence
  SiRNA target sequence
ttctcaatacgcagtctttgc

SEQ ID NO: 276745 - DNA, 21 bp, Artificial sequence
  SiRNA target sequence
tctcaatacgcagtctttgct

SEQ ID NO: 276746 - DNA, 21 bp, Artificial sequence
  SiRNA target sequence
ctcaatacgcagtctttgcta

SEQ ID NO: 276747 - DNA, 21 bp, Artificial sequence
  SiRNA target sequence
tcaatacgcagtctttgctat

SEQ ID NO: 276748 - DNA, 21 bp, Artificial sequence
  SiRNA target sequence
caatacgcagtctttgctatg

SEQ ID NO: 276749 - DNA, 21 bp, Artificial sequence
  SiRNA target sequence
aatacgcagtctttgctatgc

SEQ ID NO: 276750 - DNA, 21 bp, Artificial sequence
  SiRNA target sequence
atacgcagtctttgctatgcg

SEQ ID NO: 276751 - DNA, 21 bp, Artificial sequence
  SiRNA target sequence
tacgcagtctttgctatgcgt

SEQ ID NO: 276752 - DNA, 21 bp, Artificial sequence
  SiRNA target sequence
acgcagtctttgctatgcgtg

SEQ ID NO: 276753 - DNA, 21 bp, Artificial sequence
  SiRNA target sequence
cgcagtctttgctatgcgtgt

SEQ ID NO: 276754 - DNA, 21 bp, Artificial sequence
  SiRNA target sequence
gcagtctttgctatgcgtgtg

SEQ ID NO: 276755 - DNA, 21 bp, Artificial sequence
  SiRNA target sequence
cagtctttgctatgcgtgtgt

SEQ ID NO: 276756 - DNA, 21 bp, Artificial sequence
  SiRNA target sequence
agtctttgctatgcgtgtgta

SEQ ID NO: 276757 - DNA, 21 bp, Artificial sequence
  SiRNA target sequence
gtctttgctatgcgtgtgtag

SEQ ID NO: 276758 - DNA, 21 bp, Artificial sequence
  SiRNA target sequence
tctttgctatgcgtgtgtagg

SEQ ID NO: 276759 - DNA, 21 bp, Artificial sequence
  SiRNA target sequence
ctttgctatgcgtgtgtaggc

SEQ ID NO: 276760 - DNA, 21 bp, Artificial sequence
  SiRNA target sequence
tttgctatgcgtgtgtaggca

SEQ ID NO: 276761 - DNA, 21 bp, Artificial sequence
  SiRNA target sequence
ttgctatgcgtgtgtaggcaa

SEQ ID NO: 276762 - DNA, 21 bp, Artificial sequence
  SiRNA target sequence
tgctatgcgtgtgtaggcaaa

SEQ ID NO: 276763 - DNA, 21 bp, Artificial sequence
  SiRNA target sequence
gctatgcgtgtgtaggcaaaa

SEQ ID NO: 276764 - DNA, 21 bp, Artificial sequence
  SiRNA target sequence
ctatgcgtgtgtaggcaaaag

SEQ ID NO: 276765 - DNA, 21 bp, Artificial sequence
  SiRNA target sequence
tatgcgtgtgtaggcaaaagg

SEQ ID NO: 276766 - DNA, 21 bp, Artificial sequence
  SiRNA target sequence
atgcgtgtgtaggcaaaagga

SEQ ID NO: 276767 - DNA, 21 bp, Artificial sequence
  SiRNA target sequence
tgcgtgtgtaggcaaaaggaa

SEQ ID NO: 276768 - DNA, 21 bp, Artificial sequence
  SiRNA target sequence
gcgtgtgtaggcaaaaggaag

SEQ ID NO: 276769 - DNA, 21 bp, Artificial sequence
  SiRNA target sequence
cgtgtgtaggcaaaaggaagt

SEQ ID NO: 276770 - DNA, 21 bp, Artificial sequence
  SiRNA target sequence
gtgtgtaggcaaaaggaagtg

SEQ ID NO: 276771 - DNA, 21 bp, Artificial sequence
  SiRNA target sequence
tgtgtaggcaaaaggaagtga

SEQ ID NO: 276772 - DNA, 21 bp, Artificial sequence
  SiRNA target sequence
gtgtaggcaaaaggaagtgag

SEQ ID NO: 276773 - DNA, 21 bp, Artificial sequence
  SiRNA target sequence
tgtaggcaaaaggaagtgaga

SEQ ID NO: 276774 - DNA, 21 bp, Artificial sequence
  SiRNA target sequence
gtaggcaaaaggaagtgagag

SEQ ID NO: 276775 - DNA, 21 bp, Artificial sequence
  SiRNA target sequence
taggcaaaaggaagtgagaga

SEQ ID NO: 276776 - DNA, 21 bp, Artificial sequence
  SiRNA target sequence
aggcaaaaggaagtgagagag

SEQ ID NO: 276777 - DNA, 21 bp, Artificial sequence
  SiRNA target sequence
ggcaaaaggaagtgagagagc

SEQ ID NO: 276778 - DNA, 21 bp, Artificial sequence
  SiRNA target sequence
gcaaaaggaagtgagagagct

SEQ ID NO: 276779 - DNA, 21 bp, Artificial sequence
  SiRNA target sequence
caaaaggaagtgagagagctg

SEQ ID NO: 276780 - DNA, 21 bp, Artificial sequence
  SiRNA target sequence
aaaaggaagtgagagagctga

SEQ ID NO: 276781 - DNA, 21 bp, Artificial sequence
  SiRNA target sequence
aaaggaagtgagagagctgac

SEQ ID NO: 276782 - DNA, 21 bp, Artificial sequence
  SiRNA target sequence
aaggaagtgagagagctgacc

SEQ ID NO: 276783 - DNA, 21 bp, Artificial sequence
  SiRNA target sequence
aggaagtgagagagctgaccg

SEQ ID NO: 276784 - DNA, 21 bp, Artificial sequence
  SiRNA target sequence
ggaagtgagagagctgaccgt

SEQ ID NO: 276785 - DNA, 21 bp, Artificial sequence
  SiRNA target sequence
gaagtgagagagctgaccgtc

SEQ ID NO: 276786 - DNA, 21 bp, Artificial sequence
  SiRNA target sequence
aagtgagagagctgaccgtct

SEQ ID NO: 276787 - DNA, 21 bp, Artificial sequence
  SiRNA target sequence
agtgagagagctgaccgtctc

SEQ ID NO: 276788 - DNA, 21 bp, Artificial sequence
  SiRNA target sequence
gtgagagagctgaccgtctct

SEQ ID NO: 276789 - DNA, 21 bp, Artificial sequence
  SiRNA target sequence
tgagagagctgaccgtctctc

SEQ ID NO: 276790 - DNA, 21 bp, Artificial sequence
  SiRNA target sequence
gagagagctgaccgtctctca

SEQ ID NO: 276791 - DNA, 21 bp, Artificial sequence
  SiRNA target sequence
agagagctgaccgtctctcat

SEQ ID NO: 276792 - DNA, 21 bp, Artificial sequence
  SiRNA target sequence
gagagctgaccgtctctcatg

SEQ ID NO: 276793 - DNA, 21 bp, Artificial sequence
  SiRNA target sequence
agagctgaccgtctctcatgg

SEQ ID NO: 276794 - DNA, 21 bp, Artificial sequence
  SiRNA target sequence
gagctgaccgtctctcatggg

SEQ ID NO: 276795 - DNA, 21 bp, Artificial sequence
  SiRNA target sequence
agctgaccgtctctcatgggt

SEQ ID NO: 276796 - DNA, 21 bp, Artificial sequence
  SiRNA target sequence
gctgaccgtctctcatgggta

SEQ ID NO: 276797 - DNA, 21 bp, Artificial sequence
  SiRNA target sequence
ctgaccgtctctcatgggtat

SEQ ID NO: 276798 - DNA, 21 bp, Artificial sequence
  SiRNA target sequence
tgaccgtctctcatgggtatt

SEQ ID NO: 276799 - DNA, 21 bp, Artificial sequence
  SiRNA target sequence
gaccgtctctcatgggtattt

SEQ ID NO: 276800 - DNA, 21 bp, Artificial sequence
  SiRNA target sequence
accgtctctcatgggtattta

SEQ ID NO: 276801 - DNA, 21 bp, Artificial sequence
  SiRNA target sequence
ccgtctctcatgggtatttag

SEQ ID NO: 276802 - DNA, 21 bp, Artificial sequence
  SiRNA target sequence
cgtctctcatgggtatttagg

SEQ ID NO: 276803 - DNA, 21 bp, Artificial sequence
  SiRNA target sequence
gtctctcatgggtatttaggt

SEQ ID NO: 276804 - DNA, 21 bp, Artificial sequence
  SiRNA target sequence
tctctcatgggtatttaggtt

SEQ ID NO: 276805 - DNA, 21 bp, Artificial sequence
  SiRNA target sequence
ctctcatgggtatttaggtta

SEQ ID NO: 276806 - DNA, 21 bp, Artificial sequence
  SiRNA target sequence
tctcatgggtatttaggttat

SEQ ID NO: 276807 - DNA, 21 bp, Artificial sequence
  SiRNA target sequence
ctcatgggtatttaggttatt

SEQ ID NO: 276808 - DNA, 21 bp, Artificial sequence
  SiRNA target sequence
tcatgggtatttaggttattc

SEQ ID NO: 276809 - DNA, 21 bp, Artificial sequence
  SiRNA target sequence
catgggtatttaggttattca

SEQ ID NO: 276810 - DNA, 21 bp, Artificial sequence
  SiRNA target sequence
atgggtatttaggttattcag

SEQ ID NO: 276811 - DNA, 21 bp, Artificial sequence
  SiRNA target sequence
tgggtatttaggttattcaga

SEQ ID NO: 276812 - DNA, 21 bp, Artificial sequence
  SiRNA target sequence
gggtatttaggttattcagag

SEQ ID NO: 276813 - DNA, 21 bp, Artificial sequence
  SiRNA target sequence
ggtatttaggttattcagagt

SEQ ID NO: 276814 - DNA, 21 bp, Artificial sequence
  SiRNA target sequence
gtatttaggttattcagagta

SEQ ID NO: 276815 - DNA, 21 bp, Artificial sequence
  SiRNA target sequence
tatttaggttattcagagtac

SEQ ID NO: 276816 - DNA, 21 bp, Artificial sequence
  SiRNA target sequence
atttaggttattcagagtacg

SEQ ID NO: 276817 - DNA, 21 bp, Artificial sequence
  SiRNA target sequence
tttaggttattcagagtacgc

SEQ ID NO: 276818 - DNA, 21 bp, Artificial sequence
  SiRNA target sequence
ttaggttattcagagtacgct

SEQ ID NO: 276819 - DNA, 21 bp, Artificial sequence
  SiRNA target sequence
taggttattcagagtacgctg

SEQ ID NO: 276820 - DNA, 21 bp, Artificial sequence
  SiRNA target sequence
aggttattcagagtacgctgc

SEQ ID NO: 276821 - DNA, 21 bp, Artificial sequence
  SiRNA target sequence
ggttattcagagtacgctgct

SEQ ID NO: 276822 - DNA, 21 bp, Artificial sequence
  SiRNA target sequence
gttattcagagtacgctgcta

SEQ ID NO: 276823 - DNA, 21 bp, Artificial sequence
  SiRNA target sequence
ttattcagagtacgctgctac

SEQ ID NO: 276824 - DNA, 21 bp, Artificial sequence
  SiRNA target sequence
tattcagagtacgctgctact

SEQ ID NO: 276825 - DNA, 21 bp, Artificial sequence
  SiRNA target sequence
attcagagtacgctgctactg

SEQ ID NO: 276826 - DNA, 21 bp, Artificial sequence
  SiRNA target sequence
ttcagagtacgctgctactgc

SEQ ID NO: 276827 - DNA, 21 bp, Artificial sequence
  SiRNA target sequence
tcagagtacgctgctactgcg

SEQ ID NO: 276828 - DNA, 21 bp, Artificial sequence
  SiRNA target sequence
cagagtacgctgctactgcgg

SEQ ID NO: 276829 - DNA, 21 bp, Artificial sequence
  SiRNA target sequence
agagtacgctgctactgcggt

SEQ ID NO: 276830 - DNA, 21 bp, Artificial sequence
  SiRNA target sequence
gagtacgctgctactgcggta

SEQ ID NO: 276831 - DNA, 21 bp, Artificial sequence
  SiRNA target sequence
agtacgctgctactgcggtag

SEQ ID NO: 276832 - DNA, 21 bp, Artificial sequence
  SiRNA target sequence
gtacgctgctactgcggtagc

SEQ ID NO: 276833 - DNA, 21 bp, Artificial sequence
  SiRNA target sequence
tacgctgctactgcggtagcg

SEQ ID NO: 276834 - DNA, 21 bp, Artificial sequence
  SiRNA target sequence
acgctgctactgcggtagcgg

SEQ ID NO: 276835 - DNA, 21 bp, Artificial sequence
  SiRNA target sequence
cgctgctactgcggtagcgga

SEQ ID NO: 276836 - DNA, 21 bp, Artificial sequence
  SiRNA target sequence
gctgctactgcggtagcggac

SEQ ID NO: 276837 - DNA, 21 bp, Artificial sequence
  SiRNA target sequence
ctgctactgcggtagcggaca

SEQ ID NO: 276838 - DNA, 21 bp, Artificial sequence
  SiRNA target sequence
tgctactgcggtagcggacac

SEQ ID NO: 276839 - DNA, 21 bp, Artificial sequence
  SiRNA target sequence
gctactgcggtagcggacaca

SEQ ID NO: 276840 - DNA, 21 bp, Artificial sequence
  SiRNA target sequence
ctactgcggtagcggacacaa

SEQ ID NO: 276841 - DNA, 21 bp, Artificial sequence
  SiRNA target sequence
tactgcggtagcggacacaac

SEQ ID NO: 276842 - DNA, 21 bp, Artificial sequence
  SiRNA target sequence
actgcggtagcggacacaacc

SEQ ID NO: 276843 - DNA, 21 bp, Artificial sequence
  SiRNA target sequence
ctgcggtagcggacacaaccc

SEQ ID NO: 276844 - DNA, 21 bp, Artificial sequence
  SiRNA target sequence
tgcggtagcggacacaaccca

SEQ ID NO: 276845 - DNA, 21 bp, Artificial sequence
  SiRNA target sequence
gcggtagcggacacaacccag

SEQ ID NO: 276846 - DNA, 21 bp, Artificial sequence
  SiRNA target sequence
cggtagcggacacaacccagg

SEQ ID NO: 276847 - DNA, 21 bp, Artificial sequence
  SiRNA target sequence
ggtagcggacacaacccaggt

SEQ ID NO: 276848 - DNA, 21 bp, Artificial sequence
  SiRNA target sequence
gtagcggacacaacccaggtg

SEQ ID NO: 276849 - DNA, 21 bp, Artificial sequence
  SiRNA target sequence
tagcggacacaacccaggtgt

SEQ ID NO: 276850 - DNA, 21 bp, Artificial sequence
  SiRNA target sequence
agcggacacaacccaggtgtt

SEQ ID NO: 276851 - DNA, 21 bp, Artificial sequence
  SiRNA target sequence
gcggacacaacccaggtgttc

SEQ ID NO: 276852 - DNA, 21 bp, Artificial sequence
  SiRNA target sequence
cggacacaacccaggtgttcg

SEQ ID NO: 276853 - DNA, 21 bp, Artificial sequence
  SiRNA target sequence
ggacacaacccaggtgttcgg

SEQ ID NO: 276854 - DNA, 21 bp, Artificial sequence
  SiRNA target sequence
gacacaacccaggtgttcggg

SEQ ID NO: 276855 - DNA, 21 bp, Artificial sequence
  SiRNA target sequence
acacaacccaggtgttcgggt

SEQ ID NO: 276856 - DNA, 21 bp, Artificial sequence
  SiRNA target sequence
cacaacccaggtgttcgggtc

SEQ ID NO: 276857 - DNA, 21 bp, Artificial sequence
  SiRNA target sequence
acaacccaggtgttcgggtct

SEQ ID NO: 276858 - DNA, 21 bp, Artificial sequence
  SiRNA target sequence
caacccaggtgttcgggtctc

SEQ ID NO: 276859 - DNA, 21 bp, Artificial sequence
  SiRNA target sequence
aacccaggtgttcgggtctct

SEQ ID NO: 276860 - DNA, 21 bp, Artificial sequence
  SiRNA target sequence
acccaggtgttcgggtctctg

SEQ ID NO: 276861 - DNA, 21 bp, Artificial sequence
  SiRNA target sequence
cccaggtgttcgggtctctgt

SEQ ID NO: 276862 - DNA, 21 bp, Artificial sequence
  SiRNA target sequence
ccaggtgttcgggtctctgtc

SEQ ID NO: 276863 - DNA, 21 bp, Artificial sequence
  SiRNA target sequence
caggtgttcgggtctctgtct

SEQ ID NO: 276864 - DNA, 21 bp, Artificial sequence
  SiRNA target sequence
aggtgttcgggtctctgtctt

SEQ ID NO: 276865 - DNA, 21 bp, Artificial sequence
  SiRNA target sequence
ggtgttcgggtctctgtctta

SEQ ID NO: 276866 - DNA, 21 bp, Artificial sequence
  SiRNA target sequence
gtgttcgggtctctgtcttag

SEQ ID NO: 276867 - DNA, 21 bp, Artificial sequence
  SiRNA target sequence
tgttcgggtctctgtcttaga

SEQ ID NO: 276868 - DNA, 21 bp, Artificial sequence
  SiRNA target sequence
gttcgggtctctgtcttagaa

SEQ ID NO: 276869 - DNA, 21 bp, Artificial sequence
  SiRNA target sequence
ttcgggtctctgtcttagaaa

SEQ ID NO: 276870 - DNA, 21 bp, Artificial sequence
  SiRNA target sequence
tcgggtctctgtcttagaaac

SEQ ID NO: 276871 - DNA, 21 bp, Artificial sequence
  SiRNA target sequence
cgggtctctgtcttagaaact

SEQ ID NO: 276872 - DNA, 21 bp, Artificial sequence
  SiRNA target sequence
gggtctctgtcttagaaacta

SEQ ID NO: 276873 - DNA, 21 bp, Artificial sequence
  SiRNA target sequence
ggtctctgtcttagaaactat

SEQ ID NO: 276874 - DNA, 21 bp, Artificial sequence
  SiRNA target sequence
gtctctgtcttagaaactata

SEQ ID NO: 276875 - DNA, 21 bp, Artificial sequence
  SiRNA target sequence
tctctgtcttagaaactatat

SEQ ID NO: 276876 - DNA, 21 bp, Artificial sequence
  SiRNA target sequence
ctctgtcttagaaactatatg

SEQ ID NO: 276877 - DNA, 21 bp, Artificial sequence
  SiRNA target sequence
tctgtcttagaaactatatga

SEQ ID NO: 276878 - DNA, 21 bp, Artificial sequence
  SiRNA target sequence
ctgtcttagaaactatatgaa

SEQ ID NO: 276879 - DNA, 21 bp, Artificial sequence
  SiRNA target sequence
tgtcttagaaactatatgaaa

SEQ ID NO: 276880 - DNA, 21 bp, Artificial sequence
  SiRNA target sequence
gtcttagaaactatatgaaag

SEQ ID NO: 276881 - DNA, 21 bp, Artificial sequence
  SiRNA target sequence
tcttagaaactatatgaaagg

SEQ ID NO: 276882 - DNA, 21 bp, Artificial sequence
  SiRNA target sequence
cttagaaactatatgaaaggc

SEQ ID NO: 276883 - DNA, 21 bp, Artificial sequence
  SiRNA target sequence
ttagaaactatatgaaaggcg

SEQ ID NO: 276884 - DNA, 21 bp, Artificial sequence
  SiRNA target sequence
tagaaactatatgaaaggcga

SEQ ID NO: 276885 - DNA, 21 bp, Artificial sequence
  SiRNA target sequence
agaaactatatgaaaggcgaa

SEQ ID NO: 276886 - DNA, 21 bp, Artificial sequence
  SiRNA target sequence
gaaactatatgaaaggcgaaa

SEQ ID NO: 276887 - DNA, 21 bp, Artificial sequence
  SiRNA target sequence
aaactatatgaaaggcgaaag

SEQ ID NO: 276888 - DNA, 21 bp, Artificial sequence
  SiRNA target sequence
aactatatgaaaggcgaaagt

SEQ ID NO: 276889 - DNA, 21 bp, Artificial sequence
  SiRNA target sequence
actatatgaaaggcgaaagtt

SEQ ID NO: 276890 - DNA, 21 bp, Artificial sequence
  SiRNA target sequence
ctatatgaaaggcgaaagttg

SEQ ID NO: 276891 - DNA, 21 bp, Artificial sequence
  SiRNA target sequence
tatatgaaaggcgaaagttgt

SEQ ID NO: 276892 - DNA, 21 bp, Artificial sequence
  SiRNA target sequence
atatgaaaggcgaaagttgtg

SEQ ID NO: 276893 - DNA, 21 bp, Artificial sequence
  SiRNA target sequence
tatgaaaggcgaaagttgtga

SEQ ID NO: 276894 - DNA, 21 bp, Artificial sequence
  SiRNA target sequence
atgaaaggcgaaagttgtgat

SEQ ID NO: 276895 - DNA, 21 bp, Artificial sequence
  SiRNA target sequence
tgaaaggcgaaagttgtgatt

SEQ ID NO: 276896 - DNA, 21 bp, Artificial sequence
  SiRNA target sequence
gaaaggcgaaagttgtgattg

SEQ ID NO: 276897 - DNA, 21 bp, Artificial sequence
  SiRNA target sequence
aaaggcgaaagttgtgattga

SEQ ID NO: 276898 - DNA, 21 bp, Artificial sequence
  SiRNA target sequence
aaggcgaaagttgtgattgaa

SEQ ID NO: 276899 - DNA, 21 bp, Artificial sequence
  SiRNA target sequence
aggcgaaagttgtgattgaac

SEQ ID NO: 276900 - DNA, 21 bp, Artificial sequence
  SiRNA target sequence
ggcgaaagttgtgattgaact

SEQ ID NO: 276901 - DNA, 21 bp, Artificial sequence
  SiRNA target sequence
gcgaaagttgtgattgaactt

SEQ ID NO: 276902 - DNA, 21 bp, Artificial sequence
  SiRNA target sequence
cgaaagttgtgattgaacttt

SEQ ID NO: 276903 - DNA, 21 bp, Artificial sequence
  SiRNA target sequence
gaaagttgtgattgaactttc

SEQ ID NO: 276904 - DNA, 21 bp, Artificial sequence
  SiRNA target sequence
aaagttgtgattgaactttct

SEQ ID NO: 276905 - DNA, 21 bp, Artificial sequence
  SiRNA target sequence
aagttgtgattgaactttcta

SEQ ID NO: 276906 - DNA, 21 bp, Artificial sequence
  SiRNA target sequence
agttgtgattgaactttctaa

SEQ ID NO: 276907 - DNA, 21 bp, Artificial sequence
  SiRNA target sequence
gttgtgattgaactttctaac

SEQ ID NO: 276908 - DNA, 21 bp, Artificial sequence
  SiRNA target sequence
ttgtgattgaactttctaacg

SEQ ID NO: 276909 - DNA, 21 bp, Artificial sequence
  SiRNA target sequence
tgtgattgaactttctaacgt

SEQ ID NO: 276910 - DNA, 21 bp, Artificial sequence
  SiRNA target sequence
gtgattgaactttctaacgtc

SEQ ID NO: 276911 - DNA, 21 bp, Artificial sequence
  SiRNA target sequence
tgattgaactttctaacgtca

SEQ ID NO: 276912 - DNA, 21 bp, Artificial sequence
  SiRNA target sequence
gattgaactttctaacgtcac

SEQ ID NO: 276913 - DNA, 21 bp, Artificial sequence
  SiRNA target sequence
attgaactttctaacgtcact

SEQ ID NO: 276914 - DNA, 21 bp, Artificial sequence
  SiRNA target sequence
ttgaactttctaacgtcactc

SEQ ID NO: 276915 - DNA, 21 bp, Artificial sequence
  SiRNA target sequence
tgaactttctaacgtcactct

SEQ ID NO: 276916 - DNA, 21 bp, Artificial sequence
  SiRNA target sequence
gaactttctaacgtcactctt

SEQ ID NO: 276917 - DNA, 21 bp, Artificial sequence
  SiRNA target sequence
aactttctaacgtcactctta

SEQ ID NO: 276918 - DNA, 21 bp, Artificial sequence
  SiRNA target sequence
actttctaacgtcactcttaa

SEQ ID NO: 276919 - DNA, 21 bp, Artificial sequence
  SiRNA target sequence
ctttctaacgtcactcttaat

SEQ ID NO: 276920 - DNA, 21 bp, Artificial sequence
  SiRNA target sequence
tttctaacgtcactcttaatt

SEQ ID NO: 276921 - DNA, 21 bp, Artificial sequence
  SiRNA target sequence
ttctaacgtcactcttaattg

SEQ ID NO: 276922 - DNA, 21 bp, Artificial sequence
  SiRNA target sequence
tctaacgtcactcttaattgg

SEQ ID NO: 276923 - DNA, 21 bp, Artificial sequence
  SiRNA target sequence
ctaacgtcactcttaattggt

SEQ ID NO: 276924 - DNA, 21 bp, Artificial sequence
  SiRNA target sequence
taacgtcactcttaattggta

SEQ ID NO: 276925 - DNA, 21 bp, Artificial sequence
  SiRNA target sequence
aacgtcactcttaattggtac

SEQ ID NO: 276926 - DNA, 21 bp, Artificial sequence
  SiRNA target sequence
acgtcactcttaattggtacg

SEQ ID NO: 276927 - DNA, 21 bp, Artificial sequence
  SiRNA target sequence
cgtcactcttaattggtacgt

SEQ ID NO: 276928 - DNA, 21 bp, Artificial sequence
  SiRNA target sequence
gtcactcttaattggtacgtg

SEQ ID NO: 276929 - DNA, 21 bp, Artificial sequence
  SiRNA target sequence
tcactcttaattggtacgtgt

SEQ ID NO: 276930 - DNA, 21 bp, Artificial sequence
  SiRNA target sequence
cactcttaattggtacgtgtc

SEQ ID NO: 276931 - DNA, 21 bp, Artificial sequence
  SiRNA target sequence
actcttaattggtacgtgtcg

SEQ ID NO: 276932 - DNA, 21 bp, Artificial sequence
  SiRNA target sequence
ctcttaattggtacgtgtcga

SEQ ID NO: 276933 - DNA, 21 bp, Artificial sequence
  SiRNA target sequence
tcttaattggtacgtgtcgat

SEQ ID NO: 276934 - DNA, 21 bp, Artificial sequence
  SiRNA target sequence
cttaattggtacgtgtcgatt

SEQ ID NO: 276935 - DNA, 21 bp, Artificial sequence
  SiRNA target sequence
ttaattggtacgtgtcgatta

SEQ ID NO: 276936 - DNA, 21 bp, Artificial sequence
  SiRNA target sequence
taattggtacgtgtcgattaa

SEQ ID NO: 276937 - DNA, 21 bp, Artificial sequence
  SiRNA target sequence
aattggtacgtgtcgattaag

SEQ ID NO: 276938 - DNA, 21 bp, Artificial sequence
  SiRNA target sequence
attggtacgtgtcgattaagt

SEQ ID NO: 276939 - DNA, 21 bp, Artificial sequence
  SiRNA target sequence
ttggtacgtgtcgattaagtt

SEQ ID NO: 276940 - DNA, 21 bp, Artificial sequence
  SiRNA target sequence
tggtacgtgtcgattaagttc

SEQ ID NO: 276941 - DNA, 21 bp, Artificial sequence
  SiRNA target sequence
ggtacgtgtcgattaagttca

SEQ ID NO: 276942 - DNA, 21 bp, Artificial sequence
  SiRNA target sequence
gtacgtgtcgattaagttcat

SEQ ID NO: 276943 - DNA, 21 bp, Artificial sequence
  SiRNA target sequence
tacgtgtcgattaagttcata

SEQ ID NO: 276944 - DNA, 21 bp, Artificial sequence
  SiRNA target sequence
acgtgtcgattaagttcatag

SEQ ID NO: 276945 - DNA, 21 bp, Artificial sequence
  SiRNA target sequence
cgtgtcgattaagttcatagc

SEQ ID NO: 276946 - DNA, 21 bp, Artificial sequence
  SiRNA target sequence
gtgtcgattaagttcatagca

SEQ ID NO: 276947 - DNA, 21 bp, Artificial sequence
  SiRNA target sequence
tgtcgattaagttcatagcaa

SEQ ID NO: 276948 - DNA, 21 bp, Artificial sequence
  SiRNA target sequence
gtcgattaagttcatagcaat

SEQ ID NO: 276949 - DNA, 21 bp, Artificial sequence
  SiRNA target sequence
tcgattaagttcatagcaatg

SEQ ID NO: 276950 - DNA, 21 bp, Artificial sequence
  SiRNA target sequence
cgattaagttcatagcaatga

SEQ ID NO: 276951 - DNA, 21 bp, Artificial sequence
  SiRNA target sequence
gattaagttcatagcaatgaa

SEQ ID NO: 276952 - DNA, 21 bp, Artificial sequence
  SiRNA target sequence
attaagttcatagcaatgaat

SEQ ID NO: 276953 - DNA, 21 bp, Artificial sequence
  SiRNA target sequence
ttaagttcatagcaatgaata

SEQ ID NO: 276954 - DNA, 21 bp, Artificial sequence
  SiRNA target sequence
taagttcatagcaatgaatag

SEQ ID NO: 276955 - DNA, 21 bp, Artificial sequence
  SiRNA target sequence
aagttcatagcaatgaatagc

SEQ ID NO: 276956 - DNA, 21 bp, Artificial sequence
  SiRNA target sequence
agttcatagcaatgaatagcc

SEQ ID NO: 276957 - DNA, 21 bp, Artificial sequence
  SiRNA target sequence
gttcatagcaatgaatagcca

SEQ ID NO: 276958 - DNA, 21 bp, Artificial sequence
  SiRNA target sequence
ttcatagcaatgaatagccaa

SEQ ID NO: 276959 - DNA, 21 bp, Artificial sequence
  SiRNA target sequence
tcatagcaatgaatagccaac

SEQ ID NO: 276960 - DNA, 21 bp, Artificial sequence
  SiRNA target sequence
catagcaatgaatagccaacc

SEQ ID NO: 276961 - DNA, 21 bp, Artificial sequence
  SiRNA target sequence
atagcaatgaatagccaaccc

SEQ ID NO: 276962 - DNA, 21 bp, Artificial sequence
  SiRNA target sequence
tagcaatgaatagccaaccct

SEQ ID NO: 276963 - DNA, 21 bp, Artificial sequence
  SiRNA target sequence
agcaatgaatagccaacccta

SEQ ID NO: 276964 - DNA, 21 bp, Artificial sequence
  SiRNA target sequence
gcaatgaatagccaaccctat

SEQ ID NO: 276965 - DNA, 21 bp, Artificial sequence
  SiRNA target sequence
caatgaatagccaaccctata

SEQ ID NO: 276966 - DNA, 21 bp, Artificial sequence
  SiRNA target sequence
aatgaatagccaaccctataa

SEQ ID NO: 276967 - DNA, 21 bp, Artificial sequence
  SiRNA target sequence
atgaatagccaaccctataat

SEQ ID NO: 276968 - DNA, 21 bp, Artificial sequence
  SiRNA target sequence
tgaatagccaaccctataatg

SEQ ID NO: 276969 - DNA, 21 bp, Artificial sequence
  SiRNA target sequence
gaatagccaaccctataatga

SEQ ID NO: 276970 - DNA, 21 bp, Artificial sequence
  SiRNA target sequence
aatagccaaccctataatgat

SEQ ID NO: 276971 - DNA, 21 bp, Artificial sequence
  SiRNA target sequence
atagccaaccctataatgatg

SEQ ID NO: 276972 - DNA, 21 bp, Artificial sequence
  SiRNA target sequence
tagccaaccctataatgatgg

SEQ ID NO: 276973 - DNA, 21 bp, Artificial sequence
  SiRNA target sequence
agccaaccctataatgatgga

SEQ ID NO: 276974 - DNA, 21 bp, Artificial sequence
  SiRNA target sequence
gccaaccctataatgatggaa

SEQ ID NO: 276975 - DNA, 21 bp, Artificial sequence
  SiRNA target sequence
ccaaccctataatgatggaac

SEQ ID NO: 276976 - DNA, 21 bp, Artificial sequence
  SiRNA target sequence
caaccctataatgatggaacc

SEQ ID NO: 276977 - DNA, 21 bp, Artificial sequence
  SiRNA target sequence
aaccctataatgatggaacca

SEQ ID NO: 276978 - DNA, 21 bp, Artificial sequence
  SiRNA target sequence
accctataatgatggaaccaa

SEQ ID NO: 276979 - DNA, 21 bp, Artificial sequence
  SiRNA target sequence
ccctataatgatggaaccaat

SEQ ID NO: 276980 - DNA, 21 bp, Artificial sequence
  SiRNA target sequence
cctataatgatggaaccaatt

SEQ ID NO: 276981 - DNA, 21 bp, Artificial sequence
  SiRNA target sequence
ctataatgatggaaccaattt

SEQ ID NO: 276982 - DNA, 21 bp, Artificial sequence
  SiRNA target sequence
tataatgatggaaccaattta

SEQ ID NO: 276983 - DNA, 21 bp, Artificial sequence
  SiRNA target sequence
ataatgatggaaccaatttac

SEQ ID NO: 276984 - DNA, 21 bp, Artificial sequence
  SiRNA target sequence
taatgatggaaccaatttacg

SEQ ID NO: 276985 - DNA, 21 bp, Artificial sequence
  SiRNA target sequence
aatgatggaaccaatttacgc

SEQ ID NO: 276986 - DNA, 21 bp, Artificial sequence
  SiRNA target sequence
atgatggaaccaatttacgca

SEQ ID NO: 276987 - DNA, 21 bp, Artificial sequence
  SiRNA target sequence
tgatggaaccaatttacgcaa

SEQ ID NO: 276988 - DNA, 21 bp, Artificial sequence
  SiRNA target sequence
gatggaaccaatttacgcaaa

SEQ ID NO: 276989 - DNA, 21 bp, Artificial sequence
  SiRNA target sequence
atggaaccaatttacgcaaat

SEQ ID NO: 276990 - DNA, 21 bp, Artificial sequence
  SiRNA target sequence
tggaaccaatttacgcaaata

SEQ ID NO: 276991 - DNA, 21 bp, Artificial sequence
  SiRNA target sequence
ggaaccaatttacgcaaatag

SEQ ID NO: 276992 - DNA, 21 bp, Artificial sequence
  SiRNA target sequence
gaaccaatttacgcaaataga

SEQ ID NO: 276993 - DNA, 21 bp, Artificial sequence
  SiRNA target sequence
aaccaatttacgcaaatagac

SEQ ID NO: 276994 - DNA, 21 bp, Artificial sequence
  SiRNA target sequence
accaatttacgcaaatagacc

SEQ ID NO: 276995 - DNA, 21 bp, Artificial sequence
  SiRNA target sequence
ccaatttacgcaaatagacct

SEQ ID NO: 276996 - DNA, 21 bp, Artificial sequence
  SiRNA target sequence
caatttacgcaaatagaccta

SEQ ID NO: 276997 - DNA, 21 bp, Artificial sequence
  SiRNA target sequence
aatttacgcaaatagacctaa

SEQ ID NO: 276998 - DNA, 21 bp, Artificial sequence
  SiRNA target sequence
atttacgcaaatagacctaat

SEQ ID NO: 276999 - DNA, 21 bp, Artificial sequence
  SiRNA target sequence
tttacgcaaatagacctaatg

SEQ ID NO: 277000 - DNA, 21 bp, Artificial sequence
  SiRNA target sequence
ttacgcaaatagacctaatgt

SEQ ID NO: 277001 - DNA, 21 bp, Artificial sequence
  SiRNA target sequence
tacgcaaatagacctaatgta

SEQ ID NO: 277002 - DNA, 21 bp, Artificial sequence
  SiRNA target sequence
acgcaaatagacctaatgtat

SEQ ID NO: 277003 - DNA, 21 bp, Artificial sequence
  SiRNA target sequence
cgcaaatagacctaatgtata

SEQ ID NO: 277004 - DNA, 21 bp, Artificial sequence
  SiRNA target sequence
gcaaatagacctaatgtatac

SEQ ID NO: 277005 - DNA, 21 bp, Artificial sequence
  SiRNA target sequence
caaatagacctaatgtatact

SEQ ID NO: 277006 - DNA, 21 bp, Artificial sequence
  SiRNA target sequence
aaatagacctaatgtatacta

SEQ ID NO: 277007 - DNA, 21 bp, Artificial sequence
  SiRNA target sequence
aatagacctaatgtatactat

SEQ ID NO: 277008 - DNA, 21 bp, Artificial sequence
  SiRNA target sequence
atagacctaatgtatactatt

SEQ ID NO: 277009 - DNA, 21 bp, Artificial sequence
  SiRNA target sequence
tagacctaatgtatactatta

SEQ ID NO: 277010 - DNA, 21 bp, Artificial sequence
  SiRNA target sequence
agacctaatgtatactattat

SEQ ID NO: 277011 - DNA, 21 bp, Artificial sequence
  SiRNA target sequence
gacctaatgtatactattatc

SEQ ID NO: 277012 - DNA, 21 bp, Artificial sequence
  SiRNA target sequence
acctaatgtatactattatcc

SEQ ID NO: 277013 - DNA, 21 bp, Artificial sequence
  SiRNA target sequence
cctaatgtatactattatcct

SEQ ID NO: 277014 - DNA, 21 bp, Artificial sequence
  SiRNA target sequence
ctaatgtatactattatcctt

SEQ ID NO: 277015 - DNA, 21 bp, Artificial sequence
  SiRNA target sequence
taatgtatactattatccttt

SEQ ID NO: 277016 - DNA, 21 bp, Artificial sequence
  SiRNA target sequence
aatgtatactattatcctttc

SEQ ID NO: 277017 - DNA, 21 bp, Artificial sequence
  SiRNA target sequence
atgtatactattatcctttca

SEQ ID NO: 277018 - DNA, 21 bp, Artificial sequence
  SiRNA target sequence
tgtatactattatcctttcaa

SEQ ID NO: 277019 - DNA, 21 bp, Artificial sequence
  SiRNA target sequence
gtatactattatcctttcaaa

SEQ ID NO: 277020 - DNA, 21 bp, Artificial sequence
  SiRNA target sequence
tatactattatcctttcaaac

SEQ ID NO: 277021 - DNA, 21 bp, Artificial sequence
  SiRNA target sequence
atactattatcctttcaaaca

SEQ ID NO: 277022 - DNA, 21 bp, Artificial sequence
  SiRNA target sequence
tactattatcctttcaaacac

SEQ ID NO: 277023 - DNA, 21 bp, Artificial sequence
  SiRNA target sequence
actattatcctttcaaacaca

SEQ ID NO: 277024 - DNA, 21 bp, Artificial sequence
  SiRNA target sequence
ctattatcctttcaaacacaa

SEQ ID NO: 277025 - DNA, 21 bp, Artificial sequence
  SiRNA target sequence
tattatcctttcaaacacaac

SEQ ID NO: 277026 - DNA, 21 bp, Artificial sequence
  SiRNA target sequence
attatcctttcaaacacaact

SEQ ID NO: 277027 - DNA, 21 bp, Artificial sequence
  SiRNA target sequence
ttatcctttcaaacacaactg

SEQ ID NO: 277028 - DNA, 21 bp, Artificial sequence
  SiRNA target sequence
tatcctttcaaacacaactgg

SEQ ID NO: 277029 - DNA, 21 bp, Artificial sequence
  SiRNA target sequence
atcctttcaaacacaactggg

SEQ ID NO: 277030 - DNA, 21 bp, Artificial sequence
  SiRNA target sequence
tcctttcaaacacaactggga

SEQ ID NO: 277031 - DNA, 21 bp, Artificial sequence
  SiRNA target sequence
cctttcaaacacaactgggaa

SEQ ID NO: 277032 - DNA, 21 bp, Artificial sequence
  SiRNA target sequence
ctttcaaacacaactgggaac

SEQ ID NO: 277033 - DNA, 21 bp, Artificial sequence
  SiRNA target sequence
tttcaaacacaactgggaacc

SEQ ID NO: 277034 - DNA, 21 bp, Artificial sequence
  SiRNA target sequence
ttcaaacacaactgggaacca

SEQ ID NO: 277035 - DNA, 21 bp, Artificial sequence
  SiRNA target sequence
tcaaacacaactgggaaccaa

SEQ ID NO: 277036 - DNA, 21 bp, Artificial sequence
  SiRNA target sequence
caaacacaactgggaaccaag

SEQ ID NO: 277037 - DNA, 21 bp, Artificial sequence
  SiRNA target sequence
aaacacaactgggaaccaaga

SEQ ID NO: 277038 - DNA, 21 bp, Artificial sequence
  SiRNA target sequence
aacacaactgggaaccaagaa

SEQ ID NO: 277039 - DNA, 21 bp, Artificial sequence
  SiRNA target sequence
acacaactgggaaccaagaat

SEQ ID NO: 277040 - DNA, 21 bp, Artificial sequence
  SiRNA target sequence
cacaactgggaaccaagaatc

SEQ ID NO: 277041 - DNA, 21 bp, Artificial sequence
  SiRNA target sequence
acaactgggaaccaagaatct

SEQ ID NO: 277042 - DNA, 21 bp, Artificial sequence
  SiRNA target sequence
caactgggaaccaagaatctt

SEQ ID NO: 277043 - DNA, 21 bp, Artificial sequence
  SiRNA target sequence
aactgggaaccaagaatcttg

SEQ ID NO: 277044 - DNA, 21 bp, Artificial sequence
  SiRNA target sequence
actgggaaccaagaatcttga

SEQ ID NO: 277045 - DNA, 21 bp, Artificial sequence
  SiRNA target sequence
ctgggaaccaagaatcttgat

SEQ ID NO: 277046 - DNA, 21 bp, Artificial sequence
  SiRNA target sequence
tgggaaccaagaatcttgatc

SEQ ID NO: 277047 - DNA, 21 bp, Artificial sequence
  SiRNA target sequence
gggaaccaagaatcttgatcc

SEQ ID NO: 277048 - DNA, 21 bp, Artificial sequence
  SiRNA target sequence
ggaaccaagaatcttgatcct

SEQ ID NO: 277049 - DNA, 21 bp, Artificial sequence
  SiRNA target sequence
gaaccaagaatcttgatcctt

SEQ ID NO: 277050 - DNA, 21 bp, Artificial sequence
  SiRNA target sequence
aaccaagaatcttgatcctta

SEQ ID NO: 277051 - DNA, 21 bp, Artificial sequence
  SiRNA target sequence
accaagaatcttgatccttac

SEQ ID NO: 277052 - DNA, 21 bp, Artificial sequence
  SiRNA target sequence
ccaagaatcttgatccttact

SEQ ID NO: 277053 - DNA, 21 bp, Artificial sequence
  SiRNA target sequence
caagaatcttgatccttactg

SEQ ID NO: 277054 - DNA, 21 bp, Artificial sequence
  SiRNA target sequence
aagaatcttgatccttactga

SEQ ID NO: 277055 - DNA, 21 bp, Artificial sequence
  SiRNA target sequence
agaatcttgatccttactgat

SEQ ID NO: 277056 - DNA, 21 bp, Artificial sequence
  SiRNA target sequence
gaatcttgatccttactgata

SEQ ID NO: 277057 - DNA, 21 bp, Artificial sequence
  SiRNA target sequence
aatcttgatccttactgataa

SEQ ID NO: 277058 - DNA, 21 bp, Artificial sequence
  SiRNA target sequence
atcttgatccttactgataaa

SEQ ID NO: 277059 - DNA, 21 bp, Artificial sequence
  SiRNA target sequence
tcttgatccttactgataaag

SEQ ID NO: 277060 - DNA, 21 bp, Artificial sequence
  SiRNA target sequence
cttgatccttactgataaaga

SEQ ID NO: 277061 - DNA, 21 bp, Artificial sequence
  SiRNA target sequence
ttgatccttactgataaagaa

SEQ ID NO: 277062 - DNA, 21 bp, Artificial sequence
  SiRNA target sequence
tgatccttactgataaagaag

SEQ ID NO: 277063 - DNA, 21 bp, Artificial sequence
  SiRNA target sequence
gatccttactgataaagaagg

SEQ ID NO: 277064 - DNA, 21 bp, Artificial sequence
  SiRNA target sequence
atccttactgataaagaagga

SEQ ID NO: 277065 - DNA, 21 bp, Artificial sequence
  SiRNA target sequence
tccttactgataaagaaggac

SEQ ID NO: 277066 - DNA, 21 bp, Artificial sequence
  SiRNA target sequence
ccttactgataaagaaggaca

SEQ ID NO: 277067 - DNA, 21 bp, Artificial sequence
  SiRNA target sequence
cttactgataaagaaggacaa

SEQ ID NO: 277068 - DNA, 21 bp, Artificial sequence
  SiRNA target sequence
ttactgataaagaaggacaag

SEQ ID NO: 277069 - DNA, 21 bp, Artificial sequence
  SiRNA target sequence
tactgataaagaaggacaaga

SEQ ID NO: 277070 - DNA, 21 bp, Artificial sequence
  SiRNA target sequence
actgataaagaaggacaagag

SEQ ID NO: 277071 - DNA, 21 bp, Artificial sequence
  SiRNA target sequence
ctgataaagaaggacaagaga

SEQ ID NO: 277072 - DNA, 21 bp, Artificial sequence
  SiRNA target sequence
tgataaagaaggacaagagag

SEQ ID NO: 277073 - DNA, 21 bp, Artificial sequence
  SiRNA target sequence
gataaagaaggacaagagagc

SEQ ID NO: 277074 - DNA, 21 bp, Artificial sequence
  SiRNA target sequence
ataaagaaggacaagagagcg

SEQ ID NO: 277075 - DNA, 21 bp, Artificial sequence
  SiRNA target sequence
taaagaaggacaagagagcgt

SEQ ID NO: 277076 - DNA, 21 bp, Artificial sequence
  SiRNA target sequence
aaagaaggacaagagagcgtg

SEQ ID NO: 277077 - DNA, 21 bp, Artificial sequence
  SiRNA target sequence
aagaaggacaagagagcgtga

SEQ ID NO: 277078 - DNA, 21 bp, Artificial sequence
  SiRNA target sequence
agaaggacaagagagcgtgaa

SEQ ID NO: 277079 - DNA, 21 bp, Artificial sequence
  SiRNA target sequence
gaaggacaagagagcgtgaac

SEQ ID NO: 277080 - DNA, 21 bp, Artificial sequence
  SiRNA target sequence
aaggacaagagagcgtgaaca

SEQ ID NO: 277081 - DNA, 21 bp, Artificial sequence
  SiRNA target sequence
aggacaagagagcgtgaacaa

SEQ ID NO: 277082 - DNA, 21 bp, Artificial sequence
  SiRNA target sequence
ggacaagagagcgtgaacaag

SEQ ID NO: 277083 - DNA, 21 bp, Artificial sequence
  SiRNA target sequence
gacaagagagcgtgaacaaga

SEQ ID NO: 277084 - DNA, 21 bp, Artificial sequence
  SiRNA target sequence
acaagagagcgtgaacaagaa

SEQ ID NO: 277085 - DNA, 21 bp, Artificial sequence
  SiRNA target sequence
caagagagcgtgaacaagaag

SEQ ID NO: 277086 - DNA, 21 bp, Artificial sequence
  SiRNA target sequence
aagagagcgtgaacaagaagt

SEQ ID NO: 277087 - DNA, 21 bp, Artificial sequence
  SiRNA target sequence
agagagcgtgaacaagaagtt

SEQ ID NO: 277088 - DNA, 21 bp, Artificial sequence
  SiRNA target sequence
gagagcgtgaacaagaagttt

SEQ ID NO: 277089 - DNA, 21 bp, Artificial sequence
  SiRNA target sequence
agagcgtgaacaagaagtttc

SEQ ID NO: 277090 - DNA, 21 bp, Artificial sequence
  SiRNA target sequence
gagcgtgaacaagaagtttct

SEQ ID NO: 277091 - DNA, 21 bp, Artificial sequence
  SiRNA target sequence
agcgtgaacaagaagtttctg

SEQ ID NO: 277092 - DNA, 21 bp, Artificial sequence
  SiRNA target sequence
gcgtgaacaagaagtttctga

SEQ ID NO: 277093 - DNA, 21 bp, Artificial sequence
  SiRNA target sequence
cgtgaacaagaagtttctgag

SEQ ID NO: 277094 - DNA, 21 bp, Artificial sequence
  SiRNA target sequence
gtgaacaagaagtttctgaga

SEQ ID NO: 277095 - DNA, 21 bp, Artificial sequence
  SiRNA target sequence
tgaacaagaagtttctgagaa

SEQ ID NO: 277096 - DNA, 21 bp, Artificial sequence
  SiRNA target sequence
gaacaagaagtttctgagaaa

SEQ ID NO: 277097 - DNA, 21 bp, Artificial sequence
  SiRNA target sequence
aacaagaagtttctgagaaaa

SEQ ID NO: 277098 - DNA, 21 bp, Artificial sequence
  SiRNA target sequence
acaagaagtttctgagaaaat

SEQ ID NO: 277099 - DNA, 21 bp, Artificial sequence
  SiRNA target sequence
caagaagtttctgagaaaatt

SEQ ID NO: 277100 - DNA, 21 bp, Artificial sequence
  SiRNA target sequence
aagaagtttctgagaaaattc

SEQ ID NO: 277101 - DNA, 21 bp, Artificial sequence
  SiRNA target sequence
agaagtttctgagaaaattct

SEQ ID NO: 277102 - DNA, 21 bp, Artificial sequence
  SiRNA target sequence
gaagtttctgagaaaattctc

SEQ ID NO: 277103 - DNA, 21 bp, Artificial sequence
  SiRNA target sequence
aagtttctgagaaaattctct

SEQ ID NO: 277104 - DNA, 21 bp, Artificial sequence
  SiRNA target sequence
agtttctgagaaaattctcta

SEQ ID NO: 277105 - DNA, 21 bp, Artificial sequence
  SiRNA target sequence
gtttctgagaaaattctctaa

SEQ ID NO: 277106 - DNA, 21 bp, Artificial sequence
  SiRNA target sequence
tttctgagaaaattctctaaa

SEQ ID NO: 277107 - DNA, 21 bp, Artificial sequence
  SiRNA target sequence
ttctgagaaaattctctaaac

SEQ ID NO: 277108 - DNA, 21 bp, Artificial sequence
  SiRNA target sequence
tctgagaaaattctctaaact

SEQ ID NO: 277109 - DNA, 21 bp, Artificial sequence
  SiRNA target sequence
ctgagaaaattctctaaactt

SEQ ID NO: 277110 - DNA, 21 bp, Artificial sequence
  SiRNA target sequence
tgagaaaattctctaaacttc

SEQ ID NO: 277111 - DNA, 21 bp, Artificial sequence
  SiRNA target sequence
gagaaaattctctaaacttcg

SEQ ID NO: 277112 - DNA, 21 bp, Artificial sequence
  SiRNA target sequence
agaaaattctctaaacttcgt

SEQ ID NO: 277113 - DNA, 21 bp, Artificial sequence
  SiRNA target sequence
gaaaattctctaaacttcgta

SEQ ID NO: 277114 - DNA, 21 bp, Artificial sequence
  SiRNA target sequence
aaaattctctaaacttcgtaa

SEQ ID NO: 277115 - DNA, 21 bp, Artificial sequence
  SiRNA target sequence
aaattctctaaacttcgtaat

SEQ ID NO: 277116 - DNA, 21 bp, Artificial sequence
  SiRNA target sequence
aattctctaaacttcgtaatt

SEQ ID NO: 277117 - DNA, 21 bp, Artificial sequence
  SiRNA target sequence
attctctaaacttcgtaattt

SEQ ID NO: 277118 - DNA, 21 bp, Artificial sequence
  SiRNA target sequence
ttctctaaacttcgtaatttg

SEQ ID NO: 277119 - DNA, 21 bp, Artificial sequence
  SiRNA target sequence
tctctaaacttcgtaatttgt

SEQ ID NO: 277120 - DNA, 21 bp, Artificial sequence
  SiRNA target sequence
ctctaaacttcgtaatttgtg

SEQ ID NO: 277121 - DNA, 21 bp, Artificial sequence
  SiRNA target sequence
tctaaacttcgtaatttgtgt

SEQ ID NO: 277122 - DNA, 21 bp, Artificial sequence
  SiRNA target sequence
ctaaacttcgtaatttgtgtt

SEQ ID NO: 277123 - DNA, 21 bp, Artificial sequence
  SiRNA target sequence
taaacttcgtaatttgtgttt

SEQ ID NO: 277124 - DNA, 21 bp, Artificial sequence
  SiRNA target sequence
aaacttcgtaatttgtgtttg

SEQ ID NO: 277125 - DNA, 21 bp, Artificial sequence
  SiRNA target sequence
aacttcgtaatttgtgtttgc

SEQ ID NO: 277126 - DNA, 21 bp, Artificial sequence
  SiRNA target sequence
acttcgtaatttgtgtttgcg

SEQ ID NO: 277127 - DNA, 21 bp, Artificial sequence
  SiRNA target sequence
cttcgtaatttgtgtttgcgc

SEQ ID NO: 277128 - DNA, 21 bp, Artificial sequence
  SiRNA target sequence
ttcgtaatttgtgtttgcgcc

SEQ ID NO: 277129 - DNA, 21 bp, Artificial sequence
  SiRNA target sequence
tcgtaatttgtgtttgcgcct

SEQ ID NO: 277130 - DNA, 21 bp, Artificial sequence
  SiRNA target sequence
cgtaatttgtgtttgcgcctg

SEQ ID NO: 277131 - DNA, 21 bp, Artificial sequence
  SiRNA target sequence
gtaatttgtgtttgcgcctgc

SEQ ID NO: 277132 - DNA, 21 bp, Artificial sequence
  SiRNA target sequence
taatttgtgtttgcgcctgca

SEQ ID NO: 277133 - DNA, 21 bp, Artificial sequence
  SiRNA target sequence
aatttgtgtttgcgcctgcaa

SEQ ID NO: 277134 - DNA, 21 bp, Artificial sequence
  SiRNA target sequence
atttgtgtttgcgcctgcaaa

SEQ ID NO: 277135 - DNA, 21 bp, Artificial sequence
  SiRNA target sequence
tttgtgtttgcgcctgcaaaa

SEQ ID NO: 277136 - DNA, 21 bp, Artificial sequence
  SiRNA target sequence
ttgtgtttgcgcctgcaaaag

SEQ ID NO: 277137 - DNA, 21 bp, Artificial sequence
  SiRNA target sequence
tgtgtttgcgcctgcaaaagg

SEQ ID NO: 277138 - DNA, 21 bp, Artificial sequence
  SiRNA target sequence
gtgtttgcgcctgcaaaagga

SEQ ID NO: 277139 - DNA, 21 bp, Artificial sequence
  SiRNA target sequence
tgtttgcgcctgcaaaaggac

SEQ ID NO: 277140 - DNA, 21 bp, Artificial sequence
  SiRNA target sequence
gtttgcgcctgcaaaaggaca

SEQ ID NO: 277141 - DNA, 21 bp, Artificial sequence
  SiRNA target sequence
tttgcgcctgcaaaaggacac

SEQ ID NO: 277142 - DNA, 21 bp, Artificial sequence
  SiRNA target sequence
ttgcgcctgcaaaaggacact

SEQ ID NO: 277143 - DNA, 21 bp, Artificial sequence
  SiRNA target sequence
tgcgcctgcaaaaggacacta

SEQ ID NO: 277144 - DNA, 21 bp, Artificial sequence
  SiRNA target sequence
gcgcctgcaaaaggacactac

SEQ ID NO: 277145 - DNA, 21 bp, Artificial sequence
  SiRNA target sequence
cgcctgcaaaaggacactaca

SEQ ID NO: 277146 - DNA, 21 bp, Artificial sequence
  SiRNA target sequence
gcctgcaaaaggacactacat

SEQ ID NO: 277147 - DNA, 21 bp, Artificial sequence
  SiRNA target sequence
cctgcaaaaggacactacatt

SEQ ID NO: 277148 - DNA, 21 bp, Artificial sequence
  SiRNA target sequence
ctgcaaaaggacactacattt

SEQ ID NO: 277149 - DNA, 21 bp, Artificial sequence
  SiRNA target sequence
tgcaaaaggacactacatttt

SEQ ID NO: 277150 - DNA, 21 bp, Artificial sequence
  SiRNA target sequence
gcaaaaggacactacattttg

SEQ ID NO: 277151 - DNA, 21 bp, Artificial sequence
  SiRNA target sequence
caaaaggacactacattttgg

SEQ ID NO: 277152 - DNA, 21 bp, Artificial sequence
  SiRNA target sequence
aaaaggacactacattttgga

SEQ ID NO: 277153 - DNA, 21 bp, Artificial sequence
  SiRNA target sequence
aaaggacactacattttggaa

SEQ ID NO: 277154 - DNA, 21 bp, Artificial sequence
  SiRNA target sequence
aaggacactacattttggaaa

SEQ ID NO: 277155 - DNA, 21 bp, Artificial sequence
  SiRNA target sequence
aggacactacattttggaaaa

SEQ ID NO: 277156 - DNA, 21 bp, Artificial sequence
  SiRNA target sequence
ggacactacattttggaaaaa

SEQ ID NO: 277157 - DNA, 21 bp, Artificial sequence
  SiRNA target sequence
gacactacattttggaaaaat

SEQ ID NO: 277158 - DNA, 21 bp, Artificial sequence
  SiRNA target sequence
acactacattttggaaaaata

SEQ ID NO: 277159 - DNA, 21 bp, Artificial sequence
  SiRNA target sequence
cactacattttggaaaaatac

SEQ ID NO: 277160 - DNA, 21 bp, Artificial sequence
  SiRNA target sequence
actacattttggaaaaatact

SEQ ID NO: 277161 - DNA, 21 bp, Artificial sequence
  SiRNA target sequence
ctacattttggaaaaatactg

SEQ ID NO: 277162 - DNA, 21 bp, Artificial sequence
  SiRNA target sequence
tacattttggaaaaatactgc

SEQ ID NO: 277163 - DNA, 21 bp, Artificial sequence
  SiRNA target sequence
acattttggaaaaatactgct

SEQ ID NO: 277164 - DNA, 21 bp, Artificial sequence
  SiRNA target sequence
cattttggaaaaatactgctg

SEQ ID NO: 277165 - DNA, 21 bp, Artificial sequence
  SiRNA target sequence
attttggaaaaatactgctgg

SEQ ID NO: 277166 - DNA, 21 bp, Artificial sequence
  SiRNA target sequence
ttttggaaaaatactgctggt

SEQ ID NO: 277167 - DNA, 21 bp, Artificial sequence
  SiRNA target sequence
tttggaaaaatactgctggta

SEQ ID NO: 277168 - DNA, 21 bp, Artificial sequence
  SiRNA target sequence
ttggaaaaatactgctggtag

SEQ ID NO: 277169 - DNA, 21 bp, Artificial sequence
  SiRNA target sequence
tggaaaaatactgctggtaga

SEQ ID NO: 277170 - DNA, 21 bp, Artificial sequence
  SiRNA target sequence
ggaaaaatactgctggtagac

SEQ ID NO: 277171 - DNA, 21 bp, Artificial sequence
  SiRNA target sequence
gaaaaatactgctggtagact

SEQ ID NO: 277172 - DNA, 21 bp, Artificial sequence
  SiRNA target sequence
aaaaatactgctggtagactg

SEQ ID NO: 277173 - DNA, 21 bp, Artificial sequence
  SiRNA target sequence
aaaatactgctggtagactgg

SEQ ID NO: 277174 - DNA, 21 bp, Artificial sequence
  SiRNA target sequence
aaatactgctggtagactgga

SEQ ID NO: 277175 - DNA, 21 bp, Artificial sequence
  SiRNA target sequence
aatactgctggtagactggat

SEQ ID NO: 277176 - DNA, 21 bp, Artificial sequence
  SiRNA target sequence
atactgctggtagactggata

SEQ ID NO: 277177 - DNA, 21 bp, Artificial sequence
  SiRNA target sequence
tactgctggtagactggatat

SEQ ID NO: 277178 - DNA, 21 bp, Artificial sequence
  SiRNA target sequence
actgctggtagactggatatg

SEQ ID NO: 277179 - DNA, 21 bp, Artificial sequence
  SiRNA target sequence
ctgctggtagactggatatga

SEQ ID NO: 277180 - DNA, 21 bp, Artificial sequence
  SiRNA target sequence
tgctggtagactggatatgat

SEQ ID NO: 277181 - DNA, 21 bp, Artificial sequence
  SiRNA target sequence
gctggtagactggatatgatc

SEQ ID NO: 277182 - DNA, 21 bp, Artificial sequence
  SiRNA target sequence
ctggtagactggatatgatcc

SEQ ID NO: 277183 - DNA, 21 bp, Artificial sequence
  SiRNA target sequence
tggtagactggatatgatcca

SEQ ID NO: 277184 - DNA, 21 bp, Artificial sequence
  SiRNA target sequence
ggtagactggatatgatccag

SEQ ID NO: 277185 - DNA, 21 bp, Artificial sequence
  SiRNA target sequence
gtagactggatatgatccagg

SEQ ID NO: 277186 - DNA, 21 bp, Artificial sequence
  SiRNA target sequence
tagactggatatgatccagga

SEQ ID NO: 277187 - DNA, 21 bp, Artificial sequence
  SiRNA target sequence
agactggatatgatccaggat

SEQ ID NO: 277188 - DNA, 21 bp, Artificial sequence
  SiRNA target sequence
gactggatatgatccaggatg

SEQ ID NO: 277189 - DNA, 21 bp, Artificial sequence
  SiRNA target sequence
actggatatgatccaggatga

SEQ ID NO: 277190 - DNA, 21 bp, Artificial sequence
  SiRNA target sequence
ctggatatgatccaggatgac

SEQ ID NO: 277191 - DNA, 21 bp, Artificial sequence
  SiRNA target sequence
tggatatgatccaggatgaca

SEQ ID NO: 277192 - DNA, 21 bp, Artificial sequence
  SiRNA target sequence
ggatatgatccaggatgacat

SEQ ID NO: 277193 - DNA, 21 bp, Artificial sequence
  SiRNA target sequence
gatatgatccaggatgacatt

SEQ ID NO: 277194 - DNA, 21 bp, Artificial sequence
  SiRNA target sequence
atatgatccaggatgacattg

SEQ ID NO: 277195 - DNA, 21 bp, Artificial sequence
  SiRNA target sequence
tatgatccaggatgacattga

SEQ ID NO: 277196 - DNA, 21 bp, Artificial sequence
  SiRNA target sequence
atgatccaggatgacattgaa

SEQ ID NO: 277197 - DNA, 21 bp, Artificial sequence
  SiRNA target sequence
tgatccaggatgacattgaaa

SEQ ID NO: 277198 - DNA, 21 bp, Artificial sequence
  SiRNA target sequence
gatccaggatgacattgaaag

SEQ ID NO: 277199 - DNA, 21 bp, Artificial sequence
  SiRNA target sequence
atccaggatgacattgaaagt

SEQ ID NO: 277200 - DNA, 21 bp, Artificial sequence
  SiRNA target sequence
tccaggatgacattgaaagta

SEQ ID NO: 277201 - DNA, 21 bp, Artificial sequence
  SiRNA target sequence
ccaggatgacattgaaagtat

SEQ ID NO: 277202 - DNA, 21 bp, Artificial sequence
  SiRNA target sequence
caggatgacattgaaagtatg

SEQ ID NO: 277203 - DNA, 21 bp, Artificial sequence
  SiRNA target sequence
aggatgacattgaaagtatgg

SEQ ID NO: 277204 - DNA, 21 bp, Artificial sequence
  SiRNA target sequence
ggatgacattgaaagtatggt

SEQ ID NO: 277205 - DNA, 21 bp, Artificial sequence
  SiRNA target sequence
gatgacattgaaagtatggtt

SEQ ID NO: 277206 - DNA, 21 bp, Artificial sequence
  SiRNA target sequence
atgacattgaaagtatggttg

SEQ ID NO: 277207 - DNA, 21 bp, Artificial sequence
  SiRNA target sequence
tgacattgaaagtatggttgc

SEQ ID NO: 277208 - DNA, 21 bp, Artificial sequence
  SiRNA target sequence
gacattgaaagtatggttgct

SEQ ID NO: 277209 - DNA, 21 bp, Artificial sequence
  SiRNA target sequence
acattgaaagtatggttgctc

SEQ ID NO: 277210 - DNA, 21 bp, Artificial sequence
  SiRNA target sequence
cattgaaagtatggttgctca

SEQ ID NO: 277211 - DNA, 21 bp, Artificial sequence
  SiRNA target sequence
attgaaagtatggttgctcaa

SEQ ID NO: 277212 - DNA, 21 bp, Artificial sequence
  SiRNA target sequence
ttgaaagtatggttgctcaaa

SEQ ID NO: 277213 - DNA, 21 bp, Artificial sequence
  SiRNA target sequence
tgaaagtatggttgctcaaag

SEQ ID NO: 277214 - DNA, 21 bp, Artificial sequence
  SiRNA target sequence
gaaagtatggttgctcaaagt

SEQ ID NO: 277215 - DNA, 21 bp, Artificial sequence
  SiRNA target sequence
aaagtatggttgctcaaagtg

SEQ ID NO: 277216 - DNA, 21 bp, Artificial sequence
  SiRNA target sequence
aagtatggttgctcaaagtgg

SEQ ID NO: 277217 - DNA, 21 bp, Artificial sequence
  SiRNA target sequence
agtatggttgctcaaagtggc

SEQ ID NO: 277218 - DNA, 21 bp, Artificial sequence
  SiRNA target sequence
gtatggttgctcaaagtggcc

SEQ ID NO: 277219 - DNA, 21 bp, Artificial sequence
  SiRNA target sequence
tatggttgctcaaagtggccc

SEQ ID NO: 277220 - DNA, 21 bp, Artificial sequence
  SiRNA target sequence
atggttgctcaaagtggccct

SEQ ID NO: 277221 - DNA, 21 bp, Artificial sequence
  SiRNA target sequence
tggttgctcaaagtggccctg

SEQ ID NO: 277222 - DNA, 21 bp, Artificial sequence
  SiRNA target sequence
ggttgctcaaagtggccctgt

SEQ ID NO: 277223 - DNA, 21 bp, Artificial sequence
  SiRNA target sequence
gttgctcaaagtggccctgtt

SEQ ID NO: 277224 - DNA, 21 bp, Artificial sequence
  SiRNA target sequence
ttgctcaaagtggccctgtta

SEQ ID NO: 277225 - DNA, 21 bp, Artificial sequence
  SiRNA target sequence
tgctcaaagtggccctgttat

SEQ ID NO: 277226 - DNA, 21 bp, Artificial sequence
  SiRNA target sequence
gctcaaagtggccctgttatg

SEQ ID NO: 277227 - DNA, 21 bp, Artificial sequence
  SiRNA target sequence
ctcaaagtggccctgttatga

SEQ ID NO: 277228 - DNA, 21 bp, Artificial sequence
  SiRNA target sequence
tcaaagtggccctgttatgag

SEQ ID NO: 277229 - DNA, 21 bp, Artificial sequence
  SiRNA target sequence
caaagtggccctgttatgagt

SEQ ID NO: 277230 - DNA, 21 bp, Artificial sequence
  SiRNA target sequence
aaagtggccctgttatgagtc

SEQ ID NO: 277231 - DNA, 21 bp, Artificial sequence
  SiRNA target sequence
aagtggccctgttatgagtca

SEQ ID NO: 277232 - DNA, 21 bp, Artificial sequence
  SiRNA target sequence
agtggccctgttatgagtcag

SEQ ID NO: 277233 - DNA, 21 bp, Artificial sequence
  SiRNA target sequence
gtggccctgttatgagtcaga

SEQ ID NO: 277234 - DNA, 21 bp, Artificial sequence
  SiRNA target sequence
tggccctgttatgagtcagag

SEQ ID NO: 277235 - DNA, 21 bp, Artificial sequence
  SiRNA target sequence
ggccctgttatgagtcagagc

SEQ ID NO: 277236 - DNA, 21 bp, Artificial sequence
  SiRNA target sequence
gccctgttatgagtcagagct

SEQ ID NO: 277237 - DNA, 21 bp, Artificial sequence
  SiRNA target sequence
ccctgttatgagtcagagctt

SEQ ID NO: 277238 - DNA, 21 bp, Artificial sequence
  SiRNA target sequence
cctgttatgagtcagagctta

SEQ ID NO: 277239 - DNA, 21 bp, Artificial sequence
  SiRNA target sequence
ctgttatgagtcagagcttaa

SEQ ID NO: 277240 - DNA, 21 bp, Artificial sequence
  SiRNA target sequence
tgttatgagtcagagcttaag

SEQ ID NO: 277241 - DNA, 21 bp, Artificial sequence
  SiRNA target sequence
gttatgagtcagagcttaagt

SEQ ID NO: 277242 - DNA, 21 bp, Artificial sequence
  SiRNA target sequence
ttatgagtcagagcttaagtg

SEQ ID NO: 277243 - DNA, 21 bp, Artificial sequence
  SiRNA target sequence
tatgagtcagagcttaagtga

SEQ ID NO: 277244 - DNA, 21 bp, Artificial sequence
  SiRNA target sequence
atgagtcagagcttaagtgac

SEQ ID NO: 277245 - DNA, 21 bp, Artificial sequence
  SiRNA target sequence
tgagtcagagcttaagtgaca

SEQ ID NO: 277246 - DNA, 21 bp, Artificial sequence
  SiRNA target sequence
gagtcagagcttaagtgacag

SEQ ID NO: 277247 - DNA, 21 bp, Artificial sequence
  SiRNA target sequence
agtcagagcttaagtgacagg

SEQ ID NO: 277248 - DNA, 21 bp, Artificial sequence
  SiRNA target sequence
gtcagagcttaagtgacaggg

SEQ ID NO: 277249 - DNA, 21 bp, Artificial sequence
  SiRNA target sequence
tcagagcttaagtgacagggt

SEQ ID NO: 277250 - DNA, 21 bp, Artificial sequence
  SiRNA target sequence
cagagcttaagtgacagggtt

SEQ ID NO: 277251 - DNA, 21 bp, Artificial sequence
  SiRNA target sequence
agagcttaagtgacagggttg

SEQ ID NO: 277252 - DNA, 21 bp, Artificial sequence
  SiRNA target sequence
gagcttaagtgacagggttga

SEQ ID NO: 277253 - DNA, 21 bp, Artificial sequence
  SiRNA target sequence
agcttaagtgacagggttgac

SEQ ID NO: 277254 - DNA, 21 bp, Artificial sequence
  SiRNA target sequence
gcttaagtgacagggttgacc

SEQ ID NO: 277255 - DNA, 21 bp, Artificial sequence
  SiRNA target sequence
cttaagtgacagggttgaccg

SEQ ID NO: 277256 - DNA, 21 bp, Artificial sequence
  SiRNA target sequence
ttaagtgacagggttgaccga

SEQ ID NO: 277257 - DNA, 21 bp, Artificial sequence
  SiRNA target sequence
taagtgacagggttgaccgaa

SEQ ID NO: 277258 - DNA, 21 bp, Artificial sequence
  SiRNA target sequence
aagtgacagggttgaccgaat

SEQ ID NO: 277259 - DNA, 21 bp, Artificial sequence
  SiRNA target sequence
agtgacagggttgaccgaatg

SEQ ID NO: 277260 - DNA, 21 bp, Artificial sequence
  SiRNA target sequence
gtgacagggttgaccgaatgt

SEQ ID NO: 277261 - DNA, 21 bp, Artificial sequence
  SiRNA target sequence
tgacagggttgaccgaatgta

SEQ ID NO: 277262 - DNA, 21 bp, Artificial sequence
  SiRNA target sequence
gacagggttgaccgaatgtac

SEQ ID NO: 277263 - DNA, 21 bp, Artificial sequence
  SiRNA target sequence
acagggttgaccgaatgtacc

SEQ ID NO: 277264 - DNA, 21 bp, Artificial sequence
  SiRNA target sequence
cagggttgaccgaatgtacca

SEQ ID NO: 277265 - DNA, 21 bp, Artificial sequence
  SiRNA target sequence
agggttgaccgaatgtaccat

SEQ ID NO: 277266 - DNA, 21 bp, Artificial sequence
  SiRNA target sequence
gggttgaccgaatgtaccatg

SEQ ID NO: 277267 - DNA, 21 bp, Artificial sequence
  SiRNA target sequence
ggttgaccgaatgtaccatga

SEQ ID NO: 277268 - DNA, 21 bp, Artificial sequence
  SiRNA target sequence
gttgaccgaatgtaccatgaa

SEQ ID NO: 277269 - DNA, 21 bp, Artificial sequence
  SiRNA target sequence
ttgaccgaatgtaccatgaac

SEQ ID NO: 277270 - DNA, 21 bp, Artificial sequence
  SiRNA target sequence
tgaccgaatgtaccatgaact

SEQ ID NO: 277271 - DNA, 21 bp, Artificial sequence
  SiRNA target sequence
gaccgaatgtaccatgaactg

SEQ ID NO: 277272 - DNA, 21 bp, Artificial sequence
  SiRNA target sequence
accgaatgtaccatgaactga

SEQ ID NO: 277273 - DNA, 21 bp, Artificial sequence
  SiRNA target sequence
ccgaatgtaccatgaactgat

SEQ ID NO: 277274 - DNA, 21 bp, Artificial sequence
  SiRNA target sequence
cgaatgtaccatgaactgata

SEQ ID NO: 277275 - DNA, 21 bp, Artificial sequence
  SiRNA target sequence
gaatgtaccatgaactgatac

SEQ ID NO: 277276 - DNA, 21 bp, Artificial sequence
  SiRNA target sequence
aatgtaccatgaactgataca

SEQ ID NO: 277277 - DNA, 21 bp, Artificial sequence
  SiRNA target sequence
atgtaccatgaactgatacat

SEQ ID NO: 277278 - DNA, 21 bp, Artificial sequence
  SiRNA target sequence
tgtaccatgaactgatacata

SEQ ID NO: 277279 - DNA, 21 bp, Artificial sequence
  SiRNA target sequence
gtaccatgaactgatacatac

SEQ ID NO: 277280 - DNA, 21 bp, Artificial sequence
  SiRNA target sequence
taccatgaactgatacatact

SEQ ID NO: 277281 - DNA, 21 bp, Artificial sequence
  SiRNA target sequence
accatgaactgatacatacta

SEQ ID NO: 277282 - DNA, 21 bp, Artificial sequence
  SiRNA target sequence
ccatgaactgatacatactaa

SEQ ID NO: 277283 - DNA, 21 bp, Artificial sequence
  SiRNA target sequence
catgaactgatacatactaat

SEQ ID NO: 277284 - DNA, 21 bp, Artificial sequence
  SiRNA target sequence
atgaactgatacatactaatg

SEQ ID NO: 277285 - DNA, 21 bp, Artificial sequence
  SiRNA target sequence
tgaactgatacatactaatgt

SEQ ID NO: 277286 - DNA, 21 bp, Artificial sequence
  SiRNA target sequence
gaactgatacatactaatgtt

SEQ ID NO: 277287 - DNA, 21 bp, Artificial sequence
  SiRNA target sequence
aactgatacatactaatgttg

SEQ ID NO: 277288 - DNA, 21 bp, Artificial sequence
  SiRNA target sequence
actgatacatactaatgttgc

SEQ ID NO: 277289 - DNA, 21 bp, Artificial sequence
  SiRNA target sequence
ctgatacatactaatgttgcc

SEQ ID NO: 277290 - DNA, 21 bp, Artificial sequence
  SiRNA target sequence
tgatacatactaatgttgccc

SEQ ID NO: 277291 - DNA, 21 bp, Artificial sequence
  SiRNA target sequence
gatacatactaatgttgccca

SEQ ID NO: 277292 - DNA, 21 bp, Artificial sequence
  SiRNA target sequence
atacatactaatgttgcccag

SEQ ID NO: 277293 - DNA, 21 bp, Artificial sequence
  SiRNA target sequence
tacatactaatgttgcccaga

SEQ ID NO: 277294 - DNA, 21 bp, Artificial sequence
  SiRNA target sequence
acatactaatgttgcccagat

SEQ ID NO: 277295 - DNA, 21 bp, Artificial sequence
  SiRNA target sequence
catactaatgttgcccagatg

SEQ ID NO: 277296 - DNA, 21 bp, Artificial sequence
  SiRNA target sequence
atactaatgttgcccagatga

SEQ ID NO: 277297 - DNA, 21 bp, Artificial sequence
  SiRNA target sequence
tactaatgttgcccagatgaa

SEQ ID NO: 277298 - DNA, 21 bp, Artificial sequence
  SiRNA target sequence
actaatgttgcccagatgaac

SEQ ID NO: 277299 - DNA, 21 bp, Artificial sequence
  SiRNA target sequence
ctaatgttgcccagatgaact

SEQ ID NO: 277300 - DNA, 21 bp, Artificial sequence
  SiRNA target sequence
taatgttgcccagatgaactt

SEQ ID NO: 277301 - DNA, 21 bp, Artificial sequence
  SiRNA target sequence
aatgttgcccagatgaacttt

SEQ ID NO: 277302 - DNA, 21 bp, Artificial sequence
  SiRNA target sequence
atgttgcccagatgaactttt

SEQ ID NO: 277303 - DNA, 21 bp, Artificial sequence
  SiRNA target sequence
tgttgcccagatgaacttttc

SEQ ID NO: 277304 - DNA, 21 bp, Artificial sequence
  SiRNA target sequence
gttgcccagatgaacttttcc

SEQ ID NO: 277305 - DNA, 21 bp, Artificial sequence
  SiRNA target sequence
ttgcccagatgaacttttcca

SEQ ID NO: 277306 - DNA, 21 bp, Artificial sequence
  SiRNA target sequence
tgcccagatgaacttttccat

SEQ ID NO: 277307 - DNA, 21 bp, Artificial sequence
  SiRNA target sequence
gcccagatgaacttttccata

SEQ ID NO: 277308 - DNA, 21 bp, Artificial sequence
  SiRNA target sequence
cccagatgaacttttccatac

SEQ ID NO: 277309 - DNA, 21 bp, Artificial sequence
  SiRNA target sequence
ccagatgaacttttccatacc

SEQ ID NO: 277310 - DNA, 21 bp, Artificial sequence
  SiRNA target sequence
cagatgaacttttccatacca

SEQ ID NO: 277311 - DNA, 21 bp, Artificial sequence
  SiRNA target sequence
agatgaacttttccataccat

SEQ ID NO: 277312 - DNA, 21 bp, Artificial sequence
  SiRNA target sequence
gatgaacttttccataccatt

SEQ ID NO: 277313 - DNA, 21 bp, Artificial sequence
  SiRNA target sequence
atgaacttttccataccattt

SEQ ID NO: 277314 - DNA, 21 bp, Artificial sequence
  SiRNA target sequence
tgaacttttccataccatttt

SEQ ID NO: 277315 - DNA, 21 bp, Artificial sequence
  SiRNA target sequence
gaacttttccataccattttc

SEQ ID NO: 277316 - DNA, 21 bp, Artificial sequence
  SiRNA target sequence
aacttttccataccattttcg

SEQ ID NO: 277317 - DNA, 21 bp, Artificial sequence
  SiRNA target sequence
acttttccataccattttcgc

SEQ ID NO: 277318 - DNA, 21 bp, Artificial sequence
  SiRNA target sequence
cttttccataccattttcgca

SEQ ID NO: 277319 - DNA, 21 bp, Artificial sequence
  SiRNA target sequence
ttttccataccattttcgcat

SEQ ID NO: 277320 - DNA, 21 bp, Artificial sequence
  SiRNA target sequence
tttccataccattttcgcata

SEQ ID NO: 277321 - DNA, 21 bp, Artificial sequence
  SiRNA target sequence
ttccataccattttcgcataa

SEQ ID NO: 277322 - DNA, 21 bp, Artificial sequence
  SiRNA target sequence
tccataccattttcgcataat

SEQ ID NO: 277323 - DNA, 21 bp, Artificial sequence
  SiRNA target sequence
ccataccattttcgcataatt

SEQ ID NO: 277324 - DNA, 21 bp, Artificial sequence
  SiRNA target sequence
cataccattttcgcataattt

SEQ ID NO: 277325 - DNA, 21 bp, Artificial sequence
  SiRNA target sequence
ataccattttcgcataatttg

SEQ ID NO: 277326 - DNA, 21 bp, Artificial sequence
  SiRNA target sequence
taccattttcgcataatttgt

SEQ ID NO: 277327 - DNA, 21 bp, Artificial sequence
  SiRNA target sequence
accattttcgcataatttgtc

SEQ ID NO: 277328 - DNA, 21 bp, Artificial sequence
  SiRNA target sequence
ccattttcgcataatttgtct

SEQ ID NO: 277329 - DNA, 21 bp, Artificial sequence
  SiRNA target sequence
cattttcgcataatttgtcta

SEQ ID NO: 277330 - DNA, 21 bp, Artificial sequence
  SiRNA target sequence
attttcgcataatttgtctaa

SEQ ID NO: 277331 - DNA, 21 bp, Artificial sequence
  SiRNA target sequence
ttttcgcataatttgtctaag

SEQ ID NO: 277332 - DNA, 21 bp, Artificial sequence
  SiRNA target sequence
tttcgcataatttgtctaagg

SEQ ID NO: 277333 - DNA, 21 bp, Artificial sequence
  SiRNA target sequence
ttcgcataatttgtctaagga

SEQ ID NO: 277334 - DNA, 21 bp, Artificial sequence
  SiRNA target sequence
tcgcataatttgtctaaggac

SEQ ID NO: 277335 - DNA, 21 bp, Artificial sequence
  SiRNA target sequence
cgcataatttgtctaaggact

SEQ ID NO: 277336 - DNA, 21 bp, Artificial sequence
  SiRNA target sequence
gcataatttgtctaaggactc

SEQ ID NO: 277337 - DNA, 21 bp, Artificial sequence
  SiRNA target sequence
cataatttgtctaaggactcg

SEQ ID NO: 277338 - DNA, 21 bp, Artificial sequence
  SiRNA target sequence
ataatttgtctaaggactcga

SEQ ID NO: 277339 - DNA, 21 bp, Artificial sequence
  SiRNA target sequence
taatttgtctaaggactcgaa

SEQ ID NO: 277340 - DNA, 21 bp, Artificial sequence
  SiRNA target sequence
aatttgtctaaggactcgaaa

SEQ ID NO: 277341 - DNA, 21 bp, Artificial sequence
  SiRNA target sequence
atttgtctaaggactcgaaag

SEQ ID NO: 277342 - DNA, 21 bp, Artificial sequence
  SiRNA target sequence
tttgtctaaggactcgaaagc

SEQ ID NO: 277343 - DNA, 21 bp, Artificial sequence
  SiRNA target sequence
ttgtctaaggactcgaaagcg

SEQ ID NO: 277344 - DNA, 21 bp, Artificial sequence
  SiRNA target sequence
tgtctaaggactcgaaagcgt

SEQ ID NO: 277345 - DNA, 21 bp, Artificial sequence
  SiRNA target sequence
gtctaaggactcgaaagcgtt

SEQ ID NO: 277346 - DNA, 21 bp, Artificial sequence
  SiRNA target sequence
tctaaggactcgaaagcgttc

SEQ ID NO: 277347 - DNA, 21 bp, Artificial sequence
  SiRNA target sequence
ctaaggactcgaaagcgttcc

SEQ ID NO: 277348 - DNA, 21 bp, Artificial sequence
  SiRNA target sequence
taaggactcgaaagcgttcct

SEQ ID NO: 277349 - DNA, 21 bp, Artificial sequence
  SiRNA target sequence
aaggactcgaaagcgttcctt

SEQ ID NO: 277350 - DNA, 21 bp, Artificial sequence
  SiRNA target sequence
aggactcgaaagcgttcctta

SEQ ID NO: 277351 - DNA, 21 bp, Artificial sequence
  SiRNA target sequence
ggactcgaaagcgttccttac

SEQ ID NO: 277352 - DNA, 21 bp, Artificial sequence
  SiRNA target sequence
gactcgaaagcgttccttact

SEQ ID NO: 277353 - DNA, 21 bp, Artificial sequence
  SiRNA target sequence
actcgaaagcgttccttactc

SEQ ID NO: 277354 - DNA, 21 bp, Artificial sequence
  SiRNA target sequence
ctcgaaagcgttccttactca

SEQ ID NO: 277355 - DNA, 21 bp, Artificial sequence
  SiRNA target sequence
tcgaaagcgttccttactcaa

SEQ ID NO: 277356 - DNA, 21 bp, Artificial sequence
  SiRNA target sequence
cgaaagcgttccttactcaaa

SEQ ID NO: 277357 - DNA, 21 bp, Artificial sequence
  SiRNA target sequence
gaaagcgttccttactcaaac

SEQ ID NO: 277358 - DNA, 21 bp, Artificial sequence
  SiRNA target sequence
aaagcgttccttactcaaacc

SEQ ID NO: 277359 - DNA, 21 bp, Artificial sequence
  SiRNA target sequence
aagcgttccttactcaaaccg

SEQ ID NO: 277360 - DNA, 21 bp, Artificial sequence
  SiRNA target sequence
agcgttccttactcaaaccgt

SEQ ID NO: 277361 - DNA, 21 bp, Artificial sequence
  SiRNA target sequence
gcgttccttactcaaaccgtg

SEQ ID NO: 277362 - DNA, 21 bp, Artificial sequence
  SiRNA target sequence
cgttccttactcaaaccgtgg

SEQ ID NO: 277363 - DNA, 21 bp, Artificial sequence
  SiRNA target sequence
gttccttactcaaaccgtgga

SEQ ID NO: 277364 - DNA, 21 bp, Artificial sequence
  SiRNA target sequence
ttccttactcaaaccgtggat

SEQ ID NO: 277365 - DNA, 21 bp, Artificial sequence
  SiRNA target sequence
tccttactcaaaccgtggata

SEQ ID NO: 277366 - DNA, 21 bp, Artificial sequence
  SiRNA target sequence
ccttactcaaaccgtggatac

SEQ ID NO: 277367 - DNA, 21 bp, Artificial sequence
  SiRNA target sequence
cttactcaaaccgtggatacc

SEQ ID NO: 277368 - DNA, 21 bp, Artificial sequence
  SiRNA target sequence
ttactcaaaccgtggatacct

SEQ ID NO: 277369 - DNA, 21 bp, Artificial sequence
  SiRNA target sequence
tactcaaaccgtggatacctc

SEQ ID NO: 277370 - DNA, 21 bp, Artificial sequence
  SiRNA target sequence
actcaaaccgtggatacctct

SEQ ID NO: 277371 - DNA, 21 bp, Artificial sequence
  SiRNA target sequence
ctcaaaccgtggatacctctc

SEQ ID NO: 277372 - DNA, 21 bp, Artificial sequence
  SiRNA target sequence
tcaaaccgtggatacctctct

SEQ ID NO: 277373 - DNA, 21 bp, Artificial sequence
  SiRNA target sequence
caaaccgtggatacctctctt

SEQ ID NO: 277374 - DNA, 21 bp, Artificial sequence
  SiRNA target sequence
aaaccgtggatacctctcttg

SEQ ID NO: 277375 - DNA, 21 bp, Artificial sequence
  SiRNA target sequence
aaccgtggatacctctcttgg

SEQ ID NO: 277376 - DNA, 21 bp, Artificial sequence
  SiRNA target sequence
accgtggatacctctcttggt

SEQ ID NO: 277377 - DNA, 21 bp, Artificial sequence
  SiRNA target sequence
ccgtggatacctctcttggtg

SEQ ID NO: 277378 - DNA, 21 bp, Artificial sequence
  SiRNA target sequence
cgtggatacctctcttggtgg

SEQ ID NO: 277379 - DNA, 21 bp, Artificial sequence
  SiRNA target sequence
gtggatacctctcttggtggt

SEQ ID NO: 277380 - DNA, 21 bp, Artificial sequence
  SiRNA target sequence
tggatacctctcttggtggta

SEQ ID NO: 277381 - DNA, 21 bp, Artificial sequence
  SiRNA target sequence
ggatacctctcttggtggtat

SEQ ID NO: 277382 - DNA, 21 bp, Artificial sequence
  SiRNA target sequence
gatacctctcttggtggtatg

SEQ ID NO: 277383 - DNA, 21 bp, Artificial sequence
  SiRNA target sequence
atacctctcttggtggtatga

SEQ ID NO: 277384 - DNA, 21 bp, Artificial sequence
  SiRNA target sequence
tacctctcttggtggtatgag

SEQ ID NO: 277385 - DNA, 21 bp, Artificial sequence
  SiRNA target sequence
acctctcttggtggtatgaga

SEQ ID NO: 277386 - DNA, 21 bp, Artificial sequence
  SiRNA target sequence
cctctcttggtggtatgagac

SEQ ID NO: 277387 - DNA, 21 bp, Artificial sequence
  SiRNA target sequence
ctctcttggtggtatgagaca

SEQ ID NO: 277388 - DNA, 21 bp, Artificial sequence
  SiRNA target sequence
tctcttggtggtatgagacaa

SEQ ID NO: 277389 - DNA, 21 bp, Artificial sequence
  SiRNA target sequence
ctcttggtggtatgagacaaa

SEQ ID NO: 277390 - DNA, 21 bp, Artificial sequence
  SiRNA target sequence
tcttggtggtatgagacaaat

SEQ ID NO: 277391 - DNA, 21 bp, Artificial sequence
  SiRNA target sequence
cttggtggtatgagacaaatt

SEQ ID NO: 277392 - DNA, 21 bp, Artificial sequence
  SiRNA target sequence
ttggtggtatgagacaaattt

SEQ ID NO: 277393 - DNA, 21 bp, Artificial sequence
  SiRNA target sequence
tggtggtatgagacaaatttc

SEQ ID NO: 277394 - DNA, 21 bp, Artificial sequence
  SiRNA target sequence
ggtggtatgagacaaatttct

SEQ ID NO: 277395 - DNA, 21 bp, Artificial sequence
  SiRNA target sequence
gtggtatgagacaaatttcta

SEQ ID NO: 277396 - DNA, 21 bp, Artificial sequence
  SiRNA target sequence
tggtatgagacaaatttctaa

SEQ ID NO: 277397 - DNA, 21 bp, Artificial sequence
  SiRNA target sequence
ggtatgagacaaatttctaat

SEQ ID NO: 277398 - DNA, 21 bp, Artificial sequence
  SiRNA target sequence
gtatgagacaaatttctaatg

SEQ ID NO: 277399 - DNA, 21 bp, Artificial sequence
  SiRNA target sequence
tatgagacaaatttctaatga

SEQ ID NO: 277400 - DNA, 21 bp, Artificial sequence
  SiRNA target sequence
atgagacaaatttctaatgaa

SEQ ID NO: 277401 - DNA, 21 bp, Artificial sequence
  SiRNA target sequence
tgagacaaatttctaatgaaa

SEQ ID NO: 277402 - DNA, 21 bp, Artificial sequence
  SiRNA target sequence
gagacaaatttctaatgaaac

SEQ ID NO: 277403 - DNA, 21 bp, Artificial sequence
  SiRNA target sequence
agacaaatttctaatgaaaca

SEQ ID NO: 277404 - DNA, 21 bp, Artificial sequence
  SiRNA target sequence
gacaaatttctaatgaaacag

SEQ ID NO: 277405 - DNA, 21 bp, Artificial sequence
  SiRNA target sequence
acaaatttctaatgaaacagt

SEQ ID NO: 277406 - DNA, 21 bp, Artificial sequence
  SiRNA target sequence
caaatttctaatgaaacagtt

SEQ ID NO: 277407 - DNA, 21 bp, Artificial sequence
  SiRNA target sequence
aaatttctaatgaaacagtta

SEQ ID NO: 277408 - DNA, 21 bp, Artificial sequence
  SiRNA target sequence
aatttctaatgaaacagttaa

SEQ ID NO: 277409 - DNA, 21 bp, Artificial sequence
  SiRNA target sequence
atttctaatgaaacagttaat

SEQ ID NO: 277410 - DNA, 21 bp, Artificial sequence
  SiRNA target sequence
tttctaatgaaacagttaata

SEQ ID NO: 277411 - DNA, 21 bp, Artificial sequence
  SiRNA target sequence
ttctaatgaaacagttaatac

SEQ ID NO: 277412 - DNA, 21 bp, Artificial sequence
  SiRNA target sequence
tctaatgaaacagttaatact

SEQ ID NO: 277413 - DNA, 21 bp, Artificial sequence
  SiRNA target sequence
ctaatgaaacagttaatacta

SEQ ID NO: 277414 - DNA, 21 bp, Artificial sequence
  SiRNA target sequence
taatgaaacagttaatactat

SEQ ID NO: 277415 - DNA, 21 bp, Artificial sequence
  SiRNA target sequence
aatgaaacagttaatactatt

SEQ ID NO: 277416 - DNA, 21 bp, Artificial sequence
  SiRNA target sequence
atgaaacagttaatactatta

SEQ ID NO: 277417 - DNA, 21 bp, Artificial sequence
  SiRNA target sequence
tgaaacagttaatactattaa

SEQ ID NO: 277418 - DNA, 21 bp, Artificial sequence
  SiRNA target sequence
gaaacagttaatactattaaa

SEQ ID NO: 277419 - DNA, 21 bp, Artificial sequence
  SiRNA target sequence
aaacagttaatactattaaag

SEQ ID NO: 277420 - DNA, 21 bp, Artificial sequence
  SiRNA target sequence
aacagttaatactattaaaga

SEQ ID NO: 277421 - DNA, 21 bp, Artificial sequence
  SiRNA target sequence
acagttaatactattaaagag

SEQ ID NO: 277422 - DNA, 21 bp, Artificial sequence
  SiRNA target sequence
cagttaatactattaaagagg

SEQ ID NO: 277423 - DNA, 21 bp, Artificial sequence
  SiRNA target sequence
agttaatactattaaagaggt

SEQ ID NO: 277424 - DNA, 21 bp, Artificial sequence
  SiRNA target sequence
gttaatactattaaagaggtg

SEQ ID NO: 277425 - DNA, 21 bp, Artificial sequence
  SiRNA target sequence
ttaatactattaaagaggtgt

SEQ ID NO: 277426 - DNA, 21 bp, Artificial sequence
  SiRNA target sequence
taatactattaaagaggtgtt

SEQ ID NO: 277427 - DNA, 21 bp, Artificial sequence
  SiRNA target sequence
aatactattaaagaggtgttt

SEQ ID NO: 277428 - DNA, 21 bp, Artificial sequence
  SiRNA target sequence
atactattaaagaggtgtttg

SEQ ID NO: 277429 - DNA, 21 bp, Artificial sequence
  SiRNA target sequence
tactattaaagaggtgtttga

SEQ ID NO: 277430 - DNA, 21 bp, Artificial sequence
  SiRNA target sequence
actattaaagaggtgtttgag

SEQ ID NO: 277431 - DNA, 21 bp, Artificial sequence
  SiRNA target sequence
ctattaaagaggtgtttgaga

SEQ ID NO: 277432 - DNA, 21 bp, Artificial sequence
  SiRNA target sequence
tattaaagaggtgtttgagac

SEQ ID NO: 277433 - DNA, 21 bp, Artificial sequence
  SiRNA target sequence
attaaagaggtgtttgagaca

SEQ ID NO: 277434 - DNA, 21 bp, Artificial sequence
  SiRNA target sequence
ttaaagaggtgtttgagacat

SEQ ID NO: 277435 - DNA, 21 bp, Artificial sequence
  SiRNA target sequence
taaagaggtgtttgagacatt

SEQ ID NO: 277436 - DNA, 21 bp, Artificial sequence
  SiRNA target sequence
aaagaggtgtttgagacattt

SEQ ID NO: 277437 - DNA, 21 bp, Artificial sequence
  SiRNA target sequence
aagaggtgtttgagacatttt

SEQ ID NO: 277438 - DNA, 21 bp, Artificial sequence
  SiRNA target sequence
agaggtgtttgagacattttt

SEQ ID NO: 277439 - DNA, 21 bp, Artificial sequence
  SiRNA target sequence
gaggtgtttgagacatttttg

SEQ ID NO: 277440 - DNA, 21 bp, Artificial sequence
  SiRNA target sequence
aggtgtttgagacatttttga

SEQ ID NO: 277441 - DNA, 21 bp, Artificial sequence
  SiRNA target sequence
ggtgtttgagacatttttgac

SEQ ID NO: 277442 - DNA, 21 bp, Artificial sequence
  SiRNA target sequence
gtgtttgagacatttttgacc

SEQ ID NO: 277443 - DNA, 21 bp, Artificial sequence
  SiRNA target sequence
tgtttgagacatttttgacca

SEQ ID NO: 277444 - DNA, 21 bp, Artificial sequence
  SiRNA target sequence
gtttgagacatttttgaccaa

SEQ ID NO: 277445 - DNA, 21 bp, Artificial sequence
  SiRNA target sequence
tttgagacatttttgaccaag

SEQ ID NO: 277446 - DNA, 21 bp, Artificial sequence
  SiRNA target sequence
ttgagacatttttgaccaaga

SEQ ID NO: 277447 - DNA, 21 bp, Artificial sequence
  SiRNA target sequence
tgagacatttttgaccaagat

SEQ ID NO: 277448 - DNA, 21 bp, Artificial sequence
  SiRNA target sequence
gagacatttttgaccaagatg

SEQ ID NO: 277449 - DNA, 21 bp, Artificial sequence
  SiRNA target sequence
agacatttttgaccaagatga

SEQ ID NO: 277450 - DNA, 21 bp, Artificial sequence
  SiRNA target sequence
gacatttttgaccaagatgac

SEQ ID NO: 277451 - DNA, 21 bp, Artificial sequence
  SiRNA target sequence
acatttttgaccaagatgacg

SEQ ID NO: 277452 - DNA, 21 bp, Artificial sequence
  SiRNA target sequence
catttttgaccaagatgacga

SEQ ID NO: 277453 - DNA, 21 bp, Artificial sequence
  SiRNA target sequence
atttttgaccaagatgacgac

SEQ ID NO: 277454 - DNA, 21 bp, Artificial sequence
  SiRNA target sequence
tttttgaccaagatgacgacc

SEQ ID NO: 277455 - DNA, 21 bp, Artificial sequence
  SiRNA target sequence
ttttgaccaagatgacgacca

SEQ ID NO: 277456 - DNA, 21 bp, Artificial sequence
  SiRNA target sequence
tttgaccaagatgacgaccac

SEQ ID NO: 277457 - DNA, 21 bp, Artificial sequence
  SiRNA target sequence
ttgaccaagatgacgaccact

SEQ ID NO: 277458 - DNA, 21 bp, Artificial sequence
  SiRNA target sequence
tgaccaagatgacgaccactt

SEQ ID NO: 277459 - DNA, 21 bp, Artificial sequence
  SiRNA target sequence
gaccaagatgacgaccacttt

SEQ ID NO: 277460 - DNA, 21 bp, Artificial sequence
  SiRNA target sequence
accaagatgacgaccactttt

SEQ ID NO: 277461 - DNA, 21 bp, Artificial sequence
  SiRNA target sequence
ccaagatgacgaccacttttg

SEQ ID NO: 277462 - DNA, 21 bp, Artificial sequence
  SiRNA target sequence
caagatgacgaccacttttga

SEQ ID NO: 277463 - DNA, 21 bp, Artificial sequence
  SiRNA target sequence
aagatgacgaccacttttgaa

SEQ ID NO: 277464 - DNA, 21 bp, Artificial sequence
  SiRNA target sequence
agatgacgaccacttttgaac

SEQ ID NO: 277465 - DNA, 21 bp, Artificial sequence
  SiRNA target sequence
gatgacgaccacttttgaaca

SEQ ID NO: 277466 - DNA, 21 bp, Artificial sequence
  SiRNA target sequence
atgacgaccacttttgaacaa

SEQ ID NO: 277467 - DNA, 21 bp, Artificial sequence
  SiRNA target sequence
tgacgaccacttttgaacaat

SEQ ID NO: 277468 - DNA, 21 bp, Artificial sequence
  SiRNA target sequence
gacgaccacttttgaacaatg

SEQ ID NO: 277469 - DNA, 21 bp, Artificial sequence
  SiRNA target sequence
acgaccacttttgaacaatgt

SEQ ID NO: 277470 - DNA, 21 bp, Artificial sequence
  SiRNA target sequence
cgaccacttttgaacaatgtg

SEQ ID NO: 277471 - DNA, 21 bp, Artificial sequence
  SiRNA target sequence
gaccacttttgaacaatgtgc

SEQ ID NO: 277472 - DNA, 21 bp, Artificial sequence
  SiRNA target sequence
accacttttgaacaatgtgcc

SEQ ID NO: 277473 - DNA, 21 bp, Artificial sequence
  SiRNA target sequence
ccacttttgaacaatgtgccg

SEQ ID NO: 277474 - DNA, 21 bp, Artificial sequence
  SiRNA target sequence
cacttttgaacaatgtgccga

SEQ ID NO: 277475 - DNA, 21 bp, Artificial sequence
  SiRNA target sequence
acttttgaacaatgtgccgaa

SEQ ID NO: 277476 - DNA, 21 bp, Artificial sequence
  SiRNA target sequence
cttttgaacaatgtgccgaag

SEQ ID NO: 277477 - DNA, 21 bp, Artificial sequence
  SiRNA target sequence
ttttgaacaatgtgccgaagc

SEQ ID NO: 277478 - DNA, 21 bp, Artificial sequence
  SiRNA target sequence
tttgaacaatgtgccgaagct

SEQ ID NO: 277479 - DNA, 21 bp, Artificial sequence
  SiRNA target sequence
ttgaacaatgtgccgaagctt

SEQ ID NO: 277480 - DNA, 21 bp, Artificial sequence
  SiRNA target sequence
tgaacaatgtgccgaagcttt

SEQ ID NO: 277481 - DNA, 21 bp, Artificial sequence
  SiRNA target sequence
gaacaatgtgccgaagctttt

SEQ ID NO: 277482 - DNA, 21 bp, Artificial sequence
  SiRNA target sequence
aacaatgtgccgaagctttta

SEQ ID NO: 277483 - DNA, 21 bp, Artificial sequence
  SiRNA target sequence
acaatgtgccgaagcttttaa

SEQ ID NO: 277484 - DNA, 21 bp, Artificial sequence
  SiRNA target sequence
caatgtgccgaagcttttaac

SEQ ID NO: 277485 - DNA, 21 bp, Artificial sequence
  SiRNA target sequence
aatgtgccgaagcttttaact

SEQ ID NO: 277486 - DNA, 21 bp, Artificial sequence
  SiRNA target sequence
atgtgccgaagcttttaactt

SEQ ID NO: 277487 - DNA, 21 bp, Artificial sequence
  SiRNA target sequence
tgtgccgaagcttttaacttt

SEQ ID NO: 277488 - DNA, 21 bp, Artificial sequence
  SiRNA target sequence
gtgccgaagcttttaacttta

SEQ ID NO: 277489 - DNA, 21 bp, Artificial sequence
  SiRNA target sequence
tgccgaagcttttaactttac

SEQ ID NO: 277490 - DNA, 21 bp, Artificial sequence
  SiRNA target sequence
gccgaagcttttaactttact

SEQ ID NO: 277491 - DNA, 21 bp, Artificial sequence
  SiRNA target sequence
ccgaagcttttaactttacta

SEQ ID NO: 277492 - DNA, 21 bp, Artificial sequence
  SiRNA target sequence
cgaagcttttaactttactat

SEQ ID NO: 277493 - DNA, 21 bp, Artificial sequence
  SiRNA target sequence
gaagcttttaactttactatg

SEQ ID NO: 277494 - DNA, 21 bp, Artificial sequence
  SiRNA target sequence
aagcttttaactttactatga

SEQ ID NO: 277495 - DNA, 21 bp, Artificial sequence
  SiRNA target sequence
agcttttaactttactatgag

SEQ ID NO: 277496 - DNA, 21 bp, Artificial sequence
  SiRNA target sequence
gcttttaactttactatgagc

SEQ ID NO: 277497 - DNA, 21 bp, Artificial sequence
  SiRNA target sequence
cttttaactttactatgagct

SEQ ID NO: 277498 - DNA, 21 bp, Artificial sequence
  SiRNA target sequence
ttttaactttactatgagctt

SEQ ID NO: 277499 - DNA, 21 bp, Artificial sequence
  SiRNA target sequence
tttaactttactatgagcttt

SEQ ID NO: 277500 - DNA, 21 bp, Artificial sequence
  SiRNA target sequence
ttaactttactatgagcttta

SEQ ID NO: 277501 - DNA, 21 bp, Artificial sequence
  SiRNA target sequence
taactttactatgagctttat

SEQ ID NO: 277502 - DNA, 21 bp, Artificial sequence
  SiRNA target sequence
aactttactatgagctttatg

SEQ ID NO: 277503 - DNA, 21 bp, Artificial sequence
  SiRNA target sequence
actttactatgagctttatga

SEQ ID NO: 277504 - DNA, 21 bp, Artificial sequence
  SiRNA target sequence
ctttactatgagctttatgag

SEQ ID NO: 277505 - DNA, 21 bp, Artificial sequence
  SiRNA target sequence
tttactatgagctttatgaga

SEQ ID NO: 277506 - DNA, 21 bp, Artificial sequence
  SiRNA target sequence
ttactatgagctttatgagat

SEQ ID NO: 277507 - DNA, 21 bp, Artificial sequence
  SiRNA target sequence
tactatgagctttatgagatt

SEQ ID NO: 277508 - DNA, 21 bp, Artificial sequence
  SiRNA target sequence
actatgagctttatgagattt

SEQ ID NO: 277509 - DNA, 21 bp, Artificial sequence
  SiRNA target sequence
ctatgagctttatgagatttt

SEQ ID NO: 277510 - DNA, 21 bp, Artificial sequence
  SiRNA target sequence
tatgagctttatgagattttt

SEQ ID NO: 277511 - DNA, 21 bp, Artificial sequence
  SiRNA target sequence
atgagctttatgagattttta

SEQ ID NO: 277512 - DNA, 21 bp, Artificial sequence
  SiRNA target sequence
tgagctttatgagatttttag

SEQ ID NO: 277513 - DNA, 21 bp, Artificial sequence
  SiRNA target sequence
gagctttatgagatttttagc

SEQ ID NO: 277514 - DNA, 21 bp, Artificial sequence
  SiRNA target sequence
agctttatgagatttttagca

SEQ ID NO: 277515 - DNA, 21 bp, Artificial sequence
  SiRNA target sequence
gctttatgagatttttagcat

SEQ ID NO: 277516 - DNA, 21 bp, Artificial sequence
  SiRNA target sequence
ctttatgagatttttagcatt

SEQ ID NO: 277517 - DNA, 21 bp, Artificial sequence
  SiRNA target sequence
tttatgagatttttagcatta

SEQ ID NO: 277518 - DNA, 21 bp, Artificial sequence
  SiRNA target sequence
ttatgagatttttagcattag

SEQ ID NO: 277519 - DNA, 21 bp, Artificial sequence
  SiRNA target sequence
tatgagatttttagcattagc

SEQ ID NO: 277520 - DNA, 21 bp, Artificial sequence
  SiRNA target sequence
atgagatttttagcattagcc

SEQ ID NO: 277521 - DNA, 21 bp, Artificial sequence
  SiRNA target sequence
tgagatttttagcattagcct

SEQ ID NO: 277522 - DNA, 21 bp, Artificial sequence
  SiRNA target sequence
gagatttttagcattagccta

SEQ ID NO: 277523 - DNA, 21 bp, Artificial sequence
  SiRNA target sequence
agatttttagcattagcctat

SEQ ID NO: 277524 - DNA, 21 bp, Artificial sequence
  SiRNA target sequence
gatttttagcattagcctatg

SEQ ID NO: 277525 - DNA, 21 bp, Artificial sequence
  SiRNA target sequence
atttttagcattagcctatgc

SEQ ID NO: 277526 - DNA, 21 bp, Artificial sequence
  SiRNA target sequence
tttttagcattagcctatgct

SEQ ID NO: 277527 - DNA, 21 bp, Artificial sequence
  SiRNA target sequence
ttttagcattagcctatgcta

SEQ ID NO: 277528 - DNA, 21 bp, Artificial sequence
  SiRNA target sequence
tttagcattagcctatgctat

SEQ ID NO: 277529 - DNA, 21 bp, Artificial sequence
  SiRNA target sequence
ttagcattagcctatgctatt

SEQ ID NO: 277530 - DNA, 21 bp, Artificial sequence
  SiRNA target sequence
tagcattagcctatgctattt

SEQ ID NO: 277531 - DNA, 21 bp, Artificial sequence
  SiRNA target sequence
agcattagcctatgctatttt

SEQ ID NO: 277532 - DNA, 21 bp, Artificial sequence
  SiRNA target sequence
gcattagcctatgctattttc

SEQ ID NO: 277533 - DNA, 21 bp, Artificial sequence
  SiRNA target sequence
cattagcctatgctattttct

SEQ ID NO: 277534 - DNA, 21 bp, Artificial sequence
  SiRNA target sequence
attagcctatgctattttctt

SEQ ID NO: 277535 - DNA, 21 bp, Artificial sequence
  SiRNA target sequence
ttagcctatgctattttcttt

SEQ ID NO: 277536 - DNA, 21 bp, Artificial sequence
  SiRNA target sequence
tagcctatgctattttctttc

SEQ ID NO: 277537 - DNA, 21 bp, Artificial sequence
  SiRNA target sequence
agcctatgctattttctttct

SEQ ID NO: 277538 - DNA, 21 bp, Artificial sequence
  SiRNA target sequence
gcctatgctattttctttctt

SEQ ID NO: 277539 - DNA, 21 bp, Artificial sequence
  SiRNA target sequence
cctatgctattttctttctta

SEQ ID NO: 277540 - DNA, 21 bp, Artificial sequence
  SiRNA target sequence
ctatgctattttctttcttat

SEQ ID NO: 277541 - DNA, 21 bp, Artificial sequence
  SiRNA target sequence
tatgctattttctttcttata

SEQ ID NO: 277542 - DNA, 21 bp, Artificial sequence
  SiRNA target sequence
atgctattttctttcttatat

SEQ ID NO: 277543 - DNA, 21 bp, Artificial sequence
  SiRNA target sequence
tgctattttctttcttatatc

SEQ ID NO: 277544 - DNA, 21 bp, Artificial sequence
  SiRNA target sequence
gctattttctttcttatatct

SEQ ID NO: 277545 - DNA, 21 bp, Artificial sequence
  SiRNA target sequence
ctattttctttcttatatctc

SEQ ID NO: 277546 - DNA, 21 bp, Artificial sequence
  SiRNA target sequence
tattttctttcttatatctcg

SEQ ID NO: 277547 - DNA, 21 bp, Artificial sequence
  SiRNA target sequence
attttctttcttatatctcga

SEQ ID NO: 277548 - DNA, 21 bp, Artificial sequence
  SiRNA target sequence
ttttctttcttatatctcgag

SEQ ID NO: 277549 - DNA, 21 bp, Artificial sequence
  SiRNA target sequence
tttctttcttatatctcgagc

SEQ ID NO: 277550 - DNA, 21 bp, Artificial sequence
  SiRNA target sequence
ttctttcttatatctcgagcg

SEQ ID NO: 277551 - DNA, 21 bp, Artificial sequence
  SiRNA target sequence
tctttcttatatctcgagcga

SEQ ID NO: 277552 - DNA, 21 bp, Artificial sequence
  SiRNA target sequence
ctttcttatatctcgagcgac

SEQ ID NO: 277553 - DNA, 21 bp, Artificial sequence
  SiRNA target sequence
tttcttatatctcgagcgact

SEQ ID NO: 277554 - DNA, 21 bp, Artificial sequence
  SiRNA target sequence
ttcttatatctcgagcgacta

SEQ ID NO: 277555 - DNA, 21 bp, Artificial sequence
  SiRNA target sequence
tcttatatctcgagcgactaa

SEQ ID NO: 277556 - DNA, 21 bp, Artificial sequence
  SiRNA target sequence
cttatatctcgagcgactaaa

SEQ ID NO: 277557 - DNA, 21 bp, Artificial sequence
  SiRNA target sequence
ttatatctcgagcgactaaat

SEQ ID NO: 277558 - DNA, 21 bp, Artificial sequence
  SiRNA target sequence
tatatctcgagcgactaaatt

SEQ ID NO: 277559 - DNA, 21 bp, Artificial sequence
  SiRNA target sequence
atatctcgagcgactaaattt

SEQ ID NO: 277560 - DNA, 21 bp, Artificial sequence
  SiRNA target sequence
tatctcgagcgactaaatttt

SEQ ID NO: 277561 - DNA, 21 bp, Artificial sequence
  SiRNA target sequence
atctcgagcgactaaattttt

SEQ ID NO: 277562 - DNA, 21 bp, Artificial sequence
  SiRNA target sequence
tctcgagcgactaaatttttc

SEQ ID NO: 277563 - DNA, 21 bp, Artificial sequence
  SiRNA target sequence
ctcgagcgactaaatttttcg

SEQ ID NO: 277564 - DNA, 21 bp, Artificial sequence
  SiRNA target sequence
tcgagcgactaaatttttcgg

SEQ ID NO: 277565 - DNA, 21 bp, Artificial sequence
  SiRNA target sequence
cgagcgactaaatttttcggg

SEQ ID NO: 277566 - DNA, 21 bp, Artificial sequence
  SiRNA target sequence
gagcgactaaatttttcgggg

SEQ ID NO: 277567 - DNA, 21 bp, Artificial sequence
  SiRNA target sequence
agcgactaaatttttcggggc

SEQ ID NO: 277568 - DNA, 21 bp, Artificial sequence
  SiRNA target sequence
gcgactaaatttttcggggcc

SEQ ID NO: 277569 - DNA, 21 bp, Artificial sequence
  SiRNA target sequence
cgactaaatttttcggggcct

SEQ ID NO: 277570 - DNA, 21 bp, Artificial sequence
  SiRNA target sequence
gactaaatttttcggggcctc

SEQ ID NO: 277571 - DNA, 21 bp, Artificial sequence
  SiRNA target sequence
actaaatttttcggggcctct

SEQ ID NO: 277572 - DNA, 21 bp, Artificial sequence
  SiRNA target sequence
ctaaatttttcggggcctctt

SEQ ID NO: 277573 - DNA, 21 bp, Artificial sequence
  SiRNA target sequence
taaatttttcggggcctcttt

SEQ ID NO: 277574 - DNA, 21 bp, Artificial sequence
  SiRNA target sequence
aaatttttcggggcctctttt

SEQ ID NO: 277575 - DNA, 21 bp, Artificial sequence
  SiRNA target sequence
aatttttcggggcctcttttt

SEQ ID NO: 277576 - DNA, 21 bp, Artificial sequence
  SiRNA target sequence
atttttcggggcctctttttc

SEQ ID NO: 277577 - DNA, 21 bp, Artificial sequence
  SiRNA target sequence
tttttcggggcctctttttct

SEQ ID NO: 277578 - DNA, 21 bp, Artificial sequence
  SiRNA target sequence
ttttcggggcctctttttcta

SEQ ID NO: 277579 - DNA, 21 bp, Artificial sequence
  SiRNA target sequence
tttcggggcctctttttctac

SEQ ID NO: 277580 - DNA, 21 bp, Artificial sequence
  SiRNA target sequence
ttcggggcctctttttctact

SEQ ID NO: 277581 - DNA, 21 bp, Artificial sequence
  SiRNA target sequence
tcggggcctctttttctacta

SEQ ID NO: 277582 - DNA, 21 bp, Artificial sequence
  SiRNA target sequence
cggggcctctttttctactat

SEQ ID NO: 277583 - DNA, 21 bp, Artificial sequence
  SiRNA target sequence
ggggcctctttttctactata

SEQ ID NO: 277584 - DNA, 21 bp, Artificial sequence
  SiRNA target sequence
gggcctctttttctactatat

SEQ ID NO: 277585 - DNA, 21 bp, Artificial sequence
  SiRNA target sequence
ggcctctttttctactatatc

SEQ ID NO: 277586 - DNA, 21 bp, Artificial sequence
  SiRNA target sequence
gcctctttttctactatatct

SEQ ID NO: 277587 - DNA, 21 bp, Artificial sequence
  SiRNA target sequence
cctctttttctactatatcta

SEQ ID NO: 277588 - DNA, 21 bp, Artificial sequence
  SiRNA target sequence
ctctttttctactatatctac

SEQ ID NO: 277589 - DNA, 21 bp, Artificial sequence
  SiRNA target sequence
tctttttctactatatctact

SEQ ID NO: 277590 - DNA, 21 bp, Artificial sequence
  SiRNA target sequence
ctttttctactatatctactg

SEQ ID NO: 277591 - DNA, 21 bp, Artificial sequence
  SiRNA target sequence
tttttctactatatctactgt

SEQ ID NO: 277592 - DNA, 21 bp, Artificial sequence
  SiRNA target sequence
ttttctactatatctactgtt

SEQ ID NO: 277593 - DNA, 21 bp, Artificial sequence
  SiRNA target sequence
tttctactatatctactgttt

SEQ ID NO: 277594 - DNA, 21 bp, Artificial sequence
  SiRNA target sequence
ttctactatatctactgtttt

SEQ ID NO: 277595 - DNA, 21 bp, Artificial sequence
  SiRNA target sequence
tctactatatctactgttttg

SEQ ID NO: 277596 - DNA, 21 bp, Artificial sequence
  SiRNA target sequence
ctactatatctactgttttga

SEQ ID NO: 277597 - DNA, 21 bp, Artificial sequence
  SiRNA target sequence
tactatatctactgttttgat

SEQ ID NO: 277598 - DNA, 21 bp, Artificial sequence
  SiRNA target sequence
actatatctactgttttgata

SEQ ID NO: 277599 - DNA, 21 bp, Artificial sequence
  SiRNA target sequence
ctatatctactgttttgataa

SEQ ID NO: 277600 - DNA, 21 bp, Artificial sequence
  SiRNA target sequence
tatatctactgttttgataac

SEQ ID NO: 277601 - DNA, 21 bp, Artificial sequence
  SiRNA target sequence
atatctactgttttgataact

SEQ ID NO: 277602 - DNA, 21 bp, Artificial sequence
  SiRNA target sequence
tatctactgttttgataactc

SEQ ID NO: 277603 - DNA, 21 bp, Artificial sequence
  SiRNA target sequence
atctactgttttgataactct

SEQ ID NO: 277604 - DNA, 21 bp, Artificial sequence
  SiRNA target sequence
tctactgttttgataactctt

SEQ ID NO: 277605 - DNA, 21 bp, Artificial sequence
  SiRNA target sequence
ctactgttttgataactctta

SEQ ID NO: 277606 - DNA, 21 bp, Artificial sequence
  SiRNA target sequence
tactgttttgataactcttat

SEQ ID NO: 277607 - DNA, 21 bp, Artificial sequence
  SiRNA target sequence
actgttttgataactcttatc

SEQ ID NO: 277608 - DNA, 21 bp, Artificial sequence
  SiRNA target sequence
ctgttttgataactcttatca

SEQ ID NO: 277609 - DNA, 21 bp, Artificial sequence
  SiRNA target sequence
tgttttgataactcttatcac

SEQ ID NO: 277610 - DNA, 21 bp, Artificial sequence
  SiRNA target sequence
gttttgataactcttatcact

SEQ ID NO: 277611 - DNA, 21 bp, Artificial sequence
  SiRNA target sequence
ttttgataactcttatcacta

SEQ ID NO: 277612 - DNA, 21 bp, Artificial sequence
  SiRNA target sequence
tttgataactcttatcactat

SEQ ID NO: 277613 - DNA, 21 bp, Artificial sequence
  SiRNA target sequence
ttgataactcttatcactatg

SEQ ID NO: 277614 - DNA, 21 bp, Artificial sequence
  SiRNA target sequence
tgataactcttatcactatga

SEQ ID NO: 277615 - DNA, 21 bp, Artificial sequence
  SiRNA target sequence
gataactcttatcactatgac

SEQ ID NO: 277616 - DNA, 21 bp, Artificial sequence
  SiRNA target sequence
ataactcttatcactatgaca

SEQ ID NO: 277617 - DNA, 21 bp, Artificial sequence
  SiRNA target sequence
taactcttatcactatgacag

SEQ ID NO: 277618 - DNA, 21 bp, Artificial sequence
  SiRNA target sequence
aactcttatcactatgacagt

SEQ ID NO: 277619 - DNA, 21 bp, Artificial sequence
  SiRNA target sequence
actcttatcactatgacagtt

SEQ ID NO: 277620 - DNA, 21 bp, Artificial sequence
  SiRNA target sequence
ctcttatcactatgacagtta

SEQ ID NO: 277621 - DNA, 21 bp, Artificial sequence
  SiRNA target sequence
tcttatcactatgacagttac

SEQ ID NO: 277622 - DNA, 21 bp, Artificial sequence
  SiRNA target sequence
cttatcactatgacagttaca

SEQ ID NO: 277623 - DNA, 21 bp, Artificial sequence
  SiRNA target sequence
ttatcactatgacagttacag

SEQ ID NO: 277624 - DNA, 21 bp, Artificial sequence
  SiRNA target sequence
tatcactatgacagttacaga

SEQ ID NO: 277625 - DNA, 21 bp, Artificial sequence
  SiRNA target sequence
atcactatgacagttacagat

SEQ ID NO: 277626 - DNA, 21 bp, Artificial sequence
  SiRNA target sequence
tcactatgacagttacagata

SEQ ID NO: 277627 - DNA, 21 bp, Artificial sequence
  SiRNA target sequence
cactatgacagttacagataa

SEQ ID NO: 277628 - DNA, 21 bp, Artificial sequence
  SiRNA target sequence
actatgacagttacagataag

SEQ ID NO: 277629 - DNA, 21 bp, Artificial sequence
  SiRNA target sequence
ctatgacagttacagataagt

SEQ ID NO: 277630 - DNA, 21 bp, Artificial sequence
  SiRNA target sequence
tatgacagttacagataagtt

SEQ ID NO: 277631 - DNA, 21 bp, Artificial sequence
  SiRNA target sequence
atgacagttacagataagttg

SEQ ID NO: 277632 - DNA, 21 bp, Artificial sequence
  SiRNA target sequence
tgacagttacagataagttgg

SEQ ID NO: 277633 - DNA, 21 bp, Artificial sequence
  SiRNA target sequence
gacagttacagataagttggt

SEQ ID NO: 277634 - DNA, 21 bp, Artificial sequence
  SiRNA target sequence
acagttacagataagttggtt

SEQ ID NO: 277635 - DNA, 21 bp, Artificial sequence
  SiRNA target sequence
cagttacagataagttggtta

SEQ ID NO: 277636 - DNA, 21 bp, Artificial sequence
  SiRNA target sequence
agttacagataagttggttaa

SEQ ID NO: 277637 - DNA, 21 bp, Artificial sequence
  SiRNA target sequence
gttacagataagttggttaag

SEQ ID NO: 277638 - DNA, 21 bp, Artificial sequence
  SiRNA target sequence
ttacagataagttggttaaga

SEQ ID NO: 277639 - DNA, 21 bp, Artificial sequence
  SiRNA target sequence
tacagataagttggttaagaa

SEQ ID NO: 277640 - DNA, 21 bp, Artificial sequence
  SiRNA target sequence
acagataagttggttaagaag

SEQ ID NO: 277641 - DNA, 21 bp, Artificial sequence
  SiRNA target sequence
cagataagttggttaagaagt

SEQ ID NO: 277642 - DNA, 21 bp, Artificial sequence
  SiRNA target sequence
agataagttggttaagaagtt

SEQ ID NO: 277643 - DNA, 21 bp, Artificial sequence
  SiRNA target sequence
gataagttggttaagaagttc

SEQ ID NO: 277644 - DNA, 21 bp, Artificial sequence
  SiRNA target sequence
ataagttggttaagaagttcc

SEQ ID NO: 277645 - DNA, 21 bp, Artificial sequence
  SiRNA target sequence
taagttggttaagaagttcct

SEQ ID NO: 277646 - DNA, 21 bp, Artificial sequence
  SiRNA target sequence
aagttggttaagaagttcctc

SEQ ID NO: 277647 - DNA, 21 bp, Artificial sequence
  SiRNA target sequence
agttggttaagaagttcctcg

SEQ ID NO: 277648 - DNA, 21 bp, Artificial sequence
  SiRNA target sequence
gttggttaagaagttcctcgt

SEQ ID NO: 277649 - DNA, 21 bp, Artificial sequence
  SiRNA target sequence
ttggttaagaagttcctcgtt

SEQ ID NO: 277650 - DNA, 21 bp, Artificial sequence
  SiRNA target sequence
tggttaagaagttcctcgttg

SEQ ID NO: 277651 - DNA, 21 bp, Artificial sequence
  SiRNA target sequence
ggttaagaagttcctcgttga

SEQ ID NO: 277652 - DNA, 21 bp, Artificial sequence
  SiRNA target sequence
gttaagaagttcctcgttgat

SEQ ID NO: 277653 - DNA, 21 bp, Artificial sequence
  SiRNA target sequence
ttaagaagttcctcgttgatt

SEQ ID NO: 277654 - DNA, 21 bp, Artificial sequence
  SiRNA target sequence
taagaagttcctcgttgatta

SEQ ID NO: 277655 - DNA, 21 bp, Artificial sequence
  SiRNA target sequence
aagaagttcctcgttgattat

SEQ ID NO: 277656 - DNA, 21 bp, Artificial sequence
  SiRNA target sequence
agaagttcctcgttgattatt

SEQ ID NO: 277657 - DNA, 21 bp, Artificial sequence
  SiRNA target sequence
gaagttcctcgttgattatta

SEQ ID NO: 277658 - DNA, 21 bp, Artificial sequence
  SiRNA target sequence
aagttcctcgttgattattat

SEQ ID NO: 277659 - DNA, 21 bp, Artificial sequence
  SiRNA target sequence
agttcctcgttgattattatt

SEQ ID NO: 277660 - DNA, 21 bp, Artificial sequence
  SiRNA target sequence
gttcctcgttgattattattc

SEQ ID NO: 277661 - DNA, 21 bp, Artificial sequence
  SiRNA target sequence
ttcctcgttgattattattcg

SEQ ID NO: 277662 - DNA, 21 bp, Artificial sequence
  SiRNA target sequence
tcctcgttgattattattcga

SEQ ID NO: 277663 - DNA, 21 bp, Artificial sequence
  SiRNA target sequence
cctcgttgattattattcgaa

SEQ ID NO: 277664 - DNA, 21 bp, Artificial sequence
  SiRNA target sequence
ctcgttgattattattcgaaa

SEQ ID NO: 277665 - DNA, 21 bp, Artificial sequence
  SiRNA target sequence
tcgttgattattattcgaaac

SEQ ID NO: 277666 - DNA, 21 bp, Artificial sequence
  SiRNA target sequence
cgttgattattattcgaaaca

SEQ ID NO: 277667 - DNA, 21 bp, Artificial sequence
  SiRNA target sequence
gttgattattattcgaaacac

SEQ ID NO: 277668 - DNA, 21 bp, Artificial sequence
  SiRNA target sequence
ttgattattattcgaaacaca

SEQ ID NO: 277669 - DNA, 21 bp, Artificial sequence
  SiRNA target sequence
tgattattattcgaaacacat

SEQ ID NO: 277670 - DNA, 21 bp, Artificial sequence
  SiRNA target sequence
gattattattcgaaacacatg

SEQ ID NO: 277671 - DNA, 21 bp, Artificial sequence
  SiRNA target sequence
attattattcgaaacacatgg

SEQ ID NO: 277672 - DNA, 21 bp, Artificial sequence
  SiRNA target sequence
ttattattcgaaacacatgga

SEQ ID NO: 277673 - DNA, 21 bp, Artificial sequence
  SiRNA target sequence
tattattcgaaacacatggag

SEQ ID NO: 277674 - DNA, 21 bp, Artificial sequence
  SiRNA target sequence
attattcgaaacacatggaga

SEQ ID NO: 277675 - DNA, 21 bp, Artificial sequence
  SiRNA target sequence
ttattcgaaacacatggagaa

SEQ ID NO: 277676 - DNA, 21 bp, Artificial sequence
  SiRNA target sequence
tattcgaaacacatggagaat

SEQ ID NO: 277677 - DNA, 21 bp, Artificial sequence
  SiRNA target sequence
attcgaaacacatggagaatg

SEQ ID NO: 277678 - DNA, 21 bp, Artificial sequence
  SiRNA target sequence
ttcgaaacacatggagaatgc

SEQ ID NO: 277679 - DNA, 21 bp, Artificial sequence
  SiRNA target sequence
tcgaaacacatggagaatgcg

SEQ ID NO: 277680 - DNA, 21 bp, Artificial sequence
  SiRNA target sequence
cgaaacacatggagaatgcga

SEQ ID NO: 277681 - DNA, 21 bp, Artificial sequence
  SiRNA target sequence
gaaacacatggagaatgcgaa

SEQ ID NO: 277682 - DNA, 21 bp, Artificial sequence
  SiRNA target sequence
aaacacatggagaatgcgaaa

SEQ ID NO: 277683 - DNA, 21 bp, Artificial sequence
  SiRNA target sequence
aacacatggagaatgcgaaaa

SEQ ID NO: 277684 - DNA, 21 bp, Artificial sequence
  SiRNA target sequence
acacatggagaatgcgaaaat

SEQ ID NO: 277685 - DNA, 21 bp, Artificial sequence
  SiRNA target sequence
cacatggagaatgcgaaaatg

SEQ ID NO: 277686 - DNA, 21 bp, Artificial sequence
  SiRNA target sequence
acatggagaatgcgaaaatgt

SEQ ID NO: 277687 - DNA, 21 bp, Artificial sequence
  SiRNA target sequence
catggagaatgcgaaaatgtt

SEQ ID NO: 277688 - DNA, 21 bp, Artificial sequence
  SiRNA target sequence
atggagaatgcgaaaatgttg

SEQ ID NO: 277689 - DNA, 21 bp, Artificial sequence
  SiRNA target sequence
tggagaatgcgaaaatgttgg

SEQ ID NO: 277690 - DNA, 21 bp, Artificial sequence
  SiRNA target sequence
ggagaatgcgaaaatgttggc

SEQ ID NO: 277691 - DNA, 21 bp, Artificial sequence
  SiRNA target sequence
gagaatgcgaaaatgttggca

SEQ ID NO: 277692 - DNA, 21 bp, Artificial sequence
  SiRNA target sequence
agaatgcgaaaatgttggcac

SEQ ID NO: 277693 - DNA, 21 bp, Artificial sequence
  SiRNA target sequence
gaatgcgaaaatgttggcaca

SEQ ID NO: 277694 - DNA, 21 bp, Artificial sequence
  SiRNA target sequence
aatgcgaaaatgttggcacaa

SEQ ID NO: 277695 - DNA, 21 bp, Artificial sequence
  SiRNA target sequence
atgcgaaaatgttggcacaag

SEQ ID NO: 277696 - DNA, 21 bp, Artificial sequence
  SiRNA target sequence
tgcgaaaatgttggcacaagc

SEQ ID NO: 277697 - DNA, 21 bp, Artificial sequence
  SiRNA target sequence
gcgaaaatgttggcacaagca

SEQ ID NO: 277698 - DNA, 21 bp, Artificial sequence
  SiRNA target sequence
cgaaaatgttggcacaagcag

SEQ ID NO: 277699 - DNA, 21 bp, Artificial sequence
  SiRNA target sequence
gaaaatgttggcacaagcagg

SEQ ID NO: 277700 - DNA, 21 bp, Artificial sequence
  SiRNA target sequence
aaaatgttggcacaagcagga

SEQ ID NO: 277701 - DNA, 21 bp, Artificial sequence
  SiRNA target sequence
aaatgttggcacaagcaggag

SEQ ID NO: 277702 - DNA, 21 bp, Artificial sequence
  SiRNA target sequence
aatgttggcacaagcaggaga

SEQ ID NO: 277703 - DNA, 21 bp, Artificial sequence
  SiRNA target sequence
atgttggcacaagcaggagaa

SEQ ID NO: 277704 - DNA, 21 bp, Artificial sequence
  SiRNA target sequence
tgttggcacaagcaggagaag

SEQ ID NO: 277705 - DNA, 21 bp, Artificial sequence
  SiRNA target sequence
gttggcacaagcaggagaaga

SEQ ID NO: 277706 - DNA, 21 bp, Artificial sequence
  SiRNA target sequence
ttggcacaagcaggagaagaa

SEQ ID NO: 277707 - DNA, 21 bp, Artificial sequence
  SiRNA target sequence
tggcacaagcaggagaagaag

SEQ ID NO: 277708 - DNA, 21 bp, Artificial sequence
  SiRNA target sequence
ggcacaagcaggagaagaaga

SEQ ID NO: 277709 - DNA, 21 bp, Artificial sequence
  SiRNA target sequence
gcacaagcaggagaagaagat

SEQ ID NO: 277710 - DNA, 21 bp, Artificial sequence
  SiRNA target sequence
cacaagcaggagaagaagatt

SEQ ID NO: 277711 - DNA, 21 bp, Artificial sequence
  SiRNA target sequence
acaagcaggagaagaagattc

SEQ ID NO: 277712 - DNA, 21 bp, Artificial sequence
  SiRNA target sequence
caagcaggagaagaagattcg

SEQ ID NO: 277713 - DNA, 21 bp, Artificial sequence
  SiRNA target sequence
aagcaggagaagaagattcgt

SEQ ID NO: 277714 - DNA, 21 bp, Artificial sequence
  SiRNA target sequence
agcaggagaagaagattcgtc

SEQ ID NO: 277715 - DNA, 21 bp, Artificial sequence
  SiRNA target sequence
gcaggagaagaagattcgtca

SEQ ID NO: 277716 - DNA, 21 bp, Artificial sequence
  SiRNA target sequence
caggagaagaagattcgtcat

SEQ ID NO: 277717 - DNA, 21 bp, Artificial sequence
  SiRNA target sequence
aggagaagaagattcgtcatt

SEQ ID NO: 277718 - DNA, 21 bp, Artificial sequence
  SiRNA target sequence
ggagaagaagattcgtcattt

SEQ ID NO: 277719 - DNA, 21 bp, Artificial sequence
  SiRNA target sequence
gagaagaagattcgtcatttt

SEQ ID NO: 277720 - DNA, 21 bp, Artificial sequence
  SiRNA target sequence
agaagaagattcgtcattttt

SEQ ID NO: 277721 - DNA, 21 bp, Artificial sequence
  SiRNA target sequence
gaagaagattcgtcatttttg

SEQ ID NO: 277722 - DNA, 21 bp, Artificial sequence
  SiRNA target sequence
aagaagattcgtcatttttgt

SEQ ID NO: 277723 - DNA, 21 bp, Artificial sequence
  SiRNA target sequence
agaagattcgtcatttttgtc

SEQ ID NO: 277724 - DNA, 21 bp, Artificial sequence
  SiRNA target sequence
gaagattcgtcatttttgtct

SEQ ID NO: 277725 - DNA, 21 bp, Artificial sequence
  SiRNA target sequence
aagattcgtcatttttgtctt

SEQ ID NO: 277726 - DNA, 21 bp, Artificial sequence
  SiRNA target sequence
agattcgtcatttttgtctta

SEQ ID NO: 277727 - DNA, 21 bp, Artificial sequence
  SiRNA target sequence
gattcgtcatttttgtcttat

SEQ ID NO: 277728 - DNA, 21 bp, Artificial sequence
  SiRNA target sequence
attcgtcatttttgtcttatg

SEQ ID NO: 277729 - DNA, 21 bp, Artificial sequence
  SiRNA target sequence
ttcgtcatttttgtcttatgt

SEQ ID NO: 277730 - DNA, 21 bp, Artificial sequence
  SiRNA target sequence
tcgtcatttttgtcttatgtt

SEQ ID NO: 277731 - DNA, 21 bp, Artificial sequence
  SiRNA target sequence
cgtcatttttgtcttatgtta

SEQ ID NO: 277732 - DNA, 21 bp, Artificial sequence
  SiRNA target sequence
gtcatttttgtcttatgttat

SEQ ID NO: 277733 - DNA, 21 bp, Artificial sequence
  SiRNA target sequence
tcatttttgtcttatgttatc

SEQ ID NO: 277734 - DNA, 21 bp, Artificial sequence
  SiRNA target sequence
catttttgtcttatgttatcc

SEQ ID NO: 277735 - DNA, 21 bp, Artificial sequence
  SiRNA target sequence
atttttgtcttatgttatccc

SEQ ID NO: 277736 - DNA, 21 bp, Artificial sequence
  SiRNA target sequence
tttttgtcttatgttatccca

SEQ ID NO: 277737 - DNA, 21 bp, Artificial sequence
  SiRNA target sequence
ttttgtcttatgttatcccac

SEQ ID NO: 277738 - DNA, 21 bp, Artificial sequence
  SiRNA target sequence
tttgtcttatgttatcccacc

SEQ ID NO: 277739 - DNA, 21 bp, Artificial sequence
  SiRNA target sequence
ttgtcttatgttatcccacca

SEQ ID NO: 277740 - DNA, 21 bp, Artificial sequence
  SiRNA target sequence
tgtcttatgttatcccaccat

SEQ ID NO: 277741 - DNA, 21 bp, Artificial sequence
  SiRNA target sequence
gtcttatgttatcccaccatt

SEQ ID NO: 277742 - DNA, 21 bp, Artificial sequence
  SiRNA target sequence
tcttatgttatcccaccattg

SEQ ID NO: 277743 - DNA, 21 bp, Artificial sequence
  SiRNA target sequence
cttatgttatcccaccattgt

SEQ ID NO: 277744 - DNA, 21 bp, Artificial sequence
  SiRNA target sequence
ttatgttatcccaccattgtt

SEQ ID NO: 277745 - DNA, 21 bp, Artificial sequence
  SiRNA target sequence
tatgttatcccaccattgttc

SEQ ID NO: 277746 - DNA, 21 bp, Artificial sequence
  SiRNA target sequence
atgttatcccaccattgttcc

SEQ ID NO: 277747 - DNA, 21 bp, Artificial sequence
  SiRNA target sequence
tgttatcccaccattgttcct

SEQ ID NO: 277748 - DNA, 21 bp, Artificial sequence
  SiRNA target sequence
gttatcccaccattgttccta

SEQ ID NO: 277749 - DNA, 21 bp, Artificial sequence
  SiRNA target sequence
ttatcccaccattgttcctag

SEQ ID NO: 277750 - DNA, 21 bp, Artificial sequence
  SiRNA target sequence
tatcccaccattgttcctaga

SEQ ID NO: 277751 - DNA, 21 bp, Artificial sequence
  SiRNA target sequence
atcccaccattgttcctagaa

SEQ ID NO: 277752 - DNA, 21 bp, Artificial sequence
  SiRNA target sequence
tcccaccattgttcctagaat

SEQ ID NO: 277753 - DNA, 21 bp, Artificial sequence
  SiRNA target sequence
cccaccattgttcctagaatc

SEQ ID NO: 277754 - DNA, 21 bp, Artificial sequence
  SiRNA target sequence
ccaccattgttcctagaatct

SEQ ID NO: 277755 - DNA, 21 bp, Artificial sequence
  SiRNA target sequence
caccattgttcctagaatctg

SEQ ID NO: 277756 - DNA, 21 bp, Artificial sequence
  SiRNA target sequence
accattgttcctagaatctgt

SEQ ID NO: 277757 - DNA, 21 bp, Artificial sequence
  SiRNA target sequence
ccattgttcctagaatctgta

SEQ ID NO: 277758 - DNA, 21 bp, Artificial sequence
  SiRNA target sequence
cattgttcctagaatctgtag

SEQ ID NO: 277759 - DNA, 21 bp, Artificial sequence
  SiRNA target sequence
attgttcctagaatctgtagt

SEQ ID NO: 277760 - DNA, 21 bp, Artificial sequence
  SiRNA target sequence
ttgttcctagaatctgtagtc

SEQ ID NO: 277761 - DNA, 21 bp, Artificial sequence
  SiRNA target sequence
tgttcctagaatctgtagtcg

SEQ ID NO: 277762 - DNA, 21 bp, Artificial sequence
  SiRNA target sequence
gttcctagaatctgtagtcga

SEQ ID NO: 277763 - DNA, 21 bp, Artificial sequence
  SiRNA target sequence
ttcctagaatctgtagtcgat

SEQ ID NO: 277764 - DNA, 21 bp, Artificial sequence
  SiRNA target sequence
tcctagaatctgtagtcgatt

SEQ ID NO: 277765 - DNA, 21 bp, Artificial sequence
  SiRNA target sequence
cctagaatctgtagtcgattc

SEQ ID NO: 277766 - DNA, 21 bp, Artificial sequence
  SiRNA target sequence
ctagaatctgtagtcgattct

SEQ ID NO: 277767 - DNA, 21 bp, Artificial sequence
  SiRNA target sequence
tagaatctgtagtcgattcta

SEQ ID NO: 277768 - DNA, 21 bp, Artificial sequence
  SiRNA target sequence
agaatctgtagtcgattctaa

SEQ ID NO: 277769 - DNA, 21 bp, Artificial sequence
  SiRNA target sequence
gaatctgtagtcgattctaaa

SEQ ID NO: 277770 - DNA, 21 bp, Artificial sequence
  SiRNA target sequence
aatctgtagtcgattctaaat

SEQ ID NO: 277771 - DNA, 21 bp, Artificial sequence
  SiRNA target sequence
atctgtagtcgattctaaatc

SEQ ID NO: 277772 - DNA, 21 bp, Artificial sequence
  SiRNA target sequence
tctgtagtcgattctaaatca

SEQ ID NO: 277773 - DNA, 21 bp, Artificial sequence
  SiRNA target sequence
ctgtagtcgattctaaatcaa

SEQ ID NO: 277774 - DNA, 21 bp, Artificial sequence
  SiRNA target sequence
tgtagtcgattctaaatcaaa

SEQ ID NO: 277775 - DNA, 21 bp, Artificial sequence
  SiRNA target sequence
gtagtcgattctaaatcaaat

SEQ ID NO: 277776 - DNA, 21 bp, Artificial sequence
  SiRNA target sequence
tagtcgattctaaatcaaatt

SEQ ID NO: 277777 - DNA, 21 bp, Artificial sequence
  SiRNA target sequence
agtcgattctaaatcaaattt

SEQ ID NO: 277778 - DNA, 21 bp, Artificial sequence
  SiRNA target sequence
gtcgattctaaatcaaatttg

SEQ ID NO: 277779 - DNA, 21 bp, Artificial sequence
  SiRNA target sequence
tcgattctaaatcaaatttgt

SEQ ID NO: 277780 - DNA, 21 bp, Artificial sequence
  SiRNA target sequence
cgattctaaatcaaatttgtt

SEQ ID NO: 277781 - DNA, 21 bp, Artificial sequence
  SiRNA target sequence
gattctaaatcaaatttgttt

SEQ ID NO: 277782 - DNA, 21 bp, Artificial sequence
  SiRNA target sequence
attctaaatcaaatttgttta

SEQ ID NO: 277783 - DNA, 21 bp, Artificial sequence
  SiRNA target sequence
ttctaaatcaaatttgtttaa

SEQ ID NO: 277784 - DNA, 21 bp, Artificial sequence
  SiRNA target sequence
tctaaatcaaatttgtttaag

SEQ ID NO: 277785 - DNA, 21 bp, Artificial sequence
  SiRNA target sequence
ctaaatcaaatttgtttaagc

SEQ ID NO: 277786 - DNA, 21 bp, Artificial sequence
  SiRNA target sequence
taaatcaaatttgtttaagcg

SEQ ID NO: 277787 - DNA, 21 bp, Artificial sequence
  SiRNA target sequence
aaatcaaatttgtttaagcga

SEQ ID NO: 277788 - DNA, 21 bp, Artificial sequence
  SiRNA target sequence
aatcaaatttgtttaagcgaa

SEQ ID NO: 277789 - DNA, 21 bp, Artificial sequence
  SiRNA target sequence
atcaaatttgtttaagcgaat

SEQ ID NO: 277790 - DNA, 21 bp, Artificial sequence
  SiRNA target sequence
tcaaatttgtttaagcgaatt

SEQ ID NO: 277791 - DNA, 21 bp, Artificial sequence
  SiRNA target sequence
caaatttgtttaagcgaattt

SEQ ID NO: 277792 - DNA, 21 bp, Artificial sequence
  SiRNA target sequence
aaatttgtttaagcgaatttg

SEQ ID NO: 277793 - DNA, 21 bp, Artificial sequence
  SiRNA target sequence
aatttgtttaagcgaatttgg

SEQ ID NO: 277794 - DNA, 21 bp, Artificial sequence
  SiRNA target sequence
atttgtttaagcgaatttgga

SEQ ID NO: 277795 - DNA, 21 bp, Artificial sequence
  SiRNA target sequence
tttgtttaagcgaatttggag

SEQ ID NO: 277796 - DNA, 21 bp, Artificial sequence
  SiRNA target sequence
ttgtttaagcgaatttggaga

SEQ ID NO: 277797 - DNA, 21 bp, Artificial sequence
  SiRNA target sequence
tgtttaagcgaatttggagaa

SEQ ID NO: 277798 - DNA, 21 bp, Artificial sequence
  SiRNA target sequence
gtttaagcgaatttggagaag

SEQ ID NO: 277799 - DNA, 21 bp, Artificial sequence
  SiRNA target sequence
tttaagcgaatttggagaagt

SEQ ID NO: 277800 - DNA, 21 bp, Artificial sequence
  SiRNA target sequence
ttaagcgaatttggagaagta

SEQ ID NO: 277801 - DNA, 21 bp, Artificial sequence
  SiRNA target sequence
taagcgaatttggagaagtaa

SEQ ID NO: 277802 - DNA, 21 bp, Artificial sequence
  SiRNA target sequence
aagcgaatttggagaagtaaa

SEQ ID NO: 277803 - DNA, 21 bp, Artificial sequence
  SiRNA target sequence
agcgaatttggagaagtaaag

SEQ ID NO: 277804 - DNA, 21 bp, Artificial sequence
  SiRNA target sequence
gcgaatttggagaagtaaaga

SEQ ID NO: 277805 - DNA, 21 bp, Artificial sequence
  SiRNA target sequence
cgaatttggagaagtaaagat

SEQ ID NO: 277806 - DNA, 21 bp, Artificial sequence
  SiRNA target sequence
gaatttggagaagtaaagatt

SEQ ID NO: 277807 - DNA, 21 bp, Artificial sequence
  SiRNA target sequence
aatttggagaagtaaagattt

SEQ ID NO: 277808 - DNA, 21 bp, Artificial sequence
  SiRNA target sequence
atttggagaagtaaagatttg

SEQ ID NO: 277809 - DNA, 21 bp, Artificial sequence
  SiRNA target sequence
tttggagaagtaaagatttgg

SEQ ID NO: 277810 - DNA, 21 bp, Artificial sequence
  SiRNA target sequence
ttggagaagtaaagatttgga

SEQ ID NO: 277811 - DNA, 21 bp, Artificial sequence
  SiRNA target sequence
tggagaagtaaagatttggat

SEQ ID NO: 277812 - DNA, 21 bp, Artificial sequence
  SiRNA target sequence
ggagaagtaaagatttggatt

SEQ ID NO: 277813 - DNA, 21 bp, Artificial sequence
  SiRNA target sequence
gagaagtaaagatttggattt

SEQ ID NO: 277814 - DNA, 21 bp, Artificial sequence
  SiRNA target sequence
agaagtaaagatttggattta

SEQ ID NO: 277815 - DNA, 21 bp, Artificial sequence
  SiRNA target sequence
gaagtaaagatttggatttaa

SEQ ID NO: 277816 - DNA, 21 bp, Artificial sequence
  SiRNA target sequence
aagtaaagatttggatttaat

SEQ ID NO: 277817 - DNA, 21 bp, Artificial sequence
  SiRNA target sequence
agtaaagatttggatttaata

SEQ ID NO: 277818 - DNA, 21 bp, Artificial sequence
  SiRNA target sequence
gtaaagatttggatttaatag

SEQ ID NO: 277819 - DNA, 21 bp, Artificial sequence
  SiRNA target sequence
taaagatttggatttaatagt

SEQ ID NO: 277820 - DNA, 21 bp, Artificial sequence
  SiRNA target sequence
aaagatttggatttaatagtc

SEQ ID NO: 277821 - DNA, 21 bp, Artificial sequence
  SiRNA target sequence
aagatttggatttaatagtca

SEQ ID NO: 277822 - DNA, 21 bp, Artificial sequence
  SiRNA target sequence
agatttggatttaatagtcaa

SEQ ID NO: 277823 - DNA, 21 bp, Artificial sequence
  SiRNA target sequence
gatttggatttaatagtcaag

SEQ ID NO: 277824 - DNA, 21 bp, Artificial sequence
  SiRNA target sequence
atttggatttaatagtcaagc

SEQ ID NO: 277825 - DNA, 21 bp, Artificial sequence
  SiRNA target sequence
tttggatttaatagtcaagcg

SEQ ID NO: 277826 - DNA, 21 bp, Artificial sequence
  SiRNA target sequence
ttggatttaatagtcaagcgg

SEQ ID NO: 277827 - DNA, 21 bp, Artificial sequence
  SiRNA target sequence
tggatttaatagtcaagcggt

SEQ ID NO: 277828 - DNA, 21 bp, Artificial sequence
  SiRNA target sequence
ggatttaatagtcaagcggtt

SEQ ID NO: 277829 - DNA, 21 bp, Artificial sequence
  SiRNA target sequence
gatttaatagtcaagcggtta

SEQ ID NO: 277830 - DNA, 21 bp, Artificial sequence
  SiRNA target sequence
atttaatagtcaagcggttat

SEQ ID NO: 277831 - DNA, 21 bp, Artificial sequence
  SiRNA target sequence
tttaatagtcaagcggttatc

SEQ ID NO: 277832 - DNA, 21 bp, Artificial sequence
  SiRNA target sequence
ttaatagtcaagcggttatct

SEQ ID NO: 277833 - DNA, 21 bp, Artificial sequence
  SiRNA target sequence
taatagtcaagcggttatctt

SEQ ID NO: 277834 - DNA, 21 bp, Artificial sequence
  SiRNA target sequence
aatagtcaagcggttatctta

SEQ ID NO: 277835 - DNA, 21 bp, Artificial sequence
  SiRNA target sequence
atagtcaagcggttatcttat

SEQ ID NO: 277836 - DNA, 21 bp, Artificial sequence
  SiRNA target sequence
tagtcaagcggttatcttatt

SEQ ID NO: 277837 - DNA, 21 bp, Artificial sequence
  SiRNA target sequence
agtcaagcggttatcttattt

SEQ ID NO: 277838 - DNA, 21 bp, Artificial sequence
  SiRNA target sequence
gtcaagcggttatcttatttt

SEQ ID NO: 277839 - DNA, 21 bp, Artificial sequence
  SiRNA target sequence
tcaagcggttatcttattttg

SEQ ID NO: 277840 - DNA, 21 bp, Artificial sequence
  SiRNA target sequence
caagcggttatcttattttgg

SEQ ID NO: 277841 - DNA, 21 bp, Artificial sequence
  SiRNA target sequence
aagcggttatcttattttgga

SEQ ID NO: 277842 - DNA, 21 bp, Artificial sequence
  SiRNA target sequence
agcggttatcttattttggag

SEQ ID NO: 277843 - DNA, 21 bp, Artificial sequence
  SiRNA target sequence
gcggttatcttattttggaga

SEQ ID NO: 277844 - DNA, 21 bp, Artificial sequence
  SiRNA target sequence
cggttatcttattttggagat

SEQ ID NO: 277845 - DNA, 21 bp, Artificial sequence
  SiRNA target sequence
ggttatcttattttggagatt

SEQ ID NO: 277846 - DNA, 21 bp, Artificial sequence
  SiRNA target sequence
gttatcttattttggagattc

SEQ ID NO: 277847 - DNA, 21 bp, Artificial sequence
  SiRNA target sequence
ttatcttattttggagattcc

SEQ ID NO: 277848 - DNA, 21 bp, Artificial sequence
  SiRNA target sequence
tatcttattttggagattcca

SEQ ID NO: 277849 - DNA, 21 bp, Artificial sequence
  SiRNA target sequence
atcttattttggagattccaa

SEQ ID NO: 277850 - DNA, 21 bp, Artificial sequence
  SiRNA target sequence
tcttattttggagattccaag

SEQ ID NO: 277851 - DNA, 21 bp, Artificial sequence
  SiRNA target sequence
cttattttggagattccaaga

SEQ ID NO: 277852 - DNA, 21 bp, Artificial sequence
  SiRNA target sequence
ttattttggagattccaagat

SEQ ID NO: 277853 - DNA, 21 bp, Artificial sequence
  SiRNA target sequence
tattttggagattccaagata

SEQ ID NO: 277854 - DNA, 21 bp, Artificial sequence
  SiRNA target sequence
attttggagattccaagatat

SEQ ID NO: 277855 - DNA, 21 bp, Artificial sequence
  SiRNA target sequence
ttttggagattccaagatata

SEQ ID NO: 277856 - DNA, 21 bp, Artificial sequence
  SiRNA target sequence
tttggagattccaagatatat

SEQ ID NO: 277857 - DNA, 21 bp, Artificial sequence
  SiRNA target sequence
ttggagattccaagatatata

SEQ ID NO: 277858 - DNA, 21 bp, Artificial sequence
  SiRNA target sequence
tggagattccaagatatataa

SEQ ID NO: 277859 - DNA, 21 bp, Artificial sequence
  SiRNA target sequence
ggagattccaagatatataac

SEQ ID NO: 277860 - DNA, 21 bp, Artificial sequence
  SiRNA target sequence
gagattccaagatatataacg

SEQ ID NO: 277861 - DNA, 21 bp, Artificial sequence
  SiRNA target sequence
agattccaagatatataacgc

SEQ ID NO: 277862 - DNA, 21 bp, Artificial sequence
  SiRNA target sequence
gattccaagatatataacgcg

SEQ ID NO: 277863 - DNA, 21 bp, Artificial sequence
  SiRNA target sequence
attccaagatatataacgcgt

SEQ ID NO: 277864 - DNA, 21 bp, Artificial sequence
  SiRNA target sequence
ttccaagatatataacgcgtt

SEQ ID NO: 277865 - DNA, 21 bp, Artificial sequence
  SiRNA target sequence
tccaagatatataacgcgttt

SEQ ID NO: 277866 - DNA, 21 bp, Artificial sequence
  SiRNA target sequence
ccaagatatataacgcgtttg

SEQ ID NO: 277867 - DNA, 21 bp, Artificial sequence
  SiRNA target sequence
caagatatataacgcgtttga

SEQ ID NO: 277868 - DNA, 21 bp, Artificial sequence
  SiRNA target sequence
aagatatataacgcgtttgac

SEQ ID NO: 277869 - DNA, 21 bp, Artificial sequence
  SiRNA target sequence
agatatataacgcgtttgaca

SEQ ID NO: 277870 - DNA, 21 bp, Artificial sequence
  SiRNA target sequence
gatatataacgcgtttgacaa

SEQ ID NO: 277871 - DNA, 21 bp, Artificial sequence
  SiRNA target sequence
atatataacgcgtttgacaat

SEQ ID NO: 277872 - DNA, 21 bp, Artificial sequence
  SiRNA target sequence
tatataacgcgtttgacaata

SEQ ID NO: 277873 - DNA, 21 bp, Artificial sequence
  SiRNA target sequence
atataacgcgtttgacaatat

SEQ ID NO: 277874 - DNA, 21 bp, Artificial sequence
  SiRNA target sequence
tataacgcgtttgacaatatt

SEQ ID NO: 277875 - DNA, 21 bp, Artificial sequence
  SiRNA target sequence
ataacgcgtttgacaatattg

SEQ ID NO: 277876 - DNA, 21 bp, Artificial sequence
  SiRNA target sequence
taacgcgtttgacaatattgg

SEQ ID NO: 277877 - DNA, 21 bp, Artificial sequence
  SiRNA target sequence
aacgcgtttgacaatattgga

SEQ ID NO: 277878 - DNA, 21 bp, Artificial sequence
  SiRNA target sequence
acgcgtttgacaatattggaa

SEQ ID NO: 277879 - DNA, 21 bp, Artificial sequence
  SiRNA target sequence
cgcgtttgacaatattggaac

SEQ ID NO: 277880 - DNA, 21 bp, Artificial sequence
  SiRNA target sequence
gcgtttgacaatattggaact

SEQ ID NO: 277881 - DNA, 21 bp, Artificial sequence
  SiRNA target sequence
cgtttgacaatattggaactt

SEQ ID NO: 277882 - DNA, 21 bp, Artificial sequence
  SiRNA target sequence
gtttgacaatattggaacttg

SEQ ID NO: 277883 - DNA, 21 bp, Artificial sequence
  SiRNA target sequence
tttgacaatattggaacttgg

SEQ ID NO: 277884 - DNA, 21 bp, Artificial sequence
  SiRNA target sequence
ttgacaatattggaacttggt

SEQ ID NO: 277885 - DNA, 21 bp, Artificial sequence
  SiRNA target sequence
tgacaatattggaacttggtt

SEQ ID NO: 277886 - DNA, 21 bp, Artificial sequence
  SiRNA target sequence
gacaatattggaacttggtta

SEQ ID NO: 277887 - DNA, 21 bp, Artificial sequence
  SiRNA target sequence
acaatattggaacttggttaa

SEQ ID NO: 277888 - DNA, 21 bp, Artificial sequence
  SiRNA target sequence
caatattggaacttggttaac

SEQ ID NO: 277889 - DNA, 21 bp, Artificial sequence
  SiRNA target sequence
aatattggaacttggttaaca

SEQ ID NO: 277890 - DNA, 21 bp, Artificial sequence
  SiRNA target sequence
atattggaacttggttaacaa

SEQ ID NO: 277891 - DNA, 21 bp, Artificial sequence
  SiRNA target sequence
tattggaacttggttaacaac

SEQ ID NO: 277892 - DNA, 21 bp, Artificial sequence
  SiRNA target sequence
attggaacttggttaacaact

SEQ ID NO: 277893 - DNA, 21 bp, Artificial sequence
  SiRNA target sequence
ttggaacttggttaacaacta

SEQ ID NO: 277894 - DNA, 21 bp, Artificial sequence
  SiRNA target sequence
tggaacttggttaacaactat

SEQ ID NO: 277895 - DNA, 21 bp, Artificial sequence
  SiRNA target sequence
ggaacttggttaacaactatg

SEQ ID NO: 277896 - DNA, 21 bp, Artificial sequence
  SiRNA target sequence
gaacttggttaacaactatga

SEQ ID NO: 277897 - DNA, 21 bp, Artificial sequence
  SiRNA target sequence
aacttggttaacaactatgat

SEQ ID NO: 277898 - DNA, 21 bp, Artificial sequence
  SiRNA target sequence
acttggttaacaactatgata

SEQ ID NO: 277899 - DNA, 21 bp, Artificial sequence
  SiRNA target sequence
cttggttaacaactatgataa

SEQ ID NO: 277900 - DNA, 21 bp, Artificial sequence
  SiRNA target sequence
ttggttaacaactatgataaa

SEQ ID NO: 277901 - DNA, 21 bp, Artificial sequence
  SiRNA target sequence
tggttaacaactatgataaac

SEQ ID NO: 277902 - DNA, 21 bp, Artificial sequence
  SiRNA target sequence
ggttaacaactatgataaaca

SEQ ID NO: 277903 - DNA, 21 bp, Artificial sequence
  SiRNA target sequence
gttaacaactatgataaacac

SEQ ID NO: 277904 - DNA, 21 bp, Artificial sequence
  SiRNA target sequence
ttaacaactatgataaacaca

SEQ ID NO: 277905 - DNA, 21 bp, Artificial sequence
  SiRNA target sequence
taacaactatgataaacacaa

SEQ ID NO: 277906 - DNA, 21 bp, Artificial sequence
  SiRNA target sequence
aacaactatgataaacacaac

SEQ ID NO: 277907 - DNA, 21 bp, Artificial sequence
  SiRNA target sequence
acaactatgataaacacaacg

SEQ ID NO: 277908 - DNA, 21 bp, Artificial sequence
  SiRNA target sequence
caactatgataaacacaacgg

SEQ ID NO: 277909 - DNA, 21 bp, Artificial sequence
  SiRNA target sequence
aactatgataaacacaacggt

SEQ ID NO: 277910 - DNA, 21 bp, Artificial sequence
  SiRNA target sequence
actatgataaacacaacggtg

SEQ ID NO: 277911 - DNA, 21 bp, Artificial sequence
  SiRNA target sequence
ctatgataaacacaacggtga

SEQ ID NO: 277912 - DNA, 21 bp, Artificial sequence
  SiRNA target sequence
tatgataaacacaacggtgaa

SEQ ID NO: 277913 - DNA, 21 bp, Artificial sequence
  SiRNA target sequence
atgataaacacaacggtgaat

SEQ ID NO: 277914 - DNA, 21 bp, Artificial sequence
  SiRNA target sequence
tgataaacacaacggtgaatt

SEQ ID NO: 277915 - DNA, 21 bp, Artificial sequence
  SiRNA target sequence
gataaacacaacggtgaatta

SEQ ID NO: 277916 - DNA, 21 bp, Artificial sequence
  SiRNA target sequence
ataaacacaacggtgaattat

SEQ ID NO: 277917 - DNA, 21 bp, Artificial sequence
  SiRNA target sequence
taaacacaacggtgaattatg

SEQ ID NO: 277918 - DNA, 21 bp, Artificial sequence
  SiRNA target sequence
aaacacaacggtgaattatgt

SEQ ID NO: 277919 - DNA, 21 bp, Artificial sequence
  SiRNA target sequence
aacacaacggtgaattatgtg

SEQ ID NO: 277920 - DNA, 21 bp, Artificial sequence
  SiRNA target sequence
acacaacggtgaattatgtga

SEQ ID NO: 277921 - DNA, 21 bp, Artificial sequence
  SiRNA target sequence
cacaacggtgaattatgtgaa

SEQ ID NO: 277922 - DNA, 21 bp, Artificial sequence
  SiRNA target sequence
acaacggtgaattatgtgaag

SEQ ID NO: 277923 - DNA, 21 bp, Artificial sequence
  SiRNA target sequence
caacggtgaattatgtgaagg

SEQ ID NO: 277924 - DNA, 21 bp, Artificial sequence
  SiRNA target sequence
aacggtgaattatgtgaaggt

SEQ ID NO: 277925 - DNA, 21 bp, Artificial sequence
  SiRNA target sequence
acggtgaattatgtgaaggtt

SEQ ID NO: 277926 - DNA, 21 bp, Artificial sequence
  SiRNA target sequence
cggtgaattatgtgaaggtta

SEQ ID NO: 277927 - DNA, 21 bp, Artificial sequence
  SiRNA target sequence
ggtgaattatgtgaaggttac

SEQ ID NO: 277928 - DNA, 21 bp, Artificial sequence
  SiRNA target sequence
gtgaattatgtgaaggttacg

SEQ ID NO: 277929 - DNA, 21 bp, Artificial sequence
  SiRNA target sequence
tgaattatgtgaaggttacgc

SEQ ID NO: 277930 - DNA, 21 bp, Artificial sequence
  SiRNA target sequence
gaattatgtgaaggttacgct

SEQ ID NO: 277931 - DNA, 21 bp, Artificial sequence
  SiRNA target sequence
aattatgtgaaggttacgctc

SEQ ID NO: 277932 - DNA, 21 bp, Artificial sequence
  SiRNA target sequence
attatgtgaaggttacgctcc

SEQ ID NO: 277933 - DNA, 21 bp, Artificial sequence
  SiRNA target sequence
ttatgtgaaggttacgctcct

SEQ ID NO: 277934 - DNA, 21 bp, Artificial sequence
  SiRNA target sequence
tatgtgaaggttacgctcctg

SEQ ID NO: 277935 - DNA, 21 bp, Artificial sequence
  SiRNA target sequence
atgtgaaggttacgctcctgg

SEQ ID NO: 277936 - DNA, 21 bp, Artificial sequence
  SiRNA target sequence
tgtgaaggttacgctcctggg

SEQ ID NO: 277937 - DNA, 21 bp, Artificial sequence
  SiRNA target sequence
gtgaaggttacgctcctgggt

SEQ ID NO: 277938 - DNA, 21 bp, Artificial sequence
  SiRNA target sequence
tgaaggttacgctcctgggtc

SEQ ID NO: 277939 - DNA, 21 bp, Artificial sequence
  SiRNA target sequence
gaaggttacgctcctgggtca

SEQ ID NO: 277940 - DNA, 21 bp, Artificial sequence
  SiRNA target sequence
aaggttacgctcctgggtcat

SEQ ID NO: 277941 - DNA, 21 bp, Artificial sequence
  SiRNA target sequence
aggttacgctcctgggtcatg

SEQ ID NO: 277942 - DNA, 21 bp, Artificial sequence
  SiRNA target sequence
ggttacgctcctgggtcatga

SEQ ID NO: 277943 - DNA, 21 bp, Artificial sequence
  SiRNA target sequence
gttacgctcctgggtcatgat

SEQ ID NO: 277944 - DNA, 21 bp, Artificial sequence
  SiRNA target sequence
ttacgctcctgggtcatgatc

SEQ ID NO: 277945 - DNA, 21 bp, Artificial sequence
  SiRNA target sequence
tacgctcctgggtcatgatcc

SEQ ID NO: 277946 - DNA, 21 bp, Artificial sequence
  SiRNA target sequence
acgctcctgggtcatgatcct

SEQ ID NO: 277947 - DNA, 21 bp, Artificial sequence
  SiRNA target sequence
cgctcctgggtcatgatcctg

SEQ ID NO: 277948 - DNA, 21 bp, Artificial sequence
  SiRNA target sequence
gctcctgggtcatgatcctga

SEQ ID NO: 277949 - DNA, 21 bp, Artificial sequence
  SiRNA target sequence
ctcctgggtcatgatcctgaa

SEQ ID NO: 277950 - DNA, 21 bp, Artificial sequence
  SiRNA target sequence
tcctgggtcatgatcctgaag

SEQ ID NO: 277951 - DNA, 21 bp, Artificial sequence
  SiRNA target sequence
cctgggtcatgatcctgaaga

SEQ ID NO: 277952 - DNA, 21 bp, Artificial sequence
  SiRNA target sequence
ctgggtcatgatcctgaagaa

SEQ ID NO: 277953 - DNA, 21 bp, Artificial sequence
  SiRNA target sequence
tgggtcatgatcctgaagaat

SEQ ID NO: 277954 - DNA, 21 bp, Artificial sequence
  SiRNA target sequence
gggtcatgatcctgaagaatt

SEQ ID NO: 277955 - DNA, 21 bp, Artificial sequence
  SiRNA target sequence
ggtcatgatcctgaagaattt

SEQ ID NO: 277956 - DNA, 21 bp, Artificial sequence
  SiRNA target sequence
gtcatgatcctgaagaatttc

SEQ ID NO: 277957 - DNA, 21 bp, Artificial sequence
  SiRNA target sequence
tcatgatcctgaagaatttct

SEQ ID NO: 277958 - DNA, 21 bp, Artificial sequence
  SiRNA target sequence
catgatcctgaagaatttctg

SEQ ID NO: 277959 - DNA, 21 bp, Artificial sequence
  SiRNA target sequence
atgatcctgaagaatttctgg

SEQ ID NO: 277960 - DNA, 21 bp, Artificial sequence
  SiRNA target sequence
tgatcctgaagaatttctgga

SEQ ID NO: 277961 - DNA, 21 bp, Artificial sequence
  SiRNA target sequence
gatcctgaagaatttctggag

SEQ ID NO: 277962 - DNA, 21 bp, Artificial sequence
  SiRNA target sequence
atcctgaagaatttctggaga

SEQ ID NO: 277963 - DNA, 21 bp, Artificial sequence
  SiRNA target sequence
tcctgaagaatttctggagaa

SEQ ID NO: 277964 - DNA, 21 bp, Artificial sequence
  SiRNA target sequence
cctgaagaatttctggagaat

SEQ ID NO: 277965 - DNA, 21 bp, Artificial sequence
  SiRNA target sequence
ctgaagaatttctggagaatc

SEQ ID NO: 277966 - DNA, 21 bp, Artificial sequence
  SiRNA target sequence
tgaagaatttctggagaatca

SEQ ID NO: 277967 - DNA, 21 bp, Artificial sequence
  SiRNA target sequence
gaagaatttctggagaatcag

SEQ ID NO: 277968 - DNA, 21 bp, Artificial sequence
  SiRNA target sequence
aagaatttctggagaatcaga

SEQ ID NO: 277969 - DNA, 21 bp, Artificial sequence
  SiRNA target sequence
agaatttctggagaatcagag

SEQ ID NO: 277970 - DNA, 21 bp, Artificial sequence
  SiRNA target sequence
gaatttctggagaatcagagt

SEQ ID NO: 277971 - DNA, 21 bp, Artificial sequence
  SiRNA target sequence
aatttctggagaatcagagtg

SEQ ID NO: 277972 - DNA, 21 bp, Artificial sequence
  SiRNA target sequence
atttctggagaatcagagtga

SEQ ID NO: 277973 - DNA, 21 bp, Artificial sequence
  SiRNA target sequence
tttctggagaatcagagtgac

SEQ ID NO: 277974 - DNA, 21 bp, Artificial sequence
  SiRNA target sequence
ttctggagaatcagagtgacc

SEQ ID NO: 277975 - DNA, 21 bp, Artificial sequence
  SiRNA target sequence
tctggagaatcagagtgaccc

SEQ ID NO: 277976 - DNA, 21 bp, Artificial sequence
  SiRNA target sequence
ctggagaatcagagtgaccct

SEQ ID NO: 277977 - DNA, 21 bp, Artificial sequence
  SiRNA target sequence
tggagaatcagagtgaccctt

SEQ ID NO: 277978 - DNA, 21 bp, Artificial sequence
  SiRNA target sequence
ggagaatcagagtgacccttt

SEQ ID NO: 277979 - DNA, 21 bp, Artificial sequence
  SiRNA target sequence
gagaatcagagtgaccctttg

SEQ ID NO: 277980 - DNA, 21 bp, Artificial sequence
  SiRNA target sequence
agaatcagagtgaccctttgg

SEQ ID NO: 277981 - DNA, 21 bp, Artificial sequence
  SiRNA target sequence
gaatcagagtgaccctttggt

SEQ ID NO: 277982 - DNA, 21 bp, Artificial sequence
  SiRNA target sequence
aatcagagtgaccctttggtg

SEQ ID NO: 277983 - DNA, 21 bp, Artificial sequence
  SiRNA target sequence
atcagagtgaccctttggtgg

SEQ ID NO: 277984 - DNA, 21 bp, Artificial sequence
  SiRNA target sequence
tcagagtgaccctttggtgga

SEQ ID NO: 277985 - DNA, 21 bp, Artificial sequence
  SiRNA target sequence
cagagtgaccctttggtggat

SEQ ID NO: 277986 - DNA, 21 bp, Artificial sequence
  SiRNA target sequence
agagtgaccctttggtggatt

SEQ ID NO: 277987 - DNA, 21 bp, Artificial sequence
  SiRNA target sequence
gagtgaccctttggtggattg

SEQ ID NO: 277988 - DNA, 21 bp, Artificial sequence
  SiRNA target sequence
agtgaccctttggtggattgg

SEQ ID NO: 277989 - DNA, 21 bp, Artificial sequence
  SiRNA target sequence
gtgaccctttggtggattggg

SEQ ID NO: 277990 - DNA, 21 bp, Artificial sequence
  SiRNA target sequence
tgaccctttggtggattggga

SEQ ID NO: 277991 - DNA, 21 bp, Artificial sequence
  SiRNA target sequence
gaccctttggtggattgggaa

SEQ ID NO: 277992 - DNA, 21 bp, Artificial sequence
  SiRNA target sequence
accctttggtggattgggaag

SEQ ID NO: 277993 - DNA, 21 bp, Artificial sequence
  SiRNA target sequence
ccctttggtggattgggaaga

SEQ ID NO: 277994 - DNA, 21 bp, Artificial sequence
  SiRNA target sequence
cctttggtggattgggaagag

SEQ ID NO: 277995 - DNA, 21 bp, Artificial sequence
  SiRNA target sequence
ctttggtggattgggaagagc

SEQ ID NO: 277996 - DNA, 21 bp, Artificial sequence
  SiRNA target sequence
tttggtggattgggaagagca

SEQ ID NO: 277997 - DNA, 21 bp, Artificial sequence
  SiRNA target sequence
ttggtggattgggaagagcag

SEQ ID NO: 277998 - DNA, 21 bp, Artificial sequence
  SiRNA target sequence
tggtggattgggaagagcagt

SEQ ID NO: 277999 - DNA, 21 bp, Artificial sequence
  SiRNA target sequence
ggtggattgggaagagcagtg

SEQ ID NO: 278000 - DNA, 21 bp, Artificial sequence
  SiRNA target sequence
gtggattgggaagagcagtgt

SEQ ID NO: 278001 - DNA, 21 bp, Artificial sequence
  SiRNA target sequence
tggattgggaagagcagtgta

SEQ ID NO: 278002 - DNA, 21 bp, Artificial sequence
  SiRNA target sequence
ggattgggaagagcagtgtag

SEQ ID NO: 278003 - DNA, 21 bp, Artificial sequence
  SiRNA target sequence
gattgggaagagcagtgtagg

SEQ ID NO: 278004 - DNA, 21 bp, Artificial sequence
  SiRNA target sequence
attgggaagagcagtgtagga

SEQ ID NO: 278005 - DNA, 21 bp, Artificial sequence
  SiRNA target sequence
ttgggaagagcagtgtaggaa

SEQ ID NO: 278006 - DNA, 21 bp, Artificial sequence
  SiRNA target sequence
tgggaagagcagtgtaggaaa

SEQ ID NO: 278007 - DNA, 21 bp, Artificial sequence
  SiRNA target sequence
gggaagagcagtgtaggaaac

SEQ ID NO: 278008 - DNA, 21 bp, Artificial sequence
  SiRNA target sequence
ggaagagcagtgtaggaaaca

SEQ ID NO: 278009 - DNA, 21 bp, Artificial sequence
  SiRNA target sequence
gaagagcagtgtaggaaacat

SEQ ID NO: 278010 - DNA, 21 bp, Artificial sequence
  SiRNA target sequence
aagagcagtgtaggaaacatt

SEQ ID NO: 278011 - DNA, 21 bp, Artificial sequence
  SiRNA target sequence
agagcagtgtaggaaacattt

SEQ ID NO: 278012 - DNA, 21 bp, Artificial sequence
  SiRNA target sequence
gagcagtgtaggaaacatttt

SEQ ID NO: 278013 - DNA, 21 bp, Artificial sequence
  SiRNA target sequence
agcagtgtaggaaacattttg

SEQ ID NO: 278014 - DNA, 21 bp, Artificial sequence
  SiRNA target sequence
gcagtgtaggaaacattttgt

SEQ ID NO: 278015 - DNA, 21 bp, Artificial sequence
  SiRNA target sequence
cagtgtaggaaacattttgtt

SEQ ID NO: 278016 - DNA, 21 bp, Artificial sequence
  SiRNA target sequence
agtgtaggaaacattttgttt

SEQ ID NO: 278017 - DNA, 21 bp, Artificial sequence
  SiRNA target sequence
gtgtaggaaacattttgtttc

SEQ ID NO: 278018 - DNA, 21 bp, Artificial sequence
  SiRNA target sequence
tgtaggaaacattttgtttca

SEQ ID NO: 278019 - DNA, 21 bp, Artificial sequence
  SiRNA target sequence
gtaggaaacattttgtttcag

SEQ ID NO: 278020 - DNA, 21 bp, Artificial sequence
  SiRNA target sequence
taggaaacattttgtttcaga

SEQ ID NO: 278021 - DNA, 21 bp, Artificial sequence
  SiRNA target sequence
aggaaacattttgtttcagat

SEQ ID NO: 278022 - DNA, 21 bp, Artificial sequence
  SiRNA target sequence
ggaaacattttgtttcagata

SEQ ID NO: 278023 - DNA, 21 bp, Artificial sequence
  SiRNA target sequence
gaaacattttgtttcagatac

SEQ ID NO: 278024 - DNA, 21 bp, Artificial sequence
  SiRNA target sequence
aaacattttgtttcagatact

SEQ ID NO: 278025 - DNA, 21 bp, Artificial sequence
  SiRNA target sequence
aacattttgtttcagatactg

SEQ ID NO: 278026 - DNA, 21 bp, Artificial sequence
  SiRNA target sequence
acattttgtttcagatactga

SEQ ID NO: 278027 - DNA, 21 bp, Artificial sequence
  SiRNA target sequence
cattttgtttcagatactgac

SEQ ID NO: 278028 - DNA, 21 bp, Artificial sequence
  SiRNA target sequence
attttgtttcagatactgaca

SEQ ID NO: 278029 - DNA, 21 bp, Artificial sequence
  SiRNA target sequence
ttttgtttcagatactgacag

SEQ ID NO: 278030 - DNA, 21 bp, Artificial sequence
  SiRNA target sequence
tttgtttcagatactgacaga

SEQ ID NO: 278031 - DNA, 21 bp, Artificial sequence
  SiRNA target sequence
ttgtttcagatactgacagaa

SEQ ID NO: 278032 - DNA, 21 bp, Artificial sequence
  SiRNA target sequence
tgtttcagatactgacagaat

SEQ ID NO: 278033 - DNA, 21 bp, Artificial sequence
  SiRNA target sequence
gtttcagatactgacagaata

SEQ ID NO: 278034 - DNA, 21 bp, Artificial sequence
  SiRNA target sequence
tttcagatactgacagaatag

SEQ ID NO: 278035 - DNA, 21 bp, Artificial sequence
  SiRNA target sequence
ttcagatactgacagaatagc

SEQ ID NO: 278036 - DNA, 21 bp, Artificial sequence
  SiRNA target sequence
tcagatactgacagaatagcg

SEQ ID NO: 278037 - DNA, 21 bp, Artificial sequence
  SiRNA target sequence
cagatactgacagaatagcga

SEQ ID NO: 278038 - DNA, 21 bp, Artificial sequence
  SiRNA target sequence
agatactgacagaatagcgat

SEQ ID NO: 278039 - DNA, 21 bp, Artificial sequence
  SiRNA target sequence
gatactgacagaatagcgatc

SEQ ID NO: 278040 - DNA, 21 bp, Artificial sequence
  SiRNA target sequence
atactgacagaatagcgatct

SEQ ID NO: 278041 - DNA, 21 bp, Artificial sequence
  SiRNA target sequence
tactgacagaatagcgatcta

SEQ ID NO: 278042 - DNA, 21 bp, Artificial sequence
  SiRNA target sequence
actgacagaatagcgatctat

SEQ ID NO: 278043 - DNA, 21 bp, Artificial sequence
  SiRNA target sequence
ctgacagaatagcgatctata

SEQ ID NO: 278044 - DNA, 21 bp, Artificial sequence
  SiRNA target sequence
tgacagaatagcgatctatac

SEQ ID NO: 278045 - DNA, 21 bp, Artificial sequence
  SiRNA target sequence
gacagaatagcgatctataca

SEQ ID NO: 278046 - DNA, 21 bp, Artificial sequence
  SiRNA target sequence
acagaatagcgatctatacag

SEQ ID NO: 278047 - DNA, 21 bp, Artificial sequence
  SiRNA target sequence
cagaatagcgatctatacaga

SEQ ID NO: 278048 - DNA, 21 bp, Artificial sequence
  SiRNA target sequence
agaatagcgatctatacagag

SEQ ID NO: 278049 - DNA, 21 bp, Artificial sequence
  SiRNA target sequence
gaatagcgatctatacagagt

SEQ ID NO: 278050 - DNA, 21 bp, Artificial sequence
  SiRNA target sequence
aatagcgatctatacagagtc

SEQ ID NO: 278051 - DNA, 21 bp, Artificial sequence
  SiRNA target sequence
atagcgatctatacagagtct

SEQ ID NO: 278052 - DNA, 21 bp, Artificial sequence
  SiRNA target sequence
tagcgatctatacagagtcta

SEQ ID NO: 278053 - DNA, 21 bp, Artificial sequence
  SiRNA target sequence
agcgatctatacagagtctac

SEQ ID NO: 278054 - DNA, 21 bp, Artificial sequence
  SiRNA target sequence
gcgatctatacagagtctacg

SEQ ID NO: 278055 - DNA, 21 bp, Artificial sequence
  SiRNA target sequence
cgatctatacagagtctacgt

SEQ ID NO: 278056 - DNA, 21 bp, Artificial sequence
  SiRNA target sequence
gatctatacagagtctacgtt

SEQ ID NO: 278057 - DNA, 21 bp, Artificial sequence
  SiRNA target sequence
atctatacagagtctacgtta

SEQ ID NO: 278058 - DNA, 21 bp, Artificial sequence
  SiRNA target sequence
tctatacagagtctacgttag

SEQ ID NO: 278059 - DNA, 21 bp, Artificial sequence
  SiRNA target sequence
ctatacagagtctacgttagc

SEQ ID NO: 278060 - DNA, 21 bp, Artificial sequence
  SiRNA target sequence
tatacagagtctacgttagcg

SEQ ID NO: 278061 - DNA, 21 bp, Artificial sequence
  SiRNA target sequence
atacagagtctacgttagcgg

SEQ ID NO: 278062 - DNA, 21 bp, Artificial sequence
  SiRNA target sequence
tacagagtctacgttagcgga

SEQ ID NO: 278063 - DNA, 21 bp, Artificial sequence
  SiRNA target sequence
acagagtctacgttagcggat

SEQ ID NO: 278064 - DNA, 21 bp, Artificial sequence
  SiRNA target sequence
cagagtctacgttagcggata

SEQ ID NO: 278065 - DNA, 21 bp, Artificial sequence
  SiRNA target sequence
agagtctacgttagcggatat

SEQ ID NO: 278066 - DNA, 21 bp, Artificial sequence
  SiRNA target sequence
gagtctacgttagcggatatc

SEQ ID NO: 278067 - DNA, 21 bp, Artificial sequence
  SiRNA target sequence
agtctacgttagcggatatca

SEQ ID NO: 278068 - DNA, 21 bp, Artificial sequence
  SiRNA target sequence
gtctacgttagcggatatcaa

SEQ ID NO: 278069 - DNA, 21 bp, Artificial sequence
  SiRNA target sequence
tctacgttagcggatatcaaa

SEQ ID NO: 278070 - DNA, 21 bp, Artificial sequence
  SiRNA target sequence
ctacgttagcggatatcaaac

SEQ ID NO: 278071 - DNA, 21 bp, Artificial sequence
  SiRNA target sequence
tacgttagcggatatcaaacg

SEQ ID NO: 278072 - DNA, 21 bp, Artificial sequence
  SiRNA target sequence
acgttagcggatatcaaacgt

SEQ ID NO: 278073 - DNA, 21 bp, Artificial sequence
  SiRNA target sequence
cgttagcggatatcaaacgtc

SEQ ID NO: 278074 - DNA, 21 bp, Artificial sequence
  SiRNA target sequence
gttagcggatatcaaacgtct

SEQ ID NO: 278075 - DNA, 21 bp, Artificial sequence
  SiRNA target sequence
ttagcggatatcaaacgtctg

SEQ ID NO: 278076 - DNA, 21 bp, Artificial sequence
  SiRNA target sequence
tagcggatatcaaacgtctgt

SEQ ID NO: 278077 - DNA, 21 bp, Artificial sequence
  SiRNA target sequence
agcggatatcaaacgtctgta

SEQ ID NO: 278078 - DNA, 21 bp, Artificial sequence
  SiRNA target sequence
gcggatatcaaacgtctgtac

SEQ ID NO: 278079 - DNA, 21 bp, Artificial sequence
  SiRNA target sequence
cggatatcaaacgtctgtaca

SEQ ID NO: 278080 - DNA, 21 bp, Artificial sequence
  SiRNA target sequence
ggatatcaaacgtctgtacaa

SEQ ID NO: 278081 - DNA, 21 bp, Artificial sequence
  SiRNA target sequence
gatatcaaacgtctgtacaat

SEQ ID NO: 278082 - DNA, 21 bp, Artificial sequence
  SiRNA target sequence
atatcaaacgtctgtacaata

SEQ ID NO: 278083 - DNA, 21 bp, Artificial sequence
  SiRNA target sequence
tatcaaacgtctgtacaatat

SEQ ID NO: 278084 - DNA, 21 bp, Artificial sequence
  SiRNA target sequence
atcaaacgtctgtacaatatg

SEQ ID NO: 278085 - DNA, 21 bp, Artificial sequence
  SiRNA target sequence
tcaaacgtctgtacaatatgg

SEQ ID NO: 278086 - DNA, 21 bp, Artificial sequence
  SiRNA target sequence
caaacgtctgtacaatatggg

SEQ ID NO: 278087 - DNA, 21 bp, Artificial sequence
  SiRNA target sequence
aaacgtctgtacaatatgggc

SEQ ID NO: 278088 - DNA, 21 bp, Artificial sequence
  SiRNA target sequence
aacgtctgtacaatatgggcg

SEQ ID NO: 278089 - DNA, 21 bp, Artificial sequence
  SiRNA target sequence
acgtctgtacaatatgggcgt

SEQ ID NO: 278090 - DNA, 21 bp, Artificial sequence
  SiRNA target sequence
cgtctgtacaatatgggcgtt

SEQ ID NO: 278091 - DNA, 21 bp, Artificial sequence
  SiRNA target sequence
gtctgtacaatatgggcgtta

SEQ ID NO: 278092 - DNA, 21 bp, Artificial sequence
  SiRNA target sequence
tctgtacaatatgggcgttag

SEQ ID NO: 278093 - DNA, 21 bp, Artificial sequence
  SiRNA target sequence
ctgtacaatatgggcgttagt

SEQ ID NO: 278094 - DNA, 21 bp, Artificial sequence
  SiRNA target sequence
tgtacaatatgggcgttagtt

SEQ ID NO: 278095 - DNA, 21 bp, Artificial sequence
  SiRNA target sequence
gtacaatatgggcgttagtta

SEQ ID NO: 278096 - DNA, 21 bp, Artificial sequence
  SiRNA target sequence
tacaatatgggcgttagttat

SEQ ID NO: 278097 - DNA, 21 bp, Artificial sequence
  SiRNA target sequence
acaatatgggcgttagttata

SEQ ID NO: 278098 - DNA, 21 bp, Artificial sequence
  SiRNA target sequence
caatatgggcgttagttatat

SEQ ID NO: 278099 - DNA, 21 bp, Artificial sequence
  SiRNA target sequence
aatatgggcgttagttatatg

SEQ ID NO: 278100 - DNA, 21 bp, Artificial sequence
  SiRNA target sequence
atatgggcgttagttatatgc

SEQ ID NO: 278101 - DNA, 21 bp, Artificial sequence
  SiRNA target sequence
tatgggcgttagttatatgcg

SEQ ID NO: 278102 - DNA, 21 bp, Artificial sequence
  SiRNA target sequence
atgggcgttagttatatgcga

SEQ ID NO: 278103 - DNA, 21 bp, Artificial sequence
  SiRNA target sequence
tgggcgttagttatatgcgac

SEQ ID NO: 278104 - DNA, 21 bp, Artificial sequence
  SiRNA target sequence
gggcgttagttatatgcgaca

SEQ ID NO: 278105 - DNA, 21 bp, Artificial sequence
  SiRNA target sequence
ggcgttagttatatgcgacat

SEQ ID NO: 278106 - DNA, 21 bp, Artificial sequence
  SiRNA target sequence
gcgttagttatatgcgacatc

SEQ ID NO: 278107 - DNA, 21 bp, Artificial sequence
  SiRNA target sequence
cgttagttatatgcgacatcc

SEQ ID NO: 278108 - DNA, 21 bp, Artificial sequence
  SiRNA target sequence
gttagttatatgcgacatcct

SEQ ID NO: 278109 - DNA, 21 bp, Artificial sequence
  SiRNA target sequence
ttagttatatgcgacatcctt

SEQ ID NO: 278110 - DNA, 21 bp, Artificial sequence
  SiRNA target sequence
tagttatatgcgacatccttt

SEQ ID NO: 278111 - DNA, 21 bp, Artificial sequence
  SiRNA target sequence
agttatatgcgacatcctttg

SEQ ID NO: 278112 - DNA, 21 bp, Artificial sequence
  SiRNA target sequence
gttatatgcgacatcctttgt

SEQ ID NO: 278113 - DNA, 21 bp, Artificial sequence
  SiRNA target sequence
ttatatgcgacatcctttgta

SEQ ID NO: 278114 - DNA, 21 bp, Artificial sequence
  SiRNA target sequence
tatatgcgacatcctttgtat

SEQ ID NO: 278115 - DNA, 21 bp, Artificial sequence
  SiRNA target sequence
atatgcgacatcctttgtata

SEQ ID NO: 278116 - DNA, 21 bp, Artificial sequence
  SiRNA target sequence
tatgcgacatcctttgtataa

SEQ ID NO: 278117 - DNA, 21 bp, Artificial sequence
  SiRNA target sequence
atgcgacatcctttgtataaa

SEQ ID NO: 278118 - DNA, 21 bp, Artificial sequence
  SiRNA target sequence
tgcgacatcctttgtataaac

SEQ ID NO: 278119 - DNA, 21 bp, Artificial sequence
  SiRNA target sequence
gcgacatcctttgtataaacc

SEQ ID NO: 278120 - DNA, 21 bp, Artificial sequence
  SiRNA target sequence
cgacatcctttgtataaaccc

SEQ ID NO: 278121 - DNA, 21 bp, Artificial sequence
  SiRNA target sequence
gacatcctttgtataaacccc

SEQ ID NO: 278122 - DNA, 21 bp, Artificial sequence
  SiRNA target sequence
acatcctttgtataaacccca

SEQ ID NO: 278123 - DNA, 21 bp, Artificial sequence
  SiRNA target sequence
catcctttgtataaaccccac

SEQ ID NO: 278124 - DNA, 21 bp, Artificial sequence
  SiRNA target sequence
atcctttgtataaaccccacc

SEQ ID NO: 278125 - DNA, 21 bp, Artificial sequence
  SiRNA target sequence
tcctttgtataaaccccacca

SEQ ID NO: 278126 - DNA, 21 bp, Artificial sequence
  SiRNA target sequence
cctttgtataaaccccaccag

SEQ ID NO: 278127 - DNA, 21 bp, Artificial sequence
  SiRNA target sequence
ctttgtataaaccccaccagc

SEQ ID NO: 278128 - DNA, 21 bp, Artificial sequence
  SiRNA target sequence
tttgtataaaccccaccagcg

SEQ ID NO: 278129 - DNA, 21 bp, Artificial sequence
  SiRNA target sequence
ttgtataaaccccaccagcgt

SEQ ID NO: 278130 - DNA, 21 bp, Artificial sequence
  SiRNA target sequence
tgtataaaccccaccagcgtg

SEQ ID NO: 278131 - DNA, 21 bp, Artificial sequence
  SiRNA target sequence
gtataaaccccaccagcgtgt

SEQ ID NO: 278132 - DNA, 21 bp, Artificial sequence
  SiRNA target sequence
tataaaccccaccagcgtgtt

SEQ ID NO: 278133 - DNA, 21 bp, Artificial sequence
  SiRNA target sequence
ataaaccccaccagcgtgtta

SEQ ID NO: 278134 - DNA, 21 bp, Artificial sequence
  SiRNA target sequence
taaaccccaccagcgtgttat

SEQ ID NO: 278135 - DNA, 21 bp, Artificial sequence
  SiRNA target sequence
aaaccccaccagcgtgttatt

SEQ ID NO: 278136 - DNA, 21 bp, Artificial sequence
  SiRNA target sequence
aaccccaccagcgtgttattt

SEQ ID NO: 278137 - DNA, 21 bp, Artificial sequence
  SiRNA target sequence
accccaccagcgtgttatttc

SEQ ID NO: 278138 - DNA, 21 bp, Artificial sequence
  SiRNA target sequence
ccccaccagcgtgttatttct

SEQ ID NO: 278139 - DNA, 21 bp, Artificial sequence
  SiRNA target sequence
cccaccagcgtgttatttctg

SEQ ID NO: 278140 - DNA, 21 bp, Artificial sequence
  SiRNA target sequence
ccaccagcgtgttatttctga

SEQ ID NO: 278141 - DNA, 21 bp, Artificial sequence
  SiRNA target sequence
caccagcgtgttatttctgaa

SEQ ID NO: 278142 - DNA, 21 bp, Artificial sequence
  SiRNA target sequence
accagcgtgttatttctgaaa

SEQ ID NO: 278143 - DNA, 21 bp, Artificial sequence
  SiRNA target sequence
ccagcgtgttatttctgaaat

SEQ ID NO: 278144 - DNA, 21 bp, Artificial sequence
  SiRNA target sequence
cagcgtgttatttctgaaatt

SEQ ID NO: 278145 - DNA, 21 bp, Artificial sequence
  SiRNA target sequence
agcgtgttatttctgaaattc

SEQ ID NO: 278146 - DNA, 21 bp, Artificial sequence
  SiRNA target sequence
gcgtgttatttctgaaattct

SEQ ID NO: 278147 - DNA, 21 bp, Artificial sequence
  SiRNA target sequence
cgtgttatttctgaaattctc

SEQ ID NO: 278148 - DNA, 21 bp, Artificial sequence
  SiRNA target sequence
gtgttatttctgaaattctca

SEQ ID NO: 278149 - DNA, 21 bp, Artificial sequence
  SiRNA target sequence
tgttatttctgaaattctcaa

SEQ ID NO: 278150 - DNA, 21 bp, Artificial sequence
  SiRNA target sequence
gttatttctgaaattctcaat

SEQ ID NO: 278151 - DNA, 21 bp, Artificial sequence
  SiRNA target sequence
ttatttctgaaattctcaatc

SEQ ID NO: 278152 - DNA, 21 bp, Artificial sequence
  SiRNA target sequence
tatttctgaaattctcaatca

SEQ ID NO: 278153 - DNA, 21 bp, Artificial sequence
  SiRNA target sequence
atttctgaaattctcaatcag

SEQ ID NO: 278154 - DNA, 21 bp, Artificial sequence
  SiRNA target sequence
tttctgaaattctcaatcagt

SEQ ID NO: 278155 - DNA, 21 bp, Artificial sequence
  SiRNA target sequence
ttctgaaattctcaatcagtt

SEQ ID NO: 278156 - DNA, 21 bp, Artificial sequence
  SiRNA target sequence
tctgaaattctcaatcagttg

SEQ ID NO: 278157 - DNA, 21 bp, Artificial sequence
  SiRNA target sequence
ctgaaattctcaatcagttgc

SEQ ID NO: 278158 - DNA, 21 bp, Artificial sequence
  SiRNA target sequence
tgaaattctcaatcagttgct

SEQ ID NO: 278159 - DNA, 21 bp, Artificial sequence
  SiRNA target sequence
gaaattctcaatcagttgctt

SEQ ID NO: 278160 - DNA, 21 bp, Artificial sequence
  SiRNA target sequence
aaattctcaatcagttgctta

SEQ ID NO: 278161 - DNA, 21 bp, Artificial sequence
  SiRNA target sequence
aattctcaatcagttgcttag

SEQ ID NO: 278162 - DNA, 21 bp, Artificial sequence
  SiRNA target sequence
attctcaatcagttgcttagg

SEQ ID NO: 278163 - DNA, 21 bp, Artificial sequence
  SiRNA target sequence
ttctcaatcagttgcttaggt

SEQ ID NO: 278164 - DNA, 21 bp, Artificial sequence
  SiRNA target sequence
tctcaatcagttgcttaggtt

SEQ ID NO: 278165 - DNA, 21 bp, Artificial sequence
  SiRNA target sequence
ctcaatcagttgcttaggttt

SEQ ID NO: 278166 - DNA, 21 bp, Artificial sequence
  SiRNA target sequence
tcaatcagttgcttaggtttg

SEQ ID NO: 278167 - DNA, 21 bp, Artificial sequence
  SiRNA target sequence
caatcagttgcttaggtttgc

SEQ ID NO: 278168 - DNA, 21 bp, Artificial sequence
  SiRNA target sequence
aatcagttgcttaggtttgcg

SEQ ID NO: 278169 - DNA, 21 bp, Artificial sequence
  SiRNA target sequence
atcagttgcttaggtttgcgg

SEQ ID NO: 278170 - DNA, 21 bp, Artificial sequence
  SiRNA target sequence
tcagttgcttaggtttgcgga

SEQ ID NO: 278171 - DNA, 21 bp, Artificial sequence
  SiRNA target sequence
cagttgcttaggtttgcggat

SEQ ID NO: 278172 - DNA, 21 bp, Artificial sequence
  SiRNA target sequence
agttgcttaggtttgcggata

SEQ ID NO: 278173 - DNA, 21 bp, Artificial sequence
  SiRNA target sequence
gttgcttaggtttgcggataa

SEQ ID NO: 278174 - DNA, 21 bp, Artificial sequence
  SiRNA target sequence
ttgcttaggtttgcggataag

SEQ ID NO: 278175 - DNA, 21 bp, Artificial sequence
  SiRNA target sequence
tgcttaggtttgcggataaga

SEQ ID NO: 278176 - DNA, 21 bp, Artificial sequence
  SiRNA target sequence
gcttaggtttgcggataagat

SEQ ID NO: 278177 - DNA, 21 bp, Artificial sequence
  SiRNA target sequence
cttaggtttgcggataagata

SEQ ID NO: 278178 - DNA, 21 bp, Artificial sequence
  SiRNA target sequence
ttaggtttgcggataagataa

SEQ ID NO: 278179 - DNA, 21 bp, Artificial sequence
  SiRNA target sequence
taggtttgcggataagataaa

SEQ ID NO: 278180 - DNA, 21 bp, Artificial sequence
  SiRNA target sequence
aggtttgcggataagataaag

SEQ ID NO: 278181 - DNA, 21 bp, Artificial sequence
  SiRNA target sequence
ggtttgcggataagataaaga

SEQ ID NO: 278182 - DNA, 21 bp, Artificial sequence
  SiRNA target sequence
gtttgcggataagataaagaa

SEQ ID NO: 278183 - DNA, 21 bp, Artificial sequence
  SiRNA target sequence
tttgcggataagataaagaag

SEQ ID NO: 278184 - DNA, 21 bp, Artificial sequence
  SiRNA target sequence
ttgcggataagataaagaaga

SEQ ID NO: 278185 - DNA, 21 bp, Artificial sequence
  SiRNA target sequence
tgcggataagataaagaagaa

SEQ ID NO: 278186 - DNA, 21 bp, Artificial sequence
  SiRNA target sequence
gcggataagataaagaagaag

SEQ ID NO: 278187 - DNA, 21 bp, Artificial sequence
  SiRNA target sequence
cggataagataaagaagaagg

SEQ ID NO: 278188 - DNA, 21 bp, Artificial sequence
  SiRNA target sequence
ggataagataaagaagaaggt

SEQ ID NO: 278189 - DNA, 21 bp, Artificial sequence
  SiRNA target sequence
gataagataaagaagaaggtc

SEQ ID NO: 278190 - DNA, 21 bp, Artificial sequence
  SiRNA target sequence
ataagataaagaagaaggtcg

SEQ ID NO: 278191 - DNA, 21 bp, Artificial sequence
  SiRNA target sequence
taagataaagaagaaggtcgg

SEQ ID NO: 278192 - DNA, 21 bp, Artificial sequence
  SiRNA target sequence
aagataaagaagaaggtcggt

SEQ ID NO: 278193 - DNA, 21 bp, Artificial sequence
  SiRNA target sequence
agataaagaagaaggtcggta

SEQ ID NO: 278194 - DNA, 21 bp, Artificial sequence
  SiRNA target sequence
gataaagaagaaggtcggtac

SEQ ID NO: 278195 - DNA, 21 bp, Artificial sequence
  SiRNA target sequence
ataaagaagaaggtcggtaca

SEQ ID NO: 278196 - DNA, 21 bp, Artificial sequence
  SiRNA target sequence
taaagaagaaggtcggtacag

SEQ ID NO: 278197 - DNA, 21 bp, Artificial sequence
  SiRNA target sequence
aaagaagaaggtcggtacaga

SEQ ID NO: 278198 - DNA, 21 bp, Artificial sequence
  SiRNA target sequence
aagaagaaggtcggtacagat

SEQ ID NO: 278199 - DNA, 21 bp, Artificial sequence
  SiRNA target sequence
agaagaaggtcggtacagatg

SEQ ID NO: 278200 - DNA, 21 bp, Artificial sequence
  SiRNA target sequence
gaagaaggtcggtacagatgc

SEQ ID NO: 278201 - DNA, 21 bp, Artificial sequence
  SiRNA target sequence
aagaaggtcggtacagatgct

SEQ ID NO: 278202 - DNA, 21 bp, Artificial sequence
  SiRNA target sequence
agaaggtcggtacagatgctt

SEQ ID NO: 278203 - DNA, 21 bp, Artificial sequence
  SiRNA target sequence
gaaggtcggtacagatgcttc

SEQ ID NO: 278204 - DNA, 21 bp, Artificial sequence
  SiRNA target sequence
aaggtcggtacagatgcttct

SEQ ID NO: 278205 - DNA, 21 bp, Artificial sequence
  SiRNA target sequence
aggtcggtacagatgcttctg

SEQ ID NO: 278206 - DNA, 21 bp, Artificial sequence
  SiRNA target sequence
ggtcggtacagatgcttctgt

SEQ ID NO: 278207 - DNA, 21 bp, Artificial sequence
  SiRNA target sequence
gtcggtacagatgcttctgtt

SEQ ID NO: 278208 - DNA, 21 bp, Artificial sequence
  SiRNA target sequence
tcggtacagatgcttctgttc

SEQ ID NO: 278209 - DNA, 21 bp, Artificial sequence
  SiRNA target sequence
cggtacagatgcttctgttcg

SEQ ID NO: 278210 - DNA, 21 bp, Artificial sequence
  SiRNA target sequence
ggtacagatgcttctgttcga

SEQ ID NO: 278211 - DNA, 21 bp, Artificial sequence
  SiRNA target sequence
gtacagatgcttctgttcgaa

SEQ ID NO: 278212 - DNA, 21 bp, Artificial sequence
  SiRNA target sequence
tacagatgcttctgttcgaaa

SEQ ID NO: 278213 - DNA, 21 bp, Artificial sequence
  SiRNA target sequence
acagatgcttctgttcgaaac

SEQ ID NO: 278214 - DNA, 21 bp, Artificial sequence
  SiRNA target sequence
cagatgcttctgttcgaaacc

SEQ ID NO: 278215 - DNA, 21 bp, Artificial sequence
  SiRNA target sequence
agatgcttctgttcgaaaccc

SEQ ID NO: 278216 - DNA, 21 bp, Artificial sequence
  SiRNA target sequence
gatgcttctgttcgaaacccc

SEQ ID NO: 278217 - DNA, 21 bp, Artificial sequence
  SiRNA target sequence
atgcttctgttcgaaaccccc

SEQ ID NO: 278218 - DNA, 21 bp, Artificial sequence
  SiRNA target sequence
tgcttctgttcgaaacccccc

SEQ ID NO: 278219 - DNA, 21 bp, Artificial sequence
  SiRNA target sequence
gcttctgttcgaaacccccca

SEQ ID NO: 278220 - DNA, 21 bp, Artificial sequence
  SiRNA target sequence
cttctgttcgaaaccccccag

SEQ ID NO: 278221 - DNA, 21 bp, Artificial sequence
  SiRNA target sequence
ttctgttcgaaaccccccagt

SEQ ID NO: 278222 - DNA, 21 bp, Artificial sequence
  SiRNA target sequence
tctgttcgaaaccccccagtt

SEQ ID NO: 278223 - DNA, 21 bp, Artificial sequence
  SiRNA target sequence
ctgttcgaaaccccccagtta

SEQ ID NO: 278224 - DNA, 21 bp, Artificial sequence
  SiRNA target sequence
tgttcgaaaccccccagttac

SEQ ID NO: 278225 - DNA, 21 bp, Artificial sequence
  SiRNA target sequence
gttcgaaaccccccagttact

SEQ ID NO: 278226 - DNA, 21 bp, Artificial sequence
  SiRNA target sequence
ttcgaaaccccccagttactc

SEQ ID NO: 278227 - DNA, 21 bp, Artificial sequence
  SiRNA target sequence
tcgaaaccccccagttactct

SEQ ID NO: 278228 - DNA, 21 bp, Artificial sequence
  SiRNA target sequence
cgaaaccccccagttactctg

SEQ ID NO: 278229 - DNA, 21 bp, Artificial sequence
  SiRNA target sequence
gaaaccccccagttactctgt

SEQ ID NO: 278230 - DNA, 21 bp, Artificial sequence
  SiRNA target sequence
aaaccccccagttactctgta

SEQ ID NO: 278231 - DNA, 21 bp, Artificial sequence
  SiRNA target sequence
aaccccccagttactctgtat

SEQ ID NO: 278232 - DNA, 21 bp, Artificial sequence
  SiRNA target sequence
accccccagttactctgtatt

SEQ ID NO: 278233 - DNA, 21 bp, Artificial sequence
  SiRNA target sequence
ccccccagttactctgtattt

SEQ ID NO: 278234 - DNA, 21 bp, Artificial sequence
  SiRNA target sequence
cccccagttactctgtattta

SEQ ID NO: 278235 - DNA, 21 bp, Artificial sequence
  SiRNA target sequence
ccccagttactctgtatttat

SEQ ID NO: 278236 - DNA, 21 bp, Artificial sequence
  SiRNA target sequence
cccagttactctgtatttata

SEQ ID NO: 278237 - DNA, 21 bp, Artificial sequence
  SiRNA target sequence
ccagttactctgtatttatat

SEQ ID NO: 278238 - DNA, 21 bp, Artificial sequence
  SiRNA target sequence
cagttactctgtatttatatg

SEQ ID NO: 278239 - DNA, 21 bp, Artificial sequence
  SiRNA target sequence
agttactctgtatttatatgg

SEQ ID NO: 278240 - DNA, 21 bp, Artificial sequence
  SiRNA target sequence
gttactctgtatttatatgga

SEQ ID NO: 278241 - DNA, 21 bp, Artificial sequence
  SiRNA target sequence
ttactctgtatttatatggag

SEQ ID NO: 278242 - DNA, 21 bp, Artificial sequence
  SiRNA target sequence
tactctgtatttatatggaga

SEQ ID NO: 278243 - DNA, 21 bp, Artificial sequence
  SiRNA target sequence
actctgtatttatatggagaa

SEQ ID NO: 278244 - DNA, 21 bp, Artificial sequence
  SiRNA target sequence
ctctgtatttatatggagaaa

SEQ ID NO: 278245 - DNA, 21 bp, Artificial sequence
  SiRNA target sequence
tctgtatttatatggagaaac

SEQ ID NO: 278246 - DNA, 21 bp, Artificial sequence
  SiRNA target sequence
ctgtatttatatggagaaaca

SEQ ID NO: 278247 - DNA, 21 bp, Artificial sequence
  SiRNA target sequence
tgtatttatatggagaaacag

SEQ ID NO: 278248 - DNA, 21 bp, Artificial sequence
  SiRNA target sequence
gtatttatatggagaaacagg

SEQ ID NO: 278249 - DNA, 21 bp, Artificial sequence
  SiRNA target sequence
tatttatatggagaaacaggg

SEQ ID NO: 278250 - DNA, 21 bp, Artificial sequence
  SiRNA target sequence
atttatatggagaaacagggg

SEQ ID NO: 278251 - DNA, 21 bp, Artificial sequence
  SiRNA target sequence
tttatatggagaaacaggggt

SEQ ID NO: 278252 - DNA, 21 bp, Artificial sequence
  SiRNA target sequence
ttatatggagaaacaggggta

SEQ ID NO: 278253 - DNA, 21 bp, Artificial sequence
  SiRNA target sequence
tatatggagaaacaggggtag

SEQ ID NO: 278254 - DNA, 21 bp, Artificial sequence
  SiRNA target sequence
atatggagaaacaggggtagg

SEQ ID NO: 278255 - DNA, 21 bp, Artificial sequence
  SiRNA target sequence
tatggagaaacaggggtaggg

SEQ ID NO: 278256 - DNA, 21 bp, Artificial sequence
  SiRNA target sequence
atggagaaacaggggtaggga

SEQ ID NO: 278257 - DNA, 21 bp, Artificial sequence
  SiRNA target sequence
tggagaaacaggggtagggaa

SEQ ID NO: 278258 - DNA, 21 bp, Artificial sequence
  SiRNA target sequence
ggagaaacaggggtagggaag

SEQ ID NO: 278259 - DNA, 21 bp, Artificial sequence
  SiRNA target sequence
gagaaacaggggtagggaagt

SEQ ID NO: 278260 - DNA, 21 bp, Artificial sequence
  SiRNA target sequence
agaaacaggggtagggaagtc

SEQ ID NO: 278261 - DNA, 21 bp, Artificial sequence
  SiRNA target sequence
gaaacaggggtagggaagtct

SEQ ID NO: 278262 - DNA, 21 bp, Artificial sequence
  SiRNA target sequence
aaacaggggtagggaagtcta

SEQ ID NO: 278263 - DNA, 21 bp, Artificial sequence
  SiRNA target sequence
aacaggggtagggaagtctac

SEQ ID NO: 278264 - DNA, 21 bp, Artificial sequence
  SiRNA target sequence
acaggggtagggaagtctact

SEQ ID NO: 278265 - DNA, 21 bp, Artificial sequence
  SiRNA target sequence
caggggtagggaagtctactt

SEQ ID NO: 278266 - DNA, 21 bp, Artificial sequence
  SiRNA target sequence
aggggtagggaagtctacttt

SEQ ID NO: 278267 - DNA, 21 bp, Artificial sequence
  SiRNA target sequence
ggggtagggaagtctactttg

SEQ ID NO: 278268 - DNA, 21 bp, Artificial sequence
  SiRNA target sequence
gggtagggaagtctactttga

SEQ ID NO: 278269 - DNA, 21 bp, Artificial sequence
  SiRNA target sequence
ggtagggaagtctactttgac

SEQ ID NO: 278270 - DNA, 21 bp, Artificial sequence
  SiRNA target sequence
gtagggaagtctactttgaca

SEQ ID NO: 278271 - DNA, 21 bp, Artificial sequence
  SiRNA target sequence
tagggaagtctactttgacat

SEQ ID NO: 278272 - DNA, 21 bp, Artificial sequence
  SiRNA target sequence
agggaagtctactttgacata

SEQ ID NO: 278273 - DNA, 21 bp, Artificial sequence
  SiRNA target sequence
gggaagtctactttgacatac

SEQ ID NO: 278274 - DNA, 21 bp, Artificial sequence
  SiRNA target sequence
ggaagtctactttgacatacc

SEQ ID NO: 278275 - DNA, 21 bp, Artificial sequence
  SiRNA target sequence
gaagtctactttgacataccc

SEQ ID NO: 278276 - DNA, 21 bp, Artificial sequence
  SiRNA target sequence
aagtctactttgacataccct

SEQ ID NO: 278277 - DNA, 21 bp, Artificial sequence
  SiRNA target sequence
agtctactttgacataccctt

SEQ ID NO: 278278 - DNA, 21 bp, Artificial sequence
  SiRNA target sequence
gtctactttgacatacccttt

SEQ ID NO: 278279 - DNA, 21 bp, Artificial sequence
  SiRNA target sequence
tctactttgacataccctttg

SEQ ID NO: 278280 - DNA, 21 bp, Artificial sequence
  SiRNA target sequence
ctactttgacataccctttgt

SEQ ID NO: 278281 - DNA, 21 bp, Artificial sequence
  SiRNA target sequence
tactttgacataccctttgtg

SEQ ID NO: 278282 - DNA, 21 bp, Artificial sequence
  SiRNA target sequence
actttgacataccctttgtgt

SEQ ID NO: 278283 - DNA, 21 bp, Artificial sequence
  SiRNA target sequence
ctttgacataccctttgtgtg

SEQ ID NO: 278284 - DNA, 21 bp, Artificial sequence
  SiRNA target sequence
tttgacataccctttgtgtgc

SEQ ID NO: 278285 - DNA, 21 bp, Artificial sequence
  SiRNA target sequence
ttgacataccctttgtgtgcc

SEQ ID NO: 278286 - DNA, 21 bp, Artificial sequence
  SiRNA target sequence
tgacataccctttgtgtgcca

SEQ ID NO: 278287 - DNA, 21 bp, Artificial sequence
  SiRNA target sequence
gacataccctttgtgtgccac

SEQ ID NO: 278288 - DNA, 21 bp, Artificial sequence
  SiRNA target sequence
acataccctttgtgtgccacc

SEQ ID NO: 278289 - DNA, 21 bp, Artificial sequence
  SiRNA target sequence
cataccctttgtgtgccaccc

SEQ ID NO: 278290 - DNA, 21 bp, Artificial sequence
  SiRNA target sequence
ataccctttgtgtgccaccct

SEQ ID NO: 278291 - DNA, 21 bp, Artificial sequence
  SiRNA target sequence
taccctttgtgtgccaccctt

SEQ ID NO: 278292 - DNA, 21 bp, Artificial sequence
  SiRNA target sequence
accctttgtgtgccacccttc

SEQ ID NO: 278293 - DNA, 21 bp, Artificial sequence
  SiRNA target sequence
ccctttgtgtgccacccttct

SEQ ID NO: 278294 - DNA, 21 bp, Artificial sequence
  SiRNA target sequence
cctttgtgtgccacccttctt

SEQ ID NO: 278295 - DNA, 21 bp, Artificial sequence
  SiRNA target sequence
ctttgtgtgccacccttctta

SEQ ID NO: 278296 - DNA, 21 bp, Artificial sequence
  SiRNA target sequence
tttgtgtgccacccttcttaa

SEQ ID NO: 278297 - DNA, 21 bp, Artificial sequence
  SiRNA target sequence
ttgtgtgccacccttcttaag

SEQ ID NO: 278298 - DNA, 21 bp, Artificial sequence
  SiRNA target sequence
tgtgtgccacccttcttaaga

SEQ ID NO: 278299 - DNA, 21 bp, Artificial sequence
  SiRNA target sequence
gtgtgccacccttcttaagac

SEQ ID NO: 278300 - DNA, 21 bp, Artificial sequence
  SiRNA target sequence
tgtgccacccttcttaagact

SEQ ID NO: 278301 - DNA, 21 bp, Artificial sequence
  SiRNA target sequence
gtgccacccttcttaagacta

SEQ ID NO: 278302 - DNA, 21 bp, Artificial sequence
  SiRNA target sequence
tgccacccttcttaagactat

SEQ ID NO: 278303 - DNA, 21 bp, Artificial sequence
  SiRNA target sequence
gccacccttcttaagactatc

SEQ ID NO: 278304 - DNA, 21 bp, Artificial sequence
  SiRNA target sequence
ccacccttcttaagactatct

SEQ ID NO: 278305 - DNA, 21 bp, Artificial sequence
  SiRNA target sequence
cacccttcttaagactatctt

SEQ ID NO: 278306 - DNA, 21 bp, Artificial sequence
  SiRNA target sequence
acccttcttaagactatcttt

SEQ ID NO: 278307 - DNA, 21 bp, Artificial sequence
  SiRNA target sequence
cccttcttaagactatcttta

SEQ ID NO: 278308 - DNA, 21 bp, Artificial sequence
  SiRNA target sequence
ccttcttaagactatctttac

SEQ ID NO: 278309 - DNA, 21 bp, Artificial sequence
  SiRNA target sequence
cttcttaagactatctttacc

SEQ ID NO: 278310 - DNA, 21 bp, Artificial sequence
  SiRNA target sequence
ttcttaagactatctttacca

SEQ ID NO: 278311 - DNA, 21 bp, Artificial sequence
  SiRNA target sequence
tcttaagactatctttaccag

SEQ ID NO: 278312 - DNA, 21 bp, Artificial sequence
  SiRNA target sequence
cttaagactatctttaccaga

SEQ ID NO: 278313 - DNA, 21 bp, Artificial sequence
  SiRNA target sequence
ttaagactatctttaccagag

SEQ ID NO: 278314 - DNA, 21 bp, Artificial sequence
  SiRNA target sequence
taagactatctttaccagaga

SEQ ID NO: 278315 - DNA, 21 bp, Artificial sequence
  SiRNA target sequence
aagactatctttaccagagag

SEQ ID NO: 278316 - DNA, 21 bp, Artificial sequence
  SiRNA target sequence
agactatctttaccagagagg

SEQ ID NO: 278317 - DNA, 21 bp, Artificial sequence
  SiRNA target sequence
gactatctttaccagagaggg

SEQ ID NO: 278318 - DNA, 21 bp, Artificial sequence
  SiRNA target sequence
actatctttaccagagagggg

SEQ ID NO: 278319 - DNA, 21 bp, Artificial sequence
  SiRNA target sequence
ctatctttaccagagagggga

SEQ ID NO: 278320 - DNA, 21 bp, Artificial sequence
  SiRNA target sequence
tatctttaccagagaggggaa

SEQ ID NO: 278321 - DNA, 21 bp, Artificial sequence
  SiRNA target sequence
atctttaccagagaggggaat

SEQ ID NO: 278322 - DNA, 21 bp, Artificial sequence
  SiRNA target sequence
tctttaccagagaggggaata

SEQ ID NO: 278323 - DNA, 21 bp, Artificial sequence
  SiRNA target sequence
ctttaccagagaggggaatac

SEQ ID NO: 278324 - DNA, 21 bp, Artificial sequence
  SiRNA target sequence
tttaccagagaggggaataca

SEQ ID NO: 278325 - DNA, 21 bp, Artificial sequence
  SiRNA target sequence
ttaccagagaggggaatacag

SEQ ID NO: 278326 - DNA, 21 bp, Artificial sequence
  SiRNA target sequence
taccagagaggggaatacagt

SEQ ID NO: 278327 - DNA, 21 bp, Artificial sequence
  SiRNA target sequence
accagagaggggaatacagtg

SEQ ID NO: 278328 - DNA, 21 bp, Artificial sequence
  SiRNA target sequence
ccagagaggggaatacagtga

SEQ ID NO: 278329 - DNA, 21 bp, Artificial sequence
  SiRNA target sequence
cagagaggggaatacagtgat

SEQ ID NO: 278330 - DNA, 21 bp, Artificial sequence
  SiRNA target sequence
agagaggggaatacagtgatg

SEQ ID NO: 278331 - DNA, 21 bp, Artificial sequence
  SiRNA target sequence
gagaggggaatacagtgatgc

SEQ ID NO: 278332 - DNA, 21 bp, Artificial sequence
  SiRNA target sequence
agaggggaatacagtgatgct

SEQ ID NO: 278333 - DNA, 21 bp, Artificial sequence
  SiRNA target sequence
gaggggaatacagtgatgctt

SEQ ID NO: 278334 - DNA, 21 bp, Artificial sequence
  SiRNA target sequence
aggggaatacagtgatgcttg

SEQ ID NO: 278335 - DNA, 21 bp, Artificial sequence
  SiRNA target sequence
ggggaatacagtgatgcttga

SEQ ID NO: 278336 - DNA, 21 bp, Artificial sequence
  SiRNA target sequence
gggaatacagtgatgcttgat

SEQ ID NO: 278337 - DNA, 21 bp, Artificial sequence
  SiRNA target sequence
ggaatacagtgatgcttgatt

SEQ ID NO: 278338 - DNA, 21 bp, Artificial sequence
  SiRNA target sequence
gaatacagtgatgcttgattc

SEQ ID NO: 278339 - DNA, 21 bp, Artificial sequence
  SiRNA target sequence
aatacagtgatgcttgattct

SEQ ID NO: 278340 - DNA, 21 bp, Artificial sequence
  SiRNA target sequence
atacagtgatgcttgattctc

SEQ ID NO: 278341 - DNA, 21 bp, Artificial sequence
  SiRNA target sequence
tacagtgatgcttgattctct

SEQ ID NO: 278342 - DNA, 21 bp, Artificial sequence
  SiRNA target sequence
acagtgatgcttgattctctt

SEQ ID NO: 278343 - DNA, 21 bp, Artificial sequence
  SiRNA target sequence
cagtgatgcttgattctctta

SEQ ID NO: 278344 - DNA, 21 bp, Artificial sequence
  SiRNA target sequence
agtgatgcttgattctcttaa

SEQ ID NO: 278345 - DNA, 21 bp, Artificial sequence
  SiRNA target sequence
gtgatgcttgattctcttaaa

SEQ ID NO: 278346 - DNA, 21 bp, Artificial sequence
  SiRNA target sequence
tgatgcttgattctcttaaac

SEQ ID NO: 278347 - DNA, 21 bp, Artificial sequence
  SiRNA target sequence
gatgcttgattctcttaaaca

SEQ ID NO: 278348 - DNA, 21 bp, Artificial sequence
  SiRNA target sequence
atgcttgattctcttaaacaa

SEQ ID NO: 278349 - DNA, 21 bp, Artificial sequence
  SiRNA target sequence
tgcttgattctcttaaacaac

SEQ ID NO: 278350 - DNA, 21 bp, Artificial sequence
  SiRNA target sequence
gcttgattctcttaaacaaca

SEQ ID NO: 278351 - DNA, 21 bp, Artificial sequence
  SiRNA target sequence
cttgattctcttaaacaacat

SEQ ID NO: 278352 - DNA, 21 bp, Artificial sequence
  SiRNA target sequence
ttgattctcttaaacaacatt

SEQ ID NO: 278353 - DNA, 21 bp, Artificial sequence
  SiRNA target sequence
tgattctcttaaacaacatta

SEQ ID NO: 278354 - DNA, 21 bp, Artificial sequence
  SiRNA target sequence
gattctcttaaacaacattat

SEQ ID NO: 278355 - DNA, 21 bp, Artificial sequence
  SiRNA target sequence
attctcttaaacaacattata

SEQ ID NO: 278356 - DNA, 21 bp, Artificial sequence
  SiRNA target sequence
ttctcttaaacaacattataa

SEQ ID NO: 278357 - DNA, 21 bp, Artificial sequence
  SiRNA target sequence
tctcttaaacaacattataaa

SEQ ID NO: 278358 - DNA, 21 bp, Artificial sequence
  SiRNA target sequence
ctcttaaacaacattataaag

SEQ ID NO: 278359 - DNA, 21 bp, Artificial sequence
  SiRNA target sequence
tcttaaacaacattataaaga

SEQ ID NO: 278360 - DNA, 21 bp, Artificial sequence
  SiRNA target sequence
cttaaacaacattataaagag

SEQ ID NO: 278361 - DNA, 21 bp, Artificial sequence
  SiRNA target sequence
ttaaacaacattataaagaga

SEQ ID NO: 278362 - DNA, 21 bp, Artificial sequence
  SiRNA target sequence
taaacaacattataaagagat

SEQ ID NO: 278363 - DNA, 21 bp, Artificial sequence
  SiRNA target sequence
aaacaacattataaagagatg

SEQ ID NO: 278364 - DNA, 21 bp, Artificial sequence
  SiRNA target sequence
aacaacattataaagagatga

SEQ ID NO: 278365 - DNA, 21 bp, Artificial sequence
  SiRNA target sequence
acaacattataaagagatgat

SEQ ID NO: 278366 - DNA, 21 bp, Artificial sequence
  SiRNA target sequence
caacattataaagagatgata

SEQ ID NO: 278367 - DNA, 21 bp, Artificial sequence
  SiRNA target sequence
aacattataaagagatgatat

SEQ ID NO: 278368 - DNA, 21 bp, Artificial sequence
  SiRNA target sequence
acattataaagagatgatata

SEQ ID NO: 278369 - DNA, 21 bp, Artificial sequence
  SiRNA target sequence
cattataaagagatgatatac

SEQ ID NO: 278370 - DNA, 21 bp, Artificial sequence
  SiRNA target sequence
attataaagagatgatatacg

SEQ ID NO: 278371 - DNA, 21 bp, Artificial sequence
  SiRNA target sequence
ttataaagagatgatatacgt

SEQ ID NO: 278372 - DNA, 21 bp, Artificial sequence
  SiRNA target sequence
tataaagagatgatatacgta

SEQ ID NO: 278373 - DNA, 21 bp, Artificial sequence
  SiRNA target sequence
ataaagagatgatatacgtaa

SEQ ID NO: 278374 - DNA, 21 bp, Artificial sequence
  SiRNA target sequence
taaagagatgatatacgtaag

SEQ ID NO: 278375 - DNA, 21 bp, Artificial sequence
  SiRNA target sequence
aaagagatgatatacgtaaga

SEQ ID NO: 278376 - DNA, 21 bp, Artificial sequence
  SiRNA target sequence
aagagatgatatacgtaagag

SEQ ID NO: 278377 - DNA, 21 bp, Artificial sequence
  SiRNA target sequence
agagatgatatacgtaagagc

SEQ ID NO: 278378 - DNA, 21 bp, Artificial sequence
  SiRNA target sequence
gagatgatatacgtaagagct

SEQ ID NO: 278379 - DNA, 21 bp, Artificial sequence
  SiRNA target sequence
agatgatatacgtaagagctg

SEQ ID NO: 278380 - DNA, 21 bp, Artificial sequence
  SiRNA target sequence
gatgatatacgtaagagctgc

SEQ ID NO: 278381 - DNA, 21 bp, Artificial sequence
  SiRNA target sequence
atgatatacgtaagagctgca

SEQ ID NO: 278382 - DNA, 21 bp, Artificial sequence
  SiRNA target sequence
tgatatacgtaagagctgcag

SEQ ID NO: 278383 - DNA, 21 bp, Artificial sequence
  SiRNA target sequence
gatatacgtaagagctgcaga

SEQ ID NO: 278384 - DNA, 21 bp, Artificial sequence
  SiRNA target sequence
atatacgtaagagctgcagaa

SEQ ID NO: 278385 - DNA, 21 bp, Artificial sequence
  SiRNA target sequence
tatacgtaagagctgcagaac

SEQ ID NO: 278386 - DNA, 21 bp, Artificial sequence
  SiRNA target sequence
atacgtaagagctgcagaaca

SEQ ID NO: 278387 - DNA, 21 bp, Artificial sequence
  SiRNA target sequence
tacgtaagagctgcagaacaa

SEQ ID NO: 278388 - DNA, 21 bp, Artificial sequence
  SiRNA target sequence
acgtaagagctgcagaacaag

SEQ ID NO: 278389 - DNA, 21 bp, Artificial sequence
  SiRNA target sequence
cgtaagagctgcagaacaaga

SEQ ID NO: 278390 - DNA, 21 bp, Artificial sequence
  SiRNA target sequence
gtaagagctgcagaacaagag

SEQ ID NO: 278391 - DNA, 21 bp, Artificial sequence
  SiRNA target sequence
taagagctgcagaacaagagt

SEQ ID NO: 278392 - DNA, 21 bp, Artificial sequence
  SiRNA target sequence
aagagctgcagaacaagagtt

SEQ ID NO: 278393 - DNA, 21 bp, Artificial sequence
  SiRNA target sequence
agagctgcagaacaagagttc

SEQ ID NO: 278394 - DNA, 21 bp, Artificial sequence
  SiRNA target sequence
gagctgcagaacaagagttct

SEQ ID NO: 278395 - DNA, 21 bp, Artificial sequence
  SiRNA target sequence
agctgcagaacaagagttctg

SEQ ID NO: 278396 - DNA, 21 bp, Artificial sequence
  SiRNA target sequence
gctgcagaacaagagttctgg

SEQ ID NO: 278397 - DNA, 21 bp, Artificial sequence
  SiRNA target sequence
ctgcagaacaagagttctggg

SEQ ID NO: 278398 - DNA, 21 bp, Artificial sequence
  SiRNA target sequence
tgcagaacaagagttctggga

SEQ ID NO: 278399 - DNA, 21 bp, Artificial sequence
  SiRNA target sequence
gcagaacaagagttctgggat

SEQ ID NO: 278400 - DNA, 21 bp, Artificial sequence
  SiRNA target sequence
cagaacaagagttctgggatg

SEQ ID NO: 278401 - DNA, 21 bp, Artificial sequence
  SiRNA target sequence
agaacaagagttctgggatgg

SEQ ID NO: 278402 - DNA, 21 bp, Artificial sequence
  SiRNA target sequence
gaacaagagttctgggatggt

SEQ ID NO: 278403 - DNA, 21 bp, Artificial sequence
  SiRNA target sequence
aacaagagttctgggatggtt

SEQ ID NO: 278404 - DNA, 21 bp, Artificial sequence
  SiRNA target sequence
acaagagttctgggatggtta

SEQ ID NO: 278405 - DNA, 21 bp, Artificial sequence
  SiRNA target sequence
caagagttctgggatggttat

SEQ ID NO: 278406 - DNA, 21 bp, Artificial sequence
  SiRNA target sequence
aagagttctgggatggttata

SEQ ID NO: 278407 - DNA, 21 bp, Artificial sequence
  SiRNA target sequence
agagttctgggatggttatac

SEQ ID NO: 278408 - DNA, 21 bp, Artificial sequence
  SiRNA target sequence
gagttctgggatggttatacg

SEQ ID NO: 278409 - DNA, 21 bp, Artificial sequence
  SiRNA target sequence
agttctgggatggttatacgc

SEQ ID NO: 278410 - DNA, 21 bp, Artificial sequence
  SiRNA target sequence
gttctgggatggttatacgca

SEQ ID NO: 278411 - DNA, 21 bp, Artificial sequence
  SiRNA target sequence
ttctgggatggttatacgcag

SEQ ID NO: 278412 - DNA, 21 bp, Artificial sequence
  SiRNA target sequence
tctgggatggttatacgcagc

SEQ ID NO: 278413 - DNA, 21 bp, Artificial sequence
  SiRNA target sequence
ctgggatggttatacgcagca

SEQ ID NO: 278414 - DNA, 21 bp, Artificial sequence
  SiRNA target sequence
tgggatggttatacgcagcaa

SEQ ID NO: 278415 - DNA, 21 bp, Artificial sequence
  SiRNA target sequence
gggatggttatacgcagcaat

SEQ ID NO: 278416 - DNA, 21 bp, Artificial sequence
  SiRNA target sequence
ggatggttatacgcagcaatt

SEQ ID NO: 278417 - DNA, 21 bp, Artificial sequence
  SiRNA target sequence
gatggttatacgcagcaatta

SEQ ID NO: 278418 - DNA, 21 bp, Artificial sequence
  SiRNA target sequence
atggttatacgcagcaattag

SEQ ID NO: 278419 - DNA, 21 bp, Artificial sequence
  SiRNA target sequence
tggttatacgcagcaattagt

SEQ ID NO: 278420 - DNA, 21 bp, Artificial sequence
  SiRNA target sequence
ggttatacgcagcaattagtc

SEQ ID NO: 278421 - DNA, 21 bp, Artificial sequence
  SiRNA target sequence
gttatacgcagcaattagtca

SEQ ID NO: 278422 - DNA, 21 bp, Artificial sequence
  SiRNA target sequence
ttatacgcagcaattagtcac

SEQ ID NO: 278423 - DNA, 21 bp, Artificial sequence
  SiRNA target sequence
tatacgcagcaattagtcact

SEQ ID NO: 278424 - DNA, 21 bp, Artificial sequence
  SiRNA target sequence
atacgcagcaattagtcactg

SEQ ID NO: 278425 - DNA, 21 bp, Artificial sequence
  SiRNA target sequence
tacgcagcaattagtcactgt

SEQ ID NO: 278426 - DNA, 21 bp, Artificial sequence
  SiRNA target sequence
acgcagcaattagtcactgta

SEQ ID NO: 278427 - DNA, 21 bp, Artificial sequence
  SiRNA target sequence
cgcagcaattagtcactgtat

SEQ ID NO: 278428 - DNA, 21 bp, Artificial sequence
  SiRNA target sequence
gcagcaattagtcactgtatt

SEQ ID NO: 278429 - DNA, 21 bp, Artificial sequence
  SiRNA target sequence
cagcaattagtcactgtattt

SEQ ID NO: 278430 - DNA, 21 bp, Artificial sequence
  SiRNA target sequence
agcaattagtcactgtatttg

SEQ ID NO: 278431 - DNA, 21 bp, Artificial sequence
  SiRNA target sequence
gcaattagtcactgtatttga

SEQ ID NO: 278432 - DNA, 21 bp, Artificial sequence
  SiRNA target sequence
caattagtcactgtatttgat

SEQ ID NO: 278433 - DNA, 21 bp, Artificial sequence
  SiRNA target sequence
aattagtcactgtatttgatg

SEQ ID NO: 278434 - DNA, 21 bp, Artificial sequence
  SiRNA target sequence
attagtcactgtatttgatga

SEQ ID NO: 278435 - DNA, 21 bp, Artificial sequence
  SiRNA target sequence
ttagtcactgtatttgatgat

SEQ ID NO: 278436 - DNA, 21 bp, Artificial sequence
  SiRNA target sequence
tagtcactgtatttgatgatt

SEQ ID NO: 278437 - DNA, 21 bp, Artificial sequence
  SiRNA target sequence
agtcactgtatttgatgattt

SEQ ID NO: 278438 - DNA, 21 bp, Artificial sequence
  SiRNA target sequence
gtcactgtatttgatgatttt

SEQ ID NO: 278439 - DNA, 21 bp, Artificial sequence
  SiRNA target sequence
tcactgtatttgatgatttta

SEQ ID NO: 278440 - DNA, 21 bp, Artificial sequence
  SiRNA target sequence
cactgtatttgatgattttaa

SEQ ID NO: 278441 - DNA, 21 bp, Artificial sequence
  SiRNA target sequence
actgtatttgatgattttaat

SEQ ID NO: 278442 - DNA, 21 bp, Artificial sequence
  SiRNA target sequence
ctgtatttgatgattttaatc

SEQ ID NO: 278443 - DNA, 21 bp, Artificial sequence
  SiRNA target sequence
tgtatttgatgattttaatca

SEQ ID NO: 278444 - DNA, 21 bp, Artificial sequence
  SiRNA target sequence
gtatttgatgattttaatcaa

SEQ ID NO: 278445 - DNA, 21 bp, Artificial sequence
  SiRNA target sequence
tatttgatgattttaatcaac

SEQ ID NO: 278446 - DNA, 21 bp, Artificial sequence
  SiRNA target sequence
atttgatgattttaatcaaca

SEQ ID NO: 278447 - DNA, 21 bp, Artificial sequence
  SiRNA target sequence
tttgatgattttaatcaacaa

SEQ ID NO: 278448 - DNA, 21 bp, Artificial sequence
  SiRNA target sequence
ttgatgattttaatcaacaag

SEQ ID NO: 278449 - DNA, 21 bp, Artificial sequence
  SiRNA target sequence
tgatgattttaatcaacaagt

SEQ ID NO: 278450 - DNA, 21 bp, Artificial sequence
  SiRNA target sequence
gatgattttaatcaacaagtt

SEQ ID NO: 278451 - DNA, 21 bp, Artificial sequence
  SiRNA target sequence
atgattttaatcaacaagttg

SEQ ID NO: 278452 - DNA, 21 bp, Artificial sequence
  SiRNA target sequence
tgattttaatcaacaagttga

SEQ ID NO: 278453 - DNA, 21 bp, Artificial sequence
  SiRNA target sequence
gattttaatcaacaagttgat

SEQ ID NO: 278454 - DNA, 21 bp, Artificial sequence
  SiRNA target sequence
attttaatcaacaagttgatt

SEQ ID NO: 278455 - DNA, 21 bp, Artificial sequence
  SiRNA target sequence
ttttaatcaacaagttgattc

SEQ ID NO: 278456 - DNA, 21 bp, Artificial sequence
  SiRNA target sequence
tttaatcaacaagttgattcc

SEQ ID NO: 278457 - DNA, 21 bp, Artificial sequence
  SiRNA target sequence
ttaatcaacaagttgattcct

SEQ ID NO: 278458 - DNA, 21 bp, Artificial sequence
  SiRNA target sequence
taatcaacaagttgattcctc

SEQ ID NO: 278459 - DNA, 21 bp, Artificial sequence
  SiRNA target sequence
aatcaacaagttgattcctct

SEQ ID NO: 278460 - DNA, 21 bp, Artificial sequence
  SiRNA target sequence
atcaacaagttgattcctctg

SEQ ID NO: 278461 - DNA, 21 bp, Artificial sequence
  SiRNA target sequence
tcaacaagttgattcctctgc

SEQ ID NO: 278462 - DNA, 21 bp, Artificial sequence
  SiRNA target sequence
caacaagttgattcctctgca

SEQ ID NO: 278463 - DNA, 21 bp, Artificial sequence
  SiRNA target sequence
aacaagttgattcctctgcaa

SEQ ID NO: 278464 - DNA, 21 bp, Artificial sequence
  SiRNA target sequence
acaagttgattcctctgcaaa

SEQ ID NO: 278465 - DNA, 21 bp, Artificial sequence
  SiRNA target sequence
caagttgattcctctgcaaat

SEQ ID NO: 278466 - DNA, 21 bp, Artificial sequence
  SiRNA target sequence
aagttgattcctctgcaaatc

SEQ ID NO: 278467 - DNA, 21 bp, Artificial sequence
  SiRNA target sequence
agttgattcctctgcaaatcc

SEQ ID NO: 278468 - DNA, 21 bp, Artificial sequence
  SiRNA target sequence
gttgattcctctgcaaatcca

SEQ ID NO: 278469 - DNA, 21 bp, Artificial sequence
  SiRNA target sequence
ttgattcctctgcaaatccaa

SEQ ID NO: 278470 - DNA, 21 bp, Artificial sequence
  SiRNA target sequence
tgattcctctgcaaatccaag

SEQ ID NO: 278471 - DNA, 21 bp, Artificial sequence
  SiRNA target sequence
gattcctctgcaaatccaagt

SEQ ID NO: 278472 - DNA, 21 bp, Artificial sequence
  SiRNA target sequence
attcctctgcaaatccaagtt

SEQ ID NO: 278473 - DNA, 21 bp, Artificial sequence
  SiRNA target sequence
ttcctctgcaaatccaagttt

SEQ ID NO: 278474 - DNA, 21 bp, Artificial sequence
  SiRNA target sequence
tcctctgcaaatccaagtttg

SEQ ID NO: 278475 - DNA, 21 bp, Artificial sequence
  SiRNA target sequence
cctctgcaaatccaagtttgg

SEQ ID NO: 278476 - DNA, 21 bp, Artificial sequence
  SiRNA target sequence
ctctgcaaatccaagtttgga

SEQ ID NO: 278477 - DNA, 21 bp, Artificial sequence
  SiRNA target sequence
tctgcaaatccaagtttggag

SEQ ID NO: 278478 - DNA, 21 bp, Artificial sequence
  SiRNA target sequence
ctgcaaatccaagtttggagt

SEQ ID NO: 278479 - DNA, 21 bp, Artificial sequence
  SiRNA target sequence
tgcaaatccaagtttggagtt

SEQ ID NO: 278480 - DNA, 21 bp, Artificial sequence
  SiRNA target sequence
gcaaatccaagtttggagttg

SEQ ID NO: 278481 - DNA, 21 bp, Artificial sequence
  SiRNA target sequence
caaatccaagtttggagttgt

SEQ ID NO: 278482 - DNA, 21 bp, Artificial sequence
  SiRNA target sequence
aaatccaagtttggagttgtt

SEQ ID NO: 278483 - DNA, 21 bp, Artificial sequence
  SiRNA target sequence
aatccaagtttggagttgttt

SEQ ID NO: 278484 - DNA, 21 bp, Artificial sequence
  SiRNA target sequence
atccaagtttggagttgtttg

SEQ ID NO: 278485 - DNA, 21 bp, Artificial sequence
  SiRNA target sequence
tccaagtttggagttgtttga

SEQ ID NO: 278486 - DNA, 21 bp, Artificial sequence
  SiRNA target sequence
ccaagtttggagttgtttgaa

SEQ ID NO: 278487 - DNA, 21 bp, Artificial sequence
  SiRNA target sequence
caagtttggagttgtttgaaa

SEQ ID NO: 278488 - DNA, 21 bp, Artificial sequence
  SiRNA target sequence
aagtttggagttgtttgaaat

SEQ ID NO: 278489 - DNA, 21 bp, Artificial sequence
  SiRNA target sequence
agtttggagttgtttgaaatt

SEQ ID NO: 278490 - DNA, 21 bp, Artificial sequence
  SiRNA target sequence
gtttggagttgtttgaaatta

SEQ ID NO: 278491 - DNA, 21 bp, Artificial sequence
  SiRNA target sequence
tttggagttgtttgaaattat

SEQ ID NO: 278492 - DNA, 21 bp, Artificial sequence
  SiRNA target sequence
ttggagttgtttgaaattatt

SEQ ID NO: 278493 - DNA, 21 bp, Artificial sequence
  SiRNA target sequence
tggagttgtttgaaattatta

SEQ ID NO: 278494 - DNA, 21 bp, Artificial sequence
  SiRNA target sequence
ggagttgtttgaaattattag

SEQ ID NO: 278495 - DNA, 21 bp, Artificial sequence
  SiRNA target sequence
gagttgtttgaaattattagg

SEQ ID NO: 278496 - DNA, 21 bp, Artificial sequence
  SiRNA target sequence
agttgtttgaaattattagga

SEQ ID NO: 278497 - DNA, 21 bp, Artificial sequence
  SiRNA target sequence
gttgtttgaaattattaggag

SEQ ID NO: 278498 - DNA, 21 bp, Artificial sequence
  SiRNA target sequence
ttgtttgaaattattaggagt

SEQ ID NO: 278499 - DNA, 21 bp, Artificial sequence
  SiRNA target sequence
tgtttgaaattattaggagtt

SEQ ID NO: 278500 - DNA, 21 bp, Artificial sequence
  SiRNA target sequence
gtttgaaattattaggagttc

SEQ ID NO: 278501 - DNA, 21 bp, Artificial sequence
  SiRNA target sequence
tttgaaattattaggagttct

SEQ ID NO: 278502 - DNA, 21 bp, Artificial sequence
  SiRNA target sequence
ttgaaattattaggagttcta

SEQ ID NO: 278503 - DNA, 21 bp, Artificial sequence
  SiRNA target sequence
tgaaattattaggagttctaa

SEQ ID NO: 278504 - DNA, 21 bp, Artificial sequence
  SiRNA target sequence
gaaattattaggagttctaat

SEQ ID NO: 278505 - DNA, 21 bp, Artificial sequence
  SiRNA target sequence
aaattattaggagttctaata

SEQ ID NO: 278506 - DNA, 21 bp, Artificial sequence
  SiRNA target sequence
aattattaggagttctaatat

SEQ ID NO: 278507 - DNA, 21 bp, Artificial sequence
  SiRNA target sequence
attattaggagttctaatata

SEQ ID NO: 278508 - DNA, 21 bp, Artificial sequence
  SiRNA target sequence
ttattaggagttctaatatat

SEQ ID NO: 278509 - DNA, 21 bp, Artificial sequence
  SiRNA target sequence
tattaggagttctaatatatt

SEQ ID NO: 278510 - DNA, 21 bp, Artificial sequence
  SiRNA target sequence
attaggagttctaatatattt

SEQ ID NO: 278511 - DNA, 21 bp, Artificial sequence
  SiRNA target sequence
ttaggagttctaatatatttc

SEQ ID NO: 278512 - DNA, 21 bp, Artificial sequence
  SiRNA target sequence
taggagttctaatatatttcc

SEQ ID NO: 278513 - DNA, 21 bp, Artificial sequence
  SiRNA target sequence
aggagttctaatatatttcct

SEQ ID NO: 278514 - DNA, 21 bp, Artificial sequence
  SiRNA target sequence
ggagttctaatatatttcctt

SEQ ID NO: 278515 - DNA, 21 bp, Artificial sequence
  SiRNA target sequence
gagttctaatatatttcctta

SEQ ID NO: 278516 - DNA, 21 bp, Artificial sequence
  SiRNA target sequence
agttctaatatatttccttat

SEQ ID NO: 278517 - DNA, 21 bp, Artificial sequence
  SiRNA target sequence
gttctaatatatttccttatc

SEQ ID NO: 278518 - DNA, 21 bp, Artificial sequence
  SiRNA target sequence
ttctaatatatttccttatcc

SEQ ID NO: 278519 - DNA, 21 bp, Artificial sequence
  SiRNA target sequence
tctaatatatttccttatcca

SEQ ID NO: 278520 - DNA, 21 bp, Artificial sequence
  SiRNA target sequence
ctaatatatttccttatccat

SEQ ID NO: 278521 - DNA, 21 bp, Artificial sequence
  SiRNA target sequence
taatatatttccttatccatt

SEQ ID NO: 278522 - DNA, 21 bp, Artificial sequence
  SiRNA target sequence
aatatatttccttatccatta

SEQ ID NO: 278523 - DNA, 21 bp, Artificial sequence
  SiRNA target sequence
atatatttccttatccattac

SEQ ID NO: 278524 - DNA, 21 bp, Artificial sequence
  SiRNA target sequence
tatatttccttatccattaca

SEQ ID NO: 278525 - DNA, 21 bp, Artificial sequence
  SiRNA target sequence
atatttccttatccattacat

SEQ ID NO: 278526 - DNA, 21 bp, Artificial sequence
  SiRNA target sequence
tatttccttatccattacata

SEQ ID NO: 278527 - DNA, 21 bp, Artificial sequence
  SiRNA target sequence
atttccttatccattacatat

SEQ ID NO: 278528 - DNA, 21 bp, Artificial sequence
  SiRNA target sequence
tttccttatccattacatatg

SEQ ID NO: 278529 - DNA, 21 bp, Artificial sequence
  SiRNA target sequence
ttccttatccattacatatgg

SEQ ID NO: 278530 - DNA, 21 bp, Artificial sequence
  SiRNA target sequence
tccttatccattacatatggc

SEQ ID NO: 278531 - DNA, 21 bp, Artificial sequence
  SiRNA target sequence
ccttatccattacatatggca

SEQ ID NO: 278532 - DNA, 21 bp, Artificial sequence
  SiRNA target sequence
cttatccattacatatggcat

SEQ ID NO: 278533 - DNA, 21 bp, Artificial sequence
  SiRNA target sequence
ttatccattacatatggcatc

SEQ ID NO: 278534 - DNA, 21 bp, Artificial sequence
  SiRNA target sequence
tatccattacatatggcatcg

SEQ ID NO: 278535 - DNA, 21 bp, Artificial sequence
  SiRNA target sequence
atccattacatatggcatcga

SEQ ID NO: 278536 - DNA, 21 bp, Artificial sequence
  SiRNA target sequence
tccattacatatggcatcgat

SEQ ID NO: 278537 - DNA, 21 bp, Artificial sequence
  SiRNA target sequence
ccattacatatggcatcgatc

SEQ ID NO: 278538 - DNA, 21 bp, Artificial sequence
  SiRNA target sequence
cattacatatggcatcgatcg

SEQ ID NO: 278539 - DNA, 21 bp, Artificial sequence
  SiRNA target sequence
attacatatggcatcgatcga

SEQ ID NO: 278540 - DNA, 21 bp, Artificial sequence
  SiRNA target sequence
ttacatatggcatcgatcgaa

SEQ ID NO: 278541 - DNA, 21 bp, Artificial sequence
  SiRNA target sequence
tacatatggcatcgatcgaag

SEQ ID NO: 278542 - DNA, 21 bp, Artificial sequence
  SiRNA target sequence
acatatggcatcgatcgaaga

SEQ ID NO: 278543 - DNA, 21 bp, Artificial sequence
  SiRNA target sequence
catatggcatcgatcgaagag

SEQ ID NO: 278544 - DNA, 21 bp, Artificial sequence
  SiRNA target sequence
atatggcatcgatcgaagaga

SEQ ID NO: 278545 - DNA, 21 bp, Artificial sequence
  SiRNA target sequence
tatggcatcgatcgaagagaa

SEQ ID NO: 278546 - DNA, 21 bp, Artificial sequence
  SiRNA target sequence
atggcatcgatcgaagagaaa

SEQ ID NO: 278547 - DNA, 21 bp, Artificial sequence
  SiRNA target sequence
tggcatcgatcgaagagaaag

SEQ ID NO: 278548 - DNA, 21 bp, Artificial sequence
  SiRNA target sequence
ggcatcgatcgaagagaaagc

SEQ ID NO: 278549 - DNA, 21 bp, Artificial sequence
  SiRNA target sequence
gcatcgatcgaagagaaagct

SEQ ID NO: 278550 - DNA, 21 bp, Artificial sequence
  SiRNA target sequence
catcgatcgaagagaaagcta

SEQ ID NO: 278551 - DNA, 21 bp, Artificial sequence
  SiRNA target sequence
atcgatcgaagagaaagctaa

SEQ ID NO: 278552 - DNA, 21 bp, Artificial sequence
  SiRNA target sequence
tcgatcgaagagaaagctaac

SEQ ID NO: 278553 - DNA, 21 bp, Artificial sequence
  SiRNA target sequence
cgatcgaagagaaagctaaca

SEQ ID NO: 278554 - DNA, 21 bp, Artificial sequence
  SiRNA target sequence
gatcgaagagaaagctaacac

SEQ ID NO: 278555 - DNA, 21 bp, Artificial sequence
  SiRNA target sequence
atcgaagagaaagctaacact

SEQ ID NO: 278556 - DNA, 21 bp, Artificial sequence
  SiRNA target sequence
tcgaagagaaagctaacactg

SEQ ID NO: 278557 - DNA, 21 bp, Artificial sequence
  SiRNA target sequence
cgaagagaaagctaacactgt

SEQ ID NO: 278558 - DNA, 21 bp, Artificial sequence
  SiRNA target sequence
gaagagaaagctaacactgtt

SEQ ID NO: 278559 - DNA, 21 bp, Artificial sequence
  SiRNA target sequence
aagagaaagctaacactgttt

SEQ ID NO: 278560 - DNA, 21 bp, Artificial sequence
  SiRNA target sequence
agagaaagctaacactgtttt

SEQ ID NO: 278561 - DNA, 21 bp, Artificial sequence
  SiRNA target sequence
gagaaagctaacactgttttt

SEQ ID NO: 278562 - DNA, 21 bp, Artificial sequence
  SiRNA target sequence
agaaagctaacactgtttttc

SEQ ID NO: 278563 - DNA, 21 bp, Artificial sequence
  SiRNA target sequence
gaaagctaacactgtttttca

SEQ ID NO: 278564 - DNA, 21 bp, Artificial sequence
  SiRNA target sequence
aaagctaacactgtttttcaa

SEQ ID NO: 278565 - DNA, 21 bp, Artificial sequence
  SiRNA target sequence
aagctaacactgtttttcaat

SEQ ID NO: 278566 - DNA, 21 bp, Artificial sequence
  SiRNA target sequence
agctaacactgtttttcaatc

SEQ ID NO: 278567 - DNA, 21 bp, Artificial sequence
  SiRNA target sequence
gctaacactgtttttcaatca

SEQ ID NO: 278568 - DNA, 21 bp, Artificial sequence
  SiRNA target sequence
ctaacactgtttttcaatcaa

SEQ ID NO: 278569 - DNA, 21 bp, Artificial sequence
  SiRNA target sequence
taacactgtttttcaatcaaa

SEQ ID NO: 278570 - DNA, 21 bp, Artificial sequence
  SiRNA target sequence
aacactgtttttcaatcaaag

SEQ ID NO: 278571 - DNA, 21 bp, Artificial sequence
  SiRNA target sequence
acactgtttttcaatcaaagg

SEQ ID NO: 278572 - DNA, 21 bp, Artificial sequence
  SiRNA target sequence
cactgtttttcaatcaaaggt

SEQ ID NO: 278573 - DNA, 21 bp, Artificial sequence
  SiRNA target sequence
actgtttttcaatcaaaggtg

SEQ ID NO: 278574 - DNA, 21 bp, Artificial sequence
  SiRNA target sequence
ctgtttttcaatcaaaggtga

SEQ ID NO: 278575 - DNA, 21 bp, Artificial sequence
  SiRNA target sequence
tgtttttcaatcaaaggtgat

SEQ ID NO: 278576 - DNA, 21 bp, Artificial sequence
  SiRNA target sequence
gtttttcaatcaaaggtgata

SEQ ID NO: 278577 - DNA, 21 bp, Artificial sequence
  SiRNA target sequence
tttttcaatcaaaggtgatat

SEQ ID NO: 278578 - DNA, 21 bp, Artificial sequence
  SiRNA target sequence
ttttcaatcaaaggtgatatt

SEQ ID NO: 278579 - DNA, 21 bp, Artificial sequence
  SiRNA target sequence
tttcaatcaaaggtgatattg

SEQ ID NO: 278580 - DNA, 21 bp, Artificial sequence
  SiRNA target sequence
ttcaatcaaaggtgatattgt

SEQ ID NO: 278581 - DNA, 21 bp, Artificial sequence
  SiRNA target sequence
tcaatcaaaggtgatattgtg

SEQ ID NO: 278582 - DNA, 21 bp, Artificial sequence
  SiRNA target sequence
caatcaaaggtgatattgtgt

SEQ ID NO: 278583 - DNA, 21 bp, Artificial sequence
  SiRNA target sequence
aatcaaaggtgatattgtgtt

SEQ ID NO: 278584 - DNA, 21 bp, Artificial sequence
  SiRNA target sequence
atcaaaggtgatattgtgttc

SEQ ID NO: 278585 - DNA, 21 bp, Artificial sequence
  SiRNA target sequence
tcaaaggtgatattgtgttct

SEQ ID NO: 278586 - DNA, 21 bp, Artificial sequence
  SiRNA target sequence
caaaggtgatattgtgttctt

SEQ ID NO: 278587 - DNA, 21 bp, Artificial sequence
  SiRNA target sequence
aaaggtgatattgtgttcttc

SEQ ID NO: 278588 - DNA, 21 bp, Artificial sequence
  SiRNA target sequence
aaggtgatattgtgttcttct

SEQ ID NO: 278589 - DNA, 21 bp, Artificial sequence
  SiRNA target sequence
aggtgatattgtgttcttcta

SEQ ID NO: 278590 - DNA, 21 bp, Artificial sequence
  SiRNA target sequence
ggtgatattgtgttcttctaa

SEQ ID NO: 278591 - DNA, 21 bp, Artificial sequence
  SiRNA target sequence
gtgatattgtgttcttctaac

SEQ ID NO: 278592 - DNA, 21 bp, Artificial sequence
  SiRNA target sequence
tgatattgtgttcttctaaca

SEQ ID NO: 278593 - DNA, 21 bp, Artificial sequence
  SiRNA target sequence
gatattgtgttcttctaacaa

SEQ ID NO: 278594 - DNA, 21 bp, Artificial sequence
  SiRNA target sequence
atattgtgttcttctaacaat

SEQ ID NO: 278595 - DNA, 21 bp, Artificial sequence
  SiRNA target sequence
tattgtgttcttctaacaata

SEQ ID NO: 278596 - DNA, 21 bp, Artificial sequence
  SiRNA target sequence
attgtgttcttctaacaataa

SEQ ID NO: 278597 - DNA, 21 bp, Artificial sequence
  SiRNA target sequence
ttgtgttcttctaacaataag

SEQ ID NO: 278598 - DNA, 21 bp, Artificial sequence
  SiRNA target sequence
tgtgttcttctaacaataaga

SEQ ID NO: 278599 - DNA, 21 bp, Artificial sequence
  SiRNA target sequence
gtgttcttctaacaataagac

SEQ ID NO: 278600 - DNA, 21 bp, Artificial sequence
  SiRNA target sequence
tgttcttctaacaataagact

SEQ ID NO: 278601 - DNA, 21 bp, Artificial sequence
  SiRNA target sequence
gttcttctaacaataagactc

SEQ ID NO: 278602 - DNA, 21 bp, Artificial sequence
  SiRNA target sequence
ttcttctaacaataagactcc

SEQ ID NO: 278603 - DNA, 21 bp, Artificial sequence
  SiRNA target sequence
tcttctaacaataagactcca

SEQ ID NO: 278604 - DNA, 21 bp, Artificial sequence
  SiRNA target sequence
cttctaacaataagactccaa

SEQ ID NO: 278605 - DNA, 21 bp, Artificial sequence
  SiRNA target sequence
ttctaacaataagactccaaa

SEQ ID NO: 278606 - DNA, 21 bp, Artificial sequence
  SiRNA target sequence
tctaacaataagactccaaaa

SEQ ID NO: 278607 - DNA, 21 bp, Artificial sequence
  SiRNA target sequence
ctaacaataagactccaaaaa

SEQ ID NO: 278608 - DNA, 21 bp, Artificial sequence
  SiRNA target sequence
taacaataagactccaaaaac

SEQ ID NO: 278609 - DNA, 21 bp, Artificial sequence
  SiRNA target sequence
aacaataagactccaaaaact

SEQ ID NO: 278610 - DNA, 21 bp, Artificial sequence
  SiRNA target sequence
acaataagactccaaaaactg

SEQ ID NO: 278611 - DNA, 21 bp, Artificial sequence
  SiRNA target sequence
caataagactccaaaaactga

SEQ ID NO: 278612 - DNA, 21 bp, Artificial sequence
  SiRNA target sequence
aataagactccaaaaactgaa

SEQ ID NO: 278613 - DNA, 21 bp, Artificial sequence
  SiRNA target sequence
ataagactccaaaaactgaat

SEQ ID NO: 278614 - DNA, 21 bp, Artificial sequence
  SiRNA target sequence
taagactccaaaaactgaatc

SEQ ID NO: 278615 - DNA, 21 bp, Artificial sequence
  SiRNA target sequence
aagactccaaaaactgaatcc

SEQ ID NO: 278616 - DNA, 21 bp, Artificial sequence
  SiRNA target sequence
agactccaaaaactgaatccc

SEQ ID NO: 278617 - DNA, 21 bp, Artificial sequence
  SiRNA target sequence
gactccaaaaactgaatccct

SEQ ID NO: 278618 - DNA, 21 bp, Artificial sequence
  SiRNA target sequence
actccaaaaactgaatcccta

SEQ ID NO: 278619 - DNA, 21 bp, Artificial sequence
  SiRNA target sequence
ctccaaaaactgaatccctaa

SEQ ID NO: 278620 - DNA, 21 bp, Artificial sequence
  SiRNA target sequence
tccaaaaactgaatccctaaa

SEQ ID NO: 278621 - DNA, 21 bp, Artificial sequence
  SiRNA target sequence
ccaaaaactgaatccctaaac

SEQ ID NO: 278622 - DNA, 21 bp, Artificial sequence
  SiRNA target sequence
caaaaactgaatccctaaact

SEQ ID NO: 278623 - DNA, 21 bp, Artificial sequence
  SiRNA target sequence
aaaaactgaatccctaaacta

SEQ ID NO: 278624 - DNA, 21 bp, Artificial sequence
  SiRNA target sequence
aaaactgaatccctaaactac

SEQ ID NO: 278625 - DNA, 21 bp, Artificial sequence
  SiRNA target sequence
aaactgaatccctaaactacc

SEQ ID NO: 278626 - DNA, 21 bp, Artificial sequence
  SiRNA target sequence
aactgaatccctaaactaccc

SEQ ID NO: 278627 - DNA, 21 bp, Artificial sequence
  SiRNA target sequence
actgaatccctaaactacccg

SEQ ID NO: 278628 - DNA, 21 bp, Artificial sequence
  SiRNA target sequence
ctgaatccctaaactacccga

SEQ ID NO: 278629 - DNA, 21 bp, Artificial sequence
  SiRNA target sequence
tgaatccctaaactacccgaa

SEQ ID NO: 278630 - DNA, 21 bp, Artificial sequence
  SiRNA target sequence
gaatccctaaactacccgaaa

SEQ ID NO: 278631 - DNA, 21 bp, Artificial sequence
  SiRNA target sequence
aatccctaaactacccgaaag

SEQ ID NO: 278632 - DNA, 21 bp, Artificial sequence
  SiRNA target sequence
atccctaaactacccgaaagc

SEQ ID NO: 278633 - DNA, 21 bp, Artificial sequence
  SiRNA target sequence
tccctaaactacccgaaagct

SEQ ID NO: 278634 - DNA, 21 bp, Artificial sequence
  SiRNA target sequence
ccctaaactacccgaaagctt

SEQ ID NO: 278635 - DNA, 21 bp, Artificial sequence
  SiRNA target sequence
cctaaactacccgaaagcttt

SEQ ID NO: 278636 - DNA, 21 bp, Artificial sequence
  SiRNA target sequence
ctaaactacccgaaagctttg

SEQ ID NO: 278637 - DNA, 21 bp, Artificial sequence
  SiRNA target sequence
taaactacccgaaagctttgt

SEQ ID NO: 278638 - DNA, 21 bp, Artificial sequence
  SiRNA target sequence
aaactacccgaaagctttgtt

SEQ ID NO: 278639 - DNA, 21 bp, Artificial sequence
  SiRNA target sequence
aactacccgaaagctttgttg

SEQ ID NO: 278640 - DNA, 21 bp, Artificial sequence
  SiRNA target sequence
actacccgaaagctttgttga

SEQ ID NO: 278641 - DNA, 21 bp, Artificial sequence
  SiRNA target sequence
ctacccgaaagctttgttgag

SEQ ID NO: 278642 - DNA, 21 bp, Artificial sequence
  SiRNA target sequence
tacccgaaagctttgttgagg

SEQ ID NO: 278643 - DNA, 21 bp, Artificial sequence
  SiRNA target sequence
acccgaaagctttgttgagga

SEQ ID NO: 278644 - DNA, 21 bp, Artificial sequence
  SiRNA target sequence
cccgaaagctttgttgaggag

SEQ ID NO: 278645 - DNA, 21 bp, Artificial sequence
  SiRNA target sequence
ccgaaagctttgttgaggagg

SEQ ID NO: 278646 - DNA, 21 bp, Artificial sequence
  SiRNA target sequence
cgaaagctttgttgaggaggt

SEQ ID NO: 278647 - DNA, 21 bp, Artificial sequence
  SiRNA target sequence
gaaagctttgttgaggaggtt

SEQ ID NO: 278648 - DNA, 21 bp, Artificial sequence
  SiRNA target sequence
aaagctttgttgaggaggttt

SEQ ID NO: 278649 - DNA, 21 bp, Artificial sequence
  SiRNA target sequence
aagctttgttgaggaggtttg

SEQ ID NO: 278650 - DNA, 21 bp, Artificial sequence
  SiRNA target sequence
agctttgttgaggaggtttgc

SEQ ID NO: 278651 - DNA, 21 bp, Artificial sequence
  SiRNA target sequence
gctttgttgaggaggtttgcg

SEQ ID NO: 278652 - DNA, 21 bp, Artificial sequence
  SiRNA target sequence
ctttgttgaggaggtttgcga

SEQ ID NO: 278653 - DNA, 21 bp, Artificial sequence
  SiRNA target sequence
tttgttgaggaggtttgcgaa

SEQ ID NO: 278654 - DNA, 21 bp, Artificial sequence
  SiRNA target sequence
ttgttgaggaggtttgcgaaa

SEQ ID NO: 278655 - DNA, 21 bp, Artificial sequence
  SiRNA target sequence
tgttgaggaggtttgcgaaat

SEQ ID NO: 278656 - DNA, 21 bp, Artificial sequence
  SiRNA target sequence
gttgaggaggtttgcgaaatt

SEQ ID NO: 278657 - DNA, 21 bp, Artificial sequence
  SiRNA target sequence
ttgaggaggtttgcgaaattt

SEQ ID NO: 278658 - DNA, 21 bp, Artificial sequence
  SiRNA target sequence
tgaggaggtttgcgaaatttg

SEQ ID NO: 278659 - DNA, 21 bp, Artificial sequence
  SiRNA target sequence
gaggaggtttgcgaaatttgt

SEQ ID NO: 278660 - DNA, 21 bp, Artificial sequence
  SiRNA target sequence
aggaggtttgcgaaatttgtt

SEQ ID NO: 278661 - DNA, 21 bp, Artificial sequence
  SiRNA target sequence
ggaggtttgcgaaatttgttg

SEQ ID NO: 278662 - DNA, 21 bp, Artificial sequence
  SiRNA target sequence
gaggtttgcgaaatttgttga

SEQ ID NO: 278663 - DNA, 21 bp, Artificial sequence
  SiRNA target sequence
aggtttgcgaaatttgttgaa

SEQ ID NO: 278664 - DNA, 21 bp, Artificial sequence
  SiRNA target sequence
ggtttgcgaaatttgttgaag

SEQ ID NO: 278665 - DNA, 21 bp, Artificial sequence
  SiRNA target sequence
gtttgcgaaatttgttgaagt

SEQ ID NO: 278666 - DNA, 21 bp, Artificial sequence
  SiRNA target sequence
tttgcgaaatttgttgaagta

SEQ ID NO: 278667 - DNA, 21 bp, Artificial sequence
  SiRNA target sequence
ttgcgaaatttgttgaagtaa

SEQ ID NO: 278668 - DNA, 21 bp, Artificial sequence
  SiRNA target sequence
tgcgaaatttgttgaagtaaa

SEQ ID NO: 278669 - DNA, 21 bp, Artificial sequence
  SiRNA target sequence
gcgaaatttgttgaagtaaag

SEQ ID NO: 278670 - DNA, 21 bp, Artificial sequence
  SiRNA target sequence
cgaaatttgttgaagtaaaga

SEQ ID NO: 278671 - DNA, 21 bp, Artificial sequence
  SiRNA target sequence
gaaatttgttgaagtaaagag

SEQ ID NO: 278672 - DNA, 21 bp, Artificial sequence
  SiRNA target sequence
aaatttgttgaagtaaagaga

SEQ ID NO: 278673 - DNA, 21 bp, Artificial sequence
  SiRNA target sequence
aatttgttgaagtaaagagag

SEQ ID NO: 278674 - DNA, 21 bp, Artificial sequence
  SiRNA target sequence
atttgttgaagtaaagagagc

SEQ ID NO: 278675 - DNA, 21 bp, Artificial sequence
  SiRNA target sequence
tttgttgaagtaaagagagct

SEQ ID NO: 278676 - DNA, 21 bp, Artificial sequence
  SiRNA target sequence
ttgttgaagtaaagagagctc

SEQ ID NO: 278677 - DNA, 21 bp, Artificial sequence
  SiRNA target sequence
tgttgaagtaaagagagctcc

SEQ ID NO: 278678 - DNA, 21 bp, Artificial sequence
  SiRNA target sequence
gttgaagtaaagagagctcct

SEQ ID NO: 278679 - DNA, 21 bp, Artificial sequence
  SiRNA target sequence
ttgaagtaaagagagctcctt

SEQ ID NO: 278680 - DNA, 21 bp, Artificial sequence
  SiRNA target sequence
tgaagtaaagagagctccttc

SEQ ID NO: 278681 - DNA, 21 bp, Artificial sequence
  SiRNA target sequence
gaagtaaagagagctccttct

SEQ ID NO: 278682 - DNA, 21 bp, Artificial sequence
  SiRNA target sequence
aagtaaagagagctccttctg

SEQ ID NO: 278683 - DNA, 21 bp, Artificial sequence
  SiRNA target sequence
agtaaagagagctccttctga

SEQ ID NO: 278684 - DNA, 21 bp, Artificial sequence
  SiRNA target sequence
gtaaagagagctccttctgaa

SEQ ID NO: 278685 - DNA, 21 bp, Artificial sequence
  SiRNA target sequence
taaagagagctccttctgaaa

SEQ ID NO: 278686 - DNA, 21 bp, Artificial sequence
  SiRNA target sequence
aaagagagctccttctgaaag

SEQ ID NO: 278687 - DNA, 21 bp, Artificial sequence
  SiRNA target sequence
aagagagctccttctgaaagt

SEQ ID NO: 278688 - DNA, 21 bp, Artificial sequence
  SiRNA target sequence
agagagctccttctgaaagtg

SEQ ID NO: 278689 - DNA, 21 bp, Artificial sequence
  SiRNA target sequence
gagagctccttctgaaagtgg

SEQ ID NO: 278690 - DNA, 21 bp, Artificial sequence
  SiRNA target sequence
agagctccttctgaaagtggt

SEQ ID NO: 278691 - DNA, 21 bp, Artificial sequence
  SiRNA target sequence
gagctccttctgaaagtggta

SEQ ID NO: 278692 - DNA, 21 bp, Artificial sequence
  SiRNA target sequence
agctccttctgaaagtggtac

SEQ ID NO: 278693 - DNA, 21 bp, Artificial sequence
  SiRNA target sequence
gctccttctgaaagtggtaca

SEQ ID NO: 278694 - DNA, 21 bp, Artificial sequence
  SiRNA target sequence
ctccttctgaaagtggtacat

SEQ ID NO: 278695 - DNA, 21 bp, Artificial sequence
  SiRNA target sequence
tccttctgaaagtggtacatt

SEQ ID NO: 278696 - DNA, 21 bp, Artificial sequence
  SiRNA target sequence
ccttctgaaagtggtacattt

SEQ ID NO: 278697 - DNA, 21 bp, Artificial sequence
  SiRNA target sequence
cttctgaaagtggtacatttt

SEQ ID NO: 278698 - DNA, 21 bp, Artificial sequence
  SiRNA target sequence
ttctgaaagtggtacattttc

SEQ ID NO: 278699 - DNA, 21 bp, Artificial sequence
  SiRNA target sequence
tctgaaagtggtacattttct

SEQ ID NO: 278700 - DNA, 21 bp, Artificial sequence
  SiRNA target sequence
ctgaaagtggtacattttcta

SEQ ID NO: 278701 - DNA, 21 bp, Artificial sequence
  SiRNA target sequence
tgaaagtggtacattttctac

SEQ ID NO: 278702 - DNA, 21 bp, Artificial sequence
  SiRNA target sequence
gaaagtggtacattttctact

SEQ ID NO: 278703 - DNA, 21 bp, Artificial sequence
  SiRNA target sequence
aaagtggtacattttctactg

SEQ ID NO: 278704 - DNA, 21 bp, Artificial sequence
  SiRNA target sequence
aagtggtacattttctactga

SEQ ID NO: 278705 - DNA, 21 bp, Artificial sequence
  SiRNA target sequence
agtggtacattttctactgat

SEQ ID NO: 278706 - DNA, 21 bp, Artificial sequence
  SiRNA target sequence
gtggtacattttctactgatt

SEQ ID NO: 278707 - DNA, 21 bp, Artificial sequence
  SiRNA target sequence
tggtacattttctactgattg

SEQ ID NO: 278708 - DNA, 21 bp, Artificial sequence
  SiRNA target sequence
ggtacattttctactgattgt

SEQ ID NO: 278709 - DNA, 21 bp, Artificial sequence
  SiRNA target sequence
gtacattttctactgattgtt

SEQ ID NO: 278710 - DNA, 21 bp, Artificial sequence
  SiRNA target sequence
tacattttctactgattgtta

SEQ ID NO: 278711 - DNA, 21 bp, Artificial sequence
  SiRNA target sequence
acattttctactgattgttat

SEQ ID NO: 278712 - DNA, 21 bp, Artificial sequence
  SiRNA target sequence
cattttctactgattgttata

SEQ ID NO: 278713 - DNA, 21 bp, Artificial sequence
  SiRNA target sequence
attttctactgattgttatac

SEQ ID NO: 278714 - DNA, 21 bp, Artificial sequence
  SiRNA target sequence
ttttctactgattgttatacc

SEQ ID NO: 278715 - DNA, 21 bp, Artificial sequence
  SiRNA target sequence
tttctactgattgttatacct

SEQ ID NO: 278716 - DNA, 21 bp, Artificial sequence
  SiRNA target sequence
ttctactgattgttatacctt

SEQ ID NO: 278717 - DNA, 21 bp, Artificial sequence
  SiRNA target sequence
tctactgattgttataccttt

SEQ ID NO: 278718 - DNA, 21 bp, Artificial sequence
  SiRNA target sequence
ctactgattgttatacctttg

SEQ ID NO: 278719 - DNA, 21 bp, Artificial sequence
  SiRNA target sequence
tactgattgttatacctttgt

SEQ ID NO: 278720 - DNA, 21 bp, Artificial sequence
  SiRNA target sequence
actgattgttatacctttgtg

SEQ ID NO: 278721 - DNA, 21 bp, Artificial sequence
  SiRNA target sequence
ctgattgttatacctttgtgg

SEQ ID NO: 278722 - DNA, 21 bp, Artificial sequence
  SiRNA target sequence
tgattgttatacctttgtgga

SEQ ID NO: 278723 - DNA, 21 bp, Artificial sequence
  SiRNA target sequence
gattgttatacctttgtggaa

SEQ ID NO: 278724 - DNA, 21 bp, Artificial sequence
  SiRNA target sequence
attgttatacctttgtggaat

SEQ ID NO: 278725 - DNA, 21 bp, Artificial sequence
  SiRNA target sequence
ttgttatacctttgtggaata

SEQ ID NO: 278726 - DNA, 21 bp, Artificial sequence
  SiRNA target sequence
tgttatacctttgtggaatat

SEQ ID NO: 278727 - DNA, 21 bp, Artificial sequence
  SiRNA target sequence
gttatacctttgtggaatatg

SEQ ID NO: 278728 - DNA, 21 bp, Artificial sequence
  SiRNA target sequence
ttatacctttgtggaatatga

SEQ ID NO: 278729 - DNA, 21 bp, Artificial sequence
  SiRNA target sequence
tatacctttgtggaatatgat

SEQ ID NO: 278730 - DNA, 21 bp, Artificial sequence
  SiRNA target sequence
atacctttgtggaatatgatc

SEQ ID NO: 278731 - DNA, 21 bp, Artificial sequence
  SiRNA target sequence
tacctttgtggaatatgatcc

SEQ ID NO: 278732 - DNA, 21 bp, Artificial sequence
  SiRNA target sequence
acctttgtggaatatgatcca

SEQ ID NO: 278733 - DNA, 21 bp, Artificial sequence
  SiRNA target sequence
cctttgtggaatatgatccat

SEQ ID NO: 278734 - DNA, 21 bp, Artificial sequence
  SiRNA target sequence
ctttgtggaatatgatccatt

SEQ ID NO: 278735 - DNA, 21 bp, Artificial sequence
  SiRNA target sequence
tttgtggaatatgatccattc

SEQ ID NO: 278736 - DNA, 21 bp, Artificial sequence
  SiRNA target sequence
ttgtggaatatgatccattcg

SEQ ID NO: 278737 - DNA, 21 bp, Artificial sequence
  SiRNA target sequence
tgtggaatatgatccattcga

SEQ ID NO: 278738 - DNA, 21 bp, Artificial sequence
  SiRNA target sequence
gtggaatatgatccattcgac

SEQ ID NO: 278739 - DNA, 21 bp, Artificial sequence
  SiRNA target sequence
tggaatatgatccattcgacc

SEQ ID NO: 278740 - DNA, 21 bp, Artificial sequence
  SiRNA target sequence
ggaatatgatccattcgacca

SEQ ID NO: 278741 - DNA, 21 bp, Artificial sequence
  SiRNA target sequence
gaatatgatccattcgaccat

SEQ ID NO: 278742 - DNA, 21 bp, Artificial sequence
  SiRNA target sequence
aatatgatccattcgaccatt

SEQ ID NO: 278743 - DNA, 21 bp, Artificial sequence
  SiRNA target sequence
atatgatccattcgaccattg

SEQ ID NO: 278744 - DNA, 21 bp, Artificial sequence
  SiRNA target sequence
tatgatccattcgaccattgt

SEQ ID NO: 278745 - DNA, 21 bp, Artificial sequence
  SiRNA target sequence
atgatccattcgaccattgta

SEQ ID NO: 278746 - DNA, 21 bp, Artificial sequence
  SiRNA target sequence
tgatccattcgaccattgtaa

SEQ ID NO: 278747 - DNA, 21 bp, Artificial sequence
  SiRNA target sequence
gatccattcgaccattgtaat

SEQ ID NO: 278748 - DNA, 21 bp, Artificial sequence
  SiRNA target sequence
atccattcgaccattgtaata

SEQ ID NO: 278749 - DNA, 21 bp, Artificial sequence
  SiRNA target sequence
tccattcgaccattgtaatat

SEQ ID NO: 278750 - DNA, 21 bp, Artificial sequence
  SiRNA target sequence
ccattcgaccattgtaatatc

SEQ ID NO: 278751 - DNA, 21 bp, Artificial sequence
  SiRNA target sequence
cattcgaccattgtaatatcg

SEQ ID NO: 278752 - DNA, 21 bp, Artificial sequence
  SiRNA target sequence
attcgaccattgtaatatcgt

SEQ ID NO: 278753 - DNA, 21 bp, Artificial sequence
  SiRNA target sequence
ttcgaccattgtaatatcgtc

SEQ ID NO: 278754 - DNA, 21 bp, Artificial sequence
  SiRNA target sequence
tcgaccattgtaatatcgtca

SEQ ID NO: 278755 - DNA, 21 bp, Artificial sequence
  SiRNA target sequence
cgaccattgtaatatcgtcaa

SEQ ID NO: 278756 - DNA, 21 bp, Artificial sequence
  SiRNA target sequence
gaccattgtaatatcgtcaaa

SEQ ID NO: 278757 - DNA, 21 bp, Artificial sequence
  SiRNA target sequence
accattgtaatatcgtcaaat

SEQ ID NO: 278758 - DNA, 21 bp, Artificial sequence
  SiRNA target sequence
ccattgtaatatcgtcaaatc

SEQ ID NO: 278759 - DNA, 21 bp, Artificial sequence
  SiRNA target sequence
cattgtaatatcgtcaaatca

SEQ ID NO: 278760 - DNA, 21 bp, Artificial sequence
  SiRNA target sequence
attgtaatatcgtcaaatcaa

SEQ ID NO: 278761 - DNA, 21 bp, Artificial sequence
  SiRNA target sequence
ttgtaatatcgtcaaatcaat

SEQ ID NO: 278762 - DNA, 21 bp, Artificial sequence
  SiRNA target sequence
tgtaatatcgtcaaatcaatg

SEQ ID NO: 278763 - DNA, 21 bp, Artificial sequence
  SiRNA target sequence
gtaatatcgtcaaatcaatgt

SEQ ID NO: 278764 - DNA, 21 bp, Artificial sequence
  SiRNA target sequence
taatatcgtcaaatcaatgtc

SEQ ID NO: 278765 - DNA, 21 bp, Artificial sequence
  SiRNA target sequence
aatatcgtcaaatcaatgtct

SEQ ID NO: 278766 - DNA, 21 bp, Artificial sequence
  SiRNA target sequence
atatcgtcaaatcaatgtctt

SEQ ID NO: 278767 - DNA, 21 bp, Artificial sequence
  SiRNA target sequence
tatcgtcaaatcaatgtcttt

SEQ ID NO: 278768 - DNA, 21 bp, Artificial sequence
  SiRNA target sequence
atcgtcaaatcaatgtctttc

SEQ ID NO: 278769 - DNA, 21 bp, Artificial sequence
  SiRNA target sequence
tcgtcaaatcaatgtctttca

SEQ ID NO: 278770 - DNA, 21 bp, Artificial sequence
  SiRNA target sequence
cgtcaaatcaatgtctttcaa

SEQ ID NO: 278771 - DNA, 21 bp, Artificial sequence
  SiRNA target sequence
gtcaaatcaatgtctttcaaa

SEQ ID NO: 278772 - DNA, 21 bp, Artificial sequence
  SiRNA target sequence
tcaaatcaatgtctttcaaag

SEQ ID NO: 278773 - DNA, 21 bp, Artificial sequence
  SiRNA target sequence
caaatcaatgtctttcaaaga

SEQ ID NO: 278774 - DNA, 21 bp, Artificial sequence
  SiRNA target sequence
aaatcaatgtctttcaaagag

SEQ ID NO: 278775 - DNA, 21 bp, Artificial sequence
  SiRNA target sequence
aatcaatgtctttcaaagagt

SEQ ID NO: 278776 - DNA, 21 bp, Artificial sequence
  SiRNA target sequence
atcaatgtctttcaaagagtt

SEQ ID NO: 278777 - DNA, 21 bp, Artificial sequence
  SiRNA target sequence
tcaatgtctttcaaagagttg

SEQ ID NO: 278778 - DNA, 21 bp, Artificial sequence
  SiRNA target sequence
caatgtctttcaaagagttga

SEQ ID NO: 278779 - DNA, 21 bp, Artificial sequence
  SiRNA target sequence
aatgtctttcaaagagttgat

SEQ ID NO: 278780 - DNA, 21 bp, Artificial sequence
  SiRNA target sequence
atgtctttcaaagagttgata

SEQ ID NO: 278781 - DNA, 21 bp, Artificial sequence
  SiRNA target sequence
tgtctttcaaagagttgatag

SEQ ID NO: 278782 - DNA, 21 bp, Artificial sequence
  SiRNA target sequence
gtctttcaaagagttgataga

SEQ ID NO: 278783 - DNA, 21 bp, Artificial sequence
  SiRNA target sequence
tctttcaaagagttgatagat

SEQ ID NO: 278784 - DNA, 21 bp, Artificial sequence
  SiRNA target sequence
ctttcaaagagttgatagatg

SEQ ID NO: 278785 - DNA, 21 bp, Artificial sequence
  SiRNA target sequence
tttcaaagagttgatagatga

SEQ ID NO: 278786 - DNA, 21 bp, Artificial sequence
  SiRNA target sequence
ttcaaagagttgatagatgaa

SEQ ID NO: 278787 - DNA, 21 bp, Artificial sequence
  SiRNA target sequence
tcaaagagttgatagatgaag

SEQ ID NO: 278788 - DNA, 21 bp, Artificial sequence
  SiRNA target sequence
caaagagttgatagatgaagt

SEQ ID NO: 278789 - DNA, 21 bp, Artificial sequence
  SiRNA target sequence
aaagagttgatagatgaagtg

SEQ ID NO: 278790 - DNA, 21 bp, Artificial sequence
  SiRNA target sequence
aagagttgatagatgaagtgg

SEQ ID NO: 278791 - DNA, 21 bp, Artificial sequence
  SiRNA target sequence
agagttgatagatgaagtggt

SEQ ID NO: 278792 - DNA, 21 bp, Artificial sequence
  SiRNA target sequence
gagttgatagatgaagtggtc

SEQ ID NO: 278793 - DNA, 21 bp, Artificial sequence
  SiRNA target sequence
agttgatagatgaagtggtcg

SEQ ID NO: 278794 - DNA, 21 bp, Artificial sequence
  SiRNA target sequence
gttgatagatgaagtggtcgc

SEQ ID NO: 278795 - DNA, 21 bp, Artificial sequence
  SiRNA target sequence
ttgatagatgaagtggtcgct

SEQ ID NO: 278796 - DNA, 21 bp, Artificial sequence
  SiRNA target sequence
tgatagatgaagtggtcgcta

SEQ ID NO: 278797 - DNA, 21 bp, Artificial sequence
  SiRNA target sequence
gatagatgaagtggtcgctat

SEQ ID NO: 278798 - DNA, 21 bp, Artificial sequence
  SiRNA target sequence
atagatgaagtggtcgctatg

SEQ ID NO: 278799 - DNA, 21 bp, Artificial sequence
  SiRNA target sequence
tagatgaagtggtcgctatgt

SEQ ID NO: 278800 - DNA, 21 bp, Artificial sequence
  SiRNA target sequence
agatgaagtggtcgctatgta

SEQ ID NO: 278801 - DNA, 21 bp, Artificial sequence
  SiRNA target sequence
gatgaagtggtcgctatgtat

SEQ ID NO: 278802 - DNA, 21 bp, Artificial sequence
  SiRNA target sequence
atgaagtggtcgctatgtatt

SEQ ID NO: 278803 - DNA, 21 bp, Artificial sequence
  SiRNA target sequence
tgaagtggtcgctatgtattt

SEQ ID NO: 278804 - DNA, 21 bp, Artificial sequence
  SiRNA target sequence
gaagtggtcgctatgtatttc

SEQ ID NO: 278805 - DNA, 21 bp, Artificial sequence
  SiRNA target sequence
aagtggtcgctatgtatttcc

SEQ ID NO: 278806 - DNA, 21 bp, Artificial sequence
  SiRNA target sequence
agtggtcgctatgtatttcca

SEQ ID NO: 278807 - DNA, 21 bp, Artificial sequence
  SiRNA target sequence
gtggtcgctatgtatttccac

SEQ ID NO: 278808 - DNA, 21 bp, Artificial sequence
  SiRNA target sequence
tggtcgctatgtatttccacg

SEQ ID NO: 278809 - DNA, 21 bp, Artificial sequence
  SiRNA target sequence
ggtcgctatgtatttccacga

SEQ ID NO: 278810 - DNA, 21 bp, Artificial sequence
  SiRNA target sequence
gtcgctatgtatttccacgaa

SEQ ID NO: 278811 - DNA, 21 bp, Artificial sequence
  SiRNA target sequence
tcgctatgtatttccacgaag

SEQ ID NO: 278812 - DNA, 21 bp, Artificial sequence
  SiRNA target sequence
cgctatgtatttccacgaagg

SEQ ID NO: 278813 - DNA, 21 bp, Artificial sequence
  SiRNA target sequence
gctatgtatttccacgaagga

SEQ ID NO: 278814 - DNA, 21 bp, Artificial sequence
  SiRNA target sequence
ctatgtatttccacgaaggag

SEQ ID NO: 278815 - DNA, 21 bp, Artificial sequence
  SiRNA target sequence
tatgtatttccacgaaggaga

SEQ ID NO: 278816 - DNA, 21 bp, Artificial sequence
  SiRNA target sequence
atgtatttccacgaaggagag

SEQ ID NO: 278817 - DNA, 21 bp, Artificial sequence
  SiRNA target sequence
tgtatttccacgaaggagagt

SEQ ID NO: 278818 - DNA, 21 bp, Artificial sequence
  SiRNA target sequence
gtatttccacgaaggagagtt

SEQ ID NO: 278819 - DNA, 21 bp, Artificial sequence
  SiRNA target sequence
tatttccacgaaggagagttc

SEQ ID NO: 278820 - DNA, 21 bp, Artificial sequence
  SiRNA target sequence
atttccacgaaggagagttcg

SEQ ID NO: 278821 - DNA, 21 bp, Artificial sequence
  SiRNA target sequence
tttccacgaaggagagttcgt

SEQ ID NO: 278822 - DNA, 21 bp, Artificial sequence
  SiRNA target sequence
ttccacgaaggagagttcgta

SEQ ID NO: 278823 - DNA, 21 bp, Artificial sequence
  SiRNA target sequence
tccacgaaggagagttcgtat

SEQ ID NO: 278824 - DNA, 21 bp, Artificial sequence
  SiRNA target sequence
ccacgaaggagagttcgtatc

SEQ ID NO: 278825 - DNA, 21 bp, Artificial sequence
  SiRNA target sequence
cacgaaggagagttcgtatct

SEQ ID NO: 278826 - DNA, 21 bp, Artificial sequence
  SiRNA target sequence
acgaaggagagttcgtatctt

SEQ ID NO: 278827 - DNA, 21 bp, Artificial sequence
  SiRNA target sequence
cgaaggagagttcgtatcttc

SEQ ID NO: 278828 - DNA, 21 bp, Artificial sequence
  SiRNA target sequence
gaaggagagttcgtatcttcc

SEQ ID NO: 278829 - DNA, 21 bp, Artificial sequence
  SiRNA target sequence
aaggagagttcgtatcttccg

SEQ ID NO: 278830 - DNA, 21 bp, Artificial sequence
  SiRNA target sequence
aggagagttcgtatcttccgt

SEQ ID NO: 278831 - DNA, 21 bp, Artificial sequence
  SiRNA target sequence
ggagagttcgtatcttccgta

SEQ ID NO: 278832 - DNA, 21 bp, Artificial sequence
  SiRNA target sequence
gagagttcgtatcttccgtag

SEQ ID NO: 278833 - DNA, 21 bp, Artificial sequence
  SiRNA target sequence
agagttcgtatcttccgtaga

SEQ ID NO: 278834 - DNA, 21 bp, Artificial sequence
  SiRNA target sequence
gagttcgtatcttccgtagat

SEQ ID NO: 278835 - DNA, 21 bp, Artificial sequence
  SiRNA target sequence
agttcgtatcttccgtagata

SEQ ID NO: 278836 - DNA, 21 bp, Artificial sequence
  SiRNA target sequence
gttcgtatcttccgtagataa

SEQ ID NO: 278837 - DNA, 21 bp, Artificial sequence
  SiRNA target sequence
ttcgtatcttccgtagataaa

SEQ ID NO: 278838 - DNA, 21 bp, Artificial sequence
  SiRNA target sequence
tcgtatcttccgtagataaat

SEQ ID NO: 278839 - DNA, 21 bp, Artificial sequence
  SiRNA target sequence
cgtatcttccgtagataaatt

SEQ ID NO: 278840 - DNA, 21 bp, Artificial sequence
  SiRNA target sequence
gtatcttccgtagataaattt

SEQ ID NO: 278841 - DNA, 21 bp, Artificial sequence
  SiRNA target sequence
tatcttccgtagataaattta

SEQ ID NO: 278842 - DNA, 21 bp, Artificial sequence
  SiRNA target sequence
atcttccgtagataaatttat

SEQ ID NO: 278843 - DNA, 21 bp, Artificial sequence
  SiRNA target sequence
tcttccgtagataaatttatc

SEQ ID NO: 278844 - DNA, 21 bp, Artificial sequence
  SiRNA target sequence
cttccgtagataaatttatca

SEQ ID NO: 278845 - DNA, 21 bp, Artificial sequence
  SiRNA target sequence
ttccgtagataaatttatcat

SEQ ID NO: 278846 - DNA, 21 bp, Artificial sequence
  SiRNA target sequence
tccgtagataaatttatcatg

SEQ ID NO: 278847 - DNA, 21 bp, Artificial sequence
  SiRNA target sequence
ccgtagataaatttatcatgg

SEQ ID NO: 278848 - DNA, 21 bp, Artificial sequence
  SiRNA target sequence
cgtagataaatttatcatgga

SEQ ID NO: 278849 - DNA, 21 bp, Artificial sequence
  SiRNA target sequence
gtagataaatttatcatggaa

SEQ ID NO: 278850 - DNA, 21 bp, Artificial sequence
  SiRNA target sequence
tagataaatttatcatggaaa

SEQ ID NO: 278851 - DNA, 21 bp, Artificial sequence
  SiRNA target sequence
agataaatttatcatggaaaa

SEQ ID NO: 278852 - DNA, 21 bp, Artificial sequence
  SiRNA target sequence
gataaatttatcatggaaaat

SEQ ID NO: 278853 - DNA, 21 bp, Artificial sequence
  SiRNA target sequence
ataaatttatcatggaaaatg

SEQ ID NO: 278854 - DNA, 21 bp, Artificial sequence
  SiRNA target sequence
taaatttatcatggaaaatgt

SEQ ID NO: 278855 - DNA, 21 bp, Artificial sequence
  SiRNA target sequence
aaatttatcatggaaaatgtg

SEQ ID NO: 278856 - DNA, 21 bp, Artificial sequence
  SiRNA target sequence
aatttatcatggaaaatgtgt

SEQ ID NO: 278857 - DNA, 21 bp, Artificial sequence
  SiRNA target sequence
atttatcatggaaaatgtgtt

SEQ ID NO: 278858 - DNA, 21 bp, Artificial sequence
  SiRNA target sequence
tttatcatggaaaatgtgttt

SEQ ID NO: 278859 - DNA, 21 bp, Artificial sequence
  SiRNA target sequence
ttatcatggaaaatgtgtttg

SEQ ID NO: 278860 - DNA, 21 bp, Artificial sequence
  SiRNA target sequence
tatcatggaaaatgtgtttgc

SEQ ID NO: 278861 - DNA, 21 bp, Artificial sequence
  SiRNA target sequence
atcatggaaaatgtgtttgct

SEQ ID NO: 278862 - DNA, 21 bp, Artificial sequence
  SiRNA target sequence
tcatggaaaatgtgtttgctc

SEQ ID NO: 278863 - DNA, 21 bp, Artificial sequence
  SiRNA target sequence
catggaaaatgtgtttgctca

SEQ ID NO: 278864 - DNA, 21 bp, Artificial sequence
  SiRNA target sequence
atggaaaatgtgtttgctcag

SEQ ID NO: 278865 - DNA, 21 bp, Artificial sequence
  SiRNA target sequence
tggaaaatgtgtttgctcagg

SEQ ID NO: 278866 - DNA, 21 bp, Artificial sequence
  SiRNA target sequence
ggaaaatgtgtttgctcaggg

SEQ ID NO: 278867 - DNA, 21 bp, Artificial sequence
  SiRNA target sequence
gaaaatgtgtttgctcaggga

SEQ ID NO: 278868 - DNA, 21 bp, Artificial sequence
  SiRNA target sequence
aaaatgtgtttgctcagggag

SEQ ID NO: 278869 - DNA, 21 bp, Artificial sequence
  SiRNA target sequence
aaatgtgtttgctcagggagg

SEQ ID NO: 278870 - DNA, 21 bp, Artificial sequence
  SiRNA target sequence
aatgtgtttgctcagggagga

SEQ ID NO: 278871 - DNA, 21 bp, Artificial sequence
  SiRNA target sequence
atgtgtttgctcagggaggag

SEQ ID NO: 278872 - DNA, 21 bp, Artificial sequence
  SiRNA target sequence
tgtgtttgctcagggaggagg

SEQ ID NO: 278873 - DNA, 21 bp, Artificial sequence
  SiRNA target sequence
gtgtttgctcagggaggaggc

SEQ ID NO: 278874 - DNA, 21 bp, Artificial sequence
  SiRNA target sequence
tgtttgctcagggaggaggct

SEQ ID NO: 278875 - DNA, 21 bp, Artificial sequence
  SiRNA target sequence
gtttgctcagggaggaggctc

SEQ ID NO: 278876 - DNA, 21 bp, Artificial sequence
  SiRNA target sequence
tttgctcagggaggaggctct

SEQ ID NO: 278877 - DNA, 21 bp, Artificial sequence
  SiRNA target sequence
ttgctcagggaggaggctctt

SEQ ID NO: 278878 - DNA, 21 bp, Artificial sequence
  SiRNA target sequence
tgctcagggaggaggctcttt

SEQ ID NO: 278879 - DNA, 21 bp, Artificial sequence
  SiRNA target sequence
gctcagggaggaggctcttta

SEQ ID NO: 278880 - DNA, 21 bp, Artificial sequence
  SiRNA target sequence
ctcagggaggaggctctttat

SEQ ID NO: 278881 - DNA, 21 bp, Artificial sequence
  SiRNA target sequence
tcagggaggaggctctttatc

SEQ ID NO: 278882 - DNA, 21 bp, Artificial sequence
  SiRNA target sequence
cagggaggaggctctttatca

SEQ ID NO: 278883 - DNA, 21 bp, Artificial sequence
  SiRNA target sequence
agggaggaggctctttatcag

SEQ ID NO: 278884 - DNA, 21 bp, Artificial sequence
  SiRNA target sequence
gggaggaggctctttatcaga

SEQ ID NO: 278885 - DNA, 21 bp, Artificial sequence
  SiRNA target sequence
ggaggaggctctttatcagat

SEQ ID NO: 278886 - DNA, 21 bp, Artificial sequence
  SiRNA target sequence
gaggaggctctttatcagatg

SEQ ID NO: 278887 - DNA, 21 bp, Artificial sequence
  SiRNA target sequence
aggaggctctttatcagatga

SEQ ID NO: 278888 - DNA, 21 bp, Artificial sequence
  SiRNA target sequence
ggaggctctttatcagatgag

SEQ ID NO: 278889 - DNA, 21 bp, Artificial sequence
  SiRNA target sequence
gaggctctttatcagatgagg

SEQ ID NO: 278890 - DNA, 21 bp, Artificial sequence
  SiRNA target sequence
aggctctttatcagatgagga

SEQ ID NO: 278891 - DNA, 21 bp, Artificial sequence
  SiRNA target sequence
ggctctttatcagatgaggag

SEQ ID NO: 278892 - DNA, 21 bp, Artificial sequence
  SiRNA target sequence
gctctttatcagatgaggagg

SEQ ID NO: 278893 - DNA, 21 bp, Artificial sequence
  SiRNA target sequence
ctctttatcagatgaggagga

SEQ ID NO: 278894 - DNA, 21 bp, Artificial sequence
  SiRNA target sequence
tctttatcagatgaggaggat

SEQ ID NO: 278895 - DNA, 21 bp, Artificial sequence
  SiRNA target sequence
ctttatcagatgaggaggatg

SEQ ID NO: 278896 - DNA, 21 bp, Artificial sequence
  SiRNA target sequence
tttatcagatgaggaggatga

SEQ ID NO: 278897 - DNA, 21 bp, Artificial sequence
  SiRNA target sequence
ttatcagatgaggaggatgat

SEQ ID NO: 278898 - DNA, 21 bp, Artificial sequence
  SiRNA target sequence
tatcagatgaggaggatgatt

SEQ ID NO: 278899 - DNA, 21 bp, Artificial sequence
  SiRNA target sequence
atcagatgaggaggatgattt

SEQ ID NO: 278900 - DNA, 21 bp, Artificial sequence
  SiRNA target sequence
tcagatgaggaggatgatttc

SEQ ID NO: 278901 - DNA, 21 bp, Artificial sequence
  SiRNA target sequence
cagatgaggaggatgatttca

SEQ ID NO: 278902 - DNA, 21 bp, Artificial sequence
  SiRNA target sequence
agatgaggaggatgatttcac

SEQ ID NO: 278903 - DNA, 21 bp, Artificial sequence
  SiRNA target sequence
gatgaggaggatgatttcact

SEQ ID NO: 278904 - DNA, 21 bp, Artificial sequence
  SiRNA target sequence
atgaggaggatgatttcactg

SEQ ID NO: 278905 - DNA, 21 bp, Artificial sequence
  SiRNA target sequence
tgaggaggatgatttcactga

SEQ ID NO: 278906 - DNA, 21 bp, Artificial sequence
  SiRNA target sequence
gaggaggatgatttcactgag

SEQ ID NO: 278907 - DNA, 21 bp, Artificial sequence
  SiRNA target sequence
aggaggatgatttcactgagg

SEQ ID NO: 278908 - DNA, 21 bp, Artificial sequence
  SiRNA target sequence
ggaggatgatttcactgaggc

SEQ ID NO: 278909 - DNA, 21 bp, Artificial sequence
  SiRNA target sequence
gaggatgatttcactgaggct

SEQ ID NO: 278910 - DNA, 21 bp, Artificial sequence
  SiRNA target sequence
aggatgatttcactgaggcta

SEQ ID NO: 278911 - DNA, 21 bp, Artificial sequence
  SiRNA target sequence
ggatgatttcactgaggctag

SEQ ID NO: 278912 - DNA, 21 bp, Artificial sequence
  SiRNA target sequence
gatgatttcactgaggctagc

SEQ ID NO: 278913 - DNA, 21 bp, Artificial sequence
  SiRNA target sequence
atgatttcactgaggctagct

SEQ ID NO: 278914 - DNA, 21 bp, Artificial sequence
  SiRNA target sequence
tgatttcactgaggctagctc

SEQ ID NO: 278915 - DNA, 21 bp, Artificial sequence
  SiRNA target sequence
gatttcactgaggctagctcc

SEQ ID NO: 278916 - DNA, 21 bp, Artificial sequence
  SiRNA target sequence
atttcactgaggctagctcct

SEQ ID NO: 278917 - DNA, 21 bp, Artificial sequence
  SiRNA target sequence
tttcactgaggctagctccta

SEQ ID NO: 278918 - DNA, 21 bp, Artificial sequence
  SiRNA target sequence
ttcactgaggctagctcctat

SEQ ID NO: 278919 - DNA, 21 bp, Artificial sequence
  SiRNA target sequence
tcactgaggctagctcctatg

SEQ ID NO: 278920 - DNA, 21 bp, Artificial sequence
  SiRNA target sequence
cactgaggctagctcctatgg

SEQ ID NO: 278921 - DNA, 21 bp, Artificial sequence
  SiRNA target sequence
actgaggctagctcctatggt

SEQ ID NO: 278922 - DNA, 21 bp, Artificial sequence
  SiRNA target sequence
ctgaggctagctcctatggtg

SEQ ID NO: 278923 - DNA, 21 bp, Artificial sequence
  SiRNA target sequence
tgaggctagctcctatggtga

SEQ ID NO: 278924 - DNA, 21 bp, Artificial sequence
  SiRNA target sequence
gaggctagctcctatggtgat

SEQ ID NO: 278925 - DNA, 21 bp, Artificial sequence
  SiRNA target sequence
aggctagctcctatggtgata

SEQ ID NO: 278926 - DNA, 21 bp, Artificial sequence
  SiRNA target sequence
ggctagctcctatggtgatag

SEQ ID NO: 278927 - DNA, 21 bp, Artificial sequence
  SiRNA target sequence
gctagctcctatggtgatagt

SEQ ID NO: 278928 - DNA, 21 bp, Artificial sequence
  SiRNA target sequence
ctagctcctatggtgatagta

SEQ ID NO: 278929 - DNA, 21 bp, Artificial sequence
  SiRNA target sequence
tagctcctatggtgatagtaa

SEQ ID NO: 278930 - DNA, 21 bp, Artificial sequence
  SiRNA target sequence
agctcctatggtgatagtaat

SEQ ID NO: 278931 - DNA, 21 bp, Artificial sequence
  SiRNA target sequence
gctcctatggtgatagtaatc

SEQ ID NO: 278932 - DNA, 21 bp, Artificial sequence
  SiRNA target sequence
ctcctatggtgatagtaatct

SEQ ID NO: 278933 - DNA, 21 bp, Artificial sequence
  SiRNA target sequence
tcctatggtgatagtaatctg

SEQ ID NO: 278934 - DNA, 21 bp, Artificial sequence
  SiRNA target sequence
cctatggtgatagtaatctgg

SEQ ID NO: 278935 - DNA, 21 bp, Artificial sequence
  SiRNA target sequence
ctatggtgatagtaatctgga

SEQ ID NO: 278936 - DNA, 21 bp, Artificial sequence
  SiRNA target sequence
tatggtgatagtaatctggat

SEQ ID NO: 278937 - DNA, 21 bp, Artificial sequence
  SiRNA target sequence
atggtgatagtaatctggatg

SEQ ID NO: 278938 - DNA, 21 bp, Artificial sequence
  SiRNA target sequence
tggtgatagtaatctggatga

SEQ ID NO: 278939 - DNA, 21 bp, Artificial sequence
  SiRNA target sequence
ggtgatagtaatctggatgaa

SEQ ID NO: 278940 - DNA, 21 bp, Artificial sequence
  SiRNA target sequence
gtgatagtaatctggatgaaa

SEQ ID NO: 278941 - DNA, 21 bp, Artificial sequence
  SiRNA target sequence
tgatagtaatctggatgaaac

SEQ ID NO: 278942 - DNA, 21 bp, Artificial sequence
  SiRNA target sequence
gatagtaatctggatgaaacc

SEQ ID NO: 278943 - DNA, 21 bp, Artificial sequence
  SiRNA target sequence
atagtaatctggatgaaacct

SEQ ID NO: 278944 - DNA, 21 bp, Artificial sequence
  SiRNA target sequence
tagtaatctggatgaaacctt

SEQ ID NO: 278945 - DNA, 21 bp, Artificial sequence
  SiRNA target sequence
agtaatctggatgaaaccttg

SEQ ID NO: 278946 - DNA, 21 bp, Artificial sequence
  SiRNA target sequence
gtaatctggatgaaaccttga

SEQ ID NO: 278947 - DNA, 21 bp, Artificial sequence
  SiRNA target sequence
taatctggatgaaaccttgac

SEQ ID NO: 278948 - DNA, 21 bp, Artificial sequence
  SiRNA target sequence
aatctggatgaaaccttgact

SEQ ID NO: 278949 - DNA, 21 bp, Artificial sequence
  SiRNA target sequence
atctggatgaaaccttgactc

SEQ ID NO: 278950 - DNA, 21 bp, Artificial sequence
  SiRNA target sequence
tctggatgaaaccttgactcg

SEQ ID NO: 278951 - DNA, 21 bp, Artificial sequence
  SiRNA target sequence
ctggatgaaaccttgactcgt

SEQ ID NO: 278952 - DNA, 21 bp, Artificial sequence
  SiRNA target sequence
tggatgaaaccttgactcgtg

SEQ ID NO: 278953 - DNA, 21 bp, Artificial sequence
  SiRNA target sequence
ggatgaaaccttgactcgtga

SEQ ID NO: 278954 - DNA, 21 bp, Artificial sequence
  SiRNA target sequence
gatgaaaccttgactcgtgaa

SEQ ID NO: 278955 - DNA, 21 bp, Artificial sequence
  SiRNA target sequence
atgaaaccttgactcgtgaag

SEQ ID NO: 278956 - DNA, 21 bp, Artificial sequence
  SiRNA target sequence
tgaaaccttgactcgtgaaga

SEQ ID NO: 278957 - DNA, 21 bp, Artificial sequence
  SiRNA target sequence
gaaaccttgactcgtgaagaa

SEQ ID NO: 278958 - DNA, 21 bp, Artificial sequence
  SiRNA target sequence
aaaccttgactcgtgaagaaa

SEQ ID NO: 278959 - DNA, 21 bp, Artificial sequence
  SiRNA target sequence
aaccttgactcgtgaagaaaa

SEQ ID NO: 278960 - DNA, 21 bp, Artificial sequence
  SiRNA target sequence
accttgactcgtgaagaaaag

SEQ ID NO: 278961 - DNA, 21 bp, Artificial sequence
  SiRNA target sequence
ccttgactcgtgaagaaaaga

SEQ ID NO: 278962 - DNA, 21 bp, Artificial sequence
  SiRNA target sequence
cttgactcgtgaagaaaagaa

SEQ ID NO: 278963 - DNA, 21 bp, Artificial sequence
  SiRNA target sequence
ttgactcgtgaagaaaagaaa

SEQ ID NO: 278964 - DNA, 21 bp, Artificial sequence
  SiRNA target sequence
tgactcgtgaagaaaagaaag

SEQ ID NO: 278965 - DNA, 21 bp, Artificial sequence
  SiRNA target sequence
gactcgtgaagaaaagaaaga

SEQ ID NO: 278966 - DNA, 21 bp, Artificial sequence
  SiRNA target sequence
actcgtgaagaaaagaaagag

SEQ ID NO: 278967 - DNA, 21 bp, Artificial sequence
  SiRNA target sequence
ctcgtgaagaaaagaaagaga

SEQ ID NO: 278968 - DNA, 21 bp, Artificial sequence
  SiRNA target sequence
tcgtgaagaaaagaaagagat

SEQ ID NO: 278969 - DNA, 21 bp, Artificial sequence
  SiRNA target sequence
cgtgaagaaaagaaagagatc

SEQ ID NO: 278970 - DNA, 21 bp, Artificial sequence
  SiRNA target sequence
gtgaagaaaagaaagagatca

SEQ ID NO: 278971 - DNA, 21 bp, Artificial sequence
  SiRNA target sequence
tgaagaaaagaaagagatcat

SEQ ID NO: 278972 - DNA, 21 bp, Artificial sequence
  SiRNA target sequence
gaagaaaagaaagagatcata

SEQ ID NO: 278973 - DNA, 21 bp, Artificial sequence
  SiRNA target sequence
aagaaaagaaagagatcatag

SEQ ID NO: 278974 - DNA, 21 bp, Artificial sequence
  SiRNA target sequence
agaaaagaaagagatcataga

SEQ ID NO: 278975 - DNA, 21 bp, Artificial sequence
  SiRNA target sequence
gaaaagaaagagatcatagag

SEQ ID NO: 278976 - DNA, 21 bp, Artificial sequence
  SiRNA target sequence
aaaagaaagagatcatagagt

SEQ ID NO: 278977 - DNA, 21 bp, Artificial sequence
  SiRNA target sequence
aaagaaagagatcatagagtg

SEQ ID NO: 278978 - DNA, 21 bp, Artificial sequence
  SiRNA target sequence
aagaaagagatcatagagtgc

SEQ ID NO: 278979 - DNA, 21 bp, Artificial sequence
  SiRNA target sequence
agaaagagatcatagagtgca

SEQ ID NO: 278980 - DNA, 21 bp, Artificial sequence
  SiRNA target sequence
gaaagagatcatagagtgcat

SEQ ID NO: 278981 - DNA, 21 bp, Artificial sequence
  SiRNA target sequence
aaagagatcatagagtgcatc

SEQ ID NO: 278982 - DNA, 21 bp, Artificial sequence
  SiRNA target sequence
aagagatcatagagtgcatca

SEQ ID NO: 278983 - DNA, 21 bp, Artificial sequence
  SiRNA target sequence
agagatcatagagtgcatcaa

SEQ ID NO: 278984 - DNA, 21 bp, Artificial sequence
  SiRNA target sequence
gagatcatagagtgcatcaac

SEQ ID NO: 278985 - DNA, 21 bp, Artificial sequence
  SiRNA target sequence
agatcatagagtgcatcaacg

SEQ ID NO: 278986 - DNA, 21 bp, Artificial sequence
  SiRNA target sequence
gatcatagagtgcatcaacga

SEQ ID NO: 278987 - DNA, 21 bp, Artificial sequence
  SiRNA target sequence
atcatagagtgcatcaacgac

SEQ ID NO: 278988 - DNA, 21 bp, Artificial sequence
  SiRNA target sequence
tcatagagtgcatcaacgacc

SEQ ID NO: 278989 - DNA, 21 bp, Artificial sequence
  SiRNA target sequence
catagagtgcatcaacgacca

SEQ ID NO: 278990 - DNA, 21 bp, Artificial sequence
  SiRNA target sequence
atagagtgcatcaacgaccaa

SEQ ID NO: 278991 - DNA, 21 bp, Artificial sequence
  SiRNA target sequence
tagagtgcatcaacgaccaac

SEQ ID NO: 278992 - DNA, 21 bp, Artificial sequence
  SiRNA target sequence
agagtgcatcaacgaccaact

SEQ ID NO: 278993 - DNA, 21 bp, Artificial sequence
  SiRNA target sequence
gagtgcatcaacgaccaactt

SEQ ID NO: 278994 - DNA, 21 bp, Artificial sequence
  SiRNA target sequence
agtgcatcaacgaccaactta

SEQ ID NO: 278995 - DNA, 21 bp, Artificial sequence
  SiRNA target sequence
gtgcatcaacgaccaacttaa

SEQ ID NO: 278996 - DNA, 21 bp, Artificial sequence
  SiRNA target sequence
tgcatcaacgaccaacttaag

SEQ ID NO: 278997 - DNA, 21 bp, Artificial sequence
  SiRNA target sequence
gcatcaacgaccaacttaaga

SEQ ID NO: 278998 - DNA, 21 bp, Artificial sequence
  SiRNA target sequence
catcaacgaccaacttaagaa

SEQ ID NO: 278999 - DNA, 21 bp, Artificial sequence
  SiRNA target sequence
atcaacgaccaacttaagaat

SEQ ID NO: 279000 - DNA, 21 bp, Artificial sequence
  SiRNA target sequence
tcaacgaccaacttaagaatg

SEQ ID NO: 279001 - DNA, 21 bp, Artificial sequence
  SiRNA target sequence
caacgaccaacttaagaatga

SEQ ID NO: 279002 - DNA, 21 bp, Artificial sequence
  SiRNA target sequence
aacgaccaacttaagaatgaa

SEQ ID NO: 279003 - DNA, 21 bp, Artificial sequence
  SiRNA target sequence
acgaccaacttaagaatgaaa

SEQ ID NO: 279004 - DNA, 21 bp, Artificial sequence
  SiRNA target sequence
cgaccaacttaagaatgaaaa

SEQ ID NO: 279005 - DNA, 21 bp, Artificial sequence
  SiRNA target sequence
gaccaacttaagaatgaaaat

SEQ ID NO: 279006 - DNA, 21 bp, Artificial sequence
  SiRNA target sequence
accaacttaagaatgaaaatg

SEQ ID NO: 279007 - DNA, 21 bp, Artificial sequence
  SiRNA target sequence
ccaacttaagaatgaaaatga

SEQ ID NO: 279008 - DNA, 21 bp, Artificial sequence
  SiRNA target sequence
caacttaagaatgaaaatgat

SEQ ID NO: 279009 - DNA, 21 bp, Artificial sequence
  SiRNA target sequence
aacttaagaatgaaaatgata

SEQ ID NO: 279010 - DNA, 21 bp, Artificial sequence
  SiRNA target sequence
acttaagaatgaaaatgatac

SEQ ID NO: 279011 - DNA, 21 bp, Artificial sequence
  SiRNA target sequence
cttaagaatgaaaatgatact

SEQ ID NO: 279012 - DNA, 21 bp, Artificial sequence
  SiRNA target sequence
ttaagaatgaaaatgatacta

SEQ ID NO: 279013 - DNA, 21 bp, Artificial sequence
  SiRNA target sequence
taagaatgaaaatgatactag

SEQ ID NO: 279014 - DNA, 21 bp, Artificial sequence
  SiRNA target sequence
aagaatgaaaatgatactaga

SEQ ID NO: 279015 - DNA, 21 bp, Artificial sequence
  SiRNA target sequence
agaatgaaaatgatactagaa

SEQ ID NO: 279016 - DNA, 21 bp, Artificial sequence
  SiRNA target sequence
gaatgaaaatgatactagaac

SEQ ID NO: 279017 - DNA, 21 bp, Artificial sequence
  SiRNA target sequence
aatgaaaatgatactagaact

SEQ ID NO: 279018 - DNA, 21 bp, Artificial sequence
  SiRNA target sequence
atgaaaatgatactagaactt

SEQ ID NO: 279019 - DNA, 21 bp, Artificial sequence
  SiRNA target sequence
tgaaaatgatactagaacttc

SEQ ID NO: 279020 - DNA, 21 bp, Artificial sequence
  SiRNA target sequence
gaaaatgatactagaacttct

SEQ ID NO: 279021 - DNA, 21 bp, Artificial sequence
  SiRNA target sequence
aaaatgatactagaacttctt

SEQ ID NO: 279022 - DNA, 21 bp, Artificial sequence
  SiRNA target sequence
aaatgatactagaacttcttt

SEQ ID NO: 279023 - DNA, 21 bp, Artificial sequence
  SiRNA target sequence
aatgatactagaacttctttt

SEQ ID NO: 279024 - DNA, 21 bp, Artificial sequence
  SiRNA target sequence
atgatactagaacttcttttc

SEQ ID NO: 279025 - DNA, 21 bp, Artificial sequence
  SiRNA target sequence
tgatactagaacttcttttca

SEQ ID NO: 279026 - DNA, 21 bp, Artificial sequence
  SiRNA target sequence
gatactagaacttcttttcag

SEQ ID NO: 279027 - DNA, 21 bp, Artificial sequence
  SiRNA target sequence
atactagaacttcttttcagt

SEQ ID NO: 279028 - DNA, 21 bp, Artificial sequence
  SiRNA target sequence
tactagaacttcttttcagtt

SEQ ID NO: 279029 - DNA, 21 bp, Artificial sequence
  SiRNA target sequence
actagaacttcttttcagttg

SEQ ID NO: 279030 - DNA, 21 bp, Artificial sequence
  SiRNA target sequence
ctagaacttcttttcagttga

SEQ ID NO: 279031 - DNA, 21 bp, Artificial sequence
  SiRNA target sequence
tagaacttcttttcagttgat

SEQ ID NO: 279032 - DNA, 21 bp, Artificial sequence
  SiRNA target sequence
agaacttcttttcagttgatt

SEQ ID NO: 279033 - DNA, 21 bp, Artificial sequence
  SiRNA target sequence
gaacttcttttcagttgatta

SEQ ID NO: 279034 - DNA, 21 bp, Artificial sequence
  SiRNA target sequence
aacttcttttcagttgattag

SEQ ID NO: 279035 - DNA, 21 bp, Artificial sequence
  SiRNA target sequence
acttcttttcagttgattaga

SEQ ID NO: 279036 - DNA, 21 bp, Artificial sequence
  SiRNA target sequence
cttcttttcagttgattagag

SEQ ID NO: 279037 - DNA, 21 bp, Artificial sequence
  SiRNA target sequence
ttcttttcagttgattagaga

SEQ ID NO: 279038 - DNA, 21 bp, Artificial sequence
  SiRNA target sequence
tcttttcagttgattagagat

SEQ ID NO: 279039 - DNA, 21 bp, Artificial sequence
  SiRNA target sequence
cttttcagttgattagagatt

SEQ ID NO: 279040 - DNA, 21 bp, Artificial sequence
  SiRNA target sequence
ttttcagttgattagagatta

SEQ ID NO: 279041 - DNA, 21 bp, Artificial sequence
  SiRNA target sequence
tttcagttgattagagattat

SEQ ID NO: 279042 - DNA, 21 bp, Artificial sequence
  SiRNA target sequence
ttcagttgattagagattatt

SEQ ID NO: 279043 - DNA, 21 bp, Artificial sequence
  SiRNA target sequence
tcagttgattagagattattt

SEQ ID NO: 279044 - DNA, 21 bp, Artificial sequence
  SiRNA target sequence
cagttgattagagattatttc

SEQ ID NO: 279045 - DNA, 21 bp, Artificial sequence
  SiRNA target sequence
agttgattagagattatttcc

SEQ ID NO: 279046 - DNA, 21 bp, Artificial sequence
  SiRNA target sequence
gttgattagagattatttcca

SEQ ID NO: 279047 - DNA, 21 bp, Artificial sequence
  SiRNA target sequence
ttgattagagattatttccat

SEQ ID NO: 279048 - DNA, 21 bp, Artificial sequence
  SiRNA target sequence
tgattagagattatttccatt

SEQ ID NO: 279049 - DNA, 21 bp, Artificial sequence
  SiRNA target sequence
gattagagattatttccattg

SEQ ID NO: 279050 - DNA, 21 bp, Artificial sequence
  SiRNA target sequence
attagagattatttccattgt

SEQ ID NO: 279051 - DNA, 21 bp, Artificial sequence
  SiRNA target sequence
ttagagattatttccattgtg

SEQ ID NO: 279052 - DNA, 21 bp, Artificial sequence
  SiRNA target sequence
tagagattatttccattgtgc

SEQ ID NO: 279053 - DNA, 21 bp, Artificial sequence
  SiRNA target sequence
agagattatttccattgtgct

SEQ ID NO: 279054 - DNA, 21 bp, Artificial sequence
  SiRNA target sequence
gagattatttccattgtgcta

SEQ ID NO: 279055 - DNA, 21 bp, Artificial sequence
  SiRNA target sequence
agattatttccattgtgctaa

SEQ ID NO: 279056 - DNA, 21 bp, Artificial sequence
  SiRNA target sequence
gattatttccattgtgctaag

SEQ ID NO: 279057 - DNA, 21 bp, Artificial sequence
  SiRNA target sequence
attatttccattgtgctaagg

SEQ ID NO: 279058 - DNA, 21 bp, Artificial sequence
  SiRNA target sequence
ttatttccattgtgctaagga

SEQ ID NO: 279059 - DNA, 21 bp, Artificial sequence
  SiRNA target sequence
tatttccattgtgctaaggat

SEQ ID NO: 279060 - DNA, 21 bp, Artificial sequence
  SiRNA target sequence
atttccattgtgctaaggatt

SEQ ID NO: 279061 - DNA, 21 bp, Artificial sequence
  SiRNA target sequence
tttccattgtgctaaggattc

SEQ ID NO: 279062 - DNA, 21 bp, Artificial sequence
  SiRNA target sequence
ttccattgtgctaaggattcg

SEQ ID NO: 279063 - DNA, 21 bp, Artificial sequence
  SiRNA target sequence
tccattgtgctaaggattcgc

SEQ ID NO: 279064 - DNA, 21 bp, Artificial sequence
  SiRNA target sequence
ccattgtgctaaggattcgct

SEQ ID NO: 279065 - DNA, 21 bp, Artificial sequence
  SiRNA target sequence
cattgtgctaaggattcgcta

SEQ ID NO: 279066 - DNA, 21 bp, Artificial sequence
  SiRNA target sequence
attgtgctaaggattcgctac

SEQ ID NO: 279067 - DNA, 21 bp, Artificial sequence
  SiRNA target sequence
ttgtgctaaggattcgctaca

SEQ ID NO: 279068 - DNA, 21 bp, Artificial sequence
  SiRNA target sequence
tgtgctaaggattcgctacaa

SEQ ID NO: 279069 - DNA, 21 bp, Artificial sequence
  SiRNA target sequence
gtgctaaggattcgctacaag

SEQ ID NO: 279070 - DNA, 21 bp, Artificial sequence
  SiRNA target sequence
tgctaaggattcgctacaaga

SEQ ID NO: 279071 - DNA, 21 bp, Artificial sequence
  SiRNA target sequence
gctaaggattcgctacaagag

SEQ ID NO: 279072 - DNA, 21 bp, Artificial sequence
  SiRNA target sequence
ctaaggattcgctacaagaga

SEQ ID NO: 279073 - DNA, 21 bp, Artificial sequence
  SiRNA target sequence
taaggattcgctacaagagaa

SEQ ID NO: 279074 - DNA, 21 bp, Artificial sequence
  SiRNA target sequence
aaggattcgctacaagagaaa

SEQ ID NO: 279075 - DNA, 21 bp, Artificial sequence
  SiRNA target sequence
aggattcgctacaagagaaat

SEQ ID NO: 279076 - DNA, 21 bp, Artificial sequence
  SiRNA target sequence
ggattcgctacaagagaaatt

SEQ ID NO: 279077 - DNA, 21 bp, Artificial sequence
  SiRNA target sequence
gattcgctacaagagaaattt

SEQ ID NO: 279078 - DNA, 21 bp, Artificial sequence
  SiRNA target sequence
attcgctacaagagaaatttt

SEQ ID NO: 279079 - DNA, 21 bp, Artificial sequence
  SiRNA target sequence
ttcgctacaagagaaattttc

SEQ ID NO: 279080 - DNA, 21 bp, Artificial sequence
  SiRNA target sequence
tcgctacaagagaaattttca

SEQ ID NO: 279081 - DNA, 21 bp, Artificial sequence
  SiRNA target sequence
cgctacaagagaaattttcag

SEQ ID NO: 279082 - DNA, 21 bp, Artificial sequence
  SiRNA target sequence
gctacaagagaaattttcagc

SEQ ID NO: 279083 - DNA, 21 bp, Artificial sequence
  SiRNA target sequence
ctacaagagaaattttcagcc

SEQ ID NO: 279084 - DNA, 21 bp, Artificial sequence
  SiRNA target sequence
tacaagagaaattttcagcct

SEQ ID NO: 279085 - DNA, 21 bp, Artificial sequence
  SiRNA target sequence
acaagagaaattttcagccta

SEQ ID NO: 279086 - DNA, 21 bp, Artificial sequence
  SiRNA target sequence
caagagaaattttcagcctat

SEQ ID NO: 279087 - DNA, 21 bp, Artificial sequence
  SiRNA target sequence
aagagaaattttcagcctatc

SEQ ID NO: 279088 - DNA, 21 bp, Artificial sequence
  SiRNA target sequence
agagaaattttcagcctatcg

SEQ ID NO: 279089 - DNA, 21 bp, Artificial sequence
  SiRNA target sequence
gagaaattttcagcctatcgc

SEQ ID NO: 279090 - DNA, 21 bp, Artificial sequence
  SiRNA target sequence
agaaattttcagcctatcgcc

SEQ ID NO: 279091 - DNA, 21 bp, Artificial sequence
  SiRNA target sequence
gaaattttcagcctatcgccg

SEQ ID NO: 279092 - DNA, 21 bp, Artificial sequence
  SiRNA target sequence
aaattttcagcctatcgccga

SEQ ID NO: 279093 - DNA, 21 bp, Artificial sequence
  SiRNA target sequence
aattttcagcctatcgccgaa

SEQ ID NO: 279094 - DNA, 21 bp, Artificial sequence
  SiRNA target sequence
attttcagcctatcgccgaaa

SEQ ID NO: 279095 - DNA, 21 bp, Artificial sequence
  SiRNA target sequence
ttttcagcctatcgccgaaag

SEQ ID NO: 279096 - DNA, 21 bp, Artificial sequence
  SiRNA target sequence
tttcagcctatcgccgaaagt

SEQ ID NO: 279097 - DNA, 21 bp, Artificial sequence
  SiRNA target sequence
ttcagcctatcgccgaaagta

SEQ ID NO: 279098 - DNA, 21 bp, Artificial sequence
  SiRNA target sequence
tcagcctatcgccgaaagtac

SEQ ID NO: 279099 - DNA, 21 bp, Artificial sequence
  SiRNA target sequence
cagcctatcgccgaaagtact

SEQ ID NO: 279100 - DNA, 21 bp, Artificial sequence
  SiRNA target sequence
agcctatcgccgaaagtactc

SEQ ID NO: 279101 - DNA, 21 bp, Artificial sequence
  SiRNA target sequence
gcctatcgccgaaagtactct

SEQ ID NO: 279102 - DNA, 21 bp, Artificial sequence
  SiRNA target sequence
cctatcgccgaaagtactctt

SEQ ID NO: 279103 - DNA, 21 bp, Artificial sequence
  SiRNA target sequence
ctatcgccgaaagtactcttt

SEQ ID NO: 279104 - DNA, 21 bp, Artificial sequence
  SiRNA target sequence
tatcgccgaaagtactctttc

SEQ ID NO: 279105 - DNA, 21 bp, Artificial sequence
  SiRNA target sequence
atcgccgaaagtactctttcg

SEQ ID NO: 279106 - DNA, 21 bp, Artificial sequence
  SiRNA target sequence
tcgccgaaagtactctttcga

SEQ ID NO: 279107 - DNA, 21 bp, Artificial sequence
  SiRNA target sequence
cgccgaaagtactctttcgac

SEQ ID NO: 279108 - DNA, 21 bp, Artificial sequence
  SiRNA target sequence
gccgaaagtactctttcgacg

SEQ ID NO: 279109 - DNA, 21 bp, Artificial sequence
  SiRNA target sequence
ccgaaagtactctttcgacga

SEQ ID NO: 279110 - DNA, 21 bp, Artificial sequence
  SiRNA target sequence
cgaaagtactctttcgacgaa

SEQ ID NO: 279111 - DNA, 21 bp, Artificial sequence
  SiRNA target sequence
gaaagtactctttcgacgaat

SEQ ID NO: 279112 - DNA, 21 bp, Artificial sequence
  SiRNA target sequence
aaagtactctttcgacgaatg

SEQ ID NO: 279113 - DNA, 21 bp, Artificial sequence
  SiRNA target sequence
aagtactctttcgacgaatgg

SEQ ID NO: 279114 - DNA, 21 bp, Artificial sequence
  SiRNA target sequence
agtactctttcgacgaatggt

SEQ ID NO: 279115 - DNA, 21 bp, Artificial sequence
  SiRNA target sequence
gtactctttcgacgaatggtt

SEQ ID NO: 279116 - DNA, 21 bp, Artificial sequence
  SiRNA target sequence
tactctttcgacgaatggttt

SEQ ID NO: 279117 - DNA, 21 bp, Artificial sequence
  SiRNA target sequence
actctttcgacgaatggttta

SEQ ID NO: 279118 - DNA, 21 bp, Artificial sequence
  SiRNA target sequence
ctctttcgacgaatggtttag

SEQ ID NO: 279119 - DNA, 21 bp, Artificial sequence
  SiRNA target sequence
tctttcgacgaatggtttagt

SEQ ID NO: 279120 - DNA, 21 bp, Artificial sequence
  SiRNA target sequence
ctttcgacgaatggtttagtt

SEQ ID NO: 279121 - DNA, 21 bp, Artificial sequence
  SiRNA target sequence
tttcgacgaatggtttagttt

SEQ ID NO: 279122 - DNA, 21 bp, Artificial sequence
  SiRNA target sequence
ttcgacgaatggtttagtttc

SEQ ID NO: 279123 - DNA, 21 bp, Artificial sequence
  SiRNA target sequence
tcgacgaatggtttagtttct

SEQ ID NO: 279124 - DNA, 21 bp, Artificial sequence
  SiRNA target sequence
cgacgaatggtttagtttctc

SEQ ID NO: 279125 - DNA, 21 bp, Artificial sequence
  SiRNA target sequence
gacgaatggtttagtttctca

SEQ ID NO: 279126 - DNA, 21 bp, Artificial sequence
  SiRNA target sequence
acgaatggtttagtttctcaa

SEQ ID NO: 279127 - DNA, 21 bp, Artificial sequence
  SiRNA target sequence
cgaatggtttagtttctcaaa

SEQ ID NO: 279128 - DNA, 21 bp, Artificial sequence
  SiRNA target sequence
gaatggtttagtttctcaaag

SEQ ID NO: 279129 - DNA, 21 bp, Artificial sequence
  SiRNA target sequence
aatggtttagtttctcaaagg

SEQ ID NO: 279130 - DNA, 21 bp, Artificial sequence
  SiRNA target sequence
atggtttagtttctcaaaggc

SEQ ID NO: 279131 - DNA, 21 bp, Artificial sequence
  SiRNA target sequence
tggtttagtttctcaaaggca

SEQ ID NO: 279132 - DNA, 21 bp, Artificial sequence
  SiRNA target sequence
ggtttagtttctcaaaggcat

SEQ ID NO: 279133 - DNA, 21 bp, Artificial sequence
  SiRNA target sequence
gtttagtttctcaaaggcatc

SEQ ID NO: 279134 - DNA, 21 bp, Artificial sequence
  SiRNA target sequence
tttagtttctcaaaggcatct

SEQ ID NO: 279135 - DNA, 21 bp, Artificial sequence
  SiRNA target sequence
ttagtttctcaaaggcatcta

SEQ ID NO: 279136 - DNA, 21 bp, Artificial sequence
  SiRNA target sequence
tagtttctcaaaggcatctaa

SEQ ID NO: 279137 - DNA, 21 bp, Artificial sequence
  SiRNA target sequence
agtttctcaaaggcatctaaa

SEQ ID NO: 279138 - DNA, 21 bp, Artificial sequence
  SiRNA target sequence
gtttctcaaaggcatctaaag

SEQ ID NO: 279139 - DNA, 21 bp, Artificial sequence
  SiRNA target sequence
tttctcaaaggcatctaaagt

SEQ ID NO: 279140 - DNA, 21 bp, Artificial sequence
  SiRNA target sequence
ttctcaaaggcatctaaagta

SEQ ID NO: 279141 - DNA, 21 bp, Artificial sequence
  SiRNA target sequence
tctcaaaggcatctaaagtag

SEQ ID NO: 279142 - DNA, 21 bp, Artificial sequence
  SiRNA target sequence
ctcaaaggcatctaaagtagt

SEQ ID NO: 279143 - DNA, 21 bp, Artificial sequence
  SiRNA target sequence
tcaaaggcatctaaagtagtg

SEQ ID NO: 279144 - DNA, 21 bp, Artificial sequence
  SiRNA target sequence
caaaggcatctaaagtagtgt

SEQ ID NO: 279145 - DNA, 21 bp, Artificial sequence
  SiRNA target sequence
aaaggcatctaaagtagtgtt

SEQ ID NO: 279146 - DNA, 21 bp, Artificial sequence
  SiRNA target sequence
aaggcatctaaagtagtgttg

SEQ ID NO: 279147 - DNA, 21 bp, Artificial sequence
  SiRNA target sequence
aggcatctaaagtagtgttgg

SEQ ID NO: 279148 - DNA, 21 bp, Artificial sequence
  SiRNA target sequence
ggcatctaaagtagtgttggg

SEQ ID NO: 279149 - DNA, 21 bp, Artificial sequence
  SiRNA target sequence
gcatctaaagtagtgttggga

SEQ ID NO: 279150 - DNA, 21 bp, Artificial sequence
  SiRNA target sequence
catctaaagtagtgttgggaa

SEQ ID NO: 279151 - DNA, 21 bp, Artificial sequence
  SiRNA target sequence
atctaaagtagtgttgggaat

SEQ ID NO: 279152 - DNA, 21 bp, Artificial sequence
  SiRNA target sequence
tctaaagtagtgttgggaata

SEQ ID NO: 279153 - DNA, 21 bp, Artificial sequence
  SiRNA target sequence
ctaaagtagtgttgggaatac

SEQ ID NO: 279154 - DNA, 21 bp, Artificial sequence
  SiRNA target sequence
taaagtagtgttgggaatact

SEQ ID NO: 279155 - DNA, 21 bp, Artificial sequence
  SiRNA target sequence
aaagtagtgttgggaatactc

SEQ ID NO: 279156 - DNA, 21 bp, Artificial sequence
  SiRNA target sequence
aagtagtgttgggaatactct

SEQ ID NO: 279157 - DNA, 21 bp, Artificial sequence
  SiRNA target sequence
agtagtgttgggaatactctc

SEQ ID NO: 279158 - DNA, 21 bp, Artificial sequence
  SiRNA target sequence
gtagtgttgggaatactctct

SEQ ID NO: 279159 - DNA, 21 bp, Artificial sequence
  SiRNA target sequence
tagtgttgggaatactctctt

SEQ ID NO: 279160 - DNA, 21 bp, Artificial sequence
  SiRNA target sequence
agtgttgggaatactctcttt

SEQ ID NO: 279161 - DNA, 21 bp, Artificial sequence
  SiRNA target sequence
gtgttgggaatactctctttg

SEQ ID NO: 279162 - DNA, 21 bp, Artificial sequence
  SiRNA target sequence
tgttgggaatactctctttgg

SEQ ID NO: 279163 - DNA, 21 bp, Artificial sequence
  SiRNA target sequence
gttgggaatactctctttggt

SEQ ID NO: 279164 - DNA, 21 bp, Artificial sequence
  SiRNA target sequence
ttgggaatactctctttggta

SEQ ID NO: 279165 - DNA, 21 bp, Artificial sequence
  SiRNA target sequence
tgggaatactctctttggtac

SEQ ID NO: 279166 - DNA, 21 bp, Artificial sequence
  SiRNA target sequence
gggaatactctctttggtact

SEQ ID NO: 279167 - DNA, 21 bp, Artificial sequence
  SiRNA target sequence
ggaatactctctttggtactg

SEQ ID NO: 279168 - DNA, 21 bp, Artificial sequence
  SiRNA target sequence
gaatactctctttggtactgg

SEQ ID NO: 279169 - DNA, 21 bp, Artificial sequence
  SiRNA target sequence
aatactctctttggtactggt

SEQ ID NO: 279170 - DNA, 21 bp, Artificial sequence
  SiRNA target sequence
atactctctttggtactggtt

SEQ ID NO: 279171 - DNA, 21 bp, Artificial sequence
  SiRNA target sequence
tactctctttggtactggttg

SEQ ID NO: 279172 - DNA, 21 bp, Artificial sequence
  SiRNA target sequence
actctctttggtactggttgg

SEQ ID NO: 279173 - DNA, 21 bp, Artificial sequence
  SiRNA target sequence
ctctctttggtactggttgga

SEQ ID NO: 279174 - DNA, 21 bp, Artificial sequence
  SiRNA target sequence
tctctttggtactggttggat

SEQ ID NO: 279175 - DNA, 21 bp, Artificial sequence
  SiRNA target sequence
ctctttggtactggttggata

SEQ ID NO: 279176 - DNA, 21 bp, Artificial sequence
  SiRNA target sequence
tctttggtactggttggatat

SEQ ID NO: 279177 - DNA, 21 bp, Artificial sequence
  SiRNA target sequence
ctttggtactggttggatatg

SEQ ID NO: 279178 - DNA, 21 bp, Artificial sequence
  SiRNA target sequence
tttggtactggttggatatgg

SEQ ID NO: 279179 - DNA, 21 bp, Artificial sequence
  SiRNA target sequence
ttggtactggttggatatggt

SEQ ID NO: 279180 - DNA, 21 bp, Artificial sequence
  SiRNA target sequence
tggtactggttggatatggta

SEQ ID NO: 279181 - DNA, 21 bp, Artificial sequence
  SiRNA target sequence
ggtactggttggatatggtat

SEQ ID NO: 279182 - DNA, 21 bp, Artificial sequence
  SiRNA target sequence
gtactggttggatatggtata

SEQ ID NO: 279183 - DNA, 21 bp, Artificial sequence
  SiRNA target sequence
tactggttggatatggtatat

SEQ ID NO: 279184 - DNA, 21 bp, Artificial sequence
  SiRNA target sequence
actggttggatatggtatata

SEQ ID NO: 279185 - DNA, 21 bp, Artificial sequence
  SiRNA target sequence
ctggttggatatggtatatat

SEQ ID NO: 279186 - DNA, 21 bp, Artificial sequence
  SiRNA target sequence
tggttggatatggtatatatt

SEQ ID NO: 279187 - DNA, 21 bp, Artificial sequence
  SiRNA target sequence
ggttggatatggtatatattc

SEQ ID NO: 279188 - DNA, 21 bp, Artificial sequence
  SiRNA target sequence
gttggatatggtatatattca

SEQ ID NO: 279189 - DNA, 21 bp, Artificial sequence
  SiRNA target sequence
ttggatatggtatatattcat

SEQ ID NO: 279190 - DNA, 21 bp, Artificial sequence
  SiRNA target sequence
tggatatggtatatattcata

SEQ ID NO: 279191 - DNA, 21 bp, Artificial sequence
  SiRNA target sequence
ggatatggtatatattcatat

SEQ ID NO: 279192 - DNA, 21 bp, Artificial sequence
  SiRNA target sequence
gatatggtatatattcatatg

SEQ ID NO: 279193 - DNA, 21 bp, Artificial sequence
  SiRNA target sequence
atatggtatatattcatatgt

SEQ ID NO: 279194 - DNA, 21 bp, Artificial sequence
  SiRNA target sequence
tatggtatatattcatatgtt

SEQ ID NO: 279195 - DNA, 21 bp, Artificial sequence
  SiRNA target sequence
atggtatatattcatatgtta

SEQ ID NO: 279196 - DNA, 21 bp, Artificial sequence
  SiRNA target sequence
tggtatatattcatatgttaa

SEQ ID NO: 279197 - DNA, 21 bp, Artificial sequence
  SiRNA target sequence
ggtatatattcatatgttaaa

SEQ ID NO: 279198 - DNA, 21 bp, Artificial sequence
  SiRNA target sequence
gtatatattcatatgttaaag

SEQ ID NO: 279199 - DNA, 21 bp, Artificial sequence
  SiRNA target sequence
tatatattcatatgttaaagg

SEQ ID NO: 279200 - DNA, 21 bp, Artificial sequence
  SiRNA target sequence
atatattcatatgttaaagga

SEQ ID NO: 279201 - DNA, 21 bp, Artificial sequence
  SiRNA target sequence
tatattcatatgttaaaggaa

SEQ ID NO: 279202 - DNA, 21 bp, Artificial sequence
  SiRNA target sequence
atattcatatgttaaaggaac

SEQ ID NO: 279203 - DNA, 21 bp, Artificial sequence
  SiRNA target sequence
tattcatatgttaaaggaact

SEQ ID NO: 279204 - DNA, 21 bp, Artificial sequence
  SiRNA target sequence
attcatatgttaaaggaactc

SEQ ID NO: 279205 - DNA, 21 bp, Artificial sequence
  SiRNA target sequence
ttcatatgttaaaggaactcc

SEQ ID NO: 279206 - DNA, 21 bp, Artificial sequence
  SiRNA target sequence
tcatatgttaaaggaactcct

SEQ ID NO: 279207 - DNA, 21 bp, Artificial sequence
  SiRNA target sequence
catatgttaaaggaactcctg

SEQ ID NO: 279208 - DNA, 21 bp, Artificial sequence
  SiRNA target sequence
atatgttaaaggaactcctgc

SEQ ID NO: 279209 - DNA, 21 bp, Artificial sequence
  SiRNA target sequence
tatgttaaaggaactcctgcg

SEQ ID NO: 279210 - DNA, 21 bp, Artificial sequence
  SiRNA target sequence
atgttaaaggaactcctgcga

SEQ ID NO: 279211 - DNA, 21 bp, Artificial sequence
  SiRNA target sequence
tgttaaaggaactcctgcgaa

SEQ ID NO: 279212 - DNA, 21 bp, Artificial sequence
  SiRNA target sequence
gttaaaggaactcctgcgaaa

SEQ ID NO: 279213 - DNA, 21 bp, Artificial sequence
  SiRNA target sequence
ttaaaggaactcctgcgaaag

SEQ ID NO: 279214 - DNA, 21 bp, Artificial sequence
  SiRNA target sequence
taaaggaactcctgcgaaaga

SEQ ID NO: 279215 - DNA, 21 bp, Artificial sequence
  SiRNA target sequence
aaaggaactcctgcgaaagac

SEQ ID NO: 279216 - DNA, 21 bp, Artificial sequence
  SiRNA target sequence
aaggaactcctgcgaaagact

SEQ ID NO: 279217 - DNA, 21 bp, Artificial sequence
  SiRNA target sequence
aggaactcctgcgaaagactc

SEQ ID NO: 279218 - DNA, 21 bp, Artificial sequence
  SiRNA target sequence
ggaactcctgcgaaagactca

SEQ ID NO: 279219 - DNA, 21 bp, Artificial sequence
  SiRNA target sequence
gaactcctgcgaaagactcag

SEQ ID NO: 279220 - DNA, 21 bp, Artificial sequence
  SiRNA target sequence
aactcctgcgaaagactcagc

SEQ ID NO: 279221 - DNA, 21 bp, Artificial sequence
  SiRNA target sequence
actcctgcgaaagactcagcg

SEQ ID NO: 279222 - DNA, 21 bp, Artificial sequence
  SiRNA target sequence
ctcctgcgaaagactcagcgg

SEQ ID NO: 279223 - DNA, 21 bp, Artificial sequence
  SiRNA target sequence
tcctgcgaaagactcagcgga

SEQ ID NO: 279224 - DNA, 21 bp, Artificial sequence
  SiRNA target sequence
cctgcgaaagactcagcggaa

SEQ ID NO: 279225 - DNA, 21 bp, Artificial sequence
  SiRNA target sequence
ctgcgaaagactcagcggaat

SEQ ID NO: 279226 - DNA, 21 bp, Artificial sequence
  SiRNA target sequence
tgcgaaagactcagcggaatc

SEQ ID NO: 279227 - DNA, 21 bp, Artificial sequence
  SiRNA target sequence
gcgaaagactcagcggaatct

SEQ ID NO: 279228 - DNA, 21 bp, Artificial sequence
  SiRNA target sequence
cgaaagactcagcggaatctt

SEQ ID NO: 279229 - DNA, 21 bp, Artificial sequence
  SiRNA target sequence
gaaagactcagcggaatctta

SEQ ID NO: 279230 - DNA, 21 bp, Artificial sequence
  SiRNA target sequence
aaagactcagcggaatcttac

SEQ ID NO: 279231 - DNA, 21 bp, Artificial sequence
  SiRNA target sequence
aagactcagcggaatcttacg

SEQ ID NO: 279232 - DNA, 21 bp, Artificial sequence
  SiRNA target sequence
agactcagcggaatcttacga

SEQ ID NO: 279233 - DNA, 21 bp, Artificial sequence
  SiRNA target sequence
gactcagcggaatcttacgaa

SEQ ID NO: 279234 - DNA, 21 bp, Artificial sequence
  SiRNA target sequence
actcagcggaatcttacgaac

SEQ ID NO: 279235 - DNA, 21 bp, Artificial sequence
  SiRNA target sequence
ctcagcggaatcttacgaacc

SEQ ID NO: 279236 - DNA, 21 bp, Artificial sequence
  SiRNA target sequence
tcagcggaatcttacgaacca

SEQ ID NO: 279237 - DNA, 21 bp, Artificial sequence
  SiRNA target sequence
cagcggaatcttacgaaccaa

SEQ ID NO: 279238 - DNA, 21 bp, Artificial sequence
  SiRNA target sequence
agcggaatcttacgaaccaaa

SEQ ID NO: 279239 - DNA, 21 bp, Artificial sequence
  SiRNA target sequence
gcggaatcttacgaaccaaaa

SEQ ID NO: 279240 - DNA, 21 bp, Artificial sequence
  SiRNA target sequence
cggaatcttacgaaccaaaag

SEQ ID NO: 279241 - DNA, 21 bp, Artificial sequence
  SiRNA target sequence
ggaatcttacgaaccaaaagt

SEQ ID NO: 279242 - DNA, 21 bp, Artificial sequence
  SiRNA target sequence
gaatcttacgaaccaaaagtg

SEQ ID NO: 279243 - DNA, 21 bp, Artificial sequence
  SiRNA target sequence
aatcttacgaaccaaaagtgg

SEQ ID NO: 279244 - DNA, 21 bp, Artificial sequence
  SiRNA target sequence
atcttacgaaccaaaagtggc

SEQ ID NO: 279245 - DNA, 21 bp, Artificial sequence
  SiRNA target sequence
tcttacgaaccaaaagtggcg

SEQ ID NO: 279246 - DNA, 21 bp, Artificial sequence
  SiRNA target sequence
cttacgaaccaaaagtggcga

SEQ ID NO: 279247 - DNA, 21 bp, Artificial sequence
  SiRNA target sequence
ttacgaaccaaaagtggcgag

SEQ ID NO: 279248 - DNA, 21 bp, Artificial sequence
  SiRNA target sequence
tacgaaccaaaagtggcgagt

SEQ ID NO: 279249 - DNA, 21 bp, Artificial sequence
  SiRNA target sequence
acgaaccaaaagtggcgagta

SEQ ID NO: 279250 - DNA, 21 bp, Artificial sequence
  SiRNA target sequence
cgaaccaaaagtggcgagtaa

SEQ ID NO: 279251 - DNA, 21 bp, Artificial sequence
  SiRNA target sequence
gaaccaaaagtggcgagtaag

SEQ ID NO: 279252 - DNA, 21 bp, Artificial sequence
  SiRNA target sequence
aaccaaaagtggcgagtaagg

SEQ ID NO: 279253 - DNA, 21 bp, Artificial sequence
  SiRNA target sequence
accaaaagtggcgagtaaggt

SEQ ID NO: 279254 - DNA, 21 bp, Artificial sequence
  SiRNA target sequence
ccaaaagtggcgagtaaggtt

SEQ ID NO: 279255 - DNA, 21 bp, Artificial sequence
  SiRNA target sequence
caaaagtggcgagtaaggtta

SEQ ID NO: 279256 - DNA, 21 bp, Artificial sequence
  SiRNA target sequence
aaaagtggcgagtaaggttaa

SEQ ID NO: 279257 - DNA, 21 bp, Artificial sequence
  SiRNA target sequence
aaagtggcgagtaaggttaag

SEQ ID NO: 279258 - DNA, 21 bp, Artificial sequence
  SiRNA target sequence
aagtggcgagtaaggttaagg

SEQ ID NO: 279259 - DNA, 21 bp, Artificial sequence
  SiRNA target sequence
agtggcgagtaaggttaaggt

SEQ ID NO: 279260 - DNA, 21 bp, Artificial sequence
  SiRNA target sequence
gtggcgagtaaggttaaggtt

SEQ ID NO: 279261 - DNA, 21 bp, Artificial sequence
  SiRNA target sequence
tggcgagtaaggttaaggttg

SEQ ID NO: 279262 - DNA, 21 bp, Artificial sequence
  SiRNA target sequence
ggcgagtaaggttaaggttga

SEQ ID NO: 279263 - DNA, 21 bp, Artificial sequence
  SiRNA target sequence
gcgagtaaggttaaggttgag

SEQ ID NO: 279264 - DNA, 21 bp, Artificial sequence
  SiRNA target sequence
cgagtaaggttaaggttgagg

SEQ ID NO: 279265 - DNA, 21 bp, Artificial sequence
  SiRNA target sequence
gagtaaggttaaggttgaggg

SEQ ID NO: 279266 - DNA, 21 bp, Artificial sequence
  SiRNA target sequence
agtaaggttaaggttgaggga

SEQ ID NO: 279267 - DNA, 21 bp, Artificial sequence
  SiRNA target sequence
gtaaggttaaggttgagggaa

SEQ ID NO: 279268 - DNA, 21 bp, Artificial sequence
  SiRNA target sequence
taaggttaaggttgagggaaa

SEQ ID NO: 279269 - DNA, 21 bp, Artificial sequence
  SiRNA target sequence
aaggttaaggttgagggaaat

SEQ ID NO: 279270 - DNA, 21 bp, Artificial sequence
  SiRNA target sequence
aggttaaggttgagggaaata

SEQ ID NO: 279271 - DNA, 21 bp, Artificial sequence
  SiRNA target sequence
ggttaaggttgagggaaataa

SEQ ID NO: 279272 - DNA, 21 bp, Artificial sequence
  SiRNA target sequence
gttaaggttgagggaaataac

SEQ ID NO: 279273 - DNA, 21 bp, Artificial sequence
  SiRNA target sequence
ttaaggttgagggaaataaca

SEQ ID NO: 279274 - DNA, 21 bp, Artificial sequence
  SiRNA target sequence
taaggttgagggaaataacag

SEQ ID NO: 279275 - DNA, 21 bp, Artificial sequence
  SiRNA target sequence
aaggttgagggaaataacagt

SEQ ID NO: 279276 - DNA, 21 bp, Artificial sequence
  SiRNA target sequence
aggttgagggaaataacagtg

SEQ ID NO: 279277 - DNA, 21 bp, Artificial sequence
  SiRNA target sequence
ggttgagggaaataacagtgt

SEQ ID NO: 279278 - DNA, 21 bp, Artificial sequence
  SiRNA target sequence
gttgagggaaataacagtgtt

SEQ ID NO: 279279 - DNA, 21 bp, Artificial sequence
  SiRNA target sequence
ttgagggaaataacagtgttc

SEQ ID NO: 279280 - DNA, 21 bp, Artificial sequence
  SiRNA target sequence
tgagggaaataacagtgttcc

SEQ ID NO: 279281 - DNA, 21 bp, Artificial sequence
  SiRNA target sequence
gagggaaataacagtgttcct

SEQ ID NO: 279282 - DNA, 21 bp, Artificial sequence
  SiRNA target sequence
agggaaataacagtgttcctg

SEQ ID NO: 279283 - DNA, 21 bp, Artificial sequence
  SiRNA target sequence
gggaaataacagtgttcctga

SEQ ID NO: 279284 - DNA, 21 bp, Artificial sequence
  SiRNA target sequence
ggaaataacagtgttcctgag

SEQ ID NO: 279285 - DNA, 21 bp, Artificial sequence
  SiRNA target sequence
gaaataacagtgttcctgagg

SEQ ID NO: 279286 - DNA, 21 bp, Artificial sequence
  SiRNA target sequence
aaataacagtgttcctgaggc

SEQ ID NO: 279287 - DNA, 21 bp, Artificial sequence
  SiRNA target sequence
aataacagtgttcctgaggcg

SEQ ID NO: 279288 - DNA, 21 bp, Artificial sequence
  SiRNA target sequence
ataacagtgttcctgaggcgt

SEQ ID NO: 279289 - DNA, 21 bp, Artificial sequence
  SiRNA target sequence
taacagtgttcctgaggcgta

SEQ ID NO: 279290 - DNA, 21 bp, Artificial sequence
  SiRNA target sequence
aacagtgttcctgaggcgtac

SEQ ID NO: 279291 - DNA, 21 bp, Artificial sequence
  SiRNA target sequence
acagtgttcctgaggcgtacg

SEQ ID NO: 279292 - DNA, 21 bp, Artificial sequence
  SiRNA target sequence
cagtgttcctgaggcgtacga

SEQ ID NO: 279293 - DNA, 21 bp, Artificial sequence
  SiRNA target sequence
agtgttcctgaggcgtacgaa

SEQ ID NO: 279294 - DNA, 21 bp, Artificial sequence
  SiRNA target sequence
gtgttcctgaggcgtacgaac

SEQ ID NO: 279295 - DNA, 21 bp, Artificial sequence
  SiRNA target sequence
tgttcctgaggcgtacgaacc

SEQ ID NO: 279296 - DNA, 21 bp, Artificial sequence
  SiRNA target sequence
gttcctgaggcgtacgaacca

SEQ ID NO: 279297 - DNA, 21 bp, Artificial sequence
  SiRNA target sequence
ttcctgaggcgtacgaaccaa

SEQ ID NO: 279298 - DNA, 21 bp, Artificial sequence
  SiRNA target sequence
tcctgaggcgtacgaaccaaa

SEQ ID NO: 279299 - DNA, 21 bp, Artificial sequence
  SiRNA target sequence
cctgaggcgtacgaaccaaaa

SEQ ID NO: 279300 - DNA, 21 bp, Artificial sequence
  SiRNA target sequence
ctgaggcgtacgaaccaaaag

SEQ ID NO: 279301 - DNA, 21 bp, Artificial sequence
  SiRNA target sequence
tgaggcgtacgaaccaaaagt

SEQ ID NO: 279302 - DNA, 21 bp, Artificial sequence
  SiRNA target sequence
gaggcgtacgaaccaaaagtt

SEQ ID NO: 279303 - DNA, 21 bp, Artificial sequence
  SiRNA target sequence
aggcgtacgaaccaaaagtta

SEQ ID NO: 279304 - DNA, 21 bp, Artificial sequence
  SiRNA target sequence
ggcgtacgaaccaaaagttag

SEQ ID NO: 279305 - DNA, 21 bp, Artificial sequence
  SiRNA target sequence
gcgtacgaaccaaaagttagt

SEQ ID NO: 279306 - DNA, 21 bp, Artificial sequence
  SiRNA target sequence
cgtacgaaccaaaagttagta

SEQ ID NO: 279307 - DNA, 21 bp, Artificial sequence
  SiRNA target sequence
gtacgaaccaaaagttagtag

SEQ ID NO: 279308 - DNA, 21 bp, Artificial sequence
  SiRNA target sequence
tacgaaccaaaagttagtaga

SEQ ID NO: 279309 - DNA, 21 bp, Artificial sequence
  SiRNA target sequence
acgaaccaaaagttagtagaa

SEQ ID NO: 279310 - DNA, 21 bp, Artificial sequence
  SiRNA target sequence
cgaaccaaaagttagtagaaa

SEQ ID NO: 279311 - DNA, 21 bp, Artificial sequence
  SiRNA target sequence
gaaccaaaagttagtagaaaa

SEQ ID NO: 279312 - DNA, 21 bp, Artificial sequence
  SiRNA target sequence
aaccaaaagttagtagaaaag

SEQ ID NO: 279313 - DNA, 21 bp, Artificial sequence
  SiRNA target sequence
accaaaagttagtagaaaagt

SEQ ID NO: 279314 - DNA, 21 bp, Artificial sequence
  SiRNA target sequence
ccaaaagttagtagaaaagtc

SEQ ID NO: 279315 - DNA, 21 bp, Artificial sequence
  SiRNA target sequence
caaaagttagtagaaaagtca

SEQ ID NO: 279316 - DNA, 21 bp, Artificial sequence
  SiRNA target sequence
aaaagttagtagaaaagtcaa

SEQ ID NO: 279317 - DNA, 21 bp, Artificial sequence
  SiRNA target sequence
aaagttagtagaaaagtcaag

SEQ ID NO: 279318 - DNA, 21 bp, Artificial sequence
  SiRNA target sequence
aagttagtagaaaagtcaagg

SEQ ID NO: 279319 - DNA, 21 bp, Artificial sequence
  SiRNA target sequence
agttagtagaaaagtcaaggt

SEQ ID NO: 279320 - DNA, 21 bp, Artificial sequence
  SiRNA target sequence
gttagtagaaaagtcaaggtt

SEQ ID NO: 279321 - DNA, 21 bp, Artificial sequence
  SiRNA target sequence
ttagtagaaaagtcaaggttg

SEQ ID NO: 279322 - DNA, 21 bp, Artificial sequence
  SiRNA target sequence
tagtagaaaagtcaaggttga

SEQ ID NO: 279323 - DNA, 21 bp, Artificial sequence
  SiRNA target sequence
agtagaaaagtcaaggttgaa

SEQ ID NO: 279324 - DNA, 21 bp, Artificial sequence
  SiRNA target sequence
gtagaaaagtcaaggttgaag

SEQ ID NO: 279325 - DNA, 21 bp, Artificial sequence
  SiRNA target sequence
tagaaaagtcaaggttgaagg

SEQ ID NO: 279326 - DNA, 21 bp, Artificial sequence
  SiRNA target sequence
agaaaagtcaaggttgaagga

SEQ ID NO: 279327 - DNA, 21 bp, Artificial sequence
  SiRNA target sequence
gaaaagtcaaggttgaaggat

SEQ ID NO: 279328 - DNA, 21 bp, Artificial sequence
  SiRNA target sequence
aaaagtcaaggttgaaggata

SEQ ID NO: 279329 - DNA, 21 bp, Artificial sequence
  SiRNA target sequence
aaagtcaaggttgaaggatac

SEQ ID NO: 279330 - DNA, 21 bp, Artificial sequence
  SiRNA target sequence
aagtcaaggttgaaggataca

SEQ ID NO: 279331 - DNA, 21 bp, Artificial sequence
  SiRNA target sequence
agtcaaggttgaaggatacaa

SEQ ID NO: 279332 - DNA, 21 bp, Artificial sequence
  SiRNA target sequence
gtcaaggttgaaggatacaat

SEQ ID NO: 279333 - DNA, 21 bp, Artificial sequence
  SiRNA target sequence
tcaaggttgaaggatacaatg

SEQ ID NO: 279334 - DNA, 21 bp, Artificial sequence
  SiRNA target sequence
caaggttgaaggatacaatgc

SEQ ID NO: 279335 - DNA, 21 bp, Artificial sequence
  SiRNA target sequence
aaggttgaaggatacaatgcg

SEQ ID NO: 279336 - DNA, 21 bp, Artificial sequence
  SiRNA target sequence
aggttgaaggatacaatgcga

SEQ ID NO: 279337 - DNA, 21 bp, Artificial sequence
  SiRNA target sequence
ggttgaaggatacaatgcgag

SEQ ID NO: 279338 - DNA, 21 bp, Artificial sequence
  SiRNA target sequence
gttgaaggatacaatgcgaga

SEQ ID NO: 279339 - DNA, 21 bp, Artificial sequence
  SiRNA target sequence
ttgaaggatacaatgcgagag

SEQ ID NO: 279340 - DNA, 21 bp, Artificial sequence
  SiRNA target sequence
tgaaggatacaatgcgagaga

SEQ ID NO: 279341 - DNA, 21 bp, Artificial sequence
  SiRNA target sequence
gaaggatacaatgcgagagag

SEQ ID NO: 279342 - DNA, 21 bp, Artificial sequence
  SiRNA target sequence
aaggatacaatgcgagagaga

SEQ ID NO: 279343 - DNA, 21 bp, Artificial sequence
  SiRNA target sequence
aggatacaatgcgagagagat

SEQ ID NO: 279344 - DNA, 21 bp, Artificial sequence
  SiRNA target sequence
ggatacaatgcgagagagatt

SEQ ID NO: 279345 - DNA, 21 bp, Artificial sequence
  SiRNA target sequence
gatacaatgcgagagagatta

SEQ ID NO: 279346 - DNA, 21 bp, Artificial sequence
  SiRNA target sequence
atacaatgcgagagagattaa

SEQ ID NO: 279347 - DNA, 21 bp, Artificial sequence
  SiRNA target sequence
tacaatgcgagagagattaaa

SEQ ID NO: 279348 - DNA, 21 bp, Artificial sequence
  SiRNA target sequence
acaatgcgagagagattaaac

SEQ ID NO: 279349 - DNA, 21 bp, Artificial sequence
  SiRNA target sequence
caatgcgagagagattaaacg

SEQ ID NO: 279350 - DNA, 21 bp, Artificial sequence
  SiRNA target sequence
aatgcgagagagattaaacgt

SEQ ID NO: 279351 - DNA, 21 bp, Artificial sequence
  SiRNA target sequence
atgcgagagagattaaacgta

SEQ ID NO: 279352 - DNA, 21 bp, Artificial sequence
  SiRNA target sequence
tgcgagagagattaaacgtaa

SEQ ID NO: 279353 - DNA, 21 bp, Artificial sequence
  SiRNA target sequence
gcgagagagattaaacgtaaa

SEQ ID NO: 279354 - DNA, 21 bp, Artificial sequence
  SiRNA target sequence
cgagagagattaaacgtaaag

SEQ ID NO: 279355 - DNA, 21 bp, Artificial sequence
  SiRNA target sequence
gagagagattaaacgtaaagt

SEQ ID NO: 279356 - DNA, 21 bp, Artificial sequence
  SiRNA target sequence
agagagattaaacgtaaagtg

SEQ ID NO: 279357 - DNA, 21 bp, Artificial sequence
  SiRNA target sequence
gagagattaaacgtaaagtgg

SEQ ID NO: 279358 - DNA, 21 bp, Artificial sequence
  SiRNA target sequence
agagattaaacgtaaagtgga

SEQ ID NO: 279359 - DNA, 21 bp, Artificial sequence
  SiRNA target sequence
gagattaaacgtaaagtggaa

SEQ ID NO: 279360 - DNA, 21 bp, Artificial sequence
  SiRNA target sequence
agattaaacgtaaagtggaag

SEQ ID NO: 279361 - DNA, 21 bp, Artificial sequence
  SiRNA target sequence
gattaaacgtaaagtggaagc

SEQ ID NO: 279362 - DNA, 21 bp, Artificial sequence
  SiRNA target sequence
attaaacgtaaagtggaagct

SEQ ID NO: 279363 - DNA, 21 bp, Artificial sequence
  SiRNA target sequence
ttaaacgtaaagtggaagctt

SEQ ID NO: 279364 - DNA, 21 bp, Artificial sequence
  SiRNA target sequence
taaacgtaaagtggaagctta

SEQ ID NO: 279365 - DNA, 21 bp, Artificial sequence
  SiRNA target sequence
aaacgtaaagtggaagcttat

SEQ ID NO: 279366 - DNA, 21 bp, Artificial sequence
  SiRNA target sequence
aacgtaaagtggaagcttatg

SEQ ID NO: 279367 - DNA, 21 bp, Artificial sequence
  SiRNA target sequence
acgtaaagtggaagcttatgc

SEQ ID NO: 279368 - DNA, 21 bp, Artificial sequence
  SiRNA target sequence
cgtaaagtggaagcttatgct

SEQ ID NO: 279369 - DNA, 21 bp, Artificial sequence
  SiRNA target sequence
gtaaagtggaagcttatgctc

SEQ ID NO: 279370 - DNA, 21 bp, Artificial sequence
  SiRNA target sequence
taaagtggaagcttatgctcc

SEQ ID NO: 279371 - DNA, 21 bp, Artificial sequence
  SiRNA target sequence
aaagtggaagcttatgctccc

SEQ ID NO: 279372 - DNA, 21 bp, Artificial sequence
  SiRNA target sequence
aagtggaagcttatgctccca

SEQ ID NO: 279373 - DNA, 21 bp, Artificial sequence
  SiRNA target sequence
agtggaagcttatgctcccaa

SEQ ID NO: 279374 - DNA, 21 bp, Artificial sequence
  SiRNA target sequence
gtggaagcttatgctcccaaa

SEQ ID NO: 279375 - DNA, 21 bp, Artificial sequence
  SiRNA target sequence
tggaagcttatgctcccaaag

SEQ ID NO: 279376 - DNA, 21 bp, Artificial sequence
  SiRNA target sequence
ggaagcttatgctcccaaagt

SEQ ID NO: 279377 - DNA, 21 bp, Artificial sequence
  SiRNA target sequence
gaagcttatgctcccaaagtt

SEQ ID NO: 279378 - DNA, 21 bp, Artificial sequence
  SiRNA target sequence
aagcttatgctcccaaagtta

SEQ ID NO: 279379 - DNA, 21 bp, Artificial sequence
  SiRNA target sequence
agcttatgctcccaaagttag

SEQ ID NO: 279380 - DNA, 21 bp, Artificial sequence
  SiRNA target sequence
gcttatgctcccaaagttagt

SEQ ID NO: 279381 - DNA, 21 bp, Artificial sequence
  SiRNA target sequence
cttatgctcccaaagttagtc

SEQ ID NO: 279382 - DNA, 21 bp, Artificial sequence
  SiRNA target sequence
ttatgctcccaaagttagtcg

SEQ ID NO: 279383 - DNA, 21 bp, Artificial sequence
  SiRNA target sequence
tatgctcccaaagttagtcga

SEQ ID NO: 279384 - DNA, 21 bp, Artificial sequence
  SiRNA target sequence
atgctcccaaagttagtcgag

SEQ ID NO: 279385 - DNA, 21 bp, Artificial sequence
  SiRNA target sequence
tgctcccaaagttagtcgagc

SEQ ID NO: 279386 - DNA, 21 bp, Artificial sequence
  SiRNA target sequence
gctcccaaagttagtcgagct

SEQ ID NO: 279387 - DNA, 21 bp, Artificial sequence
  SiRNA target sequence
ctcccaaagttagtcgagctg

SEQ ID NO: 279388 - DNA, 21 bp, Artificial sequence
  SiRNA target sequence
tcccaaagttagtcgagctgt

SEQ ID NO: 279389 - DNA, 21 bp, Artificial sequence
  SiRNA target sequence
cccaaagttagtcgagctgtg

SEQ ID NO: 279390 - DNA, 21 bp, Artificial sequence
  SiRNA target sequence
ccaaagttagtcgagctgtgc

SEQ ID NO: 279391 - DNA, 21 bp, Artificial sequence
  SiRNA target sequence
caaagttagtcgagctgtgcg

SEQ ID NO: 279392 - DNA, 21 bp, Artificial sequence
  SiRNA target sequence
aaagttagtcgagctgtgcgc

SEQ ID NO: 279393 - DNA, 21 bp, Artificial sequence
  SiRNA target sequence
aagttagtcgagctgtgcgcg

SEQ ID NO: 279394 - DNA, 21 bp, Artificial sequence
  SiRNA target sequence
agttagtcgagctgtgcgcgt

SEQ ID NO: 279395 - DNA, 21 bp, Artificial sequence
  SiRNA target sequence
gttagtcgagctgtgcgcgtc

SEQ ID NO: 279396 - DNA, 21 bp, Artificial sequence
  SiRNA target sequence
ttagtcgagctgtgcgcgtcg

SEQ ID NO: 279397 - DNA, 21 bp, Artificial sequence
  SiRNA target sequence
tagtcgagctgtgcgcgtcga

SEQ ID NO: 279398 - DNA, 21 bp, Artificial sequence
  SiRNA target sequence
agtcgagctgtgcgcgtcgaa

SEQ ID NO: 279399 - DNA, 21 bp, Artificial sequence
  SiRNA target sequence
gtcgagctgtgcgcgtcgaat

SEQ ID NO: 279400 - DNA, 21 bp, Artificial sequence
  SiRNA target sequence
tcgagctgtgcgcgtcgaatc

SEQ ID NO: 279401 - DNA, 21 bp, Artificial sequence
  SiRNA target sequence
cgagctgtgcgcgtcgaatct

SEQ ID NO: 279402 - DNA, 21 bp, Artificial sequence
  SiRNA target sequence
gagctgtgcgcgtcgaatcta

SEQ ID NO: 279403 - DNA, 21 bp, Artificial sequence
  SiRNA target sequence
agctgtgcgcgtcgaatctag

SEQ ID NO: 279404 - DNA, 21 bp, Artificial sequence
  SiRNA target sequence
gctgtgcgcgtcgaatctagt

SEQ ID NO: 279405 - DNA, 21 bp, Artificial sequence
  SiRNA target sequence
ctgtgcgcgtcgaatctagtg

SEQ ID NO: 279406 - DNA, 21 bp, Artificial sequence
  SiRNA target sequence
tgtgcgcgtcgaatctagtga

SEQ ID NO: 279407 - DNA, 21 bp, Artificial sequence
  SiRNA target sequence
gtgcgcgtcgaatctagtgag

SEQ ID NO: 279408 - DNA, 21 bp, Artificial sequence
  SiRNA target sequence
tgcgcgtcgaatctagtgagg

SEQ ID NO: 279409 - DNA, 21 bp, Artificial sequence
  SiRNA target sequence
gcgcgtcgaatctagtgaggt

SEQ ID NO: 279410 - DNA, 21 bp, Artificial sequence
  SiRNA target sequence
cgcgtcgaatctagtgaggtt

SEQ ID NO: 279411 - DNA, 21 bp, Artificial sequence
  SiRNA target sequence
gcgtcgaatctagtgaggttg

SEQ ID NO: 279412 - DNA, 21 bp, Artificial sequence
  SiRNA target sequence
cgtcgaatctagtgaggttgt

SEQ ID NO: 279413 - DNA, 21 bp, Artificial sequence
  SiRNA target sequence
gtcgaatctagtgaggttgta

SEQ ID NO: 279414 - DNA, 21 bp, Artificial sequence
  SiRNA target sequence
tcgaatctagtgaggttgtaa

SEQ ID NO: 279415 - DNA, 21 bp, Artificial sequence
  SiRNA target sequence
cgaatctagtgaggttgtaat

SEQ ID NO: 279416 - DNA, 21 bp, Artificial sequence
  SiRNA target sequence
gaatctagtgaggttgtaata

SEQ ID NO: 279417 - DNA, 21 bp, Artificial sequence
  SiRNA target sequence
aatctagtgaggttgtaatac

SEQ ID NO: 279418 - DNA, 21 bp, Artificial sequence
  SiRNA target sequence
atctagtgaggttgtaataca

SEQ ID NO: 279419 - DNA, 21 bp, Artificial sequence
  SiRNA target sequence
tctagtgaggttgtaatacat

SEQ ID NO: 279420 - DNA, 21 bp, Artificial sequence
  SiRNA target sequence
ctagtgaggttgtaatacatc

SEQ ID NO: 279421 - DNA, 21 bp, Artificial sequence
  SiRNA target sequence
tagtgaggttgtaatacatcc

SEQ ID NO: 279422 - DNA, 21 bp, Artificial sequence
  SiRNA target sequence
agtgaggttgtaatacatcct

SEQ ID NO: 279423 - DNA, 21 bp, Artificial sequence
  SiRNA target sequence
gtgaggttgtaatacatccta

SEQ ID NO: 279424 - DNA, 21 bp, Artificial sequence
  SiRNA target sequence
tgaggttgtaatacatcctaa

SEQ ID NO: 279425 - DNA, 21 bp, Artificial sequence
  SiRNA target sequence
gaggttgtaatacatcctaat

SEQ ID NO: 279426 - DNA, 21 bp, Artificial sequence
  SiRNA target sequence
aggttgtaatacatcctaatt

SEQ ID NO: 279427 - DNA, 21 bp, Artificial sequence
  SiRNA target sequence
ggttgtaatacatcctaattc

SEQ ID NO: 279428 - DNA, 21 bp, Artificial sequence
  SiRNA target sequence
gttgtaatacatcctaattct

SEQ ID NO: 279429 - DNA, 21 bp, Artificial sequence
  SiRNA target sequence
ttgtaatacatcctaattctc

SEQ ID NO: 279430 - DNA, 21 bp, Artificial sequence
  SiRNA target sequence
tgtaatacatcctaattctct

SEQ ID NO: 279431 - DNA, 21 bp, Artificial sequence
  SiRNA target sequence
gtaatacatcctaattctctg

SEQ ID NO: 279432 - DNA, 21 bp, Artificial sequence
  SiRNA target sequence
taatacatcctaattctctga

SEQ ID NO: 279433 - DNA, 21 bp, Artificial sequence
  SiRNA target sequence
aatacatcctaattctctgat

SEQ ID NO: 279434 - DNA, 21 bp, Artificial sequence
  SiRNA target sequence
atacatcctaattctctgatt

SEQ ID NO: 279435 - DNA, 21 bp, Artificial sequence
  SiRNA target sequence
tacatcctaattctctgattg

SEQ ID NO: 279436 - DNA, 21 bp, Artificial sequence
  SiRNA target sequence
acatcctaattctctgattga

SEQ ID NO: 279437 - DNA, 21 bp, Artificial sequence
  SiRNA target sequence
catcctaattctctgattgag

SEQ ID NO: 279438 - DNA, 21 bp, Artificial sequence
  SiRNA target sequence
atcctaattctctgattgaga

SEQ ID NO: 279439 - DNA, 21 bp, Artificial sequence
  SiRNA target sequence
tcctaattctctgattgagaa

SEQ ID NO: 279440 - DNA, 21 bp, Artificial sequence
  SiRNA target sequence
cctaattctctgattgagaag

SEQ ID NO: 279441 - DNA, 21 bp, Artificial sequence
  SiRNA target sequence
ctaattctctgattgagaagg

SEQ ID NO: 279442 - DNA, 21 bp, Artificial sequence
  SiRNA target sequence
taattctctgattgagaaggg

SEQ ID NO: 279443 - DNA, 21 bp, Artificial sequence
  SiRNA target sequence
aattctctgattgagaagggt

SEQ ID NO: 279444 - DNA, 21 bp, Artificial sequence
  SiRNA target sequence
attctctgattgagaagggtg

SEQ ID NO: 279445 - DNA, 21 bp, Artificial sequence
  SiRNA target sequence
ttctctgattgagaagggtga

SEQ ID NO: 279446 - DNA, 21 bp, Artificial sequence
  SiRNA target sequence
tctctgattgagaagggtgat

SEQ ID NO: 279447 - DNA, 21 bp, Artificial sequence
  SiRNA target sequence
ctctgattgagaagggtgatg

SEQ ID NO: 279448 - DNA, 21 bp, Artificial sequence
  SiRNA target sequence
tctgattgagaagggtgatga

SEQ ID NO: 279449 - DNA, 21 bp, Artificial sequence
  SiRNA target sequence
ctgattgagaagggtgatgat

SEQ ID NO: 279450 - DNA, 21 bp, Artificial sequence
  SiRNA target sequence
tgattgagaagggtgatgata

SEQ ID NO: 279451 - DNA, 21 bp, Artificial sequence
  SiRNA target sequence
gattgagaagggtgatgatat

SEQ ID NO: 279452 - DNA, 21 bp, Artificial sequence
  SiRNA target sequence
attgagaagggtgatgatatt

SEQ ID NO: 279453 - DNA, 21 bp, Artificial sequence
  SiRNA target sequence
ttgagaagggtgatgatattg

SEQ ID NO: 279454 - DNA, 21 bp, Artificial sequence
  SiRNA target sequence
tgagaagggtgatgatattgt

SEQ ID NO: 279455 - DNA, 21 bp, Artificial sequence
  SiRNA target sequence
gagaagggtgatgatattgtg

SEQ ID NO: 279456 - DNA, 21 bp, Artificial sequence
  SiRNA target sequence
agaagggtgatgatattgtgc

SEQ ID NO: 279457 - DNA, 21 bp, Artificial sequence
  SiRNA target sequence
gaagggtgatgatattgtgca

SEQ ID NO: 279458 - DNA, 21 bp, Artificial sequence
  SiRNA target sequence
aagggtgatgatattgtgcaa

SEQ ID NO: 279459 - DNA, 21 bp, Artificial sequence
  SiRNA target sequence
agggtgatgatattgtgcaat

SEQ ID NO: 279460 - DNA, 21 bp, Artificial sequence
  SiRNA target sequence
gggtgatgatattgtgcaatc

SEQ ID NO: 279461 - DNA, 21 bp, Artificial sequence
  SiRNA target sequence
ggtgatgatattgtgcaatct

SEQ ID NO: 279462 - DNA, 21 bp, Artificial sequence
  SiRNA target sequence
gtgatgatattgtgcaatctg

SEQ ID NO: 279463 - DNA, 21 bp, Artificial sequence
  SiRNA target sequence
tgatgatattgtgcaatctga

SEQ ID NO: 279464 - DNA, 21 bp, Artificial sequence
  SiRNA target sequence
gatgatattgtgcaatctgaa

SEQ ID NO: 279465 - DNA, 21 bp, Artificial sequence
  SiRNA target sequence
atgatattgtgcaatctgaag

SEQ ID NO: 279466 - DNA, 21 bp, Artificial sequence
  SiRNA target sequence
tgatattgtgcaatctgaagc

SEQ ID NO: 279467 - DNA, 21 bp, Artificial sequence
  SiRNA target sequence
gatattgtgcaatctgaagca

SEQ ID NO: 279468 - DNA, 21 bp, Artificial sequence
  SiRNA target sequence
atattgtgcaatctgaagcat

SEQ ID NO: 279469 - DNA, 21 bp, Artificial sequence
  SiRNA target sequence
tattgtgcaatctgaagcatg

SEQ ID NO: 279470 - DNA, 21 bp, Artificial sequence
  SiRNA target sequence
attgtgcaatctgaagcatgt

SEQ ID NO: 279471 - DNA, 21 bp, Artificial sequence
  SiRNA target sequence
ttgtgcaatctgaagcatgta

SEQ ID NO: 279472 - DNA, 21 bp, Artificial sequence
  SiRNA target sequence
tgtgcaatctgaagcatgtag

SEQ ID NO: 279473 - DNA, 21 bp, Artificial sequence
  SiRNA target sequence
gtgcaatctgaagcatgtagt

SEQ ID NO: 279474 - DNA, 21 bp, Artificial sequence
  SiRNA target sequence
tgcaatctgaagcatgtagtg

SEQ ID NO: 279475 - DNA, 21 bp, Artificial sequence
  SiRNA target sequence
gcaatctgaagcatgtagtga

SEQ ID NO: 279476 - DNA, 21 bp, Artificial sequence
  SiRNA target sequence
caatctgaagcatgtagtgat

SEQ ID NO: 279477 - DNA, 21 bp, Artificial sequence
  SiRNA target sequence
aatctgaagcatgtagtgata

SEQ ID NO: 279478 - DNA, 21 bp, Artificial sequence
  SiRNA target sequence
atctgaagcatgtagtgatat

SEQ ID NO: 279479 - DNA, 21 bp, Artificial sequence
  SiRNA target sequence
tctgaagcatgtagtgatata

SEQ ID NO: 279480 - DNA, 21 bp, Artificial sequence
  SiRNA target sequence
ctgaagcatgtagtgatataa

SEQ ID NO: 279481 - DNA, 21 bp, Artificial sequence
  SiRNA target sequence
tgaagcatgtagtgatataaa

SEQ ID NO: 279482 - DNA, 21 bp, Artificial sequence
  SiRNA target sequence
gaagcatgtagtgatataaat

SEQ ID NO: 279483 - DNA, 21 bp, Artificial sequence
  SiRNA target sequence
aagcatgtagtgatataaatg

SEQ ID NO: 279484 - DNA, 21 bp, Artificial sequence
  SiRNA target sequence
agcatgtagtgatataaatgc

SEQ ID NO: 279485 - DNA, 21 bp, Artificial sequence
  SiRNA target sequence
gcatgtagtgatataaatgct

SEQ ID NO: 279486 - DNA, 21 bp, Artificial sequence
  SiRNA target sequence
catgtagtgatataaatgctt

SEQ ID NO: 279487 - DNA, 21 bp, Artificial sequence
  SiRNA target sequence
atgtagtgatataaatgcttc

SEQ ID NO: 279488 - DNA, 21 bp, Artificial sequence
  SiRNA target sequence
tgtagtgatataaatgcttcg

SEQ ID NO: 279489 - DNA, 21 bp, Artificial sequence
  SiRNA target sequence
gtagtgatataaatgcttcgg

SEQ ID NO: 279490 - DNA, 21 bp, Artificial sequence
  SiRNA target sequence
tagtgatataaatgcttcgga

SEQ ID NO: 279491 - DNA, 21 bp, Artificial sequence
  SiRNA target sequence
agtgatataaatgcttcggaa

SEQ ID NO: 279492 - DNA, 21 bp, Artificial sequence
  SiRNA target sequence
gtgatataaatgcttcggaac

SEQ ID NO: 279493 - DNA, 21 bp, Artificial sequence
  SiRNA target sequence
tgatataaatgcttcggaaca

SEQ ID NO: 279494 - DNA, 21 bp, Artificial sequence
  SiRNA target sequence
gatataaatgcttcggaacaa

SEQ ID NO: 279495 - DNA, 21 bp, Artificial sequence
  SiRNA target sequence
atataaatgcttcggaacaac

SEQ ID NO: 279496 - DNA, 21 bp, Artificial sequence
  SiRNA target sequence
tataaatgcttcggaacaact

SEQ ID NO: 279497 - DNA, 21 bp, Artificial sequence
  SiRNA target sequence
ataaatgcttcggaacaactc

SEQ ID NO: 279498 - DNA, 21 bp, Artificial sequence
  SiRNA target sequence
taaatgcttcggaacaactca

SEQ ID NO: 279499 - DNA, 21 bp, Artificial sequence
  SiRNA target sequence
aaatgcttcggaacaactcac

SEQ ID NO: 279500 - DNA, 21 bp, Artificial sequence
  SiRNA target sequence
aatgcttcggaacaactcact

SEQ ID NO: 279501 - DNA, 21 bp, Artificial sequence
  SiRNA target sequence
atgcttcggaacaactcactg

SEQ ID NO: 279502 - DNA, 21 bp, Artificial sequence
  SiRNA target sequence
tgcttcggaacaactcactgc

SEQ ID NO: 279503 - DNA, 21 bp, Artificial sequence
  SiRNA target sequence
gcttcggaacaactcactgct

SEQ ID NO: 279504 - DNA, 21 bp, Artificial sequence
  SiRNA target sequence
cttcggaacaactcactgctg

SEQ ID NO: 279505 - DNA, 21 bp, Artificial sequence
  SiRNA target sequence
ttcggaacaactcactgctgt

SEQ ID NO: 279506 - DNA, 21 bp, Artificial sequence
  SiRNA target sequence
tcggaacaactcactgctgtt

SEQ ID NO: 279507 - DNA, 21 bp, Artificial sequence
  SiRNA target sequence
cggaacaactcactgctgtta

SEQ ID NO: 279508 - DNA, 21 bp, Artificial sequence
  SiRNA target sequence
ggaacaactcactgctgttac

SEQ ID NO: 279509 - DNA, 21 bp, Artificial sequence
  SiRNA target sequence
gaacaactcactgctgttacg

SEQ ID NO: 279510 - DNA, 21 bp, Artificial sequence
  SiRNA target sequence
aacaactcactgctgttacga

SEQ ID NO: 279511 - DNA, 21 bp, Artificial sequence
  SiRNA target sequence
acaactcactgctgttacgac

SEQ ID NO: 279512 - DNA, 21 bp, Artificial sequence
  SiRNA target sequence
caactcactgctgttacgaca

SEQ ID NO: 279513 - DNA, 21 bp, Artificial sequence
  SiRNA target sequence
aactcactgctgttacgacaa

SEQ ID NO: 279514 - DNA, 21 bp, Artificial sequence
  SiRNA target sequence
actcactgctgttacgacaaa

SEQ ID NO: 279515 - DNA, 21 bp, Artificial sequence
  SiRNA target sequence
ctcactgctgttacgacaaat

SEQ ID NO: 279516 - DNA, 21 bp, Artificial sequence
  SiRNA target sequence
tcactgctgttacgacaaata

SEQ ID NO: 279517 - DNA, 21 bp, Artificial sequence
  SiRNA target sequence
cactgctgttacgacaaataa

SEQ ID NO: 279518 - DNA, 21 bp, Artificial sequence
  SiRNA target sequence
actgctgttacgacaaataac

SEQ ID NO: 279519 - DNA, 21 bp, Artificial sequence
  SiRNA target sequence
ctgctgttacgacaaataaca

SEQ ID NO: 279520 - DNA, 21 bp, Artificial sequence
  SiRNA target sequence
tgctgttacgacaaataacac

SEQ ID NO: 279521 - DNA, 21 bp, Artificial sequence
  SiRNA target sequence
gctgttacgacaaataacacc

SEQ ID NO: 279522 - DNA, 21 bp, Artificial sequence
  SiRNA target sequence
ctgttacgacaaataacacct

SEQ ID NO: 279523 - DNA, 21 bp, Artificial sequence
  SiRNA target sequence
tgttacgacaaataacaccta

SEQ ID NO: 279524 - DNA, 21 bp, Artificial sequence
  SiRNA target sequence
gttacgacaaataacacctat

SEQ ID NO: 279525 - DNA, 21 bp, Artificial sequence
  SiRNA target sequence
ttacgacaaataacacctatg

SEQ ID NO: 279526 - DNA, 21 bp, Artificial sequence
  SiRNA target sequence
tacgacaaataacacctatgt

SEQ ID NO: 279527 - DNA, 21 bp, Artificial sequence
  SiRNA target sequence
acgacaaataacacctatgta

SEQ ID NO: 279528 - DNA, 21 bp, Artificial sequence
  SiRNA target sequence
cgacaaataacacctatgtaa

SEQ ID NO: 279529 - DNA, 21 bp, Artificial sequence
  SiRNA target sequence
gacaaataacacctatgtaat

SEQ ID NO: 279530 - DNA, 21 bp, Artificial sequence
  SiRNA target sequence
acaaataacacctatgtaatg

SEQ ID NO: 279531 - DNA, 21 bp, Artificial sequence
  SiRNA target sequence
caaataacacctatgtaatga

SEQ ID NO: 279532 - DNA, 21 bp, Artificial sequence
  SiRNA target sequence
aaataacacctatgtaatgac

SEQ ID NO: 279533 - DNA, 21 bp, Artificial sequence
  SiRNA target sequence
aataacacctatgtaatgacc

SEQ ID NO: 279534 - DNA, 21 bp, Artificial sequence
  SiRNA target sequence
ataacacctatgtaatgacca

SEQ ID NO: 279535 - DNA, 21 bp, Artificial sequence
  SiRNA target sequence
taacacctatgtaatgaccat

SEQ ID NO: 279536 - DNA, 21 bp, Artificial sequence
  SiRNA target sequence
aacacctatgtaatgaccatt

SEQ ID NO: 279537 - DNA, 21 bp, Artificial sequence
  SiRNA target sequence
acacctatgtaatgaccattt

SEQ ID NO: 279538 - DNA, 21 bp, Artificial sequence
  SiRNA target sequence
cacctatgtaatgaccatttt

SEQ ID NO: 279539 - DNA, 21 bp, Artificial sequence
  SiRNA target sequence
acctatgtaatgaccatttta

SEQ ID NO: 279540 - DNA, 21 bp, Artificial sequence
  SiRNA target sequence
cctatgtaatgaccattttat

SEQ ID NO: 279541 - DNA, 21 bp, Artificial sequence
  SiRNA target sequence
ctatgtaatgaccattttatc

SEQ ID NO: 279542 - DNA, 21 bp, Artificial sequence
  SiRNA target sequence
tatgtaatgaccattttatct

SEQ ID NO: 279543 - DNA, 21 bp, Artificial sequence
  SiRNA target sequence
atgtaatgaccattttatcta

SEQ ID NO: 279544 - DNA, 21 bp, Artificial sequence
  SiRNA target sequence
tgtaatgaccattttatctaa

SEQ ID NO: 279545 - DNA, 21 bp, Artificial sequence
  SiRNA target sequence
gtaatgaccattttatctaaa

SEQ ID NO: 279546 - DNA, 21 bp, Artificial sequence
  SiRNA target sequence
taatgaccattttatctaaag

SEQ ID NO: 279547 - DNA, 21 bp, Artificial sequence
  SiRNA target sequence
aatgaccattttatctaaaga

SEQ ID NO: 279548 - DNA, 21 bp, Artificial sequence
  SiRNA target sequence
atgaccattttatctaaagaa

SEQ ID NO: 279549 - DNA, 21 bp, Artificial sequence
  SiRNA target sequence
tgaccattttatctaaagaat

SEQ ID NO: 279550 - DNA, 21 bp, Artificial sequence
  SiRNA target sequence
gaccattttatctaaagaatc

SEQ ID NO: 279551 - DNA, 21 bp, Artificial sequence
  SiRNA target sequence
accattttatctaaagaatct

SEQ ID NO: 279552 - DNA, 21 bp, Artificial sequence
  SiRNA target sequence
ccattttatctaaagaatctg

SEQ ID NO: 279553 - DNA, 21 bp, Artificial sequence
  SiRNA target sequence
cattttatctaaagaatctgt

SEQ ID NO: 279554 - DNA, 21 bp, Artificial sequence
  SiRNA target sequence
attttatctaaagaatctgtt

SEQ ID NO: 279555 - DNA, 21 bp, Artificial sequence
  SiRNA target sequence
ttttatctaaagaatctgtta

SEQ ID NO: 279556 - DNA, 21 bp, Artificial sequence
  SiRNA target sequence
tttatctaaagaatctgttat

SEQ ID NO: 279557 - DNA, 21 bp, Artificial sequence
  SiRNA target sequence
ttatctaaagaatctgttatt

SEQ ID NO: 279558 - DNA, 21 bp, Artificial sequence
  SiRNA target sequence
tatctaaagaatctgttatta

SEQ ID NO: 279559 - DNA, 21 bp, Artificial sequence
  SiRNA target sequence
atctaaagaatctgttattag

SEQ ID NO: 279560 - DNA, 21 bp, Artificial sequence
  SiRNA target sequence
tctaaagaatctgttattaga

SEQ ID NO: 279561 - DNA, 21 bp, Artificial sequence
  SiRNA target sequence
ctaaagaatctgttattagag

SEQ ID NO: 279562 - DNA, 21 bp, Artificial sequence
  SiRNA target sequence
taaagaatctgttattagagt

SEQ ID NO: 279563 - DNA, 21 bp, Artificial sequence
  SiRNA target sequence
aaagaatctgttattagagtg

SEQ ID NO: 279564 - DNA, 21 bp, Artificial sequence
  SiRNA target sequence
aagaatctgttattagagtgg

SEQ ID NO: 279565 - DNA, 21 bp, Artificial sequence
  SiRNA target sequence
agaatctgttattagagtggg

SEQ ID NO: 279566 - DNA, 21 bp, Artificial sequence
  SiRNA target sequence
gaatctgttattagagtgggg

SEQ ID NO: 279567 - DNA, 21 bp, Artificial sequence
  SiRNA target sequence
aatctgttattagagtggggc

SEQ ID NO: 279568 - DNA, 21 bp, Artificial sequence
  SiRNA target sequence
atctgttattagagtggggca

SEQ ID NO: 279569 - DNA, 21 bp, Artificial sequence
  SiRNA target sequence
tctgttattagagtggggcac

SEQ ID NO: 279570 - DNA, 21 bp, Artificial sequence
  SiRNA target sequence
ctgttattagagtggggcact

SEQ ID NO: 279571 - DNA, 21 bp, Artificial sequence
  SiRNA target sequence
tgttattagagtggggcactg

SEQ ID NO: 279572 - DNA, 21 bp, Artificial sequence
  SiRNA target sequence
gttattagagtggggcactgt

SEQ ID NO: 279573 - DNA, 21 bp, Artificial sequence
  SiRNA target sequence
ttattagagtggggcactgta

SEQ ID NO: 279574 - DNA, 21 bp, Artificial sequence
  SiRNA target sequence
tattagagtggggcactgtat

SEQ ID NO: 279575 - DNA, 21 bp, Artificial sequence
  SiRNA target sequence
attagagtggggcactgtatt

SEQ ID NO: 279576 - DNA, 21 bp, Artificial sequence
  SiRNA target sequence
ttagagtggggcactgtattt

SEQ ID NO: 279577 - DNA, 21 bp, Artificial sequence
  SiRNA target sequence
tagagtggggcactgtatttt

SEQ ID NO: 279578 - DNA, 21 bp, Artificial sequence
  SiRNA target sequence
agagtggggcactgtattttt

SEQ ID NO: 279579 - DNA, 21 bp, Artificial sequence
  SiRNA target sequence
gagtggggcactgtatttttc

SEQ ID NO: 279580 - DNA, 21 bp, Artificial sequence
  SiRNA target sequence
agtggggcactgtatttttct

SEQ ID NO: 279581 - DNA, 21 bp, Artificial sequence
  SiRNA target sequence
gtggggcactgtatttttctg

SEQ ID NO: 279582 - DNA, 21 bp, Artificial sequence
  SiRNA target sequence
tggggcactgtatttttctga

SEQ ID NO: 279583 - DNA, 21 bp, Artificial sequence
  SiRNA target sequence
ggggcactgtatttttctgaa

SEQ ID NO: 279584 - DNA, 21 bp, Artificial sequence
  SiRNA target sequence
gggcactgtatttttctgaaa

SEQ ID NO: 279585 - DNA, 21 bp, Artificial sequence
  SiRNA target sequence
ggcactgtatttttctgaaag

SEQ ID NO: 279586 - DNA, 21 bp, Artificial sequence
  SiRNA target sequence
gcactgtatttttctgaaagg

SEQ ID NO: 279587 - DNA, 21 bp, Artificial sequence
  SiRNA target sequence
cactgtatttttctgaaagga

SEQ ID NO: 279588 - DNA, 21 bp, Artificial sequence
  SiRNA target sequence
actgtatttttctgaaaggaa

SEQ ID NO: 279589 - DNA, 21 bp, Artificial sequence
  SiRNA target sequence
ctgtatttttctgaaaggaaa

SEQ ID NO: 279590 - DNA, 21 bp, Artificial sequence
  SiRNA target sequence
tgtatttttctgaaaggaaaa

SEQ ID NO: 279591 - DNA, 21 bp, Artificial sequence
  SiRNA target sequence
gtatttttctgaaaggaaaaa

SEQ ID NO: 279592 - DNA, 21 bp, Artificial sequence
  SiRNA target sequence
tatttttctgaaaggaaaaat

SEQ ID NO: 279593 - DNA, 21 bp, Artificial sequence
  SiRNA target sequence
atttttctgaaaggaaaaatt

SEQ ID NO: 279594 - DNA, 21 bp, Artificial sequence
  SiRNA target sequence
tttttctgaaaggaaaaattg

SEQ ID NO: 279595 - DNA, 21 bp, Artificial sequence
  SiRNA target sequence
ttttctgaaaggaaaaattgc

SEQ ID NO: 279596 - DNA, 21 bp, Artificial sequence
  SiRNA target sequence
tttctgaaaggaaaaattgca

SEQ ID NO: 279597 - DNA, 21 bp, Artificial sequence
  SiRNA target sequence
ttctgaaaggaaaaattgcag

SEQ ID NO: 279598 - DNA, 21 bp, Artificial sequence
  SiRNA target sequence
tctgaaaggaaaaattgcagt

SEQ ID NO: 279599 - DNA, 21 bp, Artificial sequence
  SiRNA target sequence
ctgaaaggaaaaattgcagta

SEQ ID NO: 279600 - DNA, 21 bp, Artificial sequence
  SiRNA target sequence
tgaaaggaaaaattgcagtag

SEQ ID NO: 279601 - DNA, 21 bp, Artificial sequence
  SiRNA target sequence
gaaaggaaaaattgcagtagc

SEQ ID NO: 279602 - DNA, 21 bp, Artificial sequence
  SiRNA target sequence
aaaggaaaaattgcagtagct

SEQ ID NO: 279603 - DNA, 21 bp, Artificial sequence
  SiRNA target sequence
aaggaaaaattgcagtagctc

SEQ ID NO: 279604 - DNA, 21 bp, Artificial sequence
  SiRNA target sequence
aggaaaaattgcagtagctcc

SEQ ID NO: 279605 - DNA, 21 bp, Artificial sequence
  SiRNA target sequence
ggaaaaattgcagtagctcct

SEQ ID NO: 279606 - DNA, 21 bp, Artificial sequence
  SiRNA target sequence
gaaaaattgcagtagctcctg

SEQ ID NO: 279607 - DNA, 21 bp, Artificial sequence
  SiRNA target sequence
aaaaattgcagtagctcctgg

SEQ ID NO: 279608 - DNA, 21 bp, Artificial sequence
  SiRNA target sequence
aaaattgcagtagctcctggt

SEQ ID NO: 279609 - DNA, 21 bp, Artificial sequence
  SiRNA target sequence
aaattgcagtagctcctggtc

SEQ ID NO: 279610 - DNA, 21 bp, Artificial sequence
  SiRNA target sequence
aattgcagtagctcctggtca

SEQ ID NO: 279611 - DNA, 21 bp, Artificial sequence
  SiRNA target sequence
attgcagtagctcctggtcat

SEQ ID NO: 279612 - DNA, 21 bp, Artificial sequence
  SiRNA target sequence
ttgcagtagctcctggtcatt

SEQ ID NO: 279613 - DNA, 21 bp, Artificial sequence
  SiRNA target sequence
tgcagtagctcctggtcatta

SEQ ID NO: 279614 - DNA, 21 bp, Artificial sequence
  SiRNA target sequence
gcagtagctcctggtcattat

SEQ ID NO: 279615 - DNA, 21 bp, Artificial sequence
  SiRNA target sequence
cagtagctcctggtcattatt

SEQ ID NO: 279616 - DNA, 21 bp, Artificial sequence
  SiRNA target sequence
agtagctcctggtcattattt

SEQ ID NO: 279617 - DNA, 21 bp, Artificial sequence
  SiRNA target sequence
gtagctcctggtcattattta

SEQ ID NO: 279618 - DNA, 21 bp, Artificial sequence
  SiRNA target sequence
tagctcctggtcattatttac

SEQ ID NO: 279619 - DNA, 21 bp, Artificial sequence
  SiRNA target sequence
agctcctggtcattatttacg

SEQ ID NO: 279620 - DNA, 21 bp, Artificial sequence
  SiRNA target sequence
gctcctggtcattatttacgt

SEQ ID NO: 279621 - DNA, 21 bp, Artificial sequence
  SiRNA target sequence
ctcctggtcattatttacgta

SEQ ID NO: 279622 - DNA, 21 bp, Artificial sequence
  SiRNA target sequence
tcctggtcattatttacgtat

SEQ ID NO: 279623 - DNA, 21 bp, Artificial sequence
  SiRNA target sequence
cctggtcattatttacgtata

SEQ ID NO: 279624 - DNA, 21 bp, Artificial sequence
  SiRNA target sequence
ctggtcattatttacgtatac

SEQ ID NO: 279625 - DNA, 21 bp, Artificial sequence
  SiRNA target sequence
tggtcattatttacgtatact

SEQ ID NO: 279626 - DNA, 21 bp, Artificial sequence
  SiRNA target sequence
ggtcattatttacgtatactt

SEQ ID NO: 279627 - DNA, 21 bp, Artificial sequence
  SiRNA target sequence
gtcattatttacgtatacttc

SEQ ID NO: 279628 - DNA, 21 bp, Artificial sequence
  SiRNA target sequence
tcattatttacgtatacttca

SEQ ID NO: 279629 - DNA, 21 bp, Artificial sequence
  SiRNA target sequence
cattatttacgtatacttcag

SEQ ID NO: 279630 - DNA, 21 bp, Artificial sequence
  SiRNA target sequence
attatttacgtatacttcagc

SEQ ID NO: 279631 - DNA, 21 bp, Artificial sequence
  SiRNA target sequence
ttatttacgtatacttcagcg

SEQ ID NO: 279632 - DNA, 21 bp, Artificial sequence
  SiRNA target sequence
tatttacgtatacttcagcgc

SEQ ID NO: 279633 - DNA, 21 bp, Artificial sequence
  SiRNA target sequence
atttacgtatacttcagcgcg

SEQ ID NO: 279634 - DNA, 21 bp, Artificial sequence
  SiRNA target sequence
tttacgtatacttcagcgcgc

SEQ ID NO: 279635 - DNA, 21 bp, Artificial sequence
  SiRNA target sequence
ttacgtatacttcagcgcgca

SEQ ID NO: 279636 - DNA, 21 bp, Artificial sequence
  SiRNA target sequence
tacgtatacttcagcgcgcat

SEQ ID NO: 279637 - DNA, 21 bp, Artificial sequence
  SiRNA target sequence
acgtatacttcagcgcgcata

SEQ ID NO: 279638 - DNA, 21 bp, Artificial sequence
  SiRNA target sequence
cgtatacttcagcgcgcatat

SEQ ID NO: 279639 - DNA, 21 bp, Artificial sequence
  SiRNA target sequence
gtatacttcagcgcgcatatg

SEQ ID NO: 279640 - DNA, 21 bp, Artificial sequence
  SiRNA target sequence
tatacttcagcgcgcatatga

SEQ ID NO: 279641 - DNA, 21 bp, Artificial sequence
  SiRNA target sequence
atacttcagcgcgcatatgag

SEQ ID NO: 279642 - DNA, 21 bp, Artificial sequence
  SiRNA target sequence
tacttcagcgcgcatatgagt

SEQ ID NO: 279643 - DNA, 21 bp, Artificial sequence
  SiRNA target sequence
acttcagcgcgcatatgagtt

SEQ ID NO: 279644 - DNA, 21 bp, Artificial sequence
  SiRNA target sequence
cttcagcgcgcatatgagtta

SEQ ID NO: 279645 - DNA, 21 bp, Artificial sequence
  SiRNA target sequence
ttcagcgcgcatatgagttag

SEQ ID NO: 279646 - DNA, 21 bp, Artificial sequence
  SiRNA target sequence
tcagcgcgcatatgagttaga

SEQ ID NO: 279647 - DNA, 21 bp, Artificial sequence
  SiRNA target sequence
cagcgcgcatatgagttagat

SEQ ID NO: 279648 - DNA, 21 bp, Artificial sequence
  SiRNA target sequence
agcgcgcatatgagttagatg

SEQ ID NO: 279649 - DNA, 21 bp, Artificial sequence
  SiRNA target sequence
gcgcgcatatgagttagatga

SEQ ID NO: 279650 - DNA, 21 bp, Artificial sequence
  SiRNA target sequence
cgcgcatatgagttagatgac

SEQ ID NO: 279651 - DNA, 21 bp, Artificial sequence
  SiRNA target sequence
gcgcatatgagttagatgacg

SEQ ID NO: 279652 - DNA, 21 bp, Artificial sequence
  SiRNA target sequence
cgcatatgagttagatgacgg

SEQ ID NO: 279653 - DNA, 21 bp, Artificial sequence
  SiRNA target sequence
gcatatgagttagatgacggt

SEQ ID NO: 279654 - DNA, 21 bp, Artificial sequence
  SiRNA target sequence
catatgagttagatgacggtg

SEQ ID NO: 279655 - DNA, 21 bp, Artificial sequence
  SiRNA target sequence
atatgagttagatgacggtgc

SEQ ID NO: 279656 - DNA, 21 bp, Artificial sequence
  SiRNA target sequence
tatgagttagatgacggtgct

SEQ ID NO: 279657 - DNA, 21 bp, Artificial sequence
  SiRNA target sequence
atgagttagatgacggtgcta

SEQ ID NO: 279658 - DNA, 21 bp, Artificial sequence
  SiRNA target sequence
tgagttagatgacggtgctat

SEQ ID NO: 279659 - DNA, 21 bp, Artificial sequence
  SiRNA target sequence
gagttagatgacggtgctatt

SEQ ID NO: 279660 - DNA, 21 bp, Artificial sequence
  SiRNA target sequence
agttagatgacggtgctattt

SEQ ID NO: 279661 - DNA, 21 bp, Artificial sequence
  SiRNA target sequence
gttagatgacggtgctatttt

SEQ ID NO: 279662 - DNA, 21 bp, Artificial sequence
  SiRNA target sequence
ttagatgacggtgctatttta

SEQ ID NO: 279663 - DNA, 21 bp, Artificial sequence
  SiRNA target sequence
tagatgacggtgctattttac

SEQ ID NO: 279664 - DNA, 21 bp, Artificial sequence
  SiRNA target sequence
agatgacggtgctattttaca

SEQ ID NO: 279665 - DNA, 21 bp, Artificial sequence
  SiRNA target sequence
gatgacggtgctattttacag

SEQ ID NO: 279666 - DNA, 21 bp, Artificial sequence
  SiRNA target sequence
atgacggtgctattttacagt

SEQ ID NO: 279667 - DNA, 21 bp, Artificial sequence
  SiRNA target sequence
tgacggtgctattttacagtt

SEQ ID NO: 279668 - DNA, 21 bp, Artificial sequence
  SiRNA target sequence
gacggtgctattttacagttt

SEQ ID NO: 279669 - DNA, 21 bp, Artificial sequence
  SiRNA target sequence
acggtgctattttacagttta

SEQ ID NO: 279670 - DNA, 21 bp, Artificial sequence
  SiRNA target sequence
cggtgctattttacagtttaa

SEQ ID NO: 279671 - DNA, 21 bp, Artificial sequence
  SiRNA target sequence
ggtgctattttacagtttaat

SEQ ID NO: 279672 - DNA, 21 bp, Artificial sequence
  SiRNA target sequence
gtgctattttacagtttaatc

SEQ ID NO: 279673 - DNA, 21 bp, Artificial sequence
  SiRNA target sequence
tgctattttacagtttaatca

SEQ ID NO: 279674 - DNA, 21 bp, Artificial sequence
  SiRNA target sequence
gctattttacagtttaatcat

SEQ ID NO: 279675 - DNA, 21 bp, Artificial sequence
  SiRNA target sequence
ctattttacagtttaatcatc

SEQ ID NO: 279676 - DNA, 21 bp, Artificial sequence
  SiRNA target sequence
tattttacagtttaatcatcc

SEQ ID NO: 279677 - DNA, 21 bp, Artificial sequence
  SiRNA target sequence
attttacagtttaatcatcct

SEQ ID NO: 279678 - DNA, 21 bp, Artificial sequence
  SiRNA target sequence
ttttacagtttaatcatcctt

SEQ ID NO: 279679 - DNA, 21 bp, Artificial sequence
  SiRNA target sequence
tttacagtttaatcatcctta

SEQ ID NO: 279680 - DNA, 21 bp, Artificial sequence
  SiRNA target sequence
ttacagtttaatcatccttac

SEQ ID NO: 279681 - DNA, 21 bp, Artificial sequence
  SiRNA target sequence
tacagtttaatcatccttacg

SEQ ID NO: 279682 - DNA, 21 bp, Artificial sequence
  SiRNA target sequence
acagtttaatcatccttacgg

SEQ ID NO: 279683 - DNA, 21 bp, Artificial sequence
  SiRNA target sequence
cagtttaatcatccttacggg

SEQ ID NO: 279684 - DNA, 21 bp, Artificial sequence
  SiRNA target sequence
agtttaatcatccttacggga

SEQ ID NO: 279685 - DNA, 21 bp, Artificial sequence
  SiRNA target sequence
gtttaatcatccttacgggaa

SEQ ID NO: 279686 - DNA, 21 bp, Artificial sequence
  SiRNA target sequence
tttaatcatccttacgggaag

SEQ ID NO: 279687 - DNA, 21 bp, Artificial sequence
  SiRNA target sequence
ttaatcatccttacgggaaga

SEQ ID NO: 279688 - DNA, 21 bp, Artificial sequence
  SiRNA target sequence
taatcatccttacgggaagag

SEQ ID NO: 279689 - DNA, 21 bp, Artificial sequence
  SiRNA target sequence
aatcatccttacgggaagagg

SEQ ID NO: 279690 - DNA, 21 bp, Artificial sequence
  SiRNA target sequence
atcatccttacgggaagagga

SEQ ID NO: 279691 - DNA, 21 bp, Artificial sequence
  SiRNA target sequence
tcatccttacgggaagaggaa

SEQ ID NO: 279692 - DNA, 21 bp, Artificial sequence
  SiRNA target sequence
catccttacgggaagaggaac

SEQ ID NO: 279693 - DNA, 21 bp, Artificial sequence
  SiRNA target sequence
atccttacgggaagaggaact

SEQ ID NO: 279694 - DNA, 21 bp, Artificial sequence
  SiRNA target sequence
tccttacgggaagaggaactt

SEQ ID NO: 279695 - DNA, 21 bp, Artificial sequence
  SiRNA target sequence
ccttacgggaagaggaacttc

SEQ ID NO: 279696 - DNA, 21 bp, Artificial sequence
  SiRNA target sequence
cttacgggaagaggaacttct

SEQ ID NO: 279697 - DNA, 21 bp, Artificial sequence
  SiRNA target sequence
ttacgggaagaggaacttctt

SEQ ID NO: 279698 - DNA, 21 bp, Artificial sequence
  SiRNA target sequence
tacgggaagaggaacttcttt

SEQ ID NO: 279699 - DNA, 21 bp, Artificial sequence
  SiRNA target sequence
acgggaagaggaacttcttta

SEQ ID NO: 279700 - DNA, 21 bp, Artificial sequence
  SiRNA target sequence
cgggaagaggaacttctttac

SEQ ID NO: 279701 - DNA, 21 bp, Artificial sequence
  SiRNA target sequence
gggaagaggaacttctttacg

SEQ ID NO: 279702 - DNA, 21 bp, Artificial sequence
  SiRNA target sequence
ggaagaggaacttctttacgt

SEQ ID NO: 279703 - DNA, 21 bp, Artificial sequence
  SiRNA target sequence
gaagaggaacttctttacgtt

SEQ ID NO: 279704 - DNA, 21 bp, Artificial sequence
  SiRNA target sequence
aagaggaacttctttacgttt

SEQ ID NO: 279705 - DNA, 21 bp, Artificial sequence
  SiRNA target sequence
agaggaacttctttacgtttg

SEQ ID NO: 279706 - DNA, 21 bp, Artificial sequence
  SiRNA target sequence
gaggaacttctttacgtttgt

SEQ ID NO: 279707 - DNA, 21 bp, Artificial sequence
  SiRNA target sequence
aggaacttctttacgtttgtt

SEQ ID NO: 279708 - DNA, 21 bp, Artificial sequence
  SiRNA target sequence
ggaacttctttacgtttgttg

SEQ ID NO: 279709 - DNA, 21 bp, Artificial sequence
  SiRNA target sequence
gaacttctttacgtttgttgg

SEQ ID NO: 279710 - DNA, 21 bp, Artificial sequence
  SiRNA target sequence
aacttctttacgtttgttggt

SEQ ID NO: 279711 - DNA, 21 bp, Artificial sequence
  SiRNA target sequence
acttctttacgtttgttggtg

SEQ ID NO: 279712 - DNA, 21 bp, Artificial sequence
  SiRNA target sequence
cttctttacgtttgttggtga

SEQ ID NO: 279713 - DNA, 21 bp, Artificial sequence
  SiRNA target sequence
ttctttacgtttgttggtgac

SEQ ID NO: 279714 - DNA, 21 bp, Artificial sequence
  SiRNA target sequence
tctttacgtttgttggtgaca

SEQ ID NO: 279715 - DNA, 21 bp, Artificial sequence
  SiRNA target sequence
ctttacgtttgttggtgacat

SEQ ID NO: 279716 - DNA, 21 bp, Artificial sequence
  SiRNA target sequence
tttacgtttgttggtgacatc

SEQ ID NO: 279717 - DNA, 21 bp, Artificial sequence
  SiRNA target sequence
ttacgtttgttggtgacatcc

SEQ ID NO: 279718 - DNA, 21 bp, Artificial sequence
  SiRNA target sequence
tacgtttgttggtgacatcca

SEQ ID NO: 279719 - DNA, 21 bp, Artificial sequence
  SiRNA target sequence
acgtttgttggtgacatccaa

SEQ ID NO: 279720 - DNA, 21 bp, Artificial sequence
  SiRNA target sequence
cgtttgttggtgacatccaat

SEQ ID NO: 279721 - DNA, 21 bp, Artificial sequence
  SiRNA target sequence
gtttgttggtgacatccaatt

SEQ ID NO: 279722 - DNA, 21 bp, Artificial sequence
  SiRNA target sequence
tttgttggtgacatccaattc

SEQ ID NO: 279723 - DNA, 21 bp, Artificial sequence
  SiRNA target sequence
ttgttggtgacatccaattct

SEQ ID NO: 279724 - DNA, 21 bp, Artificial sequence
  SiRNA target sequence
tgttggtgacatccaattctc

SEQ ID NO: 279725 - DNA, 21 bp, Artificial sequence
  SiRNA target sequence
gttggtgacatccaattctcg

SEQ ID NO: 279726 - DNA, 21 bp, Artificial sequence
  SiRNA target sequence
ttggtgacatccaattctcgt

SEQ ID NO: 279727 - DNA, 21 bp, Artificial sequence
  SiRNA target sequence
tggtgacatccaattctcgtt

SEQ ID NO: 279728 - DNA, 21 bp, Artificial sequence
  SiRNA target sequence
ggtgacatccaattctcgttg

SEQ ID NO: 279729 - DNA, 21 bp, Artificial sequence
  SiRNA target sequence
gtgacatccaattctcgttgt

SEQ ID NO: 279730 - DNA, 21 bp, Artificial sequence
  SiRNA target sequence
tgacatccaattctcgttgta

SEQ ID NO: 279731 - DNA, 21 bp, Artificial sequence
  SiRNA target sequence
gacatccaattctcgttgtat

SEQ ID NO: 279732 - DNA, 21 bp, Artificial sequence
  SiRNA target sequence
acatccaattctcgttgtata

SEQ ID NO: 279733 - DNA, 21 bp, Artificial sequence
  SiRNA target sequence
catccaattctcgttgtataa

SEQ ID NO: 279734 - DNA, 21 bp, Artificial sequence
  SiRNA target sequence
atccaattctcgttgtataaa

SEQ ID NO: 279735 - DNA, 21 bp, Artificial sequence
  SiRNA target sequence
tccaattctcgttgtataaaa

SEQ ID NO: 279736 - DNA, 21 bp, Artificial sequence
  SiRNA target sequence
ccaattctcgttgtataaaac

SEQ ID NO: 279737 - DNA, 21 bp, Artificial sequence
  SiRNA target sequence
caattctcgttgtataaaacg

SEQ ID NO: 279738 - DNA, 21 bp, Artificial sequence
  SiRNA target sequence
aattctcgttgtataaaacga

SEQ ID NO: 279739 - DNA, 21 bp, Artificial sequence
  SiRNA target sequence
attctcgttgtataaaacgaa

SEQ ID NO: 279740 - DNA, 21 bp, Artificial sequence
  SiRNA target sequence
ttctcgttgtataaaacgaaa

SEQ ID NO: 279741 - DNA, 21 bp, Artificial sequence
  SiRNA target sequence
tctcgttgtataaaacgaaaa

SEQ ID NO: 279742 - DNA, 21 bp, Artificial sequence
  SiRNA target sequence
ctcgttgtataaaacgaaaaa

SEQ ID NO: 279743 - DNA, 21 bp, Artificial sequence
  SiRNA target sequence
tcgttgtataaaacgaaaaat

SEQ ID NO: 279744 - DNA, 21 bp, Artificial sequence
  SiRNA target sequence
cgttgtataaaacgaaaaata

SEQ ID NO: 279745 - DNA, 21 bp, Artificial sequence
  SiRNA target sequence
gttgtataaaacgaaaaatat

SEQ ID NO: 279746 - DNA, 21 bp, Artificial sequence
  SiRNA target sequence
ttgtataaaacgaaaaatata

SEQ ID NO: 279747 - DNA, 21 bp, Artificial sequence
  SiRNA target sequence
tgtataaaacgaaaaatatat

SEQ ID NO: 279748 - DNA, 21 bp, Artificial sequence
  SiRNA target sequence
gtataaaacgaaaaatatatc

SEQ ID NO: 279749 - DNA, 21 bp, Artificial sequence
  SiRNA target sequence
tataaaacgaaaaatatatct

SEQ ID NO: 279750 - DNA, 21 bp, Artificial sequence
  SiRNA target sequence
ataaaacgaaaaatatatcta

SEQ ID NO: 279751 - DNA, 21 bp, Artificial sequence
  SiRNA target sequence
taaaacgaaaaatatatctaa

SEQ ID NO: 279752 - DNA, 21 bp, Artificial sequence
  SiRNA target sequence
aaaacgaaaaatatatctaaa

SEQ ID NO: 279753 - DNA, 21 bp, Artificial sequence
  SiRNA target sequence
aaacgaaaaatatatctaaaa

SEQ ID NO: 279754 - DNA, 21 bp, Artificial sequence
  SiRNA target sequence
aacgaaaaatatatctaaaac

SEQ ID NO: 279755 - DNA, 21 bp, Artificial sequence
  SiRNA target sequence
acgaaaaatatatctaaaaca

SEQ ID NO: 279756 - DNA, 21 bp, Artificial sequence
  SiRNA target sequence
cgaaaaatatatctaaaacaa

SEQ ID NO: 279757 - DNA, 21 bp, Artificial sequence
  SiRNA target sequence
gaaaaatatatctaaaacaaa

SEQ ID NO: 279758 - DNA, 21 bp, Artificial sequence
  SiRNA target sequence
aaaaatatatctaaaacaaat

SEQ ID NO: 279759 - DNA, 21 bp, Artificial sequence
  SiRNA target sequence
aaaatatatctaaaacaaatg

SEQ ID NO: 279760 - DNA, 21 bp, Artificial sequence
  SiRNA target sequence
aaatatatctaaaacaaatga

SEQ ID NO: 279761 - DNA, 21 bp, Artificial sequence
  SiRNA target sequence
aatatatctaaaacaaatgat

SEQ ID NO: 279762 - DNA, 21 bp, Artificial sequence
  SiRNA target sequence
atatatctaaaacaaatgatc

SEQ ID NO: 279763 - DNA, 21 bp, Artificial sequence
  SiRNA target sequence
tatatctaaaacaaatgatct

SEQ ID NO: 279764 - DNA, 21 bp, Artificial sequence
  SiRNA target sequence
atatctaaaacaaatgatctg

SEQ ID NO: 279765 - DNA, 21 bp, Artificial sequence
  SiRNA target sequence
tatctaaaacaaatgatctgg

SEQ ID NO: 279766 - DNA, 21 bp, Artificial sequence
  SiRNA target sequence
atctaaaacaaatgatctgga

SEQ ID NO: 279767 - DNA, 21 bp, Artificial sequence
  SiRNA target sequence
tctaaaacaaatgatctggat

SEQ ID NO: 279768 - DNA, 21 bp, Artificial sequence
  SiRNA target sequence
ctaaaacaaatgatctggatt

SEQ ID NO: 279769 - DNA, 21 bp, Artificial sequence
  SiRNA target sequence
taaaacaaatgatctggattc

SEQ ID NO: 279770 - DNA, 21 bp, Artificial sequence
  SiRNA target sequence
aaaacaaatgatctggattct

SEQ ID NO: 279771 - DNA, 21 bp, Artificial sequence
  SiRNA target sequence
aaacaaatgatctggattctc

SEQ ID NO: 279772 - DNA, 21 bp, Artificial sequence
  SiRNA target sequence
aacaaatgatctggattctcg

SEQ ID NO: 279773 - DNA, 21 bp, Artificial sequence
  SiRNA target sequence
acaaatgatctggattctcgt

SEQ ID NO: 279774 - DNA, 21 bp, Artificial sequence
  SiRNA target sequence
caaatgatctggattctcgtg

SEQ ID NO: 279775 - DNA, 21 bp, Artificial sequence
  SiRNA target sequence
aaatgatctggattctcgtga

SEQ ID NO: 279776 - DNA, 21 bp, Artificial sequence
  SiRNA target sequence
aatgatctggattctcgtgac

SEQ ID NO: 279777 - DNA, 21 bp, Artificial sequence
  SiRNA target sequence
atgatctggattctcgtgact

SEQ ID NO: 279778 - DNA, 21 bp, Artificial sequence
  SiRNA target sequence
tgatctggattctcgtgactt

SEQ ID NO: 279779 - DNA, 21 bp, Artificial sequence
  SiRNA target sequence
gatctggattctcgtgacttg

SEQ ID NO: 279780 - DNA, 21 bp, Artificial sequence
  SiRNA target sequence
atctggattctcgtgacttga

SEQ ID NO: 279781 - DNA, 21 bp, Artificial sequence
  SiRNA target sequence
tctggattctcgtgacttgat

SEQ ID NO: 279782 - DNA, 21 bp, Artificial sequence
  SiRNA target sequence
ctggattctcgtgacttgatg

SEQ ID NO: 279783 - DNA, 21 bp, Artificial sequence
  SiRNA target sequence
tggattctcgtgacttgatgc

SEQ ID NO: 279784 - DNA, 21 bp, Artificial sequence
  SiRNA target sequence
ggattctcgtgacttgatgca

SEQ ID NO: 279785 - DNA, 21 bp, Artificial sequence
  SiRNA target sequence
gattctcgtgacttgatgcac

SEQ ID NO: 279786 - DNA, 21 bp, Artificial sequence
  SiRNA target sequence
attctcgtgacttgatgcact

SEQ ID NO: 279787 - DNA, 21 bp, Artificial sequence
  SiRNA target sequence
ttctcgtgacttgatgcactt

SEQ ID NO: 279788 - DNA, 21 bp, Artificial sequence
  SiRNA target sequence
tctcgtgacttgatgcacttt

SEQ ID NO: 279789 - DNA, 21 bp, Artificial sequence
  SiRNA target sequence
ctcgtgacttgatgcactttg

SEQ ID NO: 279790 - DNA, 21 bp, Artificial sequence
  SiRNA target sequence
tcgtgacttgatgcactttgt

SEQ ID NO: 279791 - DNA, 21 bp, Artificial sequence
  SiRNA target sequence
cgtgacttgatgcactttgtt

SEQ ID NO: 279792 - DNA, 21 bp, Artificial sequence
  SiRNA target sequence
gtgacttgatgcactttgttg

SEQ ID NO: 279793 - DNA, 21 bp, Artificial sequence
  SiRNA target sequence
tgacttgatgcactttgttgt

SEQ ID NO: 279794 - DNA, 21 bp, Artificial sequence
  SiRNA target sequence
gacttgatgcactttgttgtt

SEQ ID NO: 279795 - DNA, 21 bp, Artificial sequence
  SiRNA target sequence
acttgatgcactttgttgttg

SEQ ID NO: 279796 - DNA, 21 bp, Artificial sequence
  SiRNA target sequence
cttgatgcactttgttgttga

SEQ ID NO: 279797 - DNA, 21 bp, Artificial sequence
  SiRNA target sequence
ttgatgcactttgttgttgat

SEQ ID NO: 279798 - DNA, 21 bp, Artificial sequence
  SiRNA target sequence
tgatgcactttgttgttgata

SEQ ID NO: 279799 - DNA, 21 bp, Artificial sequence
  SiRNA target sequence
gatgcactttgttgttgataa

SEQ ID NO: 279800 - DNA, 21 bp, Artificial sequence
  SiRNA target sequence
atgcactttgttgttgataag

SEQ ID NO: 279801 - DNA, 21 bp, Artificial sequence
  SiRNA target sequence
tgcactttgttgttgataagt

SEQ ID NO: 279802 - DNA, 21 bp, Artificial sequence
  SiRNA target sequence
gcactttgttgttgataagtc

SEQ ID NO: 279803 - DNA, 21 bp, Artificial sequence
  SiRNA target sequence
cactttgttgttgataagtca

SEQ ID NO: 279804 - DNA, 21 bp, Artificial sequence
  SiRNA target sequence
actttgttgttgataagtcag

SEQ ID NO: 279805 - DNA, 21 bp, Artificial sequence
  SiRNA target sequence
ctttgttgttgataagtcagt

SEQ ID NO: 279806 - DNA, 21 bp, Artificial sequence
  SiRNA target sequence
tttgttgttgataagtcagta

SEQ ID NO: 279807 - DNA, 21 bp, Artificial sequence
  SiRNA target sequence
ttgttgttgataagtcagtag

SEQ ID NO: 279808 - DNA, 21 bp, Artificial sequence
  SiRNA target sequence
tgttgttgataagtcagtagt

SEQ ID NO: 279809 - DNA, 21 bp, Artificial sequence
  SiRNA target sequence
gttgttgataagtcagtagtt

SEQ ID NO: 279810 - DNA, 21 bp, Artificial sequence
  SiRNA target sequence
ttgttgataagtcagtagttc

SEQ ID NO: 279811 - DNA, 21 bp, Artificial sequence
  SiRNA target sequence
tgttgataagtcagtagttca

SEQ ID NO: 279812 - DNA, 21 bp, Artificial sequence
  SiRNA target sequence
gttgataagtcagtagttcac

SEQ ID NO: 279813 - DNA, 21 bp, Artificial sequence
  SiRNA target sequence
ttgataagtcagtagttcaca

SEQ ID NO: 279814 - DNA, 21 bp, Artificial sequence
  SiRNA target sequence
tgataagtcagtagttcacag

SEQ ID NO: 279815 - DNA, 21 bp, Artificial sequence
  SiRNA target sequence
gataagtcagtagttcacagg

SEQ ID NO: 279816 - DNA, 21 bp, Artificial sequence
  SiRNA target sequence
ataagtcagtagttcacaggg

SEQ ID NO: 279817 - DNA, 21 bp, Artificial sequence
  SiRNA target sequence
taagtcagtagttcacaggga

SEQ ID NO: 279818 - DNA, 21 bp, Artificial sequence
  SiRNA target sequence
aagtcagtagttcacagggat

SEQ ID NO: 279819 - DNA, 21 bp, Artificial sequence
  SiRNA target sequence
agtcagtagttcacagggata

SEQ ID NO: 279820 - DNA, 21 bp, Artificial sequence
  SiRNA target sequence
gtcagtagttcacagggatat

SEQ ID NO: 279821 - DNA, 21 bp, Artificial sequence
  SiRNA target sequence
tcagtagttcacagggatatt

SEQ ID NO: 279822 - DNA, 21 bp, Artificial sequence
  SiRNA target sequence
cagtagttcacagggatattt

SEQ ID NO: 279823 - DNA, 21 bp, Artificial sequence
  SiRNA target sequence
agtagttcacagggatatttc

SEQ ID NO: 279824 - DNA, 21 bp, Artificial sequence
  SiRNA target sequence
gtagttcacagggatatttct

SEQ ID NO: 279825 - DNA, 21 bp, Artificial sequence
  SiRNA target sequence
tagttcacagggatatttctt

SEQ ID NO: 279826 - DNA, 21 bp, Artificial sequence
  SiRNA target sequence
agttcacagggatatttcttc

SEQ ID NO: 279827 - DNA, 21 bp, Artificial sequence
  SiRNA target sequence
gttcacagggatatttcttca

SEQ ID NO: 279828 - DNA, 21 bp, Artificial sequence
  SiRNA target sequence
ttcacagggatatttcttcat

SEQ ID NO: 279829 - DNA, 21 bp, Artificial sequence
  SiRNA target sequence
tcacagggatatttcttcata

SEQ ID NO: 279830 - DNA, 21 bp, Artificial sequence
  SiRNA target sequence
cacagggatatttcttcatat

SEQ ID NO: 279831 - DNA, 21 bp, Artificial sequence
  SiRNA target sequence
acagggatatttcttcatatt

SEQ ID NO: 279832 - DNA, 21 bp, Artificial sequence
  SiRNA target sequence
cagggatatttcttcatattt

SEQ ID NO: 279833 - DNA, 21 bp, Artificial sequence
  SiRNA target sequence
agggatatttcttcatatttc

SEQ ID NO: 279834 - DNA, 21 bp, Artificial sequence
  SiRNA target sequence
gggatatttcttcatatttct

SEQ ID NO: 279835 - DNA, 21 bp, Artificial sequence
  SiRNA target sequence
ggatatttcttcatatttctg

SEQ ID NO: 279836 - DNA, 21 bp, Artificial sequence
  SiRNA target sequence
gatatttcttcatatttctgt

SEQ ID NO: 279837 - DNA, 21 bp, Artificial sequence
  SiRNA target sequence
atatttcttcatatttctgtg

SEQ ID NO: 279838 - DNA, 21 bp, Artificial sequence
  SiRNA target sequence
tatttcttcatatttctgtga

SEQ ID NO: 279839 - DNA, 21 bp, Artificial sequence
  SiRNA target sequence
atttcttcatatttctgtgaa

SEQ ID NO: 279840 - DNA, 21 bp, Artificial sequence
  SiRNA target sequence
tttcttcatatttctgtgaac

SEQ ID NO: 279841 - DNA, 21 bp, Artificial sequence
  SiRNA target sequence
ttcttcatatttctgtgaacg

SEQ ID NO: 279842 - DNA, 21 bp, Artificial sequence
  SiRNA target sequence
tcttcatatttctgtgaacgt

SEQ ID NO: 279843 - DNA, 21 bp, Artificial sequence
  SiRNA target sequence
cttcatatttctgtgaacgtt

SEQ ID NO: 279844 - DNA, 21 bp, Artificial sequence
  SiRNA target sequence
ttcatatttctgtgaacgttt

SEQ ID NO: 279845 - DNA, 21 bp, Artificial sequence
  SiRNA target sequence
tcatatttctgtgaacgttta

SEQ ID NO: 279846 - DNA, 21 bp, Artificial sequence
  SiRNA target sequence
catatttctgtgaacgtttag

SEQ ID NO: 279847 - DNA, 21 bp, Artificial sequence
  SiRNA target sequence
atatttctgtgaacgtttaga

SEQ ID NO: 279848 - DNA, 21 bp, Artificial sequence
  SiRNA target sequence
tatttctgtgaacgtttagag

SEQ ID NO: 279849 - DNA, 21 bp, Artificial sequence
  SiRNA target sequence
atttctgtgaacgtttagagt

SEQ ID NO: 279850 - DNA, 21 bp, Artificial sequence
  SiRNA target sequence
tttctgtgaacgtttagagtt

SEQ ID NO: 279851 - DNA, 21 bp, Artificial sequence
  SiRNA target sequence
ttctgtgaacgtttagagttg

SEQ ID NO: 279852 - DNA, 21 bp, Artificial sequence
  SiRNA target sequence
tctgtgaacgtttagagttgc

SEQ ID NO: 279853 - DNA, 21 bp, Artificial sequence
  SiRNA target sequence
ctgtgaacgtttagagttgca

SEQ ID NO: 279854 - DNA, 21 bp, Artificial sequence
  SiRNA target sequence
tgtgaacgtttagagttgcaa

SEQ ID NO: 279855 - DNA, 21 bp, Artificial sequence
  SiRNA target sequence
gtgaacgtttagagttgcaat

SEQ ID NO: 279856 - DNA, 21 bp, Artificial sequence
  SiRNA target sequence
tgaacgtttagagttgcaatc

SEQ ID NO: 279857 - DNA, 21 bp, Artificial sequence
  SiRNA target sequence
gaacgtttagagttgcaatcc

SEQ ID NO: 279858 - DNA, 21 bp, Artificial sequence
  SiRNA target sequence
aacgtttagagttgcaatccg

SEQ ID NO: 279859 - DNA, 21 bp, Artificial sequence
  SiRNA target sequence
acgtttagagttgcaatccgt

SEQ ID NO: 279860 - DNA, 21 bp, Artificial sequence
  SiRNA target sequence
cgtttagagttgcaatccgtg

SEQ ID NO: 279861 - DNA, 21 bp, Artificial sequence
  SiRNA target sequence
gtttagagttgcaatccgtgg

SEQ ID NO: 279862 - DNA, 21 bp, Artificial sequence
  SiRNA target sequence
tttagagttgcaatccgtggg

SEQ ID NO: 279863 - DNA, 21 bp, Artificial sequence
  SiRNA target sequence
ttagagttgcaatccgtgggt

SEQ ID NO: 279864 - DNA, 21 bp, Artificial sequence
  SiRNA target sequence
tagagttgcaatccgtgggtt

SEQ ID NO: 279865 - DNA, 21 bp, Artificial sequence
  SiRNA target sequence
agagttgcaatccgtgggttc

SEQ ID NO: 279866 - DNA, 21 bp, Artificial sequence
  SiRNA target sequence
gagttgcaatccgtgggttca

SEQ ID NO: 279867 - DNA, 21 bp, Artificial sequence
  SiRNA target sequence
agttgcaatccgtgggttcaa

SEQ ID NO: 279868 - DNA, 21 bp, Artificial sequence
  SiRNA target sequence
gttgcaatccgtgggttcaac

SEQ ID NO: 279869 - DNA, 21 bp, Artificial sequence
  SiRNA target sequence
ttgcaatccgtgggttcaact

SEQ ID NO: 279870 - DNA, 21 bp, Artificial sequence
  SiRNA target sequence
tgcaatccgtgggttcaactc

SEQ ID NO: 279871 - DNA, 21 bp, Artificial sequence
  SiRNA target sequence
gcaatccgtgggttcaactcg

SEQ ID NO: 279872 - DNA, 21 bp, Artificial sequence
  SiRNA target sequence
caatccgtgggttcaactcga

SEQ ID NO: 279873 - DNA, 21 bp, Artificial sequence
  SiRNA target sequence
aatccgtgggttcaactcgaa

SEQ ID NO: 279874 - DNA, 21 bp, Artificial sequence
  SiRNA target sequence
atccgtgggttcaactcgaat

SEQ ID NO: 279875 - DNA, 21 bp, Artificial sequence
  SiRNA target sequence
tccgtgggttcaactcgaatc

SEQ ID NO: 279876 - DNA, 21 bp, Artificial sequence
  SiRNA target sequence
ccgtgggttcaactcgaatcc

SEQ ID NO: 279877 - DNA, 21 bp, Artificial sequence
  SiRNA target sequence
cgtgggttcaactcgaatcca

SEQ ID NO: 279878 - DNA, 21 bp, Artificial sequence
  SiRNA target sequence
gtgggttcaactcgaatccag

SEQ ID NO: 279879 - DNA, 21 bp, Artificial sequence
  SiRNA target sequence
tgggttcaactcgaatccagt

SEQ ID NO: 279880 - DNA, 21 bp, Artificial sequence
  SiRNA target sequence
gggttcaactcgaatccagtt

SEQ ID NO: 279881 - DNA, 21 bp, Artificial sequence
  SiRNA target sequence
ggttcaactcgaatccagtta

SEQ ID NO: 279882 - DNA, 21 bp, Artificial sequence
  SiRNA target sequence
gttcaactcgaatccagttac

SEQ ID NO: 279883 - DNA, 21 bp, Artificial sequence
  SiRNA target sequence
ttcaactcgaatccagttacc

SEQ ID NO: 279884 - DNA, 21 bp, Artificial sequence
  SiRNA target sequence
tcaactcgaatccagttacct

SEQ ID NO: 279885 - DNA, 21 bp, Artificial sequence
  SiRNA target sequence
caactcgaatccagttacctg

SEQ ID NO: 279886 - DNA, 21 bp, Artificial sequence
  SiRNA target sequence
aactcgaatccagttacctgt

SEQ ID NO: 279887 - DNA, 21 bp, Artificial sequence
  SiRNA target sequence
actcgaatccagttacctgtt

SEQ ID NO: 279888 - DNA, 21 bp, Artificial sequence
  SiRNA target sequence
ctcgaatccagttacctgtta

SEQ ID NO: 279889 - DNA, 21 bp, Artificial sequence
  SiRNA target sequence
tcgaatccagttacctgttat

SEQ ID NO: 279890 - DNA, 21 bp, Artificial sequence
  SiRNA target sequence
cgaatccagttacctgttatg

SEQ ID NO: 279891 - DNA, 21 bp, Artificial sequence
  SiRNA target sequence
gaatccagttacctgttatgc

SEQ ID NO: 279892 - DNA, 21 bp, Artificial sequence
  SiRNA target sequence
aatccagttacctgttatgcg

SEQ ID NO: 279893 - DNA, 21 bp, Artificial sequence
  SiRNA target sequence
atccagttacctgttatgcga

SEQ ID NO: 279894 - DNA, 21 bp, Artificial sequence
  SiRNA target sequence
tccagttacctgttatgcgat

SEQ ID NO: 279895 - DNA, 21 bp, Artificial sequence
  SiRNA target sequence
ccagttacctgttatgcgatg

SEQ ID NO: 279896 - DNA, 21 bp, Artificial sequence
  SiRNA target sequence
cagttacctgttatgcgatgg

SEQ ID NO: 279897 - DNA, 21 bp, Artificial sequence
  SiRNA target sequence
agttacctgttatgcgatggg

SEQ ID NO: 279898 - DNA, 21 bp, Artificial sequence
  SiRNA target sequence
gttacctgttatgcgatgggt

SEQ ID NO: 279899 - DNA, 21 bp, Artificial sequence
  SiRNA target sequence
ttacctgttatgcgatgggta

SEQ ID NO: 279900 - DNA, 21 bp, Artificial sequence
  SiRNA target sequence
tacctgttatgcgatgggtaa

SEQ ID NO: 279901 - DNA, 21 bp, Artificial sequence
  SiRNA target sequence
acctgttatgcgatgggtaag

SEQ ID NO: 279902 - DNA, 21 bp, Artificial sequence
  SiRNA target sequence
cctgttatgcgatgggtaaga

SEQ ID NO: 279903 - DNA, 21 bp, Artificial sequence
  SiRNA target sequence
ctgttatgcgatgggtaagag

SEQ ID NO: 279904 - DNA, 21 bp, Artificial sequence
  SiRNA target sequence
tgttatgcgatgggtaagaga

SEQ ID NO: 279905 - DNA, 21 bp, Artificial sequence
  SiRNA target sequence
gttatgcgatgggtaagagat

SEQ ID NO: 279906 - DNA, 21 bp, Artificial sequence
  SiRNA target sequence
ttatgcgatgggtaagagatg

SEQ ID NO: 279907 - DNA, 21 bp, Artificial sequence
  SiRNA target sequence
tatgcgatgggtaagagatgt

SEQ ID NO: 279908 - DNA, 21 bp, Artificial sequence
  SiRNA target sequence
atgcgatgggtaagagatgtt

SEQ ID NO: 279909 - DNA, 21 bp, Artificial sequence
  SiRNA target sequence
tgcgatgggtaagagatgttg

SEQ ID NO: 279910 - DNA, 21 bp, Artificial sequence
  SiRNA target sequence
gcgatgggtaagagatgttgg

SEQ ID NO: 279911 - DNA, 21 bp, Artificial sequence
  SiRNA target sequence
cgatgggtaagagatgttgga

SEQ ID NO: 279912 - DNA, 21 bp, Artificial sequence
  SiRNA target sequence
gatgggtaagagatgttggat

SEQ ID NO: 279913 - DNA, 21 bp, Artificial sequence
  SiRNA target sequence
atgggtaagagatgttggata

SEQ ID NO: 279914 - DNA, 21 bp, Artificial sequence
  SiRNA target sequence
tgggtaagagatgttggatat

SEQ ID NO: 279915 - DNA, 21 bp, Artificial sequence
  SiRNA target sequence
gggtaagagatgttggatata

SEQ ID NO: 279916 - DNA, 21 bp, Artificial sequence
  SiRNA target sequence
ggtaagagatgttggatatat

SEQ ID NO: 279917 - DNA, 21 bp, Artificial sequence
  SiRNA target sequence
gtaagagatgttggatatatt

SEQ ID NO: 279918 - DNA, 21 bp, Artificial sequence
  SiRNA target sequence
taagagatgttggatatattt

SEQ ID NO: 279919 - DNA, 21 bp, Artificial sequence
  SiRNA target sequence
aagagatgttggatatatttt

SEQ ID NO: 279920 - DNA, 21 bp, Artificial sequence
  SiRNA target sequence
agagatgttggatatattttc

SEQ ID NO: 279921 - DNA, 21 bp, Artificial sequence
  SiRNA target sequence
gagatgttggatatattttcg

SEQ ID NO: 279922 - DNA, 21 bp, Artificial sequence
  SiRNA target sequence
agatgttggatatattttcgt

SEQ ID NO: 279923 - DNA, 21 bp, Artificial sequence
  SiRNA target sequence
gatgttggatatattttcgtt

SEQ ID NO: 279924 - DNA, 21 bp, Artificial sequence
  SiRNA target sequence
atgttggatatattttcgtta

SEQ ID NO: 279925 - DNA, 21 bp, Artificial sequence
  SiRNA target sequence
tgttggatatattttcgttaa

SEQ ID NO: 279926 - DNA, 21 bp, Artificial sequence
  SiRNA target sequence
gttggatatattttcgttaag

SEQ ID NO: 279927 - DNA, 21 bp, Artificial sequence
  SiRNA target sequence
ttggatatattttcgttaagt

SEQ ID NO: 279928 - DNA, 21 bp, Artificial sequence
  SiRNA target sequence
tggatatattttcgttaagtc

SEQ ID NO: 279929 - DNA, 21 bp, Artificial sequence
  SiRNA target sequence
ggatatattttcgttaagtcg

SEQ ID NO: 279930 - DNA, 21 bp, Artificial sequence
  SiRNA target sequence
gatatattttcgttaagtcgg

SEQ ID NO: 279931 - DNA, 21 bp, Artificial sequence
  SiRNA target sequence
atatattttcgttaagtcggg

SEQ ID NO: 279932 - DNA, 21 bp, Artificial sequence
  SiRNA target sequence
tatattttcgttaagtcggga

SEQ ID NO: 279933 - DNA, 21 bp, Artificial sequence
  SiRNA target sequence
atattttcgttaagtcgggac

SEQ ID NO: 279934 - DNA, 21 bp, Artificial sequence
  SiRNA target sequence
tattttcgttaagtcgggaca

SEQ ID NO: 279935 - DNA, 21 bp, Artificial sequence
  SiRNA target sequence
attttcgttaagtcgggacag

SEQ ID NO: 279936 - DNA, 21 bp, Artificial sequence
  SiRNA target sequence
ttttcgttaagtcgggacagg

SEQ ID NO: 279937 - DNA, 21 bp, Artificial sequence
  SiRNA target sequence
tttcgttaagtcgggacaggg

SEQ ID NO: 279938 - DNA, 21 bp, Artificial sequence
  SiRNA target sequence
ttcgttaagtcgggacagggt

SEQ ID NO: 279939 - DNA, 21 bp, Artificial sequence
  SiRNA target sequence
tcgttaagtcgggacagggta

SEQ ID NO: 279940 - DNA, 21 bp, Artificial sequence
  SiRNA target sequence
cgttaagtcgggacagggtac

SEQ ID NO: 279941 - DNA, 21 bp, Artificial sequence
  SiRNA target sequence
gttaagtcgggacagggtact

SEQ ID NO: 279942 - DNA, 21 bp, Artificial sequence
  SiRNA target sequence
ttaagtcgggacagggtacta

SEQ ID NO: 279943 - DNA, 21 bp, Artificial sequence
  SiRNA target sequence
taagtcgggacagggtactag

SEQ ID NO: 279944 - DNA, 21 bp, Artificial sequence
  SiRNA target sequence
aagtcgggacagggtactagt

SEQ ID NO: 279945 - DNA, 21 bp, Artificial sequence
  SiRNA target sequence
agtcgggacagggtactagtt

SEQ ID NO: 279946 - DNA, 21 bp, Artificial sequence
  SiRNA target sequence
gtcgggacagggtactagttg

SEQ ID NO: 279947 - DNA, 21 bp, Artificial sequence
  SiRNA target sequence
tcgggacagggtactagttgt

SEQ ID NO: 279948 - DNA, 21 bp, Artificial sequence
  SiRNA target sequence
cgggacagggtactagttgta

SEQ ID NO: 279949 - DNA, 21 bp, Artificial sequence
  SiRNA target sequence
gggacagggtactagttgtat

SEQ ID NO: 279950 - DNA, 21 bp, Artificial sequence
  SiRNA target sequence
ggacagggtactagttgtata

SEQ ID NO: 279951 - DNA, 21 bp, Artificial sequence
  SiRNA target sequence
gacagggtactagttgtataa

SEQ ID NO: 279952 - DNA, 21 bp, Artificial sequence
  SiRNA target sequence
acagggtactagttgtataaa

SEQ ID NO: 279953 - DNA, 21 bp, Artificial sequence
  SiRNA target sequence
cagggtactagttgtataaag

SEQ ID NO: 279954 - DNA, 21 bp, Artificial sequence
  SiRNA target sequence
agggtactagttgtataaaga

SEQ ID NO: 279955 - DNA, 21 bp, Artificial sequence
  SiRNA target sequence
gggtactagttgtataaagaa

SEQ ID NO: 279956 - DNA, 21 bp, Artificial sequence
  SiRNA target sequence
ggtactagttgtataaagaac

SEQ ID NO: 279957 - DNA, 21 bp, Artificial sequence
  SiRNA target sequence
gtactagttgtataaagaacg

SEQ ID NO: 279958 - DNA, 21 bp, Artificial sequence
  SiRNA target sequence
tactagttgtataaagaacgt

SEQ ID NO: 279959 - DNA, 21 bp, Artificial sequence
  SiRNA target sequence
actagttgtataaagaacgtt

SEQ ID NO: 279960 - DNA, 21 bp, Artificial sequence
  SiRNA target sequence
ctagttgtataaagaacgttt

SEQ ID NO: 279961 - DNA, 21 bp, Artificial sequence
  SiRNA target sequence
tagttgtataaagaacgtttc

SEQ ID NO: 279962 - DNA, 21 bp, Artificial sequence
  SiRNA target sequence
agttgtataaagaacgtttct

SEQ ID NO: 279963 - DNA, 21 bp, Artificial sequence
  SiRNA target sequence
gttgtataaagaacgtttcta

SEQ ID NO: 279964 - DNA, 21 bp, Artificial sequence
  SiRNA target sequence
ttgtataaagaacgtttctaa

SEQ ID NO: 279965 - DNA, 21 bp, Artificial sequence
  SiRNA target sequence
tgtataaagaacgtttctaac

SEQ ID NO: 279966 - DNA, 21 bp, Artificial sequence
  SiRNA target sequence
gtataaagaacgtttctaacg

SEQ ID NO: 279967 - DNA, 21 bp, Artificial sequence
  SiRNA target sequence
tataaagaacgtttctaacgt

SEQ ID NO: 279968 - DNA, 21 bp, Artificial sequence
  SiRNA target sequence
ataaagaacgtttctaacgtt

SEQ ID NO: 279969 - DNA, 21 bp, Artificial sequence
  SiRNA target sequence
taaagaacgtttctaacgtta

SEQ ID NO: 279970 - DNA, 21 bp, Artificial sequence
  SiRNA target sequence
aaagaacgtttctaacgttag

SEQ ID NO: 279971 - DNA, 21 bp, Artificial sequence
  SiRNA target sequence
aagaacgtttctaacgttagc

SEQ ID NO: 279972 - DNA, 21 bp, Artificial sequence
  SiRNA target sequence
agaacgtttctaacgttagct

SEQ ID NO: 279973 - DNA, 21 bp, Artificial sequence
  SiRNA target sequence
gaacgtttctaacgttagcta

SEQ ID NO: 279974 - DNA, 21 bp, Artificial sequence
  SiRNA target sequence
aacgtttctaacgttagctat

SEQ ID NO: 279975 - DNA, 21 bp, Artificial sequence
  SiRNA target sequence
acgtttctaacgttagctata

SEQ ID NO: 279976 - DNA, 21 bp, Artificial sequence
  SiRNA target sequence
cgtttctaacgttagctatat

SEQ ID NO: 279977 - DNA, 21 bp, Artificial sequence
  SiRNA target sequence
gtttctaacgttagctatatg

SEQ ID NO: 279978 - DNA, 21 bp, Artificial sequence
  SiRNA target sequence
tttctaacgttagctatatga

SEQ ID NO: 279979 - DNA, 21 bp, Artificial sequence
  SiRNA target sequence
ttctaacgttagctatatgac

SEQ ID NO: 279980 - DNA, 21 bp, Artificial sequence
  SiRNA target sequence
tctaacgttagctatatgact

SEQ ID NO: 279981 - DNA, 21 bp, Artificial sequence
  SiRNA target sequence
ctaacgttagctatatgactg

SEQ ID NO: 279982 - DNA, 21 bp, Artificial sequence
  SiRNA target sequence
taacgttagctatatgactga

SEQ ID NO: 279983 - DNA, 21 bp, Artificial sequence
  SiRNA target sequence
aacgttagctatatgactgat

SEQ ID NO: 279984 - DNA, 21 bp, Artificial sequence
  SiRNA target sequence
acgttagctatatgactgata

SEQ ID NO: 279985 - DNA, 21 bp, Artificial sequence
  SiRNA target sequence
cgttagctatatgactgatac

SEQ ID NO: 279986 - DNA, 21 bp, Artificial sequence
  SiRNA target sequence
gttagctatatgactgatacc

SEQ ID NO: 279987 - DNA, 21 bp, Artificial sequence
  SiRNA target sequence
ttagctatatgactgataccg

SEQ ID NO: 279988 - DNA, 21 bp, Artificial sequence
  SiRNA target sequence
tagctatatgactgataccga

SEQ ID NO: 279989 - DNA, 21 bp, Artificial sequence
  SiRNA target sequence
agctatatgactgataccgat

SEQ ID NO: 279990 - DNA, 21 bp, Artificial sequence
  SiRNA target sequence
gctatatgactgataccgatc

SEQ ID NO: 279991 - DNA, 21 bp, Artificial sequence
  SiRNA target sequence
ctatatgactgataccgatcc

SEQ ID NO: 279992 - DNA, 21 bp, Artificial sequence
  SiRNA target sequence
tatatgactgataccgatcct

SEQ ID NO: 279993 - DNA, 21 bp, Artificial sequence
  SiRNA target sequence
atatgactgataccgatcctg

SEQ ID NO: 279994 - DNA, 21 bp, Artificial sequence
  SiRNA target sequence
tatgactgataccgatcctga

SEQ ID NO: 279995 - DNA, 21 bp, Artificial sequence
  SiRNA target sequence
atgactgataccgatcctgat

SEQ ID NO: 279996 - DNA, 21 bp, Artificial sequence
  SiRNA target sequence
tgactgataccgatcctgatg

SEQ ID NO: 279997 - DNA, 21 bp, Artificial sequence
  SiRNA target sequence
gactgataccgatcctgatgc

SEQ ID NO: 279998 - DNA, 21 bp, Artificial sequence
  SiRNA target sequence
actgataccgatcctgatgcg

SEQ ID NO: 279999 - DNA, 21 bp, Artificial sequence
  SiRNA target sequence
ctgataccgatcctgatgcgc

SEQ ID NO: 280000 - DNA, 21 bp, Artificial sequence
  SiRNA target sequence
tgataccgatcctgatgcgcg

SEQ ID NO: 280001 - DNA, 21 bp, Artificial sequence
  SiRNA target sequence
gataccgatcctgatgcgcga

SEQ ID NO: 280002 - DNA, 21 bp, Artificial sequence
  SiRNA target sequence
ataccgatcctgatgcgcgag

SEQ ID NO: 280003 - DNA, 21 bp, Artificial sequence
  SiRNA target sequence
taccgatcctgatgcgcgaga

SEQ ID NO: 280004 - DNA, 21 bp, Artificial sequence
  SiRNA target sequence
accgatcctgatgcgcgagaa

SEQ ID NO: 280005 - DNA, 21 bp, Artificial sequence
  SiRNA target sequence
ccgatcctgatgcgcgagaaa

SEQ ID NO: 280006 - DNA, 21 bp, Artificial sequence
  SiRNA target sequence
cgatcctgatgcgcgagaaat

SEQ ID NO: 280007 - DNA, 21 bp, Artificial sequence
  SiRNA target sequence
gatcctgatgcgcgagaaatt

SEQ ID NO: 280008 - DNA, 21 bp, Artificial sequence
  SiRNA target sequence
atcctgatgcgcgagaaattc

SEQ ID NO: 280009 - DNA, 21 bp, Artificial sequence
  SiRNA target sequence
tcctgatgcgcgagaaattcg

SEQ ID NO: 280010 - DNA, 21 bp, Artificial sequence
  SiRNA target sequence
cctgatgcgcgagaaattcga

SEQ ID NO: 280011 - DNA, 21 bp, Artificial sequence
  SiRNA target sequence
ctgatgcgcgagaaattcgat

SEQ ID NO: 280012 - DNA, 21 bp, Artificial sequence
  SiRNA target sequence
tgatgcgcgagaaattcgatt

SEQ ID NO: 280013 - DNA, 21 bp, Artificial sequence
  SiRNA target sequence
gatgcgcgagaaattcgattg

SEQ ID NO: 280014 - DNA, 21 bp, Artificial sequence
  SiRNA target sequence
atgcgcgagaaattcgattga

SEQ ID NO: 280015 - DNA, 21 bp, Artificial sequence
  SiRNA target sequence
tgcgcgagaaattcgattgag

SEQ ID NO: 280016 - DNA, 21 bp, Artificial sequence
  SiRNA target sequence
gcgcgagaaattcgattgagg

SEQ ID NO: 280017 - DNA, 21 bp, Artificial sequence
  SiRNA target sequence
cgcgagaaattcgattgaggg

SEQ ID NO: 280018 - DNA, 21 bp, Artificial sequence
  SiRNA target sequence
gcgagaaattcgattgaggga

SEQ ID NO: 280019 - DNA, 21 bp, Artificial sequence
  SiRNA target sequence
cgagaaattcgattgagggaa

SEQ ID NO: 280020 - DNA, 21 bp, Artificial sequence
  SiRNA target sequence
gagaaattcgattgagggaag

SEQ ID NO: 280021 - DNA, 21 bp, Artificial sequence
  SiRNA target sequence
agaaattcgattgagggaagc

SEQ ID NO: 280022 - DNA, 21 bp, Artificial sequence
  SiRNA target sequence
gaaattcgattgagggaagcg

SEQ ID NO: 280023 - DNA, 21 bp, Artificial sequence
  SiRNA target sequence
aaattcgattgagggaagcgt

SEQ ID NO: 280024 - DNA, 21 bp, Artificial sequence
  SiRNA target sequence
aattcgattgagggaagcgtg

SEQ ID NO: 280025 - DNA, 21 bp, Artificial sequence
  SiRNA target sequence
attcgattgagggaagcgtgg

SEQ ID NO: 280026 - DNA, 21 bp, Artificial sequence
  SiRNA target sequence
ttcgattgagggaagcgtggg

SEQ ID NO: 280027 - DNA, 21 bp, Artificial sequence
  SiRNA target sequence
tcgattgagggaagcgtggga

SEQ ID NO: 280028 - DNA, 21 bp, Artificial sequence
  SiRNA target sequence
cgattgagggaagcgtgggag

SEQ ID NO: 280029 - DNA, 21 bp, Artificial sequence
  SiRNA target sequence
gattgagggaagcgtgggagt

SEQ ID NO: 280030 - DNA, 21 bp, Artificial sequence
  SiRNA target sequence
attgagggaagcgtgggagta

SEQ ID NO: 280031 - DNA, 21 bp, Artificial sequence
  SiRNA target sequence
ttgagggaagcgtgggagtat

SEQ ID NO: 280032 - DNA, 21 bp, Artificial sequence
  SiRNA target sequence
tgagggaagcgtgggagtatt

SEQ ID NO: 280033 - DNA, 21 bp, Artificial sequence
  SiRNA target sequence
gagggaagcgtgggagtattc

SEQ ID NO: 280034 - DNA, 21 bp, Artificial sequence
  SiRNA target sequence
agggaagcgtgggagtattca

SEQ ID NO: 280035 - DNA, 21 bp, Artificial sequence
  SiRNA target sequence
gggaagcgtgggagtattcat

SEQ ID NO: 280036 - DNA, 21 bp, Artificial sequence
  SiRNA target sequence
ggaagcgtgggagtattcatt

SEQ ID NO: 280037 - DNA, 21 bp, Artificial sequence
  SiRNA target sequence
gaagcgtgggagtattcatta

SEQ ID NO: 280038 - DNA, 21 bp, Artificial sequence
  SiRNA target sequence
aagcgtgggagtattcattag

SEQ ID NO: 280039 - DNA, 21 bp, Artificial sequence
  SiRNA target sequence
agcgtgggagtattcattaga

SEQ ID NO: 280040 - DNA, 21 bp, Artificial sequence
  SiRNA target sequence
gcgtgggagtattcattagaa

SEQ ID NO: 280041 - DNA, 21 bp, Artificial sequence
  SiRNA target sequence
cgtgggagtattcattagaaa

SEQ ID NO: 280042 - DNA, 21 bp, Artificial sequence
  SiRNA target sequence
gtgggagtattcattagaaac

SEQ ID NO: 280043 - DNA, 21 bp, Artificial sequence
  SiRNA target sequence
tgggagtattcattagaaacg

SEQ ID NO: 280044 - DNA, 21 bp, Artificial sequence
  SiRNA target sequence
gggagtattcattagaaacga

SEQ ID NO: 280045 - DNA, 21 bp, Artificial sequence
  SiRNA target sequence
ggagtattcattagaaacgat

SEQ ID NO: 280046 - DNA, 21 bp, Artificial sequence
  SiRNA target sequence
gagtattcattagaaacgata

SEQ ID NO: 280047 - DNA, 21 bp, Artificial sequence
  SiRNA target sequence
agtattcattagaaacgatat

SEQ ID NO: 280048 - DNA, 21 bp, Artificial sequence
  SiRNA target sequence
gtattcattagaaacgatatc

SEQ ID NO: 280049 - DNA, 21 bp, Artificial sequence
  SiRNA target sequence
tattcattagaaacgatatct

SEQ ID NO: 280050 - DNA, 21 bp, Artificial sequence
  SiRNA target sequence
attcattagaaacgatatctg

SEQ ID NO: 280051 - DNA, 21 bp, Artificial sequence
  SiRNA target sequence
ttcattagaaacgatatctgg

SEQ ID NO: 280052 - DNA, 21 bp, Artificial sequence
  SiRNA target sequence
tcattagaaacgatatctggg

SEQ ID NO: 280053 - DNA, 21 bp, Artificial sequence
  SiRNA target sequence
cattagaaacgatatctgggg

SEQ ID NO: 280054 - DNA, 21 bp, Artificial sequence
  SiRNA target sequence
attagaaacgatatctgggga

SEQ ID NO: 280055 - DNA, 21 bp, Artificial sequence
  SiRNA target sequence
ttagaaacgatatctggggat

SEQ ID NO: 280056 - DNA, 21 bp, Artificial sequence
  SiRNA target sequence
tagaaacgatatctggggatg

SEQ ID NO: 280057 - DNA, 21 bp, Artificial sequence
  SiRNA target sequence
agaaacgatatctggggatgg

SEQ ID NO: 280058 - DNA, 21 bp, Artificial sequence
  SiRNA target sequence
gaaacgatatctggggatggg

SEQ ID NO: 280059 - DNA, 21 bp, Artificial sequence
  SiRNA target sequence
aaacgatatctggggatgggg

SEQ ID NO: 280060 - DNA, 21 bp, Artificial sequence
  SiRNA target sequence
aacgatatctggggatggggg

SEQ ID NO: 280061 - DNA, 21 bp, Artificial sequence
  SiRNA target sequence
acgatatctggggatggggga

SEQ ID NO: 280062 - DNA, 21 bp, Artificial sequence
  SiRNA target sequence
cgatatctggggatgggggag

SEQ ID NO: 280063 - DNA, 21 bp, Artificial sequence
  SiRNA target sequence
gatatctggggatgggggagc

SEQ ID NO: 280064 - DNA, 21 bp, Artificial sequence
  SiRNA target sequence
atatctggggatgggggagct

SEQ ID NO: 280065 - DNA, 21 bp, Artificial sequence
  SiRNA target sequence
tatctggggatgggggagctc

SEQ ID NO: 280066 - DNA, 21 bp, Artificial sequence
  SiRNA target sequence
atctggggatgggggagctcc

SEQ ID NO: 280067 - DNA, 21 bp, Artificial sequence
  SiRNA target sequence
tctggggatgggggagctcct

SEQ ID NO: 280068 - DNA, 21 bp, Artificial sequence
  SiRNA target sequence
ctggggatgggggagctcctc

SEQ ID NO: 280069 - DNA, 21 bp, Artificial sequence
  SiRNA target sequence
tggggatgggggagctcctct

SEQ ID NO: 280070 - DNA, 21 bp, Artificial sequence
  SiRNA target sequence
ggggatgggggagctcctctt

SEQ ID NO: 280071 - DNA, 21 bp, Artificial sequence
  SiRNA target sequence
gggatgggggagctcctcttt

SEQ ID NO: 280072 - DNA, 21 bp, Artificial sequence
  SiRNA target sequence
ggatgggggagctcctctttt

SEQ ID NO: 280073 - DNA, 21 bp, Artificial sequence
  SiRNA target sequence
gatgggggagctcctcttttc

SEQ ID NO: 280074 - DNA, 21 bp, Artificial sequence
  SiRNA target sequence
atgggggagctcctcttttcg

SEQ ID NO: 280075 - DNA, 21 bp, Artificial sequence
  SiRNA target sequence
tgggggagctcctcttttcgt

SEQ ID NO: 280076 - DNA, 21 bp, Artificial sequence
  SiRNA target sequence
gggggagctcctcttttcgta

SEQ ID NO: 280077 - DNA, 21 bp, Artificial sequence
  SiRNA target sequence
ggggagctcctcttttcgtaa

SEQ ID NO: 280078 - DNA, 21 bp, Artificial sequence
  SiRNA target sequence
gggagctcctcttttcgtaac

SEQ ID NO: 280079 - DNA, 21 bp, Artificial sequence
  SiRNA target sequence
ggagctcctcttttcgtaact

SEQ ID NO: 280080 - DNA, 21 bp, Artificial sequence
  SiRNA target sequence
gagctcctcttttcgtaacta

SEQ ID NO: 280081 - DNA, 21 bp, Artificial sequence
  SiRNA target sequence
agctcctcttttcgtaactaa

SEQ ID NO: 280082 - DNA, 21 bp, Artificial sequence
  SiRNA target sequence
gctcctcttttcgtaactaat

SEQ ID NO: 280083 - DNA, 21 bp, Artificial sequence
  SiRNA target sequence
ctcctcttttcgtaactaata

SEQ ID NO: 280084 - DNA, 21 bp, Artificial sequence
  SiRNA target sequence
tcctcttttcgtaactaatag

SEQ ID NO: 280085 - DNA, 21 bp, Artificial sequence
  SiRNA target sequence
cctcttttcgtaactaatagt

SEQ ID NO: 280086 - DNA, 21 bp, Artificial sequence
  SiRNA target sequence
ctcttttcgtaactaatagta

SEQ ID NO: 280087 - DNA, 21 bp, Artificial sequence
  SiRNA target sequence
tcttttcgtaactaatagtaa

SEQ ID NO: 280088 - DNA, 21 bp, Artificial sequence
  SiRNA target sequence
cttttcgtaactaatagtaaa

SEQ ID NO: 280089 - DNA, 21 bp, Artificial sequence
  SiRNA target sequence
ttttcgtaactaatagtaaaa

SEQ ID NO: 280090 - DNA, 21 bp, Artificial sequence
  SiRNA target sequence
tttcgtaactaatagtaaaat

SEQ ID NO: 280091 - DNA, 21 bp, Artificial sequence
  SiRNA target sequence
ttcgtaactaatagtaaaata

SEQ ID NO: 280092 - DNA, 21 bp, Artificial sequence
  SiRNA target sequence
tcgtaactaatagtaaaatag

SEQ ID NO: 280093 - DNA, 21 bp, Artificial sequence
  SiRNA target sequence
cgtaactaatagtaaaatagg

SEQ ID NO: 280094 - DNA, 21 bp, Artificial sequence
  SiRNA target sequence
gtaactaatagtaaaatagga

SEQ ID NO: 280095 - DNA, 21 bp, Artificial sequence
  SiRNA target sequence
taactaatagtaaaataggac

SEQ ID NO: 280096 - DNA, 21 bp, Artificial sequence
  SiRNA target sequence
aactaatagtaaaataggacc

SEQ ID NO: 280097 - DNA, 21 bp, Artificial sequence
  SiRNA target sequence
actaatagtaaaataggacct

SEQ ID NO: 280098 - DNA, 21 bp, Artificial sequence
  SiRNA target sequence
ctaatagtaaaataggacctg

SEQ ID NO: 280099 - DNA, 21 bp, Artificial sequence
  SiRNA target sequence
taatagtaaaataggacctgg

SEQ ID NO: 280100 - DNA, 21 bp, Artificial sequence
  SiRNA target sequence
aatagtaaaataggacctggt

SEQ ID NO: 280101 - DNA, 21 bp, Artificial sequence
  SiRNA target sequence
atagtaaaataggacctggta

SEQ ID NO: 280102 - DNA, 21 bp, Artificial sequence
  SiRNA target sequence
tagtaaaataggacctggtaa

SEQ ID NO: 280103 - DNA, 21 bp, Artificial sequence
  SiRNA target sequence
agtaaaataggacctggtaag

SEQ ID NO: 280104 - DNA, 21 bp, Artificial sequence
  SiRNA target sequence
gtaaaataggacctggtaaga

SEQ ID NO: 280105 - DNA, 21 bp, Artificial sequence
  SiRNA target sequence
taaaataggacctggtaagat

SEQ ID NO: 280106 - DNA, 21 bp, Artificial sequence
  SiRNA target sequence
aaaataggacctggtaagatc

SEQ ID NO: 280107 - DNA, 21 bp, Artificial sequence
  SiRNA target sequence
aaataggacctggtaagatca

SEQ ID NO: 280108 - DNA, 21 bp, Artificial sequence
  SiRNA target sequence
aataggacctggtaagatcat

SEQ ID NO: 280109 - DNA, 21 bp, Artificial sequence
  SiRNA target sequence
ataggacctggtaagatcata

SEQ ID NO: 280110 - DNA, 21 bp, Artificial sequence
  SiRNA target sequence
taggacctggtaagatcatag

SEQ ID NO: 280111 - DNA, 21 bp, Artificial sequence
  SiRNA target sequence
aggacctggtaagatcatagg

SEQ ID NO: 280112 - DNA, 21 bp, Artificial sequence
  SiRNA target sequence
ggacctggtaagatcatagga

SEQ ID NO: 280113 - DNA, 21 bp, Artificial sequence
  SiRNA target sequence
gacctggtaagatcataggaa

SEQ ID NO: 280114 - DNA, 21 bp, Artificial sequence
  SiRNA target sequence
acctggtaagatcataggaat

SEQ ID NO: 280115 - DNA, 21 bp, Artificial sequence
  SiRNA target sequence
cctggtaagatcataggaatt

SEQ ID NO: 280116 - DNA, 21 bp, Artificial sequence
  SiRNA target sequence
ctggtaagatcataggaattc

SEQ ID NO: 280117 - DNA, 21 bp, Artificial sequence
  SiRNA target sequence
tggtaagatcataggaattca

SEQ ID NO: 280118 - DNA, 21 bp, Artificial sequence
  SiRNA target sequence
ggtaagatcataggaattcat

SEQ ID NO: 280119 - DNA, 21 bp, Artificial sequence
  SiRNA target sequence
gtaagatcataggaattcata

SEQ ID NO: 280120 - DNA, 21 bp, Artificial sequence
  SiRNA target sequence
taagatcataggaattcatac

SEQ ID NO: 280121 - DNA, 21 bp, Artificial sequence
  SiRNA target sequence
aagatcataggaattcataca

SEQ ID NO: 280122 - DNA, 21 bp, Artificial sequence
  SiRNA target sequence
agatcataggaattcatacag

SEQ ID NO: 280123 - DNA, 21 bp, Artificial sequence
  SiRNA target sequence
gatcataggaattcatacagc

SEQ ID NO: 280124 - DNA, 21 bp, Artificial sequence
  SiRNA target sequence
atcataggaattcatacagct

SEQ ID NO: 280125 - DNA, 21 bp, Artificial sequence
  SiRNA target sequence
tcataggaattcatacagctg

SEQ ID NO: 280126 - DNA, 21 bp, Artificial sequence
  SiRNA target sequence
cataggaattcatacagctgg

SEQ ID NO: 280127 - DNA, 21 bp, Artificial sequence
  SiRNA target sequence
ataggaattcatacagctgga

SEQ ID NO: 280128 - DNA, 21 bp, Artificial sequence
  SiRNA target sequence
taggaattcatacagctggag

SEQ ID NO: 280129 - DNA, 21 bp, Artificial sequence
  SiRNA target sequence
aggaattcatacagctggagg

SEQ ID NO: 280130 - DNA, 21 bp, Artificial sequence
  SiRNA target sequence
ggaattcatacagctggaggt

SEQ ID NO: 280131 - DNA, 21 bp, Artificial sequence
  SiRNA target sequence
gaattcatacagctggaggtc

SEQ ID NO: 280132 - DNA, 21 bp, Artificial sequence
  SiRNA target sequence
aattcatacagctggaggtca

SEQ ID NO: 280133 - DNA, 21 bp, Artificial sequence
  SiRNA target sequence
attcatacagctggaggtcac

SEQ ID NO: 280134 - DNA, 21 bp, Artificial sequence
  SiRNA target sequence
ttcatacagctggaggtcacc

SEQ ID NO: 280135 - DNA, 21 bp, Artificial sequence
  SiRNA target sequence
tcatacagctggaggtcaccg

SEQ ID NO: 280136 - DNA, 21 bp, Artificial sequence
  SiRNA target sequence
catacagctggaggtcaccgt

SEQ ID NO: 280137 - DNA, 21 bp, Artificial sequence
  SiRNA target sequence
atacagctggaggtcaccgtt

SEQ ID NO: 280138 - DNA, 21 bp, Artificial sequence
  SiRNA target sequence
tacagctggaggtcaccgttt

SEQ ID NO: 280139 - DNA, 21 bp, Artificial sequence
  SiRNA target sequence
acagctggaggtcaccgtttt

SEQ ID NO: 280140 - DNA, 21 bp, Artificial sequence
  SiRNA target sequence
cagctggaggtcaccgttttg

SEQ ID NO: 280141 - DNA, 21 bp, Artificial sequence
  SiRNA target sequence
agctggaggtcaccgttttgg

SEQ ID NO: 280142 - DNA, 21 bp, Artificial sequence
  SiRNA target sequence
gctggaggtcaccgttttgga

SEQ ID NO: 280143 - DNA, 21 bp, Artificial sequence
  SiRNA target sequence
ctggaggtcaccgttttggag

SEQ ID NO: 280144 - DNA, 21 bp, Artificial sequence
  SiRNA target sequence
tggaggtcaccgttttggagt

SEQ ID NO: 280145 - DNA, 21 bp, Artificial sequence
  SiRNA target sequence
ggaggtcaccgttttggagtt

SEQ ID NO: 280146 - DNA, 21 bp, Artificial sequence
  SiRNA target sequence
gaggtcaccgttttggagttg

SEQ ID NO: 280147 - DNA, 21 bp, Artificial sequence
  SiRNA target sequence
aggtcaccgttttggagttgg

SEQ ID NO: 280148 - DNA, 21 bp, Artificial sequence
  SiRNA target sequence
ggtcaccgttttggagttggc

SEQ ID NO: 280149 - DNA, 21 bp, Artificial sequence
  SiRNA target sequence
gtcaccgttttggagttggca

SEQ ID NO: 280150 - DNA, 21 bp, Artificial sequence
  SiRNA target sequence
tcaccgttttggagttggcag

SEQ ID NO: 280151 - DNA, 21 bp, Artificial sequence
  SiRNA target sequence
caccgttttggagttggcagt

SEQ ID NO: 280152 - DNA, 21 bp, Artificial sequence
  SiRNA target sequence
accgttttggagttggcagtt

SEQ ID NO: 280153 - DNA, 21 bp, Artificial sequence
  SiRNA target sequence
ccgttttggagttggcagttg

SEQ ID NO: 280154 - DNA, 21 bp, Artificial sequence
  SiRNA target sequence
cgttttggagttggcagttgc

SEQ ID NO: 280155 - DNA, 21 bp, Artificial sequence
  SiRNA target sequence
gttttggagttggcagttgct

SEQ ID NO: 280156 - DNA, 21 bp, Artificial sequence
  SiRNA target sequence
ttttggagttggcagttgctt

SEQ ID NO: 280157 - DNA, 21 bp, Artificial sequence
  SiRNA target sequence
tttggagttggcagttgcttt

SEQ ID NO: 280158 - DNA, 21 bp, Artificial sequence
  SiRNA target sequence
ttggagttggcagttgctttg

SEQ ID NO: 280159 - DNA, 21 bp, Artificial sequence
  SiRNA target sequence
tggagttggcagttgctttgc

SEQ ID NO: 280160 - DNA, 21 bp, Artificial sequence
  SiRNA target sequence
ggagttggcagttgctttgcc

SEQ ID NO: 280161 - DNA, 21 bp, Artificial sequence
  SiRNA target sequence
gagttggcagttgctttgcca

SEQ ID NO: 280162 - DNA, 21 bp, Artificial sequence
  SiRNA target sequence
agttggcagttgctttgccac

SEQ ID NO: 280163 - DNA, 21 bp, Artificial sequence
  SiRNA target sequence
gttggcagttgctttgccact

SEQ ID NO: 280164 - DNA, 21 bp, Artificial sequence
  SiRNA target sequence
ttggcagttgctttgccactc

SEQ ID NO: 280165 - DNA, 21 bp, Artificial sequence
  SiRNA target sequence
tggcagttgctttgccactcc

SEQ ID NO: 280166 - DNA, 21 bp, Artificial sequence
  SiRNA target sequence
ggcagttgctttgccactccg

SEQ ID NO: 280167 - DNA, 21 bp, Artificial sequence
  SiRNA target sequence
gcagttgctttgccactccgt

SEQ ID NO: 280168 - DNA, 21 bp, Artificial sequence
  SiRNA target sequence
cagttgctttgccactccgtt

SEQ ID NO: 280169 - DNA, 21 bp, Artificial sequence
  SiRNA target sequence
agttgctttgccactccgttt

SEQ ID NO: 280170 - DNA, 21 bp, Artificial sequence
  SiRNA target sequence
gttgctttgccactccgtttt

SEQ ID NO: 280171 - DNA, 21 bp, Artificial sequence
  SiRNA target sequence
ttgctttgccactccgtttta

SEQ ID NO: 280172 - DNA, 21 bp, Artificial sequence
  SiRNA target sequence
tgctttgccactccgttttat

SEQ ID NO: 280173 - DNA, 21 bp, Artificial sequence
  SiRNA target sequence
gctttgccactccgttttata

SEQ ID NO: 280174 - DNA, 21 bp, Artificial sequence
  SiRNA target sequence
ctttgccactccgttttatat

SEQ ID NO: 280175 - DNA, 21 bp, Artificial sequence
  SiRNA target sequence
tttgccactccgttttatata

SEQ ID NO: 280176 - DNA, 21 bp, Artificial sequence
  SiRNA target sequence
ttgccactccgttttatatag

SEQ ID NO: 280177 - DNA, 21 bp, Artificial sequence
  SiRNA target sequence
tgccactccgttttatataga

SEQ ID NO: 280178 - DNA, 21 bp, Artificial sequence
  SiRNA target sequence
gccactccgttttatatagag

SEQ ID NO: 280179 - DNA, 21 bp, Artificial sequence
  SiRNA target sequence
ccactccgttttatatagagg

SEQ ID NO: 280180 - DNA, 21 bp, Artificial sequence
  SiRNA target sequence
cactccgttttatatagagga

SEQ ID NO: 280181 - DNA, 21 bp, Artificial sequence
  SiRNA target sequence
actccgttttatatagaggat

SEQ ID NO: 280182 - DNA, 21 bp, Artificial sequence
  SiRNA target sequence
ctccgttttatatagaggatg

SEQ ID NO: 280183 - DNA, 21 bp, Artificial sequence
  SiRNA target sequence
tccgttttatatagaggatgt

SEQ ID NO: 280184 - DNA, 21 bp, Artificial sequence
  SiRNA target sequence
ccgttttatatagaggatgtg

SEQ ID NO: 280185 - DNA, 21 bp, Artificial sequence
  SiRNA target sequence
cgttttatatagaggatgtga

SEQ ID NO: 280186 - DNA, 21 bp, Artificial sequence
  SiRNA target sequence
gttttatatagaggatgtgaa

SEQ ID NO: 280187 - DNA, 21 bp, Artificial sequence
  SiRNA target sequence
ttttatatagaggatgtgaaa

SEQ ID NO: 280188 - DNA, 21 bp, Artificial sequence
  SiRNA target sequence
tttatatagaggatgtgaaag

SEQ ID NO: 280189 - DNA, 21 bp, Artificial sequence
  SiRNA target sequence
ttatatagaggatgtgaaaga

SEQ ID NO: 280190 - DNA, 21 bp, Artificial sequence
  SiRNA target sequence
tatatagaggatgtgaaagag

SEQ ID NO: 280191 - DNA, 21 bp, Artificial sequence
  SiRNA target sequence
atatagaggatgtgaaagaga

SEQ ID NO: 280192 - DNA, 21 bp, Artificial sequence
  SiRNA target sequence
tatagaggatgtgaaagagat

SEQ ID NO: 280193 - DNA, 21 bp, Artificial sequence
  SiRNA target sequence
atagaggatgtgaaagagatc

SEQ ID NO: 280194 - DNA, 21 bp, Artificial sequence
  SiRNA target sequence
tagaggatgtgaaagagatct

SEQ ID NO: 280195 - DNA, 21 bp, Artificial sequence
  SiRNA target sequence
agaggatgtgaaagagatctt

SEQ ID NO: 280196 - DNA, 21 bp, Artificial sequence
  SiRNA target sequence
gaggatgtgaaagagatcttg

SEQ ID NO: 280197 - DNA, 21 bp, Artificial sequence
  SiRNA target sequence
aggatgtgaaagagatcttgt

SEQ ID NO: 280198 - DNA, 21 bp, Artificial sequence
  SiRNA target sequence
ggatgtgaaagagatcttgtc

SEQ ID NO: 280199 - DNA, 21 bp, Artificial sequence
  SiRNA target sequence
gatgtgaaagagatcttgtct

SEQ ID NO: 280200 - DNA, 21 bp, Artificial sequence
  SiRNA target sequence
atgtgaaagagatcttgtctc

SEQ ID NO: 280201 - DNA, 21 bp, Artificial sequence
  SiRNA target sequence
tgtgaaagagatcttgtctcg

SEQ ID NO: 280202 - DNA, 21 bp, Artificial sequence
  SiRNA target sequence
gtgaaagagatcttgtctcga

SEQ ID NO: 280203 - DNA, 21 bp, Artificial sequence
  SiRNA target sequence
tgaaagagatcttgtctcgat

SEQ ID NO: 280204 - DNA, 21 bp, Artificial sequence
  SiRNA target sequence
gaaagagatcttgtctcgata

SEQ ID NO: 280205 - DNA, 21 bp, Artificial sequence
  SiRNA target sequence
aaagagatcttgtctcgatat

SEQ ID NO: 280206 - DNA, 21 bp, Artificial sequence
  SiRNA target sequence
aagagatcttgtctcgatatg

SEQ ID NO: 280207 - DNA, 21 bp, Artificial sequence
  SiRNA target sequence
agagatcttgtctcgatatga

SEQ ID NO: 280208 - DNA, 21 bp, Artificial sequence
  SiRNA target sequence
gagatcttgtctcgatatgac

SEQ ID NO: 280209 - DNA, 21 bp, Artificial sequence
  SiRNA target sequence
agatcttgtctcgatatgact

SEQ ID NO: 280210 - DNA, 21 bp, Artificial sequence
  SiRNA target sequence
gatcttgtctcgatatgacta

SEQ ID NO: 280211 - DNA, 21 bp, Artificial sequence
  SiRNA target sequence
atcttgtctcgatatgactat

SEQ ID NO: 280212 - DNA, 21 bp, Artificial sequence
  SiRNA target sequence
tcttgtctcgatatgactata

SEQ ID NO: 280213 - DNA, 21 bp, Artificial sequence
  SiRNA target sequence
cttgtctcgatatgactataa

SEQ ID NO: 280214 - DNA, 21 bp, Artificial sequence
  SiRNA target sequence
ttgtctcgatatgactataaa

SEQ ID NO: 280215 - DNA, 21 bp, Artificial sequence
  SiRNA target sequence
tgtctcgatatgactataaag

SEQ ID NO: 280216 - DNA, 21 bp, Artificial sequence
  SiRNA target sequence
gtctcgatatgactataaagc

SEQ ID NO: 280217 - DNA, 21 bp, Artificial sequence
  SiRNA target sequence
tctcgatatgactataaagcg

SEQ ID NO: 280218 - DNA, 21 bp, Artificial sequence
  SiRNA target sequence
ctcgatatgactataaagcgc

SEQ ID NO: 280219 - DNA, 21 bp, Artificial sequence
  SiRNA target sequence
tcgatatgactataaagcgca

SEQ ID NO: 280220 - DNA, 21 bp, Artificial sequence
  SiRNA target sequence
cgatatgactataaagcgcaa

SEQ ID NO: 280221 - DNA, 21 bp, Artificial sequence
  SiRNA target sequence
gatatgactataaagcgcaat

SEQ ID NO: 280222 - DNA, 21 bp, Artificial sequence
  SiRNA target sequence
atatgactataaagcgcaatc

SEQ ID NO: 280223 - DNA, 21 bp, Artificial sequence
  SiRNA target sequence
tatgactataaagcgcaatct

SEQ ID NO: 280224 - DNA, 21 bp, Artificial sequence
  SiRNA target sequence
atgactataaagcgcaatctt

SEQ ID NO: 280225 - DNA, 21 bp, Artificial sequence
  SiRNA target sequence
tgactataaagcgcaatcttg

SEQ ID NO: 280226 - DNA, 21 bp, Artificial sequence
  SiRNA target sequence
gactataaagcgcaatcttgt

SEQ ID NO: 280227 - DNA, 21 bp, Artificial sequence
  SiRNA target sequence
actataaagcgcaatcttgtg

SEQ ID NO: 280228 - DNA, 21 bp, Artificial sequence
  SiRNA target sequence
ctataaagcgcaatcttgtgc

SEQ ID NO: 280229 - DNA, 21 bp, Artificial sequence
  SiRNA target sequence
tataaagcgcaatcttgtgct

SEQ ID NO: 280230 - DNA, 21 bp, Artificial sequence
  SiRNA target sequence
ataaagcgcaatcttgtgctt

SEQ ID NO: 280231 - DNA, 21 bp, Artificial sequence
  SiRNA target sequence
taaagcgcaatcttgtgcttt

SEQ ID NO: 280232 - DNA, 21 bp, Artificial sequence
  SiRNA target sequence
aaagcgcaatcttgtgctttt

SEQ ID NO: 280233 - DNA, 21 bp, Artificial sequence
  SiRNA target sequence
aagcgcaatcttgtgcttttg

SEQ ID NO: 280234 - DNA, 21 bp, Artificial sequence
  SiRNA target sequence
agcgcaatcttgtgcttttga

SEQ ID NO: 280235 - DNA, 21 bp, Artificial sequence
  SiRNA target sequence
gcgcaatcttgtgcttttgag

SEQ ID NO: 280236 - DNA, 21 bp, Artificial sequence
  SiRNA target sequence
cgcaatcttgtgcttttgagt

SEQ ID NO: 280237 - DNA, 21 bp, Artificial sequence
  SiRNA target sequence
gcaatcttgtgcttttgagtt

SEQ ID NO: 280238 - DNA, 21 bp, Artificial sequence
  SiRNA target sequence
caatcttgtgcttttgagtta

SEQ ID NO: 280239 - DNA, 21 bp, Artificial sequence
  SiRNA target sequence
aatcttgtgcttttgagttag

SEQ ID NO: 280240 - DNA, 21 bp, Artificial sequence
  SiRNA target sequence
atcttgtgcttttgagttagt

SEQ ID NO: 280241 - DNA, 21 bp, Artificial sequence
  SiRNA target sequence
tcttgtgcttttgagttagtg

SEQ ID NO: 280242 - DNA, 21 bp, Artificial sequence
  SiRNA target sequence
cttgtgcttttgagttagtgt

SEQ ID NO: 280243 - DNA, 21 bp, Artificial sequence
  SiRNA target sequence
ttgtgcttttgagttagtgtt

SEQ ID NO: 280244 - DNA, 21 bp, Artificial sequence
  SiRNA target sequence
tgtgcttttgagttagtgttg

SEQ ID NO: 280245 - DNA, 21 bp, Artificial sequence
  SiRNA target sequence
gtgcttttgagttagtgttgc

SEQ ID NO: 280246 - DNA, 21 bp, Artificial sequence
  SiRNA target sequence
tgcttttgagttagtgttgcg

SEQ ID NO: 280247 - DNA, 21 bp, Artificial sequence
  SiRNA target sequence
gcttttgagttagtgttgcga

SEQ ID NO: 280248 - DNA, 21 bp, Artificial sequence
  SiRNA target sequence
cttttgagttagtgttgcgac

SEQ ID NO: 280249 - DNA, 21 bp, Artificial sequence
  SiRNA target sequence
ttttgagttagtgttgcgaca

SEQ ID NO: 280250 - DNA, 21 bp, Artificial sequence
  SiRNA target sequence
tttgagttagtgttgcgacag

SEQ ID NO: 280251 - DNA, 21 bp, Artificial sequence
  SiRNA target sequence
ttgagttagtgttgcgacagg

SEQ ID NO: 280252 - DNA, 21 bp, Artificial sequence
  SiRNA target sequence
tgagttagtgttgcgacagga

SEQ ID NO: 280253 - DNA, 21 bp, Artificial sequence
  SiRNA target sequence
gagttagtgttgcgacaggat

SEQ ID NO: 280254 - DNA, 21 bp, Artificial sequence
  SiRNA target sequence
agttagtgttgcgacaggatc

SEQ ID NO: 280255 - DNA, 21 bp, Artificial sequence
  SiRNA target sequence
gttagtgttgcgacaggatct

SEQ ID NO: 280256 - DNA, 21 bp, Artificial sequence
  SiRNA target sequence
ttagtgttgcgacaggatctc

SEQ ID NO: 280257 - DNA, 21 bp, Artificial sequence
  SiRNA target sequence
tagtgttgcgacaggatctcg

SEQ ID NO: 280258 - DNA, 21 bp, Artificial sequence
  SiRNA target sequence
agtgttgcgacaggatctcga

SEQ ID NO: 280259 - DNA, 21 bp, Artificial sequence
  SiRNA target sequence
gtgttgcgacaggatctcgaa

SEQ ID NO: 280260 - DNA, 21 bp, Artificial sequence
  SiRNA target sequence
tgttgcgacaggatctcgaac

SEQ ID NO: 280261 - DNA, 21 bp, Artificial sequence
  SiRNA target sequence
gttgcgacaggatctcgaacc

SEQ ID NO: 280262 - DNA, 21 bp, Artificial sequence
  SiRNA target sequence
ttgcgacaggatctcgaacca

SEQ ID NO: 280263 - DNA, 21 bp, Artificial sequence
  SiRNA target sequence
tgcgacaggatctcgaaccat

SEQ ID NO: 280264 - DNA, 21 bp, Artificial sequence
  SiRNA target sequence
gcgacaggatctcgaaccatg

SEQ ID NO: 280265 - DNA, 21 bp, Artificial sequence
  SiRNA target sequence
cgacaggatctcgaaccatgt

SEQ ID NO: 280266 - DNA, 21 bp, Artificial sequence
  SiRNA target sequence
gacaggatctcgaaccatgtg

SEQ ID NO: 280267 - DNA, 21 bp, Artificial sequence
  SiRNA target sequence
acaggatctcgaaccatgtgc

SEQ ID NO: 280268 - DNA, 21 bp, Artificial sequence
  SiRNA target sequence
caggatctcgaaccatgtgct

SEQ ID NO: 280269 - DNA, 21 bp, Artificial sequence
  SiRNA target sequence
aggatctcgaaccatgtgctt

SEQ ID NO: 280270 - DNA, 21 bp, Artificial sequence
  SiRNA target sequence
ggatctcgaaccatgtgcttt

SEQ ID NO: 280271 - DNA, 21 bp, Artificial sequence
  SiRNA target sequence
gatctcgaaccatgtgcttta

SEQ ID NO: 280272 - DNA, 21 bp, Artificial sequence
  SiRNA target sequence
atctcgaaccatgtgctttac

SEQ ID NO: 280273 - DNA, 21 bp, Artificial sequence
  SiRNA target sequence
tctcgaaccatgtgctttacc

SEQ ID NO: 280274 - DNA, 21 bp, Artificial sequence
  SiRNA target sequence
ctcgaaccatgtgctttacct

SEQ ID NO: 280275 - DNA, 21 bp, Artificial sequence
  SiRNA target sequence
tcgaaccatgtgctttaccta

SEQ ID NO: 280276 - DNA, 21 bp, Artificial sequence
  SiRNA target sequence
cgaaccatgtgctttacctaa

SEQ ID NO: 280277 - DNA, 21 bp, Artificial sequence
  SiRNA target sequence
gaaccatgtgctttacctaac

SEQ ID NO: 280278 - DNA, 21 bp, Artificial sequence
  SiRNA target sequence
aaccatgtgctttacctaacc

SEQ ID NO: 280279 - DNA, 21 bp, Artificial sequence
  SiRNA target sequence
accatgtgctttacctaacca

SEQ ID NO: 280280 - DNA, 21 bp, Artificial sequence
  SiRNA target sequence
ccatgtgctttacctaaccat

SEQ ID NO: 280281 - DNA, 21 bp, Artificial sequence
  SiRNA target sequence
catgtgctttacctaaccatt

SEQ ID NO: 280282 - DNA, 21 bp, Artificial sequence
  SiRNA target sequence
atgtgctttacctaaccattt

SEQ ID NO: 280283 - DNA, 21 bp, Artificial sequence
  SiRNA target sequence
tgtgctttacctaaccattta

SEQ ID NO: 280284 - DNA, 21 bp, Artificial sequence
  SiRNA target sequence
gtgctttacctaaccatttag

SEQ ID NO: 280285 - DNA, 21 bp, Artificial sequence
  SiRNA target sequence
tgctttacctaaccatttaga

SEQ ID NO: 280286 - DNA, 21 bp, Artificial sequence
  SiRNA target sequence
gctttacctaaccatttagat

SEQ ID NO: 280287 - DNA, 21 bp, Artificial sequence
  SiRNA target sequence
ctttacctaaccatttagatg

SEQ ID NO: 280288 - DNA, 21 bp, Artificial sequence
  SiRNA target sequence
tttacctaaccatttagatga

SEQ ID NO: 280289 - DNA, 21 bp, Artificial sequence
  SiRNA target sequence
ttacctaaccatttagatgaa

SEQ ID NO: 280290 - DNA, 21 bp, Artificial sequence
  SiRNA target sequence
tacctaaccatttagatgaat

SEQ ID NO: 280291 - DNA, 21 bp, Artificial sequence
  SiRNA target sequence
acctaaccatttagatgaatg

SEQ ID NO: 280292 - DNA, 21 bp, Artificial sequence
  SiRNA target sequence
cctaaccatttagatgaatgt

SEQ ID NO: 280293 - DNA, 21 bp, Artificial sequence
  SiRNA target sequence
ctaaccatttagatgaatgtg

SEQ ID NO: 280294 - DNA, 21 bp, Artificial sequence
  SiRNA target sequence
taaccatttagatgaatgtga

SEQ ID NO: 280295 - DNA, 21 bp, Artificial sequence
  SiRNA target sequence
aaccatttagatgaatgtgag

SEQ ID NO: 280296 - DNA, 21 bp, Artificial sequence
  SiRNA target sequence
accatttagatgaatgtgagt

SEQ ID NO: 280297 - DNA, 21 bp, Artificial sequence
  SiRNA target sequence
ccatttagatgaatgtgagtt

SEQ ID NO: 280298 - DNA, 21 bp, Artificial sequence
  SiRNA target sequence
catttagatgaatgtgagttc

SEQ ID NO: 280299 - DNA, 21 bp, Artificial sequence
  SiRNA target sequence
atttagatgaatgtgagttca

SEQ ID NO: 280300 - DNA, 21 bp, Artificial sequence
  SiRNA target sequence
tttagatgaatgtgagttcat

SEQ ID NO: 280301 - DNA, 21 bp, Artificial sequence
  SiRNA target sequence
ttagatgaatgtgagttcatc

SEQ ID NO: 280302 - DNA, 21 bp, Artificial sequence
  SiRNA target sequence
tagatgaatgtgagttcatct

SEQ ID NO: 280303 - DNA, 21 bp, Artificial sequence
  SiRNA target sequence
agatgaatgtgagttcatctt

SEQ ID NO: 280304 - DNA, 21 bp, Artificial sequence
  SiRNA target sequence
gatgaatgtgagttcatctta

SEQ ID NO: 280305 - DNA, 21 bp, Artificial sequence
  SiRNA target sequence
atgaatgtgagttcatcttaa

SEQ ID NO: 280306 - DNA, 21 bp, Artificial sequence
  SiRNA target sequence
tgaatgtgagttcatcttaat

SEQ ID NO: 280307 - DNA, 21 bp, Artificial sequence
  SiRNA target sequence
gaatgtgagttcatcttaatg

SEQ ID NO: 280308 - DNA, 21 bp, Artificial sequence
  SiRNA target sequence
aatgtgagttcatcttaatgg

SEQ ID NO: 280309 - DNA, 21 bp, Artificial sequence
  SiRNA target sequence
atgtgagttcatcttaatggg

SEQ ID NO: 280310 - DNA, 21 bp, Artificial sequence
  SiRNA target sequence
tgtgagttcatcttaatgggg

SEQ ID NO: 280311 - DNA, 21 bp, Artificial sequence
  SiRNA target sequence
gtgagttcatcttaatgggga

SEQ ID NO: 280312 - DNA, 21 bp, Artificial sequence
  SiRNA target sequence
tgagttcatcttaatggggaa

SEQ ID NO: 280313 - DNA, 21 bp, Artificial sequence
  SiRNA target sequence
gagttcatcttaatggggaag

SEQ ID NO: 280314 - DNA, 21 bp, Artificial sequence
  SiRNA target sequence
agttcatcttaatggggaagg

SEQ ID NO: 280315 - DNA, 21 bp, Artificial sequence
  SiRNA target sequence
gttcatcttaatggggaaggt

SEQ ID NO: 280316 - DNA, 21 bp, Artificial sequence
  SiRNA target sequence
ttcatcttaatggggaaggtt

SEQ ID NO: 280317 - DNA, 21 bp, Artificial sequence
  SiRNA target sequence
tcatcttaatggggaaggtta

SEQ ID NO: 280318 - DNA, 21 bp, Artificial sequence
  SiRNA target sequence
catcttaatggggaaggttaa

SEQ ID NO: 280319 - DNA, 21 bp, Artificial sequence
  SiRNA target sequence
atcttaatggggaaggttaag

SEQ ID NO: 280320 - DNA, 21 bp, Artificial sequence
  SiRNA target sequence
tcttaatggggaaggttaagg

SEQ ID NO: 280321 - DNA, 21 bp, Artificial sequence
  SiRNA target sequence
cttaatggggaaggttaagga

SEQ ID NO: 280322 - DNA, 21 bp, Artificial sequence
  SiRNA target sequence
ttaatggggaaggttaaggat

SEQ ID NO: 280323 - DNA, 21 bp, Artificial sequence
  SiRNA target sequence
taatggggaaggttaaggatc

SEQ ID NO: 280324 - DNA, 21 bp, Artificial sequence
  SiRNA target sequence
aatggggaaggttaaggatcc

SEQ ID NO: 280325 - DNA, 21 bp, Artificial sequence
  SiRNA target sequence
atggggaaggttaaggatccc

SEQ ID NO: 280326 - DNA, 21 bp, Artificial sequence
  SiRNA target sequence
tggggaaggttaaggatcccc

SEQ ID NO: 280327 - DNA, 21 bp, Artificial sequence
  SiRNA target sequence
ggggaaggttaaggatccccc

SEQ ID NO: 280328 - DNA, 21 bp, Artificial sequence
  SiRNA target sequence
gggaaggttaaggatccccca

SEQ ID NO: 280329 - DNA, 21 bp, Artificial sequence
  SiRNA target sequence
ggaaggttaaggatcccccag

SEQ ID NO: 280330 - DNA, 21 bp, Artificial sequence
  SiRNA target sequence
gaaggttaaggatcccccagt

SEQ ID NO: 280331 - DNA, 21 bp, Artificial sequence
  SiRNA target sequence
aaggttaaggatcccccagtt

SEQ ID NO: 280332 - DNA, 21 bp, Artificial sequence
  SiRNA target sequence
aggttaaggatcccccagttc

SEQ ID NO: 280333 - DNA, 21 bp, Artificial sequence
  SiRNA target sequence
ggttaaggatcccccagttca

SEQ ID NO: 280334 - DNA, 21 bp, Artificial sequence
  SiRNA target sequence
gttaaggatcccccagttcaa

SEQ ID NO: 280335 - DNA, 21 bp, Artificial sequence
  SiRNA target sequence
ttaaggatcccccagttcaac

SEQ ID NO: 280336 - DNA, 21 bp, Artificial sequence
  SiRNA target sequence
taaggatcccccagttcaacc

SEQ ID NO: 280337 - DNA, 21 bp, Artificial sequence
  SiRNA target sequence
aaggatcccccagttcaacca

SEQ ID NO: 280338 - DNA, 21 bp, Artificial sequence
  SiRNA target sequence
aggatcccccagttcaaccat

SEQ ID NO: 280339 - DNA, 21 bp, Artificial sequence
  SiRNA target sequence
ggatcccccagttcaaccatc

SEQ ID NO: 280340 - DNA, 21 bp, Artificial sequence
  SiRNA target sequence
gatcccccagttcaaccatct

SEQ ID NO: 280341 - DNA, 21 bp, Artificial sequence
  SiRNA target sequence
atcccccagttcaaccatcta

SEQ ID NO: 280342 - DNA, 21 bp, Artificial sequence
  SiRNA target sequence
tcccccagttcaaccatctag

SEQ ID NO: 280343 - DNA, 21 bp, Artificial sequence
  SiRNA target sequence
cccccagttcaaccatctaga

SEQ ID NO: 280344 - DNA, 21 bp, Artificial sequence
  SiRNA target sequence
ccccagttcaaccatctagaa

SEQ ID NO: 280345 - DNA, 21 bp, Artificial sequence
  SiRNA target sequence
cccagttcaaccatctagaag

SEQ ID NO: 280346 - DNA, 21 bp, Artificial sequence
  SiRNA target sequence
ccagttcaaccatctagaagt

SEQ ID NO: 280347 - DNA, 21 bp, Artificial sequence
  SiRNA target sequence
cagttcaaccatctagaagta

SEQ ID NO: 280348 - DNA, 21 bp, Artificial sequence
  SiRNA target sequence
agttcaaccatctagaagtaa

SEQ ID NO: 280349 - DNA, 21 bp, Artificial sequence
  SiRNA target sequence
gttcaaccatctagaagtaaa

SEQ ID NO: 280350 - DNA, 21 bp, Artificial sequence
  SiRNA target sequence
ttcaaccatctagaagtaaaa

SEQ ID NO: 280351 - DNA, 21 bp, Artificial sequence
  SiRNA target sequence
tcaaccatctagaagtaaaat

SEQ ID NO: 280352 - DNA, 21 bp, Artificial sequence
  SiRNA target sequence
caaccatctagaagtaaaatt

SEQ ID NO: 280353 - DNA, 21 bp, Artificial sequence
  SiRNA target sequence
aaccatctagaagtaaaattt

SEQ ID NO: 280354 - DNA, 21 bp, Artificial sequence
  SiRNA target sequence
accatctagaagtaaaatttc

SEQ ID NO: 280355 - DNA, 21 bp, Artificial sequence
  SiRNA target sequence
ccatctagaagtaaaatttct

SEQ ID NO: 280356 - DNA, 21 bp, Artificial sequence
  SiRNA target sequence
catctagaagtaaaatttctc

SEQ ID NO: 280357 - DNA, 21 bp, Artificial sequence
  SiRNA target sequence
atctagaagtaaaatttctcc

SEQ ID NO: 280358 - DNA, 21 bp, Artificial sequence
  SiRNA target sequence
tctagaagtaaaatttctcca

SEQ ID NO: 280359 - DNA, 21 bp, Artificial sequence
  SiRNA target sequence
ctagaagtaaaatttctccat

SEQ ID NO: 280360 - DNA, 21 bp, Artificial sequence
  SiRNA target sequence
tagaagtaaaatttctccatc

SEQ ID NO: 280361 - DNA, 21 bp, Artificial sequence
  SiRNA target sequence
agaagtaaaatttctccatct

SEQ ID NO: 280362 - DNA, 21 bp, Artificial sequence
  SiRNA target sequence
gaagtaaaatttctccatctc

SEQ ID NO: 280363 - DNA, 21 bp, Artificial sequence
  SiRNA target sequence
aagtaaaatttctccatctcc

SEQ ID NO: 280364 - DNA, 21 bp, Artificial sequence
  SiRNA target sequence
agtaaaatttctccatctccc

SEQ ID NO: 280365 - DNA, 21 bp, Artificial sequence
  SiRNA target sequence
gtaaaatttctccatctccct

SEQ ID NO: 280366 - DNA, 21 bp, Artificial sequence
  SiRNA target sequence
taaaatttctccatctccctt

SEQ ID NO: 280367 - DNA, 21 bp, Artificial sequence
  SiRNA target sequence
aaaatttctccatctccctta

SEQ ID NO: 280368 - DNA, 21 bp, Artificial sequence
  SiRNA target sequence
aaatttctccatctcccttat

SEQ ID NO: 280369 - DNA, 21 bp, Artificial sequence
  SiRNA target sequence
aatttctccatctcccttata

SEQ ID NO: 280370 - DNA, 21 bp, Artificial sequence
  SiRNA target sequence
atttctccatctcccttatac

SEQ ID NO: 280371 - DNA, 21 bp, Artificial sequence
  SiRNA target sequence
tttctccatctcccttatacg

SEQ ID NO: 280372 - DNA, 21 bp, Artificial sequence
  SiRNA target sequence
ttctccatctcccttatacgg

SEQ ID NO: 280373 - DNA, 21 bp, Artificial sequence
  SiRNA target sequence
tctccatctcccttatacgga

SEQ ID NO: 280374 - DNA, 21 bp, Artificial sequence
  SiRNA target sequence
ctccatctcccttatacggac

SEQ ID NO: 280375 - DNA, 21 bp, Artificial sequence
  SiRNA target sequence
tccatctcccttatacggaca

SEQ ID NO: 280376 - DNA, 21 bp, Artificial sequence
  SiRNA target sequence
ccatctcccttatacggacac

SEQ ID NO: 280377 - DNA, 21 bp, Artificial sequence
  SiRNA target sequence
catctcccttatacggacaca

SEQ ID NO: 280378 - DNA, 21 bp, Artificial sequence
  SiRNA target sequence
atctcccttatacggacacat

SEQ ID NO: 280379 - DNA, 21 bp, Artificial sequence
  SiRNA target sequence
tctcccttatacggacacata

SEQ ID NO: 280380 - DNA, 21 bp, Artificial sequence
  SiRNA target sequence
ctcccttatacggacacataa

SEQ ID NO: 280381 - DNA, 21 bp, Artificial sequence
  SiRNA target sequence
tcccttatacggacacataac

SEQ ID NO: 280382 - DNA, 21 bp, Artificial sequence
  SiRNA target sequence
cccttatacggacacataact

SEQ ID NO: 280383 - DNA, 21 bp, Artificial sequence
  SiRNA target sequence
ccttatacggacacataactg

SEQ ID NO: 280384 - DNA, 21 bp, Artificial sequence
  SiRNA target sequence
cttatacggacacataactga

SEQ ID NO: 280385 - DNA, 21 bp, Artificial sequence
  SiRNA target sequence
ttatacggacacataactgaa

SEQ ID NO: 280386 - DNA, 21 bp, Artificial sequence
  SiRNA target sequence
tatacggacacataactgaac

SEQ ID NO: 280387 - DNA, 21 bp, Artificial sequence
  SiRNA target sequence
atacggacacataactgaacc

SEQ ID NO: 280388 - DNA, 21 bp, Artificial sequence
  SiRNA target sequence
tacggacacataactgaaccc

SEQ ID NO: 280389 - DNA, 21 bp, Artificial sequence
  SiRNA target sequence
acggacacataactgaaccct

SEQ ID NO: 280390 - DNA, 21 bp, Artificial sequence
  SiRNA target sequence
cggacacataactgaaccctc

SEQ ID NO: 280391 - DNA, 21 bp, Artificial sequence
  SiRNA target sequence
ggacacataactgaaccctct

SEQ ID NO: 280392 - DNA, 21 bp, Artificial sequence
  SiRNA target sequence
gacacataactgaaccctcta

SEQ ID NO: 280393 - DNA, 21 bp, Artificial sequence
  SiRNA target sequence
acacataactgaaccctctag

SEQ ID NO: 280394 - DNA, 21 bp, Artificial sequence
  SiRNA target sequence
cacataactgaaccctctagt

SEQ ID NO: 280395 - DNA, 21 bp, Artificial sequence
  SiRNA target sequence
acataactgaaccctctagtg

SEQ ID NO: 280396 - DNA, 21 bp, Artificial sequence
  SiRNA target sequence
cataactgaaccctctagtgc

SEQ ID NO: 280397 - DNA, 21 bp, Artificial sequence
  SiRNA target sequence
ataactgaaccctctagtgcc

SEQ ID NO: 280398 - DNA, 21 bp, Artificial sequence
  SiRNA target sequence
taactgaaccctctagtgccc

SEQ ID NO: 280399 - DNA, 21 bp, Artificial sequence
  SiRNA target sequence
aactgaaccctctagtgcccc

SEQ ID NO: 280400 - DNA, 21 bp, Artificial sequence
  SiRNA target sequence
actgaaccctctagtgcccct

SEQ ID NO: 280401 - DNA, 21 bp, Artificial sequence
  SiRNA target sequence
ctgaaccctctagtgccccta

SEQ ID NO: 280402 - DNA, 21 bp, Artificial sequence
  SiRNA target sequence
tgaaccctctagtgcccctac

SEQ ID NO: 280403 - DNA, 21 bp, Artificial sequence
  SiRNA target sequence
gaaccctctagtgcccctact

SEQ ID NO: 280404 - DNA, 21 bp, Artificial sequence
  SiRNA target sequence
aaccctctagtgcccctactt

SEQ ID NO: 280405 - DNA, 21 bp, Artificial sequence
  SiRNA target sequence
accctctagtgcccctacttg

SEQ ID NO: 280406 - DNA, 21 bp, Artificial sequence
  SiRNA target sequence
ccctctagtgcccctacttgg

SEQ ID NO: 280407 - DNA, 21 bp, Artificial sequence
  SiRNA target sequence
cctctagtgcccctacttggt

SEQ ID NO: 280408 - DNA, 21 bp, Artificial sequence
  SiRNA target sequence
ctctagtgcccctacttggtt

SEQ ID NO: 280409 - DNA, 21 bp, Artificial sequence
  SiRNA target sequence
tctagtgcccctacttggtta

SEQ ID NO: 280410 - DNA, 21 bp, Artificial sequence
  SiRNA target sequence
ctagtgcccctacttggttat

SEQ ID NO: 280411 - DNA, 21 bp, Artificial sequence
  SiRNA target sequence
tagtgcccctacttggttata

SEQ ID NO: 280412 - DNA, 21 bp, Artificial sequence
  SiRNA target sequence
agtgcccctacttggttatat

SEQ ID NO: 280413 - DNA, 21 bp, Artificial sequence
  SiRNA target sequence
gtgcccctacttggttatatc

SEQ ID NO: 280414 - DNA, 21 bp, Artificial sequence
  SiRNA target sequence
tgcccctacttggttatatcc

SEQ ID NO: 280415 - DNA, 21 bp, Artificial sequence
  SiRNA target sequence
gcccctacttggttatatcct

SEQ ID NO: 280416 - DNA, 21 bp, Artificial sequence
  SiRNA target sequence
cccctacttggttatatccta

SEQ ID NO: 280417 - DNA, 21 bp, Artificial sequence
  SiRNA target sequence
ccctacttggttatatcctag

SEQ ID NO: 280418 - DNA, 21 bp, Artificial sequence
  SiRNA target sequence
cctacttggttatatcctaga

SEQ ID NO: 280419 - DNA, 21 bp, Artificial sequence
  SiRNA target sequence
ctacttggttatatcctagag

SEQ ID NO: 280420 - DNA, 21 bp, Artificial sequence
  SiRNA target sequence
tacttggttatatcctagaga

SEQ ID NO: 280421 - DNA, 21 bp, Artificial sequence
  SiRNA target sequence
acttggttatatcctagagag

SEQ ID NO: 280422 - DNA, 21 bp, Artificial sequence
  SiRNA target sequence
cttggttatatcctagagagc

SEQ ID NO: 280423 - DNA, 21 bp, Artificial sequence
  SiRNA target sequence
ttggttatatcctagagagct

SEQ ID NO: 280424 - DNA, 21 bp, Artificial sequence
  SiRNA target sequence
tggttatatcctagagagctt

SEQ ID NO: 280425 - DNA, 21 bp, Artificial sequence
  SiRNA target sequence
ggttatatcctagagagcttg

SEQ ID NO: 280426 - DNA, 21 bp, Artificial sequence
  SiRNA target sequence
gttatatcctagagagcttga

SEQ ID NO: 280427 - DNA, 21 bp, Artificial sequence
  SiRNA target sequence
ttatatcctagagagcttgat

SEQ ID NO: 280428 - DNA, 21 bp, Artificial sequence
  SiRNA target sequence
tatatcctagagagcttgatg

SEQ ID NO: 280429 - DNA, 21 bp, Artificial sequence
  SiRNA target sequence
atatcctagagagcttgatgg

SEQ ID NO: 280430 - DNA, 21 bp, Artificial sequence
  SiRNA target sequence
tatcctagagagcttgatgga

SEQ ID NO: 280431 - DNA, 21 bp, Artificial sequence
  SiRNA target sequence
atcctagagagcttgatggac

SEQ ID NO: 280432 - DNA, 21 bp, Artificial sequence
  SiRNA target sequence
tcctagagagcttgatggaca

SEQ ID NO: 280433 - DNA, 21 bp, Artificial sequence
  SiRNA target sequence
cctagagagcttgatggacag

SEQ ID NO: 280434 - DNA, 21 bp, Artificial sequence
  SiRNA target sequence
ctagagagcttgatggacaga

SEQ ID NO: 280435 - DNA, 21 bp, Artificial sequence
  SiRNA target sequence
tagagagcttgatggacagat

SEQ ID NO: 280436 - DNA, 21 bp, Artificial sequence
  SiRNA target sequence
agagagcttgatggacagatt

SEQ ID NO: 280437 - DNA, 21 bp, Artificial sequence
  SiRNA target sequence
gagagcttgatggacagattt

SEQ ID NO: 280438 - DNA, 21 bp, Artificial sequence
  SiRNA target sequence
agagcttgatggacagatttt

SEQ ID NO: 280439 - DNA, 21 bp, Artificial sequence
  SiRNA target sequence
gagcttgatggacagattttt

SEQ ID NO: 280440 - DNA, 21 bp, Artificial sequence
  SiRNA target sequence
agcttgatggacagatttttg

SEQ ID NO: 280441 - DNA, 21 bp, Artificial sequence
  SiRNA target sequence
gcttgatggacagatttttga

SEQ ID NO: 280442 - DNA, 21 bp, Artificial sequence
  SiRNA target sequence
cttgatggacagatttttgac

SEQ ID NO: 280443 - DNA, 21 bp, Artificial sequence
  SiRNA target sequence
ttgatggacagatttttgacc

SEQ ID NO: 280444 - DNA, 21 bp, Artificial sequence
  SiRNA target sequence
tgatggacagatttttgaccc

SEQ ID NO: 280445 - DNA, 21 bp, Artificial sequence
  SiRNA target sequence
gatggacagatttttgaccct

SEQ ID NO: 280446 - DNA, 21 bp, Artificial sequence
  SiRNA target sequence
atggacagatttttgaccctc

SEQ ID NO: 280447 - DNA, 21 bp, Artificial sequence
  SiRNA target sequence
tggacagatttttgaccctct

SEQ ID NO: 280448 - DNA, 21 bp, Artificial sequence
  SiRNA target sequence
ggacagatttttgaccctcta

SEQ ID NO: 280449 - DNA, 21 bp, Artificial sequence
  SiRNA target sequence
gacagatttttgaccctctaa

SEQ ID NO: 280450 - DNA, 21 bp, Artificial sequence
  SiRNA target sequence
acagatttttgaccctctaaa

SEQ ID NO: 280451 - DNA, 21 bp, Artificial sequence
  SiRNA target sequence
cagatttttgaccctctaaaa

SEQ ID NO: 280452 - DNA, 21 bp, Artificial sequence
  SiRNA target sequence
agatttttgaccctctaaaat

SEQ ID NO: 280453 - DNA, 21 bp, Artificial sequence
  SiRNA target sequence
gatttttgaccctctaaaata

SEQ ID NO: 280454 - DNA, 21 bp, Artificial sequence
  SiRNA target sequence
atttttgaccctctaaaatat

SEQ ID NO: 280455 - DNA, 21 bp, Artificial sequence
  SiRNA target sequence
tttttgaccctctaaaatata

SEQ ID NO: 280456 - DNA, 21 bp, Artificial sequence
  SiRNA target sequence
ttttgaccctctaaaatatag

SEQ ID NO: 280457 - DNA, 21 bp, Artificial sequence
  SiRNA target sequence
tttgaccctctaaaatatagg

SEQ ID NO: 280458 - DNA, 21 bp, Artificial sequence
  SiRNA target sequence
ttgaccctctaaaatatagga

SEQ ID NO: 280459 - DNA, 21 bp, Artificial sequence
  SiRNA target sequence
tgaccctctaaaatataggac

SEQ ID NO: 280460 - DNA, 21 bp, Artificial sequence
  SiRNA target sequence
gaccctctaaaatataggact

SEQ ID NO: 280461 - DNA, 21 bp, Artificial sequence
  SiRNA target sequence
accctctaaaatataggactg

SEQ ID NO: 280462 - DNA, 21 bp, Artificial sequence
  SiRNA target sequence
ccctctaaaatataggactgc

SEQ ID NO: 280463 - DNA, 21 bp, Artificial sequence
  SiRNA target sequence
cctctaaaatataggactgct

SEQ ID NO: 280464 - DNA, 21 bp, Artificial sequence
  SiRNA target sequence
ctctaaaatataggactgcta

SEQ ID NO: 280465 - DNA, 21 bp, Artificial sequence
  SiRNA target sequence
tctaaaatataggactgctag

SEQ ID NO: 280466 - DNA, 21 bp, Artificial sequence
  SiRNA target sequence
ctaaaatataggactgctaga

SEQ ID NO: 280467 - DNA, 21 bp, Artificial sequence
  SiRNA target sequence
taaaatataggactgctagac

SEQ ID NO: 280468 - DNA, 21 bp, Artificial sequence
  SiRNA target sequence
aaaatataggactgctagact

SEQ ID NO: 280469 - DNA, 21 bp, Artificial sequence
  SiRNA target sequence
aaatataggactgctagactc

SEQ ID NO: 280470 - DNA, 21 bp, Artificial sequence
  SiRNA target sequence
aatataggactgctagactcg

SEQ ID NO: 280471 - DNA, 21 bp, Artificial sequence
  SiRNA target sequence
atataggactgctagactcgg

SEQ ID NO: 280472 - DNA, 21 bp, Artificial sequence
  SiRNA target sequence
tataggactgctagactcgga

SEQ ID NO: 280473 - DNA, 21 bp, Artificial sequence
  SiRNA target sequence
ataggactgctagactcggaa

SEQ ID NO: 280474 - DNA, 21 bp, Artificial sequence
  SiRNA target sequence
taggactgctagactcggaaa

SEQ ID NO: 280475 - DNA, 21 bp, Artificial sequence
  SiRNA target sequence
aggactgctagactcggaaaa

SEQ ID NO: 280476 - DNA, 21 bp, Artificial sequence
  SiRNA target sequence
ggactgctagactcggaaaag

SEQ ID NO: 280477 - DNA, 21 bp, Artificial sequence
  SiRNA target sequence
gactgctagactcggaaaaga

SEQ ID NO: 280478 - DNA, 21 bp, Artificial sequence
  SiRNA target sequence
actgctagactcggaaaagat

SEQ ID NO: 280479 - DNA, 21 bp, Artificial sequence
  SiRNA target sequence
ctgctagactcggaaaagata

SEQ ID NO: 280480 - DNA, 21 bp, Artificial sequence
  SiRNA target sequence
tgctagactcggaaaagatag

SEQ ID NO: 280481 - DNA, 21 bp, Artificial sequence
  SiRNA target sequence
gctagactcggaaaagatagt

SEQ ID NO: 280482 - DNA, 21 bp, Artificial sequence
  SiRNA target sequence
ctagactcggaaaagatagtg

SEQ ID NO: 280483 - DNA, 21 bp, Artificial sequence
  SiRNA target sequence
tagactcggaaaagatagtgt

SEQ ID NO: 280484 - DNA, 21 bp, Artificial sequence
  SiRNA target sequence
agactcggaaaagatagtgtt

SEQ ID NO: 280485 - DNA, 21 bp, Artificial sequence
  SiRNA target sequence
gactcggaaaagatagtgttc

SEQ ID NO: 280486 - DNA, 21 bp, Artificial sequence
  SiRNA target sequence
actcggaaaagatagtgttcc

SEQ ID NO: 280487 - DNA, 21 bp, Artificial sequence
  SiRNA target sequence
ctcggaaaagatagtgttcct

SEQ ID NO: 280488 - DNA, 21 bp, Artificial sequence
  SiRNA target sequence
tcggaaaagatagtgttccta

SEQ ID NO: 280489 - DNA, 21 bp, Artificial sequence
  SiRNA target sequence
cggaaaagatagtgttcctat

SEQ ID NO: 280490 - DNA, 21 bp, Artificial sequence
  SiRNA target sequence
ggaaaagatagtgttcctatt

SEQ ID NO: 280491 - DNA, 21 bp, Artificial sequence
  SiRNA target sequence
gaaaagatagtgttcctatta

SEQ ID NO: 280492 - DNA, 21 bp, Artificial sequence
  SiRNA target sequence
aaaagatagtgttcctattag

SEQ ID NO: 280493 - DNA, 21 bp, Artificial sequence
  SiRNA target sequence
aaagatagtgttcctattagg

SEQ ID NO: 280494 - DNA, 21 bp, Artificial sequence
  SiRNA target sequence
aagatagtgttcctattagga

SEQ ID NO: 280495 - DNA, 21 bp, Artificial sequence
  SiRNA target sequence
agatagtgttcctattaggag

SEQ ID NO: 280496 - DNA, 21 bp, Artificial sequence
  SiRNA target sequence
gatagtgttcctattaggagt

SEQ ID NO: 280497 - DNA, 21 bp, Artificial sequence
  SiRNA target sequence
atagtgttcctattaggagta

SEQ ID NO: 280498 - DNA, 21 bp, Artificial sequence
  SiRNA target sequence
tagtgttcctattaggagtaa

SEQ ID NO: 280499 - DNA, 21 bp, Artificial sequence
  SiRNA target sequence
agtgttcctattaggagtaag

SEQ ID NO: 280500 - DNA, 21 bp, Artificial sequence
  SiRNA target sequence
gtgttcctattaggagtaagt

SEQ ID NO: 280501 - DNA, 21 bp, Artificial sequence
  SiRNA target sequence
tgttcctattaggagtaagtt

SEQ ID NO: 280502 - DNA, 21 bp, Artificial sequence
  SiRNA target sequence
gttcctattaggagtaagtta

SEQ ID NO: 280503 - DNA, 21 bp, Artificial sequence
  SiRNA target sequence
ttcctattaggagtaagttaa

SEQ ID NO: 280504 - DNA, 21 bp, Artificial sequence
  SiRNA target sequence
tcctattaggagtaagttaat

SEQ ID NO: 280505 - DNA, 21 bp, Artificial sequence
  SiRNA target sequence
cctattaggagtaagttaatt

SEQ ID NO: 280506 - DNA, 21 bp, Artificial sequence
  SiRNA target sequence
ctattaggagtaagttaatta

SEQ ID NO: 280507 - DNA, 21 bp, Artificial sequence
  SiRNA target sequence
tattaggagtaagttaattaa

SEQ ID NO: 280508 - DNA, 21 bp, Artificial sequence
  SiRNA target sequence
attaggagtaagttaattaat

SEQ ID NO: 280509 - DNA, 21 bp, Artificial sequence
  SiRNA target sequence
ttaggagtaagttaattaatc

SEQ ID NO: 280510 - DNA, 21 bp, Artificial sequence
  SiRNA target sequence
taggagtaagttaattaatct

SEQ ID NO: 280511 - DNA, 21 bp, Artificial sequence
  SiRNA target sequence
aggagtaagttaattaatctg

SEQ ID NO: 280512 - DNA, 21 bp, Artificial sequence
  SiRNA target sequence
ggagtaagttaattaatctgg

SEQ ID NO: 280513 - DNA, 21 bp, Artificial sequence
  SiRNA target sequence
gagtaagttaattaatctggc

SEQ ID NO: 280514 - DNA, 21 bp, Artificial sequence
  SiRNA target sequence
agtaagttaattaatctggct

SEQ ID NO: 280515 - DNA, 21 bp, Artificial sequence
  SiRNA target sequence
gtaagttaattaatctggcta

SEQ ID NO: 280516 - DNA, 21 bp, Artificial sequence
  SiRNA target sequence
taagttaattaatctggctaa

SEQ ID NO: 280517 - DNA, 21 bp, Artificial sequence
  SiRNA target sequence
aagttaattaatctggctaaa

SEQ ID NO: 280518 - DNA, 21 bp, Artificial sequence
  SiRNA target sequence
agttaattaatctggctaaaa

SEQ ID NO: 280519 - DNA, 21 bp, Artificial sequence
  SiRNA target sequence
gttaattaatctggctaaaat

SEQ ID NO: 280520 - DNA, 21 bp, Artificial sequence
  SiRNA target sequence
ttaattaatctggctaaaatg

SEQ ID NO: 280521 - DNA, 21 bp, Artificial sequence
  SiRNA target sequence
taattaatctggctaaaatgg

SEQ ID NO: 280522 - DNA, 21 bp, Artificial sequence
  SiRNA target sequence
aattaatctggctaaaatggc

SEQ ID NO: 280523 - DNA, 21 bp, Artificial sequence
  SiRNA target sequence
attaatctggctaaaatggct

SEQ ID NO: 280524 - DNA, 21 bp, Artificial sequence
  SiRNA target sequence
ttaatctggctaaaatggctc

SEQ ID NO: 280525 - DNA, 21 bp, Artificial sequence
  SiRNA target sequence
taatctggctaaaatggctct

SEQ ID NO: 280526 - DNA, 21 bp, Artificial sequence
  SiRNA target sequence
aatctggctaaaatggctctc

SEQ ID NO: 280527 - DNA, 21 bp, Artificial sequence
  SiRNA target sequence
atctggctaaaatggctctca

SEQ ID NO: 280528 - DNA, 21 bp, Artificial sequence
  SiRNA target sequence
tctggctaaaatggctctcat

SEQ ID NO: 280529 - DNA, 21 bp, Artificial sequence
  SiRNA target sequence
ctggctaaaatggctctcata

SEQ ID NO: 280530 - DNA, 21 bp, Artificial sequence
  SiRNA target sequence
tggctaaaatggctctcatag

SEQ ID NO: 280531 - DNA, 21 bp, Artificial sequence
  SiRNA target sequence
ggctaaaatggctctcataga

SEQ ID NO: 280532 - DNA, 21 bp, Artificial sequence
  SiRNA target sequence
gctaaaatggctctcatagac

SEQ ID NO: 280533 - DNA, 21 bp, Artificial sequence
  SiRNA target sequence
ctaaaatggctctcatagacg

SEQ ID NO: 280534 - DNA, 21 bp, Artificial sequence
  SiRNA target sequence
taaaatggctctcatagacga

SEQ ID NO: 280535 - DNA, 21 bp, Artificial sequence
  SiRNA target sequence
aaaatggctctcatagacgat

SEQ ID NO: 280536 - DNA, 21 bp, Artificial sequence
  SiRNA target sequence
aaatggctctcatagacgata

SEQ ID NO: 280537 - DNA, 21 bp, Artificial sequence
  SiRNA target sequence
aatggctctcatagacgatat

SEQ ID NO: 280538 - DNA, 21 bp, Artificial sequence
  SiRNA target sequence
atggctctcatagacgatata

SEQ ID NO: 280539 - DNA, 21 bp, Artificial sequence
  SiRNA target sequence
tggctctcatagacgatatat

SEQ ID NO: 280540 - DNA, 21 bp, Artificial sequence
  SiRNA target sequence
ggctctcatagacgatatata

SEQ ID NO: 280541 - DNA, 21 bp, Artificial sequence
  SiRNA target sequence
gctctcatagacgatatatat

SEQ ID NO: 280542 - DNA, 21 bp, Artificial sequence
  SiRNA target sequence
ctctcatagacgatatatatt

SEQ ID NO: 280543 - DNA, 21 bp, Artificial sequence
  SiRNA target sequence
tctcatagacgatatatattc

SEQ ID NO: 280544 - DNA, 21 bp, Artificial sequence
  SiRNA target sequence
ctcatagacgatatatattct

SEQ ID NO: 280545 - DNA, 21 bp, Artificial sequence
  SiRNA target sequence
tcatagacgatatatattctg

SEQ ID NO: 280546 - DNA, 21 bp, Artificial sequence
  SiRNA target sequence
catagacgatatatattctgt

SEQ ID NO: 280547 - DNA, 21 bp, Artificial sequence
  SiRNA target sequence
atagacgatatatattctgtg

SEQ ID NO: 280548 - DNA, 21 bp, Artificial sequence
  SiRNA target sequence
tagacgatatatattctgtgt

SEQ ID NO: 280549 - DNA, 21 bp, Artificial sequence
  SiRNA target sequence
agacgatatatattctgtgta

SEQ ID NO: 280550 - DNA, 21 bp, Artificial sequence
  SiRNA target sequence
gacgatatatattctgtgtac

SEQ ID NO: 280551 - DNA, 21 bp, Artificial sequence
  SiRNA target sequence
acgatatatattctgtgtact

SEQ ID NO: 280552 - DNA, 21 bp, Artificial sequence
  SiRNA target sequence
cgatatatattctgtgtactt

SEQ ID NO: 280553 - DNA, 21 bp, Artificial sequence
  SiRNA target sequence
gatatatattctgtgtactta

SEQ ID NO: 280554 - DNA, 21 bp, Artificial sequence
  SiRNA target sequence
atatatattctgtgtacttac

SEQ ID NO: 280555 - DNA, 21 bp, Artificial sequence
  SiRNA target sequence
tatatattctgtgtacttaca

SEQ ID NO: 280556 - DNA, 21 bp, Artificial sequence
  SiRNA target sequence
atatattctgtgtacttacaa

SEQ ID NO: 280557 - DNA, 21 bp, Artificial sequence
  SiRNA target sequence
tatattctgtgtacttacaaa

SEQ ID NO: 280558 - DNA, 21 bp, Artificial sequence
  SiRNA target sequence
atattctgtgtacttacaaaa

SEQ ID NO: 280559 - DNA, 21 bp, Artificial sequence
  SiRNA target sequence
tattctgtgtacttacaaaag

SEQ ID NO: 280560 - DNA, 21 bp, Artificial sequence
  SiRNA target sequence
attctgtgtacttacaaaaga

SEQ ID NO: 280561 - DNA, 21 bp, Artificial sequence
  SiRNA target sequence
ttctgtgtacttacaaaagaa

SEQ ID NO: 280562 - DNA, 21 bp, Artificial sequence
  SiRNA target sequence
tctgtgtacttacaaaagaaa

SEQ ID NO: 280563 - DNA, 21 bp, Artificial sequence
  SiRNA target sequence
ctgtgtacttacaaaagaaag

SEQ ID NO: 280564 - DNA, 21 bp, Artificial sequence
  SiRNA target sequence
tgtgtacttacaaaagaaaga

SEQ ID NO: 280565 - DNA, 21 bp, Artificial sequence
  SiRNA target sequence
gtgtacttacaaaagaaagat

SEQ ID NO: 280566 - DNA, 21 bp, Artificial sequence
  SiRNA target sequence
tgtacttacaaaagaaagatc

SEQ ID NO: 280567 - DNA, 21 bp, Artificial sequence
  SiRNA target sequence
gtacttacaaaagaaagatct

SEQ ID NO: 280568 - DNA, 21 bp, Artificial sequence
  SiRNA target sequence
tacttacaaaagaaagatctc

SEQ ID NO: 280569 - DNA, 21 bp, Artificial sequence
  SiRNA target sequence
acttacaaaagaaagatctct

SEQ ID NO: 280570 - DNA, 21 bp, Artificial sequence
  SiRNA target sequence
cttacaaaagaaagatctctt

SEQ ID NO: 280571 - DNA, 21 bp, Artificial sequence
  SiRNA target sequence
ttacaaaagaaagatctcttg

SEQ ID NO: 280572 - DNA, 21 bp, Artificial sequence
  SiRNA target sequence
tacaaaagaaagatctcttgg

SEQ ID NO: 280573 - DNA, 21 bp, Artificial sequence
  SiRNA target sequence
acaaaagaaagatctcttgga

SEQ ID NO: 280574 - DNA, 21 bp, Artificial sequence
  SiRNA target sequence
caaaagaaagatctcttggat

SEQ ID NO: 280575 - DNA, 21 bp, Artificial sequence
  SiRNA target sequence
aaaagaaagatctcttggatg

SEQ ID NO: 280576 - DNA, 21 bp, Artificial sequence
  SiRNA target sequence
aaagaaagatctcttggatgg

SEQ ID NO: 280577 - DNA, 21 bp, Artificial sequence
  SiRNA target sequence
aagaaagatctcttggatggg

SEQ ID NO: 280578 - DNA, 21 bp, Artificial sequence
  SiRNA target sequence
agaaagatctcttggatgggc

SEQ ID NO: 280579 - DNA, 21 bp, Artificial sequence
  SiRNA target sequence
gaaagatctcttggatgggcg

SEQ ID NO: 280580 - DNA, 21 bp, Artificial sequence
  SiRNA target sequence
aaagatctcttggatgggcga

SEQ ID NO: 280581 - DNA, 21 bp, Artificial sequence
  SiRNA target sequence
aagatctcttggatgggcgat

SEQ ID NO: 280582 - DNA, 21 bp, Artificial sequence
  SiRNA target sequence
agatctcttggatgggcgatt

SEQ ID NO: 280583 - DNA, 21 bp, Artificial sequence
  SiRNA target sequence
gatctcttggatgggcgattt

SEQ ID NO: 280584 - DNA, 21 bp, Artificial sequence
  SiRNA target sequence
atctcttggatgggcgatttc

SEQ ID NO: 280585 - DNA, 21 bp, Artificial sequence
  SiRNA target sequence
tctcttggatgggcgatttcc

SEQ ID NO: 280586 - DNA, 21 bp, Artificial sequence
  SiRNA target sequence
ctcttggatgggcgatttcca

SEQ ID NO: 280587 - DNA, 21 bp, Artificial sequence
  SiRNA target sequence
tcttggatgggcgatttccat

SEQ ID NO: 280588 - DNA, 21 bp, Artificial sequence
  SiRNA target sequence
cttggatgggcgatttccatc

SEQ ID NO: 280589 - DNA, 21 bp, Artificial sequence
  SiRNA target sequence
ttggatgggcgatttccatca

SEQ ID NO: 280590 - DNA, 21 bp, Artificial sequence
  SiRNA target sequence
tggatgggcgatttccatcat

SEQ ID NO: 280591 - DNA, 21 bp, Artificial sequence
  SiRNA target sequence
ggatgggcgatttccatcatc

SEQ ID NO: 280592 - DNA, 21 bp, Artificial sequence
  SiRNA target sequence
gatgggcgatttccatcatca

SEQ ID NO: 280593 - DNA, 21 bp, Artificial sequence
  SiRNA target sequence
atgggcgatttccatcatcat

SEQ ID NO: 280594 - DNA, 21 bp, Artificial sequence
  SiRNA target sequence
tgggcgatttccatcatcatt

SEQ ID NO: 280595 - DNA, 21 bp, Artificial sequence
  SiRNA target sequence
gggcgatttccatcatcatta

SEQ ID NO: 280596 - DNA, 21 bp, Artificial sequence
  SiRNA target sequence
ggcgatttccatcatcattaa

SEQ ID NO: 280597 - DNA, 21 bp, Artificial sequence
  SiRNA target sequence
gcgatttccatcatcattaac

SEQ ID NO: 280598 - DNA, 21 bp, Artificial sequence
  SiRNA target sequence
cgatttccatcatcattaacc

SEQ ID NO: 280599 - DNA, 21 bp, Artificial sequence
  SiRNA target sequence
gatttccatcatcattaacct

SEQ ID NO: 280600 - DNA, 21 bp, Artificial sequence
  SiRNA target sequence
atttccatcatcattaacctt

SEQ ID NO: 280601 - DNA, 21 bp, Artificial sequence
  SiRNA target sequence
tttccatcatcattaaccttt

SEQ ID NO: 280602 - DNA, 21 bp, Artificial sequence
  SiRNA target sequence
ttccatcatcattaacctttg

SEQ ID NO: 280603 - DNA, 21 bp, Artificial sequence
  SiRNA target sequence
tccatcatcattaacctttga

SEQ ID NO: 280604 - DNA, 21 bp, Artificial sequence
  SiRNA target sequence
ccatcatcattaacctttgat

SEQ ID NO: 280605 - DNA, 21 bp, Artificial sequence
  SiRNA target sequence
catcatcattaacctttgatc

SEQ ID NO: 280606 - DNA, 21 bp, Artificial sequence
  SiRNA target sequence
atcatcattaacctttgatca

SEQ ID NO: 280607 - DNA, 21 bp, Artificial sequence
  SiRNA target sequence
tcatcattaacctttgatcag

SEQ ID NO: 280608 - DNA, 21 bp, Artificial sequence
  SiRNA target sequence
catcattaacctttgatcagg

SEQ ID NO: 280609 - DNA, 21 bp, Artificial sequence
  SiRNA target sequence
atcattaacctttgatcaggc

SEQ ID NO: 280610 - DNA, 21 bp, Artificial sequence
  SiRNA target sequence
tcattaacctttgatcaggca

SEQ ID NO: 280611 - DNA, 21 bp, Artificial sequence
  SiRNA target sequence
cattaacctttgatcaggcag

SEQ ID NO: 280612 - DNA, 21 bp, Artificial sequence
  SiRNA target sequence
attaacctttgatcaggcagt

SEQ ID NO: 280613 - DNA, 21 bp, Artificial sequence
  SiRNA target sequence
ttaacctttgatcaggcagtg

SEQ ID NO: 280614 - DNA, 21 bp, Artificial sequence
  SiRNA target sequence
taacctttgatcaggcagtgt

SEQ ID NO: 280615 - DNA, 21 bp, Artificial sequence
  SiRNA target sequence
aacctttgatcaggcagtgtt

SEQ ID NO: 280616 - DNA, 21 bp, Artificial sequence
  SiRNA target sequence
acctttgatcaggcagtgttg

SEQ ID NO: 280617 - DNA, 21 bp, Artificial sequence
  SiRNA target sequence
cctttgatcaggcagtgttgg

SEQ ID NO: 280618 - DNA, 21 bp, Artificial sequence
  SiRNA target sequence
ctttgatcaggcagtgttggg

SEQ ID NO: 280619 - DNA, 21 bp, Artificial sequence
  SiRNA target sequence
tttgatcaggcagtgttggga

SEQ ID NO: 280620 - DNA, 21 bp, Artificial sequence
  SiRNA target sequence
ttgatcaggcagtgttgggaa

SEQ ID NO: 280621 - DNA, 21 bp, Artificial sequence
  SiRNA target sequence
tgatcaggcagtgttgggaat

SEQ ID NO: 280622 - DNA, 21 bp, Artificial sequence
  SiRNA target sequence
gatcaggcagtgttgggaata

SEQ ID NO: 280623 - DNA, 21 bp, Artificial sequence
  SiRNA target sequence
atcaggcagtgttgggaatac

SEQ ID NO: 280624 - DNA, 21 bp, Artificial sequence
  SiRNA target sequence
tcaggcagtgttgggaatacc

SEQ ID NO: 280625 - DNA, 21 bp, Artificial sequence
  SiRNA target sequence
caggcagtgttgggaataccc

SEQ ID NO: 280626 - DNA, 21 bp, Artificial sequence
  SiRNA target sequence
aggcagtgttgggaatacccg

SEQ ID NO: 280627 - DNA, 21 bp, Artificial sequence
  SiRNA target sequence
ggcagtgttgggaatacccgg

SEQ ID NO: 280628 - DNA, 21 bp, Artificial sequence
  SiRNA target sequence
gcagtgttgggaatacccggg

SEQ ID NO: 280629 - DNA, 21 bp, Artificial sequence
  SiRNA target sequence
cagtgttgggaatacccgggg

SEQ ID NO: 280630 - DNA, 21 bp, Artificial sequence
  SiRNA target sequence
agtgttgggaatacccgggga

SEQ ID NO: 280631 - DNA, 21 bp, Artificial sequence
  SiRNA target sequence
gtgttgggaatacccggggag

SEQ ID NO: 280632 - DNA, 21 bp, Artificial sequence
  SiRNA target sequence
tgttgggaatacccggggagg

SEQ ID NO: 280633 - DNA, 21 bp, Artificial sequence
  SiRNA target sequence
gttgggaatacccggggagga

SEQ ID NO: 280634 - DNA, 21 bp, Artificial sequence
  SiRNA target sequence
ttgggaatacccggggaggat

SEQ ID NO: 280635 - DNA, 21 bp, Artificial sequence
  SiRNA target sequence
tgggaatacccggggaggatt

SEQ ID NO: 280636 - DNA, 21 bp, Artificial sequence
  SiRNA target sequence
gggaatacccggggaggatta

SEQ ID NO: 280637 - DNA, 21 bp, Artificial sequence
  SiRNA target sequence
ggaatacccggggaggattat

SEQ ID NO: 280638 - DNA, 21 bp, Artificial sequence
  SiRNA target sequence
gaatacccggggaggattatg

SEQ ID NO: 280639 - DNA, 21 bp, Artificial sequence
  SiRNA target sequence
aatacccggggaggattatgt

SEQ ID NO: 280640 - DNA, 21 bp, Artificial sequence
  SiRNA target sequence
atacccggggaggattatgtc

SEQ ID NO: 280641 - DNA, 21 bp, Artificial sequence
  SiRNA target sequence
tacccggggaggattatgtca

SEQ ID NO: 280642 - DNA, 21 bp, Artificial sequence
  SiRNA target sequence
acccggggaggattatgtcaa

SEQ ID NO: 280643 - DNA, 21 bp, Artificial sequence
  SiRNA target sequence
cccggggaggattatgtcaac

SEQ ID NO: 280644 - DNA, 21 bp, Artificial sequence
  SiRNA target sequence
ccggggaggattatgtcaact

SEQ ID NO: 280645 - DNA, 21 bp, Artificial sequence
  SiRNA target sequence
cggggaggattatgtcaactc

SEQ ID NO: 280646 - DNA, 21 bp, Artificial sequence
  SiRNA target sequence
ggggaggattatgtcaactca

SEQ ID NO: 280647 - DNA, 21 bp, Artificial sequence
  SiRNA target sequence
gggaggattatgtcaactcaa

SEQ ID NO: 280648 - DNA, 21 bp, Artificial sequence
  SiRNA target sequence
ggaggattatgtcaactcaat

SEQ ID NO: 280649 - DNA, 21 bp, Artificial sequence
  SiRNA target sequence
gaggattatgtcaactcaata

SEQ ID NO: 280650 - DNA, 21 bp, Artificial sequence
  SiRNA target sequence
aggattatgtcaactcaataa

SEQ ID NO: 280651 - DNA, 21 bp, Artificial sequence
  SiRNA target sequence
ggattatgtcaactcaataaa

SEQ ID NO: 280652 - DNA, 21 bp, Artificial sequence
  SiRNA target sequence
gattatgtcaactcaataaaa

SEQ ID NO: 280653 - DNA, 21 bp, Artificial sequence
  SiRNA target sequence
attatgtcaactcaataaaac

SEQ ID NO: 280654 - DNA, 21 bp, Artificial sequence
  SiRNA target sequence
ttatgtcaactcaataaaacg

SEQ ID NO: 280655 - DNA, 21 bp, Artificial sequence
  SiRNA target sequence
tatgtcaactcaataaaacgc

SEQ ID NO: 280656 - DNA, 21 bp, Artificial sequence
  SiRNA target sequence
atgtcaactcaataaaacgcg

SEQ ID NO: 280657 - DNA, 21 bp, Artificial sequence
  SiRNA target sequence
tgtcaactcaataaaacgcga

SEQ ID NO: 280658 - DNA, 21 bp, Artificial sequence
  SiRNA target sequence
gtcaactcaataaaacgcgat

SEQ ID NO: 280659 - DNA, 21 bp, Artificial sequence
  SiRNA target sequence
tcaactcaataaaacgcgata

SEQ ID NO: 280660 - DNA, 21 bp, Artificial sequence
  SiRNA target sequence
caactcaataaaacgcgatac

SEQ ID NO: 280661 - DNA, 21 bp, Artificial sequence
  SiRNA target sequence
aactcaataaaacgcgatacc

SEQ ID NO: 280662 - DNA, 21 bp, Artificial sequence
  SiRNA target sequence
actcaataaaacgcgatacct

SEQ ID NO: 280663 - DNA, 21 bp, Artificial sequence
  SiRNA target sequence
ctcaataaaacgcgatacctc

SEQ ID NO: 280664 - DNA, 21 bp, Artificial sequence
  SiRNA target sequence
tcaataaaacgcgatacctct

SEQ ID NO: 280665 - DNA, 21 bp, Artificial sequence
  SiRNA target sequence
caataaaacgcgatacctctt

SEQ ID NO: 280666 - DNA, 21 bp, Artificial sequence
  SiRNA target sequence
aataaaacgcgatacctcttg

SEQ ID NO: 280667 - DNA, 21 bp, Artificial sequence
  SiRNA target sequence
ataaaacgcgatacctcttgc

SEQ ID NO: 280668 - DNA, 21 bp, Artificial sequence
  SiRNA target sequence
taaaacgcgatacctcttgcg

SEQ ID NO: 280669 - DNA, 21 bp, Artificial sequence
  SiRNA target sequence
aaaacgcgatacctcttgcgg

SEQ ID NO: 280670 - DNA, 21 bp, Artificial sequence
  SiRNA target sequence
aaacgcgatacctcttgcgga

SEQ ID NO: 280671 - DNA, 21 bp, Artificial sequence
  SiRNA target sequence
aacgcgatacctcttgcggat

SEQ ID NO: 280672 - DNA, 21 bp, Artificial sequence
  SiRNA target sequence
acgcgatacctcttgcggata

SEQ ID NO: 280673 - DNA, 21 bp, Artificial sequence
  SiRNA target sequence
cgcgatacctcttgcggatat

SEQ ID NO: 280674 - DNA, 21 bp, Artificial sequence
  SiRNA target sequence
gcgatacctcttgcggatatc

SEQ ID NO: 280675 - DNA, 21 bp, Artificial sequence
  SiRNA target sequence
cgatacctcttgcggatatcc

SEQ ID NO: 280676 - DNA, 21 bp, Artificial sequence
  SiRNA target sequence
gatacctcttgcggatatcct

SEQ ID NO: 280677 - DNA, 21 bp, Artificial sequence
  SiRNA target sequence
atacctcttgcggatatcctt

SEQ ID NO: 280678 - DNA, 21 bp, Artificial sequence
  SiRNA target sequence
tacctcttgcggatatccttt

SEQ ID NO: 280679 - DNA, 21 bp, Artificial sequence
  SiRNA target sequence
acctcttgcggatatcctttc

SEQ ID NO: 280680 - DNA, 21 bp, Artificial sequence
  SiRNA target sequence
cctcttgcggatatcctttcg

SEQ ID NO: 280681 - DNA, 21 bp, Artificial sequence
  SiRNA target sequence
ctcttgcggatatcctttcgt

SEQ ID NO: 280682 - DNA, 21 bp, Artificial sequence
  SiRNA target sequence
tcttgcggatatcctttcgtt

SEQ ID NO: 280683 - DNA, 21 bp, Artificial sequence
  SiRNA target sequence
cttgcggatatcctttcgtta

SEQ ID NO: 280684 - DNA, 21 bp, Artificial sequence
  SiRNA target sequence
ttgcggatatcctttcgttaa

SEQ ID NO: 280685 - DNA, 21 bp, Artificial sequence
  SiRNA target sequence
tgcggatatcctttcgttaaa

SEQ ID NO: 280686 - DNA, 21 bp, Artificial sequence
  SiRNA target sequence
gcggatatcctttcgttaaag

SEQ ID NO: 280687 - DNA, 21 bp, Artificial sequence
  SiRNA target sequence
cggatatcctttcgttaaaga

SEQ ID NO: 280688 - DNA, 21 bp, Artificial sequence
  SiRNA target sequence
ggatatcctttcgttaaagaa

SEQ ID NO: 280689 - DNA, 21 bp, Artificial sequence
  SiRNA target sequence
gatatcctttcgttaaagaag

SEQ ID NO: 280690 - DNA, 21 bp, Artificial sequence
  SiRNA target sequence
atatcctttcgttaaagaagg

SEQ ID NO: 280691 - DNA, 21 bp, Artificial sequence
  SiRNA target sequence
tatcctttcgttaaagaagga

SEQ ID NO: 280692 - DNA, 21 bp, Artificial sequence
  SiRNA target sequence
atcctttcgttaaagaaggat

SEQ ID NO: 280693 - DNA, 21 bp, Artificial sequence
  SiRNA target sequence
tcctttcgttaaagaaggatg

SEQ ID NO: 280694 - DNA, 21 bp, Artificial sequence
  SiRNA target sequence
cctttcgttaaagaaggatgg

SEQ ID NO: 280695 - DNA, 21 bp, Artificial sequence
  SiRNA target sequence
ctttcgttaaagaaggatgga

SEQ ID NO: 280696 - DNA, 21 bp, Artificial sequence
  SiRNA target sequence
tttcgttaaagaaggatggac

SEQ ID NO: 280697 - DNA, 21 bp, Artificial sequence
  SiRNA target sequence
ttcgttaaagaaggatggacg

SEQ ID NO: 280698 - DNA, 21 bp, Artificial sequence
  SiRNA target sequence
tcgttaaagaaggatggacgc

SEQ ID NO: 280699 - DNA, 21 bp, Artificial sequence
  SiRNA target sequence
cgttaaagaaggatggacgcg

SEQ ID NO: 280700 - DNA, 21 bp, Artificial sequence
  SiRNA target sequence
gttaaagaaggatggacgcga

SEQ ID NO: 280701 - DNA, 21 bp, Artificial sequence
  SiRNA target sequence
ttaaagaaggatggacgcgag

SEQ ID NO: 280702 - DNA, 21 bp, Artificial sequence
  SiRNA target sequence
taaagaaggatggacgcgagc

SEQ ID NO: 280703 - DNA, 21 bp, Artificial sequence
  SiRNA target sequence
aaagaaggatggacgcgagct

SEQ ID NO: 280704 - DNA, 21 bp, Artificial sequence
  SiRNA target sequence
aagaaggatggacgcgagcta

SEQ ID NO: 280705 - DNA, 21 bp, Artificial sequence
  SiRNA target sequence
agaaggatggacgcgagctaa

SEQ ID NO: 280706 - DNA, 21 bp, Artificial sequence
  SiRNA target sequence
gaaggatggacgcgagctaaa

SEQ ID NO: 280707 - DNA, 21 bp, Artificial sequence
  SiRNA target sequence
aaggatggacgcgagctaaaa

SEQ ID NO: 280708 - DNA, 21 bp, Artificial sequence
  SiRNA target sequence
aggatggacgcgagctaaaat

SEQ ID NO: 280709 - DNA, 21 bp, Artificial sequence
  SiRNA target sequence
ggatggacgcgagctaaaatc

SEQ ID NO: 280710 - DNA, 21 bp, Artificial sequence
  SiRNA target sequence
gatggacgcgagctaaaatct

SEQ ID NO: 280711 - DNA, 21 bp, Artificial sequence
  SiRNA target sequence
atggacgcgagctaaaatctt

SEQ ID NO: 280712 - DNA, 21 bp, Artificial sequence
  SiRNA target sequence
tggacgcgagctaaaatcttt

SEQ ID NO: 280713 - DNA, 21 bp, Artificial sequence
  SiRNA target sequence
ggacgcgagctaaaatctttg

SEQ ID NO: 280714 - DNA, 21 bp, Artificial sequence
  SiRNA target sequence
gacgcgagctaaaatctttgg

SEQ ID NO: 280715 - DNA, 21 bp, Artificial sequence
  SiRNA target sequence
acgcgagctaaaatctttggt

SEQ ID NO: 280716 - DNA, 21 bp, Artificial sequence
  SiRNA target sequence
cgcgagctaaaatctttggta

SEQ ID NO: 280717 - DNA, 21 bp, Artificial sequence
  SiRNA target sequence
gcgagctaaaatctttggtaa

SEQ ID NO: 280718 - DNA, 21 bp, Artificial sequence
  SiRNA target sequence
cgagctaaaatctttggtaat

SEQ ID NO: 280719 - DNA, 21 bp, Artificial sequence
  SiRNA target sequence
gagctaaaatctttggtaatg

SEQ ID NO: 280720 - DNA, 21 bp, Artificial sequence
  SiRNA target sequence
agctaaaatctttggtaatgg

SEQ ID NO: 280721 - DNA, 21 bp, Artificial sequence
  SiRNA target sequence
gctaaaatctttggtaatggc

SEQ ID NO: 280722 - DNA, 21 bp, Artificial sequence
  SiRNA target sequence
ctaaaatctttggtaatggcg

SEQ ID NO: 280723 - DNA, 21 bp, Artificial sequence
  SiRNA target sequence
taaaatctttggtaatggcga

SEQ ID NO: 280724 - DNA, 21 bp, Artificial sequence
  SiRNA target sequence
aaaatctttggtaatggcgat

SEQ ID NO: 280725 - DNA, 21 bp, Artificial sequence
  SiRNA target sequence
aaatctttggtaatggcgatg

SEQ ID NO: 280726 - DNA, 21 bp, Artificial sequence
  SiRNA target sequence
aatctttggtaatggcgatga

SEQ ID NO: 280727 - DNA, 21 bp, Artificial sequence
  SiRNA target sequence
atctttggtaatggcgatgag

SEQ ID NO: 280728 - DNA, 21 bp, Artificial sequence
  SiRNA target sequence
tctttggtaatggcgatgagt

SEQ ID NO: 280729 - DNA, 21 bp, Artificial sequence
  SiRNA target sequence
ctttggtaatggcgatgagta

SEQ ID NO: 280730 - DNA, 21 bp, Artificial sequence
  SiRNA target sequence
tttggtaatggcgatgagtat

SEQ ID NO: 280731 - DNA, 21 bp, Artificial sequence
  SiRNA target sequence
ttggtaatggcgatgagtatg

SEQ ID NO: 280732 - DNA, 21 bp, Artificial sequence
  SiRNA target sequence
tggtaatggcgatgagtatga

SEQ ID NO: 280733 - DNA, 21 bp, Artificial sequence
  SiRNA target sequence
ggtaatggcgatgagtatgac

SEQ ID NO: 280734 - DNA, 21 bp, Artificial sequence
  SiRNA target sequence
gtaatggcgatgagtatgaca

SEQ ID NO: 280735 - DNA, 21 bp, Artificial sequence
  SiRNA target sequence
taatggcgatgagtatgacat

SEQ ID NO: 280736 - DNA, 21 bp, Artificial sequence
  SiRNA target sequence
aatggcgatgagtatgacatg

SEQ ID NO: 280737 - DNA, 21 bp, Artificial sequence
  SiRNA target sequence
atggcgatgagtatgacatgt

SEQ ID NO: 280738 - DNA, 21 bp, Artificial sequence
  SiRNA target sequence
tggcgatgagtatgacatgtc

SEQ ID NO: 280739 - DNA, 21 bp, Artificial sequence
  SiRNA target sequence
ggcgatgagtatgacatgtcc

SEQ ID NO: 280740 - DNA, 21 bp, Artificial sequence
  SiRNA target sequence
gcgatgagtatgacatgtcca

SEQ ID NO: 280741 - DNA, 21 bp, Artificial sequence
  SiRNA target sequence
cgatgagtatgacatgtccac

SEQ ID NO: 280742 - DNA, 21 bp, Artificial sequence
  SiRNA target sequence
gatgagtatgacatgtccact

SEQ ID NO: 280743 - DNA, 21 bp, Artificial sequence
  SiRNA target sequence
atgagtatgacatgtccactt

SEQ ID NO: 280744 - DNA, 21 bp, Artificial sequence
  SiRNA target sequence
tgagtatgacatgtccacttc

SEQ ID NO: 280745 - DNA, 21 bp, Artificial sequence
  SiRNA target sequence
gagtatgacatgtccacttcg

SEQ ID NO: 280746 - DNA, 21 bp, Artificial sequence
  SiRNA target sequence
agtatgacatgtccacttcgg

SEQ ID NO: 280747 - DNA, 21 bp, Artificial sequence
  SiRNA target sequence
gtatgacatgtccacttcggg

SEQ ID NO: 280748 - DNA, 21 bp, Artificial sequence
  SiRNA target sequence
tatgacatgtccacttcgggc

SEQ ID NO: 280749 - DNA, 21 bp, Artificial sequence
  SiRNA target sequence
atgacatgtccacttcgggcg

SEQ ID NO: 280750 - DNA, 21 bp, Artificial sequence
  SiRNA target sequence
tgacatgtccacttcgggcgt

SEQ ID NO: 280751 - DNA, 21 bp, Artificial sequence
  SiRNA target sequence
gacatgtccacttcgggcgtt

SEQ ID NO: 280752 - DNA, 21 bp, Artificial sequence
  SiRNA target sequence
acatgtccacttcgggcgttc

SEQ ID NO: 280753 - DNA, 21 bp, Artificial sequence
  SiRNA target sequence
catgtccacttcgggcgttca

SEQ ID NO: 280754 - DNA, 21 bp, Artificial sequence
  SiRNA target sequence
atgtccacttcgggcgttcaa

SEQ ID NO: 280755 - DNA, 21 bp, Artificial sequence
  SiRNA target sequence
tgtccacttcgggcgttcaaa

SEQ ID NO: 280756 - DNA, 21 bp, Artificial sequence
  SiRNA target sequence
gtccacttcgggcgttcaaat

SEQ ID NO: 280757 - DNA, 21 bp, Artificial sequence
  SiRNA target sequence
tccacttcgggcgttcaaatg

SEQ ID NO: 280758 - DNA, 21 bp, Artificial sequence
  SiRNA target sequence
ccacttcgggcgttcaaatgc

SEQ ID NO: 280759 - DNA, 21 bp, Artificial sequence
  SiRNA target sequence
cacttcgggcgttcaaatgct

SEQ ID NO: 280760 - DNA, 21 bp, Artificial sequence
  SiRNA target sequence
acttcgggcgttcaaatgcta

SEQ ID NO: 280761 - DNA, 21 bp, Artificial sequence
  SiRNA target sequence
cttcgggcgttcaaatgctaa

SEQ ID NO: 280762 - DNA, 21 bp, Artificial sequence
  SiRNA target sequence
ttcgggcgttcaaatgctaag

SEQ ID NO: 280763 - DNA, 21 bp, Artificial sequence
  SiRNA target sequence
tcgggcgttcaaatgctaagg

SEQ ID NO: 280764 - DNA, 21 bp, Artificial sequence
  SiRNA target sequence
cgggcgttcaaatgctaaggg

SEQ ID NO: 280765 - DNA, 21 bp, Artificial sequence
  SiRNA target sequence
gggcgttcaaatgctaaggga

SEQ ID NO: 280766 - DNA, 21 bp, Artificial sequence
  SiRNA target sequence
ggcgttcaaatgctaagggaa

SEQ ID NO: 280767 - DNA, 21 bp, Artificial sequence
  SiRNA target sequence
gcgttcaaatgctaagggaaa

SEQ ID NO: 280768 - DNA, 21 bp, Artificial sequence
  SiRNA target sequence
cgttcaaatgctaagggaaaa

SEQ ID NO: 280769 - DNA, 21 bp, Artificial sequence
  SiRNA target sequence
gttcaaatgctaagggaaaaa

SEQ ID NO: 280770 - DNA, 21 bp, Artificial sequence
  SiRNA target sequence
ttcaaatgctaagggaaaaag

SEQ ID NO: 280771 - DNA, 21 bp, Artificial sequence
  SiRNA target sequence
tcaaatgctaagggaaaaagt

SEQ ID NO: 280772 - DNA, 21 bp, Artificial sequence
  SiRNA target sequence
caaatgctaagggaaaaagta

SEQ ID NO: 280773 - DNA, 21 bp, Artificial sequence
  SiRNA target sequence
aaatgctaagggaaaaagtac

SEQ ID NO: 280774 - DNA, 21 bp, Artificial sequence
  SiRNA target sequence
aatgctaagggaaaaagtaca

SEQ ID NO: 280775 - DNA, 21 bp, Artificial sequence
  SiRNA target sequence
atgctaagggaaaaagtacaa

SEQ ID NO: 280776 - DNA, 21 bp, Artificial sequence
  SiRNA target sequence
tgctaagggaaaaagtacaag

SEQ ID NO: 280777 - DNA, 21 bp, Artificial sequence
  SiRNA target sequence
gctaagggaaaaagtacaaga

SEQ ID NO: 280778 - DNA, 21 bp, Artificial sequence
  SiRNA target sequence
ctaagggaaaaagtacaagaa

SEQ ID NO: 280779 - DNA, 21 bp, Artificial sequence
  SiRNA target sequence
taagggaaaaagtacaagaat

SEQ ID NO: 280780 - DNA, 21 bp, Artificial sequence
  SiRNA target sequence
aagggaaaaagtacaagaatg

SEQ ID NO: 280781 - DNA, 21 bp, Artificial sequence
  SiRNA target sequence
agggaaaaagtacaagaatgc

SEQ ID NO: 280782 - DNA, 21 bp, Artificial sequence
  SiRNA target sequence
gggaaaaagtacaagaatgca

SEQ ID NO: 280783 - DNA, 21 bp, Artificial sequence
  SiRNA target sequence
ggaaaaagtacaagaatgcat

SEQ ID NO: 280784 - DNA, 21 bp, Artificial sequence
  SiRNA target sequence
gaaaaagtacaagaatgcata

SEQ ID NO: 280785 - DNA, 21 bp, Artificial sequence
  SiRNA target sequence
aaaaagtacaagaatgcatag

SEQ ID NO: 280786 - DNA, 21 bp, Artificial sequence
  SiRNA target sequence
aaaagtacaagaatgcataga

SEQ ID NO: 280787 - DNA, 21 bp, Artificial sequence
  SiRNA target sequence
aaagtacaagaatgcatagag

SEQ ID NO: 280788 - DNA, 21 bp, Artificial sequence
  SiRNA target sequence
aagtacaagaatgcatagagg

SEQ ID NO: 280789 - DNA, 21 bp, Artificial sequence
  SiRNA target sequence
agtacaagaatgcatagaggc

SEQ ID NO: 280790 - DNA, 21 bp, Artificial sequence
  SiRNA target sequence
gtacaagaatgcatagaggcg

SEQ ID NO: 280791 - DNA, 21 bp, Artificial sequence
  SiRNA target sequence
tacaagaatgcatagaggcgg

SEQ ID NO: 280792 - DNA, 21 bp, Artificial sequence
  SiRNA target sequence
acaagaatgcatagaggcggc

SEQ ID NO: 280793 - DNA, 21 bp, Artificial sequence
  SiRNA target sequence
caagaatgcatagaggcggca

SEQ ID NO: 280794 - DNA, 21 bp, Artificial sequence
  SiRNA target sequence
aagaatgcatagaggcggcaa

SEQ ID NO: 280795 - DNA, 21 bp, Artificial sequence
  SiRNA target sequence
agaatgcatagaggcggcaag

SEQ ID NO: 280796 - DNA, 21 bp, Artificial sequence
  SiRNA target sequence
gaatgcatagaggcggcaaga

SEQ ID NO: 280797 - DNA, 21 bp, Artificial sequence
  SiRNA target sequence
aatgcatagaggcggcaagac

SEQ ID NO: 280798 - DNA, 21 bp, Artificial sequence
  SiRNA target sequence
atgcatagaggcggcaagaca

SEQ ID NO: 280799 - DNA, 21 bp, Artificial sequence
  SiRNA target sequence
tgcatagaggcggcaagacag

SEQ ID NO: 280800 - DNA, 21 bp, Artificial sequence
  SiRNA target sequence
gcatagaggcggcaagacagg

SEQ ID NO: 280801 - DNA, 21 bp, Artificial sequence
  SiRNA target sequence
catagaggcggcaagacaggg

SEQ ID NO: 280802 - DNA, 21 bp, Artificial sequence
  SiRNA target sequence
atagaggcggcaagacagggg

SEQ ID NO: 280803 - DNA, 21 bp, Artificial sequence
  SiRNA target sequence
tagaggcggcaagacagggga

SEQ ID NO: 280804 - DNA, 21 bp, Artificial sequence
  SiRNA target sequence
agaggcggcaagacaggggaa

SEQ ID NO: 280805 - DNA, 21 bp, Artificial sequence
  SiRNA target sequence
gaggcggcaagacaggggaag

SEQ ID NO: 280806 - DNA, 21 bp, Artificial sequence
  SiRNA target sequence
aggcggcaagacaggggaaga

SEQ ID NO: 280807 - DNA, 21 bp, Artificial sequence
  SiRNA target sequence
ggcggcaagacaggggaagat

SEQ ID NO: 280808 - DNA, 21 bp, Artificial sequence
  SiRNA target sequence
gcggcaagacaggggaagata

SEQ ID NO: 280809 - DNA, 21 bp, Artificial sequence
  SiRNA target sequence
cggcaagacaggggaagatat

SEQ ID NO: 280810 - DNA, 21 bp, Artificial sequence
  SiRNA target sequence
ggcaagacaggggaagatatt

SEQ ID NO: 280811 - DNA, 21 bp, Artificial sequence
  SiRNA target sequence
gcaagacaggggaagatattg

SEQ ID NO: 280812 - DNA, 21 bp, Artificial sequence
  SiRNA target sequence
caagacaggggaagatattgg

SEQ ID NO: 280813 - DNA, 21 bp, Artificial sequence
  SiRNA target sequence
aagacaggggaagatattgga

SEQ ID NO: 280814 - DNA, 21 bp, Artificial sequence
  SiRNA target sequence
agacaggggaagatattggac

SEQ ID NO: 280815 - DNA, 21 bp, Artificial sequence
  SiRNA target sequence
gacaggggaagatattggacc

SEQ ID NO: 280816 - DNA, 21 bp, Artificial sequence
  SiRNA target sequence
acaggggaagatattggacca

SEQ ID NO: 280817 - DNA, 21 bp, Artificial sequence
  SiRNA target sequence
caggggaagatattggaccat

SEQ ID NO: 280818 - DNA, 21 bp, Artificial sequence
  SiRNA target sequence
aggggaagatattggaccatt

SEQ ID NO: 280819 - DNA, 21 bp, Artificial sequence
  SiRNA target sequence
ggggaagatattggaccatta

SEQ ID NO: 280820 - DNA, 21 bp, Artificial sequence
  SiRNA target sequence
gggaagatattggaccattat

SEQ ID NO: 280821 - DNA, 21 bp, Artificial sequence
  SiRNA target sequence
ggaagatattggaccattatt

SEQ ID NO: 280822 - DNA, 21 bp, Artificial sequence
  SiRNA target sequence
gaagatattggaccattattt

SEQ ID NO: 280823 - DNA, 21 bp, Artificial sequence
  SiRNA target sequence
aagatattggaccattatttc

SEQ ID NO: 280824 - DNA, 21 bp, Artificial sequence
  SiRNA target sequence
agatattggaccattatttca

SEQ ID NO: 280825 - DNA, 21 bp, Artificial sequence
  SiRNA target sequence
gatattggaccattatttcat

SEQ ID NO: 280826 - DNA, 21 bp, Artificial sequence
  SiRNA target sequence
atattggaccattatttcatt

SEQ ID NO: 280827 - DNA, 21 bp, Artificial sequence
  SiRNA target sequence
tattggaccattatttcattg

SEQ ID NO: 280828 - DNA, 21 bp, Artificial sequence
  SiRNA target sequence
attggaccattatttcattga

SEQ ID NO: 280829 - DNA, 21 bp, Artificial sequence
  SiRNA target sequence
ttggaccattatttcattgat

SEQ ID NO: 280830 - DNA, 21 bp, Artificial sequence
  SiRNA target sequence
tggaccattatttcattgata

SEQ ID NO: 280831 - DNA, 21 bp, Artificial sequence
  SiRNA target sequence
ggaccattatttcattgatac

SEQ ID NO: 280832 - DNA, 21 bp, Artificial sequence
  SiRNA target sequence
gaccattatttcattgataca

SEQ ID NO: 280833 - DNA, 21 bp, Artificial sequence
  SiRNA target sequence
accattatttcattgatacat

SEQ ID NO: 280834 - DNA, 21 bp, Artificial sequence
  SiRNA target sequence
ccattatttcattgatacatt

SEQ ID NO: 280835 - DNA, 21 bp, Artificial sequence
  SiRNA target sequence
cattatttcattgatacatta

SEQ ID NO: 280836 - DNA, 21 bp, Artificial sequence
  SiRNA target sequence
attatttcattgatacattaa

SEQ ID NO: 280837 - DNA, 21 bp, Artificial sequence
  SiRNA target sequence
ttatttcattgatacattaaa

SEQ ID NO: 280838 - DNA, 21 bp, Artificial sequence
  SiRNA target sequence
tatttcattgatacattaaaa

SEQ ID NO: 280839 - DNA, 21 bp, Artificial sequence
  SiRNA target sequence
atttcattgatacattaaaag

SEQ ID NO: 280840 - DNA, 21 bp, Artificial sequence
  SiRNA target sequence
tttcattgatacattaaaaga

SEQ ID NO: 280841 - DNA, 21 bp, Artificial sequence
  SiRNA target sequence
ttcattgatacattaaaagat

SEQ ID NO: 280842 - DNA, 21 bp, Artificial sequence
  SiRNA target sequence
tcattgatacattaaaagatg

SEQ ID NO: 280843 - DNA, 21 bp, Artificial sequence
  SiRNA target sequence
cattgatacattaaaagatga

SEQ ID NO: 280844 - DNA, 21 bp, Artificial sequence
  SiRNA target sequence
attgatacattaaaagatgaa

SEQ ID NO: 280845 - DNA, 21 bp, Artificial sequence
  SiRNA target sequence
ttgatacattaaaagatgaaa

SEQ ID NO: 280846 - DNA, 21 bp, Artificial sequence
  SiRNA target sequence
tgatacattaaaagatgaaag

SEQ ID NO: 280847 - DNA, 21 bp, Artificial sequence
  SiRNA target sequence
gatacattaaaagatgaaagg

SEQ ID NO: 280848 - DNA, 21 bp, Artificial sequence
  SiRNA target sequence
atacattaaaagatgaaagga

SEQ ID NO: 280849 - DNA, 21 bp, Artificial sequence
  SiRNA target sequence
tacattaaaagatgaaaggaa

SEQ ID NO: 280850 - DNA, 21 bp, Artificial sequence
  SiRNA target sequence
acattaaaagatgaaaggaag

SEQ ID NO: 280851 - DNA, 21 bp, Artificial sequence
  SiRNA target sequence
cattaaaagatgaaaggaagc

SEQ ID NO: 280852 - DNA, 21 bp, Artificial sequence
  SiRNA target sequence
attaaaagatgaaaggaagcc

SEQ ID NO: 280853 - DNA, 21 bp, Artificial sequence
  SiRNA target sequence
ttaaaagatgaaaggaagcct

SEQ ID NO: 280854 - DNA, 21 bp, Artificial sequence
  SiRNA target sequence
taaaagatgaaaggaagccta

SEQ ID NO: 280855 - DNA, 21 bp, Artificial sequence
  SiRNA target sequence
aaaagatgaaaggaagcctaa

SEQ ID NO: 280856 - DNA, 21 bp, Artificial sequence
  SiRNA target sequence
aaagatgaaaggaagcctaaa

SEQ ID NO: 280857 - DNA, 21 bp, Artificial sequence
  SiRNA target sequence
aagatgaaaggaagcctaaac

SEQ ID NO: 280858 - DNA, 21 bp, Artificial sequence
  SiRNA target sequence
agatgaaaggaagcctaaaca

SEQ ID NO: 280859 - DNA, 21 bp, Artificial sequence
  SiRNA target sequence
gatgaaaggaagcctaaacat

SEQ ID NO: 280860 - DNA, 21 bp, Artificial sequence
  SiRNA target sequence
atgaaaggaagcctaaacata

SEQ ID NO: 280861 - DNA, 21 bp, Artificial sequence
  SiRNA target sequence
tgaaaggaagcctaaacataa

SEQ ID NO: 280862 - DNA, 21 bp, Artificial sequence
  SiRNA target sequence
gaaaggaagcctaaacataag

SEQ ID NO: 280863 - DNA, 21 bp, Artificial sequence
  SiRNA target sequence
aaaggaagcctaaacataagg

SEQ ID NO: 280864 - DNA, 21 bp, Artificial sequence
  SiRNA target sequence
aaggaagcctaaacataaggc

SEQ ID NO: 280865 - DNA, 21 bp, Artificial sequence
  SiRNA target sequence
aggaagcctaaacataaggct

SEQ ID NO: 280866 - DNA, 21 bp, Artificial sequence
  SiRNA target sequence
ggaagcctaaacataaggctc

SEQ ID NO: 280867 - DNA, 21 bp, Artificial sequence
  SiRNA target sequence
gaagcctaaacataaggctca

SEQ ID NO: 280868 - DNA, 21 bp, Artificial sequence
  SiRNA target sequence
aagcctaaacataaggctcat

SEQ ID NO: 280869 - DNA, 21 bp, Artificial sequence
  SiRNA target sequence
agcctaaacataaggctcata

SEQ ID NO: 280870 - DNA, 21 bp, Artificial sequence
  SiRNA target sequence
gcctaaacataaggctcataa

SEQ ID NO: 280871 - DNA, 21 bp, Artificial sequence
  SiRNA target sequence
cctaaacataaggctcataag

SEQ ID NO: 280872 - DNA, 21 bp, Artificial sequence
  SiRNA target sequence
ctaaacataaggctcataagt

SEQ ID NO: 280873 - DNA, 21 bp, Artificial sequence
  SiRNA target sequence
taaacataaggctcataagtc

SEQ ID NO: 280874 - DNA, 21 bp, Artificial sequence
  SiRNA target sequence
aaacataaggctcataagtct

SEQ ID NO: 280875 - DNA, 21 bp, Artificial sequence
  SiRNA target sequence
aacataaggctcataagtctc

SEQ ID NO: 280876 - DNA, 21 bp, Artificial sequence
  SiRNA target sequence
acataaggctcataagtctcg

SEQ ID NO: 280877 - DNA, 21 bp, Artificial sequence
  SiRNA target sequence
cataaggctcataagtctcga

SEQ ID NO: 280878 - DNA, 21 bp, Artificial sequence
  SiRNA target sequence
ataaggctcataagtctcgaa

SEQ ID NO: 280879 - DNA, 21 bp, Artificial sequence
  SiRNA target sequence
taaggctcataagtctcgaat

SEQ ID NO: 280880 - DNA, 21 bp, Artificial sequence
  SiRNA target sequence
aaggctcataagtctcgaatg

SEQ ID NO: 280881 - DNA, 21 bp, Artificial sequence
  SiRNA target sequence
aggctcataagtctcgaatgt

SEQ ID NO: 280882 - DNA, 21 bp, Artificial sequence
  SiRNA target sequence
ggctcataagtctcgaatgtt

SEQ ID NO: 280883 - DNA, 21 bp, Artificial sequence
  SiRNA target sequence
gctcataagtctcgaatgttt

SEQ ID NO: 280884 - DNA, 21 bp, Artificial sequence
  SiRNA target sequence
ctcataagtctcgaatgtttt

SEQ ID NO: 280885 - DNA, 21 bp, Artificial sequence
  SiRNA target sequence
tcataagtctcgaatgttttc

SEQ ID NO: 280886 - DNA, 21 bp, Artificial sequence
  SiRNA target sequence
cataagtctcgaatgttttct

SEQ ID NO: 280887 - DNA, 21 bp, Artificial sequence
  SiRNA target sequence
ataagtctcgaatgttttcta

SEQ ID NO: 280888 - DNA, 21 bp, Artificial sequence
  SiRNA target sequence
taagtctcgaatgttttctaa

SEQ ID NO: 280889 - DNA, 21 bp, Artificial sequence
  SiRNA target sequence
aagtctcgaatgttttctaat

SEQ ID NO: 280890 - DNA, 21 bp, Artificial sequence
  SiRNA target sequence
agtctcgaatgttttctaatg

SEQ ID NO: 280891 - DNA, 21 bp, Artificial sequence
  SiRNA target sequence
gtctcgaatgttttctaatgg

SEQ ID NO: 280892 - DNA, 21 bp, Artificial sequence
  SiRNA target sequence
tctcgaatgttttctaatgga

SEQ ID NO: 280893 - DNA, 21 bp, Artificial sequence
  SiRNA target sequence
ctcgaatgttttctaatggac

SEQ ID NO: 280894 - DNA, 21 bp, Artificial sequence
  SiRNA target sequence
tcgaatgttttctaatggacc

SEQ ID NO: 280895 - DNA, 21 bp, Artificial sequence
  SiRNA target sequence
cgaatgttttctaatggaccg

SEQ ID NO: 280896 - DNA, 21 bp, Artificial sequence
  SiRNA target sequence
gaatgttttctaatggaccga

SEQ ID NO: 280897 - DNA, 21 bp, Artificial sequence
  SiRNA target sequence
aatgttttctaatggaccgat

SEQ ID NO: 280898 - DNA, 21 bp, Artificial sequence
  SiRNA target sequence
atgttttctaatggaccgata

SEQ ID NO: 280899 - DNA, 21 bp, Artificial sequence
  SiRNA target sequence
tgttttctaatggaccgatag

SEQ ID NO: 280900 - DNA, 21 bp, Artificial sequence
  SiRNA target sequence
gttttctaatggaccgataga

SEQ ID NO: 280901 - DNA, 21 bp, Artificial sequence
  SiRNA target sequence
ttttctaatggaccgatagat

SEQ ID NO: 280902 - DNA, 21 bp, Artificial sequence
  SiRNA target sequence
tttctaatggaccgatagatt

SEQ ID NO: 280903 - DNA, 21 bp, Artificial sequence
  SiRNA target sequence
ttctaatggaccgatagatta

SEQ ID NO: 280904 - DNA, 21 bp, Artificial sequence
  SiRNA target sequence
tctaatggaccgatagattac

SEQ ID NO: 280905 - DNA, 21 bp, Artificial sequence
  SiRNA target sequence
ctaatggaccgatagattacc

SEQ ID NO: 280906 - DNA, 21 bp, Artificial sequence
  SiRNA target sequence
taatggaccgatagattacct

SEQ ID NO: 280907 - DNA, 21 bp, Artificial sequence
  SiRNA target sequence
aatggaccgatagattacctt

SEQ ID NO: 280908 - DNA, 21 bp, Artificial sequence
  SiRNA target sequence
atggaccgatagattaccttg

SEQ ID NO: 280909 - DNA, 21 bp, Artificial sequence
  SiRNA target sequence
tggaccgatagattaccttgt

SEQ ID NO: 280910 - DNA, 21 bp, Artificial sequence
  SiRNA target sequence
ggaccgatagattaccttgtc

SEQ ID NO: 280911 - DNA, 21 bp, Artificial sequence
  SiRNA target sequence
gaccgatagattaccttgtct

SEQ ID NO: 280912 - DNA, 21 bp, Artificial sequence
  SiRNA target sequence
accgatagattaccttgtctg

SEQ ID NO: 280913 - DNA, 21 bp, Artificial sequence
  SiRNA target sequence
ccgatagattaccttgtctgg

SEQ ID NO: 280914 - DNA, 21 bp, Artificial sequence
  SiRNA target sequence
cgatagattaccttgtctgga

SEQ ID NO: 280915 - DNA, 21 bp, Artificial sequence
  SiRNA target sequence
gatagattaccttgtctggag

SEQ ID NO: 280916 - DNA, 21 bp, Artificial sequence
  SiRNA target sequence
atagattaccttgtctggagc

SEQ ID NO: 280917 - DNA, 21 bp, Artificial sequence
  SiRNA target sequence
tagattaccttgtctggagca

SEQ ID NO: 280918 - DNA, 21 bp, Artificial sequence
  SiRNA target sequence
agattaccttgtctggagcaa

SEQ ID NO: 280919 - DNA, 21 bp, Artificial sequence
  SiRNA target sequence
gattaccttgtctggagcaag

SEQ ID NO: 280920 - DNA, 21 bp, Artificial sequence
  SiRNA target sequence
attaccttgtctggagcaaga

SEQ ID NO: 280921 - DNA, 21 bp, Artificial sequence
  SiRNA target sequence
ttaccttgtctggagcaagat

SEQ ID NO: 280922 - DNA, 21 bp, Artificial sequence
  SiRNA target sequence
taccttgtctggagcaagatg

SEQ ID NO: 280923 - DNA, 21 bp, Artificial sequence
  SiRNA target sequence
accttgtctggagcaagatgt

SEQ ID NO: 280924 - DNA, 21 bp, Artificial sequence
  SiRNA target sequence
ccttgtctggagcaagatgta

SEQ ID NO: 280925 - DNA, 21 bp, Artificial sequence
  SiRNA target sequence
cttgtctggagcaagatgtat

SEQ ID NO: 280926 - DNA, 21 bp, Artificial sequence
  SiRNA target sequence
ttgtctggagcaagatgtatt

SEQ ID NO: 280927 - DNA, 21 bp, Artificial sequence
  SiRNA target sequence
tgtctggagcaagatgtattt

SEQ ID NO: 280928 - DNA, 21 bp, Artificial sequence
  SiRNA target sequence
gtctggagcaagatgtatttt

SEQ ID NO: 280929 - DNA, 21 bp, Artificial sequence
  SiRNA target sequence
tctggagcaagatgtatttta

SEQ ID NO: 280930 - DNA, 21 bp, Artificial sequence
  SiRNA target sequence
ctggagcaagatgtattttaa

SEQ ID NO: 280931 - DNA, 21 bp, Artificial sequence
  SiRNA target sequence
tggagcaagatgtattttaat

SEQ ID NO: 280932 - DNA, 21 bp, Artificial sequence
  SiRNA target sequence
ggagcaagatgtattttaatc

SEQ ID NO: 280933 - DNA, 21 bp, Artificial sequence
  SiRNA target sequence
gagcaagatgtattttaatcc

SEQ ID NO: 280934 - DNA, 21 bp, Artificial sequence
  SiRNA target sequence
agcaagatgtattttaatcca

SEQ ID NO: 280935 - DNA, 21 bp, Artificial sequence
  SiRNA target sequence
gcaagatgtattttaatccaa

SEQ ID NO: 280936 - DNA, 21 bp, Artificial sequence
  SiRNA target sequence
caagatgtattttaatccaat

SEQ ID NO: 280937 - DNA, 21 bp, Artificial sequence
  SiRNA target sequence
aagatgtattttaatccaata

SEQ ID NO: 280938 - DNA, 21 bp, Artificial sequence
  SiRNA target sequence
agatgtattttaatccaatag

SEQ ID NO: 280939 - DNA, 21 bp, Artificial sequence
  SiRNA target sequence
gatgtattttaatccaatagt

SEQ ID NO: 280940 - DNA, 21 bp, Artificial sequence
  SiRNA target sequence
atgtattttaatccaatagta

SEQ ID NO: 280941 - DNA, 21 bp, Artificial sequence
  SiRNA target sequence
tgtattttaatccaatagtag

SEQ ID NO: 280942 - DNA, 21 bp, Artificial sequence
  SiRNA target sequence
gtattttaatccaatagtagc

SEQ ID NO: 280943 - DNA, 21 bp, Artificial sequence
  SiRNA target sequence
tattttaatccaatagtagcg

SEQ ID NO: 280944 - DNA, 21 bp, Artificial sequence
  SiRNA target sequence
attttaatccaatagtagcgg

SEQ ID NO: 280945 - DNA, 21 bp, Artificial sequence
  SiRNA target sequence
ttttaatccaatagtagcggt

SEQ ID NO: 280946 - DNA, 21 bp, Artificial sequence
  SiRNA target sequence
tttaatccaatagtagcggtg

SEQ ID NO: 280947 - DNA, 21 bp, Artificial sequence
  SiRNA target sequence
ttaatccaatagtagcggtgt

SEQ ID NO: 280948 - DNA, 21 bp, Artificial sequence
  SiRNA target sequence
taatccaatagtagcggtgtt

SEQ ID NO: 280949 - DNA, 21 bp, Artificial sequence
  SiRNA target sequence
aatccaatagtagcggtgtta

SEQ ID NO: 280950 - DNA, 21 bp, Artificial sequence
  SiRNA target sequence
atccaatagtagcggtgttat

SEQ ID NO: 280951 - DNA, 21 bp, Artificial sequence
  SiRNA target sequence
tccaatagtagcggtgttatc

SEQ ID NO: 280952 - DNA, 21 bp, Artificial sequence
  SiRNA target sequence
ccaatagtagcggtgttatct

SEQ ID NO: 280953 - DNA, 21 bp, Artificial sequence
  SiRNA target sequence
caatagtagcggtgttatctg

SEQ ID NO: 280954 - DNA, 21 bp, Artificial sequence
  SiRNA target sequence
aatagtagcggtgttatctga

SEQ ID NO: 280955 - DNA, 21 bp, Artificial sequence
  SiRNA target sequence
atagtagcggtgttatctgag

SEQ ID NO: 280956 - DNA, 21 bp, Artificial sequence
  SiRNA target sequence
tagtagcggtgttatctgagc

SEQ ID NO: 280957 - DNA, 21 bp, Artificial sequence
  SiRNA target sequence
agtagcggtgttatctgagct

SEQ ID NO: 280958 - DNA, 21 bp, Artificial sequence
  SiRNA target sequence
gtagcggtgttatctgagctc

SEQ ID NO: 280959 - DNA, 21 bp, Artificial sequence
  SiRNA target sequence
tagcggtgttatctgagctca

SEQ ID NO: 280960 - DNA, 21 bp, Artificial sequence
  SiRNA target sequence
agcggtgttatctgagctcaa

SEQ ID NO: 280961 - DNA, 21 bp, Artificial sequence
  SiRNA target sequence
gcggtgttatctgagctcaaa

SEQ ID NO: 280962 - DNA, 21 bp, Artificial sequence
  SiRNA target sequence
cggtgttatctgagctcaaaa

SEQ ID NO: 280963 - DNA, 21 bp, Artificial sequence
  SiRNA target sequence
ggtgttatctgagctcaaaaa

SEQ ID NO: 280964 - DNA, 21 bp, Artificial sequence
  SiRNA target sequence
gtgttatctgagctcaaaaat

SEQ ID NO: 280965 - DNA, 21 bp, Artificial sequence
  SiRNA target sequence
tgttatctgagctcaaaaatg

SEQ ID NO: 280966 - DNA, 21 bp, Artificial sequence
  SiRNA target sequence
gttatctgagctcaaaaatgt

SEQ ID NO: 280967 - DNA, 21 bp, Artificial sequence
  SiRNA target sequence
ttatctgagctcaaaaatgtg

SEQ ID NO: 280968 - DNA, 21 bp, Artificial sequence
  SiRNA target sequence
tatctgagctcaaaaatgtgg

SEQ ID NO: 280969 - DNA, 21 bp, Artificial sequence
  SiRNA target sequence
atctgagctcaaaaatgtgga

SEQ ID NO: 280970 - DNA, 21 bp, Artificial sequence
  SiRNA target sequence
tctgagctcaaaaatgtggat

SEQ ID NO: 280971 - DNA, 21 bp, Artificial sequence
  SiRNA target sequence
ctgagctcaaaaatgtggatc

SEQ ID NO: 280972 - DNA, 21 bp, Artificial sequence
  SiRNA target sequence
tgagctcaaaaatgtggatca

SEQ ID NO: 280973 - DNA, 21 bp, Artificial sequence
  SiRNA target sequence
gagctcaaaaatgtggatcat

SEQ ID NO: 280974 - DNA, 21 bp, Artificial sequence
  SiRNA target sequence
agctcaaaaatgtggatcata

SEQ ID NO: 280975 - DNA, 21 bp, Artificial sequence
  SiRNA target sequence
gctcaaaaatgtggatcatat

SEQ ID NO: 280976 - DNA, 21 bp, Artificial sequence
  SiRNA target sequence
ctcaaaaatgtggatcatatt

SEQ ID NO: 280977 - DNA, 21 bp, Artificial sequence
  SiRNA target sequence
tcaaaaatgtggatcatattt

SEQ ID NO: 280978 - DNA, 21 bp, Artificial sequence
  SiRNA target sequence
caaaaatgtggatcatatttc

SEQ ID NO: 280979 - DNA, 21 bp, Artificial sequence
  SiRNA target sequence
aaaaatgtggatcatatttcc

SEQ ID NO: 280980 - DNA, 21 bp, Artificial sequence
  SiRNA target sequence
aaaatgtggatcatatttccg

SEQ ID NO: 280981 - DNA, 21 bp, Artificial sequence
  SiRNA target sequence
aaatgtggatcatatttccgt

SEQ ID NO: 280982 - DNA, 21 bp, Artificial sequence
  SiRNA target sequence
aatgtggatcatatttccgta

SEQ ID NO: 280983 - DNA, 21 bp, Artificial sequence
  SiRNA target sequence
atgtggatcatatttccgtag

SEQ ID NO: 280984 - DNA, 21 bp, Artificial sequence
  SiRNA target sequence
tgtggatcatatttccgtagg

SEQ ID NO: 280985 - DNA, 21 bp, Artificial sequence
  SiRNA target sequence
gtggatcatatttccgtaggg

SEQ ID NO: 280986 - DNA, 21 bp, Artificial sequence
  SiRNA target sequence
tggatcatatttccgtagggt

SEQ ID NO: 280987 - DNA, 21 bp, Artificial sequence
  SiRNA target sequence
ggatcatatttccgtagggtc

SEQ ID NO: 280988 - DNA, 21 bp, Artificial sequence
  SiRNA target sequence
gatcatatttccgtagggtcc

SEQ ID NO: 280989 - DNA, 21 bp, Artificial sequence
  SiRNA target sequence
atcatatttccgtagggtcca

SEQ ID NO: 280990 - DNA, 21 bp, Artificial sequence
  SiRNA target sequence
tcatatttccgtagggtccaa

SEQ ID NO: 280991 - DNA, 21 bp, Artificial sequence
  SiRNA target sequence
catatttccgtagggtccaat

SEQ ID NO: 280992 - DNA, 21 bp, Artificial sequence
  SiRNA target sequence
atatttccgtagggtccaatg

SEQ ID NO: 280993 - DNA, 21 bp, Artificial sequence
  SiRNA target sequence
tatttccgtagggtccaatgt

SEQ ID NO: 280994 - DNA, 21 bp, Artificial sequence
  SiRNA target sequence
atttccgtagggtccaatgtg

SEQ ID NO: 280995 - DNA, 21 bp, Artificial sequence
  SiRNA target sequence
tttccgtagggtccaatgtgt

SEQ ID NO: 280996 - DNA, 21 bp, Artificial sequence
  SiRNA target sequence
ttccgtagggtccaatgtgta

SEQ ID NO: 280997 - DNA, 21 bp, Artificial sequence
  SiRNA target sequence
tccgtagggtccaatgtgtat

SEQ ID NO: 280998 - DNA, 21 bp, Artificial sequence
  SiRNA target sequence
ccgtagggtccaatgtgtatt

SEQ ID NO: 280999 - DNA, 21 bp, Artificial sequence
  SiRNA target sequence
cgtagggtccaatgtgtattc

SEQ ID NO: 281000 - DNA, 21 bp, Artificial sequence
  SiRNA target sequence
gtagggtccaatgtgtattct

SEQ ID NO: 281001 - DNA, 21 bp, Artificial sequence
  SiRNA target sequence
tagggtccaatgtgtattcta

SEQ ID NO: 281002 - DNA, 21 bp, Artificial sequence
  SiRNA target sequence
agggtccaatgtgtattctac

SEQ ID NO: 281003 - DNA, 21 bp, Artificial sequence
  SiRNA target sequence
gggtccaatgtgtattctacg

SEQ ID NO: 281004 - DNA, 21 bp, Artificial sequence
  SiRNA target sequence
ggtccaatgtgtattctacgg

SEQ ID NO: 281005 - DNA, 21 bp, Artificial sequence
  SiRNA target sequence
gtccaatgtgtattctacgga

SEQ ID NO: 281006 - DNA, 21 bp, Artificial sequence
  SiRNA target sequence
tccaatgtgtattctacggac

SEQ ID NO: 281007 - DNA, 21 bp, Artificial sequence
  SiRNA target sequence
ccaatgtgtattctacggact

SEQ ID NO: 281008 - DNA, 21 bp, Artificial sequence
  SiRNA target sequence
caatgtgtattctacggactg

SEQ ID NO: 281009 - DNA, 21 bp, Artificial sequence
  SiRNA target sequence
aatgtgtattctacggactgg

SEQ ID NO: 281010 - DNA, 21 bp, Artificial sequence
  SiRNA target sequence
atgtgtattctacggactggg

SEQ ID NO: 281011 - DNA, 21 bp, Artificial sequence
  SiRNA target sequence
tgtgtattctacggactggga

SEQ ID NO: 281012 - DNA, 21 bp, Artificial sequence
  SiRNA target sequence
gtgtattctacggactgggat

SEQ ID NO: 281013 - DNA, 21 bp, Artificial sequence
  SiRNA target sequence
tgtattctacggactgggatg

SEQ ID NO: 281014 - DNA, 21 bp, Artificial sequence
  SiRNA target sequence
gtattctacggactgggatgt

SEQ ID NO: 281015 - DNA, 21 bp, Artificial sequence
  SiRNA target sequence
tattctacggactgggatgtt

SEQ ID NO: 281016 - DNA, 21 bp, Artificial sequence
  SiRNA target sequence
attctacggactgggatgtta

SEQ ID NO: 281017 - DNA, 21 bp, Artificial sequence
  SiRNA target sequence
ttctacggactgggatgttat

SEQ ID NO: 281018 - DNA, 21 bp, Artificial sequence
  SiRNA target sequence
tctacggactgggatgttatc

SEQ ID NO: 281019 - DNA, 21 bp, Artificial sequence
  SiRNA target sequence
ctacggactgggatgttatcg

SEQ ID NO: 281020 - DNA, 21 bp, Artificial sequence
  SiRNA target sequence
tacggactgggatgttatcgc

SEQ ID NO: 281021 - DNA, 21 bp, Artificial sequence
  SiRNA target sequence
acggactgggatgttatcgca

SEQ ID NO: 281022 - DNA, 21 bp, Artificial sequence
  SiRNA target sequence
cggactgggatgttatcgcaa

SEQ ID NO: 281023 - DNA, 21 bp, Artificial sequence
  SiRNA target sequence
ggactgggatgttatcgcaag

SEQ ID NO: 281024 - DNA, 21 bp, Artificial sequence
  SiRNA target sequence
gactgggatgttatcgcaaga

SEQ ID NO: 281025 - DNA, 21 bp, Artificial sequence
  SiRNA target sequence
actgggatgttatcgcaagat

SEQ ID NO: 281026 - DNA, 21 bp, Artificial sequence
  SiRNA target sequence
ctgggatgttatcgcaagata

SEQ ID NO: 281027 - DNA, 21 bp, Artificial sequence
  SiRNA target sequence
tgggatgttatcgcaagatac

SEQ ID NO: 281028 - DNA, 21 bp, Artificial sequence
  SiRNA target sequence
gggatgttatcgcaagatact

SEQ ID NO: 281029 - DNA, 21 bp, Artificial sequence
  SiRNA target sequence
ggatgttatcgcaagatactt

SEQ ID NO: 281030 - DNA, 21 bp, Artificial sequence
  SiRNA target sequence
gatgttatcgcaagatacttg

SEQ ID NO: 281031 - DNA, 21 bp, Artificial sequence
  SiRNA target sequence
atgttatcgcaagatacttga

SEQ ID NO: 281032 - DNA, 21 bp, Artificial sequence
  SiRNA target sequence
tgttatcgcaagatacttgaa

SEQ ID NO: 281033 - DNA, 21 bp, Artificial sequence
  SiRNA target sequence
gttatcgcaagatacttgaag

SEQ ID NO: 281034 - DNA, 21 bp, Artificial sequence
  SiRNA target sequence
ttatcgcaagatacttgaagt

SEQ ID NO: 281035 - DNA, 21 bp, Artificial sequence
  SiRNA target sequence
tatcgcaagatacttgaagtc

SEQ ID NO: 281036 - DNA, 21 bp, Artificial sequence
  SiRNA target sequence
atcgcaagatacttgaagtca

SEQ ID NO: 281037 - DNA, 21 bp, Artificial sequence
  SiRNA target sequence
tcgcaagatacttgaagtcaa

SEQ ID NO: 281038 - DNA, 21 bp, Artificial sequence
  SiRNA target sequence
cgcaagatacttgaagtcaaa

SEQ ID NO: 281039 - DNA, 21 bp, Artificial sequence
  SiRNA target sequence
gcaagatacttgaagtcaaaa

SEQ ID NO: 281040 - DNA, 21 bp, Artificial sequence
  SiRNA target sequence
caagatacttgaagtcaaaat

SEQ ID NO: 281041 - DNA, 21 bp, Artificial sequence
  SiRNA target sequence
aagatacttgaagtcaaaatc

SEQ ID NO: 281042 - DNA, 21 bp, Artificial sequence
  SiRNA target sequence
agatacttgaagtcaaaatct

SEQ ID NO: 281043 - DNA, 21 bp, Artificial sequence
  SiRNA target sequence
gatacttgaagtcaaaatctc

SEQ ID NO: 281044 - DNA, 21 bp, Artificial sequence
  SiRNA target sequence
atacttgaagtcaaaatctca

SEQ ID NO: 281045 - DNA, 21 bp, Artificial sequence
  SiRNA target sequence
tacttgaagtcaaaatctcac

SEQ ID NO: 281046 - DNA, 21 bp, Artificial sequence
  SiRNA target sequence
acttgaagtcaaaatctcacc

SEQ ID NO: 281047 - DNA, 21 bp, Artificial sequence
  SiRNA target sequence
cttgaagtcaaaatctcacca

SEQ ID NO: 281048 - DNA, 21 bp, Artificial sequence
  SiRNA target sequence
ttgaagtcaaaatctcaccat

SEQ ID NO: 281049 - DNA, 21 bp, Artificial sequence
  SiRNA target sequence
tgaagtcaaaatctcaccata

SEQ ID NO: 281050 - DNA, 21 bp, Artificial sequence
  SiRNA target sequence
gaagtcaaaatctcaccatat

SEQ ID NO: 281051 - DNA, 21 bp, Artificial sequence
  SiRNA target sequence
aagtcaaaatctcaccatatg

SEQ ID NO: 281052 - DNA, 21 bp, Artificial sequence
  SiRNA target sequence
agtcaaaatctcaccatatgg

SEQ ID NO: 281053 - DNA, 21 bp, Artificial sequence
  SiRNA target sequence
gtcaaaatctcaccatatggt

SEQ ID NO: 281054 - DNA, 21 bp, Artificial sequence
  SiRNA target sequence
tcaaaatctcaccatatggtg

SEQ ID NO: 281055 - DNA, 21 bp, Artificial sequence
  SiRNA target sequence
caaaatctcaccatatggtgg

SEQ ID NO: 281056 - DNA, 21 bp, Artificial sequence
  SiRNA target sequence
aaaatctcaccatatggtggc

SEQ ID NO: 281057 - DNA, 21 bp, Artificial sequence
  SiRNA target sequence
aaatctcaccatatggtggca

SEQ ID NO: 281058 - DNA, 21 bp, Artificial sequence
  SiRNA target sequence
aatctcaccatatggtggcag

SEQ ID NO: 281059 - DNA, 21 bp, Artificial sequence
  SiRNA target sequence
atctcaccatatggtggcagg

SEQ ID NO: 281060 - DNA, 21 bp, Artificial sequence
  SiRNA target sequence
tctcaccatatggtggcagga

SEQ ID NO: 281061 - DNA, 21 bp, Artificial sequence
  SiRNA target sequence
ctcaccatatggtggcaggag

SEQ ID NO: 281062 - DNA, 21 bp, Artificial sequence
  SiRNA target sequence
tcaccatatggtggcaggaga

SEQ ID NO: 281063 - DNA, 21 bp, Artificial sequence
  SiRNA target sequence
caccatatggtggcaggagac

SEQ ID NO: 281064 - DNA, 21 bp, Artificial sequence
  SiRNA target sequence
accatatggtggcaggagact

SEQ ID NO: 281065 - DNA, 21 bp, Artificial sequence
  SiRNA target sequence
ccatatggtggcaggagactt

SEQ ID NO: 281066 - DNA, 21 bp, Artificial sequence
  SiRNA target sequence
catatggtggcaggagacttt

SEQ ID NO: 281067 - DNA, 21 bp, Artificial sequence
  SiRNA target sequence
atatggtggcaggagactttg

SEQ ID NO: 281068 - DNA, 21 bp, Artificial sequence
  SiRNA target sequence
tatggtggcaggagactttga

SEQ ID NO: 281069 - DNA, 21 bp, Artificial sequence
  SiRNA target sequence
atggtggcaggagactttgaa

SEQ ID NO: 281070 - DNA, 21 bp, Artificial sequence
  SiRNA target sequence
tggtggcaggagactttgaag

SEQ ID NO: 281071 - DNA, 21 bp, Artificial sequence
  SiRNA target sequence
ggtggcaggagactttgaagg

SEQ ID NO: 281072 - DNA, 21 bp, Artificial sequence
  SiRNA target sequence
gtggcaggagactttgaaggc

SEQ ID NO: 281073 - DNA, 21 bp, Artificial sequence
  SiRNA target sequence
tggcaggagactttgaaggct

SEQ ID NO: 281074 - DNA, 21 bp, Artificial sequence
  SiRNA target sequence
ggcaggagactttgaaggctt

SEQ ID NO: 281075 - DNA, 21 bp, Artificial sequence
  SiRNA target sequence
gcaggagactttgaaggcttc

SEQ ID NO: 281076 - DNA, 21 bp, Artificial sequence
  SiRNA target sequence
caggagactttgaaggcttcg

SEQ ID NO: 281077 - DNA, 21 bp, Artificial sequence
  SiRNA target sequence
aggagactttgaaggcttcga

SEQ ID NO: 281078 - DNA, 21 bp, Artificial sequence
  SiRNA target sequence
ggagactttgaaggcttcgat

SEQ ID NO: 281079 - DNA, 21 bp, Artificial sequence
  SiRNA target sequence
gagactttgaaggcttcgatg

SEQ ID NO: 281080 - DNA, 21 bp, Artificial sequence
  SiRNA target sequence
agactttgaaggcttcgatgc

SEQ ID NO: 281081 - DNA, 21 bp, Artificial sequence
  SiRNA target sequence
gactttgaaggcttcgatgct

SEQ ID NO: 281082 - DNA, 21 bp, Artificial sequence
  SiRNA target sequence
actttgaaggcttcgatgctt

SEQ ID NO: 281083 - DNA, 21 bp, Artificial sequence
  SiRNA target sequence
ctttgaaggcttcgatgcttc

SEQ ID NO: 281084 - DNA, 21 bp, Artificial sequence
  SiRNA target sequence
tttgaaggcttcgatgcttcg

SEQ ID NO: 281085 - DNA, 21 bp, Artificial sequence
  SiRNA target sequence
ttgaaggcttcgatgcttcgg

SEQ ID NO: 281086 - DNA, 21 bp, Artificial sequence
  SiRNA target sequence
tgaaggcttcgatgcttcgga

SEQ ID NO: 281087 - DNA, 21 bp, Artificial sequence
  SiRNA target sequence
gaaggcttcgatgcttcggaa

SEQ ID NO: 281088 - DNA, 21 bp, Artificial sequence
  SiRNA target sequence
aaggcttcgatgcttcggaac

SEQ ID NO: 281089 - DNA, 21 bp, Artificial sequence
  SiRNA target sequence
aggcttcgatgcttcggaaca

SEQ ID NO: 281090 - DNA, 21 bp, Artificial sequence
  SiRNA target sequence
ggcttcgatgcttcggaacag

SEQ ID NO: 281091 - DNA, 21 bp, Artificial sequence
  SiRNA target sequence
gcttcgatgcttcggaacagt

SEQ ID NO: 281092 - DNA, 21 bp, Artificial sequence
  SiRNA target sequence
cttcgatgcttcggaacagtc

SEQ ID NO: 281093 - DNA, 21 bp, Artificial sequence
  SiRNA target sequence
ttcgatgcttcggaacagtcc

SEQ ID NO: 281094 - DNA, 21 bp, Artificial sequence
  SiRNA target sequence
tcgatgcttcggaacagtccg

SEQ ID NO: 281095 - DNA, 21 bp, Artificial sequence
  SiRNA target sequence
cgatgcttcggaacagtccga

SEQ ID NO: 281096 - DNA, 21 bp, Artificial sequence
  SiRNA target sequence
gatgcttcggaacagtccgac

SEQ ID NO: 281097 - DNA, 21 bp, Artificial sequence
  SiRNA target sequence
atgcttcggaacagtccgaca

SEQ ID NO: 281098 - DNA, 21 bp, Artificial sequence
  SiRNA target sequence
tgcttcggaacagtccgacat

SEQ ID NO: 281099 - DNA, 21 bp, Artificial sequence
  SiRNA target sequence
gcttcggaacagtccgacata

SEQ ID NO: 281100 - DNA, 21 bp, Artificial sequence
  SiRNA target sequence
cttcggaacagtccgacatat

SEQ ID NO: 281101 - DNA, 21 bp, Artificial sequence
  SiRNA target sequence
ttcggaacagtccgacatatt

SEQ ID NO: 281102 - DNA, 21 bp, Artificial sequence
  SiRNA target sequence
tcggaacagtccgacatattg

SEQ ID NO: 281103 - DNA, 21 bp, Artificial sequence
  SiRNA target sequence
cggaacagtccgacatattgt

SEQ ID NO: 281104 - DNA, 21 bp, Artificial sequence
  SiRNA target sequence
ggaacagtccgacatattgta

SEQ ID NO: 281105 - DNA, 21 bp, Artificial sequence
  SiRNA target sequence
gaacagtccgacatattgtac

SEQ ID NO: 281106 - DNA, 21 bp, Artificial sequence
  SiRNA target sequence
aacagtccgacatattgtacg

SEQ ID NO: 281107 - DNA, 21 bp, Artificial sequence
  SiRNA target sequence
acagtccgacatattgtacgc

SEQ ID NO: 281108 - DNA, 21 bp, Artificial sequence
  SiRNA target sequence
cagtccgacatattgtacgct

SEQ ID NO: 281109 - DNA, 21 bp, Artificial sequence
  SiRNA target sequence
agtccgacatattgtacgctg

SEQ ID NO: 281110 - DNA, 21 bp, Artificial sequence
  SiRNA target sequence
gtccgacatattgtacgctgc

SEQ ID NO: 281111 - DNA, 21 bp, Artificial sequence
  SiRNA target sequence
tccgacatattgtacgctgcg

SEQ ID NO: 281112 - DNA, 21 bp, Artificial sequence
  SiRNA target sequence
ccgacatattgtacgctgcgg

SEQ ID NO: 281113 - DNA, 21 bp, Artificial sequence
  SiRNA target sequence
cgacatattgtacgctgcggg

SEQ ID NO: 281114 - DNA, 21 bp, Artificial sequence
  SiRNA target sequence
gacatattgtacgctgcggga

SEQ ID NO: 281115 - DNA, 21 bp, Artificial sequence
  SiRNA target sequence
acatattgtacgctgcgggag

SEQ ID NO: 281116 - DNA, 21 bp, Artificial sequence
  SiRNA target sequence
catattgtacgctgcgggaga

SEQ ID NO: 281117 - DNA, 21 bp, Artificial sequence
  SiRNA target sequence
atattgtacgctgcgggagaa

SEQ ID NO: 281118 - DNA, 21 bp, Artificial sequence
  SiRNA target sequence
tattgtacgctgcgggagaag

SEQ ID NO: 281119 - DNA, 21 bp, Artificial sequence
  SiRNA target sequence
attgtacgctgcgggagaagt

SEQ ID NO: 281120 - DNA, 21 bp, Artificial sequence
  SiRNA target sequence
ttgtacgctgcgggagaagtt

SEQ ID NO: 281121 - DNA, 21 bp, Artificial sequence
  SiRNA target sequence
tgtacgctgcgggagaagttt

SEQ ID NO: 281122 - DNA, 21 bp, Artificial sequence
  SiRNA target sequence
gtacgctgcgggagaagtttt

SEQ ID NO: 281123 - DNA, 21 bp, Artificial sequence
  SiRNA target sequence
tacgctgcgggagaagtttta

SEQ ID NO: 281124 - DNA, 21 bp, Artificial sequence
  SiRNA target sequence
acgctgcgggagaagttttac

SEQ ID NO: 281125 - DNA, 21 bp, Artificial sequence
  SiRNA target sequence
cgctgcgggagaagttttaca

SEQ ID NO: 281126 - DNA, 21 bp, Artificial sequence
  SiRNA target sequence
gctgcgggagaagttttacaa

SEQ ID NO: 281127 - DNA, 21 bp, Artificial sequence
  SiRNA target sequence
ctgcgggagaagttttacaag

SEQ ID NO: 281128 - DNA, 21 bp, Artificial sequence
  SiRNA target sequence
tgcgggagaagttttacaaga

SEQ ID NO: 281129 - DNA, 21 bp, Artificial sequence
  SiRNA target sequence
gcgggagaagttttacaagag

SEQ ID NO: 281130 - DNA, 21 bp, Artificial sequence
  SiRNA target sequence
cgggagaagttttacaagagt

SEQ ID NO: 281131 - DNA, 21 bp, Artificial sequence
  SiRNA target sequence
gggagaagttttacaagagtt

SEQ ID NO: 281132 - DNA, 21 bp, Artificial sequence
  SiRNA target sequence
ggagaagttttacaagagttg

SEQ ID NO: 281133 - DNA, 21 bp, Artificial sequence
  SiRNA target sequence
gagaagttttacaagagttga

SEQ ID NO: 281134 - DNA, 21 bp, Artificial sequence
  SiRNA target sequence
agaagttttacaagagttgag

SEQ ID NO: 281135 - DNA, 21 bp, Artificial sequence
  SiRNA target sequence
gaagttttacaagagttgagt

SEQ ID NO: 281136 - DNA, 21 bp, Artificial sequence
  SiRNA target sequence
aagttttacaagagttgagta

SEQ ID NO: 281137 - DNA, 21 bp, Artificial sequence
  SiRNA target sequence
agttttacaagagttgagtaa

SEQ ID NO: 281138 - DNA, 21 bp, Artificial sequence
  SiRNA target sequence
gttttacaagagttgagtaag

SEQ ID NO: 281139 - DNA, 21 bp, Artificial sequence
  SiRNA target sequence
ttttacaagagttgagtaaga

SEQ ID NO: 281140 - DNA, 21 bp, Artificial sequence
  SiRNA target sequence
tttacaagagttgagtaagaa

SEQ ID NO: 281141 - DNA, 21 bp, Artificial sequence
  SiRNA target sequence
ttacaagagttgagtaagaaa

SEQ ID NO: 281142 - DNA, 21 bp, Artificial sequence
  SiRNA target sequence
tacaagagttgagtaagaaaa

SEQ ID NO: 281143 - DNA, 21 bp, Artificial sequence
  SiRNA target sequence
acaagagttgagtaagaaaat

SEQ ID NO: 281144 - DNA, 21 bp, Artificial sequence
  SiRNA target sequence
caagagttgagtaagaaaatt

SEQ ID NO: 281145 - DNA, 21 bp, Artificial sequence
  SiRNA target sequence
aagagttgagtaagaaaattt

SEQ ID NO: 281146 - DNA, 21 bp, Artificial sequence
  SiRNA target sequence
agagttgagtaagaaaatttt

SEQ ID NO: 281147 - DNA, 21 bp, Artificial sequence
  SiRNA target sequence
gagttgagtaagaaaattttt

SEQ ID NO: 281148 - DNA, 21 bp, Artificial sequence
  SiRNA target sequence
agttgagtaagaaaattttta

SEQ ID NO: 281149 - DNA, 21 bp, Artificial sequence
  SiRNA target sequence
gttgagtaagaaaatttttaa

SEQ ID NO: 281150 - DNA, 21 bp, Artificial sequence
  SiRNA target sequence
ttgagtaagaaaatttttaac

SEQ ID NO: 281151 - DNA, 21 bp, Artificial sequence
  SiRNA target sequence
tgagtaagaaaatttttaact

SEQ ID NO: 281152 - DNA, 21 bp, Artificial sequence
  SiRNA target sequence
gagtaagaaaatttttaactc

SEQ ID NO: 281153 - DNA, 21 bp, Artificial sequence
  SiRNA target sequence
agtaagaaaatttttaactca

SEQ ID NO: 281154 - DNA, 21 bp, Artificial sequence
  SiRNA target sequence
gtaagaaaatttttaactcaa

SEQ ID NO: 281155 - DNA, 21 bp, Artificial sequence
  SiRNA target sequence
taagaaaatttttaactcaac

SEQ ID NO: 281156 - DNA, 21 bp, Artificial sequence
  SiRNA target sequence
aagaaaatttttaactcaacc

SEQ ID NO: 281157 - DNA, 21 bp, Artificial sequence
  SiRNA target sequence
agaaaatttttaactcaaccg

SEQ ID NO: 281158 - DNA, 21 bp, Artificial sequence
  SiRNA target sequence
gaaaatttttaactcaaccga

SEQ ID NO: 281159 - DNA, 21 bp, Artificial sequence
  SiRNA target sequence
aaaatttttaactcaaccgag

SEQ ID NO: 281160 - DNA, 21 bp, Artificial sequence
  SiRNA target sequence
aaatttttaactcaaccgagg

SEQ ID NO: 281161 - DNA, 21 bp, Artificial sequence
  SiRNA target sequence
aatttttaactcaaccgagga

SEQ ID NO: 281162 - DNA, 21 bp, Artificial sequence
  SiRNA target sequence
atttttaactcaaccgaggat

SEQ ID NO: 281163 - DNA, 21 bp, Artificial sequence
  SiRNA target sequence
tttttaactcaaccgaggatg

SEQ ID NO: 281164 - DNA, 21 bp, Artificial sequence
  SiRNA target sequence
ttttaactcaaccgaggatga

SEQ ID NO: 281165 - DNA, 21 bp, Artificial sequence
  SiRNA target sequence
tttaactcaaccgaggatgag

SEQ ID NO: 281166 - DNA, 21 bp, Artificial sequence
  SiRNA target sequence
ttaactcaaccgaggatgaga

SEQ ID NO: 281167 - DNA, 21 bp, Artificial sequence
  SiRNA target sequence
taactcaaccgaggatgagat

SEQ ID NO: 281168 - DNA, 21 bp, Artificial sequence
  SiRNA target sequence
aactcaaccgaggatgagatt

SEQ ID NO: 281169 - DNA, 21 bp, Artificial sequence
  SiRNA target sequence
actcaaccgaggatgagattt

SEQ ID NO: 281170 - DNA, 21 bp, Artificial sequence
  SiRNA target sequence
ctcaaccgaggatgagatttt

SEQ ID NO: 281171 - DNA, 21 bp, Artificial sequence
  SiRNA target sequence
tcaaccgaggatgagattttg

SEQ ID NO: 281172 - DNA, 21 bp, Artificial sequence
  SiRNA target sequence
caaccgaggatgagattttgc

SEQ ID NO: 281173 - DNA, 21 bp, Artificial sequence
  SiRNA target sequence
aaccgaggatgagattttgca

SEQ ID NO: 281174 - DNA, 21 bp, Artificial sequence
  SiRNA target sequence
accgaggatgagattttgcag

SEQ ID NO: 281175 - DNA, 21 bp, Artificial sequence
  SiRNA target sequence
ccgaggatgagattttgcagc

SEQ ID NO: 281176 - DNA, 21 bp, Artificial sequence
  SiRNA target sequence
cgaggatgagattttgcagca

SEQ ID NO: 281177 - DNA, 21 bp, Artificial sequence
  SiRNA target sequence
gaggatgagattttgcagcag

SEQ ID NO: 281178 - DNA, 21 bp, Artificial sequence
  SiRNA target sequence
aggatgagattttgcagcaga

SEQ ID NO: 281179 - DNA, 21 bp, Artificial sequence
  SiRNA target sequence
ggatgagattttgcagcagaa

SEQ ID NO: 281180 - DNA, 21 bp, Artificial sequence
  SiRNA target sequence
gatgagattttgcagcagaag

SEQ ID NO: 281181 - DNA, 21 bp, Artificial sequence
  SiRNA target sequence
atgagattttgcagcagaagg

SEQ ID NO: 281182 - DNA, 21 bp, Artificial sequence
  SiRNA target sequence
tgagattttgcagcagaaggc

SEQ ID NO: 281183 - DNA, 21 bp, Artificial sequence
  SiRNA target sequence
gagattttgcagcagaaggct

SEQ ID NO: 281184 - DNA, 21 bp, Artificial sequence
  SiRNA target sequence
agattttgcagcagaaggcta

SEQ ID NO: 281185 - DNA, 21 bp, Artificial sequence
  SiRNA target sequence
gattttgcagcagaaggctat

SEQ ID NO: 281186 - DNA, 21 bp, Artificial sequence
  SiRNA target sequence
attttgcagcagaaggctatc

SEQ ID NO: 281187 - DNA, 21 bp, Artificial sequence
  SiRNA target sequence
ttttgcagcagaaggctatcc

SEQ ID NO: 281188 - DNA, 21 bp, Artificial sequence
  SiRNA target sequence
tttgcagcagaaggctatcct

SEQ ID NO: 281189 - DNA, 21 bp, Artificial sequence
  SiRNA target sequence
ttgcagcagaaggctatcctt

SEQ ID NO: 281190 - DNA, 21 bp, Artificial sequence
  SiRNA target sequence
tgcagcagaaggctatccttc

SEQ ID NO: 281191 - DNA, 21 bp, Artificial sequence
  SiRNA target sequence
gcagcagaaggctatccttca

SEQ ID NO: 281192 - DNA, 21 bp, Artificial sequence
  SiRNA target sequence
cagcagaaggctatccttcat

SEQ ID NO: 281193 - DNA, 21 bp, Artificial sequence
  SiRNA target sequence
agcagaaggctatccttcatt

SEQ ID NO: 281194 - DNA, 21 bp, Artificial sequence
  SiRNA target sequence
gcagaaggctatccttcattc

SEQ ID NO: 281195 - DNA, 21 bp, Artificial sequence
  SiRNA target sequence
cagaaggctatccttcattcg

SEQ ID NO: 281196 - DNA, 21 bp, Artificial sequence
  SiRNA target sequence
agaaggctatccttcattcgt

SEQ ID NO: 281197 - DNA, 21 bp, Artificial sequence
  SiRNA target sequence
gaaggctatccttcattcgtt

SEQ ID NO: 281198 - DNA, 21 bp, Artificial sequence
  SiRNA target sequence
aaggctatccttcattcgttg

SEQ ID NO: 281199 - DNA, 21 bp, Artificial sequence
  SiRNA target sequence
aggctatccttcattcgttgg

SEQ ID NO: 281200 - DNA, 21 bp, Artificial sequence
  SiRNA target sequence
ggctatccttcattcgttggt

SEQ ID NO: 281201 - DNA, 21 bp, Artificial sequence
  SiRNA target sequence
gctatccttcattcgttggtt

SEQ ID NO: 281202 - DNA, 21 bp, Artificial sequence
  SiRNA target sequence
ctatccttcattcgttggtta

SEQ ID NO: 281203 - DNA, 21 bp, Artificial sequence
  SiRNA target sequence
tatccttcattcgttggttaa

SEQ ID NO: 281204 - DNA, 21 bp, Artificial sequence
  SiRNA target sequence
atccttcattcgttggttaat

SEQ ID NO: 281205 - DNA, 21 bp, Artificial sequence
  SiRNA target sequence
tccttcattcgttggttaatt

SEQ ID NO: 281206 - DNA, 21 bp, Artificial sequence
  SiRNA target sequence
ccttcattcgttggttaattc

SEQ ID NO: 281207 - DNA, 21 bp, Artificial sequence
  SiRNA target sequence
cttcattcgttggttaattct

SEQ ID NO: 281208 - DNA, 21 bp, Artificial sequence
  SiRNA target sequence
ttcattcgttggttaattctc

SEQ ID NO: 281209 - DNA, 21 bp, Artificial sequence
  SiRNA target sequence
tcattcgttggttaattctct

SEQ ID NO: 281210 - DNA, 21 bp, Artificial sequence
  SiRNA target sequence
cattcgttggttaattctctt

SEQ ID NO: 281211 - DNA, 21 bp, Artificial sequence
  SiRNA target sequence
attcgttggttaattctcttc

SEQ ID NO: 281212 - DNA, 21 bp, Artificial sequence
  SiRNA target sequence
ttcgttggttaattctcttca

SEQ ID NO: 281213 - DNA, 21 bp, Artificial sequence
  SiRNA target sequence
tcgttggttaattctcttcat

SEQ ID NO: 281214 - DNA, 21 bp, Artificial sequence
  SiRNA target sequence
cgttggttaattctcttcata

SEQ ID NO: 281215 - DNA, 21 bp, Artificial sequence
  SiRNA target sequence
gttggttaattctcttcatat

SEQ ID NO: 281216 - DNA, 21 bp, Artificial sequence
  SiRNA target sequence
ttggttaattctcttcatatc

SEQ ID NO: 281217 - DNA, 21 bp, Artificial sequence
  SiRNA target sequence
tggttaattctcttcatatca

SEQ ID NO: 281218 - DNA, 21 bp, Artificial sequence
  SiRNA target sequence
ggttaattctcttcatatcaa

SEQ ID NO: 281219 - DNA, 21 bp, Artificial sequence
  SiRNA target sequence
gttaattctcttcatatcaat

SEQ ID NO: 281220 - DNA, 21 bp, Artificial sequence
  SiRNA target sequence
ttaattctcttcatatcaatg

SEQ ID NO: 281221 - DNA, 21 bp, Artificial sequence
  SiRNA target sequence
taattctcttcatatcaatga

SEQ ID NO: 281222 - DNA, 21 bp, Artificial sequence
  SiRNA target sequence
aattctcttcatatcaatgaa

SEQ ID NO: 281223 - DNA, 21 bp, Artificial sequence
  SiRNA target sequence
attctcttcatatcaatgaaa

SEQ ID NO: 281224 - DNA, 21 bp, Artificial sequence
  SiRNA target sequence
ttctcttcatatcaatgaaaa

SEQ ID NO: 281225 - DNA, 21 bp, Artificial sequence
  SiRNA target sequence
tctcttcatatcaatgaaaat

SEQ ID NO: 281226 - DNA, 21 bp, Artificial sequence
  SiRNA target sequence
ctcttcatatcaatgaaaatg

SEQ ID NO: 281227 - DNA, 21 bp, Artificial sequence
  SiRNA target sequence
tcttcatatcaatgaaaatgg

SEQ ID NO: 281228 - DNA, 21 bp, Artificial sequence
  SiRNA target sequence
cttcatatcaatgaaaatgga

SEQ ID NO: 281229 - DNA, 21 bp, Artificial sequence
  SiRNA target sequence
ttcatatcaatgaaaatggaa

SEQ ID NO: 281230 - DNA, 21 bp, Artificial sequence
  SiRNA target sequence
tcatatcaatgaaaatggaat

SEQ ID NO: 281231 - DNA, 21 bp, Artificial sequence
  SiRNA target sequence
catatcaatgaaaatggaatt

SEQ ID NO: 281232 - DNA, 21 bp, Artificial sequence
  SiRNA target sequence
atatcaatgaaaatggaattg

SEQ ID NO: 281233 - DNA, 21 bp, Artificial sequence
  SiRNA target sequence
tatcaatgaaaatggaattgt

SEQ ID NO: 281234 - DNA, 21 bp, Artificial sequence
  SiRNA target sequence
atcaatgaaaatggaattgtc

SEQ ID NO: 281235 - DNA, 21 bp, Artificial sequence
  SiRNA target sequence
tcaatgaaaatggaattgtcc

SEQ ID NO: 281236 - DNA, 21 bp, Artificial sequence
  SiRNA target sequence
caatgaaaatggaattgtcct

SEQ ID NO: 281237 - DNA, 21 bp, Artificial sequence
  SiRNA target sequence
aatgaaaatggaattgtcctt

SEQ ID NO: 281238 - DNA, 21 bp, Artificial sequence
  SiRNA target sequence
atgaaaatggaattgtccttc

SEQ ID NO: 281239 - DNA, 21 bp, Artificial sequence
  SiRNA target sequence
tgaaaatggaattgtccttca

SEQ ID NO: 281240 - DNA, 21 bp, Artificial sequence
  SiRNA target sequence
gaaaatggaattgtccttcaa

SEQ ID NO: 281241 - DNA, 21 bp, Artificial sequence
  SiRNA target sequence
aaaatggaattgtccttcaat

SEQ ID NO: 281242 - DNA, 21 bp, Artificial sequence
  SiRNA target sequence
aaatggaattgtccttcaatg

SEQ ID NO: 281243 - DNA, 21 bp, Artificial sequence
  SiRNA target sequence
aatggaattgtccttcaatgg

SEQ ID NO: 281244 - DNA, 21 bp, Artificial sequence
  SiRNA target sequence
atggaattgtccttcaatggt

SEQ ID NO: 281245 - DNA, 21 bp, Artificial sequence
  SiRNA target sequence
tggaattgtccttcaatggtg

SEQ ID NO: 281246 - DNA, 21 bp, Artificial sequence
  SiRNA target sequence
ggaattgtccttcaatggtgc

SEQ ID NO: 281247 - DNA, 21 bp, Artificial sequence
  SiRNA target sequence
gaattgtccttcaatggtgca

SEQ ID NO: 281248 - DNA, 21 bp, Artificial sequence
  SiRNA target sequence
aattgtccttcaatggtgcaa

SEQ ID NO: 281249 - DNA, 21 bp, Artificial sequence
  SiRNA target sequence
attgtccttcaatggtgcaag

SEQ ID NO: 281250 - DNA, 21 bp, Artificial sequence
  SiRNA target sequence
ttgtccttcaatggtgcaagt

SEQ ID NO: 281251 - DNA, 21 bp, Artificial sequence
  SiRNA target sequence
tgtccttcaatggtgcaagtc

SEQ ID NO: 281252 - DNA, 21 bp, Artificial sequence
  SiRNA target sequence
gtccttcaatggtgcaagtct

SEQ ID NO: 281253 - DNA, 21 bp, Artificial sequence
  SiRNA target sequence
tccttcaatggtgcaagtctc

SEQ ID NO: 281254 - DNA, 21 bp, Artificial sequence
  SiRNA target sequence
ccttcaatggtgcaagtctct

SEQ ID NO: 281255 - DNA, 21 bp, Artificial sequence
  SiRNA target sequence
cttcaatggtgcaagtctctt

SEQ ID NO: 281256 - DNA, 21 bp, Artificial sequence
  SiRNA target sequence
ttcaatggtgcaagtctcttc

SEQ ID NO: 281257 - DNA, 21 bp, Artificial sequence
  SiRNA target sequence
tcaatggtgcaagtctcttcc

SEQ ID NO: 281258 - DNA, 21 bp, Artificial sequence
  SiRNA target sequence
caatggtgcaagtctcttcct

SEQ ID NO: 281259 - DNA, 21 bp, Artificial sequence
  SiRNA target sequence
aatggtgcaagtctcttccta

SEQ ID NO: 281260 - DNA, 21 bp, Artificial sequence
  SiRNA target sequence
atggtgcaagtctcttcctag

SEQ ID NO: 281261 - DNA, 21 bp, Artificial sequence
  SiRNA target sequence
tggtgcaagtctcttcctagt

SEQ ID NO: 281262 - DNA, 21 bp, Artificial sequence
  SiRNA target sequence
ggtgcaagtctcttcctagtg

SEQ ID NO: 281263 - DNA, 21 bp, Artificial sequence
  SiRNA target sequence
gtgcaagtctcttcctagtgg

SEQ ID NO: 281264 - DNA, 21 bp, Artificial sequence
  SiRNA target sequence
tgcaagtctcttcctagtggc

SEQ ID NO: 281265 - DNA, 21 bp, Artificial sequence
  SiRNA target sequence
gcaagtctcttcctagtggcc

SEQ ID NO: 281266 - DNA, 21 bp, Artificial sequence
  SiRNA target sequence
caagtctcttcctagtggcca

SEQ ID NO: 281267 - DNA, 21 bp, Artificial sequence
  SiRNA target sequence
aagtctcttcctagtggccat

SEQ ID NO: 281268 - DNA, 21 bp, Artificial sequence
  SiRNA target sequence
agtctcttcctagtggccatt

SEQ ID NO: 281269 - DNA, 21 bp, Artificial sequence
  SiRNA target sequence
gtctcttcctagtggccatta

SEQ ID NO: 281270 - DNA, 21 bp, Artificial sequence
  SiRNA target sequence
tctcttcctagtggccattat

SEQ ID NO: 281271 - DNA, 21 bp, Artificial sequence
  SiRNA target sequence
ctcttcctagtggccattatc

SEQ ID NO: 281272 - DNA, 21 bp, Artificial sequence
  SiRNA target sequence
tcttcctagtggccattatct

SEQ ID NO: 281273 - DNA, 21 bp, Artificial sequence
  SiRNA target sequence
cttcctagtggccattatctc

SEQ ID NO: 281274 - DNA, 21 bp, Artificial sequence
  SiRNA target sequence
ttcctagtggccattatctca

SEQ ID NO: 281275 - DNA, 21 bp, Artificial sequence
  SiRNA target sequence
tcctagtggccattatctcac

SEQ ID NO: 281276 - DNA, 21 bp, Artificial sequence
  SiRNA target sequence
cctagtggccattatctcacc

SEQ ID NO: 281277 - DNA, 21 bp, Artificial sequence
  SiRNA target sequence
ctagtggccattatctcaccg

SEQ ID NO: 281278 - DNA, 21 bp, Artificial sequence
  SiRNA target sequence
tagtggccattatctcaccgc

SEQ ID NO: 281279 - DNA, 21 bp, Artificial sequence
  SiRNA target sequence
agtggccattatctcaccgct

SEQ ID NO: 281280 - DNA, 21 bp, Artificial sequence
  SiRNA target sequence
gtggccattatctcaccgcta

SEQ ID NO: 281281 - DNA, 21 bp, Artificial sequence
  SiRNA target sequence
tggccattatctcaccgctat

SEQ ID NO: 281282 - DNA, 21 bp, Artificial sequence
  SiRNA target sequence
ggccattatctcaccgctatt

SEQ ID NO: 281283 - DNA, 21 bp, Artificial sequence
  SiRNA target sequence
gccattatctcaccgctatta

SEQ ID NO: 281284 - DNA, 21 bp, Artificial sequence
  SiRNA target sequence
ccattatctcaccgctattat

SEQ ID NO: 281285 - DNA, 21 bp, Artificial sequence
  SiRNA target sequence
cattatctcaccgctattatt

SEQ ID NO: 281286 - DNA, 21 bp, Artificial sequence
  SiRNA target sequence
attatctcaccgctattatta

SEQ ID NO: 281287 - DNA, 21 bp, Artificial sequence
  SiRNA target sequence
ttatctcaccgctattattaa

SEQ ID NO: 281288 - DNA, 21 bp, Artificial sequence
  SiRNA target sequence
tatctcaccgctattattaat

SEQ ID NO: 281289 - DNA, 21 bp, Artificial sequence
  SiRNA target sequence
atctcaccgctattattaatt

SEQ ID NO: 281290 - DNA, 21 bp, Artificial sequence
  SiRNA target sequence
tctcaccgctattattaattc

SEQ ID NO: 281291 - DNA, 21 bp, Artificial sequence
  SiRNA target sequence
ctcaccgctattattaattcc

SEQ ID NO: 281292 - DNA, 21 bp, Artificial sequence
  SiRNA target sequence
tcaccgctattattaattccg

SEQ ID NO: 281293 - DNA, 21 bp, Artificial sequence
  SiRNA target sequence
caccgctattattaattccgt

SEQ ID NO: 281294 - DNA, 21 bp, Artificial sequence
  SiRNA target sequence
accgctattattaattccgtc

SEQ ID NO: 281295 - DNA, 21 bp, Artificial sequence
  SiRNA target sequence
ccgctattattaattccgtct

SEQ ID NO: 281296 - DNA, 21 bp, Artificial sequence
  SiRNA target sequence
cgctattattaattccgtctt

SEQ ID NO: 281297 - DNA, 21 bp, Artificial sequence
  SiRNA target sequence
gctattattaattccgtcttt

SEQ ID NO: 281298 - DNA, 21 bp, Artificial sequence
  SiRNA target sequence
ctattattaattccgtctttg

SEQ ID NO: 281299 - DNA, 21 bp, Artificial sequence
  SiRNA target sequence
tattattaattccgtctttgt

SEQ ID NO: 281300 - DNA, 21 bp, Artificial sequence
  SiRNA target sequence
attattaattccgtctttgtg

SEQ ID NO: 281301 - DNA, 21 bp, Artificial sequence
  SiRNA target sequence
ttattaattccgtctttgtga

SEQ ID NO: 281302 - DNA, 21 bp, Artificial sequence
  SiRNA target sequence
tattaattccgtctttgtgaa

SEQ ID NO: 281303 - DNA, 21 bp, Artificial sequence
  SiRNA target sequence
attaattccgtctttgtgaac

SEQ ID NO: 281304 - DNA, 21 bp, Artificial sequence
  SiRNA target sequence
ttaattccgtctttgtgaact

SEQ ID NO: 281305 - DNA, 21 bp, Artificial sequence
  SiRNA target sequence
taattccgtctttgtgaactt

SEQ ID NO: 281306 - DNA, 21 bp, Artificial sequence
  SiRNA target sequence
aattccgtctttgtgaacttg

SEQ ID NO: 281307 - DNA, 21 bp, Artificial sequence
  SiRNA target sequence
attccgtctttgtgaacttgg

SEQ ID NO: 281308 - DNA, 21 bp, Artificial sequence
  SiRNA target sequence
ttccgtctttgtgaacttggt

SEQ ID NO: 281309 - DNA, 21 bp, Artificial sequence
  SiRNA target sequence
tccgtctttgtgaacttggtt

SEQ ID NO: 281310 - DNA, 21 bp, Artificial sequence
  SiRNA target sequence
ccgtctttgtgaacttggtta

SEQ ID NO: 281311 - DNA, 21 bp, Artificial sequence
  SiRNA target sequence
cgtctttgtgaacttggttat

SEQ ID NO: 281312 - DNA, 21 bp, Artificial sequence
  SiRNA target sequence
gtctttgtgaacttggttatg

SEQ ID NO: 281313 - DNA, 21 bp, Artificial sequence
  SiRNA target sequence
tctttgtgaacttggttatgt

SEQ ID NO: 281314 - DNA, 21 bp, Artificial sequence
  SiRNA target sequence
ctttgtgaacttggttatgtg

SEQ ID NO: 281315 - DNA, 21 bp, Artificial sequence
  SiRNA target sequence
tttgtgaacttggttatgtgt

SEQ ID NO: 281316 - DNA, 21 bp, Artificial sequence
  SiRNA target sequence
ttgtgaacttggttatgtgtc

SEQ ID NO: 281317 - DNA, 21 bp, Artificial sequence
  SiRNA target sequence
tgtgaacttggttatgtgtct

SEQ ID NO: 281318 - DNA, 21 bp, Artificial sequence
  SiRNA target sequence
gtgaacttggttatgtgtctc

SEQ ID NO: 281319 - DNA, 21 bp, Artificial sequence
  SiRNA target sequence
tgaacttggttatgtgtctcg

SEQ ID NO: 281320 - DNA, 21 bp, Artificial sequence
  SiRNA target sequence
gaacttggttatgtgtctcgt

SEQ ID NO: 281321 - DNA, 21 bp, Artificial sequence
  SiRNA target sequence
aacttggttatgtgtctcgta

SEQ ID NO: 281322 - DNA, 21 bp, Artificial sequence
  SiRNA target sequence
acttggttatgtgtctcgtat

SEQ ID NO: 281323 - DNA, 21 bp, Artificial sequence
  SiRNA target sequence
cttggttatgtgtctcgtatt

SEQ ID NO: 281324 - DNA, 21 bp, Artificial sequence
  SiRNA target sequence
ttggttatgtgtctcgtattt

SEQ ID NO: 281325 - DNA, 21 bp, Artificial sequence
  SiRNA target sequence
tggttatgtgtctcgtattta

SEQ ID NO: 281326 - DNA, 21 bp, Artificial sequence
  SiRNA target sequence
ggttatgtgtctcgtatttat

SEQ ID NO: 281327 - DNA, 21 bp, Artificial sequence
  SiRNA target sequence
gttatgtgtctcgtatttatg

SEQ ID NO: 281328 - DNA, 21 bp, Artificial sequence
  SiRNA target sequence
ttatgtgtctcgtatttatgg

SEQ ID NO: 281329 - DNA, 21 bp, Artificial sequence
  SiRNA target sequence
tatgtgtctcgtatttatgga

SEQ ID NO: 281330 - DNA, 21 bp, Artificial sequence
  SiRNA target sequence
atgtgtctcgtatttatggaa

SEQ ID NO: 281331 - DNA, 21 bp, Artificial sequence
  SiRNA target sequence
tgtgtctcgtatttatggaag

SEQ ID NO: 281332 - DNA, 21 bp, Artificial sequence
  SiRNA target sequence
gtgtctcgtatttatggaagc

SEQ ID NO: 281333 - DNA, 21 bp, Artificial sequence
  SiRNA target sequence
tgtctcgtatttatggaagct

SEQ ID NO: 281334 - DNA, 21 bp, Artificial sequence
  SiRNA target sequence
gtctcgtatttatggaagcta

SEQ ID NO: 281335 - DNA, 21 bp, Artificial sequence
  SiRNA target sequence
tctcgtatttatggaagctaa

SEQ ID NO: 281336 - DNA, 21 bp, Artificial sequence
  SiRNA target sequence
ctcgtatttatggaagctaat

SEQ ID NO: 281337 - DNA, 21 bp, Artificial sequence
  SiRNA target sequence
tcgtatttatggaagctaatc

SEQ ID NO: 281338 - DNA, 21 bp, Artificial sequence
  SiRNA target sequence
cgtatttatggaagctaatca

SEQ ID NO: 281339 - DNA, 21 bp, Artificial sequence
  SiRNA target sequence
gtatttatggaagctaatcaa

SEQ ID NO: 281340 - DNA, 21 bp, Artificial sequence
  SiRNA target sequence
tatttatggaagctaatcaaa

SEQ ID NO: 281341 - DNA, 21 bp, Artificial sequence
  SiRNA target sequence
atttatggaagctaatcaaaa

SEQ ID NO: 281342 - DNA, 21 bp, Artificial sequence
  SiRNA target sequence
tttatggaagctaatcaaaaa

SEQ ID NO: 281343 - DNA, 21 bp, Artificial sequence
  SiRNA target sequence
ttatggaagctaatcaaaaat

SEQ ID NO: 281344 - DNA, 21 bp, Artificial sequence
  SiRNA target sequence
tatggaagctaatcaaaaata

SEQ ID NO: 281345 - DNA, 21 bp, Artificial sequence
  SiRNA target sequence
atggaagctaatcaaaaatat

SEQ ID NO: 281346 - DNA, 21 bp, Artificial sequence
  SiRNA target sequence
tggaagctaatcaaaaatatt

SEQ ID NO: 281347 - DNA, 21 bp, Artificial sequence
  SiRNA target sequence
ggaagctaatcaaaaatattc

SEQ ID NO: 281348 - DNA, 21 bp, Artificial sequence
  SiRNA target sequence
gaagctaatcaaaaatattca

SEQ ID NO: 281349 - DNA, 21 bp, Artificial sequence
  SiRNA target sequence
aagctaatcaaaaatattcat

SEQ ID NO: 281350 - DNA, 21 bp, Artificial sequence
  SiRNA target sequence
agctaatcaaaaatattcatt

SEQ ID NO: 281351 - DNA, 21 bp, Artificial sequence
  SiRNA target sequence
gctaatcaaaaatattcattt

SEQ ID NO: 281352 - DNA, 21 bp, Artificial sequence
  SiRNA target sequence
ctaatcaaaaatattcattta

SEQ ID NO: 281353 - DNA, 21 bp, Artificial sequence
  SiRNA target sequence
taatcaaaaatattcatttac

SEQ ID NO: 281354 - DNA, 21 bp, Artificial sequence
  SiRNA target sequence
aatcaaaaatattcatttacg

SEQ ID NO: 281355 - DNA, 21 bp, Artificial sequence
  SiRNA target sequence
atcaaaaatattcatttacga

SEQ ID NO: 281356 - DNA, 21 bp, Artificial sequence
  SiRNA target sequence
tcaaaaatattcatttacgac

SEQ ID NO: 281357 - DNA, 21 bp, Artificial sequence
  SiRNA target sequence
caaaaatattcatttacgact

SEQ ID NO: 281358 - DNA, 21 bp, Artificial sequence
  SiRNA target sequence
aaaaatattcatttacgactg

SEQ ID NO: 281359 - DNA, 21 bp, Artificial sequence
  SiRNA target sequence
aaaatattcatttacgactgc

SEQ ID NO: 281360 - DNA, 21 bp, Artificial sequence
  SiRNA target sequence
aaatattcatttacgactgct

SEQ ID NO: 281361 - DNA, 21 bp, Artificial sequence
  SiRNA target sequence
aatattcatttacgactgctt

SEQ ID NO: 281362 - DNA, 21 bp, Artificial sequence
  SiRNA target sequence
atattcatttacgactgcttc

SEQ ID NO: 281363 - DNA, 21 bp, Artificial sequence
  SiRNA target sequence
tattcatttacgactgcttct

SEQ ID NO: 281364 - DNA, 21 bp, Artificial sequence
  SiRNA target sequence
attcatttacgactgcttctt

SEQ ID NO: 281365 - DNA, 21 bp, Artificial sequence
  SiRNA target sequence
ttcatttacgactgcttcttc

SEQ ID NO: 281366 - DNA, 21 bp, Artificial sequence
  SiRNA target sequence
tcatttacgactgcttcttca

SEQ ID NO: 281367 - DNA, 21 bp, Artificial sequence
  SiRNA target sequence
catttacgactgcttcttcat

SEQ ID NO: 281368 - DNA, 21 bp, Artificial sequence
  SiRNA target sequence
atttacgactgcttcttcatt

SEQ ID NO: 281369 - DNA, 21 bp, Artificial sequence
  SiRNA target sequence
tttacgactgcttcttcattt

SEQ ID NO: 281370 - DNA, 21 bp, Artificial sequence
  SiRNA target sequence
ttacgactgcttcttcatttt

SEQ ID NO: 281371 - DNA, 21 bp, Artificial sequence
  SiRNA target sequence
tacgactgcttcttcattttt

SEQ ID NO: 281372 - DNA, 21 bp, Artificial sequence
  SiRNA target sequence
acgactgcttcttcatttttc

SEQ ID NO: 281373 - DNA, 21 bp, Artificial sequence
  SiRNA target sequence
cgactgcttcttcatttttcc

SEQ ID NO: 281374 - DNA, 21 bp, Artificial sequence
  SiRNA target sequence
gactgcttcttcatttttccg

SEQ ID NO: 281375 - DNA, 21 bp, Artificial sequence
  SiRNA target sequence
actgcttcttcatttttccgt

SEQ ID NO: 281376 - DNA, 21 bp, Artificial sequence
  SiRNA target sequence
ctgcttcttcatttttccgtg

SEQ ID NO: 281377 - DNA, 21 bp, Artificial sequence
  SiRNA target sequence
tgcttcttcatttttccgtga

SEQ ID NO: 281378 - DNA, 21 bp, Artificial sequence
  SiRNA target sequence
gcttcttcatttttccgtgaa

SEQ ID NO: 281379 - DNA, 21 bp, Artificial sequence
  SiRNA target sequence
cttcttcatttttccgtgaat

SEQ ID NO: 281380 - DNA, 21 bp, Artificial sequence
  SiRNA target sequence
ttcttcatttttccgtgaatg

SEQ ID NO: 281381 - DNA, 21 bp, Artificial sequence
  SiRNA target sequence
tcttcatttttccgtgaatgt

SEQ ID NO: 281382 - DNA, 21 bp, Artificial sequence
  SiRNA target sequence
cttcatttttccgtgaatgtg

SEQ ID NO: 281383 - DNA, 21 bp, Artificial sequence
  SiRNA target sequence
ttcatttttccgtgaatgtgg

SEQ ID NO: 281384 - DNA, 21 bp, Artificial sequence
  SiRNA target sequence
tcatttttccgtgaatgtggt

SEQ ID NO: 281385 - DNA, 21 bp, Artificial sequence
  SiRNA target sequence
catttttccgtgaatgtggta

SEQ ID NO: 281386 - DNA, 21 bp, Artificial sequence
  SiRNA target sequence
atttttccgtgaatgtggtat

SEQ ID NO: 281387 - DNA, 21 bp, Artificial sequence
  SiRNA target sequence
tttttccgtgaatgtggtata

SEQ ID NO: 281388 - DNA, 21 bp, Artificial sequence
  SiRNA target sequence
ttttccgtgaatgtggtatag

SEQ ID NO: 281389 - DNA, 21 bp, Artificial sequence
  SiRNA target sequence
tttccgtgaatgtggtatagt

SEQ ID NO: 281390 - DNA, 21 bp, Artificial sequence
  SiRNA target sequence
ttccgtgaatgtggtatagta

SEQ ID NO: 281391 - DNA, 21 bp, Artificial sequence
  SiRNA target sequence
tccgtgaatgtggtatagtag

SEQ ID NO: 281392 - DNA, 21 bp, Artificial sequence
  SiRNA target sequence
ccgtgaatgtggtatagtagc

SEQ ID NO: 281393 - DNA, 21 bp, Artificial sequence
  SiRNA target sequence
cgtgaatgtggtatagtagca

SEQ ID NO: 281394 - DNA, 21 bp, Artificial sequence
  SiRNA target sequence
gtgaatgtggtatagtagcat

SEQ ID NO: 281395 - DNA, 21 bp, Artificial sequence
  SiRNA target sequence
tgaatgtggtatagtagcata

SEQ ID NO: 281396 - DNA, 21 bp, Artificial sequence
  SiRNA target sequence
gaatgtggtatagtagcatat

SEQ ID NO: 281397 - DNA, 21 bp, Artificial sequence
  SiRNA target sequence
aatgtggtatagtagcatatg

SEQ ID NO: 281398 - DNA, 21 bp, Artificial sequence
  SiRNA target sequence
atgtggtatagtagcatatgg

SEQ ID NO: 281399 - DNA, 21 bp, Artificial sequence
  SiRNA target sequence
tgtggtatagtagcatatgga

SEQ ID NO: 281400 - DNA, 21 bp, Artificial sequence
  SiRNA target sequence
gtggtatagtagcatatggag

SEQ ID NO: 281401 - DNA, 21 bp, Artificial sequence
  SiRNA target sequence
tggtatagtagcatatggaga

SEQ ID NO: 281402 - DNA, 21 bp, Artificial sequence
  SiRNA target sequence
ggtatagtagcatatggagat

SEQ ID NO: 281403 - DNA, 21 bp, Artificial sequence
  SiRNA target sequence
gtatagtagcatatggagatg

SEQ ID NO: 281404 - DNA, 21 bp, Artificial sequence
  SiRNA target sequence
tatagtagcatatggagatga

SEQ ID NO: 281405 - DNA, 21 bp, Artificial sequence
  SiRNA target sequence
atagtagcatatggagatgat

SEQ ID NO: 281406 - DNA, 21 bp, Artificial sequence
  SiRNA target sequence
tagtagcatatggagatgatc

SEQ ID NO: 281407 - DNA, 21 bp, Artificial sequence
  SiRNA target sequence
agtagcatatggagatgatca

SEQ ID NO: 281408 - DNA, 21 bp, Artificial sequence
  SiRNA target sequence
gtagcatatggagatgatcat

SEQ ID NO: 281409 - DNA, 21 bp, Artificial sequence
  SiRNA target sequence
tagcatatggagatgatcatg

SEQ ID NO: 281410 - DNA, 21 bp, Artificial sequence
  SiRNA target sequence
agcatatggagatgatcatgt

SEQ ID NO: 281411 - DNA, 21 bp, Artificial sequence
  SiRNA target sequence
gcatatggagatgatcatgtc

SEQ ID NO: 281412 - DNA, 21 bp, Artificial sequence
  SiRNA target sequence
catatggagatgatcatgtcg

SEQ ID NO: 281413 - DNA, 21 bp, Artificial sequence
  SiRNA target sequence
atatggagatgatcatgtcgt

SEQ ID NO: 281414 - DNA, 21 bp, Artificial sequence
  SiRNA target sequence
tatggagatgatcatgtcgtt

SEQ ID NO: 281415 - DNA, 21 bp, Artificial sequence
  SiRNA target sequence
atggagatgatcatgtcgttt

SEQ ID NO: 281416 - DNA, 21 bp, Artificial sequence
  SiRNA target sequence
tggagatgatcatgtcgtttc

SEQ ID NO: 281417 - DNA, 21 bp, Artificial sequence
  SiRNA target sequence
ggagatgatcatgtcgtttct

SEQ ID NO: 281418 - DNA, 21 bp, Artificial sequence
  SiRNA target sequence
gagatgatcatgtcgtttctg

SEQ ID NO: 281419 - DNA, 21 bp, Artificial sequence
  SiRNA target sequence
agatgatcatgtcgtttctgt

SEQ ID NO: 281420 - DNA, 21 bp, Artificial sequence
  SiRNA target sequence
gatgatcatgtcgtttctgtt

SEQ ID NO: 281421 - DNA, 21 bp, Artificial sequence
  SiRNA target sequence
atgatcatgtcgtttctgttc

SEQ ID NO: 281422 - DNA, 21 bp, Artificial sequence
  SiRNA target sequence
tgatcatgtcgtttctgttcc

SEQ ID NO: 281423 - DNA, 21 bp, Artificial sequence
  SiRNA target sequence
gatcatgtcgtttctgttcct

SEQ ID NO: 281424 - DNA, 21 bp, Artificial sequence
  SiRNA target sequence
atcatgtcgtttctgttcctg

SEQ ID NO: 281425 - DNA, 21 bp, Artificial sequence
  SiRNA target sequence
tcatgtcgtttctgttcctga

SEQ ID NO: 281426 - DNA, 21 bp, Artificial sequence
  SiRNA target sequence
catgtcgtttctgttcctgaa

SEQ ID NO: 281427 - DNA, 21 bp, Artificial sequence
  SiRNA target sequence
atgtcgtttctgttcctgaaa

SEQ ID NO: 281428 - DNA, 21 bp, Artificial sequence
  SiRNA target sequence
tgtcgtttctgttcctgaaaa

SEQ ID NO: 281429 - DNA, 21 bp, Artificial sequence
  SiRNA target sequence
gtcgtttctgttcctgaaaaa

SEQ ID NO: 281430 - DNA, 21 bp, Artificial sequence
  SiRNA target sequence
tcgtttctgttcctgaaaaat

SEQ ID NO: 281431 - DNA, 21 bp, Artificial sequence
  SiRNA target sequence
cgtttctgttcctgaaaaata

SEQ ID NO: 281432 - DNA, 21 bp, Artificial sequence
  SiRNA target sequence
gtttctgttcctgaaaaatac

SEQ ID NO: 281433 - DNA, 21 bp, Artificial sequence
  SiRNA target sequence
tttctgttcctgaaaaatact

SEQ ID NO: 281434 - DNA, 21 bp, Artificial sequence
  SiRNA target sequence
ttctgttcctgaaaaatactt

SEQ ID NO: 281435 - DNA, 21 bp, Artificial sequence
  SiRNA target sequence
tctgttcctgaaaaatactta

SEQ ID NO: 281436 - DNA, 21 bp, Artificial sequence
  SiRNA target sequence
ctgttcctgaaaaatacttat

SEQ ID NO: 281437 - DNA, 21 bp, Artificial sequence
  SiRNA target sequence
tgttcctgaaaaatacttatc

SEQ ID NO: 281438 - DNA, 21 bp, Artificial sequence
  SiRNA target sequence
gttcctgaaaaatacttatct

SEQ ID NO: 281439 - DNA, 21 bp, Artificial sequence
  SiRNA target sequence
ttcctgaaaaatacttatctg

SEQ ID NO: 281440 - DNA, 21 bp, Artificial sequence
  SiRNA target sequence
tcctgaaaaatacttatctgt

SEQ ID NO: 281441 - DNA, 21 bp, Artificial sequence
  SiRNA target sequence
cctgaaaaatacttatctgtg

SEQ ID NO: 281442 - DNA, 21 bp, Artificial sequence
  SiRNA target sequence
ctgaaaaatacttatctgtgt

SEQ ID NO: 281443 - DNA, 21 bp, Artificial sequence
  SiRNA target sequence
tgaaaaatacttatctgtgtt

SEQ ID NO: 281444 - DNA, 21 bp, Artificial sequence
  SiRNA target sequence
gaaaaatacttatctgtgttt

SEQ ID NO: 281445 - DNA, 21 bp, Artificial sequence
  SiRNA target sequence
aaaaatacttatctgtgttta

SEQ ID NO: 281446 - DNA, 21 bp, Artificial sequence
  SiRNA target sequence
aaaatacttatctgtgtttaa

SEQ ID NO: 281447 - DNA, 21 bp, Artificial sequence
  SiRNA target sequence
aaatacttatctgtgtttaat

SEQ ID NO: 281448 - DNA, 21 bp, Artificial sequence
  SiRNA target sequence
aatacttatctgtgtttaatc

SEQ ID NO: 281449 - DNA, 21 bp, Artificial sequence
  SiRNA target sequence
atacttatctgtgtttaatca

SEQ ID NO: 281450 - DNA, 21 bp, Artificial sequence
  SiRNA target sequence
tacttatctgtgtttaatcaa

SEQ ID NO: 281451 - DNA, 21 bp, Artificial sequence
  SiRNA target sequence
acttatctgtgtttaatcaac

SEQ ID NO: 281452 - DNA, 21 bp, Artificial sequence
  SiRNA target sequence
cttatctgtgtttaatcaaca

SEQ ID NO: 281453 - DNA, 21 bp, Artificial sequence
  SiRNA target sequence
ttatctgtgtttaatcaacag

SEQ ID NO: 281454 - DNA, 21 bp, Artificial sequence
  SiRNA target sequence
tatctgtgtttaatcaacaga

SEQ ID NO: 281455 - DNA, 21 bp, Artificial sequence
  SiRNA target sequence
atctgtgtttaatcaacagac

SEQ ID NO: 281456 - DNA, 21 bp, Artificial sequence
  SiRNA target sequence
tctgtgtttaatcaacagaca

SEQ ID NO: 281457 - DNA, 21 bp, Artificial sequence
  SiRNA target sequence
ctgtgtttaatcaacagacac

SEQ ID NO: 281458 - DNA, 21 bp, Artificial sequence
  SiRNA target sequence
tgtgtttaatcaacagacact

SEQ ID NO: 281459 - DNA, 21 bp, Artificial sequence
  SiRNA target sequence
gtgtttaatcaacagacactt

SEQ ID NO: 281460 - DNA, 21 bp, Artificial sequence
  SiRNA target sequence
tgtttaatcaacagacacttc

SEQ ID NO: 281461 - DNA, 21 bp, Artificial sequence
  SiRNA target sequence
gtttaatcaacagacacttcc

SEQ ID NO: 281462 - DNA, 21 bp, Artificial sequence
  SiRNA target sequence
tttaatcaacagacacttcca

SEQ ID NO: 281463 - DNA, 21 bp, Artificial sequence
  SiRNA target sequence
ttaatcaacagacacttccag

SEQ ID NO: 281464 - DNA, 21 bp, Artificial sequence
  SiRNA target sequence
taatcaacagacacttccagt

SEQ ID NO: 281465 - DNA, 21 bp, Artificial sequence
  SiRNA target sequence
aatcaacagacacttccagtg

SEQ ID NO: 281466 - DNA, 21 bp, Artificial sequence
  SiRNA target sequence
atcaacagacacttccagtgt

SEQ ID NO: 281467 - DNA, 21 bp, Artificial sequence
  SiRNA target sequence
tcaacagacacttccagtgtt

SEQ ID NO: 281468 - DNA, 21 bp, Artificial sequence
  SiRNA target sequence
caacagacacttccagtgttg

SEQ ID NO: 281469 - DNA, 21 bp, Artificial sequence
  SiRNA target sequence
aacagacacttccagtgttga

SEQ ID NO: 281470 - DNA, 21 bp, Artificial sequence
  SiRNA target sequence
acagacacttccagtgttgat

SEQ ID NO: 281471 - DNA, 21 bp, Artificial sequence
  SiRNA target sequence
cagacacttccagtgttgatg

SEQ ID NO: 281472 - DNA, 21 bp, Artificial sequence
  SiRNA target sequence
agacacttccagtgttgatga

SEQ ID NO: 281473 - DNA, 21 bp, Artificial sequence
  SiRNA target sequence
gacacttccagtgttgatgag

SEQ ID NO: 281474 - DNA, 21 bp, Artificial sequence
  SiRNA target sequence
acacttccagtgttgatgagt

SEQ ID NO: 281475 - DNA, 21 bp, Artificial sequence
  SiRNA target sequence
cacttccagtgttgatgagta

SEQ ID NO: 281476 - DNA, 21 bp, Artificial sequence
  SiRNA target sequence
acttccagtgttgatgagtaa

SEQ ID NO: 281477 - DNA, 21 bp, Artificial sequence
  SiRNA target sequence
cttccagtgttgatgagtaaa

SEQ ID NO: 281478 - DNA, 21 bp, Artificial sequence
  SiRNA target sequence
ttccagtgttgatgagtaaat

SEQ ID NO: 281479 - DNA, 21 bp, Artificial sequence
  SiRNA target sequence
tccagtgttgatgagtaaatt

SEQ ID NO: 281480 - DNA, 21 bp, Artificial sequence
  SiRNA target sequence
ccagtgttgatgagtaaattc

SEQ ID NO: 281481 - DNA, 21 bp, Artificial sequence
  SiRNA target sequence
cagtgttgatgagtaaattcg

SEQ ID NO: 281482 - DNA, 21 bp, Artificial sequence
  SiRNA target sequence
agtgttgatgagtaaattcgg

SEQ ID NO: 281483 - DNA, 21 bp, Artificial sequence
  SiRNA target sequence
gtgttgatgagtaaattcggg

SEQ ID NO: 281484 - DNA, 21 bp, Artificial sequence
  SiRNA target sequence
tgttgatgagtaaattcggga

SEQ ID NO: 281485 - DNA, 21 bp, Artificial sequence
  SiRNA target sequence
gttgatgagtaaattcgggat

SEQ ID NO: 281486 - DNA, 21 bp, Artificial sequence
  SiRNA target sequence
ttgatgagtaaattcgggatg

SEQ ID NO: 281487 - DNA, 21 bp, Artificial sequence
  SiRNA target sequence
tgatgagtaaattcgggatgt

SEQ ID NO: 281488 - DNA, 21 bp, Artificial sequence
  SiRNA target sequence
gatgagtaaattcgggatgtt

SEQ ID NO: 281489 - DNA, 21 bp, Artificial sequence
  SiRNA target sequence
atgagtaaattcgggatgttt

SEQ ID NO: 281490 - DNA, 21 bp, Artificial sequence
  SiRNA target sequence
tgagtaaattcgggatgtttt

SEQ ID NO: 281491 - DNA, 21 bp, Artificial sequence
  SiRNA target sequence
gagtaaattcgggatgtttta

SEQ ID NO: 281492 - DNA, 21 bp, Artificial sequence
  SiRNA target sequence
agtaaattcgggatgttttat

SEQ ID NO: 281493 - DNA, 21 bp, Artificial sequence
  SiRNA target sequence
gtaaattcgggatgttttata

SEQ ID NO: 281494 - DNA, 21 bp, Artificial sequence
  SiRNA target sequence
taaattcgggatgttttatac

SEQ ID NO: 281495 - DNA, 21 bp, Artificial sequence
  SiRNA target sequence
aaattcgggatgttttatacc

SEQ ID NO: 281496 - DNA, 21 bp, Artificial sequence
  SiRNA target sequence
aattcgggatgttttatacca

SEQ ID NO: 281497 - DNA, 21 bp, Artificial sequence
  SiRNA target sequence
attcgggatgttttataccat

SEQ ID NO: 281498 - DNA, 21 bp, Artificial sequence
  SiRNA target sequence
ttcgggatgttttataccata

SEQ ID NO: 281499 - DNA, 21 bp, Artificial sequence
  SiRNA target sequence
tcgggatgttttataccatag

SEQ ID NO: 281500 - DNA, 21 bp, Artificial sequence
  SiRNA target sequence
cgggatgttttataccataga

SEQ ID NO: 281501 - DNA, 21 bp, Artificial sequence
  SiRNA target sequence
gggatgttttataccatagaa

SEQ ID NO: 281502 - DNA, 21 bp, Artificial sequence
  SiRNA target sequence
ggatgttttataccatagaaa

SEQ ID NO: 281503 - DNA, 21 bp, Artificial sequence
  SiRNA target sequence
gatgttttataccatagaaac

SEQ ID NO: 281504 - DNA, 21 bp, Artificial sequence
  SiRNA target sequence
atgttttataccatagaaacc

SEQ ID NO: 281505 - DNA, 21 bp, Artificial sequence
  SiRNA target sequence
tgttttataccatagaaacca

SEQ ID NO: 281506 - DNA, 21 bp, Artificial sequence
  SiRNA target sequence
gttttataccatagaaaccaa

SEQ ID NO: 281507 - DNA, 21 bp, Artificial sequence
  SiRNA target sequence
ttttataccatagaaaccaag

SEQ ID NO: 281508 - DNA, 21 bp, Artificial sequence
  SiRNA target sequence
tttataccatagaaaccaagg

SEQ ID NO: 281509 - DNA, 21 bp, Artificial sequence
  SiRNA target sequence
ttataccatagaaaccaagga

SEQ ID NO: 281510 - DNA, 21 bp, Artificial sequence
  SiRNA target sequence
tataccatagaaaccaaggat

SEQ ID NO: 281511 - DNA, 21 bp, Artificial sequence
  SiRNA target sequence
ataccatagaaaccaaggatg

SEQ ID NO: 281512 - DNA, 21 bp, Artificial sequence
  SiRNA target sequence
taccatagaaaccaaggatga

SEQ ID NO: 281513 - DNA, 21 bp, Artificial sequence
  SiRNA target sequence
accatagaaaccaaggatgac

SEQ ID NO: 281514 - DNA, 21 bp, Artificial sequence
  SiRNA target sequence
ccatagaaaccaaggatgaca

SEQ ID NO: 281515 - DNA, 21 bp, Artificial sequence
  SiRNA target sequence
catagaaaccaaggatgacac

SEQ ID NO: 281516 - DNA, 21 bp, Artificial sequence
  SiRNA target sequence
atagaaaccaaggatgacaca

SEQ ID NO: 281517 - DNA, 21 bp, Artificial sequence
  SiRNA target sequence
tagaaaccaaggatgacacag

SEQ ID NO: 281518 - DNA, 21 bp, Artificial sequence
  SiRNA target sequence
agaaaccaaggatgacacaga

SEQ ID NO: 281519 - DNA, 21 bp, Artificial sequence
  SiRNA target sequence
gaaaccaaggatgacacagag

SEQ ID NO: 281520 - DNA, 21 bp, Artificial sequence
  SiRNA target sequence
aaaccaaggatgacacagaga

SEQ ID NO: 281521 - DNA, 21 bp, Artificial sequence
  SiRNA target sequence
aaccaaggatgacacagagat

SEQ ID NO: 281522 - DNA, 21 bp, Artificial sequence
  SiRNA target sequence
accaaggatgacacagagatt

SEQ ID NO: 281523 - DNA, 21 bp, Artificial sequence
  SiRNA target sequence
ccaaggatgacacagagattg

SEQ ID NO: 281524 - DNA, 21 bp, Artificial sequence
  SiRNA target sequence
caaggatgacacagagattga

SEQ ID NO: 281525 - DNA, 21 bp, Artificial sequence
  SiRNA target sequence
aaggatgacacagagattgat

SEQ ID NO: 281526 - DNA, 21 bp, Artificial sequence
  SiRNA target sequence
aggatgacacagagattgatt

SEQ ID NO: 281527 - DNA, 21 bp, Artificial sequence
  SiRNA target sequence
ggatgacacagagattgattt

SEQ ID NO: 281528 - DNA, 21 bp, Artificial sequence
  SiRNA target sequence
gatgacacagagattgatttc

SEQ ID NO: 281529 - DNA, 21 bp, Artificial sequence
  SiRNA target sequence
atgacacagagattgatttcc

SEQ ID NO: 281530 - DNA, 21 bp, Artificial sequence
  SiRNA target sequence
tgacacagagattgatttcct

SEQ ID NO: 281531 - DNA, 21 bp, Artificial sequence
  SiRNA target sequence
gacacagagattgatttcctt

SEQ ID NO: 281532 - DNA, 21 bp, Artificial sequence
  SiRNA target sequence
acacagagattgatttccttt

SEQ ID NO: 281533 - DNA, 21 bp, Artificial sequence
  SiRNA target sequence
cacagagattgatttcctttc

SEQ ID NO: 281534 - DNA, 21 bp, Artificial sequence
  SiRNA target sequence
acagagattgatttcctttcg

SEQ ID NO: 281535 - DNA, 21 bp, Artificial sequence
  SiRNA target sequence
cagagattgatttcctttcga

SEQ ID NO: 281536 - DNA, 21 bp, Artificial sequence
  SiRNA target sequence
agagattgatttcctttcgag

SEQ ID NO: 281537 - DNA, 21 bp, Artificial sequence
  SiRNA target sequence
gagattgatttcctttcgagg

SEQ ID NO: 281538 - DNA, 21 bp, Artificial sequence
  SiRNA target sequence
agattgatttcctttcgagga

SEQ ID NO: 281539 - DNA, 21 bp, Artificial sequence
  SiRNA target sequence
gattgatttcctttcgaggaa

SEQ ID NO: 281540 - DNA, 21 bp, Artificial sequence
  SiRNA target sequence
attgatttcctttcgaggaaa

SEQ ID NO: 281541 - DNA, 21 bp, Artificial sequence
  SiRNA target sequence
ttgatttcctttcgaggaaat

SEQ ID NO: 281542 - DNA, 21 bp, Artificial sequence
  SiRNA target sequence
tgatttcctttcgaggaaatt

SEQ ID NO: 281543 - DNA, 21 bp, Artificial sequence
  SiRNA target sequence
gatttcctttcgaggaaattg

SEQ ID NO: 281544 - DNA, 21 bp, Artificial sequence
  SiRNA target sequence
atttcctttcgaggaaattgg

SEQ ID NO: 281545 - DNA, 21 bp, Artificial sequence
  SiRNA target sequence
tttcctttcgaggaaattgga

SEQ ID NO: 281546 - DNA, 21 bp, Artificial sequence
  SiRNA target sequence
ttcctttcgaggaaattggaa

SEQ ID NO: 281547 - DNA, 21 bp, Artificial sequence
  SiRNA target sequence
tcctttcgaggaaattggaag

SEQ ID NO: 281548 - DNA, 21 bp, Artificial sequence
  SiRNA target sequence
cctttcgaggaaattggaaga

SEQ ID NO: 281549 - DNA, 21 bp, Artificial sequence
  SiRNA target sequence
ctttcgaggaaattggaagat

SEQ ID NO: 281550 - DNA, 21 bp, Artificial sequence
  SiRNA target sequence
tttcgaggaaattggaagatg

SEQ ID NO: 281551 - DNA, 21 bp, Artificial sequence
  SiRNA target sequence
ttcgaggaaattggaagatgt

SEQ ID NO: 281552 - DNA, 21 bp, Artificial sequence
  SiRNA target sequence
tcgaggaaattggaagatgtg

SEQ ID NO: 281553 - DNA, 21 bp, Artificial sequence
  SiRNA target sequence
cgaggaaattggaagatgtgt

SEQ ID NO: 281554 - DNA, 21 bp, Artificial sequence
  SiRNA target sequence
gaggaaattggaagatgtgtc

SEQ ID NO: 281555 - DNA, 21 bp, Artificial sequence
  SiRNA target sequence
aggaaattggaagatgtgtcg

SEQ ID NO: 281556 - DNA, 21 bp, Artificial sequence
  SiRNA target sequence
ggaaattggaagatgtgtcgt

SEQ ID NO: 281557 - DNA, 21 bp, Artificial sequence
  SiRNA target sequence
gaaattggaagatgtgtcgta

SEQ ID NO: 281558 - DNA, 21 bp, Artificial sequence
  SiRNA target sequence
aaattggaagatgtgtcgtac

SEQ ID NO: 281559 - DNA, 21 bp, Artificial sequence
  SiRNA target sequence
aattggaagatgtgtcgtact

SEQ ID NO: 281560 - DNA, 21 bp, Artificial sequence
  SiRNA target sequence
attggaagatgtgtcgtactt

SEQ ID NO: 281561 - DNA, 21 bp, Artificial sequence
  SiRNA target sequence
ttggaagatgtgtcgtacttg

SEQ ID NO: 281562 - DNA, 21 bp, Artificial sequence
  SiRNA target sequence
tggaagatgtgtcgtacttga

SEQ ID NO: 281563 - DNA, 21 bp, Artificial sequence
  SiRNA target sequence
ggaagatgtgtcgtacttgaa

SEQ ID NO: 281564 - DNA, 21 bp, Artificial sequence
  SiRNA target sequence
gaagatgtgtcgtacttgaag

SEQ ID NO: 281565 - DNA, 21 bp, Artificial sequence
  SiRNA target sequence
aagatgtgtcgtacttgaagc

SEQ ID NO: 281566 - DNA, 21 bp, Artificial sequence
  SiRNA target sequence
agatgtgtcgtacttgaagcg

SEQ ID NO: 281567 - DNA, 21 bp, Artificial sequence
  SiRNA target sequence
gatgtgtcgtacttgaagcgg

SEQ ID NO: 281568 - DNA, 21 bp, Artificial sequence
  SiRNA target sequence
atgtgtcgtacttgaagcgga

SEQ ID NO: 281569 - DNA, 21 bp, Artificial sequence
  SiRNA target sequence
tgtgtcgtacttgaagcggaa

SEQ ID NO: 281570 - DNA, 21 bp, Artificial sequence
  SiRNA target sequence
gtgtcgtacttgaagcggaat

SEQ ID NO: 281571 - DNA, 21 bp, Artificial sequence
  SiRNA target sequence
tgtcgtacttgaagcggaatt

SEQ ID NO: 281572 - DNA, 21 bp, Artificial sequence
  SiRNA target sequence
gtcgtacttgaagcggaattt

SEQ ID NO: 281573 - DNA, 21 bp, Artificial sequence
  SiRNA target sequence
tcgtacttgaagcggaatttt

SEQ ID NO: 281574 - DNA, 21 bp, Artificial sequence
  SiRNA target sequence
cgtacttgaagcggaattttg

SEQ ID NO: 281575 - DNA, 21 bp, Artificial sequence
  SiRNA target sequence
gtacttgaagcggaattttgt

SEQ ID NO: 281576 - DNA, 21 bp, Artificial sequence
  SiRNA target sequence
tacttgaagcggaattttgtt

SEQ ID NO: 281577 - DNA, 21 bp, Artificial sequence
  SiRNA target sequence
acttgaagcggaattttgttt

SEQ ID NO: 281578 - DNA, 21 bp, Artificial sequence
  SiRNA target sequence
cttgaagcggaattttgttta

SEQ ID NO: 281579 - DNA, 21 bp, Artificial sequence
  SiRNA target sequence
ttgaagcggaattttgtttat

SEQ ID NO: 281580 - DNA, 21 bp, Artificial sequence
  SiRNA target sequence
tgaagcggaattttgtttatg

SEQ ID NO: 281581 - DNA, 21 bp, Artificial sequence
  SiRNA target sequence
gaagcggaattttgtttatga

SEQ ID NO: 281582 - DNA, 21 bp, Artificial sequence
  SiRNA target sequence
aagcggaattttgtttatgac

SEQ ID NO: 281583 - DNA, 21 bp, Artificial sequence
  SiRNA target sequence
agcggaattttgtttatgacg

SEQ ID NO: 281584 - DNA, 21 bp, Artificial sequence
  SiRNA target sequence
gcggaattttgtttatgacga

SEQ ID NO: 281585 - DNA, 21 bp, Artificial sequence
  SiRNA target sequence
cggaattttgtttatgacgaa

SEQ ID NO: 281586 - DNA, 21 bp, Artificial sequence
  SiRNA target sequence
ggaattttgtttatgacgaat

SEQ ID NO: 281587 - DNA, 21 bp, Artificial sequence
  SiRNA target sequence
gaattttgtttatgacgaatc

SEQ ID NO: 281588 - DNA, 21 bp, Artificial sequence
  SiRNA target sequence
aattttgtttatgacgaatct

SEQ ID NO: 281589 - DNA, 21 bp, Artificial sequence
  SiRNA target sequence
attttgtttatgacgaatcta

SEQ ID NO: 281590 - DNA, 21 bp, Artificial sequence
  SiRNA target sequence
ttttgtttatgacgaatctag

SEQ ID NO: 281591 - DNA, 21 bp, Artificial sequence
  SiRNA target sequence
tttgtttatgacgaatctagg

SEQ ID NO: 281592 - DNA, 21 bp, Artificial sequence
  SiRNA target sequence
ttgtttatgacgaatctaggc

SEQ ID NO: 281593 - DNA, 21 bp, Artificial sequence
  SiRNA target sequence
tgtttatgacgaatctaggca

SEQ ID NO: 281594 - DNA, 21 bp, Artificial sequence
  SiRNA target sequence
gtttatgacgaatctaggcaa

SEQ ID NO: 281595 - DNA, 21 bp, Artificial sequence
  SiRNA target sequence
tttatgacgaatctaggcaac

SEQ ID NO: 281596 - DNA, 21 bp, Artificial sequence
  SiRNA target sequence
ttatgacgaatctaggcaacg

SEQ ID NO: 281597 - DNA, 21 bp, Artificial sequence
  SiRNA target sequence
tatgacgaatctaggcaacgt

SEQ ID NO: 281598 - DNA, 21 bp, Artificial sequence
  SiRNA target sequence
atgacgaatctaggcaacgtt

SEQ ID NO: 281599 - DNA, 21 bp, Artificial sequence
  SiRNA target sequence
tgacgaatctaggcaacgtta

SEQ ID NO: 281600 - DNA, 21 bp, Artificial sequence
  SiRNA target sequence
gacgaatctaggcaacgttat

SEQ ID NO: 281601 - DNA, 21 bp, Artificial sequence
  SiRNA target sequence
acgaatctaggcaacgttata

SEQ ID NO: 281602 - DNA, 21 bp, Artificial sequence
  SiRNA target sequence
cgaatctaggcaacgttatat

SEQ ID NO: 281603 - DNA, 21 bp, Artificial sequence
  SiRNA target sequence
gaatctaggcaacgttatatt

SEQ ID NO: 281604 - DNA, 21 bp, Artificial sequence
  SiRNA target sequence
aatctaggcaacgttatattg

SEQ ID NO: 281605 - DNA, 21 bp, Artificial sequence
  SiRNA target sequence
atctaggcaacgttatattgc

SEQ ID NO: 281606 - DNA, 21 bp, Artificial sequence
  SiRNA target sequence
tctaggcaacgttatattgct

SEQ ID NO: 281607 - DNA, 21 bp, Artificial sequence
  SiRNA target sequence
ctaggcaacgttatattgctc

SEQ ID NO: 281608 - DNA, 21 bp, Artificial sequence
  SiRNA target sequence
taggcaacgttatattgctcc

SEQ ID NO: 281609 - DNA, 21 bp, Artificial sequence
  SiRNA target sequence
aggcaacgttatattgctcct

SEQ ID NO: 281610 - DNA, 21 bp, Artificial sequence
  SiRNA target sequence
ggcaacgttatattgctcctc

SEQ ID NO: 281611 - DNA, 21 bp, Artificial sequence
  SiRNA target sequence
gcaacgttatattgctcctct

SEQ ID NO: 281612 - DNA, 21 bp, Artificial sequence
  SiRNA target sequence
caacgttatattgctcctctt

SEQ ID NO: 281613 - DNA, 21 bp, Artificial sequence
  SiRNA target sequence
aacgttatattgctcctcttt

SEQ ID NO: 281614 - DNA, 21 bp, Artificial sequence
  SiRNA target sequence
acgttatattgctcctctttc

SEQ ID NO: 281615 - DNA, 21 bp, Artificial sequence
  SiRNA target sequence
cgttatattgctcctctttct

SEQ ID NO: 281616 - DNA, 21 bp, Artificial sequence
  SiRNA target sequence
gttatattgctcctctttctc

SEQ ID NO: 281617 - DNA, 21 bp, Artificial sequence
  SiRNA target sequence
ttatattgctcctctttctct

SEQ ID NO: 281618 - DNA, 21 bp, Artificial sequence
  SiRNA target sequence
tatattgctcctctttctctg

SEQ ID NO: 281619 - DNA, 21 bp, Artificial sequence
  SiRNA target sequence
atattgctcctctttctctgg

SEQ ID NO: 281620 - DNA, 21 bp, Artificial sequence
  SiRNA target sequence
tattgctcctctttctctgga

SEQ ID NO: 281621 - DNA, 21 bp, Artificial sequence
  SiRNA target sequence
attgctcctctttctctggat

SEQ ID NO: 281622 - DNA, 21 bp, Artificial sequence
  SiRNA target sequence
ttgctcctctttctctggatg

SEQ ID NO: 281623 - DNA, 21 bp, Artificial sequence
  SiRNA target sequence
tgctcctctttctctggatgt

SEQ ID NO: 281624 - DNA, 21 bp, Artificial sequence
  SiRNA target sequence
gctcctctttctctggatgtt

SEQ ID NO: 281625 - DNA, 21 bp, Artificial sequence
  SiRNA target sequence
ctcctctttctctggatgtta

SEQ ID NO: 281626 - DNA, 21 bp, Artificial sequence
  SiRNA target sequence
tcctctttctctggatgttat

SEQ ID NO: 281627 - DNA, 21 bp, Artificial sequence
  SiRNA target sequence
cctctttctctggatgttata

SEQ ID NO: 281628 - DNA, 21 bp, Artificial sequence
  SiRNA target sequence
ctctttctctggatgttatat

SEQ ID NO: 281629 - DNA, 21 bp, Artificial sequence
  SiRNA target sequence
tctttctctggatgttatatt

SEQ ID NO: 281630 - DNA, 21 bp, Artificial sequence
  SiRNA target sequence
ctttctctggatgttatattg

SEQ ID NO: 281631 - DNA, 21 bp, Artificial sequence
  SiRNA target sequence
tttctctggatgttatattgg

SEQ ID NO: 281632 - DNA, 21 bp, Artificial sequence
  SiRNA target sequence
ttctctggatgttatattgga

SEQ ID NO: 281633 - DNA, 21 bp, Artificial sequence
  SiRNA target sequence
tctctggatgttatattggaa

SEQ ID NO: 281634 - DNA, 21 bp, Artificial sequence
  SiRNA target sequence
ctctggatgttatattggaaa

SEQ ID NO: 281635 - DNA, 21 bp, Artificial sequence
  SiRNA target sequence
tctggatgttatattggaaat

SEQ ID NO: 281636 - DNA, 21 bp, Artificial sequence
  SiRNA target sequence
ctggatgttatattggaaatg

SEQ ID NO: 281637 - DNA, 21 bp, Artificial sequence
  SiRNA target sequence
tggatgttatattggaaatgc

SEQ ID NO: 281638 - DNA, 21 bp, Artificial sequence
  SiRNA target sequence
ggatgttatattggaaatgcc

SEQ ID NO: 281639 - DNA, 21 bp, Artificial sequence
  SiRNA target sequence
gatgttatattggaaatgccc

SEQ ID NO: 281640 - DNA, 21 bp, Artificial sequence
  SiRNA target sequence
atgttatattggaaatgccca

SEQ ID NO: 281641 - DNA, 21 bp, Artificial sequence
  SiRNA target sequence
tgttatattggaaatgcccat

SEQ ID NO: 281642 - DNA, 21 bp, Artificial sequence
  SiRNA target sequence
gttatattggaaatgcccatg

SEQ ID NO: 281643 - DNA, 21 bp, Artificial sequence
  SiRNA target sequence
ttatattggaaatgcccatgt

SEQ ID NO: 281644 - DNA, 21 bp, Artificial sequence
  SiRNA target sequence
tatattggaaatgcccatgtg

SEQ ID NO: 281645 - DNA, 21 bp, Artificial sequence
  SiRNA target sequence
atattggaaatgcccatgtgg

SEQ ID NO: 281646 - DNA, 21 bp, Artificial sequence
  SiRNA target sequence
tattggaaatgcccatgtgga

SEQ ID NO: 281647 - DNA, 21 bp, Artificial sequence
  SiRNA target sequence
attggaaatgcccatgtggac

SEQ ID NO: 281648 - DNA, 21 bp, Artificial sequence
  SiRNA target sequence
ttggaaatgcccatgtggacc

SEQ ID NO: 281649 - DNA, 21 bp, Artificial sequence
  SiRNA target sequence
tggaaatgcccatgtggacca

SEQ ID NO: 281650 - DNA, 21 bp, Artificial sequence
  SiRNA target sequence
ggaaatgcccatgtggaccaa

SEQ ID NO: 281651 - DNA, 21 bp, Artificial sequence
  SiRNA target sequence
gaaatgcccatgtggaccaaa

SEQ ID NO: 281652 - DNA, 21 bp, Artificial sequence
  SiRNA target sequence
aaatgcccatgtggaccaaat

SEQ ID NO: 281653 - DNA, 21 bp, Artificial sequence
  SiRNA target sequence
aatgcccatgtggaccaaatc

SEQ ID NO: 281654 - DNA, 21 bp, Artificial sequence
  SiRNA target sequence
atgcccatgtggaccaaatct

SEQ ID NO: 281655 - DNA, 21 bp, Artificial sequence
  SiRNA target sequence
tgcccatgtggaccaaatcta

SEQ ID NO: 281656 - DNA, 21 bp, Artificial sequence
  SiRNA target sequence
gcccatgtggaccaaatctag

SEQ ID NO: 281657 - DNA, 21 bp, Artificial sequence
  SiRNA target sequence
cccatgtggaccaaatctagc

SEQ ID NO: 281658 - DNA, 21 bp, Artificial sequence
  SiRNA target sequence
ccatgtggaccaaatctagca

SEQ ID NO: 281659 - DNA, 21 bp, Artificial sequence
  SiRNA target sequence
catgtggaccaaatctagcag

SEQ ID NO: 281660 - DNA, 21 bp, Artificial sequence
  SiRNA target sequence
atgtggaccaaatctagcagg

SEQ ID NO: 281661 - DNA, 21 bp, Artificial sequence
  SiRNA target sequence
tgtggaccaaatctagcaggg

SEQ ID NO: 281662 - DNA, 21 bp, Artificial sequence
  SiRNA target sequence
gtggaccaaatctagcaggga

SEQ ID NO: 281663 - DNA, 21 bp, Artificial sequence
  SiRNA target sequence
tggaccaaatctagcagggac

SEQ ID NO: 281664 - DNA, 21 bp, Artificial sequence
  SiRNA target sequence
ggaccaaatctagcagggaca

SEQ ID NO: 281665 - DNA, 21 bp, Artificial sequence
  SiRNA target sequence
gaccaaatctagcagggacat

SEQ ID NO: 281666 - DNA, 21 bp, Artificial sequence
  SiRNA target sequence
accaaatctagcagggacatt

SEQ ID NO: 281667 - DNA, 21 bp, Artificial sequence
  SiRNA target sequence
ccaaatctagcagggacattg

SEQ ID NO: 281668 - DNA, 21 bp, Artificial sequence
  SiRNA target sequence
caaatctagcagggacattgt

SEQ ID NO: 281669 - DNA, 21 bp, Artificial sequence
  SiRNA target sequence
aaatctagcagggacattgta

SEQ ID NO: 281670 - DNA, 21 bp, Artificial sequence
  SiRNA target sequence
aatctagcagggacattgtaa

SEQ ID NO: 281671 - DNA, 21 bp, Artificial sequence
  SiRNA target sequence
atctagcagggacattgtaac

SEQ ID NO: 281672 - DNA, 21 bp, Artificial sequence
  SiRNA target sequence
tctagcagggacattgtaaca

SEQ ID NO: 281673 - DNA, 21 bp, Artificial sequence
  SiRNA target sequence
ctagcagggacattgtaacaa

SEQ ID NO: 281674 - DNA, 21 bp, Artificial sequence
  SiRNA target sequence
tagcagggacattgtaacaaa

SEQ ID NO: 281675 - DNA, 21 bp, Artificial sequence
  SiRNA target sequence
agcagggacattgtaacaaat

SEQ ID NO: 281676 - DNA, 21 bp, Artificial sequence
  SiRNA target sequence
gcagggacattgtaacaaatg

SEQ ID NO: 281677 - DNA, 21 bp, Artificial sequence
  SiRNA target sequence
cagggacattgtaacaaatgt

SEQ ID NO: 281678 - DNA, 21 bp, Artificial sequence
  SiRNA target sequence
agggacattgtaacaaatgta

SEQ ID NO: 281679 - DNA, 21 bp, Artificial sequence
  SiRNA target sequence
gggacattgtaacaaatgtat

SEQ ID NO: 281680 - DNA, 21 bp, Artificial sequence
  SiRNA target sequence
ggacattgtaacaaatgtatt

SEQ ID NO: 281681 - DNA, 21 bp, Artificial sequence
  SiRNA target sequence
gacattgtaacaaatgtattc

SEQ ID NO: 281682 - DNA, 21 bp, Artificial sequence
  SiRNA target sequence
acattgtaacaaatgtattct

SEQ ID NO: 281683 - DNA, 21 bp, Artificial sequence
  SiRNA target sequence
cattgtaacaaatgtattctg

SEQ ID NO: 281684 - DNA, 21 bp, Artificial sequence
  SiRNA target sequence
attgtaacaaatgtattctgt

SEQ ID NO: 281685 - DNA, 21 bp, Artificial sequence
  SiRNA target sequence
ttgtaacaaatgtattctgta

SEQ ID NO: 281686 - DNA, 21 bp, Artificial sequence
  SiRNA target sequence
tgtaacaaatgtattctgtaa

SEQ ID NO: 281687 - DNA, 21 bp, Artificial sequence
  SiRNA target sequence
gtaacaaatgtattctgtaat

SEQ ID NO: 281688 - DNA, 21 bp, Artificial sequence
  SiRNA target sequence
taacaaatgtattctgtaatt

SEQ ID NO: 281689 - DNA, 21 bp, Artificial sequence
  SiRNA target sequence
aacaaatgtattctgtaattt

SEQ ID NO: 281690 - DNA, 21 bp, Artificial sequence
  SiRNA target sequence
acaaatgtattctgtaatttg

SEQ ID NO: 281691 - DNA, 21 bp, Artificial sequence
  SiRNA target sequence
caaatgtattctgtaatttgg

SEQ ID NO: 281692 - DNA, 21 bp, Artificial sequence
  SiRNA target sequence
aaatgtattctgtaatttgga

SEQ ID NO: 281693 - DNA, 21 bp, Artificial sequence
  SiRNA target sequence
aatgtattctgtaatttggaa

SEQ ID NO: 281694 - DNA, 21 bp, Artificial sequence
  SiRNA target sequence
atgtattctgtaatttggaac

SEQ ID NO: 281695 - DNA, 21 bp, Artificial sequence
  SiRNA target sequence
tgtattctgtaatttggaaca

SEQ ID NO: 281696 - DNA, 21 bp, Artificial sequence
  SiRNA target sequence
gtattctgtaatttggaacac

SEQ ID NO: 281697 - DNA, 21 bp, Artificial sequence
  SiRNA target sequence
tattctgtaatttggaacacg

SEQ ID NO: 281698 - DNA, 21 bp, Artificial sequence
  SiRNA target sequence
attctgtaatttggaacacgc

SEQ ID NO: 281699 - DNA, 21 bp, Artificial sequence
  SiRNA target sequence
ttctgtaatttggaacacgct

SEQ ID NO: 281700 - DNA, 21 bp, Artificial sequence
  SiRNA target sequence
tctgtaatttggaacacgctc

SEQ ID NO: 281701 - DNA, 21 bp, Artificial sequence
  SiRNA target sequence
ctgtaatttggaacacgctct

SEQ ID NO: 281702 - DNA, 21 bp, Artificial sequence
  SiRNA target sequence
tgtaatttggaacacgctctc

SEQ ID NO: 281703 - DNA, 21 bp, Artificial sequence
  SiRNA target sequence
gtaatttggaacacgctctca

SEQ ID NO: 281704 - DNA, 21 bp, Artificial sequence
  SiRNA target sequence
taatttggaacacgctctcaa

SEQ ID NO: 281705 - DNA, 21 bp, Artificial sequence
  SiRNA target sequence
aatttggaacacgctctcaag

SEQ ID NO: 281706 - DNA, 21 bp, Artificial sequence
  SiRNA target sequence
atttggaacacgctctcaagg

SEQ ID NO: 281707 - DNA, 21 bp, Artificial sequence
  SiRNA target sequence
tttggaacacgctctcaagga

SEQ ID NO: 281708 - DNA, 21 bp, Artificial sequence
  SiRNA target sequence
ttggaacacgctctcaaggaa

SEQ ID NO: 281709 - DNA, 21 bp, Artificial sequence
  SiRNA target sequence
tggaacacgctctcaaggaat

SEQ ID NO: 281710 - DNA, 21 bp, Artificial sequence
  SiRNA target sequence
ggaacacgctctcaaggaatt

SEQ ID NO: 281711 - DNA, 21 bp, Artificial sequence
  SiRNA target sequence
gaacacgctctcaaggaatta

SEQ ID NO: 281712 - DNA, 21 bp, Artificial sequence
  SiRNA target sequence
aacacgctctcaaggaattat

SEQ ID NO: 281713 - DNA, 21 bp, Artificial sequence
  SiRNA target sequence
acacgctctcaaggaattatc

SEQ ID NO: 281714 - DNA, 21 bp, Artificial sequence
  SiRNA target sequence
cacgctctcaaggaattatca

SEQ ID NO: 281715 - DNA, 21 bp, Artificial sequence
  SiRNA target sequence
acgctctcaaggaattatcat

SEQ ID NO: 281716 - DNA, 21 bp, Artificial sequence
  SiRNA target sequence
cgctctcaaggaattatcatt

SEQ ID NO: 281717 - DNA, 21 bp, Artificial sequence
  SiRNA target sequence
gctctcaaggaattatcatta

SEQ ID NO: 281718 - DNA, 21 bp, Artificial sequence
  SiRNA target sequence
ctctcaaggaattatcattac

SEQ ID NO: 281719 - DNA, 21 bp, Artificial sequence
  SiRNA target sequence
tctcaaggaattatcattaca

SEQ ID NO: 281720 - DNA, 21 bp, Artificial sequence
  SiRNA target sequence
ctcaaggaattatcattacat

SEQ ID NO: 281721 - DNA, 21 bp, Artificial sequence
  SiRNA target sequence
tcaaggaattatcattacatg

SEQ ID NO: 281722 - DNA, 21 bp, Artificial sequence
  SiRNA target sequence
caaggaattatcattacatga

SEQ ID NO: 281723 - DNA, 21 bp, Artificial sequence
  SiRNA target sequence
aaggaattatcattacatgat

SEQ ID NO: 281724 - DNA, 21 bp, Artificial sequence
  SiRNA target sequence
aggaattatcattacatgata

SEQ ID NO: 281725 - DNA, 21 bp, Artificial sequence
  SiRNA target sequence
ggaattatcattacatgataa

SEQ ID NO: 281726 - DNA, 21 bp, Artificial sequence
  SiRNA target sequence
gaattatcattacatgataag

SEQ ID NO: 281727 - DNA, 21 bp, Artificial sequence
  SiRNA target sequence
aattatcattacatgataagg

SEQ ID NO: 281728 - DNA, 21 bp, Artificial sequence
  SiRNA target sequence
attatcattacatgataagga

SEQ ID NO: 281729 - DNA, 21 bp, Artificial sequence
  SiRNA target sequence
ttatcattacatgataaggaa

SEQ ID NO: 281730 - DNA, 21 bp, Artificial sequence
  SiRNA target sequence
tatcattacatgataaggaat

SEQ ID NO: 281731 - DNA, 21 bp, Artificial sequence
  SiRNA target sequence
atcattacatgataaggaatt

SEQ ID NO: 281732 - DNA, 21 bp, Artificial sequence
  SiRNA target sequence
tcattacatgataaggaattg

SEQ ID NO: 281733 - DNA, 21 bp, Artificial sequence
  SiRNA target sequence
cattacatgataaggaattgt

SEQ ID NO: 281734 - DNA, 21 bp, Artificial sequence
  SiRNA target sequence
attacatgataaggaattgtg

SEQ ID NO: 281735 - DNA, 21 bp, Artificial sequence
  SiRNA target sequence
ttacatgataaggaattgtgg

SEQ ID NO: 281736 - DNA, 21 bp, Artificial sequence
  SiRNA target sequence
tacatgataaggaattgtggg

SEQ ID NO: 281737 - DNA, 21 bp, Artificial sequence
  SiRNA target sequence
acatgataaggaattgtggga

SEQ ID NO: 281738 - DNA, 21 bp, Artificial sequence
  SiRNA target sequence
catgataaggaattgtgggat

SEQ ID NO: 281739 - DNA, 21 bp, Artificial sequence
  SiRNA target sequence
atgataaggaattgtgggata

SEQ ID NO: 281740 - DNA, 21 bp, Artificial sequence
  SiRNA target sequence
tgataaggaattgtgggataa

SEQ ID NO: 281741 - DNA, 21 bp, Artificial sequence
  SiRNA target sequence
gataaggaattgtgggataaa

SEQ ID NO: 281742 - DNA, 21 bp, Artificial sequence
  SiRNA target sequence
ataaggaattgtgggataaat

SEQ ID NO: 281743 - DNA, 21 bp, Artificial sequence
  SiRNA target sequence
taaggaattgtgggataaatg

SEQ ID NO: 281744 - DNA, 21 bp, Artificial sequence
  SiRNA target sequence
aaggaattgtgggataaatgg

SEQ ID NO: 281745 - DNA, 21 bp, Artificial sequence
  SiRNA target sequence
aggaattgtgggataaatgga

SEQ ID NO: 281746 - DNA, 21 bp, Artificial sequence
  SiRNA target sequence
ggaattgtgggataaatggag

SEQ ID NO: 281747 - DNA, 21 bp, Artificial sequence
  SiRNA target sequence
gaattgtgggataaatggagt

SEQ ID NO: 281748 - DNA, 21 bp, Artificial sequence
  SiRNA target sequence
aattgtgggataaatggagtc

SEQ ID NO: 281749 - DNA, 21 bp, Artificial sequence
  SiRNA target sequence
attgtgggataaatggagtcc

SEQ ID NO: 281750 - DNA, 21 bp, Artificial sequence
  SiRNA target sequence
ttgtgggataaatggagtcct

SEQ ID NO: 281751 - DNA, 21 bp, Artificial sequence
  SiRNA target sequence
tgtgggataaatggagtcctg

SEQ ID NO: 281752 - DNA, 21 bp, Artificial sequence
  SiRNA target sequence
gtgggataaatggagtcctgt

SEQ ID NO: 281753 - DNA, 21 bp, Artificial sequence
  SiRNA target sequence
tgggataaatggagtcctgta

SEQ ID NO: 281754 - DNA, 21 bp, Artificial sequence
  SiRNA target sequence
gggataaatggagtcctgtac

SEQ ID NO: 281755 - DNA, 21 bp, Artificial sequence
  SiRNA target sequence
ggataaatggagtcctgtact

SEQ ID NO: 281756 - DNA, 21 bp, Artificial sequence
  SiRNA target sequence
gataaatggagtcctgtactg

SEQ ID NO: 281757 - DNA, 21 bp, Artificial sequence
  SiRNA target sequence
ataaatggagtcctgtactgc

SEQ ID NO: 281758 - DNA, 21 bp, Artificial sequence
  SiRNA target sequence
taaatggagtcctgtactgca

SEQ ID NO: 281759 - DNA, 21 bp, Artificial sequence
  SiRNA target sequence
aaatggagtcctgtactgcat

SEQ ID NO: 281760 - DNA, 21 bp, Artificial sequence
  SiRNA target sequence
aatggagtcctgtactgcatt

SEQ ID NO: 281761 - DNA, 21 bp, Artificial sequence
  SiRNA target sequence
atggagtcctgtactgcattc

SEQ ID NO: 281762 - DNA, 21 bp, Artificial sequence
  SiRNA target sequence
tggagtcctgtactgcattcg

SEQ ID NO: 281763 - DNA, 21 bp, Artificial sequence
  SiRNA target sequence
ggagtcctgtactgcattcga

SEQ ID NO: 281764 - DNA, 21 bp, Artificial sequence
  SiRNA target sequence
gagtcctgtactgcattcgaa

SEQ ID NO: 281765 - DNA, 21 bp, Artificial sequence
  SiRNA target sequence
agtcctgtactgcattcgaag

SEQ ID NO: 281766 - DNA, 21 bp, Artificial sequence
  SiRNA target sequence
gtcctgtactgcattcgaaga

SEQ ID NO: 281767 - DNA, 21 bp, Artificial sequence
  SiRNA target sequence
tcctgtactgcattcgaagag

SEQ ID NO: 281768 - DNA, 21 bp, Artificial sequence
  SiRNA target sequence
cctgtactgcattcgaagagc

SEQ ID NO: 281769 - DNA, 21 bp, Artificial sequence
  SiRNA target sequence
ctgtactgcattcgaagagcg

SEQ ID NO: 281770 - DNA, 21 bp, Artificial sequence
  SiRNA target sequence
tgtactgcattcgaagagcga

SEQ ID NO: 281771 - DNA, 21 bp, Artificial sequence
  SiRNA target sequence
gtactgcattcgaagagcgag

SEQ ID NO: 281772 - DNA, 21 bp, Artificial sequence
  SiRNA target sequence
tactgcattcgaagagcgagg

SEQ ID NO: 281773 - DNA, 21 bp, Artificial sequence
  SiRNA target sequence
actgcattcgaagagcgagga

SEQ ID NO: 281774 - DNA, 21 bp, Artificial sequence
  SiRNA target sequence
ctgcattcgaagagcgaggaa

SEQ ID NO: 281775 - DNA, 21 bp, Artificial sequence
  SiRNA target sequence
tgcattcgaagagcgaggaag

SEQ ID NO: 281776 - DNA, 21 bp, Artificial sequence
  SiRNA target sequence
gcattcgaagagcgaggaagt

SEQ ID NO: 281777 - DNA, 21 bp, Artificial sequence
  SiRNA target sequence
cattcgaagagcgaggaagtt

SEQ ID NO: 281778 - DNA, 21 bp, Artificial sequence
  SiRNA target sequence
attcgaagagcgaggaagttc

SEQ ID NO: 281779 - DNA, 21 bp, Artificial sequence
  SiRNA target sequence
ttcgaagagcgaggaagttct

SEQ ID NO: 281780 - DNA, 21 bp, Artificial sequence
  SiRNA target sequence
tcgaagagcgaggaagttctg

SEQ ID NO: 281781 - DNA, 21 bp, Artificial sequence
  SiRNA target sequence
cgaagagcgaggaagttctga

SEQ ID NO: 281782 - DNA, 21 bp, Artificial sequence
  SiRNA target sequence
gaagagcgaggaagttctgaa

SEQ ID NO: 281783 - DNA, 21 bp, Artificial sequence
  SiRNA target sequence
aagagcgaggaagttctgaaa

SEQ ID NO: 281784 - DNA, 21 bp, Artificial sequence
  SiRNA target sequence
agagcgaggaagttctgaaaa

SEQ ID NO: 281785 - DNA, 21 bp, Artificial sequence
  SiRNA target sequence
gagcgaggaagttctgaaaat

SEQ ID NO: 281786 - DNA, 21 bp, Artificial sequence
  SiRNA target sequence
agcgaggaagttctgaaaatg

SEQ ID NO: 281787 - DNA, 21 bp, Artificial sequence
  SiRNA target sequence
gcgaggaagttctgaaaatgg

SEQ ID NO: 281788 - DNA, 21 bp, Artificial sequence
  SiRNA target sequence
cgaggaagttctgaaaatggt

SEQ ID NO: 281789 - DNA, 21 bp, Artificial sequence
  SiRNA target sequence
gaggaagttctgaaaatggtt

SEQ ID NO: 281790 - DNA, 21 bp, Artificial sequence
  SiRNA target sequence
aggaagttctgaaaatggttt

SEQ ID NO: 281791 - DNA, 21 bp, Artificial sequence
  SiRNA target sequence
ggaagttctgaaaatggtttc

SEQ ID NO: 281792 - DNA, 21 bp, Artificial sequence
  SiRNA target sequence
gaagttctgaaaatggtttct

SEQ ID NO: 281793 - DNA, 21 bp, Artificial sequence
  SiRNA target sequence
aagttctgaaaatggtttctt

SEQ ID NO: 281794 - DNA, 21 bp, Artificial sequence
  SiRNA target sequence
agttctgaaaatggtttcttc

SEQ ID NO: 281795 - DNA, 21 bp, Artificial sequence
  SiRNA target sequence
gttctgaaaatggtttcttct

SEQ ID NO: 281796 - DNA, 21 bp, Artificial sequence
  SiRNA target sequence
ttctgaaaatggtttcttctc

SEQ ID NO: 281797 - DNA, 21 bp, Artificial sequence
  SiRNA target sequence
tctgaaaatggtttcttctct

SEQ ID NO: 281798 - DNA, 21 bp, Artificial sequence
  SiRNA target sequence
ctgaaaatggtttcttctctg

SEQ ID NO: 281799 - DNA, 21 bp, Artificial sequence
  SiRNA target sequence
tgaaaatggtttcttctctga

SEQ ID NO: 281800 - DNA, 21 bp, Artificial sequence
  SiRNA target sequence
gaaaatggtttcttctctgaa

SEQ ID NO: 281801 - DNA, 21 bp, Artificial sequence
  SiRNA target sequence
aaaatggtttcttctctgaaa

SEQ ID NO: 281802 - DNA, 21 bp, Artificial sequence
  SiRNA target sequence
aaatggtttcttctctgaaat

SEQ ID NO: 281803 - DNA, 21 bp, Artificial sequence
  SiRNA target sequence
aatggtttcttctctgaaatt

SEQ ID NO: 281804 - DNA, 21 bp, Artificial sequence
  SiRNA target sequence
atggtttcttctctgaaattt

SEQ ID NO: 281805 - DNA, 21 bp, Artificial sequence
  SiRNA target sequence
tggtttcttctctgaaatttc

SEQ ID NO: 281806 - DNA, 21 bp, Artificial sequence
  SiRNA target sequence
ggtttcttctctgaaatttca

SEQ ID NO: 281807 - DNA, 21 bp, Artificial sequence
  SiRNA target sequence
gtttcttctctgaaatttcaa

SEQ ID NO: 281808 - DNA, 21 bp, Artificial sequence
  SiRNA target sequence
tttcttctctgaaatttcaag

SEQ ID NO: 281809 - DNA, 21 bp, Artificial sequence
  SiRNA target sequence
ttcttctctgaaatttcaaga

SEQ ID NO: 281810 - DNA, 21 bp, Artificial sequence
  SiRNA target sequence
tcttctctgaaatttcaagat

SEQ ID NO: 281811 - DNA, 21 bp, Artificial sequence
  SiRNA target sequence
cttctctgaaatttcaagatg

SEQ ID NO: 281812 - DNA, 21 bp, Artificial sequence
  SiRNA target sequence
ttctctgaaatttcaagatga

SEQ ID NO: 281813 - DNA, 21 bp, Artificial sequence
  SiRNA target sequence
tctctgaaatttcaagatgag

SEQ ID NO: 281814 - DNA, 21 bp, Artificial sequence
  SiRNA target sequence
ctctgaaatttcaagatgagg

SEQ ID NO: 281815 - DNA, 21 bp, Artificial sequence
  SiRNA target sequence
tctgaaatttcaagatgaggt

SEQ ID NO: 281816 - DNA, 21 bp, Artificial sequence
  SiRNA target sequence
ctgaaatttcaagatgaggtt

SEQ ID NO: 281817 - DNA, 21 bp, Artificial sequence
  SiRNA target sequence
tgaaatttcaagatgaggtta

SEQ ID NO: 281818 - DNA, 21 bp, Artificial sequence
  SiRNA target sequence
gaaatttcaagatgaggttag

SEQ ID NO: 281819 - DNA, 21 bp, Artificial sequence
  SiRNA target sequence
aaatttcaagatgaggttagg

SEQ ID NO: 281820 - DNA, 21 bp, Artificial sequence
  SiRNA target sequence
aatttcaagatgaggttaggg

SEQ ID NO: 281821 - DNA, 21 bp, Artificial sequence
  SiRNA target sequence
atttcaagatgaggttaggga

SEQ ID NO: 281822 - DNA, 21 bp, Artificial sequence
  SiRNA target sequence
tttcaagatgaggttagggaa

SEQ ID NO: 281823 - DNA, 21 bp, Artificial sequence
  SiRNA target sequence
ttcaagatgaggttagggaaa

SEQ ID NO: 281824 - DNA, 21 bp, Artificial sequence
  SiRNA target sequence
tcaagatgaggttagggaaat

SEQ ID NO: 281825 - DNA, 21 bp, Artificial sequence
  SiRNA target sequence
caagatgaggttagggaaatt

SEQ ID NO: 281826 - DNA, 21 bp, Artificial sequence
  SiRNA target sequence
aagatgaggttagggaaattg

SEQ ID NO: 281827 - DNA, 21 bp, Artificial sequence
  SiRNA target sequence
agatgaggttagggaaattgc

SEQ ID NO: 281828 - DNA, 21 bp, Artificial sequence
  SiRNA target sequence
gatgaggttagggaaattgct

SEQ ID NO: 281829 - DNA, 21 bp, Artificial sequence
  SiRNA target sequence
atgaggttagggaaattgctc

SEQ ID NO: 281830 - DNA, 21 bp, Artificial sequence
  SiRNA target sequence
tgaggttagggaaattgctct

SEQ ID NO: 281831 - DNA, 21 bp, Artificial sequence
  SiRNA target sequence
gaggttagggaaattgctctt

SEQ ID NO: 281832 - DNA, 21 bp, Artificial sequence
  SiRNA target sequence
aggttagggaaattgctcttg

SEQ ID NO: 281833 - DNA, 21 bp, Artificial sequence
  SiRNA target sequence
ggttagggaaattgctcttgg

SEQ ID NO: 281834 - DNA, 21 bp, Artificial sequence
  SiRNA target sequence
gttagggaaattgctcttggc

SEQ ID NO: 281835 - DNA, 21 bp, Artificial sequence
  SiRNA target sequence
ttagggaaattgctcttggcc

SEQ ID NO: 281836 - DNA, 21 bp, Artificial sequence
  SiRNA target sequence
tagggaaattgctcttggcct

SEQ ID NO: 281837 - DNA, 21 bp, Artificial sequence
  SiRNA target sequence
agggaaattgctcttggcctt

SEQ ID NO: 281838 - DNA, 21 bp, Artificial sequence
  SiRNA target sequence
gggaaattgctcttggccttt

SEQ ID NO: 281839 - DNA, 21 bp, Artificial sequence
  SiRNA target sequence
ggaaattgctcttggcctttt

SEQ ID NO: 281840 - DNA, 21 bp, Artificial sequence
  SiRNA target sequence
gaaattgctcttggcctttta

SEQ ID NO: 281841 - DNA, 21 bp, Artificial sequence
  SiRNA target sequence
aaattgctcttggccttttag

SEQ ID NO: 281842 - DNA, 21 bp, Artificial sequence
  SiRNA target sequence
aattgctcttggccttttagg

SEQ ID NO: 281843 - DNA, 21 bp, Artificial sequence
  SiRNA target sequence
attgctcttggccttttaggt

SEQ ID NO: 281844 - DNA, 21 bp, Artificial sequence
  SiRNA target sequence
ttgctcttggccttttaggtt

SEQ ID NO: 281845 - DNA, 21 bp, Artificial sequence
  SiRNA target sequence
tgctcttggccttttaggtta

SEQ ID NO: 281846 - DNA, 21 bp, Artificial sequence
  SiRNA target sequence
gctcttggccttttaggttac

SEQ ID NO: 281847 - DNA, 21 bp, Artificial sequence
  SiRNA target sequence
ctcttggccttttaggttacg

SEQ ID NO: 281848 - DNA, 21 bp, Artificial sequence
  SiRNA target sequence
tcttggccttttaggttacga

SEQ ID NO: 281849 - DNA, 21 bp, Artificial sequence
  SiRNA target sequence
cttggccttttaggttacgag

SEQ ID NO: 281850 - DNA, 21 bp, Artificial sequence
  SiRNA target sequence
ttggccttttaggttacgagt

SEQ ID NO: 281851 - DNA, 21 bp, Artificial sequence
  SiRNA target sequence
tggccttttaggttacgagta

SEQ ID NO: 281852 - DNA, 21 bp, Artificial sequence
  SiRNA target sequence
ggccttttaggttacgagtag

SEQ ID NO: 281853 - DNA, 21 bp, Artificial sequence
  SiRNA target sequence
gccttttaggttacgagtagt

SEQ ID NO: 281854 - DNA, 21 bp, Artificial sequence
  SiRNA target sequence
ccttttaggttacgagtagtt

SEQ ID NO: 281855 - DNA, 21 bp, Artificial sequence
  SiRNA target sequence
cttttaggttacgagtagttt

SEQ ID NO: 281856 - DNA, 21 bp, Artificial sequence
  SiRNA target sequence
ttttaggttacgagtagtttt

SEQ ID NO: 281857 - DNA, 21 bp, Artificial sequence
  SiRNA target sequence
tttaggttacgagtagttttc

SEQ ID NO: 281858 - DNA, 21 bp, Artificial sequence
  SiRNA target sequence
ttaggttacgagtagttttct

SEQ ID NO: 281859 - DNA, 21 bp, Artificial sequence
  SiRNA target sequence
taggttacgagtagttttctt

SEQ ID NO: 281860 - DNA, 21 bp, Artificial sequence
  SiRNA target sequence
aggttacgagtagttttctta

SEQ ID NO: 281861 - DNA, 21 bp, Artificial sequence
  SiRNA target sequence
ggttacgagtagttttcttat

SEQ ID NO: 281862 - DNA, 21 bp, Artificial sequence
  SiRNA target sequence
gttacgagtagttttcttatc

SEQ ID NO: 281863 - DNA, 21 bp, Artificial sequence
  SiRNA target sequence
ttacgagtagttttcttatca

SEQ ID NO: 281864 - DNA, 21 bp, Artificial sequence
  SiRNA target sequence
tacgagtagttttcttatcac

SEQ ID NO: 281865 - DNA, 21 bp, Artificial sequence
  SiRNA target sequence
acgagtagttttcttatcacc

SEQ ID NO: 281866 - DNA, 21 bp, Artificial sequence
  SiRNA target sequence
cgagtagttttcttatcacct

SEQ ID NO: 281867 - DNA, 21 bp, Artificial sequence
  SiRNA target sequence
gagtagttttcttatcacctt

SEQ ID NO: 281868 - DNA, 21 bp, Artificial sequence
  SiRNA target sequence
agtagttttcttatcaccttt

SEQ ID NO: 281869 - DNA, 21 bp, Artificial sequence
  SiRNA target sequence
gtagttttcttatcacctttt

SEQ ID NO: 281870 - DNA, 21 bp, Artificial sequence
  SiRNA target sequence
tagttttcttatcacctttta

SEQ ID NO: 281871 - DNA, 21 bp, Artificial sequence
  SiRNA target sequence
agttttcttatcaccttttaa

SEQ ID NO: 281872 - DNA, 21 bp, Artificial sequence
  SiRNA target sequence
gttttcttatcaccttttaaa

SEQ ID NO: 281873 - DNA, 21 bp, Artificial sequence
  SiRNA target sequence
ttttcttatcaccttttaaac

SEQ ID NO: 281874 - DNA, 21 bp, Artificial sequence
  SiRNA target sequence
tttcttatcaccttttaaacc

SEQ ID NO: 281875 - DNA, 21 bp, Artificial sequence
  SiRNA target sequence
ttcttatcaccttttaaacca

SEQ ID NO: 281876 - DNA, 21 bp, Artificial sequence
  SiRNA target sequence
tcttatcaccttttaaaccaa

SEQ ID NO: 281877 - DNA, 21 bp, Artificial sequence
  SiRNA target sequence
cttatcaccttttaaaccaac

SEQ ID NO: 281878 - DNA, 21 bp, Artificial sequence
  SiRNA target sequence
ttatcaccttttaaaccaaca

SEQ ID NO: 281879 - DNA, 21 bp, Artificial sequence
  SiRNA target sequence
tatcaccttttaaaccaacaa

SEQ ID NO: 281880 - DNA, 21 bp, Artificial sequence
  SiRNA target sequence
atcaccttttaaaccaacaat

SEQ ID NO: 281881 - DNA, 21 bp, Artificial sequence
  SiRNA target sequence
tcaccttttaaaccaacaatg

SEQ ID NO: 281882 - DNA, 21 bp, Artificial sequence
  SiRNA target sequence
caccttttaaaccaacaatgt

SEQ ID NO: 281883 - DNA, 21 bp, Artificial sequence
  SiRNA target sequence
accttttaaaccaacaatgtg

SEQ ID NO: 281884 - DNA, 21 bp, Artificial sequence
  SiRNA target sequence
ccttttaaaccaacaatgtga

SEQ ID NO: 281885 - DNA, 21 bp, Artificial sequence
  SiRNA target sequence
cttttaaaccaacaatgtgat

SEQ ID NO: 281886 - DNA, 21 bp, Artificial sequence
  SiRNA target sequence
ttttaaaccaacaatgtgatc

SEQ ID NO: 281887 - DNA, 21 bp, Artificial sequence
  SiRNA target sequence
tttaaaccaacaatgtgatct

SEQ ID NO: 281888 - DNA, 21 bp, Artificial sequence
  SiRNA target sequence
ttaaaccaacaatgtgatctt

SEQ ID NO: 281889 - DNA, 21 bp, Artificial sequence
  SiRNA target sequence
taaaccaacaatgtgatcttg

SEQ ID NO: 281890 - DNA, 21 bp, Artificial sequence
  SiRNA target sequence
aaaccaacaatgtgatcttgc

SEQ ID NO: 281891 - DNA, 21 bp, Artificial sequence
  SiRNA target sequence
aaccaacaatgtgatcttgct

SEQ ID NO: 281892 - DNA, 21 bp, Artificial sequence
  SiRNA target sequence
accaacaatgtgatcttgctc

SEQ ID NO: 281893 - DNA, 21 bp, Artificial sequence
  SiRNA target sequence
ccaacaatgtgatcttgctcg

SEQ ID NO: 281894 - DNA, 21 bp, Artificial sequence
  SiRNA target sequence
caacaatgtgatcttgctcgc

SEQ ID NO: 281895 - DNA, 21 bp, Artificial sequence
  SiRNA target sequence
aacaatgtgatcttgctcgca

SEQ ID NO: 281896 - DNA, 21 bp, Artificial sequence
  SiRNA target sequence
acaatgtgatcttgctcgcag

SEQ ID NO: 281897 - DNA, 21 bp, Artificial sequence
  SiRNA target sequence
caatgtgatcttgctcgcaga

SEQ ID NO: 281898 - DNA, 21 bp, Artificial sequence
  SiRNA target sequence
aatgtgatcttgctcgcagag

SEQ ID NO: 281899 - DNA, 21 bp, Artificial sequence
  SiRNA target sequence
atgtgatcttgctcgcagagg

SEQ ID NO: 281900 - DNA, 21 bp, Artificial sequence
  SiRNA target sequence
tgtgatcttgctcgcagaggc

SEQ ID NO: 281901 - DNA, 21 bp, Artificial sequence
  SiRNA target sequence
gtgatcttgctcgcagaggca

SEQ ID NO: 281902 - DNA, 21 bp, Artificial sequence
  SiRNA target sequence
tgatcttgctcgcagaggcaa

SEQ ID NO: 281903 - DNA, 21 bp, Artificial sequence
  SiRNA target sequence
gatcttgctcgcagaggcaaa

SEQ ID NO: 281904 - DNA, 21 bp, Artificial sequence
  SiRNA target sequence
atcttgctcgcagaggcaaaa

SEQ ID NO: 281905 - DNA, 21 bp, Artificial sequence
  SiRNA target sequence
tcttgctcgcagaggcaaaaa

SEQ ID NO: 281906 - DNA, 21 bp, Artificial sequence
  SiRNA target sequence
cttgctcgcagaggcaaaaat

SEQ ID NO: 281907 - DNA, 21 bp, Artificial sequence
  SiRNA target sequence
ttgctcgcagaggcaaaaatt

SEQ ID NO: 281908 - DNA, 21 bp, Artificial sequence
  SiRNA target sequence
tgctcgcagaggcaaaaattt

SEQ ID NO: 281909 - DNA, 21 bp, Artificial sequence
  SiRNA target sequence
gctcgcagaggcaaaaatttg

SEQ ID NO: 281910 - DNA, 21 bp, Artificial sequence
  SiRNA target sequence
ctcgcagaggcaaaaatttgc

SEQ ID NO: 281911 - DNA, 21 bp, Artificial sequence
  SiRNA target sequence
tcgcagaggcaaaaatttgca

SEQ ID NO: 281912 - DNA, 21 bp, Artificial sequence
  SiRNA target sequence
cgcagaggcaaaaatttgcac

SEQ ID NO: 281913 - DNA, 21 bp, Artificial sequence
  SiRNA target sequence
gcagaggcaaaaatttgcaca

SEQ ID NO: 281914 - DNA, 21 bp, Artificial sequence
  SiRNA target sequence
cagaggcaaaaatttgcacag

SEQ ID NO: 281915 - DNA, 21 bp, Artificial sequence
  SiRNA target sequence
agaggcaaaaatttgcacagt

SEQ ID NO: 281916 - DNA, 21 bp, Artificial sequence
  SiRNA target sequence
gaggcaaaaatttgcacagta

SEQ ID NO: 281917 - DNA, 21 bp, Artificial sequence
  SiRNA target sequence
aggcaaaaatttgcacagtat

SEQ ID NO: 281918 - DNA, 21 bp, Artificial sequence
  SiRNA target sequence
ggcaaaaatttgcacagtata

SEQ ID NO: 281919 - DNA, 21 bp, Artificial sequence
  SiRNA target sequence
gcaaaaatttgcacagtataa

SEQ ID NO: 281920 - DNA, 21 bp, Artificial sequence
  SiRNA target sequence
caaaaatttgcacagtataaa

SEQ ID NO: 281921 - DNA, 21 bp, Artificial sequence
  SiRNA target sequence
aaaaatttgcacagtataaaa

SEQ ID NO: 281922 - DNA, 21 bp, Artificial sequence
  SiRNA target sequence
aaaatttgcacagtataaaat

SEQ ID NO: 281923 - DNA, 21 bp, Artificial sequence
  SiRNA target sequence
aaatttgcacagtataaaatc

SEQ ID NO: 281924 - DNA, 21 bp, Artificial sequence
  SiRNA target sequence
aatttgcacagtataaaatct

SEQ ID NO: 281925 - DNA, 21 bp, Artificial sequence
  SiRNA target sequence
atttgcacagtataaaatctg

SEQ ID NO: 281926 - DNA, 21 bp, Artificial sequence
  SiRNA target sequence
tttgcacagtataaaatctgc

SEQ ID NO: 281927 - DNA, 21 bp, Artificial sequence
  SiRNA target sequence
ttgcacagtataaaatctgca

SEQ ID NO: 281928 - DNA, 21 bp, Artificial sequence
  SiRNA target sequence
tgcacagtataaaatctgcaa

SEQ ID NO: 281929 - DNA, 21 bp, Artificial sequence
  SiRNA target sequence
gcacagtataaaatctgcaag

SEQ ID NO: 281930 - DNA, 21 bp, Artificial sequence
  SiRNA target sequence
cacagtataaaatctgcaagt

SEQ ID NO: 281931 - DNA, 21 bp, Artificial sequence
  SiRNA target sequence
acagtataaaatctgcaagta

SEQ ID NO: 281932 - DNA, 21 bp, Artificial sequence
  SiRNA target sequence
cagtataaaatctgcaagtag

SEQ ID NO: 281933 - DNA, 21 bp, Artificial sequence
  SiRNA target sequence
agtataaaatctgcaagtagt

SEQ ID NO: 281934 - DNA, 21 bp, Artificial sequence
  SiRNA target sequence
gtataaaatctgcaagtagtg

SEQ ID NO: 281935 - DNA, 21 bp, Artificial sequence
  SiRNA target sequence
tataaaatctgcaagtagtgc

SEQ ID NO: 281936 - DNA, 21 bp, Artificial sequence
  SiRNA target sequence
ataaaatctgcaagtagtgct

SEQ ID NO: 281937 - DNA, 21 bp, Artificial sequence
  SiRNA target sequence
taaaatctgcaagtagtgcta

SEQ ID NO: 281938 - DNA, 21 bp, Artificial sequence
  SiRNA target sequence
aaaatctgcaagtagtgctat

SEQ ID NO: 281939 - DNA, 21 bp, Artificial sequence
  SiRNA target sequence
aaatctgcaagtagtgctatt

SEQ ID NO: 281940 - DNA, 21 bp, Artificial sequence
  SiRNA target sequence
aatctgcaagtagtgctattg

SEQ ID NO: 281941 - DNA, 21 bp, Artificial sequence
  SiRNA target sequence
atctgcaagtagtgctattgt

SEQ ID NO: 281942 - DNA, 21 bp, Artificial sequence
  SiRNA target sequence
tctgcaagtagtgctattgtt

SEQ ID NO: 281943 - DNA, 21 bp, Artificial sequence
  SiRNA target sequence
ctgcaagtagtgctattgttg

SEQ ID NO: 281944 - DNA, 21 bp, Artificial sequence
  SiRNA target sequence
tgcaagtagtgctattgttgg

SEQ ID NO: 281945 - DNA, 21 bp, Artificial sequence
  SiRNA target sequence
gcaagtagtgctattgttgga

SEQ ID NO: 281946 - DNA, 21 bp, Artificial sequence
  SiRNA target sequence
caagtagtgctattgttggaa

SEQ ID NO: 281947 - DNA, 21 bp, Artificial sequence
  SiRNA target sequence
aagtagtgctattgttggaat

SEQ ID NO: 281948 - DNA, 21 bp, Artificial sequence
  SiRNA target sequence
agtagtgctattgttggaatc

SEQ ID NO: 281949 - DNA, 21 bp, Artificial sequence
  SiRNA target sequence
gtagtgctattgttggaatca

SEQ ID NO: 281950 - DNA, 21 bp, Artificial sequence
  SiRNA target sequence
tagtgctattgttggaatcac

SEQ ID NO: 281951 - DNA, 21 bp, Artificial sequence
  SiRNA target sequence
agtgctattgttggaatcacc

SEQ ID NO: 281952 - DNA, 21 bp, Artificial sequence
  SiRNA target sequence
gtgctattgttggaatcaccg

SEQ ID NO: 281953 - DNA, 21 bp, Artificial sequence
  SiRNA target sequence
tgctattgttggaatcaccgt

SEQ ID NO: 281954 - DNA, 21 bp, Artificial sequence
  SiRNA target sequence
gctattgttggaatcaccgta

SEQ ID NO: 281955 - DNA, 21 bp, Artificial sequence
  SiRNA target sequence
ctattgttggaatcaccgtac

SEQ ID NO: 281956 - DNA, 21 bp, Artificial sequence
  SiRNA target sequence
tattgttggaatcaccgtacc

SEQ ID NO: 281957 - DNA, 21 bp, Artificial sequence
  SiRNA target sequence
attgttggaatcaccgtacct

SEQ ID NO: 281958 - DNA, 21 bp, Artificial sequence
  SiRNA target sequence
ttgttggaatcaccgtaccta

SEQ ID NO: 281959 - DNA, 21 bp, Artificial sequence
  SiRNA target sequence
tgttggaatcaccgtacctat

SEQ ID NO: 281960 - DNA, 21 bp, Artificial sequence
  SiRNA target sequence
gttggaatcaccgtacctatt

SEQ ID NO: 281961 - DNA, 21 bp, Artificial sequence
  SiRNA target sequence
ttggaatcaccgtacctattt

SEQ ID NO: 281962 - DNA, 21 bp, Artificial sequence
  SiRNA target sequence
tggaatcaccgtacctattta

SEQ ID NO: 281963 - DNA, 21 bp, Artificial sequence
  SiRNA target sequence
ggaatcaccgtacctatttag

SEQ ID NO: 281964 - DNA, 21 bp, Artificial sequence
  SiRNA target sequence
gaatcaccgtacctatttagg

SEQ ID NO: 281965 - DNA, 21 bp, Artificial sequence
  SiRNA target sequence
aatcaccgtacctatttaggt

SEQ ID NO: 281966 - DNA, 21 bp, Artificial sequence
  SiRNA target sequence
atcaccgtacctatttaggtt

SEQ ID NO: 281967 - DNA, 21 bp, Artificial sequence
  SiRNA target sequence
tcaccgtacctatttaggttt

SEQ ID NO: 281968 - DNA, 21 bp, Artificial sequence
  SiRNA target sequence
caccgtacctatttaggttta

SEQ ID NO: 281969 - DNA, 21 bp, Artificial sequence
  SiRNA target sequence
accgtacctatttaggtttac

SEQ ID NO: 281970 - DNA, 21 bp, Artificial sequence
  SiRNA target sequence
ccgtacctatttaggtttacg

SEQ ID NO: 281971 - DNA, 21 bp, Artificial sequence
  SiRNA target sequence
cgtacctatttaggtttacgc

SEQ ID NO: 281972 - DNA, 21 bp, Artificial sequence
  SiRNA target sequence
gtacctatttaggtttacgct

SEQ ID NO: 281973 - DNA, 21 bp, Artificial sequence
  SiRNA target sequence
tacctatttaggtttacgctc

SEQ ID NO: 281974 - DNA, 21 bp, Artificial sequence
  SiRNA target sequence
acctatttaggtttacgctcc

SEQ ID NO: 281975 - DNA, 21 bp, Artificial sequence
  SiRNA target sequence
cctatttaggtttacgctcca

SEQ ID NO: 281976 - DNA, 21 bp, Artificial sequence
  SiRNA target sequence
ctatttaggtttacgctccaa

SEQ ID NO: 281977 - DNA, 21 bp, Artificial sequence
  SiRNA target sequence
tatttaggtttacgctccaag

SEQ ID NO: 281978 - DNA, 21 bp, Artificial sequence
  SiRNA target sequence
atttaggtttacgctccaaga

SEQ ID NO: 281979 - DNA, 21 bp, Artificial sequence
  SiRNA target sequence
tttaggtttacgctccaagat

SEQ ID NO: 281980 - DNA, 21 bp, Artificial sequence
  SiRNA target sequence
ttaggtttacgctccaagatc

SEQ ID NO: 281981 - DNA, 21 bp, Artificial sequence
  SiRNA target sequence
taggtttacgctccaagatcg

SEQ ID NO: 281982 - DNA, 21 bp, Artificial sequence
  SiRNA target sequence
aggtttacgctccaagatcgg

SEQ ID NO: 281983 - DNA, 21 bp, Artificial sequence
  SiRNA target sequence
ggtttacgctccaagatcggt

SEQ ID NO: 281984 - DNA, 21 bp, Artificial sequence
  SiRNA target sequence
gtttacgctccaagatcggtg

SEQ ID NO: 281985 - DNA, 21 bp, Artificial sequence
  SiRNA target sequence
tttacgctccaagatcggtgg

SEQ ID NO: 281986 - DNA, 21 bp, Artificial sequence
  SiRNA target sequence
ttacgctccaagatcggtgga

SEQ ID NO: 281987 - DNA, 21 bp, Artificial sequence
  SiRNA target sequence
tacgctccaagatcggtggat

SEQ ID NO: 281988 - DNA, 21 bp, Artificial sequence
  SiRNA target sequence
acgctccaagatcggtggata

SEQ ID NO: 281989 - DNA, 21 bp, Artificial sequence
  SiRNA target sequence
cgctccaagatcggtggatag

SEQ ID NO: 281990 - DNA, 21 bp, Artificial sequence
  SiRNA target sequence
gctccaagatcggtggatagc

SEQ ID NO: 281991 - DNA, 21 bp, Artificial sequence
  SiRNA target sequence
ctccaagatcggtggatagca

SEQ ID NO: 281992 - DNA, 21 bp, Artificial sequence
  SiRNA target sequence
tccaagatcggtggatagcag

SEQ ID NO: 281993 - DNA, 21 bp, Artificial sequence
  SiRNA target sequence
ccaagatcggtggatagcagc

SEQ ID NO: 281994 - DNA, 21 bp, Artificial sequence
  SiRNA target sequence
caagatcggtggatagcagcc

SEQ ID NO: 281995 - DNA, 21 bp, Artificial sequence
  SiRNA target sequence
aagatcggtggatagcagccc

SEQ ID NO: 281996 - DNA, 21 bp, Artificial sequence
  SiRNA target sequence
agatcggtggatagcagccct

SEQ ID NO: 281997 - DNA, 21 bp, Artificial sequence
  SiRNA target sequence
gatcggtggatagcagcccta

SEQ ID NO: 281998 - DNA, 21 bp, Artificial sequence
  SiRNA target sequence
atcggtggatagcagccctat

SEQ ID NO: 281999 - DNA, 21 bp, Artificial sequence
  SiRNA target sequence
tcggtggatagcagccctatc

SEQ ID NO: 282000 - DNA, 21 bp, Artificial sequence
  SiRNA target sequence
cggtggatagcagccctatca

SEQ ID NO: 282001 - DNA, 21 bp, Artificial sequence
  SiRNA target sequence
ggtggatagcagccctatcaa

SEQ ID NO: 282002 - DNA, 21 bp, Artificial sequence
  SiRNA target sequence
gtggatagcagccctatcaat

SEQ ID NO: 282003 - DNA, 21 bp, Artificial sequence
  SiRNA target sequence
tggatagcagccctatcaata

SEQ ID NO: 282004 - DNA, 21 bp, Artificial sequence
  SiRNA target sequence
ggatagcagccctatcaatat

SEQ ID NO: 282005 - DNA, 21 bp, Artificial sequence
  SiRNA target sequence
gatagcagccctatcaatatc

SEQ ID NO: 282006 - DNA, 21 bp, Artificial sequence
  SiRNA target sequence
atagcagccctatcaatatct

SEQ ID NO: 282007 - DNA, 21 bp, Artificial sequence
  SiRNA target sequence
tagcagccctatcaatatcta

SEQ ID NO: 282008 - DNA, 21 bp, Artificial sequence
  SiRNA target sequence
agcagccctatcaatatctag

SEQ ID NO: 282009 - DNA, 21 bp, Artificial sequence
  SiRNA target sequence
gcagccctatcaatatctagg

SEQ ID NO: 282010 - DNA, 21 bp, Artificial sequence
  SiRNA target sequence
cagccctatcaatatctagga

SEQ ID NO: 282011 - DNA, 21 bp, Artificial sequence
  SiRNA target sequence
agccctatcaatatctaggag

SEQ ID NO: 282012 - DNA, 21 bp, Artificial sequence
  SiRNA target sequence
gccctatcaatatctaggaga

SEQ ID NO: 282013 - DNA, 21 bp, Artificial sequence
  SiRNA target sequence
ccctatcaatatctaggagaa

SEQ ID NO: 282014 - DNA, 21 bp, Artificial sequence
  SiRNA target sequence
cctatcaatatctaggagaac

SEQ ID NO: 282015 - DNA, 21 bp, Artificial sequence
  SiRNA target sequence
ctatcaatatctaggagaact

SEQ ID NO: 282016 - DNA, 21 bp, Artificial sequence
  SiRNA target sequence
tatcaatatctaggagaactg

SEQ ID NO: 282017 - DNA, 21 bp, Artificial sequence
  SiRNA target sequence
atcaatatctaggagaactgt

SEQ ID NO: 282018 - DNA, 21 bp, Artificial sequence
  SiRNA target sequence
tcaatatctaggagaactgtg

SEQ ID NO: 282019 - DNA, 21 bp, Artificial sequence
  SiRNA target sequence
caatatctaggagaactgtgc

SEQ ID NO: 282020 - DNA, 21 bp, Artificial sequence
  SiRNA target sequence
aatatctaggagaactgtgct

SEQ ID NO: 282021 - DNA, 21 bp, Artificial sequence
  SiRNA target sequence
atatctaggagaactgtgcta

SEQ ID NO: 282022 - DNA, 21 bp, Artificial sequence
  SiRNA target sequence
tatctaggagaactgtgctat

SEQ ID NO: 282023 - DNA, 21 bp, Artificial sequence
  SiRNA target sequence
atctaggagaactgtgctatg

SEQ ID NO: 282024 - DNA, 21 bp, Artificial sequence
  SiRNA target sequence
tctaggagaactgtgctatgt

SEQ ID NO: 282025 - DNA, 21 bp, Artificial sequence
  SiRNA target sequence
ctaggagaactgtgctatgtt

SEQ ID NO: 282026 - DNA, 21 bp, Artificial sequence
  SiRNA target sequence
taggagaactgtgctatgttt

SEQ ID NO: 282027 - DNA, 21 bp, Artificial sequence
  SiRNA target sequence
aggagaactgtgctatgttta

SEQ ID NO: 282028 - DNA, 21 bp, Artificial sequence
  SiRNA target sequence
ggagaactgtgctatgtttag

SEQ ID NO: 282029 - DNA, 21 bp, Artificial sequence
  SiRNA target sequence
gagaactgtgctatgtttaga

SEQ ID NO: 282030 - DNA, 21 bp, Artificial sequence
  SiRNA target sequence
agaactgtgctatgtttagaa

SEQ ID NO: 282031 - DNA, 21 bp, Artificial sequence
  SiRNA target sequence
gaactgtgctatgtttagaag

SEQ ID NO: 282032 - DNA, 21 bp, Artificial sequence
  SiRNA target sequence
aactgtgctatgtttagaaga

SEQ ID NO: 282033 - DNA, 21 bp, Artificial sequence
  SiRNA target sequence
actgtgctatgtttagaagat

SEQ ID NO: 282034 - DNA, 21 bp, Artificial sequence
  SiRNA target sequence
ctgtgctatgtttagaagatt

SEQ ID NO: 282035 - DNA, 21 bp, Artificial sequence
  SiRNA target sequence
tgtgctatgtttagaagatta

SEQ ID NO: 282036 - DNA, 21 bp, Artificial sequence
  SiRNA target sequence
gtgctatgtttagaagattag

SEQ ID NO: 282037 - DNA, 21 bp, Artificial sequence
  SiRNA target sequence
tgctatgtttagaagattagg

SEQ ID NO: 282038 - DNA, 21 bp, Artificial sequence
  SiRNA target sequence
gctatgtttagaagattaggt

SEQ ID NO: 282039 - DNA, 21 bp, Artificial sequence
  SiRNA target sequence
ctatgtttagaagattaggta

SEQ ID NO: 282040 - DNA, 21 bp, Artificial sequence
  SiRNA target sequence
tatgtttagaagattaggtag

SEQ ID NO: 282041 - DNA, 21 bp, Artificial sequence
  SiRNA target sequence
atgtttagaagattaggtagt

SEQ ID NO: 282042 - DNA, 21 bp, Artificial sequence
  SiRNA target sequence
tgtttagaagattaggtagtc

SEQ ID NO: 282043 - DNA, 21 bp, Artificial sequence
  SiRNA target sequence
gtttagaagattaggtagtct

SEQ ID NO: 282044 - DNA, 21 bp, Artificial sequence
  SiRNA target sequence
tttagaagattaggtagtctc

SEQ ID NO: 282045 - DNA, 21 bp, Artificial sequence
  SiRNA target sequence
ttagaagattaggtagtctct

SEQ ID NO: 282046 - DNA, 21 bp, Artificial sequence
  SiRNA target sequence
tagaagattaggtagtctcta

SEQ ID NO: 282047 - DNA, 21 bp, Artificial sequence
  SiRNA target sequence
agaagattaggtagtctctaa

SEQ ID NO: 282048 - DNA, 21 bp, Artificial sequence
  SiRNA target sequence
gaagattaggtagtctctaaa

SEQ ID NO: 282049 - DNA, 21 bp, Artificial sequence
  SiRNA target sequence
aagattaggtagtctctaaac

SEQ ID NO: 282050 - DNA, 21 bp, Artificial sequence
  SiRNA target sequence
agattaggtagtctctaaaca

SEQ ID NO: 282051 - DNA, 21 bp, Artificial sequence
  SiRNA target sequence
gattaggtagtctctaaacag

SEQ ID NO: 282052 - DNA, 21 bp, Artificial sequence
  SiRNA target sequence
attaggtagtctctaaacaga

SEQ ID NO: 282053 - DNA, 21 bp, Artificial sequence
  SiRNA target sequence
ttaggtagtctctaaacagaa

SEQ ID NO: 282054 - DNA, 21 bp, Artificial sequence
  SiRNA target sequence
taggtagtctctaaacagaac

SEQ ID NO: 282055 - DNA, 21 bp, Artificial sequence
  SiRNA target sequence
aggtagtctctaaacagaaca

SEQ ID NO: 282056 - DNA, 21 bp, Artificial sequence
  SiRNA target sequence
ggtagtctctaaacagaacaa

SEQ ID NO: 282057 - DNA, 21 bp, Artificial sequence
  SiRNA target sequence
gtagtctctaaacagaacaat

SEQ ID NO: 282058 - DNA, 21 bp, Artificial sequence
  SiRNA target sequence
tagtctctaaacagaacaatt

SEQ ID NO: 282059 - DNA, 21 bp, Artificial sequence
  SiRNA target sequence
agtctctaaacagaacaattt

SEQ ID NO: 282060 - DNA, 21 bp, Artificial sequence
  SiRNA target sequence
gtctctaaacagaacaattta

SEQ ID NO: 282061 - DNA, 21 bp, Artificial sequence
  SiRNA target sequence
tctctaaacagaacaatttac

SEQ ID NO: 282062 - DNA, 21 bp, Artificial sequence
  SiRNA target sequence
ctctaaacagaacaatttacc

SEQ ID NO: 282063 - DNA, 21 bp, Artificial sequence
  SiRNA target sequence
tctaaacagaacaatttacct

SEQ ID NO: 282064 - DNA, 21 bp, Artificial sequence
  SiRNA target sequence
ctaaacagaacaatttacctg

SEQ ID NO: 282065 - DNA, 21 bp, Artificial sequence
  SiRNA target sequence
taaacagaacaatttacctgc

SEQ ID NO: 282066 - DNA, 21 bp, Artificial sequence
  SiRNA target sequence
aaacagaacaatttacctgct

SEQ ID NO: 282067 - DNA, 21 bp, Artificial sequence
  SiRNA target sequence
aacagaacaatttacctgctg

SEQ ID NO: 282068 - DNA, 21 bp, Artificial sequence
  SiRNA target sequence
acagaacaatttacctgctga

SEQ ID NO: 282069 - DNA, 21 bp, Artificial sequence
  SiRNA target sequence
cagaacaatttacctgctgaa

SEQ ID NO: 282070 - DNA, 21 bp, Artificial sequence
  SiRNA target sequence
agaacaatttacctgctgaac

SEQ ID NO: 282071 - DNA, 21 bp, Artificial sequence
  SiRNA target sequence
gaacaatttacctgctgaaca

SEQ ID NO: 282072 - DNA, 21 bp, Artificial sequence
  SiRNA target sequence
aacaatttacctgctgaacaa

SEQ ID NO: 282073 - DNA, 21 bp, Artificial sequence
  SiRNA target sequence
acaatttacctgctgaacaaa

SEQ ID NO: 282074 - DNA, 21 bp, Artificial sequence
  SiRNA target sequence
caatttacctgctgaacaaat

SEQ ID NO: 282075 - DNA, 21 bp, Artificial sequence
  SiRNA target sequence
aatttacctgctgaacaaatt

SEQ ID NO: 282076 - DNA, 21 bp, Artificial sequence
  SiRNA target sequence
atttacctgctgaacaaatta

SEQ ID NO: 282077 - DNA, 21 bp, Artificial sequence
  SiRNA target sequence
tttacctgctgaacaaattaa

SEQ ID NO: 282078 - DNA, 21 bp, Artificial sequence
  SiRNA target sequence
ttacctgctgaacaaattaat

SEQ ID NO: 282079 - DNA, 21 bp, Artificial sequence
  SiRNA target sequence
tacctgctgaacaaattaatg

SEQ ID NO: 282080 - DNA, 21 bp, Artificial sequence
  SiRNA target sequence
acctgctgaacaaattaatga

SEQ ID NO: 282081 - DNA, 21 bp, Artificial sequence
  SiRNA target sequence
cctgctgaacaaattaatgaa

SEQ ID NO: 282082 - DNA, 21 bp, Artificial sequence
  SiRNA target sequence
ctgctgaacaaattaatgaaa

SEQ ID NO: 282083 - DNA, 21 bp, Artificial sequence
  SiRNA target sequence
tgctgaacaaattaatgaaaa

SEQ ID NO: 282084 - DNA, 21 bp, Artificial sequence
  SiRNA target sequence
gctgaacaaattaatgaaaat

SEQ ID NO: 282085 - DNA, 21 bp, Artificial sequence
  SiRNA target sequence
ctgaacaaattaatgaaaatt

SEQ ID NO: 282086 - DNA, 21 bp, Artificial sequence
  SiRNA target sequence
tgaacaaattaatgaaaatta

SEQ ID NO: 282087 - DNA, 21 bp, Artificial sequence
  SiRNA target sequence
gaacaaattaatgaaaattat

SEQ ID NO: 282088 - DNA, 21 bp, Artificial sequence
  SiRNA target sequence
aacaaattaatgaaaattatg

SEQ ID NO: 282089 - DNA, 21 bp, Artificial sequence
  SiRNA target sequence
acaaattaatgaaaattatga

SEQ ID NO: 282090 - DNA, 21 bp, Artificial sequence
  SiRNA target sequence
caaattaatgaaaattatgaa

SEQ ID NO: 282091 - DNA, 21 bp, Artificial sequence
  SiRNA target sequence
aaattaatgaaaattatgaaa

SEQ ID NO: 282092 - DNA, 21 bp, Artificial sequence
  SiRNA target sequence
aattaatgaaaattatgaaaa

SEQ ID NO: 282093 - DNA, 21 bp, Artificial sequence
  SiRNA target sequence
attaatgaaaattatgaaaat

SEQ ID NO: 282094 - DNA, 21 bp, Artificial sequence
  SiRNA target sequence
ttaatgaaaattatgaaaata

SEQ ID NO: 282095 - DNA, 21 bp, Artificial sequence
  SiRNA target sequence
taatgaaaattatgaaaataa

SEQ ID NO: 282096 - DNA, 21 bp, Artificial sequence
  SiRNA target sequence
aatgaaaattatgaaaataaa

SEQ ID NO: 282097 - DNA, 21 bp, Artificial sequence
  SiRNA target sequence
atgaaaattatgaaaataaac

SEQ ID NO: 282098 - DNA, 21 bp, Artificial sequence
  SiRNA target sequence
tgaaaattatgaaaataaaca

SEQ ID NO: 282099 - DNA, 21 bp, Artificial sequence
  SiRNA target sequence
gaaaattatgaaaataaacaa

SEQ ID NO: 282100 - DNA, 21 bp, Artificial sequence
  SiRNA target sequence
aaaattatgaaaataaacaac

SEQ ID NO: 282101 - DNA, 21 bp, Artificial sequence
  SiRNA target sequence
aaattatgaaaataaacaaca

SEQ ID NO: 282102 - DNA, 21 bp, Artificial sequence
  SiRNA target sequence
aattatgaaaataaacaacaa

SEQ ID NO: 282103 - DNA, 21 bp, Artificial sequence
  SiRNA target sequence
attatgaaaataaacaacaac

SEQ ID NO: 282104 - DNA, 21 bp, Artificial sequence
  SiRNA target sequence
ttatgaaaataaacaacaact

SEQ ID NO: 282105 - DNA, 21 bp, Artificial sequence
  SiRNA target sequence
tatgaaaataaacaacaactt

SEQ ID NO: 282106 - DNA, 21 bp, Artificial sequence
  SiRNA target sequence
atgaaaataaacaacaacttg

SEQ ID NO: 282107 - DNA, 21 bp, Artificial sequence
  SiRNA target sequence
tgaaaataaacaacaacttgt

SEQ ID NO: 282108 - DNA, 21 bp, Artificial sequence
  SiRNA target sequence
gaaaataaacaacaacttgtt

SEQ ID NO: 282109 - DNA, 21 bp, Artificial sequence
  SiRNA target sequence
aaaataaacaacaacttgttg

SEQ ID NO: 282110 - DNA, 21 bp, Artificial sequence
  SiRNA target sequence
aaataaacaacaacttgttga

SEQ ID NO: 282111 - DNA, 21 bp, Artificial sequence
  SiRNA target sequence
aataaacaacaacttgttgaa

SEQ ID NO: 282112 - DNA, 21 bp, Artificial sequence
  SiRNA target sequence
ataaacaacaacttgttgaac

SEQ ID NO: 282113 - DNA, 21 bp, Artificial sequence
  SiRNA target sequence
taaacaacaacttgttgaaca

SEQ ID NO: 282114 - DNA, 21 bp, Artificial sequence
  SiRNA target sequence
aaacaacaacttgttgaacag

SEQ ID NO: 282115 - DNA, 21 bp, Artificial sequence
  SiRNA target sequence
aacaacaacttgttgaacaga

SEQ ID NO: 282116 - DNA, 21 bp, Artificial sequence
  SiRNA target sequence
acaacaacttgttgaacagac

SEQ ID NO: 282117 - DNA, 21 bp, Artificial sequence
  SiRNA target sequence
caacaacttgttgaacagacc

SEQ ID NO: 282118 - DNA, 21 bp, Artificial sequence
  SiRNA target sequence
aacaacttgttgaacagaccg

SEQ ID NO: 282119 - DNA, 21 bp, Artificial sequence
  SiRNA target sequence
acaacttgttgaacagaccga

SEQ ID NO: 282120 - DNA, 21 bp, Artificial sequence
  SiRNA target sequence
caacttgttgaacagaccgaa

SEQ ID NO: 282121 - DNA, 21 bp, Artificial sequence
  SiRNA target sequence
aacttgttgaacagaccgaaa

SEQ ID NO: 282122 - DNA, 21 bp, Artificial sequence
  SiRNA target sequence
acttgttgaacagaccgaaat

SEQ ID NO: 282123 - DNA, 21 bp, Artificial sequence
  SiRNA target sequence
cttgttgaacagaccgaaatt

SEQ ID NO: 282124 - DNA, 21 bp, Artificial sequence
  SiRNA target sequence
ttgttgaacagaccgaaatta

SEQ ID NO: 282125 - DNA, 21 bp, Artificial sequence
  SiRNA target sequence
tgttgaacagaccgaaattac

SEQ ID NO: 282126 - DNA, 21 bp, Artificial sequence
  SiRNA target sequence
gttgaacagaccgaaattacc

SEQ ID NO: 282127 - DNA, 21 bp, Artificial sequence
  SiRNA target sequence
ttgaacagaccgaaattacca

SEQ ID NO: 282128 - DNA, 21 bp, Artificial sequence
  SiRNA target sequence
tgaacagaccgaaattaccac

SEQ ID NO: 282129 - DNA, 21 bp, Artificial sequence
  SiRNA target sequence
gaacagaccgaaattaccacc

SEQ ID NO: 282130 - DNA, 21 bp, Artificial sequence
  SiRNA target sequence
aacagaccgaaattaccacct

SEQ ID NO: 282131 - DNA, 21 bp, Artificial sequence
  SiRNA target sequence
acagaccgaaattaccacctt

SEQ ID NO: 282132 - DNA, 21 bp, Artificial sequence
  SiRNA target sequence
cagaccgaaattaccaccttt

SEQ ID NO: 282133 - DNA, 21 bp, Artificial sequence
  SiRNA target sequence
agaccgaaattaccacctttg

SEQ ID NO: 282134 - DNA, 21 bp, Artificial sequence
  SiRNA target sequence
gaccgaaattaccacctttga

SEQ ID NO: 282135 - DNA, 21 bp, Artificial sequence
  SiRNA target sequence
accgaaattaccacctttgaa

SEQ ID NO: 282136 - DNA, 21 bp, Artificial sequence
  SiRNA target sequence
ccgaaattaccacctttgaaa

SEQ ID NO: 282137 - DNA, 21 bp, Artificial sequence
  SiRNA target sequence
cgaaattaccacctttgaaaa

SEQ ID NO: 282138 - DNA, 21 bp, Artificial sequence
  SiRNA target sequence
gaaattaccacctttgaaaac

SEQ ID NO: 282139 - DNA, 21 bp, Artificial sequence
  SiRNA target sequence
aaattaccacctttgaaaacg

SEQ ID NO: 282140 - DNA, 21 bp, Artificial sequence
  SiRNA target sequence
aattaccacctttgaaaacga

SEQ ID NO: 282141 - DNA, 21 bp, Artificial sequence
  SiRNA target sequence
attaccacctttgaaaacgat

SEQ ID NO: 282142 - DNA, 21 bp, Artificial sequence
  SiRNA target sequence
ttaccacctttgaaaacgatt

SEQ ID NO: 282143 - DNA, 21 bp, Artificial sequence
  SiRNA target sequence
taccacctttgaaaacgattt

SEQ ID NO: 282144 - DNA, 21 bp, Artificial sequence
  SiRNA target sequence
accacctttgaaaacgatttg

SEQ ID NO: 282145 - DNA, 21 bp, Artificial sequence
  SiRNA target sequence
ccacctttgaaaacgatttga

SEQ ID NO: 282146 - DNA, 21 bp, Artificial sequence
  SiRNA target sequence
cacctttgaaaacgatttgat

SEQ ID NO: 282147 - DNA, 21 bp, Artificial sequence
  SiRNA target sequence
acctttgaaaacgatttgatc

SEQ ID NO: 282148 - DNA, 21 bp, Artificial sequence
  SiRNA target sequence
cctttgaaaacgatttgatcg

SEQ ID NO: 282149 - DNA, 21 bp, Artificial sequence
  SiRNA target sequence
ctttgaaaacgatttgatcgt

SEQ ID NO: 282150 - DNA, 21 bp, Artificial sequence
  SiRNA target sequence
tttgaaaacgatttgatcgtg

SEQ ID NO: 282151 - DNA, 21 bp, Artificial sequence
  SiRNA target sequence
ttgaaaacgatttgatcgtgc

SEQ ID NO: 282152 - DNA, 21 bp, Artificial sequence
  SiRNA target sequence
tgaaaacgatttgatcgtgct

SEQ ID NO: 282153 - DNA, 21 bp, Artificial sequence
  SiRNA target sequence
gaaaacgatttgatcgtgcta

SEQ ID NO: 282154 - DNA, 21 bp, Artificial sequence
  SiRNA target sequence
aaaacgatttgatcgtgctag

SEQ ID NO: 282155 - DNA, 21 bp, Artificial sequence
  SiRNA target sequence
aaacgatttgatcgtgctaga

SEQ ID NO: 282156 - DNA, 21 bp, Artificial sequence
  SiRNA target sequence
aacgatttgatcgtgctagag

SEQ ID NO: 282157 - DNA, 21 bp, Artificial sequence
  SiRNA target sequence
acgatttgatcgtgctagagg

SEQ ID NO: 282158 - DNA, 21 bp, Artificial sequence
  SiRNA target sequence
cgatttgatcgtgctagagga

SEQ ID NO: 282159 - DNA, 21 bp, Artificial sequence
  SiRNA target sequence
gatttgatcgtgctagaggat

SEQ ID NO: 282160 - DNA, 21 bp, Artificial sequence
  SiRNA target sequence
atttgatcgtgctagaggatg

SEQ ID NO: 282161 - DNA, 21 bp, Artificial sequence
  SiRNA target sequence
tttgatcgtgctagaggatgg

SEQ ID NO: 282162 - DNA, 21 bp, Artificial sequence
  SiRNA target sequence
ttgatcgtgctagaggatggg

SEQ ID NO: 282163 - DNA, 21 bp, Artificial sequence
  SiRNA target sequence
tgatcgtgctagaggatgggc

SEQ ID NO: 282164 - DNA, 21 bp, Artificial sequence
  SiRNA target sequence
gatcgtgctagaggatgggcc

SEQ ID NO: 282165 - DNA, 21 bp, Artificial sequence
  SiRNA target sequence
atcgtgctagaggatgggccg

SEQ ID NO: 282166 - DNA, 21 bp, Artificial sequence
  SiRNA target sequence
tcgtgctagaggatgggccgc

SEQ ID NO: 282167 - DNA, 21 bp, Artificial sequence
  SiRNA target sequence
cgtgctagaggatgggccgca

SEQ ID NO: 282168 - DNA, 21 bp, Artificial sequence
  SiRNA target sequence
gtgctagaggatgggccgcaa

SEQ ID NO: 282169 - DNA, 21 bp, Artificial sequence
  SiRNA target sequence
tgctagaggatgggccgcaaa

SEQ ID NO: 282170 - DNA, 21 bp, Artificial sequence
  SiRNA target sequence
gctagaggatgggccgcaaat

SEQ ID NO: 282171 - DNA, 21 bp, Artificial sequence
  SiRNA target sequence
ctagaggatgggccgcaaatg

SEQ ID NO: 282172 - DNA, 21 bp, Artificial sequence
  SiRNA target sequence
tagaggatgggccgcaaatgg

SEQ ID NO: 282173 - DNA, 21 bp, Artificial sequence
  SiRNA target sequence
agaggatgggccgcaaatgga

SEQ ID NO: 282174 - DNA, 21 bp, Artificial sequence
  SiRNA target sequence
gaggatgggccgcaaatggaa

SEQ ID NO: 282175 - DNA, 21 bp, Artificial sequence
  SiRNA target sequence
aggatgggccgcaaatggaag

SEQ ID NO: 282176 - DNA, 21 bp, Artificial sequence
  SiRNA target sequence
ggatgggccgcaaatggaaga

SEQ ID NO: 282177 - DNA, 21 bp, Artificial sequence
  SiRNA target sequence
gatgggccgcaaatggaagaa

SEQ ID NO: 282178 - DNA, 21 bp, Artificial sequence
  SiRNA target sequence
atgggccgcaaatggaagaat

SEQ ID NO: 282179 - DNA, 21 bp, Artificial sequence
  SiRNA target sequence
tgggccgcaaatggaagaatc

SEQ ID NO: 282180 - DNA, 21 bp, Artificial sequence
  SiRNA target sequence
gggccgcaaatggaagaatct

SEQ ID NO: 282181 - DNA, 21 bp, Artificial sequence
  SiRNA target sequence
ggccgcaaatggaagaatctc

SEQ ID NO: 282182 - DNA, 21 bp, Artificial sequence
  SiRNA target sequence
gccgcaaatggaagaatctct

SEQ ID NO: 282183 - DNA, 21 bp, Artificial sequence
  SiRNA target sequence
ccgcaaatggaagaatctctt

SEQ ID NO: 282184 - DNA, 21 bp, Artificial sequence
  SiRNA target sequence
cgcaaatggaagaatctcttc

SEQ ID NO: 282185 - DNA, 21 bp, Artificial sequence
  SiRNA target sequence
gcaaatggaagaatctcttcc

SEQ ID NO: 282186 - DNA, 21 bp, Artificial sequence
  SiRNA target sequence
caaatggaagaatctcttcct

SEQ ID NO: 282187 - DNA, 21 bp, Artificial sequence
  SiRNA target sequence
aaatggaagaatctcttcctt

SEQ ID NO: 282188 - DNA, 21 bp, Artificial sequence
  SiRNA target sequence
aatggaagaatctcttccttt

SEQ ID NO: 282189 - DNA, 21 bp, Artificial sequence
  SiRNA target sequence
atggaagaatctcttcctttt

SEQ ID NO: 282190 - DNA, 21 bp, Artificial sequence
  SiRNA target sequence
tggaagaatctcttccttttg

SEQ ID NO: 282191 - DNA, 21 bp, Artificial sequence
  SiRNA target sequence
ggaagaatctcttccttttgc

SEQ ID NO: 282192 - DNA, 21 bp, Artificial sequence
  SiRNA target sequence
gaagaatctcttccttttgcg

SEQ ID NO: 282193 - DNA, 21 bp, Artificial sequence
  SiRNA target sequence
aagaatctcttccttttgcgt

SEQ ID NO: 282194 - DNA, 21 bp, Artificial sequence
  SiRNA target sequence
agaatctcttccttttgcgtt

SEQ ID NO: 282195 - DNA, 21 bp, Artificial sequence
  SiRNA target sequence
gaatctcttccttttgcgttt

SEQ ID NO: 282196 - DNA, 21 bp, Artificial sequence
  SiRNA target sequence
aatctcttccttttgcgtttc

SEQ ID NO: 282197 - DNA, 21 bp, Artificial sequence
  SiRNA target sequence
atctcttccttttgcgtttca

SEQ ID NO: 282198 - DNA, 21 bp, Artificial sequence
  SiRNA target sequence
tctcttccttttgcgtttcac

SEQ ID NO: 282199 - DNA, 21 bp, Artificial sequence
  SiRNA target sequence
ctcttccttttgcgtttcacg

SEQ ID NO: 282200 - DNA, 21 bp, Artificial sequence
  SiRNA target sequence
tcttccttttgcgtttcacgg

SEQ ID NO: 282201 - DNA, 21 bp, Artificial sequence
  SiRNA target sequence
cttccttttgcgtttcacggg

SEQ ID NO: 282202 - DNA, 21 bp, Artificial sequence
  SiRNA target sequence
ttccttttgcgtttcacgggc

SEQ ID NO: 282203 - DNA, 21 bp, Artificial sequence
  SiRNA target sequence
tccttttgcgtttcacgggca

SEQ ID NO: 282204 - DNA, 21 bp, Artificial sequence
  SiRNA target sequence
ccttttgcgtttcacgggcag

SEQ ID NO: 282205 - DNA, 21 bp, Artificial sequence
  SiRNA target sequence
cttttgcgtttcacgggcagc

SEQ ID NO: 282206 - DNA, 21 bp, Artificial sequence
  SiRNA target sequence
ttttgcgtttcacgggcagca

SEQ ID NO: 282207 - DNA, 21 bp, Artificial sequence
  SiRNA target sequence
tttgcgtttcacgggcagcac

SEQ ID NO: 282208 - DNA, 21 bp, Artificial sequence
  SiRNA target sequence
ttgcgtttcacgggcagcaca

SEQ ID NO: 282209 - DNA, 21 bp, Artificial sequence
  SiRNA target sequence
tgcgtttcacgggcagcacac

SEQ ID NO: 282210 - DNA, 21 bp, Artificial sequence
  SiRNA target sequence
gcgtttcacgggcagcacact

SEQ ID NO: 282211 - DNA, 21 bp, Artificial sequence
  SiRNA target sequence
cgtttcacgggcagcacactg

SEQ ID NO: 282212 - DNA, 21 bp, Artificial sequence
  SiRNA target sequence
gtttcacgggcagcacactga

SEQ ID NO: 282213 - DNA, 21 bp, Artificial sequence
  SiRNA target sequence
tttcacgggcagcacactgat

SEQ ID NO: 282214 - DNA, 21 bp, Artificial sequence
  SiRNA target sequence
ttcacgggcagcacactgata

SEQ ID NO: 282215 - DNA, 21 bp, Artificial sequence
  SiRNA target sequence
tcacgggcagcacactgataa

SEQ ID NO: 282216 - DNA, 21 bp, Artificial sequence
  SiRNA target sequence
cacgggcagcacactgataat

SEQ ID NO: 282217 - DNA, 21 bp, Artificial sequence
  SiRNA target sequence
acgggcagcacactgataatc

SEQ ID NO: 282218 - DNA, 21 bp, Artificial sequence
  SiRNA target sequence
cgggcagcacactgataatcg

SEQ ID NO: 282219 - DNA, 21 bp, Artificial sequence
  SiRNA target sequence
gggcagcacactgataatcgt

SEQ ID NO: 282220 - DNA, 21 bp, Artificial sequence
  SiRNA target sequence
ggcagcacactgataatcgtc

SEQ ID NO: 282221 - DNA, 21 bp, Artificial sequence
  SiRNA target sequence
gcagcacactgataatcgtca

SEQ ID NO: 282222 - DNA, 21 bp, Artificial sequence
  SiRNA target sequence
cagcacactgataatcgtcaa

SEQ ID NO: 282223 - DNA, 21 bp, Artificial sequence
  SiRNA target sequence
agcacactgataatcgtcaac

SEQ ID NO: 282224 - DNA, 21 bp, Artificial sequence
  SiRNA target sequence
gcacactgataatcgtcaaca

SEQ ID NO: 282225 - DNA, 21 bp, Artificial sequence
  SiRNA target sequence
cacactgataatcgtcaacat

SEQ ID NO: 282226 - DNA, 21 bp, Artificial sequence
  SiRNA target sequence
acactgataatcgtcaacata

SEQ ID NO: 282227 - DNA, 21 bp, Artificial sequence
  SiRNA target sequence
cactgataatcgtcaacatac

SEQ ID NO: 282228 - DNA, 21 bp, Artificial sequence
  SiRNA target sequence
actgataatcgtcaacataca

SEQ ID NO: 282229 - DNA, 21 bp, Artificial sequence
  SiRNA target sequence
ctgataatcgtcaacatacag

SEQ ID NO: 282230 - DNA, 21 bp, Artificial sequence
  SiRNA target sequence
tgataatcgtcaacatacagt

SEQ ID NO: 282231 - DNA, 21 bp, Artificial sequence
  SiRNA target sequence
gataatcgtcaacatacagtg

SEQ ID NO: 282232 - DNA, 21 bp, Artificial sequence
  SiRNA target sequence
ataatcgtcaacatacagtgg

SEQ ID NO: 282233 - DNA, 21 bp, Artificial sequence
  SiRNA target sequence
taatcgtcaacatacagtggt

SEQ ID NO: 282234 - DNA, 21 bp, Artificial sequence
  SiRNA target sequence
aatcgtcaacatacagtggtt

SEQ ID NO: 282235 - DNA, 21 bp, Artificial sequence
  SiRNA target sequence
atcgtcaacatacagtggtta

SEQ ID NO: 282236 - DNA, 21 bp, Artificial sequence
  SiRNA target sequence
tcgtcaacatacagtggttaa

SEQ ID NO: 282237 - DNA, 21 bp, Artificial sequence
  SiRNA target sequence
cgtcaacatacagtggttaat

SEQ ID NO: 282238 - DNA, 21 bp, Artificial sequence
  SiRNA target sequence
gtcaacatacagtggttaatt

SEQ ID NO: 282239 - DNA, 21 bp, Artificial sequence
  SiRNA target sequence
tcaacatacagtggttaattt

SEQ ID NO: 282240 - DNA, 21 bp, Artificial sequence
  SiRNA target sequence
caacatacagtggttaatttc

SEQ ID NO: 282241 - DNA, 21 bp, Artificial sequence
  SiRNA target sequence
aacatacagtggttaatttct

SEQ ID NO: 282242 - DNA, 21 bp, Artificial sequence
  SiRNA target sequence
acatacagtggttaatttctt

SEQ ID NO: 282243 - DNA, 21 bp, Artificial sequence
  SiRNA target sequence
catacagtggttaatttcttg

SEQ ID NO: 282244 - DNA, 21 bp, Artificial sequence
  SiRNA target sequence
atacagtggttaatttcttgc

SEQ ID NO: 282245 - DNA, 21 bp, Artificial sequence
  SiRNA target sequence
tacagtggttaatttcttgca

SEQ ID NO: 282246 - DNA, 21 bp, Artificial sequence
  SiRNA target sequence
acagtggttaatttcttgcaa

SEQ ID NO: 282247 - DNA, 21 bp, Artificial sequence
  SiRNA target sequence
cagtggttaatttcttgcaac

SEQ ID NO: 282248 - DNA, 21 bp, Artificial sequence
  SiRNA target sequence
agtggttaatttcttgcaacg

SEQ ID NO: 282249 - DNA, 21 bp, Artificial sequence
  SiRNA target sequence
gtggttaatttcttgcaacgt

SEQ ID NO: 282250 - DNA, 21 bp, Artificial sequence
  SiRNA target sequence
tggttaatttcttgcaacgtc

SEQ ID NO: 282251 - DNA, 21 bp, Artificial sequence
  SiRNA target sequence
ggttaatttcttgcaacgtcc

SEQ ID NO: 282252 - DNA, 21 bp, Artificial sequence
  SiRNA target sequence
gttaatttcttgcaacgtccc

SEQ ID NO: 282253 - DNA, 21 bp, Artificial sequence
  SiRNA target sequence
ttaatttcttgcaacgtcccc

SEQ ID NO: 282254 - DNA, 21 bp, Artificial sequence
  SiRNA target sequence
taatttcttgcaacgtcccca

SEQ ID NO: 282255 - DNA, 21 bp, Artificial sequence
  SiRNA target sequence
aatttcttgcaacgtccccag

SEQ ID NO: 282256 - DNA, 21 bp, Artificial sequence
  SiRNA target sequence
atttcttgcaacgtccccagg

SEQ ID NO: 282257 - DNA, 21 bp, Artificial sequence
  SiRNA target sequence
tttcttgcaacgtccccaggt

SEQ ID NO: 282258 - DNA, 21 bp, Artificial sequence
  SiRNA target sequence
ttcttgcaacgtccccaggtt

SEQ ID NO: 282259 - DNA, 21 bp, Artificial sequence
  SiRNA target sequence
tcttgcaacgtccccaggtta

SEQ ID NO: 282260 - DNA, 21 bp, Artificial sequence
  SiRNA target sequence
cttgcaacgtccccaggttat

SEQ ID NO: 282261 - DNA, 21 bp, Artificial sequence
  SiRNA target sequence
ttgcaacgtccccaggttatt

SEQ ID NO: 282262 - DNA, 21 bp, Artificial sequence
  SiRNA target sequence
tgcaacgtccccaggttattt

SEQ ID NO: 282263 - DNA, 21 bp, Artificial sequence
  SiRNA target sequence
gcaacgtccccaggttatttt

SEQ ID NO: 282264 - DNA, 21 bp, Artificial sequence
  SiRNA target sequence
caacgtccccaggttattttt

SEQ ID NO: 282265 - DNA, 21 bp, Artificial sequence
  SiRNA target sequence
aacgtccccaggttatttttg

SEQ ID NO: 282266 - DNA, 21 bp, Artificial sequence
  SiRNA target sequence
acgtccccaggttatttttga

SEQ ID NO: 282267 - DNA, 21 bp, Artificial sequence
  SiRNA target sequence
cgtccccaggttatttttgat

SEQ ID NO: 282268 - DNA, 21 bp, Artificial sequence
  SiRNA target sequence
gtccccaggttatttttgatt

SEQ ID NO: 282269 - DNA, 21 bp, Artificial sequence
  SiRNA target sequence
tccccaggttatttttgattc

SEQ ID NO: 282270 - DNA, 21 bp, Artificial sequence
  SiRNA target sequence
ccccaggttatttttgattcg

SEQ ID NO: 282271 - DNA, 21 bp, Artificial sequence
  SiRNA target sequence
cccaggttatttttgattcgt

SEQ ID NO: 282272 - DNA, 21 bp, Artificial sequence
  SiRNA target sequence
ccaggttatttttgattcgtc

SEQ ID NO: 282273 - DNA, 21 bp, Artificial sequence
  SiRNA target sequence
caggttatttttgattcgtct

SEQ ID NO: 282274 - DNA, 21 bp, Artificial sequence
  SiRNA target sequence
aggttatttttgattcgtctt

SEQ ID NO: 282275 - DNA, 21 bp, Artificial sequence
  SiRNA target sequence
ggttatttttgattcgtcttg

SEQ ID NO: 282276 - DNA, 21 bp, Artificial sequence
  SiRNA target sequence
gttatttttgattcgtcttgg

SEQ ID NO: 282277 - DNA, 21 bp, Artificial sequence
  SiRNA target sequence
ttatttttgattcgtcttggg

SEQ ID NO: 282278 - DNA, 21 bp, Artificial sequence
  SiRNA target sequence
tatttttgattcgtcttgggc

SEQ ID NO: 282279 - DNA, 21 bp, Artificial sequence
  SiRNA target sequence
atttttgattcgtcttgggcg

SEQ ID NO: 282280 - DNA, 21 bp, Artificial sequence
  SiRNA target sequence
tttttgattcgtcttgggcgt

SEQ ID NO: 282281 - DNA, 21 bp, Artificial sequence
  SiRNA target sequence
ttttgattcgtcttgggcgtc

SEQ ID NO: 282282 - DNA, 21 bp, Artificial sequence
  SiRNA target sequence
tttgattcgtcttgggcgtct

SEQ ID NO: 282283 - DNA, 21 bp, Artificial sequence
  SiRNA target sequence
ttgattcgtcttgggcgtctg

SEQ ID NO: 282284 - DNA, 21 bp, Artificial sequence
  SiRNA target sequence
tgattcgtcttgggcgtctga

SEQ ID NO: 282285 - DNA, 21 bp, Artificial sequence
  SiRNA target sequence
gattcgtcttgggcgtctgat

SEQ ID NO: 282286 - DNA, 21 bp, Artificial sequence
  SiRNA target sequence
attcgtcttgggcgtctgatg

SEQ ID NO: 282287 - DNA, 21 bp, Artificial sequence
  SiRNA target sequence
ttcgtcttgggcgtctgatgt

SEQ ID NO: 282288 - DNA, 21 bp, Artificial sequence
  SiRNA target sequence
tcgtcttgggcgtctgatgta

SEQ ID NO: 282289 - DNA, 21 bp, Artificial sequence
  SiRNA target sequence
cgtcttgggcgtctgatgtac

SEQ ID NO: 282290 - DNA, 21 bp, Artificial sequence
  SiRNA target sequence
gtcttgggcgtctgatgtacc

SEQ ID NO: 282291 - DNA, 21 bp, Artificial sequence
  SiRNA target sequence
tcttgggcgtctgatgtacct

SEQ ID NO: 282292 - DNA, 21 bp, Artificial sequence
  SiRNA target sequence
cttgggcgtctgatgtacctc

SEQ ID NO: 282293 - DNA, 21 bp, Artificial sequence
  SiRNA target sequence
ttgggcgtctgatgtacctcg

SEQ ID NO: 282294 - DNA, 21 bp, Artificial sequence
  SiRNA target sequence
tgggcgtctgatgtacctcga

SEQ ID NO: 282295 - DNA, 21 bp, Artificial sequence
  SiRNA target sequence
gggcgtctgatgtacctcgaa

SEQ ID NO: 282296 - DNA, 21 bp, Artificial sequence
  SiRNA target sequence
ggcgtctgatgtacctcgaaa

SEQ ID NO: 282297 - DNA, 21 bp, Artificial sequence
  SiRNA target sequence
gcgtctgatgtacctcgaaac

SEQ ID NO: 282298 - DNA, 21 bp, Artificial sequence
  SiRNA target sequence
cgtctgatgtacctcgaaaca

SEQ ID NO: 282299 - DNA, 21 bp, Artificial sequence
  SiRNA target sequence
gtctgatgtacctcgaaacaa

SEQ ID NO: 282300 - DNA, 21 bp, Artificial sequence
  SiRNA target sequence
tctgatgtacctcgaaacaag

SEQ ID NO: 282301 - DNA, 21 bp, Artificial sequence
  SiRNA target sequence
ctgatgtacctcgaaacaagc

SEQ ID NO: 282302 - DNA, 21 bp, Artificial sequence
  SiRNA target sequence
tgatgtacctcgaaacaagca

SEQ ID NO: 282303 - DNA, 21 bp, Artificial sequence
  SiRNA target sequence
gatgtacctcgaaacaagcaa

SEQ ID NO: 282304 - DNA, 21 bp, Artificial sequence
  SiRNA target sequence
atgtacctcgaaacaagcaat

SEQ ID NO: 282305 - DNA, 21 bp, Artificial sequence
  SiRNA target sequence
tgtacctcgaaacaagcaatt

SEQ ID NO: 282306 - DNA, 21 bp, Artificial sequence
  SiRNA target sequence
gtacctcgaaacaagcaattc

SEQ ID NO: 282307 - DNA, 21 bp, Artificial sequence
  SiRNA target sequence
tacctcgaaacaagcaattca

SEQ ID NO: 282308 - DNA, 21 bp, Artificial sequence
  SiRNA target sequence
acctcgaaacaagcaattcat

SEQ ID NO: 282309 - DNA, 21 bp, Artificial sequence
  SiRNA target sequence
cctcgaaacaagcaattcatg

SEQ ID NO: 282310 - DNA, 21 bp, Artificial sequence
  SiRNA target sequence
ctcgaaacaagcaattcatgg

SEQ ID NO: 282311 - DNA, 21 bp, Artificial sequence
  SiRNA target sequence
tcgaaacaagcaattcatgga

SEQ ID NO: 282312 - DNA, 21 bp, Artificial sequence
  SiRNA target sequence
cgaaacaagcaattcatggat

SEQ ID NO: 282313 - DNA, 21 bp, Artificial sequence
  SiRNA target sequence
gaaacaagcaattcatggatt

SEQ ID NO: 282314 - DNA, 21 bp, Artificial sequence
  SiRNA target sequence
aaacaagcaattcatggattc

SEQ ID NO: 282315 - DNA, 21 bp, Artificial sequence
  SiRNA target sequence
aacaagcaattcatggattcg

SEQ ID NO: 282316 - DNA, 21 bp, Artificial sequence
  SiRNA target sequence
acaagcaattcatggattcga

SEQ ID NO: 282317 - DNA, 21 bp, Artificial sequence
  SiRNA target sequence
caagcaattcatggattcgat

SEQ ID NO: 282318 - DNA, 21 bp, Artificial sequence
  SiRNA target sequence
aagcaattcatggattcgatt

SEQ ID NO: 282319 - DNA, 21 bp, Artificial sequence
  SiRNA target sequence
agcaattcatggattcgatta

SEQ ID NO: 282320 - DNA, 21 bp, Artificial sequence
  SiRNA target sequence
gcaattcatggattcgattat

SEQ ID NO: 282321 - DNA, 21 bp, Artificial sequence
  SiRNA target sequence
caattcatggattcgattatg

SEQ ID NO: 282322 - DNA, 21 bp, Artificial sequence
  SiRNA target sequence
aattcatggattcgattatga

SEQ ID NO: 282323 - DNA, 21 bp, Artificial sequence
  SiRNA target sequence
attcatggattcgattatgat

SEQ ID NO: 282324 - DNA, 21 bp, Artificial sequence
  SiRNA target sequence
ttcatggattcgattatgata

SEQ ID NO: 282325 - DNA, 21 bp, Artificial sequence
  SiRNA target sequence
tcatggattcgattatgatac

SEQ ID NO: 282326 - DNA, 21 bp, Artificial sequence
  SiRNA target sequence
catggattcgattatgatacc

SEQ ID NO: 282327 - DNA, 21 bp, Artificial sequence
  SiRNA target sequence
atggattcgattatgatacct

SEQ ID NO: 282328 - DNA, 21 bp, Artificial sequence
  SiRNA target sequence
tggattcgattatgatacctg

SEQ ID NO: 282329 - DNA, 21 bp, Artificial sequence
  SiRNA target sequence
ggattcgattatgatacctga

SEQ ID NO: 282330 - DNA, 21 bp, Artificial sequence
  SiRNA target sequence
gattcgattatgatacctgat

SEQ ID NO: 282331 - DNA, 21 bp, Artificial sequence
  SiRNA target sequence
attcgattatgatacctgatg

SEQ ID NO: 282332 - DNA, 21 bp, Artificial sequence
  SiRNA target sequence
ttcgattatgatacctgatga

SEQ ID NO: 282333 - DNA, 21 bp, Artificial sequence
  SiRNA target sequence
tcgattatgatacctgatgat

SEQ ID NO: 282334 - DNA, 21 bp, Artificial sequence
  SiRNA target sequence
cgattatgatacctgatgata

SEQ ID NO: 282335 - DNA, 21 bp, Artificial sequence
  SiRNA target sequence
gattatgatacctgatgatat

SEQ ID NO: 282336 - DNA, 21 bp, Artificial sequence
  SiRNA target sequence
attatgatacctgatgatatc

SEQ ID NO: 282337 - DNA, 21 bp, Artificial sequence
  SiRNA target sequence
ttatgatacctgatgatatca

SEQ ID NO: 282338 - DNA, 21 bp, Artificial sequence
  SiRNA target sequence
tatgatacctgatgatatcat

SEQ ID NO: 282339 - DNA, 21 bp, Artificial sequence
  SiRNA target sequence
atgatacctgatgatatcatc

SEQ ID NO: 282340 - DNA, 21 bp, Artificial sequence
  SiRNA target sequence
tgatacctgatgatatcatct

SEQ ID NO: 282341 - DNA, 21 bp, Artificial sequence
  SiRNA target sequence
gatacctgatgatatcatctc

SEQ ID NO: 282342 - DNA, 21 bp, Artificial sequence
  SiRNA target sequence
atacctgatgatatcatctct

SEQ ID NO: 282343 - DNA, 21 bp, Artificial sequence
  SiRNA target sequence
tacctgatgatatcatctctt

SEQ ID NO: 282344 - DNA, 21 bp, Artificial sequence
  SiRNA target sequence
acctgatgatatcatctcttt

SEQ ID NO: 282345 - DNA, 21 bp, Artificial sequence
  SiRNA target sequence
cctgatgatatcatctctttt

SEQ ID NO: 282346 - DNA, 21 bp, Artificial sequence
  SiRNA target sequence
ctgatgatatcatctcttttc

SEQ ID NO: 282347 - DNA, 21 bp, Artificial sequence
  SiRNA target sequence
tgatgatatcatctcttttcc

SEQ ID NO: 282348 - DNA, 21 bp, Artificial sequence
  SiRNA target sequence
gatgatatcatctcttttccg

SEQ ID NO: 282349 - DNA, 21 bp, Artificial sequence
  SiRNA target sequence
atgatatcatctcttttccga

SEQ ID NO: 282350 - DNA, 21 bp, Artificial sequence
  SiRNA target sequence
tgatatcatctcttttccgat

SEQ ID NO: 282351 - DNA, 21 bp, Artificial sequence
  SiRNA target sequence
gatatcatctcttttccgatg

SEQ ID NO: 282352 - DNA, 21 bp, Artificial sequence
  SiRNA target sequence
atatcatctcttttccgatgt

SEQ ID NO: 282353 - DNA, 21 bp, Artificial sequence
  SiRNA target sequence
tatcatctcttttccgatgtt

SEQ ID NO: 282354 - DNA, 21 bp, Artificial sequence
  SiRNA target sequence
atcatctcttttccgatgttt

SEQ ID NO: 282355 - DNA, 21 bp, Artificial sequence
  SiRNA target sequence
tcatctcttttccgatgtttg

SEQ ID NO: 282356 - DNA, 21 bp, Artificial sequence
  SiRNA target sequence
catctcttttccgatgtttgc

SEQ ID NO: 282357 - DNA, 21 bp, Artificial sequence
  SiRNA target sequence
atctcttttccgatgtttgca

SEQ ID NO: 282358 - DNA, 21 bp, Artificial sequence
  SiRNA target sequence
tctcttttccgatgtttgcag

SEQ ID NO: 282359 - DNA, 21 bp, Artificial sequence
  SiRNA target sequence
ctcttttccgatgtttgcaga

SEQ ID NO: 282360 - DNA, 21 bp, Artificial sequence
  SiRNA target sequence
tcttttccgatgtttgcagag

SEQ ID NO: 282361 - DNA, 21 bp, Artificial sequence
  SiRNA target sequence
cttttccgatgtttgcagaga

SEQ ID NO: 282362 - DNA, 21 bp, Artificial sequence
  SiRNA target sequence
ttttccgatgtttgcagagaa

SEQ ID NO: 282363 - DNA, 21 bp, Artificial sequence
  SiRNA target sequence
tttccgatgtttgcagagaaa

SEQ ID NO: 282364 - DNA, 21 bp, Artificial sequence
  SiRNA target sequence
ttccgatgtttgcagagaaac

SEQ ID NO: 282365 - DNA, 21 bp, Artificial sequence
  SiRNA target sequence
tccgatgtttgcagagaaact

SEQ ID NO: 282366 - DNA, 21 bp, Artificial sequence
  SiRNA target sequence
ccgatgtttgcagagaaactc

SEQ ID NO: 282367 - DNA, 21 bp, Artificial sequence
  SiRNA target sequence
cgatgtttgcagagaaactca

SEQ ID NO: 282368 - DNA, 21 bp, Artificial sequence
  SiRNA target sequence
gatgtttgcagagaaactcaa

SEQ ID NO: 282369 - DNA, 21 bp, Artificial sequence
  SiRNA target sequence
atgtttgcagagaaactcaaa

SEQ ID NO: 282370 - DNA, 21 bp, Artificial sequence
  SiRNA target sequence
tgtttgcagagaaactcaaag

SEQ ID NO: 282371 - DNA, 21 bp, Artificial sequence
  SiRNA target sequence
gtttgcagagaaactcaaagg

SEQ ID NO: 282372 - DNA, 21 bp, Artificial sequence
  SiRNA target sequence
tttgcagagaaactcaaaggg

SEQ ID NO: 282373 - DNA, 21 bp, Artificial sequence
  SiRNA target sequence
ttgcagagaaactcaaagggt

SEQ ID NO: 282374 - DNA, 21 bp, Artificial sequence
  SiRNA target sequence
tgcagagaaactcaaagggtt

SEQ ID NO: 282375 - DNA, 21 bp, Artificial sequence
  SiRNA target sequence
gcagagaaactcaaagggttt

SEQ ID NO: 282376 - DNA, 21 bp, Artificial sequence
  SiRNA target sequence
cagagaaactcaaagggtttt

SEQ ID NO: 282377 - DNA, 21 bp, Artificial sequence
  SiRNA target sequence
agagaaactcaaagggttttc

SEQ ID NO: 282378 - DNA, 21 bp, Artificial sequence
  SiRNA target sequence
gagaaactcaaagggttttct

SEQ ID NO: 282379 - DNA, 21 bp, Artificial sequence
  SiRNA target sequence
agaaactcaaagggttttctt

SEQ ID NO: 282380 - DNA, 21 bp, Artificial sequence
  SiRNA target sequence
gaaactcaaagggttttcttc

SEQ ID NO: 282381 - DNA, 21 bp, Artificial sequence
  SiRNA target sequence
aaactcaaagggttttcttct

SEQ ID NO: 282382 - DNA, 21 bp, Artificial sequence
  SiRNA target sequence
aactcaaagggttttcttctt

SEQ ID NO: 282383 - DNA, 21 bp, Artificial sequence
  SiRNA target sequence
actcaaagggttttcttcttt

SEQ ID NO: 282384 - DNA, 21 bp, Artificial sequence
  SiRNA target sequence
ctcaaagggttttcttctttg

SEQ ID NO: 282385 - DNA, 21 bp, Artificial sequence
  SiRNA target sequence
tcaaagggttttcttctttga

SEQ ID NO: 282386 - DNA, 21 bp, Artificial sequence
  SiRNA target sequence
caaagggttttcttctttgag

SEQ ID NO: 282387 - DNA, 21 bp, Artificial sequence
  SiRNA target sequence
aaagggttttcttctttgaga

SEQ ID NO: 282388 - DNA, 21 bp, Artificial sequence
  SiRNA target sequence
aagggttttcttctttgagag

SEQ ID NO: 282389 - DNA, 21 bp, Artificial sequence
  SiRNA target sequence
agggttttcttctttgagagc

SEQ ID NO: 282390 - DNA, 21 bp, Artificial sequence
  SiRNA target sequence
gggttttcttctttgagagca

SEQ ID NO: 282391 - DNA, 21 bp, Artificial sequence
  SiRNA target sequence
ggttttcttctttgagagcaa

SEQ ID NO: 282392 - DNA, 21 bp, Artificial sequence
  SiRNA target sequence
gttttcttctttgagagcaac

SEQ ID NO: 282393 - DNA, 21 bp, Artificial sequence
  SiRNA target sequence
ttttcttctttgagagcaaca

SEQ ID NO: 282394 - DNA, 21 bp, Artificial sequence
  SiRNA target sequence
tttcttctttgagagcaacag

SEQ ID NO: 282395 - DNA, 21 bp, Artificial sequence
  SiRNA target sequence
ttcttctttgagagcaacagc

SEQ ID NO: 282396 - DNA, 21 bp, Artificial sequence
  SiRNA target sequence
tcttctttgagagcaacagct

SEQ ID NO: 282397 - DNA, 21 bp, Artificial sequence
  SiRNA target sequence
cttctttgagagcaacagctg

SEQ ID NO: 282398 - DNA, 21 bp, Artificial sequence
  SiRNA target sequence
ttctttgagagcaacagctgt

SEQ ID NO: 282399 - DNA, 21 bp, Artificial sequence
  SiRNA target sequence
tctttgagagcaacagctgtg

SEQ ID NO: 282400 - DNA, 21 bp, Artificial sequence
  SiRNA target sequence
ctttgagagcaacagctgtga

SEQ ID NO: 282401 - DNA, 21 bp, Artificial sequence
  SiRNA target sequence
tttgagagcaacagctgtgat

SEQ ID NO: 282402 - DNA, 21 bp, Artificial sequence
  SiRNA target sequence
ttgagagcaacagctgtgata

SEQ ID NO: 282403 - DNA, 21 bp, Artificial sequence
  SiRNA target sequence
tgagagcaacagctgtgataa

SEQ ID NO: 282404 - DNA, 21 bp, Artificial sequence
  SiRNA target sequence
gagagcaacagctgtgataac

SEQ ID NO: 282405 - DNA, 21 bp, Artificial sequence
  SiRNA target sequence
agagcaacagctgtgataaca

SEQ ID NO: 282406 - DNA, 21 bp, Artificial sequence
  SiRNA target sequence
gagcaacagctgtgataacag

SEQ ID NO: 282407 - DNA, 21 bp, Artificial sequence
  SiRNA target sequence
agcaacagctgtgataacagt

SEQ ID NO: 282408 - DNA, 21 bp, Artificial sequence
  SiRNA target sequence
gcaacagctgtgataacagta

SEQ ID NO: 282409 - DNA, 21 bp, Artificial sequence
  SiRNA target sequence
caacagctgtgataacagtac

SEQ ID NO: 282410 - DNA, 21 bp, Artificial sequence
  SiRNA target sequence
aacagctgtgataacagtaca

SEQ ID NO: 282411 - DNA, 21 bp, Artificial sequence
  SiRNA target sequence
acagctgtgataacagtacag

SEQ ID NO: 282412 - DNA, 21 bp, Artificial sequence
  SiRNA target sequence
cagctgtgataacagtacagt

SEQ ID NO: 282413 - DNA, 21 bp, Artificial sequence
  SiRNA target sequence
agctgtgataacagtacagtt

SEQ ID NO: 282414 - DNA, 21 bp, Artificial sequence
  SiRNA target sequence
gctgtgataacagtacagttt

SEQ ID NO: 282415 - DNA, 21 bp, Artificial sequence
  SiRNA target sequence
ctgtgataacagtacagtttc

SEQ ID NO: 282416 - DNA, 21 bp, Artificial sequence
  SiRNA target sequence
tgtgataacagtacagtttca

SEQ ID NO: 282417 - DNA, 21 bp, Artificial sequence
  SiRNA target sequence
gtgataacagtacagtttcag

SEQ ID NO: 282418 - DNA, 21 bp, Artificial sequence
  SiRNA target sequence
tgataacagtacagtttcaga

SEQ ID NO: 282419 - DNA, 21 bp, Artificial sequence
  SiRNA target sequence
gataacagtacagtttcagac

SEQ ID NO: 282420 - DNA, 21 bp, Artificial sequence
  SiRNA target sequence
ataacagtacagtttcagacg

SEQ ID NO: 282421 - DNA, 21 bp, Artificial sequence
  SiRNA target sequence
taacagtacagtttcagacgc

SEQ ID NO: 282422 - DNA, 21 bp, Artificial sequence
  SiRNA target sequence
aacagtacagtttcagacgca

SEQ ID NO: 282423 - DNA, 21 bp, Artificial sequence
  SiRNA target sequence
acagtacagtttcagacgcaa

SEQ ID NO: 282424 - DNA, 21 bp, Artificial sequence
  SiRNA target sequence
cagtacagtttcagacgcaac

SEQ ID NO: 282425 - DNA, 21 bp, Artificial sequence
  SiRNA target sequence
agtacagtttcagacgcaacc

SEQ ID NO: 282426 - DNA, 21 bp, Artificial sequence
  SiRNA target sequence
gtacagtttcagacgcaacca

SEQ ID NO: 282427 - DNA, 21 bp, Artificial sequence
  SiRNA target sequence
tacagtttcagacgcaaccat

SEQ ID NO: 282428 - DNA, 21 bp, Artificial sequence
  SiRNA target sequence
acagtttcagacgcaaccatt

SEQ ID NO: 282429 - DNA, 21 bp, Artificial sequence
  SiRNA target sequence
cagtttcagacgcaaccattt

SEQ ID NO: 282430 - DNA, 21 bp, Artificial sequence
  SiRNA target sequence
agtttcagacgcaaccatttc

SEQ ID NO: 282431 - DNA, 21 bp, Artificial sequence
  SiRNA target sequence
gtttcagacgcaaccatttca

SEQ ID NO: 282432 - DNA, 21 bp, Artificial sequence
  SiRNA target sequence
tttcagacgcaaccatttcaa

SEQ ID NO: 282433 - DNA, 21 bp, Artificial sequence
  SiRNA target sequence
ttcagacgcaaccatttcaag

SEQ ID NO: 282434 - DNA, 21 bp, Artificial sequence
  SiRNA target sequence
tcagacgcaaccatttcaagc

SEQ ID NO: 282435 - DNA, 21 bp, Artificial sequence
  SiRNA target sequence
cagacgcaaccatttcaagcg

SEQ ID NO: 282436 - DNA, 21 bp, Artificial sequence
  SiRNA target sequence
agacgcaaccatttcaagcgg

SEQ ID NO: 282437 - DNA, 21 bp, Artificial sequence
  SiRNA target sequence
gacgcaaccatttcaagcggg

SEQ ID NO: 282438 - DNA, 21 bp, Artificial sequence
  SiRNA target sequence
acgcaaccatttcaagcggga

SEQ ID NO: 282439 - DNA, 21 bp, Artificial sequence
  SiRNA target sequence
cgcaaccatttcaagcgggaa

SEQ ID NO: 282440 - DNA, 21 bp, Artificial sequence
  SiRNA target sequence
gcaaccatttcaagcgggaag

SEQ ID NO: 282441 - DNA, 21 bp, Artificial sequence
  SiRNA target sequence
caaccatttcaagcgggaaga

SEQ ID NO: 282442 - DNA, 21 bp, Artificial sequence
  SiRNA target sequence
aaccatttcaagcgggaagag

SEQ ID NO: 282443 - DNA, 21 bp, Artificial sequence
  SiRNA target sequence
accatttcaagcgggaagagt

SEQ ID NO: 282444 - DNA, 21 bp, Artificial sequence
  SiRNA target sequence
ccatttcaagcgggaagagtt

SEQ ID NO: 282445 - DNA, 21 bp, Artificial sequence
  SiRNA target sequence
catttcaagcgggaagagtta

SEQ ID NO: 282446 - DNA, 21 bp, Artificial sequence
  SiRNA target sequence
atttcaagcgggaagagttat

SEQ ID NO: 282447 - DNA, 21 bp, Artificial sequence
  SiRNA target sequence
tttcaagcgggaagagttatg

SEQ ID NO: 282448 - DNA, 21 bp, Artificial sequence
  SiRNA target sequence
ttcaagcgggaagagttatgt

SEQ ID NO: 282449 - DNA, 21 bp, Artificial sequence
  SiRNA target sequence
tcaagcgggaagagttatgtt

SEQ ID NO: 282450 - DNA, 21 bp, Artificial sequence
  SiRNA target sequence
caagcgggaagagttatgttg

SEQ ID NO: 282451 - DNA, 21 bp, Artificial sequence
  SiRNA target sequence
aagcgggaagagttatgttgg

SEQ ID NO: 282452 - DNA, 21 bp, Artificial sequence
  SiRNA target sequence
agcgggaagagttatgttggg

SEQ ID NO: 282453 - DNA, 21 bp, Artificial sequence
  SiRNA target sequence
gcgggaagagttatgttggga

SEQ ID NO: 282454 - DNA, 21 bp, Artificial sequence
  SiRNA target sequence
cgggaagagttatgttgggat

SEQ ID NO: 282455 - DNA, 21 bp, Artificial sequence
  SiRNA target sequence
gggaagagttatgttgggatc

SEQ ID NO: 282456 - DNA, 21 bp, Artificial sequence
  SiRNA target sequence
ggaagagttatgttgggatca

SEQ ID NO: 282457 - DNA, 21 bp, Artificial sequence
  SiRNA target sequence
gaagagttatgttgggatcat

SEQ ID NO: 282458 - DNA, 21 bp, Artificial sequence
  SiRNA target sequence
aagagttatgttgggatcatt

SEQ ID NO: 282459 - DNA, 21 bp, Artificial sequence
  SiRNA target sequence
agagttatgttgggatcattc

SEQ ID NO: 282460 - DNA, 21 bp, Artificial sequence
  SiRNA target sequence
gagttatgttgggatcattcc

SEQ ID NO: 282461 - DNA, 21 bp, Artificial sequence
  SiRNA target sequence
agttatgttgggatcattccc

SEQ ID NO: 282462 - DNA, 21 bp, Artificial sequence
  SiRNA target sequence
gttatgttgggatcattccca

SEQ ID NO: 282463 - DNA, 21 bp, Artificial sequence
  SiRNA target sequence
ttatgttgggatcattcccat

SEQ ID NO: 282464 - DNA, 21 bp, Artificial sequence
  SiRNA target sequence
tatgttgggatcattcccatt

SEQ ID NO: 282465 - DNA, 21 bp, Artificial sequence
  SiRNA target sequence
atgttgggatcattcccatta

SEQ ID NO: 282466 - DNA, 21 bp, Artificial sequence
  SiRNA target sequence
tgttgggatcattcccattac

SEQ ID NO: 282467 - DNA, 21 bp, Artificial sequence
  SiRNA target sequence
gttgggatcattcccattacc

SEQ ID NO: 282468 - DNA, 21 bp, Artificial sequence
  SiRNA target sequence
ttgggatcattcccattacca

SEQ ID NO: 282469 - DNA, 21 bp, Artificial sequence
  SiRNA target sequence
tgggatcattcccattaccaa

SEQ ID NO: 282470 - DNA, 21 bp, Artificial sequence
  SiRNA target sequence
gggatcattcccattaccaac

SEQ ID NO: 282471 - DNA, 21 bp, Artificial sequence
  SiRNA target sequence
ggatcattcccattaccaact

SEQ ID NO: 282472 - DNA, 21 bp, Artificial sequence
  SiRNA target sequence
gatcattcccattaccaactt

SEQ ID NO: 282473 - DNA, 21 bp, Artificial sequence
  SiRNA target sequence
atcattcccattaccaacttt

SEQ ID NO: 282474 - DNA, 21 bp, Artificial sequence
  SiRNA target sequence
tcattcccattaccaacttta

SEQ ID NO: 282475 - DNA, 21 bp, Artificial sequence
  SiRNA target sequence
cattcccattaccaactttaa

SEQ ID NO: 282476 - DNA, 21 bp, Artificial sequence
  SiRNA target sequence
attcccattaccaactttaaa

SEQ ID NO: 282477 - DNA, 21 bp, Artificial sequence
  SiRNA target sequence
ttcccattaccaactttaaat

SEQ ID NO: 282478 - DNA, 21 bp, Artificial sequence
  SiRNA target sequence
tcccattaccaactttaaatc

SEQ ID NO: 282479 - DNA, 21 bp, Artificial sequence
  SiRNA target sequence
cccattaccaactttaaatcc

SEQ ID NO: 282480 - DNA, 21 bp, Artificial sequence
  SiRNA target sequence
ccattaccaactttaaatcca

SEQ ID NO: 282481 - DNA, 21 bp, Artificial sequence
  SiRNA target sequence
cattaccaactttaaatccaa

SEQ ID NO: 282482 - DNA, 21 bp, Artificial sequence
  SiRNA target sequence
attaccaactttaaatccaac

SEQ ID NO: 282483 - DNA, 21 bp, Artificial sequence
  SiRNA target sequence
ttaccaactttaaatccaact

SEQ ID NO: 282484 - DNA, 21 bp, Artificial sequence
  SiRNA target sequence
taccaactttaaatccaacta

SEQ ID NO: 282485 - DNA, 21 bp, Artificial sequence
  SiRNA target sequence
accaactttaaatccaactag

SEQ ID NO: 282486 - DNA, 21 bp, Artificial sequence
  SiRNA target sequence
ccaactttaaatccaactagg

SEQ ID NO: 282487 - DNA, 21 bp, Artificial sequence
  SiRNA target sequence
caactttaaatccaactaggg

SEQ ID NO: 282488 - DNA, 21 bp, Artificial sequence
  SiRNA target sequence
aactttaaatccaactagggt

SEQ ID NO: 282489 - DNA, 21 bp, Artificial sequence
  SiRNA target sequence
actttaaatccaactagggtt

SEQ ID NO: 282490 - DNA, 21 bp, Artificial sequence
  SiRNA target sequence
ctttaaatccaactagggtta

SEQ ID NO: 282491 - DNA, 21 bp, Artificial sequence
  SiRNA target sequence
tttaaatccaactagggttaa

SEQ ID NO: 282492 - DNA, 21 bp, Artificial sequence
  SiRNA target sequence
ttaaatccaactagggttaag

SEQ ID NO: 282493 - DNA, 21 bp, Artificial sequence
  SiRNA target sequence
taaatccaactagggttaagt

SEQ ID NO: 282494 - DNA, 21 bp, Artificial sequence
  SiRNA target sequence
aaatccaactagggttaagtt

SEQ ID NO: 282495 - DNA, 21 bp, Artificial sequence
  SiRNA target sequence
aatccaactagggttaagttt

SEQ ID NO: 282496 - DNA, 21 bp, Artificial sequence
  SiRNA target sequence
atccaactagggttaagtttg

SEQ ID NO: 282497 - DNA, 21 bp, Artificial sequence
  SiRNA target sequence
tccaactagggttaagtttgc

SEQ ID NO: 282498 - DNA, 21 bp, Artificial sequence
  SiRNA target sequence
ccaactagggttaagtttgct

SEQ ID NO: 282499 - DNA, 21 bp, Artificial sequence
  SiRNA target sequence
caactagggttaagtttgcta

SEQ ID NO: 282500 - DNA, 21 bp, Artificial sequence
  SiRNA target sequence
aactagggttaagtttgctac

SEQ ID NO: 282501 - DNA, 21 bp, Artificial sequence
  SiRNA target sequence
actagggttaagtttgctact

SEQ ID NO: 282502 - DNA, 21 bp, Artificial sequence
  SiRNA target sequence
ctagggttaagtttgctacta

SEQ ID NO: 282503 - DNA, 21 bp, Artificial sequence
  SiRNA target sequence
tagggttaagtttgctactaa

SEQ ID NO: 282504 - DNA, 21 bp, Artificial sequence
  SiRNA target sequence
agggttaagtttgctactaac

SEQ ID NO: 282505 - DNA, 21 bp, Artificial sequence
  SiRNA target sequence
gggttaagtttgctactaacc

SEQ ID NO: 282506 - DNA, 21 bp, Artificial sequence
  SiRNA target sequence
ggttaagtttgctactaacca

SEQ ID NO: 282507 - DNA, 21 bp, Artificial sequence
  SiRNA target sequence
gttaagtttgctactaaccat

SEQ ID NO: 282508 - DNA, 21 bp, Artificial sequence
  SiRNA target sequence
ttaagtttgctactaaccatg

SEQ ID NO: 282509 - DNA, 21 bp, Artificial sequence
  SiRNA target sequence
taagtttgctactaaccatgt

SEQ ID NO: 282510 - DNA, 21 bp, Artificial sequence
  SiRNA target sequence
aagtttgctactaaccatgtg

SEQ ID NO: 282511 - DNA, 21 bp, Artificial sequence
  SiRNA target sequence
agtttgctactaaccatgtgt

SEQ ID NO: 282512 - DNA, 21 bp, Artificial sequence
  SiRNA target sequence
gtttgctactaaccatgtgtc

SEQ ID NO: 282513 - DNA, 21 bp, Artificial sequence
  SiRNA target sequence
tttgctactaaccatgtgtcc

SEQ ID NO: 282514 - DNA, 21 bp, Artificial sequence
  SiRNA target sequence
ttgctactaaccatgtgtccc

SEQ ID NO: 282515 - DNA, 21 bp, Artificial sequence
  SiRNA target sequence
tgctactaaccatgtgtcccg

SEQ ID NO: 282516 - DNA, 21 bp, Artificial sequence
  SiRNA target sequence
gctactaaccatgtgtcccgg

SEQ ID NO: 282517 - DNA, 21 bp, Artificial sequence
  SiRNA target sequence
ctactaaccatgtgtcccggt

SEQ ID NO: 282518 - DNA, 21 bp, Artificial sequence
  SiRNA target sequence
tactaaccatgtgtcccggtt

SEQ ID NO: 282519 - DNA, 21 bp, Artificial sequence
  SiRNA target sequence
actaaccatgtgtcccggttg

SEQ ID NO: 282520 - DNA, 21 bp, Artificial sequence
  SiRNA target sequence
ctaaccatgtgtcccggttga

SEQ ID NO: 282521 - DNA, 21 bp, Artificial sequence
  SiRNA target sequence
taaccatgtgtcccggttgat

SEQ ID NO: 282522 - DNA, 21 bp, Artificial sequence
  SiRNA target sequence
aaccatgtgtcccggttgatg

SEQ ID NO: 282523 - DNA, 21 bp, Artificial sequence
  SiRNA target sequence
accatgtgtcccggttgatgc

SEQ ID NO: 282524 - DNA, 21 bp, Artificial sequence
  SiRNA target sequence
ccatgtgtcccggttgatgct

SEQ ID NO: 282525 - DNA, 21 bp, Artificial sequence
  SiRNA target sequence
catgtgtcccggttgatgctt

SEQ ID NO: 282526 - DNA, 21 bp, Artificial sequence
  SiRNA target sequence
atgtgtcccggttgatgcttt

SEQ ID NO: 282527 - DNA, 21 bp, Artificial sequence
  SiRNA target sequence
tgtgtcccggttgatgctttt

SEQ ID NO: 282528 - DNA, 21 bp, Artificial sequence
  SiRNA target sequence
gtgtcccggttgatgcttttg

SEQ ID NO: 282529 - DNA, 21 bp, Artificial sequence
  SiRNA target sequence
tgtcccggttgatgcttttga

SEQ ID NO: 282530 - DNA, 21 bp, Artificial sequence
  SiRNA target sequence
gtcccggttgatgcttttgaa

SEQ ID NO: 282531 - DNA, 21 bp, Artificial sequence
  SiRNA target sequence
tcccggttgatgcttttgaac

SEQ ID NO: 282532 - DNA, 21 bp, Artificial sequence
  SiRNA target sequence
cccggttgatgcttttgaacc

SEQ ID NO: 282533 - DNA, 21 bp, Artificial sequence
  SiRNA target sequence
ccggttgatgcttttgaacca

SEQ ID NO: 282534 - DNA, 21 bp, Artificial sequence
  SiRNA target sequence
cggttgatgcttttgaaccac

SEQ ID NO: 282535 - DNA, 21 bp, Artificial sequence
  SiRNA target sequence
ggttgatgcttttgaaccacg

SEQ ID NO: 282536 - DNA, 21 bp, Artificial sequence
  SiRNA target sequence
gttgatgcttttgaaccacgt

SEQ ID NO: 282537 - DNA, 21 bp, Artificial sequence
  SiRNA target sequence
ttgatgcttttgaaccacgtg

SEQ ID NO: 282538 - DNA, 21 bp, Artificial sequence
  SiRNA target sequence
tgatgcttttgaaccacgtgc

SEQ ID NO: 282539 - DNA, 21 bp, Artificial sequence
  SiRNA target sequence
gatgcttttgaaccacgtgca

SEQ ID NO: 282540 - DNA, 21 bp, Artificial sequence
  SiRNA target sequence
atgcttttgaaccacgtgcaa

SEQ ID NO: 282541 - DNA, 21 bp, Artificial sequence
  SiRNA target sequence
tgcttttgaaccacgtgcaat

SEQ ID NO: 282542 - DNA, 21 bp, Artificial sequence
  SiRNA target sequence
gcttttgaaccacgtgcaatg

SEQ ID NO: 282543 - DNA, 21 bp, Artificial sequence
  SiRNA target sequence
cttttgaaccacgtgcaatgt

SEQ ID NO: 282544 - DNA, 21 bp, Artificial sequence
  SiRNA target sequence
ttttgaaccacgtgcaatgtg

SEQ ID NO: 282545 - DNA, 21 bp, Artificial sequence
  SiRNA target sequence
tttgaaccacgtgcaatgtga

SEQ ID NO: 282546 - DNA, 21 bp, Artificial sequence
  SiRNA target sequence
ttgaaccacgtgcaatgtgat

SEQ ID NO: 282547 - DNA, 21 bp, Artificial sequence
  SiRNA target sequence
tgaaccacgtgcaatgtgata

SEQ ID NO: 282548 - DNA, 21 bp, Artificial sequence
  SiRNA target sequence
gaaccacgtgcaatgtgatat

SEQ ID NO: 282549 - DNA, 21 bp, Artificial sequence
  SiRNA target sequence
aaccacgtgcaatgtgatatt

SEQ ID NO: 282550 - DNA, 21 bp, Artificial sequence
  SiRNA target sequence
accacgtgcaatgtgatattg

SEQ ID NO: 282551 - DNA, 21 bp, Artificial sequence
  SiRNA target sequence
ccacgtgcaatgtgatattgc

SEQ ID NO: 282552 - DNA, 21 bp, Artificial sequence
  SiRNA target sequence
cacgtgcaatgtgatattgcc

SEQ ID NO: 282553 - DNA, 21 bp, Artificial sequence
  SiRNA target sequence
acgtgcaatgtgatattgcca

SEQ ID NO: 282554 - DNA, 21 bp, Artificial sequence
  SiRNA target sequence
cgtgcaatgtgatattgccaa

SEQ ID NO: 282555 - DNA, 21 bp, Artificial sequence
  SiRNA target sequence
gtgcaatgtgatattgccaag

SEQ ID NO: 282556 - DNA, 21 bp, Artificial sequence
  SiRNA target sequence
tgcaatgtgatattgccaagg

SEQ ID NO: 282557 - DNA, 21 bp, Artificial sequence
  SiRNA target sequence
gcaatgtgatattgccaagga

SEQ ID NO: 282558 - DNA, 21 bp, Artificial sequence
  SiRNA target sequence
caatgtgatattgccaaggag

SEQ ID NO: 282559 - DNA, 21 bp, Artificial sequence
  SiRNA target sequence
aatgtgatattgccaaggaga

SEQ ID NO: 282560 - DNA, 21 bp, Artificial sequence
  SiRNA target sequence
atgtgatattgccaaggagac

SEQ ID NO: 282561 - DNA, 21 bp, Artificial sequence
  SiRNA target sequence
tgtgatattgccaaggagact

SEQ ID NO: 282562 - DNA, 21 bp, Artificial sequence
  SiRNA target sequence
gtgatattgccaaggagactg

SEQ ID NO: 282563 - DNA, 21 bp, Artificial sequence
  SiRNA target sequence
tgatattgccaaggagactga

SEQ ID NO: 282564 - DNA, 21 bp, Artificial sequence
  SiRNA target sequence
gatattgccaaggagactgag

SEQ ID NO: 282565 - DNA, 21 bp, Artificial sequence
  SiRNA target sequence
atattgccaaggagactgagg

SEQ ID NO: 282566 - DNA, 21 bp, Artificial sequence
  SiRNA target sequence
tattgccaaggagactgaggt

SEQ ID NO: 282567 - DNA, 21 bp, Artificial sequence
  SiRNA target sequence
attgccaaggagactgaggtt

SEQ ID NO: 282568 - DNA, 21 bp, Artificial sequence
  SiRNA target sequence
ttgccaaggagactgaggttt

SEQ ID NO: 282569 - DNA, 21 bp, Artificial sequence
  SiRNA target sequence
tgccaaggagactgaggtttc

SEQ ID NO: 282570 - DNA, 21 bp, Artificial sequence
  SiRNA target sequence
gccaaggagactgaggtttcg

SEQ ID NO: 282571 - DNA, 21 bp, Artificial sequence
  SiRNA target sequence
ccaaggagactgaggtttcgt

SEQ ID NO: 282572 - DNA, 21 bp, Artificial sequence
  SiRNA target sequence
caaggagactgaggtttcgtt

SEQ ID NO: 282573 - DNA, 21 bp, Artificial sequence
  SiRNA target sequence
aaggagactgaggtttcgtta

SEQ ID NO: 282574 - DNA, 21 bp, Artificial sequence
  SiRNA target sequence
aggagactgaggtttcgttac

SEQ ID NO: 282575 - DNA, 21 bp, Artificial sequence
  SiRNA target sequence
ggagactgaggtttcgttacg

SEQ ID NO: 282576 - DNA, 21 bp, Artificial sequence
  SiRNA target sequence
gagactgaggtttcgttacga

SEQ ID NO: 282577 - DNA, 21 bp, Artificial sequence
  SiRNA target sequence
agactgaggtttcgttacgaa

SEQ ID NO: 282578 - DNA, 21 bp, Artificial sequence
  SiRNA target sequence
gactgaggtttcgttacgaat

SEQ ID NO: 282579 - DNA, 21 bp, Artificial sequence
  SiRNA target sequence
actgaggtttcgttacgaatt

SEQ ID NO: 282580 - DNA, 21 bp, Artificial sequence
  SiRNA target sequence
ctgaggtttcgttacgaattc

SEQ ID NO: 282581 - DNA, 21 bp, Artificial sequence
  SiRNA target sequence
tgaggtttcgttacgaattcc

SEQ ID NO: 282582 - DNA, 21 bp, Artificial sequence
  SiRNA target sequence
gaggtttcgttacgaattcct

SEQ ID NO: 282583 - DNA, 21 bp, Artificial sequence
  SiRNA target sequence
aggtttcgttacgaattcctt

SEQ ID NO: 282584 - DNA, 21 bp, Artificial sequence
  SiRNA target sequence
ggtttcgttacgaattccttt

SEQ ID NO: 282585 - DNA, 21 bp, Artificial sequence
  SiRNA target sequence
gtttcgttacgaattcctttt

SEQ ID NO: 282586 - DNA, 21 bp, Artificial sequence
  SiRNA target sequence
tttcgttacgaattccttttg

SEQ ID NO: 282587 - DNA, 21 bp, Artificial sequence
  SiRNA target sequence
ttcgttacgaattccttttgt

SEQ ID NO: 282588 - DNA, 21 bp, Artificial sequence
  SiRNA target sequence
tcgttacgaattccttttgtt

SEQ ID NO: 282589 - DNA, 21 bp, Artificial sequence
  SiRNA target sequence
cgttacgaattccttttgttt

SEQ ID NO: 282590 - DNA, 21 bp, Artificial sequence
  SiRNA target sequence
gttacgaattccttttgtttc

SEQ ID NO: 282591 - DNA, 21 bp, Artificial sequence
  SiRNA target sequence
ttacgaattccttttgtttcc

SEQ ID NO: 282592 - DNA, 21 bp, Artificial sequence
  SiRNA target sequence
tacgaattccttttgtttccc

SEQ ID NO: 282593 - DNA, 21 bp, Artificial sequence
  SiRNA target sequence
acgaattccttttgtttcccc

SEQ ID NO: 282594 - DNA, 21 bp, Artificial sequence
  SiRNA target sequence
cgaattccttttgtttcccca

SEQ ID NO: 282595 - DNA, 21 bp, Artificial sequence
  SiRNA target sequence
gaattccttttgtttccccat

SEQ ID NO: 282596 - DNA, 21 bp, Artificial sequence
  SiRNA target sequence
aattccttttgtttccccata

SEQ ID NO: 282597 - DNA, 21 bp, Artificial sequence
  SiRNA target sequence
attccttttgtttccccatac

SEQ ID NO: 282598 - DNA, 21 bp, Artificial sequence
  SiRNA target sequence
ttccttttgtttccccataca

SEQ ID NO: 282599 - DNA, 21 bp, Artificial sequence
  SiRNA target sequence
tccttttgtttccccatacaa

SEQ ID NO: 282600 - DNA, 21 bp, Artificial sequence
  SiRNA target sequence
ccttttgtttccccatacaat

SEQ ID NO: 282601 - DNA, 21 bp, Artificial sequence
  SiRNA target sequence
cttttgtttccccatacaatt

SEQ ID NO: 282602 - DNA, 21 bp, Artificial sequence
  SiRNA target sequence
ttttgtttccccatacaattc

SEQ ID NO: 282603 - DNA, 21 bp, Artificial sequence
  SiRNA target sequence
tttgtttccccatacaattca

SEQ ID NO: 282604 - DNA, 21 bp, Artificial sequence
  SiRNA target sequence
ttgtttccccatacaattcat

SEQ ID NO: 282605 - DNA, 21 bp, Artificial sequence
  SiRNA target sequence
tgtttccccatacaattcata

SEQ ID NO: 282606 - DNA, 21 bp, Artificial sequence
  SiRNA target sequence
gtttccccatacaattcatat

SEQ ID NO: 282607 - DNA, 21 bp, Artificial sequence
  SiRNA target sequence
tttccccatacaattcatatg

SEQ ID NO: 282608 - DNA, 21 bp, Artificial sequence
  SiRNA target sequence
ttccccatacaattcatatga

SEQ ID NO: 282609 - DNA, 21 bp, Artificial sequence
  SiRNA target sequence
tccccatacaattcatatgat

SEQ ID NO: 282610 - DNA, 21 bp, Artificial sequence
  SiRNA target sequence
ccccatacaattcatatgatt

SEQ ID NO: 282611 - DNA, 21 bp, Artificial sequence
  SiRNA target sequence
cccatacaattcatatgattt

SEQ ID NO: 282612 - DNA, 21 bp, Artificial sequence
  SiRNA target sequence
ccatacaattcatatgatttg

SEQ ID NO: 282613 - DNA, 21 bp, Artificial sequence
  SiRNA target sequence
catacaattcatatgatttgg

SEQ ID NO: 282614 - DNA, 21 bp, Artificial sequence
  SiRNA target sequence
atacaattcatatgatttggt

SEQ ID NO: 282615 - DNA, 21 bp, Artificial sequence
  SiRNA target sequence
tacaattcatatgatttggtt

SEQ ID NO: 282616 - DNA, 21 bp, Artificial sequence
  SiRNA target sequence
acaattcatatgatttggttt

SEQ ID NO: 282617 - DNA, 21 bp, Artificial sequence
  SiRNA target sequence
caattcatatgatttggtttc

SEQ ID NO: 282618 - DNA, 21 bp, Artificial sequence
  SiRNA target sequence
aattcatatgatttggtttcg

SEQ ID NO: 282619 - DNA, 21 bp, Artificial sequence
  SiRNA target sequence
attcatatgatttggtttcga

SEQ ID NO: 282620 - DNA, 21 bp, Artificial sequence
  SiRNA target sequence
ttcatatgatttggtttcgaa

SEQ ID NO: 282621 - DNA, 21 bp, Artificial sequence
  SiRNA target sequence
tcatatgatttggtttcgaag

SEQ ID NO: 282622 - DNA, 21 bp, Artificial sequence
  SiRNA target sequence
catatgatttggtttcgaagc

SEQ ID NO: 282623 - DNA, 21 bp, Artificial sequence
  SiRNA target sequence
atatgatttggtttcgaagcg

SEQ ID NO: 282624 - DNA, 21 bp, Artificial sequence
  SiRNA target sequence
tatgatttggtttcgaagcgt

SEQ ID NO: 282625 - DNA, 21 bp, Artificial sequence
  SiRNA target sequence
atgatttggtttcgaagcgtt

SEQ ID NO: 282626 - DNA, 21 bp, Artificial sequence
  SiRNA target sequence
tgatttggtttcgaagcgttt

SEQ ID NO: 282627 - DNA, 21 bp, Artificial sequence
  SiRNA target sequence
gatttggtttcgaagcgtttt

SEQ ID NO: 282628 - DNA, 21 bp, Artificial sequence
  SiRNA target sequence
atttggtttcgaagcgttttc

SEQ ID NO: 282629 - DNA, 21 bp, Artificial sequence
  SiRNA target sequence
tttggtttcgaagcgttttcc

SEQ ID NO: 282630 - DNA, 21 bp, Artificial sequence
  SiRNA target sequence
ttggtttcgaagcgttttccg

SEQ ID NO: 282631 - DNA, 21 bp, Artificial sequence
  SiRNA target sequence
tggtttcgaagcgttttccgt

SEQ ID NO: 282632 - DNA, 21 bp, Artificial sequence
  SiRNA target sequence
ggtttcgaagcgttttccgtg

SEQ ID NO: 282633 - DNA, 21 bp, Artificial sequence
  SiRNA target sequence
gtttcgaagcgttttccgtgg

SEQ ID NO: 282634 - DNA, 21 bp, Artificial sequence
  SiRNA target sequence
tttcgaagcgttttccgtggg

SEQ ID NO: 282635 - DNA, 21 bp, Artificial sequence
  SiRNA target sequence
ttcgaagcgttttccgtgggc

SEQ ID NO: 282636 - DNA, 21 bp, Artificial sequence
  SiRNA target sequence
tcgaagcgttttccgtgggca

SEQ ID NO: 282637 - DNA, 21 bp, Artificial sequence
  SiRNA target sequence
cgaagcgttttccgtgggcaa

SEQ ID NO: 282638 - DNA, 21 bp, Artificial sequence
  SiRNA target sequence
gaagcgttttccgtgggcaaa

SEQ ID NO: 282639 - DNA, 21 bp, Artificial sequence
  SiRNA target sequence
aagcgttttccgtgggcaaag

SEQ ID NO: 282640 - DNA, 21 bp, Artificial sequence
  SiRNA target sequence
agcgttttccgtgggcaaagg

SEQ ID NO: 282641 - DNA, 21 bp, Artificial sequence
  SiRNA target sequence
gcgttttccgtgggcaaaggt

SEQ ID NO: 282642 - DNA, 21 bp, Artificial sequence
  SiRNA target sequence
cgttttccgtgggcaaaggtg

SEQ ID NO: 282643 - DNA, 21 bp, Artificial sequence
  SiRNA target sequence
gttttccgtgggcaaaggtgg

SEQ ID NO: 282644 - DNA, 21 bp, Artificial sequence
  SiRNA target sequence
ttttccgtgggcaaaggtggt

SEQ ID NO: 282645 - DNA, 21 bp, Artificial sequence
  SiRNA target sequence
tttccgtgggcaaaggtggtt

SEQ ID NO: 282646 - DNA, 21 bp, Artificial sequence
  SiRNA target sequence
ttccgtgggcaaaggtggttg

SEQ ID NO: 282647 - DNA, 21 bp, Artificial sequence
  SiRNA target sequence
tccgtgggcaaaggtggttgg

SEQ ID NO: 282648 - DNA, 21 bp, Artificial sequence
  SiRNA target sequence
ccgtgggcaaaggtggttggg

SEQ ID NO: 282649 - DNA, 21 bp, Artificial sequence
  SiRNA target sequence
cgtgggcaaaggtggttgggt

SEQ ID NO: 282650 - DNA, 21 bp, Artificial sequence
  SiRNA target sequence
gtgggcaaaggtggttgggtt

SEQ ID NO: 282651 - DNA, 21 bp, Artificial sequence
  SiRNA target sequence
tgggcaaaggtggttgggtta

SEQ ID NO: 282652 - DNA, 21 bp, Artificial sequence
  SiRNA target sequence
gggcaaaggtggttgggttag

SEQ ID NO: 282653 - DNA, 21 bp, Artificial sequence
  SiRNA target sequence
ggcaaaggtggttgggttagt

SEQ ID NO: 282654 - DNA, 21 bp, Artificial sequence
  SiRNA target sequence
gcaaaggtggttgggttagtg

SEQ ID NO: 282655 - DNA, 21 bp, Artificial sequence
  SiRNA target sequence
caaaggtggttgggttagtgt

SEQ ID NO: 282656 - DNA, 21 bp, Artificial sequence
  SiRNA target sequence
aaaggtggttgggttagtgta

SEQ ID NO: 282657 - DNA, 21 bp, Artificial sequence
  SiRNA target sequence
aaggtggttgggttagtgtac

SEQ ID NO: 282658 - DNA, 21 bp, Artificial sequence
  SiRNA target sequence
aggtggttgggttagtgtact

SEQ ID NO: 282659 - DNA, 21 bp, Artificial sequence
  SiRNA target sequence
ggtggttgggttagtgtactc

SEQ ID NO: 282660 - DNA, 21 bp, Artificial sequence
  SiRNA target sequence
gtggttgggttagtgtactcc

SEQ ID NO: 282661 - DNA, 21 bp, Artificial sequence
  SiRNA target sequence
tggttgggttagtgtactccc

SEQ ID NO: 282662 - DNA, 21 bp, Artificial sequence
  SiRNA target sequence
ggttgggttagtgtactcccc

SEQ ID NO: 282663 - DNA, 21 bp, Artificial sequence
  SiRNA target sequence
gttgggttagtgtactccccc

SEQ ID NO: 282664 - DNA, 21 bp, Artificial sequence
  SiRNA target sequence
ttgggttagtgtactcccccc

SEQ ID NO: 282665 - DNA, 21 bp, Artificial sequence
  SiRNA target sequence
tgggttagtgtactcccccct

SEQ ID NO: 282666 - DNA, 21 bp, Artificial sequence
  SiRNA target sequence
gggttagtgtactccccccta

SEQ ID NO: 282667 - DNA, 21 bp, Artificial sequence
  SiRNA target sequence
ggttagtgtactcccccctaa

SEQ ID NO: 282668 - DNA, 21 bp, Artificial sequence
  SiRNA target sequence
gttagtgtactcccccctaac

SEQ ID NO: 282669 - DNA, 21 bp, Artificial sequence
  SiRNA target sequence
ttagtgtactcccccctaact

SEQ ID NO: 282670 - DNA, 21 bp, Artificial sequence
  SiRNA target sequence
tagtgtactcccccctaacta

SEQ ID NO: 282671 - DNA, 21 bp, Artificial sequence
  SiRNA target sequence
agtgtactcccccctaactac

SEQ ID NO: 282672 - DNA, 21 bp, Artificial sequence
  SiRNA target sequence
gtgtactcccccctaactaca

SEQ ID NO: 282673 - DNA, 21 bp, Artificial sequence
  SiRNA target sequence
tgtactcccccctaactacaa

SEQ ID NO: 282674 - DNA, 21 bp, Artificial sequence
  SiRNA target sequence
gtactcccccctaactacaac

SEQ ID NO: 282675 - DNA, 21 bp, Artificial sequence
  SiRNA target sequence
tactcccccctaactacaact

SEQ ID NO: 282676 - DNA, 21 bp, Artificial sequence
  SiRNA target sequence
actcccccctaactacaacta

SEQ ID NO: 282677 - DNA, 21 bp, Artificial sequence
  SiRNA target sequence
ctcccccctaactacaactat

SEQ ID NO: 282678 - DNA, 21 bp, Artificial sequence
  SiRNA target sequence
tcccccctaactacaactatt

SEQ ID NO: 282679 - DNA, 21 bp, Artificial sequence
  SiRNA target sequence
cccccctaactacaactattc

SEQ ID NO: 282680 - DNA, 21 bp, Artificial sequence
  SiRNA target sequence
ccccctaactacaactattcc

SEQ ID NO: 282681 - DNA, 21 bp, Artificial sequence
  SiRNA target sequence
cccctaactacaactattccc

SEQ ID NO: 282682 - DNA, 21 bp, Artificial sequence
  SiRNA target sequence
ccctaactacaactattcccg

SEQ ID NO: 282683 - DNA, 21 bp, Artificial sequence
  SiRNA target sequence
cctaactacaactattcccgt

SEQ ID NO: 282684 - DNA, 21 bp, Artificial sequence
  SiRNA target sequence
ctaactacaactattcccgta

SEQ ID NO: 282685 - DNA, 21 bp, Artificial sequence
  SiRNA target sequence
taactacaactattcccgtag

SEQ ID NO: 282686 - DNA, 21 bp, Artificial sequence
  SiRNA target sequence
aactacaactattcccgtaga

SEQ ID NO: 282687 - DNA, 21 bp, Artificial sequence
  SiRNA target sequence
actacaactattcccgtagat

SEQ ID NO: 282688 - DNA, 21 bp, Artificial sequence
  SiRNA target sequence
ctacaactattcccgtagatt

SEQ ID NO: 282689 - DNA, 21 bp, Artificial sequence
  SiRNA target sequence
tacaactattcccgtagattt

SEQ ID NO: 282690 - DNA, 21 bp, Artificial sequence
  SiRNA target sequence
acaactattcccgtagatttc

SEQ ID NO: 282691 - DNA, 21 bp, Artificial sequence
  SiRNA target sequence
caactattcccgtagatttca

SEQ ID NO: 282692 - DNA, 21 bp, Artificial sequence
  SiRNA target sequence
aactattcccgtagatttcat

SEQ ID NO: 282693 - DNA, 21 bp, Artificial sequence
  SiRNA target sequence
actattcccgtagatttcata

SEQ ID NO: 282694 - DNA, 21 bp, Artificial sequence
  SiRNA target sequence
ctattcccgtagatttcatag

SEQ ID NO: 282695 - DNA, 21 bp, Artificial sequence
  SiRNA target sequence
tattcccgtagatttcatagt

SEQ ID NO: 282696 - DNA, 21 bp, Artificial sequence
  SiRNA target sequence
attcccgtagatttcatagta

SEQ ID NO: 282697 - DNA, 21 bp, Artificial sequence
  SiRNA target sequence
ttcccgtagatttcatagtat

SEQ ID NO: 282698 - DNA, 21 bp, Artificial sequence
  SiRNA target sequence
tcccgtagatttcatagtata

SEQ ID NO: 282699 - DNA, 21 bp, Artificial sequence
  SiRNA target sequence
cccgtagatttcatagtatac

SEQ ID NO: 282700 - DNA, 21 bp, Artificial sequence
  SiRNA target sequence
ccgtagatttcatagtatacg

SEQ ID NO: 282701 - DNA, 21 bp, Artificial sequence
  SiRNA target sequence
cgtagatttcatagtatacgg

SEQ ID NO: 282702 - DNA, 21 bp, Artificial sequence
  SiRNA target sequence
gtagatttcatagtatacggt

SEQ ID NO: 282703 - DNA, 21 bp, Artificial sequence
  SiRNA target sequence
tagatttcatagtatacggtc

SEQ ID NO: 282704 - DNA, 21 bp, Artificial sequence
  SiRNA target sequence
agatttcatagtatacggtca

SEQ ID NO: 282705 - DNA, 21 bp, Artificial sequence
  SiRNA target sequence
gatttcatagtatacggtcat

SEQ ID NO: 282706 - DNA, 21 bp, Artificial sequence
  SiRNA target sequence
atttcatagtatacggtcatt

SEQ ID NO: 282707 - DNA, 21 bp, Artificial sequence
  SiRNA target sequence
tttcatagtatacggtcattt

SEQ ID NO: 282708 - DNA, 21 bp, Artificial sequence
  SiRNA target sequence
ttcatagtatacggtcatttt

SEQ ID NO: 282709 - DNA, 21 bp, Artificial sequence
  SiRNA target sequence
tcatagtatacggtcattttg

SEQ ID NO: 282710 - DNA, 21 bp, Artificial sequence
  SiRNA target sequence
catagtatacggtcattttga

SEQ ID NO: 282711 - DNA, 21 bp, Artificial sequence
  SiRNA target sequence
atagtatacggtcattttgag

SEQ ID NO: 282712 - DNA, 21 bp, Artificial sequence
  SiRNA target sequence
tagtatacggtcattttgagg

SEQ ID NO: 282713 - DNA, 21 bp, Artificial sequence
  SiRNA target sequence
agtatacggtcattttgagga

SEQ ID NO: 282714 - DNA, 21 bp, Artificial sequence
  SiRNA target sequence
gtatacggtcattttgaggac

SEQ ID NO: 282715 - DNA, 21 bp, Artificial sequence
  SiRNA target sequence
tatacggtcattttgaggacg

SEQ ID NO: 282716 - DNA, 21 bp, Artificial sequence
  SiRNA target sequence
atacggtcattttgaggacgt

SEQ ID NO: 282717 - DNA, 21 bp, Artificial sequence
  SiRNA target sequence
tacggtcattttgaggacgtg

SEQ ID NO: 282718 - DNA, 21 bp, Artificial sequence
  SiRNA target sequence
acggtcattttgaggacgtgg

SEQ ID NO: 282719 - DNA, 21 bp, Artificial sequence
  SiRNA target sequence
cggtcattttgaggacgtgga

SEQ ID NO: 282720 - DNA, 21 bp, Artificial sequence
  SiRNA target sequence
ggtcattttgaggacgtggag

SEQ ID NO: 282721 - DNA, 21 bp, Artificial sequence
  SiRNA target sequence
gtcattttgaggacgtggagt

SEQ ID NO: 282722 - DNA, 21 bp, Artificial sequence
  SiRNA target sequence
tcattttgaggacgtggagtt

SEQ ID NO: 282723 - DNA, 21 bp, Artificial sequence
  SiRNA target sequence
cattttgaggacgtggagttg

SEQ ID NO: 282724 - DNA, 21 bp, Artificial sequence
  SiRNA target sequence
attttgaggacgtggagttgg

SEQ ID NO: 282725 - DNA, 21 bp, Artificial sequence
  SiRNA target sequence
ttttgaggacgtggagttggg

SEQ ID NO: 282726 - DNA, 21 bp, Artificial sequence
  SiRNA target sequence
tttgaggacgtggagttgggt

SEQ ID NO: 282727 - DNA, 21 bp, Artificial sequence
  SiRNA target sequence
ttgaggacgtggagttgggtt

SEQ ID NO: 282728 - DNA, 21 bp, Artificial sequence
  SiRNA target sequence
tgaggacgtggagttgggttg

SEQ ID NO: 282729 - DNA, 21 bp, Artificial sequence
  SiRNA target sequence
gaggacgtggagttgggttgc

SEQ ID NO: 282730 - DNA, 21 bp, Artificial sequence
  SiRNA target sequence
aggacgtggagttgggttgcc

SEQ ID NO: 282731 - DNA, 21 bp, Artificial sequence
  SiRNA target sequence
ggacgtggagttgggttgccc

SEQ ID NO: 282732 - DNA, 21 bp, Artificial sequence
  SiRNA target sequence
gacgtggagttgggttgccca

SEQ ID NO: 282733 - DNA, 21 bp, Artificial sequence
  SiRNA target sequence
acgtggagttgggttgcccaa

SEQ ID NO: 282734 - DNA, 21 bp, Artificial sequence
  SiRNA target sequence
cgtggagttgggttgcccaac

SEQ ID NO: 282735 - DNA, 21 bp, Artificial sequence
  SiRNA target sequence
gtggagttgggttgcccaact

SEQ ID NO: 282736 - DNA, 21 bp, Artificial sequence
  SiRNA target sequence
tggagttgggttgcccaactt

SEQ ID NO: 282737 - DNA, 21 bp, Artificial sequence
  SiRNA target sequence
ggagttgggttgcccaacttc

SEQ ID NO: 282738 - DNA, 21 bp, Artificial sequence
  SiRNA target sequence
gagttgggttgcccaacttct

SEQ ID NO: 282739 - DNA, 21 bp, Artificial sequence
  SiRNA target sequence
agttgggttgcccaacttctg

SEQ ID NO: 282740 - DNA, 21 bp, Artificial sequence
  SiRNA target sequence
gttgggttgcccaacttctgg

SEQ ID NO: 282741 - DNA, 21 bp, Artificial sequence
  SiRNA target sequence
ttgggttgcccaacttctggg

SEQ ID NO: 282742 - DNA, 21 bp, Artificial sequence
  SiRNA target sequence
tgggttgcccaacttctggga

SEQ ID NO: 282743 - DNA, 21 bp, Artificial sequence
  SiRNA target sequence
gggttgcccaacttctgggat

SEQ ID NO: 282744 - DNA, 21 bp, Artificial sequence
  SiRNA target sequence
ggttgcccaacttctgggatg

SEQ ID NO: 282745 - DNA, 21 bp, Artificial sequence
  SiRNA target sequence
gttgcccaacttctgggatgt

SEQ ID NO: 282746 - DNA, 21 bp, Artificial sequence
  SiRNA target sequence
ttgcccaacttctgggatgtt

SEQ ID NO: 282747 - DNA, 21 bp, Artificial sequence
  SiRNA target sequence
tgcccaacttctgggatgttg

SEQ ID NO: 282748 - DNA, 21 bp, Artificial sequence
  SiRNA target sequence
gcccaacttctgggatgttgg

SEQ ID NO: 282749 - DNA, 21 bp, Artificial sequence
  SiRNA target sequence
cccaacttctgggatgttggc

SEQ ID NO: 282750 - DNA, 21 bp, Artificial sequence
  SiRNA target sequence
ccaacttctgggatgttggct

SEQ ID NO: 282751 - DNA, 21 bp, Artificial sequence
  SiRNA target sequence
caacttctgggatgttggctc

SEQ ID NO: 282752 - DNA, 21 bp, Artificial sequence
  SiRNA target sequence
aacttctgggatgttggctca

SEQ ID NO: 282753 - DNA, 21 bp, Artificial sequence
  SiRNA target sequence
acttctgggatgttggctcaa

SEQ ID NO: 282754 - DNA, 21 bp, Artificial sequence
  SiRNA target sequence
cttctgggatgttggctcaag

SEQ ID NO: 282755 - DNA, 21 bp, Artificial sequence
  SiRNA target sequence
ttctgggatgttggctcaagc

SEQ ID NO: 282756 - DNA, 21 bp, Artificial sequence
  SiRNA target sequence
tctgggatgttggctcaagcc

SEQ ID NO: 282757 - DNA, 21 bp, Artificial sequence
  SiRNA target sequence
ctgggatgttggctcaagccg

SEQ ID NO: 282758 - DNA, 21 bp, Artificial sequence
  SiRNA target sequence
tgggatgttggctcaagccgg

SEQ ID NO: 282759 - DNA, 21 bp, Artificial sequence
  SiRNA target sequence
gggatgttggctcaagccggt

SEQ ID NO: 282760 - DNA, 21 bp, Artificial sequence
  SiRNA target sequence
ggatgttggctcaagccggtc

SEQ ID NO: 282761 - DNA, 21 bp, Artificial sequence
  SiRNA target sequence
gatgttggctcaagccggtct

SEQ ID NO: 282762 - DNA, 21 bp, Artificial sequence
  SiRNA target sequence
atgttggctcaagccggtctg

SEQ ID NO: 282763 - DNA, 21 bp, Artificial sequence
  SiRNA target sequence
tgttggctcaagccggtctga

SEQ ID NO: 282764 - DNA, 21 bp, Artificial sequence
  SiRNA target sequence
gttggctcaagccggtctgaa

SEQ ID NO: 282765 - DNA, 21 bp, Artificial sequence
  SiRNA target sequence
ttggctcaagccggtctgaag

SEQ ID NO: 282766 - DNA, 21 bp, Artificial sequence
  SiRNA target sequence
tggctcaagccggtctgaagg

SEQ ID NO: 282767 - DNA, 21 bp, Artificial sequence
  SiRNA target sequence
ggctcaagccggtctgaaggt

SEQ ID NO: 282768 - DNA, 21 bp, Artificial sequence
  SiRNA target sequence
gctcaagccggtctgaaggta

SEQ ID NO: 282769 - DNA, 21 bp, Artificial sequence
  SiRNA target sequence
ctcaagccggtctgaaggtac

SEQ ID NO: 282770 - DNA, 21 bp, Artificial sequence
  SiRNA target sequence
tcaagccggtctgaaggtaca

SEQ ID NO: 282771 - DNA, 21 bp, Artificial sequence
  SiRNA target sequence
caagccggtctgaaggtacaa

SEQ ID NO: 282772 - DNA, 21 bp, Artificial sequence
  SiRNA target sequence
aagccggtctgaaggtacaac

SEQ ID NO: 282773 - DNA, 21 bp, Artificial sequence
  SiRNA target sequence
agccggtctgaaggtacaacc

SEQ ID NO: 282774 - DNA, 21 bp, Artificial sequence
  SiRNA target sequence
gccggtctgaaggtacaacct

SEQ ID NO: 282775 - DNA, 21 bp, Artificial sequence
  SiRNA target sequence
ccggtctgaaggtacaacctc

SEQ ID NO: 282776 - DNA, 21 bp, Artificial sequence
  SiRNA target sequence
cggtctgaaggtacaacctcc

SEQ ID NO: 282777 - DNA, 21 bp, Artificial sequence
  SiRNA target sequence
ggtctgaaggtacaacctcct

SEQ ID NO: 282778 - DNA, 21 bp, Artificial sequence
  SiRNA target sequence
gtctgaaggtacaacctccta

SEQ ID NO: 282779 - DNA, 21 bp, Artificial sequence
  SiRNA target sequence
tctgaaggtacaacctcctac

SEQ ID NO: 282780 - DNA, 21 bp, Artificial sequence
  SiRNA target sequence
ctgaaggtacaacctcctaca

SEQ ID NO: 282781 - DNA, 21 bp, Artificial sequence
  SiRNA target sequence
tgaaggtacaacctcctacaa

SEQ ID NO: 282782 - DNA, 21 bp, Artificial sequence
  SiRNA target sequence
gaaggtacaacctcctacaaa

SEQ ID NO: 282783 - DNA, 21 bp, Artificial sequence
  SiRNA target sequence
aaggtacaacctcctacaaac

SEQ ID NO: 282784 - DNA, 21 bp, Artificial sequence
  SiRNA target sequence
aggtacaacctcctacaaact

SEQ ID NO: 282785 - DNA, 21 bp, Artificial sequence
  SiRNA target sequence
ggtacaacctcctacaaactc

SEQ ID NO: 282786 - DNA, 21 bp, Artificial sequence
  SiRNA target sequence
gtacaacctcctacaaactct

SEQ ID NO: 282787 - DNA, 21 bp, Artificial sequence
  SiRNA target sequence
tacaacctcctacaaactctg

SEQ ID NO: 282788 - DNA, 21 bp, Artificial sequence
  SiRNA target sequence
acaacctcctacaaactctga

SEQ ID NO: 282789 - DNA, 21 bp, Artificial sequence
  SiRNA target sequence
caacctcctacaaactctgac

SEQ ID NO: 282790 - DNA, 21 bp, Artificial sequence
  SiRNA target sequence
aacctcctacaaactctgact

SEQ ID NO: 282791 - DNA, 21 bp, Artificial sequence
  SiRNA target sequence
acctcctacaaactctgactc

SEQ ID NO: 282792 - DNA, 21 bp, Artificial sequence
  SiRNA target sequence
cctcctacaaactctgactct

SEQ ID NO: 282793 - DNA, 21 bp, Artificial sequence
  SiRNA target sequence
ctcctacaaactctgactctc

SEQ ID NO: 282794 - DNA, 21 bp, Artificial sequence
  SiRNA target sequence
tcctacaaactctgactctcg

SEQ ID NO: 282795 - DNA, 21 bp, Artificial sequence
  SiRNA target sequence
cctacaaactctgactctcga

SEQ ID NO: 282796 - DNA, 21 bp, Artificial sequence
  SiRNA target sequence
ctacaaactctgactctcgac

SEQ ID NO: 282797 - DNA, 21 bp, Artificial sequence
  SiRNA target sequence
tacaaactctgactctcgaca

SEQ ID NO: 282798 - DNA, 21 bp, Artificial sequence
  SiRNA target sequence
acaaactctgactctcgacag

SEQ ID NO: 282799 - DNA, 21 bp, Artificial sequence
  SiRNA target sequence
caaactctgactctcgacagc

SEQ ID NO: 282800 - DNA, 21 bp, Artificial sequence
  SiRNA target sequence
aaactctgactctcgacagcg

SEQ ID NO: 282801 - DNA, 21 bp, Artificial sequence
  SiRNA target sequence
aactctgactctcgacagcgt

SEQ ID NO: 282802 - DNA, 21 bp, Artificial sequence
  SiRNA target sequence
actctgactctcgacagcgtg

SEQ ID NO: 282803 - DNA, 21 bp, Artificial sequence
  SiRNA target sequence
ctctgactctcgacagcgtgc

SEQ ID NO: 282804 - DNA, 21 bp, Artificial sequence
  SiRNA target sequence
tctgactctcgacagcgtgcc

SEQ ID NO: 282805 - DNA, 21 bp, Artificial sequence
  SiRNA target sequence
ctgactctcgacagcgtgcca

SEQ ID NO: 282806 - DNA, 21 bp, Artificial sequence
  SiRNA target sequence
tgactctcgacagcgtgccaa

SEQ ID NO: 282807 - DNA, 21 bp, Artificial sequence
  SiRNA target sequence
gactctcgacagcgtgccaaa

SEQ ID NO: 282808 - DNA, 21 bp, Artificial sequence
  SiRNA target sequence
actctcgacagcgtgccaaag

SEQ ID NO: 282809 - DNA, 21 bp, Artificial sequence
  SiRNA target sequence
ctctcgacagcgtgccaaaga

SEQ ID NO: 282810 - DNA, 21 bp, Artificial sequence
  SiRNA target sequence
tctcgacagcgtgccaaagag

SEQ ID NO: 282811 - DNA, 21 bp, Artificial sequence
  SiRNA target sequence
ctcgacagcgtgccaaagaga

SEQ ID NO: 282812 - DNA, 21 bp, Artificial sequence
  SiRNA target sequence
tcgacagcgtgccaaagagag

SEQ ID NO: 282813 - DNA, 21 bp, Artificial sequence
  SiRNA target sequence
cgacagcgtgccaaagagagt

SEQ ID NO: 282814 - DNA, 21 bp, Artificial sequence
  SiRNA target sequence
gacagcgtgccaaagagagta

SEQ ID NO: 282815 - DNA, 21 bp, Artificial sequence
  SiRNA target sequence
acagcgtgccaaagagagtaa

SEQ ID NO: 282816 - DNA, 21 bp, Artificial sequence
  SiRNA target sequence
cagcgtgccaaagagagtaag

SEQ ID NO: 282817 - DNA, 21 bp, Artificial sequence
  SiRNA target sequence
agcgtgccaaagagagtaagg

SEQ ID NO: 282818 - DNA, 21 bp, Artificial sequence
  SiRNA target sequence
gcgtgccaaagagagtaaggg

SEQ ID NO: 282819 - DNA, 21 bp, Artificial sequence
  SiRNA target sequence
cgtgccaaagagagtaagggc

SEQ ID NO: 282820 - DNA, 21 bp, Artificial sequence
  SiRNA target sequence
gtgccaaagagagtaagggca

SEQ ID NO: 282821 - DNA, 21 bp, Artificial sequence
  SiRNA target sequence
tgccaaagagagtaagggcaa

SEQ ID NO: 282822 - DNA, 21 bp, Artificial sequence
  SiRNA target sequence
gccaaagagagtaagggcaaa

SEQ ID NO: 282823 - DNA, 21 bp, Artificial sequence
  SiRNA target sequence
ccaaagagagtaagggcaaaa

SEQ ID NO: 282824 - DNA, 21 bp, Artificial sequence
  SiRNA target sequence
caaagagagtaagggcaaaaa

SEQ ID NO: 282825 - DNA, 21 bp, Artificial sequence
  SiRNA target sequence
aaagagagtaagggcaaaaag

SEQ ID NO: 282826 - DNA, 21 bp, Artificial sequence
  SiRNA target sequence
aagagagtaagggcaaaaagg

SEQ ID NO: 282827 - DNA, 21 bp, Artificial sequence
  SiRNA target sequence
agagagtaagggcaaaaagga

SEQ ID NO: 282828 - DNA, 21 bp, Artificial sequence
  SiRNA target sequence
gagagtaagggcaaaaaggat

SEQ ID NO: 282829 - DNA, 21 bp, Artificial sequence
  SiRNA target sequence
agagtaagggcaaaaaggatt

SEQ ID NO: 282830 - DNA, 21 bp, Artificial sequence
  SiRNA target sequence
gagtaagggcaaaaaggatta

SEQ ID NO: 282831 - DNA, 21 bp, Artificial sequence
  SiRNA target sequence
agtaagggcaaaaaggattac

SEQ ID NO: 282832 - DNA, 21 bp, Artificial sequence
  SiRNA target sequence
gtaagggcaaaaaggattact

SEQ ID NO: 282833 - DNA, 21 bp, Artificial sequence
  SiRNA target sequence
taagggcaaaaaggattactc

SEQ ID NO: 282834 - DNA, 21 bp, Artificial sequence
  SiRNA target sequence
aagggcaaaaaggattactct

SEQ ID NO: 282835 - DNA, 21 bp, Artificial sequence
  SiRNA target sequence
agggcaaaaaggattactcta

SEQ ID NO: 282836 - DNA, 21 bp, Artificial sequence
  SiRNA target sequence
gggcaaaaaggattactctaa

SEQ ID NO: 282837 - DNA, 21 bp, Artificial sequence
  SiRNA target sequence
ggcaaaaaggattactctaag

SEQ ID NO: 282838 - DNA, 21 bp, Artificial sequence
  SiRNA target sequence
gcaaaaaggattactctaaga

SEQ ID NO: 282839 - DNA, 21 bp, Artificial sequence
  SiRNA target sequence
caaaaaggattactctaagac

SEQ ID NO: 282840 - DNA, 21 bp, Artificial sequence
  SiRNA target sequence
aaaaaggattactctaagaca

SEQ ID NO: 282841 - DNA, 21 bp, Artificial sequence
  SiRNA target sequence
aaaaggattactctaagacag

SEQ ID NO: 282842 - DNA, 21 bp, Artificial sequence
  SiRNA target sequence
aaaggattactctaagacagg

SEQ ID NO: 282843 - DNA, 21 bp, Artificial sequence
  SiRNA target sequence
aaggattactctaagacagga

SEQ ID NO: 282844 - DNA, 21 bp, Artificial sequence
  SiRNA target sequence
aggattactctaagacaggag

SEQ ID NO: 282845 - DNA, 21 bp, Artificial sequence
  SiRNA target sequence
ggattactctaagacaggagc

SEQ ID NO: 282846 - DNA, 21 bp, Artificial sequence
  SiRNA target sequence
gattactctaagacaggagca

SEQ ID NO: 282847 - DNA, 21 bp, Artificial sequence
  SiRNA target sequence
attactctaagacaggagcag

SEQ ID NO: 282848 - DNA, 21 bp, Artificial sequence
  SiRNA target sequence
ttactctaagacaggagcagc

SEQ ID NO: 282849 - DNA, 21 bp, Artificial sequence
  SiRNA target sequence
tactctaagacaggagcagct

SEQ ID NO: 282850 - DNA, 21 bp, Artificial sequence
  SiRNA target sequence
actctaagacaggagcagctt

SEQ ID NO: 282851 - DNA, 21 bp, Artificial sequence
  SiRNA target sequence
ctctaagacaggagcagcttt

SEQ ID NO: 282852 - DNA, 21 bp, Artificial sequence
  SiRNA target sequence
tctaagacaggagcagctttt

SEQ ID NO: 282853 - DNA, 21 bp, Artificial sequence
  SiRNA target sequence
ctaagacaggagcagctttta

SEQ ID NO: 282854 - DNA, 21 bp, Artificial sequence
  SiRNA target sequence
taagacaggagcagcttttaa

SEQ ID NO: 282855 - DNA, 21 bp, Artificial sequence
  SiRNA target sequence
aagacaggagcagcttttaaa

SEQ ID NO: 282856 - DNA, 21 bp, Artificial sequence
  SiRNA target sequence
agacaggagcagcttttaaac

SEQ ID NO: 282857 - DNA, 21 bp, Artificial sequence
  SiRNA target sequence
gacaggagcagcttttaaaca

SEQ ID NO: 282858 - DNA, 21 bp, Artificial sequence
  SiRNA target sequence
acaggagcagcttttaaacaa

SEQ ID NO: 282859 - DNA, 21 bp, Artificial sequence
  SiRNA target sequence
caggagcagcttttaaacaat

SEQ ID NO: 282860 - DNA, 21 bp, Artificial sequence
  SiRNA target sequence
aggagcagcttttaaacaatc

SEQ ID NO: 282861 - DNA, 21 bp, Artificial sequence
  SiRNA target sequence
ggagcagcttttaaacaatct

SEQ ID NO: 282862 - DNA, 21 bp, Artificial sequence
  SiRNA target sequence
gagcagcttttaaacaatctg

SEQ ID NO: 282863 - DNA, 21 bp, Artificial sequence
  SiRNA target sequence
agcagcttttaaacaatctgt

SEQ ID NO: 282864 - DNA, 21 bp, Artificial sequence
  SiRNA target sequence
gcagcttttaaacaatctgtt

SEQ ID NO: 282865 - DNA, 21 bp, Artificial sequence
  SiRNA target sequence
cagcttttaaacaatctgttt

SEQ ID NO: 282866 - DNA, 21 bp, Artificial sequence
  SiRNA target sequence
agcttttaaacaatctgtttc

SEQ ID NO: 282867 - DNA, 21 bp, Artificial sequence
  SiRNA target sequence
gcttttaaacaatctgtttcg

SEQ ID NO: 282868 - DNA, 21 bp, Artificial sequence
  SiRNA target sequence
cttttaaacaatctgtttcga

SEQ ID NO: 282869 - DNA, 21 bp, Artificial sequence
  SiRNA target sequence
ttttaaacaatctgtttcgaa

SEQ ID NO: 282870 - DNA, 21 bp, Artificial sequence
  SiRNA target sequence
tttaaacaatctgtttcgaag

SEQ ID NO: 282871 - DNA, 21 bp, Artificial sequence
  SiRNA target sequence
ttaaacaatctgtttcgaagc

SEQ ID NO: 282872 - DNA, 21 bp, Artificial sequence
  SiRNA target sequence
taaacaatctgtttcgaagct

SEQ ID NO: 282873 - DNA, 21 bp, Artificial sequence
  SiRNA target sequence
aaacaatctgtttcgaagctg

SEQ ID NO: 282874 - DNA, 21 bp, Artificial sequence
  SiRNA target sequence
aacaatctgtttcgaagctgg

SEQ ID NO: 282875 - DNA, 21 bp, Artificial sequence
  SiRNA target sequence
acaatctgtttcgaagctggg

SEQ ID NO: 282876 - DNA, 21 bp, Artificial sequence
  SiRNA target sequence
caatctgtttcgaagctgggc

SEQ ID NO: 282877 - DNA, 21 bp, Artificial sequence
  SiRNA target sequence
aatctgtttcgaagctgggcg

SEQ ID NO: 282878 - DNA, 21 bp, Artificial sequence
  SiRNA target sequence
atctgtttcgaagctgggcga

SEQ ID NO: 282879 - DNA, 21 bp, Artificial sequence
  SiRNA target sequence
tctgtttcgaagctgggcgaa

SEQ ID NO: 282880 - DNA, 21 bp, Artificial sequence
  SiRNA target sequence
ctgtttcgaagctgggcgaac

SEQ ID NO: 282881 - DNA, 21 bp, Artificial sequence
  SiRNA target sequence
tgtttcgaagctgggcgaaca

SEQ ID NO: 282882 - DNA, 21 bp, Artificial sequence
  SiRNA target sequence
gtttcgaagctgggcgaacat

SEQ ID NO: 282883 - DNA, 21 bp, Artificial sequence
  SiRNA target sequence
tttcgaagctgggcgaacatc

SEQ ID NO: 282884 - DNA, 21 bp, Artificial sequence
  SiRNA target sequence
ttcgaagctgggcgaacatct

SEQ ID NO: 282885 - DNA, 21 bp, Artificial sequence
  SiRNA target sequence
tcgaagctgggcgaacatcta

SEQ ID NO: 282886 - DNA, 21 bp, Artificial sequence
  SiRNA target sequence
cgaagctgggcgaacatctac

SEQ ID NO: 282887 - DNA, 21 bp, Artificial sequence
  SiRNA target sequence
gaagctgggcgaacatctacc

SEQ ID NO: 282888 - DNA, 21 bp, Artificial sequence
  SiRNA target sequence
aagctgggcgaacatctacct

SEQ ID NO: 282889 - DNA, 21 bp, Artificial sequence
  SiRNA target sequence
agctgggcgaacatctacctt

SEQ ID NO: 282890 - DNA, 21 bp, Artificial sequence
  SiRNA target sequence
gctgggcgaacatctaccttt

SEQ ID NO: 282891 - DNA, 21 bp, Artificial sequence
  SiRNA target sequence
ctgggcgaacatctacctttc

SEQ ID NO: 282892 - DNA, 21 bp, Artificial sequence
  SiRNA target sequence
tgggcgaacatctacctttcc

SEQ ID NO: 282893 - DNA, 21 bp, Artificial sequence
  SiRNA target sequence
gggcgaacatctacctttcct

SEQ ID NO: 282894 - DNA, 21 bp, Artificial sequence
  SiRNA target sequence
ggcgaacatctacctttcctc

SEQ ID NO: 282895 - DNA, 21 bp, Artificial sequence
  SiRNA target sequence
gcgaacatctacctttcctca

SEQ ID NO: 282896 - DNA, 21 bp, Artificial sequence
  SiRNA target sequence
cgaacatctacctttcctcaa

SEQ ID NO: 282897 - DNA, 21 bp, Artificial sequence
  SiRNA target sequence
gaacatctacctttcctcaaa

SEQ ID NO: 282898 - DNA, 21 bp, Artificial sequence
  SiRNA target sequence
aacatctacctttcctcaaat

SEQ ID NO: 282899 - DNA, 21 bp, Artificial sequence
  SiRNA target sequence
acatctacctttcctcaaatc

SEQ ID NO: 282900 - DNA, 21 bp, Artificial sequence
  SiRNA target sequence
catctacctttcctcaaatca

SEQ ID NO: 282901 - DNA, 21 bp, Artificial sequence
  SiRNA target sequence
atctacctttcctcaaatcag

SEQ ID NO: 282902 - DNA, 21 bp, Artificial sequence
  SiRNA target sequence
tctacctttcctcaaatcagg

SEQ ID NO: 282903 - DNA, 21 bp, Artificial sequence
  SiRNA target sequence
ctacctttcctcaaatcagga

SEQ ID NO: 282904 - DNA, 21 bp, Artificial sequence
  SiRNA target sequence
tacctttcctcaaatcaggag

SEQ ID NO: 282905 - DNA, 21 bp, Artificial sequence
  SiRNA target sequence
acctttcctcaaatcaggagc

SEQ ID NO: 282906 - DNA, 21 bp, Artificial sequence
  SiRNA target sequence
cctttcctcaaatcaggagcg

SEQ ID NO: 282907 - DNA, 21 bp, Artificial sequence
  SiRNA target sequence
ctttcctcaaatcaggagcga

SEQ ID NO: 282908 - DNA, 21 bp, Artificial sequence
  SiRNA target sequence
tttcctcaaatcaggagcgaa

SEQ ID NO: 282909 - DNA, 21 bp, Artificial sequence
  SiRNA target sequence
ttcctcaaatcaggagcgaac

SEQ ID NO: 282910 - DNA, 21 bp, Artificial sequence
  SiRNA target sequence
tcctcaaatcaggagcgaact

SEQ ID NO: 282911 - DNA, 21 bp, Artificial sequence
  SiRNA target sequence
cctcaaatcaggagcgaactg

SEQ ID NO: 282912 - DNA, 21 bp, Artificial sequence
  SiRNA target sequence
ctcaaatcaggagcgaactgg

SEQ ID NO: 282913 - DNA, 21 bp, Artificial sequence
  SiRNA target sequence
tcaaatcaggagcgaactggg

SEQ ID NO: 282914 - DNA, 21 bp, Artificial sequence
  SiRNA target sequence
caaatcaggagcgaactgggt

SEQ ID NO: 282915 - DNA, 21 bp, Artificial sequence
  SiRNA target sequence
aaatcaggagcgaactgggtc

SEQ ID NO: 282916 - DNA, 21 bp, Artificial sequence
  SiRNA target sequence
aatcaggagcgaactgggtca

SEQ ID NO: 282917 - DNA, 21 bp, Artificial sequence
  SiRNA target sequence
atcaggagcgaactgggtcag

SEQ ID NO: 282918 - DNA, 21 bp, Artificial sequence
  SiRNA target sequence
tcaggagcgaactgggtcagt

SEQ ID NO: 282919 - DNA, 21 bp, Artificial sequence
  SiRNA target sequence
caggagcgaactgggtcagtg

SEQ ID NO: 282920 - DNA, 21 bp, Artificial sequence
  SiRNA target sequence
aggagcgaactgggtcagtga

SEQ ID NO: 282921 - DNA, 21 bp, Artificial sequence
  SiRNA target sequence
ggagcgaactgggtcagtgag

SEQ ID NO: 282922 - DNA, 21 bp, Artificial sequence
  SiRNA target sequence
gagcgaactgggtcagtgaga

SEQ ID NO: 282923 - DNA, 21 bp, Artificial sequence
  SiRNA target sequence
agcgaactgggtcagtgagaa

SEQ ID NO: 282924 - DNA, 21 bp, Artificial sequence
  SiRNA target sequence
gcgaactgggtcagtgagaat

SEQ ID NO: 282925 - DNA, 21 bp, Artificial sequence
  SiRNA target sequence
cgaactgggtcagtgagaata

SEQ ID NO: 282926 - DNA, 21 bp, Artificial sequence
  SiRNA target sequence
gaactgggtcagtgagaatat

SEQ ID NO: 282927 - DNA, 21 bp, Artificial sequence
  SiRNA target sequence
aactgggtcagtgagaatatt

SEQ ID NO: 282928 - DNA, 21 bp, Artificial sequence
  SiRNA target sequence
actgggtcagtgagaatattc

SEQ ID NO: 282929 - DNA, 21 bp, Artificial sequence
  SiRNA target sequence
ctgggtcagtgagaatattct

SEQ ID NO: 282930 - DNA, 21 bp, Artificial sequence
  SiRNA target sequence
tgggtcagtgagaatattctg

SEQ ID NO: 282931 - DNA, 21 bp, Artificial sequence
  SiRNA target sequence
gggtcagtgagaatattctgc

SEQ ID NO: 282932 - DNA, 21 bp, Artificial sequence
  SiRNA target sequence
ggtcagtgagaatattctgca

SEQ ID NO: 282933 - DNA, 21 bp, Artificial sequence
  SiRNA target sequence
gtcagtgagaatattctgcaa

SEQ ID NO: 282934 - DNA, 21 bp, Artificial sequence
  SiRNA target sequence
tcagtgagaatattctgcaac

SEQ ID NO: 282935 - DNA, 21 bp, Artificial sequence
  SiRNA target sequence
cagtgagaatattctgcaacc

SEQ ID NO: 282936 - DNA, 21 bp, Artificial sequence
  SiRNA target sequence
agtgagaatattctgcaacct

SEQ ID NO: 282937 - DNA, 21 bp, Artificial sequence
  SiRNA target sequence
gtgagaatattctgcaacctg

SEQ ID NO: 282938 - DNA, 21 bp, Artificial sequence
  SiRNA target sequence
tgagaatattctgcaacctgc

SEQ ID NO: 282939 - DNA, 21 bp, Artificial sequence
  SiRNA target sequence
gagaatattctgcaacctgca

SEQ ID NO: 282940 - DNA, 21 bp, Artificial sequence
  SiRNA target sequence
agaatattctgcaacctgcag

SEQ ID NO: 282941 - DNA, 21 bp, Artificial sequence
  SiRNA target sequence
gaatattctgcaacctgcaga

SEQ ID NO: 282942 - DNA, 21 bp, Artificial sequence
  SiRNA target sequence
aatattctgcaacctgcagat

SEQ ID NO: 282943 - DNA, 21 bp, Artificial sequence
  SiRNA target sequence
atattctgcaacctgcagatg

SEQ ID NO: 282944 - DNA, 21 bp, Artificial sequence
  SiRNA target sequence
tattctgcaacctgcagatga

SEQ ID NO: 282945 - DNA, 21 bp, Artificial sequence
  SiRNA target sequence
attctgcaacctgcagatgaa

SEQ ID NO: 282946 - DNA, 21 bp, Artificial sequence
  SiRNA target sequence
ttctgcaacctgcagatgaaa

SEQ ID NO: 282947 - DNA, 21 bp, Artificial sequence
  SiRNA target sequence
tctgcaacctgcagatgaaat

SEQ ID NO: 282948 - DNA, 21 bp, Artificial sequence
  SiRNA target sequence
ctgcaacctgcagatgaaatc

SEQ ID NO: 282949 - DNA, 21 bp, Artificial sequence
  SiRNA target sequence
tgcaacctgcagatgaaatca

SEQ ID NO: 282950 - DNA, 21 bp, Artificial sequence
  SiRNA target sequence
gcaacctgcagatgaaatcat

SEQ ID NO: 282951 - DNA, 21 bp, Artificial sequence
  SiRNA target sequence
caacctgcagatgaaatcata

SEQ ID NO: 282952 - DNA, 21 bp, Artificial sequence
  SiRNA target sequence
aacctgcagatgaaatcatag

SEQ ID NO: 282953 - DNA, 21 bp, Artificial sequence
  SiRNA target sequence
acctgcagatgaaatcatagg

SEQ ID NO: 282954 - DNA, 21 bp, Artificial sequence
  SiRNA target sequence
cctgcagatgaaatcatagga

SEQ ID NO: 282955 - DNA, 21 bp, Artificial sequence
  SiRNA target sequence
ctgcagatgaaatcataggac

SEQ ID NO: 282956 - DNA, 21 bp, Artificial sequence
  SiRNA target sequence
tgcagatgaaatcataggacc

SEQ ID NO: 282957 - DNA, 21 bp, Artificial sequence
  SiRNA target sequence
gcagatgaaatcataggacct

SEQ ID NO: 282958 - DNA, 21 bp, Artificial sequence
  SiRNA target sequence
cagatgaaatcataggaccta

SEQ ID NO: 282959 - DNA, 21 bp, Artificial sequence
  SiRNA target sequence
agatgaaatcataggacctat

SEQ ID NO: 282960 - DNA, 21 bp, Artificial sequence
  SiRNA target sequence
gatgaaatcataggacctata

SEQ ID NO: 282961 - DNA, 21 bp, Artificial sequence
  SiRNA target sequence
atgaaatcataggacctatat

SEQ ID NO: 282962 - DNA, 21 bp, Artificial sequence
  SiRNA target sequence
tgaaatcataggacctatatt

SEQ ID NO: 282963 - DNA, 21 bp, Artificial sequence
  SiRNA target sequence
gaaatcataggacctatattg

SEQ ID NO: 282964 - DNA, 21 bp, Artificial sequence
  SiRNA target sequence
aaatcataggacctatattgt

SEQ ID NO: 282965 - DNA, 21 bp, Artificial sequence
  SiRNA target sequence
aatcataggacctatattgtc

SEQ ID NO: 282966 - DNA, 21 bp, Artificial sequence
  SiRNA target sequence
atcataggacctatattgtct

SEQ ID NO: 282967 - DNA, 21 bp, Artificial sequence
  SiRNA target sequence
tcataggacctatattgtctc

SEQ ID NO: 282968 - DNA, 21 bp, Artificial sequence
  SiRNA target sequence
cataggacctatattgtctct

SEQ ID NO: 282969 - DNA, 21 bp, Artificial sequence
  SiRNA target sequence
ataggacctatattgtctctt

SEQ ID NO: 282970 - DNA, 21 bp, Artificial sequence
  SiRNA target sequence
taggacctatattgtctcttt

SEQ ID NO: 282971 - DNA, 21 bp, Artificial sequence
  SiRNA target sequence
aggacctatattgtctctttt

SEQ ID NO: 282972 - DNA, 21 bp, Artificial sequence
  SiRNA target sequence
ggacctatattgtctcttttt

SEQ ID NO: 282973 - DNA, 21 bp, Artificial sequence
  SiRNA target sequence
gacctatattgtctctttttg

SEQ ID NO: 282974 - DNA, 21 bp, Artificial sequence
  SiRNA target sequence
acctatattgtctctttttgg

SEQ ID NO: 282975 - DNA, 21 bp, Artificial sequence
  SiRNA target sequence
cctatattgtctctttttggg

SEQ ID NO: 282976 - DNA, 21 bp, Artificial sequence
  SiRNA target sequence
ctatattgtctctttttgggt

SEQ ID NO: 282977 - DNA, 21 bp, Artificial sequence
  SiRNA target sequence
tatattgtctctttttgggtt

SEQ ID NO: 282978 - DNA, 21 bp, Artificial sequence
  SiRNA target sequence
atattgtctctttttgggttc

SEQ ID NO: 282979 - DNA, 21 bp, Artificial sequence
  SiRNA target sequence
tattgtctctttttgggttct

SEQ ID NO: 282980 - DNA, 21 bp, Artificial sequence
  SiRNA target sequence
attgtctctttttgggttctc

SEQ ID NO: 282981 - DNA, 21 bp, Artificial sequence
  SiRNA target sequence
ttgtctctttttgggttctcg

SEQ ID NO: 282982 - DNA, 21 bp, Artificial sequence
  SiRNA target sequence
tgtctctttttgggttctcga

SEQ ID NO: 282983 - DNA, 21 bp, Artificial sequence
  SiRNA target sequence
gtctctttttgggttctcgaa

SEQ ID NO: 282984 - DNA, 21 bp, Artificial sequence
  SiRNA target sequence
tctctttttgggttctcgaag

SEQ ID NO: 282985 - DNA, 21 bp, Artificial sequence
  SiRNA target sequence
ctctttttgggttctcgaagc

SEQ ID NO: 282986 - DNA, 21 bp, Artificial sequence
  SiRNA target sequence
tctttttgggttctcgaagcc

SEQ ID NO: 282987 - DNA, 21 bp, Artificial sequence
  SiRNA target sequence
ctttttgggttctcgaagcct

SEQ ID NO: 282988 - DNA, 21 bp, Artificial sequence
  SiRNA target sequence
tttttgggttctcgaagcctc

SEQ ID NO: 282989 - DNA, 21 bp, Artificial sequence
  SiRNA target sequence
ttttgggttctcgaagcctct

SEQ ID NO: 282990 - DNA, 21 bp, Artificial sequence
  SiRNA target sequence
tttgggttctcgaagcctctt

SEQ ID NO: 282991 - DNA, 21 bp, Artificial sequence
  SiRNA target sequence
ttgggttctcgaagcctcttt

SEQ ID NO: 282992 - DNA, 21 bp, Artificial sequence
  SiRNA target sequence
tgggttctcgaagcctctttt

SEQ ID NO: 282993 - DNA, 21 bp, Artificial sequence
  SiRNA target sequence
gggttctcgaagcctcttttg

SEQ ID NO: 282994 - DNA, 21 bp, Artificial sequence
  SiRNA target sequence
ggttctcgaagcctcttttgc

SEQ ID NO: 282995 - DNA, 21 bp, Artificial sequence
  SiRNA target sequence
gttctcgaagcctcttttgcc

SEQ ID NO: 282996 - DNA, 21 bp, Artificial sequence
  SiRNA target sequence
ttctcgaagcctcttttgccc

SEQ ID NO: 282997 - DNA, 21 bp, Artificial sequence
  SiRNA target sequence
tctcgaagcctcttttgccca

SEQ ID NO: 282998 - DNA, 21 bp, Artificial sequence
  SiRNA target sequence
ctcgaagcctcttttgcccat

SEQ ID NO: 282999 - DNA, 21 bp, Artificial sequence
  SiRNA target sequence
tcgaagcctcttttgcccatt

SEQ ID NO: 283000 - DNA, 21 bp, Artificial sequence
  SiRNA target sequence
cgaagcctcttttgcccatta

SEQ ID NO: 283001 - DNA, 21 bp, Artificial sequence
  SiRNA target sequence
gaagcctcttttgcccattac

SEQ ID NO: 283002 - DNA, 21 bp, Artificial sequence
  SiRNA target sequence
aagcctcttttgcccattact

SEQ ID NO: 283003 - DNA, 21 bp, Artificial sequence
  SiRNA target sequence
agcctcttttgcccattacta

SEQ ID NO: 283004 - DNA, 21 bp, Artificial sequence
  SiRNA target sequence
gcctcttttgcccattactaa

SEQ ID NO: 283005 - DNA, 21 bp, Artificial sequence
  SiRNA target sequence
cctcttttgcccattactaat

SEQ ID NO: 283006 - DNA, 21 bp, Artificial sequence
  SiRNA target sequence
ctcttttgcccattactaatc

SEQ ID NO: 283007 - DNA, 21 bp, Artificial sequence
  SiRNA target sequence
tcttttgcccattactaatcc

SEQ ID NO: 283008 - DNA, 21 bp, Artificial sequence
  SiRNA target sequence
cttttgcccattactaatccc

SEQ ID NO: 283009 - DNA, 21 bp, Artificial sequence
  SiRNA target sequence
ttttgcccattactaatccca

SEQ ID NO: 283010 - DNA, 21 bp, Artificial sequence
  SiRNA target sequence
tttgcccattactaatcccac

SEQ ID NO: 283011 - DNA, 21 bp, Artificial sequence
  SiRNA target sequence
ttgcccattactaatcccacc

SEQ ID NO: 283012 - DNA, 21 bp, Artificial sequence
  SiRNA target sequence
tgcccattactaatcccaccg

SEQ ID NO: 283013 - DNA, 21 bp, Artificial sequence
  SiRNA target sequence
gcccattactaatcccaccgt

SEQ ID NO: 283014 - DNA, 21 bp, Artificial sequence
  SiRNA target sequence
cccattactaatcccaccgtt

SEQ ID NO: 283015 - DNA, 21 bp, Artificial sequence
  SiRNA target sequence
ccattactaatcccaccgttt

SEQ ID NO: 283016 - DNA, 21 bp, Artificial sequence
  SiRNA target sequence
cattactaatcccaccgtttt

SEQ ID NO: 283017 - DNA, 21 bp, Artificial sequence
  SiRNA target sequence
attactaatcccaccgttttg

SEQ ID NO: 283018 - DNA, 21 bp, Artificial sequence
  SiRNA target sequence
ttactaatcccaccgttttgc

SEQ ID NO: 283019 - DNA, 21 bp, Artificial sequence
  SiRNA target sequence
tactaatcccaccgttttgcg

SEQ ID NO: 283020 - DNA, 21 bp, Artificial sequence
  SiRNA target sequence
actaatcccaccgttttgcgg

SEQ ID NO: 283021 - DNA, 21 bp, Artificial sequence
  SiRNA target sequence
ctaatcccaccgttttgcggc

SEQ ID NO: 283022 - DNA, 21 bp, Artificial sequence
  SiRNA target sequence
taatcccaccgttttgcggcc

SEQ ID NO: 283023 - DNA, 21 bp, Artificial sequence
  SiRNA target sequence
aatcccaccgttttgcggcct

SEQ ID NO: 283024 - DNA, 21 bp, Artificial sequence
  SiRNA target sequence
atcccaccgttttgcggcctg

SEQ ID NO: 283025 - DNA, 21 bp, Artificial sequence
  SiRNA target sequence
tcccaccgttttgcggcctgc

SEQ ID NO: 283026 - DNA, 21 bp, Artificial sequence
  SiRNA target sequence
cccaccgttttgcggcctgcg

SEQ ID NO: 283027 - DNA, 21 bp, Artificial sequence
  SiRNA target sequence
ccaccgttttgcggcctgcga

SEQ ID NO: 283028 - DNA, 21 bp, Artificial sequence
  SiRNA target sequence
caccgttttgcggcctgcgaa

SEQ ID NO: 283029 - DNA, 21 bp, Artificial sequence
  SiRNA target sequence
accgttttgcggcctgcgaat

SEQ ID NO: 283030 - DNA, 21 bp, Artificial sequence
  SiRNA target sequence
ccgttttgcggcctgcgaata

SEQ ID NO: 283031 - DNA, 21 bp, Artificial sequence
  SiRNA target sequence
cgttttgcggcctgcgaatac

SEQ ID NO: 283032 - DNA, 21 bp, Artificial sequence
  SiRNA target sequence
gttttgcggcctgcgaatacc

SEQ ID NO: 283033 - DNA, 21 bp, Artificial sequence
  SiRNA target sequence
ttttgcggcctgcgaatacct

SEQ ID NO: 283034 - DNA, 21 bp, Artificial sequence
  SiRNA target sequence
tttgcggcctgcgaatacctt

SEQ ID NO: 283035 - DNA, 21 bp, Artificial sequence
  SiRNA target sequence
ttgcggcctgcgaataccttt

SEQ ID NO: 283036 - DNA, 21 bp, Artificial sequence
  SiRNA target sequence
tgcggcctgcgaatacctttg

SEQ ID NO: 283037 - DNA, 21 bp, Artificial sequence
  SiRNA target sequence
gcggcctgcgaatacctttgc

SEQ ID NO: 283038 - DNA, 21 bp, Artificial sequence
  SiRNA target sequence
cggcctgcgaatacctttgct

SEQ ID NO: 283039 - DNA, 21 bp, Artificial sequence
  SiRNA target sequence
ggcctgcgaatacctttgcta

SEQ ID NO: 283040 - DNA, 21 bp, Artificial sequence
  SiRNA target sequence
gcctgcgaatacctttgctat

SEQ ID NO: 283041 - DNA, 21 bp, Artificial sequence
  SiRNA target sequence
cctgcgaatacctttgctatc

SEQ ID NO: 283042 - DNA, 21 bp, Artificial sequence
  SiRNA target sequence
ctgcgaatacctttgctatca

SEQ ID NO: 283043 - DNA, 21 bp, Artificial sequence
  SiRNA target sequence
tgcgaatacctttgctatcac

SEQ ID NO: 283044 - DNA, 21 bp, Artificial sequence
  SiRNA target sequence
gcgaatacctttgctatcact

SEQ ID NO: 283045 - DNA, 21 bp, Artificial sequence
  SiRNA target sequence
cgaatacctttgctatcactg

SEQ ID NO: 283046 - DNA, 21 bp, Artificial sequence
  SiRNA target sequence
gaatacctttgctatcactga

SEQ ID NO: 283047 - DNA, 21 bp, Artificial sequence
  SiRNA target sequence
aatacctttgctatcactgat

SEQ ID NO: 283048 - DNA, 21 bp, Artificial sequence
  SiRNA target sequence
atacctttgctatcactgata

SEQ ID NO: 283049 - DNA, 21 bp, Artificial sequence
  SiRNA target sequence
tacctttgctatcactgatac

SEQ ID NO: 283050 - DNA, 21 bp, Artificial sequence
  SiRNA target sequence
acctttgctatcactgatacc

SEQ ID NO: 283051 - DNA, 21 bp, Artificial sequence
  SiRNA target sequence
cctttgctatcactgatacca

SEQ ID NO: 283052 - DNA, 21 bp, Artificial sequence
  SiRNA target sequence
ctttgctatcactgataccaa

SEQ ID NO: 283053 - DNA, 21 bp, Artificial sequence
  SiRNA target sequence
tttgctatcactgataccaat

SEQ ID NO: 283054 - DNA, 21 bp, Artificial sequence
  SiRNA target sequence
ttgctatcactgataccaatg

SEQ ID NO: 283055 - DNA, 21 bp, Artificial sequence
  SiRNA target sequence
tgctatcactgataccaatga

SEQ ID NO: 283056 - DNA, 21 bp, Artificial sequence
  SiRNA target sequence
gctatcactgataccaatgat

SEQ ID NO: 283057 - DNA, 21 bp, Artificial sequence
  SiRNA target sequence
ctatcactgataccaatgata

SEQ ID NO: 283058 - DNA, 21 bp, Artificial sequence
  SiRNA target sequence
tatcactgataccaatgatat

SEQ ID NO: 283059 - DNA, 21 bp, Artificial sequence
  SiRNA target sequence
atcactgataccaatgatatg

SEQ ID NO: 283060 - DNA, 21 bp, Artificial sequence
  SiRNA target sequence
tcactgataccaatgatatgt

SEQ ID NO: 283061 - DNA, 21 bp, Artificial sequence
  SiRNA target sequence
cactgataccaatgatatgtc

SEQ ID NO: 283062 - DNA, 21 bp, Artificial sequence
  SiRNA target sequence
actgataccaatgatatgtcg

SEQ ID NO: 283063 - DNA, 21 bp, Artificial sequence
  SiRNA target sequence
ctgataccaatgatatgtcgc

SEQ ID NO: 283064 - DNA, 21 bp, Artificial sequence
  SiRNA target sequence
tgataccaatgatatgtcgca

SEQ ID NO: 283065 - DNA, 21 bp, Artificial sequence
  SiRNA target sequence
gataccaatgatatgtcgcat

SEQ ID NO: 283066 - DNA, 21 bp, Artificial sequence
  SiRNA target sequence
ataccaatgatatgtcgcata

SEQ ID NO: 283067 - DNA, 21 bp, Artificial sequence
  SiRNA target sequence
taccaatgatatgtcgcatag

SEQ ID NO: 283068 - DNA, 21 bp, Artificial sequence
  SiRNA target sequence
accaatgatatgtcgcatagt

SEQ ID NO: 283069 - DNA, 21 bp, Artificial sequence
  SiRNA target sequence
ccaatgatatgtcgcatagtc

SEQ ID NO: 283070 - DNA, 21 bp, Artificial sequence
  SiRNA target sequence
caatgatatgtcgcatagtct

SEQ ID NO: 283071 - DNA, 21 bp, Artificial sequence
  SiRNA target sequence
aatgatatgtcgcatagtctg

SEQ ID NO: 283072 - DNA, 21 bp, Artificial sequence
  SiRNA target sequence
atgatatgtcgcatagtctgg

SEQ ID NO: 283073 - DNA, 21 bp, Artificial sequence
  SiRNA target sequence
tgatatgtcgcatagtctggc

SEQ ID NO: 283074 - DNA, 21 bp, Artificial sequence
  SiRNA target sequence
gatatgtcgcatagtctggcg

SEQ ID NO: 283075 - DNA, 21 bp, Artificial sequence
  SiRNA target sequence
atatgtcgcatagtctggcgc

SEQ ID NO: 283076 - DNA, 21 bp, Artificial sequence
  SiRNA target sequence
tatgtcgcatagtctggcgct

SEQ ID NO: 283077 - DNA, 21 bp, Artificial sequence
  SiRNA target sequence
atgtcgcatagtctggcgctt

SEQ ID NO: 283078 - DNA, 21 bp, Artificial sequence
  SiRNA target sequence
tgtcgcatagtctggcgcttt

SEQ ID NO: 283079 - DNA, 21 bp, Artificial sequence
  SiRNA target sequence
gtcgcatagtctggcgctttc

SEQ ID NO: 283080 - DNA, 21 bp, Artificial sequence
  SiRNA target sequence
tcgcatagtctggcgctttct

SEQ ID NO: 283081 - DNA, 21 bp, Artificial sequence
  SiRNA target sequence
cgcatagtctggcgctttcta

SEQ ID NO: 283082 - DNA, 21 bp, Artificial sequence
  SiRNA target sequence
gcatagtctggcgctttctaa

SEQ ID NO: 283083 - DNA, 21 bp, Artificial sequence
  SiRNA target sequence
catagtctggcgctttctaac

SEQ ID NO: 283084 - DNA, 21 bp, Artificial sequence
  SiRNA target sequence
atagtctggcgctttctaacg

SEQ ID NO: 283085 - DNA, 21 bp, Artificial sequence
  SiRNA target sequence
tagtctggcgctttctaacga

SEQ ID NO: 283086 - DNA, 21 bp, Artificial sequence
  SiRNA target sequence
agtctggcgctttctaacgat

SEQ ID NO: 283087 - DNA, 21 bp, Artificial sequence
  SiRNA target sequence
gtctggcgctttctaacgata

SEQ ID NO: 283088 - DNA, 21 bp, Artificial sequence
  SiRNA target sequence
tctggcgctttctaacgatac

SEQ ID NO: 283089 - DNA, 21 bp, Artificial sequence
  SiRNA target sequence
ctggcgctttctaacgatact

SEQ ID NO: 283090 - DNA, 21 bp, Artificial sequence
  SiRNA target sequence
tggcgctttctaacgatacta

SEQ ID NO: 283091 - DNA, 21 bp, Artificial sequence
  SiRNA target sequence
ggcgctttctaacgatactaa

SEQ ID NO: 283092 - DNA, 21 bp, Artificial sequence
  SiRNA target sequence
gcgctttctaacgatactaat

SEQ ID NO: 283093 - DNA, 21 bp, Artificial sequence
  SiRNA target sequence
cgctttctaacgatactaatg

SEQ ID NO: 283094 - DNA, 21 bp, Artificial sequence
  SiRNA target sequence
gctttctaacgatactaatgt

SEQ ID NO: 283095 - DNA, 21 bp, Artificial sequence
  SiRNA target sequence
ctttctaacgatactaatgta

SEQ ID NO: 283096 - DNA, 21 bp, Artificial sequence
  SiRNA target sequence
tttctaacgatactaatgtac

SEQ ID NO: 283097 - DNA, 21 bp, Artificial sequence
  SiRNA target sequence
ttctaacgatactaatgtacc

SEQ ID NO: 283098 - DNA, 21 bp, Artificial sequence
  SiRNA target sequence
tctaacgatactaatgtaccg

SEQ ID NO: 283099 - DNA, 21 bp, Artificial sequence
  SiRNA target sequence
ctaacgatactaatgtaccgt

SEQ ID NO: 283100 - DNA, 21 bp, Artificial sequence
  SiRNA target sequence
taacgatactaatgtaccgtt

SEQ ID NO: 283101 - DNA, 21 bp, Artificial sequence
  SiRNA target sequence
aacgatactaatgtaccgttt

SEQ ID NO: 283102 - DNA, 21 bp, Artificial sequence
  SiRNA target sequence
acgatactaatgtaccgtttg

SEQ ID NO: 283103 - DNA, 21 bp, Artificial sequence
  SiRNA target sequence
cgatactaatgtaccgtttgt

SEQ ID NO: 283104 - DNA, 21 bp, Artificial sequence
  SiRNA target sequence
gatactaatgtaccgtttgtt

SEQ ID NO: 283105 - DNA, 21 bp, Artificial sequence
  SiRNA target sequence
atactaatgtaccgtttgtta

SEQ ID NO: 283106 - DNA, 21 bp, Artificial sequence
  SiRNA target sequence
tactaatgtaccgtttgttaa

SEQ ID NO: 283107 - DNA, 21 bp, Artificial sequence
  SiRNA target sequence
actaatgtaccgtttgttaag

SEQ ID NO: 283108 - DNA, 21 bp, Artificial sequence
  SiRNA target sequence
ctaatgtaccgtttgttaagg

SEQ ID NO: 283109 - DNA, 21 bp, Artificial sequence
  SiRNA target sequence
taatgtaccgtttgttaaggc

SEQ ID NO: 283110 - DNA, 21 bp, Artificial sequence
  SiRNA target sequence
aatgtaccgtttgttaaggcg

SEQ ID NO: 283111 - DNA, 21 bp, Artificial sequence
  SiRNA target sequence
atgtaccgtttgttaaggcgc

SEQ ID NO: 283112 - DNA, 21 bp, Artificial sequence
  SiRNA target sequence
tgtaccgtttgttaaggcgct

SEQ ID NO: 283113 - DNA, 21 bp, Artificial sequence
  SiRNA target sequence
gtaccgtttgttaaggcgctt

SEQ ID NO: 283114 - DNA, 21 bp, Artificial sequence
  SiRNA target sequence
taccgtttgttaaggcgcttg

SEQ ID NO: 283115 - DNA, 21 bp, Artificial sequence
  SiRNA target sequence
accgtttgttaaggcgcttga

SEQ ID NO: 283116 - DNA, 21 bp, Artificial sequence
  SiRNA target sequence
ccgtttgttaaggcgcttgat

SEQ ID NO: 283117 - DNA, 21 bp, Artificial sequence
  SiRNA target sequence
cgtttgttaaggcgcttgatg

SEQ ID NO: 283118 - DNA, 21 bp, Artificial sequence
  SiRNA target sequence
gtttgttaaggcgcttgatgg

SEQ ID NO: 283119 - DNA, 21 bp, Artificial sequence
  SiRNA target sequence
tttgttaaggcgcttgatggg

SEQ ID NO: 283120 - DNA, 21 bp, Artificial sequence
  SiRNA target sequence
ttgttaaggcgcttgatgggt

SEQ ID NO: 283121 - DNA, 21 bp, Artificial sequence
  SiRNA target sequence
tgttaaggcgcttgatgggtc

SEQ ID NO: 283122 - DNA, 21 bp, Artificial sequence
  SiRNA target sequence
gttaaggcgcttgatgggtca

SEQ ID NO: 283123 - DNA, 21 bp, Artificial sequence
  SiRNA target sequence
ttaaggcgcttgatgggtcag

SEQ ID NO: 283124 - DNA, 21 bp, Artificial sequence
  SiRNA target sequence
taaggcgcttgatgggtcagg

SEQ ID NO: 283125 - DNA, 21 bp, Artificial sequence
  SiRNA target sequence
aaggcgcttgatgggtcaggt

SEQ ID NO: 283126 - DNA, 21 bp, Artificial sequence
  SiRNA target sequence
aggcgcttgatgggtcaggtt

SEQ ID NO: 283127 - DNA, 21 bp, Artificial sequence
  SiRNA target sequence
ggcgcttgatgggtcaggttt

SEQ ID NO: 283128 - DNA, 21 bp, Artificial sequence
  SiRNA target sequence
gcgcttgatgggtcaggtttg

SEQ ID NO: 283129 - DNA, 21 bp, Artificial sequence
  SiRNA target sequence
cgcttgatgggtcaggtttgg

SEQ ID NO: 283130 - DNA, 21 bp, Artificial sequence
  SiRNA target sequence
gcttgatgggtcaggtttgga

SEQ ID NO: 283131 - DNA, 21 bp, Artificial sequence
  SiRNA target sequence
cttgatgggtcaggtttggac

SEQ ID NO: 283132 - DNA, 21 bp, Artificial sequence
  SiRNA target sequence
ttgatgggtcaggtttggacg

SEQ ID NO: 283133 - DNA, 21 bp, Artificial sequence
  SiRNA target sequence
tgatgggtcaggtttggacga

SEQ ID NO: 283134 - DNA, 21 bp, Artificial sequence
  SiRNA target sequence
gatgggtcaggtttggacgaa

SEQ ID NO: 283135 - DNA, 21 bp, Artificial sequence
  SiRNA target sequence
atgggtcaggtttggacgaaa

SEQ ID NO: 283136 - DNA, 21 bp, Artificial sequence
  SiRNA target sequence
tgggtcaggtttggacgaaat

SEQ ID NO: 283137 - DNA, 21 bp, Artificial sequence
  SiRNA target sequence
gggtcaggtttggacgaaatg

SEQ ID NO: 283138 - DNA, 21 bp, Artificial sequence
  SiRNA target sequence
ggtcaggtttggacgaaatga

SEQ ID NO: 283139 - DNA, 21 bp, Artificial sequence
  SiRNA target sequence
gtcaggtttggacgaaatgag

SEQ ID NO: 283140 - DNA, 21 bp, Artificial sequence
  SiRNA target sequence
tcaggtttggacgaaatgagt

SEQ ID NO: 283141 - DNA, 21 bp, Artificial sequence
  SiRNA target sequence
caggtttggacgaaatgagtt

SEQ ID NO: 283142 - DNA, 21 bp, Artificial sequence
  SiRNA target sequence
aggtttggacgaaatgagttt

SEQ ID NO: 283143 - DNA, 21 bp, Artificial sequence
  SiRNA target sequence
ggtttggacgaaatgagtttc

SEQ ID NO: 283144 - DNA, 21 bp, Artificial sequence
  SiRNA target sequence
gtttggacgaaatgagtttcg

SEQ ID NO: 283145 - DNA, 21 bp, Artificial sequence
  SiRNA target sequence
tttggacgaaatgagtttcga

SEQ ID NO: 283146 - DNA, 21 bp, Artificial sequence
  SiRNA target sequence
ttggacgaaatgagtttcgat

SEQ ID NO: 283147 - DNA, 21 bp, Artificial sequence
  SiRNA target sequence
tggacgaaatgagtttcgatt

SEQ ID NO: 283148 - DNA, 21 bp, Artificial sequence
  SiRNA target sequence
ggacgaaatgagtttcgatta

SEQ ID NO: 283149 - DNA, 21 bp, Artificial sequence
  SiRNA target sequence
gacgaaatgagtttcgattac

SEQ ID NO: 283150 - DNA, 21 bp, Artificial sequence
  SiRNA target sequence
acgaaatgagtttcgattacc

SEQ ID NO: 283151 - DNA, 21 bp, Artificial sequence
  SiRNA target sequence
cgaaatgagtttcgattacct

SEQ ID NO: 283152 - DNA, 21 bp, Artificial sequence
  SiRNA target sequence
gaaatgagtttcgattaccta

SEQ ID NO: 283153 - DNA, 21 bp, Artificial sequence
  SiRNA target sequence
aaatgagtttcgattacctaa

SEQ ID NO: 283154 - DNA, 21 bp, Artificial sequence
  SiRNA target sequence
aatgagtttcgattacctaaa

SEQ ID NO: 283155 - DNA, 21 bp, Artificial sequence
  SiRNA target sequence
atgagtttcgattacctaaag

SEQ ID NO: 283156 - DNA, 21 bp, Artificial sequence
  SiRNA target sequence
tgagtttcgattacctaaaga

SEQ ID NO: 283157 - DNA, 21 bp, Artificial sequence
  SiRNA target sequence
gagtttcgattacctaaagaa

SEQ ID NO: 283158 - DNA, 21 bp, Artificial sequence
  SiRNA target sequence
agtttcgattacctaaagaaa

SEQ ID NO: 283159 - DNA, 21 bp, Artificial sequence
  SiRNA target sequence
gtttcgattacctaaagaaaa

SEQ ID NO: 283160 - DNA, 21 bp, Artificial sequence
  SiRNA target sequence
tttcgattacctaaagaaaat

SEQ ID NO: 283161 - DNA, 21 bp, Artificial sequence
  SiRNA target sequence
ttcgattacctaaagaaaata

SEQ ID NO: 283162 - DNA, 21 bp, Artificial sequence
  SiRNA target sequence
tcgattacctaaagaaaatac

SEQ ID NO: 283163 - DNA, 21 bp, Artificial sequence
  SiRNA target sequence
cgattacctaaagaaaatacc

SEQ ID NO: 283164 - DNA, 21 bp, Artificial sequence
  SiRNA target sequence
gattacctaaagaaaataccc

SEQ ID NO: 283165 - DNA, 21 bp, Artificial sequence
  SiRNA target sequence
attacctaaagaaaatacccc

SEQ ID NO: 283166 - DNA, 21 bp, Artificial sequence
  SiRNA target sequence
ttacctaaagaaaatacccca

SEQ ID NO: 283167 - DNA, 21 bp, Artificial sequence
  SiRNA target sequence
tacctaaagaaaataccccaa

SEQ ID NO: 283168 - DNA, 21 bp, Artificial sequence
  SiRNA target sequence
acctaaagaaaataccccaat

SEQ ID NO: 283169 - DNA, 21 bp, Artificial sequence
  SiRNA target sequence
cctaaagaaaataccccaatt

SEQ ID NO: 283170 - DNA, 21 bp, Artificial sequence
  SiRNA target sequence
ctaaagaaaataccccaattc

SEQ ID NO: 283171 - DNA, 21 bp, Artificial sequence
  SiRNA target sequence
taaagaaaataccccaattca

SEQ ID NO: 283172 - DNA, 21 bp, Artificial sequence
  SiRNA target sequence
aaagaaaataccccaattcat

SEQ ID NO: 283173 - DNA, 21 bp, Artificial sequence
  SiRNA target sequence
aagaaaataccccaattcata

SEQ ID NO: 283174 - DNA, 21 bp, Artificial sequence
  SiRNA target sequence
agaaaataccccaattcatac

SEQ ID NO: 283175 - DNA, 21 bp, Artificial sequence
  SiRNA target sequence
gaaaataccccaattcataca

SEQ ID NO: 283176 - DNA, 21 bp, Artificial sequence
  SiRNA target sequence
aaaataccccaattcatacag

SEQ ID NO: 283177 - DNA, 21 bp, Artificial sequence
  SiRNA target sequence
aaataccccaattcatacagt

SEQ ID NO: 283178 - DNA, 21 bp, Artificial sequence
  SiRNA target sequence
aataccccaattcatacagtc

SEQ ID NO: 283179 - DNA, 21 bp, Artificial sequence
  SiRNA target sequence
ataccccaattcatacagtca

SEQ ID NO: 283180 - DNA, 21 bp, Artificial sequence
  SiRNA target sequence
taccccaattcatacagtcaa

SEQ ID NO: 283181 - DNA, 21 bp, Artificial sequence
  SiRNA target sequence
accccaattcatacagtcaaa

SEQ ID NO: 283182 - DNA, 21 bp, Artificial sequence
  SiRNA target sequence
ccccaattcatacagtcaaag

SEQ ID NO: 283183 - DNA, 21 bp, Artificial sequence
  SiRNA target sequence
cccaattcatacagtcaaagt

SEQ ID NO: 283184 - DNA, 21 bp, Artificial sequence
  SiRNA target sequence
ccaattcatacagtcaaagtt

SEQ ID NO: 283185 - DNA, 21 bp, Artificial sequence
  SiRNA target sequence
caattcatacagtcaaagttc

SEQ ID NO: 283186 - DNA, 21 bp, Artificial sequence
  SiRNA target sequence
aattcatacagtcaaagttct

SEQ ID NO: 283187 - DNA, 21 bp, Artificial sequence
  SiRNA target sequence
attcatacagtcaaagttctt

SEQ ID NO: 283188 - DNA, 21 bp, Artificial sequence
  SiRNA target sequence
ttcatacagtcaaagttcttc

SEQ ID NO: 283189 - DNA, 21 bp, Artificial sequence
  SiRNA target sequence
tcatacagtcaaagttcttca

SEQ ID NO: 283190 - DNA, 21 bp, Artificial sequence
  SiRNA target sequence
catacagtcaaagttcttcac

SEQ ID NO: 283191 - DNA, 21 bp, Artificial sequence
  SiRNA target sequence
atacagtcaaagttcttcacc

SEQ ID NO: 283192 - DNA, 21 bp, Artificial sequence
  SiRNA target sequence
tacagtcaaagttcttcacca

SEQ ID NO: 283193 - DNA, 21 bp, Artificial sequence
  SiRNA target sequence
acagtcaaagttcttcaccac

SEQ ID NO: 283194 - DNA, 21 bp, Artificial sequence
  SiRNA target sequence
cagtcaaagttcttcaccacc

SEQ ID NO: 283195 - DNA, 21 bp, Artificial sequence
  SiRNA target sequence
agtcaaagttcttcaccacct

SEQ ID NO: 283196 - DNA, 21 bp, Artificial sequence
  SiRNA target sequence
gtcaaagttcttcaccacctc

SEQ ID NO: 283197 - DNA, 21 bp, Artificial sequence
  SiRNA target sequence
tcaaagttcttcaccacctca

SEQ ID NO: 283198 - DNA, 21 bp, Artificial sequence
  SiRNA target sequence
caaagttcttcaccacctcaa

SEQ ID NO: 283199 - DNA, 21 bp, Artificial sequence
  SiRNA target sequence
aaagttcttcaccacctcaac

SEQ ID NO: 283200 - DNA, 21 bp, Artificial sequence
  SiRNA target sequence
aagttcttcaccacctcaact

SEQ ID NO: 283201 - DNA, 21 bp, Artificial sequence
  SiRNA target sequence
agttcttcaccacctcaacta

SEQ ID NO: 283202 - DNA, 21 bp, Artificial sequence
  SiRNA target sequence
gttcttcaccacctcaactaa

SEQ ID NO: 283203 - DNA, 21 bp, Artificial sequence
  SiRNA target sequence
ttcttcaccacctcaactaaa

SEQ ID NO: 283204 - DNA, 21 bp, Artificial sequence
  SiRNA target sequence
tcttcaccacctcaactaaac

SEQ ID NO: 283205 - DNA, 21 bp, Artificial sequence
  SiRNA target sequence
cttcaccacctcaactaaacc

SEQ ID NO: 283206 - DNA, 21 bp, Artificial sequence
  SiRNA target sequence
ttcaccacctcaactaaacct

SEQ ID NO: 283207 - DNA, 21 bp, Artificial sequence
  SiRNA target sequence
tcaccacctcaactaaacctc

SEQ ID NO: 283208 - DNA, 21 bp, Artificial sequence
  SiRNA target sequence
caccacctcaactaaacctca

SEQ ID NO: 283209 - DNA, 21 bp, Artificial sequence
  SiRNA target sequence
accacctcaactaaacctcaa

SEQ ID NO: 283210 - DNA, 21 bp, Artificial sequence
  SiRNA target sequence
ccacctcaactaaacctcaag

SEQ ID NO: 283211 - DNA, 21 bp, Artificial sequence
  SiRNA target sequence
cacctcaactaaacctcaaga

SEQ ID NO: 283212 - DNA, 21 bp, Artificial sequence
  SiRNA target sequence
acctcaactaaacctcaagag

SEQ ID NO: 283213 - DNA, 21 bp, Artificial sequence
  SiRNA target sequence
cctcaactaaacctcaagagg

SEQ ID NO: 283214 - DNA, 21 bp, Artificial sequence
  SiRNA target sequence
ctcaactaaacctcaagaggt

SEQ ID NO: 283215 - DNA, 21 bp, Artificial sequence
  SiRNA target sequence
tcaactaaacctcaagaggtt

SEQ ID NO: 283216 - DNA, 21 bp, Artificial sequence
  SiRNA target sequence
caactaaacctcaagaggttc

SEQ ID NO: 283217 - DNA, 21 bp, Artificial sequence
  SiRNA target sequence
aactaaacctcaagaggttct

SEQ ID NO: 283218 - DNA, 21 bp, Artificial sequence
  SiRNA target sequence
actaaacctcaagaggttctg

SEQ ID NO: 283219 - DNA, 21 bp, Artificial sequence
  SiRNA target sequence
ctaaacctcaagaggttctgt

SEQ ID NO: 283220 - DNA, 21 bp, Artificial sequence
  SiRNA target sequence
taaacctcaagaggttctgtt

SEQ ID NO: 283221 - DNA, 21 bp, Artificial sequence
  SiRNA target sequence
aaacctcaagaggttctgttt

SEQ ID NO: 283222 - DNA, 21 bp, Artificial sequence
  SiRNA target sequence
aacctcaagaggttctgtttc

SEQ ID NO: 283223 - DNA, 21 bp, Artificial sequence
  SiRNA target sequence
acctcaagaggttctgtttca

SEQ ID NO: 283224 - DNA, 21 bp, Artificial sequence
  SiRNA target sequence
cctcaagaggttctgtttcag

SEQ ID NO: 283225 - DNA, 21 bp, Artificial sequence
  SiRNA target sequence
ctcaagaggttctgtttcaga

SEQ ID NO: 283226 - DNA, 21 bp, Artificial sequence
  SiRNA target sequence
tcaagaggttctgtttcagac

SEQ ID NO: 283227 - DNA, 21 bp, Artificial sequence
  SiRNA target sequence
caagaggttctgtttcagact

SEQ ID NO: 283228 - DNA, 21 bp, Artificial sequence
  SiRNA target sequence
aagaggttctgtttcagacta

SEQ ID NO: 283229 - DNA, 21 bp, Artificial sequence
  SiRNA target sequence
agaggttctgtttcagactaa

SEQ ID NO: 283230 - DNA, 21 bp, Artificial sequence
  SiRNA target sequence
gaggttctgtttcagactaaa

SEQ ID NO: 283231 - DNA, 21 bp, Artificial sequence
  SiRNA target sequence
aggttctgtttcagactaaag

SEQ ID NO: 283232 - DNA, 21 bp, Artificial sequence
  SiRNA target sequence
ggttctgtttcagactaaagt

SEQ ID NO: 283233 - DNA, 21 bp, Artificial sequence
  SiRNA target sequence
gttctgtttcagactaaagtg

SEQ ID NO: 283234 - DNA, 21 bp, Artificial sequence
  SiRNA target sequence
ttctgtttcagactaaagtga

SEQ ID NO: 283235 - DNA, 21 bp, Artificial sequence
  SiRNA target sequence
tctgtttcagactaaagtgat

SEQ ID NO: 283236 - DNA, 21 bp, Artificial sequence
  SiRNA target sequence
ctgtttcagactaaagtgatg

SEQ ID NO: 283237 - DNA, 21 bp, Artificial sequence
  SiRNA target sequence
tgtttcagactaaagtgatgc

SEQ ID NO: 283238 - DNA, 21 bp, Artificial sequence
  SiRNA target sequence
gtttcagactaaagtgatgcc

SEQ ID NO: 283239 - DNA, 21 bp, Artificial sequence
  SiRNA target sequence
tttcagactaaagtgatgcca

SEQ ID NO: 283240 - DNA, 21 bp, Artificial sequence
  SiRNA target sequence
ttcagactaaagtgatgccac

SEQ ID NO: 283241 - DNA, 21 bp, Artificial sequence
  SiRNA target sequence
tcagactaaagtgatgccaca

SEQ ID NO: 283242 - DNA, 21 bp, Artificial sequence
  SiRNA target sequence
cagactaaagtgatgccacat

SEQ ID NO: 283243 - DNA, 21 bp, Artificial sequence
  SiRNA target sequence
agactaaagtgatgccacatt

SEQ ID NO: 283244 - DNA, 21 bp, Artificial sequence
  SiRNA target sequence
gactaaagtgatgccacatta

SEQ ID NO: 283245 - DNA, 21 bp, Artificial sequence
  SiRNA target sequence
actaaagtgatgccacattac

SEQ ID NO: 283246 - DNA, 21 bp, Artificial sequence
  SiRNA target sequence
ctaaagtgatgccacattact

SEQ ID NO: 283247 - DNA, 21 bp, Artificial sequence
  SiRNA target sequence
taaagtgatgccacattactt

SEQ ID NO: 283248 - DNA, 21 bp, Artificial sequence
  SiRNA target sequence
aaagtgatgccacattacttt

SEQ ID NO: 283249 - DNA, 21 bp, Artificial sequence
  SiRNA target sequence
aagtgatgccacattactttg

SEQ ID NO: 283250 - DNA, 21 bp, Artificial sequence
  SiRNA target sequence
agtgatgccacattactttgt

SEQ ID NO: 283251 - DNA, 21 bp, Artificial sequence
  SiRNA target sequence
gtgatgccacattactttgtc

SEQ ID NO: 283252 - DNA, 21 bp, Artificial sequence
  SiRNA target sequence
tgatgccacattactttgtcc

SEQ ID NO: 283253 - DNA, 21 bp, Artificial sequence
  SiRNA target sequence
gatgccacattactttgtccc

SEQ ID NO: 283254 - DNA, 21 bp, Artificial sequence
  SiRNA target sequence
atgccacattactttgtccct

SEQ ID NO: 283255 - DNA, 21 bp, Artificial sequence
  SiRNA target sequence
tgccacattactttgtccctg

SEQ ID NO: 283256 - DNA, 21 bp, Artificial sequence
  SiRNA target sequence
gccacattactttgtccctgc

SEQ ID NO: 283257 - DNA, 21 bp, Artificial sequence
  SiRNA target sequence
ccacattactttgtccctgct

SEQ ID NO: 283258 - DNA, 21 bp, Artificial sequence
  SiRNA target sequence
cacattactttgtccctgctg

SEQ ID NO: 283259 - DNA, 21 bp, Artificial sequence
  SiRNA target sequence
acattactttgtccctgctgg

SEQ ID NO: 283260 - DNA, 21 bp, Artificial sequence
  SiRNA target sequence
cattactttgtccctgctggt

SEQ ID NO: 283261 - DNA, 21 bp, Artificial sequence
  SiRNA target sequence
attactttgtccctgctggtg

SEQ ID NO: 283262 - DNA, 21 bp, Artificial sequence
  SiRNA target sequence
ttactttgtccctgctggtga

SEQ ID NO: 283263 - DNA, 21 bp, Artificial sequence
  SiRNA target sequence
tactttgtccctgctggtgat

SEQ ID NO: 283264 - DNA, 21 bp, Artificial sequence
  SiRNA target sequence
actttgtccctgctggtgatg

SEQ ID NO: 283265 - DNA, 21 bp, Artificial sequence
  SiRNA target sequence
ctttgtccctgctggtgatgt

SEQ ID NO: 283266 - DNA, 21 bp, Artificial sequence
  SiRNA target sequence
tttgtccctgctggtgatgtg

SEQ ID NO: 283267 - DNA, 21 bp, Artificial sequence
  SiRNA target sequence
ttgtccctgctggtgatgtga

SEQ ID NO: 283268 - DNA, 21 bp, Artificial sequence
  SiRNA target sequence
tgtccctgctggtgatgtgaa

SEQ ID NO: 283269 - DNA, 21 bp, Artificial sequence
  SiRNA target sequence
gtccctgctggtgatgtgaat

SEQ ID NO: 283270 - DNA, 21 bp, Artificial sequence
  SiRNA target sequence
tccctgctggtgatgtgaata

SEQ ID NO: 283271 - DNA, 21 bp, Artificial sequence
  SiRNA target sequence
ccctgctggtgatgtgaatat

SEQ ID NO: 283272 - DNA, 21 bp, Artificial sequence
  SiRNA target sequence
cctgctggtgatgtgaatatc

SEQ ID NO: 283273 - DNA, 21 bp, Artificial sequence
  SiRNA target sequence
ctgctggtgatgtgaatatcg

SEQ ID NO: 283274 - DNA, 21 bp, Artificial sequence
  SiRNA target sequence
tgctggtgatgtgaatatcgc

SEQ ID NO: 283275 - DNA, 21 bp, Artificial sequence
  SiRNA target sequence
gctggtgatgtgaatatcgct

SEQ ID NO: 283276 - DNA, 21 bp, Artificial sequence
  SiRNA target sequence
ctggtgatgtgaatatcgcta

SEQ ID NO: 283277 - DNA, 21 bp, Artificial sequence
  SiRNA target sequence
tggtgatgtgaatatcgctat

SEQ ID NO: 283278 - DNA, 21 bp, Artificial sequence
  SiRNA target sequence
ggtgatgtgaatatcgctatg

SEQ ID NO: 283279 - DNA, 21 bp, Artificial sequence
  SiRNA target sequence
gtgatgtgaatatcgctatgg

SEQ ID NO: 283280 - DNA, 21 bp, Artificial sequence
  SiRNA target sequence
tgatgtgaatatcgctatgga

SEQ ID NO: 283281 - DNA, 21 bp, Artificial sequence
  SiRNA target sequence
gatgtgaatatcgctatggac

SEQ ID NO: 283282 - DNA, 21 bp, Artificial sequence
  SiRNA target sequence
atgtgaatatcgctatggaca

SEQ ID NO: 283283 - DNA, 21 bp, Artificial sequence
  SiRNA target sequence
tgtgaatatcgctatggacaa

SEQ ID NO: 283284 - DNA, 21 bp, Artificial sequence
  SiRNA target sequence
gtgaatatcgctatggacaag

SEQ ID NO: 283285 - DNA, 21 bp, Artificial sequence
  SiRNA target sequence
tgaatatcgctatggacaagg

SEQ ID NO: 283286 - DNA, 21 bp, Artificial sequence
  SiRNA target sequence
gaatatcgctatggacaagga

SEQ ID NO: 283287 - DNA, 21 bp, Artificial sequence
  SiRNA target sequence
aatatcgctatggacaaggat

SEQ ID NO: 283288 - DNA, 21 bp, Artificial sequence
  SiRNA target sequence
atatcgctatggacaaggata

SEQ ID NO: 283289 - DNA, 21 bp, Artificial sequence
  SiRNA target sequence
tatcgctatggacaaggatac

SEQ ID NO: 283290 - DNA, 21 bp, Artificial sequence
  SiRNA target sequence
atcgctatggacaaggatacg

SEQ ID NO: 283291 - DNA, 21 bp, Artificial sequence
  SiRNA target sequence
tcgctatggacaaggatacga

SEQ ID NO: 283292 - DNA, 21 bp, Artificial sequence
  SiRNA target sequence
cgctatggacaaggatacgat

SEQ ID NO: 283293 - DNA, 21 bp, Artificial sequence
  SiRNA target sequence
gctatggacaaggatacgatt

SEQ ID NO: 283294 - DNA, 21 bp, Artificial sequence
  SiRNA target sequence
ctatggacaaggatacgatta

SEQ ID NO: 283295 - DNA, 21 bp, Artificial sequence
  SiRNA target sequence
tatggacaaggatacgattag

SEQ ID NO: 283296 - DNA, 21 bp, Artificial sequence
  SiRNA target sequence
atggacaaggatacgattaga

SEQ ID NO: 283297 - DNA, 21 bp, Artificial sequence
  SiRNA target sequence
tggacaaggatacgattagaa

SEQ ID NO: 283298 - DNA, 21 bp, Artificial sequence
  SiRNA target sequence
ggacaaggatacgattagaac

SEQ ID NO: 283299 - DNA, 21 bp, Artificial sequence
  SiRNA target sequence
gacaaggatacgattagaacg

SEQ ID NO: 283300 - DNA, 21 bp, Artificial sequence
  SiRNA target sequence
acaaggatacgattagaacga

SEQ ID NO: 283301 - DNA, 21 bp, Artificial sequence
  SiRNA target sequence
caaggatacgattagaacgat

SEQ ID NO: 283302 - DNA, 21 bp, Artificial sequence
  SiRNA target sequence
aaggatacgattagaacgatc

SEQ ID NO: 283303 - DNA, 21 bp, Artificial sequence
  SiRNA target sequence
aggatacgattagaacgatct

SEQ ID NO: 283304 - DNA, 21 bp, Artificial sequence
  SiRNA target sequence
ggatacgattagaacgatctg

SEQ ID NO: 283305 - DNA, 21 bp, Artificial sequence
  SiRNA target sequence
gatacgattagaacgatctgg

SEQ ID NO: 283306 - DNA, 21 bp, Artificial sequence
  SiRNA target sequence
atacgattagaacgatctggc

SEQ ID NO: 283307 - DNA, 21 bp, Artificial sequence
  SiRNA target sequence
tacgattagaacgatctggca

SEQ ID NO: 283308 - DNA, 21 bp, Artificial sequence
  SiRNA target sequence
acgattagaacgatctggcaa

SEQ ID NO: 283309 - DNA, 21 bp, Artificial sequence
  SiRNA target sequence
cgattagaacgatctggcaac

SEQ ID NO: 283310 - DNA, 21 bp, Artificial sequence
  SiRNA target sequence
gattagaacgatctggcaacc

SEQ ID NO: 283311 - DNA, 21 bp, Artificial sequence
  SiRNA target sequence
attagaacgatctggcaaccc

SEQ ID NO: 283312 - DNA, 21 bp, Artificial sequence
  SiRNA target sequence
ttagaacgatctggcaaccca

SEQ ID NO: 283313 - DNA, 21 bp, Artificial sequence
  SiRNA target sequence
tagaacgatctggcaacccag

SEQ ID NO: 283314 - DNA, 21 bp, Artificial sequence
  SiRNA target sequence
agaacgatctggcaacccagt

SEQ ID NO: 283315 - DNA, 21 bp, Artificial sequence
  SiRNA target sequence
gaacgatctggcaacccagtc

SEQ ID NO: 283316 - DNA, 21 bp, Artificial sequence
  SiRNA target sequence
aacgatctggcaacccagtca

SEQ ID NO: 283317 - DNA, 21 bp, Artificial sequence
  SiRNA target sequence
acgatctggcaacccagtcat

SEQ ID NO: 283318 - DNA, 21 bp, Artificial sequence
  SiRNA target sequence
cgatctggcaacccagtcatt

SEQ ID NO: 283319 - DNA, 21 bp, Artificial sequence
  SiRNA target sequence
gatctggcaacccagtcattt

SEQ ID NO: 283320 - DNA, 21 bp, Artificial sequence
  SiRNA target sequence
atctggcaacccagtcattta

SEQ ID NO: 283321 - DNA, 21 bp, Artificial sequence
  SiRNA target sequence
tctggcaacccagtcatttag

SEQ ID NO: 283322 - DNA, 21 bp, Artificial sequence
  SiRNA target sequence
ctggcaacccagtcatttagc

SEQ ID NO: 283323 - DNA, 21 bp, Artificial sequence
  SiRNA target sequence
tggcaacccagtcatttagct

SEQ ID NO: 283324 - DNA, 21 bp, Artificial sequence
  SiRNA target sequence
ggcaacccagtcatttagctt

SEQ ID NO: 283325 - DNA, 21 bp, Artificial sequence
  SiRNA target sequence
gcaacccagtcatttagctta

SEQ ID NO: 283326 - DNA, 21 bp, Artificial sequence
  SiRNA target sequence
caacccagtcatttagcttat

SEQ ID NO: 283327 - DNA, 21 bp, Artificial sequence
  SiRNA target sequence
aacccagtcatttagcttata

SEQ ID NO: 283328 - DNA, 21 bp, Artificial sequence
  SiRNA target sequence
acccagtcatttagcttatat

SEQ ID NO: 283329 - DNA, 21 bp, Artificial sequence
  SiRNA target sequence
cccagtcatttagcttatatc

SEQ ID NO: 283330 - DNA, 21 bp, Artificial sequence
  SiRNA target sequence
ccagtcatttagcttatatca

SEQ ID NO: 283331 - DNA, 21 bp, Artificial sequence
  SiRNA target sequence
cagtcatttagcttatatcac

SEQ ID NO: 283332 - DNA, 21 bp, Artificial sequence
  SiRNA target sequence
agtcatttagcttatatcact

SEQ ID NO: 283333 - DNA, 21 bp, Artificial sequence
  SiRNA target sequence
gtcatttagcttatatcactt

SEQ ID NO: 283334 - DNA, 21 bp, Artificial sequence
  SiRNA target sequence
tcatttagcttatatcacttc

SEQ ID NO: 283335 - DNA, 21 bp, Artificial sequence
  SiRNA target sequence
catttagcttatatcacttcc

SEQ ID NO: 283336 - DNA, 21 bp, Artificial sequence
  SiRNA target sequence
atttagcttatatcacttcca

SEQ ID NO: 283337 - DNA, 21 bp, Artificial sequence
  SiRNA target sequence
tttagcttatatcacttccat

SEQ ID NO: 283338 - DNA, 21 bp, Artificial sequence
  SiRNA target sequence
ttagcttatatcacttccatg

SEQ ID NO: 283339 - DNA, 21 bp, Artificial sequence
  SiRNA target sequence
tagcttatatcacttccatgt

SEQ ID NO: 283340 - DNA, 21 bp, Artificial sequence
  SiRNA target sequence
agcttatatcacttccatgtt

SEQ ID NO: 283341 - DNA, 21 bp, Artificial sequence
  SiRNA target sequence
gcttatatcacttccatgttc

SEQ ID NO: 283342 - DNA, 21 bp, Artificial sequence
  SiRNA target sequence
cttatatcacttccatgttca

SEQ ID NO: 283343 - DNA, 21 bp, Artificial sequence
  SiRNA target sequence
ttatatcacttccatgttcaa

SEQ ID NO: 283344 - DNA, 21 bp, Artificial sequence
  SiRNA target sequence
tatatcacttccatgttcaag

SEQ ID NO: 283345 - DNA, 21 bp, Artificial sequence
  SiRNA target sequence
atatcacttccatgttcaagt

SEQ ID NO: 283346 - DNA, 21 bp, Artificial sequence
  SiRNA target sequence
tatcacttccatgttcaagta

SEQ ID NO: 283347 - DNA, 21 bp, Artificial sequence
  SiRNA target sequence
atcacttccatgttcaagtat

SEQ ID NO: 283348 - DNA, 21 bp, Artificial sequence
  SiRNA target sequence
tcacttccatgttcaagtatt

SEQ ID NO: 283349 - DNA, 21 bp, Artificial sequence
  SiRNA target sequence
cacttccatgttcaagtattg

SEQ ID NO: 283350 - DNA, 21 bp, Artificial sequence
  SiRNA target sequence
acttccatgttcaagtattgg

SEQ ID NO: 283351 - DNA, 21 bp, Artificial sequence
  SiRNA target sequence
cttccatgttcaagtattgga

SEQ ID NO: 283352 - DNA, 21 bp, Artificial sequence
  SiRNA target sequence
ttccatgttcaagtattggac

SEQ ID NO: 283353 - DNA, 21 bp, Artificial sequence
  SiRNA target sequence
tccatgttcaagtattggacg

SEQ ID NO: 283354 - DNA, 21 bp, Artificial sequence
  SiRNA target sequence
ccatgttcaagtattggacgg

SEQ ID NO: 283355 - DNA, 21 bp, Artificial sequence
  SiRNA target sequence
catgttcaagtattggacggg

SEQ ID NO: 283356 - DNA, 21 bp, Artificial sequence
  SiRNA target sequence
atgttcaagtattggacgggt

SEQ ID NO: 283357 - DNA, 21 bp, Artificial sequence
  SiRNA target sequence
tgttcaagtattggacgggtt

SEQ ID NO: 283358 - DNA, 21 bp, Artificial sequence
  SiRNA target sequence
gttcaagtattggacgggttc

SEQ ID NO: 283359 - DNA, 21 bp, Artificial sequence
  SiRNA target sequence
ttcaagtattggacgggttcg

SEQ ID NO: 283360 - DNA, 21 bp, Artificial sequence
  SiRNA target sequence
tcaagtattggacgggttcgc

SEQ ID NO: 283361 - DNA, 21 bp, Artificial sequence
  SiRNA target sequence
caagtattggacgggttcgct

SEQ ID NO: 283362 - DNA, 21 bp, Artificial sequence
  SiRNA target sequence
aagtattggacgggttcgctc

SEQ ID NO: 283363 - DNA, 21 bp, Artificial sequence
  SiRNA target sequence
agtattggacgggttcgctcg

SEQ ID NO: 283364 - DNA, 21 bp, Artificial sequence
  SiRNA target sequence
gtattggacgggttcgctcgt

SEQ ID NO: 283365 - DNA, 21 bp, Artificial sequence
  SiRNA target sequence
tattggacgggttcgctcgtg

SEQ ID NO: 283366 - DNA, 21 bp, Artificial sequence
  SiRNA target sequence
attggacgggttcgctcgtgt

SEQ ID NO: 283367 - DNA, 21 bp, Artificial sequence
  SiRNA target sequence
ttggacgggttcgctcgtgta

SEQ ID NO: 283368 - DNA, 21 bp, Artificial sequence
  SiRNA target sequence
tggacgggttcgctcgtgtat

SEQ ID NO: 283369 - DNA, 21 bp, Artificial sequence
  SiRNA target sequence
ggacgggttcgctcgtgtata

SEQ ID NO: 283370 - DNA, 21 bp, Artificial sequence
  SiRNA target sequence
gacgggttcgctcgtgtatac

SEQ ID NO: 283371 - DNA, 21 bp, Artificial sequence
  SiRNA target sequence
acgggttcgctcgtgtatact

SEQ ID NO: 283372 - DNA, 21 bp, Artificial sequence
  SiRNA target sequence
cgggttcgctcgtgtatactt

SEQ ID NO: 283373 - DNA, 21 bp, Artificial sequence
  SiRNA target sequence
gggttcgctcgtgtatacttt

SEQ ID NO: 283374 - DNA, 21 bp, Artificial sequence
  SiRNA target sequence
ggttcgctcgtgtatactttc

SEQ ID NO: 283375 - DNA, 21 bp, Artificial sequence
  SiRNA target sequence
gttcgctcgtgtatactttca

SEQ ID NO: 283376 - DNA, 21 bp, Artificial sequence
  SiRNA target sequence
ttcgctcgtgtatactttcaa

SEQ ID NO: 283377 - DNA, 21 bp, Artificial sequence
  SiRNA target sequence
tcgctcgtgtatactttcaaa

SEQ ID NO: 283378 - DNA, 21 bp, Artificial sequence
  SiRNA target sequence
cgctcgtgtatactttcaaat

SEQ ID NO: 283379 - DNA, 21 bp, Artificial sequence
  SiRNA target sequence
gctcgtgtatactttcaaatt

SEQ ID NO: 283380 - DNA, 21 bp, Artificial sequence
  SiRNA target sequence
ctcgtgtatactttcaaattt

SEQ ID NO: 283381 - DNA, 21 bp, Artificial sequence
  SiRNA target sequence
tcgtgtatactttcaaatttg

SEQ ID NO: 283382 - DNA, 21 bp, Artificial sequence
  SiRNA target sequence
cgtgtatactttcaaatttgt

SEQ ID NO: 283383 - DNA, 21 bp, Artificial sequence
  SiRNA target sequence
gtgtatactttcaaatttgtt

SEQ ID NO: 283384 - DNA, 21 bp, Artificial sequence
  SiRNA target sequence
tgtatactttcaaatttgtta

SEQ ID NO: 283385 - DNA, 21 bp, Artificial sequence
  SiRNA target sequence
gtatactttcaaatttgttaa

SEQ ID NO: 283386 - DNA, 21 bp, Artificial sequence
  SiRNA target sequence
tatactttcaaatttgttaaa

SEQ ID NO: 283387 - DNA, 21 bp, Artificial sequence
  SiRNA target sequence
atactttcaaatttgttaaaa

SEQ ID NO: 283388 - DNA, 21 bp, Artificial sequence
  SiRNA target sequence
tactttcaaatttgttaaaac

SEQ ID NO: 283389 - DNA, 21 bp, Artificial sequence
  SiRNA target sequence
actttcaaatttgttaaaaca

SEQ ID NO: 283390 - DNA, 21 bp, Artificial sequence
  SiRNA target sequence
ctttcaaatttgttaaaacag

SEQ ID NO: 283391 - DNA, 21 bp, Artificial sequence
  SiRNA target sequence
tttcaaatttgttaaaacaga

SEQ ID NO: 283392 - DNA, 21 bp, Artificial sequence
  SiRNA target sequence
ttcaaatttgttaaaacagac

SEQ ID NO: 283393 - DNA, 21 bp, Artificial sequence
  SiRNA target sequence
tcaaatttgttaaaacagact

SEQ ID NO: 283394 - DNA, 21 bp, Artificial sequence
  SiRNA target sequence
caaatttgttaaaacagacta

SEQ ID NO: 283395 - DNA, 21 bp, Artificial sequence
  SiRNA target sequence
aaatttgttaaaacagactac

SEQ ID NO: 283396 - DNA, 21 bp, Artificial sequence
  SiRNA target sequence
aatttgttaaaacagactacc

SEQ ID NO: 283397 - DNA, 21 bp, Artificial sequence
  SiRNA target sequence
atttgttaaaacagactacca

SEQ ID NO: 283398 - DNA, 21 bp, Artificial sequence
  SiRNA target sequence
tttgttaaaacagactaccat

SEQ ID NO: 283399 - DNA, 21 bp, Artificial sequence
  SiRNA target sequence
ttgttaaaacagactaccatt

SEQ ID NO: 283400 - DNA, 21 bp, Artificial sequence
  SiRNA target sequence
tgttaaaacagactaccattc

SEQ ID NO: 283401 - DNA, 21 bp, Artificial sequence
  SiRNA target sequence
gttaaaacagactaccattct

SEQ ID NO: 283402 - DNA, 21 bp, Artificial sequence
  SiRNA target sequence
ttaaaacagactaccattctg

SEQ ID NO: 283403 - DNA, 21 bp, Artificial sequence
  SiRNA target sequence
taaaacagactaccattctgg

SEQ ID NO: 283404 - DNA, 21 bp, Artificial sequence
  SiRNA target sequence
aaaacagactaccattctggt

SEQ ID NO: 283405 - DNA, 21 bp, Artificial sequence
  SiRNA target sequence
aaacagactaccattctggta

SEQ ID NO: 283406 - DNA, 21 bp, Artificial sequence
  SiRNA target sequence
aacagactaccattctggtag

SEQ ID NO: 283407 - DNA, 21 bp, Artificial sequence
  SiRNA target sequence
acagactaccattctggtagg

SEQ ID NO: 283408 - DNA, 21 bp, Artificial sequence
  SiRNA target sequence
cagactaccattctggtaggg

SEQ ID NO: 283409 - DNA, 21 bp, Artificial sequence
  SiRNA target sequence
agactaccattctggtagggt

SEQ ID NO: 283410 - DNA, 21 bp, Artificial sequence
  SiRNA target sequence
gactaccattctggtagggtg

SEQ ID NO: 283411 - DNA, 21 bp, Artificial sequence
  SiRNA target sequence
actaccattctggtagggtgg

SEQ ID NO: 283412 - DNA, 21 bp, Artificial sequence
  SiRNA target sequence
ctaccattctggtagggtgga

SEQ ID NO: 283413 - DNA, 21 bp, Artificial sequence
  SiRNA target sequence
taccattctggtagggtggaa

SEQ ID NO: 283414 - DNA, 21 bp, Artificial sequence
  SiRNA target sequence
accattctggtagggtggaaa

SEQ ID NO: 283415 - DNA, 21 bp, Artificial sequence
  SiRNA target sequence
ccattctggtagggtggaaat

SEQ ID NO: 283416 - DNA, 21 bp, Artificial sequence
  SiRNA target sequence
cattctggtagggtggaaatt

SEQ ID NO: 283417 - DNA, 21 bp, Artificial sequence
  SiRNA target sequence
attctggtagggtggaaattt

SEQ ID NO: 283418 - DNA, 21 bp, Artificial sequence
  SiRNA target sequence
ttctggtagggtggaaatttc

SEQ ID NO: 283419 - DNA, 21 bp, Artificial sequence
  SiRNA target sequence
tctggtagggtggaaatttct

SEQ ID NO: 283420 - DNA, 21 bp, Artificial sequence
  SiRNA target sequence
ctggtagggtggaaatttctt

SEQ ID NO: 283421 - DNA, 21 bp, Artificial sequence
  SiRNA target sequence
tggtagggtggaaatttcttt

SEQ ID NO: 283422 - DNA, 21 bp, Artificial sequence
  SiRNA target sequence
ggtagggtggaaatttctttc

SEQ ID NO: 283423 - DNA, 21 bp, Artificial sequence
  SiRNA target sequence
gtagggtggaaatttctttcc

SEQ ID NO: 283424 - DNA, 21 bp, Artificial sequence
  SiRNA target sequence
tagggtggaaatttctttcca

SEQ ID NO: 283425 - DNA, 21 bp, Artificial sequence
  SiRNA target sequence
agggtggaaatttctttccac

SEQ ID NO: 283426 - DNA, 21 bp, Artificial sequence
  SiRNA target sequence
gggtggaaatttctttccacc

SEQ ID NO: 283427 - DNA, 21 bp, Artificial sequence
  SiRNA target sequence
ggtggaaatttctttccaccc

SEQ ID NO: 283428 - DNA, 21 bp, Artificial sequence
  SiRNA target sequence
gtggaaatttctttccaccct

SEQ ID NO: 283429 - DNA, 21 bp, Artificial sequence
  SiRNA target sequence
tggaaatttctttccaccctt

SEQ ID NO: 283430 - DNA, 21 bp, Artificial sequence
  SiRNA target sequence
ggaaatttctttccacccttt

SEQ ID NO: 283431 - DNA, 21 bp, Artificial sequence
  SiRNA target sequence
gaaatttctttccaccctttt

SEQ ID NO: 283432 - DNA, 21 bp, Artificial sequence
  SiRNA target sequence
aaatttctttccacccttttt

SEQ ID NO: 283433 - DNA, 21 bp, Artificial sequence
  SiRNA target sequence
aatttctttccaccctttttc

SEQ ID NO: 283434 - DNA, 21 bp, Artificial sequence
  SiRNA target sequence
atttctttccaccctttttct

SEQ ID NO: 283435 - DNA, 21 bp, Artificial sequence
  SiRNA target sequence
tttctttccaccctttttctg

SEQ ID NO: 283436 - DNA, 21 bp, Artificial sequence
  SiRNA target sequence
ttctttccaccctttttctga

SEQ ID NO: 283437 - DNA, 21 bp, Artificial sequence
  SiRNA target sequence
tctttccaccctttttctgat

SEQ ID NO: 283438 - DNA, 21 bp, Artificial sequence
  SiRNA target sequence
ctttccaccctttttctgatt

SEQ ID NO: 283439 - DNA, 21 bp, Artificial sequence
  SiRNA target sequence
tttccaccctttttctgatta

SEQ ID NO: 283440 - DNA, 21 bp, Artificial sequence
  SiRNA target sequence
ttccaccctttttctgattat

SEQ ID NO: 283441 - DNA, 21 bp, Artificial sequence
  SiRNA target sequence
tccaccctttttctgattata

SEQ ID NO: 283442 - DNA, 21 bp, Artificial sequence
  SiRNA target sequence
ccaccctttttctgattatac

SEQ ID NO: 283443 - DNA, 21 bp, Artificial sequence
  SiRNA target sequence
caccctttttctgattatacc

SEQ ID NO: 283444 - DNA, 21 bp, Artificial sequence
  SiRNA target sequence
accctttttctgattataccg

SEQ ID NO: 283445 - DNA, 21 bp, Artificial sequence
  SiRNA target sequence
ccctttttctgattataccgc

SEQ ID NO: 283446 - DNA, 21 bp, Artificial sequence
  SiRNA target sequence
cctttttctgattataccgct

SEQ ID NO: 283447 - DNA, 21 bp, Artificial sequence
  SiRNA target sequence
ctttttctgattataccgctg

SEQ ID NO: 283448 - DNA, 21 bp, Artificial sequence
  SiRNA target sequence
tttttctgattataccgctgg

SEQ ID NO: 283449 - DNA, 21 bp, Artificial sequence
  SiRNA target sequence
ttttctgattataccgctggt

SEQ ID NO: 283450 - DNA, 21 bp, Artificial sequence
  SiRNA target sequence
tttctgattataccgctggta

SEQ ID NO: 283451 - DNA, 21 bp, Artificial sequence
  SiRNA target sequence
ttctgattataccgctggtac

SEQ ID NO: 283452 - DNA, 21 bp, Artificial sequence
  SiRNA target sequence
tctgattataccgctggtacc

SEQ ID NO: 283453 - DNA, 21 bp, Artificial sequence
  SiRNA target sequence
ctgattataccgctggtacct

SEQ ID NO: 283454 - DNA, 21 bp, Artificial sequence
  SiRNA target sequence
tgattataccgctggtaccta

SEQ ID NO: 283455 - DNA, 21 bp, Artificial sequence
  SiRNA target sequence
gattataccgctggtacctat

SEQ ID NO: 283456 - DNA, 21 bp, Artificial sequence
  SiRNA target sequence
attataccgctggtacctatt

SEQ ID NO: 283457 - DNA, 21 bp, Artificial sequence
  SiRNA target sequence
ttataccgctggtacctattc

SEQ ID NO: 283458 - DNA, 21 bp, Artificial sequence
  SiRNA target sequence
tataccgctggtacctattcg

SEQ ID NO: 283459 - DNA, 21 bp, Artificial sequence
  SiRNA target sequence
ataccgctggtacctattcgg

SEQ ID NO: 283460 - DNA, 21 bp, Artificial sequence
  SiRNA target sequence
taccgctggtacctattcgga

SEQ ID NO: 283461 - DNA, 21 bp, Artificial sequence
  SiRNA target sequence
accgctggtacctattcggat

SEQ ID NO: 283462 - DNA, 21 bp, Artificial sequence
  SiRNA target sequence
ccgctggtacctattcggatt

SEQ ID NO: 283463 - DNA, 21 bp, Artificial sequence
  SiRNA target sequence
cgctggtacctattcggatta

SEQ ID NO: 283464 - DNA, 21 bp, Artificial sequence
  SiRNA target sequence
gctggtacctattcggattat

SEQ ID NO: 283465 - DNA, 21 bp, Artificial sequence
  SiRNA target sequence
ctggtacctattcggattata

SEQ ID NO: 283466 - DNA, 21 bp, Artificial sequence
  SiRNA target sequence
tggtacctattcggattatac

SEQ ID NO: 283467 - DNA, 21 bp, Artificial sequence
  SiRNA target sequence
ggtacctattcggattatact

SEQ ID NO: 283468 - DNA, 21 bp, Artificial sequence
  SiRNA target sequence
gtacctattcggattatactt

SEQ ID NO: 283469 - DNA, 21 bp, Artificial sequence
  SiRNA target sequence
tacctattcggattatactta

SEQ ID NO: 283470 - DNA, 21 bp, Artificial sequence
  SiRNA target sequence
acctattcggattatacttat

SEQ ID NO: 283471 - DNA, 21 bp, Artificial sequence
  SiRNA target sequence
cctattcggattatacttata

SEQ ID NO: 283472 - DNA, 21 bp, Artificial sequence
  SiRNA target sequence
ctattcggattatacttatag

SEQ ID NO: 283473 - DNA, 21 bp, Artificial sequence
  SiRNA target sequence
tattcggattatacttatagg

SEQ ID NO: 283474 - DNA, 21 bp, Artificial sequence
  SiRNA target sequence
attcggattatacttatagga

SEQ ID NO: 283475 - DNA, 21 bp, Artificial sequence
  SiRNA target sequence
ttcggattatacttataggat

SEQ ID NO: 283476 - DNA, 21 bp, Artificial sequence
  SiRNA target sequence
tcggattatacttataggatc

SEQ ID NO: 283477 - DNA, 21 bp, Artificial sequence
  SiRNA target sequence
cggattatacttataggatca

SEQ ID NO: 283478 - DNA, 21 bp, Artificial sequence
  SiRNA target sequence
ggattatacttataggatcat

SEQ ID NO: 283479 - DNA, 21 bp, Artificial sequence
  SiRNA target sequence
gattatacttataggatcata

SEQ ID NO: 283480 - DNA, 21 bp, Artificial sequence
  SiRNA target sequence
attatacttataggatcatag

SEQ ID NO: 283481 - DNA, 21 bp, Artificial sequence
  SiRNA target sequence
ttatacttataggatcatagt

SEQ ID NO: 283482 - DNA, 21 bp, Artificial sequence
  SiRNA target sequence
tatacttataggatcatagtg

SEQ ID NO: 283483 - DNA, 21 bp, Artificial sequence
  SiRNA target sequence
atacttataggatcatagtgg

SEQ ID NO: 283484 - DNA, 21 bp, Artificial sequence
  SiRNA target sequence
tacttataggatcatagtgga

SEQ ID NO: 283485 - DNA, 21 bp, Artificial sequence
  SiRNA target sequence
acttataggatcatagtggat

SEQ ID NO: 283486 - DNA, 21 bp, Artificial sequence
  SiRNA target sequence
cttataggatcatagtggatt

SEQ ID NO: 283487 - DNA, 21 bp, Artificial sequence
  SiRNA target sequence
ttataggatcatagtggattt

SEQ ID NO: 283488 - DNA, 21 bp, Artificial sequence
  SiRNA target sequence
tataggatcatagtggatttg

SEQ ID NO: 283489 - DNA, 21 bp, Artificial sequence
  SiRNA target sequence
ataggatcatagtggatttga

SEQ ID NO: 283490 - DNA, 21 bp, Artificial sequence
  SiRNA target sequence
taggatcatagtggatttgag

SEQ ID NO: 283491 - DNA, 21 bp, Artificial sequence
  SiRNA target sequence
aggatcatagtggatttgagg

SEQ ID NO: 283492 - DNA, 21 bp, Artificial sequence
  SiRNA target sequence
ggatcatagtggatttgaggg

SEQ ID NO: 283493 - DNA, 21 bp, Artificial sequence
  SiRNA target sequence
gatcatagtggatttgaggga

SEQ ID NO: 283494 - DNA, 21 bp, Artificial sequence
  SiRNA target sequence
atcatagtggatttgagggaa

SEQ ID NO: 283495 - DNA, 21 bp, Artificial sequence
  SiRNA target sequence
tcatagtggatttgagggaaa

SEQ ID NO: 283496 - DNA, 21 bp, Artificial sequence
  SiRNA target sequence
catagtggatttgagggaaaa

SEQ ID NO: 283497 - DNA, 21 bp, Artificial sequence
  SiRNA target sequence
atagtggatttgagggaaaag

SEQ ID NO: 283498 - DNA, 21 bp, Artificial sequence
  SiRNA target sequence
tagtggatttgagggaaaagt

SEQ ID NO: 283499 - DNA, 21 bp, Artificial sequence
  SiRNA target sequence
agtggatttgagggaaaagtc

SEQ ID NO: 283500 - DNA, 21 bp, Artificial sequence
  SiRNA target sequence
gtggatttgagggaaaagtct

SEQ ID NO: 283501 - DNA, 21 bp, Artificial sequence
  SiRNA target sequence
tggatttgagggaaaagtctg

SEQ ID NO: 283502 - DNA, 21 bp, Artificial sequence
  SiRNA target sequence
ggatttgagggaaaagtctga

SEQ ID NO: 283503 - DNA, 21 bp, Artificial sequence
  SiRNA target sequence
gatttgagggaaaagtctgag

SEQ ID NO: 283504 - DNA, 21 bp, Artificial sequence
  SiRNA target sequence
atttgagggaaaagtctgagt

SEQ ID NO: 283505 - DNA, 21 bp, Artificial sequence
  SiRNA target sequence
tttgagggaaaagtctgagtt

SEQ ID NO: 283506 - DNA, 21 bp, Artificial sequence
  SiRNA target sequence
ttgagggaaaagtctgagttt

SEQ ID NO: 283507 - DNA, 21 bp, Artificial sequence
  SiRNA target sequence
tgagggaaaagtctgagtttt

SEQ ID NO: 283508 - DNA, 21 bp, Artificial sequence
  SiRNA target sequence
gagggaaaagtctgagttttc

SEQ ID NO: 283509 - DNA, 21 bp, Artificial sequence
  SiRNA target sequence
agggaaaagtctgagttttcg

SEQ ID NO: 283510 - DNA, 21 bp, Artificial sequence
  SiRNA target sequence
gggaaaagtctgagttttcgg

SEQ ID NO: 283511 - DNA, 21 bp, Artificial sequence
  SiRNA target sequence
ggaaaagtctgagttttcggt

SEQ ID NO: 283512 - DNA, 21 bp, Artificial sequence
  SiRNA target sequence
gaaaagtctgagttttcggtc

SEQ ID NO: 283513 - DNA, 21 bp, Artificial sequence
  SiRNA target sequence
aaaagtctgagttttcggtca

SEQ ID NO: 283514 - DNA, 21 bp, Artificial sequence
  SiRNA target sequence
aaagtctgagttttcggtcac

SEQ ID NO: 283515 - DNA, 21 bp, Artificial sequence
  SiRNA target sequence
aagtctgagttttcggtcaca

SEQ ID NO: 283516 - DNA, 21 bp, Artificial sequence
  SiRNA target sequence
agtctgagttttcggtcacaa

SEQ ID NO: 283517 - DNA, 21 bp, Artificial sequence
  SiRNA target sequence
gtctgagttttcggtcacaat

SEQ ID NO: 283518 - DNA, 21 bp, Artificial sequence
  SiRNA target sequence
tctgagttttcggtcacaata

SEQ ID NO: 283519 - DNA, 21 bp, Artificial sequence
  SiRNA target sequence
ctgagttttcggtcacaatac

SEQ ID NO: 283520 - DNA, 21 bp, Artificial sequence
  SiRNA target sequence
tgagttttcggtcacaatacc

SEQ ID NO: 283521 - DNA, 21 bp, Artificial sequence
  SiRNA target sequence
gagttttcggtcacaatacct

SEQ ID NO: 283522 - DNA, 21 bp, Artificial sequence
  SiRNA target sequence
agttttcggtcacaatacctt

SEQ ID NO: 283523 - DNA, 21 bp, Artificial sequence
  SiRNA target sequence
gttttcggtcacaataccttt

SEQ ID NO: 283524 - DNA, 21 bp, Artificial sequence
  SiRNA target sequence
ttttcggtcacaatacctttc

SEQ ID NO: 283525 - DNA, 21 bp, Artificial sequence
  SiRNA target sequence
tttcggtcacaatacctttca

SEQ ID NO: 283526 - DNA, 21 bp, Artificial sequence
  SiRNA target sequence
ttcggtcacaatacctttcat

SEQ ID NO: 283527 - DNA, 21 bp, Artificial sequence
  SiRNA target sequence
tcggtcacaatacctttcatt

SEQ ID NO: 283528 - DNA, 21 bp, Artificial sequence
  SiRNA target sequence
cggtcacaatacctttcattt

SEQ ID NO: 283529 - DNA, 21 bp, Artificial sequence
  SiRNA target sequence
ggtcacaatacctttcatttc

SEQ ID NO: 283530 - DNA, 21 bp, Artificial sequence
  SiRNA target sequence
gtcacaatacctttcatttct

SEQ ID NO: 283531 - DNA, 21 bp, Artificial sequence
  SiRNA target sequence
tcacaatacctttcatttctc

SEQ ID NO: 283532 - DNA, 21 bp, Artificial sequence
  SiRNA target sequence
cacaatacctttcatttctcc

SEQ ID NO: 283533 - DNA, 21 bp, Artificial sequence
  SiRNA target sequence
acaatacctttcatttctcca

SEQ ID NO: 283534 - DNA, 21 bp, Artificial sequence
  SiRNA target sequence
caatacctttcatttctccag

SEQ ID NO: 283535 - DNA, 21 bp, Artificial sequence
  SiRNA target sequence
aatacctttcatttctccagt

SEQ ID NO: 283536 - DNA, 21 bp, Artificial sequence
  SiRNA target sequence
atacctttcatttctccagtt

SEQ ID NO: 283537 - DNA, 21 bp, Artificial sequence
  SiRNA target sequence
tacctttcatttctccagttc

SEQ ID NO: 283538 - DNA, 21 bp, Artificial sequence
  SiRNA target sequence
acctttcatttctccagttcc

SEQ ID NO: 283539 - DNA, 21 bp, Artificial sequence
  SiRNA target sequence
cctttcatttctccagttcca

SEQ ID NO: 283540 - DNA, 21 bp, Artificial sequence
  SiRNA target sequence
ctttcatttctccagttccat

SEQ ID NO: 283541 - DNA, 21 bp, Artificial sequence
  SiRNA target sequence
tttcatttctccagttccata

SEQ ID NO: 283542 - DNA, 21 bp, Artificial sequence
  SiRNA target sequence
ttcatttctccagttccatat

SEQ ID NO: 283543 - DNA, 21 bp, Artificial sequence
  SiRNA target sequence
tcatttctccagttccatata

SEQ ID NO: 283544 - DNA, 21 bp, Artificial sequence
  SiRNA target sequence
catttctccagttccatataa

SEQ ID NO: 283545 - DNA, 21 bp, Artificial sequence
  SiRNA target sequence
atttctccagttccatataaa

SEQ ID NO: 283546 - DNA, 21 bp, Artificial sequence
  SiRNA target sequence
tttctccagttccatataaac

SEQ ID NO: 283547 - DNA, 21 bp, Artificial sequence
  SiRNA target sequence
ttctccagttccatataaacg

SEQ ID NO: 283548 - DNA, 21 bp, Artificial sequence
  SiRNA target sequence
tctccagttccatataaacgc

SEQ ID NO: 283549 - DNA, 21 bp, Artificial sequence
  SiRNA target sequence
ctccagttccatataaacgca

SEQ ID NO: 283550 - DNA, 21 bp, Artificial sequence
  SiRNA target sequence
tccagttccatataaacgcat

SEQ ID NO: 283551 - DNA, 21 bp, Artificial sequence
  SiRNA target sequence
ccagttccatataaacgcata

SEQ ID NO: 283552 - DNA, 21 bp, Artificial sequence
  SiRNA target sequence
cagttccatataaacgcatat

SEQ ID NO: 283553 - DNA, 21 bp, Artificial sequence
  SiRNA target sequence
agttccatataaacgcatatc

SEQ ID NO: 283554 - DNA, 21 bp, Artificial sequence
  SiRNA target sequence
gttccatataaacgcatatct

SEQ ID NO: 283555 - DNA, 21 bp, Artificial sequence
  SiRNA target sequence
ttccatataaacgcatatcta

SEQ ID NO: 283556 - DNA, 21 bp, Artificial sequence
  SiRNA target sequence
tccatataaacgcatatctaa

SEQ ID NO: 283557 - DNA, 21 bp, Artificial sequence
  SiRNA target sequence
ccatataaacgcatatctaag

SEQ ID NO: 283558 - DNA, 21 bp, Artificial sequence
  SiRNA target sequence
catataaacgcatatctaagc

SEQ ID NO: 283559 - DNA, 21 bp, Artificial sequence
  SiRNA target sequence
atataaacgcatatctaagcc

SEQ ID NO: 283560 - DNA, 21 bp, Artificial sequence
  SiRNA target sequence
tataaacgcatatctaagcca

SEQ ID NO: 283561 - DNA, 21 bp, Artificial sequence
  SiRNA target sequence
ataaacgcatatctaagccag

SEQ ID NO: 283562 - DNA, 21 bp, Artificial sequence
  SiRNA target sequence
taaacgcatatctaagccaga

SEQ ID NO: 283563 - DNA, 21 bp, Artificial sequence
  SiRNA target sequence
aaacgcatatctaagccagat

SEQ ID NO: 283564 - DNA, 21 bp, Artificial sequence
  SiRNA target sequence
aacgcatatctaagccagatt

SEQ ID NO: 283565 - DNA, 21 bp, Artificial sequence
  SiRNA target sequence
acgcatatctaagccagattg

SEQ ID NO: 283566 - DNA, 21 bp, Artificial sequence
  SiRNA target sequence
cgcatatctaagccagattgg

SEQ ID NO: 283567 - DNA, 21 bp, Artificial sequence
  SiRNA target sequence
gcatatctaagccagattggg

SEQ ID NO: 283568 - DNA, 21 bp, Artificial sequence
  SiRNA target sequence
catatctaagccagattggga

SEQ ID NO: 283569 - DNA, 21 bp, Artificial sequence
  SiRNA target sequence
atatctaagccagattgggat

SEQ ID NO: 283570 - DNA, 21 bp, Artificial sequence
  SiRNA target sequence
tatctaagccagattgggata

SEQ ID NO: 283571 - DNA, 21 bp, Artificial sequence
  SiRNA target sequence
atctaagccagattgggataa

SEQ ID NO: 283572 - DNA, 21 bp, Artificial sequence
  SiRNA target sequence
tctaagccagattgggataag

SEQ ID NO: 283573 - DNA, 21 bp, Artificial sequence
  SiRNA target sequence
ctaagccagattgggataagc

SEQ ID NO: 283574 - DNA, 21 bp, Artificial sequence
  SiRNA target sequence
taagccagattgggataagcc

SEQ ID NO: 283575 - DNA, 21 bp, Artificial sequence
  SiRNA target sequence
aagccagattgggataagccc

SEQ ID NO: 283576 - DNA, 21 bp, Artificial sequence
  SiRNA target sequence
agccagattgggataagccct

SEQ ID NO: 283577 - DNA, 21 bp, Artificial sequence
  SiRNA target sequence
gccagattgggataagcccta

SEQ ID NO: 283578 - DNA, 21 bp, Artificial sequence
  SiRNA target sequence
ccagattgggataagccctat

SEQ ID NO: 283579 - DNA, 21 bp, Artificial sequence
  SiRNA target sequence
cagattgggataagccctatt

SEQ ID NO: 283580 - DNA, 21 bp, Artificial sequence
  SiRNA target sequence
agattgggataagccctattc

SEQ ID NO: 283581 - DNA, 21 bp, Artificial sequence
  SiRNA target sequence
gattgggataagccctattcc

SEQ ID NO: 283582 - DNA, 21 bp, Artificial sequence
  SiRNA target sequence
attgggataagccctattcca

SEQ ID NO: 283583 - DNA, 21 bp, Artificial sequence
  SiRNA target sequence
ttgggataagccctattccaa

SEQ ID NO: 283584 - DNA, 21 bp, Artificial sequence
  SiRNA target sequence
tgggataagccctattccaaa

SEQ ID NO: 283585 - DNA, 21 bp, Artificial sequence
  SiRNA target sequence
gggataagccctattccaaat

SEQ ID NO: 283586 - DNA, 21 bp, Artificial sequence
  SiRNA target sequence
ggataagccctattccaaatt

SEQ ID NO: 283587 - DNA, 21 bp, Artificial sequence
  SiRNA target sequence
gataagccctattccaaattt

SEQ ID NO: 283588 - DNA, 21 bp, Artificial sequence
  SiRNA target sequence
ataagccctattccaaatttg

SEQ ID NO: 283589 - DNA, 21 bp, Artificial sequence
  SiRNA target sequence
taagccctattccaaatttgc

SEQ ID NO: 283590 - DNA, 21 bp, Artificial sequence
  SiRNA target sequence
aagccctattccaaatttgct

SEQ ID NO: 283591 - DNA, 21 bp, Artificial sequence
  SiRNA target sequence
agccctattccaaatttgctc

SEQ ID NO: 283592 - DNA, 21 bp, Artificial sequence
  SiRNA target sequence
gccctattccaaatttgctca

SEQ ID NO: 283593 - DNA, 21 bp, Artificial sequence
  SiRNA target sequence
ccctattccaaatttgctcat

SEQ ID NO: 283594 - DNA, 21 bp, Artificial sequence
  SiRNA target sequence
cctattccaaatttgctcatg

SEQ ID NO: 283595 - DNA, 21 bp, Artificial sequence
  SiRNA target sequence
ctattccaaatttgctcatgc

SEQ ID NO: 283596 - DNA, 21 bp, Artificial sequence
  SiRNA target sequence
tattccaaatttgctcatgct

SEQ ID NO: 283597 - DNA, 21 bp, Artificial sequence
  SiRNA target sequence
attccaaatttgctcatgcta

SEQ ID NO: 283598 - DNA, 21 bp, Artificial sequence
  SiRNA target sequence
ttccaaatttgctcatgctag

SEQ ID NO: 283599 - DNA, 21 bp, Artificial sequence
  SiRNA target sequence
tccaaatttgctcatgctagt

SEQ ID NO: 283600 - DNA, 21 bp, Artificial sequence
  SiRNA target sequence
ccaaatttgctcatgctagta

SEQ ID NO: 283601 - DNA, 21 bp, Artificial sequence
  SiRNA target sequence
caaatttgctcatgctagtac

SEQ ID NO: 283602 - DNA, 21 bp, Artificial sequence
  SiRNA target sequence
aaatttgctcatgctagtacg

SEQ ID NO: 283603 - DNA, 21 bp, Artificial sequence
  SiRNA target sequence
aatttgctcatgctagtacgg

SEQ ID NO: 283604 - DNA, 21 bp, Artificial sequence
  SiRNA target sequence
atttgctcatgctagtacggg

SEQ ID NO: 283605 - DNA, 21 bp, Artificial sequence
  SiRNA target sequence
tttgctcatgctagtacgggt

SEQ ID NO: 283606 - DNA, 21 bp, Artificial sequence
  SiRNA target sequence
ttgctcatgctagtacgggta

SEQ ID NO: 283607 - DNA, 21 bp, Artificial sequence
  SiRNA target sequence
tgctcatgctagtacgggtac

SEQ ID NO: 283608 - DNA, 21 bp, Artificial sequence
  SiRNA target sequence
gctcatgctagtacgggtact

SEQ ID NO: 283609 - DNA, 21 bp, Artificial sequence
  SiRNA target sequence
ctcatgctagtacgggtactc

SEQ ID NO: 283610 - DNA, 21 bp, Artificial sequence
  SiRNA target sequence
tcatgctagtacgggtactct

SEQ ID NO: 283611 - DNA, 21 bp, Artificial sequence
  SiRNA target sequence
catgctagtacgggtactcta

SEQ ID NO: 283612 - DNA, 21 bp, Artificial sequence
  SiRNA target sequence
atgctagtacgggtactctag

SEQ ID NO: 283613 - DNA, 21 bp, Artificial sequence
  SiRNA target sequence
tgctagtacgggtactctagt

SEQ ID NO: 283614 - DNA, 21 bp, Artificial sequence
  SiRNA target sequence
gctagtacgggtactctagtc

SEQ ID NO: 283615 - DNA, 21 bp, Artificial sequence
  SiRNA target sequence
ctagtacgggtactctagtct

SEQ ID NO: 283616 - DNA, 21 bp, Artificial sequence
  SiRNA target sequence
tagtacgggtactctagtctt

SEQ ID NO: 283617 - DNA, 21 bp, Artificial sequence
  SiRNA target sequence
agtacgggtactctagtcttg

SEQ ID NO: 283618 - DNA, 21 bp, Artificial sequence
  SiRNA target sequence
gtacgggtactctagtcttga

SEQ ID NO: 283619 - DNA, 21 bp, Artificial sequence
  SiRNA target sequence
tacgggtactctagtcttgaa

SEQ ID NO: 283620 - DNA, 21 bp, Artificial sequence
  SiRNA target sequence
acgggtactctagtcttgaag

SEQ ID NO: 283621 - DNA, 21 bp, Artificial sequence
  SiRNA target sequence
cgggtactctagtcttgaagg

SEQ ID NO: 283622 - DNA, 21 bp, Artificial sequence
  SiRNA target sequence
gggtactctagtcttgaaggc

SEQ ID NO: 283623 - DNA, 21 bp, Artificial sequence
  SiRNA target sequence
ggtactctagtcttgaaggcg

SEQ ID NO: 283624 - DNA, 21 bp, Artificial sequence
  SiRNA target sequence
gtactctagtcttgaaggcgt

SEQ ID NO: 283625 - DNA, 21 bp, Artificial sequence
  SiRNA target sequence
tactctagtcttgaaggcgtt

SEQ ID NO: 283626 - DNA, 21 bp, Artificial sequence
  SiRNA target sequence
actctagtcttgaaggcgttg

SEQ ID NO: 283627 - DNA, 21 bp, Artificial sequence
  SiRNA target sequence
ctctagtcttgaaggcgttga

SEQ ID NO: 283628 - DNA, 21 bp, Artificial sequence
  SiRNA target sequence
tctagtcttgaaggcgttgac

SEQ ID NO: 283629 - DNA, 21 bp, Artificial sequence
  SiRNA target sequence
ctagtcttgaaggcgttgaca

SEQ ID NO: 283630 - DNA, 21 bp, Artificial sequence
  SiRNA target sequence
tagtcttgaaggcgttgacat

SEQ ID NO: 283631 - DNA, 21 bp, Artificial sequence
  SiRNA target sequence
agtcttgaaggcgttgacatc

SEQ ID NO: 283632 - DNA, 21 bp, Artificial sequence
  SiRNA target sequence
gtcttgaaggcgttgacatcg

SEQ ID NO: 283633 - DNA, 21 bp, Artificial sequence
  SiRNA target sequence
tcttgaaggcgttgacatcgt

SEQ ID NO: 283634 - DNA, 21 bp, Artificial sequence
  SiRNA target sequence
cttgaaggcgttgacatcgtt

SEQ ID NO: 283635 - DNA, 21 bp, Artificial sequence
  SiRNA target sequence
ttgaaggcgttgacatcgtta

SEQ ID NO: 283636 - DNA, 21 bp, Artificial sequence
  SiRNA target sequence
tgaaggcgttgacatcgttaa

SEQ ID NO: 283637 - DNA, 21 bp, Artificial sequence
  SiRNA target sequence
gaaggcgttgacatcgttaaa

SEQ ID NO: 283638 - DNA, 21 bp, Artificial sequence
  SiRNA target sequence
aaggcgttgacatcgttaaaa

SEQ ID NO: 283639 - DNA, 21 bp, Artificial sequence
  SiRNA target sequence
aggcgttgacatcgttaaaag

SEQ ID NO: 283640 - DNA, 21 bp, Artificial sequence
  SiRNA target sequence
ggcgttgacatcgttaaaagc

SEQ ID NO: 283641 - DNA, 21 bp, Artificial sequence
  SiRNA target sequence
gcgttgacatcgttaaaagca

SEQ ID NO: 283642 - DNA, 21 bp, Artificial sequence
  SiRNA target sequence
cgttgacatcgttaaaagcaa

SEQ ID NO: 283643 - DNA, 21 bp, Artificial sequence
  SiRNA target sequence
gttgacatcgttaaaagcaac

SEQ ID NO: 283644 - DNA, 21 bp, Artificial sequence
  SiRNA target sequence
ttgacatcgttaaaagcaact

SEQ ID NO: 283645 - DNA, 21 bp, Artificial sequence
  SiRNA target sequence
tgacatcgttaaaagcaacta

SEQ ID NO: 283646 - DNA, 21 bp, Artificial sequence
  SiRNA target sequence
gacatcgttaaaagcaactaa

SEQ ID NO: 283647 - DNA, 21 bp, Artificial sequence
  SiRNA target sequence
acatcgttaaaagcaactaat

SEQ ID NO: 283648 - DNA, 21 bp, Artificial sequence
  SiRNA target sequence
catcgttaaaagcaactaata

SEQ ID NO: 283649 - DNA, 21 bp, Artificial sequence
  SiRNA target sequence
atcgttaaaagcaactaatac

SEQ ID NO: 283650 - DNA, 21 bp, Artificial sequence
  SiRNA target sequence
tcgttaaaagcaactaatacc

SEQ ID NO: 283651 - DNA, 21 bp, Artificial sequence
  SiRNA target sequence
cgttaaaagcaactaataccg

SEQ ID NO: 283652 - DNA, 21 bp, Artificial sequence
  SiRNA target sequence
gttaaaagcaactaataccgt

SEQ ID NO: 283653 - DNA, 21 bp, Artificial sequence
  SiRNA target sequence
ttaaaagcaactaataccgtg

SEQ ID NO: 283654 - DNA, 21 bp, Artificial sequence
  SiRNA target sequence
taaaagcaactaataccgtgg

SEQ ID NO: 283655 - DNA, 21 bp, Artificial sequence
  SiRNA target sequence
aaaagcaactaataccgtggt

SEQ ID NO: 283656 - DNA, 21 bp, Artificial sequence
  SiRNA target sequence
aaagcaactaataccgtggtt

SEQ ID NO: 283657 - DNA, 21 bp, Artificial sequence
  SiRNA target sequence
aagcaactaataccgtggttt

SEQ ID NO: 283658 - DNA, 21 bp, Artificial sequence
  SiRNA target sequence
agcaactaataccgtggtttc

SEQ ID NO: 283659 - DNA, 21 bp, Artificial sequence
  SiRNA target sequence
gcaactaataccgtggtttcc

SEQ ID NO: 283660 - DNA, 21 bp, Artificial sequence
  SiRNA target sequence
caactaataccgtggtttcca

SEQ ID NO: 283661 - DNA, 21 bp, Artificial sequence
  SiRNA target sequence
aactaataccgtggtttccaa

SEQ ID NO: 283662 - DNA, 21 bp, Artificial sequence
  SiRNA target sequence
actaataccgtggtttccaat

SEQ ID NO: 283663 - DNA, 21 bp, Artificial sequence
  SiRNA target sequence
ctaataccgtggtttccaatt

SEQ ID NO: 283664 - DNA, 21 bp, Artificial sequence
  SiRNA target sequence
taataccgtggtttccaattc

SEQ ID NO: 283665 - DNA, 21 bp, Artificial sequence
  SiRNA target sequence
aataccgtggtttccaattct

SEQ ID NO: 283666 - DNA, 21 bp, Artificial sequence
  SiRNA target sequence
ataccgtggtttccaattctg

SEQ ID NO: 283667 - DNA, 21 bp, Artificial sequence
  SiRNA target sequence
taccgtggtttccaattctgt

SEQ ID NO: 283668 - DNA, 21 bp, Artificial sequence
  SiRNA target sequence
accgtggtttccaattctgtg

SEQ ID NO: 283669 - DNA, 21 bp, Artificial sequence
  SiRNA target sequence
ccgtggtttccaattctgtgg

SEQ ID NO: 283670 - DNA, 21 bp, Artificial sequence
  SiRNA target sequence
cgtggtttccaattctgtgga

SEQ ID NO: 283671 - DNA, 21 bp, Artificial sequence
  SiRNA target sequence
gtggtttccaattctgtggaa

SEQ ID NO: 283672 - DNA, 21 bp, Artificial sequence
  SiRNA target sequence
tggtttccaattctgtggaaa

SEQ ID NO: 283673 - DNA, 21 bp, Artificial sequence
  SiRNA target sequence
ggtttccaattctgtggaaat

SEQ ID NO: 283674 - DNA, 21 bp, Artificial sequence
  SiRNA target sequence
gtttccaattctgtggaaatc

SEQ ID NO: 283675 - DNA, 21 bp, Artificial sequence
  SiRNA target sequence
tttccaattctgtggaaatct

SEQ ID NO: 283676 - DNA, 21 bp, Artificial sequence
  SiRNA target sequence
ttccaattctgtggaaatctt

SEQ ID NO: 283677 - DNA, 21 bp, Artificial sequence
  SiRNA target sequence
tccaattctgtggaaatcttg

SEQ ID NO: 283678 - DNA, 21 bp, Artificial sequence
  SiRNA target sequence
ccaattctgtggaaatcttga

SEQ ID NO: 283679 - DNA, 21 bp, Artificial sequence
  SiRNA target sequence
caattctgtggaaatcttgat

SEQ ID NO: 283680 - DNA, 21 bp, Artificial sequence
  SiRNA target sequence
aattctgtggaaatcttgata

SEQ ID NO: 283681 - DNA, 21 bp, Artificial sequence
  SiRNA target sequence
attctgtggaaatcttgatag

SEQ ID NO: 283682 - DNA, 21 bp, Artificial sequence
  SiRNA target sequence
ttctgtggaaatcttgataga

SEQ ID NO: 283683 - DNA, 21 bp, Artificial sequence
  SiRNA target sequence
tctgtggaaatcttgatagaa

SEQ ID NO: 283684 - DNA, 21 bp, Artificial sequence
  SiRNA target sequence
ctgtggaaatcttgatagaag

SEQ ID NO: 283685 - DNA, 21 bp, Artificial sequence
  SiRNA target sequence
tgtggaaatcttgatagaagt

SEQ ID NO: 283686 - DNA, 21 bp, Artificial sequence
  SiRNA target sequence
gtggaaatcttgatagaagtt

SEQ ID NO: 283687 - DNA, 21 bp, Artificial sequence
  SiRNA target sequence
tggaaatcttgatagaagtta

SEQ ID NO: 283688 - DNA, 21 bp, Artificial sequence
  SiRNA target sequence
ggaaatcttgatagaagttaa

SEQ ID NO: 283689 - DNA, 21 bp, Artificial sequence
  SiRNA target sequence
gaaatcttgatagaagttaat

SEQ ID NO: 283690 - DNA, 21 bp, Artificial sequence
  SiRNA target sequence
aaatcttgatagaagttaatg

SEQ ID NO: 283691 - DNA, 21 bp, Artificial sequence
  SiRNA target sequence
aatcttgatagaagttaatgc

SEQ ID NO: 283692 - DNA, 21 bp, Artificial sequence
  SiRNA target sequence
atcttgatagaagttaatgct

SEQ ID NO: 283693 - DNA, 21 bp, Artificial sequence
  SiRNA target sequence
tcttgatagaagttaatgctg

SEQ ID NO: 283694 - DNA, 21 bp, Artificial sequence
  SiRNA target sequence
cttgatagaagttaatgctgg

SEQ ID NO: 283695 - DNA, 21 bp, Artificial sequence
  SiRNA target sequence
ttgatagaagttaatgctgga

SEQ ID NO: 283696 - DNA, 21 bp, Artificial sequence
  SiRNA target sequence
tgatagaagttaatgctggag

SEQ ID NO: 283697 - DNA, 21 bp, Artificial sequence
  SiRNA target sequence
gatagaagttaatgctggaga

SEQ ID NO: 283698 - DNA, 21 bp, Artificial sequence
  SiRNA target sequence
atagaagttaatgctggagac

SEQ ID NO: 283699 - DNA, 21 bp, Artificial sequence
  SiRNA target sequence
tagaagttaatgctggagacg

SEQ ID NO: 283700 - DNA, 21 bp, Artificial sequence
  SiRNA target sequence
agaagttaatgctggagacga

SEQ ID NO: 283701 - DNA, 21 bp, Artificial sequence
  SiRNA target sequence
gaagttaatgctggagacgac

SEQ ID NO: 283702 - DNA, 21 bp, Artificial sequence
  SiRNA target sequence
aagttaatgctggagacgact

SEQ ID NO: 283703 - DNA, 21 bp, Artificial sequence
  SiRNA target sequence
agttaatgctggagacgactt

SEQ ID NO: 283704 - DNA, 21 bp, Artificial sequence
  SiRNA target sequence
gttaatgctggagacgacttc

SEQ ID NO: 283705 - DNA, 21 bp, Artificial sequence
  SiRNA target sequence
ttaatgctggagacgacttca

SEQ ID NO: 283706 - DNA, 21 bp, Artificial sequence
  SiRNA target sequence
taatgctggagacgacttcaa

SEQ ID NO: 283707 - DNA, 21 bp, Artificial sequence
  SiRNA target sequence
aatgctggagacgacttcaac

SEQ ID NO: 283708 - DNA, 21 bp, Artificial sequence
  SiRNA target sequence
atgctggagacgacttcaacg

SEQ ID NO: 283709 - DNA, 21 bp, Artificial sequence
  SiRNA target sequence
tgctggagacgacttcaacgt

SEQ ID NO: 283710 - DNA, 21 bp, Artificial sequence
  SiRNA target sequence
gctggagacgacttcaacgtt

SEQ ID NO: 283711 - DNA, 21 bp, Artificial sequence
  SiRNA target sequence
ctggagacgacttcaacgtta

SEQ ID NO: 283712 - DNA, 21 bp, Artificial sequence
  SiRNA target sequence
tggagacgacttcaacgttat

SEQ ID NO: 283713 - DNA, 21 bp, Artificial sequence
  SiRNA target sequence
ggagacgacttcaacgttatt

SEQ ID NO: 283714 - DNA, 21 bp, Artificial sequence
  SiRNA target sequence
gagacgacttcaacgttattg

SEQ ID NO: 283715 - DNA, 21 bp, Artificial sequence
  SiRNA target sequence
agacgacttcaacgttattgc

SEQ ID NO: 283716 - DNA, 21 bp, Artificial sequence
  SiRNA target sequence
gacgacttcaacgttattgct

SEQ ID NO: 283717 - DNA, 21 bp, Artificial sequence
  SiRNA target sequence
acgacttcaacgttattgctc

SEQ ID NO: 283718 - DNA, 21 bp, Artificial sequence
  SiRNA target sequence
cgacttcaacgttattgctcc

SEQ ID NO: 283719 - DNA, 21 bp, Artificial sequence
  SiRNA target sequence
gacttcaacgttattgctccc

SEQ ID NO: 283720 - DNA, 21 bp, Artificial sequence
  SiRNA target sequence
acttcaacgttattgctccca

SEQ ID NO: 283721 - DNA, 21 bp, Artificial sequence
  SiRNA target sequence
cttcaacgttattgctcccat

SEQ ID NO: 283722 - DNA, 21 bp, Artificial sequence
  SiRNA target sequence
ttcaacgttattgctcccatc

SEQ ID NO: 283723 - DNA, 21 bp, Artificial sequence
  SiRNA target sequence
tcaacgttattgctcccatcg

SEQ ID NO: 283724 - DNA, 21 bp, Artificial sequence
  SiRNA target sequence
caacgttattgctcccatcga

SEQ ID NO: 283725 - DNA, 21 bp, Artificial sequence
  SiRNA target sequence
aacgttattgctcccatcgaa

SEQ ID NO: 283726 - DNA, 21 bp, Artificial sequence
  SiRNA target sequence
acgttattgctcccatcgaaa

SEQ ID NO: 283727 - DNA, 21 bp, Artificial sequence
  SiRNA target sequence
cgttattgctcccatcgaaaa

SEQ ID NO: 283728 - DNA, 21 bp, Artificial sequence
  SiRNA target sequence
gttattgctcccatcgaaaac

SEQ ID NO: 283729 - DNA, 21 bp, Artificial sequence
  SiRNA target sequence
ttattgctcccatcgaaaaca

SEQ ID NO: 283730 - DNA, 21 bp, Artificial sequence
  SiRNA target sequence
tattgctcccatcgaaaacat

SEQ ID NO: 283731 - DNA, 21 bp, Artificial sequence
  SiRNA target sequence
attgctcccatcgaaaacatc

SEQ ID NO: 283732 - DNA, 21 bp, Artificial sequence
  SiRNA target sequence
ttgctcccatcgaaaacatct

SEQ ID NO: 283733 - DNA, 21 bp, Artificial sequence
  SiRNA target sequence
tgctcccatcgaaaacatctt

SEQ ID NO: 283734 - DNA, 21 bp, Artificial sequence
  SiRNA target sequence
gctcccatcgaaaacatcttt

SEQ ID NO: 283735 - DNA, 21 bp, Artificial sequence
  SiRNA target sequence
ctcccatcgaaaacatctttt

SEQ ID NO: 283736 - DNA, 21 bp, Artificial sequence
  SiRNA target sequence
tcccatcgaaaacatcttttt

SEQ ID NO: 283737 - DNA, 21 bp, Artificial sequence
  SiRNA target sequence
cccatcgaaaacatctttttc

SEQ ID NO: 283738 - DNA, 21 bp, Artificial sequence
  SiRNA target sequence
ccatcgaaaacatctttttcc

SEQ ID NO: 283739 - DNA, 21 bp, Artificial sequence
  SiRNA target sequence
catcgaaaacatctttttccc

SEQ ID NO: 283740 - DNA, 21 bp, Artificial sequence
  SiRNA target sequence
atcgaaaacatctttttcccc

SEQ ID NO: 283741 - DNA, 21 bp, Artificial sequence
  SiRNA target sequence
tcgaaaacatctttttcccct

SEQ ID NO: 283742 - DNA, 21 bp, Artificial sequence
  SiRNA target sequence
cgaaaacatctttttcccctt

SEQ ID NO: 283743 - DNA, 21 bp, Artificial sequence
  SiRNA target sequence
gaaaacatctttttccccttc

SEQ ID NO: 283744 - DNA, 21 bp, Artificial sequence
  SiRNA target sequence
aaaacatctttttccccttct

SEQ ID NO: 283745 - DNA, 21 bp, Artificial sequence
  SiRNA target sequence
aaacatctttttccccttctc

SEQ ID NO: 283746 - DNA, 21 bp, Artificial sequence
  SiRNA target sequence
aacatctttttccccttctct

SEQ ID NO: 283747 - DNA, 21 bp, Artificial sequence
  SiRNA target sequence
acatctttttccccttctctc

SEQ ID NO: 283748 - DNA, 21 bp, Artificial sequence
  SiRNA target sequence
catctttttccccttctctct

SEQ ID NO: 283749 - DNA, 21 bp, Artificial sequence
  SiRNA target sequence
atctttttccccttctctctg

SEQ ID NO: 283750 - DNA, 21 bp, Artificial sequence
  SiRNA target sequence
tctttttccccttctctctgt

SEQ ID NO: 283751 - DNA, 21 bp, Artificial sequence
  SiRNA target sequence
ctttttccccttctctctgtc

SEQ ID NO: 283752 - DNA, 21 bp, Artificial sequence
  SiRNA target sequence
tttttccccttctctctgtct

SEQ ID NO: 283753 - DNA, 21 bp, Artificial sequence
  SiRNA target sequence
ttttccccttctctctgtctc

SEQ ID NO: 283754 - DNA, 21 bp, Artificial sequence
  SiRNA target sequence
tttccccttctctctgtctcc

SEQ ID NO: 283755 - DNA, 21 bp, Artificial sequence
  SiRNA target sequence
ttccccttctctctgtctcca

SEQ ID NO: 283756 - DNA, 21 bp, Artificial sequence
  SiRNA target sequence
tccccttctctctgtctccag

SEQ ID NO: 283757 - DNA, 21 bp, Artificial sequence
  SiRNA target sequence
ccccttctctctgtctccagg

SEQ ID NO: 283758 - DNA, 21 bp, Artificial sequence
  SiRNA target sequence
cccttctctctgtctccaggg

SEQ ID NO: 283759 - DNA, 21 bp, Artificial sequence
  SiRNA target sequence
ccttctctctgtctccaggga

SEQ ID NO: 283760 - DNA, 21 bp, Artificial sequence
  SiRNA target sequence
cttctctctgtctccagggag

SEQ ID NO: 283761 - DNA, 21 bp, Artificial sequence
  SiRNA target sequence
ttctctctgtctccagggaga

SEQ ID NO: 283762 - DNA, 21 bp, Artificial sequence
  SiRNA target sequence
tctctctgtctccagggagag

SEQ ID NO: 283763 - DNA, 21 bp, Artificial sequence
  SiRNA target sequence
ctctctgtctccagggagagg

SEQ ID NO: 283764 - DNA, 21 bp, Artificial sequence
  SiRNA target sequence
tctctgtctccagggagaggg

SEQ ID NO: 283765 - DNA, 21 bp, Artificial sequence
  SiRNA target sequence
ctctgtctccagggagaggga

SEQ ID NO: 283766 - DNA, 21 bp, Artificial sequence
  SiRNA target sequence
tctgtctccagggagagggag

SEQ ID NO: 283767 - DNA, 21 bp, Artificial sequence
  SiRNA target sequence
ctgtctccagggagagggagt

SEQ ID NO: 283768 - DNA, 21 bp, Artificial sequence
  SiRNA target sequence
tgtctccagggagagggagta

SEQ ID NO: 283769 - DNA, 21 bp, Artificial sequence
  SiRNA target sequence
gtctccagggagagggagtat

SEQ ID NO: 283770 - DNA, 21 bp, Artificial sequence
  SiRNA target sequence
tctccagggagagggagtatg

SEQ ID NO: 283771 - DNA, 21 bp, Artificial sequence
  SiRNA target sequence
ctccagggagagggagtatgg

SEQ ID NO: 283772 - DNA, 21 bp, Artificial sequence
  SiRNA target sequence
tccagggagagggagtatggt

SEQ ID NO: 283773 - DNA, 21 bp, Artificial sequence
  SiRNA target sequence
ccagggagagggagtatggtt

SEQ ID NO: 283774 - DNA, 21 bp, Artificial sequence
  SiRNA target sequence
cagggagagggagtatggttg

SEQ ID NO: 283775 - DNA, 21 bp, Artificial sequence
  SiRNA target sequence
agggagagggagtatggttgc

SEQ ID NO: 283776 - DNA, 21 bp, Artificial sequence
  SiRNA target sequence
gggagagggagtatggttgct

SEQ ID NO: 283777 - DNA, 21 bp, Artificial sequence
  SiRNA target sequence
ggagagggagtatggttgctc

SEQ ID NO: 283778 - DNA, 21 bp, Artificial sequence
  SiRNA target sequence
gagagggagtatggttgctca

SEQ ID NO: 283779 - DNA, 21 bp, Artificial sequence
  SiRNA target sequence
agagggagtatggttgctcaa

SEQ ID NO: 283780 - DNA, 21 bp, Artificial sequence
  SiRNA target sequence
gagggagtatggttgctcaat

SEQ ID NO: 283781 - DNA, 21 bp, Artificial sequence
  SiRNA target sequence
agggagtatggttgctcaatc

SEQ ID NO: 283782 - DNA, 21 bp, Artificial sequence
  SiRNA target sequence
gggagtatggttgctcaatct

SEQ ID NO: 283783 - DNA, 21 bp, Artificial sequence
  SiRNA target sequence
ggagtatggttgctcaatcta

SEQ ID NO: 283784 - DNA, 21 bp, Artificial sequence
  SiRNA target sequence
gagtatggttgctcaatctaa

SEQ ID NO: 283785 - DNA, 21 bp, Artificial sequence
  SiRNA target sequence
agtatggttgctcaatctaat

SEQ ID NO: 283786 - DNA, 21 bp, Artificial sequence
  SiRNA target sequence
gtatggttgctcaatctaatt

SEQ ID NO: 283787 - DNA, 21 bp, Artificial sequence
  SiRNA target sequence
tatggttgctcaatctaattc

SEQ ID NO: 283788 - DNA, 21 bp, Artificial sequence
  SiRNA target sequence
atggttgctcaatctaattcg

SEQ ID NO: 283789 - DNA, 21 bp, Artificial sequence
  SiRNA target sequence
tggttgctcaatctaattcgg

SEQ ID NO: 283790 - DNA, 21 bp, Artificial sequence
  SiRNA target sequence
ggttgctcaatctaattcggg

SEQ ID NO: 283791 - DNA, 21 bp, Artificial sequence
  SiRNA target sequence
gttgctcaatctaattcgggg

SEQ ID NO: 283792 - DNA, 21 bp, Artificial sequence
  SiRNA target sequence
ttgctcaatctaattcgggga

SEQ ID NO: 283793 - DNA, 21 bp, Artificial sequence
  SiRNA target sequence
tgctcaatctaattcggggac

SEQ ID NO: 283794 - DNA, 21 bp, Artificial sequence
  SiRNA target sequence
gctcaatctaattcggggact

SEQ ID NO: 283795 - DNA, 21 bp, Artificial sequence
  SiRNA target sequence
ctcaatctaattcggggactg

SEQ ID NO: 283796 - DNA, 21 bp, Artificial sequence
  SiRNA target sequence
tcaatctaattcggggactga

SEQ ID NO: 283797 - DNA, 21 bp, Artificial sequence
  SiRNA target sequence
caatctaattcggggactgaa

SEQ ID NO: 283798 - DNA, 21 bp, Artificial sequence
  SiRNA target sequence
aatctaattcggggactgaac

SEQ ID NO: 283799 - DNA, 21 bp, Artificial sequence
  SiRNA target sequence
atctaattcggggactgaaca

SEQ ID NO: 283800 - DNA, 21 bp, Artificial sequence
  SiRNA target sequence
tctaattcggggactgaacaa

SEQ ID NO: 283801 - DNA, 21 bp, Artificial sequence
  SiRNA target sequence
ctaattcggggactgaacaac

SEQ ID NO: 283802 - DNA, 21 bp, Artificial sequence
  SiRNA target sequence
taattcggggactgaacaaca

SEQ ID NO: 283803 - DNA, 21 bp, Artificial sequence
  SiRNA target sequence
aattcggggactgaacaacaa

SEQ ID NO: 283804 - DNA, 21 bp, Artificial sequence
  SiRNA target sequence
attcggggactgaacaacaaa

SEQ ID NO: 283805 - DNA, 21 bp, Artificial sequence
  SiRNA target sequence
ttcggggactgaacaacaaaa

SEQ ID NO: 283806 - DNA, 21 bp, Artificial sequence
  SiRNA target sequence
tcggggactgaacaacaaaat

SEQ ID NO: 283807 - DNA, 21 bp, Artificial sequence
  SiRNA target sequence
cggggactgaacaacaaaatc

SEQ ID NO: 283808 - DNA, 21 bp, Artificial sequence
  SiRNA target sequence
ggggactgaacaacaaaatcc

SEQ ID NO: 283809 - DNA, 21 bp, Artificial sequence
  SiRNA target sequence
gggactgaacaacaaaatccc

SEQ ID NO: 283810 - DNA, 21 bp, Artificial sequence
  SiRNA target sequence
ggactgaacaacaaaatccca

SEQ ID NO: 283811 - DNA, 21 bp, Artificial sequence
  SiRNA target sequence
gactgaacaacaaaatcccag

SEQ ID NO: 283812 - DNA, 21 bp, Artificial sequence
  SiRNA target sequence
actgaacaacaaaatcccagg

SEQ ID NO: 283813 - DNA, 21 bp, Artificial sequence
  SiRNA target sequence
ctgaacaacaaaatcccaggg

SEQ ID NO: 283814 - DNA, 21 bp, Artificial sequence
  SiRNA target sequence
tgaacaacaaaatcccagggg

SEQ ID NO: 283815 - DNA, 21 bp, Artificial sequence
  SiRNA target sequence
gaacaacaaaatcccagggga

SEQ ID NO: 283816 - DNA, 21 bp, Artificial sequence
  SiRNA target sequence
aacaacaaaatcccaggggat

SEQ ID NO: 283817 - DNA, 21 bp, Artificial sequence
  SiRNA target sequence
acaacaaaatcccaggggatc

SEQ ID NO: 283818 - DNA, 21 bp, Artificial sequence
  SiRNA target sequence
caacaaaatcccaggggatct

SEQ ID NO: 283819 - DNA, 21 bp, Artificial sequence
  SiRNA target sequence
aacaaaatcccaggggatctt

SEQ ID NO: 283820 - DNA, 21 bp, Artificial sequence
  SiRNA target sequence
acaaaatcccaggggatcttc

SEQ ID NO: 283821 - DNA, 21 bp, Artificial sequence
  SiRNA target sequence
caaaatcccaggggatcttct

SEQ ID NO: 283822 - DNA, 21 bp, Artificial sequence
  SiRNA target sequence
aaaatcccaggggatcttctt

SEQ ID NO: 283823 - DNA, 21 bp, Artificial sequence
  SiRNA target sequence
aaatcccaggggatcttcttt

SEQ ID NO: 283824 - DNA, 21 bp, Artificial sequence
  SiRNA target sequence
aatcccaggggatcttctttg

SEQ ID NO: 283825 - DNA, 21 bp, Artificial sequence
  SiRNA target sequence
atcccaggggatcttctttgt

SEQ ID NO: 283826 - DNA, 21 bp, Artificial sequence
  SiRNA target sequence
tcccaggggatcttctttgtt

SEQ ID NO: 283827 - DNA, 21 bp, Artificial sequence
  SiRNA target sequence
cccaggggatcttctttgtta

SEQ ID NO: 283828 - DNA, 21 bp, Artificial sequence
  SiRNA target sequence
ccaggggatcttctttgttaa

SEQ ID NO: 283829 - DNA, 21 bp, Artificial sequence
  SiRNA target sequence
caggggatcttctttgttaac

SEQ ID NO: 283830 - DNA, 21 bp, Artificial sequence
  SiRNA target sequence
aggggatcttctttgttaact

SEQ ID NO: 283831 - DNA, 21 bp, Artificial sequence
  SiRNA target sequence
ggggatcttctttgttaactg

SEQ ID NO: 283832 - DNA, 21 bp, Artificial sequence
  SiRNA target sequence
gggatcttctttgttaactga

SEQ ID NO: 283833 - DNA, 21 bp, Artificial sequence
  SiRNA target sequence
ggatcttctttgttaactgac

SEQ ID NO: 283834 - DNA, 21 bp, Artificial sequence
  SiRNA target sequence
gatcttctttgttaactgacc

SEQ ID NO: 283835 - DNA, 21 bp, Artificial sequence
  SiRNA target sequence
atcttctttgttaactgaccc

SEQ ID NO: 283836 - DNA, 21 bp, Artificial sequence
  SiRNA target sequence
tcttctttgttaactgaccca

SEQ ID NO: 283837 - DNA, 21 bp, Artificial sequence
  SiRNA target sequence
cttctttgttaactgacccag

SEQ ID NO: 283838 - DNA, 21 bp, Artificial sequence
  SiRNA target sequence
ttctttgttaactgacccaga

SEQ ID NO: 283839 - DNA, 21 bp, Artificial sequence
  SiRNA target sequence
tctttgttaactgacccagag

SEQ ID NO: 283840 - DNA, 21 bp, Artificial sequence
  SiRNA target sequence
ctttgttaactgacccagagt

SEQ ID NO: 283841 - DNA, 21 bp, Artificial sequence
  SiRNA target sequence
tttgttaactgacccagagtc

SEQ ID NO: 283842 - DNA, 21 bp, Artificial sequence
  SiRNA target sequence
ttgttaactgacccagagtca

SEQ ID NO: 283843 - DNA, 21 bp, Artificial sequence
  SiRNA target sequence
tgttaactgacccagagtcaa

SEQ ID NO: 283844 - DNA, 21 bp, Artificial sequence
  SiRNA target sequence
gttaactgacccagagtcaat

SEQ ID NO: 283845 - DNA, 21 bp, Artificial sequence
  SiRNA target sequence
ttaactgacccagagtcaata

SEQ ID NO: 283846 - DNA, 21 bp, Artificial sequence
  SiRNA target sequence
taactgacccagagtcaataa

SEQ ID NO: 283847 - DNA, 21 bp, Artificial sequence
  SiRNA target sequence
aactgacccagagtcaataac

SEQ ID NO: 283848 - DNA, 21 bp, Artificial sequence
  SiRNA target sequence
actgacccagagtcaataacg

SEQ ID NO: 283849 - DNA, 21 bp, Artificial sequence
  SiRNA target sequence
ctgacccagagtcaataacga

SEQ ID NO: 283850 - DNA, 21 bp, Artificial sequence
  SiRNA target sequence
tgacccagagtcaataacgaa

SEQ ID NO: 283851 - DNA, 21 bp, Artificial sequence
  SiRNA target sequence
gacccagagtcaataacgaag

SEQ ID NO: 283852 - DNA, 21 bp, Artificial sequence
  SiRNA target sequence
acccagagtcaataacgaagt

SEQ ID NO: 283853 - DNA, 21 bp, Artificial sequence
  SiRNA target sequence
cccagagtcaataacgaagtc

SEQ ID NO: 283854 - DNA, 21 bp, Artificial sequence
  SiRNA target sequence
ccagagtcaataacgaagtct

SEQ ID NO: 283855 - DNA, 21 bp, Artificial sequence
  SiRNA target sequence
cagagtcaataacgaagtctg

SEQ ID NO: 283856 - DNA, 21 bp, Artificial sequence
  SiRNA target sequence
agagtcaataacgaagtctga

SEQ ID NO: 283857 - DNA, 21 bp, Artificial sequence
  SiRNA target sequence
gagtcaataacgaagtctgat

SEQ ID NO: 283858 - DNA, 21 bp, Artificial sequence
  SiRNA target sequence
agtcaataacgaagtctgatc

SEQ ID NO: 283859 - DNA, 21 bp, Artificial sequence
  SiRNA target sequence
gtcaataacgaagtctgatcc

SEQ ID NO: 283860 - DNA, 21 bp, Artificial sequence
  SiRNA target sequence
tcaataacgaagtctgatcct

SEQ ID NO: 283861 - DNA, 21 bp, Artificial sequence
  SiRNA target sequence
caataacgaagtctgatcctt

SEQ ID NO: 283862 - DNA, 21 bp, Artificial sequence
  SiRNA target sequence
aataacgaagtctgatcctta

SEQ ID NO: 283863 - DNA, 21 bp, Artificial sequence
  SiRNA target sequence
ataacgaagtctgatccttac

SEQ ID NO: 283864 - DNA, 21 bp, Artificial sequence
  SiRNA target sequence
taacgaagtctgatccttaca

SEQ ID NO: 283865 - DNA, 21 bp, Artificial sequence
  SiRNA target sequence
aacgaagtctgatccttacaa

SEQ ID NO: 283866 - DNA, 21 bp, Artificial sequence
  SiRNA target sequence
acgaagtctgatccttacaat

SEQ ID NO: 283867 - DNA, 21 bp, Artificial sequence
  SiRNA target sequence
cgaagtctgatccttacaatc

SEQ ID NO: 283868 - DNA, 21 bp, Artificial sequence
  SiRNA target sequence
gaagtctgatccttacaatcc

SEQ ID NO: 283869 - DNA, 21 bp, Artificial sequence
  SiRNA target sequence
aagtctgatccttacaatccg

SEQ ID NO: 283870 - DNA, 21 bp, Artificial sequence
  SiRNA target sequence
agtctgatccttacaatccga

SEQ ID NO: 283871 - DNA, 21 bp, Artificial sequence
  SiRNA target sequence
gtctgatccttacaatccgaa

SEQ ID NO: 283872 - DNA, 21 bp, Artificial sequence
  SiRNA target sequence
tctgatccttacaatccgaat

SEQ ID NO: 283873 - DNA, 21 bp, Artificial sequence
  SiRNA target sequence
ctgatccttacaatccgaata

SEQ ID NO: 283874 - DNA, 21 bp, Artificial sequence
  SiRNA target sequence
tgatccttacaatccgaatat

SEQ ID NO: 283875 - DNA, 21 bp, Artificial sequence
  SiRNA target sequence
gatccttacaatccgaatatt

SEQ ID NO: 283876 - DNA, 21 bp, Artificial sequence
  SiRNA target sequence
atccttacaatccgaatattt

SEQ ID NO: 283877 - DNA, 21 bp, Artificial sequence
  SiRNA target sequence
tccttacaatccgaatatttc

SEQ ID NO: 283878 - DNA, 21 bp, Artificial sequence
  SiRNA target sequence
ccttacaatccgaatatttct

SEQ ID NO: 283879 - DNA, 21 bp, Artificial sequence
  SiRNA target sequence
cttacaatccgaatatttctc

SEQ ID NO: 283880 - DNA, 21 bp, Artificial sequence
  SiRNA target sequence
ttacaatccgaatatttctct

SEQ ID NO: 283881 - DNA, 21 bp, Artificial sequence
  SiRNA target sequence
tacaatccgaatatttctctc

SEQ ID NO: 283882 - DNA, 21 bp, Artificial sequence
  SiRNA target sequence
acaatccgaatatttctctct

SEQ ID NO: 283883 - DNA, 21 bp, Artificial sequence
  SiRNA target sequence
caatccgaatatttctctctt

SEQ ID NO: 283884 - DNA, 21 bp, Artificial sequence
  SiRNA target sequence
aatccgaatatttctctcttg

SEQ ID NO: 283885 - DNA, 21 bp, Artificial sequence
  SiRNA target sequence
atccgaatatttctctcttga

SEQ ID NO: 283886 - DNA, 21 bp, Artificial sequence
  SiRNA target sequence
tccgaatatttctctcttgat

SEQ ID NO: 283887 - DNA, 21 bp, Artificial sequence
  SiRNA target sequence
ccgaatatttctctcttgatt

SEQ ID NO: 283888 - DNA, 21 bp, Artificial sequence
  SiRNA target sequence
cgaatatttctctcttgatta

SEQ ID NO: 283889 - DNA, 21 bp, Artificial sequence
  SiRNA target sequence
gaatatttctctcttgattag

SEQ ID NO: 283890 - DNA, 21 bp, Artificial sequence
  SiRNA target sequence
aatatttctctcttgattagc

SEQ ID NO: 283891 - DNA, 21 bp, Artificial sequence
  SiRNA target sequence
atatttctctcttgattagcg

SEQ ID NO: 283892 - DNA, 21 bp, Artificial sequence
  SiRNA target sequence
tatttctctcttgattagcgg

SEQ ID NO: 283893 - DNA, 21 bp, Artificial sequence
  SiRNA target sequence
atttctctcttgattagcgga

SEQ ID NO: 283894 - DNA, 21 bp, Artificial sequence
  SiRNA target sequence
tttctctcttgattagcggag

SEQ ID NO: 283895 - DNA, 21 bp, Artificial sequence
  SiRNA target sequence
ttctctcttgattagcggaga

SEQ ID NO: 283896 - DNA, 21 bp, Artificial sequence
  SiRNA target sequence
tctctcttgattagcggagaa

SEQ ID NO: 283897 - DNA, 21 bp, Artificial sequence
  SiRNA target sequence
ctctcttgattagcggagaag

SEQ ID NO: 283898 - DNA, 21 bp, Artificial sequence
  SiRNA target sequence
tctcttgattagcggagaagt

SEQ ID NO: 283899 - DNA, 21 bp, Artificial sequence
  SiRNA target sequence
ctcttgattagcggagaagtt

SEQ ID NO: 283900 - DNA, 21 bp, Artificial sequence
  SiRNA target sequence
tcttgattagcggagaagttt

SEQ ID NO: 283901 - DNA, 21 bp, Artificial sequence
  SiRNA target sequence
cttgattagcggagaagtttt

SEQ ID NO: 283902 - DNA, 21 bp, Artificial sequence
  SiRNA target sequence
ttgattagcggagaagttttt

SEQ ID NO: 283903 - DNA, 21 bp, Artificial sequence
  SiRNA target sequence
tgattagcggagaagttttta

SEQ ID NO: 283904 - DNA, 21 bp, Artificial sequence
  SiRNA target sequence
gattagcggagaagtttttac

SEQ ID NO: 283905 - DNA, 21 bp, Artificial sequence
  SiRNA target sequence
attagcggagaagtttttact

SEQ ID NO: 283906 - DNA, 21 bp, Artificial sequence
  SiRNA target sequence
ttagcggagaagtttttacta

SEQ ID NO: 283907 - DNA, 21 bp, Artificial sequence
  SiRNA target sequence
tagcggagaagtttttactaa

SEQ ID NO: 283908 - DNA, 21 bp, Artificial sequence
  SiRNA target sequence
agcggagaagtttttactaac

SEQ ID NO: 283909 - DNA, 21 bp, Artificial sequence
  SiRNA target sequence
gcggagaagtttttactaact

SEQ ID NO: 283910 - DNA, 21 bp, Artificial sequence
  SiRNA target sequence
cggagaagtttttactaactt

SEQ ID NO: 283911 - DNA, 21 bp, Artificial sequence
  SiRNA target sequence
ggagaagtttttactaacttc

SEQ ID NO: 283912 - DNA, 21 bp, Artificial sequence
  SiRNA target sequence
gagaagtttttactaacttca

SEQ ID NO: 283913 - DNA, 21 bp, Artificial sequence
  SiRNA target sequence
agaagtttttactaacttcag

SEQ ID NO: 283914 - DNA, 21 bp, Artificial sequence
  SiRNA target sequence
gaagtttttactaacttcaga

SEQ ID NO: 283915 - DNA, 21 bp, Artificial sequence
  SiRNA target sequence
aagtttttactaacttcagaa

SEQ ID NO: 283916 - DNA, 21 bp, Artificial sequence
  SiRNA target sequence
agtttttactaacttcagaaa

SEQ ID NO: 283917 - DNA, 21 bp, Artificial sequence
  SiRNA target sequence
gtttttactaacttcagaaac

SEQ ID NO: 283918 - DNA, 21 bp, Artificial sequence
  SiRNA target sequence
tttttactaacttcagaaact

SEQ ID NO: 283919 - DNA, 21 bp, Artificial sequence
  SiRNA target sequence
ttttactaacttcagaaactt

SEQ ID NO: 283920 - DNA, 21 bp, Artificial sequence
  SiRNA target sequence
tttactaacttcagaaacttg

SEQ ID NO: 283921 - DNA, 21 bp, Artificial sequence
  SiRNA target sequence
ttactaacttcagaaacttga

SEQ ID NO: 283922 - DNA, 21 bp, Artificial sequence
  SiRNA target sequence
tactaacttcagaaacttgat

SEQ ID NO: 283923 - DNA, 21 bp, Artificial sequence
  SiRNA target sequence
actaacttcagaaacttgatt

SEQ ID NO: 283924 - DNA, 21 bp, Artificial sequence
  SiRNA target sequence
ctaacttcagaaacttgatta

SEQ ID NO: 283925 - DNA, 21 bp, Artificial sequence
  SiRNA target sequence
taacttcagaaacttgattaa

SEQ ID NO: 283926 - DNA, 21 bp, Artificial sequence
  SiRNA target sequence
aacttcagaaacttgattaag

SEQ ID NO: 283927 - DNA, 21 bp, Artificial sequence
  SiRNA target sequence
acttcagaaacttgattaaga

SEQ ID NO: 283928 - DNA, 21 bp, Artificial sequence
  SiRNA target sequence
cttcagaaacttgattaagag

SEQ ID NO: 283929 - DNA, 21 bp, Artificial sequence
  SiRNA target sequence
ttcagaaacttgattaagaga

SEQ ID NO: 283930 - DNA, 21 bp, Artificial sequence
  SiRNA target sequence
tcagaaacttgattaagagag

SEQ ID NO: 283931 - DNA, 21 bp, Artificial sequence
  SiRNA target sequence
cagaaacttgattaagagagt

SEQ ID NO: 283932 - DNA, 21 bp, Artificial sequence
  SiRNA target sequence
agaaacttgattaagagagta

SEQ ID NO: 283933 - DNA, 21 bp, Artificial sequence
  SiRNA target sequence
gaaacttgattaagagagtaa

SEQ ID NO: 283934 - DNA, 21 bp, Artificial sequence
  SiRNA target sequence
aaacttgattaagagagtaaa

SEQ ID NO: 283935 - DNA, 21 bp, Artificial sequence
  SiRNA target sequence
aacttgattaagagagtaaat

SEQ ID NO: 283936 - DNA, 21 bp, Artificial sequence
  SiRNA target sequence
acttgattaagagagtaaatt

SEQ ID NO: 283937 - DNA, 21 bp, Artificial sequence
  SiRNA target sequence
cttgattaagagagtaaattt

SEQ ID NO: 283938 - DNA, 21 bp, Artificial sequence
  SiRNA target sequence
ttgattaagagagtaaatttc

SEQ ID NO: 283939 - DNA, 21 bp, Artificial sequence
  SiRNA target sequence
tgattaagagagtaaatttca

SEQ ID NO: 283940 - DNA, 21 bp, Artificial sequence
  SiRNA target sequence
gattaagagagtaaatttcag

SEQ ID NO: 283941 - DNA, 21 bp, Artificial sequence
  SiRNA target sequence
attaagagagtaaatttcaga

SEQ ID NO: 283942 - DNA, 21 bp, Artificial sequence
  SiRNA target sequence
ttaagagagtaaatttcagaa

SEQ ID NO: 283943 - DNA, 21 bp, Artificial sequence
  SiRNA target sequence
taagagagtaaatttcagaaa

SEQ ID NO: 283944 - DNA, 21 bp, Artificial sequence
  SiRNA target sequence
aagagagtaaatttcagaaag

SEQ ID NO: 283945 - DNA, 21 bp, Artificial sequence
  SiRNA target sequence
agagagtaaatttcagaaagg

SEQ ID NO: 283946 - DNA, 21 bp, Artificial sequence
  SiRNA target sequence
gagagtaaatttcagaaaggc

SEQ ID NO: 283947 - DNA, 21 bp, Artificial sequence
  SiRNA target sequence
agagtaaatttcagaaaggct

SEQ ID NO: 283948 - DNA, 21 bp, Artificial sequence
  SiRNA target sequence
gagtaaatttcagaaaggcta

SEQ ID NO: 283949 - DNA, 21 bp, Artificial sequence
  SiRNA target sequence
agtaaatttcagaaaggctac

SEQ ID NO: 283950 - DNA, 21 bp, Artificial sequence
  SiRNA target sequence
gtaaatttcagaaaggctact

SEQ ID NO: 283951 - DNA, 21 bp, Artificial sequence
  SiRNA target sequence
taaatttcagaaaggctacta

SEQ ID NO: 283952 - DNA, 21 bp, Artificial sequence
  SiRNA target sequence
aaatttcagaaaggctactac

SEQ ID NO: 283953 - DNA, 21 bp, Artificial sequence
  SiRNA target sequence
aatttcagaaaggctactaca

SEQ ID NO: 283954 - DNA, 21 bp, Artificial sequence
  SiRNA target sequence
atttcagaaaggctactacat

SEQ ID NO: 283955 - DNA, 21 bp, Artificial sequence
  SiRNA target sequence
tttcagaaaggctactacatt

SEQ ID NO: 283956 - DNA, 21 bp, Artificial sequence
  SiRNA target sequence
ttcagaaaggctactacattg

SEQ ID NO: 283957 - DNA, 21 bp, Artificial sequence
  SiRNA target sequence
tcagaaaggctactacattga

SEQ ID NO: 283958 - DNA, 21 bp, Artificial sequence
  SiRNA target sequence
cagaaaggctactacattgaa

SEQ ID NO: 283959 - DNA, 21 bp, Artificial sequence
  SiRNA target sequence
agaaaggctactacattgaat

SEQ ID NO: 283960 - DNA, 21 bp, Artificial sequence
  SiRNA target sequence
gaaaggctactacattgaatg

SEQ ID NO: 283961 - DNA, 21 bp, Artificial sequence
  SiRNA target sequence
aaaggctactacattgaatgg

SEQ ID NO: 283962 - DNA, 21 bp, Artificial sequence
  SiRNA target sequence
aaggctactacattgaatgga

SEQ ID NO: 283963 - DNA, 21 bp, Artificial sequence
  SiRNA target sequence
aggctactacattgaatggaa

SEQ ID NO: 283964 - DNA, 21 bp, Artificial sequence
  SiRNA target sequence
ggctactacattgaatggaaa

SEQ ID NO: 283965 - DNA, 21 bp, Artificial sequence
  SiRNA target sequence
gctactacattgaatggaaag

SEQ ID NO: 283966 - DNA, 21 bp, Artificial sequence
  SiRNA target sequence
ctactacattgaatggaaagc

SEQ ID NO: 283967 - DNA, 21 bp, Artificial sequence
  SiRNA target sequence
tactacattgaatggaaagcg

SEQ ID NO: 283968 - DNA, 21 bp, Artificial sequence
  SiRNA target sequence
actacattgaatggaaagcgt

SEQ ID NO: 283969 - DNA, 21 bp, Artificial sequence
  SiRNA target sequence
ctacattgaatggaaagcgta

SEQ ID NO: 283970 - DNA, 21 bp, Artificial sequence
  SiRNA target sequence
tacattgaatggaaagcgtat

SEQ ID NO: 283971 - DNA, 21 bp, Artificial sequence
  SiRNA target sequence
acattgaatggaaagcgtatc

SEQ ID NO: 283972 - DNA, 21 bp, Artificial sequence
  SiRNA target sequence
cattgaatggaaagcgtatcg

SEQ ID NO: 283973 - DNA, 21 bp, Artificial sequence
  SiRNA target sequence
attgaatggaaagcgtatcgg

SEQ ID NO: 283974 - DNA, 21 bp, Artificial sequence
  SiRNA target sequence
ttgaatggaaagcgtatcgga

SEQ ID NO: 283975 - DNA, 21 bp, Artificial sequence
  SiRNA target sequence
tgaatggaaagcgtatcggag

SEQ ID NO: 283976 - DNA, 21 bp, Artificial sequence
  SiRNA target sequence
gaatggaaagcgtatcggaga

SEQ ID NO: 283977 - DNA, 21 bp, Artificial sequence
  SiRNA target sequence
aatggaaagcgtatcggagat

SEQ ID NO: 283978 - DNA, 21 bp, Artificial sequence
  SiRNA target sequence
atggaaagcgtatcggagata

SEQ ID NO: 283979 - DNA, 21 bp, Artificial sequence
  SiRNA target sequence
tggaaagcgtatcggagatac

SEQ ID NO: 283980 - DNA, 21 bp, Artificial sequence
  SiRNA target sequence
ggaaagcgtatcggagatacg

SEQ ID NO: 283981 - DNA, 21 bp, Artificial sequence
  SiRNA target sequence
gaaagcgtatcggagatacgt

SEQ ID NO: 283982 - DNA, 21 bp, Artificial sequence
  SiRNA target sequence
aaagcgtatcggagatacgtt

SEQ ID NO: 283983 - DNA, 21 bp, Artificial sequence
  SiRNA target sequence
aagcgtatcggagatacgttt

SEQ ID NO: 283984 - DNA, 21 bp, Artificial sequence
  SiRNA target sequence
agcgtatcggagatacgtttc

SEQ ID NO: 283985 - DNA, 21 bp, Artificial sequence
  SiRNA target sequence
gcgtatcggagatacgtttcc

SEQ ID NO: 283986 - DNA, 21 bp, Artificial sequence
  SiRNA target sequence
cgtatcggagatacgtttccc

SEQ ID NO: 283987 - DNA, 21 bp, Artificial sequence
  SiRNA target sequence
gtatcggagatacgtttcccg

SEQ ID NO: 283988 - DNA, 21 bp, Artificial sequence
  SiRNA target sequence
tatcggagatacgtttcccgt

SEQ ID NO: 283989 - DNA, 21 bp, Artificial sequence
  SiRNA target sequence
atcggagatacgtttcccgtt

SEQ ID NO: 283990 - DNA, 21 bp, Artificial sequence
  SiRNA target sequence
tcggagatacgtttcccgtta

SEQ ID NO: 283991 - DNA, 21 bp, Artificial sequence
  SiRNA target sequence
cggagatacgtttcccgttaa

SEQ ID NO: 283992 - DNA, 21 bp, Artificial sequence
  SiRNA target sequence
ggagatacgtttcccgttaat

SEQ ID NO: 283993 - DNA, 21 bp, Artificial sequence
  SiRNA target sequence
gagatacgtttcccgttaata

SEQ ID NO: 283994 - DNA, 21 bp, Artificial sequence
  SiRNA target sequence
agatacgtttcccgttaatag

SEQ ID NO: 283995 - DNA, 21 bp, Artificial sequence
  SiRNA target sequence
gatacgtttcccgttaatagc

SEQ ID NO: 283996 - DNA, 21 bp, Artificial sequence
  SiRNA target sequence
atacgtttcccgttaatagcc

SEQ ID NO: 283997 - DNA, 21 bp, Artificial sequence
  SiRNA target sequence
tacgtttcccgttaatagcct

SEQ ID NO: 283998 - DNA, 21 bp, Artificial sequence
  SiRNA target sequence
acgtttcccgttaatagcctg

SEQ ID NO: 283999 - DNA, 21 bp, Artificial sequence
  SiRNA target sequence
cgtttcccgttaatagcctga

SEQ ID NO: 284000 - DNA, 21 bp, Artificial sequence
  SiRNA target sequence
gtttcccgttaatagcctgat

SEQ ID NO: 284001 - DNA, 21 bp, Artificial sequence
  SiRNA target sequence
tttcccgttaatagcctgatt

SEQ ID NO: 284002 - DNA, 21 bp, Artificial sequence
  SiRNA target sequence
ttcccgttaatagcctgattg

SEQ ID NO: 284003 - DNA, 21 bp, Artificial sequence
  SiRNA target sequence
tcccgttaatagcctgattga

SEQ ID NO: 284004 - DNA, 21 bp, Artificial sequence
  SiRNA target sequence
cccgttaatagcctgattgaa

SEQ ID NO: 284005 - DNA, 21 bp, Artificial sequence
  SiRNA target sequence
ccgttaatagcctgattgaag

SEQ ID NO: 284006 - DNA, 21 bp, Artificial sequence
  SiRNA target sequence
cgttaatagcctgattgaagc

SEQ ID NO: 284007 - DNA, 21 bp, Artificial sequence
  SiRNA target sequence
gttaatagcctgattgaagca

SEQ ID NO: 284008 - DNA, 21 bp, Artificial sequence
  SiRNA target sequence
ttaatagcctgattgaagcac

SEQ ID NO: 284009 - DNA, 21 bp, Artificial sequence
  SiRNA target sequence
taatagcctgattgaagcacc

SEQ ID NO: 284010 - DNA, 21 bp, Artificial sequence
  SiRNA target sequence
aatagcctgattgaagcaccc

SEQ ID NO: 284011 - DNA, 21 bp, Artificial sequence
  SiRNA target sequence
atagcctgattgaagcacccc

SEQ ID NO: 284012 - DNA, 21 bp, Artificial sequence
  SiRNA target sequence
tagcctgattgaagcaccccg

SEQ ID NO: 284013 - DNA, 21 bp, Artificial sequence
  SiRNA target sequence
agcctgattgaagcaccccgt

SEQ ID NO: 284014 - DNA, 21 bp, Artificial sequence
  SiRNA target sequence
gcctgattgaagcaccccgtc

SEQ ID NO: 284015 - DNA, 21 bp, Artificial sequence
  SiRNA target sequence
cctgattgaagcaccccgtct

SEQ ID NO: 284016 - DNA, 21 bp, Artificial sequence
  SiRNA target sequence
ctgattgaagcaccccgtctt

SEQ ID NO: 284017 - DNA, 21 bp, Artificial sequence
  SiRNA target sequence
tgattgaagcaccccgtcttg

SEQ ID NO: 284018 - DNA, 21 bp, Artificial sequence
  SiRNA target sequence
gattgaagcaccccgtcttga

SEQ ID NO: 284019 - DNA, 21 bp, Artificial sequence
  SiRNA target sequence
attgaagcaccccgtcttgat

SEQ ID NO: 284020 - DNA, 21 bp, Artificial sequence
  SiRNA target sequence
ttgaagcaccccgtcttgata

SEQ ID NO: 284021 - DNA, 21 bp, Artificial sequence
  SiRNA target sequence
tgaagcaccccgtcttgatat

SEQ ID NO: 284022 - DNA, 21 bp, Artificial sequence
  SiRNA target sequence
gaagcaccccgtcttgatata

SEQ ID NO: 284023 - DNA, 21 bp, Artificial sequence
  SiRNA target sequence
aagcaccccgtcttgatatag

SEQ ID NO: 284024 - DNA, 21 bp, Artificial sequence
  SiRNA target sequence
agcaccccgtcttgatatagc

SEQ ID NO: 284025 - DNA, 21 bp, Artificial sequence
  SiRNA target sequence
gcaccccgtcttgatatagct

SEQ ID NO: 284026 - DNA, 21 bp, Artificial sequence
  SiRNA target sequence
caccccgtcttgatatagctc

SEQ ID NO: 284027 - DNA, 21 bp, Artificial sequence
  SiRNA target sequence
accccgtcttgatatagctca

SEQ ID NO: 284028 - DNA, 21 bp, Artificial sequence
  SiRNA target sequence
ccccgtcttgatatagctcaa

SEQ ID NO: 284029 - DNA, 21 bp, Artificial sequence
  SiRNA target sequence
cccgtcttgatatagctcaat

SEQ ID NO: 284030 - DNA, 21 bp, Artificial sequence
  SiRNA target sequence
ccgtcttgatatagctcaata

SEQ ID NO: 284031 - DNA, 21 bp, Artificial sequence
  SiRNA target sequence
cgtcttgatatagctcaatac

SEQ ID NO: 284032 - DNA, 21 bp, Artificial sequence
  SiRNA target sequence
gtcttgatatagctcaatacg

SEQ ID NO: 284033 - DNA, 21 bp, Artificial sequence
  SiRNA target sequence
tcttgatatagctcaatacgt

SEQ ID NO: 284034 - DNA, 21 bp, Artificial sequence
  SiRNA target sequence
cttgatatagctcaatacgtc

SEQ ID NO: 284035 - DNA, 21 bp, Artificial sequence
  SiRNA target sequence
ttgatatagctcaatacgtcg

SEQ ID NO: 284036 - DNA, 21 bp, Artificial sequence
  SiRNA target sequence
tgatatagctcaatacgtcga

SEQ ID NO: 284037 - DNA, 21 bp, Artificial sequence
  SiRNA target sequence
gatatagctcaatacgtcgat

SEQ ID NO: 284038 - DNA, 21 bp, Artificial sequence
  SiRNA target sequence
atatagctcaatacgtcgata

SEQ ID NO: 284039 - DNA, 21 bp, Artificial sequence
  SiRNA target sequence
tatagctcaatacgtcgatac

SEQ ID NO: 284040 - DNA, 21 bp, Artificial sequence
  SiRNA target sequence
atagctcaatacgtcgatact

SEQ ID NO: 284041 - DNA, 21 bp, Artificial sequence
  SiRNA target sequence
tagctcaatacgtcgatactg

SEQ ID NO: 284042 - DNA, 21 bp, Artificial sequence
  SiRNA target sequence
agctcaatacgtcgatactga

SEQ ID NO: 284043 - DNA, 21 bp, Artificial sequence
  SiRNA target sequence
gctcaatacgtcgatactgaa

SEQ ID NO: 284044 - DNA, 21 bp, Artificial sequence
  SiRNA target sequence
ctcaatacgtcgatactgaaa

SEQ ID NO: 284045 - DNA, 21 bp, Artificial sequence
  SiRNA target sequence
tcaatacgtcgatactgaaac

SEQ ID NO: 284046 - DNA, 21 bp, Artificial sequence
  SiRNA target sequence
caatacgtcgatactgaaacc

SEQ ID NO: 284047 - DNA, 21 bp, Artificial sequence
  SiRNA target sequence
aatacgtcgatactgaaacca

SEQ ID NO: 284048 - DNA, 21 bp, Artificial sequence
  SiRNA target sequence
atacgtcgatactgaaaccaa

SEQ ID NO: 284049 - DNA, 21 bp, Artificial sequence
  SiRNA target sequence
tacgtcgatactgaaaccaag

SEQ ID NO: 284050 - DNA, 21 bp, Artificial sequence
  SiRNA target sequence
acgtcgatactgaaaccaagg

SEQ ID NO: 284051 - DNA, 21 bp, Artificial sequence
  SiRNA target sequence
cgtcgatactgaaaccaagga

SEQ ID NO: 284052 - DNA, 21 bp, Artificial sequence
  SiRNA target sequence
gtcgatactgaaaccaaggag

SEQ ID NO: 284053 - DNA, 21 bp, Artificial sequence
  SiRNA target sequence
tcgatactgaaaccaaggagg

SEQ ID NO: 284054 - DNA, 21 bp, Artificial sequence
  SiRNA target sequence
cgatactgaaaccaaggaggc

SEQ ID NO: 284055 - DNA, 21 bp, Artificial sequence
  SiRNA target sequence
gatactgaaaccaaggaggct

SEQ ID NO: 284056 - DNA, 21 bp, Artificial sequence
  SiRNA target sequence
atactgaaaccaaggaggcta

SEQ ID NO: 284057 - DNA, 21 bp, Artificial sequence
  SiRNA target sequence
tactgaaaccaaggaggctaa

SEQ ID NO: 284058 - DNA, 21 bp, Artificial sequence
  SiRNA target sequence
actgaaaccaaggaggctaaa

SEQ ID NO: 284059 - DNA, 21 bp, Artificial sequence
  SiRNA target sequence
ctgaaaccaaggaggctaaat

SEQ ID NO: 284060 - DNA, 21 bp, Artificial sequence
  SiRNA target sequence
tgaaaccaaggaggctaaata

SEQ ID NO: 284061 - DNA, 21 bp, Artificial sequence
  SiRNA target sequence
gaaaccaaggaggctaaatat

SEQ ID NO: 284062 - DNA, 21 bp, Artificial sequence
  SiRNA target sequence
aaaccaaggaggctaaatatg

SEQ ID NO: 284063 - DNA, 21 bp, Artificial sequence
  SiRNA target sequence
aaccaaggaggctaaatatgg

SEQ ID NO: 284064 - DNA, 21 bp, Artificial sequence
  SiRNA target sequence
accaaggaggctaaatatgga

SEQ ID NO: 284065 - DNA, 21 bp, Artificial sequence
  SiRNA target sequence
ccaaggaggctaaatatggat

SEQ ID NO: 284066 - DNA, 21 bp, Artificial sequence
  SiRNA target sequence
caaggaggctaaatatggatt

SEQ ID NO: 284067 - DNA, 21 bp, Artificial sequence
  SiRNA target sequence
aaggaggctaaatatggattt

SEQ ID NO: 284068 - DNA, 21 bp, Artificial sequence
  SiRNA target sequence
aggaggctaaatatggattta

SEQ ID NO: 284069 - DNA, 21 bp, Artificial sequence
  SiRNA target sequence
ggaggctaaatatggatttag

SEQ ID NO: 284070 - DNA, 21 bp, Artificial sequence
  SiRNA target sequence
gaggctaaatatggatttagt

SEQ ID NO: 284071 - DNA, 21 bp, Artificial sequence
  SiRNA target sequence
aggctaaatatggatttagtt

SEQ ID NO: 284072 - DNA, 21 bp, Artificial sequence
  SiRNA target sequence
ggctaaatatggatttagttt

SEQ ID NO: 284073 - DNA, 21 bp, Artificial sequence
  SiRNA target sequence
gctaaatatggatttagtttc

SEQ ID NO: 284074 - DNA, 21 bp, Artificial sequence
  SiRNA target sequence
ctaaatatggatttagtttct

SEQ ID NO: 284075 - DNA, 21 bp, Artificial sequence
  SiRNA target sequence
taaatatggatttagtttctt

SEQ ID NO: 284076 - DNA, 21 bp, Artificial sequence
  SiRNA target sequence
aaatatggatttagtttcttt

SEQ ID NO: 284077 - DNA, 21 bp, Artificial sequence
  SiRNA target sequence
aatatggatttagtttctttt

SEQ ID NO: 284078 - DNA, 21 bp, Artificial sequence
  SiRNA target sequence
atatggatttagtttcttttg

SEQ ID NO: 284079 - DNA, 21 bp, Artificial sequence
  SiRNA target sequence
tatggatttagtttcttttgg

SEQ ID NO: 284080 - DNA, 21 bp, Artificial sequence
  SiRNA target sequence
atggatttagtttcttttggt

SEQ ID NO: 284081 - DNA, 21 bp, Artificial sequence
  SiRNA target sequence
tggatttagtttcttttggtc

SEQ ID NO: 284082 - DNA, 21 bp, Artificial sequence
  SiRNA target sequence
ggatttagtttcttttggtcg

SEQ ID NO: 284083 - DNA, 21 bp, Artificial sequence
  SiRNA target sequence
gatttagtttcttttggtcgg

SEQ ID NO: 284084 - DNA, 21 bp, Artificial sequence
  SiRNA target sequence
atttagtttcttttggtcggc

SEQ ID NO: 284085 - DNA, 21 bp, Artificial sequence
  SiRNA target sequence
tttagtttcttttggtcggct

SEQ ID NO: 284086 - DNA, 21 bp, Artificial sequence
  SiRNA target sequence
ttagtttcttttggtcggctc

SEQ ID NO: 284087 - DNA, 21 bp, Artificial sequence
  SiRNA target sequence
tagtttcttttggtcggctcc

SEQ ID NO: 284088 - DNA, 21 bp, Artificial sequence
  SiRNA target sequence
agtttcttttggtcggctccc

SEQ ID NO: 284089 - DNA, 21 bp, Artificial sequence
  SiRNA target sequence
gtttcttttggtcggctccca

SEQ ID NO: 284090 - DNA, 21 bp, Artificial sequence
  SiRNA target sequence
tttcttttggtcggctcccac

SEQ ID NO: 284091 - DNA, 21 bp, Artificial sequence
  SiRNA target sequence
ttcttttggtcggctcccact

SEQ ID NO: 284092 - DNA, 21 bp, Artificial sequence
  SiRNA target sequence
tcttttggtcggctcccacta

SEQ ID NO: 284093 - DNA, 21 bp, Artificial sequence
  SiRNA target sequence
cttttggtcggctcccactac

SEQ ID NO: 284094 - DNA, 21 bp, Artificial sequence
  SiRNA target sequence
ttttggtcggctcccactacc

SEQ ID NO: 284095 - DNA, 21 bp, Artificial sequence
  SiRNA target sequence
tttggtcggctcccactacct

SEQ ID NO: 284096 - DNA, 21 bp, Artificial sequence
  SiRNA target sequence
ttggtcggctcccactacctt

SEQ ID NO: 284097 - DNA, 21 bp, Artificial sequence
  SiRNA target sequence
tggtcggctcccactacctta

SEQ ID NO: 284098 - DNA, 21 bp, Artificial sequence
  SiRNA target sequence
ggtcggctcccactaccttaa

SEQ ID NO: 284099 - DNA, 21 bp, Artificial sequence
  SiRNA target sequence
gtcggctcccactaccttaaa

SEQ ID NO: 284100 - DNA, 21 bp, Artificial sequence
  SiRNA target sequence
tcggctcccactaccttaaac

SEQ ID NO: 284101 - DNA, 21 bp, Artificial sequence
  SiRNA target sequence
cggctcccactaccttaaaca

SEQ ID NO: 284102 - DNA, 21 bp, Artificial sequence
  SiRNA target sequence
ggctcccactaccttaaacat

SEQ ID NO: 284103 - DNA, 21 bp, Artificial sequence
  SiRNA target sequence
gctcccactaccttaaacata

SEQ ID NO: 284104 - DNA, 21 bp, Artificial sequence
  SiRNA target sequence
ctcccactaccttaaacatag

SEQ ID NO: 284105 - DNA, 21 bp, Artificial sequence
  SiRNA target sequence
tcccactaccttaaacatagt

SEQ ID NO: 284106 - DNA, 21 bp, Artificial sequence
  SiRNA target sequence
cccactaccttaaacatagtg

SEQ ID NO: 284107 - DNA, 21 bp, Artificial sequence
  SiRNA target sequence
ccactaccttaaacatagtgg

SEQ ID NO: 284108 - DNA, 21 bp, Artificial sequence
  SiRNA target sequence
cactaccttaaacatagtggc

SEQ ID NO: 284109 - DNA, 21 bp, Artificial sequence
  SiRNA target sequence
actaccttaaacatagtggcg

SEQ ID NO: 284110 - DNA, 21 bp, Artificial sequence
  SiRNA target sequence
ctaccttaaacatagtggcgg

SEQ ID NO: 284111 - DNA, 21 bp, Artificial sequence
  SiRNA target sequence
taccttaaacatagtggcgga

SEQ ID NO: 284112 - DNA, 21 bp, Artificial sequence
  SiRNA target sequence
accttaaacatagtggcggag

SEQ ID NO: 284113 - DNA, 21 bp, Artificial sequence
  SiRNA target sequence
ccttaaacatagtggcggaga

SEQ ID NO: 284114 - DNA, 21 bp, Artificial sequence
  SiRNA target sequence
cttaaacatagtggcggagat

SEQ ID NO: 284115 - DNA, 21 bp, Artificial sequence
  SiRNA target sequence
ttaaacatagtggcggagatg

SEQ ID NO: 284116 - DNA, 21 bp, Artificial sequence
  SiRNA target sequence
taaacatagtggcggagatgt

SEQ ID NO: 284117 - DNA, 21 bp, Artificial sequence
  SiRNA target sequence
aaacatagtggcggagatgta

SEQ ID NO: 284118 - DNA, 21 bp, Artificial sequence
  SiRNA target sequence
aacatagtggcggagatgtat

SEQ ID NO: 284119 - DNA, 21 bp, Artificial sequence
  SiRNA target sequence
acatagtggcggagatgtatg

SEQ ID NO: 284120 - DNA, 21 bp, Artificial sequence
  SiRNA target sequence
catagtggcggagatgtatgc

SEQ ID NO: 284121 - DNA, 21 bp, Artificial sequence
  SiRNA target sequence
atagtggcggagatgtatgcg

SEQ ID NO: 284122 - DNA, 21 bp, Artificial sequence
  SiRNA target sequence
tagtggcggagatgtatgcgc

SEQ ID NO: 284123 - DNA, 21 bp, Artificial sequence
  SiRNA target sequence
agtggcggagatgtatgcgct

SEQ ID NO: 284124 - DNA, 21 bp, Artificial sequence
  SiRNA target sequence
gtggcggagatgtatgcgcta

SEQ ID NO: 284125 - DNA, 21 bp, Artificial sequence
  SiRNA target sequence
tggcggagatgtatgcgctat

SEQ ID NO: 284126 - DNA, 21 bp, Artificial sequence
  SiRNA target sequence
ggcggagatgtatgcgctata

SEQ ID NO: 284127 - DNA, 21 bp, Artificial sequence
  SiRNA target sequence
gcggagatgtatgcgctatat

SEQ ID NO: 284128 - DNA, 21 bp, Artificial sequence
  SiRNA target sequence
cggagatgtatgcgctatatc

SEQ ID NO: 284129 - DNA, 21 bp, Artificial sequence
  SiRNA target sequence
ggagatgtatgcgctatatcg

SEQ ID NO: 284130 - DNA, 21 bp, Artificial sequence
  SiRNA target sequence
gagatgtatgcgctatatcga

SEQ ID NO: 284131 - DNA, 21 bp, Artificial sequence
  SiRNA target sequence
agatgtatgcgctatatcgag

SEQ ID NO: 284132 - DNA, 21 bp, Artificial sequence
  SiRNA target sequence
gatgtatgcgctatatcgagg

SEQ ID NO: 284133 - DNA, 21 bp, Artificial sequence
  SiRNA target sequence
atgtatgcgctatatcgagga

SEQ ID NO: 284134 - DNA, 21 bp, Artificial sequence
  SiRNA target sequence
tgtatgcgctatatcgaggag

SEQ ID NO: 284135 - DNA, 21 bp, Artificial sequence
  SiRNA target sequence
gtatgcgctatatcgaggagg

SEQ ID NO: 284136 - DNA, 21 bp, Artificial sequence
  SiRNA target sequence
tatgcgctatatcgaggagga

SEQ ID NO: 284137 - DNA, 21 bp, Artificial sequence
  SiRNA target sequence
atgcgctatatcgaggaggag

SEQ ID NO: 284138 - DNA, 21 bp, Artificial sequence
  SiRNA target sequence
tgcgctatatcgaggaggagt

SEQ ID NO: 284139 - DNA, 21 bp, Artificial sequence
  SiRNA target sequence
gcgctatatcgaggaggagtt

SEQ ID NO: 284140 - DNA, 21 bp, Artificial sequence
  SiRNA target sequence
cgctatatcgaggaggagttc

SEQ ID NO: 284141 - DNA, 21 bp, Artificial sequence
  SiRNA target sequence
gctatatcgaggaggagttcg

SEQ ID NO: 284142 - DNA, 21 bp, Artificial sequence
  SiRNA target sequence
ctatatcgaggaggagttcga

SEQ ID NO: 284143 - DNA, 21 bp, Artificial sequence
  SiRNA target sequence
tatatcgaggaggagttcgag

SEQ ID NO: 284144 - DNA, 21 bp, Artificial sequence
  SiRNA target sequence
atatcgaggaggagttcgagt

SEQ ID NO: 284145 - DNA, 21 bp, Artificial sequence
  SiRNA target sequence
tatcgaggaggagttcgagtt

SEQ ID NO: 284146 - DNA, 21 bp, Artificial sequence
  SiRNA target sequence
atcgaggaggagttcgagtta

SEQ ID NO: 284147 - DNA, 21 bp, Artificial sequence
  SiRNA target sequence
tcgaggaggagttcgagttaa

SEQ ID NO: 284148 - DNA, 21 bp, Artificial sequence
  SiRNA target sequence
cgaggaggagttcgagttaaa

SEQ ID NO: 284149 - DNA, 21 bp, Artificial sequence
  SiRNA target sequence
gaggaggagttcgagttaaag

SEQ ID NO: 284150 - DNA, 21 bp, Artificial sequence
  SiRNA target sequence
aggaggagttcgagttaaagt

SEQ ID NO: 284151 - DNA, 21 bp, Artificial sequence
  SiRNA target sequence
ggaggagttcgagttaaagta

SEQ ID NO: 284152 - DNA, 21 bp, Artificial sequence
  SiRNA target sequence
gaggagttcgagttaaagtag

SEQ ID NO: 284153 - DNA, 21 bp, Artificial sequence
  SiRNA target sequence
aggagttcgagttaaagtagt

SEQ ID NO: 284154 - DNA, 21 bp, Artificial sequence
  SiRNA target sequence
ggagttcgagttaaagtagtt

SEQ ID NO: 284155 - DNA, 21 bp, Artificial sequence
  SiRNA target sequence
gagttcgagttaaagtagtta

SEQ ID NO: 284156 - DNA, 21 bp, Artificial sequence
  SiRNA target sequence
agttcgagttaaagtagttac

SEQ ID NO: 284157 - DNA, 21 bp, Artificial sequence
  SiRNA target sequence
gttcgagttaaagtagttact

SEQ ID NO: 284158 - DNA, 21 bp, Artificial sequence
  SiRNA target sequence
ttcgagttaaagtagttactg

SEQ ID NO: 284159 - DNA, 21 bp, Artificial sequence
  SiRNA target sequence
tcgagttaaagtagttactga

SEQ ID NO: 284160 - DNA, 21 bp, Artificial sequence
  SiRNA target sequence
cgagttaaagtagttactgag

SEQ ID NO: 284161 - DNA, 21 bp, Artificial sequence
  SiRNA target sequence
gagttaaagtagttactgaga

SEQ ID NO: 284162 - DNA, 21 bp, Artificial sequence
  SiRNA target sequence
agttaaagtagttactgagaa

SEQ ID NO: 284163 - DNA, 21 bp, Artificial sequence
  SiRNA target sequence
gttaaagtagttactgagaag

SEQ ID NO: 284164 - DNA, 21 bp, Artificial sequence
  SiRNA target sequence
ttaaagtagttactgagaagg

SEQ ID NO: 284165 - DNA, 21 bp, Artificial sequence
  SiRNA target sequence
taaagtagttactgagaaggg

SEQ ID NO: 284166 - DNA, 21 bp, Artificial sequence
  SiRNA target sequence
aaagtagttactgagaagggt

SEQ ID NO: 284167 - DNA, 21 bp, Artificial sequence
  SiRNA target sequence
aagtagttactgagaagggtg

SEQ ID NO: 284168 - DNA, 21 bp, Artificial sequence
  SiRNA target sequence
agtagttactgagaagggtgt

SEQ ID NO: 284169 - DNA, 21 bp, Artificial sequence
  SiRNA target sequence
gtagttactgagaagggtgtg

SEQ ID NO: 284170 - DNA, 21 bp, Artificial sequence
  SiRNA target sequence
tagttactgagaagggtgtgg

SEQ ID NO: 284171 - DNA, 21 bp, Artificial sequence
  SiRNA target sequence
agttactgagaagggtgtgga

SEQ ID NO: 284172 - DNA, 21 bp, Artificial sequence
  SiRNA target sequence
gttactgagaagggtgtggat

SEQ ID NO: 284173 - DNA, 21 bp, Artificial sequence
  SiRNA target sequence
ttactgagaagggtgtggatt

SEQ ID NO: 284174 - DNA, 21 bp, Artificial sequence
  SiRNA target sequence
tactgagaagggtgtggatta

SEQ ID NO: 284175 - DNA, 21 bp, Artificial sequence
  SiRNA target sequence
actgagaagggtgtggattac

SEQ ID NO: 284176 - DNA, 21 bp, Artificial sequence
  SiRNA target sequence
ctgagaagggtgtggattacg

SEQ ID NO: 284177 - DNA, 21 bp, Artificial sequence
  SiRNA target sequence
tgagaagggtgtggattacgt

SEQ ID NO: 284178 - DNA, 21 bp, Artificial sequence
  SiRNA target sequence
gagaagggtgtggattacgtc

SEQ ID NO: 284179 - DNA, 21 bp, Artificial sequence
  SiRNA target sequence
agaagggtgtggattacgtcc

SEQ ID NO: 284180 - DNA, 21 bp, Artificial sequence
  SiRNA target sequence
gaagggtgtggattacgtccg

SEQ ID NO: 284181 - DNA, 21 bp, Artificial sequence
  SiRNA target sequence
aagggtgtggattacgtccga

SEQ ID NO: 284182 - DNA, 21 bp, Artificial sequence
  SiRNA target sequence
agggtgtggattacgtccgag

SEQ ID NO: 284183 - DNA, 21 bp, Artificial sequence
  SiRNA target sequence
gggtgtggattacgtccgagc

SEQ ID NO: 284184 - DNA, 21 bp, Artificial sequence
  SiRNA target sequence
ggtgtggattacgtccgagct

SEQ ID NO: 284185 - DNA, 21 bp, Artificial sequence
  SiRNA target sequence
gtgtggattacgtccgagcta

SEQ ID NO: 284186 - DNA, 21 bp, Artificial sequence
  SiRNA target sequence
tgtggattacgtccgagctac

SEQ ID NO: 284187 - DNA, 21 bp, Artificial sequence
  SiRNA target sequence
gtggattacgtccgagctact

SEQ ID NO: 284188 - DNA, 21 bp, Artificial sequence
  SiRNA target sequence
tggattacgtccgagctacta

SEQ ID NO: 284189 - DNA, 21 bp, Artificial sequence
  SiRNA target sequence
ggattacgtccgagctactat

SEQ ID NO: 284190 - DNA, 21 bp, Artificial sequence
  SiRNA target sequence
gattacgtccgagctactata

SEQ ID NO: 284191 - DNA, 21 bp, Artificial sequence
  SiRNA target sequence
attacgtccgagctactataa

SEQ ID NO: 284192 - DNA, 21 bp, Artificial sequence
  SiRNA target sequence
ttacgtccgagctactataag

SEQ ID NO: 284193 - DNA, 21 bp, Artificial sequence
  SiRNA target sequence
tacgtccgagctactataagt

SEQ ID NO: 284194 - DNA, 21 bp, Artificial sequence
  SiRNA target sequence
acgtccgagctactataagtc

SEQ ID NO: 284195 - DNA, 21 bp, Artificial sequence
  SiRNA target sequence
cgtccgagctactataagtcc

SEQ ID NO: 284196 - DNA, 21 bp, Artificial sequence
  SiRNA target sequence
gtccgagctactataagtcct

SEQ ID NO: 284197 - DNA, 21 bp, Artificial sequence
  SiRNA target sequence
tccgagctactataagtcctc

SEQ ID NO: 284198 - DNA, 21 bp, Artificial sequence
  SiRNA target sequence
ccgagctactataagtcctca

SEQ ID NO: 284199 - DNA, 21 bp, Artificial sequence
  SiRNA target sequence
cgagctactataagtcctcaa

SEQ ID NO: 284200 - DNA, 21 bp, Artificial sequence
  SiRNA target sequence
gagctactataagtcctcaac

SEQ ID NO: 284201 - DNA, 21 bp, Artificial sequence
  SiRNA target sequence
agctactataagtcctcaaca

SEQ ID NO: 284202 - DNA, 21 bp, Artificial sequence
  SiRNA target sequence
gctactataagtcctcaacag

SEQ ID NO: 284203 - DNA, 21 bp, Artificial sequence
  SiRNA target sequence
ctactataagtcctcaacaga

SEQ ID NO: 284204 - DNA, 21 bp, Artificial sequence
  SiRNA target sequence
tactataagtcctcaacagac

SEQ ID NO: 284205 - DNA, 21 bp, Artificial sequence
  SiRNA target sequence
actataagtcctcaacagact

SEQ ID NO: 284206 - DNA, 21 bp, Artificial sequence
  SiRNA target sequence
ctataagtcctcaacagactt

SEQ ID NO: 284207 - DNA, 21 bp, Artificial sequence
  SiRNA target sequence
tataagtcctcaacagactta

SEQ ID NO: 284208 - DNA, 21 bp, Artificial sequence
  SiRNA target sequence
ataagtcctcaacagacttat

SEQ ID NO: 284209 - DNA, 21 bp, Artificial sequence
  SiRNA target sequence
taagtcctcaacagacttatg

SEQ ID NO: 284210 - DNA, 21 bp, Artificial sequence
  SiRNA target sequence
aagtcctcaacagacttatgg

SEQ ID NO: 284211 - DNA, 21 bp, Artificial sequence
  SiRNA target sequence
agtcctcaacagacttatggt

SEQ ID NO: 284212 - DNA, 21 bp, Artificial sequence
  SiRNA target sequence
gtcctcaacagacttatggta

SEQ ID NO: 284213 - DNA, 21 bp, Artificial sequence
  SiRNA target sequence
tcctcaacagacttatggtag

SEQ ID NO: 284214 - DNA, 21 bp, Artificial sequence
  SiRNA target sequence
cctcaacagacttatggtagt

SEQ ID NO: 284215 - DNA, 21 bp, Artificial sequence
  SiRNA target sequence
ctcaacagacttatggtagtg

SEQ ID NO: 284216 - DNA, 21 bp, Artificial sequence
  SiRNA target sequence
tcaacagacttatggtagtga

SEQ ID NO: 284217 - DNA, 21 bp, Artificial sequence
  SiRNA target sequence
caacagacttatggtagtgac

SEQ ID NO: 284218 - DNA, 21 bp, Artificial sequence
  SiRNA target sequence
aacagacttatggtagtgacg

SEQ ID NO: 284219 - DNA, 21 bp, Artificial sequence
  SiRNA target sequence
acagacttatggtagtgacgt

SEQ ID NO: 284220 - DNA, 21 bp, Artificial sequence
  SiRNA target sequence
cagacttatggtagtgacgtc

SEQ ID NO: 284221 - DNA, 21 bp, Artificial sequence
  SiRNA target sequence
agacttatggtagtgacgtcg

SEQ ID NO: 284222 - DNA, 21 bp, Artificial sequence
  SiRNA target sequence
gacttatggtagtgacgtcgc

SEQ ID NO: 284223 - DNA, 21 bp, Artificial sequence
  SiRNA target sequence
acttatggtagtgacgtcgct

SEQ ID NO: 284224 - DNA, 21 bp, Artificial sequence
  SiRNA target sequence
cttatggtagtgacgtcgctc

SEQ ID NO: 284225 - DNA, 21 bp, Artificial sequence
  SiRNA target sequence
ttatggtagtgacgtcgctcc

SEQ ID NO: 284226 - DNA, 21 bp, Artificial sequence
  SiRNA target sequence
tatggtagtgacgtcgctcca

SEQ ID NO: 284227 - DNA, 21 bp, Artificial sequence
  SiRNA target sequence
atggtagtgacgtcgctccaa

SEQ ID NO: 284228 - DNA, 21 bp, Artificial sequence
  SiRNA target sequence
tggtagtgacgtcgctccaac

SEQ ID NO: 284229 - DNA, 21 bp, Artificial sequence
  SiRNA target sequence
ggtagtgacgtcgctccaact

SEQ ID NO: 284230 - DNA, 21 bp, Artificial sequence
  SiRNA target sequence
gtagtgacgtcgctccaacta

SEQ ID NO: 284231 - DNA, 21 bp, Artificial sequence
  SiRNA target sequence
tagtgacgtcgctccaactac

SEQ ID NO: 284232 - DNA, 21 bp, Artificial sequence
  SiRNA target sequence
agtgacgtcgctccaactacc

SEQ ID NO: 284233 - DNA, 21 bp, Artificial sequence
  SiRNA target sequence
gtgacgtcgctccaactaccc

SEQ ID NO: 284234 - DNA, 21 bp, Artificial sequence
  SiRNA target sequence
tgacgtcgctccaactaccca

SEQ ID NO: 284235 - DNA, 21 bp, Artificial sequence
  SiRNA target sequence
gacgtcgctccaactacccat

SEQ ID NO: 284236 - DNA, 21 bp, Artificial sequence
  SiRNA target sequence
acgtcgctccaactacccata

SEQ ID NO: 284237 - DNA, 21 bp, Artificial sequence
  SiRNA target sequence
cgtcgctccaactacccatat

SEQ ID NO: 284238 - DNA, 21 bp, Artificial sequence
  SiRNA target sequence
gtcgctccaactacccatatt

SEQ ID NO: 284239 - DNA, 21 bp, Artificial sequence
  SiRNA target sequence
tcgctccaactacccatatta

SEQ ID NO: 284240 - DNA, 21 bp, Artificial sequence
  SiRNA target sequence
cgctccaactacccatattag

SEQ ID NO: 284241 - DNA, 21 bp, Artificial sequence
  SiRNA target sequence
gctccaactacccatattagt

SEQ ID NO: 284242 - DNA, 21 bp, Artificial sequence
  SiRNA target sequence
ctccaactacccatattagta

SEQ ID NO: 284243 - DNA, 21 bp, Artificial sequence
  SiRNA target sequence
tccaactacccatattagtac

SEQ ID NO: 284244 - DNA, 21 bp, Artificial sequence
  SiRNA target sequence
ccaactacccatattagtact

SEQ ID NO: 284245 - DNA, 21 bp, Artificial sequence
  SiRNA target sequence
caactacccatattagtactc

SEQ ID NO: 284246 - DNA, 21 bp, Artificial sequence
  SiRNA target sequence
aactacccatattagtactcc

SEQ ID NO: 284247 - DNA, 21 bp, Artificial sequence
  SiRNA target sequence
actacccatattagtactcct

SEQ ID NO: 284248 - DNA, 21 bp, Artificial sequence
  SiRNA target sequence
ctacccatattagtactcctt

SEQ ID NO: 284249 - DNA, 21 bp, Artificial sequence
  SiRNA target sequence
tacccatattagtactccttt

SEQ ID NO: 284250 - DNA, 21 bp, Artificial sequence
  SiRNA target sequence
acccatattagtactcctttg

SEQ ID NO: 284251 - DNA, 21 bp, Artificial sequence
  SiRNA target sequence
cccatattagtactcctttgg

SEQ ID NO: 284252 - DNA, 21 bp, Artificial sequence
  SiRNA target sequence
ccatattagtactcctttggc

SEQ ID NO: 284253 - DNA, 21 bp, Artificial sequence
  SiRNA target sequence
catattagtactcctttggca

SEQ ID NO: 284254 - DNA, 21 bp, Artificial sequence
  SiRNA target sequence
atattagtactcctttggcaa

SEQ ID NO: 284255 - DNA, 21 bp, Artificial sequence
  SiRNA target sequence
tattagtactcctttggcaat

SEQ ID NO: 284256 - DNA, 21 bp, Artificial sequence
  SiRNA target sequence
attagtactcctttggcaata

SEQ ID NO: 284257 - DNA, 21 bp, Artificial sequence
  SiRNA target sequence
ttagtactcctttggcaatag

SEQ ID NO: 284258 - DNA, 21 bp, Artificial sequence
  SiRNA target sequence
tagtactcctttggcaataga

SEQ ID NO: 284259 - DNA, 21 bp, Artificial sequence
  SiRNA target sequence
agtactcctttggcaatagaa

SEQ ID NO: 284260 - DNA, 21 bp, Artificial sequence
  SiRNA target sequence
gtactcctttggcaatagaac

SEQ ID NO: 284261 - DNA, 21 bp, Artificial sequence
  SiRNA target sequence
tactcctttggcaatagaaca

SEQ ID NO: 284262 - DNA, 21 bp, Artificial sequence
  SiRNA target sequence
actcctttggcaatagaacaa

SEQ ID NO: 284263 - DNA, 21 bp, Artificial sequence
  SiRNA target sequence
ctcctttggcaatagaacaaa

SEQ ID NO: 284264 - DNA, 21 bp, Artificial sequence
  SiRNA target sequence
tcctttggcaatagaacaaat

SEQ ID NO: 284265 - DNA, 21 bp, Artificial sequence
  SiRNA target sequence
cctttggcaatagaacaaata

SEQ ID NO: 284266 - DNA, 21 bp, Artificial sequence
  SiRNA target sequence
ctttggcaatagaacaaatac

SEQ ID NO: 284267 - DNA, 21 bp, Artificial sequence
  SiRNA target sequence
tttggcaatagaacaaatacc

SEQ ID NO: 284268 - DNA, 21 bp, Artificial sequence
  SiRNA target sequence
ttggcaatagaacaaatacca

SEQ ID NO: 284269 - DNA, 21 bp, Artificial sequence
  SiRNA target sequence
tggcaatagaacaaataccaa

SEQ ID NO: 284270 - DNA, 21 bp, Artificial sequence
  SiRNA target sequence
ggcaatagaacaaataccaat

SEQ ID NO: 284271 - DNA, 21 bp, Artificial sequence
  SiRNA target sequence
gcaatagaacaaataccaata

SEQ ID NO: 284272 - DNA, 21 bp, Artificial sequence
  SiRNA target sequence
caatagaacaaataccaataa

SEQ ID NO: 284273 - DNA, 21 bp, Artificial sequence
  SiRNA target sequence
aatagaacaaataccaataaa

SEQ ID NO: 284274 - DNA, 21 bp, Artificial sequence
  SiRNA target sequence
atagaacaaataccaataaag

SEQ ID NO: 284275 - DNA, 21 bp, Artificial sequence
  SiRNA target sequence
tagaacaaataccaataaagg

SEQ ID NO: 284276 - DNA, 21 bp, Artificial sequence
  SiRNA target sequence
agaacaaataccaataaaggg

SEQ ID NO: 284277 - DNA, 21 bp, Artificial sequence
  SiRNA target sequence
gaacaaataccaataaaggga

SEQ ID NO: 284278 - DNA, 21 bp, Artificial sequence
  SiRNA target sequence
aacaaataccaataaagggag

SEQ ID NO: 284279 - DNA, 21 bp, Artificial sequence
  SiRNA target sequence
acaaataccaataaagggagt

SEQ ID NO: 284280 - DNA, 21 bp, Artificial sequence
  SiRNA target sequence
caaataccaataaagggagtc

SEQ ID NO: 284281 - DNA, 21 bp, Artificial sequence
  SiRNA target sequence
aaataccaataaagggagtcg

SEQ ID NO: 284282 - DNA, 21 bp, Artificial sequence
  SiRNA target sequence
aataccaataaagggagtcgc

SEQ ID NO: 284283 - DNA, 21 bp, Artificial sequence
  SiRNA target sequence
ataccaataaagggagtcgca

SEQ ID NO: 284284 - DNA, 21 bp, Artificial sequence
  SiRNA target sequence
taccaataaagggagtcgcag

SEQ ID NO: 284285 - DNA, 21 bp, Artificial sequence
  SiRNA target sequence
accaataaagggagtcgcaga

SEQ ID NO: 284286 - DNA, 21 bp, Artificial sequence
  SiRNA target sequence
ccaataaagggagtcgcagag

SEQ ID NO: 284287 - DNA, 21 bp, Artificial sequence
  SiRNA target sequence
caataaagggagtcgcagagt

SEQ ID NO: 284288 - DNA, 21 bp, Artificial sequence
  SiRNA target sequence
aataaagggagtcgcagagtt

SEQ ID NO: 284289 - DNA, 21 bp, Artificial sequence
  SiRNA target sequence
ataaagggagtcgcagagttc

SEQ ID NO: 284290 - DNA, 21 bp, Artificial sequence
  SiRNA target sequence
taaagggagtcgcagagttcc

SEQ ID NO: 284291 - DNA, 21 bp, Artificial sequence
  SiRNA target sequence
aaagggagtcgcagagttcca

SEQ ID NO: 284292 - DNA, 21 bp, Artificial sequence
  SiRNA target sequence
aagggagtcgcagagttccaa

SEQ ID NO: 284293 - DNA, 21 bp, Artificial sequence
  SiRNA target sequence
agggagtcgcagagttccaaa

SEQ ID NO: 284294 - DNA, 21 bp, Artificial sequence
  SiRNA target sequence
gggagtcgcagagttccaaat

SEQ ID NO: 284295 - DNA, 21 bp, Artificial sequence
  SiRNA target sequence
ggagtcgcagagttccaaata

SEQ ID NO: 284296 - DNA, 21 bp, Artificial sequence
  SiRNA target sequence
gagtcgcagagttccaaatac

SEQ ID NO: 284297 - DNA, 21 bp, Artificial sequence
  SiRNA target sequence
agtcgcagagttccaaatacc

SEQ ID NO: 284298 - DNA, 21 bp, Artificial sequence
  SiRNA target sequence
gtcgcagagttccaaataccg

SEQ ID NO: 284299 - DNA, 21 bp, Artificial sequence
  SiRNA target sequence
tcgcagagttccaaataccgt

SEQ ID NO: 284300 - DNA, 21 bp, Artificial sequence
  SiRNA target sequence
cgcagagttccaaataccgta

SEQ ID NO: 284301 - DNA, 21 bp, Artificial sequence
  SiRNA target sequence
gcagagttccaaataccgtac

SEQ ID NO: 284302 - DNA, 21 bp, Artificial sequence
  SiRNA target sequence
cagagttccaaataccgtact

SEQ ID NO: 284303 - DNA, 21 bp, Artificial sequence
  SiRNA target sequence
agagttccaaataccgtacta

SEQ ID NO: 284304 - DNA, 21 bp, Artificial sequence
  SiRNA target sequence
gagttccaaataccgtactat

SEQ ID NO: 284305 - DNA, 21 bp, Artificial sequence
  SiRNA target sequence
agttccaaataccgtactatg

SEQ ID NO: 284306 - DNA, 21 bp, Artificial sequence
  SiRNA target sequence
gttccaaataccgtactatgc

SEQ ID NO: 284307 - DNA, 21 bp, Artificial sequence
  SiRNA target sequence
ttccaaataccgtactatgct

SEQ ID NO: 284308 - DNA, 21 bp, Artificial sequence
  SiRNA target sequence
tccaaataccgtactatgctc

SEQ ID NO: 284309 - DNA, 21 bp, Artificial sequence
  SiRNA target sequence
ccaaataccgtactatgctcc

SEQ ID NO: 284310 - DNA, 21 bp, Artificial sequence
  SiRNA target sequence
caaataccgtactatgctcca

SEQ ID NO: 284311 - DNA, 21 bp, Artificial sequence
  SiRNA target sequence
aaataccgtactatgctccat

SEQ ID NO: 284312 - DNA, 21 bp, Artificial sequence
  SiRNA target sequence
aataccgtactatgctccatg

SEQ ID NO: 284313 - DNA, 21 bp, Artificial sequence
  SiRNA target sequence
ataccgtactatgctccatgt

SEQ ID NO: 284314 - DNA, 21 bp, Artificial sequence
  SiRNA target sequence
taccgtactatgctccatgtt

SEQ ID NO: 284315 - DNA, 21 bp, Artificial sequence
  SiRNA target sequence
accgtactatgctccatgttt

SEQ ID NO: 284316 - DNA, 21 bp, Artificial sequence
  SiRNA target sequence
ccgtactatgctccatgttta

SEQ ID NO: 284317 - DNA, 21 bp, Artificial sequence
  SiRNA target sequence
cgtactatgctccatgtttat

SEQ ID NO: 284318 - DNA, 21 bp, Artificial sequence
  SiRNA target sequence
gtactatgctccatgtttatc

SEQ ID NO: 284319 - DNA, 21 bp, Artificial sequence
  SiRNA target sequence
tactatgctccatgtttatca

SEQ ID NO: 284320 - DNA, 21 bp, Artificial sequence
  SiRNA target sequence
actatgctccatgtttatcat

SEQ ID NO: 284321 - DNA, 21 bp, Artificial sequence
  SiRNA target sequence
ctatgctccatgtttatcatc

SEQ ID NO: 284322 - DNA, 21 bp, Artificial sequence
  SiRNA target sequence
tatgctccatgtttatcatct

SEQ ID NO: 284323 - DNA, 21 bp, Artificial sequence
  SiRNA target sequence
atgctccatgtttatcatctt

SEQ ID NO: 284324 - DNA, 21 bp, Artificial sequence
  SiRNA target sequence
tgctccatgtttatcatcttc

SEQ ID NO: 284325 - DNA, 21 bp, Artificial sequence
  SiRNA target sequence
gctccatgtttatcatcttcg

SEQ ID NO: 284326 - DNA, 21 bp, Artificial sequence
  SiRNA target sequence
ctccatgtttatcatcttcgt

SEQ ID NO: 284327 - DNA, 21 bp, Artificial sequence
  SiRNA target sequence
tccatgtttatcatcttcgtt

SEQ ID NO: 284328 - DNA, 21 bp, Artificial sequence
  SiRNA target sequence
ccatgtttatcatcttcgttt

SEQ ID NO: 284329 - DNA, 21 bp, Artificial sequence
  SiRNA target sequence
catgtttatcatcttcgttta

SEQ ID NO: 284330 - DNA, 21 bp, Artificial sequence
  SiRNA target sequence
atgtttatcatcttcgtttag

SEQ ID NO: 284331 - DNA, 21 bp, Artificial sequence
  SiRNA target sequence
tgtttatcatcttcgtttaga

SEQ ID NO: 284332 - DNA, 21 bp, Artificial sequence
  SiRNA target sequence
gtttatcatcttcgtttagag

SEQ ID NO: 284333 - DNA, 21 bp, Artificial sequence
  SiRNA target sequence
tttatcatcttcgtttagagc

SEQ ID NO: 284334 - DNA, 21 bp, Artificial sequence
  SiRNA target sequence
ttatcatcttcgtttagagcg

SEQ ID NO: 284335 - DNA, 21 bp, Artificial sequence
  SiRNA target sequence
tatcatcttcgtttagagcga

SEQ ID NO: 284336 - DNA, 21 bp, Artificial sequence
  SiRNA target sequence
atcatcttcgtttagagcgaa

SEQ ID NO: 284337 - DNA, 21 bp, Artificial sequence
  SiRNA target sequence
tcatcttcgtttagagcgaat

SEQ ID NO: 284338 - DNA, 21 bp, Artificial sequence
  SiRNA target sequence
catcttcgtttagagcgaatt

SEQ ID NO: 284339 - DNA, 21 bp, Artificial sequence
  SiRNA target sequence
atcttcgtttagagcgaattc

SEQ ID NO: 284340 - DNA, 21 bp, Artificial sequence
  SiRNA target sequence
tcttcgtttagagcgaattca

SEQ ID NO: 284341 - DNA, 21 bp, Artificial sequence
  SiRNA target sequence
cttcgtttagagcgaattcag

SEQ ID NO: 284342 - DNA, 21 bp, Artificial sequence
  SiRNA target sequence
ttcgtttagagcgaattcaga

SEQ ID NO: 284343 - DNA, 21 bp, Artificial sequence
  SiRNA target sequence
tcgtttagagcgaattcagaa

SEQ ID NO: 284344 - DNA, 21 bp, Artificial sequence
  SiRNA target sequence
cgtttagagcgaattcagaaa

SEQ ID NO: 284345 - DNA, 21 bp, Artificial sequence
  SiRNA target sequence
gtttagagcgaattcagaaac

SEQ ID NO: 284346 - DNA, 21 bp, Artificial sequence
  SiRNA target sequence
tttagagcgaattcagaaaca

SEQ ID NO: 284347 - DNA, 21 bp, Artificial sequence
  SiRNA target sequence
ttagagcgaattcagaaacat

SEQ ID NO: 284348 - DNA, 21 bp, Artificial sequence
  SiRNA target sequence
tagagcgaattcagaaacatt

SEQ ID NO: 284349 - DNA, 21 bp, Artificial sequence
  SiRNA target sequence
agagcgaattcagaaacattt

SEQ ID NO: 284350 - DNA, 21 bp, Artificial sequence
  SiRNA target sequence
gagcgaattcagaaacatttt

SEQ ID NO: 284351 - DNA, 21 bp, Artificial sequence
  SiRNA target sequence
agcgaattcagaaacatttta

SEQ ID NO: 284352 - DNA, 21 bp, Artificial sequence
  SiRNA target sequence
gcgaattcagaaacattttac

SEQ ID NO: 284353 - DNA, 21 bp, Artificial sequence
  SiRNA target sequence
cgaattcagaaacattttact

SEQ ID NO: 284354 - DNA, 21 bp, Artificial sequence
  SiRNA target sequence
gaattcagaaacattttacta

SEQ ID NO: 284355 - DNA, 21 bp, Artificial sequence
  SiRNA target sequence
aattcagaaacattttactat

SEQ ID NO: 284356 - DNA, 21 bp, Artificial sequence
  SiRNA target sequence
attcagaaacattttactata

SEQ ID NO: 284357 - DNA, 21 bp, Artificial sequence
  SiRNA target sequence
ttcagaaacattttactatag

SEQ ID NO: 284358 - DNA, 21 bp, Artificial sequence
  SiRNA target sequence
tcagaaacattttactatagt

SEQ ID NO: 284359 - DNA, 21 bp, Artificial sequence
  SiRNA target sequence
cagaaacattttactatagtt

SEQ ID NO: 284360 - DNA, 21 bp, Artificial sequence
  SiRNA target sequence
agaaacattttactatagttc

SEQ ID NO: 284361 - DNA, 21 bp, Artificial sequence
  SiRNA target sequence
gaaacattttactatagttca

SEQ ID NO: 284362 - DNA, 21 bp, Artificial sequence
  SiRNA target sequence
aaacattttactatagttcag

SEQ ID NO: 284363 - DNA, 21 bp, Artificial sequence
  SiRNA target sequence
aacattttactatagttcagg

SEQ ID NO: 284364 - DNA, 21 bp, Artificial sequence
  SiRNA target sequence
acattttactatagttcaggt

SEQ ID NO: 284365 - DNA, 21 bp, Artificial sequence
  SiRNA target sequence
cattttactatagttcaggtc

SEQ ID NO: 284366 - DNA, 21 bp, Artificial sequence
  SiRNA target sequence
attttactatagttcaggtcg

SEQ ID NO: 284367 - DNA, 21 bp, Artificial sequence
  SiRNA target sequence
ttttactatagttcaggtcgg

SEQ ID NO: 284368 - DNA, 21 bp, Artificial sequence
  SiRNA target sequence
tttactatagttcaggtcgga

SEQ ID NO: 284369 - DNA, 21 bp, Artificial sequence
  SiRNA target sequence
ttactatagttcaggtcggaa

SEQ ID NO: 284370 - DNA, 21 bp, Artificial sequence
  SiRNA target sequence
tactatagttcaggtcggaat

SEQ ID NO: 284371 - DNA, 21 bp, Artificial sequence
  SiRNA target sequence
actatagttcaggtcggaata

SEQ ID NO: 284372 - DNA, 21 bp, Artificial sequence
  SiRNA target sequence
ctatagttcaggtcggaataa

SEQ ID NO: 284373 - DNA, 21 bp, Artificial sequence
  SiRNA target sequence
tatagttcaggtcggaataat

SEQ ID NO: 284374 - DNA, 21 bp, Artificial sequence
  SiRNA target sequence
atagttcaggtcggaataatc

SEQ ID NO: 284375 - DNA, 21 bp, Artificial sequence
  SiRNA target sequence
tagttcaggtcggaataatct

SEQ ID NO: 284376 - DNA, 21 bp, Artificial sequence
  SiRNA target sequence
agttcaggtcggaataatctc

SEQ ID NO: 284377 - DNA, 21 bp, Artificial sequence
  SiRNA target sequence
gttcaggtcggaataatctcg

SEQ ID NO: 284378 - DNA, 21 bp, Artificial sequence
  SiRNA target sequence
ttcaggtcggaataatctcga

SEQ ID NO: 284379 - DNA, 21 bp, Artificial sequence
  SiRNA target sequence
tcaggtcggaataatctcgat

SEQ ID NO: 284380 - DNA, 21 bp, Artificial sequence
  SiRNA target sequence
caggtcggaataatctcgata

SEQ ID NO: 284381 - DNA, 21 bp, Artificial sequence
  SiRNA target sequence
aggtcggaataatctcgatat

SEQ ID NO: 284382 - DNA, 21 bp, Artificial sequence
  SiRNA target sequence
ggtcggaataatctcgatata

SEQ ID NO: 284383 - DNA, 21 bp, Artificial sequence
  SiRNA target sequence
gtcggaataatctcgatatag

SEQ ID NO: 284384 - DNA, 21 bp, Artificial sequence
  SiRNA target sequence
tcggaataatctcgatatagc

SEQ ID NO: 284385 - DNA, 21 bp, Artificial sequence
  SiRNA target sequence
cggaataatctcgatatagcc

SEQ ID NO: 284386 - DNA, 21 bp, Artificial sequence
  SiRNA target sequence
ggaataatctcgatatagcca

SEQ ID NO: 284387 - DNA, 21 bp, Artificial sequence
  SiRNA target sequence
gaataatctcgatatagccac

SEQ ID NO: 284388 - DNA, 21 bp, Artificial sequence
  SiRNA target sequence
aataatctcgatatagccact

SEQ ID NO: 284389 - DNA, 21 bp, Artificial sequence
  SiRNA target sequence
ataatctcgatatagccactt

SEQ ID NO: 284390 - DNA, 21 bp, Artificial sequence
  SiRNA target sequence
taatctcgatatagccacttc

SEQ ID NO: 284391 - DNA, 21 bp, Artificial sequence
  SiRNA target sequence
aatctcgatatagccacttca

SEQ ID NO: 284392 - DNA, 21 bp, Artificial sequence
  SiRNA target sequence
atctcgatatagccacttcac

SEQ ID NO: 284393 - DNA, 21 bp, Artificial sequence
  SiRNA target sequence
tctcgatatagccacttcacc

SEQ ID NO: 284394 - DNA, 21 bp, Artificial sequence
  SiRNA target sequence
ctcgatatagccacttcacct

SEQ ID NO: 284395 - DNA, 21 bp, Artificial sequence
  SiRNA target sequence
tcgatatagccacttcacctc

SEQ ID NO: 284396 - DNA, 21 bp, Artificial sequence
  SiRNA target sequence
cgatatagccacttcacctcc

SEQ ID NO: 284397 - DNA, 21 bp, Artificial sequence
  SiRNA target sequence
gatatagccacttcacctccc

SEQ ID NO: 284398 - DNA, 21 bp, Artificial sequence
  SiRNA target sequence
atatagccacttcacctccct

SEQ ID NO: 284399 - DNA, 21 bp, Artificial sequence
  SiRNA target sequence
tatagccacttcacctccctc

SEQ ID NO: 284400 - DNA, 21 bp, Artificial sequence
  SiRNA target sequence
atagccacttcacctccctcc

SEQ ID NO: 284401 - DNA, 21 bp, Artificial sequence
  SiRNA target sequence
tagccacttcacctccctcca

SEQ ID NO: 284402 - DNA, 21 bp, Artificial sequence
  SiRNA target sequence
agccacttcacctccctccat

SEQ ID NO: 284403 - DNA, 21 bp, Artificial sequence
  SiRNA target sequence
gccacttcacctccctccatc

SEQ ID NO: 284404 - DNA, 21 bp, Artificial sequence
  SiRNA target sequence
ccacttcacctccctccatca

SEQ ID NO: 284405 - DNA, 21 bp, Artificial sequence
  SiRNA target sequence
cacttcacctccctccatcaa

SEQ ID NO: 284406 - DNA, 21 bp, Artificial sequence
  SiRNA target sequence
acttcacctccctccatcaat

SEQ ID NO: 284407 - DNA, 21 bp, Artificial sequence
  SiRNA target sequence
cttcacctccctccatcaatc

SEQ ID NO: 284408 - DNA, 21 bp, Artificial sequence
  SiRNA target sequence
ttcacctccctccatcaatcg

SEQ ID NO: 284409 - DNA, 21 bp, Artificial sequence
  SiRNA target sequence
tcacctccctccatcaatcgc

SEQ ID NO: 284410 - DNA, 21 bp, Artificial sequence
  SiRNA target sequence
cacctccctccatcaatcgct

SEQ ID NO: 284411 - DNA, 21 bp, Artificial sequence
  SiRNA target sequence
acctccctccatcaatcgcta

SEQ ID NO: 284412 - DNA, 21 bp, Artificial sequence
  SiRNA target sequence
cctccctccatcaatcgctat

SEQ ID NO: 284413 - DNA, 21 bp, Artificial sequence
  SiRNA target sequence
ctccctccatcaatcgctatt

SEQ ID NO: 284414 - DNA, 21 bp, Artificial sequence
  SiRNA target sequence
tccctccatcaatcgctatta

SEQ ID NO: 284415 - DNA, 21 bp, Artificial sequence
  SiRNA target sequence
ccctccatcaatcgctattat

SEQ ID NO: 284416 - DNA, 21 bp, Artificial sequence
  SiRNA target sequence
cctccatcaatcgctattatg

SEQ ID NO: 284417 - DNA, 21 bp, Artificial sequence
  SiRNA target sequence
ctccatcaatcgctattatgc

SEQ ID NO: 284418 - DNA, 21 bp, Artificial sequence
  SiRNA target sequence
tccatcaatcgctattatgcg

SEQ ID NO: 284419 - DNA, 21 bp, Artificial sequence
  SiRNA target sequence
ccatcaatcgctattatgcgg

SEQ ID NO: 284420 - DNA, 21 bp, Artificial sequence
  SiRNA target sequence
catcaatcgctattatgcggt

SEQ ID NO: 284421 - DNA, 21 bp, Artificial sequence
  SiRNA target sequence
atcaatcgctattatgcggtt

SEQ ID NO: 284422 - DNA, 21 bp, Artificial sequence
  SiRNA target sequence
tcaatcgctattatgcggttg

SEQ ID NO: 284423 - DNA, 21 bp, Artificial sequence
  SiRNA target sequence
caatcgctattatgcggttgg

SEQ ID NO: 284424 - DNA, 21 bp, Artificial sequence
  SiRNA target sequence
aatcgctattatgcggttggt

SEQ ID NO: 284425 - DNA, 21 bp, Artificial sequence
  SiRNA target sequence
atcgctattatgcggttggtg

SEQ ID NO: 284426 - DNA, 21 bp, Artificial sequence
  SiRNA target sequence
tcgctattatgcggttggtgc

SEQ ID NO: 284427 - DNA, 21 bp, Artificial sequence
  SiRNA target sequence
cgctattatgcggttggtgcg

SEQ ID NO: 284428 - DNA, 21 bp, Artificial sequence
  SiRNA target sequence
gctattatgcggttggtgcgg

SEQ ID NO: 284429 - DNA, 21 bp, Artificial sequence
  SiRNA target sequence
ctattatgcggttggtgcggg

SEQ ID NO: 284430 - DNA, 21 bp, Artificial sequence
  SiRNA target sequence
tattatgcggttggtgcggga

SEQ ID NO: 284431 - DNA, 21 bp, Artificial sequence
  SiRNA target sequence
attatgcggttggtgcgggag

SEQ ID NO: 284432 - DNA, 21 bp, Artificial sequence
  SiRNA target sequence
ttatgcggttggtgcgggaga

SEQ ID NO: 284433 - DNA, 21 bp, Artificial sequence
  SiRNA target sequence
tatgcggttggtgcgggagat

SEQ ID NO: 284434 - DNA, 21 bp, Artificial sequence
  SiRNA target sequence
atgcggttggtgcgggagatg

SEQ ID NO: 284435 - DNA, 21 bp, Artificial sequence
  SiRNA target sequence
tgcggttggtgcgggagatga

SEQ ID NO: 284436 - DNA, 21 bp, Artificial sequence
  SiRNA target sequence
gcggttggtgcgggagatgat

SEQ ID NO: 284437 - DNA, 21 bp, Artificial sequence
  SiRNA target sequence
cggttggtgcgggagatgata

SEQ ID NO: 284438 - DNA, 21 bp, Artificial sequence
  SiRNA target sequence
ggttggtgcgggagatgatat

SEQ ID NO: 284439 - DNA, 21 bp, Artificial sequence
  SiRNA target sequence
gttggtgcgggagatgatatg

SEQ ID NO: 284440 - DNA, 21 bp, Artificial sequence
  SiRNA target sequence
ttggtgcgggagatgatatgg

SEQ ID NO: 284441 - DNA, 21 bp, Artificial sequence
  SiRNA target sequence
tggtgcgggagatgatatgga

SEQ ID NO: 284442 - DNA, 21 bp, Artificial sequence
  SiRNA target sequence
ggtgcgggagatgatatggac

SEQ ID NO: 284443 - DNA, 21 bp, Artificial sequence
  SiRNA target sequence
gtgcgggagatgatatggact

SEQ ID NO: 284444 - DNA, 21 bp, Artificial sequence
  SiRNA target sequence
tgcgggagatgatatggactt

SEQ ID NO: 284445 - DNA, 21 bp, Artificial sequence
  SiRNA target sequence
gcgggagatgatatggacttt

SEQ ID NO: 284446 - DNA, 21 bp, Artificial sequence
  SiRNA target sequence
cgggagatgatatggactttt

SEQ ID NO: 284447 - DNA, 21 bp, Artificial sequence
  SiRNA target sequence
gggagatgatatggacttttc

SEQ ID NO: 284448 - DNA, 21 bp, Artificial sequence
  SiRNA target sequence
ggagatgatatggacttttcc

SEQ ID NO: 284449 - DNA, 21 bp, Artificial sequence
  SiRNA target sequence
gagatgatatggacttttcca

SEQ ID NO: 284450 - DNA, 21 bp, Artificial sequence
  SiRNA target sequence
agatgatatggacttttccat

SEQ ID NO: 284451 - DNA, 21 bp, Artificial sequence
  SiRNA target sequence
gatgatatggacttttccatc

SEQ ID NO: 284452 - DNA, 21 bp, Artificial sequence
  SiRNA target sequence
atgatatggacttttccatct

SEQ ID NO: 284453 - DNA, 21 bp, Artificial sequence
  SiRNA target sequence
tgatatggacttttccatctt

SEQ ID NO: 284454 - DNA, 21 bp, Artificial sequence
  SiRNA target sequence
gatatggacttttccatcttt

SEQ ID NO: 284455 - DNA, 21 bp, Artificial sequence
  SiRNA target sequence
atatggacttttccatcttta

SEQ ID NO: 284456 - DNA, 21 bp, Artificial sequence
  SiRNA target sequence
tatggacttttccatctttat

SEQ ID NO: 284457 - DNA, 21 bp, Artificial sequence
  SiRNA target sequence
atggacttttccatctttatc

SEQ ID NO: 284458 - DNA, 21 bp, Artificial sequence
  SiRNA target sequence
tggacttttccatctttatcg

SEQ ID NO: 284459 - DNA, 21 bp, Artificial sequence
  SiRNA target sequence
ggacttttccatctttatcgg

SEQ ID NO: 284460 - DNA, 21 bp, Artificial sequence
  SiRNA target sequence
gacttttccatctttatcggt

SEQ ID NO: 284461 - DNA, 21 bp, Artificial sequence
  SiRNA target sequence
acttttccatctttatcggta

SEQ ID NO: 284462 - DNA, 21 bp, Artificial sequence
  SiRNA target sequence
cttttccatctttatcggtac

SEQ ID NO: 284463 - DNA, 21 bp, Artificial sequence
  SiRNA target sequence
ttttccatctttatcggtacg

SEQ ID NO: 284464 - DNA, 21 bp, Artificial sequence
  SiRNA target sequence
tttccatctttatcggtacgc

SEQ ID NO: 284465 - DNA, 21 bp, Artificial sequence
  SiRNA target sequence
ttccatctttatcggtacgcc

SEQ ID NO: 284466 - DNA, 21 bp, Artificial sequence
  SiRNA target sequence
tccatctttatcggtacgccg

SEQ ID NO: 284467 - DNA, 21 bp, Artificial sequence
  SiRNA target sequence
ccatctttatcggtacgccgc

SEQ ID NO: 284468 - DNA, 21 bp, Artificial sequence
  SiRNA target sequence
catctttatcggtacgccgcc

SEQ ID NO: 284469 - DNA, 21 bp, Artificial sequence
  SiRNA target sequence
atctttatcggtacgccgccc

SEQ ID NO: 284470 - DNA, 21 bp, Artificial sequence
  SiRNA target sequence
tctttatcggtacgccgccct

SEQ ID NO: 284471 - DNA, 21 bp, Artificial sequence
  SiRNA target sequence
ctttatcggtacgccgccctg

SEQ ID NO: 284472 - DNA, 21 bp, Artificial sequence
  SiRNA target sequence
tttatcggtacgccgccctgt

SEQ ID NO: 284473 - DNA, 21 bp, Artificial sequence
  SiRNA target sequence
ttatcggtacgccgccctgta

SEQ ID NO: 284474 - DNA, 21 bp, Artificial sequence
  SiRNA target sequence
tatcggtacgccgccctgtat

SEQ ID NO: 284475 - DNA, 21 bp, Artificial sequence
  SiRNA target sequence
atcggtacgccgccctgtatt

SEQ ID NO: 284476 - DNA, 21 bp, Artificial sequence
  SiRNA target sequence
tcggtacgccgccctgtattc

SEQ ID NO: 284477 - DNA, 21 bp, Artificial sequence
  SiRNA target sequence
cggtacgccgccctgtattca

SEQ ID NO: 284478 - DNA, 21 bp, Artificial sequence
  SiRNA target sequence
ggtacgccgccctgtattcat

SEQ ID NO: 284479 - DNA, 21 bp, Artificial sequence
  SiRNA target sequence
gtacgccgccctgtattcatg

SEQ ID NO: 284480 - DNA, 21 bp, Artificial sequence
  SiRNA target sequence
tacgccgccctgtattcatgc

SEQ ID NO: 284481 - DNA, 21 bp, Artificial sequence
  SiRNA target sequence
acgccgccctgtattcatgca

SEQ ID NO: 284482 - DNA, 21 bp, Artificial sequence
  SiRNA target sequence
cgccgccctgtattcatgcat

SEQ ID NO: 284483 - DNA, 21 bp, Artificial sequence
  SiRNA target sequence
gccgccctgtattcatgcatc

SEQ ID NO: 284484 - DNA, 21 bp, Artificial sequence
  SiRNA target sequence
ccgccctgtattcatgcatct

SEQ ID NO: 284485 - DNA, 21 bp, Artificial sequence
  SiRNA target sequence
cgccctgtattcatgcatctc

SEQ ID NO: 284486 - DNA, 21 bp, Artificial sequence
  SiRNA target sequence
gccctgtattcatgcatctca

SEQ ID NO: 284487 - DNA, 21 bp, Artificial sequence
  SiRNA target sequence
ccctgtattcatgcatctcag

SEQ ID NO: 284488 - DNA, 21 bp, Artificial sequence
  SiRNA target sequence
cctgtattcatgcatctcaga

SEQ ID NO: 284489 - DNA, 21 bp, Artificial sequence
  SiRNA target sequence
ctgtattcatgcatctcagac

SEQ ID NO: 284490 - DNA, 21 bp, Artificial sequence
  SiRNA target sequence
tgtattcatgcatctcagacg

SEQ ID NO: 284491 - DNA, 21 bp, Artificial sequence
  SiRNA target sequence
gtattcatgcatctcagacgg

SEQ ID NO: 284492 - DNA, 21 bp, Artificial sequence
  SiRNA target sequence
tattcatgcatctcagacggc

SEQ ID NO: 284493 - DNA, 21 bp, Artificial sequence
  SiRNA target sequence
attcatgcatctcagacggct

SEQ ID NO: 284494 - DNA, 21 bp, Artificial sequence
  SiRNA target sequence
ttcatgcatctcagacggctc

SEQ ID NO: 284495 - DNA, 21 bp, Artificial sequence
  SiRNA target sequence
tcatgcatctcagacggctca

SEQ ID NO: 284496 - DNA, 21 bp, Artificial sequence
  SiRNA target sequence
catgcatctcagacggctcag

SEQ ID NO: 284497 - DNA, 21 bp, Artificial sequence
  SiRNA target sequence
atgcatctcagacggctcagt

SEQ ID NO: 284498 - DNA, 21 bp, Artificial sequence
  SiRNA target sequence
tgcatctcagacggctcagtt

SEQ ID NO: 284499 - DNA, 21 bp, Artificial sequence
  SiRNA target sequence
gcatctcagacggctcagttt

SEQ ID NO: 284500 - DNA, 21 bp, Artificial sequence
  SiRNA target sequence
catctcagacggctcagttta

SEQ ID NO: 284501 - DNA, 21 bp, Artificial sequence
  SiRNA target sequence
atctcagacggctcagtttac

SEQ ID NO: 284502 - DNA, 21 bp, Artificial sequence
  SiRNA target sequence
tctcagacggctcagtttacc

SEQ ID NO: 284503 - DNA, 21 bp, Artificial sequence
  SiRNA target sequence
ctcagacggctcagtttacca

SEQ ID NO: 284504 - DNA, 21 bp, Artificial sequence
  SiRNA target sequence
tcagacggctcagtttaccaa

SEQ ID NO: 284505 - DNA, 21 bp, Artificial sequence
  SiRNA target sequence
cagacggctcagtttaccaag

SEQ ID NO: 284506 - DNA, 21 bp, Artificial sequence
  SiRNA target sequence
agacggctcagtttaccaaga

SEQ ID NO: 284507 - DNA, 21 bp, Artificial sequence
  SiRNA target sequence
gacggctcagtttaccaagat

SEQ ID NO: 284508 - DNA, 21 bp, Artificial sequence
  SiRNA target sequence
acggctcagtttaccaagata

SEQ ID NO: 284509 - DNA, 21 bp, Artificial sequence
  SiRNA target sequence
cggctcagtttaccaagataa

SEQ ID NO: 284510 - DNA, 21 bp, Artificial sequence
  SiRNA target sequence
ggctcagtttaccaagataaa

SEQ ID NO: 284511 - DNA, 21 bp, Artificial sequence
  SiRNA target sequence
gctcagtttaccaagataaaa

SEQ ID NO: 284512 - DNA, 21 bp, Artificial sequence
  SiRNA target sequence
ctcagtttaccaagataaaac

SEQ ID NO: 284513 - DNA, 21 bp, Artificial sequence
  SiRNA target sequence
tcagtttaccaagataaaaca

SEQ ID NO: 284514 - DNA, 21 bp, Artificial sequence
  SiRNA target sequence
cagtttaccaagataaaacaa

SEQ ID NO: 284515 - DNA, 21 bp, Artificial sequence
  SiRNA target sequence
agtttaccaagataaaacaag

SEQ ID NO: 284516 - DNA, 21 bp, Artificial sequence
  SiRNA target sequence
gtttaccaagataaaacaagg

SEQ ID NO: 284517 - DNA, 21 bp, Artificial sequence
  SiRNA target sequence
tttaccaagataaaacaaggt

SEQ ID NO: 284518 - DNA, 21 bp, Artificial sequence
  SiRNA target sequence
ttaccaagataaaacaaggta

SEQ ID NO: 284519 - DNA, 21 bp, Artificial sequence
  SiRNA target sequence
taccaagataaaacaaggtaa

SEQ ID NO: 284520 - DNA, 21 bp, Artificial sequence
  SiRNA target sequence
accaagataaaacaaggtaaa

SEQ ID NO: 284521 - DNA, 21 bp, Artificial sequence
  SiRNA target sequence
ccaagataaaacaaggtaaag

SEQ ID NO: 284522 - DNA, 21 bp, Artificial sequence
  SiRNA target sequence
caagataaaacaaggtaaagt

SEQ ID NO: 284523 - DNA, 21 bp, Artificial sequence
  SiRNA target sequence
aagataaaacaaggtaaagtg

SEQ ID NO: 284524 - DNA, 21 bp, Artificial sequence
  SiRNA target sequence
agataaaacaaggtaaagtgt

SEQ ID NO: 284525 - DNA, 21 bp, Artificial sequence
  SiRNA target sequence
gataaaacaaggtaaagtgta

SEQ ID NO: 284526 - DNA, 21 bp, Artificial sequence
  SiRNA target sequence
ataaaacaaggtaaagtgtat

SEQ ID NO: 284527 - DNA, 21 bp, Artificial sequence
  SiRNA target sequence
taaaacaaggtaaagtgtatg

SEQ ID NO: 284528 - DNA, 21 bp, Artificial sequence
  SiRNA target sequence
aaaacaaggtaaagtgtatga

SEQ ID NO: 284529 - DNA, 21 bp, Artificial sequence
  SiRNA target sequence
aaacaaggtaaagtgtatgat

SEQ ID NO: 284530 - DNA, 21 bp, Artificial sequence
  SiRNA target sequence
aacaaggtaaagtgtatgatt

SEQ ID NO: 284531 - DNA, 21 bp, Artificial sequence
  SiRNA target sequence
acaaggtaaagtgtatgattt

SEQ ID NO: 284532 - DNA, 21 bp, Artificial sequence
  SiRNA target sequence
caaggtaaagtgtatgatttg

SEQ ID NO: 284533 - DNA, 21 bp, Artificial sequence
  SiRNA target sequence
aaggtaaagtgtatgatttga

SEQ ID NO: 284534 - DNA, 21 bp, Artificial sequence
  SiRNA target sequence
aggtaaagtgtatgatttgag

SEQ ID NO: 284535 - DNA, 21 bp, Artificial sequence
  SiRNA target sequence
ggtaaagtgtatgatttgagg

SEQ ID NO: 284536 - DNA, 21 bp, Artificial sequence
  SiRNA target sequence
gtaaagtgtatgatttgaggt

SEQ ID NO: 284537 - DNA, 21 bp, Artificial sequence
  SiRNA target sequence
taaagtgtatgatttgaggta

SEQ ID NO: 284538 - DNA, 21 bp, Artificial sequence
  SiRNA target sequence
aaagtgtatgatttgaggtat

SEQ ID NO: 284539 - DNA, 21 bp, Artificial sequence
  SiRNA target sequence
aagtgtatgatttgaggtatg

SEQ ID NO: 284540 - DNA, 21 bp, Artificial sequence
  SiRNA target sequence
agtgtatgatttgaggtatga

SEQ ID NO: 284541 - DNA, 21 bp, Artificial sequence
  SiRNA target sequence
gtgtatgatttgaggtatgat

SEQ ID NO: 284542 - DNA, 21 bp, Artificial sequence
  SiRNA target sequence
tgtatgatttgaggtatgatc

SEQ ID NO: 284543 - DNA, 21 bp, Artificial sequence
  SiRNA target sequence
gtatgatttgaggtatgatca

SEQ ID NO: 284544 - DNA, 21 bp, Artificial sequence
  SiRNA target sequence
tatgatttgaggtatgatcag

SEQ ID NO: 284545 - DNA, 21 bp, Artificial sequence
  SiRNA target sequence
atgatttgaggtatgatcagt

SEQ ID NO: 284546 - DNA, 21 bp, Artificial sequence
  SiRNA target sequence
tgatttgaggtatgatcagta

SEQ ID NO: 284547 - DNA, 21 bp, Artificial sequence
  SiRNA target sequence
gatttgaggtatgatcagtac

SEQ ID NO: 284548 - DNA, 21 bp, Artificial sequence
  SiRNA target sequence
atttgaggtatgatcagtacg

SEQ ID NO: 284549 - DNA, 21 bp, Artificial sequence
  SiRNA target sequence
tttgaggtatgatcagtacga

SEQ ID NO: 284550 - DNA, 21 bp, Artificial sequence
  SiRNA target sequence
ttgaggtatgatcagtacgac

SEQ ID NO: 284551 - DNA, 21 bp, Artificial sequence
  SiRNA target sequence
tgaggtatgatcagtacgacc

SEQ ID NO: 284552 - DNA, 21 bp, Artificial sequence
  SiRNA target sequence
gaggtatgatcagtacgaccc

SEQ ID NO: 284553 - DNA, 21 bp, Artificial sequence
  SiRNA target sequence
aggtatgatcagtacgacccc

SEQ ID NO: 284554 - DNA, 21 bp, Artificial sequence
  SiRNA target sequence
ggtatgatcagtacgacccct

SEQ ID NO: 284555 - DNA, 21 bp, Artificial sequence
  SiRNA target sequence
gtatgatcagtacgacccctt

SEQ ID NO: 284556 - DNA, 21 bp, Artificial sequence
  SiRNA target sequence
tatgatcagtacgaccccttc

SEQ ID NO: 284557 - DNA, 21 bp, Artificial sequence
  SiRNA target sequence
atgatcagtacgaccccttcc

SEQ ID NO: 284558 - DNA, 21 bp, Artificial sequence
  SiRNA target sequence
tgatcagtacgaccccttccg

SEQ ID NO: 284559 - DNA, 21 bp, Artificial sequence
  SiRNA target sequence
gatcagtacgaccccttccgg

SEQ ID NO: 284560 - DNA, 21 bp, Artificial sequence
  SiRNA target sequence
atcagtacgaccccttccggg

SEQ ID NO: 284561 - DNA, 21 bp, Artificial sequence
  SiRNA target sequence
tcagtacgaccccttccggga

SEQ ID NO: 284562 - DNA, 21 bp, Artificial sequence
  SiRNA target sequence
cagtacgaccccttccgggaa

SEQ ID NO: 284563 - DNA, 21 bp, Artificial sequence
  SiRNA target sequence
agtacgaccccttccgggaag

SEQ ID NO: 284564 - DNA, 21 bp, Artificial sequence
  SiRNA target sequence
gtacgaccccttccgggaagt

SEQ ID NO: 284565 - DNA, 21 bp, Artificial sequence
  SiRNA target sequence
tacgaccccttccgggaagtc

SEQ ID NO: 284566 - DNA, 21 bp, Artificial sequence
  SiRNA target sequence
acgaccccttccgggaagtcc

SEQ ID NO: 284567 - DNA, 21 bp, Artificial sequence
  SiRNA target sequence
cgaccccttccgggaagtcca

SEQ ID NO: 284568 - DNA, 21 bp, Artificial sequence
  SiRNA target sequence
gaccccttccgggaagtccag

SEQ ID NO: 284569 - DNA, 21 bp, Artificial sequence
  SiRNA target sequence
accccttccgggaagtccagg

SEQ ID NO: 284570 - DNA, 21 bp, Artificial sequence
  SiRNA target sequence
ccccttccgggaagtccagga

SEQ ID NO: 284571 - DNA, 21 bp, Artificial sequence
  SiRNA target sequence
cccttccgggaagtccaggac

SEQ ID NO: 284572 - DNA, 21 bp, Artificial sequence
  SiRNA target sequence
ccttccgggaagtccaggacg

SEQ ID NO: 284573 - DNA, 21 bp, Artificial sequence
  SiRNA target sequence
cttccgggaagtccaggacgg

SEQ ID NO: 284574 - DNA, 21 bp, Artificial sequence
  SiRNA target sequence
ttccgggaagtccaggacggt

SEQ ID NO: 284575 - DNA, 21 bp, Artificial sequence
  SiRNA target sequence
tccgggaagtccaggacggta

SEQ ID NO: 284576 - DNA, 21 bp, Artificial sequence
  SiRNA target sequence
ccgggaagtccaggacggtac

SEQ ID NO: 284577 - DNA, 21 bp, Artificial sequence
  SiRNA target sequence
cgggaagtccaggacggtacg

SEQ ID NO: 284578 - DNA, 21 bp, Artificial sequence
  SiRNA target sequence
gggaagtccaggacggtacgg

SEQ ID NO: 284579 - DNA, 21 bp, Artificial sequence
  SiRNA target sequence
ggaagtccaggacggtacggc

SEQ ID NO: 284580 - DNA, 21 bp, Artificial sequence
  SiRNA target sequence
gaagtccaggacggtacggct

SEQ ID NO: 284581 - DNA, 21 bp, Artificial sequence
  SiRNA target sequence
aagtccaggacggtacggctt

SEQ ID NO: 284582 - DNA, 21 bp, Artificial sequence
  SiRNA target sequence
agtccaggacggtacggcttt

SEQ ID NO: 284583 - DNA, 21 bp, Artificial sequence
  SiRNA target sequence
gtccaggacggtacggctttc

SEQ ID NO: 284584 - DNA, 21 bp, Artificial sequence
  SiRNA target sequence
tccaggacggtacggctttcc

SEQ ID NO: 284585 - DNA, 21 bp, Artificial sequence
  SiRNA target sequence
ccaggacggtacggctttcct

SEQ ID NO: 284586 - DNA, 21 bp, Artificial sequence
  SiRNA target sequence
caggacggtacggctttcctc

SEQ ID NO: 284587 - DNA, 21 bp, Artificial sequence
  SiRNA target sequence
aggacggtacggctttcctca

SEQ ID NO: 284588 - DNA, 21 bp, Artificial sequence
  SiRNA target sequence
ggacggtacggctttcctcaa

SEQ ID NO: 284589 - DNA, 21 bp, Artificial sequence
  SiRNA target sequence
gacggtacggctttcctcaat

SEQ ID NO: 284590 - DNA, 21 bp, Artificial sequence
  SiRNA target sequence
acggtacggctttcctcaatg

SEQ ID NO: 284591 - DNA, 21 bp, Artificial sequence
  SiRNA target sequence
cggtacggctttcctcaatgc

SEQ ID NO: 284592 - DNA, 21 bp, Artificial sequence
  SiRNA target sequence
ggtacggctttcctcaatgct

SEQ ID NO: 284593 - DNA, 21 bp, Artificial sequence
  SiRNA target sequence
gtacggctttcctcaatgctc

SEQ ID NO: 284594 - DNA, 21 bp, Artificial sequence
  SiRNA target sequence
tacggctttcctcaatgctcg

SEQ ID NO: 284595 - DNA, 21 bp, Artificial sequence
  SiRNA target sequence
acggctttcctcaatgctcga

SEQ ID NO: 284596 - DNA, 21 bp, Artificial sequence
  SiRNA target sequence
cggctttcctcaatgctcgaa

SEQ ID NO: 284597 - DNA, 21 bp, Artificial sequence
  SiRNA target sequence
ggctttcctcaatgctcgaag

SEQ ID NO: 284598 - DNA, 21 bp, Artificial sequence
  SiRNA target sequence
gctttcctcaatgctcgaagt

SEQ ID NO: 284599 - DNA, 21 bp, Artificial sequence
  SiRNA target sequence
ctttcctcaatgctcgaagta

SEQ ID NO: 284600 - DNA, 21 bp, Artificial sequence
  SiRNA target sequence
tttcctcaatgctcgaagtat

SEQ ID NO: 284601 - DNA, 21 bp, Artificial sequence
  SiRNA target sequence
ttcctcaatgctcgaagtatt

SEQ ID NO: 284602 - DNA, 21 bp, Artificial sequence
  SiRNA target sequence
tcctcaatgctcgaagtattg

SEQ ID NO: 284603 - DNA, 21 bp, Artificial sequence
  SiRNA target sequence
cctcaatgctcgaagtattga

SEQ ID NO: 284604 - DNA, 21 bp, Artificial sequence
  SiRNA target sequence
ctcaatgctcgaagtattgag

SEQ ID NO: 284605 - DNA, 21 bp, Artificial sequence
  SiRNA target sequence
tcaatgctcgaagtattgagg

SEQ ID NO: 284606 - DNA, 21 bp, Artificial sequence
  SiRNA target sequence
caatgctcgaagtattgagga

SEQ ID NO: 284607 - DNA, 21 bp, Artificial sequence
  SiRNA target sequence
aatgctcgaagtattgaggat

SEQ ID NO: 284608 - DNA, 21 bp, Artificial sequence
  SiRNA target sequence
atgctcgaagtattgaggata

SEQ ID NO: 284609 - DNA, 21 bp, Artificial sequence
  SiRNA target sequence
tgctcgaagtattgaggatag

SEQ ID NO: 284610 - DNA, 21 bp, Artificial sequence
  SiRNA target sequence
gctcgaagtattgaggatagc

SEQ ID NO: 284611 - DNA, 21 bp, Artificial sequence
  SiRNA target sequence
ctcgaagtattgaggatagcg

SEQ ID NO: 284612 - DNA, 21 bp, Artificial sequence
  SiRNA target sequence
tcgaagtattgaggatagcga

SEQ ID NO: 284613 - DNA, 21 bp, Artificial sequence
  SiRNA target sequence
cgaagtattgaggatagcgat

SEQ ID NO: 284614 - DNA, 21 bp, Artificial sequence
  SiRNA target sequence
gaagtattgaggatagcgatt

SEQ ID NO: 284615 - DNA, 21 bp, Artificial sequence
  SiRNA target sequence
aagtattgaggatagcgattt

SEQ ID NO: 284616 - DNA, 21 bp, Artificial sequence
  SiRNA target sequence
agtattgaggatagcgatttg

SEQ ID NO: 284617 - DNA, 21 bp, Artificial sequence
  SiRNA target sequence
gtattgaggatagcgatttgt

SEQ ID NO: 284618 - DNA, 21 bp, Artificial sequence
  SiRNA target sequence
tattgaggatagcgatttgtt

SEQ ID NO: 284619 - DNA, 21 bp, Artificial sequence
  SiRNA target sequence
attgaggatagcgatttgttg

SEQ ID NO: 284620 - DNA, 21 bp, Artificial sequence
  SiRNA target sequence
ttgaggatagcgatttgttgt

SEQ ID NO: 284621 - DNA, 21 bp, Artificial sequence
  SiRNA target sequence
tgaggatagcgatttgttgtg

SEQ ID NO: 284622 - DNA, 21 bp, Artificial sequence
  SiRNA target sequence
gaggatagcgatttgttgtga

SEQ ID NO: 284623 - DNA, 21 bp, Artificial sequence
  SiRNA target sequence
aggatagcgatttgttgtgag

SEQ ID NO: 284624 - DNA, 21 bp, Artificial sequence
  SiRNA target sequence
ggatagcgatttgttgtgagc

SEQ ID NO: 284625 - DNA, 21 bp, Artificial sequence
  SiRNA target sequence
gatagcgatttgttgtgagct

SEQ ID NO: 284626 - DNA, 21 bp, Artificial sequence
  SiRNA target sequence
atagcgatttgttgtgagctc

SEQ ID NO: 284627 - DNA, 21 bp, Artificial sequence
  SiRNA target sequence
tagcgatttgttgtgagctcc

SEQ ID NO: 284628 - DNA, 21 bp, Artificial sequence
  SiRNA target sequence
agcgatttgttgtgagctcct

SEQ ID NO: 284629 - DNA, 21 bp, Artificial sequence
  SiRNA target sequence
gcgatttgttgtgagctcctt

SEQ ID NO: 284630 - DNA, 21 bp, Artificial sequence
  SiRNA target sequence
cgatttgttgtgagctccttt

SEQ ID NO: 284631 - DNA, 21 bp, Artificial sequence
  SiRNA target sequence
gatttgttgtgagctccttta

SEQ ID NO: 284632 - DNA, 21 bp, Artificial sequence
  SiRNA target sequence
atttgttgtgagctcctttag

SEQ ID NO: 284633 - DNA, 21 bp, Artificial sequence
  SiRNA target sequence
tttgttgtgagctcctttaga

SEQ ID NO: 284634 - DNA, 21 bp, Artificial sequence
  SiRNA target sequence
ttgttgtgagctcctttagag

SEQ ID NO: 284635 - DNA, 21 bp, Artificial sequence
  SiRNA target sequence
tgttgtgagctcctttagagg

SEQ ID NO: 284636 - DNA, 21 bp, Artificial sequence
  SiRNA target sequence
gttgtgagctcctttagaggg

SEQ ID NO: 284637 - DNA, 21 bp, Artificial sequence
  SiRNA target sequence
ttgtgagctcctttagaggga

SEQ ID NO: 284638 - DNA, 21 bp, Artificial sequence
  SiRNA target sequence
tgtgagctcctttagagggag

SEQ ID NO: 284639 - DNA, 21 bp, Artificial sequence
  SiRNA target sequence
gtgagctcctttagagggagg

SEQ ID NO: 284640 - DNA, 21 bp, Artificial sequence
  SiRNA target sequence
tgagctcctttagagggaggg

SEQ ID NO: 284641 - DNA, 21 bp, Artificial sequence
  SiRNA target sequence
gagctcctttagagggagggc

SEQ ID NO: 284642 - DNA, 21 bp, Artificial sequence
  SiRNA target sequence
agctcctttagagggagggct

SEQ ID NO: 284643 - DNA, 21 bp, Artificial sequence
  SiRNA target sequence
gctcctttagagggagggctc

SEQ ID NO: 284644 - DNA, 21 bp, Artificial sequence
  SiRNA target sequence
ctcctttagagggagggctca

SEQ ID NO: 284645 - DNA, 21 bp, Artificial sequence
  SiRNA target sequence
tcctttagagggagggctcac

SEQ ID NO: 284646 - DNA, 21 bp, Artificial sequence
  SiRNA target sequence
cctttagagggagggctcact

SEQ ID NO: 284647 - DNA, 21 bp, Artificial sequence
  SiRNA target sequence
ctttagagggagggctcactt

SEQ ID NO: 284648 - DNA, 21 bp, Artificial sequence
  SiRNA target sequence
tttagagggagggctcacttt

SEQ ID NO: 284649 - DNA, 21 bp, Artificial sequence
  SiRNA target sequence
ttagagggagggctcacttta

SEQ ID NO: 284650 - DNA, 21 bp, Artificial sequence
  SiRNA target sequence
tagagggagggctcactttat

SEQ ID NO: 284651 - DNA, 21 bp, Artificial sequence
  SiRNA target sequence
agagggagggctcactttatc

SEQ ID NO: 284652 - DNA, 21 bp, Artificial sequence
  SiRNA target sequence
gagggagggctcactttatct

SEQ ID NO: 284653 - DNA, 21 bp, Artificial sequence
  SiRNA target sequence
agggagggctcactttatcta

SEQ ID NO: 284654 - DNA, 21 bp, Artificial sequence
  SiRNA target sequence
gggagggctcactttatctat

SEQ ID NO: 284655 - DNA, 21 bp, Artificial sequence
  SiRNA target sequence
ggagggctcactttatctatt

SEQ ID NO: 284656 - DNA, 21 bp, Artificial sequence
  SiRNA target sequence
gagggctcactttatctattg

SEQ ID NO: 284657 - DNA, 21 bp, Artificial sequence
  SiRNA target sequence
agggctcactttatctattgc

SEQ ID NO: 284658 - DNA, 21 bp, Artificial sequence
  SiRNA target sequence
gggctcactttatctattgct

SEQ ID NO: 284659 - DNA, 21 bp, Artificial sequence
  SiRNA target sequence
ggctcactttatctattgctt

SEQ ID NO: 284660 - DNA, 21 bp, Artificial sequence
  SiRNA target sequence
gctcactttatctattgctta

SEQ ID NO: 284661 - DNA, 21 bp, Artificial sequence
  SiRNA target sequence
ctcactttatctattgcttaa

SEQ ID NO: 284662 - DNA, 21 bp, Artificial sequence
  SiRNA target sequence
tcactttatctattgcttaat

SEQ ID NO: 284663 - DNA, 21 bp, Artificial sequence
  SiRNA target sequence
gtaaaccttaggctttcatct

SEQ ID NO: 284664 - DNA, 21 bp, Artificial sequence
  SiRNA target sequence
taaaccttaggctttcatcta

SEQ ID NO: 284665 - DNA, 21 bp, Artificial sequence
  SiRNA target sequence
aaaccttaggctttcatctat

SEQ ID NO: 284666 - DNA, 21 bp, Artificial sequence
  SiRNA target sequence
aaccttaggctttcatctatg

SEQ ID NO: 284667 - DNA, 21 bp, Artificial sequence
  SiRNA target sequence
accttaggctttcatctatgg

SEQ ID NO: 284668 - DNA, 21 bp, Artificial sequence
  SiRNA target sequence
ccttaggctttcatctatgga

SEQ ID NO: 284669 - DNA, 21 bp, Artificial sequence
  SiRNA target sequence
cttaggctttcatctatggat

SEQ ID NO: 284670 - DNA, 21 bp, Artificial sequence
  SiRNA target sequence
ttaggctttcatctatggata

SEQ ID NO: 284671 - DNA, 21 bp, Artificial sequence
  SiRNA target sequence
taggctttcatctatggatag

SEQ ID NO: 284672 - DNA, 21 bp, Artificial sequence
  SiRNA target sequence
aggctttcatctatggataga

SEQ ID NO: 284673 - DNA, 21 bp, Artificial sequence
  SiRNA target sequence
ggctttcatctatggatagag

SEQ ID NO: 284674 - DNA, 21 bp, Artificial sequence
  SiRNA target sequence
gctttcatctatggatagagt

SEQ ID NO: 284675 - DNA, 21 bp, Artificial sequence
  SiRNA target sequence
ctttcatctatggatagagtc

SEQ ID NO: 284676 - DNA, 21 bp, Artificial sequence
  SiRNA target sequence
tttcatctatggatagagtcc

SEQ ID NO: 284677 - DNA, 21 bp, Artificial sequence
  SiRNA target sequence
ttcatctatggatagagtcct

SEQ ID NO: 284678 - DNA, 21 bp, Artificial sequence
  SiRNA target sequence
tcatctatggatagagtccta

SEQ ID NO: 284679 - DNA, 21 bp, Artificial sequence
  SiRNA target sequence
catctatggatagagtcctac

SEQ ID NO: 284680 - DNA, 21 bp, Artificial sequence
  SiRNA target sequence
atctatggatagagtcctacc

SEQ ID NO: 284681 - DNA, 21 bp, Artificial sequence
  SiRNA target sequence
tctatggatagagtcctacca

SEQ ID NO: 284682 - DNA, 21 bp, Artificial sequence
  SiRNA target sequence
ctatggatagagtcctaccat

SEQ ID NO: 284683 - DNA, 21 bp, Artificial sequence
  SiRNA target sequence
tatggatagagtcctaccatt

SEQ ID NO: 284684 - DNA, 21 bp, Artificial sequence
  SiRNA target sequence
atggatagagtcctaccatta

SEQ ID NO: 284685 - DNA, 21 bp, Artificial sequence
  SiRNA target sequence
tggatagagtcctaccattat

SEQ ID NO: 284686 - DNA, 21 bp, Artificial sequence
  SiRNA target sequence
ggatagagtcctaccattatc

SEQ ID NO: 284687 - DNA, 21 bp, Artificial sequence
  SiRNA target sequence
gatagagtcctaccattatcc

SEQ ID NO: 284688 - DNA, 21 bp, Artificial sequence
  SiRNA target sequence
atagagtcctaccattatcct

SEQ ID NO: 284689 - DNA, 21 bp, Artificial sequence
  SiRNA target sequence
tagagtcctaccattatcctt

SEQ ID NO: 284690 - DNA, 21 bp, Artificial sequence
  SiRNA target sequence
agagtcctaccattatccttc

SEQ ID NO: 284691 - DNA, 21 bp, Artificial sequence
  SiRNA target sequence
gagtcctaccattatccttca

SEQ ID NO: 284692 - DNA, 21 bp, Artificial sequence
  SiRNA target sequence
agtcctaccattatccttcat

SEQ ID NO: 284693 - DNA, 21 bp, Artificial sequence
  SiRNA target sequence
gtcctaccattatccttcatc

SEQ ID NO: 284694 - DNA, 21 bp, Artificial sequence
  SiRNA target sequence
tcctaccattatccttcatct

SEQ ID NO: 284695 - DNA, 21 bp, Artificial sequence
  SiRNA target sequence
cctaccattatccttcatcta

SEQ ID NO: 284696 - DNA, 21 bp, Artificial sequence
  SiRNA target sequence
ctaccattatccttcatctac

SEQ ID NO: 284697 - DNA, 21 bp, Artificial sequence
  SiRNA target sequence
taccattatccttcatctact

SEQ ID NO: 284698 - DNA, 21 bp, Artificial sequence
  SiRNA target sequence
accattatccttcatctacta

SEQ ID NO: 284699 - DNA, 21 bp, Artificial sequence
  SiRNA target sequence
ccattatccttcatctactac

SEQ ID NO: 284700 - DNA, 21 bp, Artificial sequence
  SiRNA target sequence
cattatccttcatctactact

SEQ ID NO: 284701 - DNA, 21 bp, Artificial sequence
  SiRNA target sequence
attatccttcatctactactc

SEQ ID NO: 284702 - DNA, 21 bp, Artificial sequence
  SiRNA target sequence
ttatccttcatctactactcc

SEQ ID NO: 284703 - DNA, 21 bp, Artificial sequence
  SiRNA target sequence
tatccttcatctactactcct

SEQ ID NO: 284704 - DNA, 21 bp, Artificial sequence
  SiRNA target sequence
atccttcatctactactcctt

SEQ ID NO: 284705 - DNA, 21 bp, Artificial sequence
  SiRNA target sequence
tccttcatctactactcctta

SEQ ID NO: 284706 - DNA, 21 bp, Artificial sequence
  SiRNA target sequence
ccttcatctactactccttag

SEQ ID NO: 284707 - DNA, 21 bp, Artificial sequence
  SiRNA target sequence
cttcatctactactccttagc

SEQ ID NO: 284708 - DNA, 21 bp, Artificial sequence
  SiRNA target sequence
ttcatctactactccttagct

SEQ ID NO: 284709 - DNA, 21 bp, Artificial sequence
  SiRNA target sequence
tcatctactactccttagctg

SEQ ID NO: 284710 - DNA, 21 bp, Artificial sequence
  SiRNA target sequence
catctactactccttagctga

SEQ ID NO: 284711 - DNA, 21 bp, Artificial sequence
  SiRNA target sequence
atctactactccttagctgag

SEQ ID NO: 284712 - DNA, 21 bp, Artificial sequence
  SiRNA target sequence
tctactactccttagctgagc

SEQ ID NO: 284713 - DNA, 21 bp, Artificial sequence
  SiRNA target sequence
ctactactccttagctgagca

SEQ ID NO: 284714 - DNA, 21 bp, Artificial sequence
  SiRNA target sequence
tactactccttagctgagcag

SEQ ID NO: 284715 - DNA, 21 bp, Artificial sequence
  SiRNA target sequence
actactccttagctgagcagt

SEQ ID NO: 284716 - DNA, 21 bp, Artificial sequence
  SiRNA target sequence
ctactccttagctgagcagtt

SEQ ID NO: 284717 - DNA, 21 bp, Artificial sequence
  SiRNA target sequence
tactccttagctgagcagtta

SEQ ID NO: 284718 - DNA, 21 bp, Artificial sequence
  SiRNA target sequence
actccttagctgagcagttac

SEQ ID NO: 284719 - DNA, 21 bp, Artificial sequence
  SiRNA target sequence
ctccttagctgagcagttacg

SEQ ID NO: 284720 - DNA, 21 bp, Artificial sequence
  SiRNA target sequence
tccttagctgagcagttacgc

SEQ ID NO: 284721 - DNA, 21 bp, Artificial sequence
  SiRNA target sequence
ccttagctgagcagttacgca

SEQ ID NO: 284722 - DNA, 21 bp, Artificial sequence
  SiRNA target sequence
cttagctgagcagttacgcat

SEQ ID NO: 284723 - DNA, 21 bp, Artificial sequence
  SiRNA target sequence
ttagctgagcagttacgcatt

SEQ ID NO: 284724 - DNA, 21 bp, Artificial sequence
  SiRNA target sequence
tagctgagcagttacgcattg

SEQ ID NO: 284725 - DNA, 21 bp, Artificial sequence
  SiRNA target sequence
agctgagcagttacgcattgc

SEQ ID NO: 284726 - DNA, 21 bp, Artificial sequence
  SiRNA target sequence
gctgagcagttacgcattgct

SEQ ID NO: 284727 - DNA, 21 bp, Artificial sequence
  SiRNA target sequence
ctgagcagttacgcattgctg

SEQ ID NO: 284728 - DNA, 21 bp, Artificial sequence
  SiRNA target sequence
tgagcagttacgcattgctgc

SEQ ID NO: 284729 - DNA, 21 bp, Artificial sequence
  SiRNA target sequence
gagcagttacgcattgctgcc

SEQ ID NO: 284730 - DNA, 21 bp, Artificial sequence
  SiRNA target sequence
agcagttacgcattgctgcca

SEQ ID NO: 284731 - DNA, 21 bp, Artificial sequence
  SiRNA target sequence
gcagttacgcattgctgccat

SEQ ID NO: 284732 - DNA, 21 bp, Artificial sequence
  SiRNA target sequence
cagttacgcattgctgccatc

SEQ ID NO: 284733 - DNA, 21 bp, Artificial sequence
  SiRNA target sequence
agttacgcattgctgccatca

SEQ ID NO: 284734 - DNA, 21 bp, Artificial sequence
  SiRNA target sequence
gttacgcattgctgccatcat

SEQ ID NO: 284735 - DNA, 21 bp, Artificial sequence
  SiRNA target sequence
ttacgcattgctgccatcatc

SEQ ID NO: 284736 - DNA, 21 bp, Artificial sequence
  SiRNA target sequence
tacgcattgctgccatcatct

SEQ ID NO: 284737 - DNA, 21 bp, Artificial sequence
  SiRNA target sequence
acgcattgctgccatcatctc

SEQ ID NO: 284738 - DNA, 21 bp, Artificial sequence
  SiRNA target sequence
cgcattgctgccatcatctct

SEQ ID NO: 284739 - DNA, 21 bp, Artificial sequence
  SiRNA target sequence
gcattgctgccatcatctcta

SEQ ID NO: 284740 - DNA, 21 bp, Artificial sequence
  SiRNA target sequence
cattgctgccatcatctctag

SEQ ID NO: 284741 - DNA, 21 bp, Artificial sequence
  SiRNA target sequence
attgctgccatcatctctagc

SEQ ID NO: 284742 - DNA, 21 bp, Artificial sequence
  SiRNA target sequence
ttgctgccatcatctctagca

SEQ ID NO: 284743 - DNA, 21 bp, Artificial sequence
  SiRNA target sequence
tgctgccatcatctctagcac

SEQ ID NO: 284744 - DNA, 21 bp, Artificial sequence
  SiRNA target sequence
gctgccatcatctctagcaca

SEQ ID NO: 284745 - DNA, 21 bp, Artificial sequence
  SiRNA target sequence
ctgccatcatctctagcacat

SEQ ID NO: 284746 - DNA, 21 bp, Artificial sequence
  SiRNA target sequence
tgccatcatctctagcacatt

SEQ ID NO: 284747 - DNA, 21 bp, Artificial sequence
  SiRNA target sequence
gccatcatctctagcacattc

SEQ ID NO: 284748 - DNA, 21 bp, Artificial sequence
  SiRNA target sequence
ccatcatctctagcacattcc

SEQ ID NO: 284749 - DNA, 21 bp, Artificial sequence
  SiRNA target sequence
catcatctctagcacattcca

SEQ ID NO: 284750 - DNA, 21 bp, Artificial sequence
  SiRNA target sequence
atcatctctagcacattccac

SEQ ID NO: 284751 - DNA, 21 bp, Artificial sequence
  SiRNA target sequence
tcatctctagcacattccaca

SEQ ID NO: 284752 - DNA, 21 bp, Artificial sequence
  SiRNA target sequence
catctctagcacattccacac

SEQ ID NO: 284753 - DNA, 21 bp, Artificial sequence
  SiRNA target sequence
atctctagcacattccacact

SEQ ID NO: 284754 - DNA, 21 bp, Artificial sequence
  SiRNA target sequence
tctctagcacattccacactc

SEQ ID NO: 284755 - DNA, 21 bp, Artificial sequence
  SiRNA target sequence
ctctagcacattccacactcc

SEQ ID NO: 284756 - DNA, 21 bp, Artificial sequence
  SiRNA target sequence
tctagcacattccacactccc

SEQ ID NO: 284757 - DNA, 21 bp, Artificial sequence
  SiRNA target sequence
ctagcacattccacactcccg

SEQ ID NO: 284758 - DNA, 21 bp, Artificial sequence
  SiRNA target sequence
tagcacattccacactcccgt

SEQ ID NO: 284759 - DNA, 21 bp, Artificial sequence
  SiRNA target sequence
agcacattccacactcccgtc

SEQ ID NO: 284760 - DNA, 21 bp, Artificial sequence
  SiRNA target sequence
gcacattccacactcccgtcg

SEQ ID NO: 284761 - DNA, 21 bp, Artificial sequence
  SiRNA target sequence
cacattccacactcccgtcgt

SEQ ID NO: 284762 - DNA, 21 bp, Artificial sequence
  SiRNA target sequence
acattccacactcccgtcgtt

SEQ ID NO: 284763 - DNA, 21 bp, Artificial sequence
  SiRNA target sequence
cattccacactcccgtcgttg

SEQ ID NO: 284764 - DNA, 21 bp, Artificial sequence
  SiRNA target sequence
attccacactcccgtcgttgt

SEQ ID NO: 284765 - DNA, 21 bp, Artificial sequence
  SiRNA target sequence
ttccacactcccgtcgttgtg

SEQ ID NO: 284766 - DNA, 21 bp, Artificial sequence
  SiRNA target sequence
tccacactcccgtcgttgtgt

SEQ ID NO: 284767 - DNA, 21 bp, Artificial sequence
  SiRNA target sequence
ccacactcccgtcgttgtgtt

SEQ ID NO: 284768 - DNA, 21 bp, Artificial sequence
  SiRNA target sequence
cacactcccgtcgttgtgttc

SEQ ID NO: 284769 - DNA, 21 bp, Artificial sequence
  SiRNA target sequence
acactcccgtcgttgtgttct

SEQ ID NO: 284770 - DNA, 21 bp, Artificial sequence
  SiRNA target sequence
cactcccgtcgttgtgttctc

SEQ ID NO: 284771 - DNA, 21 bp, Artificial sequence
  SiRNA target sequence
actcccgtcgttgtgttctcc

SEQ ID NO: 284772 - DNA, 21 bp, Artificial sequence
  SiRNA target sequence
ctcccgtcgttgtgttctcct

SEQ ID NO: 284773 - DNA, 21 bp, Artificial sequence
  SiRNA target sequence
tcccgtcgttgtgttctcctt

SEQ ID NO: 284774 - DNA, 21 bp, Artificial sequence
  SiRNA target sequence
cccgtcgttgtgttctccttg

SEQ ID NO: 284775 - DNA, 21 bp, Artificial sequence
  SiRNA target sequence
ccgtcgttgtgttctccttgg

SEQ ID NO: 284776 - DNA, 21 bp, Artificial sequence
  SiRNA target sequence
cgtcgttgtgttctccttgga

SEQ ID NO: 284777 - DNA, 21 bp, Artificial sequence
  SiRNA target sequence
gtcgttgtgttctccttggac

SEQ ID NO: 284778 - DNA, 21 bp, Artificial sequence
  SiRNA target sequence
tcgttgtgttctccttggacc

SEQ ID NO: 284779 - DNA, 21 bp, Artificial sequence
  SiRNA target sequence
cgttgtgttctccttggaccc

SEQ ID NO: 284780 - DNA, 21 bp, Artificial sequence
  SiRNA target sequence
gttgtgttctccttggaccct

SEQ ID NO: 284781 - DNA, 21 bp, Artificial sequence
  SiRNA target sequence
ttgtgttctccttggaccctc

SEQ ID NO: 284782 - DNA, 21 bp, Artificial sequence
  SiRNA target sequence
tgtgttctccttggaccctcg

SEQ ID NO: 284783 - DNA, 21 bp, Artificial sequence
  SiRNA target sequence
gtgttctccttggaccctcgt

SEQ ID NO: 284784 - DNA, 21 bp, Artificial sequence
  SiRNA target sequence
tgttctccttggaccctcgtt

SEQ ID NO: 284785 - DNA, 21 bp, Artificial sequence
  SiRNA target sequence
gttctccttggaccctcgttg

SEQ ID NO: 284786 - DNA, 21 bp, Artificial sequence
  SiRNA target sequence
ttctccttggaccctcgttgg

SEQ ID NO: 284787 - DNA, 21 bp, Artificial sequence
  SiRNA target sequence
tctccttggaccctcgttgga

SEQ ID NO: 284788 - DNA, 21 bp, Artificial sequence
  SiRNA target sequence
ctccttggaccctcgttggac

SEQ ID NO: 284789 - DNA, 21 bp, Artificial sequence
  SiRNA target sequence
tccttggaccctcgttggact

SEQ ID NO: 284790 - DNA, 21 bp, Artificial sequence
  SiRNA target sequence
ccttggaccctcgttggactg

SEQ ID NO: 284791 - DNA, 21 bp, Artificial sequence
  SiRNA target sequence
cttggaccctcgttggactga

SEQ ID NO: 284792 - DNA, 21 bp, Artificial sequence
  SiRNA target sequence
ttggaccctcgttggactgac

SEQ ID NO: 284793 - DNA, 21 bp, Artificial sequence
  SiRNA target sequence
tggaccctcgttggactgacg

SEQ ID NO: 284794 - DNA, 21 bp, Artificial sequence
  SiRNA target sequence
ggaccctcgttggactgacgc

SEQ ID NO: 284795 - DNA, 21 bp, Artificial sequence
  SiRNA target sequence
gaccctcgttggactgacgcc

SEQ ID NO: 284796 - DNA, 21 bp, Artificial sequence
  SiRNA target sequence
accctcgttggactgacgccg

SEQ ID NO: 284797 - DNA, 21 bp, Artificial sequence
  SiRNA target sequence
ccctcgttggactgacgccga

SEQ ID NO: 284798 - DNA, 21 bp, Artificial sequence
  SiRNA target sequence
cctcgttggactgacgccgac

SEQ ID NO: 284799 - DNA, 21 bp, Artificial sequence
  SiRNA target sequence
ctcgttggactgacgccgacg

SEQ ID NO: 284800 - DNA, 21 bp, Artificial sequence
  SiRNA target sequence
tcgttggactgacgccgacgc

SEQ ID NO: 284801 - DNA, 21 bp, Artificial sequence
  SiRNA target sequence
cgttggactgacgccgacgcc

SEQ ID NO: 284802 - DNA, 21 bp, Artificial sequence
  SiRNA target sequence
gttggactgacgccgacgccc

SEQ ID NO: 284803 - DNA, 21 bp, Artificial sequence
  SiRNA target sequence
ttggactgacgccgacgccct

SEQ ID NO: 284804 - DNA, 21 bp, Artificial sequence
  SiRNA target sequence
tggactgacgccgacgcccta

SEQ ID NO: 284805 - DNA, 21 bp, Artificial sequence
  SiRNA target sequence
ggactgacgccgacgccctat

SEQ ID NO: 284806 - DNA, 21 bp, Artificial sequence
  SiRNA target sequence
gactgacgccgacgccctatc

SEQ ID NO: 284807 - DNA, 21 bp, Artificial sequence
  SiRNA target sequence
actgacgccgacgccctatct

SEQ ID NO: 284808 - DNA, 21 bp, Artificial sequence
  SiRNA target sequence
ctgacgccgacgccctatctc

SEQ ID NO: 284809 - DNA, 21 bp, Artificial sequence
  SiRNA target sequence
tgacgccgacgccctatctca

SEQ ID NO: 284810 - DNA, 21 bp, Artificial sequence
  SiRNA target sequence
gacgccgacgccctatctcac

SEQ ID NO: 284811 - DNA, 21 bp, Artificial sequence
  SiRNA target sequence
acgccgacgccctatctcacc

SEQ ID NO: 284812 - DNA, 21 bp, Artificial sequence
  SiRNA target sequence
cgccgacgccctatctcacca

SEQ ID NO: 284813 - DNA, 21 bp, Artificial sequence
  SiRNA target sequence
gccgacgccctatctcaccaa

SEQ ID NO: 284814 - DNA, 21 bp, Artificial sequence
  SiRNA target sequence
ccgacgccctatctcaccaag

SEQ ID NO: 284815 - DNA, 21 bp, Artificial sequence
  SiRNA target sequence
cgacgccctatctcaccaagg

SEQ ID NO: 284816 - DNA, 21 bp, Artificial sequence
  SiRNA target sequence
gacgccctatctcaccaaggc

SEQ ID NO: 284817 - DNA, 21 bp, Artificial sequence
  SiRNA target sequence
acgccctatctcaccaaggcc

SEQ ID NO: 284818 - DNA, 21 bp, Artificial sequence
  SiRNA target sequence
cgccctatctcaccaaggcct

SEQ ID NO: 284819 - DNA, 21 bp, Artificial sequence
  SiRNA target sequence
gccctatctcaccaaggccta

SEQ ID NO: 284820 - DNA, 21 bp, Artificial sequence
  SiRNA target sequence
ccctatctcaccaaggcctac

SEQ ID NO: 284821 - DNA, 21 bp, Artificial sequence
  SiRNA target sequence
cctatctcaccaaggcctacg

SEQ ID NO: 284822 - DNA, 21 bp, Artificial sequence
  SiRNA target sequence
ctatctcaccaaggcctacgt

SEQ ID NO: 284823 - DNA, 21 bp, Artificial sequence
  SiRNA target sequence
tatctcaccaaggcctacgtt

SEQ ID NO: 284824 - DNA, 21 bp, Artificial sequence
  SiRNA target sequence
atctcaccaaggcctacgtta

SEQ ID NO: 284825 - DNA, 21 bp, Artificial sequence
  SiRNA target sequence
tctcaccaaggcctacgttat

SEQ ID NO: 284826 - DNA, 21 bp, Artificial sequence
  SiRNA target sequence
ctcaccaaggcctacgttatc

SEQ ID NO: 284827 - DNA, 21 bp, Artificial sequence
  SiRNA target sequence
tcaccaaggcctacgttatct

SEQ ID NO: 284828 - DNA, 21 bp, Artificial sequence
  SiRNA target sequence
caccaaggcctacgttatctc

SEQ ID NO: 284829 - DNA, 21 bp, Artificial sequence
  SiRNA target sequence
accaaggcctacgttatctca

SEQ ID NO: 284830 - DNA, 21 bp, Artificial sequence
  SiRNA target sequence
ccaaggcctacgttatctcag

SEQ ID NO: 284831 - DNA, 21 bp, Artificial sequence
  SiRNA target sequence
caaggcctacgttatctcagg

SEQ ID NO: 284832 - DNA, 21 bp, Artificial sequence
  SiRNA target sequence
aaggcctacgttatctcaggt

SEQ ID NO: 284833 - DNA, 21 bp, Artificial sequence
  SiRNA target sequence
aggcctacgttatctcaggtc

SEQ ID NO: 284834 - DNA, 21 bp, Artificial sequence
  SiRNA target sequence
ggcctacgttatctcaggtcc

SEQ ID NO: 284835 - DNA, 21 bp, Artificial sequence
  SiRNA target sequence
gcctacgttatctcaggtccg

SEQ ID NO: 284836 - DNA, 21 bp, Artificial sequence
  SiRNA target sequence
cctacgttatctcaggtccgg

SEQ ID NO: 284837 - DNA, 21 bp, Artificial sequence
  SiRNA target sequence
ctacgttatctcaggtccggc

SEQ ID NO: 284838 - DNA, 21 bp, Artificial sequence
  SiRNA target sequence
tacgttatctcaggtccggca

SEQ ID NO: 284839 - DNA, 21 bp, Artificial sequence
  SiRNA target sequence
acgttatctcaggtccggcaa

SEQ ID NO: 284840 - DNA, 21 bp, Artificial sequence
  SiRNA target sequence
cgttatctcaggtccggcaac

SEQ ID NO: 284841 - DNA, 21 bp, Artificial sequence
  SiRNA target sequence
gttatctcaggtccggcaacg

SEQ ID NO: 284842 - DNA, 21 bp, Artificial sequence
  SiRNA target sequence
ttatctcaggtccggcaacga

SEQ ID NO: 284843 - DNA, 21 bp, Artificial sequence
  SiRNA target sequence
tatctcaggtccggcaacgaa

SEQ ID NO: 284844 - DNA, 21 bp, Artificial sequence
  SiRNA target sequence
atctcaggtccggcaacgaac

SEQ ID NO: 284845 - DNA, 21 bp, Artificial sequence
  SiRNA target sequence
tctcaggtccggcaacgaact

SEQ ID NO: 284846 - DNA, 21 bp, Artificial sequence
  SiRNA target sequence
ctcaggtccggcaacgaactt

SEQ ID NO: 284847 - DNA, 21 bp, Artificial sequence
  SiRNA target sequence
tcaggtccggcaacgaacttg

SEQ ID NO: 284848 - DNA, 21 bp, Artificial sequence
  SiRNA target sequence
caggtccggcaacgaacttgc

SEQ ID NO: 284849 - DNA, 21 bp, Artificial sequence
  SiRNA target sequence
aggtccggcaacgaacttgct

SEQ ID NO: 284850 - DNA, 21 bp, Artificial sequence
  SiRNA target sequence
ggtccggcaacgaacttgctg

SEQ ID NO: 284851 - DNA, 21 bp, Artificial sequence
  SiRNA target sequence
gtccggcaacgaacttgctgt

SEQ ID NO: 284852 - DNA, 21 bp, Artificial sequence
  SiRNA target sequence
tccggcaacgaacttgctgtt

SEQ ID NO: 284853 - DNA, 21 bp, Artificial sequence
  SiRNA target sequence
ccggcaacgaacttgctgttc

SEQ ID NO: 284854 - DNA, 21 bp, Artificial sequence
  SiRNA target sequence
cggcaacgaacttgctgttct

SEQ ID NO: 284855 - DNA, 21 bp, Artificial sequence
  SiRNA target sequence
ggcaacgaacttgctgttctc

SEQ ID NO: 284856 - DNA, 21 bp, Artificial sequence
  SiRNA target sequence
gcaacgaacttgctgttctct

SEQ ID NO: 284857 - DNA, 21 bp, Artificial sequence
  SiRNA target sequence
caacgaacttgctgttctctc

SEQ ID NO: 284858 - DNA, 21 bp, Artificial sequence
  SiRNA target sequence
aacgaacttgctgttctctcc

SEQ ID NO: 284859 - DNA, 21 bp, Artificial sequence
  SiRNA target sequence
acgaacttgctgttctctcca

SEQ ID NO: 284860 - DNA, 21 bp, Artificial sequence
  SiRNA target sequence
cgaacttgctgttctctccag

SEQ ID NO: 284861 - DNA, 21 bp, Artificial sequence
  SiRNA target sequence
gaacttgctgttctctccagg

SEQ ID NO: 284862 - DNA, 21 bp, Artificial sequence
  SiRNA target sequence
aacttgctgttctctccaggg

SEQ ID NO: 284863 - DNA, 21 bp, Artificial sequence
  SiRNA target sequence
acttgctgttctctccagggc

SEQ ID NO: 284864 - DNA, 21 bp, Artificial sequence
  SiRNA target sequence
cttgctgttctctccagggcc

SEQ ID NO: 284865 - DNA, 21 bp, Artificial sequence
  SiRNA target sequence
ttgctgttctctccagggccg

SEQ ID NO: 284866 - DNA, 21 bp, Artificial sequence
  SiRNA target sequence
tgctgttctctccagggccgc

SEQ ID NO: 284867 - DNA, 21 bp, Artificial sequence
  SiRNA target sequence
gctgttctctccagggccgcc

SEQ ID NO: 284868 - DNA, 21 bp, Artificial sequence
  SiRNA target sequence
ctgttctctccagggccgccc

SEQ ID NO: 284869 - DNA, 21 bp, Artificial sequence
  SiRNA target sequence
tgttctctccagggccgccca

SEQ ID NO: 284870 - DNA, 21 bp, Artificial sequence
  SiRNA target sequence
gttctctccagggccgcccaa

SEQ ID NO: 284871 - DNA, 21 bp, Artificial sequence
  SiRNA target sequence
ttctctccagggccgcccaac

SEQ ID NO: 284872 - DNA, 21 bp, Artificial sequence
  SiRNA target sequence
tctctccagggccgcccaacg

SEQ ID NO: 284873 - DNA, 21 bp, Artificial sequence
  SiRNA target sequence
ctctccagggccgcccaacga

SEQ ID NO: 284874 - DNA, 21 bp, Artificial sequence
  SiRNA target sequence
tctccagggccgcccaacgaa

SEQ ID NO: 284875 - DNA, 21 bp, Artificial sequence
  SiRNA target sequence
ctccagggccgcccaacgaac

SEQ ID NO: 284876 - DNA, 21 bp, Artificial sequence
  SiRNA target sequence
tccagggccgcccaacgaact

SEQ ID NO: 284877 - DNA, 21 bp, Artificial sequence
  SiRNA target sequence
ccagggccgcccaacgaactt

SEQ ID NO: 284878 - DNA, 21 bp, Artificial sequence
  SiRNA target sequence
cagggccgcccaacgaacttt

SEQ ID NO: 284879 - DNA, 21 bp, Artificial sequence
  SiRNA target sequence
agggccgcccaacgaactttc

SEQ ID NO: 284880 - DNA, 21 bp, Artificial sequence
  SiRNA target sequence
gggccgcccaacgaactttca

SEQ ID NO: 284881 - DNA, 21 bp, Artificial sequence
  SiRNA target sequence
ggccgcccaacgaactttcat

SEQ ID NO: 284882 - DNA, 21 bp, Artificial sequence
  SiRNA target sequence
gccgcccaacgaactttcatc

SEQ ID NO: 284883 - DNA, 21 bp, Artificial sequence
  SiRNA target sequence
ccgcccaacgaactttcatct

SEQ ID NO: 284884 - DNA, 21 bp, Artificial sequence
  SiRNA target sequence
cgcccaacgaactttcatctg

SEQ ID NO: 284885 - DNA, 21 bp, Artificial sequence
  SiRNA target sequence
gcccaacgaactttcatctgt

SEQ ID NO: 284886 - DNA, 21 bp, Artificial sequence
  SiRNA target sequence
cccaacgaactttcatctgtc

SEQ ID NO: 284887 - DNA, 21 bp, Artificial sequence
  SiRNA target sequence
ccaacgaactttcatctgtcc

SEQ ID NO: 284888 - DNA, 21 bp, Artificial sequence
  SiRNA target sequence
caacgaactttcatctgtcca

SEQ ID NO: 284889 - DNA, 21 bp, Artificial sequence
  SiRNA target sequence
aacgaactttcatctgtccat

SEQ ID NO: 284890 - DNA, 21 bp, Artificial sequence
  SiRNA target sequence
acgaactttcatctgtccatc

SEQ ID NO: 284891 - DNA, 21 bp, Artificial sequence
  SiRNA target sequence
cgaactttcatctgtccatct

SEQ ID NO: 284892 - DNA, 21 bp, Artificial sequence
  SiRNA target sequence
gaactttcatctgtccatctc

SEQ ID NO: 284893 - DNA, 21 bp, Artificial sequence
  SiRNA target sequence
aactttcatctgtccatctca

SEQ ID NO: 284894 - DNA, 21 bp, Artificial sequence
  SiRNA target sequence
actttcatctgtccatctcaa

SEQ ID NO: 284895 - DNA, 21 bp, Artificial sequence
  SiRNA target sequence
ctttcatctgtccatctcaat

SEQ ID NO: 284896 - DNA, 21 bp, Artificial sequence
  SiRNA target sequence
tttcatctgtccatctcaata

SEQ ID NO: 284897 - DNA, 21 bp, Artificial sequence
  SiRNA target sequence
ttcatctgtccatctcaatac

SEQ ID NO: 284898 - DNA, 21 bp, Artificial sequence
  SiRNA target sequence
tcatctgtccatctcaataca

SEQ ID NO: 284899 - DNA, 21 bp, Artificial sequence
  SiRNA target sequence
catctgtccatctcaatacac

SEQ ID NO: 284900 - DNA, 21 bp, Artificial sequence
  SiRNA target sequence
atctgtccatctcaatacacc

SEQ ID NO: 284901 - DNA, 21 bp, Artificial sequence
  SiRNA target sequence
tctgtccatctcaatacaccg

SEQ ID NO: 284902 - DNA, 21 bp, Artificial sequence
  SiRNA target sequence
ctgtccatctcaatacaccga

SEQ ID NO: 284903 - DNA, 21 bp, Artificial sequence
  SiRNA target sequence
tgtccatctcaatacaccgaa

SEQ ID NO: 284904 - DNA, 21 bp, Artificial sequence
  SiRNA target sequence
gtccatctcaatacaccgaat

SEQ ID NO: 284905 - DNA, 21 bp, Artificial sequence
  SiRNA target sequence
tccatctcaatacaccgaata

SEQ ID NO: 284906 - DNA, 21 bp, Artificial sequence
  SiRNA target sequence
ccatctcaatacaccgaatac

SEQ ID NO: 284907 - DNA, 21 bp, Artificial sequence
  SiRNA target sequence
catctcaatacaccgaataca

SEQ ID NO: 284908 - DNA, 21 bp, Artificial sequence
  SiRNA target sequence
atctcaatacaccgaatacac

SEQ ID NO: 284909 - DNA, 21 bp, Artificial sequence
  SiRNA target sequence
tctcaatacaccgaatacaca

SEQ ID NO: 284910 - DNA, 21 bp, Artificial sequence
  SiRNA target sequence
ctcaatacaccgaatacacaa

SEQ ID NO: 284911 - DNA, 21 bp, Artificial sequence
  SiRNA target sequence
tcaatacaccgaatacacaac

SEQ ID NO: 284912 - DNA, 21 bp, Artificial sequence
  SiRNA target sequence
caatacaccgaatacacaacc

SEQ ID NO: 284913 - DNA, 21 bp, Artificial sequence
  SiRNA target sequence
aatacaccgaatacacaacca

SEQ ID NO: 284914 - DNA, 21 bp, Artificial sequence
  SiRNA target sequence
atacaccgaatacacaaccat

SEQ ID NO: 284915 - DNA, 21 bp, Artificial sequence
  SiRNA target sequence
tacaccgaatacacaaccatc

SEQ ID NO: 284916 - DNA, 21 bp, Artificial sequence
  SiRNA target sequence
acaccgaatacacaaccatcc

SEQ ID NO: 284917 - DNA, 21 bp, Artificial sequence
  SiRNA target sequence
caccgaatacacaaccatccc

SEQ ID NO: 284918 - DNA, 21 bp, Artificial sequence
  SiRNA target sequence
accgaatacacaaccatccca

SEQ ID NO: 284919 - DNA, 21 bp, Artificial sequence
  SiRNA target sequence
ccgaatacacaaccatcccat

SEQ ID NO: 284920 - DNA, 21 bp, Artificial sequence
  SiRNA target sequence
cgaatacacaaccatcccatt

SEQ ID NO: 284921 - DNA, 21 bp, Artificial sequence
  SiRNA target sequence
gaatacacaaccatcccattg

SEQ ID NO: 284922 - DNA, 21 bp, Artificial sequence
  SiRNA target sequence
aatacacaaccatcccattgg

SEQ ID NO: 284923 - DNA, 21 bp, Artificial sequence
  SiRNA target sequence
atacacaaccatcccattgga

SEQ ID NO: 284924 - DNA, 21 bp, Artificial sequence
  SiRNA target sequence
tacacaaccatcccattggac

SEQ ID NO: 284925 - DNA, 21 bp, Artificial sequence
  SiRNA target sequence
acacaaccatcccattggact

SEQ ID NO: 284926 - DNA, 21 bp, Artificial sequence
  SiRNA target sequence
cacaaccatcccattggactg

SEQ ID NO: 284927 - DNA, 21 bp, Artificial sequence
  SiRNA target sequence
acaaccatcccattggactgt

SEQ ID NO: 284928 - DNA, 21 bp, Artificial sequence
  SiRNA target sequence
caaccatcccattggactgtg

SEQ ID NO: 284929 - DNA, 21 bp, Artificial sequence
  SiRNA target sequence
aaccatcccattggactgtga

SEQ ID NO: 284930 - DNA, 21 bp, Artificial sequence
  SiRNA target sequence
accatcccattggactgtgac

SEQ ID NO: 284931 - DNA, 21 bp, Artificial sequence
  SiRNA target sequence
ccatcccattggactgtgacg

SEQ ID NO: 284932 - DNA, 21 bp, Artificial sequence
  SiRNA target sequence
catcccattggactgtgacga

SEQ ID NO: 284933 - DNA, 21 bp, Artificial sequence
  SiRNA target sequence
atcccattggactgtgacgaa

SEQ ID NO: 284934 - DNA, 21 bp, Artificial sequence
  SiRNA target sequence
tcccattggactgtgacgaac

SEQ ID NO: 284935 - DNA, 21 bp, Artificial sequence
  SiRNA target sequence
cccattggactgtgacgaact

SEQ ID NO: 284936 - DNA, 21 bp, Artificial sequence
  SiRNA target sequence
ccattggactgtgacgaactc

SEQ ID NO: 284937 - DNA, 21 bp, Artificial sequence
  SiRNA target sequence
cattggactgtgacgaactca

SEQ ID NO: 284938 - DNA, 21 bp, Artificial sequence
  SiRNA target sequence
attggactgtgacgaactcaa

SEQ ID NO: 284939 - DNA, 21 bp, Artificial sequence
  SiRNA target sequence
ttggactgtgacgaactcaat

SEQ ID NO: 284940 - DNA, 21 bp, Artificial sequence
  SiRNA target sequence
tggactgtgacgaactcaatg

SEQ ID NO: 284941 - DNA, 21 bp, Artificial sequence
  SiRNA target sequence
ggactgtgacgaactcaatgt

SEQ ID NO: 284942 - DNA, 21 bp, Artificial sequence
  SiRNA target sequence
gactgtgacgaactcaatgtg

SEQ ID NO: 284943 - DNA, 21 bp, Artificial sequence
  SiRNA target sequence
actgtgacgaactcaatgtgc

SEQ ID NO: 284944 - DNA, 21 bp, Artificial sequence
  SiRNA target sequence
ctgtgacgaactcaatgtgcg

SEQ ID NO: 284945 - DNA, 21 bp, Artificial sequence
  SiRNA target sequence
tgtgacgaactcaatgtgcga

SEQ ID NO: 284946 - DNA, 21 bp, Artificial sequence
  SiRNA target sequence
gtgacgaactcaatgtgcgat

SEQ ID NO: 284947 - DNA, 21 bp, Artificial sequence
  SiRNA target sequence
tgacgaactcaatgtgcgatg

SEQ ID NO: 284948 - DNA, 21 bp, Artificial sequence
  SiRNA target sequence
gacgaactcaatgtgcgatgg

SEQ ID NO: 284949 - DNA, 21 bp, Artificial sequence
  SiRNA target sequence
acgaactcaatgtgcgatggc

SEQ ID NO: 284950 - DNA, 21 bp, Artificial sequence
  SiRNA target sequence
cgaactcaatgtgcgatggcc

SEQ ID NO: 284951 - DNA, 21 bp, Artificial sequence
  SiRNA target sequence
gaactcaatgtgcgatggccc

SEQ ID NO: 284952 - DNA, 21 bp, Artificial sequence
  SiRNA target sequence
aactcaatgtgcgatggcccg

SEQ ID NO: 284953 - DNA, 21 bp, Artificial sequence
  SiRNA target sequence
actcaatgtgcgatggcccgt

SEQ ID NO: 284954 - DNA, 21 bp, Artificial sequence
  SiRNA target sequence
ctcaatgtgcgatggcccgtt

SEQ ID NO: 284955 - DNA, 21 bp, Artificial sequence
  SiRNA target sequence
tcaatgtgcgatggcccgttc

SEQ ID NO: 284956 - DNA, 21 bp, Artificial sequence
  SiRNA target sequence
caatgtgcgatggcccgttca

SEQ ID NO: 284957 - DNA, 21 bp, Artificial sequence
  SiRNA target sequence
aatgtgcgatggcccgttcac

SEQ ID NO: 284958 - DNA, 21 bp, Artificial sequence
  SiRNA target sequence
atgtgcgatggcccgttcacg

SEQ ID NO: 284959 - DNA, 21 bp, Artificial sequence
  SiRNA target sequence
tgtgcgatggcccgttcacgc

SEQ ID NO: 284960 - DNA, 21 bp, Artificial sequence
  SiRNA target sequence
gtgcgatggcccgttcacgct

SEQ ID NO: 284961 - DNA, 21 bp, Artificial sequence
  SiRNA target sequence
tgcgatggcccgttcacgctc

SEQ ID NO: 284962 - DNA, 21 bp, Artificial sequence
  SiRNA target sequence
gcgatggcccgttcacgctca

SEQ ID NO: 284963 - DNA, 21 bp, Artificial sequence
  SiRNA target sequence
cgatggcccgttcacgctcaa

SEQ ID NO: 284964 - DNA, 21 bp, Artificial sequence
  SiRNA target sequence
gatggcccgttcacgctcaat

SEQ ID NO: 284965 - DNA, 21 bp, Artificial sequence
  SiRNA target sequence
atggcccgttcacgctcaatc

SEQ ID NO: 284966 - DNA, 21 bp, Artificial sequence
  SiRNA target sequence
tggcccgttcacgctcaatct

SEQ ID NO: 284967 - DNA, 21 bp, Artificial sequence
  SiRNA target sequence
ggcccgttcacgctcaatctc

SEQ ID NO: 284968 - DNA, 21 bp, Artificial sequence
  SiRNA target sequence
gcccgttcacgctcaatctcc

SEQ ID NO: 284969 - DNA, 21 bp, Artificial sequence
  SiRNA target sequence
cccgttcacgctcaatctccc

SEQ ID NO: 284970 - DNA, 21 bp, Artificial sequence
  SiRNA target sequence
ccgttcacgctcaatctcccg

SEQ ID NO: 284971 - DNA, 21 bp, Artificial sequence
  SiRNA target sequence
cgttcacgctcaatctcccgc

SEQ ID NO: 284972 - DNA, 21 bp, Artificial sequence
  SiRNA target sequence
gttcacgctcaatctcccgca

SEQ ID NO: 284973 - DNA, 21 bp, Artificial sequence
  SiRNA target sequence
ttcacgctcaatctcccgcag

SEQ ID NO: 284974 - DNA, 21 bp, Artificial sequence
  SiRNA target sequence
tcacgctcaatctcccgcaga

SEQ ID NO: 284975 - DNA, 21 bp, Artificial sequence
  SiRNA target sequence
cacgctcaatctcccgcagac

SEQ ID NO: 284976 - DNA, 21 bp, Artificial sequence
  SiRNA target sequence
acgctcaatctcccgcagacg

SEQ ID NO: 284977 - DNA, 21 bp, Artificial sequence
  SiRNA target sequence
cgctcaatctcccgcagacgc

SEQ ID NO: 284978 - DNA, 21 bp, Artificial sequence
  SiRNA target sequence
gctcaatctcccgcagacgct

SEQ ID NO: 284979 - DNA, 21 bp, Artificial sequence
  SiRNA target sequence
ctcaatctcccgcagacgctc

SEQ ID NO: 284980 - DNA, 21 bp, Artificial sequence
  SiRNA target sequence
tcaatctcccgcagacgctct

SEQ ID NO: 284981 - DNA, 21 bp, Artificial sequence
  SiRNA target sequence
caatctcccgcagacgctctc

SEQ ID NO: 284982 - DNA, 21 bp, Artificial sequence
  SiRNA target sequence
aatctcccgcagacgctctcg

SEQ ID NO: 284983 - DNA, 21 bp, Artificial sequence
  SiRNA target sequence
atctcccgcagacgctctcga

SEQ ID NO: 284984 - DNA, 21 bp, Artificial sequence
  SiRNA target sequence
tctcccgcagacgctctcgat

SEQ ID NO: 284985 - DNA, 21 bp, Artificial sequence
  SiRNA target sequence
ctcccgcagacgctctcgatc

SEQ ID NO: 284986 - DNA, 21 bp, Artificial sequence
  SiRNA target sequence
tcccgcagacgctctcgatca

SEQ ID NO: 284987 - DNA, 21 bp, Artificial sequence
  SiRNA target sequence
cccgcagacgctctcgatcat

SEQ ID NO: 284988 - DNA, 21 bp, Artificial sequence
  SiRNA target sequence
ccgcagacgctctcgatcatt

SEQ ID NO: 284989 - DNA, 21 bp, Artificial sequence
  SiRNA target sequence
cgcagacgctctcgatcattg

SEQ ID NO: 284990 - DNA, 21 bp, Artificial sequence
  SiRNA target sequence
gcagacgctctcgatcattga

SEQ ID NO: 284991 - DNA, 21 bp, Artificial sequence
  SiRNA target sequence
cagacgctctcgatcattgag

SEQ ID NO: 284992 - DNA, 21 bp, Artificial sequence
  SiRNA target sequence
agacgctctcgatcattgagc

SEQ ID NO: 284993 - DNA, 21 bp, Artificial sequence
  SiRNA target sequence
gacgctctcgatcattgagcg

SEQ ID NO: 284994 - DNA, 21 bp, Artificial sequence
  SiRNA target sequence
acgctctcgatcattgagcgc

SEQ ID NO: 284995 - DNA, 21 bp, Artificial sequence
  SiRNA target sequence
cgctctcgatcattgagcgcc

SEQ ID NO: 284996 - DNA, 21 bp, Artificial sequence
  SiRNA target sequence
gctctcgatcattgagcgcca

SEQ ID NO: 284997 - DNA, 21 bp, Artificial sequence
  SiRNA target sequence
ctctcgatcattgagcgccag

SEQ ID NO: 284998 - DNA, 21 bp, Artificial sequence
  SiRNA target sequence
tctcgatcattgagcgccagt

SEQ ID NO: 284999 - DNA, 21 bp, Artificial sequence
  SiRNA target sequence
ctcgatcattgagcgccagtc

SEQ ID NO: 285000 - DNA, 21 bp, Artificial sequence
  SiRNA target sequence
tcgatcattgagcgccagtcg

SEQ ID NO: 285001 - DNA, 21 bp, Artificial sequence
  SiRNA target sequence
cgatcattgagcgccagtcgt

SEQ ID NO: 285002 - DNA, 21 bp, Artificial sequence
  SiRNA target sequence
gatcattgagcgccagtcgtc

SEQ ID NO: 285003 - DNA, 21 bp, Artificial sequence
  SiRNA target sequence
atcattgagcgccagtcgtcg

SEQ ID NO: 285004 - DNA, 21 bp, Artificial sequence
  SiRNA target sequence
tcattgagcgccagtcgtcgt

SEQ ID NO: 285005 - DNA, 21 bp, Artificial sequence
  SiRNA target sequence
cattgagcgccagtcgtcgtc

SEQ ID NO: 285006 - DNA, 21 bp, Artificial sequence
  SiRNA target sequence
attgagcgccagtcgtcgtcc

SEQ ID NO: 285007 - DNA, 21 bp, Artificial sequence
  SiRNA target sequence
ttgagcgccagtcgtcgtccg

SEQ ID NO: 285008 - DNA, 21 bp, Artificial sequence
  SiRNA target sequence
tgagcgccagtcgtcgtccga

SEQ ID NO: 285009 - DNA, 21 bp, Artificial sequence
  SiRNA target sequence
gagcgccagtcgtcgtccgag

SEQ ID NO: 285010 - DNA, 21 bp, Artificial sequence
  SiRNA target sequence
agcgccagtcgtcgtccgagc

SEQ ID NO: 285011 - DNA, 21 bp, Artificial sequence
  SiRNA target sequence
gcgccagtcgtcgtccgagcc

SEQ ID NO: 285012 - DNA, 21 bp, Artificial sequence
  SiRNA target sequence
cgccagtcgtcgtccgagccg

SEQ ID NO: 285013 - DNA, 21 bp, Artificial sequence
  SiRNA target sequence
gccagtcgtcgtccgagccga

SEQ ID NO: 285014 - DNA, 21 bp, Artificial sequence
  SiRNA target sequence
ccagtcgtcgtccgagccgac

SEQ ID NO: 285015 - DNA, 21 bp, Artificial sequence
  SiRNA target sequence
cagtcgtcgtccgagccgacc

SEQ ID NO: 285016 - DNA, 21 bp, Artificial sequence
  SiRNA target sequence
agtcgtcgtccgagccgacca

SEQ ID NO: 285017 - DNA, 21 bp, Artificial sequence
  SiRNA target sequence
gtcgtcgtccgagccgaccac

SEQ ID NO: 285018 - DNA, 21 bp, Artificial sequence
  SiRNA target sequence
tcgtcgtccgagccgaccacg

SEQ ID NO: 285019 - DNA, 21 bp, Artificial sequence
  SiRNA target sequence
cgtcgtccgagccgaccacgc

SEQ ID NO: 285020 - DNA, 21 bp, Artificial sequence
  SiRNA target sequence
gtcgtccgagccgaccacgcc

SEQ ID NO: 285021 - DNA, 21 bp, Artificial sequence
  SiRNA target sequence
tcgtccgagccgaccacgccg

SEQ ID NO: 285022 - DNA, 21 bp, Artificial sequence
  SiRNA target sequence
cgtccgagccgaccacgccgg

SEQ ID NO: 285023 - DNA, 21 bp, Artificial sequence
  SiRNA target sequence
gtccgagccgaccacgccggt

SEQ ID NO: 285024 - DNA, 21 bp, Artificial sequence
  SiRNA target sequence
tccgagccgaccacgccggtc

SEQ ID NO: 285025 - DNA, 21 bp, Artificial sequence
  SiRNA target sequence
ccgagccgaccacgccggtcc

SEQ ID NO: 285026 - DNA, 21 bp, Artificial sequence
  SiRNA target sequence
cgagccgaccacgccggtcca

SEQ ID NO: 285027 - DNA, 21 bp, Artificial sequence
  SiRNA target sequence
gagccgaccacgccggtccat

SEQ ID NO: 285028 - DNA, 21 bp, Artificial sequence
  SiRNA target sequence
agccgaccacgccggtccatt

SEQ ID NO: 285029 - DNA, 21 bp, Artificial sequence
  SiRNA target sequence
gccgaccacgccggtccattc

SEQ ID NO: 285030 - DNA, 21 bp, Artificial sequence
  SiRNA target sequence
ccgaccacgccggtccattct

SEQ ID NO: 285031 - DNA, 21 bp, Artificial sequence
  SiRNA target sequence
cgaccacgccggtccattcta

SEQ ID NO: 285032 - DNA, 21 bp, Artificial sequence
  SiRNA target sequence
gaccacgccggtccattctag

SEQ ID NO: 285033 - DNA, 21 bp, Artificial sequence
  SiRNA target sequence
accacgccggtccattctaga

SEQ ID NO: 285034 - DNA, 21 bp, Artificial sequence
  SiRNA target sequence
ccacgccggtccattctagac

SEQ ID NO: 285035 - DNA, 21 bp, Artificial sequence
  SiRNA target sequence
cacgccggtccattctagacc

SEQ ID NO: 285036 - DNA, 21 bp, Artificial sequence
  SiRNA target sequence
acgccggtccattctagaccg

SEQ ID NO: 285037 - DNA, 21 bp, Artificial sequence
  SiRNA target sequence
cgccggtccattctagaccgc

SEQ ID NO: 285038 - DNA, 21 bp, Artificial sequence
  SiRNA target sequence
gccggtccattctagaccgca

SEQ ID NO: 285039 - DNA, 21 bp, Artificial sequence
  SiRNA target sequence
ccggtccattctagaccgcat

SEQ ID NO: 285040 - DNA, 21 bp, Artificial sequence
  SiRNA target sequence
cggtccattctagaccgcatc

SEQ ID NO: 285041 - DNA, 21 bp, Artificial sequence
  SiRNA target sequence
ggtccattctagaccgcatcg

SEQ ID NO: 285042 - DNA, 21 bp, Artificial sequence
  SiRNA target sequence
gtccattctagaccgcatcgg

SEQ ID NO: 285043 - DNA, 21 bp, Artificial sequence
  SiRNA target sequence
tccattctagaccgcatcggc

SEQ ID NO: 285044 - DNA, 21 bp, Artificial sequence
  SiRNA target sequence
ccattctagaccgcatcggcc

SEQ ID NO: 285045 - DNA, 21 bp, Artificial sequence
  SiRNA target sequence
cattctagaccgcatcggccg

SEQ ID NO: 285046 - DNA, 21 bp, Artificial sequence
  SiRNA target sequence
attctagaccgcatcggccgt

SEQ ID NO: 285047 - DNA, 21 bp, Artificial sequence
  SiRNA target sequence
ttctagaccgcatcggccgtg

SEQ ID NO: 285048 - DNA, 21 bp, Artificial sequence
  SiRNA target sequence
tctagaccgcatcggccgtgc

SEQ ID NO: 285049 - DNA, 21 bp, Artificial sequence
  SiRNA target sequence
ctagaccgcatcggccgtgcc

SEQ ID NO: 285050 - DNA, 21 bp, Artificial sequence
  SiRNA target sequence
tagaccgcatcggccgtgcct

SEQ ID NO: 285051 - DNA, 21 bp, Artificial sequence
  SiRNA target sequence
agaccgcatcggccgtgcctt

SEQ ID NO: 285052 - DNA, 21 bp, Artificial sequence
  SiRNA target sequence
gaccgcatcggccgtgccttt

SEQ ID NO: 285053 - DNA, 21 bp, Artificial sequence
  SiRNA target sequence
accgcatcggccgtgcctttc

SEQ ID NO: 285054 - DNA, 21 bp, Artificial sequence
  SiRNA target sequence
ccgcatcggccgtgcctttca

SEQ ID NO: 285055 - DNA, 21 bp, Artificial sequence
  SiRNA target sequence
cgcatcggccgtgcctttcaa

SEQ ID NO: 285056 - DNA, 21 bp, Artificial sequence
  SiRNA target sequence
gcatcggccgtgcctttcaac

SEQ ID NO: 285057 - DNA, 21 bp, Artificial sequence
  SiRNA target sequence
catcggccgtgcctttcaacg

SEQ ID NO: 285058 - DNA, 21 bp, Artificial sequence
  SiRNA target sequence
atcggccgtgcctttcaacga

SEQ ID NO: 285059 - DNA, 21 bp, Artificial sequence
  SiRNA target sequence
tcggccgtgcctttcaacgag

SEQ ID NO: 285060 - DNA, 21 bp, Artificial sequence
  SiRNA target sequence
cggccgtgcctttcaacgagt

SEQ ID NO: 285061 - DNA, 21 bp, Artificial sequence
  SiRNA target sequence
ggccgtgcctttcaacgagtc

SEQ ID NO: 285062 - DNA, 21 bp, Artificial sequence
  SiRNA target sequence
gccgtgcctttcaacgagtcc

SEQ ID NO: 285063 - DNA, 21 bp, Artificial sequence
  SiRNA target sequence
ccgtgcctttcaacgagtcct

SEQ ID NO: 285064 - DNA, 21 bp, Artificial sequence
  SiRNA target sequence
cgtgcctttcaacgagtcctt

SEQ ID NO: 285065 - DNA, 21 bp, Artificial sequence
  SiRNA target sequence
gtgcctttcaacgagtccttg

SEQ ID NO: 285066 - DNA, 21 bp, Artificial sequence
  SiRNA target sequence
tgcctttcaacgagtccttgc

SEQ ID NO: 285067 - DNA, 21 bp, Artificial sequence
  SiRNA target sequence
gcctttcaacgagtccttgcc

SEQ ID NO: 285068 - DNA, 21 bp, Artificial sequence
  SiRNA target sequence
cctttcaacgagtccttgcca

SEQ ID NO: 285069 - DNA, 21 bp, Artificial sequence
  SiRNA target sequence
ctttcaacgagtccttgccaa

SEQ ID NO: 285070 - DNA, 21 bp, Artificial sequence
  SiRNA target sequence
tttcaacgagtccttgccaat

SEQ ID NO: 285071 - DNA, 21 bp, Artificial sequence
  SiRNA target sequence
ttcaacgagtccttgccaatc

SEQ ID NO: 285072 - DNA, 21 bp, Artificial sequence
  SiRNA target sequence
tcaacgagtccttgccaatcc

SEQ ID NO: 285073 - DNA, 21 bp, Artificial sequence
  SiRNA target sequence
caacgagtccttgccaatcca

SEQ ID NO: 285074 - DNA, 21 bp, Artificial sequence
  SiRNA target sequence
aacgagtccttgccaatccaa

SEQ ID NO: 285075 - DNA, 21 bp, Artificial sequence
  SiRNA target sequence
acgagtccttgccaatccaac

SEQ ID NO: 285076 - DNA, 21 bp, Artificial sequence
  SiRNA target sequence
cgagtccttgccaatccaact

SEQ ID NO: 285077 - DNA, 21 bp, Artificial sequence
  SiRNA target sequence
gagtccttgccaatccaactg

SEQ ID NO: 285078 - DNA, 21 bp, Artificial sequence
  SiRNA target sequence
agtccttgccaatccaactgc

SEQ ID NO: 285079 - DNA, 21 bp, Artificial sequence
  SiRNA target sequence
gtccttgccaatccaactgct

SEQ ID NO: 285080 - DNA, 21 bp, Artificial sequence
  SiRNA target sequence
tccttgccaatccaactgctg

SEQ ID NO: 285081 - DNA, 21 bp, Artificial sequence
  SiRNA target sequence
ccttgccaatccaactgctgt

SEQ ID NO: 285082 - DNA, 21 bp, Artificial sequence
  SiRNA target sequence
cttgccaatccaactgctgtg

SEQ ID NO: 285083 - DNA, 21 bp, Artificial sequence
  SiRNA target sequence
ttgccaatccaactgctgtgg

SEQ ID NO: 285084 - DNA, 21 bp, Artificial sequence
  SiRNA target sequence
tgccaatccaactgctgtggt

SEQ ID NO: 285085 - DNA, 21 bp, Artificial sequence
  SiRNA target sequence
gccaatccaactgctgtggta

SEQ ID NO: 285086 - DNA, 21 bp, Artificial sequence
  SiRNA target sequence
ccaatccaactgctgtggtag

SEQ ID NO: 285087 - DNA, 21 bp, Artificial sequence
  SiRNA target sequence
caatccaactgctgtggtagc

SEQ ID NO: 285088 - DNA, 21 bp, Artificial sequence
  SiRNA target sequence
aatccaactgctgtggtagcc

SEQ ID NO: 285089 - DNA, 21 bp, Artificial sequence
  SiRNA target sequence
atccaactgctgtggtagcct

SEQ ID NO: 285090 - DNA, 21 bp, Artificial sequence
  SiRNA target sequence
tccaactgctgtggtagcctt

SEQ ID NO: 285091 - DNA, 21 bp, Artificial sequence
  SiRNA target sequence
ccaactgctgtggtagccttc

SEQ ID NO: 285092 - DNA, 21 bp, Artificial sequence
  SiRNA target sequence
caactgctgtggtagccttcg

SEQ ID NO: 285093 - DNA, 21 bp, Artificial sequence
  SiRNA target sequence
aactgctgtggtagccttcgt

SEQ ID NO: 285094 - DNA, 21 bp, Artificial sequence
  SiRNA target sequence
actgctgtggtagccttcgtc

SEQ ID NO: 285095 - DNA, 21 bp, Artificial sequence
  SiRNA target sequence
ctgctgtggtagccttcgtcg

SEQ ID NO: 285096 - DNA, 21 bp, Artificial sequence
  SiRNA target sequence
tgctgtggtagccttcgtcgt

SEQ ID NO: 285097 - DNA, 21 bp, Artificial sequence
  SiRNA target sequence
gctgtggtagccttcgtcgta

SEQ ID NO: 285098 - DNA, 21 bp, Artificial sequence
  SiRNA target sequence
ctgtggtagccttcgtcgtat

SEQ ID NO: 285099 - DNA, 21 bp, Artificial sequence
  SiRNA target sequence
tgtggtagccttcgtcgtatg

SEQ ID NO: 285100 - DNA, 21 bp, Artificial sequence
  SiRNA target sequence
gtggtagccttcgtcgtatgc

SEQ ID NO: 285101 - DNA, 21 bp, Artificial sequence
  SiRNA target sequence
tggtagccttcgtcgtatgcg

SEQ ID NO: 285102 - DNA, 21 bp, Artificial sequence
  SiRNA target sequence
ggtagccttcgtcgtatgcgc

SEQ ID NO: 285103 - DNA, 21 bp, Artificial sequence
  SiRNA target sequence
gtagccttcgtcgtatgcgcg

SEQ ID NO: 285104 - DNA, 21 bp, Artificial sequence
  SiRNA target sequence
tagccttcgtcgtatgcgcga

SEQ ID NO: 285105 - DNA, 21 bp, Artificial sequence
  SiRNA target sequence
agccttcgtcgtatgcgcgat

SEQ ID NO: 285106 - DNA, 21 bp, Artificial sequence
  SiRNA target sequence
gccttcgtcgtatgcgcgatc

SEQ ID NO: 285107 - DNA, 21 bp, Artificial sequence
  SiRNA target sequence
ccttcgtcgtatgcgcgatct

SEQ ID NO: 285108 - DNA, 21 bp, Artificial sequence
  SiRNA target sequence
cttcgtcgtatgcgcgatctt

SEQ ID NO: 285109 - DNA, 21 bp, Artificial sequence
  SiRNA target sequence
ttcgtcgtatgcgcgatctta

SEQ ID NO: 285110 - DNA, 21 bp, Artificial sequence
  SiRNA target sequence
tcgtcgtatgcgcgatcttag

SEQ ID NO: 285111 - DNA, 21 bp, Artificial sequence
  SiRNA target sequence
cgtcgtatgcgcgatcttagc

SEQ ID NO: 285112 - DNA, 21 bp, Artificial sequence
  SiRNA target sequence
gtcgtatgcgcgatcttagct

SEQ ID NO: 285113 - DNA, 21 bp, Artificial sequence
  SiRNA target sequence
tcgtatgcgcgatcttagctg

SEQ ID NO: 285114 - DNA, 21 bp, Artificial sequence
  SiRNA target sequence
cgtatgcgcgatcttagctgt

SEQ ID NO: 285115 - DNA, 21 bp, Artificial sequence
  SiRNA target sequence
gtatgcgcgatcttagctgtt

SEQ ID NO: 285116 - DNA, 21 bp, Artificial sequence
  SiRNA target sequence
tatgcgcgatcttagctgttt

SEQ ID NO: 285117 - DNA, 21 bp, Artificial sequence
  SiRNA target sequence
atgcgcgatcttagctgtttc

SEQ ID NO: 285118 - DNA, 21 bp, Artificial sequence
  SiRNA target sequence
tgcgcgatcttagctgtttcc

SEQ ID NO: 285119 - DNA, 21 bp, Artificial sequence
  SiRNA target sequence
gcgcgatcttagctgtttccc

SEQ ID NO: 285120 - DNA, 21 bp, Artificial sequence
  SiRNA target sequence
cgcgatcttagctgtttccca

SEQ ID NO: 285121 - DNA, 21 bp, Artificial sequence
  SiRNA target sequence
gcgatcttagctgtttcccat

SEQ ID NO: 285122 - DNA, 21 bp, Artificial sequence
  SiRNA target sequence
cgatcttagctgtttcccata

SEQ ID NO: 285123 - DNA, 21 bp, Artificial sequence
  SiRNA target sequence
gatcttagctgtttcccatac

SEQ ID NO: 285124 - DNA, 21 bp, Artificial sequence
  SiRNA target sequence
atcttagctgtttcccataca

SEQ ID NO: 285125 - DNA, 21 bp, Artificial sequence
  SiRNA target sequence
tcttagctgtttcccatacat

SEQ ID NO: 285126 - DNA, 21 bp, Artificial sequence
  SiRNA target sequence
cttagctgtttcccatacatc

SEQ ID NO: 285127 - DNA, 21 bp, Artificial sequence
  SiRNA target sequence
ttagctgtttcccatacatca

SEQ ID NO: 285128 - DNA, 21 bp, Artificial sequence
  SiRNA target sequence
tagctgtttcccatacatcag

SEQ ID NO: 285129 - DNA, 21 bp, Artificial sequence
  SiRNA target sequence
agctgtttcccatacatcaga

SEQ ID NO: 285130 - DNA, 21 bp, Artificial sequence
  SiRNA target sequence
gctgtttcccatacatcagat

SEQ ID NO: 285131 - DNA, 21 bp, Artificial sequence
  SiRNA target sequence
ctgtttcccatacatcagatc

SEQ ID NO: 285132 - DNA, 21 bp, Artificial sequence
  SiRNA target sequence
tgtttcccatacatcagatcc

SEQ ID NO: 285133 - DNA, 21 bp, Artificial sequence
  SiRNA target sequence
gtttcccatacatcagatcca

SEQ ID NO: 285134 - DNA, 21 bp, Artificial sequence
  SiRNA target sequence
tttcccatacatcagatccag

SEQ ID NO: 285135 - DNA, 21 bp, Artificial sequence
  SiRNA target sequence
ttcccatacatcagatccagc

SEQ ID NO: 285136 - DNA, 21 bp, Artificial sequence
  SiRNA target sequence
tcccatacatcagatccagcc

SEQ ID NO: 285137 - DNA, 21 bp, Artificial sequence
  SiRNA target sequence
cccatacatcagatccagcca

SEQ ID NO: 285138 - DNA, 21 bp, Artificial sequence
  SiRNA target sequence
ccatacatcagatccagccaa

SEQ ID NO: 285139 - DNA, 21 bp, Artificial sequence
  SiRNA target sequence
catacatcagatccagccaaa

SEQ ID NO: 285140 - DNA, 21 bp, Artificial sequence
  SiRNA target sequence
atacatcagatccagccaaat

SEQ ID NO: 285141 - DNA, 21 bp, Artificial sequence
  SiRNA target sequence
tacatcagatccagccaaatc

SEQ ID NO: 285142 - DNA, 21 bp, Artificial sequence
  SiRNA target sequence
acatcagatccagccaaatca

SEQ ID NO: 285143 - DNA, 21 bp, Artificial sequence
  SiRNA target sequence
catcagatccagccaaatcaa

SEQ ID NO: 285144 - DNA, 21 bp, Artificial sequence
  SiRNA target sequence
atcagatccagccaaatcaat

SEQ ID NO: 285145 - DNA, 21 bp, Artificial sequence
  SiRNA target sequence
tcagatccagccaaatcaatc

SEQ ID NO: 285146 - DNA, 21 bp, Artificial sequence
  SiRNA target sequence
cagatccagccaaatcaatcg

SEQ ID NO: 285147 - DNA, 21 bp, Artificial sequence
  SiRNA target sequence
agatccagccaaatcaatcgt

SEQ ID NO: 285148 - DNA, 21 bp, Artificial sequence
  SiRNA target sequence
gatccagccaaatcaatcgtg

SEQ ID NO: 285149 - DNA, 21 bp, Artificial sequence
  SiRNA target sequence
atccagccaaatcaatcgtgg

SEQ ID NO: 285150 - DNA, 21 bp, Artificial sequence
  SiRNA target sequence
tccagccaaatcaatcgtggt

SEQ ID NO: 285151 - DNA, 21 bp, Artificial sequence
  SiRNA target sequence
ccagccaaatcaatcgtggtt

SEQ ID NO: 285152 - DNA, 21 bp, Artificial sequence
  SiRNA target sequence
cagccaaatcaatcgtggtta

SEQ ID NO: 285153 - DNA, 21 bp, Artificial sequence
  SiRNA target sequence
agccaaatcaatcgtggttac

SEQ ID NO: 285154 - DNA, 21 bp, Artificial sequence
  SiRNA target sequence
gccaaatcaatcgtggttacc

SEQ ID NO: 285155 - DNA, 21 bp, Artificial sequence
  SiRNA target sequence
ccaaatcaatcgtggttaccc

SEQ ID NO: 285156 - DNA, 21 bp, Artificial sequence
  SiRNA target sequence
caaatcaatcgtggttaccct

SEQ ID NO: 285157 - DNA, 21 bp, Artificial sequence
  SiRNA target sequence
aaatcaatcgtggttaccctc

SEQ ID NO: 285158 - DNA, 21 bp, Artificial sequence
  SiRNA target sequence
aatcaatcgtggttaccctcg

SEQ ID NO: 285159 - DNA, 21 bp, Artificial sequence
  SiRNA target sequence
atcaatcgtggttaccctcgg

SEQ ID NO: 285160 - DNA, 21 bp, Artificial sequence
  SiRNA target sequence
tcaatcgtggttaccctcggg

SEQ ID NO: 285161 - DNA, 21 bp, Artificial sequence
  SiRNA target sequence
caatcgtggttaccctcgggc

SEQ ID NO: 285162 - DNA, 21 bp, Artificial sequence
  SiRNA target sequence
aatcgtggttaccctcgggca

SEQ ID NO: 285163 - DNA, 21 bp, Artificial sequence
  SiRNA target sequence
atcgtggttaccctcgggcag

SEQ ID NO: 285164 - DNA, 21 bp, Artificial sequence
  SiRNA target sequence
tcgtggttaccctcgggcaga

SEQ ID NO: 285165 - DNA, 21 bp, Artificial sequence
  SiRNA target sequence
cgtggttaccctcgggcagaa

SEQ ID NO: 285166 - DNA, 21 bp, Artificial sequence
  SiRNA target sequence
gtggttaccctcgggcagaag

SEQ ID NO: 285167 - DNA, 21 bp, Artificial sequence
  SiRNA target sequence
tggttaccctcgggcagaagc

SEQ ID NO: 285168 - DNA, 21 bp, Artificial sequence
  SiRNA target sequence
ggttaccctcgggcagaagct

SEQ ID NO: 285169 - DNA, 21 bp, Artificial sequence
  SiRNA target sequence
gttaccctcgggcagaagctc

SEQ ID NO: 285170 - DNA, 21 bp, Artificial sequence
  SiRNA target sequence
ttaccctcgggcagaagctcc

SEQ ID NO: 285171 - DNA, 21 bp, Artificial sequence
  SiRNA target sequence
taccctcgggcagaagctcca

SEQ ID NO: 285172 - DNA, 21 bp, Artificial sequence
  SiRNA target sequence
accctcgggcagaagctccaa

SEQ ID NO: 285173 - DNA, 21 bp, Artificial sequence
  SiRNA target sequence
ccctcgggcagaagctccaaa

SEQ ID NO: 285174 - DNA, 21 bp, Artificial sequence
  SiRNA target sequence
cctcgggcagaagctccaaac

SEQ ID NO: 285175 - DNA, 21 bp, Artificial sequence
  SiRNA target sequence
ctcgggcagaagctccaaact

SEQ ID NO: 285176 - DNA, 21 bp, Artificial sequence
  SiRNA target sequence
tcgggcagaagctccaaactg

SEQ ID NO: 285177 - DNA, 21 bp, Artificial sequence
  SiRNA target sequence
cgggcagaagctccaaactgt

SEQ ID NO: 285178 - DNA, 21 bp, Artificial sequence
  SiRNA target sequence
gggcagaagctccaaactgtc

SEQ ID NO: 285179 - DNA, 21 bp, Artificial sequence
  SiRNA target sequence
ggcagaagctccaaactgtca

SEQ ID NO: 285180 - DNA, 21 bp, Artificial sequence
  SiRNA target sequence
gcagaagctccaaactgtcaa

SEQ ID NO: 285181 - DNA, 21 bp, Artificial sequence
  SiRNA target sequence
cagaagctccaaactgtcaat

SEQ ID NO: 285182 - DNA, 21 bp, Artificial sequence
  SiRNA target sequence
agaagctccaaactgtcaatg

SEQ ID NO: 285183 - DNA, 21 bp, Artificial sequence
  SiRNA target sequence
gaagctccaaactgtcaatgc

SEQ ID NO: 285184 - DNA, 21 bp, Artificial sequence
  SiRNA target sequence
aagctccaaactgtcaatgcc

SEQ ID NO: 285185 - DNA, 21 bp, Artificial sequence
  SiRNA target sequence
agctccaaactgtcaatgccc

SEQ ID NO: 285186 - DNA, 21 bp, Artificial sequence
  SiRNA target sequence
gctccaaactgtcaatgccct

SEQ ID NO: 285187 - DNA, 21 bp, Artificial sequence
  SiRNA target sequence
ctccaaactgtcaatgccctc

SEQ ID NO: 285188 - DNA, 21 bp, Artificial sequence
  SiRNA target sequence
tccaaactgtcaatgccctca

SEQ ID NO: 285189 - DNA, 21 bp, Artificial sequence
  SiRNA target sequence
ccaaactgtcaatgccctcaa

SEQ ID NO: 285190 - DNA, 21 bp, Artificial sequence
  SiRNA target sequence
caaactgtcaatgccctcaaa

SEQ ID NO: 285191 - DNA, 21 bp, Artificial sequence
  SiRNA target sequence
aaactgtcaatgccctcaaat

SEQ ID NO: 285192 - DNA, 21 bp, Artificial sequence
  SiRNA target sequence
aactgtcaatgccctcaaatt

SEQ ID NO: 285193 - DNA, 21 bp, Artificial sequence
  SiRNA target sequence
actgtcaatgccctcaaattc

SEQ ID NO: 285194 - DNA, 21 bp, Artificial sequence
  SiRNA target sequence
ctgtcaatgccctcaaattca

SEQ ID NO: 285195 - DNA, 21 bp, Artificial sequence
  SiRNA target sequence
tgtcaatgccctcaaattcat

SEQ ID NO: 285196 - DNA, 21 bp, Artificial sequence
  SiRNA target sequence
gtcaatgccctcaaattcatc

SEQ ID NO: 285197 - DNA, 21 bp, Artificial sequence
  SiRNA target sequence
tcaatgccctcaaattcatcg

SEQ ID NO: 285198 - DNA, 21 bp, Artificial sequence
  SiRNA target sequence
caatgccctcaaattcatcgg

SEQ ID NO: 285199 - DNA, 21 bp, Artificial sequence
  SiRNA target sequence
aatgccctcaaattcatcggg

SEQ ID NO: 285200 - DNA, 21 bp, Artificial sequence
  SiRNA target sequence
atgccctcaaattcatcgggg

SEQ ID NO: 285201 - DNA, 21 bp, Artificial sequence
  SiRNA target sequence
tgccctcaaattcatcgggga

SEQ ID NO: 285202 - DNA, 21 bp, Artificial sequence
  SiRNA target sequence
gccctcaaattcatcggggac

SEQ ID NO: 285203 - DNA, 21 bp, Artificial sequence
  SiRNA target sequence
ccctcaaattcatcggggact

SEQ ID NO: 285204 - DNA, 21 bp, Artificial sequence
  SiRNA target sequence
cctcaaattcatcggggactt

SEQ ID NO: 285205 - DNA, 21 bp, Artificial sequence
  SiRNA target sequence
ctcaaattcatcggggacttc

SEQ ID NO: 285206 - DNA, 21 bp, Artificial sequence
  SiRNA target sequence
tcaaattcatcggggacttca

SEQ ID NO: 285207 - DNA, 21 bp, Artificial sequence
  SiRNA target sequence
caaattcatcggggacttcat

SEQ ID NO: 285208 - DNA, 21 bp, Artificial sequence
  SiRNA target sequence
aaattcatcggggacttcatc

SEQ ID NO: 285209 - DNA, 21 bp, Artificial sequence
  SiRNA target sequence
aattcatcggggacttcatca

SEQ ID NO: 285210 - DNA, 21 bp, Artificial sequence
  SiRNA target sequence
attcatcggggacttcatcac

SEQ ID NO: 285211 - DNA, 21 bp, Artificial sequence
  SiRNA target sequence
ttcatcggggacttcatcaca

SEQ ID NO: 285212 - DNA, 21 bp, Artificial sequence
  SiRNA target sequence
tcatcggggacttcatcacag

SEQ ID NO: 285213 - DNA, 21 bp, Artificial sequence
  SiRNA target sequence
catcggggacttcatcacaga

SEQ ID NO: 285214 - DNA, 21 bp, Artificial sequence
  SiRNA target sequence
atcggggacttcatcacagaa

SEQ ID NO: 285215 - DNA, 21 bp, Artificial sequence
  SiRNA target sequence
tcggggacttcatcacagaac

SEQ ID NO: 285216 - DNA, 21 bp, Artificial sequence
  SiRNA target sequence
cggggacttcatcacagaaca

SEQ ID NO: 285217 - DNA, 21 bp, Artificial sequence
  SiRNA target sequence
ggggacttcatcacagaacat

SEQ ID NO: 285218 - DNA, 21 bp, Artificial sequence
  SiRNA target sequence
gggacttcatcacagaacatc

SEQ ID NO: 285219 - DNA, 21 bp, Artificial sequence
  SiRNA target sequence
ggacttcatcacagaacatcc

SEQ ID NO: 285220 - DNA, 21 bp, Artificial sequence
  SiRNA target sequence
gacttcatcacagaacatccg

SEQ ID NO: 285221 - DNA, 21 bp, Artificial sequence
  SiRNA target sequence
acttcatcacagaacatccgg

SEQ ID NO: 285222 - DNA, 21 bp, Artificial sequence
  SiRNA target sequence
cttcatcacagaacatccgga

SEQ ID NO: 285223 - DNA, 21 bp, Artificial sequence
  SiRNA target sequence
ttcatcacagaacatccggaa

SEQ ID NO: 285224 - DNA, 21 bp, Artificial sequence
  SiRNA target sequence
tcatcacagaacatccggaac

SEQ ID NO: 285225 - DNA, 21 bp, Artificial sequence
  SiRNA target sequence
catcacagaacatccggaaca

SEQ ID NO: 285226 - DNA, 21 bp, Artificial sequence
  SiRNA target sequence
atcacagaacatccggaacag

SEQ ID NO: 285227 - DNA, 21 bp, Artificial sequence
  SiRNA target sequence
tcacagaacatccggaacaga

SEQ ID NO: 285228 - DNA, 21 bp, Artificial sequence
  SiRNA target sequence
cacagaacatccggaacagac

SEQ ID NO: 285229 - DNA, 21 bp, Artificial sequence
  SiRNA target sequence
acagaacatccggaacagacg

SEQ ID NO: 285230 - DNA, 21 bp, Artificial sequence
  SiRNA target sequence
cagaacatccggaacagacga

SEQ ID NO: 285231 - DNA, 21 bp, Artificial sequence
  SiRNA target sequence
agaacatccggaacagacgat

SEQ ID NO: 285232 - DNA, 21 bp, Artificial sequence
  SiRNA target sequence
gaacatccggaacagacgata

SEQ ID NO: 285233 - DNA, 21 bp, Artificial sequence
  SiRNA target sequence
aacatccggaacagacgatag

SEQ ID NO: 285234 - DNA, 21 bp, Artificial sequence
  SiRNA target sequence
acatccggaacagacgatagg

SEQ ID NO: 285235 - DNA, 21 bp, Artificial sequence
  SiRNA target sequence
catccggaacagacgataggc

SEQ ID NO: 285236 - DNA, 21 bp, Artificial sequence
  SiRNA target sequence
atccggaacagacgataggcg

SEQ ID NO: 285237 - DNA, 21 bp, Artificial sequence
  SiRNA target sequence
tccggaacagacgataggcgc

SEQ ID NO: 285238 - DNA, 21 bp, Artificial sequence
  SiRNA target sequence
ccggaacagacgataggcgcc

SEQ ID NO: 285239 - DNA, 21 bp, Artificial sequence
  SiRNA target sequence
cggaacagacgataggcgccg

SEQ ID NO: 285240 - DNA, 21 bp, Artificial sequence
  SiRNA target sequence
ggaacagacgataggcgccgt

SEQ ID NO: 285241 - DNA, 21 bp, Artificial sequence
  SiRNA target sequence
gaacagacgataggcgccgta

SEQ ID NO: 285242 - DNA, 21 bp, Artificial sequence
  SiRNA target sequence
aacagacgataggcgccgtag

SEQ ID NO: 285243 - DNA, 21 bp, Artificial sequence
  SiRNA target sequence
acagacgataggcgccgtagc

SEQ ID NO: 285244 - DNA, 21 bp, Artificial sequence
  SiRNA target sequence
cagacgataggcgccgtagct

SEQ ID NO: 285245 - DNA, 21 bp, Artificial sequence
  SiRNA target sequence
agacgataggcgccgtagctg

SEQ ID NO: 285246 - DNA, 21 bp, Artificial sequence
  SiRNA target sequence
gacgataggcgccgtagctgt

SEQ ID NO: 285247 - DNA, 21 bp, Artificial sequence
  SiRNA target sequence
acgataggcgccgtagctgtt

SEQ ID NO: 285248 - DNA, 21 bp, Artificial sequence
  SiRNA target sequence
cgataggcgccgtagctgttt

SEQ ID NO: 285249 - DNA, 21 bp, Artificial sequence
  SiRNA target sequence
gataggcgccgtagctgtttc

SEQ ID NO: 285250 - DNA, 21 bp, Artificial sequence
  SiRNA target sequence
ataggcgccgtagctgtttct

SEQ ID NO: 285251 - DNA, 21 bp, Artificial sequence
  SiRNA target sequence
taggcgccgtagctgtttctg

SEQ ID NO: 285252 - DNA, 21 bp, Artificial sequence
  SiRNA target sequence
aggcgccgtagctgtttctgc

SEQ ID NO: 285253 - DNA, 21 bp, Artificial sequence
  SiRNA target sequence
ggcgccgtagctgtttctgct

SEQ ID NO: 285254 - DNA, 21 bp, Artificial sequence
  SiRNA target sequence
gcgccgtagctgtttctgctg

SEQ ID NO: 285255 - DNA, 21 bp, Artificial sequence
  SiRNA target sequence
cgccgtagctgtttctgctgc

SEQ ID NO: 285256 - DNA, 21 bp, Artificial sequence
  SiRNA target sequence
gccgtagctgtttctgctgcg

SEQ ID NO: 285257 - DNA, 21 bp, Artificial sequence
  SiRNA target sequence
ccgtagctgtttctgctgcgg

SEQ ID NO: 285258 - DNA, 21 bp, Artificial sequence
  SiRNA target sequence
cgtagctgtttctgctgcggt

SEQ ID NO: 285259 - DNA, 21 bp, Artificial sequence
  SiRNA target sequence
gtagctgtttctgctgcggta

SEQ ID NO: 285260 - DNA, 21 bp, Artificial sequence
  SiRNA target sequence
tagctgtttctgctgcggtac

SEQ ID NO: 285261 - DNA, 21 bp, Artificial sequence
  SiRNA target sequence
agctgtttctgctgcggtact

SEQ ID NO: 285262 - DNA, 21 bp, Artificial sequence
  SiRNA target sequence
gctgtttctgctgcggtactc

SEQ ID NO: 285263 - DNA, 21 bp, Artificial sequence
  SiRNA target sequence
ctgtttctgctgcggtactca

SEQ ID NO: 285264 - DNA, 21 bp, Artificial sequence
  SiRNA target sequence
tgtttctgctgcggtactcag

SEQ ID NO: 285265 - DNA, 21 bp, Artificial sequence
  SiRNA target sequence
gtttctgctgcggtactcagc

SEQ ID NO: 285266 - DNA, 21 bp, Artificial sequence
  SiRNA target sequence
tttctgctgcggtactcagct

SEQ ID NO: 285267 - DNA, 21 bp, Artificial sequence
  SiRNA target sequence
ttctgctgcggtactcagctc

SEQ ID NO: 285268 - DNA, 21 bp, Artificial sequence
  SiRNA target sequence
tctgctgcggtactcagctca

SEQ ID NO: 285269 - DNA, 21 bp, Artificial sequence
  SiRNA target sequence
ctgctgcggtactcagctcag

SEQ ID NO: 285270 - DNA, 21 bp, Artificial sequence
  SiRNA target sequence
tgctgcggtactcagctcagc

SEQ ID NO: 285271 - DNA, 21 bp, Artificial sequence
  SiRNA target sequence
gctgcggtactcagctcagct

SEQ ID NO: 285272 - DNA, 21 bp, Artificial sequence
  SiRNA target sequence
ctgcggtactcagctcagctc

SEQ ID NO: 285273 - DNA, 21 bp, Artificial sequence
  SiRNA target sequence
tgcggtactcagctcagctcg

SEQ ID NO: 285274 - DNA, 21 bp, Artificial sequence
  SiRNA target sequence
gcggtactcagctcagctcga

SEQ ID NO: 285275 - DNA, 21 bp, Artificial sequence
  SiRNA target sequence
cggtactcagctcagctcgac

SEQ ID NO: 285276 - DNA, 21 bp, Artificial sequence
  SiRNA target sequence
ggtactcagctcagctcgacg

SEQ ID NO: 285277 - DNA, 21 bp, Artificial sequence
  SiRNA target sequence
gtactcagctcagctcgacgc

SEQ ID NO: 285278 - DNA, 21 bp, Artificial sequence
  SiRNA target sequence
tactcagctcagctcgacgct

SEQ ID NO: 285279 - DNA, 21 bp, Artificial sequence
  SiRNA target sequence
actcagctcagctcgacgctc

SEQ ID NO: 285280 - DNA, 21 bp, Artificial sequence
  SiRNA target sequence
ctcagctcagctcgacgctca

SEQ ID NO: 285281 - DNA, 21 bp, Artificial sequence
  SiRNA target sequence
tcagctcagctcgacgctcag

SEQ ID NO: 285282 - DNA, 21 bp, Artificial sequence
  SiRNA target sequence
cagctcagctcgacgctcaga

SEQ ID NO: 285283 - DNA, 21 bp, Artificial sequence
  SiRNA target sequence
agctcagctcgacgctcagag

SEQ ID NO: 285284 - DNA, 21 bp, Artificial sequence
  SiRNA target sequence
gctcagctcgacgctcagaga

SEQ ID NO: 285285 - DNA, 21 bp, Artificial sequence
  SiRNA target sequence
ctcagctcgacgctcagagaa

SEQ ID NO: 285286 - DNA, 21 bp, Artificial sequence
  SiRNA target sequence
tcagctcgacgctcagagaag

SEQ ID NO: 285287 - DNA, 21 bp, Artificial sequence
  SiRNA target sequence
cagctcgacgctcagagaagt

SEQ ID NO: 285288 - DNA, 21 bp, Artificial sequence
  SiRNA target sequence
agctcgacgctcagagaagtt

SEQ ID NO: 285289 - DNA, 21 bp, Artificial sequence
  SiRNA target sequence
gctcgacgctcagagaagttt

SEQ ID NO: 285290 - DNA, 21 bp, Artificial sequence
  SiRNA target sequence
ctcgacgctcagagaagtttg

SEQ ID NO: 285291 - DNA, 21 bp, Artificial sequence
  SiRNA target sequence
tcgacgctcagagaagtttgc

SEQ ID NO: 285292 - DNA, 21 bp, Artificial sequence
  SiRNA target sequence
cgacgctcagagaagtttgct

SEQ ID NO: 285293 - DNA, 21 bp, Artificial sequence
  SiRNA target sequence
gacgctcagagaagtttgctt

SEQ ID NO: 285294 - DNA, 21 bp, Artificial sequence
  SiRNA target sequence
acgctcagagaagtttgctta

SEQ ID NO: 285295 - DNA, 21 bp, Artificial sequence
  SiRNA target sequence
cgctcagagaagtttgcttat

SEQ ID NO: 285296 - DNA, 21 bp, Artificial sequence
  SiRNA target sequence
gctcagagaagtttgcttata

SEQ ID NO: 285297 - DNA, 21 bp, Artificial sequence
  SiRNA target sequence
ctcagagaagtttgcttatat

SEQ ID NO: 285298 - DNA, 21 bp, Artificial sequence
  SiRNA target sequence
tcagagaagtttgcttatatg

SEQ ID NO: 285299 - DNA, 21 bp, Artificial sequence
  SiRNA target sequence
cagagaagtttgcttatatga

SEQ ID NO: 285300 - DNA, 21 bp, Artificial sequence
  SiRNA target sequence
agagaagtttgcttatatgat

SEQ ID NO: 285301 - DNA, 21 bp, Artificial sequence
  SiRNA target sequence
gagaagtttgcttatatgatc

SEQ ID NO: 285302 - DNA, 21 bp, Artificial sequence
  SiRNA target sequence
agaagtttgcttatatgatcg

SEQ ID NO: 285303 - DNA, 21 bp, Artificial sequence
  SiRNA target sequence
gaagtttgcttatatgatcgg

SEQ ID NO: 285304 - DNA, 21 bp, Artificial sequence
  SiRNA target sequence
aagtttgcttatatgatcggg

SEQ ID NO: 285305 - DNA, 21 bp, Artificial sequence
  SiRNA target sequence
agtttgcttatatgatcgggg

SEQ ID NO: 285306 - DNA, 21 bp, Artificial sequence
  SiRNA target sequence
gtttgcttatatgatcggggc

SEQ ID NO: 285307 - DNA, 21 bp, Artificial sequence
  SiRNA target sequence
tttgcttatatgatcggggca

SEQ ID NO: 285308 - DNA, 21 bp, Artificial sequence
  SiRNA target sequence
ttgcttatatgatcggggcaa

SEQ ID NO: 285309 - DNA, 21 bp, Artificial sequence
  SiRNA target sequence
tgcttatatgatcggggcaat

SEQ ID NO: 285310 - DNA, 21 bp, Artificial sequence
  SiRNA target sequence
gcttatatgatcggggcaatc

SEQ ID NO: 285311 - DNA, 21 bp, Artificial sequence
  SiRNA target sequence
cttatatgatcggggcaatcc

SEQ ID NO: 285312 - DNA, 21 bp, Artificial sequence
  SiRNA target sequence
ttatatgatcggggcaatcct

SEQ ID NO: 285313 - DNA, 21 bp, Artificial sequence
  SiRNA target sequence
tatatgatcggggcaatcctg

SEQ ID NO: 285314 - DNA, 21 bp, Artificial sequence
  SiRNA target sequence
atatgatcggggcaatcctgg

SEQ ID NO: 285315 - DNA, 21 bp, Artificial sequence
  SiRNA target sequence
tatgatcggggcaatcctggt

SEQ ID NO: 285316 - DNA, 21 bp, Artificial sequence
  SiRNA target sequence
atgatcggggcaatcctggtc

SEQ ID NO: 285317 - DNA, 21 bp, Artificial sequence
  SiRNA target sequence
tgatcggggcaatcctggtcg

SEQ ID NO: 285318 - DNA, 21 bp, Artificial sequence
  SiRNA target sequence
gatcggggcaatcctggtcgt

SEQ ID NO: 285319 - DNA, 21 bp, Artificial sequence
  SiRNA target sequence
atcggggcaatcctggtcgta

SEQ ID NO: 285320 - DNA, 21 bp, Artificial sequence
  SiRNA target sequence
tcggggcaatcctggtcgtat

SEQ ID NO: 285321 - DNA, 21 bp, Artificial sequence
  SiRNA target sequence
cggggcaatcctggtcgtata

SEQ ID NO: 285322 - DNA, 21 bp, Artificial sequence
  SiRNA target sequence
ggggcaatcctggtcgtatat

SEQ ID NO: 285323 - DNA, 21 bp, Artificial sequence
  SiRNA target sequence
gggcaatcctggtcgtatatg

SEQ ID NO: 285324 - DNA, 21 bp, Artificial sequence
  SiRNA target sequence
ggcaatcctggtcgtatatgt

SEQ ID NO: 285325 - DNA, 21 bp, Artificial sequence
  SiRNA target sequence
gcaatcctggtcgtatatgtg

SEQ ID NO: 285326 - DNA, 21 bp, Artificial sequence
  SiRNA target sequence
caatcctggtcgtatatgtgt

SEQ ID NO: 285327 - DNA, 21 bp, Artificial sequence
  SiRNA target sequence
aatcctggtcgtatatgtgtt

SEQ ID NO: 285328 - DNA, 21 bp, Artificial sequence
  SiRNA target sequence
atcctggtcgtatatgtgttg

SEQ ID NO: 285329 - DNA, 21 bp, Artificial sequence
  SiRNA target sequence
tcctggtcgtatatgtgttgc

SEQ ID NO: 285330 - DNA, 21 bp, Artificial sequence
  SiRNA target sequence
cctggtcgtatatgtgttgcc

SEQ ID NO: 285331 - DNA, 21 bp, Artificial sequence
  SiRNA target sequence
ctggtcgtatatgtgttgcct

SEQ ID NO: 285332 - DNA, 21 bp, Artificial sequence
  SiRNA target sequence
tggtcgtatatgtgttgcctg

SEQ ID NO: 285333 - DNA, 21 bp, Artificial sequence
  SiRNA target sequence
ggtcgtatatgtgttgcctgc

SEQ ID NO: 285334 - DNA, 21 bp, Artificial sequence
  SiRNA target sequence
gtcgtatatgtgttgcctgca

SEQ ID NO: 285335 - DNA, 21 bp, Artificial sequence
  SiRNA target sequence
tcgtatatgtgttgcctgcaa

SEQ ID NO: 285336 - DNA, 21 bp, Artificial sequence
  SiRNA target sequence
cgtatatgtgttgcctgcaac

SEQ ID NO: 285337 - DNA, 21 bp, Artificial sequence
  SiRNA target sequence
gtatatgtgttgcctgcaaca

SEQ ID NO: 285338 - DNA, 21 bp, Artificial sequence
  SiRNA target sequence
tatatgtgttgcctgcaacag

SEQ ID NO: 285339 - DNA, 21 bp, Artificial sequence
  SiRNA target sequence
atatgtgttgcctgcaacaga

SEQ ID NO: 285340 - DNA, 21 bp, Artificial sequence
  SiRNA target sequence
tatgtgttgcctgcaacagat

SEQ ID NO: 285341 - DNA, 21 bp, Artificial sequence
  SiRNA target sequence
atgtgttgcctgcaacagatg

SEQ ID NO: 285342 - DNA, 21 bp, Artificial sequence
  SiRNA target sequence
tgtgttgcctgcaacagatgc

SEQ ID NO: 285343 - DNA, 21 bp, Artificial sequence
  SiRNA target sequence
gtgttgcctgcaacagatgct

SEQ ID NO: 285344 - DNA, 21 bp, Artificial sequence
  SiRNA target sequence
tgttgcctgcaacagatgctt

SEQ ID NO: 285345 - DNA, 21 bp, Artificial sequence
  SiRNA target sequence
gttgcctgcaacagatgcttg

SEQ ID NO: 285346 - DNA, 21 bp, Artificial sequence
  SiRNA target sequence
ttgcctgcaacagatgcttgg

SEQ ID NO: 285347 - DNA, 21 bp, Artificial sequence
  SiRNA target sequence
tgcctgcaacagatgcttgga

SEQ ID NO: 285348 - DNA, 21 bp, Artificial sequence
  SiRNA target sequence
gcctgcaacagatgcttggac

SEQ ID NO: 285349 - DNA, 21 bp, Artificial sequence
  SiRNA target sequence
cctgcaacagatgcttggaca

SEQ ID NO: 285350 - DNA, 21 bp, Artificial sequence
  SiRNA target sequence
ctgcaacagatgcttggacat

SEQ ID NO: 285351 - DNA, 21 bp, Artificial sequence
  SiRNA target sequence
tgcaacagatgcttggacata

SEQ ID NO: 285352 - DNA, 21 bp, Artificial sequence
  SiRNA target sequence
gcaacagatgcttggacatat

SEQ ID NO: 285353 - DNA, 21 bp, Artificial sequence
  SiRNA target sequence
caacagatgcttggacatatg

SEQ ID NO: 285354 - DNA, 21 bp, Artificial sequence
  SiRNA target sequence
aacagatgcttggacatatgg

SEQ ID NO: 285355 - DNA, 21 bp, Artificial sequence
  SiRNA target sequence
acagatgcttggacatatggc

SEQ ID NO: 285356 - DNA, 21 bp, Artificial sequence
  SiRNA target sequence
cagatgcttggacatatggcg

SEQ ID NO: 285357 - DNA, 21 bp, Artificial sequence
  SiRNA target sequence
agatgcttggacatatggcgc

SEQ ID NO: 285358 - DNA, 21 bp, Artificial sequence
  SiRNA target sequence
gatgcttggacatatggcgct

SEQ ID NO: 285359 - DNA, 21 bp, Artificial sequence
  SiRNA target sequence
atgcttggacatatggcgctt

SEQ ID NO: 285360 - DNA, 21 bp, Artificial sequence
  SiRNA target sequence
tgcttggacatatggcgcttg

SEQ ID NO: 285361 - DNA, 21 bp, Artificial sequence
  SiRNA target sequence
gcttggacatatggcgcttgg

SEQ ID NO: 285362 - DNA, 21 bp, Artificial sequence
  SiRNA target sequence
cttggacatatggcgcttggg

SEQ ID NO: 285363 - DNA, 21 bp, Artificial sequence
  SiRNA target sequence
ttggacatatggcgcttgggc

SEQ ID NO: 285364 - DNA, 21 bp, Artificial sequence
  SiRNA target sequence
tggacatatggcgcttgggcc

SEQ ID NO: 285365 - DNA, 21 bp, Artificial sequence
  SiRNA target sequence
ggacatatggcgcttgggccg

SEQ ID NO: 285366 - DNA, 21 bp, Artificial sequence
  SiRNA target sequence
gacatatggcgcttgggccgc

SEQ ID NO: 285367 - DNA, 21 bp, Artificial sequence
  SiRNA target sequence
acatatggcgcttgggccgcc

SEQ ID NO: 285368 - DNA, 21 bp, Artificial sequence
  SiRNA target sequence
catatggcgcttgggccgccg

SEQ ID NO: 285369 - DNA, 21 bp, Artificial sequence
  SiRNA target sequence
atatggcgcttgggccgccgc

SEQ ID NO: 285370 - DNA, 21 bp, Artificial sequence
  SiRNA target sequence
tatggcgcttgggccgccgcc

SEQ ID NO: 285371 - DNA, 21 bp, Artificial sequence
  SiRNA target sequence
atggcgcttgggccgccgccc

SEQ ID NO: 285372 - DNA, 21 bp, Artificial sequence
  SiRNA target sequence
tggcgcttgggccgccgccct

SEQ ID NO: 285373 - DNA, 21 bp, Artificial sequence
  SiRNA target sequence
ggcgcttgggccgccgccctg

SEQ ID NO: 285374 - DNA, 21 bp, Artificial sequence
  SiRNA target sequence
gcgcttgggccgccgccctgg

SEQ ID NO: 285375 - DNA, 21 bp, Artificial sequence
  SiRNA target sequence
cgcttgggccgccgccctggc

SEQ ID NO: 285376 - DNA, 21 bp, Artificial sequence
  SiRNA target sequence
gcttgggccgccgccctggcg

SEQ ID NO: 285377 - DNA, 21 bp, Artificial sequence
  SiRNA target sequence
cttgggccgccgccctggcgt

SEQ ID NO: 285378 - DNA, 21 bp, Artificial sequence
  SiRNA target sequence
ttgggccgccgccctggcgtt

SEQ ID NO: 285379 - DNA, 21 bp, Artificial sequence
  SiRNA target sequence
tgggccgccgccctggcgtta

SEQ ID NO: 285380 - DNA, 21 bp, Artificial sequence
  SiRNA target sequence
gggccgccgccctggcgttat

SEQ ID NO: 285381 - DNA, 21 bp, Artificial sequence
  SiRNA target sequence
ggccgccgccctggcgttatt

SEQ ID NO: 285382 - DNA, 21 bp, Artificial sequence
  SiRNA target sequence
gccgccgccctggcgttattt

SEQ ID NO: 285383 - DNA, 21 bp, Artificial sequence
  SiRNA target sequence
ccgccgccctggcgttatttc

SEQ ID NO: 285384 - DNA, 21 bp, Artificial sequence
  SiRNA target sequence
cgccgccctggcgttatttct

SEQ ID NO: 285385 - DNA, 21 bp, Artificial sequence
  SiRNA target sequence
gccgccctggcgttatttctc

SEQ ID NO: 285386 - DNA, 21 bp, Artificial sequence
  SiRNA target sequence
ccgccctggcgttatttctcc

SEQ ID NO: 285387 - DNA, 21 bp, Artificial sequence
  SiRNA target sequence
cgccctggcgttatttctcca

SEQ ID NO: 285388 - DNA, 21 bp, Artificial sequence
  SiRNA target sequence
gccctggcgttatttctccaa

SEQ ID NO: 285389 - DNA, 21 bp, Artificial sequence
  SiRNA target sequence
ccctggcgttatttctccaac

SEQ ID NO: 285390 - DNA, 21 bp, Artificial sequence
  SiRNA target sequence
cctggcgttatttctccaact

SEQ ID NO: 285391 - DNA, 21 bp, Artificial sequence
  SiRNA target sequence
ctggcgttatttctccaactc

SEQ ID NO: 285392 - DNA, 21 bp, Artificial sequence
  SiRNA target sequence
tggcgttatttctccaactcc

SEQ ID NO: 285393 - DNA, 21 bp, Artificial sequence
  SiRNA target sequence
ggcgttatttctccaactccg

SEQ ID NO: 285394 - DNA, 21 bp, Artificial sequence
  SiRNA target sequence
gcgttatttctccaactccga

SEQ ID NO: 285395 - DNA, 21 bp, Artificial sequence
  SiRNA target sequence
cgttatttctccaactccgaa

SEQ ID NO: 285396 - DNA, 21 bp, Artificial sequence
  SiRNA target sequence
gttatttctccaactccgaac

SEQ ID NO: 285397 - DNA, 21 bp, Artificial sequence
  SiRNA target sequence
ttatttctccaactccgaacc

SEQ ID NO: 285398 - DNA, 21 bp, Artificial sequence
  SiRNA target sequence
tatttctccaactccgaacca

SEQ ID NO: 285399 - DNA, 21 bp, Artificial sequence
  SiRNA target sequence
atttctccaactccgaaccat

SEQ ID NO: 285400 - DNA, 21 bp, Artificial sequence
  SiRNA target sequence
tttctccaactccgaaccatc

SEQ ID NO: 285401 - DNA, 21 bp, Artificial sequence
  SiRNA target sequence
ttctccaactccgaaccatcg

SEQ ID NO: 285402 - DNA, 21 bp, Artificial sequence
  SiRNA target sequence
tctccaactccgaaccatcga

SEQ ID NO: 285403 - DNA, 21 bp, Artificial sequence
  SiRNA target sequence
ctccaactccgaaccatcgag

SEQ ID NO: 285404 - DNA, 21 bp, Artificial sequence
  SiRNA target sequence
tccaactccgaaccatcgagg

SEQ ID NO: 285405 - DNA, 21 bp, Artificial sequence
  SiRNA target sequence
ccaactccgaaccatcgagga

SEQ ID NO: 285406 - DNA, 21 bp, Artificial sequence
  SiRNA target sequence
caactccgaaccatcgaggat

SEQ ID NO: 285407 - DNA, 21 bp, Artificial sequence
  SiRNA target sequence
aactccgaaccatcgaggatc

SEQ ID NO: 285408 - DNA, 21 bp, Artificial sequence
  SiRNA target sequence
actccgaaccatcgaggatcg

SEQ ID NO: 285409 - DNA, 21 bp, Artificial sequence
  SiRNA target sequence
ctccgaaccatcgaggatcgc

SEQ ID NO: 285410 - DNA, 21 bp, Artificial sequence
  SiRNA target sequence
tccgaaccatcgaggatcgca

SEQ ID NO: 285411 - DNA, 21 bp, Artificial sequence
  SiRNA target sequence
ccgaaccatcgaggatcgcat

SEQ ID NO: 285412 - DNA, 21 bp, Artificial sequence
  SiRNA target sequence
cgaaccatcgaggatcgcatt

SEQ ID NO: 285413 - DNA, 21 bp, Artificial sequence
  SiRNA target sequence
gaaccatcgaggatcgcattc

SEQ ID NO: 285414 - DNA, 21 bp, Artificial sequence
  SiRNA target sequence
aaccatcgaggatcgcattct

SEQ ID NO: 285415 - DNA, 21 bp, Artificial sequence
  SiRNA target sequence
accatcgaggatcgcattctc

SEQ ID NO: 285416 - DNA, 21 bp, Artificial sequence
  SiRNA target sequence
ccatcgaggatcgcattctcc

SEQ ID NO: 285417 - DNA, 21 bp, Artificial sequence
  SiRNA target sequence
catcgaggatcgcattctcct

SEQ ID NO: 285418 - DNA, 21 bp, Artificial sequence
  SiRNA target sequence
atcgaggatcgcattctcctc

SEQ ID NO: 285419 - DNA, 21 bp, Artificial sequence
  SiRNA target sequence
tcgaggatcgcattctcctca

SEQ ID NO: 285420 - DNA, 21 bp, Artificial sequence
  SiRNA target sequence
cgaggatcgcattctcctcag

SEQ ID NO: 285421 - DNA, 21 bp, Artificial sequence
  SiRNA target sequence
gaggatcgcattctcctcagc

SEQ ID NO: 285422 - DNA, 21 bp, Artificial sequence
  SiRNA target sequence
aggatcgcattctcctcagcg

SEQ ID NO: 285423 - DNA, 21 bp, Artificial sequence
  SiRNA target sequence
ggatcgcattctcctcagcgt

SEQ ID NO: 285424 - DNA, 21 bp, Artificial sequence
  SiRNA target sequence
gatcgcattctcctcagcgtc

SEQ ID NO: 285425 - DNA, 21 bp, Artificial sequence
  SiRNA target sequence
atcgcattctcctcagcgtct

SEQ ID NO: 285426 - DNA, 21 bp, Artificial sequence
  SiRNA target sequence
tcgcattctcctcagcgtctt

SEQ ID NO: 285427 - DNA, 21 bp, Artificial sequence
  SiRNA target sequence
cgcattctcctcagcgtcttt

SEQ ID NO: 285428 - DNA, 21 bp, Artificial sequence
  SiRNA target sequence
gcattctcctcagcgtctttg

SEQ ID NO: 285429 - DNA, 21 bp, Artificial sequence
  SiRNA target sequence
cattctcctcagcgtctttgc

SEQ ID NO: 285430 - DNA, 21 bp, Artificial sequence
  SiRNA target sequence
attctcctcagcgtctttgct

SEQ ID NO: 285431 - DNA, 21 bp, Artificial sequence
  SiRNA target sequence
ttctcctcagcgtctttgctc

SEQ ID NO: 285432 - DNA, 21 bp, Artificial sequence
  SiRNA target sequence
tctcctcagcgtctttgctct

SEQ ID NO: 285433 - DNA, 21 bp, Artificial sequence
  SiRNA target sequence
ctcctcagcgtctttgctctc

SEQ ID NO: 285434 - DNA, 21 bp, Artificial sequence
  SiRNA target sequence
tcctcagcgtctttgctctcg

SEQ ID NO: 285435 - DNA, 21 bp, Artificial sequence
  SiRNA target sequence
cctcagcgtctttgctctcgg

SEQ ID NO: 285436 - DNA, 21 bp, Artificial sequence
  SiRNA target sequence
ctcagcgtctttgctctcggc

SEQ ID NO: 285437 - DNA, 21 bp, Artificial sequence
  SiRNA target sequence
tcagcgtctttgctctcggcg

SEQ ID NO: 285438 - DNA, 21 bp, Artificial sequence
  SiRNA target sequence
cagcgtctttgctctcggcgt

SEQ ID NO: 285439 - DNA, 21 bp, Artificial sequence
  SiRNA target sequence
agcgtctttgctctcggcgtt

SEQ ID NO: 285440 - DNA, 21 bp, Artificial sequence
  SiRNA target sequence
gcgtctttgctctcggcgttt

SEQ ID NO: 285441 - DNA, 21 bp, Artificial sequence
  SiRNA target sequence
cgtctttgctctcggcgttta

SEQ ID NO: 285442 - DNA, 21 bp, Artificial sequence
  SiRNA target sequence
gtctttgctctcggcgtttat

SEQ ID NO: 285443 - DNA, 21 bp, Artificial sequence
  SiRNA target sequence
tctttgctctcggcgtttatg

SEQ ID NO: 285444 - DNA, 21 bp, Artificial sequence
  SiRNA target sequence
ctttgctctcggcgtttatgt

SEQ ID NO: 285445 - DNA, 21 bp, Artificial sequence
  SiRNA target sequence
tttgctctcggcgtttatgtc

SEQ ID NO: 285446 - DNA, 21 bp, Artificial sequence
  SiRNA target sequence
ttgctctcggcgtttatgtct

SEQ ID NO: 285447 - DNA, 21 bp, Artificial sequence
  SiRNA target sequence
tgctctcggcgtttatgtctg

SEQ ID NO: 285448 - DNA, 21 bp, Artificial sequence
  SiRNA target sequence
gctctcggcgtttatgtctgg

SEQ ID NO: 285449 - DNA, 21 bp, Artificial sequence
  SiRNA target sequence
ctctcggcgtttatgtctgga

SEQ ID NO: 285450 - DNA, 21 bp, Artificial sequence
  SiRNA target sequence
tctcggcgtttatgtctggac

SEQ ID NO: 285451 - DNA, 21 bp, Artificial sequence
  SiRNA target sequence
ctcggcgtttatgtctggact

SEQ ID NO: 285452 - DNA, 21 bp, Artificial sequence
  SiRNA target sequence
tcggcgtttatgtctggactc

SEQ ID NO: 285453 - DNA, 21 bp, Artificial sequence
  SiRNA target sequence
cggcgtttatgtctggactct

SEQ ID NO: 285454 - DNA, 21 bp, Artificial sequence
  SiRNA target sequence
ggcgtttatgtctggactctc

SEQ ID NO: 285455 - DNA, 21 bp, Artificial sequence
  SiRNA target sequence
gcgtttatgtctggactctcc

SEQ ID NO: 285456 - DNA, 21 bp, Artificial sequence
  SiRNA target sequence
cgtttatgtctggactctcca

SEQ ID NO: 285457 - DNA, 21 bp, Artificial sequence
  SiRNA target sequence
gtttatgtctggactctccag

SEQ ID NO: 285458 - DNA, 21 bp, Artificial sequence
  SiRNA target sequence
tttatgtctggactctccaga

SEQ ID NO: 285459 - DNA, 21 bp, Artificial sequence
  SiRNA target sequence
ttatgtctggactctccagac

SEQ ID NO: 285460 - DNA, 21 bp, Artificial sequence
  SiRNA target sequence
tatgtctggactctccagact

SEQ ID NO: 285461 - DNA, 21 bp, Artificial sequence
  SiRNA target sequence
atgtctggactctccagactc

SEQ ID NO: 285462 - DNA, 21 bp, Artificial sequence
  SiRNA target sequence
tgtctggactctccagactca

SEQ ID NO: 285463 - DNA, 21 bp, Artificial sequence
  SiRNA target sequence
gtctggactctccagactcaa

SEQ ID NO: 285464 - DNA, 21 bp, Artificial sequence
  SiRNA target sequence
tctggactctccagactcaac

SEQ ID NO: 285465 - DNA, 21 bp, Artificial sequence
  SiRNA target sequence
ctggactctccagactcaaca

SEQ ID NO: 285466 - DNA, 21 bp, Artificial sequence
  SiRNA target sequence
tggactctccagactcaacag

SEQ ID NO: 285467 - DNA, 21 bp, Artificial sequence
  SiRNA target sequence
ggactctccagactcaacaga

SEQ ID NO: 285468 - DNA, 21 bp, Artificial sequence
  SiRNA target sequence
gactctccagactcaacagac

SEQ ID NO: 285469 - DNA, 21 bp, Artificial sequence
  SiRNA target sequence
actctccagactcaacagaca

SEQ ID NO: 285470 - DNA, 21 bp, Artificial sequence
  SiRNA target sequence
ctctccagactcaacagacag

SEQ ID NO: 285471 - DNA, 21 bp, Artificial sequence
  SiRNA target sequence
tctccagactcaacagacagc

SEQ ID NO: 285472 - DNA, 21 bp, Artificial sequence
  SiRNA target sequence
ctccagactcaacagacagct

SEQ ID NO: 285473 - DNA, 21 bp, Artificial sequence
  SiRNA target sequence
tccagactcaacagacagctc

SEQ ID NO: 285474 - DNA, 21 bp, Artificial sequence
  SiRNA target sequence
ccagactcaacagacagctcc

SEQ ID NO: 285475 - DNA, 21 bp, Artificial sequence
  SiRNA target sequence
cagactcaacagacagctcct

SEQ ID NO: 285476 - DNA, 21 bp, Artificial sequence
  SiRNA target sequence
agactcaacagacagctcctc

SEQ ID NO: 285477 - DNA, 21 bp, Artificial sequence
  SiRNA target sequence
gactcaacagacagctcctcc

SEQ ID NO: 285478 - DNA, 21 bp, Artificial sequence
  SiRNA target sequence
actcaacagacagctcctcca

SEQ ID NO: 285479 - DNA, 21 bp, Artificial sequence
  SiRNA target sequence
ctcaacagacagctcctccag

SEQ ID NO: 285480 - DNA, 21 bp, Artificial sequence
  SiRNA target sequence
tcaacagacagctcctccagc

SEQ ID NO: 285481 - DNA, 21 bp, Artificial sequence
  SiRNA target sequence
caacagacagctcctccagca

SEQ ID NO: 285482 - DNA, 21 bp, Artificial sequence
  SiRNA target sequence
aacagacagctcctccagcac

SEQ ID NO: 285483 - DNA, 21 bp, Artificial sequence
  SiRNA target sequence
acagacagctcctccagcaca

SEQ ID NO: 285484 - DNA, 21 bp, Artificial sequence
  SiRNA target sequence
cagacagctcctccagcacag

SEQ ID NO: 285485 - DNA, 21 bp, Artificial sequence
  SiRNA target sequence
agacagctcctccagcacagt

SEQ ID NO: 285486 - DNA, 21 bp, Artificial sequence
  SiRNA target sequence
gacagctcctccagcacagta

SEQ ID NO: 285487 - DNA, 21 bp, Artificial sequence
  SiRNA target sequence
acagctcctccagcacagtaa

SEQ ID NO: 285488 - DNA, 21 bp, Artificial sequence
  SiRNA target sequence
cagctcctccagcacagtaag

SEQ ID NO: 285489 - DNA, 21 bp, Artificial sequence
  SiRNA target sequence
agctcctccagcacagtaagc

SEQ ID NO: 285490 - DNA, 21 bp, Artificial sequence
  SiRNA target sequence
gctcctccagcacagtaagca

SEQ ID NO: 285491 - DNA, 21 bp, Artificial sequence
  SiRNA target sequence
ctcctccagcacagtaagcag

SEQ ID NO: 285492 - DNA, 21 bp, Artificial sequence
  SiRNA target sequence
tcctccagcacagtaagcagc

SEQ ID NO: 285493 - DNA, 21 bp, Artificial sequence
  SiRNA target sequence
cctccagcacagtaagcagcc

SEQ ID NO: 285494 - DNA, 21 bp, Artificial sequence
  SiRNA target sequence
ctccagcacagtaagcagccc

SEQ ID NO: 285495 - DNA, 21 bp, Artificial sequence
  SiRNA target sequence
tccagcacagtaagcagcccg

SEQ ID NO: 285496 - DNA, 21 bp, Artificial sequence
  SiRNA target sequence
ccagcacagtaagcagcccgg

SEQ ID NO: 285497 - DNA, 21 bp, Artificial sequence
  SiRNA target sequence
cagcacagtaagcagcccgga

SEQ ID NO: 285498 - DNA, 21 bp, Artificial sequence
  SiRNA target sequence
agcacagtaagcagcccggag

SEQ ID NO: 285499 - DNA, 21 bp, Artificial sequence
  SiRNA target sequence
gcacagtaagcagcccggaga

SEQ ID NO: 285500 - DNA, 21 bp, Artificial sequence
  SiRNA target sequence
cacagtaagcagcccggagaa

SEQ ID NO: 285501 - DNA, 21 bp, Artificial sequence
  SiRNA target sequence
acagtaagcagcccggagaat

SEQ ID NO: 285502 - DNA, 21 bp, Artificial sequence
  SiRNA target sequence
cagtaagcagcccggagaatt

SEQ ID NO: 285503 - DNA, 21 bp, Artificial sequence
  SiRNA target sequence
agtaagcagcccggagaattc

SEQ ID NO: 285504 - DNA, 21 bp, Artificial sequence
  SiRNA target sequence
gtaagcagcccggagaattca

SEQ ID NO: 285505 - DNA, 21 bp, Artificial sequence
  SiRNA target sequence
taagcagcccggagaattcaa

SEQ ID NO: 285506 - DNA, 21 bp, Artificial sequence
  SiRNA target sequence
aagcagcccggagaattcaag

SEQ ID NO: 285507 - DNA, 21 bp, Artificial sequence
  SiRNA target sequence
agcagcccggagaattcaagc

SEQ ID NO: 285508 - DNA, 21 bp, Artificial sequence
  SiRNA target sequence
gcagcccggagaattcaagcg

SEQ ID NO: 285509 - DNA, 21 bp, Artificial sequence
  SiRNA target sequence
cagcccggagaattcaagcgg

SEQ ID NO: 285510 - DNA, 21 bp, Artificial sequence
  SiRNA target sequence
agcccggagaattcaagcggg

SEQ ID NO: 285511 - DNA, 21 bp, Artificial sequence
  SiRNA target sequence
gcccggagaattcaagcggga

SEQ ID NO: 285512 - DNA, 21 bp, Artificial sequence
  SiRNA target sequence
cccggagaattcaagcgggat

SEQ ID NO: 285513 - DNA, 21 bp, Artificial sequence
  SiRNA target sequence
ccggagaattcaagcgggatg

SEQ ID NO: 285514 - DNA, 21 bp, Artificial sequence
  SiRNA target sequence
cggagaattcaagcgggatgt

SEQ ID NO: 285515 - DNA, 21 bp, Artificial sequence
  SiRNA target sequence
ggagaattcaagcgggatgta

SEQ ID NO: 285516 - DNA, 21 bp, Artificial sequence
  SiRNA target sequence
gagaattcaagcgggatgtac

SEQ ID NO: 285517 - DNA, 21 bp, Artificial sequence
  SiRNA target sequence
agaattcaagcgggatgtaca

SEQ ID NO: 285518 - DNA, 21 bp, Artificial sequence
  SiRNA target sequence
gaattcaagcgggatgtacac

SEQ ID NO: 285519 - DNA, 21 bp, Artificial sequence
  SiRNA target sequence
aattcaagcgggatgtacaca

SEQ ID NO: 285520 - DNA, 21 bp, Artificial sequence
  SiRNA target sequence
attcaagcgggatgtacacac

SEQ ID NO: 285521 - DNA, 21 bp, Artificial sequence
  SiRNA target sequence
ttcaagcgggatgtacacacc

SEQ ID NO: 285522 - DNA, 21 bp, Artificial sequence
  SiRNA target sequence
tcaagcgggatgtacacacca

SEQ ID NO: 285523 - DNA, 21 bp, Artificial sequence
  SiRNA target sequence
caagcgggatgtacacaccac

SEQ ID NO: 285524 - DNA, 21 bp, Artificial sequence
  SiRNA target sequence
aagcgggatgtacacaccacc

SEQ ID NO: 285525 - DNA, 21 bp, Artificial sequence
  SiRNA target sequence
agcgggatgtacacaccaccc

SEQ ID NO: 285526 - DNA, 21 bp, Artificial sequence
  SiRNA target sequence
gcgggatgtacacaccacccg

SEQ ID NO: 285527 - DNA, 21 bp, Artificial sequence
  SiRNA target sequence
cgggatgtacacaccacccgc

SEQ ID NO: 285528 - DNA, 21 bp, Artificial sequence
  SiRNA target sequence
gggatgtacacaccacccgcc

SEQ ID NO: 285529 - DNA, 21 bp, Artificial sequence
  SiRNA target sequence
ggatgtacacaccacccgccg

SEQ ID NO: 285530 - DNA, 21 bp, Artificial sequence
  SiRNA target sequence
gatgtacacaccacccgccgg

SEQ ID NO: 285531 - DNA, 21 bp, Artificial sequence
  SiRNA target sequence
atgtacacaccacccgccggg

SEQ ID NO: 285532 - DNA, 21 bp, Artificial sequence
  SiRNA target sequence
tgtacacaccacccgccgggt

SEQ ID NO: 285533 - DNA, 21 bp, Artificial sequence
  SiRNA target sequence
gtacacaccacccgccgggtc

SEQ ID NO: 285534 - DNA, 21 bp, Artificial sequence
  SiRNA target sequence
tacacaccacccgccgggtcc

SEQ ID NO: 285535 - DNA, 21 bp, Artificial sequence
  SiRNA target sequence
acacaccacccgccgggtccg

SEQ ID NO: 285536 - DNA, 21 bp, Artificial sequence
  SiRNA target sequence
cacaccacccgccgggtccga

SEQ ID NO: 285537 - DNA, 21 bp, Artificial sequence
  SiRNA target sequence
acaccacccgccgggtccgat

SEQ ID NO: 285538 - DNA, 21 bp, Artificial sequence
  SiRNA target sequence
caccacccgccgggtccgatt

SEQ ID NO: 285539 - DNA, 21 bp, Artificial sequence
  SiRNA target sequence
accacccgccgggtccgattt

SEQ ID NO: 285540 - DNA, 21 bp, Artificial sequence
  SiRNA target sequence
ccacccgccgggtccgatttt

SEQ ID NO: 285541 - DNA, 21 bp, Artificial sequence
  SiRNA target sequence
cacccgccgggtccgattttc

SEQ ID NO: 285542 - DNA, 21 bp, Artificial sequence
  SiRNA target sequence
acccgccgggtccgattttct

SEQ ID NO: 285543 - DNA, 21 bp, Artificial sequence
  SiRNA target sequence
cccgccgggtccgattttctc

SEQ ID NO: 285544 - DNA, 21 bp, Artificial sequence
  SiRNA target sequence
ccgccgggtccgattttctcg

SEQ ID NO: 285545 - DNA, 21 bp, Artificial sequence
  SiRNA target sequence
cgccgggtccgattttctcgc

SEQ ID NO: 285546 - DNA, 21 bp, Artificial sequence
  SiRNA target sequence
gccgggtccgattttctcgcc

SEQ ID NO: 285547 - DNA, 21 bp, Artificial sequence
  SiRNA target sequence
ccgggtccgattttctcgccc

SEQ ID NO: 285548 - DNA, 21 bp, Artificial sequence
  SiRNA target sequence
cgggtccgattttctcgcccg

SEQ ID NO: 285549 - DNA, 21 bp, Artificial sequence
  SiRNA target sequence
gggtccgattttctcgcccga

SEQ ID NO: 285550 - DNA, 21 bp, Artificial sequence
  SiRNA target sequence
ggtccgattttctcgcccgac

SEQ ID NO: 285551 - DNA, 21 bp, Artificial sequence
  SiRNA target sequence
gtccgattttctcgcccgacg

SEQ ID NO: 285552 - DNA, 21 bp, Artificial sequence
  SiRNA target sequence
tccgattttctcgcccgacgt

SEQ ID NO: 285553 - DNA, 21 bp, Artificial sequence
  SiRNA target sequence
ccgattttctcgcccgacgta

SEQ ID NO: 285554 - DNA, 21 bp, Artificial sequence
  SiRNA target sequence
cgattttctcgcccgacgtat

SEQ ID NO: 285555 - DNA, 21 bp, Artificial sequence
  SiRNA target sequence
gattttctcgcccgacgtatc

SEQ ID NO: 285556 - DNA, 21 bp, Artificial sequence
  SiRNA target sequence
attttctcgcccgacgtatca

SEQ ID NO: 285557 - DNA, 21 bp, Artificial sequence
  SiRNA target sequence
ttttctcgcccgacgtatcaa

SEQ ID NO: 285558 - DNA, 21 bp, Artificial sequence
  SiRNA target sequence
tttctcgcccgacgtatcaag

SEQ ID NO: 285559 - DNA, 21 bp, Artificial sequence
  SiRNA target sequence
ttctcgcccgacgtatcaagg

SEQ ID NO: 285560 - DNA, 21 bp, Artificial sequence
  SiRNA target sequence
tctcgcccgacgtatcaaggc

SEQ ID NO: 285561 - DNA, 21 bp, Artificial sequence
  SiRNA target sequence
ctcgcccgacgtatcaaggcc

SEQ ID NO: 285562 - DNA, 21 bp, Artificial sequence
  SiRNA target sequence
tcgcccgacgtatcaaggcca

SEQ ID NO: 285563 - DNA, 21 bp, Artificial sequence
  SiRNA target sequence
cgcccgacgtatcaaggccat

SEQ ID NO: 285564 - DNA, 21 bp, Artificial sequence
  SiRNA target sequence
gcccgacgtatcaaggccatg

SEQ ID NO: 285565 - DNA, 21 bp, Artificial sequence
  SiRNA target sequence
cccgacgtatcaaggccatgc

SEQ ID NO: 285566 - DNA, 21 bp, Artificial sequence
  SiRNA target sequence
ccgacgtatcaaggccatgct

SEQ ID NO: 285567 - DNA, 21 bp, Artificial sequence
  SiRNA target sequence
cgacgtatcaaggccatgctt

SEQ ID NO: 285568 - DNA, 21 bp, Artificial sequence
  SiRNA target sequence
gacgtatcaaggccatgctta

SEQ ID NO: 285569 - DNA, 21 bp, Artificial sequence
  SiRNA target sequence
acgtatcaaggccatgcttat

SEQ ID NO: 285570 - DNA, 21 bp, Artificial sequence
  SiRNA target sequence
cgtatcaaggccatgcttatt

SEQ ID NO: 285571 - DNA, 21 bp, Artificial sequence
  SiRNA target sequence
gtatcaaggccatgcttattc

SEQ ID NO: 285572 - DNA, 21 bp, Artificial sequence
  SiRNA target sequence
tatcaaggccatgcttattct

SEQ ID NO: 285573 - DNA, 21 bp, Artificial sequence
  SiRNA target sequence
atcaaggccatgcttattcta

SEQ ID NO: 285574 - DNA, 21 bp, Artificial sequence
  SiRNA target sequence
tcaaggccatgcttattctac

SEQ ID NO: 285575 - DNA, 21 bp, Artificial sequence
  SiRNA target sequence
caaggccatgcttattctacc

SEQ ID NO: 285576 - DNA, 21 bp, Artificial sequence
  SiRNA target sequence
aaggccatgcttattctaccc

SEQ ID NO: 285577 - DNA, 21 bp, Artificial sequence
  SiRNA target sequence
aggccatgcttattctacccc

SEQ ID NO: 285578 - DNA, 21 bp, Artificial sequence
  SiRNA target sequence
ggccatgcttattctacccct

SEQ ID NO: 285579 - DNA, 21 bp, Artificial sequence
  SiRNA target sequence
gccatgcttattctacccctc

SEQ ID NO: 285580 - DNA, 21 bp, Artificial sequence
  SiRNA target sequence
ccatgcttattctacccctcg

SEQ ID NO: 285581 - DNA, 21 bp, Artificial sequence
  SiRNA target sequence
catgcttattctacccctcgc

SEQ ID NO: 285582 - DNA, 21 bp, Artificial sequence
  SiRNA target sequence
atgcttattctacccctcgcc

SEQ ID NO: 285583 - DNA, 21 bp, Artificial sequence
  SiRNA target sequence
tgcttattctacccctcgcct

SEQ ID NO: 285584 - DNA, 21 bp, Artificial sequence
  SiRNA target sequence
gcttattctacccctcgcctt

SEQ ID NO: 285585 - DNA, 21 bp, Artificial sequence
  SiRNA target sequence
cttattctacccctcgcctta

SEQ ID NO: 285586 - DNA, 21 bp, Artificial sequence
  SiRNA target sequence
ttattctacccctcgccttat

SEQ ID NO: 285587 - DNA, 21 bp, Artificial sequence
  SiRNA target sequence
tattctacccctcgccttatc

SEQ ID NO: 285588 - DNA, 21 bp, Artificial sequence
  SiRNA target sequence
attctacccctcgccttatcc

SEQ ID NO: 285589 - DNA, 21 bp, Artificial sequence
  SiRNA target sequence
ttctacccctcgccttatcca

SEQ ID NO: 285590 - DNA, 21 bp, Artificial sequence
  SiRNA target sequence
tctacccctcgccttatccat

SEQ ID NO: 285591 - DNA, 21 bp, Artificial sequence
  SiRNA target sequence
ctacccctcgccttatccatc

SEQ ID NO: 285592 - DNA, 21 bp, Artificial sequence
  SiRNA target sequence
tacccctcgccttatccatca

SEQ ID NO: 285593 - DNA, 21 bp, Artificial sequence
  SiRNA target sequence
acccctcgccttatccatcat

SEQ ID NO: 285594 - DNA, 21 bp, Artificial sequence
  SiRNA target sequence
cccctcgccttatccatcata

SEQ ID NO: 285595 - DNA, 21 bp, Artificial sequence
  SiRNA target sequence
ccctcgccttatccatcataa

SEQ ID NO: 285596 - DNA, 21 bp, Artificial sequence
  SiRNA target sequence
cctcgccttatccatcataac

SEQ ID NO: 285597 - DNA, 21 bp, Artificial sequence
  SiRNA target sequence
ctcgccttatccatcataaca

SEQ ID NO: 285598 - DNA, 21 bp, Artificial sequence
  SiRNA target sequence
tcgccttatccatcataacat

SEQ ID NO: 285599 - DNA, 21 bp, Artificial sequence
  SiRNA target sequence
cgccttatccatcataacatc

SEQ ID NO: 285600 - DNA, 21 bp, Artificial sequence
  SiRNA target sequence
gccttatccatcataacatcc

SEQ ID NO: 285601 - DNA, 21 bp, Artificial sequence
  SiRNA target sequence
ccttatccatcataacatcca

SEQ ID NO: 285602 - DNA, 21 bp, Artificial sequence
  SiRNA target sequence
cttatccatcataacatccat

SEQ ID NO: 285603 - DNA, 21 bp, Artificial sequence
  SiRNA target sequence
ttatccatcataacatccatt

SEQ ID NO: 285604 - DNA, 21 bp, Artificial sequence
  SiRNA target sequence
tatccatcataacatccattc

SEQ ID NO: 285605 - DNA, 21 bp, Artificial sequence
  SiRNA target sequence
atccatcataacatccattct

SEQ ID NO: 285606 - DNA, 21 bp, Artificial sequence
  SiRNA target sequence
tccatcataacatccattctg

SEQ ID NO: 285607 - DNA, 21 bp, Artificial sequence
  SiRNA target sequence
ccatcataacatccattctgc

SEQ ID NO: 285608 - DNA, 21 bp, Artificial sequence
  SiRNA target sequence
catcataacatccattctgcc

SEQ ID NO: 285609 - DNA, 21 bp, Artificial sequence
  SiRNA target sequence
atcataacatccattctgcct

SEQ ID NO: 285610 - DNA, 21 bp, Artificial sequence
  SiRNA target sequence
tcataacatccattctgcctc

SEQ ID NO: 285611 - DNA, 21 bp, Artificial sequence
  SiRNA target sequence
cataacatccattctgcctcc

SEQ ID NO: 285612 - DNA, 21 bp, Artificial sequence
  SiRNA target sequence
ataacatccattctgcctccc

SEQ ID NO: 285613 - DNA, 21 bp, Artificial sequence
  SiRNA target sequence
taacatccattctgcctcccg

SEQ ID NO: 285614 - DNA, 21 bp, Artificial sequence
  SiRNA target sequence
aacatccattctgcctcccgc

SEQ ID NO: 285615 - DNA, 21 bp, Artificial sequence
  SiRNA target sequence
acatccattctgcctcccgcc

SEQ ID NO: 285616 - DNA, 21 bp, Artificial sequence
  SiRNA target sequence
catccattctgcctcccgcct

SEQ ID NO: 285617 - DNA, 21 bp, Artificial sequence
  SiRNA target sequence
atccattctgcctcccgcctc

SEQ ID NO: 285618 - DNA, 21 bp, Artificial sequence
  SiRNA target sequence
tccattctgcctcccgcctcc

SEQ ID NO: 285619 - DNA, 21 bp, Artificial sequence
  SiRNA target sequence
ccattctgcctcccgcctccg

SEQ ID NO: 285620 - DNA, 21 bp, Artificial sequence
  SiRNA target sequence
cattctgcctcccgcctccgc

SEQ ID NO: 285621 - DNA, 21 bp, Artificial sequence
  SiRNA target sequence
attctgcctcccgcctccgcc

SEQ ID NO: 285622 - DNA, 21 bp, Artificial sequence
  SiRNA target sequence
ttctgcctcccgcctccgccg

SEQ ID NO: 285623 - DNA, 21 bp, Artificial sequence
  SiRNA target sequence
tctgcctcccgcctccgccgc

SEQ ID NO: 285624 - DNA, 21 bp, Artificial sequence
  SiRNA target sequence
ctgcctcccgcctccgccgcg

SEQ ID NO: 285625 - DNA, 21 bp, Artificial sequence
  SiRNA target sequence
tgcctcccgcctccgccgcgc

SEQ ID NO: 285626 - DNA, 21 bp, Artificial sequence
  SiRNA target sequence
gcctcccgcctccgccgcgcc

SEQ ID NO: 285627 - DNA, 21 bp, Artificial sequence
  SiRNA target sequence
cctcccgcctccgccgcgccc

SEQ ID NO: 285628 - DNA, 21 bp, Artificial sequence
  SiRNA target sequence
ctcccgcctccgccgcgccca

SEQ ID NO: 285629 - DNA, 21 bp, Artificial sequence
  SiRNA target sequence
tcccgcctccgccgcgcccaa

SEQ ID NO: 285630 - DNA, 21 bp, Artificial sequence
  SiRNA target sequence
cccgcctccgccgcgcccaaa

SEQ ID NO: 285631 - DNA, 21 bp, Artificial sequence
  SiRNA target sequence
ccgcctccgccgcgcccaaac

SEQ ID NO: 285632 - DNA, 21 bp, Artificial sequence
  SiRNA target sequence
cgcctccgccgcgcccaaaca

SEQ ID NO: 285633 - DNA, 21 bp, Artificial sequence
  SiRNA target sequence
gcctccgccgcgcccaaacaa

SEQ ID NO: 285634 - DNA, 21 bp, Artificial sequence
  SiRNA target sequence
cctccgccgcgcccaaacaaa

SEQ ID NO: 285635 - DNA, 21 bp, Artificial sequence
  SiRNA target sequence
ctccgccgcgcccaaacaaat

SEQ ID NO: 285636 - DNA, 21 bp, Artificial sequence
  SiRNA target sequence
tccgccgcgcccaaacaaata

SEQ ID NO: 285637 - DNA, 21 bp, Artificial sequence
  SiRNA target sequence
ccgccgcgcccaaacaaatac

SEQ ID NO: 285638 - DNA, 21 bp, Artificial sequence
  SiRNA target sequence
cgccgcgcccaaacaaatacc

SEQ ID NO: 285639 - DNA, 21 bp, Artificial sequence
  SiRNA target sequence
gccgcgcccaaacaaatacca

SEQ ID NO: 285640 - DNA, 21 bp, Artificial sequence
  SiRNA target sequence
ccgcgcccaaacaaataccaa

SEQ ID NO: 285641 - DNA, 21 bp, Artificial sequence
  SiRNA target sequence
cgcgcccaaacaaataccaat

SEQ ID NO: 285642 - DNA, 21 bp, Artificial sequence
  SiRNA target sequence
gcgcccaaacaaataccaatc

SEQ ID NO: 285643 - DNA, 21 bp, Artificial sequence
  SiRNA target sequence
cgcccaaacaaataccaatcg

SEQ ID NO: 285644 - DNA, 21 bp, Artificial sequence
  SiRNA target sequence
gcccaaacaaataccaatcgc

SEQ ID NO: 285645 - DNA, 21 bp, Artificial sequence
  SiRNA target sequence
cccaaacaaataccaatcgcc

SEQ ID NO: 285646 - DNA, 21 bp, Artificial sequence
  SiRNA target sequence
ccaaacaaataccaatcgcca

SEQ ID NO: 285647 - DNA, 21 bp, Artificial sequence
  SiRNA target sequence
caaacaaataccaatcgccaa

SEQ ID NO: 285648 - DNA, 21 bp, Artificial sequence
  SiRNA target sequence
aaacaaataccaatcgccaac

SEQ ID NO: 285649 - DNA, 21 bp, Artificial sequence
  SiRNA target sequence
aacaaataccaatcgccaact

SEQ ID NO: 285650 - DNA, 21 bp, Artificial sequence
  SiRNA target sequence
acaaataccaatcgccaactt

SEQ ID NO: 285651 - DNA, 21 bp, Artificial sequence
  SiRNA target sequence
caaataccaatcgccaacttc

SEQ ID NO: 285652 - DNA, 21 bp, Artificial sequence
  SiRNA target sequence
aaataccaatcgccaacttca

SEQ ID NO: 285653 - DNA, 21 bp, Artificial sequence
  SiRNA target sequence
aataccaatcgccaacttcaa

SEQ ID NO: 285654 - DNA, 21 bp, Artificial sequence
  SiRNA target sequence
ataccaatcgccaacttcaac

SEQ ID NO: 285655 - DNA, 21 bp, Artificial sequence
  SiRNA target sequence
taccaatcgccaacttcaacg

SEQ ID NO: 285656 - DNA, 21 bp, Artificial sequence
  SiRNA target sequence
accaatcgccaacttcaacga

SEQ ID NO: 285657 - DNA, 21 bp, Artificial sequence
  SiRNA target sequence
ccaatcgccaacttcaacgaa

SEQ ID NO: 285658 - DNA, 21 bp, Artificial sequence
  SiRNA target sequence
caatcgccaacttcaacgaat

SEQ ID NO: 285659 - DNA, 21 bp, Artificial sequence
  SiRNA target sequence
aatcgccaacttcaacgaatt

SEQ ID NO: 285660 - DNA, 21 bp, Artificial sequence
  SiRNA target sequence
atcgccaacttcaacgaattc

SEQ ID NO: 285661 - DNA, 21 bp, Artificial sequence
  SiRNA target sequence
tcgccaacttcaacgaattcc

SEQ ID NO: 285662 - DNA, 21 bp, Artificial sequence
  SiRNA target sequence
cgccaacttcaacgaattcct

SEQ ID NO: 285663 - DNA, 21 bp, Artificial sequence
  SiRNA target sequence
gccaacttcaacgaattcctc

SEQ ID NO: 285664 - DNA, 21 bp, Artificial sequence
  SiRNA target sequence
ccaacttcaacgaattcctca

SEQ ID NO: 285665 - DNA, 21 bp, Artificial sequence
  SiRNA target sequence
caacttcaacgaattcctcat

SEQ ID NO: 285666 - DNA, 21 bp, Artificial sequence
  SiRNA target sequence
aacttcaacgaattcctcatc

SEQ ID NO: 285667 - DNA, 21 bp, Artificial sequence
  SiRNA target sequence
acttcaacgaattcctcatca

SEQ ID NO: 285668 - DNA, 21 bp, Artificial sequence
  SiRNA target sequence
cttcaacgaattcctcatcaa

SEQ ID NO: 285669 - DNA, 21 bp, Artificial sequence
  SiRNA target sequence
ttcaacgaattcctcatcaag

SEQ ID NO: 285670 - DNA, 21 bp, Artificial sequence
  SiRNA target sequence
tcaacgaattcctcatcaaga

SEQ ID NO: 285671 - DNA, 21 bp, Artificial sequence
  SiRNA target sequence
caacgaattcctcatcaagaa

SEQ ID NO: 285672 - DNA, 21 bp, Artificial sequence
  SiRNA target sequence
aacgaattcctcatcaagaat

SEQ ID NO: 285673 - DNA, 21 bp, Artificial sequence
  SiRNA target sequence
acgaattcctcatcaagaatc

SEQ ID NO: 285674 - DNA, 21 bp, Artificial sequence
  SiRNA target sequence
cgaattcctcatcaagaatcg

SEQ ID NO: 285675 - DNA, 21 bp, Artificial sequence
  SiRNA target sequence
gaattcctcatcaagaatcgt

SEQ ID NO: 285676 - DNA, 21 bp, Artificial sequence
  SiRNA target sequence
aattcctcatcaagaatcgtc

SEQ ID NO: 285677 - DNA, 21 bp, Artificial sequence
  SiRNA target sequence
attcctcatcaagaatcgtct

SEQ ID NO: 285678 - DNA, 21 bp, Artificial sequence
  SiRNA target sequence
ttcctcatcaagaatcgtcta

SEQ ID NO: 285679 - DNA, 21 bp, Artificial sequence
  SiRNA target sequence
tcctcatcaagaatcgtctac

SEQ ID NO: 285680 - DNA, 21 bp, Artificial sequence
  SiRNA target sequence
cctcatcaagaatcgtctacc

SEQ ID NO: 285681 - DNA, 21 bp, Artificial sequence
  SiRNA target sequence
ctcatcaagaatcgtctacca

SEQ ID NO: 285682 - DNA, 21 bp, Artificial sequence
  SiRNA target sequence
tcatcaagaatcgtctaccac

SEQ ID NO: 285683 - DNA, 21 bp, Artificial sequence
  SiRNA target sequence
catcaagaatcgtctaccacc

SEQ ID NO: 285684 - DNA, 21 bp, Artificial sequence
  SiRNA target sequence
atcaagaatcgtctaccacca

SEQ ID NO: 285685 - DNA, 21 bp, Artificial sequence
  SiRNA target sequence
tcaagaatcgtctaccaccat

SEQ ID NO: 285686 - DNA, 21 bp, Artificial sequence
  SiRNA target sequence
caagaatcgtctaccaccata

SEQ ID NO: 285687 - DNA, 21 bp, Artificial sequence
  SiRNA target sequence
aagaatcgtctaccaccatat

SEQ ID NO: 285688 - DNA, 21 bp, Artificial sequence
  SiRNA target sequence
agaatcgtctaccaccatatc

SEQ ID NO: 285689 - DNA, 21 bp, Artificial sequence
  SiRNA target sequence
gaatcgtctaccaccatatct

SEQ ID NO: 285690 - DNA, 21 bp, Artificial sequence
  SiRNA target sequence
aatcgtctaccaccatatctt

SEQ ID NO: 285691 - DNA, 21 bp, Artificial sequence
  SiRNA target sequence
atcgtctaccaccatatcttc

SEQ ID NO: 285692 - DNA, 21 bp, Artificial sequence
  SiRNA target sequence
tcgtctaccaccatatcttcc

SEQ ID NO: 285693 - DNA, 21 bp, Artificial sequence
  SiRNA target sequence
cgtctaccaccatatcttccc

SEQ ID NO: 285694 - DNA, 21 bp, Artificial sequence
  SiRNA target sequence
gtctaccaccatatcttccct

SEQ ID NO: 285695 - DNA, 21 bp, Artificial sequence
  SiRNA target sequence
tctaccaccatatcttccctt

SEQ ID NO: 285696 - DNA, 21 bp, Artificial sequence
  SiRNA target sequence
ctaccaccatatcttcccttc

SEQ ID NO: 285697 - DNA, 21 bp, Artificial sequence
  SiRNA target sequence
taccaccatatcttcccttca

SEQ ID NO: 285698 - DNA, 21 bp, Artificial sequence
  SiRNA target sequence
accaccatatcttcccttcag

SEQ ID NO: 285699 - DNA, 21 bp, Artificial sequence
  SiRNA target sequence
ccaccatatcttcccttcagc

SEQ ID NO: 285700 - DNA, 21 bp, Artificial sequence
  SiRNA target sequence
caccatatcttcccttcagca

SEQ ID NO: 285701 - DNA, 21 bp, Artificial sequence
  SiRNA target sequence
accatatcttcccttcagcat

SEQ ID NO: 285702 - DNA, 21 bp, Artificial sequence
  SiRNA target sequence
ccatatcttcccttcagcatc

SEQ ID NO: 285703 - DNA, 21 bp, Artificial sequence
  SiRNA target sequence
catatcttcccttcagcatca

SEQ ID NO: 285704 - DNA, 21 bp, Artificial sequence
  SiRNA target sequence
atatcttcccttcagcatcaa

SEQ ID NO: 285705 - DNA, 21 bp, Artificial sequence
  SiRNA target sequence
tatcttcccttcagcatcaac

SEQ ID NO: 285706 - DNA, 21 bp, Artificial sequence
  SiRNA target sequence
atcttcccttcagcatcaacg

SEQ ID NO: 285707 - DNA, 21 bp, Artificial sequence
  SiRNA target sequence
tcttcccttcagcatcaacga

SEQ ID NO: 285708 - DNA, 21 bp, Artificial sequence
  SiRNA target sequence
cttcccttcagcatcaacgat

SEQ ID NO: 285709 - DNA, 21 bp, Artificial sequence
  SiRNA target sequence
ttcccttcagcatcaacgatt

SEQ ID NO: 285710 - DNA, 21 bp, Artificial sequence
  SiRNA target sequence
tcccttcagcatcaacgattc

SEQ ID NO: 285711 - DNA, 21 bp, Artificial sequence
  SiRNA target sequence
cccttcagcatcaacgattcg

SEQ ID NO: 285712 - DNA, 21 bp, Artificial sequence
  SiRNA target sequence
ccttcagcatcaacgattcga

SEQ ID NO: 285713 - DNA, 21 bp, Artificial sequence
  SiRNA target sequence
cttcagcatcaacgattcgaa

SEQ ID NO: 285714 - DNA, 21 bp, Artificial sequence
  SiRNA target sequence
ttcagcatcaacgattcgaaa

SEQ ID NO: 285715 - DNA, 21 bp, Artificial sequence
  SiRNA target sequence
tcagcatcaacgattcgaaac

SEQ ID NO: 285716 - DNA, 21 bp, Artificial sequence
  SiRNA target sequence
cagcatcaacgattcgaaact

SEQ ID NO: 285717 - DNA, 21 bp, Artificial sequence
  SiRNA target sequence
agcatcaacgattcgaaactg

SEQ ID NO: 285718 - DNA, 21 bp, Artificial sequence
  SiRNA target sequence
gcatcaacgattcgaaactgt

SEQ ID NO: 285719 - DNA, 21 bp, Artificial sequence
  SiRNA target sequence
catcaacgattcgaaactgtt

SEQ ID NO: 285720 - DNA, 21 bp, Artificial sequence
  SiRNA target sequence
atcaacgattcgaaactgttc

SEQ ID NO: 285721 - DNA, 21 bp, Artificial sequence
  SiRNA target sequence
tcaacgattcgaaactgttcc

SEQ ID NO: 285722 - DNA, 21 bp, Artificial sequence
  SiRNA target sequence
caacgattcgaaactgttcca

SEQ ID NO: 285723 - DNA, 21 bp, Artificial sequence
  SiRNA target sequence
aacgattcgaaactgttccac

SEQ ID NO: 285724 - DNA, 21 bp, Artificial sequence
  SiRNA target sequence
acgattcgaaactgttccact

SEQ ID NO: 285725 - DNA, 21 bp, Artificial sequence
  SiRNA target sequence
cgattcgaaactgttccacta

SEQ ID NO: 285726 - DNA, 21 bp, Artificial sequence
  SiRNA target sequence
gattcgaaactgttccactac

SEQ ID NO: 285727 - DNA, 21 bp, Artificial sequence
  SiRNA target sequence
attcgaaactgttccactact

SEQ ID NO: 285728 - DNA, 21 bp, Artificial sequence
  SiRNA target sequence
ttcgaaactgttccactacta

SEQ ID NO: 285729 - DNA, 21 bp, Artificial sequence
  SiRNA target sequence
tcgaaactgttccactactac

SEQ ID NO: 285730 - DNA, 21 bp, Artificial sequence
  SiRNA target sequence
cgaaactgttccactactacc

SEQ ID NO: 285731 - DNA, 21 bp, Artificial sequence
  SiRNA target sequence
gaaactgttccactactaccc

SEQ ID NO: 285732 - DNA, 21 bp, Artificial sequence
  SiRNA target sequence
aaactgttccactactaccca

SEQ ID NO: 285733 - DNA, 21 bp, Artificial sequence
  SiRNA target sequence
aactgttccactactacccac

SEQ ID NO: 285734 - DNA, 21 bp, Artificial sequence
  SiRNA target sequence
actgttccactactacccacc

SEQ ID NO: 285735 - DNA, 21 bp, Artificial sequence
  SiRNA target sequence
ctgttccactactacccaccg

SEQ ID NO: 285736 - DNA, 21 bp, Artificial sequence
  SiRNA target sequence
tgttccactactacccaccgt

SEQ ID NO: 285737 - DNA, 21 bp, Artificial sequence
  SiRNA target sequence
gttccactactacccaccgtt

SEQ ID NO: 285738 - DNA, 21 bp, Artificial sequence
  SiRNA target sequence
ttccactactacccaccgtta

SEQ ID NO: 285739 - DNA, 21 bp, Artificial sequence
  SiRNA target sequence
tccactactacccaccgttac

SEQ ID NO: 285740 - DNA, 21 bp, Artificial sequence
  SiRNA target sequence
ccactactacccaccgttaca

SEQ ID NO: 285741 - DNA, 21 bp, Artificial sequence
  SiRNA target sequence
cactactacccaccgttacag

SEQ ID NO: 285742 - DNA, 21 bp, Artificial sequence
  SiRNA target sequence
actactacccaccgttacagt

SEQ ID NO: 285743 - DNA, 21 bp, Artificial sequence
  SiRNA target sequence
ctactacccaccgttacagtt

SEQ ID NO: 285744 - DNA, 21 bp, Artificial sequence
  SiRNA target sequence
tactacccaccgttacagttg

SEQ ID NO: 285745 - DNA, 21 bp, Artificial sequence
  SiRNA target sequence
actacccaccgttacagttga

SEQ ID NO: 285746 - DNA, 21 bp, Artificial sequence
  SiRNA target sequence
ctacccaccgttacagttgag

SEQ ID NO: 285747 - DNA, 21 bp, Artificial sequence
  SiRNA target sequence
tacccaccgttacagttgaga

SEQ ID NO: 285748 - DNA, 21 bp, Artificial sequence
  SiRNA target sequence
acccaccgttacagttgagac

SEQ ID NO: 285749 - DNA, 21 bp, Artificial sequence
  SiRNA target sequence
cccaccgttacagttgagacg

SEQ ID NO: 285750 - DNA, 21 bp, Artificial sequence
  SiRNA target sequence
ccaccgttacagttgagacgc

SEQ ID NO: 285751 - DNA, 21 bp, Artificial sequence
  SiRNA target sequence
caccgttacagttgagacgcc

SEQ ID NO: 285752 - DNA, 21 bp, Artificial sequence
  SiRNA target sequence
accgttacagttgagacgccg

SEQ ID NO: 285753 - DNA, 21 bp, Artificial sequence
  SiRNA target sequence
ccgttacagttgagacgccgg

SEQ ID NO: 285754 - DNA, 21 bp, Artificial sequence
  SiRNA target sequence
cgttacagttgagacgccggt

SEQ ID NO: 285755 - DNA, 21 bp, Artificial sequence
  SiRNA target sequence
gttacagttgagacgccggtg

SEQ ID NO: 285756 - DNA, 21 bp, Artificial sequence
  SiRNA target sequence
ttacagttgagacgccggtgt

SEQ ID NO: 285757 - DNA, 21 bp, Artificial sequence
  SiRNA target sequence
tacagttgagacgccggtgtg

SEQ ID NO: 285758 - DNA, 21 bp, Artificial sequence
  SiRNA target sequence
acagttgagacgccggtgtgt

SEQ ID NO: 285759 - DNA, 21 bp, Artificial sequence
  SiRNA target sequence
cagttgagacgccggtgtgtt

SEQ ID NO: 285760 - DNA, 21 bp, Artificial sequence
  SiRNA target sequence
agttgagacgccggtgtgttg

SEQ ID NO: 285761 - DNA, 21 bp, Artificial sequence
  SiRNA target sequence
gttgagacgccggtgtgttga

SEQ ID NO: 285762 - DNA, 21 bp, Artificial sequence
  SiRNA target sequence
ttgagacgccggtgtgttgag

SEQ ID NO: 285763 - DNA, 21 bp, Artificial sequence
  SiRNA target sequence
tgagacgccggtgtgttgaga

SEQ ID NO: 285764 - DNA, 21 bp, Artificial sequence
  SiRNA target sequence
gagacgccggtgtgttgagat

SEQ ID NO: 285765 - DNA, 21 bp, Artificial sequence
  SiRNA target sequence
agacgccggtgtgttgagatt

SEQ ID NO: 285766 - DNA, 21 bp, Artificial sequence
  SiRNA target sequence
gacgccggtgtgttgagattc

SEQ ID NO: 285767 - DNA, 21 bp, Artificial sequence
  SiRNA target sequence
acgccggtgtgttgagattct

SEQ ID NO: 285768 - DNA, 21 bp, Artificial sequence
  SiRNA target sequence
cgccggtgtgttgagattcta

SEQ ID NO: 285769 - DNA, 21 bp, Artificial sequence
  SiRNA target sequence
gccggtgtgttgagattctac

SEQ ID NO: 285770 - DNA, 21 bp, Artificial sequence
  SiRNA target sequence
ccggtgtgttgagattctaca

SEQ ID NO: 285771 - DNA, 21 bp, Artificial sequence
  SiRNA target sequence
cggtgtgttgagattctacac

SEQ ID NO: 285772 - DNA, 21 bp, Artificial sequence
  SiRNA target sequence
ggtgtgttgagattctacaca

SEQ ID NO: 285773 - DNA, 21 bp, Artificial sequence
  SiRNA target sequence
gtgtgttgagattctacacac

SEQ ID NO: 285774 - DNA, 21 bp, Artificial sequence
  SiRNA target sequence
tgtgttgagattctacacacc

SEQ ID NO: 285775 - DNA, 21 bp, Artificial sequence
  SiRNA target sequence
gtgttgagattctacacacca

SEQ ID NO: 285776 - DNA, 21 bp, Artificial sequence
  SiRNA target sequence
tgttgagattctacacaccag

SEQ ID NO: 285777 - DNA, 21 bp, Artificial sequence
  SiRNA target sequence
gttgagattctacacaccagt

SEQ ID NO: 285778 - DNA, 21 bp, Artificial sequence
  SiRNA target sequence
ttgagattctacacaccagta

SEQ ID NO: 285779 - DNA, 21 bp, Artificial sequence
  SiRNA target sequence
tgagattctacacaccagtaa

SEQ ID NO: 285780 - DNA, 21 bp, Artificial sequence
  SiRNA target sequence
gagattctacacaccagtaaa

SEQ ID NO: 285781 - DNA, 21 bp, Artificial sequence
  SiRNA target sequence
agattctacacaccagtaaac

SEQ ID NO: 285782 - DNA, 21 bp, Artificial sequence
  SiRNA target sequence
gattctacacaccagtaaact

SEQ ID NO: 285783 - DNA, 21 bp, Artificial sequence
  SiRNA target sequence
attctacacaccagtaaactt

SEQ ID NO: 285784 - DNA, 21 bp, Artificial sequence
  SiRNA target sequence
ttctacacaccagtaaacttg

SEQ ID NO: 285785 - DNA, 21 bp, Artificial sequence
  SiRNA target sequence
tctacacaccagtaaacttgc

SEQ ID NO: 285786 - DNA, 21 bp, Artificial sequence
  SiRNA target sequence
ctacacaccagtaaacttgct

SEQ ID NO: 285787 - DNA, 21 bp, Artificial sequence
  SiRNA target sequence
tacacaccagtaaacttgctc

SEQ ID NO: 285788 - DNA, 21 bp, Artificial sequence
  SiRNA target sequence
acacaccagtaaacttgctcc

SEQ ID NO: 285789 - DNA, 21 bp, Artificial sequence
  SiRNA target sequence
cacaccagtaaacttgctcct

SEQ ID NO: 285790 - DNA, 21 bp, Artificial sequence
  SiRNA target sequence
acaccagtaaacttgctcctg

SEQ ID NO: 285791 - DNA, 21 bp, Artificial sequence
  SiRNA target sequence
caccagtaaacttgctcctgc

SEQ ID NO: 285792 - DNA, 21 bp, Artificial sequence
  SiRNA target sequence
accagtaaacttgctcctgcc

SEQ ID NO: 285793 - DNA, 21 bp, Artificial sequence
  SiRNA target sequence
ccagtaaacttgctcctgccg

SEQ ID NO: 285794 - DNA, 21 bp, Artificial sequence
  SiRNA target sequence
cagtaaacttgctcctgccga

SEQ ID NO: 285795 - DNA, 21 bp, Artificial sequence
  SiRNA target sequence
agtaaacttgctcctgccgat

SEQ ID NO: 285796 - DNA, 21 bp, Artificial sequence
  SiRNA target sequence
gtaaacttgctcctgccgatt

SEQ ID NO: 285797 - DNA, 21 bp, Artificial sequence
  SiRNA target sequence
taaacttgctcctgccgattg

SEQ ID NO: 285798 - DNA, 21 bp, Artificial sequence
  SiRNA target sequence
aaacttgctcctgccgattgt

SEQ ID NO: 285799 - DNA, 21 bp, Artificial sequence
  SiRNA target sequence
aacttgctcctgccgattgta

SEQ ID NO: 285800 - DNA, 21 bp, Artificial sequence
  SiRNA target sequence
acttgctcctgccgattgtag

SEQ ID NO: 285801 - DNA, 21 bp, Artificial sequence
  SiRNA target sequence
cttgctcctgccgattgtagc

SEQ ID NO: 285802 - DNA, 21 bp, Artificial sequence
  SiRNA target sequence
ttgctcctgccgattgtagcc

SEQ ID NO: 285803 - DNA, 21 bp, Artificial sequence
  SiRNA target sequence
tgctcctgccgattgtagcct

SEQ ID NO: 285804 - DNA, 21 bp, Artificial sequence
  SiRNA target sequence
gctcctgccgattgtagcctg

SEQ ID NO: 285805 - DNA, 21 bp, Artificial sequence
  SiRNA target sequence
ctcctgccgattgtagcctgc

SEQ ID NO: 285806 - DNA, 21 bp, Artificial sequence
  SiRNA target sequence
tcctgccgattgtagcctgcc

SEQ ID NO: 285807 - DNA, 21 bp, Artificial sequence
  SiRNA target sequence
cctgccgattgtagcctgcct

SEQ ID NO: 285808 - DNA, 21 bp, Artificial sequence
  SiRNA target sequence
ctgccgattgtagcctgcctt

SEQ ID NO: 285809 - DNA, 21 bp, Artificial sequence
  SiRNA target sequence
tgccgattgtagcctgccttc

SEQ ID NO: 285810 - DNA, 21 bp, Artificial sequence
  SiRNA target sequence
gccgattgtagcctgccttcg

SEQ ID NO: 285811 - DNA, 21 bp, Artificial sequence
  SiRNA target sequence
ccgattgtagcctgccttcgt

SEQ ID NO: 285812 - DNA, 21 bp, Artificial sequence
  SiRNA target sequence
cgattgtagcctgccttcgta

SEQ ID NO: 285813 - DNA, 21 bp, Artificial sequence
  SiRNA target sequence
gattgtagcctgccttcgtat

SEQ ID NO: 285814 - DNA, 21 bp, Artificial sequence
  SiRNA target sequence
attgtagcctgccttcgtatt

SEQ ID NO: 285815 - DNA, 21 bp, Artificial sequence
  SiRNA target sequence
ttgtagcctgccttcgtattg

SEQ ID NO: 285816 - DNA, 21 bp, Artificial sequence
  SiRNA target sequence
tgtagcctgccttcgtattgt

SEQ ID NO: 285817 - DNA, 21 bp, Artificial sequence
  SiRNA target sequence
gtagcctgccttcgtattgtg

SEQ ID NO: 285818 - DNA, 21 bp, Artificial sequence
  SiRNA target sequence
tagcctgccttcgtattgtgg

SEQ ID NO: 285819 - DNA, 21 bp, Artificial sequence
  SiRNA target sequence
agcctgccttcgtattgtggt

SEQ ID NO: 285820 - DNA, 21 bp, Artificial sequence
  SiRNA target sequence
gcctgccttcgtattgtggtc

SEQ ID NO: 285821 - DNA, 21 bp, Artificial sequence
  SiRNA target sequence
cctgccttcgtattgtggtca

SEQ ID NO: 285822 - DNA, 21 bp, Artificial sequence
  SiRNA target sequence
ctgccttcgtattgtggtcag

SEQ ID NO: 285823 - DNA, 21 bp, Artificial sequence
  SiRNA target sequence
tgccttcgtattgtggtcagg

SEQ ID NO: 285824 - DNA, 21 bp, Artificial sequence
  SiRNA target sequence
gccttcgtattgtggtcaggt

SEQ ID NO: 285825 - DNA, 21 bp, Artificial sequence
  SiRNA target sequence
ccttcgtattgtggtcaggtc

SEQ ID NO: 285826 - DNA, 21 bp, Artificial sequence
  SiRNA target sequence
cttcgtattgtggtcaggtcc

SEQ ID NO: 285827 - DNA, 21 bp, Artificial sequence
  SiRNA target sequence
ttcgtattgtggtcaggtcca

SEQ ID NO: 285828 - DNA, 21 bp, Artificial sequence
  SiRNA target sequence
tcgtattgtggtcaggtccat

SEQ ID NO: 285829 - DNA, 21 bp, Artificial sequence
  SiRNA target sequence
cgtattgtggtcaggtccatt

SEQ ID NO: 285830 - DNA, 21 bp, Artificial sequence
  SiRNA target sequence
gtattgtggtcaggtccattg

SEQ ID NO: 285831 - DNA, 21 bp, Artificial sequence
  SiRNA target sequence
tattgtggtcaggtccattgg

SEQ ID NO: 285832 - DNA, 21 bp, Artificial sequence
  SiRNA target sequence
attgtggtcaggtccattggt

SEQ ID NO: 285833 - DNA, 21 bp, Artificial sequence
  SiRNA target sequence
ttgtggtcaggtccattggtc

SEQ ID NO: 285834 - DNA, 21 bp, Artificial sequence
  SiRNA target sequence
tgtggtcaggtccattggtca

SEQ ID NO: 285835 - DNA, 21 bp, Artificial sequence
  SiRNA target sequence
gtggtcaggtccattggtcaa

SEQ ID NO: 285836 - DNA, 21 bp, Artificial sequence
  SiRNA target sequence
tggtcaggtccattggtcaac

SEQ ID NO: 285837 - DNA, 21 bp, Artificial sequence
  SiRNA target sequence
ggtcaggtccattggtcaacc

SEQ ID NO: 285838 - DNA, 21 bp, Artificial sequence
  SiRNA target sequence
gtcaggtccattggtcaacct

SEQ ID NO: 285839 - DNA, 21 bp, Artificial sequence
  SiRNA target sequence
tcaggtccattggtcaacctt

SEQ ID NO: 285840 - DNA, 21 bp, Artificial sequence
  SiRNA target sequence
caggtccattggtcaaccttc

SEQ ID NO: 285841 - DNA, 21 bp, Artificial sequence
  SiRNA target sequence
aggtccattggtcaaccttcc

SEQ ID NO: 285842 - DNA, 21 bp, Artificial sequence
  SiRNA target sequence
ggtccattggtcaaccttcca

SEQ ID NO: 285843 - DNA, 21 bp, Artificial sequence
  SiRNA target sequence
gtccattggtcaaccttccaa

SEQ ID NO: 285844 - DNA, 21 bp, Artificial sequence
  SiRNA target sequence
tccattggtcaaccttccaat

SEQ ID NO: 285845 - DNA, 21 bp, Artificial sequence
  SiRNA target sequence
ccattggtcaaccttccaatc

SEQ ID NO: 285846 - DNA, 21 bp, Artificial sequence
  SiRNA target sequence
cattggtcaaccttccaatcc

SEQ ID NO: 285847 - DNA, 21 bp, Artificial sequence
  SiRNA target sequence
attggtcaaccttccaatcca

SEQ ID NO: 285848 - DNA, 21 bp, Artificial sequence
  SiRNA target sequence
ttggtcaaccttccaatccac

SEQ ID NO: 285849 - DNA, 21 bp, Artificial sequence
  SiRNA target sequence
tggtcaaccttccaatccacc

SEQ ID NO: 285850 - DNA, 21 bp, Artificial sequence
  SiRNA target sequence
ggtcaaccttccaatccacct

SEQ ID NO: 285851 - DNA, 21 bp, Artificial sequence
  SiRNA target sequence
gtcaaccttccaatccacctg

SEQ ID NO: 285852 - DNA, 21 bp, Artificial sequence
  SiRNA target sequence
tcaaccttccaatccacctgg

SEQ ID NO: 285853 - DNA, 21 bp, Artificial sequence
  SiRNA target sequence
caaccttccaatccacctggt

SEQ ID NO: 285854 - DNA, 21 bp, Artificial sequence
  SiRNA target sequence
aaccttccaatccacctggta

SEQ ID NO: 285855 - DNA, 21 bp, Artificial sequence
  SiRNA target sequence
accttccaatccacctggtac

SEQ ID NO: 285856 - DNA, 21 bp, Artificial sequence
  SiRNA target sequence
ccttccaatccacctggtacg

SEQ ID NO: 285857 - DNA, 21 bp, Artificial sequence
  SiRNA target sequence
cttccaatccacctggtacgg

SEQ ID NO: 285858 - DNA, 21 bp, Artificial sequence
  SiRNA target sequence
ttccaatccacctggtacggg

SEQ ID NO: 285859 - DNA, 21 bp, Artificial sequence
  SiRNA target sequence
tccaatccacctggtacggga

SEQ ID NO: 285860 - DNA, 21 bp, Artificial sequence
  SiRNA target sequence
ccaatccacctggtacgggag

SEQ ID NO: 285861 - DNA, 21 bp, Artificial sequence
  SiRNA target sequence
caatccacctggtacgggagc

SEQ ID NO: 285862 - DNA, 21 bp, Artificial sequence
  SiRNA target sequence
aatccacctggtacgggagcg

SEQ ID NO: 285863 - DNA, 21 bp, Artificial sequence
  SiRNA target sequence
atccacctggtacgggagcga

SEQ ID NO: 285864 - DNA, 21 bp, Artificial sequence
  SiRNA target sequence
tccacctggtacgggagcgaa

SEQ ID NO: 285865 - DNA, 21 bp, Artificial sequence
  SiRNA target sequence
ccacctggtacgggagcgaag

SEQ ID NO: 285866 - DNA, 21 bp, Artificial sequence
  SiRNA target sequence
cacctggtacgggagcgaagt

SEQ ID NO: 285867 - DNA, 21 bp, Artificial sequence
  SiRNA target sequence
acctggtacgggagcgaagtt

SEQ ID NO: 285868 - DNA, 21 bp, Artificial sequence
  SiRNA target sequence
cctggtacgggagcgaagttg

SEQ ID NO: 285869 - DNA, 21 bp, Artificial sequence
  SiRNA target sequence
ctggtacgggagcgaagttgg

SEQ ID NO: 285870 - DNA, 21 bp, Artificial sequence
  SiRNA target sequence
tggtacgggagcgaagttggc

SEQ ID NO: 285871 - DNA, 21 bp, Artificial sequence
  SiRNA target sequence
ggtacgggagcgaagttggcg

SEQ ID NO: 285872 - DNA, 21 bp, Artificial sequence
  SiRNA target sequence
gtacgggagcgaagttggcgc

SEQ ID NO: 285873 - DNA, 21 bp, Artificial sequence
  SiRNA target sequence
tacgggagcgaagttggcgca

SEQ ID NO: 285874 - DNA, 21 bp, Artificial sequence
  SiRNA target sequence
acgggagcgaagttggcgcat

SEQ ID NO: 285875 - DNA, 21 bp, Artificial sequence
  SiRNA target sequence
cgggagcgaagttggcgcatg

SEQ ID NO: 285876 - DNA, 21 bp, Artificial sequence
  SiRNA target sequence
gggagcgaagttggcgcatgt

SEQ ID NO: 285877 - DNA, 21 bp, Artificial sequence
  SiRNA target sequence
ggagcgaagttggcgcatgtg

SEQ ID NO: 285878 - DNA, 21 bp, Artificial sequence
  SiRNA target sequence
gagcgaagttggcgcatgtgt

SEQ ID NO: 285879 - DNA, 21 bp, Artificial sequence
  SiRNA target sequence
agcgaagttggcgcatgtgtt

SEQ ID NO: 285880 - DNA, 21 bp, Artificial sequence
  SiRNA target sequence
gcgaagttggcgcatgtgttg

SEQ ID NO: 285881 - DNA, 21 bp, Artificial sequence
  SiRNA target sequence
cgaagttggcgcatgtgttgg

SEQ ID NO: 285882 - DNA, 21 bp, Artificial sequence
  SiRNA target sequence
gaagttggcgcatgtgttggt

SEQ ID NO: 285883 - DNA, 21 bp, Artificial sequence
  SiRNA target sequence
aagttggcgcatgtgttggta

SEQ ID NO: 285884 - DNA, 21 bp, Artificial sequence
  SiRNA target sequence
agttggcgcatgtgttggtac

SEQ ID NO: 285885 - DNA, 21 bp, Artificial sequence
  SiRNA target sequence
gttggcgcatgtgttggtaca

SEQ ID NO: 285886 - DNA, 21 bp, Artificial sequence
  SiRNA target sequence
ttggcgcatgtgttggtacag

SEQ ID NO: 285887 - DNA, 21 bp, Artificial sequence
  SiRNA target sequence
tggcgcatgtgttggtacagg

SEQ ID NO: 285888 - DNA, 21 bp, Artificial sequence
  SiRNA target sequence
ggcgcatgtgttggtacaggc

SEQ ID NO: 285889 - DNA, 21 bp, Artificial sequence
  SiRNA target sequence
gcgcatgtgttggtacaggcg

SEQ ID NO: 285890 - DNA, 21 bp, Artificial sequence
  SiRNA target sequence
cgcatgtgttggtacaggcgt

SEQ ID NO: 285891 - DNA, 21 bp, Artificial sequence
  SiRNA target sequence
gcatgtgttggtacaggcgtc

SEQ ID NO: 285892 - DNA, 21 bp, Artificial sequence
  SiRNA target sequence
catgtgttggtacaggcgtcc

SEQ ID NO: 285893 - DNA, 21 bp, Artificial sequence
  SiRNA target sequence
atgtgttggtacaggcgtcca

SEQ ID NO: 285894 - DNA, 21 bp, Artificial sequence
  SiRNA target sequence
tgtgttggtacaggcgtccat

SEQ ID NO: 285895 - DNA, 21 bp, Artificial sequence
  SiRNA target sequence
gtgttggtacaggcgtccatc

SEQ ID NO: 285896 - DNA, 21 bp, Artificial sequence
  SiRNA target sequence
tgttggtacaggcgtccatcc

SEQ ID NO: 285897 - DNA, 21 bp, Artificial sequence
  SiRNA target sequence
gttggtacaggcgtccatccg

SEQ ID NO: 285898 - DNA, 21 bp, Artificial sequence
  SiRNA target sequence
ttggtacaggcgtccatccgc

SEQ ID NO: 285899 - DNA, 21 bp, Artificial sequence
  SiRNA target sequence
tggtacaggcgtccatccgcc

SEQ ID NO: 285900 - DNA, 21 bp, Artificial sequence
  SiRNA target sequence
ggtacaggcgtccatccgcct

SEQ ID NO: 285901 - DNA, 21 bp, Artificial sequence
  SiRNA target sequence
gtacaggcgtccatccgcctg

SEQ ID NO: 285902 - DNA, 21 bp, Artificial sequence
  SiRNA target sequence
tacaggcgtccatccgcctgt

SEQ ID NO: 285903 - DNA, 21 bp, Artificial sequence
  SiRNA target sequence
acaggcgtccatccgcctgtt

SEQ ID NO: 285904 - DNA, 21 bp, Artificial sequence
  SiRNA target sequence
caggcgtccatccgcctgtta

SEQ ID NO: 285905 - DNA, 21 bp, Artificial sequence
  SiRNA target sequence
aggcgtccatccgcctgttag

SEQ ID NO: 285906 - DNA, 21 bp, Artificial sequence
  SiRNA target sequence
ggcgtccatccgcctgttagg

SEQ ID NO: 285907 - DNA, 21 bp, Artificial sequence
  SiRNA target sequence
gcgtccatccgcctgttaggt

SEQ ID NO: 285908 - DNA, 21 bp, Artificial sequence
  SiRNA target sequence
cgtccatccgcctgttaggta

SEQ ID NO: 285909 - DNA, 21 bp, Artificial sequence
  SiRNA target sequence
gtccatccgcctgttaggtac

SEQ ID NO: 285910 - DNA, 21 bp, Artificial sequence
  SiRNA target sequence
tccatccgcctgttaggtacg

SEQ ID NO: 285911 - DNA, 21 bp, Artificial sequence
  SiRNA target sequence
ccatccgcctgttaggtacga

SEQ ID NO: 285912 - DNA, 21 bp, Artificial sequence
  SiRNA target sequence
catccgcctgttaggtacgag

SEQ ID NO: 285913 - DNA, 21 bp, Artificial sequence
  SiRNA target sequence
atccgcctgttaggtacgagc

SEQ ID NO: 285914 - DNA, 21 bp, Artificial sequence
  SiRNA target sequence
tccgcctgttaggtacgagcc

SEQ ID NO: 285915 - DNA, 21 bp, Artificial sequence
  SiRNA target sequence
ccgcctgttaggtacgagcca

SEQ ID NO: 285916 - DNA, 21 bp, Artificial sequence
  SiRNA target sequence
cgcctgttaggtacgagccat

SEQ ID NO: 285917 - DNA, 21 bp, Artificial sequence
  SiRNA target sequence
gcctgttaggtacgagccatc

SEQ ID NO: 285918 - DNA, 21 bp, Artificial sequence
  SiRNA target sequence
cctgttaggtacgagccatct

SEQ ID NO: 285919 - DNA, 21 bp, Artificial sequence
  SiRNA target sequence
ctgttaggtacgagccatctc

SEQ ID NO: 285920 - DNA, 21 bp, Artificial sequence
  SiRNA target sequence
tgttaggtacgagccatctcc

SEQ ID NO: 285921 - DNA, 21 bp, Artificial sequence
  SiRNA target sequence
gttaggtacgagccatctcca

SEQ ID NO: 285922 - DNA, 21 bp, Artificial sequence
  SiRNA target sequence
ttaggtacgagccatctccat

SEQ ID NO: 285923 - DNA, 21 bp, Artificial sequence
  SiRNA target sequence
taggtacgagccatctccatt

SEQ ID NO: 285924 - DNA, 21 bp, Artificial sequence
  SiRNA target sequence
aggtacgagccatctccattt

SEQ ID NO: 285925 - DNA, 21 bp, Artificial sequence
  SiRNA target sequence
ggtacgagccatctccatttt

SEQ ID NO: 285926 - DNA, 21 bp, Artificial sequence
  SiRNA target sequence
gtacgagccatctccatttta

SEQ ID NO: 285927 - DNA, 21 bp, Artificial sequence
  SiRNA target sequence
tacgagccatctccattttat

SEQ ID NO: 285928 - DNA, 21 bp, Artificial sequence
  SiRNA target sequence
acgagccatctccattttatc

SEQ ID NO: 285929 - DNA, 21 bp, Artificial sequence
  SiRNA target sequence
cgagccatctccattttatca

SEQ ID NO: 285930 - DNA, 21 bp, Artificial sequence
  SiRNA target sequence
gagccatctccattttatcat

SEQ ID NO: 285931 - DNA, 21 bp, Artificial sequence
  SiRNA target sequence
agccatctccattttatcata

SEQ ID NO: 285932 - DNA, 21 bp, Artificial sequence
  SiRNA target sequence
gccatctccattttatcatat

SEQ ID NO: 285933 - DNA, 21 bp, Artificial sequence
  SiRNA target sequence
ccatctccattttatcatatc

SEQ ID NO: 285934 - DNA, 21 bp, Artificial sequence
  SiRNA target sequence
catctccattttatcatatcc

SEQ ID NO: 285935 - DNA, 21 bp, Artificial sequence
  SiRNA target sequence
atctccattttatcatatcct

SEQ ID NO: 285936 - DNA, 21 bp, Artificial sequence
  SiRNA target sequence
tctccattttatcatatcctc

SEQ ID NO: 285937 - DNA, 21 bp, Artificial sequence
  SiRNA target sequence
ctccattttatcatatcctca

SEQ ID NO: 285938 - DNA, 21 bp, Artificial sequence
  SiRNA target sequence
tccattttatcatatcctcaa

SEQ ID NO: 285939 - DNA, 21 bp, Artificial sequence
  SiRNA target sequence
ccattttatcatatcctcaat

SEQ ID NO: 285940 - DNA, 21 bp, Artificial sequence
  SiRNA target sequence
cattttatcatatcctcaatc

SEQ ID NO: 285941 - DNA, 21 bp, Artificial sequence
  SiRNA target sequence
attttatcatatcctcaatca

SEQ ID NO: 285942 - DNA, 21 bp, Artificial sequence
  SiRNA target sequence
ttttatcatatcctcaatcag

SEQ ID NO: 285943 - DNA, 21 bp, Artificial sequence
  SiRNA target sequence
tttatcatatcctcaatcagg

SEQ ID NO: 285944 - DNA, 21 bp, Artificial sequence
  SiRNA target sequence
ttatcatatcctcaatcaggg

SEQ ID NO: 285945 - DNA, 21 bp, Artificial sequence
  SiRNA target sequence
tatcatatcctcaatcaggga

SEQ ID NO: 285946 - DNA, 21 bp, Artificial sequence
  SiRNA target sequence
atcatatcctcaatcagggaa

SEQ ID NO: 285947 - DNA, 21 bp, Artificial sequence
  SiRNA target sequence
tcatatcctcaatcagggaaa

SEQ ID NO: 285948 - DNA, 21 bp, Artificial sequence
  SiRNA target sequence
catatcctcaatcagggaaag

SEQ ID NO: 285949 - DNA, 21 bp, Artificial sequence
  SiRNA target sequence
atatcctcaatcagggaaagt

SEQ ID NO: 285950 - DNA, 21 bp, Artificial sequence
  SiRNA target sequence
tatcctcaatcagggaaagtg

SEQ ID NO: 285951 - DNA, 21 bp, Artificial sequence
  SiRNA target sequence
atcctcaatcagggaaagtgg

SEQ ID NO: 285952 - DNA, 21 bp, Artificial sequence
  SiRNA target sequence
tcctcaatcagggaaagtggt

SEQ ID NO: 285953 - DNA, 21 bp, Artificial sequence
  SiRNA target sequence
cctcaatcagggaaagtggtt

SEQ ID NO: 285954 - DNA, 21 bp, Artificial sequence
  SiRNA target sequence
ctcaatcagggaaagtggttc

SEQ ID NO: 285955 - DNA, 21 bp, Artificial sequence
  SiRNA target sequence
tcaatcagggaaagtggttcc

SEQ ID NO: 285956 - DNA, 21 bp, Artificial sequence
  SiRNA target sequence
caatcagggaaagtggttccg

SEQ ID NO: 285957 - DNA, 21 bp, Artificial sequence
  SiRNA target sequence
aatcagggaaagtggttccgg

SEQ ID NO: 285958 - DNA, 21 bp, Artificial sequence
  SiRNA target sequence
atcagggaaagtggttccggt

SEQ ID NO: 285959 - DNA, 21 bp, Artificial sequence
  SiRNA target sequence
tcagggaaagtggttccggtc

SEQ ID NO: 285960 - DNA, 21 bp, Artificial sequence
  SiRNA target sequence
cagggaaagtggttccggtcc

SEQ ID NO: 285961 - DNA, 21 bp, Artificial sequence
  SiRNA target sequence
agggaaagtggttccggtccc

SEQ ID NO: 285962 - DNA, 21 bp, Artificial sequence
  SiRNA target sequence
gggaaagtggttccggtccca

SEQ ID NO: 285963 - DNA, 21 bp, Artificial sequence
  SiRNA target sequence
ggaaagtggttccggtcccat

SEQ ID NO: 285964 - DNA, 21 bp, Artificial sequence
  SiRNA target sequence
gaaagtggttccggtcccata

SEQ ID NO: 285965 - DNA, 21 bp, Artificial sequence
  SiRNA target sequence
aaagtggttccggtcccatac

SEQ ID NO: 285966 - DNA, 21 bp, Artificial sequence
  SiRNA target sequence
aagtggttccggtcccatacc

SEQ ID NO: 285967 - DNA, 21 bp, Artificial sequence
  SiRNA target sequence
agtggttccggtcccatacca

SEQ ID NO: 285968 - DNA, 21 bp, Artificial sequence
  SiRNA target sequence
gtggttccggtcccataccat

SEQ ID NO: 285969 - DNA, 21 bp, Artificial sequence
  SiRNA target sequence
tggttccggtcccataccatc

SEQ ID NO: 285970 - DNA, 21 bp, Artificial sequence
  SiRNA target sequence
ggttccggtcccataccatca

SEQ ID NO: 285971 - DNA, 21 bp, Artificial sequence
  SiRNA target sequence
gttccggtcccataccatcat

SEQ ID NO: 285972 - DNA, 21 bp, Artificial sequence
  SiRNA target sequence
ttccggtcccataccatcata

SEQ ID NO: 285973 - DNA, 21 bp, Artificial sequence
  SiRNA target sequence
tccggtcccataccatcataa

SEQ ID NO: 285974 - DNA, 21 bp, Artificial sequence
  SiRNA target sequence
ccggtcccataccatcataag

SEQ ID NO: 285975 - DNA, 21 bp, Artificial sequence
  SiRNA target sequence
cggtcccataccatcataagt

SEQ ID NO: 285976 - DNA, 21 bp, Artificial sequence
  SiRNA target sequence
ggtcccataccatcataagta

SEQ ID NO: 285977 - DNA, 21 bp, Artificial sequence
  SiRNA target sequence
gtcccataccatcataagtac

SEQ ID NO: 285978 - DNA, 21 bp, Artificial sequence
  SiRNA target sequence
tcccataccatcataagtacc

SEQ ID NO: 285979 - DNA, 21 bp, Artificial sequence
  SiRNA target sequence
cccataccatcataagtacca

SEQ ID NO: 285980 - DNA, 21 bp, Artificial sequence
  SiRNA target sequence
ccataccatcataagtaccaa

SEQ ID NO: 285981 - DNA, 21 bp, Artificial sequence
  SiRNA target sequence
cataccatcataagtaccaat

SEQ ID NO: 285982 - DNA, 21 bp, Artificial sequence
  SiRNA target sequence
ataccatcataagtaccaatc

SEQ ID NO: 285983 - DNA, 21 bp, Artificial sequence
  SiRNA target sequence
taccatcataagtaccaatca

SEQ ID NO: 285984 - DNA, 21 bp, Artificial sequence
  SiRNA target sequence
accatcataagtaccaatcaa

SEQ ID NO: 285985 - DNA, 21 bp, Artificial sequence
  SiRNA target sequence
ccatcataagtaccaatcaac

SEQ ID NO: 285986 - DNA, 21 bp, Artificial sequence
  SiRNA target sequence
catcataagtaccaatcaacc

SEQ ID NO: 285987 - DNA, 21 bp, Artificial sequence
  SiRNA target sequence
atcataagtaccaatcaacca

SEQ ID NO: 285988 - DNA, 21 bp, Artificial sequence
  SiRNA target sequence
tcataagtaccaatcaaccat

SEQ ID NO: 285989 - DNA, 21 bp, Artificial sequence
  SiRNA target sequence
cataagtaccaatcaaccata

SEQ ID NO: 285990 - DNA, 21 bp, Artificial sequence
  SiRNA target sequence
ataagtaccaatcaaccatat

SEQ ID NO: 285991 - DNA, 21 bp, Artificial sequence
  SiRNA target sequence
taagtaccaatcaaccatatc

SEQ ID NO: 285992 - DNA, 21 bp, Artificial sequence
  SiRNA target sequence
aagtaccaatcaaccatatcc

SEQ ID NO: 285993 - DNA, 21 bp, Artificial sequence
  SiRNA target sequence
agtaccaatcaaccatatcct

SEQ ID NO: 285994 - DNA, 21 bp, Artificial sequence
  SiRNA target sequence
gtaccaatcaaccatatcctt

SEQ ID NO: 285995 - DNA, 21 bp, Artificial sequence
  SiRNA target sequence
taccaatcaaccatatcctta

SEQ ID NO: 285996 - DNA, 21 bp, Artificial sequence
  SiRNA target sequence
accaatcaaccatatccttat

SEQ ID NO: 285997 - DNA, 21 bp, Artificial sequence
  SiRNA target sequence
ccaatcaaccatatccttatc

SEQ ID NO: 285998 - DNA, 21 bp, Artificial sequence
  SiRNA target sequence
caatcaaccatatccttatcc

SEQ ID NO: 285999 - DNA, 21 bp, Artificial sequence
  SiRNA target sequence
aatcaaccatatccttatccc

SEQ ID NO: 286000 - DNA, 21 bp, Artificial sequence
  SiRNA target sequence
atcaaccatatccttatccca

SEQ ID NO: 286001 - DNA, 21 bp, Artificial sequence
  SiRNA target sequence
tcaaccatatccttatcccat

SEQ ID NO: 286002 - DNA, 21 bp, Artificial sequence
  SiRNA target sequence
caaccatatccttatcccatt

SEQ ID NO: 286003 - DNA, 21 bp, Artificial sequence
  SiRNA target sequence
aaccatatccttatcccattg

SEQ ID NO: 286004 - DNA, 21 bp, Artificial sequence
  SiRNA target sequence
accatatccttatcccattgt

SEQ ID NO: 286005 - DNA, 21 bp, Artificial sequence
  SiRNA target sequence
ccatatccttatcccattgtc

SEQ ID NO: 286006 - DNA, 21 bp, Artificial sequence
  SiRNA target sequence
catatccttatcccattgtca

SEQ ID NO: 286007 - DNA, 21 bp, Artificial sequence
  SiRNA target sequence
atatccttatcccattgtcaa

SEQ ID NO: 286008 - DNA, 21 bp, Artificial sequence
  SiRNA target sequence
tatccttatcccattgtcaaa

SEQ ID NO: 286009 - DNA, 21 bp, Artificial sequence
  SiRNA target sequence
atccttatcccattgtcaaaa

SEQ ID NO: 286010 - DNA, 21 bp, Artificial sequence
  SiRNA target sequence
tccttatcccattgtcaaaat

SEQ ID NO: 286011 - DNA, 21 bp, Artificial sequence
  SiRNA target sequence
ccttatcccattgtcaaaatt

SEQ ID NO: 286012 - DNA, 21 bp, Artificial sequence
  SiRNA target sequence
cttatcccattgtcaaaattc

SEQ ID NO: 286013 - DNA, 21 bp, Artificial sequence
  SiRNA target sequence
ttatcccattgtcaaaattca

SEQ ID NO: 286014 - DNA, 21 bp, Artificial sequence
  SiRNA target sequence
tatcccattgtcaaaattcac

SEQ ID NO: 286015 - DNA, 21 bp, Artificial sequence
  SiRNA target sequence
atcccattgtcaaaattcaca

SEQ ID NO: 286016 - DNA, 21 bp, Artificial sequence
  SiRNA target sequence
tcccattgtcaaaattcacaa

SEQ ID NO: 286017 - DNA, 21 bp, Artificial sequence
  SiRNA target sequence
cccattgtcaaaattcacaag

SEQ ID NO: 286018 - DNA, 21 bp, Artificial sequence
  SiRNA target sequence
ccattgtcaaaattcacaaga

SEQ ID NO: 286019 - DNA, 21 bp, Artificial sequence
  SiRNA target sequence
cattgtcaaaattcacaagat

SEQ ID NO: 286020 - DNA, 21 bp, Artificial sequence
  SiRNA target sequence
attgtcaaaattcacaagata

SEQ ID NO: 286021 - DNA, 21 bp, Artificial sequence
  SiRNA target sequence
ttgtcaaaattcacaagatag

SEQ ID NO: 286022 - DNA, 21 bp, Artificial sequence
  SiRNA target sequence
tgtcaaaattcacaagataga

SEQ ID NO: 286023 - DNA, 21 bp, Artificial sequence
  SiRNA target sequence
gtcaaaattcacaagatagac

SEQ ID NO: 286024 - DNA, 21 bp, Artificial sequence
  SiRNA target sequence
tcaaaattcacaagatagaca

SEQ ID NO: 286025 - DNA, 21 bp, Artificial sequence
  SiRNA target sequence
caaaattcacaagatagacac

SEQ ID NO: 286026 - DNA, 21 bp, Artificial sequence
  SiRNA target sequence
aaaattcacaagatagacaca

SEQ ID NO: 286027 - DNA, 21 bp, Artificial sequence
  SiRNA target sequence
aaattcacaagatagacacac

SEQ ID NO: 286028 - DNA, 21 bp, Artificial sequence
  SiRNA target sequence
aattcacaagatagacacaca

SEQ ID NO: 286029 - DNA, 21 bp, Artificial sequence
  SiRNA target sequence
attcacaagatagacacacaa

SEQ ID NO: 286030 - DNA, 21 bp, Artificial sequence
  SiRNA target sequence
ttcacaagatagacacacaag

SEQ ID NO: 286031 - DNA, 21 bp, Artificial sequence
  SiRNA target sequence
tcacaagatagacacacaagc

SEQ ID NO: 286032 - DNA, 21 bp, Artificial sequence
  SiRNA target sequence
cacaagatagacacacaagcc

SEQ ID NO: 286033 - DNA, 21 bp, Artificial sequence
  SiRNA target sequence
acaagatagacacacaagcca

SEQ ID NO: 286034 - DNA, 21 bp, Artificial sequence
  SiRNA target sequence
caagatagacacacaagccac

SEQ ID NO: 286035 - DNA, 21 bp, Artificial sequence
  SiRNA target sequence
aagatagacacacaagccacg

SEQ ID NO: 286036 - DNA, 21 bp, Artificial sequence
  SiRNA target sequence
agatagacacacaagccacgc

SEQ ID NO: 286037 - DNA, 21 bp, Artificial sequence
  SiRNA target sequence
gatagacacacaagccacgct

SEQ ID NO: 286038 - DNA, 21 bp, Artificial sequence
  SiRNA target sequence
atagacacacaagccacgctc

SEQ ID NO: 286039 - DNA, 21 bp, Artificial sequence
  SiRNA target sequence
tagacacacaagccacgctct

SEQ ID NO: 286040 - DNA, 21 bp, Artificial sequence
  SiRNA target sequence
agacacacaagccacgctctc

SEQ ID NO: 286041 - DNA, 21 bp, Artificial sequence
  SiRNA target sequence
gacacacaagccacgctctca

SEQ ID NO: 286042 - DNA, 21 bp, Artificial sequence
  SiRNA target sequence
acacacaagccacgctctcag

SEQ ID NO: 286043 - DNA, 21 bp, Artificial sequence
  SiRNA target sequence
cacacaagccacgctctcaga

SEQ ID NO: 286044 - DNA, 21 bp, Artificial sequence
  SiRNA target sequence
acacaagccacgctctcagaa

SEQ ID NO: 286045 - DNA, 21 bp, Artificial sequence
  SiRNA target sequence
cacaagccacgctctcagaac

SEQ ID NO: 286046 - DNA, 21 bp, Artificial sequence
  SiRNA target sequence
acaagccacgctctcagaact

SEQ ID NO: 286047 - DNA, 21 bp, Artificial sequence
  SiRNA target sequence
caagccacgctctcagaactc

SEQ ID NO: 286048 - DNA, 21 bp, Artificial sequence
  SiRNA target sequence
aagccacgctctcagaactcc

SEQ ID NO: 286049 - DNA, 21 bp, Artificial sequence
  SiRNA target sequence
agccacgctctcagaactccg

SEQ ID NO: 286050 - DNA, 21 bp, Artificial sequence
  SiRNA target sequence
gccacgctctcagaactccgc

SEQ ID NO: 286051 - DNA, 21 bp, Artificial sequence
  SiRNA target sequence
ccacgctctcagaactccgcc

SEQ ID NO: 286052 - DNA, 21 bp, Artificial sequence
  SiRNA target sequence
cacgctctcagaactccgcct

SEQ ID NO: 286053 - DNA, 21 bp, Artificial sequence
  SiRNA target sequence
acgctctcagaactccgcctg

SEQ ID NO: 286054 - DNA, 21 bp, Artificial sequence
  SiRNA target sequence
cgctctcagaactccgcctgc

SEQ ID NO: 286055 - DNA, 21 bp, Artificial sequence
  SiRNA target sequence
gctctcagaactccgcctgct

SEQ ID NO: 286056 - DNA, 21 bp, Artificial sequence
  SiRNA target sequence
ctctcagaactccgcctgctt

SEQ ID NO: 286057 - DNA, 21 bp, Artificial sequence
  SiRNA target sequence
tctcagaactccgcctgcttg

SEQ ID NO: 286058 - DNA, 21 bp, Artificial sequence
  SiRNA target sequence
ctcagaactccgcctgcttga

SEQ ID NO: 286059 - DNA, 21 bp, Artificial sequence
  SiRNA target sequence
tcagaactccgcctgcttgag

SEQ ID NO: 286060 - DNA, 21 bp, Artificial sequence
  SiRNA target sequence
cagaactccgcctgcttgagg

SEQ ID NO: 286061 - DNA, 21 bp, Artificial sequence
  SiRNA target sequence
agaactccgcctgcttgaggg

SEQ ID NO: 286062 - DNA, 21 bp, Artificial sequence
  SiRNA target sequence
gaactccgcctgcttgagggc

SEQ ID NO: 286063 - DNA, 21 bp, Artificial sequence
  SiRNA target sequence
aactccgcctgcttgagggcc

SEQ ID NO: 286064 - DNA, 21 bp, Artificial sequence
  SiRNA target sequence
actccgcctgcttgagggccc

SEQ ID NO: 286065 - DNA, 21 bp, Artificial sequence
  SiRNA target sequence
ctccgcctgcttgagggccca

SEQ ID NO: 286066 - DNA, 21 bp, Artificial sequence
  SiRNA target sequence
tccgcctgcttgagggcccag

SEQ ID NO: 286067 - DNA, 21 bp, Artificial sequence
  SiRNA target sequence
ccgcctgcttgagggcccaga

SEQ ID NO: 286068 - DNA, 21 bp, Artificial sequence
  SiRNA target sequence
cgcctgcttgagggcccagac

SEQ ID NO: 286069 - DNA, 21 bp, Artificial sequence
  SiRNA target sequence
gcctgcttgagggcccagacg

SEQ ID NO: 286070 - DNA, 21 bp, Artificial sequence
  SiRNA target sequence
cctgcttgagggcccagacga

SEQ ID NO: 286071 - DNA, 21 bp, Artificial sequence
  SiRNA target sequence
ctgcttgagggcccagacgag

SEQ ID NO: 286072 - DNA, 21 bp, Artificial sequence
  SiRNA target sequence
tgcttgagggcccagacgagt

SEQ ID NO: 286073 - DNA, 21 bp, Artificial sequence
  SiRNA target sequence
gcttgagggcccagacgagtg

SEQ ID NO: 286074 - DNA, 21 bp, Artificial sequence
  SiRNA target sequence
cttgagggcccagacgagtgg

SEQ ID NO: 286075 - DNA, 21 bp, Artificial sequence
  SiRNA target sequence
ttgagggcccagacgagtggc

SEQ ID NO: 286076 - DNA, 21 bp, Artificial sequence
  SiRNA target sequence
tgagggcccagacgagtggct

SEQ ID NO: 286077 - DNA, 21 bp, Artificial sequence
  SiRNA target sequence
gagggcccagacgagtggctt

SEQ ID NO: 286078 - DNA, 21 bp, Artificial sequence
  SiRNA target sequence
agggcccagacgagtggcttt

SEQ ID NO: 286079 - DNA, 21 bp, Artificial sequence
  SiRNA target sequence
gggcccagacgagtggctttt

SEQ ID NO: 286080 - DNA, 21 bp, Artificial sequence
  SiRNA target sequence
ggcccagacgagtggcttttg

SEQ ID NO: 286081 - DNA, 21 bp, Artificial sequence
  SiRNA target sequence
gcccagacgagtggcttttgg

SEQ ID NO: 286082 - DNA, 21 bp, Artificial sequence
  SiRNA target sequence
cccagacgagtggcttttggt

SEQ ID NO: 286083 - DNA, 21 bp, Artificial sequence
  SiRNA target sequence
ccagacgagtggcttttggtc

SEQ ID NO: 286084 - DNA, 21 bp, Artificial sequence
  SiRNA target sequence
cagacgagtggcttttggtca

SEQ ID NO: 286085 - DNA, 21 bp, Artificial sequence
  SiRNA target sequence
agacgagtggcttttggtcac

SEQ ID NO: 286086 - DNA, 21 bp, Artificial sequence
  SiRNA target sequence
gacgagtggcttttggtcact

SEQ ID NO: 286087 - DNA, 21 bp, Artificial sequence
  SiRNA target sequence
acgagtggcttttggtcactg

SEQ ID NO: 286088 - DNA, 21 bp, Artificial sequence
  SiRNA target sequence
cgagtggcttttggtcactgc

SEQ ID NO: 286089 - DNA, 21 bp, Artificial sequence
  SiRNA target sequence
gagtggcttttggtcactgct

SEQ ID NO: 286090 - DNA, 21 bp, Artificial sequence
  SiRNA target sequence
agtggcttttggtcactgctc

SEQ ID NO: 286091 - DNA, 21 bp, Artificial sequence
  SiRNA target sequence
gtggcttttggtcactgctcg

SEQ ID NO: 286092 - DNA, 21 bp, Artificial sequence
  SiRNA target sequence
tggcttttggtcactgctcgc

SEQ ID NO: 286093 - DNA, 21 bp, Artificial sequence
  SiRNA target sequence
ggcttttggtcactgctcgcc

SEQ ID NO: 286094 - DNA, 21 bp, Artificial sequence
  SiRNA target sequence
gcttttggtcactgctcgcca

SEQ ID NO: 286095 - DNA, 21 bp, Artificial sequence
  SiRNA target sequence
cttttggtcactgctcgccag

SEQ ID NO: 286096 - DNA, 21 bp, Artificial sequence
  SiRNA target sequence
ttttggtcactgctcgccagc

SEQ ID NO: 286097 - DNA, 21 bp, Artificial sequence
  SiRNA target sequence
tttggtcactgctcgccagct

SEQ ID NO: 286098 - DNA, 21 bp, Artificial sequence
  SiRNA target sequence
ttggtcactgctcgccagctt

SEQ ID NO: 286099 - DNA, 21 bp, Artificial sequence
  SiRNA target sequence
tggtcactgctcgccagcttg

SEQ ID NO: 286100 - DNA, 21 bp, Artificial sequence
  SiRNA target sequence
ggtcactgctcgccagcttga

SEQ ID NO: 286101 - DNA, 21 bp, Artificial sequence
  SiRNA target sequence
gtcactgctcgccagcttgac

SEQ ID NO: 286102 - DNA, 21 bp, Artificial sequence
  SiRNA target sequence
tcactgctcgccagcttgact

SEQ ID NO: 286103 - DNA, 21 bp, Artificial sequence
  SiRNA target sequence
cactgctcgccagcttgactt

SEQ ID NO: 286104 - DNA, 21 bp, Artificial sequence
  SiRNA target sequence
actgctcgccagcttgacttc

SEQ ID NO: 286105 - DNA, 21 bp, Artificial sequence
  SiRNA target sequence
ctgctcgccagcttgacttct

SEQ ID NO: 286106 - DNA, 21 bp, Artificial sequence
  SiRNA target sequence
tgctcgccagcttgacttctc

SEQ ID NO: 286107 - DNA, 21 bp, Artificial sequence
  SiRNA target sequence
gctcgccagcttgacttctcc

SEQ ID NO: 286108 - DNA, 21 bp, Artificial sequence
  SiRNA target sequence
ctcgccagcttgacttctcct

SEQ ID NO: 286109 - DNA, 21 bp, Artificial sequence
  SiRNA target sequence
tcgccagcttgacttctcctt

SEQ ID NO: 286110 - DNA, 21 bp, Artificial sequence
  SiRNA target sequence
cgccagcttgacttctcctta

SEQ ID NO: 286111 - DNA, 21 bp, Artificial sequence
  SiRNA target sequence
gccagcttgacttctccttat

SEQ ID NO: 286112 - DNA, 21 bp, Artificial sequence
  SiRNA target sequence
ccagcttgacttctccttata

SEQ ID NO: 286113 - DNA, 21 bp, Artificial sequence
  SiRNA target sequence
cagcttgacttctccttatat

SEQ ID NO: 286114 - DNA, 21 bp, Artificial sequence
  SiRNA target sequence
agcttgacttctccttatatg

SEQ ID NO: 286115 - DNA, 21 bp, Artificial sequence
  SiRNA target sequence
gcttgacttctccttatatgt

SEQ ID NO: 286116 - DNA, 21 bp, Artificial sequence
  SiRNA target sequence
cttgacttctccttatatgtc

SEQ ID NO: 286117 - DNA, 21 bp, Artificial sequence
  SiRNA target sequence
ttgacttctccttatatgtca

SEQ ID NO: 286118 - DNA, 21 bp, Artificial sequence
  SiRNA target sequence
tgacttctccttatatgtcac

SEQ ID NO: 286119 - DNA, 21 bp, Artificial sequence
  SiRNA target sequence
gacttctccttatatgtcacc

SEQ ID NO: 286120 - DNA, 21 bp, Artificial sequence
  SiRNA target sequence
acttctccttatatgtcaccg

SEQ ID NO: 286121 - DNA, 21 bp, Artificial sequence
  SiRNA target sequence
cttctccttatatgtcaccga

SEQ ID NO: 286122 - DNA, 21 bp, Artificial sequence
  SiRNA target sequence
ttctccttatatgtcaccgac

SEQ ID NO: 286123 - DNA, 21 bp, Artificial sequence
  SiRNA target sequence
tctccttatatgtcaccgaca

SEQ ID NO: 286124 - DNA, 21 bp, Artificial sequence
  SiRNA target sequence
ctccttatatgtcaccgacaa

SEQ ID NO: 286125 - DNA, 21 bp, Artificial sequence
  SiRNA target sequence
tccttatatgtcaccgacaat

SEQ ID NO: 286126 - DNA, 21 bp, Artificial sequence
  SiRNA target sequence
ccttatatgtcaccgacaatc

SEQ ID NO: 286127 - DNA, 21 bp, Artificial sequence
  SiRNA target sequence
cttatatgtcaccgacaatct

SEQ ID NO: 286128 - DNA, 21 bp, Artificial sequence
  SiRNA target sequence
ttatatgtcaccgacaatctt

SEQ ID NO: 286129 - DNA, 21 bp, Artificial sequence
  SiRNA target sequence
tatatgtcaccgacaatcttg

SEQ ID NO: 286130 - DNA, 21 bp, Artificial sequence
  SiRNA target sequence
atatgtcaccgacaatcttga

SEQ ID NO: 286131 - DNA, 21 bp, Artificial sequence
  SiRNA target sequence
tatgtcaccgacaatcttgac

SEQ ID NO: 286132 - DNA, 21 bp, Artificial sequence
  SiRNA target sequence
atgtcaccgacaatcttgacg

SEQ ID NO: 286133 - DNA, 21 bp, Artificial sequence
  SiRNA target sequence
tgtcaccgacaatcttgacga

SEQ ID NO: 286134 - DNA, 21 bp, Artificial sequence
  SiRNA target sequence
gtcaccgacaatcttgacgaa

SEQ ID NO: 286135 - DNA, 21 bp, Artificial sequence
  SiRNA target sequence
tcaccgacaatcttgacgaac

SEQ ID NO: 286136 - DNA, 21 bp, Artificial sequence
  SiRNA target sequence
caccgacaatcttgacgaacc

SEQ ID NO: 286137 - DNA, 21 bp, Artificial sequence
  SiRNA target sequence
accgacaatcttgacgaaccc

SEQ ID NO: 286138 - DNA, 21 bp, Artificial sequence
  SiRNA target sequence
ccgacaatcttgacgaaccca

SEQ ID NO: 286139 - DNA, 21 bp, Artificial sequence
  SiRNA target sequence
cgacaatcttgacgaacccaa

SEQ ID NO: 286140 - DNA, 21 bp, Artificial sequence
  SiRNA target sequence
gacaatcttgacgaacccaaa

SEQ ID NO: 286141 - DNA, 21 bp, Artificial sequence
  SiRNA target sequence
acaatcttgacgaacccaaat

SEQ ID NO: 286142 - DNA, 21 bp, Artificial sequence
  SiRNA target sequence
caatcttgacgaacccaaata

SEQ ID NO: 286143 - DNA, 21 bp, Artificial sequence
  SiRNA target sequence
aatcttgacgaacccaaatat

SEQ ID NO: 286144 - DNA, 21 bp, Artificial sequence
  SiRNA target sequence
atcttgacgaacccaaatatc

SEQ ID NO: 286145 - DNA, 21 bp, Artificial sequence
  SiRNA target sequence
tcttgacgaacccaaatatcc

SEQ ID NO: 286146 - DNA, 21 bp, Artificial sequence
  SiRNA target sequence
cttgacgaacccaaatatcct

SEQ ID NO: 286147 - DNA, 21 bp, Artificial sequence
  SiRNA target sequence
ttgacgaacccaaatatccta

SEQ ID NO: 286148 - DNA, 21 bp, Artificial sequence
  SiRNA target sequence
tgacgaacccaaatatcctaa

SEQ ID NO: 286149 - DNA, 21 bp, Artificial sequence
  SiRNA target sequence
gacgaacccaaatatcctaag

SEQ ID NO: 286150 - DNA, 21 bp, Artificial sequence
  SiRNA target sequence
acgaacccaaatatcctaagt

SEQ ID NO: 286151 - DNA, 21 bp, Artificial sequence
  SiRNA target sequence
cgaacccaaatatcctaagta

SEQ ID NO: 286152 - DNA, 21 bp, Artificial sequence
  SiRNA target sequence
gaacccaaatatcctaagtac

SEQ ID NO: 286153 - DNA, 21 bp, Artificial sequence
  SiRNA target sequence
aacccaaatatcctaagtacg

SEQ ID NO: 286154 - DNA, 21 bp, Artificial sequence
  SiRNA target sequence
acccaaatatcctaagtacga

SEQ ID NO: 286155 - DNA, 21 bp, Artificial sequence
  SiRNA target sequence
cccaaatatcctaagtacgac

SEQ ID NO: 286156 - DNA, 21 bp, Artificial sequence
  SiRNA target sequence
ccaaatatcctaagtacgact

SEQ ID NO: 286157 - DNA, 21 bp, Artificial sequence
  SiRNA target sequence
caaatatcctaagtacgactg

SEQ ID NO: 286158 - DNA, 21 bp, Artificial sequence
  SiRNA target sequence
aaatatcctaagtacgactgg

SEQ ID NO: 286159 - DNA, 21 bp, Artificial sequence
  SiRNA target sequence
aatatcctaagtacgactggc

SEQ ID NO: 286160 - DNA, 21 bp, Artificial sequence
  SiRNA target sequence
atatcctaagtacgactggct

SEQ ID NO: 286161 - DNA, 21 bp, Artificial sequence
  SiRNA target sequence
tatcctaagtacgactggctt

SEQ ID NO: 286162 - DNA, 21 bp, Artificial sequence
  SiRNA target sequence
atcctaagtacgactggcttg

SEQ ID NO: 286163 - DNA, 21 bp, Artificial sequence
  SiRNA target sequence
tcctaagtacgactggcttgg

SEQ ID NO: 286164 - DNA, 21 bp, Artificial sequence
  SiRNA target sequence
cctaagtacgactggcttgga

SEQ ID NO: 286165 - DNA, 21 bp, Artificial sequence
  SiRNA target sequence
ctaagtacgactggcttggaa

SEQ ID NO: 286166 - DNA, 21 bp, Artificial sequence
  SiRNA target sequence
taagtacgactggcttggaag

SEQ ID NO: 286167 - DNA, 21 bp, Artificial sequence
  SiRNA target sequence
aagtacgactggcttggaagc

SEQ ID NO: 286168 - DNA, 21 bp, Artificial sequence
  SiRNA target sequence
agtacgactggcttggaagcg

SEQ ID NO: 286169 - DNA, 21 bp, Artificial sequence
  SiRNA target sequence
gtacgactggcttggaagcgg

SEQ ID NO: 286170 - DNA, 21 bp, Artificial sequence
  SiRNA target sequence
tacgactggcttggaagcggt

SEQ ID NO: 286171 - DNA, 21 bp, Artificial sequence
  SiRNA target sequence
acgactggcttggaagcggtg

SEQ ID NO: 286172 - DNA, 21 bp, Artificial sequence
  SiRNA target sequence
cgactggcttggaagcggtgg

SEQ ID NO: 286173 - DNA, 21 bp, Artificial sequence
  SiRNA target sequence
gactggcttggaagcggtggc

SEQ ID NO: 286174 - DNA, 21 bp, Artificial sequence
  SiRNA target sequence
actggcttggaagcggtggct

SEQ ID NO: 286175 - DNA, 21 bp, Artificial sequence
  SiRNA target sequence
ctggcttggaagcggtggctc

SEQ ID NO: 286176 - DNA, 21 bp, Artificial sequence
  SiRNA target sequence
tggcttggaagcggtggctct

SEQ ID NO: 286177 - DNA, 21 bp, Artificial sequence
  SiRNA target sequence
ggcttggaagcggtggctctt

SEQ ID NO: 286178 - DNA, 21 bp, Artificial sequence
  SiRNA target sequence
gcttggaagcggtggctctta

SEQ ID NO: 286179 - DNA, 21 bp, Artificial sequence
  SiRNA target sequence
cttggaagcggtggctcttac

SEQ ID NO: 286180 - DNA, 21 bp, Artificial sequence
  SiRNA target sequence
ttggaagcggtggctcttact

SEQ ID NO: 286181 - DNA, 21 bp, Artificial sequence
  SiRNA target sequence
tggaagcggtggctcttactg

SEQ ID NO: 286182 - DNA, 21 bp, Artificial sequence
  SiRNA target sequence
ggaagcggtggctcttactgt

SEQ ID NO: 286183 - DNA, 21 bp, Artificial sequence
  SiRNA target sequence
gaagcggtggctcttactgtt

SEQ ID NO: 286184 - DNA, 21 bp, Artificial sequence
  SiRNA target sequence
aagcggtggctcttactgttt

SEQ ID NO: 286185 - DNA, 21 bp, Artificial sequence
  SiRNA target sequence
agcggtggctcttactgtttg

SEQ ID NO: 286186 - DNA, 21 bp, Artificial sequence
  SiRNA target sequence
gcggtggctcttactgtttgg

SEQ ID NO: 286187 - DNA, 21 bp, Artificial sequence
  SiRNA target sequence
cggtggctcttactgtttggt

SEQ ID NO: 286188 - DNA, 21 bp, Artificial sequence
  SiRNA target sequence
ggtggctcttactgtttggta

SEQ ID NO: 286189 - DNA, 21 bp, Artificial sequence
  SiRNA target sequence
gtggctcttactgtttggtac

SEQ ID NO: 286190 - DNA, 21 bp, Artificial sequence
  SiRNA target sequence
tggctcttactgtttggtaca

SEQ ID NO: 286191 - DNA, 21 bp, Artificial sequence
  SiRNA target sequence
ggctcttactgtttggtacag

SEQ ID NO: 286192 - DNA, 21 bp, Artificial sequence
  SiRNA target sequence
gctcttactgtttggtacagc

SEQ ID NO: 286193 - DNA, 21 bp, Artificial sequence
  SiRNA target sequence
ctcttactgtttggtacagcc

SEQ ID NO: 286194 - DNA, 21 bp, Artificial sequence
  SiRNA target sequence
tcttactgtttggtacagcct

SEQ ID NO: 286195 - DNA, 21 bp, Artificial sequence
  SiRNA target sequence
cttactgtttggtacagcctg

SEQ ID NO: 286196 - DNA, 21 bp, Artificial sequence
  SiRNA target sequence
ttactgtttggtacagcctga

SEQ ID NO: 286197 - DNA, 21 bp, Artificial sequence
  SiRNA target sequence
tactgtttggtacagcctgac

SEQ ID NO: 286198 - DNA, 21 bp, Artificial sequence
  SiRNA target sequence
actgtttggtacagcctgacc

SEQ ID NO: 286199 - DNA, 21 bp, Artificial sequence
  SiRNA target sequence
ctgtttggtacagcctgaccg

SEQ ID NO: 286200 - DNA, 21 bp, Artificial sequence
  SiRNA target sequence
tgtttggtacagcctgaccgg

SEQ ID NO: 286201 - DNA, 21 bp, Artificial sequence
  SiRNA target sequence
gtttggtacagcctgaccggt

SEQ ID NO: 286202 - DNA, 21 bp, Artificial sequence
  SiRNA target sequence
tttggtacagcctgaccggtt

SEQ ID NO: 286203 - DNA, 21 bp, Artificial sequence
  SiRNA target sequence
ttggtacagcctgaccggttc

SEQ ID NO: 286204 - DNA, 21 bp, Artificial sequence
  SiRNA target sequence
tggtacagcctgaccggttct

SEQ ID NO: 286205 - DNA, 21 bp, Artificial sequence
  SiRNA target sequence
ggtacagcctgaccggttctt

SEQ ID NO: 286206 - DNA, 21 bp, Artificial sequence
  SiRNA target sequence
gtacagcctgaccggttcttc

SEQ ID NO: 286207 - DNA, 21 bp, Artificial sequence
  SiRNA target sequence
tacagcctgaccggttcttcc

SEQ ID NO: 286208 - DNA, 21 bp, Artificial sequence
  SiRNA target sequence
acagcctgaccggttcttccc

SEQ ID NO: 286209 - DNA, 21 bp, Artificial sequence
  SiRNA target sequence
cagcctgaccggttcttccca

SEQ ID NO: 286210 - DNA, 21 bp, Artificial sequence
  SiRNA target sequence
agcctgaccggttcttcccac

SEQ ID NO: 286211 - DNA, 21 bp, Artificial sequence
  SiRNA target sequence
gcctgaccggttcttcccact

SEQ ID NO: 286212 - DNA, 21 bp, Artificial sequence
  SiRNA target sequence
cctgaccggttcttcccactt

SEQ ID NO: 286213 - DNA, 21 bp, Artificial sequence
  SiRNA target sequence
ctgaccggttcttcccacttc

SEQ ID NO: 286214 - DNA, 21 bp, Artificial sequence
  SiRNA target sequence
tgaccggttcttcccacttca

SEQ ID NO: 286215 - DNA, 21 bp, Artificial sequence
  SiRNA target sequence
gaccggttcttcccacttcaa

SEQ ID NO: 286216 - DNA, 21 bp, Artificial sequence
  SiRNA target sequence
accggttcttcccacttcaac

SEQ ID NO: 286217 - DNA, 21 bp, Artificial sequence
  SiRNA target sequence
ccggttcttcccacttcaacc

SEQ ID NO: 286218 - DNA, 21 bp, Artificial sequence
  SiRNA target sequence
cggttcttcccacttcaaccc

SEQ ID NO: 286219 - DNA, 21 bp, Artificial sequence
  SiRNA target sequence
ggttcttcccacttcaacccc

SEQ ID NO: 286220 - DNA, 21 bp, Artificial sequence
  SiRNA target sequence
gttcttcccacttcaacccct

SEQ ID NO: 286221 - DNA, 21 bp, Artificial sequence
  SiRNA target sequence
ttcttcccacttcaacccctt

SEQ ID NO: 286222 - DNA, 21 bp, Artificial sequence
  SiRNA target sequence
tcttcccacttcaaccccttg

SEQ ID NO: 286223 - DNA, 21 bp, Artificial sequence
  SiRNA target sequence
cttcccacttcaaccccttgc

SEQ ID NO: 286224 - DNA, 21 bp, Artificial sequence
  SiRNA target sequence
ttcccacttcaaccccttgca

SEQ ID NO: 286225 - DNA, 21 bp, Artificial sequence
  SiRNA target sequence
tcccacttcaaccccttgcac

SEQ ID NO: 286226 - DNA, 21 bp, Artificial sequence
  SiRNA target sequence
cccacttcaaccccttgcacg

SEQ ID NO: 286227 - DNA, 21 bp, Artificial sequence
  SiRNA target sequence
ccacttcaaccccttgcacgc

SEQ ID NO: 286228 - DNA, 21 bp, Artificial sequence
  SiRNA target sequence
cacttcaaccccttgcacgcg

SEQ ID NO: 286229 - DNA, 21 bp, Artificial sequence
  SiRNA target sequence
acttcaaccccttgcacgcgc

SEQ ID NO: 286230 - DNA, 21 bp, Artificial sequence
  SiRNA target sequence
cttcaaccccttgcacgcgcc

SEQ ID NO: 286231 - DNA, 21 bp, Artificial sequence
  SiRNA target sequence
ttcaaccccttgcacgcgccg

SEQ ID NO: 286232 - DNA, 21 bp, Artificial sequence
  SiRNA target sequence
tcaaccccttgcacgcgccga

SEQ ID NO: 286233 - DNA, 21 bp, Artificial sequence
  SiRNA target sequence
caaccccttgcacgcgccgac

SEQ ID NO: 286234 - DNA, 21 bp, Artificial sequence
  SiRNA target sequence
aaccccttgcacgcgccgaca

SEQ ID NO: 286235 - DNA, 21 bp, Artificial sequence
  SiRNA target sequence
accccttgcacgcgccgacaa

SEQ ID NO: 286236 - DNA, 21 bp, Artificial sequence
  SiRNA target sequence
ccccttgcacgcgccgacaac

SEQ ID NO: 286237 - DNA, 21 bp, Artificial sequence
  SiRNA target sequence
cccttgcacgcgccgacaacc

SEQ ID NO: 286238 - DNA, 21 bp, Artificial sequence
  SiRNA target sequence
ccttgcacgcgccgacaaccc

SEQ ID NO: 286239 - DNA, 21 bp, Artificial sequence
  SiRNA target sequence
cttgcacgcgccgacaaccct

SEQ ID NO: 286240 - DNA, 21 bp, Artificial sequence
  SiRNA target sequence
ttgcacgcgccgacaaccctg

SEQ ID NO: 286241 - DNA, 21 bp, Artificial sequence
  SiRNA target sequence
tgcacgcgccgacaaccctga

SEQ ID NO: 286242 - DNA, 21 bp, Artificial sequence
  SiRNA target sequence
gcacgcgccgacaaccctgac

SEQ ID NO: 286243 - DNA, 21 bp, Artificial sequence
  SiRNA target sequence
cacgcgccgacaaccctgact

SEQ ID NO: 286244 - DNA, 21 bp, Artificial sequence
  SiRNA target sequence
acgcgccgacaaccctgactc

SEQ ID NO: 286245 - DNA, 21 bp, Artificial sequence
  SiRNA target sequence
cgcgccgacaaccctgactct

SEQ ID NO: 286246 - DNA, 21 bp, Artificial sequence
  SiRNA target sequence
gcgccgacaaccctgactctc

SEQ ID NO: 286247 - DNA, 21 bp, Artificial sequence
  SiRNA target sequence
cgccgacaaccctgactctct

SEQ ID NO: 286248 - DNA, 21 bp, Artificial sequence
  SiRNA target sequence
gccgacaaccctgactctcta

SEQ ID NO: 286249 - DNA, 21 bp, Artificial sequence
  SiRNA target sequence
ccgacaaccctgactctctac

SEQ ID NO: 286250 - DNA, 21 bp, Artificial sequence
  SiRNA target sequence
cgacaaccctgactctctact

SEQ ID NO: 286251 - DNA, 21 bp, Artificial sequence
  SiRNA target sequence
gacaaccctgactctctactc

SEQ ID NO: 286252 - DNA, 21 bp, Artificial sequence
  SiRNA target sequence
acaaccctgactctctactcg

SEQ ID NO: 286253 - DNA, 21 bp, Artificial sequence
  SiRNA target sequence
caaccctgactctctactcga

SEQ ID NO: 286254 - DNA, 21 bp, Artificial sequence
  SiRNA target sequence
aaccctgactctctactcgag

SEQ ID NO: 286255 - DNA, 21 bp, Artificial sequence
  SiRNA target sequence
accctgactctctactcgagg

SEQ ID NO: 286256 - DNA, 21 bp, Artificial sequence
  SiRNA target sequence
ccctgactctctactcgaggt

SEQ ID NO: 286257 - DNA, 21 bp, Artificial sequence
  SiRNA target sequence
cctgactctctactcgaggtc

SEQ ID NO: 286258 - DNA, 21 bp, Artificial sequence
  SiRNA target sequence
ctgactctctactcgaggtct

SEQ ID NO: 286259 - DNA, 21 bp, Artificial sequence
  SiRNA target sequence
tgactctctactcgaggtctt

SEQ ID NO: 286260 - DNA, 21 bp, Artificial sequence
  SiRNA target sequence
gactctctactcgaggtctta

SEQ ID NO: 286261 - DNA, 21 bp, Artificial sequence
  SiRNA target sequence
actctctactcgaggtcttac

SEQ ID NO: 286262 - DNA, 21 bp, Artificial sequence
  SiRNA target sequence
ctctctactcgaggtcttacc

SEQ ID NO: 286263 - DNA, 21 bp, Artificial sequence
  SiRNA target sequence
tctctactcgaggtcttaccc

SEQ ID NO: 286264 - DNA, 21 bp, Artificial sequence
  SiRNA target sequence
ctctactcgaggtcttacccg

SEQ ID NO: 286265 - DNA, 21 bp, Artificial sequence
  SiRNA target sequence
tctactcgaggtcttacccgt

SEQ ID NO: 286266 - DNA, 21 bp, Artificial sequence
  SiRNA target sequence
ctactcgaggtcttacccgtc

SEQ ID NO: 286267 - DNA, 21 bp, Artificial sequence
  SiRNA target sequence
tactcgaggtcttacccgtct

SEQ ID NO: 286268 - DNA, 21 bp, Artificial sequence
  SiRNA target sequence
actcgaggtcttacccgtctt

SEQ ID NO: 286269 - DNA, 21 bp, Artificial sequence
  SiRNA target sequence
ctcgaggtcttacccgtcttg

SEQ ID NO: 286270 - DNA, 21 bp, Artificial sequence
  SiRNA target sequence
tcgaggtcttacccgtcttgg

SEQ ID NO: 286271 - DNA, 21 bp, Artificial sequence
  SiRNA target sequence
cgaggtcttacccgtcttggt

SEQ ID NO: 286272 - DNA, 21 bp, Artificial sequence
  SiRNA target sequence
gaggtcttacccgtcttggta

SEQ ID NO: 286273 - DNA, 21 bp, Artificial sequence
  SiRNA target sequence
aggtcttacccgtcttggtat

SEQ ID NO: 286274 - DNA, 21 bp, Artificial sequence
  SiRNA target sequence
ggtcttacccgtcttggtatc

SEQ ID NO: 286275 - DNA, 21 bp, Artificial sequence
  SiRNA target sequence
gtcttacccgtcttggtatca

SEQ ID NO: 286276 - DNA, 21 bp, Artificial sequence
  SiRNA target sequence
tcttacccgtcttggtatcag

SEQ ID NO: 286277 - DNA, 21 bp, Artificial sequence
  SiRNA target sequence
cttacccgtcttggtatcagc

SEQ ID NO: 286278 - DNA, 21 bp, Artificial sequence
  SiRNA target sequence
ttacccgtcttggtatcagca

SEQ ID NO: 286279 - DNA, 21 bp, Artificial sequence
  SiRNA target sequence
tacccgtcttggtatcagcag

SEQ ID NO: 286280 - DNA, 21 bp, Artificial sequence
  SiRNA target sequence
acccgtcttggtatcagcaga

SEQ ID NO: 286281 - DNA, 21 bp, Artificial sequence
  SiRNA target sequence
cccgtcttggtatcagcagac

SEQ ID NO: 286282 - DNA, 21 bp, Artificial sequence
  SiRNA target sequence
ccgtcttggtatcagcagaca

SEQ ID NO: 286283 - DNA, 21 bp, Artificial sequence
  SiRNA target sequence
cgtcttggtatcagcagacat

SEQ ID NO: 286284 - DNA, 21 bp, Artificial sequence
  SiRNA target sequence
gtcttggtatcagcagacatc

SEQ ID NO: 286285 - DNA, 21 bp, Artificial sequence
  SiRNA target sequence
tcttggtatcagcagacatca

SEQ ID NO: 286286 - DNA, 21 bp, Artificial sequence
  SiRNA target sequence
cttggtatcagcagacatcaa

SEQ ID NO: 286287 - DNA, 21 bp, Artificial sequence
  SiRNA target sequence
ttggtatcagcagacatcaag

SEQ ID NO: 286288 - DNA, 21 bp, Artificial sequence
  SiRNA target sequence
tggtatcagcagacatcaaga

SEQ ID NO: 286289 - DNA, 21 bp, Artificial sequence
  SiRNA target sequence
ggtatcagcagacatcaagat

SEQ ID NO: 286290 - DNA, 21 bp, Artificial sequence
  SiRNA target sequence
gtatcagcagacatcaagata

SEQ ID NO: 286291 - DNA, 21 bp, Artificial sequence
  SiRNA target sequence
tatcagcagacatcaagatat

SEQ ID NO: 286292 - DNA, 21 bp, Artificial sequence
  SiRNA target sequence
atcagcagacatcaagatatc

SEQ ID NO: 286293 - DNA, 21 bp, Artificial sequence
  SiRNA target sequence
tcagcagacatcaagatatcc

SEQ ID NO: 286294 - DNA, 21 bp, Artificial sequence
  SiRNA target sequence
cagcagacatcaagatatcca

SEQ ID NO: 286295 - DNA, 21 bp, Artificial sequence
  SiRNA target sequence
agcagacatcaagatatccaa

SEQ ID NO: 286296 - DNA, 21 bp, Artificial sequence
  SiRNA target sequence
gcagacatcaagatatccaac

SEQ ID NO: 286297 - DNA, 21 bp, Artificial sequence
  SiRNA target sequence
cagacatcaagatatccaaca

SEQ ID NO: 286298 - DNA, 21 bp, Artificial sequence
  SiRNA target sequence
agacatcaagatatccaacat

SEQ ID NO: 286299 - DNA, 21 bp, Artificial sequence
  SiRNA target sequence
gacatcaagatatccaacatc

SEQ ID NO: 286300 - DNA, 21 bp, Artificial sequence
  SiRNA target sequence
acatcaagatatccaacatcc

SEQ ID NO: 286301 - DNA, 21 bp, Artificial sequence
  SiRNA target sequence
catcaagatatccaacatcca

SEQ ID NO: 286302 - DNA, 21 bp, Artificial sequence
  SiRNA target sequence
atcaagatatccaacatccac

SEQ ID NO: 286303 - DNA, 21 bp, Artificial sequence
  SiRNA target sequence
tcaagatatccaacatccacc

SEQ ID NO: 286304 - DNA, 21 bp, Artificial sequence
  SiRNA target sequence
caagatatccaacatccaccg

SEQ ID NO: 286305 - DNA, 21 bp, Artificial sequence
  SiRNA target sequence
aagatatccaacatccaccga

SEQ ID NO: 286306 - DNA, 21 bp, Artificial sequence
  SiRNA target sequence
agatatccaacatccaccgag

SEQ ID NO: 286307 - DNA, 21 bp, Artificial sequence
  SiRNA target sequence
gatatccaacatccaccgaga

SEQ ID NO: 286308 - DNA, 21 bp, Artificial sequence
  SiRNA target sequence
atatccaacatccaccgagac

SEQ ID NO: 286309 - DNA, 21 bp, Artificial sequence
  SiRNA target sequence
tatccaacatccaccgagacg

SEQ ID NO: 286310 - DNA, 21 bp, Artificial sequence
  SiRNA target sequence
atccaacatccaccgagacgt

SEQ ID NO: 286311 - DNA, 21 bp, Artificial sequence
  SiRNA target sequence
tccaacatccaccgagacgtt

SEQ ID NO: 286312 - DNA, 21 bp, Artificial sequence
  SiRNA target sequence
ccaacatccaccgagacgtta

SEQ ID NO: 286313 - DNA, 21 bp, Artificial sequence
  SiRNA target sequence
caacatccaccgagacgttaa

SEQ ID NO: 286314 - DNA, 21 bp, Artificial sequence
  SiRNA target sequence
aacatccaccgagacgttaac

SEQ ID NO: 286315 - DNA, 21 bp, Artificial sequence
  SiRNA target sequence
acatccaccgagacgttaaca

SEQ ID NO: 286316 - DNA, 21 bp, Artificial sequence
  SiRNA target sequence
catccaccgagacgttaacac

SEQ ID NO: 286317 - DNA, 21 bp, Artificial sequence
  SiRNA target sequence
atccaccgagacgttaacaca

SEQ ID NO: 286318 - DNA, 21 bp, Artificial sequence
  SiRNA target sequence
tccaccgagacgttaacacaa

SEQ ID NO: 286319 - DNA, 21 bp, Artificial sequence
  SiRNA target sequence
ccaccgagacgttaacacaac

SEQ ID NO: 286320 - DNA, 21 bp, Artificial sequence
  SiRNA target sequence
caccgagacgttaacacaacc

SEQ ID NO: 286321 - DNA, 21 bp, Artificial sequence
  SiRNA target sequence
accgagacgttaacacaaccg

SEQ ID NO: 286322 - DNA, 21 bp, Artificial sequence
  SiRNA target sequence
ccgagacgttaacacaaccgg

SEQ ID NO: 286323 - DNA, 21 bp, Artificial sequence
  SiRNA target sequence
cgagacgttaacacaaccgga

SEQ ID NO: 286324 - DNA, 21 bp, Artificial sequence
  SiRNA target sequence
gagacgttaacacaaccggac

SEQ ID NO: 286325 - DNA, 21 bp, Artificial sequence
  SiRNA target sequence
agacgttaacacaaccggact

SEQ ID NO: 286326 - DNA, 21 bp, Artificial sequence
  SiRNA target sequence
gacgttaacacaaccggactt

SEQ ID NO: 286327 - DNA, 21 bp, Artificial sequence
  SiRNA target sequence
acgttaacacaaccggacttt

SEQ ID NO: 286328 - DNA, 21 bp, Artificial sequence
  SiRNA target sequence
cgttaacacaaccggactttg

SEQ ID NO: 286329 - DNA, 21 bp, Artificial sequence
  SiRNA target sequence
gttaacacaaccggactttgt

SEQ ID NO: 286330 - DNA, 21 bp, Artificial sequence
  SiRNA target sequence
ttaacacaaccggactttgtt

SEQ ID NO: 286331 - DNA, 21 bp, Artificial sequence
  SiRNA target sequence
taacacaaccggactttgtta

SEQ ID NO: 286332 - DNA, 21 bp, Artificial sequence
  SiRNA target sequence
aacacaaccggactttgttat

SEQ ID NO: 286333 - DNA, 21 bp, Artificial sequence
  SiRNA target sequence
acacaaccggactttgttatc

SEQ ID NO: 286334 - DNA, 21 bp, Artificial sequence
  SiRNA target sequence
cacaaccggactttgttatcc

SEQ ID NO: 286335 - DNA, 21 bp, Artificial sequence
  SiRNA target sequence
acaaccggactttgttatcct

SEQ ID NO: 286336 - DNA, 21 bp, Artificial sequence
  SiRNA target sequence
caaccggactttgttatcctc

SEQ ID NO: 286337 - DNA, 21 bp, Artificial sequence
  SiRNA target sequence
aaccggactttgttatcctct

SEQ ID NO: 286338 - DNA, 21 bp, Artificial sequence
  SiRNA target sequence
accggactttgttatcctctc

SEQ ID NO: 286339 - DNA, 21 bp, Artificial sequence
  SiRNA target sequence
ccggactttgttatcctctct

SEQ ID NO: 286340 - DNA, 21 bp, Artificial sequence
  SiRNA target sequence
cggactttgttatcctctctc

SEQ ID NO: 286341 - DNA, 21 bp, Artificial sequence
  SiRNA target sequence
ggactttgttatcctctctcc

SEQ ID NO: 286342 - DNA, 21 bp, Artificial sequence
  SiRNA target sequence
gactttgttatcctctctcca

SEQ ID NO: 286343 - DNA, 21 bp, Artificial sequence
  SiRNA target sequence
actttgttatcctctctccac

SEQ ID NO: 286344 - DNA, 21 bp, Artificial sequence
  SiRNA target sequence
ctttgttatcctctctccacc

SEQ ID NO: 286345 - DNA, 21 bp, Artificial sequence
  SiRNA target sequence
tttgttatcctctctccacct

SEQ ID NO: 286346 - DNA, 21 bp, Artificial sequence
  SiRNA target sequence
ttgttatcctctctccaccta

SEQ ID NO: 286347 - DNA, 21 bp, Artificial sequence
  SiRNA target sequence
tgttatcctctctccacctac

SEQ ID NO: 286348 - DNA, 21 bp, Artificial sequence
  SiRNA target sequence
gttatcctctctccacctact

SEQ ID NO: 286349 - DNA, 21 bp, Artificial sequence
  SiRNA target sequence
ttatcctctctccacctactg

SEQ ID NO: 286350 - DNA, 21 bp, Artificial sequence
  SiRNA target sequence
tatcctctctccacctactgc

SEQ ID NO: 286351 - DNA, 21 bp, Artificial sequence
  SiRNA target sequence
atcctctctccacctactgcg

SEQ ID NO: 286352 - DNA, 21 bp, Artificial sequence
  SiRNA target sequence
tcctctctccacctactgcgt

SEQ ID NO: 286353 - DNA, 21 bp, Artificial sequence
  SiRNA target sequence
cctctctccacctactgcgtc

SEQ ID NO: 286354 - DNA, 21 bp, Artificial sequence
  SiRNA target sequence
ctctctccacctactgcgtct

SEQ ID NO: 286355 - DNA, 21 bp, Artificial sequence
  SiRNA target sequence
tctctccacctactgcgtctt

SEQ ID NO: 286356 - DNA, 21 bp, Artificial sequence
  SiRNA target sequence
ctctccacctactgcgtcttt

SEQ ID NO: 286357 - DNA, 21 bp, Artificial sequence
  SiRNA target sequence
tctccacctactgcgtctttc

SEQ ID NO: 286358 - DNA, 21 bp, Artificial sequence
  SiRNA target sequence
ctccacctactgcgtctttcg

SEQ ID NO: 286359 - DNA, 21 bp, Artificial sequence
  SiRNA target sequence
tccacctactgcgtctttcgg

SEQ ID NO: 286360 - DNA, 21 bp, Artificial sequence
  SiRNA target sequence
ccacctactgcgtctttcggt

SEQ ID NO: 286361 - DNA, 21 bp, Artificial sequence
  SiRNA target sequence
cacctactgcgtctttcggtc

SEQ ID NO: 286362 - DNA, 21 bp, Artificial sequence
  SiRNA target sequence
acctactgcgtctttcggtcc

SEQ ID NO: 286363 - DNA, 21 bp, Artificial sequence
  SiRNA target sequence
cctactgcgtctttcggtccg

SEQ ID NO: 286364 - DNA, 21 bp, Artificial sequence
  SiRNA target sequence
ctactgcgtctttcggtccgg

SEQ ID NO: 286365 - DNA, 21 bp, Artificial sequence
  SiRNA target sequence
tactgcgtctttcggtccggt

SEQ ID NO: 286366 - DNA, 21 bp, Artificial sequence
  SiRNA target sequence
actgcgtctttcggtccggtt

SEQ ID NO: 286367 - DNA, 21 bp, Artificial sequence
  SiRNA target sequence
ctgcgtctttcggtccggtta

SEQ ID NO: 286368 - DNA, 21 bp, Artificial sequence
  SiRNA target sequence
tgcgtctttcggtccggttat

SEQ ID NO: 286369 - DNA, 21 bp, Artificial sequence
  SiRNA target sequence
gcgtctttcggtccggttatg

SEQ ID NO: 286370 - DNA, 21 bp, Artificial sequence
  SiRNA target sequence
cgtctttcggtccggttatgt

SEQ ID NO: 286371 - DNA, 21 bp, Artificial sequence
  SiRNA target sequence
gtctttcggtccggttatgtc

SEQ ID NO: 286372 - DNA, 21 bp, Artificial sequence
  SiRNA target sequence
tctttcggtccggttatgtcg

SEQ ID NO: 286373 - DNA, 21 bp, Artificial sequence
  SiRNA target sequence
ctttcggtccggttatgtcga

SEQ ID NO: 286374 - DNA, 21 bp, Artificial sequence
  SiRNA target sequence
tttcggtccggttatgtcgac

SEQ ID NO: 286375 - DNA, 21 bp, Artificial sequence
  SiRNA target sequence
ttcggtccggttatgtcgaca

SEQ ID NO: 286376 - DNA, 21 bp, Artificial sequence
  SiRNA target sequence
tcggtccggttatgtcgacag

SEQ ID NO: 286377 - DNA, 21 bp, Artificial sequence
  SiRNA target sequence
cggtccggttatgtcgacagc

SEQ ID NO: 286378 - DNA, 21 bp, Artificial sequence
  SiRNA target sequence
ggtccggttatgtcgacagcc

SEQ ID NO: 286379 - DNA, 21 bp, Artificial sequence
  SiRNA target sequence
gtccggttatgtcgacagcca

SEQ ID NO: 286380 - DNA, 21 bp, Artificial sequence
  SiRNA target sequence
tccggttatgtcgacagccac

SEQ ID NO: 286381 - DNA, 21 bp, Artificial sequence
  SiRNA target sequence
ccggttatgtcgacagccact

SEQ ID NO: 286382 - DNA, 21 bp, Artificial sequence
  SiRNA target sequence
cggttatgtcgacagccactc

SEQ ID NO: 286383 - DNA, 21 bp, Artificial sequence
  SiRNA target sequence
ggttatgtcgacagccactct

SEQ ID NO: 286384 - DNA, 21 bp, Artificial sequence
  SiRNA target sequence
gttatgtcgacagccactcta

SEQ ID NO: 286385 - DNA, 21 bp, Artificial sequence
  SiRNA target sequence
ttatgtcgacagccactctaa

SEQ ID NO: 286386 - DNA, 21 bp, Artificial sequence
  SiRNA target sequence
tatgtcgacagccactctaac

SEQ ID NO: 286387 - DNA, 21 bp, Artificial sequence
  SiRNA target sequence
atgtcgacagccactctaaca

SEQ ID NO: 286388 - DNA, 21 bp, Artificial sequence
  SiRNA target sequence
tgtcgacagccactctaacat

SEQ ID NO: 286389 - DNA, 21 bp, Artificial sequence
  SiRNA target sequence
gtcgacagccactctaacatc

SEQ ID NO: 286390 - DNA, 21 bp, Artificial sequence
  SiRNA target sequence
tcgacagccactctaacatct

SEQ ID NO: 286391 - DNA, 21 bp, Artificial sequence
  SiRNA target sequence
cgacagccactctaacatctc

SEQ ID NO: 286392 - DNA, 21 bp, Artificial sequence
  SiRNA target sequence
gacagccactctaacatctca

SEQ ID NO: 286393 - DNA, 21 bp, Artificial sequence
  SiRNA target sequence
acagccactctaacatctcac

SEQ ID NO: 286394 - DNA, 21 bp, Artificial sequence
  SiRNA target sequence
cagccactctaacatctcaca

SEQ ID NO: 286395 - DNA, 21 bp, Artificial sequence
  SiRNA target sequence
agccactctaacatctcacag

SEQ ID NO: 286396 - DNA, 21 bp, Artificial sequence
  SiRNA target sequence
gccactctaacatctcacagg

SEQ ID NO: 286397 - DNA, 21 bp, Artificial sequence
  SiRNA target sequence
ccactctaacatctcacaggc

SEQ ID NO: 286398 - DNA, 21 bp, Artificial sequence
  SiRNA target sequence
cactctaacatctcacaggct

SEQ ID NO: 286399 - DNA, 21 bp, Artificial sequence
  SiRNA target sequence
actctaacatctcacaggctg

SEQ ID NO: 286400 - DNA, 21 bp, Artificial sequence
  SiRNA target sequence
ctctaacatctcacaggctgt

SEQ ID NO: 286401 - DNA, 21 bp, Artificial sequence
  SiRNA target sequence
tctaacatctcacaggctgtc

SEQ ID NO: 286402 - DNA, 21 bp, Artificial sequence
  SiRNA target sequence
ctaacatctcacaggctgtca

SEQ ID NO: 286403 - DNA, 21 bp, Artificial sequence
  SiRNA target sequence
taacatctcacaggctgtcac

SEQ ID NO: 286404 - DNA, 21 bp, Artificial sequence
  SiRNA target sequence
aacatctcacaggctgtcact

SEQ ID NO: 286405 - DNA, 21 bp, Artificial sequence
  SiRNA target sequence
acatctcacaggctgtcactt

SEQ ID NO: 286406 - DNA, 21 bp, Artificial sequence
  SiRNA target sequence
catctcacaggctgtcacttg

SEQ ID NO: 286407 - DNA, 21 bp, Artificial sequence
  SiRNA target sequence
atctcacaggctgtcacttgt

SEQ ID NO: 286408 - DNA, 21 bp, Artificial sequence
  SiRNA target sequence
tctcacaggctgtcacttgtg

SEQ ID NO: 286409 - DNA, 21 bp, Artificial sequence
  SiRNA target sequence
ctcacaggctgtcacttgtga

SEQ ID NO: 286410 - DNA, 21 bp, Artificial sequence
  SiRNA target sequence
tcacaggctgtcacttgtgat

SEQ ID NO: 286411 - DNA, 21 bp, Artificial sequence
  SiRNA target sequence
cacaggctgtcacttgtgatc

SEQ ID NO: 286412 - DNA, 21 bp, Artificial sequence
  SiRNA target sequence
acaggctgtcacttgtgatcc

SEQ ID NO: 286413 - DNA, 21 bp, Artificial sequence
  SiRNA target sequence
caggctgtcacttgtgatcca

SEQ ID NO: 286414 - DNA, 21 bp, Artificial sequence
  SiRNA target sequence
aggctgtcacttgtgatccat

SEQ ID NO: 286415 - DNA, 21 bp, Artificial sequence
  SiRNA target sequence
ggctgtcacttgtgatccatt

SEQ ID NO: 286416 - DNA, 21 bp, Artificial sequence
  SiRNA target sequence
gctgtcacttgtgatccattt

SEQ ID NO: 286417 - DNA, 21 bp, Artificial sequence
  SiRNA target sequence
ctgtcacttgtgatccattta

SEQ ID NO: 286418 - DNA, 21 bp, Artificial sequence
  SiRNA target sequence
tgtcacttgtgatccatttaa

SEQ ID NO: 286419 - DNA, 21 bp, Artificial sequence
  SiRNA target sequence
gtcacttgtgatccatttaag

SEQ ID NO: 286420 - DNA, 21 bp, Artificial sequence
  SiRNA target sequence
tcacttgtgatccatttaaga

SEQ ID NO: 286421 - DNA, 21 bp, Artificial sequence
  SiRNA target sequence
cacttgtgatccatttaagat

SEQ ID NO: 286422 - DNA, 21 bp, Artificial sequence
  SiRNA target sequence
acttgtgatccatttaagatg

SEQ ID NO: 286423 - DNA, 21 bp, Artificial sequence
  SiRNA target sequence
cttgtgatccatttaagatga

SEQ ID NO: 286424 - DNA, 21 bp, Artificial sequence
  SiRNA target sequence
ttgtgatccatttaagatgac

SEQ ID NO: 286425 - DNA, 21 bp, Artificial sequence
  SiRNA target sequence
tgtgatccatttaagatgacg

SEQ ID NO: 286426 - DNA, 21 bp, Artificial sequence
  SiRNA target sequence
gtgatccatttaagatgacga

SEQ ID NO: 286427 - DNA, 21 bp, Artificial sequence
  SiRNA target sequence
tgatccatttaagatgacgac

SEQ ID NO: 286428 - DNA, 21 bp, Artificial sequence
  SiRNA target sequence
gatccatttaagatgacgacg

SEQ ID NO: 286429 - DNA, 21 bp, Artificial sequence
  SiRNA target sequence
atccatttaagatgacgacgc

SEQ ID NO: 286430 - DNA, 21 bp, Artificial sequence
  SiRNA target sequence
tccatttaagatgacgacgca

SEQ ID NO: 286431 - DNA, 21 bp, Artificial sequence
  SiRNA target sequence
ccatttaagatgacgacgcag

SEQ ID NO: 286432 - DNA, 21 bp, Artificial sequence
  SiRNA target sequence
catttaagatgacgacgcagt

SEQ ID NO: 286433 - DNA, 21 bp, Artificial sequence
  SiRNA target sequence
atttaagatgacgacgcagta

SEQ ID NO: 286434 - DNA, 21 bp, Artificial sequence
  SiRNA target sequence
tttaagatgacgacgcagtat

SEQ ID NO: 286435 - DNA, 21 bp, Artificial sequence
  SiRNA target sequence
ttaagatgacgacgcagtata

SEQ ID NO: 286436 - DNA, 21 bp, Artificial sequence
  SiRNA target sequence
taagatgacgacgcagtataa

SEQ ID NO: 286437 - DNA, 21 bp, Artificial sequence
  SiRNA target sequence
aagatgacgacgcagtataac

SEQ ID NO: 286438 - DNA, 21 bp, Artificial sequence
  SiRNA target sequence
agatgacgacgcagtataaca

SEQ ID NO: 286439 - DNA, 21 bp, Artificial sequence
  SiRNA target sequence
gatgacgacgcagtataacat

SEQ ID NO: 286440 - DNA, 21 bp, Artificial sequence
  SiRNA target sequence
atgacgacgcagtataacatc

SEQ ID NO: 286441 - DNA, 21 bp, Artificial sequence
  SiRNA target sequence
tgacgacgcagtataacatcc

SEQ ID NO: 286442 - DNA, 21 bp, Artificial sequence
  SiRNA target sequence
gacgacgcagtataacatccc

SEQ ID NO: 286443 - DNA, 21 bp, Artificial sequence
  SiRNA target sequence
acgacgcagtataacatccct

SEQ ID NO: 286444 - DNA, 21 bp, Artificial sequence
  SiRNA target sequence
cgacgcagtataacatccctg

SEQ ID NO: 286445 - DNA, 21 bp, Artificial sequence
  SiRNA target sequence
gacgcagtataacatccctgg

SEQ ID NO: 286446 - DNA, 21 bp, Artificial sequence
  SiRNA target sequence
acgcagtataacatccctggg

SEQ ID NO: 286447 - DNA, 21 bp, Artificial sequence
  SiRNA target sequence
cgcagtataacatccctgggt

SEQ ID NO: 286448 - DNA, 21 bp, Artificial sequence
  SiRNA target sequence
gcagtataacatccctgggta

SEQ ID NO: 286449 - DNA, 21 bp, Artificial sequence
  SiRNA target sequence
cagtataacatccctgggtat

SEQ ID NO: 286450 - DNA, 21 bp, Artificial sequence
  SiRNA target sequence
agtataacatccctgggtatt

SEQ ID NO: 286451 - DNA, 21 bp, Artificial sequence
  SiRNA target sequence
gtataacatccctgggtattc

SEQ ID NO: 286452 - DNA, 21 bp, Artificial sequence
  SiRNA target sequence
tataacatccctgggtattcc

SEQ ID NO: 286453 - DNA, 21 bp, Artificial sequence
  SiRNA target sequence
ataacatccctgggtattcct

SEQ ID NO: 286454 - DNA, 21 bp, Artificial sequence
  SiRNA target sequence
taacatccctgggtattcctg

SEQ ID NO: 286455 - DNA, 21 bp, Artificial sequence
  SiRNA target sequence
aacatccctgggtattcctgg

SEQ ID NO: 286456 - DNA, 21 bp, Artificial sequence
  SiRNA target sequence
acatccctgggtattcctggc

SEQ ID NO: 286457 - DNA, 21 bp, Artificial sequence
  SiRNA target sequence
catccctgggtattcctggct

SEQ ID NO: 286458 - DNA, 21 bp, Artificial sequence
  SiRNA target sequence
atccctgggtattcctggctc

SEQ ID NO: 286459 - DNA, 21 bp, Artificial sequence
  SiRNA target sequence
tccctgggtattcctggctca

SEQ ID NO: 286460 - DNA, 21 bp, Artificial sequence
  SiRNA target sequence
ccctgggtattcctggctcaa

SEQ ID NO: 286461 - DNA, 21 bp, Artificial sequence
  SiRNA target sequence
cctgggtattcctggctcaag

SEQ ID NO: 286462 - DNA, 21 bp, Artificial sequence
  SiRNA target sequence
ctgggtattcctggctcaaga

SEQ ID NO: 286463 - DNA, 21 bp, Artificial sequence
  SiRNA target sequence
tgggtattcctggctcaagaa

SEQ ID NO: 286464 - DNA, 21 bp, Artificial sequence
  SiRNA target sequence
gggtattcctggctcaagaag

SEQ ID NO: 286465 - DNA, 21 bp, Artificial sequence
  SiRNA target sequence
ggtattcctggctcaagaagg

SEQ ID NO: 286466 - DNA, 21 bp, Artificial sequence
  SiRNA target sequence
gtattcctggctcaagaaggc

SEQ ID NO: 286467 - DNA, 21 bp, Artificial sequence
  SiRNA target sequence
tattcctggctcaagaaggca

SEQ ID NO: 286468 - DNA, 21 bp, Artificial sequence
  SiRNA target sequence
attcctggctcaagaaggcaa

SEQ ID NO: 286469 - DNA, 21 bp, Artificial sequence
  SiRNA target sequence
ttcctggctcaagaaggcaat

SEQ ID NO: 286470 - DNA, 21 bp, Artificial sequence
  SiRNA target sequence
tcctggctcaagaaggcaatc

SEQ ID NO: 286471 - DNA, 21 bp, Artificial sequence
  SiRNA target sequence
cctggctcaagaaggcaatct

SEQ ID NO: 286472 - DNA, 21 bp, Artificial sequence
  SiRNA target sequence
ctggctcaagaaggcaatctt

SEQ ID NO: 286473 - DNA, 21 bp, Artificial sequence
  SiRNA target sequence
tggctcaagaaggcaatcttg

SEQ ID NO: 286474 - DNA, 21 bp, Artificial sequence
  SiRNA target sequence
ggctcaagaaggcaatcttgt

SEQ ID NO: 286475 - DNA, 21 bp, Artificial sequence
  SiRNA target sequence
gctcaagaaggcaatcttgtt

SEQ ID NO: 286476 - DNA, 21 bp, Artificial sequence
  SiRNA target sequence
ctcaagaaggcaatcttgttt

SEQ ID NO: 286477 - DNA, 21 bp, Artificial sequence
  SiRNA target sequence
tcaagaaggcaatcttgtttt

SEQ ID NO: 286478 - DNA, 21 bp, Artificial sequence
  SiRNA target sequence
caagaaggcaatcttgttttt

SEQ ID NO: 286479 - DNA, 21 bp, Artificial sequence
  SiRNA target sequence
aagaaggcaatcttgtttttt

SEQ ID NO: 286480 - DNA, 21 bp, Artificial sequence
  SiRNA target sequence
agaaggcaatcttgtttttta

SEQ ID NO: 286481 - DNA, 21 bp, Artificial sequence
  SiRNA target sequence
gaaggcaatcttgttttttat

SEQ ID NO: 286482 - DNA, 21 bp, Artificial sequence
  SiRNA target sequence
aaggcaatcttgttttttatt

SEQ ID NO: 286483 - DNA, 21 bp, Artificial sequence
  SiRNA target sequence
aggcaatcttgttttttattg

SEQ ID NO: 286484 - DNA, 21 bp, Artificial sequence
  SiRNA target sequence
ggcaatcttgttttttattga

SEQ ID NO: 286485 - DNA, 21 bp, Artificial sequence
  SiRNA target sequence
gcaatcttgttttttattgag

SEQ ID NO: 286486 - DNA, 21 bp, Artificial sequence
  SiRNA target sequence
caatcttgttttttattgagt

SEQ ID NO: 286487 - DNA, 21 bp, Artificial sequence
  SiRNA target sequence
aatcttgttttttattgagtc

SEQ ID NO: 286488 - DNA, 21 bp, Artificial sequence
  SiRNA target sequence
atcttgttttttattgagtca

SEQ ID NO: 286489 - DNA, 21 bp, Artificial sequence
  SiRNA target sequence
tcttgttttttattgagtcag

SEQ ID NO: 286490 - DNA, 21 bp, Artificial sequence
  SiRNA target sequence
cttgttttttattgagtcagt

SEQ ID NO: 286491 - DNA, 21 bp, Artificial sequence
  SiRNA target sequence
ttgttttttattgagtcagtc

SEQ ID NO: 286492 - DNA, 21 bp, Artificial sequence
  SiRNA target sequence
tgttttttattgagtcagtcg

SEQ ID NO: 286493 - DNA, 21 bp, Artificial sequence
  SiRNA target sequence
gttttttattgagtcagtcgt

SEQ ID NO: 286494 - DNA, 21 bp, Artificial sequence
  SiRNA target sequence
ttttttattgagtcagtcgtt

SEQ ID NO: 286495 - DNA, 21 bp, Artificial sequence
  SiRNA target sequence
tttttattgagtcagtcgttg

SEQ ID NO: 286496 - DNA, 21 bp, Artificial sequence
  SiRNA target sequence
ttttattgagtcagtcgttga

SEQ ID NO: 286497 - DNA, 21 bp, Artificial sequence
  SiRNA target sequence
tttattgagtcagtcgttgac

SEQ ID NO: 286498 - DNA, 21 bp, Artificial sequence
  SiRNA target sequence
ttattgagtcagtcgttgaca

SEQ ID NO: 286499 - DNA, 21 bp, Artificial sequence
  SiRNA target sequence
tattgagtcagtcgttgacac

SEQ ID NO: 286500 - DNA, 21 bp, Artificial sequence
  SiRNA target sequence
attgagtcagtcgttgacact

SEQ ID NO: 286501 - DNA, 21 bp, Artificial sequence
  SiRNA target sequence
ttgagtcagtcgttgacactc

SEQ ID NO: 286502 - DNA, 21 bp, Artificial sequence
  SiRNA target sequence
tgagtcagtcgttgacactct

SEQ ID NO: 286503 - DNA, 21 bp, Artificial sequence
  SiRNA target sequence
gagtcagtcgttgacactctc

SEQ ID NO: 286504 - DNA, 21 bp, Artificial sequence
  SiRNA target sequence
agtcagtcgttgacactctca

SEQ ID NO: 286505 - DNA, 21 bp, Artificial sequence
  SiRNA target sequence
gtcagtcgttgacactctcat

SEQ ID NO: 286506 - DNA, 21 bp, Artificial sequence
  SiRNA target sequence
tcagtcgttgacactctcatt

SEQ ID NO: 286507 - DNA, 21 bp, Artificial sequence
  SiRNA target sequence
cagtcgttgacactctcattt

SEQ ID NO: 286508 - DNA, 21 bp, Artificial sequence
  SiRNA target sequence
agtcgttgacactctcatttc

SEQ ID NO: 286509 - DNA, 21 bp, Artificial sequence
  SiRNA target sequence
gtcgttgacactctcatttcc

SEQ ID NO: 286510 - DNA, 21 bp, Artificial sequence
  SiRNA target sequence
tcgttgacactctcatttcca

SEQ ID NO: 286511 - DNA, 21 bp, Artificial sequence
  SiRNA target sequence
cgttgacactctcatttccat

SEQ ID NO: 286512 - DNA, 21 bp, Artificial sequence
  SiRNA target sequence
gttgacactctcatttccatc

SEQ ID NO: 286513 - DNA, 21 bp, Artificial sequence
  SiRNA target sequence
ttgacactctcatttccatca

SEQ ID NO: 286514 - DNA, 21 bp, Artificial sequence
  SiRNA target sequence
tgacactctcatttccatcat

SEQ ID NO: 286515 - DNA, 21 bp, Artificial sequence
  SiRNA target sequence
gacactctcatttccatcata

SEQ ID NO: 286516 - DNA, 21 bp, Artificial sequence
  SiRNA target sequence
acactctcatttccatcatat

SEQ ID NO: 286517 - DNA, 21 bp, Artificial sequence
  SiRNA target sequence
cactctcatttccatcatatt

SEQ ID NO: 286518 - DNA, 21 bp, Artificial sequence
  SiRNA target sequence
actctcatttccatcatattg

SEQ ID NO: 286519 - DNA, 21 bp, Artificial sequence
  SiRNA target sequence
ctctcatttccatcatattgt

SEQ ID NO: 286520 - DNA, 21 bp, Artificial sequence
  SiRNA target sequence
tctcatttccatcatattgtc

SEQ ID NO: 286521 - DNA, 21 bp, Artificial sequence
  SiRNA target sequence
ctcatttccatcatattgtct

SEQ ID NO: 286522 - DNA, 21 bp, Artificial sequence
  SiRNA target sequence
tcatttccatcatattgtctc

SEQ ID NO: 286523 - DNA, 21 bp, Artificial sequence
  SiRNA target sequence
catttccatcatattgtctct

SEQ ID NO: 286524 - DNA, 21 bp, Artificial sequence
  SiRNA target sequence
atttccatcatattgtctctc

SEQ ID NO: 286525 - DNA, 21 bp, Artificial sequence
  SiRNA target sequence
tttccatcatattgtctctct

SEQ ID NO: 286526 - DNA, 21 bp, Artificial sequence
  SiRNA target sequence
ttccatcatattgtctctctt

SEQ ID NO: 286527 - DNA, 21 bp, Artificial sequence
  SiRNA target sequence
tccatcatattgtctctcttt

SEQ ID NO: 286528 - DNA, 21 bp, Artificial sequence
  SiRNA target sequence
ccatcatattgtctctctttg

SEQ ID NO: 286529 - DNA, 21 bp, Artificial sequence
  SiRNA target sequence
catcatattgtctctctttga

SEQ ID NO: 286530 - DNA, 21 bp, Artificial sequence
  SiRNA target sequence
atcatattgtctctctttgat

SEQ ID NO: 286531 - DNA, 21 bp, Artificial sequence
  SiRNA target sequence
tcatattgtctctctttgatg

SEQ ID NO: 286532 - DNA, 21 bp, Artificial sequence
  SiRNA target sequence
catattgtctctctttgatga

SEQ ID NO: 286533 - DNA, 21 bp, Artificial sequence
  SiRNA target sequence
atattgtctctctttgatgag

SEQ ID NO: 286534 - DNA, 21 bp, Artificial sequence
  SiRNA target sequence
tattgtctctctttgatgagt

SEQ ID NO: 286535 - DNA, 21 bp, Artificial sequence
  SiRNA target sequence
attgtctctctttgatgagtt

SEQ ID NO: 286536 - DNA, 21 bp, Artificial sequence
  SiRNA target sequence
ttgtctctctttgatgagttc

SEQ ID NO: 286537 - DNA, 21 bp, Artificial sequence
  SiRNA target sequence
tgtctctctttgatgagttct

SEQ ID NO: 286538 - DNA, 21 bp, Artificial sequence
  SiRNA target sequence
gtctctctttgatgagttctt

SEQ ID NO: 286539 - DNA, 21 bp, Artificial sequence
  SiRNA target sequence
tctctctttgatgagttctta

SEQ ID NO: 286540 - DNA, 21 bp, Artificial sequence
  SiRNA target sequence
ctctctttgatgagttcttat

SEQ ID NO: 286541 - DNA, 21 bp, Artificial sequence
  SiRNA target sequence
tctctttgatgagttcttatc

SEQ ID NO: 286542 - DNA, 21 bp, Artificial sequence
  SiRNA target sequence
ctctttgatgagttcttatct

SEQ ID NO: 286543 - DNA, 21 bp, Artificial sequence
  SiRNA target sequence
tctttgatgagttcttatctt

SEQ ID NO: 286544 - DNA, 21 bp, Artificial sequence
  SiRNA target sequence
ctttgatgagttcttatcttt

SEQ ID NO: 286545 - DNA, 21 bp, Artificial sequence
  SiRNA target sequence
tttgatgagttcttatcttta

SEQ ID NO: 286546 - DNA, 21 bp, Artificial sequence
  SiRNA target sequence
ttgatgagttcttatctttac

SEQ ID NO: 286547 - DNA, 21 bp, Artificial sequence
  SiRNA target sequence
tgatgagttcttatctttact

SEQ ID NO: 286548 - DNA, 21 bp, Artificial sequence
  SiRNA target sequence
gatgagttcttatctttactg

SEQ ID NO: 286549 - DNA, 21 bp, Artificial sequence
  SiRNA target sequence
atgagttcttatctttactga

SEQ ID NO: 286550 - DNA, 21 bp, Artificial sequence
  SiRNA target sequence
tgagttcttatctttactgag

SEQ ID NO: 286551 - DNA, 21 bp, Artificial sequence
  SiRNA target sequence
gagttcttatctttactgagg

SEQ ID NO: 286552 - DNA, 21 bp, Artificial sequence
  SiRNA target sequence
agttcttatctttactgagga

SEQ ID NO: 286553 - DNA, 21 bp, Artificial sequence
  SiRNA target sequence
gttcttatctttactgaggac

SEQ ID NO: 286554 - DNA, 21 bp, Artificial sequence
  SiRNA target sequence
ttcttatctttactgaggact

SEQ ID NO: 286555 - DNA, 21 bp, Artificial sequence
  SiRNA target sequence
tcttatctttactgaggactc

SEQ ID NO: 286556 - DNA, 21 bp, Artificial sequence
  SiRNA target sequence
cttatctttactgaggactct

SEQ ID NO: 286557 - DNA, 21 bp, Artificial sequence
  SiRNA target sequence
ttatctttactgaggactctc

SEQ ID NO: 286558 - DNA, 21 bp, Artificial sequence
  SiRNA target sequence
tatctttactgaggactctca

SEQ ID NO: 286559 - DNA, 21 bp, Artificial sequence
  SiRNA target sequence
atctttactgaggactctcaa

SEQ ID NO: 286560 - DNA, 21 bp, Artificial sequence
  SiRNA target sequence
tctttactgaggactctcaat

SEQ ID NO: 286561 - DNA, 21 bp, Artificial sequence
  SiRNA target sequence
ctttactgaggactctcaatg

SEQ ID NO: 286562 - DNA, 21 bp, Artificial sequence
  SiRNA target sequence
tttactgaggactctcaatga

SEQ ID NO: 286563 - DNA, 21 bp, Artificial sequence
  SiRNA target sequence
ttactgaggactctcaatgag

SEQ ID NO: 286564 - DNA, 21 bp, Artificial sequence
  SiRNA target sequence
tactgaggactctcaatgaga

SEQ ID NO: 286565 - DNA, 21 bp, Artificial sequence
  SiRNA target sequence
actgaggactctcaatgagaa

SEQ ID NO: 286566 - DNA, 21 bp, Artificial sequence
  SiRNA target sequence
ctgaggactctcaatgagaag

SEQ ID NO: 286567 - DNA, 21 bp, Artificial sequence
  SiRNA target sequence
tgaggactctcaatgagaagt

SEQ ID NO: 286568 - DNA, 21 bp, Artificial sequence
  SiRNA target sequence
gaggactctcaatgagaagta

SEQ ID NO: 286569 - DNA, 21 bp, Artificial sequence
  SiRNA target sequence
aggactctcaatgagaagtac

SEQ ID NO: 286570 - DNA, 21 bp, Artificial sequence
  SiRNA target sequence
ggactctcaatgagaagtacc

SEQ ID NO: 286571 - DNA, 21 bp, Artificial sequence
  SiRNA target sequence
gactctcaatgagaagtaccg

SEQ ID NO: 286572 - DNA, 21 bp, Artificial sequence
  SiRNA target sequence
actctcaatgagaagtaccgt

SEQ ID NO: 286573 - DNA, 21 bp, Artificial sequence
  SiRNA target sequence
ctctcaatgagaagtaccgtg

SEQ ID NO: 286574 - DNA, 21 bp, Artificial sequence
  SiRNA target sequence
tctcaatgagaagtaccgtgt

SEQ ID NO: 286575 - DNA, 21 bp, Artificial sequence
  SiRNA target sequence
ctcaatgagaagtaccgtgtc

SEQ ID NO: 286576 - DNA, 21 bp, Artificial sequence
  SiRNA target sequence
tcaatgagaagtaccgtgtct

SEQ ID NO: 286577 - DNA, 21 bp, Artificial sequence
  SiRNA target sequence
caatgagaagtaccgtgtctt

SEQ ID NO: 286578 - DNA, 21 bp, Artificial sequence
  SiRNA target sequence
aatgagaagtaccgtgtcttc

SEQ ID NO: 286579 - DNA, 21 bp, Artificial sequence
  SiRNA target sequence
atgagaagtaccgtgtcttcg

SEQ ID NO: 286580 - DNA, 21 bp, Artificial sequence
  SiRNA target sequence
tgagaagtaccgtgtcttcga

SEQ ID NO: 286581 - DNA, 21 bp, Artificial sequence
  SiRNA target sequence
gagaagtaccgtgtcttcgaa

SEQ ID NO: 286582 - DNA, 21 bp, Artificial sequence
  SiRNA target sequence
agaagtaccgtgtcttcgaat

SEQ ID NO: 286583 - DNA, 21 bp, Artificial sequence
  SiRNA target sequence
gaagtaccgtgtcttcgaata

SEQ ID NO: 286584 - DNA, 21 bp, Artificial sequence
  SiRNA target sequence
aagtaccgtgtcttcgaatac

SEQ ID NO: 286585 - DNA, 21 bp, Artificial sequence
  SiRNA target sequence
agtaccgtgtcttcgaatacc

SEQ ID NO: 286586 - DNA, 21 bp, Artificial sequence
  SiRNA target sequence
gtaccgtgtcttcgaatacct

SEQ ID NO: 286587 - DNA, 21 bp, Artificial sequence
  SiRNA target sequence
taccgtgtcttcgaatacctc

SEQ ID NO: 286588 - DNA, 21 bp, Artificial sequence
  SiRNA target sequence
accgtgtcttcgaatacctcg

SEQ ID NO: 286589 - DNA, 21 bp, Artificial sequence
  SiRNA target sequence
ccgtgtcttcgaatacctcgc

SEQ ID NO: 286590 - DNA, 21 bp, Artificial sequence
  SiRNA target sequence
cgtgtcttcgaatacctcgct

SEQ ID NO: 286591 - DNA, 21 bp, Artificial sequence
  SiRNA target sequence
gtgtcttcgaatacctcgctc

SEQ ID NO: 286592 - DNA, 21 bp, Artificial sequence
  SiRNA target sequence
tgtcttcgaatacctcgctct

SEQ ID NO: 286593 - DNA, 21 bp, Artificial sequence
  SiRNA target sequence
gtcttcgaatacctcgctctc

SEQ ID NO: 286594 - DNA, 21 bp, Artificial sequence
  SiRNA target sequence
tcttcgaatacctcgctctca

SEQ ID NO: 286595 - DNA, 21 bp, Artificial sequence
  SiRNA target sequence
cttcgaatacctcgctctcat

SEQ ID NO: 286596 - DNA, 21 bp, Artificial sequence
  SiRNA target sequence
ttcgaatacctcgctctcatt

SEQ ID NO: 286597 - DNA, 21 bp, Artificial sequence
  SiRNA target sequence
tcgaatacctcgctctcattg

SEQ ID NO: 286598 - DNA, 21 bp, Artificial sequence
  SiRNA target sequence
cgaatacctcgctctcattgg

SEQ ID NO: 286599 - DNA, 21 bp, Artificial sequence
  SiRNA target sequence
gaatacctcgctctcattggg

SEQ ID NO: 286600 - DNA, 21 bp, Artificial sequence
  SiRNA target sequence
aatacctcgctctcattgggt

SEQ ID NO: 286601 - DNA, 21 bp, Artificial sequence
  SiRNA target sequence
atacctcgctctcattgggtt

SEQ ID NO: 286602 - DNA, 21 bp, Artificial sequence
  SiRNA target sequence
tacctcgctctcattgggttc

SEQ ID NO: 286603 - DNA, 21 bp, Artificial sequence
  SiRNA target sequence
acctcgctctcattgggttct

SEQ ID NO: 286604 - DNA, 21 bp, Artificial sequence
  SiRNA target sequence
cctcgctctcattgggttctg

SEQ ID NO: 286605 - DNA, 21 bp, Artificial sequence
  SiRNA target sequence
ctcgctctcattgggttctgc

SEQ ID NO: 286606 - DNA, 21 bp, Artificial sequence
  SiRNA target sequence
tcgctctcattgggttctgcc

SEQ ID NO: 286607 - DNA, 21 bp, Artificial sequence
  SiRNA target sequence
cgctctcattgggttctgcct

SEQ ID NO: 286608 - DNA, 21 bp, Artificial sequence
  SiRNA target sequence
gctctcattgggttctgcctc

SEQ ID NO: 286609 - DNA, 21 bp, Artificial sequence
  SiRNA target sequence
ctctcattgggttctgcctct

SEQ ID NO: 286610 - DNA, 21 bp, Artificial sequence
  SiRNA target sequence
tctcattgggttctgcctctg

SEQ ID NO: 286611 - DNA, 21 bp, Artificial sequence
  SiRNA target sequence
ctcattgggttctgcctctgg

SEQ ID NO: 286612 - DNA, 21 bp, Artificial sequence
  SiRNA target sequence
tcattgggttctgcctctggc

SEQ ID NO: 286613 - DNA, 21 bp, Artificial sequence
  SiRNA target sequence
cattgggttctgcctctggcg

SEQ ID NO: 286614 - DNA, 21 bp, Artificial sequence
  SiRNA target sequence
attgggttctgcctctggcgt

SEQ ID NO: 286615 - DNA, 21 bp, Artificial sequence
  SiRNA target sequence
ttgggttctgcctctggcgtt

SEQ ID NO: 286616 - DNA, 21 bp, Artificial sequence
  SiRNA target sequence
tgggttctgcctctggcgttt

SEQ ID NO: 286617 - DNA, 21 bp, Artificial sequence
  SiRNA target sequence
gggttctgcctctggcgtttc

SEQ ID NO: 286618 - DNA, 21 bp, Artificial sequence
  SiRNA target sequence
ggttctgcctctggcgtttcc

SEQ ID NO: 286619 - DNA, 21 bp, Artificial sequence
  SiRNA target sequence
gttctgcctctggcgtttcca

SEQ ID NO: 286620 - DNA, 21 bp, Artificial sequence
  SiRNA target sequence
ttctgcctctggcgtttccag

SEQ ID NO: 286621 - DNA, 21 bp, Artificial sequence
  SiRNA target sequence
tctgcctctggcgtttccaga

SEQ ID NO: 286622 - DNA, 21 bp, Artificial sequence
  SiRNA target sequence
ctgcctctggcgtttccagaa

SEQ ID NO: 286623 - DNA, 21 bp, Artificial sequence
  SiRNA target sequence
tgcctctggcgtttccagaac

SEQ ID NO: 286624 - DNA, 21 bp, Artificial sequence
  SiRNA target sequence
gcctctggcgtttccagaacc

SEQ ID NO: 286625 - DNA, 21 bp, Artificial sequence
  SiRNA target sequence
cctctggcgtttccagaaccc

SEQ ID NO: 286626 - DNA, 21 bp, Artificial sequence
  SiRNA target sequence
ctctggcgtttccagaacccc

SEQ ID NO: 286627 - DNA, 21 bp, Artificial sequence
  SiRNA target sequence
tctggcgtttccagaacccct

SEQ ID NO: 286628 - DNA, 21 bp, Artificial sequence
  SiRNA target sequence
ctggcgtttccagaacccctg

SEQ ID NO: 286629 - DNA, 21 bp, Artificial sequence
  SiRNA target sequence
tggcgtttccagaacccctgg

SEQ ID NO: 286630 - DNA, 21 bp, Artificial sequence
  SiRNA target sequence
ggcgtttccagaacccctggc

SEQ ID NO: 286631 - DNA, 21 bp, Artificial sequence
  SiRNA target sequence
gcgtttccagaacccctggcc

SEQ ID NO: 286632 - DNA, 21 bp, Artificial sequence
  SiRNA target sequence
cgtttccagaacccctggcca

SEQ ID NO: 286633 - DNA, 21 bp, Artificial sequence
  SiRNA target sequence
gtttccagaacccctggccaa

SEQ ID NO: 286634 - DNA, 21 bp, Artificial sequence
  SiRNA target sequence
tttccagaacccctggccaac

SEQ ID NO: 286635 - DNA, 21 bp, Artificial sequence
  SiRNA target sequence
ttccagaacccctggccaact

SEQ ID NO: 286636 - DNA, 21 bp, Artificial sequence
  SiRNA target sequence
tccagaacccctggccaactg

SEQ ID NO: 286637 - DNA, 21 bp, Artificial sequence
  SiRNA target sequence
ccagaacccctggccaactgt

SEQ ID NO: 286638 - DNA, 21 bp, Artificial sequence
  SiRNA target sequence
cagaacccctggccaactgta

SEQ ID NO: 286639 - DNA, 21 bp, Artificial sequence
  SiRNA target sequence
agaacccctggccaactgtat

SEQ ID NO: 286640 - DNA, 21 bp, Artificial sequence
  SiRNA target sequence
gaacccctggccaactgtatc

SEQ ID NO: 286641 - DNA, 21 bp, Artificial sequence
  SiRNA target sequence
aacccctggccaactgtatca

SEQ ID NO: 286642 - DNA, 21 bp, Artificial sequence
  SiRNA target sequence
acccctggccaactgtatcaa

SEQ ID NO: 286643 - DNA, 21 bp, Artificial sequence
  SiRNA target sequence
cccctggccaactgtatcaat

SEQ ID NO: 286644 - DNA, 21 bp, Artificial sequence
  SiRNA target sequence
ccctggccaactgtatcaatt

SEQ ID NO: 286645 - DNA, 21 bp, Artificial sequence
  SiRNA target sequence
cctggccaactgtatcaattg

SEQ ID NO: 286646 - DNA, 21 bp, Artificial sequence
  SiRNA target sequence
ctggccaactgtatcaattgt

SEQ ID NO: 286647 - DNA, 21 bp, Artificial sequence
  SiRNA target sequence
tggccaactgtatcaattgtt

SEQ ID NO: 286648 - DNA, 21 bp, Artificial sequence
  SiRNA target sequence
ggccaactgtatcaattgttg

SEQ ID NO: 286649 - DNA, 21 bp, Artificial sequence
  SiRNA target sequence
gccaactgtatcaattgttgg

SEQ ID NO: 286650 - DNA, 21 bp, Artificial sequence
  SiRNA target sequence
ccaactgtatcaattgttggc

SEQ ID NO: 286651 - DNA, 21 bp, Artificial sequence
  SiRNA target sequence
caactgtatcaattgttggct

SEQ ID NO: 286652 - DNA, 21 bp, Artificial sequence
  SiRNA target sequence
aactgtatcaattgttggctt

SEQ ID NO: 286653 - DNA, 21 bp, Artificial sequence
  SiRNA target sequence
actgtatcaattgttggcttc

SEQ ID NO: 286654 - DNA, 21 bp, Artificial sequence
  SiRNA target sequence
ctgtatcaattgttggcttca

SEQ ID NO: 286655 - DNA, 21 bp, Artificial sequence
  SiRNA target sequence
tgtatcaattgttggcttcac

SEQ ID NO: 286656 - DNA, 21 bp, Artificial sequence
  SiRNA target sequence
gtatcaattgttggcttcact

SEQ ID NO: 286657 - DNA, 21 bp, Artificial sequence
  SiRNA target sequence
tatcaattgttggcttcactt

SEQ ID NO: 286658 - DNA, 21 bp, Artificial sequence
  SiRNA target sequence
atcaattgttggcttcacttt

SEQ ID NO: 286659 - DNA, 21 bp, Artificial sequence
  SiRNA target sequence
tcaattgttggcttcactttg

SEQ ID NO: 286660 - DNA, 21 bp, Artificial sequence
  SiRNA target sequence
caattgttggcttcactttgg

SEQ ID NO: 286661 - DNA, 21 bp, Artificial sequence
  SiRNA target sequence
aattgttggcttcactttggc

SEQ ID NO: 286662 - DNA, 21 bp, Artificial sequence
  SiRNA target sequence
attgttggcttcactttggcc

SEQ ID NO: 286663 - DNA, 21 bp, Artificial sequence
  SiRNA target sequence
ttgttggcttcactttggcca

SEQ ID NO: 286664 - DNA, 21 bp, Artificial sequence
  SiRNA target sequence
tgttggcttcactttggccat

SEQ ID NO: 286665 - DNA, 21 bp, Artificial sequence
  SiRNA target sequence
gttggcttcactttggccatg

SEQ ID NO: 286666 - DNA, 21 bp, Artificial sequence
  SiRNA target sequence
ttggcttcactttggccatga

SEQ ID NO: 286667 - DNA, 21 bp, Artificial sequence
  SiRNA target sequence
tggcttcactttggccatgat

SEQ ID NO: 286668 - DNA, 21 bp, Artificial sequence
  SiRNA target sequence
ggcttcactttggccatgatc

SEQ ID NO: 286669 - DNA, 21 bp, Artificial sequence
  SiRNA target sequence
gcttcactttggccatgatcg

SEQ ID NO: 286670 - DNA, 21 bp, Artificial sequence
  SiRNA target sequence
cttcactttggccatgatcgg

SEQ ID NO: 286671 - DNA, 21 bp, Artificial sequence
  SiRNA target sequence
ttcactttggccatgatcggc

SEQ ID NO: 286672 - DNA, 21 bp, Artificial sequence
  SiRNA target sequence
tcactttggccatgatcggcc

SEQ ID NO: 286673 - DNA, 21 bp, Artificial sequence
  SiRNA target sequence
cactttggccatgatcggcct

SEQ ID NO: 286674 - DNA, 21 bp, Artificial sequence
  SiRNA target sequence
actttggccatgatcggcctt

SEQ ID NO: 286675 - DNA, 21 bp, Artificial sequence
  SiRNA target sequence
ctttggccatgatcggccttg

SEQ ID NO: 286676 - DNA, 21 bp, Artificial sequence
  SiRNA target sequence
tttggccatgatcggccttgc

SEQ ID NO: 286677 - DNA, 21 bp, Artificial sequence
  SiRNA target sequence
ttggccatgatcggccttgca

SEQ ID NO: 286678 - DNA, 21 bp, Artificial sequence
  SiRNA target sequence
tggccatgatcggccttgcac

SEQ ID NO: 286679 - DNA, 21 bp, Artificial sequence
  SiRNA target sequence
ggccatgatcggccttgcacg

SEQ ID NO: 286680 - DNA, 21 bp, Artificial sequence
  SiRNA target sequence
gccatgatcggccttgcacgg

SEQ ID NO: 286681 - DNA, 21 bp, Artificial sequence
  SiRNA target sequence
ccatgatcggccttgcacggt

SEQ ID NO: 286682 - DNA, 21 bp, Artificial sequence
  SiRNA target sequence
catgatcggccttgcacggta

SEQ ID NO: 286683 - DNA, 21 bp, Artificial sequence
  SiRNA target sequence
atgatcggccttgcacggtag

SEQ ID NO: 286684 - DNA, 21 bp, Artificial sequence
  SiRNA target sequence
tgatcggccttgcacggtaga

SEQ ID NO: 286685 - DNA, 21 bp, Artificial sequence
  SiRNA target sequence
gatcggccttgcacggtagat

SEQ ID NO: 286686 - DNA, 21 bp, Artificial sequence
  SiRNA target sequence
atcggccttgcacggtagata

SEQ ID NO: 286687 - DNA, 21 bp, Artificial sequence
  SiRNA target sequence
tcggccttgcacggtagatac

SEQ ID NO: 286688 - DNA, 21 bp, Artificial sequence
  SiRNA target sequence
cggccttgcacggtagatact

SEQ ID NO: 286689 - DNA, 21 bp, Artificial sequence
  SiRNA target sequence
ggccttgcacggtagatacta

SEQ ID NO: 286690 - DNA, 21 bp, Artificial sequence
  SiRNA target sequence
gccttgcacggtagatactac

SEQ ID NO: 286691 - DNA, 21 bp, Artificial sequence
  SiRNA target sequence
ccttgcacggtagatactacc

SEQ ID NO: 286692 - DNA, 21 bp, Artificial sequence
  SiRNA target sequence
cttgcacggtagatactaccg

SEQ ID NO: 286693 - DNA, 21 bp, Artificial sequence
  SiRNA target sequence
ttgcacggtagatactaccgt

SEQ ID NO: 286694 - DNA, 21 bp, Artificial sequence
  SiRNA target sequence
tgcacggtagatactaccgtt

SEQ ID NO: 286695 - DNA, 21 bp, Artificial sequence
  SiRNA target sequence
gcacggtagatactaccgtta

SEQ ID NO: 286696 - DNA, 21 bp, Artificial sequence
  SiRNA target sequence
cacggtagatactaccgttat

SEQ ID NO: 286697 - DNA, 21 bp, Artificial sequence
  SiRNA target sequence
acggtagatactaccgttata

SEQ ID NO: 286698 - DNA, 21 bp, Artificial sequence
  SiRNA target sequence
cggtagatactaccgttatat

SEQ ID NO: 286699 - DNA, 21 bp, Artificial sequence
  SiRNA target sequence
ggtagatactaccgttatatc

SEQ ID NO: 286700 - DNA, 21 bp, Artificial sequence
  SiRNA target sequence
gtagatactaccgttatatcg

SEQ ID NO: 286701 - DNA, 21 bp, Artificial sequence
  SiRNA target sequence
tagatactaccgttatatcgt

SEQ ID NO: 286702 - DNA, 21 bp, Artificial sequence
  SiRNA target sequence
agatactaccgttatatcgtc

SEQ ID NO: 286703 - DNA, 21 bp, Artificial sequence
  SiRNA target sequence
gatactaccgttatatcgtct

SEQ ID NO: 286704 - DNA, 21 bp, Artificial sequence
  SiRNA target sequence
atactaccgttatatcgtctg

SEQ ID NO: 286705 - DNA, 21 bp, Artificial sequence
  SiRNA target sequence
tactaccgttatatcgtctga

SEQ ID NO: 286706 - DNA, 21 bp, Artificial sequence
  SiRNA target sequence
actaccgttatatcgtctgac

SEQ ID NO: 286707 - DNA, 21 bp, Artificial sequence
  SiRNA target sequence
ctaccgttatatcgtctgacc

SEQ ID NO: 286708 - DNA, 21 bp, Artificial sequence
  SiRNA target sequence
taccgttatatcgtctgacct

SEQ ID NO: 286709 - DNA, 21 bp, Artificial sequence
  SiRNA target sequence
accgttatatcgtctgaccta

SEQ ID NO: 286710 - DNA, 21 bp, Artificial sequence
  SiRNA target sequence
ccgttatatcgtctgacctac

SEQ ID NO: 286711 - DNA, 21 bp, Artificial sequence
  SiRNA target sequence
cgttatatcgtctgacctact

SEQ ID NO: 286712 - DNA, 21 bp, Artificial sequence
  SiRNA target sequence
gttatatcgtctgacctacta

SEQ ID NO: 286713 - DNA, 21 bp, Artificial sequence
  SiRNA target sequence
ttatatcgtctgacctactac

SEQ ID NO: 286714 - DNA, 21 bp, Artificial sequence
  SiRNA target sequence
tatatcgtctgacctactaca

SEQ ID NO: 286715 - DNA, 21 bp, Artificial sequence
  SiRNA target sequence
atatcgtctgacctactacac

SEQ ID NO: 286716 - DNA, 21 bp, Artificial sequence
  SiRNA target sequence
tatcgtctgacctactacact

SEQ ID NO: 286717 - DNA, 21 bp, Artificial sequence
  SiRNA target sequence
atcgtctgacctactacactg

SEQ ID NO: 286718 - DNA, 21 bp, Artificial sequence
  SiRNA target sequence
tcgtctgacctactacactgg

SEQ ID NO: 286719 - DNA, 21 bp, Artificial sequence
  SiRNA target sequence
cgtctgacctactacactggt

SEQ ID NO: 286720 - DNA, 21 bp, Artificial sequence
  SiRNA target sequence
gtctgacctactacactggtg

SEQ ID NO: 286721 - DNA, 21 bp, Artificial sequence
  SiRNA target sequence
tctgacctactacactggtgc

SEQ ID NO: 286722 - DNA, 21 bp, Artificial sequence
  SiRNA target sequence
ctgacctactacactggtgcc

SEQ ID NO: 286723 - DNA, 21 bp, Artificial sequence
  SiRNA target sequence
tgacctactacactggtgcca

SEQ ID NO: 286724 - DNA, 21 bp, Artificial sequence
  SiRNA target sequence
gacctactacactggtgccac

SEQ ID NO: 286725 - DNA, 21 bp, Artificial sequence
  SiRNA target sequence
acctactacactggtgccact

SEQ ID NO: 286726 - DNA, 21 bp, Artificial sequence
  SiRNA target sequence
cctactacactggtgccactg

SEQ ID NO: 286727 - DNA, 21 bp, Artificial sequence
  SiRNA target sequence
ctactacactggtgccactga

SEQ ID NO: 286728 - DNA, 21 bp, Artificial sequence
  SiRNA target sequence
tactacactggtgccactgac

SEQ ID NO: 286729 - DNA, 21 bp, Artificial sequence
  SiRNA target sequence
actacactggtgccactgaca

SEQ ID NO: 286730 - DNA, 21 bp, Artificial sequence
  SiRNA target sequence
ctacactggtgccactgacag

SEQ ID NO: 286731 - DNA, 21 bp, Artificial sequence
  SiRNA target sequence
tacactggtgccactgacagc

SEQ ID NO: 286732 - DNA, 21 bp, Artificial sequence
  SiRNA target sequence
acactggtgccactgacagct

SEQ ID NO: 286733 - DNA, 21 bp, Artificial sequence
  SiRNA target sequence
cactggtgccactgacagcta

SEQ ID NO: 286734 - DNA, 21 bp, Artificial sequence
  SiRNA target sequence
actggtgccactgacagctaa

SEQ ID NO: 286735 - DNA, 21 bp, Artificial sequence
  SiRNA target sequence
ctggtgccactgacagctaat

SEQ ID NO: 286736 - DNA, 21 bp, Artificial sequence
  SiRNA target sequence
tggtgccactgacagctaata

SEQ ID NO: 286737 - DNA, 21 bp, Artificial sequence
  SiRNA target sequence
ggtgccactgacagctaataa

SEQ ID NO: 286738 - DNA, 21 bp, Artificial sequence
  SiRNA target sequence
gtgccactgacagctaataac

SEQ ID NO: 286739 - DNA, 21 bp, Artificial sequence
  SiRNA target sequence
tgccactgacagctaataacg

SEQ ID NO: 286740 - DNA, 21 bp, Artificial sequence
  SiRNA target sequence
gccactgacagctaataacgc

SEQ ID NO: 286741 - DNA, 21 bp, Artificial sequence
  SiRNA target sequence
ccactgacagctaataacgcg

SEQ ID NO: 286742 - DNA, 21 bp, Artificial sequence
  SiRNA target sequence
cactgacagctaataacgcgg

SEQ ID NO: 286743 - DNA, 21 bp, Artificial sequence
  SiRNA target sequence
actgacagctaataacgcggt

SEQ ID NO: 286744 - DNA, 21 bp, Artificial sequence
  SiRNA target sequence
ctgacagctaataacgcggtc

SEQ ID NO: 286745 - DNA, 21 bp, Artificial sequence
  SiRNA target sequence
tgacagctaataacgcggtca

SEQ ID NO: 286746 - DNA, 21 bp, Artificial sequence
  SiRNA target sequence
gacagctaataacgcggtcaa

SEQ ID NO: 286747 - DNA, 21 bp, Artificial sequence
  SiRNA target sequence
acagctaataacgcggtcaac

SEQ ID NO: 286748 - DNA, 21 bp, Artificial sequence
  SiRNA target sequence
cagctaataacgcggtcaaca

SEQ ID NO: 286749 - DNA, 21 bp, Artificial sequence
  SiRNA target sequence
agctaataacgcggtcaacac

SEQ ID NO: 286750 - DNA, 21 bp, Artificial sequence
  SiRNA target sequence
gctaataacgcggtcaacacc

SEQ ID NO: 286751 - DNA, 21 bp, Artificial sequence
  SiRNA target sequence
ctaataacgcggtcaacacca

SEQ ID NO: 286752 - DNA, 21 bp, Artificial sequence
  SiRNA target sequence
taataacgcggtcaacaccac

SEQ ID NO: 286753 - DNA, 21 bp, Artificial sequence
  SiRNA target sequence
aataacgcggtcaacaccact

SEQ ID NO: 286754 - DNA, 21 bp, Artificial sequence
  SiRNA target sequence
ataacgcggtcaacaccacta

SEQ ID NO: 286755 - DNA, 21 bp, Artificial sequence
  SiRNA target sequence
taacgcggtcaacaccactat

SEQ ID NO: 286756 - DNA, 21 bp, Artificial sequence
  SiRNA target sequence
aacgcggtcaacaccactatt

SEQ ID NO: 286757 - DNA, 21 bp, Artificial sequence
  SiRNA target sequence
acgcggtcaacaccactattc

SEQ ID NO: 286758 - DNA, 21 bp, Artificial sequence
  SiRNA target sequence
cgcggtcaacaccactattct

SEQ ID NO: 286759 - DNA, 21 bp, Artificial sequence
  SiRNA target sequence
gcggtcaacaccactattctg

SEQ ID NO: 286760 - DNA, 21 bp, Artificial sequence
  SiRNA target sequence
cggtcaacaccactattctgg

SEQ ID NO: 286761 - DNA, 21 bp, Artificial sequence
  SiRNA target sequence
ggtcaacaccactattctggg

SEQ ID NO: 286762 - DNA, 21 bp, Artificial sequence
  SiRNA target sequence
gtcaacaccactattctgggt

SEQ ID NO: 286763 - DNA, 21 bp, Artificial sequence
  SiRNA target sequence
tcaacaccactattctgggtc

SEQ ID NO: 286764 - DNA, 21 bp, Artificial sequence
  SiRNA target sequence
caacaccactattctgggtca

SEQ ID NO: 286765 - DNA, 21 bp, Artificial sequence
  SiRNA target sequence
aacaccactattctgggtcag

SEQ ID NO: 286766 - DNA, 21 bp, Artificial sequence
  SiRNA target sequence
acaccactattctgggtcagg

SEQ ID NO: 286767 - DNA, 21 bp, Artificial sequence
  SiRNA target sequence
caccactattctgggtcaggc

SEQ ID NO: 286768 - DNA, 21 bp, Artificial sequence
  SiRNA target sequence
accactattctgggtcaggct

SEQ ID NO: 286769 - DNA, 21 bp, Artificial sequence
  SiRNA target sequence
ccactattctgggtcaggctg

SEQ ID NO: 286770 - DNA, 21 bp, Artificial sequence
  SiRNA target sequence
cactattctgggtcaggctgg

SEQ ID NO: 286771 - DNA, 21 bp, Artificial sequence
  SiRNA target sequence
actattctgggtcaggctgga

SEQ ID NO: 286772 - DNA, 21 bp, Artificial sequence
  SiRNA target sequence
ctattctgggtcaggctggac

SEQ ID NO: 286773 - DNA, 21 bp, Artificial sequence
  SiRNA target sequence
tattctgggtcaggctggact

SEQ ID NO: 286774 - DNA, 21 bp, Artificial sequence
  SiRNA target sequence
attctgggtcaggctggactt

SEQ ID NO: 286775 - DNA, 21 bp, Artificial sequence
  SiRNA target sequence
ttctgggtcaggctggacttg

SEQ ID NO: 286776 - DNA, 21 bp, Artificial sequence
  SiRNA target sequence
tctgggtcaggctggacttgg

SEQ ID NO: 286777 - DNA, 21 bp, Artificial sequence
  SiRNA target sequence
ctgggtcaggctggacttggt

SEQ ID NO: 286778 - DNA, 21 bp, Artificial sequence
  SiRNA target sequence
tgggtcaggctggacttggta

SEQ ID NO: 286779 - DNA, 21 bp, Artificial sequence
  SiRNA target sequence
gggtcaggctggacttggtaa

SEQ ID NO: 286780 - DNA, 21 bp, Artificial sequence
  SiRNA target sequence
ggtcaggctggacttggtaat

SEQ ID NO: 286781 - DNA, 21 bp, Artificial sequence
  SiRNA target sequence
gtcaggctggacttggtaatt

SEQ ID NO: 286782 - DNA, 21 bp, Artificial sequence
  SiRNA target sequence
tcaggctggacttggtaattg

SEQ ID NO: 286783 - DNA, 21 bp, Artificial sequence
  SiRNA target sequence
caggctggacttggtaattgg

SEQ ID NO: 286784 - DNA, 21 bp, Artificial sequence
  SiRNA target sequence
aggctggacttggtaattggg

SEQ ID NO: 286785 - DNA, 21 bp, Artificial sequence
  SiRNA target sequence
ggctggacttggtaattgggc

SEQ ID NO: 286786 - DNA, 21 bp, Artificial sequence
  SiRNA target sequence
gctggacttggtaattgggca

SEQ ID NO: 286787 - DNA, 21 bp, Artificial sequence
  SiRNA target sequence
ctggacttggtaattgggcat

SEQ ID NO: 286788 - DNA, 21 bp, Artificial sequence
  SiRNA target sequence
tggacttggtaattgggcatc

SEQ ID NO: 286789 - DNA, 21 bp, Artificial sequence
  SiRNA target sequence
ggacttggtaattgggcatct

SEQ ID NO: 286790 - DNA, 21 bp, Artificial sequence
  SiRNA target sequence
gacttggtaattgggcatctg

SEQ ID NO: 286791 - DNA, 21 bp, Artificial sequence
  SiRNA target sequence
acttggtaattgggcatctgc

SEQ ID NO: 286792 - DNA, 21 bp, Artificial sequence
  SiRNA target sequence
cttggtaattgggcatctgcc

SEQ ID NO: 286793 - DNA, 21 bp, Artificial sequence
  SiRNA target sequence
ttggtaattgggcatctgcca

SEQ ID NO: 286794 - DNA, 21 bp, Artificial sequence
  SiRNA target sequence
tggtaattgggcatctgccaa

SEQ ID NO: 286795 - DNA, 21 bp, Artificial sequence
  SiRNA target sequence
ggtaattgggcatctgccaac

SEQ ID NO: 286796 - DNA, 21 bp, Artificial sequence
  SiRNA target sequence
gtaattgggcatctgccaacc

SEQ ID NO: 286797 - DNA, 21 bp, Artificial sequence
  SiRNA target sequence
taattgggcatctgccaaccc

SEQ ID NO: 286798 - DNA, 21 bp, Artificial sequence
  SiRNA target sequence
aattgggcatctgccaacccc

SEQ ID NO: 286799 - DNA, 21 bp, Artificial sequence
  SiRNA target sequence
attgggcatctgccaacccca

SEQ ID NO: 286800 - DNA, 21 bp, Artificial sequence
  SiRNA target sequence
ttgggcatctgccaaccccac

SEQ ID NO: 286801 - DNA, 21 bp, Artificial sequence
  SiRNA target sequence
tgggcatctgccaaccccact

SEQ ID NO: 286802 - DNA, 21 bp, Artificial sequence
  SiRNA target sequence
gggcatctgccaaccccactg

SEQ ID NO: 286803 - DNA, 21 bp, Artificial sequence
  SiRNA target sequence
ggcatctgccaaccccactgt

SEQ ID NO: 286804 - DNA, 21 bp, Artificial sequence
  SiRNA target sequence
gcatctgccaaccccactgta

SEQ ID NO: 286805 - DNA, 21 bp, Artificial sequence
  SiRNA target sequence
catctgccaaccccactgtac

SEQ ID NO: 286806 - DNA, 21 bp, Artificial sequence
  SiRNA target sequence
atctgccaaccccactgtacg

SEQ ID NO: 286807 - DNA, 21 bp, Artificial sequence
  SiRNA target sequence
tctgccaaccccactgtacgg

SEQ ID NO: 286808 - DNA, 21 bp, Artificial sequence
  SiRNA target sequence
ctgccaaccccactgtacggg

SEQ ID NO: 286809 - DNA, 21 bp, Artificial sequence
  SiRNA target sequence
tgccaaccccactgtacgggc

SEQ ID NO: 286810 - DNA, 21 bp, Artificial sequence
  SiRNA target sequence
gccaaccccactgtacgggcc

SEQ ID NO: 286811 - DNA, 21 bp, Artificial sequence
  SiRNA target sequence
ccaaccccactgtacgggccc

SEQ ID NO: 286812 - DNA, 21 bp, Artificial sequence
  SiRNA target sequence
caaccccactgtacgggccca

SEQ ID NO: 286813 - DNA, 21 bp, Artificial sequence
  SiRNA target sequence
aaccccactgtacgggcccat

SEQ ID NO: 286814 - DNA, 21 bp, Artificial sequence
  SiRNA target sequence
accccactgtacgggcccata

SEQ ID NO: 286815 - DNA, 21 bp, Artificial sequence
  SiRNA target sequence
ccccactgtacgggcccatac

SEQ ID NO: 286816 - DNA, 21 bp, Artificial sequence
  SiRNA target sequence
cccactgtacgggcccatacc

SEQ ID NO: 286817 - DNA, 21 bp, Artificial sequence
  SiRNA target sequence
ccactgtacgggcccataccg

SEQ ID NO: 286818 - DNA, 21 bp, Artificial sequence
  SiRNA target sequence
cactgtacgggcccataccga

SEQ ID NO: 286819 - DNA, 21 bp, Artificial sequence
  SiRNA target sequence
actgtacgggcccataccgag

SEQ ID NO: 286820 - DNA, 21 bp, Artificial sequence
  SiRNA target sequence
ctgtacgggcccataccgaga

SEQ ID NO: 286821 - DNA, 21 bp, Artificial sequence
  SiRNA target sequence
tgtacgggcccataccgagac

SEQ ID NO: 286822 - DNA, 21 bp, Artificial sequence
  SiRNA target sequence
gtacgggcccataccgagacg

SEQ ID NO: 286823 - DNA, 21 bp, Artificial sequence
  SiRNA target sequence
tacgggcccataccgagacgg

SEQ ID NO: 286824 - DNA, 21 bp, Artificial sequence
  SiRNA target sequence
acgggcccataccgagacgga

SEQ ID NO: 286825 - DNA, 21 bp, Artificial sequence
  SiRNA target sequence
cgggcccataccgagacggat

SEQ ID NO: 286826 - DNA, 21 bp, Artificial sequence
  SiRNA target sequence
gggcccataccgagacggatg

SEQ ID NO: 286827 - DNA, 21 bp, Artificial sequence
  SiRNA target sequence
ggcccataccgagacggatgc

SEQ ID NO: 286828 - DNA, 21 bp, Artificial sequence
  SiRNA target sequence
gcccataccgagacggatgca

SEQ ID NO: 286829 - DNA, 21 bp, Artificial sequence
  SiRNA target sequence
cccataccgagacggatgcag

SEQ ID NO: 286830 - DNA, 21 bp, Artificial sequence
  SiRNA target sequence
ccataccgagacggatgcagc

SEQ ID NO: 286831 - DNA, 21 bp, Artificial sequence
  SiRNA target sequence
cataccgagacggatgcagcc

SEQ ID NO: 286832 - DNA, 21 bp, Artificial sequence
  SiRNA target sequence
ataccgagacggatgcagccc

SEQ ID NO: 286833 - DNA, 21 bp, Artificial sequence
  SiRNA target sequence
taccgagacggatgcagcccc

SEQ ID NO: 286834 - DNA, 21 bp, Artificial sequence
  SiRNA target sequence
accgagacggatgcagcccct

SEQ ID NO: 286835 - DNA, 21 bp, Artificial sequence
  SiRNA target sequence
ccgagacggatgcagcccctc

SEQ ID NO: 286836 - DNA, 21 bp, Artificial sequence
  SiRNA target sequence
cgagacggatgcagcccctct

SEQ ID NO: 286837 - DNA, 21 bp, Artificial sequence
  SiRNA target sequence
gagacggatgcagcccctctt

SEQ ID NO: 286838 - DNA, 21 bp, Artificial sequence
  SiRNA target sequence
agacggatgcagcccctcttc

SEQ ID NO: 286839 - DNA, 21 bp, Artificial sequence
  SiRNA target sequence
gacggatgcagcccctcttca

SEQ ID NO: 286840 - DNA, 21 bp, Artificial sequence
  SiRNA target sequence
acggatgcagcccctcttcag

SEQ ID NO: 286841 - DNA, 21 bp, Artificial sequence
  SiRNA target sequence
cggatgcagcccctcttcagg

SEQ ID NO: 286842 - DNA, 21 bp, Artificial sequence
  SiRNA target sequence
ggatgcagcccctcttcagga

SEQ ID NO: 286843 - DNA, 21 bp, Artificial sequence
  SiRNA target sequence
gatgcagcccctcttcaggag

SEQ ID NO: 286844 - DNA, 21 bp, Artificial sequence
  SiRNA target sequence
atgcagcccctcttcaggagg

SEQ ID NO: 286845 - DNA, 21 bp, Artificial sequence
  SiRNA target sequence
tgcagcccctcttcaggaggc

SEQ ID NO: 286846 - DNA, 21 bp, Artificial sequence
  SiRNA target sequence
gcagcccctcttcaggaggcc

SEQ ID NO: 286847 - DNA, 21 bp, Artificial sequence
  SiRNA target sequence
cagcccctcttcaggaggcca

SEQ ID NO: 286848 - DNA, 21 bp, Artificial sequence
  SiRNA target sequence
agcccctcttcaggaggccat

SEQ ID NO: 286849 - DNA, 21 bp, Artificial sequence
  SiRNA target sequence
gcccctcttcaggaggccatg

SEQ ID NO: 286850 - DNA, 21 bp, Artificial sequence
  SiRNA target sequence
cccctcttcaggaggccatgc

SEQ ID NO: 286851 - DNA, 21 bp, Artificial sequence
  SiRNA target sequence
ccctcttcaggaggccatgca

SEQ ID NO: 286852 - DNA, 21 bp, Artificial sequence
  SiRNA target sequence
cctcttcaggaggccatgcac

SEQ ID NO: 286853 - DNA, 21 bp, Artificial sequence
  SiRNA target sequence
ctcttcaggaggccatgcacc

SEQ ID NO: 286854 - DNA, 21 bp, Artificial sequence
  SiRNA target sequence
tcttcaggaggccatgcaccc

SEQ ID NO: 286855 - DNA, 21 bp, Artificial sequence
  SiRNA target sequence
cttcaggaggccatgcaccct

SEQ ID NO: 286856 - DNA, 21 bp, Artificial sequence
  SiRNA target sequence
ttcaggaggccatgcaccctc

SEQ ID NO: 286857 - DNA, 21 bp, Artificial sequence
  SiRNA target sequence
tcaggaggccatgcaccctct

SEQ ID NO: 286858 - DNA, 21 bp, Artificial sequence
  SiRNA target sequence
caggaggccatgcaccctctt

SEQ ID NO: 286859 - DNA, 21 bp, Artificial sequence
  SiRNA target sequence
aggaggccatgcaccctctta

SEQ ID NO: 286860 - DNA, 21 bp, Artificial sequence
  SiRNA target sequence
ggaggccatgcaccctcttac

SEQ ID NO: 286861 - DNA, 21 bp, Artificial sequence
  SiRNA target sequence
gaggccatgcaccctcttacc

SEQ ID NO: 286862 - DNA, 21 bp, Artificial sequence
  SiRNA target sequence
aggccatgcaccctcttacca

SEQ ID NO: 286863 - DNA, 21 bp, Artificial sequence
  SiRNA target sequence
ggccatgcaccctcttaccag

SEQ ID NO: 286864 - DNA, 21 bp, Artificial sequence
  SiRNA target sequence
gccatgcaccctcttaccagt

SEQ ID NO: 286865 - DNA, 21 bp, Artificial sequence
  SiRNA target sequence
ccatgcaccctcttaccagtc

SEQ ID NO: 286866 - DNA, 21 bp, Artificial sequence
  SiRNA target sequence
catgcaccctcttaccagtcc

SEQ ID NO: 286867 - DNA, 21 bp, Artificial sequence
  SiRNA target sequence
atgcaccctcttaccagtcct

SEQ ID NO: 286868 - DNA, 21 bp, Artificial sequence
  SiRNA target sequence
tgcaccctcttaccagtcctg

SEQ ID NO: 286869 - DNA, 21 bp, Artificial sequence
  SiRNA target sequence
gcaccctcttaccagtcctgg

SEQ ID NO: 286870 - DNA, 21 bp, Artificial sequence
  SiRNA target sequence
caccctcttaccagtcctgga

SEQ ID NO: 286871 - DNA, 21 bp, Artificial sequence
  SiRNA target sequence
accctcttaccagtcctggat

SEQ ID NO: 286872 - DNA, 21 bp, Artificial sequence
  SiRNA target sequence
ccctcttaccagtcctggata

SEQ ID NO: 286873 - DNA, 21 bp, Artificial sequence
  SiRNA target sequence
cctcttaccagtcctggatag

SEQ ID NO: 286874 - DNA, 21 bp, Artificial sequence
  SiRNA target sequence
ctcttaccagtcctggatagg

SEQ ID NO: 286875 - DNA, 21 bp, Artificial sequence
  SiRNA target sequence
tcttaccagtcctggataggt

SEQ ID NO: 286876 - DNA, 21 bp, Artificial sequence
  SiRNA target sequence
cttaccagtcctggataggtg

SEQ ID NO: 286877 - DNA, 21 bp, Artificial sequence
  SiRNA target sequence
ttaccagtcctggataggtgc

SEQ ID NO: 286878 - DNA, 21 bp, Artificial sequence
  SiRNA target sequence
taccagtcctggataggtgct

SEQ ID NO: 286879 - DNA, 21 bp, Artificial sequence
  SiRNA target sequence
accagtcctggataggtgctg

SEQ ID NO: 286880 - DNA, 21 bp, Artificial sequence
  SiRNA target sequence
ccagtcctggataggtgctgt

SEQ ID NO: 286881 - DNA, 21 bp, Artificial sequence
  SiRNA target sequence
cagtcctggataggtgctgta

SEQ ID NO: 286882 - DNA, 21 bp, Artificial sequence
  SiRNA target sequence
agtcctggataggtgctgtac

SEQ ID NO: 286883 - DNA, 21 bp, Artificial sequence
  SiRNA target sequence
gtcctggataggtgctgtacc

SEQ ID NO: 286884 - DNA, 21 bp, Artificial sequence
  SiRNA target sequence
tcctggataggtgctgtacct

SEQ ID NO: 286885 - DNA, 21 bp, Artificial sequence
  SiRNA target sequence
cctggataggtgctgtaccta

SEQ ID NO: 286886 - DNA, 21 bp, Artificial sequence
  SiRNA target sequence
ctggataggtgctgtacctat

SEQ ID NO: 286887 - DNA, 21 bp, Artificial sequence
  SiRNA target sequence
tggataggtgctgtacctatt

SEQ ID NO: 286888 - DNA, 21 bp, Artificial sequence
  SiRNA target sequence
ggataggtgctgtacctattc

SEQ ID NO: 286889 - DNA, 21 bp, Artificial sequence
  SiRNA target sequence
gataggtgctgtacctattcc

SEQ ID NO: 286890 - DNA, 21 bp, Artificial sequence
  SiRNA target sequence
ataggtgctgtacctattcct

SEQ ID NO: 286891 - DNA, 21 bp, Artificial sequence
  SiRNA target sequence
taggtgctgtacctattccta

SEQ ID NO: 286892 - DNA, 21 bp, Artificial sequence
  SiRNA target sequence
aggtgctgtacctattcctat

SEQ ID NO: 286893 - DNA, 21 bp, Artificial sequence
  SiRNA target sequence
ggtgctgtacctattcctata

SEQ ID NO: 286894 - DNA, 21 bp, Artificial sequence
  SiRNA target sequence
gtgctgtacctattcctatat

SEQ ID NO: 286895 - DNA, 21 bp, Artificial sequence
  SiRNA target sequence
tgctgtacctattcctatatg

SEQ ID NO: 286896 - DNA, 21 bp, Artificial sequence
  SiRNA target sequence
gctgtacctattcctatatgg

SEQ ID NO: 286897 - DNA, 21 bp, Artificial sequence
  SiRNA target sequence
ctgtacctattcctatatggg

SEQ ID NO: 286898 - DNA, 21 bp, Artificial sequence
  SiRNA target sequence
tgtacctattcctatatgggg

SEQ ID NO: 286899 - DNA, 21 bp, Artificial sequence
  SiRNA target sequence
gtacctattcctatatggggg

SEQ ID NO: 286900 - DNA, 21 bp, Artificial sequence
  SiRNA target sequence
tacctattcctatatggggga

SEQ ID NO: 286901 - DNA, 21 bp, Artificial sequence
  SiRNA target sequence
acctattcctatatgggggaa

SEQ ID NO: 286902 - DNA, 21 bp, Artificial sequence
  SiRNA target sequence
cctattcctatatgggggaac

SEQ ID NO: 286903 - DNA, 21 bp, Artificial sequence
  SiRNA target sequence
ctattcctatatgggggaaca

SEQ ID NO: 286904 - DNA, 21 bp, Artificial sequence
  SiRNA target sequence
tattcctatatgggggaacac

SEQ ID NO: 286905 - DNA, 21 bp, Artificial sequence
  SiRNA target sequence
attcctatatgggggaacaca

SEQ ID NO: 286906 - DNA, 21 bp, Artificial sequence
  SiRNA target sequence
ttcctatatgggggaacacag

SEQ ID NO: 286907 - DNA, 21 bp, Artificial sequence
  SiRNA target sequence
tcctatatgggggaacacagc

SEQ ID NO: 286908 - DNA, 21 bp, Artificial sequence
  SiRNA target sequence
cctatatgggggaacacagca

SEQ ID NO: 286909 - DNA, 21 bp, Artificial sequence
  SiRNA target sequence
ctatatgggggaacacagcag

SEQ ID NO: 286910 - DNA, 21 bp, Artificial sequence
  SiRNA target sequence
tatatgggggaacacagcagc

SEQ ID NO: 286911 - DNA, 21 bp, Artificial sequence
  SiRNA target sequence
atatgggggaacacagcagcc

SEQ ID NO: 286912 - DNA, 21 bp, Artificial sequence
  SiRNA target sequence
tatgggggaacacagcagcca

SEQ ID NO: 286913 - DNA, 21 bp, Artificial sequence
  SiRNA target sequence
atgggggaacacagcagccat

SEQ ID NO: 286914 - DNA, 21 bp, Artificial sequence
  SiRNA target sequence
tgggggaacacagcagccatc

SEQ ID NO: 286915 - DNA, 21 bp, Artificial sequence
  SiRNA target sequence
gggggaacacagcagccatcg

SEQ ID NO: 286916 - DNA, 21 bp, Artificial sequence
  SiRNA target sequence
ggggaacacagcagccatcga

SEQ ID NO: 286917 - DNA, 21 bp, Artificial sequence
  SiRNA target sequence
gggaacacagcagccatcgat

SEQ ID NO: 286918 - DNA, 21 bp, Artificial sequence
  SiRNA target sequence
ggaacacagcagccatcgata

SEQ ID NO: 286919 - DNA, 21 bp, Artificial sequence
  SiRNA target sequence
gaacacagcagccatcgatag

SEQ ID NO: 286920 - DNA, 21 bp, Artificial sequence
  SiRNA target sequence
aacacagcagccatcgataga

SEQ ID NO: 286921 - DNA, 21 bp, Artificial sequence
  SiRNA target sequence
acacagcagccatcgatagat

SEQ ID NO: 286922 - DNA, 21 bp, Artificial sequence
  SiRNA target sequence
cacagcagccatcgatagata

SEQ ID NO: 286923 - DNA, 21 bp, Artificial sequence
  SiRNA target sequence
acagcagccatcgatagataa

SEQ ID NO: 286924 - DNA, 21 bp, Artificial sequence
  SiRNA target sequence
cagcagccatcgatagataag

SEQ ID NO: 286925 - DNA, 21 bp, Artificial sequence
  SiRNA target sequence
agcagccatcgatagataagt

SEQ ID NO: 286926 - DNA, 21 bp, Artificial sequence
  SiRNA target sequence
gcagccatcgatagataagtc

SEQ ID NO: 286927 - DNA, 21 bp, Artificial sequence
  SiRNA target sequence
cagccatcgatagataagtcg

SEQ ID NO: 286928 - DNA, 21 bp, Artificial sequence
  SiRNA target sequence
agccatcgatagataagtcgt

SEQ ID NO: 286929 - DNA, 21 bp, Artificial sequence
  SiRNA target sequence
gccatcgatagataagtcgtc

SEQ ID NO: 286930 - DNA, 21 bp, Artificial sequence
  SiRNA target sequence
ccatcgatagataagtcgtca

SEQ ID NO: 286931 - DNA, 21 bp, Artificial sequence
  SiRNA target sequence
catcgatagataagtcgtcat

SEQ ID NO: 286932 - DNA, 21 bp, Artificial sequence
  SiRNA target sequence
atcgatagataagtcgtcata

SEQ ID NO: 286933 - DNA, 21 bp, Artificial sequence
  SiRNA target sequence
tcgatagataagtcgtcatac

SEQ ID NO: 286934 - DNA, 21 bp, Artificial sequence
  SiRNA target sequence
cgatagataagtcgtcatacg

SEQ ID NO: 286935 - DNA, 21 bp, Artificial sequence
  SiRNA target sequence
gatagataagtcgtcatacgc

SEQ ID NO: 286936 - DNA, 21 bp, Artificial sequence
  SiRNA target sequence
atagataagtcgtcatacgcc

SEQ ID NO: 286937 - DNA, 21 bp, Artificial sequence
  SiRNA target sequence
tagataagtcgtcatacgccc

SEQ ID NO: 286938 - DNA, 21 bp, Artificial sequence
  SiRNA target sequence
agataagtcgtcatacgccct

SEQ ID NO: 286939 - DNA, 21 bp, Artificial sequence
  SiRNA target sequence
gataagtcgtcatacgcccta

SEQ ID NO: 286940 - DNA, 21 bp, Artificial sequence
  SiRNA target sequence
ataagtcgtcatacgccctat

SEQ ID NO: 286941 - DNA, 21 bp, Artificial sequence
  SiRNA target sequence
taagtcgtcatacgccctatc

SEQ ID NO: 286942 - DNA, 21 bp, Artificial sequence
  SiRNA target sequence
aagtcgtcatacgccctatca

SEQ ID NO: 286943 - DNA, 21 bp, Artificial sequence
  SiRNA target sequence
agtcgtcatacgccctatcat

SEQ ID NO: 286944 - DNA, 21 bp, Artificial sequence
  SiRNA target sequence
gtcgtcatacgccctatcatg

SEQ ID NO: 286945 - DNA, 21 bp, Artificial sequence
  SiRNA target sequence
tcgtcatacgccctatcatgg

SEQ ID NO: 286946 - DNA, 21 bp, Artificial sequence
  SiRNA target sequence
cgtcatacgccctatcatggt

SEQ ID NO: 286947 - DNA, 21 bp, Artificial sequence
  SiRNA target sequence
gtcatacgccctatcatggtt

SEQ ID NO: 286948 - DNA, 21 bp, Artificial sequence
  SiRNA target sequence
gatgaacgtcgacctattgaa

SEQ ID NO: 286949 - DNA, 21 bp, Artificial sequence
  SiRNA target sequence
atgaacgtcgacctattgaaa

SEQ ID NO: 286950 - DNA, 21 bp, Artificial sequence
  SiRNA target sequence
tgaacgtcgacctattgaaaa

SEQ ID NO: 286951 - DNA, 21 bp, Artificial sequence
  SiRNA target sequence
gaacgtcgacctattgaaaaa

SEQ ID NO: 286952 - DNA, 21 bp, Artificial sequence
  SiRNA target sequence
aacgtcgacctattgaaaaag

SEQ ID NO: 286953 - DNA, 21 bp, Artificial sequence
  SiRNA target sequence
acgtcgacctattgaaaaagt

SEQ ID NO: 286954 - DNA, 21 bp, Artificial sequence
  SiRNA target sequence
cgtcgacctattgaaaaagtt

SEQ ID NO: 286955 - DNA, 21 bp, Artificial sequence
  SiRNA target sequence
gtcgacctattgaaaaagtta

SEQ ID NO: 286956 - DNA, 21 bp, Artificial sequence
  SiRNA target sequence
tcgacctattgaaaaagttaa

SEQ ID NO: 286957 - DNA, 21 bp, Artificial sequence
  SiRNA target sequence
cgacctattgaaaaagttaat

SEQ ID NO: 286958 - DNA, 21 bp, Artificial sequence
  SiRNA target sequence
gacctattgaaaaagttaatc

SEQ ID NO: 286959 - DNA, 21 bp, Artificial sequence
  SiRNA target sequence
acctattgaaaaagttaatca

SEQ ID NO: 286960 - DNA, 21 bp, Artificial sequence
  SiRNA target sequence
cctattgaaaaagttaatcaa

SEQ ID NO: 286961 - DNA, 21 bp, Artificial sequence
  SiRNA target sequence
ctattgaaaaagttaatcaat

SEQ ID NO: 286962 - DNA, 21 bp, Artificial sequence
  SiRNA target sequence
tattgaaaaagttaatcaatt

SEQ ID NO: 286963 - DNA, 21 bp, Artificial sequence
  SiRNA target sequence
attgaaaaagttaatcaattg

SEQ ID NO: 286964 - DNA, 21 bp, Artificial sequence
  SiRNA target sequence
ttgaaaaagttaatcaattga

SEQ ID NO: 286965 - DNA, 21 bp, Artificial sequence
  SiRNA target sequence
tgaaaaagttaatcaattgaa

SEQ ID NO: 286966 - DNA, 21 bp, Artificial sequence
  SiRNA target sequence
gaaaaagttaatcaattgaaa

SEQ ID NO: 286967 - DNA, 21 bp, Artificial sequence
  SiRNA target sequence
aaaaagttaatcaattgaaaa

SEQ ID NO: 286968 - DNA, 21 bp, Artificial sequence
  SiRNA target sequence
aaaagttaatcaattgaaaac

SEQ ID NO: 286969 - DNA, 21 bp, Artificial sequence
  SiRNA target sequence
aaagttaatcaattgaaaaca

SEQ ID NO: 286970 - DNA, 21 bp, Artificial sequence
  SiRNA target sequence
aagttaatcaattgaaaacac

SEQ ID NO: 286971 - DNA, 21 bp, Artificial sequence
  SiRNA target sequence
agttaatcaattgaaaacacg

SEQ ID NO: 286972 - DNA, 21 bp, Artificial sequence
  SiRNA target sequence
gttaatcaattgaaaacacga

SEQ ID NO: 286973 - DNA, 21 bp, Artificial sequence
  SiRNA target sequence
ttaatcaattgaaaacacgag

SEQ ID NO: 286974 - DNA, 21 bp, Artificial sequence
  SiRNA target sequence
taatcaattgaaaacacgagt

SEQ ID NO: 286975 - DNA, 21 bp, Artificial sequence
  SiRNA target sequence
aatcaattgaaaacacgagta

SEQ ID NO: 286976 - DNA, 21 bp, Artificial sequence
  SiRNA target sequence
atcaattgaaaacacgagtat

SEQ ID NO: 286977 - DNA, 21 bp, Artificial sequence
  SiRNA target sequence
tcaattgaaaacacgagtatt

SEQ ID NO: 286978 - DNA, 21 bp, Artificial sequence
  SiRNA target sequence
caattgaaaacacgagtattc

SEQ ID NO: 286979 - DNA, 21 bp, Artificial sequence
  SiRNA target sequence
aattgaaaacacgagtattct

SEQ ID NO: 286980 - DNA, 21 bp, Artificial sequence
  SiRNA target sequence
attgaaaacacgagtattctc

SEQ ID NO: 286981 - DNA, 21 bp, Artificial sequence
  SiRNA target sequence
ttgaaaacacgagtattctca

SEQ ID NO: 286982 - DNA, 21 bp, Artificial sequence
  SiRNA target sequence
tgaaaacacgagtattctcaa

SEQ ID NO: 286983 - DNA, 21 bp, Artificial sequence
  SiRNA target sequence
gaaaacacgagtattctcaaa

SEQ ID NO: 286984 - DNA, 21 bp, Artificial sequence
  SiRNA target sequence
aaaacacgagtattctcaaat

SEQ ID NO: 286985 - DNA, 21 bp, Artificial sequence
  SiRNA target sequence
aaacacgagtattctcaaatg

SEQ ID NO: 286986 - DNA, 21 bp, Artificial sequence
  SiRNA target sequence
aacacgagtattctcaaatgg

SEQ ID NO: 286987 - DNA, 21 bp, Artificial sequence
  SiRNA target sequence
acacgagtattctcaaatgga

SEQ ID NO: 286988 - DNA, 21 bp, Artificial sequence
  SiRNA target sequence
cacgagtattctcaaatggac

SEQ ID NO: 286989 - DNA, 21 bp, Artificial sequence
  SiRNA target sequence
acgagtattctcaaatggacc

SEQ ID NO: 286990 - DNA, 21 bp, Artificial sequence
  SiRNA target sequence
cgagtattctcaaatggacca

SEQ ID NO: 286991 - DNA, 21 bp, Artificial sequence
  SiRNA target sequence
gagtattctcaaatggaccaa

SEQ ID NO: 286992 - DNA, 21 bp, Artificial sequence
  SiRNA target sequence
agtattctcaaatggaccaat

SEQ ID NO: 286993 - DNA, 21 bp, Artificial sequence
  SiRNA target sequence
gtattctcaaatggaccaatg

SEQ ID NO: 286994 - DNA, 21 bp, Artificial sequence
  SiRNA target sequence
tattctcaaatggaccaatgg

SEQ ID NO: 286995 - DNA, 21 bp, Artificial sequence
  SiRNA target sequence
attctcaaatggaccaatgga

SEQ ID NO: 286996 - DNA, 21 bp, Artificial sequence
  SiRNA target sequence
ttctcaaatggaccaatggac

SEQ ID NO: 286997 - DNA, 21 bp, Artificial sequence
  SiRNA target sequence
tctcaaatggaccaatggact

SEQ ID NO: 286998 - DNA, 21 bp, Artificial sequence
  SiRNA target sequence
ctcaaatggaccaatggactt

SEQ ID NO: 286999 - DNA, 21 bp, Artificial sequence
  SiRNA target sequence
tcaaatggaccaatggacttc

SEQ ID NO: 287000 - DNA, 21 bp, Artificial sequence
  SiRNA target sequence
caaatggaccaatggacttct

SEQ ID NO: 287001 - DNA, 21 bp, Artificial sequence
  SiRNA target sequence
aaatggaccaatggacttctc

SEQ ID NO: 287002 - DNA, 21 bp, Artificial sequence
  SiRNA target sequence
aatggaccaatggacttctca

SEQ ID NO: 287003 - DNA, 21 bp, Artificial sequence
  SiRNA target sequence
atggaccaatggacttctcaa

SEQ ID NO: 287004 - DNA, 21 bp, Artificial sequence
  SiRNA target sequence
tggaccaatggacttctcaat

SEQ ID NO: 287005 - DNA, 21 bp, Artificial sequence
  SiRNA target sequence
ggaccaatggacttctcaatt

SEQ ID NO: 287006 - DNA, 21 bp, Artificial sequence
  SiRNA target sequence
gaccaatggacttctcaattg

SEQ ID NO: 287007 - DNA, 21 bp, Artificial sequence
  SiRNA target sequence
accaatggacttctcaattgc

SEQ ID NO: 287008 - DNA, 21 bp, Artificial sequence
  SiRNA target sequence
ccaatggacttctcaattgcg

SEQ ID NO: 287009 - DNA, 21 bp, Artificial sequence
  SiRNA target sequence
caatggacttctcaattgcgt

SEQ ID NO: 287010 - DNA, 21 bp, Artificial sequence
  SiRNA target sequence
aatggacttctcaattgcgtt

SEQ ID NO: 287011 - DNA, 21 bp, Artificial sequence
  SiRNA target sequence
atggacttctcaattgcgttt

SEQ ID NO: 287012 - DNA, 21 bp, Artificial sequence
  SiRNA target sequence
tggacttctcaattgcgtttc

SEQ ID NO: 287013 - DNA, 21 bp, Artificial sequence
  SiRNA target sequence
ggacttctcaattgcgtttcg

SEQ ID NO: 287014 - DNA, 21 bp, Artificial sequence
  SiRNA target sequence
gacttctcaattgcgtttcga

SEQ ID NO: 287015 - DNA, 21 bp, Artificial sequence
  SiRNA target sequence
acttctcaattgcgtttcgaa

SEQ ID NO: 287016 - DNA, 21 bp, Artificial sequence
  SiRNA target sequence
cttctcaattgcgtttcgaat

SEQ ID NO: 287017 - DNA, 21 bp, Artificial sequence
  SiRNA target sequence
ttctcaattgcgtttcgaatg

SEQ ID NO: 287018 - DNA, 21 bp, Artificial sequence
  SiRNA target sequence
tctcaattgcgtttcgaatgt

SEQ ID NO: 287019 - DNA, 21 bp, Artificial sequence
  SiRNA target sequence
ctcaattgcgtttcgaatgta

SEQ ID NO: 287020 - DNA, 21 bp, Artificial sequence
  SiRNA target sequence
tcaattgcgtttcgaatgtat

SEQ ID NO: 287021 - DNA, 21 bp, Artificial sequence
  SiRNA target sequence
caattgcgtttcgaatgtatt

SEQ ID NO: 287022 - DNA, 21 bp, Artificial sequence
  SiRNA target sequence
aattgcgtttcgaatgtatta

SEQ ID NO: 287023 - DNA, 21 bp, Artificial sequence
  SiRNA target sequence
attgcgtttcgaatgtattat

SEQ ID NO: 287024 - DNA, 21 bp, Artificial sequence
  SiRNA target sequence
ttgcgtttcgaatgtattatt

SEQ ID NO: 287025 - DNA, 21 bp, Artificial sequence
  SiRNA target sequence
tgcgtttcgaatgtattattt

SEQ ID NO: 287026 - DNA, 21 bp, Artificial sequence
  SiRNA target sequence
gcgtttcgaatgtattatttg

SEQ ID NO: 287027 - DNA, 21 bp, Artificial sequence
  SiRNA target sequence
cgtttcgaatgtattatttgg

SEQ ID NO: 287028 - DNA, 21 bp, Artificial sequence
  SiRNA target sequence
gtttcgaatgtattatttggg

SEQ ID NO: 287029 - DNA, 21 bp, Artificial sequence
  SiRNA target sequence
tttcgaatgtattatttgggc

SEQ ID NO: 287030 - DNA, 21 bp, Artificial sequence
  SiRNA target sequence
ttcgaatgtattatttgggct

SEQ ID NO: 287031 - DNA, 21 bp, Artificial sequence
  SiRNA target sequence
tcgaatgtattatttgggctt

SEQ ID NO: 287032 - DNA, 21 bp, Artificial sequence
  SiRNA target sequence
cgaatgtattatttgggcttt

SEQ ID NO: 287033 - DNA, 21 bp, Artificial sequence
  SiRNA target sequence
gaatgtattatttgggcttta

SEQ ID NO: 287034 - DNA, 21 bp, Artificial sequence
  SiRNA target sequence
aatgtattatttgggctttat

SEQ ID NO: 287035 - DNA, 21 bp, Artificial sequence
  SiRNA target sequence
atgtattatttgggctttata

SEQ ID NO: 287036 - DNA, 21 bp, Artificial sequence
  SiRNA target sequence
tgtattatttgggctttatag

SEQ ID NO: 287037 - DNA, 21 bp, Artificial sequence
  SiRNA target sequence
gtattatttgggctttatagc

SEQ ID NO: 287038 - DNA, 21 bp, Artificial sequence
  SiRNA target sequence
tattatttgggctttatagct

SEQ ID NO: 287039 - DNA, 21 bp, Artificial sequence
  SiRNA target sequence
attatttgggctttatagctc

SEQ ID NO: 287040 - DNA, 21 bp, Artificial sequence
  SiRNA target sequence
ttatttgggctttatagctca

SEQ ID NO: 287041 - DNA, 21 bp, Artificial sequence
  SiRNA target sequence
tatttgggctttatagctcat

SEQ ID NO: 287042 - DNA, 21 bp, Artificial sequence
  SiRNA target sequence
atttgggctttatagctcatt

SEQ ID NO: 287043 - DNA, 21 bp, Artificial sequence
  SiRNA target sequence
tttgggctttatagctcattt

SEQ ID NO: 287044 - DNA, 21 bp, Artificial sequence
  SiRNA target sequence
ttgggctttatagctcatttg

SEQ ID NO: 287045 - DNA, 21 bp, Artificial sequence
  SiRNA target sequence
tgggctttatagctcatttga

SEQ ID NO: 287046 - DNA, 21 bp, Artificial sequence
  SiRNA target sequence
gggctttatagctcatttgat

SEQ ID NO: 287047 - DNA, 21 bp, Artificial sequence
  SiRNA target sequence
ggctttatagctcatttgatg

SEQ ID NO: 287048 - DNA, 21 bp, Artificial sequence
  SiRNA target sequence
gctttatagctcatttgatgg

SEQ ID NO: 287049 - DNA, 21 bp, Artificial sequence
  SiRNA target sequence
ctttatagctcatttgatgga

SEQ ID NO: 287050 - DNA, 21 bp, Artificial sequence
  SiRNA target sequence
tttatagctcatttgatggag

SEQ ID NO: 287051 - DNA, 21 bp, Artificial sequence
  SiRNA target sequence
ttatagctcatttgatggaga

SEQ ID NO: 287052 - DNA, 21 bp, Artificial sequence
  SiRNA target sequence
tatagctcatttgatggagaa

SEQ ID NO: 287053 - DNA, 21 bp, Artificial sequence
  SiRNA target sequence
atagctcatttgatggagaat

SEQ ID NO: 287054 - DNA, 21 bp, Artificial sequence
  SiRNA target sequence
tagctcatttgatggagaatc

SEQ ID NO: 287055 - DNA, 21 bp, Artificial sequence
  SiRNA target sequence
agctcatttgatggagaatcg

SEQ ID NO: 287056 - DNA, 21 bp, Artificial sequence
  SiRNA target sequence
gctcatttgatggagaatcga

SEQ ID NO: 287057 - DNA, 21 bp, Artificial sequence
  SiRNA target sequence
ctcatttgatggagaatcgaa

SEQ ID NO: 287058 - DNA, 21 bp, Artificial sequence
  SiRNA target sequence
tcatttgatggagaatcgaat

SEQ ID NO: 287059 - DNA, 21 bp, Artificial sequence
  SiRNA target sequence
catttgatggagaatcgaatt

SEQ ID NO: 287060 - DNA, 21 bp, Artificial sequence
  SiRNA target sequence
atttgatggagaatcgaattg

SEQ ID NO: 287061 - DNA, 21 bp, Artificial sequence
  SiRNA target sequence
tttgatggagaatcgaattgc

SEQ ID NO: 287062 - DNA, 21 bp, Artificial sequence
  SiRNA target sequence
ttgatggagaatcgaattgca

SEQ ID NO: 287063 - DNA, 21 bp, Artificial sequence
  SiRNA target sequence
tgatggagaatcgaattgcaa

SEQ ID NO: 287064 - DNA, 21 bp, Artificial sequence
  SiRNA target sequence
gatggagaatcgaattgcaaa

SEQ ID NO: 287065 - DNA, 21 bp, Artificial sequence
  SiRNA target sequence
atggagaatcgaattgcaaat

SEQ ID NO: 287066 - DNA, 21 bp, Artificial sequence
  SiRNA target sequence
tggagaatcgaattgcaaatg

SEQ ID NO: 287067 - DNA, 21 bp, Artificial sequence
  SiRNA target sequence
ggagaatcgaattgcaaatga

SEQ ID NO: 287068 - DNA, 21 bp, Artificial sequence
  SiRNA target sequence
gagaatcgaattgcaaatgaa

SEQ ID NO: 287069 - DNA, 21 bp, Artificial sequence
  SiRNA target sequence
agaatcgaattgcaaatgaag

SEQ ID NO: 287070 - DNA, 21 bp, Artificial sequence
  SiRNA target sequence
gaatcgaattgcaaatgaagt

SEQ ID NO: 287071 - DNA, 21 bp, Artificial sequence
  SiRNA target sequence
aatcgaattgcaaatgaagtg

SEQ ID NO: 287072 - DNA, 21 bp, Artificial sequence
  SiRNA target sequence
atcgaattgcaaatgaagtgt

SEQ ID NO: 287073 - DNA, 21 bp, Artificial sequence
  SiRNA target sequence
tcgaattgcaaatgaagtgtc

SEQ ID NO: 287074 - DNA, 21 bp, Artificial sequence
  SiRNA target sequence
cgaattgcaaatgaagtgtct

SEQ ID NO: 287075 - DNA, 21 bp, Artificial sequence
  SiRNA target sequence
gaattgcaaatgaagtgtcta

SEQ ID NO: 287076 - DNA, 21 bp, Artificial sequence
  SiRNA target sequence
aattgcaaatgaagtgtctat

SEQ ID NO: 287077 - DNA, 21 bp, Artificial sequence
  SiRNA target sequence
attgcaaatgaagtgtctatt

SEQ ID NO: 287078 - DNA, 21 bp, Artificial sequence
  SiRNA target sequence
ttgcaaatgaagtgtctattg

SEQ ID NO: 287079 - DNA, 21 bp, Artificial sequence
  SiRNA target sequence
tgcaaatgaagtgtctattgg

SEQ ID NO: 287080 - DNA, 21 bp, Artificial sequence
  SiRNA target sequence
gcaaatgaagtgtctattgga

SEQ ID NO: 287081 - DNA, 21 bp, Artificial sequence
  SiRNA target sequence
caaatgaagtgtctattggaa

SEQ ID NO: 287082 - DNA, 21 bp, Artificial sequence
  SiRNA target sequence
aaatgaagtgtctattggaac

SEQ ID NO: 287083 - DNA, 21 bp, Artificial sequence
  SiRNA target sequence
aatgaagtgtctattggaacg

SEQ ID NO: 287084 - DNA, 21 bp, Artificial sequence
  SiRNA target sequence
atgaagtgtctattggaacga

SEQ ID NO: 287085 - DNA, 21 bp, Artificial sequence
  SiRNA target sequence
tgaagtgtctattggaacgaa

SEQ ID NO: 287086 - DNA, 21 bp, Artificial sequence
  SiRNA target sequence
gaagtgtctattggaacgaat

SEQ ID NO: 287087 - DNA, 21 bp, Artificial sequence
  SiRNA target sequence
aagtgtctattggaacgaatg

SEQ ID NO: 287088 - DNA, 21 bp, Artificial sequence
  SiRNA target sequence
agtgtctattggaacgaatgt

SEQ ID NO: 287089 - DNA, 21 bp, Artificial sequence
  SiRNA target sequence
gtgtctattggaacgaatgtt

SEQ ID NO: 287090 - DNA, 21 bp, Artificial sequence
  SiRNA target sequence
tgtctattggaacgaatgttt

SEQ ID NO: 287091 - DNA, 21 bp, Artificial sequence
  SiRNA target sequence
gtctattggaacgaatgttta

SEQ ID NO: 287092 - DNA, 21 bp, Artificial sequence
  SiRNA target sequence
tctattggaacgaatgtttat

SEQ ID NO: 287093 - DNA, 21 bp, Artificial sequence
  SiRNA target sequence
ctattggaacgaatgtttatt

SEQ ID NO: 287094 - DNA, 21 bp, Artificial sequence
  SiRNA target sequence
tattggaacgaatgtttattc

SEQ ID NO: 287095 - DNA, 21 bp, Artificial sequence
  SiRNA target sequence
attggaacgaatgtttattca

SEQ ID NO: 287096 - DNA, 21 bp, Artificial sequence
  SiRNA target sequence
ttggaacgaatgtttattcac

SEQ ID NO: 287097 - DNA, 21 bp, Artificial sequence
  SiRNA target sequence
tggaacgaatgtttattcaca

SEQ ID NO: 287098 - DNA, 21 bp, Artificial sequence
  SiRNA target sequence
ggaacgaatgtttattcacaa

SEQ ID NO: 287099 - DNA, 21 bp, Artificial sequence
  SiRNA target sequence
gaacgaatgtttattcacaag

SEQ ID NO: 287100 - DNA, 21 bp, Artificial sequence
  SiRNA target sequence
aacgaatgtttattcacaaga

SEQ ID NO: 287101 - DNA, 21 bp, Artificial sequence
  SiRNA target sequence
acgaatgtttattcacaagac

SEQ ID NO: 287102 - DNA, 21 bp, Artificial sequence
  SiRNA target sequence
cgaatgtttattcacaagact

SEQ ID NO: 287103 - DNA, 21 bp, Artificial sequence
  SiRNA target sequence
gaatgtttattcacaagactg

SEQ ID NO: 287104 - DNA, 21 bp, Artificial sequence
  SiRNA target sequence
aatgtttattcacaagactgg

SEQ ID NO: 287105 - DNA, 21 bp, Artificial sequence
  SiRNA target sequence
atgtttattcacaagactgga

SEQ ID NO: 287106 - DNA, 21 bp, Artificial sequence
  SiRNA target sequence
tgtttattcacaagactggag

SEQ ID NO: 287107 - DNA, 21 bp, Artificial sequence
  SiRNA target sequence
gtttattcacaagactggagt

SEQ ID NO: 287108 - DNA, 21 bp, Artificial sequence
  SiRNA target sequence
tttattcacaagactggagta

SEQ ID NO: 287109 - DNA, 21 bp, Artificial sequence
  SiRNA target sequence
ttattcacaagactggagtaa

SEQ ID NO: 287110 - DNA, 21 bp, Artificial sequence
  SiRNA target sequence
tattcacaagactggagtaaa

SEQ ID NO: 287111 - DNA, 21 bp, Artificial sequence
  SiRNA target sequence
attcacaagactggagtaaaa

SEQ ID NO: 287112 - DNA, 21 bp, Artificial sequence
  SiRNA target sequence
ttcacaagactggagtaaaac

SEQ ID NO: 287113 - DNA, 21 bp, Artificial sequence
  SiRNA target sequence
tcacaagactggagtaaaact

SEQ ID NO: 287114 - DNA, 21 bp, Artificial sequence
  SiRNA target sequence
cacaagactggagtaaaactg

SEQ ID NO: 287115 - DNA, 21 bp, Artificial sequence
  SiRNA target sequence
acaagactggagtaaaactgt

SEQ ID NO: 287116 - DNA, 21 bp, Artificial sequence
  SiRNA target sequence
caagactggagtaaaactgtt

SEQ ID NO: 287117 - DNA, 21 bp, Artificial sequence
  SiRNA target sequence
aagactggagtaaaactgtta

SEQ ID NO: 287118 - DNA, 21 bp, Artificial sequence
  SiRNA target sequence
agactggagtaaaactgttag

SEQ ID NO: 287119 - DNA, 21 bp, Artificial sequence
  SiRNA target sequence
gactggagtaaaactgttagg

SEQ ID NO: 287120 - DNA, 21 bp, Artificial sequence
  SiRNA target sequence
actggagtaaaactgttagga

SEQ ID NO: 287121 - DNA, 21 bp, Artificial sequence
  SiRNA target sequence
ctggagtaaaactgttaggaa

SEQ ID NO: 287122 - DNA, 21 bp, Artificial sequence
  SiRNA target sequence
tggagtaaaactgttaggaaa

SEQ ID NO: 287123 - DNA, 21 bp, Artificial sequence
  SiRNA target sequence
ggagtaaaactgttaggaaat

SEQ ID NO: 287124 - DNA, 21 bp, Artificial sequence
  SiRNA target sequence
gagtaaaactgttaggaaatt

SEQ ID NO: 287125 - DNA, 21 bp, Artificial sequence
  SiRNA target sequence
agtaaaactgttaggaaatta

SEQ ID NO: 287126 - DNA, 21 bp, Artificial sequence
  SiRNA target sequence
gtaaaactgttaggaaattaa

SEQ ID NO: 287127 - DNA, 21 bp, Artificial sequence
  SiRNA target sequence
taaaactgttaggaaattaac

SEQ ID NO: 287128 - DNA, 21 bp, Artificial sequence
  SiRNA target sequence
aaaactgttaggaaattaacc

SEQ ID NO: 287129 - DNA, 21 bp, Artificial sequence
  SiRNA target sequence
aaactgttaggaaattaacca

SEQ ID NO: 287130 - DNA, 21 bp, Artificial sequence
  SiRNA target sequence
aactgttaggaaattaaccaa

SEQ ID NO: 287131 - DNA, 21 bp, Artificial sequence
  SiRNA target sequence
actgttaggaaattaaccaaa

SEQ ID NO: 287132 - DNA, 21 bp, Artificial sequence
  SiRNA target sequence
ctgttaggaaattaaccaaat

SEQ ID NO: 287133 - DNA, 21 bp, Artificial sequence
  SiRNA target sequence
tgttaggaaattaaccaaatt

SEQ ID NO: 287134 - DNA, 21 bp, Artificial sequence
  SiRNA target sequence
gttaggaaattaaccaaattt

SEQ ID NO: 287135 - DNA, 21 bp, Artificial sequence
  SiRNA target sequence
ttaggaaattaaccaaatttg

SEQ ID NO: 287136 - DNA, 21 bp, Artificial sequence
  SiRNA target sequence
taggaaattaaccaaatttgg

SEQ ID NO: 287137 - DNA, 21 bp, Artificial sequence
  SiRNA target sequence
aggaaattaaccaaatttgga

SEQ ID NO: 287138 - DNA, 21 bp, Artificial sequence
  SiRNA target sequence
ggaaattaaccaaatttggaa

SEQ ID NO: 287139 - DNA, 21 bp, Artificial sequence
  SiRNA target sequence
gaaattaaccaaatttggaaa

SEQ ID NO: 287140 - DNA, 21 bp, Artificial sequence
  SiRNA target sequence
aaattaaccaaatttggaaat

SEQ ID NO: 287141 - DNA, 21 bp, Artificial sequence
  SiRNA target sequence
aattaaccaaatttggaaata

SEQ ID NO: 287142 - DNA, 21 bp, Artificial sequence
  SiRNA target sequence
attaaccaaatttggaaataa

SEQ ID NO: 287143 - DNA, 21 bp, Artificial sequence
  SiRNA target sequence
ttaaccaaatttggaaataaa

SEQ ID NO: 287144 - DNA, 21 bp, Artificial sequence
  SiRNA target sequence
taaccaaatttggaaataaag

SEQ ID NO: 287145 - DNA, 21 bp, Artificial sequence
  SiRNA target sequence
aaccaaatttggaaataaagt

SEQ ID NO: 287146 - DNA, 21 bp, Artificial sequence
  SiRNA target sequence
accaaatttggaaataaagta

SEQ ID NO: 287147 - DNA, 21 bp, Artificial sequence
  SiRNA target sequence
ccaaatttggaaataaagtaa

SEQ ID NO: 287148 - DNA, 21 bp, Artificial sequence
  SiRNA target sequence
caaatttggaaataaagtaat

SEQ ID NO: 287149 - DNA, 21 bp, Artificial sequence
  SiRNA target sequence
aaatttggaaataaagtaatt

SEQ ID NO: 287150 - DNA, 21 bp, Artificial sequence
  SiRNA target sequence
aatttggaaataaagtaattg

SEQ ID NO: 287151 - DNA, 21 bp, Artificial sequence
  SiRNA target sequence
atttggaaataaagtaattgc

SEQ ID NO: 287152 - DNA, 21 bp, Artificial sequence
  SiRNA target sequence
tttggaaataaagtaattgct

SEQ ID NO: 287153 - DNA, 21 bp, Artificial sequence
  SiRNA target sequence
ttggaaataaagtaattgctg

SEQ ID NO: 287154 - DNA, 21 bp, Artificial sequence
  SiRNA target sequence
tggaaataaagtaattgctgg

SEQ ID NO: 287155 - DNA, 21 bp, Artificial sequence
  SiRNA target sequence
ggaaataaagtaattgctggt

SEQ ID NO: 287156 - DNA, 21 bp, Artificial sequence
  SiRNA target sequence
gaaataaagtaattgctggtg

SEQ ID NO: 287157 - DNA, 21 bp, Artificial sequence
  SiRNA target sequence
aaataaagtaattgctggtga

SEQ ID NO: 287158 - DNA, 21 bp, Artificial sequence
  SiRNA target sequence
aataaagtaattgctggtgat

SEQ ID NO: 287159 - DNA, 21 bp, Artificial sequence
  SiRNA target sequence
ataaagtaattgctggtgatt

SEQ ID NO: 287160 - DNA, 21 bp, Artificial sequence
  SiRNA target sequence
taaagtaattgctggtgattt

SEQ ID NO: 287161 - DNA, 21 bp, Artificial sequence
  SiRNA target sequence
aaagtaattgctggtgatttt

SEQ ID NO: 287162 - DNA, 21 bp, Artificial sequence
  SiRNA target sequence
aagtaattgctggtgattttt

SEQ ID NO: 287163 - DNA, 21 bp, Artificial sequence
  SiRNA target sequence
agtaattgctggtgatttttc

SEQ ID NO: 287164 - DNA, 21 bp, Artificial sequence
  SiRNA target sequence
gtaattgctggtgatttttca

SEQ ID NO: 287165 - DNA, 21 bp, Artificial sequence
  SiRNA target sequence
taattgctggtgatttttcaa

SEQ ID NO: 287166 - DNA, 21 bp, Artificial sequence
  SiRNA target sequence
aattgctggtgatttttcaac

SEQ ID NO: 287167 - DNA, 21 bp, Artificial sequence
  SiRNA target sequence
attgctggtgatttttcaact

SEQ ID NO: 287168 - DNA, 21 bp, Artificial sequence
  SiRNA target sequence
ttgctggtgatttttcaactt

SEQ ID NO: 287169 - DNA, 21 bp, Artificial sequence
  SiRNA target sequence
tgctggtgatttttcaacttt

SEQ ID NO: 287170 - DNA, 21 bp, Artificial sequence
  SiRNA target sequence
gctggtgatttttcaactttt

SEQ ID NO: 287171 - DNA, 21 bp, Artificial sequence
  SiRNA target sequence
ctggtgatttttcaacttttg

SEQ ID NO: 287172 - DNA, 21 bp, Artificial sequence
  SiRNA target sequence
tggtgatttttcaacttttga

SEQ ID NO: 287173 - DNA, 21 bp, Artificial sequence
  SiRNA target sequence
ggtgatttttcaacttttgat

SEQ ID NO: 287174 - DNA, 21 bp, Artificial sequence
  SiRNA target sequence
gtgatttttcaacttttgatg

SEQ ID NO: 287175 - DNA, 21 bp, Artificial sequence
  SiRNA target sequence
tgatttttcaacttttgatgg

SEQ ID NO: 287176 - DNA, 21 bp, Artificial sequence
  SiRNA target sequence
gatttttcaacttttgatgga

SEQ ID NO: 287177 - DNA, 21 bp, Artificial sequence
  SiRNA target sequence
atttttcaacttttgatggat

SEQ ID NO: 287178 - DNA, 21 bp, Artificial sequence
  SiRNA target sequence
tttttcaacttttgatggatc

SEQ ID NO: 287179 - DNA, 21 bp, Artificial sequence
  SiRNA target sequence
ttttcaacttttgatggatca

SEQ ID NO: 287180 - DNA, 21 bp, Artificial sequence
  SiRNA target sequence
tttcaacttttgatggatcac

SEQ ID NO: 287181 - DNA, 21 bp, Artificial sequence
  SiRNA target sequence
ttcaacttttgatggatcact

SEQ ID NO: 287182 - DNA, 21 bp, Artificial sequence
  SiRNA target sequence
tcaacttttgatggatcacta

SEQ ID NO: 287183 - DNA, 21 bp, Artificial sequence
  SiRNA target sequence
caacttttgatggatcactaa

SEQ ID NO: 287184 - DNA, 21 bp, Artificial sequence
  SiRNA target sequence
aacttttgatggatcactaaa

SEQ ID NO: 287185 - DNA, 21 bp, Artificial sequence
  SiRNA target sequence
acttttgatggatcactaaac

SEQ ID NO: 287186 - DNA, 21 bp, Artificial sequence
  SiRNA target sequence
cttttgatggatcactaaacg

SEQ ID NO: 287187 - DNA, 21 bp, Artificial sequence
  SiRNA target sequence
ttttgatggatcactaaacgt

SEQ ID NO: 287188 - DNA, 21 bp, Artificial sequence
  SiRNA target sequence
tttgatggatcactaaacgtt

SEQ ID NO: 287189 - DNA, 21 bp, Artificial sequence
  SiRNA target sequence
ttgatggatcactaaacgttt

SEQ ID NO: 287190 - DNA, 21 bp, Artificial sequence
  SiRNA target sequence
tgatggatcactaaacgtttg

SEQ ID NO: 287191 - DNA, 21 bp, Artificial sequence
  SiRNA target sequence
gatggatcactaaacgtttgc

SEQ ID NO: 287192 - DNA, 21 bp, Artificial sequence
  SiRNA target sequence
atggatcactaaacgtttgca

SEQ ID NO: 287193 - DNA, 21 bp, Artificial sequence
  SiRNA target sequence
tggatcactaaacgtttgcat

SEQ ID NO: 287194 - DNA, 21 bp, Artificial sequence
  SiRNA target sequence
ggatcactaaacgtttgcatt

SEQ ID NO: 287195 - DNA, 21 bp, Artificial sequence
  SiRNA target sequence
gatcactaaacgtttgcatta

SEQ ID NO: 287196 - DNA, 21 bp, Artificial sequence
  SiRNA target sequence
atcactaaacgtttgcattat

SEQ ID NO: 287197 - DNA, 21 bp, Artificial sequence
  SiRNA target sequence
tcactaaacgtttgcattatg

SEQ ID NO: 287198 - DNA, 21 bp, Artificial sequence
  SiRNA target sequence
cactaaacgtttgcattatgg

SEQ ID NO: 287199 - DNA, 21 bp, Artificial sequence
  SiRNA target sequence
actaaacgtttgcattatgga

SEQ ID NO: 287200 - DNA, 21 bp, Artificial sequence
  SiRNA target sequence
ctaaacgtttgcattatggaa

SEQ ID NO: 287201 - DNA, 21 bp, Artificial sequence
  SiRNA target sequence
taaacgtttgcattatggaaa

SEQ ID NO: 287202 - DNA, 21 bp, Artificial sequence
  SiRNA target sequence
aaacgtttgcattatggaaaa

SEQ ID NO: 287203 - DNA, 21 bp, Artificial sequence
  SiRNA target sequence
aacgtttgcattatggaaaaa

SEQ ID NO: 287204 - DNA, 21 bp, Artificial sequence
  SiRNA target sequence
acgtttgcattatggaaaaat

SEQ ID NO: 287205 - DNA, 21 bp, Artificial sequence
  SiRNA target sequence
cgtttgcattatggaaaaatt

SEQ ID NO: 287206 - DNA, 21 bp, Artificial sequence
  SiRNA target sequence
gtttgcattatggaaaaattt

SEQ ID NO: 287207 - DNA, 21 bp, Artificial sequence
  SiRNA target sequence
tttgcattatggaaaaatttg

SEQ ID NO: 287208 - DNA, 21 bp, Artificial sequence
  SiRNA target sequence
ttgcattatggaaaaatttgc

SEQ ID NO: 287209 - DNA, 21 bp, Artificial sequence
  SiRNA target sequence
tgcattatggaaaaatttgca

SEQ ID NO: 287210 - DNA, 21 bp, Artificial sequence
  SiRNA target sequence
gcattatggaaaaatttgcag

SEQ ID NO: 287211 - DNA, 21 bp, Artificial sequence
  SiRNA target sequence
cattatggaaaaatttgcaga

SEQ ID NO: 287212 - DNA, 21 bp, Artificial sequence
  SiRNA target sequence
attatggaaaaatttgcagat

SEQ ID NO: 287213 - DNA, 21 bp, Artificial sequence
  SiRNA target sequence
ttatggaaaaatttgcagatt

SEQ ID NO: 287214 - DNA, 21 bp, Artificial sequence
  SiRNA target sequence
tatggaaaaatttgcagattt

SEQ ID NO: 287215 - DNA, 21 bp, Artificial sequence
  SiRNA target sequence
atggaaaaatttgcagattta

SEQ ID NO: 287216 - DNA, 21 bp, Artificial sequence
  SiRNA target sequence
tggaaaaatttgcagatttag

SEQ ID NO: 287217 - DNA, 21 bp, Artificial sequence
  SiRNA target sequence
ggaaaaatttgcagatttagc

SEQ ID NO: 287218 - DNA, 21 bp, Artificial sequence
  SiRNA target sequence
gaaaaatttgcagatttagct

SEQ ID NO: 287219 - DNA, 21 bp, Artificial sequence
  SiRNA target sequence
aaaaatttgcagatttagcta

SEQ ID NO: 287220 - DNA, 21 bp, Artificial sequence
  SiRNA target sequence
aaaatttgcagatttagctaa

SEQ ID NO: 287221 - DNA, 21 bp, Artificial sequence
  SiRNA target sequence
aaatttgcagatttagctaat

SEQ ID NO: 287222 - DNA, 21 bp, Artificial sequence
  SiRNA target sequence
aatttgcagatttagctaatg

SEQ ID NO: 287223 - DNA, 21 bp, Artificial sequence
  SiRNA target sequence
atttgcagatttagctaatga

SEQ ID NO: 287224 - DNA, 21 bp, Artificial sequence
  SiRNA target sequence
tttgcagatttagctaatgag

SEQ ID NO: 287225 - DNA, 21 bp, Artificial sequence
  SiRNA target sequence
ttgcagatttagctaatgagt

SEQ ID NO: 287226 - DNA, 21 bp, Artificial sequence
  SiRNA target sequence
tgcagatttagctaatgagtt

SEQ ID NO: 287227 - DNA, 21 bp, Artificial sequence
  SiRNA target sequence
gcagatttagctaatgagttt

SEQ ID NO: 287228 - DNA, 21 bp, Artificial sequence
  SiRNA target sequence
cagatttagctaatgagtttt

SEQ ID NO: 287229 - DNA, 21 bp, Artificial sequence
  SiRNA target sequence
agatttagctaatgagtttta

SEQ ID NO: 287230 - DNA, 21 bp, Artificial sequence
  SiRNA target sequence
gatttagctaatgagttttac

SEQ ID NO: 287231 - DNA, 21 bp, Artificial sequence
  SiRNA target sequence
atttagctaatgagttttacg

SEQ ID NO: 287232 - DNA, 21 bp, Artificial sequence
  SiRNA target sequence
tttagctaatgagttttacga

SEQ ID NO: 287233 - DNA, 21 bp, Artificial sequence
  SiRNA target sequence
ttagctaatgagttttacgat

SEQ ID NO: 287234 - DNA, 21 bp, Artificial sequence
  SiRNA target sequence
tagctaatgagttttacgatg

SEQ ID NO: 287235 - DNA, 21 bp, Artificial sequence
  SiRNA target sequence
agctaatgagttttacgatga

SEQ ID NO: 287236 - DNA, 21 bp, Artificial sequence
  SiRNA target sequence
gctaatgagttttacgatgat

SEQ ID NO: 287237 - DNA, 21 bp, Artificial sequence
  SiRNA target sequence
ctaatgagttttacgatgatg

SEQ ID NO: 287238 - DNA, 21 bp, Artificial sequence
  SiRNA target sequence
taatgagttttacgatgatgg

SEQ ID NO: 287239 - DNA, 21 bp, Artificial sequence
  SiRNA target sequence
aatgagttttacgatgatgga

SEQ ID NO: 287240 - DNA, 21 bp, Artificial sequence
  SiRNA target sequence
atgagttttacgatgatggac

SEQ ID NO: 287241 - DNA, 21 bp, Artificial sequence
  SiRNA target sequence
tgagttttacgatgatggacc

SEQ ID NO: 287242 - DNA, 21 bp, Artificial sequence
  SiRNA target sequence
gagttttacgatgatggacca

SEQ ID NO: 287243 - DNA, 21 bp, Artificial sequence
  SiRNA target sequence
agttttacgatgatggaccag

SEQ ID NO: 287244 - DNA, 21 bp, Artificial sequence
  SiRNA target sequence
gttttacgatgatggaccaga

SEQ ID NO: 287245 - DNA, 21 bp, Artificial sequence
  SiRNA target sequence
ttttacgatgatggaccagaa

SEQ ID NO: 287246 - DNA, 21 bp, Artificial sequence
  SiRNA target sequence
tttacgatgatggaccagaaa

SEQ ID NO: 287247 - DNA, 21 bp, Artificial sequence
  SiRNA target sequence
ttacgatgatggaccagaaaa

SEQ ID NO: 287248 - DNA, 21 bp, Artificial sequence
  SiRNA target sequence
tacgatgatggaccagaaaat

SEQ ID NO: 287249 - DNA, 21 bp, Artificial sequence
  SiRNA target sequence
acgatgatggaccagaaaatg

SEQ ID NO: 287250 - DNA, 21 bp, Artificial sequence
  SiRNA target sequence
cgatgatggaccagaaaatgc

SEQ ID NO: 287251 - DNA, 21 bp, Artificial sequence
  SiRNA target sequence
gatgatggaccagaaaatgct

SEQ ID NO: 287252 - DNA, 21 bp, Artificial sequence
  SiRNA target sequence
atgatggaccagaaaatgctt

SEQ ID NO: 287253 - DNA, 21 bp, Artificial sequence
  SiRNA target sequence
tgatggaccagaaaatgcttt

SEQ ID NO: 287254 - DNA, 21 bp, Artificial sequence
  SiRNA target sequence
gatggaccagaaaatgctttg

SEQ ID NO: 287255 - DNA, 21 bp, Artificial sequence
  SiRNA target sequence
atggaccagaaaatgctttga

SEQ ID NO: 287256 - DNA, 21 bp, Artificial sequence
  SiRNA target sequence
tggaccagaaaatgctttgat

SEQ ID NO: 287257 - DNA, 21 bp, Artificial sequence
  SiRNA target sequence
ggaccagaaaatgctttgatc

SEQ ID NO: 287258 - DNA, 21 bp, Artificial sequence
  SiRNA target sequence
gaccagaaaatgctttgatcc

SEQ ID NO: 287259 - DNA, 21 bp, Artificial sequence
  SiRNA target sequence
accagaaaatgctttgatccg

SEQ ID NO: 287260 - DNA, 21 bp, Artificial sequence
  SiRNA target sequence
ccagaaaatgctttgatccgt

SEQ ID NO: 287261 - DNA, 21 bp, Artificial sequence
  SiRNA target sequence
cagaaaatgctttgatccgtc

SEQ ID NO: 287262 - DNA, 21 bp, Artificial sequence
  SiRNA target sequence
agaaaatgctttgatccgtca

SEQ ID NO: 287263 - DNA, 21 bp, Artificial sequence
  SiRNA target sequence
gaaaatgctttgatccgtcat

SEQ ID NO: 287264 - DNA, 21 bp, Artificial sequence
  SiRNA target sequence
aaaatgctttgatccgtcatg

SEQ ID NO: 287265 - DNA, 21 bp, Artificial sequence
  SiRNA target sequence
aaatgctttgatccgtcatgt

SEQ ID NO: 287266 - DNA, 21 bp, Artificial sequence
  SiRNA target sequence
aatgctttgatccgtcatgta

SEQ ID NO: 287267 - DNA, 21 bp, Artificial sequence
  SiRNA target sequence
atgctttgatccgtcatgtat

SEQ ID NO: 287268 - DNA, 21 bp, Artificial sequence
  SiRNA target sequence
tgctttgatccgtcatgtatt

SEQ ID NO: 287269 - DNA, 21 bp, Artificial sequence
  SiRNA target sequence
gctttgatccgtcatgtatta

SEQ ID NO: 287270 - DNA, 21 bp, Artificial sequence
  SiRNA target sequence
ctttgatccgtcatgtattat

SEQ ID NO: 287271 - DNA, 21 bp, Artificial sequence
  SiRNA target sequence
tttgatccgtcatgtattatt

SEQ ID NO: 287272 - DNA, 21 bp, Artificial sequence
  SiRNA target sequence
ttgatccgtcatgtattattg

SEQ ID NO: 287273 - DNA, 21 bp, Artificial sequence
  SiRNA target sequence
tgatccgtcatgtattattgg

SEQ ID NO: 287274 - DNA, 21 bp, Artificial sequence
  SiRNA target sequence
gatccgtcatgtattattggt

SEQ ID NO: 287275 - DNA, 21 bp, Artificial sequence
  SiRNA target sequence
atccgtcatgtattattggtg

SEQ ID NO: 287276 - DNA, 21 bp, Artificial sequence
  SiRNA target sequence
tccgtcatgtattattggtgg

SEQ ID NO: 287277 - DNA, 21 bp, Artificial sequence
  SiRNA target sequence
ccgtcatgtattattggtgga

SEQ ID NO: 287278 - DNA, 21 bp, Artificial sequence
  SiRNA target sequence
cgtcatgtattattggtggat

SEQ ID NO: 287279 - DNA, 21 bp, Artificial sequence
  SiRNA target sequence
gtcatgtattattggtggatg

SEQ ID NO: 287280 - DNA, 21 bp, Artificial sequence
  SiRNA target sequence
tcatgtattattggtggatgt

SEQ ID NO: 287281 - DNA, 21 bp, Artificial sequence
  SiRNA target sequence
catgtattattggtggatgtg

SEQ ID NO: 287282 - DNA, 21 bp, Artificial sequence
  SiRNA target sequence
atgtattattggtggatgtgt

SEQ ID NO: 287283 - DNA, 21 bp, Artificial sequence
  SiRNA target sequence
tgtattattggtggatgtgta

SEQ ID NO: 287284 - DNA, 21 bp, Artificial sequence
  SiRNA target sequence
gtattattggtggatgtgtac

SEQ ID NO: 287285 - DNA, 21 bp, Artificial sequence
  SiRNA target sequence
tattattggtggatgtgtaca

SEQ ID NO: 287286 - DNA, 21 bp, Artificial sequence
  SiRNA target sequence
attattggtggatgtgtacaa

SEQ ID NO: 287287 - DNA, 21 bp, Artificial sequence
  SiRNA target sequence
ttattggtggatgtgtacaat

SEQ ID NO: 287288 - DNA, 21 bp, Artificial sequence
  SiRNA target sequence
tattggtggatgtgtacaatt

SEQ ID NO: 287289 - DNA, 21 bp, Artificial sequence
  SiRNA target sequence
attggtggatgtgtacaattc

SEQ ID NO: 287290 - DNA, 21 bp, Artificial sequence
  SiRNA target sequence
ttggtggatgtgtacaattct

SEQ ID NO: 287291 - DNA, 21 bp, Artificial sequence
  SiRNA target sequence
tggtggatgtgtacaattctg

SEQ ID NO: 287292 - DNA, 21 bp, Artificial sequence
  SiRNA target sequence
ggtggatgtgtacaattctgt

SEQ ID NO: 287293 - DNA, 21 bp, Artificial sequence
  SiRNA target sequence
gtggatgtgtacaattctgtg

SEQ ID NO: 287294 - DNA, 21 bp, Artificial sequence
  SiRNA target sequence
tggatgtgtacaattctgtgc

SEQ ID NO: 287295 - DNA, 21 bp, Artificial sequence
  SiRNA target sequence
ggatgtgtacaattctgtgca

SEQ ID NO: 287296 - DNA, 21 bp, Artificial sequence
  SiRNA target sequence
gatgtgtacaattctgtgcat

SEQ ID NO: 287297 - DNA, 21 bp, Artificial sequence
  SiRNA target sequence
atgtgtacaattctgtgcata

SEQ ID NO: 287298 - DNA, 21 bp, Artificial sequence
  SiRNA target sequence
tgtgtacaattctgtgcatat

SEQ ID NO: 287299 - DNA, 21 bp, Artificial sequence
  SiRNA target sequence
gtgtacaattctgtgcatatt

SEQ ID NO: 287300 - DNA, 21 bp, Artificial sequence
  SiRNA target sequence
tgtacaattctgtgcatattt

SEQ ID NO: 287301 - DNA, 21 bp, Artificial sequence
  SiRNA target sequence
gtacaattctgtgcatatttg

SEQ ID NO: 287302 - DNA, 21 bp, Artificial sequence
  SiRNA target sequence
tacaattctgtgcatatttgt

SEQ ID NO: 287303 - DNA, 21 bp, Artificial sequence
  SiRNA target sequence
acaattctgtgcatatttgta

SEQ ID NO: 287304 - DNA, 21 bp, Artificial sequence
  SiRNA target sequence
caattctgtgcatatttgtaa

SEQ ID NO: 287305 - DNA, 21 bp, Artificial sequence
  SiRNA target sequence
aattctgtgcatatttgtaat

SEQ ID NO: 287306 - DNA, 21 bp, Artificial sequence
  SiRNA target sequence
attctgtgcatatttgtaatg

SEQ ID NO: 287307 - DNA, 21 bp, Artificial sequence
  SiRNA target sequence
ttctgtgcatatttgtaatga

SEQ ID NO: 287308 - DNA, 21 bp, Artificial sequence
  SiRNA target sequence
tctgtgcatatttgtaatgac

SEQ ID NO: 287309 - DNA, 21 bp, Artificial sequence
  SiRNA target sequence
ctgtgcatatttgtaatgact

SEQ ID NO: 287310 - DNA, 21 bp, Artificial sequence
  SiRNA target sequence
tgtgcatatttgtaatgactc

SEQ ID NO: 287311 - DNA, 21 bp, Artificial sequence
  SiRNA target sequence
gtgcatatttgtaatgactca

SEQ ID NO: 287312 - DNA, 21 bp, Artificial sequence
  SiRNA target sequence
tgcatatttgtaatgactcag

SEQ ID NO: 287313 - DNA, 21 bp, Artificial sequence
  SiRNA target sequence
gcatatttgtaatgactcagt

SEQ ID NO: 287314 - DNA, 21 bp, Artificial sequence
  SiRNA target sequence
catatttgtaatgactcagta

SEQ ID NO: 287315 - DNA, 21 bp, Artificial sequence
  SiRNA target sequence
atatttgtaatgactcagtat

SEQ ID NO: 287316 - DNA, 21 bp, Artificial sequence
  SiRNA target sequence
tatttgtaatgactcagtata

SEQ ID NO: 287317 - DNA, 21 bp, Artificial sequence
  SiRNA target sequence
atttgtaatgactcagtatac

SEQ ID NO: 287318 - DNA, 21 bp, Artificial sequence
  SiRNA target sequence
tttgtaatgactcagtataca

SEQ ID NO: 287319 - DNA, 21 bp, Artificial sequence
  SiRNA target sequence
ttgtaatgactcagtatacat

SEQ ID NO: 287320 - DNA, 21 bp, Artificial sequence
  SiRNA target sequence
tgtaatgactcagtatacatg

SEQ ID NO: 287321 - DNA, 21 bp, Artificial sequence
  SiRNA target sequence
gtaatgactcagtatacatga

SEQ ID NO: 287322 - DNA, 21 bp, Artificial sequence
  SiRNA target sequence
taatgactcagtatacatgat

SEQ ID NO: 287323 - DNA, 21 bp, Artificial sequence
  SiRNA target sequence
aatgactcagtatacatgatg

SEQ ID NO: 287324 - DNA, 21 bp, Artificial sequence
  SiRNA target sequence
atgactcagtatacatgatga

SEQ ID NO: 287325 - DNA, 21 bp, Artificial sequence
  SiRNA target sequence
tgactcagtatacatgatgac

SEQ ID NO: 287326 - DNA, 21 bp, Artificial sequence
  SiRNA target sequence
gactcagtatacatgatgact

SEQ ID NO: 287327 - DNA, 21 bp, Artificial sequence
  SiRNA target sequence
actcagtatacatgatgactc

SEQ ID NO: 287328 - DNA, 21 bp, Artificial sequence
  SiRNA target sequence
ctcagtatacatgatgactca

SEQ ID NO: 287329 - DNA, 21 bp, Artificial sequence
  SiRNA target sequence
tcagtatacatgatgactcat

SEQ ID NO: 287330 - DNA, 21 bp, Artificial sequence
  SiRNA target sequence
cagtatacatgatgactcata

SEQ ID NO: 287331 - DNA, 21 bp, Artificial sequence
  SiRNA target sequence
agtatacatgatgactcatag

SEQ ID NO: 287332 - DNA, 21 bp, Artificial sequence
  SiRNA target sequence
gtatacatgatgactcatagc

SEQ ID NO: 287333 - DNA, 21 bp, Artificial sequence
  SiRNA target sequence
tatacatgatgactcatagcc

SEQ ID NO: 287334 - DNA, 21 bp, Artificial sequence
  SiRNA target sequence
atacatgatgactcatagcca

SEQ ID NO: 287335 - DNA, 21 bp, Artificial sequence
  SiRNA target sequence
tacatgatgactcatagccaa

SEQ ID NO: 287336 - DNA, 21 bp, Artificial sequence
  SiRNA target sequence
acatgatgactcatagccaac

SEQ ID NO: 287337 - DNA, 21 bp, Artificial sequence
  SiRNA target sequence
catgatgactcatagccaacc

SEQ ID NO: 287338 - DNA, 21 bp, Artificial sequence
  SiRNA target sequence
atgatgactcatagccaaccc

SEQ ID NO: 287339 - DNA, 21 bp, Artificial sequence
  SiRNA target sequence
tgatgactcatagccaaccca

SEQ ID NO: 287340 - DNA, 21 bp, Artificial sequence
  SiRNA target sequence
gatgactcatagccaacccac

SEQ ID NO: 287341 - DNA, 21 bp, Artificial sequence
  SiRNA target sequence
atgactcatagccaacccaca

SEQ ID NO: 287342 - DNA, 21 bp, Artificial sequence
  SiRNA target sequence
aatcgctgcaaacgatgattt

SEQ ID NO: 287343 - DNA, 21 bp, Artificial sequence
  SiRNA target sequence
atcgctgcaaacgatgatttt

SEQ ID NO: 287344 - DNA, 21 bp, Artificial sequence
  SiRNA target sequence
tcgctgcaaacgatgattttg

SEQ ID NO: 287345 - DNA, 21 bp, Artificial sequence
  SiRNA target sequence
cgctgcaaacgatgattttgc

SEQ ID NO: 287346 - DNA, 21 bp, Artificial sequence
  SiRNA target sequence
gctgcaaacgatgattttgca

SEQ ID NO: 287347 - DNA, 21 bp, Artificial sequence
  SiRNA target sequence
ctgcaaacgatgattttgcaa

SEQ ID NO: 287348 - DNA, 21 bp, Artificial sequence
  SiRNA target sequence
tgcaaacgatgattttgcaat

SEQ ID NO: 287349 - DNA, 21 bp, Artificial sequence
  SiRNA target sequence
gcaaacgatgattttgcaatt

SEQ ID NO: 287350 - DNA, 21 bp, Artificial sequence
  SiRNA target sequence
caaacgatgattttgcaattg

SEQ ID NO: 287351 - DNA, 21 bp, Artificial sequence
  SiRNA target sequence
aaacgatgattttgcaattga

SEQ ID NO: 287352 - DNA, 21 bp, Artificial sequence
  SiRNA target sequence
aacgatgattttgcaattgag

SEQ ID NO: 287353 - DNA, 21 bp, Artificial sequence
  SiRNA target sequence
acgatgattttgcaattgagg

SEQ ID NO: 287354 - DNA, 21 bp, Artificial sequence
  SiRNA target sequence
cgatgattttgcaattgaggg

SEQ ID NO: 287355 - DNA, 21 bp, Artificial sequence
  SiRNA target sequence
gatgattttgcaattgaggga

SEQ ID NO: 287356 - DNA, 21 bp, Artificial sequence
  SiRNA target sequence
atgattttgcaattgagggaa

SEQ ID NO: 287357 - DNA, 21 bp, Artificial sequence
  SiRNA target sequence
tgattttgcaattgagggaag

SEQ ID NO: 287358 - DNA, 21 bp, Artificial sequence
  SiRNA target sequence
gattttgcaattgagggaagt

SEQ ID NO: 287359 - DNA, 21 bp, Artificial sequence
  SiRNA target sequence
attttgcaattgagggaagtg

SEQ ID NO: 287360 - DNA, 21 bp, Artificial sequence
  SiRNA target sequence
ttttgcaattgagggaagtgc

SEQ ID NO: 287361 - DNA, 21 bp, Artificial sequence
  SiRNA target sequence
tttgcaattgagggaagtgcc

SEQ ID NO: 287362 - DNA, 21 bp, Artificial sequence
  SiRNA target sequence
ttgcaattgagggaagtgcct

SEQ ID NO: 287363 - DNA, 21 bp, Artificial sequence
  SiRNA target sequence
tgcaattgagggaagtgcctg

SEQ ID NO: 287364 - DNA, 21 bp, Artificial sequence
  SiRNA target sequence
gcaattgagggaagtgcctgc

SEQ ID NO: 287365 - DNA, 21 bp, Artificial sequence
  SiRNA target sequence
caattgagggaagtgcctgca

SEQ ID NO: 287366 - DNA, 21 bp, Artificial sequence
  SiRNA target sequence
aattgagggaagtgcctgcaa

SEQ ID NO: 287367 - DNA, 21 bp, Artificial sequence
  SiRNA target sequence
attgagggaagtgcctgcaac

SEQ ID NO: 287368 - DNA, 21 bp, Artificial sequence
  SiRNA target sequence
ttgagggaagtgcctgcaaca

SEQ ID NO: 287369 - DNA, 21 bp, Artificial sequence
  SiRNA target sequence
tgagggaagtgcctgcaacat

SEQ ID NO: 287370 - DNA, 21 bp, Artificial sequence
  SiRNA target sequence
gagggaagtgcctgcaacatg

SEQ ID NO: 287371 - DNA, 21 bp, Artificial sequence
  SiRNA target sequence
agggaagtgcctgcaacatga

SEQ ID NO: 287372 - DNA, 21 bp, Artificial sequence
  SiRNA target sequence
gggaagtgcctgcaacatgaa

SEQ ID NO: 287373 - DNA, 21 bp, Artificial sequence
  SiRNA target sequence
ggaagtgcctgcaacatgaat

SEQ ID NO: 287374 - DNA, 21 bp, Artificial sequence
  SiRNA target sequence
gaagtgcctgcaacatgaatc

SEQ ID NO: 287375 - DNA, 21 bp, Artificial sequence
  SiRNA target sequence
aagtgcctgcaacatgaatcc

SEQ ID NO: 287376 - DNA, 21 bp, Artificial sequence
  SiRNA target sequence
agtgcctgcaacatgaatccg

SEQ ID NO: 287377 - DNA, 21 bp, Artificial sequence
  SiRNA target sequence
gtgcctgcaacatgaatccgg

SEQ ID NO: 287378 - DNA, 21 bp, Artificial sequence
  SiRNA target sequence
tgcctgcaacatgaatccggg

SEQ ID NO: 287379 - DNA, 21 bp, Artificial sequence
  SiRNA target sequence
gcctgcaacatgaatccggga

SEQ ID NO: 287380 - DNA, 21 bp, Artificial sequence
  SiRNA target sequence
cctgcaacatgaatccgggaa

SEQ ID NO: 287381 - DNA, 21 bp, Artificial sequence
  SiRNA target sequence
ctgcaacatgaatccgggaaa

SEQ ID NO: 287382 - DNA, 21 bp, Artificial sequence
  SiRNA target sequence
tgcaacatgaatccgggaaaa

SEQ ID NO: 287383 - DNA, 21 bp, Artificial sequence
  SiRNA target sequence
gcaacatgaatccgggaaaat

SEQ ID NO: 287384 - DNA, 21 bp, Artificial sequence
  SiRNA target sequence
caacatgaatccgggaaaatt

SEQ ID NO: 287385 - DNA, 21 bp, Artificial sequence
  SiRNA target sequence
aacatgaatccgggaaaatta

SEQ ID NO: 287386 - DNA, 21 bp, Artificial sequence
  SiRNA target sequence
acatgaatccgggaaaattaa

SEQ ID NO: 287387 - DNA, 21 bp, Artificial sequence
  SiRNA target sequence
catgaatccgggaaaattaaa

SEQ ID NO: 287388 - DNA, 21 bp, Artificial sequence
  SiRNA target sequence
atgaatccgggaaaattaaac

SEQ ID NO: 287389 - DNA, 21 bp, Artificial sequence
  SiRNA target sequence
tgaatccgggaaaattaaacc

SEQ ID NO: 287390 - DNA, 21 bp, Artificial sequence
  SiRNA target sequence
gaatccgggaaaattaaaccg

SEQ ID NO: 287391 - DNA, 21 bp, Artificial sequence
  SiRNA target sequence
aatccgggaaaattaaaccgc

SEQ ID NO: 287392 - DNA, 21 bp, Artificial sequence
  SiRNA target sequence
atccgggaaaattaaaccgcc

SEQ ID NO: 287393 - DNA, 21 bp, Artificial sequence
  SiRNA target sequence
tccgggaaaattaaaccgccg

SEQ ID NO: 287394 - DNA, 21 bp, Artificial sequence
  SiRNA target sequence
ccgggaaaattaaaccgccgg

SEQ ID NO: 287395 - DNA, 21 bp, Artificial sequence
  SiRNA target sequence
cgggaaaattaaaccgccgga

SEQ ID NO: 287396 - DNA, 21 bp, Artificial sequence
  SiRNA target sequence
gggaaaattaaaccgccggat

SEQ ID NO: 287397 - DNA, 21 bp, Artificial sequence
  SiRNA target sequence
ggaaaattaaaccgccggatc

SEQ ID NO: 287398 - DNA, 21 bp, Artificial sequence
  SiRNA target sequence
gaaaattaaaccgccggatca

SEQ ID NO: 287399 - DNA, 21 bp, Artificial sequence
  SiRNA target sequence
aaaattaaaccgccggatcac

SEQ ID NO: 287400 - DNA, 21 bp, Artificial sequence
  SiRNA target sequence
aaattaaaccgccggatcaca

SEQ ID NO: 287401 - DNA, 21 bp, Artificial sequence
  SiRNA target sequence
aattaaaccgccggatcacat

SEQ ID NO: 287402 - DNA, 21 bp, Artificial sequence
  SiRNA target sequence
attaaaccgccggatcacatt

SEQ ID NO: 287403 - DNA, 21 bp, Artificial sequence
  SiRNA target sequence
ttaaaccgccggatcacattt

SEQ ID NO: 287404 - DNA, 21 bp, Artificial sequence
  SiRNA target sequence
taaaccgccggatcacatttc

SEQ ID NO: 287405 - DNA, 21 bp, Artificial sequence
  SiRNA target sequence
aaaccgccggatcacatttca

SEQ ID NO: 287406 - DNA, 21 bp, Artificial sequence
  SiRNA target sequence
aaccgccggatcacatttcaa

SEQ ID NO: 287407 - DNA, 21 bp, Artificial sequence
  SiRNA target sequence
accgccggatcacatttcaaa

SEQ ID NO: 287408 - DNA, 21 bp, Artificial sequence
  SiRNA target sequence
ccgccggatcacatttcaaaa

SEQ ID NO: 287409 - DNA, 21 bp, Artificial sequence
  SiRNA target sequence
cgccggatcacatttcaaaag

SEQ ID NO: 287410 - DNA, 21 bp, Artificial sequence
  SiRNA target sequence
gccggatcacatttcaaaagc

SEQ ID NO: 287411 - DNA, 21 bp, Artificial sequence
  SiRNA target sequence
ccggatcacatttcaaaagca

SEQ ID NO: 287412 - DNA, 21 bp, Artificial sequence
  SiRNA target sequence
cggatcacatttcaaaagcac

SEQ ID NO: 287413 - DNA, 21 bp, Artificial sequence
  SiRNA target sequence
ggatcacatttcaaaagcacg

SEQ ID NO: 287414 - DNA, 21 bp, Artificial sequence
  SiRNA target sequence
gatcacatttcaaaagcacgg

SEQ ID NO: 287415 - DNA, 21 bp, Artificial sequence
  SiRNA target sequence
atcacatttcaaaagcacggt

SEQ ID NO: 287416 - DNA, 21 bp, Artificial sequence
  SiRNA target sequence
tcacatttcaaaagcacggtg

SEQ ID NO: 287417 - DNA, 21 bp, Artificial sequence
  SiRNA target sequence
cacatttcaaaagcacggtga

SEQ ID NO: 287418 - DNA, 21 bp, Artificial sequence
  SiRNA target sequence
acatttcaaaagcacggtgaa

SEQ ID NO: 287419 - DNA, 21 bp, Artificial sequence
  SiRNA target sequence
catttcaaaagcacggtgaaa

SEQ ID NO: 287420 - DNA, 21 bp, Artificial sequence
  SiRNA target sequence
atttcaaaagcacggtgaaac

SEQ ID NO: 287421 - DNA, 21 bp, Artificial sequence
  SiRNA target sequence
tttcaaaagcacggtgaaacg

SEQ ID NO: 287422 - DNA, 21 bp, Artificial sequence
  SiRNA target sequence
ttcaaaagcacggtgaaacga

SEQ ID NO: 287423 - DNA, 21 bp, Artificial sequence
  SiRNA target sequence
tcaaaagcacggtgaaacgac

SEQ ID NO: 287424 - DNA, 21 bp, Artificial sequence
  SiRNA target sequence
caaaagcacggtgaaacgacg

SEQ ID NO: 287425 - DNA, 21 bp, Artificial sequence
  SiRNA target sequence
aaaagcacggtgaaacgacga

SEQ ID NO: 287426 - DNA, 21 bp, Artificial sequence
  SiRNA target sequence
aaagcacggtgaaacgacgaa

SEQ ID NO: 287427 - DNA, 21 bp, Artificial sequence
  SiRNA target sequence
aagcacggtgaaacgacgaat

SEQ ID NO: 287428 - DNA, 21 bp, Artificial sequence
  SiRNA target sequence
agcacggtgaaacgacgaatg

SEQ ID NO: 287429 - DNA, 21 bp, Artificial sequence
  SiRNA target sequence
gcacggtgaaacgacgaatga

SEQ ID NO: 287430 - DNA, 21 bp, Artificial sequence
  SiRNA target sequence
cacggtgaaacgacgaatgaa

SEQ ID NO: 287431 - DNA, 21 bp, Artificial sequence
  SiRNA target sequence
acggtgaaacgacgaatgaaa

SEQ ID NO: 287432 - DNA, 21 bp, Artificial sequence
  SiRNA target sequence
cggtgaaacgacgaatgaaaa

SEQ ID NO: 287433 - DNA, 21 bp, Artificial sequence
  SiRNA target sequence
ggtgaaacgacgaatgaaaac

SEQ ID NO: 287434 - DNA, 21 bp, Artificial sequence
  SiRNA target sequence
gtgaaacgacgaatgaaaacg

SEQ ID NO: 287435 - DNA, 21 bp, Artificial sequence
  SiRNA target sequence
tgaaacgacgaatgaaaacgg

SEQ ID NO: 287436 - DNA, 21 bp, Artificial sequence
  SiRNA target sequence
gaaacgacgaatgaaaacggg

SEQ ID NO: 287437 - DNA, 21 bp, Artificial sequence
  SiRNA target sequence
aaacgacgaatgaaaacgggt

SEQ ID NO: 287438 - DNA, 21 bp, Artificial sequence
  SiRNA target sequence
aacgacgaatgaaaacgggtt

SEQ ID NO: 287439 - DNA, 21 bp, Artificial sequence
  SiRNA target sequence
acgacgaatgaaaacgggttt

SEQ ID NO: 287440 - DNA, 21 bp, Artificial sequence
  SiRNA target sequence
cgacgaatgaaaacgggttta

SEQ ID NO: 287441 - DNA, 21 bp, Artificial sequence
  SiRNA target sequence
gacgaatgaaaacgggtttaa

SEQ ID NO: 287442 - DNA, 21 bp, Artificial sequence
  SiRNA target sequence
acgaatgaaaacgggtttaaa

SEQ ID NO: 287443 - DNA, 21 bp, Artificial sequence
  SiRNA target sequence
cgaatgaaaacgggtttaaaa

SEQ ID NO: 287444 - DNA, 21 bp, Artificial sequence
  SiRNA target sequence
gaatgaaaacgggtttaaaac

SEQ ID NO: 287445 - DNA, 21 bp, Artificial sequence
  SiRNA target sequence
aatgaaaacgggtttaaaaca

SEQ ID NO: 287446 - DNA, 21 bp, Artificial sequence
  SiRNA target sequence
atgaaaacgggtttaaaacag

SEQ ID NO: 287447 - DNA, 21 bp, Artificial sequence
  SiRNA target sequence
tgaaaacgggtttaaaacaga

SEQ ID NO: 287448 - DNA, 21 bp, Artificial sequence
  SiRNA target sequence
gaaaacgggtttaaaacagat

SEQ ID NO: 287449 - DNA, 21 bp, Artificial sequence
  SiRNA target sequence
aaaacgggtttaaaacagatg

SEQ ID NO: 287450 - DNA, 21 bp, Artificial sequence
  SiRNA target sequence
aaacgggtttaaaacagatgg

SEQ ID NO: 287451 - DNA, 21 bp, Artificial sequence
  SiRNA target sequence
aacgggtttaaaacagatggc

SEQ ID NO: 287452 - DNA, 21 bp, Artificial sequence
  SiRNA target sequence
acgggtttaaaacagatggct

SEQ ID NO: 287453 - DNA, 21 bp, Artificial sequence
  SiRNA target sequence
cgggtttaaaacagatggctg

SEQ ID NO: 287454 - DNA, 21 bp, Artificial sequence
  SiRNA target sequence
gggtttaaaacagatggctgg

SEQ ID NO: 287455 - DNA, 21 bp, Artificial sequence
  SiRNA target sequence
ggtttaaaacagatggctggg

SEQ ID NO: 287456 - DNA, 21 bp, Artificial sequence
  SiRNA target sequence
gtttaaaacagatggctgggt

SEQ ID NO: 287457 - DNA, 21 bp, Artificial sequence
  SiRNA target sequence
tttaaaacagatggctgggtg

SEQ ID NO: 287458 - DNA, 21 bp, Artificial sequence
  SiRNA target sequence
ttaaaacagatggctgggtgg

SEQ ID NO: 287459 - DNA, 21 bp, Artificial sequence
  SiRNA target sequence
taaaacagatggctgggtgga

SEQ ID NO: 287460 - DNA, 21 bp, Artificial sequence
  SiRNA target sequence
aaaacagatggctgggtggat

SEQ ID NO: 287461 - DNA, 21 bp, Artificial sequence
  SiRNA target sequence
aaacagatggctgggtggatg

SEQ ID NO: 287462 - DNA, 21 bp, Artificial sequence
  SiRNA target sequence
aacagatggctgggtggatgt

SEQ ID NO: 287463 - DNA, 21 bp, Artificial sequence
  SiRNA target sequence
acagatggctgggtggatgtg

SEQ ID NO: 287464 - DNA, 21 bp, Artificial sequence
  SiRNA target sequence
cagatggctgggtggatgtgc

SEQ ID NO: 287465 - DNA, 21 bp, Artificial sequence
  SiRNA target sequence
agatggctgggtggatgtgca

SEQ ID NO: 287466 - DNA, 21 bp, Artificial sequence
  SiRNA target sequence
gatggctgggtggatgtgcag

SEQ ID NO: 287467 - DNA, 21 bp, Artificial sequence
  SiRNA target sequence
atggctgggtggatgtgcaga

SEQ ID NO: 287468 - DNA, 21 bp, Artificial sequence
  SiRNA target sequence
tggctgggtggatgtgcagac

SEQ ID NO: 287469 - DNA, 21 bp, Artificial sequence
  SiRNA target sequence
ggctgggtggatgtgcagacg

SEQ ID NO: 287470 - DNA, 21 bp, Artificial sequence
  SiRNA target sequence
gctgggtggatgtgcagacgg

SEQ ID NO: 287471 - DNA, 21 bp, Artificial sequence
  SiRNA target sequence
ctgggtggatgtgcagacggt

SEQ ID NO: 287472 - DNA, 21 bp, Artificial sequence
  SiRNA target sequence
tgggtggatgtgcagacggtt

SEQ ID NO: 287473 - DNA, 21 bp, Artificial sequence
  SiRNA target sequence
gggtggatgtgcagacggttt

SEQ ID NO: 287474 - DNA, 21 bp, Artificial sequence
  SiRNA target sequence
ggtggatgtgcagacggtttg

SEQ ID NO: 287475 - DNA, 21 bp, Artificial sequence
  SiRNA target sequence
gtggatgtgcagacggtttgg

SEQ ID NO: 287476 - DNA, 21 bp, Artificial sequence
  SiRNA target sequence
tggatgtgcagacggtttggg

SEQ ID NO: 287477 - DNA, 21 bp, Artificial sequence
  SiRNA target sequence
ggatgtgcagacggtttgggc

SEQ ID NO: 287478 - DNA, 21 bp, Artificial sequence
  SiRNA target sequence
gatgtgcagacggtttgggcg

SEQ ID NO: 287479 - DNA, 21 bp, Artificial sequence
  SiRNA target sequence
atgtgcagacggtttgggcgt

SEQ ID NO: 287480 - DNA, 21 bp, Artificial sequence
  SiRNA target sequence
tgtgcagacggtttgggcgtg

SEQ ID NO: 287481 - DNA, 21 bp, Artificial sequence
  SiRNA target sequence
gtgcagacggtttgggcgtgc

SEQ ID NO: 287482 - DNA, 21 bp, Artificial sequence
  SiRNA target sequence
tgcagacggtttgggcgtgca

SEQ ID NO: 287483 - DNA, 21 bp, Artificial sequence
  SiRNA target sequence
gcagacggtttgggcgtgcat

SEQ ID NO: 287484 - DNA, 21 bp, Artificial sequence
  SiRNA target sequence
cagacggtttgggcgtgcatc

SEQ ID NO: 287485 - DNA, 21 bp, Artificial sequence
  SiRNA target sequence
agacggtttgggcgtgcatca

SEQ ID NO: 287486 - DNA, 21 bp, Artificial sequence
  SiRNA target sequence
gacggtttgggcgtgcatcaa

SEQ ID NO: 287487 - DNA, 21 bp, Artificial sequence
  SiRNA target sequence
acggtttgggcgtgcatcaag

SEQ ID NO: 287488 - DNA, 21 bp, Artificial sequence
  SiRNA target sequence
cggtttgggcgtgcatcaaga

SEQ ID NO: 287489 - DNA, 21 bp, Artificial sequence
  SiRNA target sequence
ggtttgggcgtgcatcaagac

SEQ ID NO: 287490 - DNA, 21 bp, Artificial sequence
  SiRNA target sequence
gtttgggcgtgcatcaagacg

SEQ ID NO: 287491 - DNA, 21 bp, Artificial sequence
  SiRNA target sequence
tttgggcgtgcatcaagacgc

SEQ ID NO: 287492 - DNA, 21 bp, Artificial sequence
  SiRNA target sequence
ttgggcgtgcatcaagacgct

SEQ ID NO: 287493 - DNA, 21 bp, Artificial sequence
  SiRNA target sequence
tgggcgtgcatcaagacgctg

SEQ ID NO: 287494 - DNA, 21 bp, Artificial sequence
  SiRNA target sequence
gggcgtgcatcaagacgctga

SEQ ID NO: 287495 - DNA, 21 bp, Artificial sequence
  SiRNA target sequence
ggcgtgcatcaagacgctgaa

SEQ ID NO: 287496 - DNA, 21 bp, Artificial sequence
  SiRNA target sequence
gcgtgcatcaagacgctgaaa

SEQ ID NO: 287497 - DNA, 21 bp, Artificial sequence
  SiRNA target sequence
cgtgcatcaagacgctgaaag

SEQ ID NO: 287498 - DNA, 21 bp, Artificial sequence
  SiRNA target sequence
gtgcatcaagacgctgaaagg

SEQ ID NO: 287499 - DNA, 21 bp, Artificial sequence
  SiRNA target sequence
tgcatcaagacgctgaaaggg

SEQ ID NO: 287500 - DNA, 21 bp, Artificial sequence
  SiRNA target sequence
gcatcaagacgctgaaaggga

SEQ ID NO: 287501 - DNA, 21 bp, Artificial sequence
  SiRNA target sequence
catcaagacgctgaaagggaa

SEQ ID NO: 287502 - DNA, 21 bp, Artificial sequence
  SiRNA target sequence
atcaagacgctgaaagggaaa

SEQ ID NO: 287503 - DNA, 21 bp, Artificial sequence
  SiRNA target sequence
tcaagacgctgaaagggaaag

SEQ ID NO: 287504 - DNA, 21 bp, Artificial sequence
  SiRNA target sequence
caagacgctgaaagggaaaga

SEQ ID NO: 287505 - DNA, 21 bp, Artificial sequence
  SiRNA target sequence
aagacgctgaaagggaaagaa

SEQ ID NO: 287506 - DNA, 21 bp, Artificial sequence
  SiRNA target sequence
agacgctgaaagggaaagaat

SEQ ID NO: 287507 - DNA, 21 bp, Artificial sequence
  SiRNA target sequence
gacgctgaaagggaaagaatt

SEQ ID NO: 287508 - DNA, 21 bp, Artificial sequence
  SiRNA target sequence
acgctgaaagggaaagaattt

SEQ ID NO: 287509 - DNA, 21 bp, Artificial sequence
  SiRNA target sequence
cgctgaaagggaaagaatttt

SEQ ID NO: 287510 - DNA, 21 bp, Artificial sequence
  SiRNA target sequence
gctgaaagggaaagaatttta

SEQ ID NO: 287511 - DNA, 21 bp, Artificial sequence
  SiRNA target sequence
ctgaaagggaaagaattttat

SEQ ID NO: 287512 - DNA, 21 bp, Artificial sequence
  SiRNA target sequence
tgaaagggaaagaattttatg

SEQ ID NO: 287513 - DNA, 21 bp, Artificial sequence
  SiRNA target sequence
gaaagggaaagaattttatga

SEQ ID NO: 287514 - DNA, 21 bp, Artificial sequence
  SiRNA target sequence
aaagggaaagaattttatgaa

SEQ ID NO: 287515 - DNA, 21 bp, Artificial sequence
  SiRNA target sequence
aagggaaagaattttatgaag

SEQ ID NO: 287516 - DNA, 21 bp, Artificial sequence
  SiRNA target sequence
agggaaagaattttatgaagc

SEQ ID NO: 287517 - DNA, 21 bp, Artificial sequence
  SiRNA target sequence
gggaaagaattttatgaagcc

SEQ ID NO: 287518 - DNA, 21 bp, Artificial sequence
  SiRNA target sequence
ggaaagaattttatgaagcct

SEQ ID NO: 287519 - DNA, 21 bp, Artificial sequence
  SiRNA target sequence
gaaagaattttatgaagcctc

SEQ ID NO: 287520 - DNA, 21 bp, Artificial sequence
  SiRNA target sequence
aaagaattttatgaagcctct

SEQ ID NO: 287521 - DNA, 21 bp, Artificial sequence
  SiRNA target sequence
aagaattttatgaagcctcta

SEQ ID NO: 287522 - DNA, 21 bp, Artificial sequence
  SiRNA target sequence
agaattttatgaagcctctac

SEQ ID NO: 287523 - DNA, 21 bp, Artificial sequence
  SiRNA target sequence
gaattttatgaagcctctact

SEQ ID NO: 287524 - DNA, 21 bp, Artificial sequence
  SiRNA target sequence
aattttatgaagcctctacta

SEQ ID NO: 287525 - DNA, 21 bp, Artificial sequence
  SiRNA target sequence
attttatgaagcctctactac

SEQ ID NO: 287526 - DNA, 21 bp, Artificial sequence
  SiRNA target sequence
ttttatgaagcctctactaca

SEQ ID NO: 287527 - DNA, 21 bp, Artificial sequence
  SiRNA target sequence
tttatgaagcctctactacac

SEQ ID NO: 287528 - DNA, 21 bp, Artificial sequence
  SiRNA target sequence
ttatgaagcctctactacaca

SEQ ID NO: 287529 - DNA, 21 bp, Artificial sequence
  SiRNA target sequence
tatgaagcctctactacacag

SEQ ID NO: 287530 - DNA, 21 bp, Artificial sequence
  SiRNA target sequence
atgaagcctctactacacaga

SEQ ID NO: 287531 - DNA, 21 bp, Artificial sequence
  SiRNA target sequence
tgaagcctctactacacagaa

SEQ ID NO: 287532 - DNA, 21 bp, Artificial sequence
  SiRNA target sequence
gaagcctctactacacagaac

SEQ ID NO: 287533 - DNA, 21 bp, Artificial sequence
  SiRNA target sequence
aagcctctactacacagaacc

SEQ ID NO: 287534 - DNA, 21 bp, Artificial sequence
  SiRNA target sequence
agcctctactacacagaacca

SEQ ID NO: 287535 - DNA, 21 bp, Artificial sequence
  SiRNA target sequence
gcctctactacacagaaccaa

SEQ ID NO: 287536 - DNA, 21 bp, Artificial sequence
  SiRNA target sequence
cctctactacacagaaccaaa

SEQ ID NO: 287537 - DNA, 21 bp, Artificial sequence
  SiRNA target sequence
ctctactacacagaaccaaaa

SEQ ID NO: 287538 - DNA, 21 bp, Artificial sequence
  SiRNA target sequence
tctactacacagaaccaaaat

SEQ ID NO: 287539 - DNA, 21 bp, Artificial sequence
  SiRNA target sequence
ctactacacagaaccaaaata

SEQ ID NO: 287540 - DNA, 21 bp, Artificial sequence
  SiRNA target sequence
tactacacagaaccaaaatac

SEQ ID NO: 287541 - DNA, 21 bp, Artificial sequence
  SiRNA target sequence
actacacagaaccaaaataca

SEQ ID NO: 287542 - DNA, 21 bp, Artificial sequence
  SiRNA target sequence
ctacacagaaccaaaatacaa

SEQ ID NO: 287543 - DNA, 21 bp, Artificial sequence
  SiRNA target sequence
tacacagaaccaaaatacaac

SEQ ID NO: 287544 - DNA, 21 bp, Artificial sequence
  SiRNA target sequence
acacagaaccaaaatacaaca

SEQ ID NO: 287545 - DNA, 21 bp, Artificial sequence
  SiRNA target sequence
cacagaaccaaaatacaacac

SEQ ID NO: 287546 - DNA, 21 bp, Artificial sequence
  SiRNA target sequence
acagaaccaaaatacaacacg

SEQ ID NO: 287547 - DNA, 21 bp, Artificial sequence
  SiRNA target sequence
cagaaccaaaatacaacacgg

SEQ ID NO: 287548 - DNA, 21 bp, Artificial sequence
  SiRNA target sequence
agaaccaaaatacaacacggt

SEQ ID NO: 287549 - DNA, 21 bp, Artificial sequence
  SiRNA target sequence
gaaccaaaatacaacacggtt

SEQ ID NO: 287550 - DNA, 21 bp, Artificial sequence
  SiRNA target sequence
aaccaaaatacaacacggttt

SEQ ID NO: 287551 - DNA, 21 bp, Artificial sequence
  SiRNA target sequence
accaaaatacaacacggttta

SEQ ID NO: 287552 - DNA, 21 bp, Artificial sequence
  SiRNA target sequence
ccaaaatacaacacggtttat

SEQ ID NO: 287553 - DNA, 21 bp, Artificial sequence
  SiRNA target sequence
caaaatacaacacggtttatc

SEQ ID NO: 287554 - DNA, 21 bp, Artificial sequence
  SiRNA target sequence
aaaatacaacacggtttatca

SEQ ID NO: 287555 - DNA, 21 bp, Artificial sequence
  SiRNA target sequence
aaatacaacacggtttatcat

SEQ ID NO: 287556 - DNA, 21 bp, Artificial sequence
  SiRNA target sequence
aatacaacacggtttatcatc

SEQ ID NO: 287557 - DNA, 21 bp, Artificial sequence
  SiRNA target sequence
atacaacacggtttatcatcc

SEQ ID NO: 287558 - DNA, 21 bp, Artificial sequence
  SiRNA target sequence
tacaacacggtttatcatccg

SEQ ID NO: 287559 - DNA, 21 bp, Artificial sequence
  SiRNA target sequence
acaacacggtttatcatccgg

SEQ ID NO: 287560 - DNA, 21 bp, Artificial sequence
  SiRNA target sequence
caacacggtttatcatccggt

SEQ ID NO: 287561 - DNA, 21 bp, Artificial sequence
  SiRNA target sequence
aacacggtttatcatccggta

SEQ ID NO: 287562 - DNA, 21 bp, Artificial sequence
  SiRNA target sequence
acacggtttatcatccggtat

SEQ ID NO: 287563 - DNA, 21 bp, Artificial sequence
  SiRNA target sequence
cacggtttatcatccggtatc

SEQ ID NO: 287564 - DNA, 21 bp, Artificial sequence
  SiRNA target sequence
acggtttatcatccggtatcg

SEQ ID NO: 287565 - DNA, 21 bp, Artificial sequence
  SiRNA target sequence
cggtttatcatccggtatcga

SEQ ID NO: 287566 - DNA, 21 bp, Artificial sequence
  SiRNA target sequence
ggtttatcatccggtatcgaa

SEQ ID NO: 287567 - DNA, 21 bp, Artificial sequence
  SiRNA target sequence
gtttatcatccggtatcgaaa

SEQ ID NO: 287568 - DNA, 21 bp, Artificial sequence
  SiRNA target sequence
tttatcatccggtatcgaaaa

SEQ ID NO: 287569 - DNA, 21 bp, Artificial sequence
  SiRNA target sequence
ttatcatccggtatcgaaaag

SEQ ID NO: 287570 - DNA, 21 bp, Artificial sequence
  SiRNA target sequence
tatcatccggtatcgaaaagg

SEQ ID NO: 287571 - DNA, 21 bp, Artificial sequence
  SiRNA target sequence
atcatccggtatcgaaaaggg

SEQ ID NO: 287572 - DNA, 21 bp, Artificial sequence
  SiRNA target sequence
tcatccggtatcgaaaagggc

SEQ ID NO: 287573 - DNA, 21 bp, Artificial sequence
  SiRNA target sequence
catccggtatcgaaaagggct

SEQ ID NO: 287574 - DNA, 21 bp, Artificial sequence
  SiRNA target sequence
atccggtatcgaaaagggctt

SEQ ID NO: 287575 - DNA, 21 bp, Artificial sequence
  SiRNA target sequence
tccggtatcgaaaagggcttc

SEQ ID NO: 287576 - DNA, 21 bp, Artificial sequence
  SiRNA target sequence
ccggtatcgaaaagggcttca

SEQ ID NO: 287577 - DNA, 21 bp, Artificial sequence
  SiRNA target sequence
cggtatcgaaaagggcttcac

SEQ ID NO: 287578 - DNA, 21 bp, Artificial sequence
  SiRNA target sequence
ggtatcgaaaagggcttcacc

SEQ ID NO: 287579 - DNA, 21 bp, Artificial sequence
  SiRNA target sequence
gtatcgaaaagggcttcaccc

SEQ ID NO: 287580 - DNA, 21 bp, Artificial sequence
  SiRNA target sequence
tatcgaaaagggcttcaccct

SEQ ID NO: 287581 - DNA, 21 bp, Artificial sequence
  SiRNA target sequence
atcgaaaagggcttcaccctg

SEQ ID NO: 287582 - DNA, 21 bp, Artificial sequence
  SiRNA target sequence
tcgaaaagggcttcaccctga

SEQ ID NO: 287583 - DNA, 21 bp, Artificial sequence
  SiRNA target sequence
cgaaaagggcttcaccctgac

SEQ ID NO: 287584 - DNA, 21 bp, Artificial sequence
  SiRNA target sequence
gaaaagggcttcaccctgaca

SEQ ID NO: 287585 - DNA, 21 bp, Artificial sequence
  SiRNA target sequence
aaaagggcttcaccctgacat

SEQ ID NO: 287586 - DNA, 21 bp, Artificial sequence
  SiRNA target sequence
aaagggcttcaccctgacatg

SEQ ID NO: 287587 - DNA, 21 bp, Artificial sequence
  SiRNA target sequence
aagggcttcaccctgacatga

SEQ ID NO: 287588 - DNA, 21 bp, Artificial sequence
  SiRNA target sequence
agggcttcaccctgacatgag

SEQ ID NO: 287589 - DNA, 21 bp, Artificial sequence
  SiRNA target sequence
gggcttcaccctgacatgagg

SEQ ID NO: 287590 - DNA, 21 bp, Artificial sequence
  SiRNA target sequence
ggcttcaccctgacatgagga

SEQ ID NO: 287591 - DNA, 21 bp, Artificial sequence
  SiRNA target sequence
gcttcaccctgacatgaggat

SEQ ID NO: 287592 - DNA, 21 bp, Artificial sequence
  SiRNA target sequence
cttcaccctgacatgaggatc

SEQ ID NO: 287593 - DNA, 21 bp, Artificial sequence
  SiRNA target sequence
ttcaccctgacatgaggatca

SEQ ID NO: 287594 - DNA, 21 bp, Artificial sequence
  SiRNA target sequence
tcaccctgacatgaggatcaa

SEQ ID NO: 287595 - DNA, 21 bp, Artificial sequence
  SiRNA target sequence
caccctgacatgaggatcaaa

SEQ ID NO: 287596 - DNA, 21 bp, Artificial sequence
  SiRNA target sequence
accctgacatgaggatcaaat

SEQ ID NO: 287597 - DNA, 21 bp, Artificial sequence
  SiRNA target sequence
ccctgacatgaggatcaaata

SEQ ID NO: 287598 - DNA, 21 bp, Artificial sequence
  SiRNA target sequence
cctgacatgaggatcaaatat

SEQ ID NO: 287599 - DNA, 21 bp, Artificial sequence
  SiRNA target sequence
ctgacatgaggatcaaatata

SEQ ID NO: 287600 - DNA, 21 bp, Artificial sequence
  SiRNA target sequence
tgacatgaggatcaaatataa

SEQ ID NO: 287601 - DNA, 21 bp, Artificial sequence
  SiRNA target sequence
gacatgaggatcaaatataat

SEQ ID NO: 287602 - DNA, 21 bp, Artificial sequence
  SiRNA target sequence
acatgaggatcaaatataata

SEQ ID NO: 287603 - DNA, 21 bp, Artificial sequence
  SiRNA target sequence
catgaggatcaaatataataa

SEQ ID NO: 287604 - DNA, 21 bp, Artificial sequence
  SiRNA target sequence
atgaggatcaaatataataac

SEQ ID NO: 287605 - DNA, 21 bp, Artificial sequence
  SiRNA target sequence
tgaggatcaaatataataacc

SEQ ID NO: 287606 - DNA, 21 bp, Artificial sequence
  SiRNA target sequence
gaggatcaaatataataaccg

SEQ ID NO: 287607 - DNA, 21 bp, Artificial sequence
  SiRNA target sequence
aggatcaaatataataaccga

SEQ ID NO: 287608 - DNA, 21 bp, Artificial sequence
  SiRNA target sequence
ggatcaaatataataaccgat

SEQ ID NO: 287609 - DNA, 21 bp, Artificial sequence
  SiRNA target sequence
gatcaaatataataaccgata

SEQ ID NO: 287610 - DNA, 21 bp, Artificial sequence
  SiRNA target sequence
atcaaatataataaccgatat

SEQ ID NO: 287611 - DNA, 21 bp, Artificial sequence
  SiRNA target sequence
tcaaatataataaccgatatt

SEQ ID NO: 287612 - DNA, 21 bp, Artificial sequence
  SiRNA target sequence
caaatataataaccgatattt

SEQ ID NO: 287613 - DNA, 21 bp, Artificial sequence
  SiRNA target sequence
aaatataataaccgatatttt

SEQ ID NO: 287614 - DNA, 21 bp, Artificial sequence
  SiRNA target sequence
aatataataaccgatattttg

SEQ ID NO: 287615 - DNA, 21 bp, Artificial sequence
  SiRNA target sequence
atataataaccgatattttga

SEQ ID NO: 287616 - DNA, 21 bp, Artificial sequence
  SiRNA target sequence
tataataaccgatattttgat

SEQ ID NO: 287617 - DNA, 21 bp, Artificial sequence
  SiRNA target sequence
ataataaccgatattttgata

SEQ ID NO: 287618 - DNA, 21 bp, Artificial sequence
  SiRNA target sequence
taataaccgatattttgatat

SEQ ID NO: 287619 - DNA, 21 bp, Artificial sequence
  SiRNA target sequence
aataaccgatattttgatatt

SEQ ID NO: 287620 - DNA, 21 bp, Artificial sequence
  SiRNA target sequence
ataaccgatattttgatattg

SEQ ID NO: 287621 - DNA, 21 bp, Artificial sequence
  SiRNA target sequence
taaccgatattttgatattga

SEQ ID NO: 287622 - DNA, 21 bp, Artificial sequence
  SiRNA target sequence
aaccgatattttgatattgaa

SEQ ID NO: 287623 - DNA, 21 bp, Artificial sequence
  SiRNA target sequence
accgatattttgatattgaag

SEQ ID NO: 287624 - DNA, 21 bp, Artificial sequence
  SiRNA target sequence
ccgatattttgatattgaagc

SEQ ID NO: 287625 - DNA, 21 bp, Artificial sequence
  SiRNA target sequence
cgatattttgatattgaagcc

SEQ ID NO: 287626 - DNA, 21 bp, Artificial sequence
  SiRNA target sequence
gatattttgatattgaagcca

SEQ ID NO: 287627 - DNA, 21 bp, Artificial sequence
  SiRNA target sequence
atattttgatattgaagccat

SEQ ID NO: 287628 - DNA, 21 bp, Artificial sequence
  SiRNA target sequence
tattttgatattgaagccatc

SEQ ID NO: 287629 - DNA, 21 bp, Artificial sequence
  SiRNA target sequence
attttgatattgaagccatca

SEQ ID NO: 287630 - DNA, 21 bp, Artificial sequence
  SiRNA target sequence
ttttgatattgaagccatcat

SEQ ID NO: 287631 - DNA, 21 bp, Artificial sequence
  SiRNA target sequence
tttgatattgaagccatcatt

SEQ ID NO: 287632 - DNA, 21 bp, Artificial sequence
  SiRNA target sequence
ttgatattgaagccatcatta

SEQ ID NO: 287633 - DNA, 21 bp, Artificial sequence
  SiRNA target sequence
tgatattgaagccatcattaa

SEQ ID NO: 287634 - DNA, 21 bp, Artificial sequence
  SiRNA target sequence
gatattgaagccatcattaat

SEQ ID NO: 287635 - DNA, 21 bp, Artificial sequence
  SiRNA target sequence
atattgaagccatcattaatg

SEQ ID NO: 287636 - DNA, 21 bp, Artificial sequence
  SiRNA target sequence
tattgaagccatcattaatga

SEQ ID NO: 287637 - DNA, 21 bp, Artificial sequence
  SiRNA target sequence
attgaagccatcattaatgac

SEQ ID NO: 287638 - DNA, 21 bp, Artificial sequence
  SiRNA target sequence
ttgaagccatcattaatgacg

SEQ ID NO: 287639 - DNA, 21 bp, Artificial sequence
  SiRNA target sequence
tgaagccatcattaatgacga

SEQ ID NO: 287640 - DNA, 21 bp, Artificial sequence
  SiRNA target sequence
gaagccatcattaatgacgac

SEQ ID NO: 287641 - DNA, 21 bp, Artificial sequence
  SiRNA target sequence
aagccatcattaatgacgacg

SEQ ID NO: 287642 - DNA, 21 bp, Artificial sequence
  SiRNA target sequence
agccatcattaatgacgacga

SEQ ID NO: 287643 - DNA, 21 bp, Artificial sequence
  SiRNA target sequence
gccatcattaatgacgacgaa

SEQ ID NO: 287644 - DNA, 21 bp, Artificial sequence
  SiRNA target sequence
ccatcattaatgacgacgaaa

SEQ ID NO: 287645 - DNA, 21 bp, Artificial sequence
  SiRNA target sequence
catcattaatgacgacgaaat

SEQ ID NO: 287646 - DNA, 21 bp, Artificial sequence
  SiRNA target sequence
atcattaatgacgacgaaatg

SEQ ID NO: 287647 - DNA, 21 bp, Artificial sequence
  SiRNA target sequence
tcattaatgacgacgaaatga

SEQ ID NO: 287648 - DNA, 21 bp, Artificial sequence
  SiRNA target sequence
cattaatgacgacgaaatgaa

SEQ ID NO: 287649 - DNA, 21 bp, Artificial sequence
  SiRNA target sequence
attaatgacgacgaaatgaat

SEQ ID NO: 287650 - DNA, 21 bp, Artificial sequence
  SiRNA target sequence
ttaatgacgacgaaatgaata

SEQ ID NO: 287651 - DNA, 21 bp, Artificial sequence
  SiRNA target sequence
taatgacgacgaaatgaataa

SEQ ID NO: 287652 - DNA, 21 bp, Artificial sequence
  SiRNA target sequence
aatgacgacgaaatgaataaa

SEQ ID NO: 287653 - DNA, 21 bp, Artificial sequence
  SiRNA target sequence
atgacgacgaaatgaataaaa

SEQ ID NO: 287654 - DNA, 21 bp, Artificial sequence
  SiRNA target sequence
tgacgacgaaatgaataaaac

SEQ ID NO: 287655 - DNA, 21 bp, Artificial sequence
  SiRNA target sequence
gacgacgaaatgaataaaacc

SEQ ID NO: 287656 - DNA, 21 bp, Artificial sequence
  SiRNA target sequence
acgacgaaatgaataaaaccc

SEQ ID NO: 287657 - DNA, 21 bp, Artificial sequence
  SiRNA target sequence
cgacgaaatgaataaaaccct

SEQ ID NO: 287658 - DNA, 21 bp, Artificial sequence
  SiRNA target sequence
gacgaaatgaataaaaccctg

SEQ ID NO: 287659 - DNA, 21 bp, Artificial sequence
  SiRNA target sequence
acgaaatgaataaaaccctga

SEQ ID NO: 287660 - DNA, 21 bp, Artificial sequence
  SiRNA target sequence
cgaaatgaataaaaccctgac

SEQ ID NO: 287661 - DNA, 21 bp, Artificial sequence
  SiRNA target sequence
gaaatgaataaaaccctgacg

SEQ ID NO: 287662 - DNA, 21 bp, Artificial sequence
  SiRNA target sequence
aaatgaataaaaccctgacga

SEQ ID NO: 287663 - DNA, 21 bp, Artificial sequence
  SiRNA target sequence
aatgaataaaaccctgacgat

SEQ ID NO: 287664 - DNA, 21 bp, Artificial sequence
  SiRNA target sequence
atgaataaaaccctgacgata

SEQ ID NO: 287665 - DNA, 21 bp, Artificial sequence
  SiRNA target sequence
tgaataaaaccctgacgatac

SEQ ID NO: 287666 - DNA, 21 bp, Artificial sequence
  SiRNA target sequence
gaataaaaccctgacgataca

SEQ ID NO: 287667 - DNA, 21 bp, Artificial sequence
  SiRNA target sequence
aataaaaccctgacgatacac

SEQ ID NO: 287668 - DNA, 21 bp, Artificial sequence
  SiRNA target sequence
ataaaaccctgacgatacacg

SEQ ID NO: 287669 - DNA, 21 bp, Artificial sequence
  SiRNA target sequence
taaaaccctgacgatacacgc

SEQ ID NO: 287670 - DNA, 21 bp, Artificial sequence
  SiRNA target sequence
aaaaccctgacgatacacgcc

SEQ ID NO: 287671 - DNA, 21 bp, Artificial sequence
  SiRNA target sequence
aaaccctgacgatacacgcca

SEQ ID NO: 287672 - DNA, 21 bp, Artificial sequence
  SiRNA target sequence
aaccctgacgatacacgccaa

SEQ ID NO: 287673 - DNA, 21 bp, Artificial sequence
  SiRNA target sequence
accctgacgatacacgccaag

SEQ ID NO: 287674 - DNA, 21 bp, Artificial sequence
  SiRNA target sequence
ccctgacgatacacgccaagg

SEQ ID NO: 287675 - DNA, 21 bp, Artificial sequence
  SiRNA target sequence
cctgacgatacacgccaagga

SEQ ID NO: 287676 - DNA, 21 bp, Artificial sequence
  SiRNA target sequence
ctgacgatacacgccaaggag

SEQ ID NO: 287677 - DNA, 21 bp, Artificial sequence
  SiRNA target sequence
tgacgatacacgccaaggaga

SEQ ID NO: 287678 - DNA, 21 bp, Artificial sequence
  SiRNA target sequence
gacgatacacgccaaggagag

SEQ ID NO: 287679 - DNA, 21 bp, Artificial sequence
  SiRNA target sequence
acgatacacgccaaggagagg

SEQ ID NO: 287680 - DNA, 21 bp, Artificial sequence
  SiRNA target sequence
cgatacacgccaaggagaggg

SEQ ID NO: 287681 - DNA, 21 bp, Artificial sequence
  SiRNA target sequence
gatacacgccaaggagagggt

SEQ ID NO: 287682 - DNA, 21 bp, Artificial sequence
  SiRNA target sequence
atacacgccaaggagagggta

SEQ ID NO: 287683 - DNA, 21 bp, Artificial sequence
  SiRNA target sequence
tacacgccaaggagagggtac

SEQ ID NO: 287684 - DNA, 21 bp, Artificial sequence
  SiRNA target sequence
acacgccaaggagagggtaca

SEQ ID NO: 287685 - DNA, 21 bp, Artificial sequence
  SiRNA target sequence
cacgccaaggagagggtacaa

SEQ ID NO: 287686 - DNA, 21 bp, Artificial sequence
  SiRNA target sequence
acgccaaggagagggtacaat

SEQ ID NO: 287687 - DNA, 21 bp, Artificial sequence
  SiRNA target sequence
cgccaaggagagggtacaatg

SEQ ID NO: 287688 - DNA, 21 bp, Artificial sequence
  SiRNA target sequence
gccaaggagagggtacaatga

SEQ ID NO: 287689 - DNA, 21 bp, Artificial sequence
  SiRNA target sequence
ccaaggagagggtacaatgag

SEQ ID NO: 287690 - DNA, 21 bp, Artificial sequence
  SiRNA target sequence
caaggagagggtacaatgagc

SEQ ID NO: 287691 - DNA, 21 bp, Artificial sequence
  SiRNA target sequence
aaggagagggtacaatgagct

SEQ ID NO: 287692 - DNA, 21 bp, Artificial sequence
  SiRNA target sequence
aggagagggtacaatgagctt

SEQ ID NO: 287693 - DNA, 21 bp, Artificial sequence
  SiRNA target sequence
ggagagggtacaatgagcttt

SEQ ID NO: 287694 - DNA, 21 bp, Artificial sequence
  SiRNA target sequence
gagagggtacaatgagctttc

SEQ ID NO: 287695 - DNA, 21 bp, Artificial sequence
  SiRNA target sequence
agagggtacaatgagctttca

SEQ ID NO: 287696 - DNA, 21 bp, Artificial sequence
  SiRNA target sequence
gagggtacaatgagctttcaa

SEQ ID NO: 287697 - DNA, 21 bp, Artificial sequence
  SiRNA target sequence
agggtacaatgagctttcaag

SEQ ID NO: 287698 - DNA, 21 bp, Artificial sequence
  SiRNA target sequence
gggtacaatgagctttcaagt

SEQ ID NO: 287699 - DNA, 21 bp, Artificial sequence
  SiRNA target sequence
ggtacaatgagctttcaagtg

SEQ ID NO: 287700 - DNA, 21 bp, Artificial sequence
  SiRNA target sequence
gtacaatgagctttcaagtgt

SEQ ID NO: 287701 - DNA, 21 bp, Artificial sequence
  SiRNA target sequence
tacaatgagctttcaagtgtc

SEQ ID NO: 287702 - DNA, 21 bp, Artificial sequence
  SiRNA target sequence
acaatgagctttcaagtgtct

SEQ ID NO: 287703 - DNA, 21 bp, Artificial sequence
  SiRNA target sequence
caatgagctttcaagtgtctg

SEQ ID NO: 287704 - DNA, 21 bp, Artificial sequence
  SiRNA target sequence
aatgagctttcaagtgtctgg

SEQ ID NO: 287705 - DNA, 21 bp, Artificial sequence
  SiRNA target sequence
atgagctttcaagtgtctggt

SEQ ID NO: 287706 - DNA, 21 bp, Artificial sequence
  SiRNA target sequence
tgagctttcaagtgtctggta

SEQ ID NO: 287707 - DNA, 21 bp, Artificial sequence
  SiRNA target sequence
gagctttcaagtgtctggtat

SEQ ID NO: 287708 - DNA, 21 bp, Artificial sequence
  SiRNA target sequence
agctttcaagtgtctggtatg

SEQ ID NO: 287709 - DNA, 21 bp, Artificial sequence
  SiRNA target sequence
gctttcaagtgtctggtatgg

SEQ ID NO: 287710 - DNA, 21 bp, Artificial sequence
  SiRNA target sequence
ctttcaagtgtctggtatgga

SEQ ID NO: 287711 - DNA, 21 bp, Artificial sequence
  SiRNA target sequence
tttcaagtgtctggtatggag

SEQ ID NO: 287712 - DNA, 21 bp, Artificial sequence
  SiRNA target sequence
ttcaagtgtctggtatggagg

SEQ ID NO: 287713 - DNA, 21 bp, Artificial sequence
  SiRNA target sequence
tcaagtgtctggtatggagga

SEQ ID NO: 287714 - DNA, 21 bp, Artificial sequence
  SiRNA target sequence
caagtgtctggtatggaggaa

SEQ ID NO: 287715 - DNA, 21 bp, Artificial sequence
  SiRNA target sequence
aagtgtctggtatggaggaat

SEQ ID NO: 287716 - DNA, 21 bp, Artificial sequence
  SiRNA target sequence
agtgtctggtatggaggaatt

SEQ ID NO: 287717 - DNA, 21 bp, Artificial sequence
  SiRNA target sequence
gtgtctggtatggaggaatta

SEQ ID NO: 287718 - DNA, 21 bp, Artificial sequence
  SiRNA target sequence
tgtctggtatggaggaattat

SEQ ID NO: 287719 - DNA, 21 bp, Artificial sequence
  SiRNA target sequence
gtctggtatggaggaattatt

SEQ ID NO: 287720 - DNA, 21 bp, Artificial sequence
  SiRNA target sequence
tctggtatggaggaattatta

SEQ ID NO: 287721 - DNA, 21 bp, Artificial sequence
  SiRNA target sequence
ctggtatggaggaattattag

SEQ ID NO: 287722 - DNA, 21 bp, Artificial sequence
  SiRNA target sequence
tggtatggaggaattattagc

SEQ ID NO: 287723 - DNA, 21 bp, Artificial sequence
  SiRNA target sequence
ggtatggaggaattattagcc

SEQ ID NO: 287724 - DNA, 21 bp, Artificial sequence
  SiRNA target sequence
gtatggaggaattattagccc

SEQ ID NO: 287725 - DNA, 21 bp, Artificial sequence
  SiRNA target sequence
tatggaggaattattagccca

SEQ ID NO: 287726 - DNA, 21 bp, Artificial sequence
  SiRNA target sequence
atggaggaattattagcccaa

SEQ ID NO: 287727 - DNA, 21 bp, Artificial sequence
  SiRNA target sequence
tggaggaattattagcccaac

SEQ ID NO: 287728 - DNA, 21 bp, Artificial sequence
  SiRNA target sequence
ggaggaattattagcccaact

SEQ ID NO: 287729 - DNA, 21 bp, Artificial sequence
  SiRNA target sequence
gaggaattattagcccaactc

SEQ ID NO: 287730 - DNA, 21 bp, Artificial sequence
  SiRNA target sequence
aggaattattagcccaactcc

SEQ ID NO: 287731 - DNA, 21 bp, Artificial sequence
  SiRNA target sequence
ggaattattagcccaactccg

SEQ ID NO: 287732 - DNA, 21 bp, Artificial sequence
  SiRNA target sequence
gaattattagcccaactccgc

SEQ ID NO: 287733 - DNA, 21 bp, Artificial sequence
  SiRNA target sequence
aattattagcccaactccgcc

SEQ ID NO: 287734 - DNA, 21 bp, Artificial sequence
  SiRNA target sequence
attattagcccaactccgcca

SEQ ID NO: 287735 - DNA, 21 bp, Artificial sequence
  SiRNA target sequence
ttattagcccaactccgccat

SEQ ID NO: 287736 - DNA, 21 bp, Artificial sequence
  SiRNA target sequence
tattagcccaactccgccata

SEQ ID NO: 287737 - DNA, 21 bp, Artificial sequence
  SiRNA target sequence
attagcccaactccgccatat

SEQ ID NO: 287738 - DNA, 21 bp, Artificial sequence
  SiRNA target sequence
ttagcccaactccgccatatg

SEQ ID NO: 287739 - DNA, 21 bp, Artificial sequence
  SiRNA target sequence
tagcccaactccgccatatgg

SEQ ID NO: 287740 - DNA, 21 bp, Artificial sequence
  SiRNA target sequence
agcccaactccgccatatggg

SEQ ID NO: 287741 - DNA, 21 bp, Artificial sequence
  SiRNA target sequence
gcccaactccgccatatggga

SEQ ID NO: 287742 - DNA, 21 bp, Artificial sequence
  SiRNA target sequence
cccaactccgccatatgggag

SEQ ID NO: 287743 - DNA, 21 bp, Artificial sequence
  SiRNA target sequence
ccaactccgccatatgggaga

SEQ ID NO: 287744 - DNA, 21 bp, Artificial sequence
  SiRNA target sequence
caactccgccatatgggagaa

SEQ ID NO: 287745 - DNA, 21 bp, Artificial sequence
  SiRNA target sequence
aactccgccatatgggagaaa

SEQ ID NO: 287746 - DNA, 21 bp, Artificial sequence
  SiRNA target sequence
actccgccatatgggagaaaa

SEQ ID NO: 287747 - DNA, 21 bp, Artificial sequence
  SiRNA target sequence
ctccgccatatgggagaaaaa

SEQ ID NO: 287748 - DNA, 21 bp, Artificial sequence
  SiRNA target sequence
tccgccatatgggagaaaaag

SEQ ID NO: 287749 - DNA, 21 bp, Artificial sequence
  SiRNA target sequence
ccgccatatgggagaaaaagg

SEQ ID NO: 287750 - DNA, 21 bp, Artificial sequence
  SiRNA target sequence
cgccatatgggagaaaaagga

SEQ ID NO: 287751 - DNA, 21 bp, Artificial sequence
  SiRNA target sequence
gccatatgggagaaaaaggag

SEQ ID NO: 287752 - DNA, 21 bp, Artificial sequence
  SiRNA target sequence
ccatatgggagaaaaaggaga

SEQ ID NO: 287753 - DNA, 21 bp, Artificial sequence
  SiRNA target sequence
catatgggagaaaaaggagac

SEQ ID NO: 287754 - DNA, 21 bp, Artificial sequence
  SiRNA target sequence
atatgggagaaaaaggagaca

SEQ ID NO: 287755 - DNA, 21 bp, Artificial sequence
  SiRNA target sequence
tatgggagaaaaaggagacaa

SEQ ID NO: 287756 - DNA, 21 bp, Artificial sequence
  SiRNA target sequence
atgggagaaaaaggagacaaa

SEQ ID NO: 287757 - DNA, 21 bp, Artificial sequence
  SiRNA target sequence
tgggagaaaaaggagacaaaa

SEQ ID NO: 287758 - DNA, 21 bp, Artificial sequence
  SiRNA target sequence
gggagaaaaaggagacaaaat

SEQ ID NO: 287759 - DNA, 21 bp, Artificial sequence
  SiRNA target sequence
ggagaaaaaggagacaaaata

SEQ ID NO: 287760 - DNA, 21 bp, Artificial sequence
  SiRNA target sequence
gagaaaaaggagacaaaataa

SEQ ID NO: 287761 - DNA, 21 bp, Artificial sequence
  SiRNA target sequence
agaaaaaggagacaaaataaa

SEQ ID NO: 287762 - DNA, 21 bp, Artificial sequence
  SiRNA target sequence
gaaaaaggagacaaaataaaa

SEQ ID NO: 287763 - DNA, 21 bp, Artificial sequence
  SiRNA target sequence
aaaaaggagacaaaataaaag

SEQ ID NO: 287764 - DNA, 21 bp, Artificial sequence
  SiRNA target sequence
aaaaggagacaaaataaaaga

SEQ ID NO: 287765 - DNA, 21 bp, Artificial sequence
  SiRNA target sequence
aaaggagacaaaataaaagag

SEQ ID NO: 287766 - DNA, 21 bp, Artificial sequence
  SiRNA target sequence
aaggagacaaaataaaagagc

SEQ ID NO: 287767 - DNA, 21 bp, Artificial sequence
  SiRNA target sequence
aggagacaaaataaaagagca

SEQ ID NO: 287768 - DNA, 21 bp, Artificial sequence
  SiRNA target sequence
ggagacaaaataaaagagcag

SEQ ID NO: 287769 - DNA, 21 bp, Artificial sequence
  SiRNA target sequence
gagacaaaataaaagagcagg

SEQ ID NO: 287770 - DNA, 21 bp, Artificial sequence
  SiRNA target sequence
agacaaaataaaagagcaggc

SEQ ID NO: 287771 - DNA, 21 bp, Artificial sequence
  SiRNA target sequence
gacaaaataaaagagcaggcc

SEQ ID NO: 287772 - DNA, 21 bp, Artificial sequence
  SiRNA target sequence
acaaaataaaagagcaggccg

SEQ ID NO: 287773 - DNA, 21 bp, Artificial sequence
  SiRNA target sequence
caaaataaaagagcaggccga

SEQ ID NO: 287774 - DNA, 21 bp, Artificial sequence
  SiRNA target sequence
aaaataaaagagcaggccgag

SEQ ID NO: 287775 - DNA, 21 bp, Artificial sequence
  SiRNA target sequence
aaataaaagagcaggccgaga

SEQ ID NO: 287776 - DNA, 21 bp, Artificial sequence
  SiRNA target sequence
aataaaagagcaggccgagat

SEQ ID NO: 287777 - DNA, 21 bp, Artificial sequence
  SiRNA target sequence
ataaaagagcaggccgagatg

SEQ ID NO: 287778 - DNA, 21 bp, Artificial sequence
  SiRNA target sequence
taaaagagcaggccgagatgg

SEQ ID NO: 287779 - DNA, 21 bp, Artificial sequence
  SiRNA target sequence
aaaagagcaggccgagatgga

SEQ ID NO: 287780 - DNA, 21 bp, Artificial sequence
  SiRNA target sequence
aaagagcaggccgagatggaa

SEQ ID NO: 287781 - DNA, 21 bp, Artificial sequence
  SiRNA target sequence
aagagcaggccgagatggaag

SEQ ID NO: 287782 - DNA, 21 bp, Artificial sequence
  SiRNA target sequence
agagcaggccgagatggaagg

SEQ ID NO: 287783 - DNA, 21 bp, Artificial sequence
  SiRNA target sequence
gagcaggccgagatggaaggt

SEQ ID NO: 287784 - DNA, 21 bp, Artificial sequence
  SiRNA target sequence
agcaggccgagatggaaggtg

SEQ ID NO: 287785 - DNA, 21 bp, Artificial sequence
  SiRNA target sequence
gcaggccgagatggaaggtgc

SEQ ID NO: 287786 - DNA, 21 bp, Artificial sequence
  SiRNA target sequence
caggccgagatggaaggtgca

SEQ ID NO: 287787 - DNA, 21 bp, Artificial sequence
  SiRNA target sequence
aggccgagatggaaggtgcaa

SEQ ID NO: 287788 - DNA, 21 bp, Artificial sequence
  SiRNA target sequence
ggccgagatggaaggtgcaaa

SEQ ID NO: 287789 - DNA, 21 bp, Artificial sequence
  SiRNA target sequence
gccgagatggaaggtgcaaaa

SEQ ID NO: 287790 - DNA, 21 bp, Artificial sequence
  SiRNA target sequence
ccgagatggaaggtgcaaaaa

SEQ ID NO: 287791 - DNA, 21 bp, Artificial sequence
  SiRNA target sequence
cgagatggaaggtgcaaaaat

SEQ ID NO: 287792 - DNA, 21 bp, Artificial sequence
  SiRNA target sequence
gagatggaaggtgcaaaaatc

SEQ ID NO: 287793 - DNA, 21 bp, Artificial sequence
  SiRNA target sequence
agatggaaggtgcaaaaatca

SEQ ID NO: 287794 - DNA, 21 bp, Artificial sequence
  SiRNA target sequence
gatggaaggtgcaaaaatcat

SEQ ID NO: 287795 - DNA, 21 bp, Artificial sequence
  SiRNA target sequence
atggaaggtgcaaaaatcatg

SEQ ID NO: 287796 - DNA, 21 bp, Artificial sequence
  SiRNA target sequence
tggaaggtgcaaaaatcatgc

SEQ ID NO: 287797 - DNA, 21 bp, Artificial sequence
  SiRNA target sequence
ggaaggtgcaaaaatcatgca

SEQ ID NO: 287798 - DNA, 21 bp, Artificial sequence
  SiRNA target sequence
gaaggtgcaaaaatcatgcag

SEQ ID NO: 287799 - DNA, 21 bp, Artificial sequence
  SiRNA target sequence
aaggtgcaaaaatcatgcagc

SEQ ID NO: 287800 - DNA, 21 bp, Artificial sequence
  SiRNA target sequence
aggtgcaaaaatcatgcagca

SEQ ID NO: 287801 - DNA, 21 bp, Artificial sequence
  SiRNA target sequence
ggtgcaaaaatcatgcagcaa

SEQ ID NO: 287802 - DNA, 21 bp, Artificial sequence
  SiRNA target sequence
gtgcaaaaatcatgcagcaag

SEQ ID NO: 287803 - DNA, 21 bp, Artificial sequence
  SiRNA target sequence
tgcaaaaatcatgcagcaagc

SEQ ID NO: 287804 - DNA, 21 bp, Artificial sequence
  SiRNA target sequence
gcaaaaatcatgcagcaagcc

SEQ ID NO: 287805 - DNA, 21 bp, Artificial sequence
  SiRNA target sequence
caaaaatcatgcagcaagcca

SEQ ID NO: 287806 - DNA, 21 bp, Artificial sequence
  SiRNA target sequence
aaaaatcatgcagcaagccat

SEQ ID NO: 287807 - DNA, 21 bp, Artificial sequence
  SiRNA target sequence
aaaatcatgcagcaagccatc

SEQ ID NO: 287808 - DNA, 21 bp, Artificial sequence
  SiRNA target sequence
aaatcatgcagcaagccatca

SEQ ID NO: 287809 - DNA, 21 bp, Artificial sequence
  SiRNA target sequence
aatcatgcagcaagccatcaa

SEQ ID NO: 287810 - DNA, 21 bp, Artificial sequence
  SiRNA target sequence
atcatgcagcaagccatcaag

SEQ ID NO: 287811 - DNA, 21 bp, Artificial sequence
  SiRNA target sequence
tcatgcagcaagccatcaagg

SEQ ID NO: 287812 - DNA, 21 bp, Artificial sequence
  SiRNA target sequence
catgcagcaagccatcaagga

SEQ ID NO: 287813 - DNA, 21 bp, Artificial sequence
  SiRNA target sequence
atgcagcaagccatcaaggaa

SEQ ID NO: 287814 - DNA, 21 bp, Artificial sequence
  SiRNA target sequence
tgcagcaagccatcaaggaag

SEQ ID NO: 287815 - DNA, 21 bp, Artificial sequence
  SiRNA target sequence
gcagcaagccatcaaggaagg

SEQ ID NO: 287816 - DNA, 21 bp, Artificial sequence
  SiRNA target sequence
cagcaagccatcaaggaaggt

SEQ ID NO: 287817 - DNA, 21 bp, Artificial sequence
  SiRNA target sequence
agcaagccatcaaggaaggta

SEQ ID NO: 287818 - DNA, 21 bp, Artificial sequence
  SiRNA target sequence
gcaagccatcaaggaaggtac

SEQ ID NO: 287819 - DNA, 21 bp, Artificial sequence
  SiRNA target sequence
caagccatcaaggaaggtact

SEQ ID NO: 287820 - DNA, 21 bp, Artificial sequence
  SiRNA target sequence
aagccatcaaggaaggtactc

SEQ ID NO: 287821 - DNA, 21 bp, Artificial sequence
  SiRNA target sequence
agccatcaaggaaggtactcc

SEQ ID NO: 287822 - DNA, 21 bp, Artificial sequence
  SiRNA target sequence
gccatcaaggaaggtactcct

SEQ ID NO: 287823 - DNA, 21 bp, Artificial sequence
  SiRNA target sequence
ccatcaaggaaggtactccta

SEQ ID NO: 287824 - DNA, 21 bp, Artificial sequence
  SiRNA target sequence
catcaaggaaggtactcctat

SEQ ID NO: 287825 - DNA, 21 bp, Artificial sequence
  SiRNA target sequence
atcaaggaaggtactcctatt

SEQ ID NO: 287826 - DNA, 21 bp, Artificial sequence
  SiRNA target sequence
tcaaggaaggtactcctattg

SEQ ID NO: 287827 - DNA, 21 bp, Artificial sequence
  SiRNA target sequence
caaggaaggtactcctattgg

SEQ ID NO: 287828 - DNA, 21 bp, Artificial sequence
  SiRNA target sequence
aaggaaggtactcctattggt

SEQ ID NO: 287829 - DNA, 21 bp, Artificial sequence
  SiRNA target sequence
aggaaggtactcctattggtc

SEQ ID NO: 287830 - DNA, 21 bp, Artificial sequence
  SiRNA target sequence
ggaaggtactcctattggtcc

SEQ ID NO: 287831 - DNA, 21 bp, Artificial sequence
  SiRNA target sequence
gaaggtactcctattggtcct

SEQ ID NO: 287832 - DNA, 21 bp, Artificial sequence
  SiRNA target sequence
aaggtactcctattggtcctc

SEQ ID NO: 287833 - DNA, 21 bp, Artificial sequence
  SiRNA target sequence
aggtactcctattggtcctca

SEQ ID NO: 287834 - DNA, 21 bp, Artificial sequence
  SiRNA target sequence
ggtactcctattggtcctcat

SEQ ID NO: 287835 - DNA, 21 bp, Artificial sequence
  SiRNA target sequence
gtactcctattggtcctcata

SEQ ID NO: 287836 - DNA, 21 bp, Artificial sequence
  SiRNA target sequence
tactcctattggtcctcatac

SEQ ID NO: 287837 - DNA, 21 bp, Artificial sequence
  SiRNA target sequence
actcctattggtcctcatacc

SEQ ID NO: 287838 - DNA, 21 bp, Artificial sequence
  SiRNA target sequence
ctcctattggtcctcatacca

SEQ ID NO: 287839 - DNA, 21 bp, Artificial sequence
  SiRNA target sequence
tcctattggtcctcataccaa

SEQ ID NO: 287840 - DNA, 21 bp, Artificial sequence
  SiRNA target sequence
cctattggtcctcataccaaa

SEQ ID NO: 287841 - DNA, 21 bp, Artificial sequence
  SiRNA target sequence
ctattggtcctcataccaaac

SEQ ID NO: 287842 - DNA, 21 bp, Artificial sequence
  SiRNA target sequence
tattggtcctcataccaaaca

SEQ ID NO: 287843 - DNA, 21 bp, Artificial sequence
  SiRNA target sequence
attggtcctcataccaaacac

SEQ ID NO: 287844 - DNA, 21 bp, Artificial sequence
  SiRNA target sequence
ttggtcctcataccaaacacg

SEQ ID NO: 287845 - DNA, 21 bp, Artificial sequence
  SiRNA target sequence
tggtcctcataccaaacacgc

SEQ ID NO: 287846 - DNA, 21 bp, Artificial sequence
  SiRNA target sequence
ggtcctcataccaaacacgct

SEQ ID NO: 287847 - DNA, 21 bp, Artificial sequence
  SiRNA target sequence
gtcctcataccaaacacgcta

SEQ ID NO: 287848 - DNA, 21 bp, Artificial sequence
  SiRNA target sequence
tcctcataccaaacacgctag

SEQ ID NO: 287849 - DNA, 21 bp, Artificial sequence
  SiRNA target sequence
cctcataccaaacacgctaga

SEQ ID NO: 287850 - DNA, 21 bp, Artificial sequence
  SiRNA target sequence
ctcataccaaacacgctagag

SEQ ID NO: 287851 - DNA, 21 bp, Artificial sequence
  SiRNA target sequence
tcataccaaacacgctagaga

SEQ ID NO: 287852 - DNA, 21 bp, Artificial sequence
  SiRNA target sequence
cataccaaacacgctagagac

SEQ ID NO: 287853 - DNA, 21 bp, Artificial sequence
  SiRNA target sequence
ataccaaacacgctagagacc

SEQ ID NO: 287854 - DNA, 21 bp, Artificial sequence
  SiRNA target sequence
taccaaacacgctagagacca

SEQ ID NO: 287855 - DNA, 21 bp, Artificial sequence
  SiRNA target sequence
accaaacacgctagagaccat

SEQ ID NO: 287856 - DNA, 21 bp, Artificial sequence
  SiRNA target sequence
ccaaacacgctagagaccatg

SEQ ID NO: 287857 - DNA, 21 bp, Artificial sequence
  SiRNA target sequence
caaacacgctagagaccatgt

SEQ ID NO: 287858 - DNA, 21 bp, Artificial sequence
  SiRNA target sequence
aaacacgctagagaccatgta

SEQ ID NO: 287859 - DNA, 21 bp, Artificial sequence
  SiRNA target sequence
aacacgctagagaccatgtag

SEQ ID NO: 287860 - DNA, 21 bp, Artificial sequence
  SiRNA target sequence
acacgctagagaccatgtaga

SEQ ID NO: 287861 - DNA, 21 bp, Artificial sequence
  SiRNA target sequence
cacgctagagaccatgtagag

SEQ ID NO: 287862 - DNA, 21 bp, Artificial sequence
  SiRNA target sequence
acgctagagaccatgtagaga

SEQ ID NO: 287863 - DNA, 21 bp, Artificial sequence
  SiRNA target sequence
cgctagagaccatgtagagat

SEQ ID NO: 287864 - DNA, 21 bp, Artificial sequence
  SiRNA target sequence
gctagagaccatgtagagatt

SEQ ID NO: 287865 - DNA, 21 bp, Artificial sequence
  SiRNA target sequence
ctagagaccatgtagagattg

SEQ ID NO: 287866 - DNA, 21 bp, Artificial sequence
  SiRNA target sequence
tagagaccatgtagagattga

SEQ ID NO: 287867 - DNA, 21 bp, Artificial sequence
  SiRNA target sequence
agagaccatgtagagattgaa

SEQ ID NO: 287868 - DNA, 21 bp, Artificial sequence
  SiRNA target sequence
gagaccatgtagagattgaaa

SEQ ID NO: 287869 - DNA, 21 bp, Artificial sequence
  SiRNA target sequence
agaccatgtagagattgaaaa

SEQ ID NO: 287870 - DNA, 21 bp, Artificial sequence
  SiRNA target sequence
gaccatgtagagattgaaaag

SEQ ID NO: 287871 - DNA, 21 bp, Artificial sequence
  SiRNA target sequence
accatgtagagattgaaaaga

SEQ ID NO: 287872 - DNA, 21 bp, Artificial sequence
  SiRNA target sequence
ccatgtagagattgaaaagat

SEQ ID NO: 287873 - DNA, 21 bp, Artificial sequence
  SiRNA target sequence
catgtagagattgaaaagata

SEQ ID NO: 287874 - DNA, 21 bp, Artificial sequence
  SiRNA target sequence
atgtagagattgaaaagatag

SEQ ID NO: 287875 - DNA, 21 bp, Artificial sequence
  SiRNA target sequence
tgtagagattgaaaagataga

SEQ ID NO: 287876 - DNA, 21 bp, Artificial sequence
  SiRNA target sequence
gtagagattgaaaagatagac

SEQ ID NO: 287877 - DNA, 21 bp, Artificial sequence
  SiRNA target sequence
tagagattgaaaagatagacg

SEQ ID NO: 287878 - DNA, 21 bp, Artificial sequence
  SiRNA target sequence
agagattgaaaagatagacga

SEQ ID NO: 287879 - DNA, 21 bp, Artificial sequence
  SiRNA target sequence
gagattgaaaagatagacgac

SEQ ID NO: 287880 - DNA, 21 bp, Artificial sequence
  SiRNA target sequence
agattgaaaagatagacgacg

SEQ ID NO: 287881 - DNA, 21 bp, Artificial sequence
  SiRNA target sequence
gattgaaaagatagacgacgg

SEQ ID NO: 287882 - DNA, 21 bp, Artificial sequence
  SiRNA target sequence
attgaaaagatagacgacggc

SEQ ID NO: 287883 - DNA, 21 bp, Artificial sequence
  SiRNA target sequence
ttgaaaagatagacgacggca

SEQ ID NO: 287884 - DNA, 21 bp, Artificial sequence
  SiRNA target sequence
tgaaaagatagacgacggcat

SEQ ID NO: 287885 - DNA, 21 bp, Artificial sequence
  SiRNA target sequence
gaaaagatagacgacggcatg

SEQ ID NO: 287886 - DNA, 21 bp, Artificial sequence
  SiRNA target sequence
aaaagatagacgacggcatga

SEQ ID NO: 287887 - DNA, 21 bp, Artificial sequence
  SiRNA target sequence
aaagatagacgacggcatgat

SEQ ID NO: 287888 - DNA, 21 bp, Artificial sequence
  SiRNA target sequence
aagatagacgacggcatgata

SEQ ID NO: 287889 - DNA, 21 bp, Artificial sequence
  SiRNA target sequence
agatagacgacggcatgatag

SEQ ID NO: 287890 - DNA, 21 bp, Artificial sequence
  SiRNA target sequence
gatagacgacggcatgatagt

SEQ ID NO: 287891 - DNA, 21 bp, Artificial sequence
  SiRNA target sequence
atagacgacggcatgatagtg

SEQ ID NO: 287892 - DNA, 21 bp, Artificial sequence
  SiRNA target sequence
tagacgacggcatgatagtgg

SEQ ID NO: 287893 - DNA, 21 bp, Artificial sequence
  SiRNA target sequence
agacgacggcatgatagtggg

SEQ ID NO: 287894 - DNA, 21 bp, Artificial sequence
  SiRNA target sequence
gacgacggcatgatagtgggc

SEQ ID NO: 287895 - DNA, 21 bp, Artificial sequence
  SiRNA target sequence
acgacggcatgatagtgggct

SEQ ID NO: 287896 - DNA, 21 bp, Artificial sequence
  SiRNA target sequence
cgacggcatgatagtgggcta

SEQ ID NO: 287897 - DNA, 21 bp, Artificial sequence
  SiRNA target sequence
gacggcatgatagtgggctac

SEQ ID NO: 287898 - DNA, 21 bp, Artificial sequence
  SiRNA target sequence
acggcatgatagtgggctacg

SEQ ID NO: 287899 - DNA, 21 bp, Artificial sequence
  SiRNA target sequence
cggcatgatagtgggctacgg

SEQ ID NO: 287900 - DNA, 21 bp, Artificial sequence
  SiRNA target sequence
ggcatgatagtgggctacggt

SEQ ID NO: 287901 - DNA, 21 bp, Artificial sequence
  SiRNA target sequence
gcatgatagtgggctacggtg

SEQ ID NO: 287902 - DNA, 21 bp, Artificial sequence
  SiRNA target sequence
catgatagtgggctacggtga

SEQ ID NO: 287903 - DNA, 21 bp, Artificial sequence
  SiRNA target sequence
atgatagtgggctacggtgaa

SEQ ID NO: 287904 - DNA, 21 bp, Artificial sequence
  SiRNA target sequence
tgatagtgggctacggtgaag

SEQ ID NO: 287905 - DNA, 21 bp, Artificial sequence
  SiRNA target sequence
gatagtgggctacggtgaaga

SEQ ID NO: 287906 - DNA, 21 bp, Artificial sequence
  SiRNA target sequence
atagtgggctacggtgaagag

SEQ ID NO: 287907 - DNA, 21 bp, Artificial sequence
  SiRNA target sequence
tagtgggctacggtgaagagc

SEQ ID NO: 287908 - DNA, 21 bp, Artificial sequence
  SiRNA target sequence
agtgggctacggtgaagagca

SEQ ID NO: 287909 - DNA, 21 bp, Artificial sequence
  SiRNA target sequence
gtgggctacggtgaagagcat

SEQ ID NO: 287910 - DNA, 21 bp, Artificial sequence
  SiRNA target sequence
tgggctacggtgaagagcatt

SEQ ID NO: 287911 - DNA, 21 bp, Artificial sequence
  SiRNA target sequence
gggctacggtgaagagcattt

SEQ ID NO: 287912 - DNA, 21 bp, Artificial sequence
  SiRNA target sequence
ggctacggtgaagagcatttt

SEQ ID NO: 287913 - DNA, 21 bp, Artificial sequence
  SiRNA target sequence
gctacggtgaagagcattttt

SEQ ID NO: 287914 - DNA, 21 bp, Artificial sequence
  SiRNA target sequence
ctacggtgaagagcattttta

SEQ ID NO: 287915 - DNA, 21 bp, Artificial sequence
  SiRNA target sequence
tacggtgaagagcatttttac

SEQ ID NO: 287916 - DNA, 21 bp, Artificial sequence
  SiRNA target sequence
acggtgaagagcatttttaca

SEQ ID NO: 287917 - DNA, 21 bp, Artificial sequence
  SiRNA target sequence
cggtgaagagcatttttacat

SEQ ID NO: 287918 - DNA, 21 bp, Artificial sequence
  SiRNA target sequence
ggtgaagagcatttttacatg

SEQ ID NO: 287919 - DNA, 21 bp, Artificial sequence
  SiRNA target sequence
gtgaagagcatttttacatgc

SEQ ID NO: 287920 - DNA, 21 bp, Artificial sequence
  SiRNA target sequence
tgaagagcatttttacatgct

SEQ ID NO: 287921 - DNA, 21 bp, Artificial sequence
  SiRNA target sequence
gaagagcatttttacatgctt

SEQ ID NO: 287922 - DNA, 21 bp, Artificial sequence
  SiRNA target sequence
aagagcatttttacatgcttt

SEQ ID NO: 287923 - DNA, 21 bp, Artificial sequence
  SiRNA target sequence
agagcatttttacatgctttt

SEQ ID NO: 287924 - DNA, 21 bp, Artificial sequence
  SiRNA target sequence
gagcatttttacatgcttttt

SEQ ID NO: 287925 - DNA, 21 bp, Artificial sequence
  SiRNA target sequence
agcatttttacatgctttttc

SEQ ID NO: 287926 - DNA, 21 bp, Artificial sequence
  SiRNA target sequence
gcatttttacatgctttttct

SEQ ID NO: 287927 - DNA, 21 bp, Artificial sequence
  SiRNA target sequence
catttttacatgctttttctg

SEQ ID NO: 287928 - DNA, 21 bp, Artificial sequence
  SiRNA target sequence
atttttacatgctttttctgg

SEQ ID NO: 287929 - DNA, 21 bp, Artificial sequence
  SiRNA target sequence
tttttacatgctttttctgga

SEQ ID NO: 287930 - DNA, 21 bp, Artificial sequence
  SiRNA target sequence
ttttacatgctttttctggaa

SEQ ID NO: 287931 - DNA, 21 bp, Artificial sequence
  SiRNA target sequence
tttacatgctttttctggaag

SEQ ID NO: 287932 - DNA, 21 bp, Artificial sequence
  SiRNA target sequence
ttacatgctttttctggaagc

SEQ ID NO: 287933 - DNA, 21 bp, Artificial sequence
  SiRNA target sequence
tacatgctttttctggaagcc

SEQ ID NO: 287934 - DNA, 21 bp, Artificial sequence
  SiRNA target sequence
acatgctttttctggaagccg

SEQ ID NO: 287935 - DNA, 21 bp, Artificial sequence
  SiRNA target sequence
catgctttttctggaagccgg

SEQ ID NO: 287936 - DNA, 21 bp, Artificial sequence
  SiRNA target sequence
atgctttttctggaagccggg

SEQ ID NO: 287937 - DNA, 21 bp, Artificial sequence
  SiRNA target sequence
tgctttttctggaagccggga

SEQ ID NO: 287938 - DNA, 21 bp, Artificial sequence
  SiRNA target sequence
gctttttctggaagccgggac

SEQ ID NO: 287939 - DNA, 21 bp, Artificial sequence
  SiRNA target sequence
ctttttctggaagccgggaca

SEQ ID NO: 287940 - DNA, 21 bp, Artificial sequence
  SiRNA target sequence
tttttctggaagccgggacat

SEQ ID NO: 287941 - DNA, 21 bp, Artificial sequence
  SiRNA target sequence
ttttctggaagccgggacatc

SEQ ID NO: 287942 - DNA, 21 bp, Artificial sequence
  SiRNA target sequence
tttctggaagccgggacatct

SEQ ID NO: 287943 - DNA, 21 bp, Artificial sequence
  SiRNA target sequence
ttctggaagccgggacatctg

SEQ ID NO: 287944 - DNA, 21 bp, Artificial sequence
  SiRNA target sequence
tctggaagccgggacatctga

SEQ ID NO: 287945 - DNA, 21 bp, Artificial sequence
  SiRNA target sequence
ctggaagccgggacatctgag

SEQ ID NO: 287946 - DNA, 21 bp, Artificial sequence
  SiRNA target sequence
tggaagccgggacatctgagc

SEQ ID NO: 287947 - DNA, 21 bp, Artificial sequence
  SiRNA target sequence
ggaagccgggacatctgagcg

SEQ ID NO: 287948 - DNA, 21 bp, Artificial sequence
  SiRNA target sequence
gaagccgggacatctgagcga

SEQ ID NO: 287949 - DNA, 21 bp, Artificial sequence
  SiRNA target sequence
aagccgggacatctgagcgat

SEQ ID NO: 287950 - DNA, 21 bp, Artificial sequence
  SiRNA target sequence
agccgggacatctgagcgata

SEQ ID NO: 287951 - DNA, 21 bp, Artificial sequence
  SiRNA target sequence
gccgggacatctgagcgatat

SEQ ID NO: 287952 - DNA, 21 bp, Artificial sequence
  SiRNA target sequence
ccgggacatctgagcgatata

SEQ ID NO: 287953 - DNA, 21 bp, Artificial sequence
  SiRNA target sequence
cgggacatctgagcgatatac

SEQ ID NO: 287954 - DNA, 21 bp, Artificial sequence
  SiRNA target sequence
gggacatctgagcgatataca

SEQ ID NO: 287955 - DNA, 21 bp, Artificial sequence
  SiRNA target sequence
ggacatctgagcgatatacaa

SEQ ID NO: 287956 - DNA, 21 bp, Artificial sequence
  SiRNA target sequence
gacatctgagcgatatacaaa

SEQ ID NO: 287957 - DNA, 21 bp, Artificial sequence
  SiRNA target sequence
acatctgagcgatatacaaaa

SEQ ID NO: 287958 - DNA, 21 bp, Artificial sequence
  SiRNA target sequence
catctgagcgatatacaaaaa

SEQ ID NO: 287959 - DNA, 21 bp, Artificial sequence
  SiRNA target sequence
atctgagcgatatacaaaaac

SEQ ID NO: 287960 - DNA, 21 bp, Artificial sequence
  SiRNA target sequence
tctgagcgatatacaaaaaca

SEQ ID NO: 287961 - DNA, 21 bp, Artificial sequence
  SiRNA target sequence
ctgagcgatatacaaaaacaa

SEQ ID NO: 287962 - DNA, 21 bp, Artificial sequence
  SiRNA target sequence
tgagcgatatacaaaaacaaa

SEQ ID NO: 287963 - DNA, 21 bp, Artificial sequence
  SiRNA target sequence
gagcgatatacaaaaacaaag

SEQ ID NO: 287964 - DNA, 21 bp, Artificial sequence
  SiRNA target sequence
agcgatatacaaaaacaaaga

SEQ ID NO: 287965 - DNA, 21 bp, Artificial sequence
  SiRNA target sequence
gcgatatacaaaaacaaagaa

SEQ ID NO: 287966 - DNA, 21 bp, Artificial sequence
  SiRNA target sequence
cgatatacaaaaacaaagaaa

SEQ ID NO: 287967 - DNA, 21 bp, Artificial sequence
  SiRNA target sequence
gatatacaaaaacaaagaaat

SEQ ID NO: 287968 - DNA, 21 bp, Artificial sequence
  SiRNA target sequence
atatacaaaaacaaagaaata

SEQ ID NO: 287969 - DNA, 21 bp, Artificial sequence
  SiRNA target sequence
tatacaaaaacaaagaaatac

SEQ ID NO: 287970 - DNA, 21 bp, Artificial sequence
  SiRNA target sequence
atacaaaaacaaagaaataca

SEQ ID NO: 287971 - DNA, 21 bp, Artificial sequence
  SiRNA target sequence
tacaaaaacaaagaaatacaa

SEQ ID NO: 287972 - DNA, 21 bp, Artificial sequence
  SiRNA target sequence
acaaaaacaaagaaatacaaa

SEQ ID NO: 287973 - DNA, 21 bp, Artificial sequence
  SiRNA target sequence
caaaaacaaagaaatacaaag

SEQ ID NO: 287974 - DNA, 21 bp, Artificial sequence
  SiRNA target sequence
aaaaacaaagaaatacaaagg

SEQ ID NO: 287975 - DNA, 21 bp, Artificial sequence
  SiRNA target sequence
aaaacaaagaaatacaaaggt

SEQ ID NO: 287976 - DNA, 21 bp, Artificial sequence
  SiRNA target sequence
aaacaaagaaatacaaaggta

SEQ ID NO: 287977 - DNA, 21 bp, Artificial sequence
  SiRNA target sequence
aacaaagaaatacaaaggtaa

SEQ ID NO: 287978 - DNA, 21 bp, Artificial sequence
  SiRNA target sequence
acaaagaaatacaaaggtaaa

SEQ ID NO: 287979 - DNA, 21 bp, Artificial sequence
  SiRNA target sequence
caaagaaatacaaaggtaaag

SEQ ID NO: 287980 - DNA, 21 bp, Artificial sequence
  SiRNA target sequence
aaagaaatacaaaggtaaagt

SEQ ID NO: 287981 - DNA, 21 bp, Artificial sequence
  SiRNA target sequence
aagaaatacaaaggtaaagta

SEQ ID NO: 287982 - DNA, 21 bp, Artificial sequence
  SiRNA target sequence
agaaatacaaaggtaaagtat

SEQ ID NO: 287983 - DNA, 21 bp, Artificial sequence
  SiRNA target sequence
gaaatacaaaggtaaagtatc

SEQ ID NO: 287984 - DNA, 21 bp, Artificial sequence
  SiRNA target sequence
aaatacaaaggtaaagtatcc

SEQ ID NO: 287985 - DNA, 21 bp, Artificial sequence
  SiRNA target sequence
aatacaaaggtaaagtatccg

SEQ ID NO: 287986 - DNA, 21 bp, Artificial sequence
  SiRNA target sequence
atacaaaggtaaagtatccgc

SEQ ID NO: 287987 - DNA, 21 bp, Artificial sequence
  SiRNA target sequence
tacaaaggtaaagtatccgca

SEQ ID NO: 287988 - DNA, 21 bp, Artificial sequence
  SiRNA target sequence
acaaaggtaaagtatccgcaa

SEQ ID NO: 287989 - DNA, 21 bp, Artificial sequence
  SiRNA target sequence
caaaggtaaagtatccgcaag

SEQ ID NO: 287990 - DNA, 21 bp, Artificial sequence
  SiRNA target sequence
aaaggtaaagtatccgcaaga

SEQ ID NO: 287991 - DNA, 21 bp, Artificial sequence
  SiRNA target sequence
aaggtaaagtatccgcaagag

SEQ ID NO: 287992 - DNA, 21 bp, Artificial sequence
  SiRNA target sequence
aggtaaagtatccgcaagagg

SEQ ID NO: 287993 - DNA, 21 bp, Artificial sequence
  SiRNA target sequence
ggtaaagtatccgcaagagga

SEQ ID NO: 287994 - DNA, 21 bp, Artificial sequence
  SiRNA target sequence
gtaaagtatccgcaagaggaa

SEQ ID NO: 287995 - DNA, 21 bp, Artificial sequence
  SiRNA target sequence
taaagtatccgcaagaggaaa

SEQ ID NO: 287996 - DNA, 21 bp, Artificial sequence
  SiRNA target sequence
aaagtatccgcaagaggaaat

SEQ ID NO: 287997 - DNA, 21 bp, Artificial sequence
  SiRNA target sequence
aagtatccgcaagaggaaatg

SEQ ID NO: 287998 - DNA, 21 bp, Artificial sequence
  SiRNA target sequence
agtatccgcaagaggaaatgt

SEQ ID NO: 287999 - DNA, 21 bp, Artificial sequence
  SiRNA target sequence
gtatccgcaagaggaaatgta

SEQ ID NO: 288000 - DNA, 21 bp, Artificial sequence
  SiRNA target sequence
tatccgcaagaggaaatgtag

SEQ ID NO: 288001 - DNA, 21 bp, Artificial sequence
  SiRNA target sequence
atccgcaagaggaaatgtaga

SEQ ID NO: 288002 - DNA, 21 bp, Artificial sequence
  SiRNA target sequence
tccgcaagaggaaatgtagag

SEQ ID NO: 288003 - DNA, 21 bp, Artificial sequence
  SiRNA target sequence
ccgcaagaggaaatgtagagc

SEQ ID NO: 288004 - DNA, 21 bp, Artificial sequence
  SiRNA target sequence
cgcaagaggaaatgtagagcg

SEQ ID NO: 288005 - DNA, 21 bp, Artificial sequence
  SiRNA target sequence
gcaagaggaaatgtagagcgg

SEQ ID NO: 288006 - DNA, 21 bp, Artificial sequence
  SiRNA target sequence
caagaggaaatgtagagcgga

SEQ ID NO: 288007 - DNA, 21 bp, Artificial sequence
  SiRNA target sequence
aagaggaaatgtagagcggat

SEQ ID NO: 288008 - DNA, 21 bp, Artificial sequence
  SiRNA target sequence
agaggaaatgtagagcggatc

SEQ ID NO: 288009 - DNA, 21 bp, Artificial sequence
  SiRNA target sequence
gaggaaatgtagagcggatct

SEQ ID NO: 288010 - DNA, 21 bp, Artificial sequence
  SiRNA target sequence
aggaaatgtagagcggatcta

SEQ ID NO: 288011 - DNA, 21 bp, Artificial sequence
  SiRNA target sequence
ggaaatgtagagcggatctat

SEQ ID NO: 288012 - DNA, 21 bp, Artificial sequence
  SiRNA target sequence
gaaatgtagagcggatctata

SEQ ID NO: 288013 - DNA, 21 bp, Artificial sequence
  SiRNA target sequence
aaatgtagagcggatctataa

SEQ ID NO: 288014 - DNA, 21 bp, Artificial sequence
  SiRNA target sequence
aatgtagagcggatctataat

SEQ ID NO: 288015 - DNA, 21 bp, Artificial sequence
  SiRNA target sequence
atgtagagcggatctataata

SEQ ID NO: 288016 - DNA, 21 bp, Artificial sequence
  SiRNA target sequence
tgtagagcggatctataatag

SEQ ID NO: 288017 - DNA, 21 bp, Artificial sequence
  SiRNA target sequence
gtagagcggatctataatagc

SEQ ID NO: 288018 - DNA, 21 bp, Artificial sequence
  SiRNA target sequence
tagagcggatctataatagca

SEQ ID NO: 288019 - DNA, 21 bp, Artificial sequence
  SiRNA target sequence
agagcggatctataatagcaa

SEQ ID NO: 288020 - DNA, 21 bp, Artificial sequence
  SiRNA target sequence
gagcggatctataatagcaac

SEQ ID NO: 288021 - DNA, 21 bp, Artificial sequence
  SiRNA target sequence
agcggatctataatagcaacg

SEQ ID NO: 288022 - DNA, 21 bp, Artificial sequence
  SiRNA target sequence
gcggatctataatagcaacga

SEQ ID NO: 288023 - DNA, 21 bp, Artificial sequence
  SiRNA target sequence
cggatctataatagcaacgag

SEQ ID NO: 288024 - DNA, 21 bp, Artificial sequence
  SiRNA target sequence
ggatctataatagcaacgaga

SEQ ID NO: 288025 - DNA, 21 bp, Artificial sequence
  SiRNA target sequence
gatctataatagcaacgagaa

SEQ ID NO: 288026 - DNA, 21 bp, Artificial sequence
  SiRNA target sequence
atctataatagcaacgagaaa

SEQ ID NO: 288027 - DNA, 21 bp, Artificial sequence
  SiRNA target sequence
tctataatagcaacgagaaaa

SEQ ID NO: 288028 - DNA, 21 bp, Artificial sequence
  SiRNA target sequence
ctataatagcaacgagaaaaa

SEQ ID NO: 288029 - DNA, 21 bp, Artificial sequence
  SiRNA target sequence
tataatagcaacgagaaaaag

SEQ ID NO: 288030 - DNA, 21 bp, Artificial sequence
  SiRNA target sequence
ataatagcaacgagaaaaagg

SEQ ID NO: 288031 - DNA, 21 bp, Artificial sequence
  SiRNA target sequence
taatagcaacgagaaaaaggc

SEQ ID NO: 288032 - DNA, 21 bp, Artificial sequence
  SiRNA target sequence
aatagcaacgagaaaaaggca

SEQ ID NO: 288033 - DNA, 21 bp, Artificial sequence
  SiRNA target sequence
atagcaacgagaaaaaggcac

SEQ ID NO: 288034 - DNA, 21 bp, Artificial sequence
  SiRNA target sequence
tagcaacgagaaaaaggcact

SEQ ID NO: 288035 - DNA, 21 bp, Artificial sequence
  SiRNA target sequence
agcaacgagaaaaaggcactg

SEQ ID NO: 288036 - DNA, 21 bp, Artificial sequence
  SiRNA target sequence
gcaacgagaaaaaggcactga

SEQ ID NO: 288037 - DNA, 21 bp, Artificial sequence
  SiRNA target sequence
caacgagaaaaaggcactgaa

SEQ ID NO: 288038 - DNA, 21 bp, Artificial sequence
  SiRNA target sequence
aacgagaaaaaggcactgaaa

SEQ ID NO: 288039 - DNA, 21 bp, Artificial sequence
  SiRNA target sequence
acgagaaaaaggcactgaaag

SEQ ID NO: 288040 - DNA, 21 bp, Artificial sequence
  SiRNA target sequence
cgagaaaaaggcactgaaagc

SEQ ID NO: 288041 - DNA, 21 bp, Artificial sequence
  SiRNA target sequence
gagaaaaaggcactgaaagct

SEQ ID NO: 288042 - DNA, 21 bp, Artificial sequence
  SiRNA target sequence
agaaaaaggcactgaaagcta

SEQ ID NO: 288043 - DNA, 21 bp, Artificial sequence
  SiRNA target sequence
gaaaaaggcactgaaagctat

SEQ ID NO: 288044 - DNA, 21 bp, Artificial sequence
  SiRNA target sequence
aaaaaggcactgaaagctatg

SEQ ID NO: 288045 - DNA, 21 bp, Artificial sequence
  SiRNA target sequence
aaaaggcactgaaagctatgc

SEQ ID NO: 288046 - DNA, 21 bp, Artificial sequence
  SiRNA target sequence
aaaggcactgaaagctatgca

SEQ ID NO: 288047 - DNA, 21 bp, Artificial sequence
  SiRNA target sequence
aaggcactgaaagctatgcag

SEQ ID NO: 288048 - DNA, 21 bp, Artificial sequence
  SiRNA target sequence
aggcactgaaagctatgcagg

SEQ ID NO: 288049 - DNA, 21 bp, Artificial sequence
  SiRNA target sequence
ggcactgaaagctatgcagga

SEQ ID NO: 288050 - DNA, 21 bp, Artificial sequence
  SiRNA target sequence
gcactgaaagctatgcaggag

SEQ ID NO: 288051 - DNA, 21 bp, Artificial sequence
  SiRNA target sequence
cactgaaagctatgcaggagg

SEQ ID NO: 288052 - DNA, 21 bp, Artificial sequence
  SiRNA target sequence
actgaaagctatgcaggaggc

SEQ ID NO: 288053 - DNA, 21 bp, Artificial sequence
  SiRNA target sequence
ctgaaagctatgcaggaggcg

SEQ ID NO: 288054 - DNA, 21 bp, Artificial sequence
  SiRNA target sequence
tgaaagctatgcaggaggcgg

SEQ ID NO: 288055 - DNA, 21 bp, Artificial sequence
  SiRNA target sequence
gaaagctatgcaggaggcggt

SEQ ID NO: 288056 - DNA, 21 bp, Artificial sequence
  SiRNA target sequence
aaagctatgcaggaggcggtg

SEQ ID NO: 288057 - DNA, 21 bp, Artificial sequence
  SiRNA target sequence
aagctatgcaggaggcggtga

SEQ ID NO: 288058 - DNA, 21 bp, Artificial sequence
  SiRNA target sequence
agctatgcaggaggcggtgaa

SEQ ID NO: 288059 - DNA, 21 bp, Artificial sequence
  SiRNA target sequence
gctatgcaggaggcggtgaaa

SEQ ID NO: 288060 - DNA, 21 bp, Artificial sequence
  SiRNA target sequence
ctatgcaggaggcggtgaaac

SEQ ID NO: 288061 - DNA, 21 bp, Artificial sequence
  SiRNA target sequence
tatgcaggaggcggtgaaacg

SEQ ID NO: 288062 - DNA, 21 bp, Artificial sequence
  SiRNA target sequence
atgcaggaggcggtgaaacgt

SEQ ID NO: 288063 - DNA, 21 bp, Artificial sequence
  SiRNA target sequence
tgcaggaggcggtgaaacgtg

SEQ ID NO: 288064 - DNA, 21 bp, Artificial sequence
  SiRNA target sequence
gcaggaggcggtgaaacgtga

SEQ ID NO: 288065 - DNA, 21 bp, Artificial sequence
  SiRNA target sequence
caggaggcggtgaaacgtgag

SEQ ID NO: 288066 - DNA, 21 bp, Artificial sequence
  SiRNA target sequence
aggaggcggtgaaacgtgagt

SEQ ID NO: 288067 - DNA, 21 bp, Artificial sequence
  SiRNA target sequence
ggaggcggtgaaacgtgagtt

SEQ ID NO: 288068 - DNA, 21 bp, Artificial sequence
  SiRNA target sequence
gaggcggtgaaacgtgagttg

SEQ ID NO: 288069 - DNA, 21 bp, Artificial sequence
  SiRNA target sequence
aggcggtgaaacgtgagttga

SEQ ID NO: 288070 - DNA, 21 bp, Artificial sequence
  SiRNA target sequence
ggcggtgaaacgtgagttgaa

SEQ ID NO: 288071 - DNA, 21 bp, Artificial sequence
  SiRNA target sequence
gcggtgaaacgtgagttgaac

SEQ ID NO: 288072 - DNA, 21 bp, Artificial sequence
  SiRNA target sequence
cggtgaaacgtgagttgaacc

SEQ ID NO: 288073 - DNA, 21 bp, Artificial sequence
  SiRNA target sequence
ggtgaaacgtgagttgaacct

SEQ ID NO: 288074 - DNA, 21 bp, Artificial sequence
  SiRNA target sequence
gtgaaacgtgagttgaaccta

SEQ ID NO: 288075 - DNA, 21 bp, Artificial sequence
  SiRNA target sequence
tgaaacgtgagttgaacctat

SEQ ID NO: 288076 - DNA, 21 bp, Artificial sequence
  SiRNA target sequence
gaaacgtgagttgaacctatg

SEQ ID NO: 288077 - DNA, 21 bp, Artificial sequence
  SiRNA target sequence
aaacgtgagttgaacctatga

SEQ ID NO: 288078 - DNA, 21 bp, Artificial sequence
  SiRNA target sequence
aacgtgagttgaacctatgac

SEQ ID NO: 288079 - DNA, 21 bp, Artificial sequence
  SiRNA target sequence
acgtgagttgaacctatgacc

SEQ ID NO: 288080 - DNA, 21 bp, Artificial sequence
  SiRNA target sequence
cgtgagttgaacctatgacca

SEQ ID NO: 288081 - DNA, 21 bp, Artificial sequence
  SiRNA target sequence
gtgagttgaacctatgaccat

SEQ ID NO: 288082 - DNA, 21 bp, Artificial sequence
  SiRNA target sequence
tgagttgaacctatgaccata

SEQ ID NO: 288083 - DNA, 21 bp, Artificial sequence
  SiRNA target sequence
gagttgaacctatgaccatac

SEQ ID NO: 288084 - DNA, 21 bp, Artificial sequence
  SiRNA target sequence
agttgaacctatgaccataca

SEQ ID NO: 288085 - DNA, 21 bp, Artificial sequence
  SiRNA target sequence
gttgaacctatgaccatacaa

SEQ ID NO: 288086 - DNA, 21 bp, Artificial sequence
  SiRNA target sequence
ttgaacctatgaccatacaaa

SEQ ID NO: 288087 - DNA, 21 bp, Artificial sequence
  SiRNA target sequence
tgaacctatgaccatacaaag

SEQ ID NO: 288088 - DNA, 21 bp, Artificial sequence
  SiRNA target sequence
gaacctatgaccatacaaagt

SEQ ID NO: 288089 - DNA, 21 bp, Artificial sequence
  SiRNA target sequence
aacctatgaccatacaaagtt

SEQ ID NO: 288090 - DNA, 21 bp, Artificial sequence
  SiRNA target sequence
acctatgaccatacaaagttt

SEQ ID NO: 288091 - DNA, 21 bp, Artificial sequence
  SiRNA target sequence
cctatgaccatacaaagtttg

SEQ ID NO: 288092 - DNA, 21 bp, Artificial sequence
  SiRNA target sequence
ctatgaccatacaaagtttga

SEQ ID NO: 288093 - DNA, 21 bp, Artificial sequence
  SiRNA target sequence
tatgaccatacaaagtttgat

SEQ ID NO: 288094 - DNA, 21 bp, Artificial sequence
  SiRNA target sequence
atgaccatacaaagtttgata

SEQ ID NO: 288095 - DNA, 21 bp, Artificial sequence
  SiRNA target sequence
tgaccatacaaagtttgatac

SEQ ID NO: 288096 - DNA, 21 bp, Artificial sequence
  SiRNA target sequence
gaccatacaaagtttgatact

SEQ ID NO: 288097 - DNA, 21 bp, Artificial sequence
  SiRNA target sequence
accatacaaagtttgatactt

SEQ ID NO: 288098 - DNA, 21 bp, Artificial sequence
  SiRNA target sequence
ccatacaaagtttgatactta

SEQ ID NO: 288099 - DNA, 21 bp, Artificial sequence
  SiRNA target sequence
catacaaagtttgatacttag

SEQ ID NO: 288100 - DNA, 21 bp, Artificial sequence
  SiRNA target sequence
atacaaagtttgatacttagc

SEQ ID NO: 288101 - DNA, 21 bp, Artificial sequence
  SiRNA target sequence
tacaaagtttgatacttagca

SEQ ID NO: 288102 - DNA, 21 bp, Artificial sequence
  SiRNA target sequence
acaaagtttgatacttagcaa

SEQ ID NO: 288103 - DNA, 21 bp, Artificial sequence
  SiRNA target sequence
caaagtttgatacttagcaaa

SEQ ID NO: 288104 - DNA, 21 bp, Artificial sequence
  SiRNA target sequence
aaagtttgatacttagcaaac

SEQ ID NO: 288105 - DNA, 21 bp, Artificial sequence
  SiRNA target sequence
aagtttgatacttagcaaact

SEQ ID NO: 288106 - DNA, 21 bp, Artificial sequence
  SiRNA target sequence
agtttgatacttagcaaacta

SEQ ID NO: 288107 - DNA, 21 bp, Artificial sequence
  SiRNA target sequence
gtttgatacttagcaaactaa

SEQ ID NO: 288108 - DNA, 21 bp, Artificial sequence
  SiRNA target sequence
tttgatacttagcaaactaag

SEQ ID NO: 288109 - DNA, 21 bp, Artificial sequence
  SiRNA target sequence
ttgatacttagcaaactaagg

SEQ ID NO: 288110 - DNA, 21 bp, Artificial sequence
  SiRNA target sequence
tgatacttagcaaactaaggg

SEQ ID NO: 288111 - DNA, 21 bp, Artificial sequence
  SiRNA target sequence
gatacttagcaaactaaggga

SEQ ID NO: 288112 - DNA, 21 bp, Artificial sequence
  SiRNA target sequence
atacttagcaaactaagggaa

SEQ ID NO: 288113 - DNA, 21 bp, Artificial sequence
  SiRNA target sequence
tacttagcaaactaagggaac

SEQ ID NO: 288114 - DNA, 21 bp, Artificial sequence
  SiRNA target sequence
acttagcaaactaagggaact

SEQ ID NO: 288115 - DNA, 21 bp, Artificial sequence
  SiRNA target sequence
cttagcaaactaagggaacta

SEQ ID NO: 288116 - DNA, 21 bp, Artificial sequence
  SiRNA target sequence
ttagcaaactaagggaactac

SEQ ID NO: 288117 - DNA, 21 bp, Artificial sequence
  SiRNA target sequence
tagcaaactaagggaactacc

SEQ ID NO: 288118 - DNA, 21 bp, Artificial sequence
  SiRNA target sequence
agcaaactaagggaactaccc

SEQ ID NO: 288119 - DNA, 21 bp, Artificial sequence
  SiRNA target sequence
gcaaactaagggaactacccg

SEQ ID NO: 288120 - DNA, 21 bp, Artificial sequence
  SiRNA target sequence
caaactaagggaactacccgt

SEQ ID NO: 288121 - DNA, 21 bp, Artificial sequence
  SiRNA target sequence
aaactaagggaactacccgtt

SEQ ID NO: 288122 - DNA, 21 bp, Artificial sequence
  SiRNA target sequence
aactaagggaactacccgttc

SEQ ID NO: 288123 - DNA, 21 bp, Artificial sequence
  SiRNA target sequence
actaagggaactacccgttcc

SEQ ID NO: 288124 - DNA, 21 bp, Artificial sequence
  SiRNA target sequence
ctaagggaactacccgttcca

SEQ ID NO: 288125 - DNA, 21 bp, Artificial sequence
  SiRNA target sequence
taagggaactacccgttccag

SEQ ID NO: 288126 - DNA, 21 bp, Artificial sequence
  SiRNA target sequence
aagggaactacccgttccagt

SEQ ID NO: 288127 - DNA, 21 bp, Artificial sequence
  SiRNA target sequence
agggaactacccgttccagtg

SEQ ID NO: 288128 - DNA, 21 bp, Artificial sequence
  SiRNA target sequence
gggaactacccgttccagtgg

SEQ ID NO: 288129 - DNA, 21 bp, Artificial sequence
  SiRNA target sequence
ggaactacccgttccagtggc

SEQ ID NO: 288130 - DNA, 21 bp, Artificial sequence
  SiRNA target sequence
gaactacccgttccagtggcg

SEQ ID NO: 288131 - DNA, 21 bp, Artificial sequence
  SiRNA target sequence
aactacccgttccagtggcgt

SEQ ID NO: 288132 - DNA, 21 bp, Artificial sequence
  SiRNA target sequence
actacccgttccagtggcgtt

SEQ ID NO: 288133 - DNA, 21 bp, Artificial sequence
  SiRNA target sequence
ctacccgttccagtggcgttt

SEQ ID NO: 288134 - DNA, 21 bp, Artificial sequence
  SiRNA target sequence
tacccgttccagtggcgtttg

SEQ ID NO: 288135 - DNA, 21 bp, Artificial sequence
  SiRNA target sequence
acccgttccagtggcgtttga

SEQ ID NO: 288136 - DNA, 21 bp, Artificial sequence
  SiRNA target sequence
cccgttccagtggcgtttgag

SEQ ID NO: 288137 - DNA, 21 bp, Artificial sequence
  SiRNA target sequence
ccgttccagtggcgtttgaga

SEQ ID NO: 288138 - DNA, 21 bp, Artificial sequence
  SiRNA target sequence
cgttccagtggcgtttgagac

SEQ ID NO: 288139 - DNA, 21 bp, Artificial sequence
  SiRNA target sequence
gttccagtggcgtttgagacg

SEQ ID NO: 288140 - DNA, 21 bp, Artificial sequence
  SiRNA target sequence
ttccagtggcgtttgagacgc

SEQ ID NO: 288141 - DNA, 21 bp, Artificial sequence
  SiRNA target sequence
tccagtggcgtttgagacgca

SEQ ID NO: 288142 - DNA, 21 bp, Artificial sequence
  SiRNA target sequence
ccagtggcgtttgagacgcat

SEQ ID NO: 288143 - DNA, 21 bp, Artificial sequence
  SiRNA target sequence
cagtggcgtttgagacgcatt

SEQ ID NO: 288144 - DNA, 21 bp, Artificial sequence
  SiRNA target sequence
agtggcgtttgagacgcattt

SEQ ID NO: 288145 - DNA, 21 bp, Artificial sequence
  SiRNA target sequence
gtggcgtttgagacgcatttt

SEQ ID NO: 288146 - DNA, 21 bp, Artificial sequence
  SiRNA target sequence
tggcgtttgagacgcattttg

SEQ ID NO: 288147 - DNA, 21 bp, Artificial sequence
  SiRNA target sequence
ggcgtttgagacgcattttga

SEQ ID NO: 288148 - DNA, 21 bp, Artificial sequence
  SiRNA target sequence
gcgtttgagacgcattttgag

SEQ ID NO: 288149 - DNA, 21 bp, Artificial sequence
  SiRNA target sequence
cgtttgagacgcattttgaga

SEQ ID NO: 288150 - DNA, 21 bp, Artificial sequence
  SiRNA target sequence
gtttgagacgcattttgagaa

SEQ ID NO: 288151 - DNA, 21 bp, Artificial sequence
  SiRNA target sequence
tttgagacgcattttgagaaa

SEQ ID NO: 288152 - DNA, 21 bp, Artificial sequence
  SiRNA target sequence
ttgagacgcattttgagaaag

SEQ ID NO: 288153 - DNA, 21 bp, Artificial sequence
  SiRNA target sequence
tgagacgcattttgagaaaga

SEQ ID NO: 288154 - DNA, 21 bp, Artificial sequence
  SiRNA target sequence
gagacgcattttgagaaagag

SEQ ID NO: 288155 - DNA, 21 bp, Artificial sequence
  SiRNA target sequence
agacgcattttgagaaagaga

SEQ ID NO: 288156 - DNA, 21 bp, Artificial sequence
  SiRNA target sequence
gacgcattttgagaaagagaa

SEQ ID NO: 288157 - DNA, 21 bp, Artificial sequence
  SiRNA target sequence
acgcattttgagaaagagaat

SEQ ID NO: 288158 - DNA, 21 bp, Artificial sequence
  SiRNA target sequence
cgcattttgagaaagagaata

SEQ ID NO: 288159 - DNA, 21 bp, Artificial sequence
  SiRNA target sequence
gcattttgagaaagagaatat

SEQ ID NO: 288160 - DNA, 21 bp, Artificial sequence
  SiRNA target sequence
cattttgagaaagagaatatg

SEQ ID NO: 288161 - DNA, 21 bp, Artificial sequence
  SiRNA target sequence
attttgagaaagagaatatgt

SEQ ID NO: 288162 - DNA, 21 bp, Artificial sequence
  SiRNA target sequence
ttttgagaaagagaatatgta

SEQ ID NO: 288163 - DNA, 21 bp, Artificial sequence
  SiRNA target sequence
tttgagaaagagaatatgtat

SEQ ID NO: 288164 - DNA, 21 bp, Artificial sequence
  SiRNA target sequence
ttgagaaagagaatatgtatg

SEQ ID NO: 288165 - DNA, 21 bp, Artificial sequence
  SiRNA target sequence
tgagaaagagaatatgtatgt

SEQ ID NO: 288166 - DNA, 21 bp, Artificial sequence
  SiRNA target sequence
gagaaagagaatatgtatgtg

SEQ ID NO: 288167 - DNA, 21 bp, Artificial sequence
  SiRNA target sequence
agaaagagaatatgtatgtgg

SEQ ID NO: 288168 - DNA, 21 bp, Artificial sequence
  SiRNA target sequence
gaaagagaatatgtatgtggt

SEQ ID NO: 288169 - DNA, 21 bp, Artificial sequence
  SiRNA target sequence
aaagagaatatgtatgtggtc

SEQ ID NO: 288170 - DNA, 21 bp, Artificial sequence
  SiRNA target sequence
aagagaatatgtatgtggtct

SEQ ID NO: 288171 - DNA, 21 bp, Artificial sequence
  SiRNA target sequence
agagaatatgtatgtggtctt

SEQ ID NO: 288172 - DNA, 21 bp, Artificial sequence
  SiRNA target sequence
gagaatatgtatgtggtcttt

SEQ ID NO: 288173 - DNA, 21 bp, Artificial sequence
  SiRNA target sequence
agaatatgtatgtggtctttt

SEQ ID NO: 288174 - DNA, 21 bp, Artificial sequence
  SiRNA target sequence
gaatatgtatgtggtcttttt

SEQ ID NO: 288175 - DNA, 21 bp, Artificial sequence
  SiRNA target sequence
aatatgtatgtggtctttttt

SEQ ID NO: 288176 - DNA, 21 bp, Artificial sequence
  SiRNA target sequence
atatgtatgtggtctttttta

SEQ ID NO: 288177 - DNA, 21 bp, Artificial sequence
  SiRNA target sequence
tatgtatgtggtcttttttat

SEQ ID NO: 288178 - DNA, 21 bp, Artificial sequence
  SiRNA target sequence
atgtatgtggtcttttttatc

SEQ ID NO: 288179 - DNA, 21 bp, Artificial sequence
  SiRNA target sequence
tgtatgtggtcttttttatca

SEQ ID NO: 288180 - DNA, 21 bp, Artificial sequence
  SiRNA target sequence
gtatgtggtcttttttatcaa

SEQ ID NO: 288181 - DNA, 21 bp, Artificial sequence
  SiRNA target sequence
tatgtggtcttttttatcaac

SEQ ID NO: 288182 - DNA, 21 bp, Artificial sequence
  SiRNA target sequence
atgtggtcttttttatcaacg

SEQ ID NO: 288183 - DNA, 21 bp, Artificial sequence
  SiRNA target sequence
tgtggtcttttttatcaacga

SEQ ID NO: 288184 - DNA, 21 bp, Artificial sequence
  SiRNA target sequence
gtggtcttttttatcaacgac

SEQ ID NO: 288185 - DNA, 21 bp, Artificial sequence
  SiRNA target sequence
tggtcttttttatcaacgacg

SEQ ID NO: 288186 - DNA, 21 bp, Artificial sequence
  SiRNA target sequence
ggtcttttttatcaacgacga

SEQ ID NO: 288187 - DNA, 21 bp, Artificial sequence
  SiRNA target sequence
gtcttttttatcaacgacgaa

SEQ ID NO: 288188 - DNA, 21 bp, Artificial sequence
  SiRNA target sequence
tcttttttatcaacgacgaac

SEQ ID NO: 288189 - DNA, 21 bp, Artificial sequence
  SiRNA target sequence
cttttttatcaacgacgaacg

SEQ ID NO: 288190 - DNA, 21 bp, Artificial sequence
  SiRNA target sequence
ttttttatcaacgacgaacgc

SEQ ID NO: 288191 - DNA, 21 bp, Artificial sequence
  SiRNA target sequence
tttttatcaacgacgaacgcc

SEQ ID NO: 288192 - DNA, 21 bp, Artificial sequence
  SiRNA target sequence
ttttatcaacgacgaacgccc

SEQ ID NO: 288193 - DNA, 21 bp, Artificial sequence
  SiRNA target sequence
tttatcaacgacgaacgcccg

SEQ ID NO: 288194 - DNA, 21 bp, Artificial sequence
  SiRNA target sequence
ttatcaacgacgaacgcccgc

SEQ ID NO: 288195 - DNA, 21 bp, Artificial sequence
  SiRNA target sequence
tatcaacgacgaacgcccgct

SEQ ID NO: 288196 - DNA, 21 bp, Artificial sequence
  SiRNA target sequence
atcaacgacgaacgcccgctg

SEQ ID NO: 288197 - DNA, 21 bp, Artificial sequence
  SiRNA target sequence
tcaacgacgaacgcccgctgt

SEQ ID NO: 288198 - DNA, 21 bp, Artificial sequence
  SiRNA target sequence
caacgacgaacgcccgctgtt

SEQ ID NO: 288199 - DNA, 21 bp, Artificial sequence
  SiRNA target sequence
aacgacgaacgcccgctgttt

SEQ ID NO: 288200 - DNA, 21 bp, Artificial sequence
  SiRNA target sequence
acgacgaacgcccgctgtttt

SEQ ID NO: 288201 - DNA, 21 bp, Artificial sequence
  SiRNA target sequence
cgacgaacgcccgctgttttg

SEQ ID NO: 288202 - DNA, 21 bp, Artificial sequence
  SiRNA target sequence
gacgaacgcccgctgttttgt

SEQ ID NO: 288203 - DNA, 21 bp, Artificial sequence
  SiRNA target sequence
acgaacgcccgctgttttgtg

SEQ ID NO: 288204 - DNA, 21 bp, Artificial sequence
  SiRNA target sequence
cgaacgcccgctgttttgtgc

SEQ ID NO: 288205 - DNA, 21 bp, Artificial sequence
  SiRNA target sequence
gaacgcccgctgttttgtgca

SEQ ID NO: 288206 - DNA, 21 bp, Artificial sequence
  SiRNA target sequence
aacgcccgctgttttgtgcag

SEQ ID NO: 288207 - DNA, 21 bp, Artificial sequence
  SiRNA target sequence
acgcccgctgttttgtgcaga

SEQ ID NO: 288208 - DNA, 21 bp, Artificial sequence
  SiRNA target sequence
cgcccgctgttttgtgcagat

SEQ ID NO: 288209 - DNA, 21 bp, Artificial sequence
  SiRNA target sequence
gcccgctgttttgtgcagatg

SEQ ID NO: 288210 - DNA, 21 bp, Artificial sequence
  SiRNA target sequence
cccgctgttttgtgcagatga

SEQ ID NO: 288211 - DNA, 21 bp, Artificial sequence
  SiRNA target sequence
ccgctgttttgtgcagatgac

SEQ ID NO: 288212 - DNA, 21 bp, Artificial sequence
  SiRNA target sequence
cgctgttttgtgcagatgacg

SEQ ID NO: 288213 - DNA, 21 bp, Artificial sequence
  SiRNA target sequence
gctgttttgtgcagatgacga

SEQ ID NO: 288214 - DNA, 21 bp, Artificial sequence
  SiRNA target sequence
ctgttttgtgcagatgacgaa

SEQ ID NO: 288215 - DNA, 21 bp, Artificial sequence
  SiRNA target sequence
tgttttgtgcagatgacgaag

SEQ ID NO: 288216 - DNA, 21 bp, Artificial sequence
  SiRNA target sequence
gttttgtgcagatgacgaaga

SEQ ID NO: 288217 - DNA, 21 bp, Artificial sequence
  SiRNA target sequence
ttttgtgcagatgacgaagag

SEQ ID NO: 288218 - DNA, 21 bp, Artificial sequence
  SiRNA target sequence
tttgtgcagatgacgaagagc

SEQ ID NO: 288219 - DNA, 21 bp, Artificial sequence
  SiRNA target sequence
ttgtgcagatgacgaagagca

SEQ ID NO: 288220 - DNA, 21 bp, Artificial sequence
  SiRNA target sequence
tgtgcagatgacgaagagcaa

SEQ ID NO: 288221 - DNA, 21 bp, Artificial sequence
  SiRNA target sequence
gtgcagatgacgaagagcaac

SEQ ID NO: 288222 - DNA, 21 bp, Artificial sequence
  SiRNA target sequence
tgcagatgacgaagagcaact

SEQ ID NO: 288223 - DNA, 21 bp, Artificial sequence
  SiRNA target sequence
gcagatgacgaagagcaactg

SEQ ID NO: 288224 - DNA, 21 bp, Artificial sequence
  SiRNA target sequence
cagatgacgaagagcaactga

SEQ ID NO: 288225 - DNA, 21 bp, Artificial sequence
  SiRNA target sequence
agatgacgaagagcaactgac

SEQ ID NO: 288226 - DNA, 21 bp, Artificial sequence
  SiRNA target sequence
gatgacgaagagcaactgacc

SEQ ID NO: 288227 - DNA, 21 bp, Artificial sequence
  SiRNA target sequence
atgacgaagagcaactgacca

SEQ ID NO: 288228 - DNA, 21 bp, Artificial sequence
  SiRNA target sequence
tgacgaagagcaactgaccaa

SEQ ID NO: 288229 - DNA, 21 bp, Artificial sequence
  SiRNA target sequence
gacgaagagcaactgaccaag

SEQ ID NO: 288230 - DNA, 21 bp, Artificial sequence
  SiRNA target sequence
acgaagagcaactgaccaagt

SEQ ID NO: 288231 - DNA, 21 bp, Artificial sequence
  SiRNA target sequence
cgaagagcaactgaccaagta

SEQ ID NO: 288232 - DNA, 21 bp, Artificial sequence
  SiRNA target sequence
gaagagcaactgaccaagtac

SEQ ID NO: 288233 - DNA, 21 bp, Artificial sequence
  SiRNA target sequence
aagagcaactgaccaagtact

SEQ ID NO: 288234 - DNA, 21 bp, Artificial sequence
  SiRNA target sequence
agagcaactgaccaagtactt

SEQ ID NO: 288235 - DNA, 21 bp, Artificial sequence
  SiRNA target sequence
gagcaactgaccaagtacttt

SEQ ID NO: 288236 - DNA, 21 bp, Artificial sequence
  SiRNA target sequence
agcaactgaccaagtacttta

SEQ ID NO: 288237 - DNA, 21 bp, Artificial sequence
  SiRNA target sequence
gcaactgaccaagtactttat

SEQ ID NO: 288238 - DNA, 21 bp, Artificial sequence
  SiRNA target sequence
caactgaccaagtactttatc

SEQ ID NO: 288239 - DNA, 21 bp, Artificial sequence
  SiRNA target sequence
aactgaccaagtactttatcc

SEQ ID NO: 288240 - DNA, 21 bp, Artificial sequence
  SiRNA target sequence
actgaccaagtactttatcca

SEQ ID NO: 288241 - DNA, 21 bp, Artificial sequence
  SiRNA target sequence
ctgaccaagtactttatccag

SEQ ID NO: 288242 - DNA, 21 bp, Artificial sequence
  SiRNA target sequence
tgaccaagtactttatccagg

SEQ ID NO: 288243 - DNA, 21 bp, Artificial sequence
  SiRNA target sequence
gaccaagtactttatccaggt

SEQ ID NO: 288244 - DNA, 21 bp, Artificial sequence
  SiRNA target sequence
accaagtactttatccaggtt

SEQ ID NO: 288245 - DNA, 21 bp, Artificial sequence
  SiRNA target sequence
ccaagtactttatccaggttg

SEQ ID NO: 288246 - DNA, 21 bp, Artificial sequence
  SiRNA target sequence
caagtactttatccaggttga

SEQ ID NO: 288247 - DNA, 21 bp, Artificial sequence
  SiRNA target sequence
aagtactttatccaggttgat

SEQ ID NO: 288248 - DNA, 21 bp, Artificial sequence
  SiRNA target sequence
agtactttatccaggttgata

SEQ ID NO: 288249 - DNA, 21 bp, Artificial sequence
  SiRNA target sequence
gtactttatccaggttgatat

SEQ ID NO: 288250 - DNA, 21 bp, Artificial sequence
  SiRNA target sequence
tactttatccaggttgatatc

SEQ ID NO: 288251 - DNA, 21 bp, Artificial sequence
  SiRNA target sequence
actttatccaggttgatatct

SEQ ID NO: 288252 - DNA, 21 bp, Artificial sequence
  SiRNA target sequence
ctttatccaggttgatatctg

SEQ ID NO: 288253 - DNA, 21 bp, Artificial sequence
  SiRNA target sequence
tttatccaggttgatatctgg

SEQ ID NO: 288254 - DNA, 21 bp, Artificial sequence
  SiRNA target sequence
ttatccaggttgatatctggt

SEQ ID NO: 288255 - DNA, 21 bp, Artificial sequence
  SiRNA target sequence
tatccaggttgatatctggtc

SEQ ID NO: 288256 - DNA, 21 bp, Artificial sequence
  SiRNA target sequence
atccaggttgatatctggtca

SEQ ID NO: 288257 - DNA, 21 bp, Artificial sequence
  SiRNA target sequence
tccaggttgatatctggtcaa

SEQ ID NO: 288258 - DNA, 21 bp, Artificial sequence
  SiRNA target sequence
ccaggttgatatctggtcaaa

SEQ ID NO: 288259 - DNA, 21 bp, Artificial sequence
  SiRNA target sequence
caggttgatatctggtcaaaa

SEQ ID NO: 288260 - DNA, 21 bp, Artificial sequence
  SiRNA target sequence
aggttgatatctggtcaaaag

SEQ ID NO: 288261 - DNA, 21 bp, Artificial sequence
  SiRNA target sequence
ggttgatatctggtcaaaagg

SEQ ID NO: 288262 - DNA, 21 bp, Artificial sequence
  SiRNA target sequence
gttgatatctggtcaaaaggg

SEQ ID NO: 288263 - DNA, 21 bp, Artificial sequence
  SiRNA target sequence
ttgatatctggtcaaaagggg

SEQ ID NO: 288264 - DNA, 21 bp, Artificial sequence
  SiRNA target sequence
tgatatctggtcaaaagggga

SEQ ID NO: 288265 - DNA, 21 bp, Artificial sequence
  SiRNA target sequence
gatatctggtcaaaaggggat

SEQ ID NO: 288266 - DNA, 21 bp, Artificial sequence
  SiRNA target sequence
atatctggtcaaaaggggatt

SEQ ID NO: 288267 - DNA, 21 bp, Artificial sequence
  SiRNA target sequence
tatctggtcaaaaggggatta

SEQ ID NO: 288268 - DNA, 21 bp, Artificial sequence
  SiRNA target sequence
atctggtcaaaaggggattac

SEQ ID NO: 288269 - DNA, 21 bp, Artificial sequence
  SiRNA target sequence
tctggtcaaaaggggattaca

SEQ ID NO: 288270 - DNA, 21 bp, Artificial sequence
  SiRNA target sequence
ctggtcaaaaggggattacac

SEQ ID NO: 288271 - DNA, 21 bp, Artificial sequence
  SiRNA target sequence
tggtcaaaaggggattacacg

SEQ ID NO: 288272 - DNA, 21 bp, Artificial sequence
  SiRNA target sequence
ggtcaaaaggggattacacgg

SEQ ID NO: 288273 - DNA, 21 bp, Artificial sequence
  SiRNA target sequence
gtcaaaaggggattacacgga

SEQ ID NO: 288274 - DNA, 21 bp, Artificial sequence
  SiRNA target sequence
tcaaaaggggattacacggaa

SEQ ID NO: 288275 - DNA, 21 bp, Artificial sequence
  SiRNA target sequence
caaaaggggattacacggaaa

SEQ ID NO: 288276 - DNA, 21 bp, Artificial sequence
  SiRNA target sequence
aaaaggggattacacggaaat

SEQ ID NO: 288277 - DNA, 21 bp, Artificial sequence
  SiRNA target sequence
aaaggggattacacggaaata

SEQ ID NO: 288278 - DNA, 21 bp, Artificial sequence
  SiRNA target sequence
aaggggattacacggaaatag

SEQ ID NO: 288279 - DNA, 21 bp, Artificial sequence
  SiRNA target sequence
aggggattacacggaaataga

SEQ ID NO: 288280 - DNA, 21 bp, Artificial sequence
  SiRNA target sequence
ggggattacacggaaatagag

SEQ ID NO: 288281 - DNA, 21 bp, Artificial sequence
  SiRNA target sequence
gggattacacggaaatagaga

SEQ ID NO: 288282 - DNA, 21 bp, Artificial sequence
  SiRNA target sequence
ggattacacggaaatagagaa

SEQ ID NO: 288283 - DNA, 21 bp, Artificial sequence
  SiRNA target sequence
gattacacggaaatagagaaa

SEQ ID NO: 288284 - DNA, 21 bp, Artificial sequence
  SiRNA target sequence
attacacggaaatagagaaac

SEQ ID NO: 288285 - DNA, 21 bp, Artificial sequence
  SiRNA target sequence
ttacacggaaatagagaaaca

SEQ ID NO: 288286 - DNA, 21 bp, Artificial sequence
  SiRNA target sequence
tacacggaaatagagaaacaa

SEQ ID NO: 288287 - DNA, 21 bp, Artificial sequence
  SiRNA target sequence
acacggaaatagagaaacaag

SEQ ID NO: 288288 - DNA, 21 bp, Artificial sequence
  SiRNA target sequence
cacggaaatagagaaacaagt

SEQ ID NO: 288289 - DNA, 21 bp, Artificial sequence
  SiRNA target sequence
acggaaatagagaaacaagtt

SEQ ID NO: 288290 - DNA, 21 bp, Artificial sequence
  SiRNA target sequence
cggaaatagagaaacaagtta

SEQ ID NO: 288291 - DNA, 21 bp, Artificial sequence
  SiRNA target sequence
ggaaatagagaaacaagttaa

SEQ ID NO: 288292 - DNA, 21 bp, Artificial sequence
  SiRNA target sequence
gaaatagagaaacaagttaag

SEQ ID NO: 288293 - DNA, 21 bp, Artificial sequence
  SiRNA target sequence
aaatagagaaacaagttaagc

SEQ ID NO: 288294 - DNA, 21 bp, Artificial sequence
  SiRNA target sequence
aatagagaaacaagttaagca

SEQ ID NO: 288295 - DNA, 21 bp, Artificial sequence
  SiRNA target sequence
atagagaaacaagttaagcag

SEQ ID NO: 288296 - DNA, 21 bp, Artificial sequence
  SiRNA target sequence
tagagaaacaagttaagcaga

SEQ ID NO: 288297 - DNA, 21 bp, Artificial sequence
  SiRNA target sequence
agagaaacaagttaagcagaa

SEQ ID NO: 288298 - DNA, 21 bp, Artificial sequence
  SiRNA target sequence
gagaaacaagttaagcagaag

SEQ ID NO: 288299 - DNA, 21 bp, Artificial sequence
  SiRNA target sequence
agaaacaagttaagcagaaga

SEQ ID NO: 288300 - DNA, 21 bp, Artificial sequence
  SiRNA target sequence
gaaacaagttaagcagaagat

SEQ ID NO: 288301 - DNA, 21 bp, Artificial sequence
  SiRNA target sequence
aaacaagttaagcagaagatg

SEQ ID NO: 288302 - DNA, 21 bp, Artificial sequence
  SiRNA target sequence
aacaagttaagcagaagatgc

SEQ ID NO: 288303 - DNA, 21 bp, Artificial sequence
  SiRNA target sequence
acaagttaagcagaagatgca

SEQ ID NO: 288304 - DNA, 21 bp, Artificial sequence
  SiRNA target sequence
caagttaagcagaagatgcag

SEQ ID NO: 288305 - DNA, 21 bp, Artificial sequence
  SiRNA target sequence
aagttaagcagaagatgcagg

SEQ ID NO: 288306 - DNA, 21 bp, Artificial sequence
  SiRNA target sequence
agttaagcagaagatgcagga

SEQ ID NO: 288307 - DNA, 21 bp, Artificial sequence
  SiRNA target sequence
gttaagcagaagatgcaggag

SEQ ID NO: 288308 - DNA, 21 bp, Artificial sequence
  SiRNA target sequence
ttaagcagaagatgcaggagc

SEQ ID NO: 288309 - DNA, 21 bp, Artificial sequence
  SiRNA target sequence
taagcagaagatgcaggagct

SEQ ID NO: 288310 - DNA, 21 bp, Artificial sequence
  SiRNA target sequence
aagcagaagatgcaggagctg

SEQ ID NO: 288311 - DNA, 21 bp, Artificial sequence
  SiRNA target sequence
agcagaagatgcaggagctgg

SEQ ID NO: 288312 - DNA, 21 bp, Artificial sequence
  SiRNA target sequence
gcagaagatgcaggagctggg

SEQ ID NO: 288313 - DNA, 21 bp, Artificial sequence
  SiRNA target sequence
cagaagatgcaggagctgggt

SEQ ID NO: 288314 - DNA, 21 bp, Artificial sequence
  SiRNA target sequence
agaagatgcaggagctgggtg

SEQ ID NO: 288315 - DNA, 21 bp, Artificial sequence
  SiRNA target sequence
gaagatgcaggagctgggtgc

SEQ ID NO: 288316 - DNA, 21 bp, Artificial sequence
  SiRNA target sequence
aagatgcaggagctgggtgcc

SEQ ID NO: 288317 - DNA, 21 bp, Artificial sequence
  SiRNA target sequence
agatgcaggagctgggtgcca

SEQ ID NO: 288318 - DNA, 21 bp, Artificial sequence
  SiRNA target sequence
gatgcaggagctgggtgccat

SEQ ID NO: 288319 - DNA, 21 bp, Artificial sequence
  SiRNA target sequence
atgcaggagctgggtgccata

SEQ ID NO: 288320 - DNA, 21 bp, Artificial sequence
  SiRNA target sequence
tgcaggagctgggtgccatac

SEQ ID NO: 288321 - DNA, 21 bp, Artificial sequence
  SiRNA target sequence
gcaggagctgggtgccatacg

SEQ ID NO: 288322 - DNA, 21 bp, Artificial sequence
  SiRNA target sequence
caggagctgggtgccatacgg

SEQ ID NO: 288323 - DNA, 21 bp, Artificial sequence
  SiRNA target sequence
aggagctgggtgccatacgga

SEQ ID NO: 288324 - DNA, 21 bp, Artificial sequence
  SiRNA target sequence
ggagctgggtgccatacggac

SEQ ID NO: 288325 - DNA, 21 bp, Artificial sequence
  SiRNA target sequence
gagctgggtgccatacggaca

SEQ ID NO: 288326 - DNA, 21 bp, Artificial sequence
  SiRNA target sequence
agctgggtgccatacggacaa

SEQ ID NO: 288327 - DNA, 21 bp, Artificial sequence
  SiRNA target sequence
gctgggtgccatacggacaag

SEQ ID NO: 288328 - DNA, 21 bp, Artificial sequence
  SiRNA target sequence
ctgggtgccatacggacaagt

SEQ ID NO: 288329 - DNA, 21 bp, Artificial sequence
  SiRNA target sequence
tgggtgccatacggacaagtg

SEQ ID NO: 288330 - DNA, 21 bp, Artificial sequence
  SiRNA target sequence
gggtgccatacggacaagtgc

SEQ ID NO: 288331 - DNA, 21 bp, Artificial sequence
  SiRNA target sequence
ggtgccatacggacaagtgcg

SEQ ID NO: 288332 - DNA, 21 bp, Artificial sequence
  SiRNA target sequence
gtgccatacggacaagtgcgt

SEQ ID NO: 288333 - DNA, 21 bp, Artificial sequence
  SiRNA target sequence
tgccatacggacaagtgcgtt

SEQ ID NO: 288334 - DNA, 21 bp, Artificial sequence
  SiRNA target sequence
gccatacggacaagtgcgttt

SEQ ID NO: 288335 - DNA, 21 bp, Artificial sequence
  SiRNA target sequence
ccatacggacaagtgcgtttg

SEQ ID NO: 288336 - DNA, 21 bp, Artificial sequence
  SiRNA target sequence
catacggacaagtgcgtttgg

SEQ ID NO: 288337 - DNA, 21 bp, Artificial sequence
  SiRNA target sequence
atacggacaagtgcgtttggt

SEQ ID NO: 288338 - DNA, 21 bp, Artificial sequence
  SiRNA target sequence
tacggacaagtgcgtttggtc

SEQ ID NO: 288339 - DNA, 21 bp, Artificial sequence
  SiRNA target sequence
acggacaagtgcgtttggtct

SEQ ID NO: 288340 - DNA, 21 bp, Artificial sequence
  SiRNA target sequence
cggacaagtgcgtttggtctt

SEQ ID NO: 288341 - DNA, 21 bp, Artificial sequence
  SiRNA target sequence
ggacaagtgcgtttggtcttt

SEQ ID NO: 288342 - DNA, 21 bp, Artificial sequence
  SiRNA target sequence
gacaagtgcgtttggtcttta

SEQ ID NO: 288343 - DNA, 21 bp, Artificial sequence
  SiRNA target sequence
acaagtgcgtttggtctttat

SEQ ID NO: 288344 - DNA, 21 bp, Artificial sequence
  SiRNA target sequence
caagtgcgtttggtctttatg

SEQ ID NO: 288345 - DNA, 21 bp, Artificial sequence
  SiRNA target sequence
aagtgcgtttggtctttatgc

SEQ ID NO: 288346 - DNA, 21 bp, Artificial sequence
  SiRNA target sequence
agtgcgtttggtctttatgct

SEQ ID NO: 288347 - DNA, 21 bp, Artificial sequence
  SiRNA target sequence
gtgcgtttggtctttatgctc

SEQ ID NO: 288348 - DNA, 21 bp, Artificial sequence
  SiRNA target sequence
tgcgtttggtctttatgctcc

SEQ ID NO: 288349 - DNA, 21 bp, Artificial sequence
  SiRNA target sequence
gcgtttggtctttatgctccc

SEQ ID NO: 288350 - DNA, 21 bp, Artificial sequence
  SiRNA target sequence
cgtttggtctttatgctcccg

SEQ ID NO: 288351 - DNA, 21 bp, Artificial sequence
  SiRNA target sequence
gtttggtctttatgctcccga

SEQ ID NO: 288352 - DNA, 21 bp, Artificial sequence
  SiRNA target sequence
tttggtctttatgctcccgac

SEQ ID NO: 288353 - DNA, 21 bp, Artificial sequence
  SiRNA target sequence
ttggtctttatgctcccgaca

SEQ ID NO: 288354 - DNA, 21 bp, Artificial sequence
  SiRNA target sequence
tggtctttatgctcccgacat

SEQ ID NO: 288355 - DNA, 21 bp, Artificial sequence
  SiRNA target sequence
ggtctttatgctcccgacata

SEQ ID NO: 288356 - DNA, 21 bp, Artificial sequence
  SiRNA target sequence
gtctttatgctcccgacatac

SEQ ID NO: 288357 - DNA, 21 bp, Artificial sequence
  SiRNA target sequence
tctttatgctcccgacataca

SEQ ID NO: 288358 - DNA, 21 bp, Artificial sequence
  SiRNA target sequence
ctttatgctcccgacatacag

SEQ ID NO: 288359 - DNA, 21 bp, Artificial sequence
  SiRNA target sequence
tttatgctcccgacatacaga

SEQ ID NO: 288360 - DNA, 21 bp, Artificial sequence
  SiRNA target sequence
ttatgctcccgacatacagat

SEQ ID NO: 288361 - DNA, 21 bp, Artificial sequence
  SiRNA target sequence
tatgctcccgacatacagatg

SEQ ID NO: 288362 - DNA, 21 bp, Artificial sequence
  SiRNA target sequence
atgctcccgacatacagatgt

SEQ ID NO: 288363 - DNA, 21 bp, Artificial sequence
  SiRNA target sequence
tgctcccgacatacagatgta

SEQ ID NO: 288364 - DNA, 21 bp, Artificial sequence
  SiRNA target sequence
gctcccgacatacagatgtat

SEQ ID NO: 288365 - DNA, 21 bp, Artificial sequence
  SiRNA target sequence
ctcccgacatacagatgtatc

SEQ ID NO: 288366 - DNA, 21 bp, Artificial sequence
  SiRNA target sequence
tcccgacatacagatgtatca

SEQ ID NO: 288367 - DNA, 21 bp, Artificial sequence
  SiRNA target sequence
cccgacatacagatgtatcaa

SEQ ID NO: 288368 - DNA, 21 bp, Artificial sequence
  SiRNA target sequence
ccgacatacagatgtatcaaa

SEQ ID NO: 288369 - DNA, 21 bp, Artificial sequence
  SiRNA target sequence
cgacatacagatgtatcaaaa

SEQ ID NO: 288370 - DNA, 21 bp, Artificial sequence
  SiRNA target sequence
gacatacagatgtatcaaaaa

SEQ ID NO: 288371 - DNA, 21 bp, Artificial sequence
  SiRNA target sequence
acatacagatgtatcaaaaag

SEQ ID NO: 288372 - DNA, 21 bp, Artificial sequence
  SiRNA target sequence
catacagatgtatcaaaaagt

SEQ ID NO: 288373 - DNA, 21 bp, Artificial sequence
  SiRNA target sequence
atacagatgtatcaaaaagtc

SEQ ID NO: 288374 - DNA, 21 bp, Artificial sequence
  SiRNA target sequence
tacagatgtatcaaaaagtct

SEQ ID NO: 288375 - DNA, 21 bp, Artificial sequence
  SiRNA target sequence
acagatgtatcaaaaagtctt

SEQ ID NO: 288376 - DNA, 21 bp, Artificial sequence
  SiRNA target sequence
cagatgtatcaaaaagtcttg

SEQ ID NO: 288377 - DNA, 21 bp, Artificial sequence
  SiRNA target sequence
agatgtatcaaaaagtcttgc

SEQ ID NO: 288378 - DNA, 21 bp, Artificial sequence
  SiRNA target sequence
gatgtatcaaaaagtcttgcg

SEQ ID NO: 288379 - DNA, 21 bp, Artificial sequence
  SiRNA target sequence
atgtatcaaaaagtcttgcgt

SEQ ID NO: 288380 - DNA, 21 bp, Artificial sequence
  SiRNA target sequence
tgtatcaaaaagtcttgcgtt

SEQ ID NO: 288381 - DNA, 21 bp, Artificial sequence
  SiRNA target sequence
gtatcaaaaagtcttgcgttt

SEQ ID NO: 288382 - DNA, 21 bp, Artificial sequence
  SiRNA target sequence
tatcaaaaagtcttgcgtttt

SEQ ID NO: 288383 - DNA, 21 bp, Artificial sequence
  SiRNA target sequence
atcaaaaagtcttgcgttttg

SEQ ID NO: 288384 - DNA, 21 bp, Artificial sequence
  SiRNA target sequence
tcaaaaagtcttgcgttttgt

SEQ ID NO: 288385 - DNA, 21 bp, Artificial sequence
  SiRNA target sequence
caaaaagtcttgcgttttgtg

SEQ ID NO: 288386 - DNA, 21 bp, Artificial sequence
  SiRNA target sequence
aaaaagtcttgcgttttgtga

SEQ ID NO: 288387 - DNA, 21 bp, Artificial sequence
  SiRNA target sequence
aaaagtcttgcgttttgtgat

SEQ ID NO: 288388 - DNA, 21 bp, Artificial sequence
  SiRNA target sequence
aaagtcttgcgttttgtgatg

SEQ ID NO: 288389 - DNA, 21 bp, Artificial sequence
  SiRNA target sequence
aagtcttgcgttttgtgatga

SEQ ID NO: 288390 - DNA, 21 bp, Artificial sequence
  SiRNA target sequence
agtcttgcgttttgtgatgag

SEQ ID NO: 288391 - DNA, 21 bp, Artificial sequence
  SiRNA target sequence
gtcttgcgttttgtgatgagc

SEQ ID NO: 288392 - DNA, 21 bp, Artificial sequence
  SiRNA target sequence
tcttgcgttttgtgatgagca

SEQ ID NO: 288393 - DNA, 21 bp, Artificial sequence
  SiRNA target sequence
cttgcgttttgtgatgagcat

SEQ ID NO: 288394 - DNA, 21 bp, Artificial sequence
  SiRNA target sequence
ttgcgttttgtgatgagcatg

SEQ ID NO: 288395 - DNA, 21 bp, Artificial sequence
  SiRNA target sequence
tgcgttttgtgatgagcatgc

SEQ ID NO: 288396 - DNA, 21 bp, Artificial sequence
  SiRNA target sequence
gcgttttgtgatgagcatgcc

SEQ ID NO: 288397 - DNA, 21 bp, Artificial sequence
  SiRNA target sequence
cgttttgtgatgagcatgcct

SEQ ID NO: 288398 - DNA, 21 bp, Artificial sequence
  SiRNA target sequence
gttttgtgatgagcatgcctg

SEQ ID NO: 288399 - DNA, 21 bp, Artificial sequence
  SiRNA target sequence
ttttgtgatgagcatgcctgc

SEQ ID NO: 288400 - DNA, 21 bp, Artificial sequence
  SiRNA target sequence
tttgtgatgagcatgcctgcc

SEQ ID NO: 288401 - DNA, 21 bp, Artificial sequence
  SiRNA target sequence
ttgtgatgagcatgcctgcct

SEQ ID NO: 288402 - DNA, 21 bp, Artificial sequence
  SiRNA target sequence
tgtgatgagcatgcctgccta

SEQ ID NO: 288403 - DNA, 21 bp, Artificial sequence
  SiRNA target sequence
gtgatgagcatgcctgcctag

SEQ ID NO: 288404 - DNA, 21 bp, Artificial sequence
  SiRNA target sequence
tgatgagcatgcctgcctagg

SEQ ID NO: 288405 - DNA, 21 bp, Artificial sequence
  SiRNA target sequence
gatgagcatgcctgcctaggc

SEQ ID NO: 288406 - DNA, 21 bp, Artificial sequence
  SiRNA target sequence
atgagcatgcctgcctaggcg

SEQ ID NO: 288407 - DNA, 21 bp, Artificial sequence
  SiRNA target sequence
tgagcatgcctgcctaggcgt

SEQ ID NO: 288408 - DNA, 21 bp, Artificial sequence
  SiRNA target sequence
gagcatgcctgcctaggcgtg

SEQ ID NO: 288409 - DNA, 21 bp, Artificial sequence
  SiRNA target sequence
agcatgcctgcctaggcgtgc

SEQ ID NO: 288410 - DNA, 21 bp, Artificial sequence
  SiRNA target sequence
gcatgcctgcctaggcgtgct

SEQ ID NO: 288411 - DNA, 21 bp, Artificial sequence
  SiRNA target sequence
catgcctgcctaggcgtgctt

SEQ ID NO: 288412 - DNA, 21 bp, Artificial sequence
  SiRNA target sequence
atgcctgcctaggcgtgcttt

SEQ ID NO: 288413 - DNA, 21 bp, Artificial sequence
  SiRNA target sequence
tgcctgcctaggcgtgctttt

SEQ ID NO: 288414 - DNA, 21 bp, Artificial sequence
  SiRNA target sequence
gcctgcctaggcgtgcttttt

SEQ ID NO: 288415 - DNA, 21 bp, Artificial sequence
  SiRNA target sequence
cctgcctaggcgtgcttttta

SEQ ID NO: 288416 - DNA, 21 bp, Artificial sequence
  SiRNA target sequence
ctgcctaggcgtgctttttat

SEQ ID NO: 288417 - DNA, 21 bp, Artificial sequence
  SiRNA target sequence
tgcctaggcgtgctttttatt

SEQ ID NO: 288418 - DNA, 21 bp, Artificial sequence
  SiRNA target sequence
gcctaggcgtgctttttattt

SEQ ID NO: 288419 - DNA, 21 bp, Artificial sequence
  SiRNA target sequence
cctaggcgtgctttttatttg

SEQ ID NO: 288420 - DNA, 21 bp, Artificial sequence
  SiRNA target sequence
ctaggcgtgctttttatttgt

SEQ ID NO: 288421 - DNA, 21 bp, Artificial sequence
  SiRNA target sequence
taggcgtgctttttatttgta

SEQ ID NO: 288422 - DNA, 21 bp, Artificial sequence
  SiRNA target sequence
aggcgtgctttttatttgtaa

SEQ ID NO: 288423 - DNA, 21 bp, Artificial sequence
  SiRNA target sequence
ggcgtgctttttatttgtaaa

SEQ ID NO: 288424 - DNA, 21 bp, Artificial sequence
  SiRNA target sequence
gcgtgctttttatttgtaaac

SEQ ID NO: 288425 - DNA, 21 bp, Artificial sequence
  SiRNA target sequence
cgtgctttttatttgtaaaca

SEQ ID NO: 288426 - DNA, 21 bp, Artificial sequence
  SiRNA target sequence
gtgctttttatttgtaaacaa

SEQ ID NO: 288427 - DNA, 21 bp, Artificial sequence
  SiRNA target sequence
tgctttttatttgtaaacaag

SEQ ID NO: 288428 - DNA, 21 bp, Artificial sequence
  SiRNA target sequence
gctttttatttgtaaacaagg

SEQ ID NO: 288429 - DNA, 21 bp, Artificial sequence
  SiRNA target sequence
ctttttatttgtaaacaaggg

SEQ ID NO: 288430 - DNA, 21 bp, Artificial sequence
  SiRNA target sequence
tttttatttgtaaacaagggg

SEQ ID NO: 288431 - DNA, 21 bp, Artificial sequence
  SiRNA target sequence
ttttatttgtaaacaaggggg

SEQ ID NO: 288432 - DNA, 21 bp, Artificial sequence
  SiRNA target sequence
tttatttgtaaacaaggggga

SEQ ID NO: 288433 - DNA, 21 bp, Artificial sequence
  SiRNA target sequence
ttatttgtaaacaagggggaa

SEQ ID NO: 288434 - DNA, 21 bp, Artificial sequence
  SiRNA target sequence
tatttgtaaacaagggggaac

SEQ ID NO: 288435 - DNA, 21 bp, Artificial sequence
  SiRNA target sequence
atttgtaaacaagggggaaca

SEQ ID NO: 288436 - DNA, 21 bp, Artificial sequence
  SiRNA target sequence
tttgtaaacaagggggaacaa

SEQ ID NO: 288437 - DNA, 21 bp, Artificial sequence
  SiRNA target sequence
ttgtaaacaagggggaacaac

SEQ ID NO: 288438 - DNA, 21 bp, Artificial sequence
  SiRNA target sequence
tgtaaacaagggggaacaact

SEQ ID NO: 288439 - DNA, 21 bp, Artificial sequence
  SiRNA target sequence
gtaaacaagggggaacaacta

SEQ ID NO: 288440 - DNA, 21 bp, Artificial sequence
  SiRNA target sequence
taaacaagggggaacaactat

SEQ ID NO: 288441 - DNA, 21 bp, Artificial sequence
  SiRNA target sequence
aaacaagggggaacaactatg

SEQ ID NO: 288442 - DNA, 21 bp, Artificial sequence
  SiRNA target sequence
aacaagggggaacaactatgg

SEQ ID NO: 288443 - DNA, 21 bp, Artificial sequence
  SiRNA target sequence
acaagggggaacaactatggg

SEQ ID NO: 288444 - DNA, 21 bp, Artificial sequence
  SiRNA target sequence
caagggggaacaactatggga

SEQ ID NO: 288445 - DNA, 21 bp, Artificial sequence
  SiRNA target sequence
aagggggaacaactatgggag

SEQ ID NO: 288446 - DNA, 21 bp, Artificial sequence
  SiRNA target sequence
agggggaacaactatgggagt

SEQ ID NO: 288447 - DNA, 21 bp, Artificial sequence
  SiRNA target sequence
gggggaacaactatgggagta

SEQ ID NO: 288448 - DNA, 21 bp, Artificial sequence
  SiRNA target sequence
ggggaacaactatgggagtac

SEQ ID NO: 288449 - DNA, 21 bp, Artificial sequence
  SiRNA target sequence
gggaacaactatgggagtacc

SEQ ID NO: 288450 - DNA, 21 bp, Artificial sequence
  SiRNA target sequence
ggaacaactatgggagtaccg

SEQ ID NO: 288451 - DNA, 21 bp, Artificial sequence
  SiRNA target sequence
gaacaactatgggagtaccga

SEQ ID NO: 288452 - DNA, 21 bp, Artificial sequence
  SiRNA target sequence
aacaactatgggagtaccgat

SEQ ID NO: 288453 - DNA, 21 bp, Artificial sequence
  SiRNA target sequence
acaactatgggagtaccgatt

SEQ ID NO: 288454 - DNA, 21 bp, Artificial sequence
  SiRNA target sequence
caactatgggagtaccgattg

SEQ ID NO: 288455 - DNA, 21 bp, Artificial sequence
  SiRNA target sequence
aactatgggagtaccgattgg

SEQ ID NO: 288456 - DNA, 21 bp, Artificial sequence
  SiRNA target sequence
actatgggagtaccgattggg

SEQ ID NO: 288457 - DNA, 21 bp, Artificial sequence
  SiRNA target sequence
ctatgggagtaccgattgggg

SEQ ID NO: 288458 - DNA, 21 bp, Artificial sequence
  SiRNA target sequence
tatgggagtaccgattggggt

SEQ ID NO: 288459 - DNA, 21 bp, Artificial sequence
  SiRNA target sequence
atgggagtaccgattggggta

SEQ ID NO: 288460 - DNA, 21 bp, Artificial sequence
  SiRNA target sequence
tgggagtaccgattggggtaa

SEQ ID NO: 288461 - DNA, 21 bp, Artificial sequence
  SiRNA target sequence
gggagtaccgattggggtaag

SEQ ID NO: 288462 - DNA, 21 bp, Artificial sequence
  SiRNA target sequence
ggagtaccgattggggtaagg

SEQ ID NO: 288463 - DNA, 21 bp, Artificial sequence
  SiRNA target sequence
gagtaccgattggggtaagga

SEQ ID NO: 288464 - DNA, 21 bp, Artificial sequence
  SiRNA target sequence
agtaccgattggggtaaggaa

SEQ ID NO: 288465 - DNA, 21 bp, Artificial sequence
  SiRNA target sequence
gtaccgattggggtaaggaat

SEQ ID NO: 288466 - DNA, 21 bp, Artificial sequence
  SiRNA target sequence
taccgattggggtaaggaatt

SEQ ID NO: 288467 - DNA, 21 bp, Artificial sequence
  SiRNA target sequence
accgattggggtaaggaattt

SEQ ID NO: 288468 - DNA, 21 bp, Artificial sequence
  SiRNA target sequence
ccgattggggtaaggaattta

SEQ ID NO: 288469 - DNA, 21 bp, Artificial sequence
  SiRNA target sequence
cgattggggtaaggaatttat

SEQ ID NO: 288470 - DNA, 21 bp, Artificial sequence
  SiRNA target sequence
gattggggtaaggaatttata

SEQ ID NO: 288471 - DNA, 21 bp, Artificial sequence
  SiRNA target sequence
attggggtaaggaatttatat

SEQ ID NO: 288472 - DNA, 21 bp, Artificial sequence
  SiRNA target sequence
ttggggtaaggaatttatatg

SEQ ID NO: 288473 - DNA, 21 bp, Artificial sequence
  SiRNA target sequence
tggggtaaggaatttatatgt

SEQ ID NO: 288474 - DNA, 21 bp, Artificial sequence
  SiRNA target sequence
ggggtaaggaatttatatgta

SEQ ID NO: 288475 - DNA, 21 bp, Artificial sequence
  SiRNA target sequence
gggtaaggaatttatatgtag

SEQ ID NO: 288476 - DNA, 21 bp, Artificial sequence
  SiRNA target sequence
ggtaaggaatttatatgtagc

SEQ ID NO: 288477 - DNA, 21 bp, Artificial sequence
  SiRNA target sequence
gtaaggaatttatatgtagcc

SEQ ID NO: 288478 - DNA, 21 bp, Artificial sequence
  SiRNA target sequence
taaggaatttatatgtagcca

SEQ ID NO: 288479 - DNA, 21 bp, Artificial sequence
  SiRNA target sequence
aaggaatttatatgtagccat

SEQ ID NO: 288480 - DNA, 21 bp, Artificial sequence
  SiRNA target sequence
aggaatttatatgtagccatc

SEQ ID NO: 288481 - DNA, 21 bp, Artificial sequence
  SiRNA target sequence
ggaatttatatgtagccatct

SEQ ID NO: 288482 - DNA, 21 bp, Artificial sequence
  SiRNA target sequence
gaatttatatgtagccatctt

SEQ ID NO: 288483 - DNA, 21 bp, Artificial sequence
  SiRNA target sequence
aatttatatgtagccatctta

SEQ ID NO: 288484 - DNA, 21 bp, Artificial sequence
  SiRNA target sequence
atttatatgtagccatcttaa

SEQ ID NO: 288485 - DNA, 21 bp, Artificial sequence
  SiRNA target sequence
tttatatgtagccatcttaaa

SEQ ID NO: 288486 - DNA, 21 bp, Artificial sequence
  SiRNA target sequence
ttatatgtagccatcttaaaa

SEQ ID NO: 288487 - DNA, 21 bp, Artificial sequence
  SiRNA target sequence
tatatgtagccatcttaaaaa

SEQ ID NO: 288488 - DNA, 21 bp, Artificial sequence
  SiRNA target sequence
atatgtagccatcttaaaaac

SEQ ID NO: 288489 - DNA, 21 bp, Artificial sequence
  SiRNA target sequence
tatgtagccatcttaaaaacc

SEQ ID NO: 288490 - DNA, 21 bp, Artificial sequence
  SiRNA target sequence
atgtagccatcttaaaaaccg

SEQ ID NO: 288491 - DNA, 21 bp, Artificial sequence
  SiRNA target sequence
tgtagccatcttaaaaaccga

SEQ ID NO: 288492 - DNA, 21 bp, Artificial sequence
  SiRNA target sequence
gtagccatcttaaaaaccgat

SEQ ID NO: 288493 - DNA, 21 bp, Artificial sequence
  SiRNA target sequence
tagccatcttaaaaaccgatg

SEQ ID NO: 288494 - DNA, 21 bp, Artificial sequence
  SiRNA target sequence
agccatcttaaaaaccgatga

SEQ ID NO: 288495 - DNA, 21 bp, Artificial sequence
  SiRNA target sequence
gccatcttaaaaaccgatgat

SEQ ID NO: 288496 - DNA, 21 bp, Artificial sequence
  SiRNA target sequence
ccatcttaaaaaccgatgata

SEQ ID NO: 288497 - DNA, 21 bp, Artificial sequence
  SiRNA target sequence
catcttaaaaaccgatgataa

SEQ ID NO: 288498 - DNA, 21 bp, Artificial sequence
  SiRNA target sequence
atcttaaaaaccgatgataaa

SEQ ID NO: 288499 - DNA, 21 bp, Artificial sequence
  SiRNA target sequence
tcttaaaaaccgatgataaaa

SEQ ID NO: 288500 - DNA, 21 bp, Artificial sequence
  SiRNA target sequence
cttaaaaaccgatgataaaaa

SEQ ID NO: 288501 - DNA, 21 bp, Artificial sequence
  SiRNA target sequence
ttaaaaaccgatgataaaaat

SEQ ID NO: 288502 - DNA, 21 bp, Artificial sequence
  SiRNA target sequence
taaaaaccgatgataaaaatg

SEQ ID NO: 288503 - DNA, 21 bp, Artificial sequence
  SiRNA target sequence
aaaaaccgatgataaaaatgg

SEQ ID NO: 288504 - DNA, 21 bp, Artificial sequence
  SiRNA target sequence
aaaaccgatgataaaaatggt

SEQ ID NO: 288505 - DNA, 21 bp, Artificial sequence
  SiRNA target sequence
aaaccgatgataaaaatggtg

SEQ ID NO: 288506 - DNA, 21 bp, Artificial sequence
  SiRNA target sequence
aaccgatgataaaaatggtgc

SEQ ID NO: 288507 - DNA, 21 bp, Artificial sequence
  SiRNA target sequence
accgatgataaaaatggtgcg

SEQ ID NO: 288508 - DNA, 21 bp, Artificial sequence
  SiRNA target sequence
ccgatgataaaaatggtgcga

SEQ ID NO: 288509 - DNA, 21 bp, Artificial sequence
  SiRNA target sequence
cgatgataaaaatggtgcgac

SEQ ID NO: 288510 - DNA, 21 bp, Artificial sequence
  SiRNA target sequence
gatgataaaaatggtgcgacg

SEQ ID NO: 288511 - DNA, 21 bp, Artificial sequence
  SiRNA target sequence
atgataaaaatggtgcgacgt

SEQ ID NO: 288512 - DNA, 21 bp, Artificial sequence
  SiRNA target sequence
tgataaaaatggtgcgacgta

SEQ ID NO: 288513 - DNA, 21 bp, Artificial sequence
  SiRNA target sequence
gataaaaatggtgcgacgtac

SEQ ID NO: 288514 - DNA, 21 bp, Artificial sequence
  SiRNA target sequence
ataaaaatggtgcgacgtacg

SEQ ID NO: 288515 - DNA, 21 bp, Artificial sequence
  SiRNA target sequence
taaaaatggtgcgacgtacga

SEQ ID NO: 288516 - DNA, 21 bp, Artificial sequence
  SiRNA target sequence
aaaaatggtgcgacgtacgac

SEQ ID NO: 288517 - DNA, 21 bp, Artificial sequence
  SiRNA target sequence
aaaatggtgcgacgtacgaca

SEQ ID NO: 288518 - DNA, 21 bp, Artificial sequence
  SiRNA target sequence
aaatggtgcgacgtacgacaa

SEQ ID NO: 288519 - DNA, 21 bp, Artificial sequence
  SiRNA target sequence
aatggtgcgacgtacgacaaa

SEQ ID NO: 288520 - DNA, 21 bp, Artificial sequence
  SiRNA target sequence
atggtgcgacgtacgacaaac

SEQ ID NO: 288521 - DNA, 21 bp, Artificial sequence
  SiRNA target sequence
tggtgcgacgtacgacaaacc

SEQ ID NO: 288522 - DNA, 21 bp, Artificial sequence
  SiRNA target sequence
ggtgcgacgtacgacaaaccc

SEQ ID NO: 288523 - DNA, 21 bp, Artificial sequence
  SiRNA target sequence
gtgcgacgtacgacaaacccg

SEQ ID NO: 288524 - DNA, 21 bp, Artificial sequence
  SiRNA target sequence
tgcgacgtacgacaaacccgt

SEQ ID NO: 288525 - DNA, 21 bp, Artificial sequence
  SiRNA target sequence
gcgacgtacgacaaacccgtc

SEQ ID NO: 288526 - DNA, 21 bp, Artificial sequence
  SiRNA target sequence
cgacgtacgacaaacccgtcc

SEQ ID NO: 288527 - DNA, 21 bp, Artificial sequence
  SiRNA target sequence
gacgtacgacaaacccgtcca

SEQ ID NO: 288528 - DNA, 21 bp, Artificial sequence
  SiRNA target sequence
acgtacgacaaacccgtccac

SEQ ID NO: 288529 - DNA, 21 bp, Artificial sequence
  SiRNA target sequence
cgtacgacaaacccgtccacc

SEQ ID NO: 288530 - DNA, 21 bp, Artificial sequence
  SiRNA target sequence
gtacgacaaacccgtccacct

SEQ ID NO: 288531 - DNA, 21 bp, Artificial sequence
  SiRNA target sequence
tacgacaaacccgtccacctg

SEQ ID NO: 288532 - DNA, 21 bp, Artificial sequence
  SiRNA target sequence
acgacaaacccgtccacctgg

SEQ ID NO: 288533 - DNA, 21 bp, Artificial sequence
  SiRNA target sequence
cgacaaacccgtccacctggc

SEQ ID NO: 288534 - DNA, 21 bp, Artificial sequence
  SiRNA target sequence
gacaaacccgtccacctggct

SEQ ID NO: 288535 - DNA, 21 bp, Artificial sequence
  SiRNA target sequence
acaaacccgtccacctggcta

SEQ ID NO: 288536 - DNA, 21 bp, Artificial sequence
  SiRNA target sequence
caaacccgtccacctggctaa

SEQ ID NO: 288537 - DNA, 21 bp, Artificial sequence
  SiRNA target sequence
aaacccgtccacctggctaaa

SEQ ID NO: 288538 - DNA, 21 bp, Artificial sequence
  SiRNA target sequence
aacccgtccacctggctaaag

SEQ ID NO: 288539 - DNA, 21 bp, Artificial sequence
  SiRNA target sequence
acccgtccacctggctaaagc

SEQ ID NO: 288540 - DNA, 21 bp, Artificial sequence
  SiRNA target sequence
cccgtccacctggctaaagcg

SEQ ID NO: 288541 - DNA, 21 bp, Artificial sequence
  SiRNA target sequence
ccgtccacctggctaaagcgg

SEQ ID NO: 288542 - DNA, 21 bp, Artificial sequence
  SiRNA target sequence
cgtccacctggctaaagcggt

SEQ ID NO: 288543 - DNA, 21 bp, Artificial sequence
  SiRNA target sequence
gtccacctggctaaagcggtt

SEQ ID NO: 288544 - DNA, 21 bp, Artificial sequence
  SiRNA target sequence
tccacctggctaaagcggttg

SEQ ID NO: 288545 - DNA, 21 bp, Artificial sequence
  SiRNA target sequence
ccacctggctaaagcggttga

SEQ ID NO: 288546 - DNA, 21 bp, Artificial sequence
  SiRNA target sequence
cacctggctaaagcggttgag

SEQ ID NO: 288547 - DNA, 21 bp, Artificial sequence
  SiRNA target sequence
acctggctaaagcggttgaga

SEQ ID NO: 288548 - DNA, 21 bp, Artificial sequence
  SiRNA target sequence
cctggctaaagcggttgagat

SEQ ID NO: 288549 - DNA, 21 bp, Artificial sequence
  SiRNA target sequence
ctggctaaagcggttgagatc

SEQ ID NO: 288550 - DNA, 21 bp, Artificial sequence
  SiRNA target sequence
tggctaaagcggttgagatca

SEQ ID NO: 288551 - DNA, 21 bp, Artificial sequence
  SiRNA target sequence
ggctaaagcggttgagatcag

SEQ ID NO: 288552 - DNA, 21 bp, Artificial sequence
  SiRNA target sequence
gctaaagcggttgagatcagc

SEQ ID NO: 288553 - DNA, 21 bp, Artificial sequence
  SiRNA target sequence
ctaaagcggttgagatcagcg

SEQ ID NO: 288554 - DNA, 21 bp, Artificial sequence
  SiRNA target sequence
taaagcggttgagatcagcgt

SEQ ID NO: 288555 - DNA, 21 bp, Artificial sequence
  SiRNA target sequence
aaagcggttgagatcagcgta

SEQ ID NO: 288556 - DNA, 21 bp, Artificial sequence
  SiRNA target sequence
aagcggttgagatcagcgtaa

SEQ ID NO: 288557 - DNA, 21 bp, Artificial sequence
  SiRNA target sequence
agcggttgagatcagcgtaaa

SEQ ID NO: 288558 - DNA, 21 bp, Artificial sequence
  SiRNA target sequence
gcggttgagatcagcgtaaaa

SEQ ID NO: 288559 - DNA, 21 bp, Artificial sequence
  SiRNA target sequence
cggttgagatcagcgtaaaac

SEQ ID NO: 288560 - DNA, 21 bp, Artificial sequence
  SiRNA target sequence
ggttgagatcagcgtaaaacc

SEQ ID NO: 288561 - DNA, 21 bp, Artificial sequence
  SiRNA target sequence
gttgagatcagcgtaaaaccg

SEQ ID NO: 288562 - DNA, 21 bp, Artificial sequence
  SiRNA target sequence
ttgagatcagcgtaaaaccga

SEQ ID NO: 288563 - DNA, 21 bp, Artificial sequence
  SiRNA target sequence
tgagatcagcgtaaaaccgaa

SEQ ID NO: 288564 - DNA, 21 bp, Artificial sequence
  SiRNA target sequence
gagatcagcgtaaaaccgaat

SEQ ID NO: 288565 - DNA, 21 bp, Artificial sequence
  SiRNA target sequence
agatcagcgtaaaaccgaatg

SEQ ID NO: 288566 - DNA, 21 bp, Artificial sequence
  SiRNA target sequence
gatcagcgtaaaaccgaatgt

SEQ ID NO: 288567 - DNA, 21 bp, Artificial sequence
  SiRNA target sequence
atcagcgtaaaaccgaatgtt

SEQ ID NO: 288568 - DNA, 21 bp, Artificial sequence
  SiRNA target sequence
tcagcgtaaaaccgaatgttt

SEQ ID NO: 288569 - DNA, 21 bp, Artificial sequence
  SiRNA target sequence
cagcgtaaaaccgaatgtttc

SEQ ID NO: 288570 - DNA, 21 bp, Artificial sequence
  SiRNA target sequence
agcgtaaaaccgaatgtttca

SEQ ID NO: 288571 - DNA, 21 bp, Artificial sequence
  SiRNA target sequence
gcgtaaaaccgaatgtttcat

SEQ ID NO: 288572 - DNA, 21 bp, Artificial sequence
  SiRNA target sequence
cgtaaaaccgaatgtttcatc

SEQ ID NO: 288573 - DNA, 21 bp, Artificial sequence
  SiRNA target sequence
gtaaaaccgaatgtttcatcc

SEQ ID NO: 288574 - DNA, 21 bp, Artificial sequence
  SiRNA target sequence
taaaaccgaatgtttcatcca

SEQ ID NO: 288575 - DNA, 21 bp, Artificial sequence
  SiRNA target sequence
aaaaccgaatgtttcatccac

SEQ ID NO: 288576 - DNA, 21 bp, Artificial sequence
  SiRNA target sequence
aaaccgaatgtttcatccacc

SEQ ID NO: 288577 - DNA, 21 bp, Artificial sequence
  SiRNA target sequence
aaccgaatgtttcatccacca

SEQ ID NO: 288578 - DNA, 21 bp, Artificial sequence
  SiRNA target sequence
accgaatgtttcatccaccac

SEQ ID NO: 288579 - DNA, 21 bp, Artificial sequence
  SiRNA target sequence
ccgaatgtttcatccaccacg

SEQ ID NO: 288580 - DNA, 21 bp, Artificial sequence
  SiRNA target sequence
cgaatgtttcatccaccacgt

SEQ ID NO: 288581 - DNA, 21 bp, Artificial sequence
  SiRNA target sequence
gaatgtttcatccaccacgtt

SEQ ID NO: 288582 - DNA, 21 bp, Artificial sequence
  SiRNA target sequence
aatgtttcatccaccacgttt

SEQ ID NO: 288583 - DNA, 21 bp, Artificial sequence
  SiRNA target sequence
atgtttcatccaccacgtttt

SEQ ID NO: 288584 - DNA, 21 bp, Artificial sequence
  SiRNA target sequence
tgtttcatccaccacgtttta

SEQ ID NO: 288585 - DNA, 21 bp, Artificial sequence
  SiRNA target sequence
gtttcatccaccacgttttac

SEQ ID NO: 288586 - DNA, 21 bp, Artificial sequence
  SiRNA target sequence
tttcatccaccacgttttacg

SEQ ID NO: 288587 - DNA, 21 bp, Artificial sequence
  SiRNA target sequence
ttcatccaccacgttttacgc

SEQ ID NO: 288588 - DNA, 21 bp, Artificial sequence
  SiRNA target sequence
tcatccaccacgttttacgcg

SEQ ID NO: 288589 - DNA, 21 bp, Artificial sequence
  SiRNA target sequence
catccaccacgttttacgcgg

SEQ ID NO: 288590 - DNA, 21 bp, Artificial sequence
  SiRNA target sequence
atccaccacgttttacgcgga

SEQ ID NO: 288591 - DNA, 21 bp, Artificial sequence
  SiRNA target sequence
tccaccacgttttacgcggat

SEQ ID NO: 288592 - DNA, 21 bp, Artificial sequence
  SiRNA target sequence
ccaccacgttttacgcggatg

SEQ ID NO: 288593 - DNA, 21 bp, Artificial sequence
  SiRNA target sequence
caccacgttttacgcggatga

SEQ ID NO: 288594 - DNA, 21 bp, Artificial sequence
  SiRNA target sequence
accacgttttacgcggatgac

SEQ ID NO: 288595 - DNA, 21 bp, Artificial sequence
  SiRNA target sequence
ccacgttttacgcggatgacc

SEQ ID NO: 288596 - DNA, 21 bp, Artificial sequence
  SiRNA target sequence
cacgttttacgcggatgacca

SEQ ID NO: 288597 - DNA, 21 bp, Artificial sequence
  SiRNA target sequence
acgttttacgcggatgaccaa

SEQ ID NO: 288598 - DNA, 21 bp, Artificial sequence
  SiRNA target sequence
cgttttacgcggatgaccaag

SEQ ID NO: 288599 - DNA, 21 bp, Artificial sequence
  SiRNA target sequence
gttttacgcggatgaccaagc

SEQ ID NO: 288600 - DNA, 21 bp, Artificial sequence
  SiRNA target sequence
ttttacgcggatgaccaagca

SEQ ID NO: 288601 - DNA, 21 bp, Artificial sequence
  SiRNA target sequence
tttacgcggatgaccaagcat

SEQ ID NO: 288602 - DNA, 21 bp, Artificial sequence
  SiRNA target sequence
ttacgcggatgaccaagcatc

SEQ ID NO: 288603 - DNA, 21 bp, Artificial sequence
  SiRNA target sequence
tacgcggatgaccaagcatct

SEQ ID NO: 288604 - DNA, 21 bp, Artificial sequence
  SiRNA target sequence
acgcggatgaccaagcatctg

SEQ ID NO: 288605 - DNA, 21 bp, Artificial sequence
  SiRNA target sequence
cgcggatgaccaagcatctga

SEQ ID NO: 288606 - DNA, 21 bp, Artificial sequence
  SiRNA target sequence
gcggatgaccaagcatctgaa

SEQ ID NO: 288607 - DNA, 21 bp, Artificial sequence
  SiRNA target sequence
cggatgaccaagcatctgaat

SEQ ID NO: 288608 - DNA, 21 bp, Artificial sequence
  SiRNA target sequence
ggatgaccaagcatctgaatc

SEQ ID NO: 288609 - DNA, 21 bp, Artificial sequence
  SiRNA target sequence
gatgaccaagcatctgaatct

SEQ ID NO: 288610 - DNA, 21 bp, Artificial sequence
  SiRNA target sequence
atgaccaagcatctgaatctg

SEQ ID NO: 288611 - DNA, 21 bp, Artificial sequence
  SiRNA target sequence
tgaccaagcatctgaatctga

SEQ ID NO: 288612 - DNA, 21 bp, Artificial sequence
  SiRNA target sequence
gaccaagcatctgaatctgaa

SEQ ID NO: 288613 - DNA, 21 bp, Artificial sequence
  SiRNA target sequence
accaagcatctgaatctgaat

SEQ ID NO: 288614 - DNA, 21 bp, Artificial sequence
  SiRNA target sequence
ccaagcatctgaatctgaatc

SEQ ID NO: 288615 - DNA, 21 bp, Artificial sequence
  SiRNA target sequence
caagcatctgaatctgaatcc

SEQ ID NO: 288616 - DNA, 21 bp, Artificial sequence
  SiRNA target sequence
aagcatctgaatctgaatcca

SEQ ID NO: 288617 - DNA, 21 bp, Artificial sequence
  SiRNA target sequence
agcatctgaatctgaatccac

SEQ ID NO: 288618 - DNA, 21 bp, Artificial sequence
  SiRNA target sequence
gcatctgaatctgaatccaca

SEQ ID NO: 288619 - DNA, 21 bp, Artificial sequence
  SiRNA target sequence
catctgaatctgaatccacat

SEQ ID NO: 288620 - DNA, 21 bp, Artificial sequence
  SiRNA target sequence
atctgaatctgaatccacatt

SEQ ID NO: 288621 - DNA, 21 bp, Artificial sequence
  SiRNA target sequence
tctgaatctgaatccacattg

SEQ ID NO: 288622 - DNA, 21 bp, Artificial sequence
  SiRNA target sequence
ctgaatctgaatccacattgg

SEQ ID NO: 288623 - DNA, 21 bp, Artificial sequence
  SiRNA target sequence
tgaatctgaatccacattggc

SEQ ID NO: 288624 - DNA, 21 bp, Artificial sequence
  SiRNA target sequence
gaatctgaatccacattggcc

SEQ ID NO: 288625 - DNA, 21 bp, Artificial sequence
  SiRNA target sequence
aatctgaatccacattggccg

SEQ ID NO: 288626 - DNA, 21 bp, Artificial sequence
  SiRNA target sequence
atctgaatccacattggccga

SEQ ID NO: 288627 - DNA, 21 bp, Artificial sequence
  SiRNA target sequence
tctgaatccacattggccgac

SEQ ID NO: 288628 - DNA, 21 bp, Artificial sequence
  SiRNA target sequence
ctgaatccacattggccgaca

SEQ ID NO: 288629 - DNA, 21 bp, Artificial sequence
  SiRNA target sequence
tgaatccacattggccgacat

SEQ ID NO: 288630 - DNA, 21 bp, Artificial sequence
  SiRNA target sequence
gaatccacattggccgacatt

SEQ ID NO: 288631 - DNA, 21 bp, Artificial sequence
  SiRNA target sequence
aatccacattggccgacattg

SEQ ID NO: 288632 - DNA, 21 bp, Artificial sequence
  SiRNA target sequence
atccacattggccgacattga

SEQ ID NO: 288633 - DNA, 21 bp, Artificial sequence
  SiRNA target sequence
tccacattggccgacattgaa

SEQ ID NO: 288634 - DNA, 21 bp, Artificial sequence
  SiRNA target sequence
ccacattggccgacattgaag

SEQ ID NO: 288635 - DNA, 21 bp, Artificial sequence
  SiRNA target sequence
cacattggccgacattgaagt

SEQ ID NO: 288636 - DNA, 21 bp, Artificial sequence
  SiRNA target sequence
acattggccgacattgaagta

SEQ ID NO: 288637 - DNA, 21 bp, Artificial sequence
  SiRNA target sequence
cattggccgacattgaagtag

SEQ ID NO: 288638 - DNA, 21 bp, Artificial sequence
  SiRNA target sequence
attggccgacattgaagtaga

SEQ ID NO: 288639 - DNA, 21 bp, Artificial sequence
  SiRNA target sequence
ttggccgacattgaagtagag

SEQ ID NO: 288640 - DNA, 21 bp, Artificial sequence
  SiRNA target sequence
tggccgacattgaagtagaga

SEQ ID NO: 288641 - DNA, 21 bp, Artificial sequence
  SiRNA target sequence
ggccgacattgaagtagagat

SEQ ID NO: 288642 - DNA, 21 bp, Artificial sequence
  SiRNA target sequence
gccgacattgaagtagagatt

SEQ ID NO: 288643 - DNA, 21 bp, Artificial sequence
  SiRNA target sequence
ccgacattgaagtagagatta

SEQ ID NO: 288644 - DNA, 21 bp, Artificial sequence
  SiRNA target sequence
cgacattgaagtagagattac

SEQ ID NO: 288645 - DNA, 21 bp, Artificial sequence
  SiRNA target sequence
gacattgaagtagagattacg

SEQ ID NO: 288646 - DNA, 21 bp, Artificial sequence
  SiRNA target sequence
acattgaagtagagattacgg

SEQ ID NO: 288647 - DNA, 21 bp, Artificial sequence
  SiRNA target sequence
cattgaagtagagattacggt

SEQ ID NO: 288648 - DNA, 21 bp, Artificial sequence
  SiRNA target sequence
attgaagtagagattacggta

SEQ ID NO: 288649 - DNA, 21 bp, Artificial sequence
  SiRNA target sequence
ttgaagtagagattacggtag

SEQ ID NO: 288650 - DNA, 21 bp, Artificial sequence
  SiRNA target sequence
tgaagtagagattacggtaga

SEQ ID NO: 288651 - DNA, 21 bp, Artificial sequence
  SiRNA target sequence
gaagtagagattacggtagat

SEQ ID NO: 288652 - DNA, 21 bp, Artificial sequence
  SiRNA target sequence
aagtagagattacggtagatc

SEQ ID NO: 288653 - DNA, 21 bp, Artificial sequence
  SiRNA target sequence
agtagagattacggtagatca

SEQ ID NO: 288654 - DNA, 21 bp, Artificial sequence
  SiRNA target sequence
gtagagattacggtagatcaa

SEQ ID NO: 288655 - DNA, 21 bp, Artificial sequence
  SiRNA target sequence
tagagattacggtagatcaaa

SEQ ID NO: 288656 - DNA, 21 bp, Artificial sequence
  SiRNA target sequence
agagattacggtagatcaaat

SEQ ID NO: 288657 - DNA, 21 bp, Artificial sequence
  SiRNA target sequence
gagattacggtagatcaaatt

SEQ ID NO: 288658 - DNA, 21 bp, Artificial sequence
  SiRNA target sequence
agattacggtagatcaaattg

SEQ ID NO: 288659 - DNA, 21 bp, Artificial sequence
  SiRNA target sequence
gattacggtagatcaaattgg

SEQ ID NO: 288660 - DNA, 21 bp, Artificial sequence
  SiRNA target sequence
attacggtagatcaaattgga

SEQ ID NO: 288661 - DNA, 21 bp, Artificial sequence
  SiRNA target sequence
ttacggtagatcaaattggat

SEQ ID NO: 288662 - DNA, 21 bp, Artificial sequence
  SiRNA target sequence
tacggtagatcaaattggatc

SEQ ID NO: 288663 - DNA, 21 bp, Artificial sequence
  SiRNA target sequence
acggtagatcaaattggatct

SEQ ID NO: 288664 - DNA, 21 bp, Artificial sequence
  SiRNA target sequence
cggtagatcaaattggatcta

SEQ ID NO: 288665 - DNA, 21 bp, Artificial sequence
  SiRNA target sequence
ggtagatcaaattggatctaa

SEQ ID NO: 288666 - DNA, 21 bp, Artificial sequence
  SiRNA target sequence
gtagatcaaattggatctaaa

SEQ ID NO: 288667 - DNA, 21 bp, Artificial sequence
  SiRNA target sequence
tagatcaaattggatctaaaa

SEQ ID NO: 288668 - DNA, 21 bp, Artificial sequence
  SiRNA target sequence
agatcaaattggatctaaaaa

SEQ ID NO: 288669 - DNA, 21 bp, Artificial sequence
  SiRNA target sequence
gatcaaattggatctaaaaac

SEQ ID NO: 288670 - DNA, 21 bp, Artificial sequence
  SiRNA target sequence
atcaaattggatctaaaaacg

SEQ ID NO: 288671 - DNA, 21 bp, Artificial sequence
  SiRNA target sequence
tcaaattggatctaaaaacgc

SEQ ID NO: 288672 - DNA, 21 bp, Artificial sequence
  SiRNA target sequence
caaattggatctaaaaacgcc

SEQ ID NO: 288673 - DNA, 21 bp, Artificial sequence
  SiRNA target sequence
aaattggatctaaaaacgccg

SEQ ID NO: 288674 - DNA, 21 bp, Artificial sequence
  SiRNA target sequence
aattggatctaaaaacgccgc

SEQ ID NO: 288675 - DNA, 21 bp, Artificial sequence
  SiRNA target sequence
attggatctaaaaacgccgcc

SEQ ID NO: 288676 - DNA, 21 bp, Artificial sequence
  SiRNA target sequence
ttggatctaaaaacgccgcca

SEQ ID NO: 288677 - DNA, 21 bp, Artificial sequence
  SiRNA target sequence
tggatctaaaaacgccgccat

SEQ ID NO: 288678 - DNA, 21 bp, Artificial sequence
  SiRNA target sequence
ggatctaaaaacgccgccatg

SEQ ID NO: 288679 - DNA, 21 bp, Artificial sequence
  SiRNA target sequence
gatctaaaaacgccgccatgc

SEQ ID NO: 288680 - DNA, 21 bp, Artificial sequence
  SiRNA target sequence
atctaaaaacgccgccatgct

SEQ ID NO: 288681 - DNA, 21 bp, Artificial sequence
  SiRNA target sequence
tctaaaaacgccgccatgctt

SEQ ID NO: 288682 - DNA, 21 bp, Artificial sequence
  SiRNA target sequence
ctaaaaacgccgccatgcttc

SEQ ID NO: 288683 - DNA, 21 bp, Artificial sequence
  SiRNA target sequence
taaaaacgccgccatgcttct

SEQ ID NO: 288684 - DNA, 21 bp, Artificial sequence
  SiRNA target sequence
aaaaacgccgccatgcttctg

SEQ ID NO: 288685 - DNA, 21 bp, Artificial sequence
  SiRNA target sequence
aaaacgccgccatgcttctgg

SEQ ID NO: 288686 - DNA, 21 bp, Artificial sequence
  SiRNA target sequence
aaacgccgccatgcttctggg

SEQ ID NO: 288687 - DNA, 21 bp, Artificial sequence
  SiRNA target sequence
aacgccgccatgcttctgggg

SEQ ID NO: 288688 - DNA, 21 bp, Artificial sequence
  SiRNA target sequence
acgccgccatgcttctggggg

SEQ ID NO: 288689 - DNA, 21 bp, Artificial sequence
  SiRNA target sequence
cgccgccatgcttctgggggc

SEQ ID NO: 288690 - DNA, 21 bp, Artificial sequence
  SiRNA target sequence
gccgccatgcttctgggggct

SEQ ID NO: 288691 - DNA, 21 bp, Artificial sequence
  SiRNA target sequence
ccgccatgcttctgggggcta

SEQ ID NO: 288692 - DNA, 21 bp, Artificial sequence
  SiRNA target sequence
cgccatgcttctgggggctaa

SEQ ID NO: 288693 - DNA, 21 bp, Artificial sequence
  SiRNA target sequence
gccatgcttctgggggctaaa

SEQ ID NO: 288694 - DNA, 21 bp, Artificial sequence
  SiRNA target sequence
ccatgcttctgggggctaaag

SEQ ID NO: 288695 - DNA, 21 bp, Artificial sequence
  SiRNA target sequence
catgcttctgggggctaaagt

SEQ ID NO: 288696 - DNA, 21 bp, Artificial sequence
  SiRNA target sequence
atgcttctgggggctaaagtg

SEQ ID NO: 288697 - DNA, 21 bp, Artificial sequence
  SiRNA target sequence
tgcttctgggggctaaagtgg

SEQ ID NO: 288698 - DNA, 21 bp, Artificial sequence
  SiRNA target sequence
gcttctgggggctaaagtgga

SEQ ID NO: 288699 - DNA, 21 bp, Artificial sequence
  SiRNA target sequence
cttctgggggctaaagtggat

SEQ ID NO: 288700 - DNA, 21 bp, Artificial sequence
  SiRNA target sequence
ttctgggggctaaagtggatg

SEQ ID NO: 288701 - DNA, 21 bp, Artificial sequence
  SiRNA target sequence
tctgggggctaaagtggatga

SEQ ID NO: 288702 - DNA, 21 bp, Artificial sequence
  SiRNA target sequence
ctgggggctaaagtggatgaa

SEQ ID NO: 288703 - DNA, 21 bp, Artificial sequence
  SiRNA target sequence
tgggggctaaagtggatgaaa

SEQ ID NO: 288704 - DNA, 21 bp, Artificial sequence
  SiRNA target sequence
gggggctaaagtggatgaaaa

SEQ ID NO: 288705 - DNA, 21 bp, Artificial sequence
  SiRNA target sequence
ggggctaaagtggatgaaaac

SEQ ID NO: 288706 - DNA, 21 bp, Artificial sequence
  SiRNA target sequence
gggctaaagtggatgaaaacg

SEQ ID NO: 288707 - DNA, 21 bp, Artificial sequence
  SiRNA target sequence
ggctaaagtggatgaaaacgg

SEQ ID NO: 288708 - DNA, 21 bp, Artificial sequence
  SiRNA target sequence
gctaaagtggatgaaaacgga

SEQ ID NO: 288709 - DNA, 21 bp, Artificial sequence
  SiRNA target sequence
ctaaagtggatgaaaacggag

SEQ ID NO: 288710 - DNA, 21 bp, Artificial sequence
  SiRNA target sequence
taaagtggatgaaaacggagt

SEQ ID NO: 288711 - DNA, 21 bp, Artificial sequence
  SiRNA target sequence
aaagtggatgaaaacggagtg

SEQ ID NO: 288712 - DNA, 21 bp, Artificial sequence
  SiRNA target sequence
aagtggatgaaaacggagtgc

SEQ ID NO: 288713 - DNA, 21 bp, Artificial sequence
  SiRNA target sequence
agtggatgaaaacggagtgct

SEQ ID NO: 288714 - DNA, 21 bp, Artificial sequence
  SiRNA target sequence
gtggatgaaaacggagtgctg

SEQ ID NO: 288715 - DNA, 21 bp, Artificial sequence
  SiRNA target sequence
tggatgaaaacggagtgctgg

SEQ ID NO: 288716 - DNA, 21 bp, Artificial sequence
  SiRNA target sequence
ggatgaaaacggagtgctggt

SEQ ID NO: 288717 - DNA, 21 bp, Artificial sequence
  SiRNA target sequence
gatgaaaacggagtgctggtt

SEQ ID NO: 288718 - DNA, 21 bp, Artificial sequence
  SiRNA target sequence
atgaaaacggagtgctggttt

SEQ ID NO: 288719 - DNA, 21 bp, Artificial sequence
  SiRNA target sequence
tgaaaacggagtgctggtttg

SEQ ID NO: 288720 - DNA, 21 bp, Artificial sequence
  SiRNA target sequence
gaaaacggagtgctggtttgg

SEQ ID NO: 288721 - DNA, 21 bp, Artificial sequence
  SiRNA target sequence
aaaacggagtgctggtttgga

SEQ ID NO: 288722 - DNA, 21 bp, Artificial sequence
  SiRNA target sequence
aaacggagtgctggtttggaa

SEQ ID NO: 288723 - DNA, 21 bp, Artificial sequence
  SiRNA target sequence
aacggagtgctggtttggaac

SEQ ID NO: 288724 - DNA, 21 bp, Artificial sequence
  SiRNA target sequence
acggagtgctggtttggaaca

SEQ ID NO: 288725 - DNA, 21 bp, Artificial sequence
  SiRNA target sequence
cggagtgctggtttggaacag

SEQ ID NO: 288726 - DNA, 21 bp, Artificial sequence
  SiRNA target sequence
ggagtgctggtttggaacaga

SEQ ID NO: 288727 - DNA, 21 bp, Artificial sequence
  SiRNA target sequence
gagtgctggtttggaacagag

SEQ ID NO: 288728 - DNA, 21 bp, Artificial sequence
  SiRNA target sequence
agtgctggtttggaacagaga

SEQ ID NO: 288729 - DNA, 21 bp, Artificial sequence
  SiRNA target sequence
gtgctggtttggaacagagat

SEQ ID NO: 288730 - DNA, 21 bp, Artificial sequence
  SiRNA target sequence
tgctggtttggaacagagatg

SEQ ID NO: 288731 - DNA, 21 bp, Artificial sequence
  SiRNA target sequence
gctggtttggaacagagatga

SEQ ID NO: 288732 - DNA, 21 bp, Artificial sequence
  SiRNA target sequence
ctggtttggaacagagatgat

SEQ ID NO: 288733 - DNA, 21 bp, Artificial sequence
  SiRNA target sequence
tggtttggaacagagatgatc

SEQ ID NO: 288734 - DNA, 21 bp, Artificial sequence
  SiRNA target sequence
ggtttggaacagagatgatca

SEQ ID NO: 288735 - DNA, 21 bp, Artificial sequence
  SiRNA target sequence
gtttggaacagagatgatcaa

SEQ ID NO: 288736 - DNA, 21 bp, Artificial sequence
  SiRNA target sequence
ttatattgatactgaaacaat

SEQ ID NO: 288737 - DNA, 21 bp, Artificial sequence
  SiRNA target sequence
tatattgatactgaaacaatg

SEQ ID NO: 288738 - DNA, 21 bp, Artificial sequence
  SiRNA target sequence
atattgatactgaaacaatgc

SEQ ID NO: 288739 - DNA, 21 bp, Artificial sequence
  SiRNA target sequence
tattgatactgaaacaatgca

SEQ ID NO: 288740 - DNA, 21 bp, Artificial sequence
  SiRNA target sequence
attgatactgaaacaatgcat

SEQ ID NO: 288741 - DNA, 21 bp, Artificial sequence
  SiRNA target sequence
ttgatactgaaacaatgcatt

SEQ ID NO: 288742 - DNA, 21 bp, Artificial sequence
  SiRNA target sequence
tgatactgaaacaatgcattt

SEQ ID NO: 288743 - DNA, 21 bp, Artificial sequence
  SiRNA target sequence
gatactgaaacaatgcatttg

SEQ ID NO: 288744 - DNA, 21 bp, Artificial sequence
  SiRNA target sequence
atactgaaacaatgcatttgc

SEQ ID NO: 288745 - DNA, 21 bp, Artificial sequence
  SiRNA target sequence
tactgaaacaatgcatttgca

SEQ ID NO: 288746 - DNA, 21 bp, Artificial sequence
  SiRNA target sequence
actgaaacaatgcatttgcac

SEQ ID NO: 288747 - DNA, 21 bp, Artificial sequence
  SiRNA target sequence
ctgaaacaatgcatttgcacc

SEQ ID NO: 288748 - DNA, 21 bp, Artificial sequence
  SiRNA target sequence
tgaaacaatgcatttgcacca

SEQ ID NO: 288749 - DNA, 21 bp, Artificial sequence
  SiRNA target sequence
gaaacaatgcatttgcaccat

SEQ ID NO: 288750 - DNA, 21 bp, Artificial sequence
  SiRNA target sequence
aaacaatgcatttgcaccatg

SEQ ID NO: 288751 - DNA, 21 bp, Artificial sequence
  SiRNA target sequence
aacaatgcatttgcaccatga

SEQ ID NO: 288752 - DNA, 21 bp, Artificial sequence
  SiRNA target sequence
acaatgcatttgcaccatgat

SEQ ID NO: 288753 - DNA, 21 bp, Artificial sequence
  SiRNA target sequence
caatgcatttgcaccatgata

SEQ ID NO: 288754 - DNA, 21 bp, Artificial sequence
  SiRNA target sequence
aatgcatttgcaccatgataa

SEQ ID NO: 288755 - DNA, 21 bp, Artificial sequence
  SiRNA target sequence
atgcatttgcaccatgataaa

SEQ ID NO: 288756 - DNA, 21 bp, Artificial sequence
  SiRNA target sequence
tgcatttgcaccatgataaac

SEQ ID NO: 288757 - DNA, 21 bp, Artificial sequence
  SiRNA target sequence
gcatttgcaccatgataaaca

SEQ ID NO: 288758 - DNA, 21 bp, Artificial sequence
  SiRNA target sequence
catttgcaccatgataaacat

SEQ ID NO: 288759 - DNA, 21 bp, Artificial sequence
  SiRNA target sequence
atttgcaccatgataaacatc

SEQ ID NO: 288760 - DNA, 21 bp, Artificial sequence
  SiRNA target sequence
tttgcaccatgataaacatca

SEQ ID NO: 288761 - DNA, 21 bp, Artificial sequence
  SiRNA target sequence
ttgcaccatgataaacatcat

SEQ ID NO: 288762 - DNA, 21 bp, Artificial sequence
  SiRNA target sequence
tgcaccatgataaacatcata

SEQ ID NO: 288763 - DNA, 21 bp, Artificial sequence
  SiRNA target sequence
gcaccatgataaacatcataa

SEQ ID NO: 288764 - DNA, 21 bp, Artificial sequence
  SiRNA target sequence
caccatgataaacatcataat

SEQ ID NO: 288765 - DNA, 21 bp, Artificial sequence
  SiRNA target sequence
accatgataaacatcataata

SEQ ID NO: 288766 - DNA, 21 bp, Artificial sequence
  SiRNA target sequence
ccatgataaacatcataatac

SEQ ID NO: 288767 - DNA, 21 bp, Artificial sequence
  SiRNA target sequence
catgataaacatcataatact

SEQ ID NO: 288768 - DNA, 21 bp, Artificial sequence
  SiRNA target sequence
atgataaacatcataatactt

SEQ ID NO: 288769 - DNA, 21 bp, Artificial sequence
  SiRNA target sequence
tgataaacatcataatactta

SEQ ID NO: 288770 - DNA, 21 bp, Artificial sequence
  SiRNA target sequence
gataaacatcataatacttat

SEQ ID NO: 288771 - DNA, 21 bp, Artificial sequence
  SiRNA target sequence
ataaacatcataatacttatg

SEQ ID NO: 288772 - DNA, 21 bp, Artificial sequence
  SiRNA target sequence
taaacatcataatacttatgt

SEQ ID NO: 288773 - DNA, 21 bp, Artificial sequence
  SiRNA target sequence
aaacatcataatacttatgta

SEQ ID NO: 288774 - DNA, 21 bp, Artificial sequence
  SiRNA target sequence
aacatcataatacttatgtaa

SEQ ID NO: 288775 - DNA, 21 bp, Artificial sequence
  SiRNA target sequence
acatcataatacttatgtaac

SEQ ID NO: 288776 - DNA, 21 bp, Artificial sequence
  SiRNA target sequence
catcataatacttatgtaact

SEQ ID NO: 288777 - DNA, 21 bp, Artificial sequence
  SiRNA target sequence
atcataatacttatgtaacta

SEQ ID NO: 288778 - DNA, 21 bp, Artificial sequence
  SiRNA target sequence
tcataatacttatgtaactaa

SEQ ID NO: 288779 - DNA, 21 bp, Artificial sequence
  SiRNA target sequence
cataatacttatgtaactaaa

SEQ ID NO: 288780 - DNA, 21 bp, Artificial sequence
  SiRNA target sequence
ataatacttatgtaactaaat

SEQ ID NO: 288781 - DNA, 21 bp, Artificial sequence
  SiRNA target sequence
taatacttatgtaactaaatt

SEQ ID NO: 288782 - DNA, 21 bp, Artificial sequence
  SiRNA target sequence
aatacttatgtaactaaattg

SEQ ID NO: 288783 - DNA, 21 bp, Artificial sequence
  SiRNA target sequence
atacttatgtaactaaattga

SEQ ID NO: 288784 - DNA, 21 bp, Artificial sequence
  SiRNA target sequence
tacttatgtaactaaattgaa

SEQ ID NO: 288785 - DNA, 21 bp, Artificial sequence
  SiRNA target sequence
acttatgtaactaaattgaat

SEQ ID NO: 288786 - DNA, 21 bp, Artificial sequence
  SiRNA target sequence
cttatgtaactaaattgaatg

SEQ ID NO: 288787 - DNA, 21 bp, Artificial sequence
  SiRNA target sequence
ttatgtaactaaattgaatga

SEQ ID NO: 288788 - DNA, 21 bp, Artificial sequence
  SiRNA target sequence
tatgtaactaaattgaatgaa

SEQ ID NO: 288789 - DNA, 21 bp, Artificial sequence
  SiRNA target sequence
atgtaactaaattgaatgaag

SEQ ID NO: 288790 - DNA, 21 bp, Artificial sequence
  SiRNA target sequence
tgtaactaaattgaatgaagc

SEQ ID NO: 288791 - DNA, 21 bp, Artificial sequence
  SiRNA target sequence
gtaactaaattgaatgaagca

SEQ ID NO: 288792 - DNA, 21 bp, Artificial sequence
  SiRNA target sequence
taactaaattgaatgaagcaa

SEQ ID NO: 288793 - DNA, 21 bp, Artificial sequence
  SiRNA target sequence
aactaaattgaatgaagcaat

SEQ ID NO: 288794 - DNA, 21 bp, Artificial sequence
  SiRNA target sequence
actaaattgaatgaagcaatt

SEQ ID NO: 288795 - DNA, 21 bp, Artificial sequence
  SiRNA target sequence
ctaaattgaatgaagcaattg

SEQ ID NO: 288796 - DNA, 21 bp, Artificial sequence
  SiRNA target sequence
taaattgaatgaagcaattga

SEQ ID NO: 288797 - DNA, 21 bp, Artificial sequence
  SiRNA target sequence
aaattgaatgaagcaattgaa

SEQ ID NO: 288798 - DNA, 21 bp, Artificial sequence
  SiRNA target sequence
aattgaatgaagcaattgaaa

SEQ ID NO: 288799 - DNA, 21 bp, Artificial sequence
  SiRNA target sequence
attgaatgaagcaattgaaaa

SEQ ID NO: 288800 - DNA, 21 bp, Artificial sequence
  SiRNA target sequence
ttgaatgaagcaattgaaaaa

SEQ ID NO: 288801 - DNA, 21 bp, Artificial sequence
  SiRNA target sequence
tgaatgaagcaattgaaaaac

SEQ ID NO: 288802 - DNA, 21 bp, Artificial sequence
  SiRNA target sequence
gaatgaagcaattgaaaaaca

SEQ ID NO: 288803 - DNA, 21 bp, Artificial sequence
  SiRNA target sequence
aatgaagcaattgaaaaacat

SEQ ID NO: 288804 - DNA, 21 bp, Artificial sequence
  SiRNA target sequence
atgaagcaattgaaaaacatc

SEQ ID NO: 288805 - DNA, 21 bp, Artificial sequence
  SiRNA target sequence
tgaagcaattgaaaaacatcc

SEQ ID NO: 288806 - DNA, 21 bp, Artificial sequence
  SiRNA target sequence
gaagcaattgaaaaacatcct

SEQ ID NO: 288807 - DNA, 21 bp, Artificial sequence
  SiRNA target sequence
aagcaattgaaaaacatcctg

SEQ ID NO: 288808 - DNA, 21 bp, Artificial sequence
  SiRNA target sequence
agcaattgaaaaacatcctga

SEQ ID NO: 288809 - DNA, 21 bp, Artificial sequence
  SiRNA target sequence
gcaattgaaaaacatcctgaa

SEQ ID NO: 288810 - DNA, 21 bp, Artificial sequence
  SiRNA target sequence
caattgaaaaacatcctgaac

SEQ ID NO: 288811 - DNA, 21 bp, Artificial sequence
  SiRNA target sequence
aattgaaaaacatcctgaact

SEQ ID NO: 288812 - DNA, 21 bp, Artificial sequence
  SiRNA target sequence
attgaaaaacatcctgaactt

SEQ ID NO: 288813 - DNA, 21 bp, Artificial sequence
  SiRNA target sequence
ttgaaaaacatcctgaacttg

SEQ ID NO: 288814 - DNA, 21 bp, Artificial sequence
  SiRNA target sequence
tgaaaaacatcctgaacttgg

SEQ ID NO: 288815 - DNA, 21 bp, Artificial sequence
  SiRNA target sequence
gaaaaacatcctgaacttgga

SEQ ID NO: 288816 - DNA, 21 bp, Artificial sequence
  SiRNA target sequence
aaaaacatcctgaacttggaa

SEQ ID NO: 288817 - DNA, 21 bp, Artificial sequence
  SiRNA target sequence
aaaacatcctgaacttggaaa

SEQ ID NO: 288818 - DNA, 21 bp, Artificial sequence
  SiRNA target sequence
aaacatcctgaacttggaaat

SEQ ID NO: 288819 - DNA, 21 bp, Artificial sequence
  SiRNA target sequence
aacatcctgaacttggaaatc

SEQ ID NO: 288820 - DNA, 21 bp, Artificial sequence
  SiRNA target sequence
acatcctgaacttggaaatca

SEQ ID NO: 288821 - DNA, 21 bp, Artificial sequence
  SiRNA target sequence
catcctgaacttggaaatcaa

SEQ ID NO: 288822 - DNA, 21 bp, Artificial sequence
  SiRNA target sequence
atcctgaacttggaaatcaat

SEQ ID NO: 288823 - DNA, 21 bp, Artificial sequence
  SiRNA target sequence
tcctgaacttggaaatcaatc

SEQ ID NO: 288824 - DNA, 21 bp, Artificial sequence
  SiRNA target sequence
cctgaacttggaaatcaatct

SEQ ID NO: 288825 - DNA, 21 bp, Artificial sequence
  SiRNA target sequence
ctgaacttggaaatcaatctg

SEQ ID NO: 288826 - DNA, 21 bp, Artificial sequence
  SiRNA target sequence
tgaacttggaaatcaatctgt

SEQ ID NO: 288827 - DNA, 21 bp, Artificial sequence
  SiRNA target sequence
gaacttggaaatcaatctgtt

SEQ ID NO: 288828 - DNA, 21 bp, Artificial sequence
  SiRNA target sequence
aacttggaaatcaatctgttg

SEQ ID NO: 288829 - DNA, 21 bp, Artificial sequence
  SiRNA target sequence
acttggaaatcaatctgttga

SEQ ID NO: 288830 - DNA, 21 bp, Artificial sequence
  SiRNA target sequence
cttggaaatcaatctgttgag

SEQ ID NO: 288831 - DNA, 21 bp, Artificial sequence
  SiRNA target sequence
ttggaaatcaatctgttgagg

SEQ ID NO: 288832 - DNA, 21 bp, Artificial sequence
  SiRNA target sequence
tggaaatcaatctgttgagga

SEQ ID NO: 288833 - DNA, 21 bp, Artificial sequence
  SiRNA target sequence
ggaaatcaatctgttgaggaa

SEQ ID NO: 288834 - DNA, 21 bp, Artificial sequence
  SiRNA target sequence
gaaatcaatctgttgaggaat

SEQ ID NO: 288835 - DNA, 21 bp, Artificial sequence
  SiRNA target sequence
aaatcaatctgttgaggaatt

SEQ ID NO: 288836 - DNA, 21 bp, Artificial sequence
  SiRNA target sequence
aatcaatctgttgaggaatta

SEQ ID NO: 288837 - DNA, 21 bp, Artificial sequence
  SiRNA target sequence
atcaatctgttgaggaattaa

SEQ ID NO: 288838 - DNA, 21 bp, Artificial sequence
  SiRNA target sequence
tcaatctgttgaggaattaat

SEQ ID NO: 288839 - DNA, 21 bp, Artificial sequence
  SiRNA target sequence
caatctgttgaggaattaatt

SEQ ID NO: 288840 - DNA, 21 bp, Artificial sequence
  SiRNA target sequence
aatctgttgaggaattaatta

SEQ ID NO: 288841 - DNA, 21 bp, Artificial sequence
  SiRNA target sequence
atctgttgaggaattaattac

SEQ ID NO: 288842 - DNA, 21 bp, Artificial sequence
  SiRNA target sequence
tctgttgaggaattaattaca

SEQ ID NO: 288843 - DNA, 21 bp, Artificial sequence
  SiRNA target sequence
ctgttgaggaattaattacaa

SEQ ID NO: 288844 - DNA, 21 bp, Artificial sequence
  SiRNA target sequence
tgttgaggaattaattacaaa

SEQ ID NO: 288845 - DNA, 21 bp, Artificial sequence
  SiRNA target sequence
gttgaggaattaattacaaat

SEQ ID NO: 288846 - DNA, 21 bp, Artificial sequence
  SiRNA target sequence
ttgaggaattaattacaaata

SEQ ID NO: 288847 - DNA, 21 bp, Artificial sequence
  SiRNA target sequence
tgaggaattaattacaaatat

SEQ ID NO: 288848 - DNA, 21 bp, Artificial sequence
  SiRNA target sequence
gaggaattaattacaaatatg

SEQ ID NO: 288849 - DNA, 21 bp, Artificial sequence
  SiRNA target sequence
aggaattaattacaaatatga

SEQ ID NO: 288850 - DNA, 21 bp, Artificial sequence
  SiRNA target sequence
ggaattaattacaaatatgaa

SEQ ID NO: 288851 - DNA, 21 bp, Artificial sequence
  SiRNA target sequence
gaattaattacaaatatgaat

SEQ ID NO: 288852 - DNA, 21 bp, Artificial sequence
  SiRNA target sequence
aattaattacaaatatgaatg

SEQ ID NO: 288853 - DNA, 21 bp, Artificial sequence
  SiRNA target sequence
attaattacaaatatgaatgc

SEQ ID NO: 288854 - DNA, 21 bp, Artificial sequence
  SiRNA target sequence
ttaattacaaatatgaatgcg

SEQ ID NO: 288855 - DNA, 21 bp, Artificial sequence
  SiRNA target sequence
taattacaaatatgaatgcga

SEQ ID NO: 288856 - DNA, 21 bp, Artificial sequence
  SiRNA target sequence
aattacaaatatgaatgcgat

SEQ ID NO: 288857 - DNA, 21 bp, Artificial sequence
  SiRNA target sequence
attacaaatatgaatgcgatt

SEQ ID NO: 288858 - DNA, 21 bp, Artificial sequence
  SiRNA target sequence
ttacaaatatgaatgcgattc

SEQ ID NO: 288859 - DNA, 21 bp, Artificial sequence
  SiRNA target sequence
tacaaatatgaatgcgattcc

SEQ ID NO: 288860 - DNA, 21 bp, Artificial sequence
  SiRNA target sequence
acaaatatgaatgcgattccc

SEQ ID NO: 288861 - DNA, 21 bp, Artificial sequence
  SiRNA target sequence
caaatatgaatgcgattcccg

SEQ ID NO: 288862 - DNA, 21 bp, Artificial sequence
  SiRNA target sequence
aaatatgaatgcgattcccga

SEQ ID NO: 288863 - DNA, 21 bp, Artificial sequence
  SiRNA target sequence
aatatgaatgcgattcccgaa

SEQ ID NO: 288864 - DNA, 21 bp, Artificial sequence
  SiRNA target sequence
atatgaatgcgattcccgaag

SEQ ID NO: 288865 - DNA, 21 bp, Artificial sequence
  SiRNA target sequence
tatgaatgcgattcccgaaga

SEQ ID NO: 288866 - DNA, 21 bp, Artificial sequence
  SiRNA target sequence
atgaatgcgattcccgaagat

SEQ ID NO: 288867 - DNA, 21 bp, Artificial sequence
  SiRNA target sequence
tgaatgcgattcccgaagata

SEQ ID NO: 288868 - DNA, 21 bp, Artificial sequence
  SiRNA target sequence
gaatgcgattcccgaagatat

SEQ ID NO: 288869 - DNA, 21 bp, Artificial sequence
  SiRNA target sequence
aatgcgattcccgaagatatt

SEQ ID NO: 288870 - DNA, 21 bp, Artificial sequence
  SiRNA target sequence
atgcgattcccgaagatattc

SEQ ID NO: 288871 - DNA, 21 bp, Artificial sequence
  SiRNA target sequence
tgcgattcccgaagatattcg

SEQ ID NO: 288872 - DNA, 21 bp, Artificial sequence
  SiRNA target sequence
gcgattcccgaagatattcgt

SEQ ID NO: 288873 - DNA, 21 bp, Artificial sequence
  SiRNA target sequence
cgattcccgaagatattcgtt

SEQ ID NO: 288874 - DNA, 21 bp, Artificial sequence
  SiRNA target sequence
gattcccgaagatattcgttt

SEQ ID NO: 288875 - DNA, 21 bp, Artificial sequence
  SiRNA target sequence
attcccgaagatattcgttta

SEQ ID NO: 288876 - DNA, 21 bp, Artificial sequence
  SiRNA target sequence
ttcccgaagatattcgtttag

SEQ ID NO: 288877 - DNA, 21 bp, Artificial sequence
  SiRNA target sequence
tcccgaagatattcgtttagc

SEQ ID NO: 288878 - DNA, 21 bp, Artificial sequence
  SiRNA target sequence
cccgaagatattcgtttagct

SEQ ID NO: 288879 - DNA, 21 bp, Artificial sequence
  SiRNA target sequence
ccgaagatattcgtttagctg

SEQ ID NO: 288880 - DNA, 21 bp, Artificial sequence
  SiRNA target sequence
cgaagatattcgtttagctgt

SEQ ID NO: 288881 - DNA, 21 bp, Artificial sequence
  SiRNA target sequence
gaagatattcgtttagctgtt

SEQ ID NO: 288882 - DNA, 21 bp, Artificial sequence
  SiRNA target sequence
aagatattcgtttagctgttc

SEQ ID NO: 288883 - DNA, 21 bp, Artificial sequence
  SiRNA target sequence
agatattcgtttagctgttcg

SEQ ID NO: 288884 - DNA, 21 bp, Artificial sequence
  SiRNA target sequence
gatattcgtttagctgttcgc

SEQ ID NO: 288885 - DNA, 21 bp, Artificial sequence
  SiRNA target sequence
atattcgtttagctgttcgca

SEQ ID NO: 288886 - DNA, 21 bp, Artificial sequence
  SiRNA target sequence
tattcgtttagctgttcgcaa

SEQ ID NO: 288887 - DNA, 21 bp, Artificial sequence
  SiRNA target sequence
attcgtttagctgttcgcaat

SEQ ID NO: 288888 - DNA, 21 bp, Artificial sequence
  SiRNA target sequence
ttcgtttagctgttcgcaata

SEQ ID NO: 288889 - DNA, 21 bp, Artificial sequence
  SiRNA target sequence
tcgtttagctgttcgcaataa

SEQ ID NO: 288890 - DNA, 21 bp, Artificial sequence
  SiRNA target sequence
cgtttagctgttcgcaataat

SEQ ID NO: 288891 - DNA, 21 bp, Artificial sequence
  SiRNA target sequence
gtttagctgttcgcaataatg

SEQ ID NO: 288892 - DNA, 21 bp, Artificial sequence
  SiRNA target sequence
tttagctgttcgcaataatgg

SEQ ID NO: 288893 - DNA, 21 bp, Artificial sequence
  SiRNA target sequence
ttagctgttcgcaataatggt

SEQ ID NO: 288894 - DNA, 21 bp, Artificial sequence
  SiRNA target sequence
tagctgttcgcaataatggtg

SEQ ID NO: 288895 - DNA, 21 bp, Artificial sequence
  SiRNA target sequence
agctgttcgcaataatggtgg

SEQ ID NO: 288896 - DNA, 21 bp, Artificial sequence
  SiRNA target sequence
gctgttcgcaataatggtggg

SEQ ID NO: 288897 - DNA, 21 bp, Artificial sequence
  SiRNA target sequence
ctgttcgcaataatggtgggg

SEQ ID NO: 288898 - DNA, 21 bp, Artificial sequence
  SiRNA target sequence
tgttcgcaataatggtggggg

SEQ ID NO: 288899 - DNA, 21 bp, Artificial sequence
  SiRNA target sequence
gttcgcaataatggtgggggg

SEQ ID NO: 288900 - DNA, 21 bp, Artificial sequence
  SiRNA target sequence
ttcgcaataatggtggggggc

SEQ ID NO: 288901 - DNA, 21 bp, Artificial sequence
  SiRNA target sequence
tcgcaataatggtggggggca

SEQ ID NO: 288902 - DNA, 21 bp, Artificial sequence
  SiRNA target sequence
cgcaataatggtggggggcat

SEQ ID NO: 288903 - DNA, 21 bp, Artificial sequence
  SiRNA target sequence
gcaataatggtggggggcatg

SEQ ID NO: 288904 - DNA, 21 bp, Artificial sequence
  SiRNA target sequence
caataatggtggggggcatgt

SEQ ID NO: 288905 - DNA, 21 bp, Artificial sequence
  SiRNA target sequence
aataatggtggggggcatgtg

SEQ ID NO: 288906 - DNA, 21 bp, Artificial sequence
  SiRNA target sequence
ataatggtggggggcatgtga

SEQ ID NO: 288907 - DNA, 21 bp, Artificial sequence
  SiRNA target sequence
taatggtggggggcatgtgaa

SEQ ID NO: 288908 - DNA, 21 bp, Artificial sequence
  SiRNA target sequence
aatggtggggggcatgtgaat

SEQ ID NO: 288909 - DNA, 21 bp, Artificial sequence
  SiRNA target sequence
atggtggggggcatgtgaatc

SEQ ID NO: 288910 - DNA, 21 bp, Artificial sequence
  SiRNA target sequence
tggtggggggcatgtgaatca

SEQ ID NO: 288911 - DNA, 21 bp, Artificial sequence
  SiRNA target sequence
ggtggggggcatgtgaatcat

SEQ ID NO: 288912 - DNA, 21 bp, Artificial sequence
  SiRNA target sequence
gtggggggcatgtgaatcatt

SEQ ID NO: 288913 - DNA, 21 bp, Artificial sequence
  SiRNA target sequence
tggggggcatgtgaatcattc

SEQ ID NO: 288914 - DNA, 21 bp, Artificial sequence
  SiRNA target sequence
ggggggcatgtgaatcattca

SEQ ID NO: 288915 - DNA, 21 bp, Artificial sequence
  SiRNA target sequence
gggggcatgtgaatcattcat

SEQ ID NO: 288916 - DNA, 21 bp, Artificial sequence
  SiRNA target sequence
ggggcatgtgaatcattcatt

SEQ ID NO: 288917 - DNA, 21 bp, Artificial sequence
  SiRNA target sequence
gggcatgtgaatcattcattt

SEQ ID NO: 288918 - DNA, 21 bp, Artificial sequence
  SiRNA target sequence
ggcatgtgaatcattcatttt

SEQ ID NO: 288919 - DNA, 21 bp, Artificial sequence
  SiRNA target sequence
gcatgtgaatcattcattttt

SEQ ID NO: 288920 - DNA, 21 bp, Artificial sequence
  SiRNA target sequence
catgtgaatcattcatttttc

SEQ ID NO: 288921 - DNA, 21 bp, Artificial sequence
  SiRNA target sequence
atgtgaatcattcatttttct

SEQ ID NO: 288922 - DNA, 21 bp, Artificial sequence
  SiRNA target sequence
tgtgaatcattcatttttctg

SEQ ID NO: 288923 - DNA, 21 bp, Artificial sequence
  SiRNA target sequence
gtgaatcattcatttttctgg

SEQ ID NO: 288924 - DNA, 21 bp, Artificial sequence
  SiRNA target sequence
tgaatcattcatttttctgga

SEQ ID NO: 288925 - DNA, 21 bp, Artificial sequence
  SiRNA target sequence
gaatcattcatttttctggaa

SEQ ID NO: 288926 - DNA, 21 bp, Artificial sequence
  SiRNA target sequence
aatcattcatttttctggaaa

SEQ ID NO: 288927 - DNA, 21 bp, Artificial sequence
  SiRNA target sequence
atcattcatttttctggaaag

SEQ ID NO: 288928 - DNA, 21 bp, Artificial sequence
  SiRNA target sequence
tcattcatttttctggaaagt

SEQ ID NO: 288929 - DNA, 21 bp, Artificial sequence
  SiRNA target sequence
cattcatttttctggaaagtt

SEQ ID NO: 288930 - DNA, 21 bp, Artificial sequence
  SiRNA target sequence
attcatttttctggaaagtta

SEQ ID NO: 288931 - DNA, 21 bp, Artificial sequence
  SiRNA target sequence
ttcatttttctggaaagttat

SEQ ID NO: 288932 - DNA, 21 bp, Artificial sequence
  SiRNA target sequence
tcatttttctggaaagttatg

SEQ ID NO: 288933 - DNA, 21 bp, Artificial sequence
  SiRNA target sequence
catttttctggaaagttatgg

SEQ ID NO: 288934 - DNA, 21 bp, Artificial sequence
  SiRNA target sequence
atttttctggaaagttatggg

SEQ ID NO: 288935 - DNA, 21 bp, Artificial sequence
  SiRNA target sequence
tttttctggaaagttatgggg

SEQ ID NO: 288936 - DNA, 21 bp, Artificial sequence
  SiRNA target sequence
ttttctggaaagttatggggc

SEQ ID NO: 288937 - DNA, 21 bp, Artificial sequence
  SiRNA target sequence
tttctggaaagttatggggcc

SEQ ID NO: 288938 - DNA, 21 bp, Artificial sequence
  SiRNA target sequence
ttctggaaagttatggggcca

SEQ ID NO: 288939 - DNA, 21 bp, Artificial sequence
  SiRNA target sequence
tctggaaagttatggggccaa

SEQ ID NO: 288940 - DNA, 21 bp, Artificial sequence
  SiRNA target sequence
ctggaaagttatggggccaaa

SEQ ID NO: 288941 - DNA, 21 bp, Artificial sequence
  SiRNA target sequence
tggaaagttatggggccaaat

SEQ ID NO: 288942 - DNA, 21 bp, Artificial sequence
  SiRNA target sequence
ggaaagttatggggccaaatg

SEQ ID NO: 288943 - DNA, 21 bp, Artificial sequence
  SiRNA target sequence
gaaagttatggggccaaatgc

SEQ ID NO: 288944 - DNA, 21 bp, Artificial sequence
  SiRNA target sequence
aaagttatggggccaaatgct

SEQ ID NO: 288945 - DNA, 21 bp, Artificial sequence
  SiRNA target sequence
aagttatggggccaaatgctg

SEQ ID NO: 288946 - DNA, 21 bp, Artificial sequence
  SiRNA target sequence
agttatggggccaaatgctgg

SEQ ID NO: 288947 - DNA, 21 bp, Artificial sequence
  SiRNA target sequence
gttatggggccaaatgctggt

SEQ ID NO: 288948 - DNA, 21 bp, Artificial sequence
  SiRNA target sequence
ttatggggccaaatgctggtg

SEQ ID NO: 288949 - DNA, 21 bp, Artificial sequence
  SiRNA target sequence
tatggggccaaatgctggtgg

SEQ ID NO: 288950 - DNA, 21 bp, Artificial sequence
  SiRNA target sequence
atggggccaaatgctggtggt

SEQ ID NO: 288951 - DNA, 21 bp, Artificial sequence
  SiRNA target sequence
tggggccaaatgctggtggtg

SEQ ID NO: 288952 - DNA, 21 bp, Artificial sequence
  SiRNA target sequence
ggggccaaatgctggtggtga

SEQ ID NO: 288953 - DNA, 21 bp, Artificial sequence
  SiRNA target sequence
gggccaaatgctggtggtgaa

SEQ ID NO: 288954 - DNA, 21 bp, Artificial sequence
  SiRNA target sequence
ggccaaatgctggtggtgaac

SEQ ID NO: 288955 - DNA, 21 bp, Artificial sequence
  SiRNA target sequence
gccaaatgctggtggtgaacc

SEQ ID NO: 288956 - DNA, 21 bp, Artificial sequence
  SiRNA target sequence
ccaaatgctggtggtgaacca

SEQ ID NO: 288957 - DNA, 21 bp, Artificial sequence
  SiRNA target sequence
caaatgctggtggtgaaccaa

SEQ ID NO: 288958 - DNA, 21 bp, Artificial sequence
  SiRNA target sequence
aaatgctggtggtgaaccaac

SEQ ID NO: 288959 - DNA, 21 bp, Artificial sequence
  SiRNA target sequence
aatgctggtggtgaaccaact

SEQ ID NO: 288960 - DNA, 21 bp, Artificial sequence
  SiRNA target sequence
atgctggtggtgaaccaactg

SEQ ID NO: 288961 - DNA, 21 bp, Artificial sequence
  SiRNA target sequence
tgctggtggtgaaccaactgg

SEQ ID NO: 288962 - DNA, 21 bp, Artificial sequence
  SiRNA target sequence
gctggtggtgaaccaactggt

SEQ ID NO: 288963 - DNA, 21 bp, Artificial sequence
  SiRNA target sequence
ctggtggtgaaccaactggtg

SEQ ID NO: 288964 - DNA, 21 bp, Artificial sequence
  SiRNA target sequence
tggtggtgaaccaactggtgc

SEQ ID NO: 288965 - DNA, 21 bp, Artificial sequence
  SiRNA target sequence
ggtggtgaaccaactggtgct

SEQ ID NO: 288966 - DNA, 21 bp, Artificial sequence
  SiRNA target sequence
gtggtgaaccaactggtgctg

SEQ ID NO: 288967 - DNA, 21 bp, Artificial sequence
  SiRNA target sequence
tggtgaaccaactggtgctgt

SEQ ID NO: 288968 - DNA, 21 bp, Artificial sequence
  SiRNA target sequence
ggtgaaccaactggtgctgta

SEQ ID NO: 288969 - DNA, 21 bp, Artificial sequence
  SiRNA target sequence
gtgaaccaactggtgctgtaa

SEQ ID NO: 288970 - DNA, 21 bp, Artificial sequence
  SiRNA target sequence
tgaaccaactggtgctgtaaa

SEQ ID NO: 288971 - DNA, 21 bp, Artificial sequence
  SiRNA target sequence
gaaccaactggtgctgtaaaa

SEQ ID NO: 288972 - DNA, 21 bp, Artificial sequence
  SiRNA target sequence
aaccaactggtgctgtaaaag

SEQ ID NO: 288973 - DNA, 21 bp, Artificial sequence
  SiRNA target sequence
accaactggtgctgtaaaaga

SEQ ID NO: 288974 - DNA, 21 bp, Artificial sequence
  SiRNA target sequence
ccaactggtgctgtaaaagaa

SEQ ID NO: 288975 - DNA, 21 bp, Artificial sequence
  SiRNA target sequence
caactggtgctgtaaaagaag

SEQ ID NO: 288976 - DNA, 21 bp, Artificial sequence
  SiRNA target sequence
aactggtgctgtaaaagaagc

SEQ ID NO: 288977 - DNA, 21 bp, Artificial sequence
  SiRNA target sequence
actggtgctgtaaaagaagct

SEQ ID NO: 288978 - DNA, 21 bp, Artificial sequence
  SiRNA target sequence
ctggtgctgtaaaagaagcta

SEQ ID NO: 288979 - DNA, 21 bp, Artificial sequence
  SiRNA target sequence
tggtgctgtaaaagaagctat

SEQ ID NO: 288980 - DNA, 21 bp, Artificial sequence
  SiRNA target sequence
ggtgctgtaaaagaagctatt

SEQ ID NO: 288981 - DNA, 21 bp, Artificial sequence
  SiRNA target sequence
gtgctgtaaaagaagctatta

SEQ ID NO: 288982 - DNA, 21 bp, Artificial sequence
  SiRNA target sequence
tgctgtaaaagaagctattaa

SEQ ID NO: 288983 - DNA, 21 bp, Artificial sequence
  SiRNA target sequence
gctgtaaaagaagctattaat

SEQ ID NO: 288984 - DNA, 21 bp, Artificial sequence
  SiRNA target sequence
ctgtaaaagaagctattaatc

SEQ ID NO: 288985 - DNA, 21 bp, Artificial sequence
  SiRNA target sequence
tgtaaaagaagctattaatca

SEQ ID NO: 288986 - DNA, 21 bp, Artificial sequence
  SiRNA target sequence
gtaaaagaagctattaatcaa

SEQ ID NO: 288987 - DNA, 21 bp, Artificial sequence
  SiRNA target sequence
taaaagaagctattaatcaaa

SEQ ID NO: 288988 - DNA, 21 bp, Artificial sequence
  SiRNA target sequence
aaaagaagctattaatcaaac

SEQ ID NO: 288989 - DNA, 21 bp, Artificial sequence
  SiRNA target sequence
aaagaagctattaatcaaact

SEQ ID NO: 288990 - DNA, 21 bp, Artificial sequence
  SiRNA target sequence
aagaagctattaatcaaactt

SEQ ID NO: 288991 - DNA, 21 bp, Artificial sequence
  SiRNA target sequence
agaagctattaatcaaacttt

SEQ ID NO: 288992 - DNA, 21 bp, Artificial sequence
  SiRNA target sequence
gaagctattaatcaaactttt

SEQ ID NO: 288993 - DNA, 21 bp, Artificial sequence
  SiRNA target sequence
aagctattaatcaaacttttg

SEQ ID NO: 288994 - DNA, 21 bp, Artificial sequence
  SiRNA target sequence
agctattaatcaaacttttgg

SEQ ID NO: 288995 - DNA, 21 bp, Artificial sequence
  SiRNA target sequence
gctattaatcaaacttttggt

SEQ ID NO: 288996 - DNA, 21 bp, Artificial sequence
  SiRNA target sequence
ctattaatcaaacttttggta

SEQ ID NO: 288997 - DNA, 21 bp, Artificial sequence
  SiRNA target sequence
tattaatcaaacttttggtag

SEQ ID NO: 288998 - DNA, 21 bp, Artificial sequence
  SiRNA target sequence
attaatcaaacttttggtagt

SEQ ID NO: 288999 - DNA, 21 bp, Artificial sequence
  SiRNA target sequence
ttaatcaaacttttggtagtt

SEQ ID NO: 289000 - DNA, 21 bp, Artificial sequence
  SiRNA target sequence
taatcaaacttttggtagttt

SEQ ID NO: 289001 - DNA, 21 bp, Artificial sequence
  SiRNA target sequence
aatcaaacttttggtagtttc

SEQ ID NO: 289002 - DNA, 21 bp, Artificial sequence
  SiRNA target sequence
atcaaacttttggtagtttcg

SEQ ID NO: 289003 - DNA, 21 bp, Artificial sequence
  SiRNA target sequence
tcaaacttttggtagtttcga

SEQ ID NO: 289004 - DNA, 21 bp, Artificial sequence
  SiRNA target sequence
caaacttttggtagtttcgaa

SEQ ID NO: 289005 - DNA, 21 bp, Artificial sequence
  SiRNA target sequence
aaacttttggtagtttcgaaa

SEQ ID NO: 289006 - DNA, 21 bp, Artificial sequence
  SiRNA target sequence
aacttttggtagtttcgaaaa

SEQ ID NO: 289007 - DNA, 21 bp, Artificial sequence
  SiRNA target sequence
acttttggtagtttcgaaaaa

SEQ ID NO: 289008 - DNA, 21 bp, Artificial sequence
  SiRNA target sequence
cttttggtagtttcgaaaaaa

SEQ ID NO: 289009 - DNA, 21 bp, Artificial sequence
  SiRNA target sequence
ttttggtagtttcgaaaaaat

SEQ ID NO: 289010 - DNA, 21 bp, Artificial sequence
  SiRNA target sequence
tttggtagtttcgaaaaaatg

SEQ ID NO: 289011 - DNA, 21 bp, Artificial sequence
  SiRNA target sequence
ttggtagtttcgaaaaaatga

SEQ ID NO: 289012 - DNA, 21 bp, Artificial sequence
  SiRNA target sequence
tggtagtttcgaaaaaatgaa

SEQ ID NO: 289013 - DNA, 21 bp, Artificial sequence
  SiRNA target sequence
ggtagtttcgaaaaaatgaag

SEQ ID NO: 289014 - DNA, 21 bp, Artificial sequence
  SiRNA target sequence
gtagtttcgaaaaaatgaagg

SEQ ID NO: 289015 - DNA, 21 bp, Artificial sequence
  SiRNA target sequence
tagtttcgaaaaaatgaagga

SEQ ID NO: 289016 - DNA, 21 bp, Artificial sequence
  SiRNA target sequence
agtttcgaaaaaatgaaggaa

SEQ ID NO: 289017 - DNA, 21 bp, Artificial sequence
  SiRNA target sequence
gtttcgaaaaaatgaaggaac

SEQ ID NO: 289018 - DNA, 21 bp, Artificial sequence
  SiRNA target sequence
tttcgaaaaaatgaaggaaca

SEQ ID NO: 289019 - DNA, 21 bp, Artificial sequence
  SiRNA target sequence
ttcgaaaaaatgaaggaacaa

SEQ ID NO: 289020 - DNA, 21 bp, Artificial sequence
  SiRNA target sequence
tcgaaaaaatgaaggaacaat

SEQ ID NO: 289021 - DNA, 21 bp, Artificial sequence
  SiRNA target sequence
cgaaaaaatgaaggaacaatt

SEQ ID NO: 289022 - DNA, 21 bp, Artificial sequence
  SiRNA target sequence
gaaaaaatgaaggaacaattc

SEQ ID NO: 289023 - DNA, 21 bp, Artificial sequence
  SiRNA target sequence
aaaaaatgaaggaacaattca

SEQ ID NO: 289024 - DNA, 21 bp, Artificial sequence
  SiRNA target sequence
aaaaatgaaggaacaattcaa

SEQ ID NO: 289025 - DNA, 21 bp, Artificial sequence
  SiRNA target sequence
aaaatgaaggaacaattcaat

SEQ ID NO: 289026 - DNA, 21 bp, Artificial sequence
  SiRNA target sequence
aaatgaaggaacaattcaatg

SEQ ID NO: 289027 - DNA, 21 bp, Artificial sequence
  SiRNA target sequence
aatgaaggaacaattcaatgc

SEQ ID NO: 289028 - DNA, 21 bp, Artificial sequence
  SiRNA target sequence
atgaaggaacaattcaatgca

SEQ ID NO: 289029 - DNA, 21 bp, Artificial sequence
  SiRNA target sequence
tgaaggaacaattcaatgcag

SEQ ID NO: 289030 - DNA, 21 bp, Artificial sequence
  SiRNA target sequence
gaaggaacaattcaatgcagc

SEQ ID NO: 289031 - DNA, 21 bp, Artificial sequence
  SiRNA target sequence
aaggaacaattcaatgcagct

SEQ ID NO: 289032 - DNA, 21 bp, Artificial sequence
  SiRNA target sequence
aggaacaattcaatgcagctg

SEQ ID NO: 289033 - DNA, 21 bp, Artificial sequence
  SiRNA target sequence
ggaacaattcaatgcagctgc

SEQ ID NO: 289034 - DNA, 21 bp, Artificial sequence
  SiRNA target sequence
gaacaattcaatgcagctgca

SEQ ID NO: 289035 - DNA, 21 bp, Artificial sequence
  SiRNA target sequence
aacaattcaatgcagctgcag

SEQ ID NO: 289036 - DNA, 21 bp, Artificial sequence
  SiRNA target sequence
acaattcaatgcagctgcagc

SEQ ID NO: 289037 - DNA, 21 bp, Artificial sequence
  SiRNA target sequence
caattcaatgcagctgcagct

SEQ ID NO: 289038 - DNA, 21 bp, Artificial sequence
  SiRNA target sequence
aattcaatgcagctgcagcta

SEQ ID NO: 289039 - DNA, 21 bp, Artificial sequence
  SiRNA target sequence
attcaatgcagctgcagctag

SEQ ID NO: 289040 - DNA, 21 bp, Artificial sequence
  SiRNA target sequence
ttcaatgcagctgcagctagt

SEQ ID NO: 289041 - DNA, 21 bp, Artificial sequence
  SiRNA target sequence
tcaatgcagctgcagctagtc

SEQ ID NO: 289042 - DNA, 21 bp, Artificial sequence
  SiRNA target sequence
caatgcagctgcagctagtcg

SEQ ID NO: 289043 - DNA, 21 bp, Artificial sequence
  SiRNA target sequence
aatgcagctgcagctagtcgg

SEQ ID NO: 289044 - DNA, 21 bp, Artificial sequence
  SiRNA target sequence
atgcagctgcagctagtcggt

SEQ ID NO: 289045 - DNA, 21 bp, Artificial sequence
  SiRNA target sequence
tgcagctgcagctagtcggtt

SEQ ID NO: 289046 - DNA, 21 bp, Artificial sequence
  SiRNA target sequence
gcagctgcagctagtcggttt

SEQ ID NO: 289047 - DNA, 21 bp, Artificial sequence
  SiRNA target sequence
cagctgcagctagtcggtttg

SEQ ID NO: 289048 - DNA, 21 bp, Artificial sequence
  SiRNA target sequence
agctgcagctagtcggtttgg

SEQ ID NO: 289049 - DNA, 21 bp, Artificial sequence
  SiRNA target sequence
gctgcagctagtcggtttggt

SEQ ID NO: 289050 - DNA, 21 bp, Artificial sequence
  SiRNA target sequence
ctgcagctagtcggtttggtt

SEQ ID NO: 289051 - DNA, 21 bp, Artificial sequence
  SiRNA target sequence
tgcagctagtcggtttggttc

SEQ ID NO: 289052 - DNA, 21 bp, Artificial sequence
  SiRNA target sequence
gcagctagtcggtttggttcc

SEQ ID NO: 289053 - DNA, 21 bp, Artificial sequence
  SiRNA target sequence
cagctagtcggtttggttccg

SEQ ID NO: 289054 - DNA, 21 bp, Artificial sequence
  SiRNA target sequence
agctagtcggtttggttccgg

SEQ ID NO: 289055 - DNA, 21 bp, Artificial sequence
  SiRNA target sequence
gctagtcggtttggttccggt

SEQ ID NO: 289056 - DNA, 21 bp, Artificial sequence
  SiRNA target sequence
ctagtcggtttggttccggtt

SEQ ID NO: 289057 - DNA, 21 bp, Artificial sequence
  SiRNA target sequence
tagtcggtttggttccggttg

SEQ ID NO: 289058 - DNA, 21 bp, Artificial sequence
  SiRNA target sequence
agtcggtttggttccggttgg

SEQ ID NO: 289059 - DNA, 21 bp, Artificial sequence
  SiRNA target sequence
gtcggtttggttccggttggg

SEQ ID NO: 289060 - DNA, 21 bp, Artificial sequence
  SiRNA target sequence
tcggtttggttccggttgggc

SEQ ID NO: 289061 - DNA, 21 bp, Artificial sequence
  SiRNA target sequence
cggtttggttccggttgggct

SEQ ID NO: 289062 - DNA, 21 bp, Artificial sequence
  SiRNA target sequence
ggtttggttccggttgggctt

SEQ ID NO: 289063 - DNA, 21 bp, Artificial sequence
  SiRNA target sequence
gtttggttccggttgggcttg

SEQ ID NO: 289064 - DNA, 21 bp, Artificial sequence
  SiRNA target sequence
tttggttccggttgggcttgg

SEQ ID NO: 289065 - DNA, 21 bp, Artificial sequence
  SiRNA target sequence
ttggttccggttgggcttggt

SEQ ID NO: 289066 - DNA, 21 bp, Artificial sequence
  SiRNA target sequence
tggttccggttgggcttggtt

SEQ ID NO: 289067 - DNA, 21 bp, Artificial sequence
  SiRNA target sequence
ggttccggttgggcttggttg

SEQ ID NO: 289068 - DNA, 21 bp, Artificial sequence
  SiRNA target sequence
gttccggttgggcttggttgg

SEQ ID NO: 289069 - DNA, 21 bp, Artificial sequence
  SiRNA target sequence
ttccggttgggcttggttggt

SEQ ID NO: 289070 - DNA, 21 bp, Artificial sequence
  SiRNA target sequence
tccggttgggcttggttggtc

SEQ ID NO: 289071 - DNA, 21 bp, Artificial sequence
  SiRNA target sequence
ccggttgggcttggttggtcg

SEQ ID NO: 289072 - DNA, 21 bp, Artificial sequence
  SiRNA target sequence
cggttgggcttggttggtcgt

SEQ ID NO: 289073 - DNA, 21 bp, Artificial sequence
  SiRNA target sequence
ggttgggcttggttggtcgtt

SEQ ID NO: 289074 - DNA, 21 bp, Artificial sequence
  SiRNA target sequence
gttgggcttggttggtcgttg

SEQ ID NO: 289075 - DNA, 21 bp, Artificial sequence
  SiRNA target sequence
ttgggcttggttggtcgttga

SEQ ID NO: 289076 - DNA, 21 bp, Artificial sequence
  SiRNA target sequence
tgggcttggttggtcgttgac

SEQ ID NO: 289077 - DNA, 21 bp, Artificial sequence
  SiRNA target sequence
gggcttggttggtcgttgaca

SEQ ID NO: 289078 - DNA, 21 bp, Artificial sequence
  SiRNA target sequence
ggcttggttggtcgttgacaa

SEQ ID NO: 289079 - DNA, 21 bp, Artificial sequence
  SiRNA target sequence
gcttggttggtcgttgacaaa

SEQ ID NO: 289080 - DNA, 21 bp, Artificial sequence
  SiRNA target sequence
cttggttggtcgttgacaaaa

SEQ ID NO: 289081 - DNA, 21 bp, Artificial sequence
  SiRNA target sequence
ttggttggtcgttgacaaaaa

SEQ ID NO: 289082 - DNA, 21 bp, Artificial sequence
  SiRNA target sequence
tggttggtcgttgacaaaaac

SEQ ID NO: 289083 - DNA, 21 bp, Artificial sequence
  SiRNA target sequence
ggttggtcgttgacaaaaaca

SEQ ID NO: 289084 - DNA, 21 bp, Artificial sequence
  SiRNA target sequence
gttggtcgttgacaaaaacaa

SEQ ID NO: 289085 - DNA, 21 bp, Artificial sequence
  SiRNA target sequence
ttggtcgttgacaaaaacaaa

SEQ ID NO: 289086 - DNA, 21 bp, Artificial sequence
  SiRNA target sequence
tggtcgttgacaaaaacaaaa

SEQ ID NO: 289087 - DNA, 21 bp, Artificial sequence
  SiRNA target sequence
ggtcgttgacaaaaacaaaaa

SEQ ID NO: 289088 - DNA, 21 bp, Artificial sequence
  SiRNA target sequence
gtcgttgacaaaaacaaaaaa

SEQ ID NO: 289089 - DNA, 21 bp, Artificial sequence
  SiRNA target sequence
tcgttgacaaaaacaaaaaat

SEQ ID NO: 289090 - DNA, 21 bp, Artificial sequence
  SiRNA target sequence
cgttgacaaaaacaaaaaatt

SEQ ID NO: 289091 - DNA, 21 bp, Artificial sequence
  SiRNA target sequence
gttgacaaaaacaaaaaattg

SEQ ID NO: 289092 - DNA, 21 bp, Artificial sequence
  SiRNA target sequence
ttgacaaaaacaaaaaattgt

SEQ ID NO: 289093 - DNA, 21 bp, Artificial sequence
  SiRNA target sequence
tgacaaaaacaaaaaattgtc

SEQ ID NO: 289094 - DNA, 21 bp, Artificial sequence
  SiRNA target sequence
gacaaaaacaaaaaattgtca

SEQ ID NO: 289095 - DNA, 21 bp, Artificial sequence
  SiRNA target sequence
acaaaaacaaaaaattgtcaa

SEQ ID NO: 289096 - DNA, 21 bp, Artificial sequence
  SiRNA target sequence
caaaaacaaaaaattgtcaat

SEQ ID NO: 289097 - DNA, 21 bp, Artificial sequence
  SiRNA target sequence
aaaaacaaaaaattgtcaatt

SEQ ID NO: 289098 - DNA, 21 bp, Artificial sequence
  SiRNA target sequence
aaaacaaaaaattgtcaattc

SEQ ID NO: 289099 - DNA, 21 bp, Artificial sequence
  SiRNA target sequence
aaacaaaaaattgtcaattct

SEQ ID NO: 289100 - DNA, 21 bp, Artificial sequence
  SiRNA target sequence
aacaaaaaattgtcaattcta

SEQ ID NO: 289101 - DNA, 21 bp, Artificial sequence
  SiRNA target sequence
acaaaaaattgtcaattctat

SEQ ID NO: 289102 - DNA, 21 bp, Artificial sequence
  SiRNA target sequence
caaaaaattgtcaattctatc

SEQ ID NO: 289103 - DNA, 21 bp, Artificial sequence
  SiRNA target sequence
aaaaaattgtcaattctatct

SEQ ID NO: 289104 - DNA, 21 bp, Artificial sequence
  SiRNA target sequence
aaaaattgtcaattctatcta

SEQ ID NO: 289105 - DNA, 21 bp, Artificial sequence
  SiRNA target sequence
aaaattgtcaattctatctac

SEQ ID NO: 289106 - DNA, 21 bp, Artificial sequence
  SiRNA target sequence
aaattgtcaattctatctaca

SEQ ID NO: 289107 - DNA, 21 bp, Artificial sequence
  SiRNA target sequence
aattgtcaattctatctacag

SEQ ID NO: 289108 - DNA, 21 bp, Artificial sequence
  SiRNA target sequence
attgtcaattctatctacagc

SEQ ID NO: 289109 - DNA, 21 bp, Artificial sequence
  SiRNA target sequence
ttgtcaattctatctacagcc

SEQ ID NO: 289110 - DNA, 21 bp, Artificial sequence
  SiRNA target sequence
tgtcaattctatctacagcca

SEQ ID NO: 289111 - DNA, 21 bp, Artificial sequence
  SiRNA target sequence
gtcaattctatctacagccaa

SEQ ID NO: 289112 - DNA, 21 bp, Artificial sequence
  SiRNA target sequence
tcaattctatctacagccaac

SEQ ID NO: 289113 - DNA, 21 bp, Artificial sequence
  SiRNA target sequence
caattctatctacagccaacc

SEQ ID NO: 289114 - DNA, 21 bp, Artificial sequence
  SiRNA target sequence
aattctatctacagccaacca

SEQ ID NO: 289115 - DNA, 21 bp, Artificial sequence
  SiRNA target sequence
attctatctacagccaaccaa

SEQ ID NO: 289116 - DNA, 21 bp, Artificial sequence
  SiRNA target sequence
ttctatctacagccaaccaag

SEQ ID NO: 289117 - DNA, 21 bp, Artificial sequence
  SiRNA target sequence
tctatctacagccaaccaaga

SEQ ID NO: 289118 - DNA, 21 bp, Artificial sequence
  SiRNA target sequence
ctatctacagccaaccaagat

SEQ ID NO: 289119 - DNA, 21 bp, Artificial sequence
  SiRNA target sequence
tatctacagccaaccaagatt

SEQ ID NO: 289120 - DNA, 21 bp, Artificial sequence
  SiRNA target sequence
atctacagccaaccaagattc

SEQ ID NO: 289121 - DNA, 21 bp, Artificial sequence
  SiRNA target sequence
tctacagccaaccaagattca

SEQ ID NO: 289122 - DNA, 21 bp, Artificial sequence
  SiRNA target sequence
ctacagccaaccaagattcac

SEQ ID NO: 289123 - DNA, 21 bp, Artificial sequence
  SiRNA target sequence
tacagccaaccaagattcacc

SEQ ID NO: 289124 - DNA, 21 bp, Artificial sequence
  SiRNA target sequence
acagccaaccaagattcacca

SEQ ID NO: 289125 - DNA, 21 bp, Artificial sequence
  SiRNA target sequence
cagccaaccaagattcaccac

SEQ ID NO: 289126 - DNA, 21 bp, Artificial sequence
  SiRNA target sequence
agccaaccaagattcaccact

SEQ ID NO: 289127 - DNA, 21 bp, Artificial sequence
  SiRNA target sequence
gccaaccaagattcaccacta

SEQ ID NO: 289128 - DNA, 21 bp, Artificial sequence
  SiRNA target sequence
ccaaccaagattcaccactaa

SEQ ID NO: 289129 - DNA, 21 bp, Artificial sequence
  SiRNA target sequence
caaccaagattcaccactaat

SEQ ID NO: 289130 - DNA, 21 bp, Artificial sequence
  SiRNA target sequence
aaccaagattcaccactaatg

SEQ ID NO: 289131 - DNA, 21 bp, Artificial sequence
  SiRNA target sequence
accaagattcaccactaatgg

SEQ ID NO: 289132 - DNA, 21 bp, Artificial sequence
  SiRNA target sequence
ccaagattcaccactaatgga

SEQ ID NO: 289133 - DNA, 21 bp, Artificial sequence
  SiRNA target sequence
caagattcaccactaatggaa

SEQ ID NO: 289134 - DNA, 21 bp, Artificial sequence
  SiRNA target sequence
aagattcaccactaatggaag

SEQ ID NO: 289135 - DNA, 21 bp, Artificial sequence
  SiRNA target sequence
agattcaccactaatggaagg

SEQ ID NO: 289136 - DNA, 21 bp, Artificial sequence
  SiRNA target sequence
gattcaccactaatggaagga

SEQ ID NO: 289137 - DNA, 21 bp, Artificial sequence
  SiRNA target sequence
attcaccactaatggaaggaa

SEQ ID NO: 289138 - DNA, 21 bp, Artificial sequence
  SiRNA target sequence
ttcaccactaatggaaggaaa

SEQ ID NO: 289139 - DNA, 21 bp, Artificial sequence
  SiRNA target sequence
tcaccactaatggaaggaaaa

SEQ ID NO: 289140 - DNA, 21 bp, Artificial sequence
  SiRNA target sequence
caccactaatggaaggaaaaa

SEQ ID NO: 289141 - DNA, 21 bp, Artificial sequence
  SiRNA target sequence
accactaatggaaggaaaaac

SEQ ID NO: 289142 - DNA, 21 bp, Artificial sequence
  SiRNA target sequence
ccactaatggaaggaaaaaca

SEQ ID NO: 289143 - DNA, 21 bp, Artificial sequence
  SiRNA target sequence
cactaatggaaggaaaaacac

SEQ ID NO: 289144 - DNA, 21 bp, Artificial sequence
  SiRNA target sequence
actaatggaaggaaaaacacc

SEQ ID NO: 289145 - DNA, 21 bp, Artificial sequence
  SiRNA target sequence
ctaatggaaggaaaaacacca

SEQ ID NO: 289146 - DNA, 21 bp, Artificial sequence
  SiRNA target sequence
taatggaaggaaaaacaccaa

SEQ ID NO: 289147 - DNA, 21 bp, Artificial sequence
  SiRNA target sequence
aatggaaggaaaaacaccaat

SEQ ID NO: 289148 - DNA, 21 bp, Artificial sequence
  SiRNA target sequence
atggaaggaaaaacaccaatt

SEQ ID NO: 289149 - DNA, 21 bp, Artificial sequence
  SiRNA target sequence
tggaaggaaaaacaccaattt

SEQ ID NO: 289150 - DNA, 21 bp, Artificial sequence
  SiRNA target sequence
ggaaggaaaaacaccaatttt

SEQ ID NO: 289151 - DNA, 21 bp, Artificial sequence
  SiRNA target sequence
gaaggaaaaacaccaatttta

SEQ ID NO: 289152 - DNA, 21 bp, Artificial sequence
  SiRNA target sequence
aaggaaaaacaccaattttag

SEQ ID NO: 289153 - DNA, 21 bp, Artificial sequence
  SiRNA target sequence
aggaaaaacaccaattttagg

SEQ ID NO: 289154 - DNA, 21 bp, Artificial sequence
  SiRNA target sequence
ggaaaaacaccaattttagga

SEQ ID NO: 289155 - DNA, 21 bp, Artificial sequence
  SiRNA target sequence
gaaaaacaccaattttaggat

SEQ ID NO: 289156 - DNA, 21 bp, Artificial sequence
  SiRNA target sequence
aaaaacaccaattttaggatt

SEQ ID NO: 289157 - DNA, 21 bp, Artificial sequence
  SiRNA target sequence
aaaacaccaattttaggatta

SEQ ID NO: 289158 - DNA, 21 bp, Artificial sequence
  SiRNA target sequence
cccgtcaaaataacaacttat

SEQ ID NO: 289159 - DNA, 21 bp, Artificial sequence
  SiRNA target sequence
ccgtcaaaataacaacttata

SEQ ID NO: 289160 - DNA, 21 bp, Artificial sequence
  SiRNA target sequence
cgtcaaaataacaacttataa

SEQ ID NO: 289161 - DNA, 21 bp, Artificial sequence
  SiRNA target sequence
gtcaaaataacaacttataac

SEQ ID NO: 289162 - DNA, 21 bp, Artificial sequence
  SiRNA target sequence
tcaaaataacaacttataaca

SEQ ID NO: 289163 - DNA, 21 bp, Artificial sequence
  SiRNA target sequence
caaaataacaacttataacac

SEQ ID NO: 289164 - DNA, 21 bp, Artificial sequence
  SiRNA target sequence
aaaataacaacttataacacg

SEQ ID NO: 289165 - DNA, 21 bp, Artificial sequence
  SiRNA target sequence
aaataacaacttataacacga

SEQ ID NO: 289166 - DNA, 21 bp, Artificial sequence
  SiRNA target sequence
aataacaacttataacacgat

SEQ ID NO: 289167 - DNA, 21 bp, Artificial sequence
  SiRNA target sequence
ataacaacttataacacgatg

SEQ ID NO: 289168 - DNA, 21 bp, Artificial sequence
  SiRNA target sequence
taacaacttataacacgatgt

SEQ ID NO: 289169 - DNA, 21 bp, Artificial sequence
  SiRNA target sequence
aacaacttataacacgatgtt

SEQ ID NO: 289170 - DNA, 21 bp, Artificial sequence
  SiRNA target sequence
acaacttataacacgatgtta

SEQ ID NO: 289171 - DNA, 21 bp, Artificial sequence
  SiRNA target sequence
caacttataacacgatgttac

SEQ ID NO: 289172 - DNA, 21 bp, Artificial sequence
  SiRNA target sequence
aacttataacacgatgttacc

SEQ ID NO: 289173 - DNA, 21 bp, Artificial sequence
  SiRNA target sequence
acttataacacgatgttaccc

SEQ ID NO: 289174 - DNA, 21 bp, Artificial sequence
  SiRNA target sequence
cttataacacgatgttacccg

SEQ ID NO: 289175 - DNA, 21 bp, Artificial sequence
  SiRNA target sequence
ttataacacgatgttacccga

SEQ ID NO: 289176 - DNA, 21 bp, Artificial sequence
  SiRNA target sequence
tataacacgatgttacccgaa

SEQ ID NO: 289177 - DNA, 21 bp, Artificial sequence
  SiRNA target sequence
ataacacgatgttacccgaag

SEQ ID NO: 289178 - DNA, 21 bp, Artificial sequence
  SiRNA target sequence
taacacgatgttacccgaaga

SEQ ID NO: 289179 - DNA, 21 bp, Artificial sequence
  SiRNA target sequence
aacacgatgttacccgaagaa

SEQ ID NO: 289180 - DNA, 21 bp, Artificial sequence
  SiRNA target sequence
acacgatgttacccgaagaaa

SEQ ID NO: 289181 - DNA, 21 bp, Artificial sequence
  SiRNA target sequence
cacgatgttacccgaagaaac

SEQ ID NO: 289182 - DNA, 21 bp, Artificial sequence
  SiRNA target sequence
acgatgttacccgaagaaacc

SEQ ID NO: 289183 - DNA, 21 bp, Artificial sequence
  SiRNA target sequence
cgatgttacccgaagaaacca

SEQ ID NO: 289184 - DNA, 21 bp, Artificial sequence
  SiRNA target sequence
gatgttacccgaagaaaccat

SEQ ID NO: 289185 - DNA, 21 bp, Artificial sequence
  SiRNA target sequence
atgttacccgaagaaaccatt

SEQ ID NO: 289186 - DNA, 21 bp, Artificial sequence
  SiRNA target sequence
tgttacccgaagaaaccattt

SEQ ID NO: 289187 - DNA, 21 bp, Artificial sequence
  SiRNA target sequence
gttacccgaagaaaccatttt

SEQ ID NO: 289188 - DNA, 21 bp, Artificial sequence
  SiRNA target sequence
ttacccgaagaaaccatttta

SEQ ID NO: 289189 - DNA, 21 bp, Artificial sequence
  SiRNA target sequence
tacccgaagaaaccattttag

SEQ ID NO: 289190 - DNA, 21 bp, Artificial sequence
  SiRNA target sequence
acccgaagaaaccattttagt

SEQ ID NO: 289191 - DNA, 21 bp, Artificial sequence
  SiRNA target sequence
cccgaagaaaccattttagtg

SEQ ID NO: 289192 - DNA, 21 bp, Artificial sequence
  SiRNA target sequence
ccgaagaaaccattttagtgt

SEQ ID NO: 289193 - DNA, 21 bp, Artificial sequence
  SiRNA target sequence
cgaagaaaccattttagtgta

SEQ ID NO: 289194 - DNA, 21 bp, Artificial sequence
  SiRNA target sequence
gaagaaaccattttagtgtaa

SEQ ID NO: 289195 - DNA, 21 bp, Artificial sequence
  SiRNA target sequence
aagaaaccattttagtgtaac

SEQ ID NO: 289196 - DNA, 21 bp, Artificial sequence
  SiRNA target sequence
agaaaccattttagtgtaaca

SEQ ID NO: 289197 - DNA, 21 bp, Artificial sequence
  SiRNA target sequence
gaaaccattttagtgtaacat

SEQ ID NO: 289198 - DNA, 21 bp, Artificial sequence
  SiRNA target sequence
aaaccattttagtgtaacatt

SEQ ID NO: 289199 - DNA, 21 bp, Artificial sequence
  SiRNA target sequence
aaccattttagtgtaacattt

SEQ ID NO: 289200 - DNA, 21 bp, Artificial sequence
  SiRNA target sequence
accattttagtgtaacattta

SEQ ID NO: 289201 - DNA, 21 bp, Artificial sequence
  SiRNA target sequence
ccattttagtgtaacatttaa

SEQ ID NO: 289202 - DNA, 21 bp, Artificial sequence
  SiRNA target sequence
cattttagtgtaacatttaag

SEQ ID NO: 289203 - DNA, 21 bp, Artificial sequence
  SiRNA target sequence
attttagtgtaacatttaaga

SEQ ID NO: 289204 - DNA, 21 bp, Artificial sequence
  SiRNA target sequence
ttttagtgtaacatttaagat

SEQ ID NO: 289205 - DNA, 21 bp, Artificial sequence
  SiRNA target sequence
tttagtgtaacatttaagatt

SEQ ID NO: 289206 - DNA, 21 bp, Artificial sequence
  SiRNA target sequence
ttagtgtaacatttaagatta

SEQ ID NO: 289207 - DNA, 21 bp, Artificial sequence
  SiRNA target sequence
tagtgtaacatttaagattag

SEQ ID NO: 289208 - DNA, 21 bp, Artificial sequence
  SiRNA target sequence
agtgtaacatttaagattaga

SEQ ID NO: 289209 - DNA, 21 bp, Artificial sequence
  SiRNA target sequence
gtgtaacatttaagattagaa

SEQ ID NO: 289210 - DNA, 21 bp, Artificial sequence
  SiRNA target sequence
tgtaacatttaagattagaag

SEQ ID NO: 289211 - DNA, 21 bp, Artificial sequence
  SiRNA target sequence
gtaacatttaagattagaagt

SEQ ID NO: 289212 - DNA, 21 bp, Artificial sequence
  SiRNA target sequence
taacatttaagattagaagta

SEQ ID NO: 289213 - DNA, 21 bp, Artificial sequence
  SiRNA target sequence
aacatttaagattagaagtag

SEQ ID NO: 289214 - DNA, 21 bp, Artificial sequence
  SiRNA target sequence
acatttaagattagaagtagt

SEQ ID NO: 289215 - DNA, 21 bp, Artificial sequence
  SiRNA target sequence
catttaagattagaagtagtt

SEQ ID NO: 289216 - DNA, 21 bp, Artificial sequence
  SiRNA target sequence
atttaagattagaagtagttc

SEQ ID NO: 289217 - DNA, 21 bp, Artificial sequence
  SiRNA target sequence
tttaagattagaagtagttca

SEQ ID NO: 289218 - DNA, 21 bp, Artificial sequence
  SiRNA target sequence
ttaagattagaagtagttcat

SEQ ID NO: 289219 - DNA, 21 bp, Artificial sequence
  SiRNA target sequence
taagattagaagtagttcatc

SEQ ID NO: 289220 - DNA, 21 bp, Artificial sequence
  SiRNA target sequence
aagattagaagtagttcatct

SEQ ID NO: 289221 - DNA, 21 bp, Artificial sequence
  SiRNA target sequence
agattagaagtagttcatcta

SEQ ID NO: 289222 - DNA, 21 bp, Artificial sequence
  SiRNA target sequence
gattagaagtagttcatctaa

SEQ ID NO: 289223 - DNA, 21 bp, Artificial sequence
  SiRNA target sequence
attagaagtagttcatctaat

SEQ ID NO: 289224 - DNA, 21 bp, Artificial sequence
  SiRNA target sequence
ttagaagtagttcatctaata

SEQ ID NO: 289225 - DNA, 21 bp, Artificial sequence
  SiRNA target sequence
tagaagtagttcatctaatag

SEQ ID NO: 289226 - DNA, 21 bp, Artificial sequence
  SiRNA target sequence
agaagtagttcatctaataga

SEQ ID NO: 289227 - DNA, 21 bp, Artificial sequence
  SiRNA target sequence
gaagtagttcatctaatagag

SEQ ID NO: 289228 - DNA, 21 bp, Artificial sequence
  SiRNA target sequence
aagtagttcatctaatagaga

SEQ ID NO: 289229 - DNA, 21 bp, Artificial sequence
  SiRNA target sequence
agtagttcatctaatagagat

SEQ ID NO: 289230 - DNA, 21 bp, Artificial sequence
  SiRNA target sequence
gtagttcatctaatagagata

SEQ ID NO: 289231 - DNA, 21 bp, Artificial sequence
  SiRNA target sequence
tagttcatctaatagagatag

SEQ ID NO: 289232 - DNA, 21 bp, Artificial sequence
  SiRNA target sequence
agttcatctaatagagatagg

SEQ ID NO: 289233 - DNA, 21 bp, Artificial sequence
  SiRNA target sequence
gttcatctaatagagataggc

SEQ ID NO: 289234 - DNA, 21 bp, Artificial sequence
  SiRNA target sequence
ttcatctaatagagataggca

SEQ ID NO: 289235 - DNA, 21 bp, Artificial sequence
  SiRNA target sequence
tcatctaatagagataggcac

SEQ ID NO: 289236 - DNA, 21 bp, Artificial sequence
  SiRNA target sequence
catctaatagagataggcact

SEQ ID NO: 289237 - DNA, 21 bp, Artificial sequence
  SiRNA target sequence
atctaatagagataggcacta

SEQ ID NO: 289238 - DNA, 21 bp, Artificial sequence
  SiRNA target sequence
tctaatagagataggcactat

SEQ ID NO: 289239 - DNA, 21 bp, Artificial sequence
  SiRNA target sequence
ctaatagagataggcactatt

SEQ ID NO: 289240 - DNA, 21 bp, Artificial sequence
  SiRNA target sequence
taatagagataggcactatta

SEQ ID NO: 289241 - DNA, 21 bp, Artificial sequence
  SiRNA target sequence
aatagagataggcactattag

SEQ ID NO: 289242 - DNA, 21 bp, Artificial sequence
  SiRNA target sequence
atagagataggcactattaga

SEQ ID NO: 289243 - DNA, 21 bp, Artificial sequence
  SiRNA target sequence
tagagataggcactattagaa

SEQ ID NO: 289244 - DNA, 21 bp, Artificial sequence
  SiRNA target sequence
agagataggcactattagaag

SEQ ID NO: 289245 - DNA, 21 bp, Artificial sequence
  SiRNA target sequence
gagataggcactattagaagg

SEQ ID NO: 289246 - DNA, 21 bp, Artificial sequence
  SiRNA target sequence
agataggcactattagaagga

SEQ ID NO: 289247 - DNA, 21 bp, Artificial sequence
  SiRNA target sequence
gataggcactattagaaggag

SEQ ID NO: 289248 - DNA, 21 bp, Artificial sequence
  SiRNA target sequence
ataggcactattagaaggagg

SEQ ID NO: 289249 - DNA, 21 bp, Artificial sequence
  SiRNA target sequence
taggcactattagaaggaggc

SEQ ID NO: 289250 - DNA, 21 bp, Artificial sequence
  SiRNA target sequence
aggcactattagaaggaggcc

SEQ ID NO: 289251 - DNA, 21 bp, Artificial sequence
  SiRNA target sequence
ggcactattagaaggaggcct

SEQ ID NO: 289252 - DNA, 21 bp, Artificial sequence
  SiRNA target sequence
gcactattagaaggaggcctt

SEQ ID NO: 289253 - DNA, 21 bp, Artificial sequence
  SiRNA target sequence
cactattagaaggaggccttt

SEQ ID NO: 289254 - DNA, 21 bp, Artificial sequence
  SiRNA target sequence
actattagaaggaggcctttt

SEQ ID NO: 289255 - DNA, 21 bp, Artificial sequence
  SiRNA target sequence
ctattagaaggaggccttttc

SEQ ID NO: 289256 - DNA, 21 bp, Artificial sequence
  SiRNA target sequence
tattagaaggaggccttttct

SEQ ID NO: 289257 - DNA, 21 bp, Artificial sequence
  SiRNA target sequence
attagaaggaggccttttcta

SEQ ID NO: 289258 - DNA, 21 bp, Artificial sequence
  SiRNA target sequence
ttagaaggaggccttttctaa

SEQ ID NO: 289259 - DNA, 21 bp, Artificial sequence
  SiRNA target sequence
tagaaggaggccttttctaaa

SEQ ID NO: 289260 - DNA, 21 bp, Artificial sequence
  SiRNA target sequence
agaaggaggccttttctaaag

SEQ ID NO: 289261 - DNA, 21 bp, Artificial sequence
  SiRNA target sequence
gaaggaggccttttctaaagg

SEQ ID NO: 289262 - DNA, 21 bp, Artificial sequence
  SiRNA target sequence
aaggaggccttttctaaagga

SEQ ID NO: 289263 - DNA, 21 bp, Artificial sequence
  SiRNA target sequence
aggaggccttttctaaaggag

SEQ ID NO: 289264 - DNA, 21 bp, Artificial sequence
  SiRNA target sequence
ggaggccttttctaaaggagc

SEQ ID NO: 289265 - DNA, 21 bp, Artificial sequence
  SiRNA target sequence
gaggccttttctaaaggagcc

SEQ ID NO: 289266 - DNA, 21 bp, Artificial sequence
  SiRNA target sequence
aggccttttctaaaggagccg

SEQ ID NO: 289267 - DNA, 21 bp, Artificial sequence
  SiRNA target sequence
ggccttttctaaaggagccgt

SEQ ID NO: 289268 - DNA, 21 bp, Artificial sequence
  SiRNA target sequence
gccttttctaaaggagccgtt

SEQ ID NO: 289269 - DNA, 21 bp, Artificial sequence
  SiRNA target sequence
ccttttctaaaggagccgtta

SEQ ID NO: 289270 - DNA, 21 bp, Artificial sequence
  SiRNA target sequence
cttttctaaaggagccgttag

SEQ ID NO: 289271 - DNA, 21 bp, Artificial sequence
  SiRNA target sequence
ttttctaaaggagccgttagt

SEQ ID NO: 289272 - DNA, 21 bp, Artificial sequence
  SiRNA target sequence
tttctaaaggagccgttagtc

SEQ ID NO: 289273 - DNA, 21 bp, Artificial sequence
  SiRNA target sequence
ttctaaaggagccgttagtca

SEQ ID NO: 289274 - DNA, 21 bp, Artificial sequence
  SiRNA target sequence
tctaaaggagccgttagtcag

SEQ ID NO: 289275 - DNA, 21 bp, Artificial sequence
  SiRNA target sequence
ctaaaggagccgttagtcagc

SEQ ID NO: 289276 - DNA, 21 bp, Artificial sequence
  SiRNA target sequence
taaaggagccgttagtcagcc

SEQ ID NO: 289277 - DNA, 21 bp, Artificial sequence
  SiRNA target sequence
aaaggagccgttagtcagccc

SEQ ID NO: 289278 - DNA, 21 bp, Artificial sequence
  SiRNA target sequence
aaggagccgttagtcagccca

SEQ ID NO: 289279 - DNA, 21 bp, Artificial sequence
  SiRNA target sequence
aggagccgttagtcagcccag

SEQ ID NO: 289280 - DNA, 21 bp, Artificial sequence
  SiRNA target sequence
ggagccgttagtcagcccaga

SEQ ID NO: 289281 - DNA, 21 bp, Artificial sequence
  SiRNA target sequence
gagccgttagtcagcccagac

SEQ ID NO: 289282 - DNA, 21 bp, Artificial sequence
  SiRNA target sequence
agccgttagtcagcccagaca

SEQ ID NO: 289283 - DNA, 21 bp, Artificial sequence
  SiRNA target sequence
gccgttagtcagcccagacaa

SEQ ID NO: 289284 - DNA, 21 bp, Artificial sequence
  SiRNA target sequence
ccgttagtcagcccagacaag

SEQ ID NO: 289285 - DNA, 21 bp, Artificial sequence
  SiRNA target sequence
cgttagtcagcccagacaagc

SEQ ID NO: 289286 - DNA, 21 bp, Artificial sequence
  SiRNA target sequence
gttagtcagcccagacaagcg

SEQ ID NO: 289287 - DNA, 21 bp, Artificial sequence
  SiRNA target sequence
ttagtcagcccagacaagcgc

SEQ ID NO: 289288 - DNA, 21 bp, Artificial sequence
  SiRNA target sequence
tagtcagcccagacaagcgca

SEQ ID NO: 289289 - DNA, 21 bp, Artificial sequence
  SiRNA target sequence
agtcagcccagacaagcgcag

SEQ ID NO: 289290 - DNA, 21 bp, Artificial sequence
  SiRNA target sequence
gtcagcccagacaagcgcagt

SEQ ID NO: 289291 - DNA, 21 bp, Artificial sequence
  SiRNA target sequence
tcagcccagacaagcgcagta

SEQ ID NO: 289292 - DNA, 21 bp, Artificial sequence
  SiRNA target sequence
cagcccagacaagcgcagtac

SEQ ID NO: 289293 - DNA, 21 bp, Artificial sequence
  SiRNA target sequence
agcccagacaagcgcagtact

SEQ ID NO: 289294 - DNA, 21 bp, Artificial sequence
  SiRNA target sequence
gcccagacaagcgcagtactt

SEQ ID NO: 289295 - DNA, 21 bp, Artificial sequence
  SiRNA target sequence
cccagacaagcgcagtacttt

SEQ ID NO: 289296 - DNA, 21 bp, Artificial sequence
  SiRNA target sequence
ccagacaagcgcagtacttta

SEQ ID NO: 289297 - DNA, 21 bp, Artificial sequence
  SiRNA target sequence
cagacaagcgcagtactttag

SEQ ID NO: 289298 - DNA, 21 bp, Artificial sequence
  SiRNA target sequence
agacaagcgcagtactttaga

SEQ ID NO: 289299 - DNA, 21 bp, Artificial sequence
  SiRNA target sequence
gacaagcgcagtactttagaa

SEQ ID NO: 289300 - DNA, 21 bp, Artificial sequence
  SiRNA target sequence
acaagcgcagtactttagaag

SEQ ID NO: 289301 - DNA, 21 bp, Artificial sequence
  SiRNA target sequence
caagcgcagtactttagaaga

SEQ ID NO: 289302 - DNA, 21 bp, Artificial sequence
  SiRNA target sequence
aagcgcagtactttagaagag

SEQ ID NO: 289303 - DNA, 21 bp, Artificial sequence
  SiRNA target sequence
agcgcagtactttagaagaga

SEQ ID NO: 289304 - DNA, 21 bp, Artificial sequence
  SiRNA target sequence
gcgcagtactttagaagagag

SEQ ID NO: 289305 - DNA, 21 bp, Artificial sequence
  SiRNA target sequence
cgcagtactttagaagagaga

SEQ ID NO: 289306 - DNA, 21 bp, Artificial sequence
  SiRNA target sequence
gcagtactttagaagagagaa

SEQ ID NO: 289307 - DNA, 21 bp, Artificial sequence
  SiRNA target sequence
cagtactttagaagagagaag

SEQ ID NO: 289308 - DNA, 21 bp, Artificial sequence
  SiRNA target sequence
agtactttagaagagagaagt

SEQ ID NO: 289309 - DNA, 21 bp, Artificial sequence
  SiRNA target sequence
gtactttagaagagagaagtt

SEQ ID NO: 289310 - DNA, 21 bp, Artificial sequence
  SiRNA target sequence
tactttagaagagagaagttc

SEQ ID NO: 289311 - DNA, 21 bp, Artificial sequence
  SiRNA target sequence
actttagaagagagaagttcc

SEQ ID NO: 289312 - DNA, 21 bp, Artificial sequence
  SiRNA target sequence
ctttagaagagagaagttccc

SEQ ID NO: 289313 - DNA, 21 bp, Artificial sequence
  SiRNA target sequence
tttagaagagagaagttcccc

SEQ ID NO: 289314 - DNA, 21 bp, Artificial sequence
  SiRNA target sequence
ttagaagagagaagttccccg

SEQ ID NO: 289315 - DNA, 21 bp, Artificial sequence
  SiRNA target sequence
tagaagagagaagttccccga

SEQ ID NO: 289316 - DNA, 21 bp, Artificial sequence
  SiRNA target sequence
agaagagagaagttccccgat

SEQ ID NO: 289317 - DNA, 21 bp, Artificial sequence
  SiRNA target sequence
gaagagagaagttccccgata

SEQ ID NO: 289318 - DNA, 21 bp, Artificial sequence
  SiRNA target sequence
aagagagaagttccccgatag

SEQ ID NO: 289319 - DNA, 21 bp, Artificial sequence
  SiRNA target sequence
agagagaagttccccgatagc

SEQ ID NO: 289320 - DNA, 21 bp, Artificial sequence
  SiRNA target sequence
gagagaagttccccgatagcg

SEQ ID NO: 289321 - DNA, 21 bp, Artificial sequence
  SiRNA target sequence
agagaagttccccgatagcga

SEQ ID NO: 289322 - DNA, 21 bp, Artificial sequence
  SiRNA target sequence
gagaagttccccgatagcgac

SEQ ID NO: 289323 - DNA, 21 bp, Artificial sequence
  SiRNA target sequence
agaagttccccgatagcgacc

SEQ ID NO: 289324 - DNA, 21 bp, Artificial sequence
  SiRNA target sequence
gaagttccccgatagcgaccg

SEQ ID NO: 289325 - DNA, 21 bp, Artificial sequence
  SiRNA target sequence
aagttccccgatagcgaccga

SEQ ID NO: 289326 - DNA, 21 bp, Artificial sequence
  SiRNA target sequence
agttccccgatagcgaccgaa

SEQ ID NO: 289327 - DNA, 21 bp, Artificial sequence
  SiRNA target sequence
gttccccgatagcgaccgaaa

SEQ ID NO: 289328 - DNA, 21 bp, Artificial sequence
  SiRNA target sequence
ttccccgatagcgaccgaaaa

SEQ ID NO: 289329 - DNA, 21 bp, Artificial sequence
  SiRNA target sequence
tccccgatagcgaccgaaaag

SEQ ID NO: 289330 - DNA, 21 bp, Artificial sequence
  SiRNA target sequence
ccccgatagcgaccgaaaaga

SEQ ID NO: 289331 - DNA, 21 bp, Artificial sequence
  SiRNA target sequence
cccgatagcgaccgaaaagac

SEQ ID NO: 289332 - DNA, 21 bp, Artificial sequence
  SiRNA target sequence
ccgatagcgaccgaaaagacg

SEQ ID NO: 289333 - DNA, 21 bp, Artificial sequence
  SiRNA target sequence
cgatagcgaccgaaaagacgc

SEQ ID NO: 289334 - DNA, 21 bp, Artificial sequence
  SiRNA target sequence
gatagcgaccgaaaagacgcg

SEQ ID NO: 289335 - DNA, 21 bp, Artificial sequence
  SiRNA target sequence
atagcgaccgaaaagacgcgt

SEQ ID NO: 289336 - DNA, 21 bp, Artificial sequence
  SiRNA target sequence
tagcgaccgaaaagacgcgtt

SEQ ID NO: 289337 - DNA, 21 bp, Artificial sequence
  SiRNA target sequence
agcgaccgaaaagacgcgttt

SEQ ID NO: 289338 - DNA, 21 bp, Artificial sequence
  SiRNA target sequence
gcgaccgaaaagacgcgtttt

SEQ ID NO: 289339 - DNA, 21 bp, Artificial sequence
  SiRNA target sequence
cgaccgaaaagacgcgttttc

SEQ ID NO: 289340 - DNA, 21 bp, Artificial sequence
  SiRNA target sequence
gaccgaaaagacgcgttttcc

SEQ ID NO: 289341 - DNA, 21 bp, Artificial sequence
  SiRNA target sequence
accgaaaagacgcgttttccg

SEQ ID NO: 289342 - DNA, 21 bp, Artificial sequence
  SiRNA target sequence
ccgaaaagacgcgttttccgt

SEQ ID NO: 289343 - DNA, 21 bp, Artificial sequence
  SiRNA target sequence
cgaaaagacgcgttttccgtg

SEQ ID NO: 289344 - DNA, 21 bp, Artificial sequence
  SiRNA target sequence
gaaaagacgcgttttccgtgc

SEQ ID NO: 289345 - DNA, 21 bp, Artificial sequence
  SiRNA target sequence
aaaagacgcgttttccgtgct

SEQ ID NO: 289346 - DNA, 21 bp, Artificial sequence
  SiRNA target sequence
aaagacgcgttttccgtgcta

SEQ ID NO: 289347 - DNA, 21 bp, Artificial sequence
  SiRNA target sequence
aagacgcgttttccgtgctaa

SEQ ID NO: 289348 - DNA, 21 bp, Artificial sequence
  SiRNA target sequence
agacgcgttttccgtgctaac

SEQ ID NO: 289349 - DNA, 21 bp, Artificial sequence
  SiRNA target sequence
gacgcgttttccgtgctaact

SEQ ID NO: 289350 - DNA, 21 bp, Artificial sequence
  SiRNA target sequence
acgcgttttccgtgctaacta

SEQ ID NO: 289351 - DNA, 21 bp, Artificial sequence
  SiRNA target sequence
cgcgttttccgtgctaactaa

SEQ ID NO: 289352 - DNA, 21 bp, Artificial sequence
  SiRNA target sequence
gcgttttccgtgctaactaat

SEQ ID NO: 289353 - DNA, 21 bp, Artificial sequence
  SiRNA target sequence
cgttttccgtgctaactaatt

SEQ ID NO: 289354 - DNA, 21 bp, Artificial sequence
  SiRNA target sequence
gttttccgtgctaactaattt

SEQ ID NO: 289355 - DNA, 21 bp, Artificial sequence
  SiRNA target sequence
ttttccgtgctaactaattta

SEQ ID NO: 289356 - DNA, 21 bp, Artificial sequence
  SiRNA target sequence
tttccgtgctaactaatttaa

SEQ ID NO: 289357 - DNA, 21 bp, Artificial sequence
  SiRNA target sequence
ttccgtgctaactaatttaaa

SEQ ID NO: 289358 - DNA, 21 bp, Artificial sequence
  SiRNA target sequence
tccgtgctaactaatttaaat

SEQ ID NO: 289359 - DNA, 21 bp, Artificial sequence
  SiRNA target sequence
ccgtgctaactaatttaaatg

SEQ ID NO: 289360 - DNA, 21 bp, Artificial sequence
  SiRNA target sequence
cgtgctaactaatttaaatgt

SEQ ID NO: 289361 - DNA, 21 bp, Artificial sequence
  SiRNA target sequence
gtgctaactaatttaaatgtg

SEQ ID NO: 289362 - DNA, 21 bp, Artificial sequence
  SiRNA target sequence
tgctaactaatttaaatgtgg

SEQ ID NO: 289363 - DNA, 21 bp, Artificial sequence
  SiRNA target sequence
gctaactaatttaaatgtggg

SEQ ID NO: 289364 - DNA, 21 bp, Artificial sequence
  SiRNA target sequence
ctaactaatttaaatgtggga

SEQ ID NO: 289365 - DNA, 21 bp, Artificial sequence
  SiRNA target sequence
taactaatttaaatgtgggaa

SEQ ID NO: 289366 - DNA, 21 bp, Artificial sequence
  SiRNA target sequence
aactaatttaaatgtgggaac

SEQ ID NO: 289367 - DNA, 21 bp, Artificial sequence
  SiRNA target sequence
actaatttaaatgtgggaacg

SEQ ID NO: 289368 - DNA, 21 bp, Artificial sequence
  SiRNA target sequence
ctaatttaaatgtgggaacga

SEQ ID NO: 289369 - DNA, 21 bp, Artificial sequence
  SiRNA target sequence
taatttaaatgtgggaacgaa

SEQ ID NO: 289370 - DNA, 21 bp, Artificial sequence
  SiRNA target sequence
aatttaaatgtgggaacgaat

SEQ ID NO: 289371 - DNA, 21 bp, Artificial sequence
  SiRNA target sequence
atttaaatgtgggaacgaata

SEQ ID NO: 289372 - DNA, 21 bp, Artificial sequence
  SiRNA target sequence
tttaaatgtgggaacgaatat

SEQ ID NO: 289373 - DNA, 21 bp, Artificial sequence
  SiRNA target sequence
ttaaatgtgggaacgaatatt

SEQ ID NO: 289374 - DNA, 21 bp, Artificial sequence
  SiRNA target sequence
taaatgtgggaacgaatatta

SEQ ID NO: 289375 - DNA, 21 bp, Artificial sequence
  SiRNA target sequence
aaatgtgggaacgaatattat

SEQ ID NO: 289376 - DNA, 21 bp, Artificial sequence
  SiRNA target sequence
aatgtgggaacgaatattatt

SEQ ID NO: 289377 - DNA, 21 bp, Artificial sequence
  SiRNA target sequence
atgtgggaacgaatattatta

SEQ ID NO: 289378 - DNA, 21 bp, Artificial sequence
  SiRNA target sequence
tgtgggaacgaatattattat

SEQ ID NO: 289379 - DNA, 21 bp, Artificial sequence
  SiRNA target sequence
gtgggaacgaatattattatt

SEQ ID NO: 289380 - DNA, 21 bp, Artificial sequence
  SiRNA target sequence
tgggaacgaatattattattg

SEQ ID NO: 289381 - DNA, 21 bp, Artificial sequence
  SiRNA target sequence
gggaacgaatattattattga

SEQ ID NO: 289382 - DNA, 21 bp, Artificial sequence
  SiRNA target sequence
ggaacgaatattattattgaa

SEQ ID NO: 289383 - DNA, 21 bp, Artificial sequence
  SiRNA target sequence
gaacgaatattattattgaaa

SEQ ID NO: 289384 - DNA, 21 bp, Artificial sequence
  SiRNA target sequence
aacgaatattattattgaaat

SEQ ID NO: 289385 - DNA, 21 bp, Artificial sequence
  SiRNA target sequence
acgaatattattattgaaatt

SEQ ID NO: 289386 - DNA, 21 bp, Artificial sequence
  SiRNA target sequence
cgaatattattattgaaatta

SEQ ID NO: 289387 - DNA, 21 bp, Artificial sequence
  SiRNA target sequence
gaatattattattgaaattat

SEQ ID NO: 289388 - DNA, 21 bp, Artificial sequence
  SiRNA target sequence
aatattattattgaaattatg

SEQ ID NO: 289389 - DNA, 21 bp, Artificial sequence
  SiRNA target sequence
atattattattgaaattatgt

SEQ ID NO: 289390 - DNA, 21 bp, Artificial sequence
  SiRNA target sequence
tattattattgaaattatgtg

SEQ ID NO: 289391 - DNA, 21 bp, Artificial sequence
  SiRNA target sequence
attattattgaaattatgtga

SEQ ID NO: 289392 - DNA, 21 bp, Artificial sequence
  SiRNA target sequence
ttattattgaaattatgtgag

SEQ ID NO: 289393 - DNA, 21 bp, Artificial sequence
  SiRNA target sequence
tattattgaaattatgtgagc

SEQ ID NO: 289394 - DNA, 21 bp, Artificial sequence
  SiRNA target sequence
attattgaaattatgtgagcc

SEQ ID NO: 289395 - DNA, 21 bp, Artificial sequence
  SiRNA target sequence
ttattgaaattatgtgagcca

SEQ ID NO: 289396 - DNA, 21 bp, Artificial sequence
  SiRNA target sequence
tattgaaattatgtgagccac

SEQ ID NO: 289397 - DNA, 21 bp, Artificial sequence
  SiRNA target sequence
attgaaattatgtgagccacg

SEQ ID NO: 289398 - DNA, 21 bp, Artificial sequence
  SiRNA target sequence
ttgaaattatgtgagccacgt

SEQ ID NO: 289399 - DNA, 21 bp, Artificial sequence
  SiRNA target sequence
tgaaattatgtgagccacgta

SEQ ID NO: 289400 - DNA, 21 bp, Artificial sequence
  SiRNA target sequence
gaaattatgtgagccacgtag

SEQ ID NO: 289401 - DNA, 21 bp, Artificial sequence
  SiRNA target sequence
aaattatgtgagccacgtagc

SEQ ID NO: 289402 - DNA, 21 bp, Artificial sequence
  SiRNA target sequence
aattatgtgagccacgtagca

SEQ ID NO: 289403 - DNA, 21 bp, Artificial sequence
  SiRNA target sequence
attatgtgagccacgtagcaa

SEQ ID NO: 289404 - DNA, 21 bp, Artificial sequence
  SiRNA target sequence
ttatgtgagccacgtagcaat

SEQ ID NO: 289405 - DNA, 21 bp, Artificial sequence
  SiRNA target sequence
tatgtgagccacgtagcaatc

SEQ ID NO: 289406 - DNA, 21 bp, Artificial sequence
  SiRNA target sequence
atgtgagccacgtagcaatca

SEQ ID NO: 289407 - DNA, 21 bp, Artificial sequence
  SiRNA target sequence
tgtgagccacgtagcaatcaa

SEQ ID NO: 289408 - DNA, 21 bp, Artificial sequence
  SiRNA target sequence
gtgagccacgtagcaatcaag

SEQ ID NO: 289409 - DNA, 21 bp, Artificial sequence
  SiRNA target sequence
tgagccacgtagcaatcaagt

SEQ ID NO: 289410 - DNA, 21 bp, Artificial sequence
  SiRNA target sequence
gagccacgtagcaatcaagtc

SEQ ID NO: 289411 - DNA, 21 bp, Artificial sequence
  SiRNA target sequence
agccacgtagcaatcaagtca

SEQ ID NO: 289412 - DNA, 21 bp, Artificial sequence
  SiRNA target sequence
gccacgtagcaatcaagtcat

SEQ ID NO: 289413 - DNA, 21 bp, Artificial sequence
  SiRNA target sequence
ccacgtagcaatcaagtcatg

SEQ ID NO: 289414 - DNA, 21 bp, Artificial sequence
  SiRNA target sequence
cacgtagcaatcaagtcatgt

SEQ ID NO: 289415 - DNA, 21 bp, Artificial sequence
  SiRNA target sequence
acgtagcaatcaagtcatgtt

SEQ ID NO: 289416 - DNA, 21 bp, Artificial sequence
  SiRNA target sequence
cgtagcaatcaagtcatgttt

SEQ ID NO: 289417 - DNA, 21 bp, Artificial sequence
  SiRNA target sequence
gtagcaatcaagtcatgtttt

SEQ ID NO: 289418 - DNA, 21 bp, Artificial sequence
  SiRNA target sequence
tagcaatcaagtcatgttttt

SEQ ID NO: 289419 - DNA, 21 bp, Artificial sequence
  SiRNA target sequence
agcaatcaagtcatgtttttg

SEQ ID NO: 289420 - DNA, 21 bp, Artificial sequence
  SiRNA target sequence
gcaatcaagtcatgtttttgt

SEQ ID NO: 289421 - DNA, 21 bp, Artificial sequence
  SiRNA target sequence
caatcaagtcatgtttttgtc

SEQ ID NO: 289422 - DNA, 21 bp, Artificial sequence
  SiRNA target sequence
aatcaagtcatgtttttgtca

SEQ ID NO: 289423 - DNA, 21 bp, Artificial sequence
  SiRNA target sequence
atcaagtcatgtttttgtcac

SEQ ID NO: 289424 - DNA, 21 bp, Artificial sequence
  SiRNA target sequence
tcaagtcatgtttttgtcact

SEQ ID NO: 289425 - DNA, 21 bp, Artificial sequence
  SiRNA target sequence
caagtcatgtttttgtcacta

SEQ ID NO: 289426 - DNA, 21 bp, Artificial sequence
  SiRNA target sequence
aagtcatgtttttgtcactac

SEQ ID NO: 289427 - DNA, 21 bp, Artificial sequence
  SiRNA target sequence
agtcatgtttttgtcactacg

SEQ ID NO: 289428 - DNA, 21 bp, Artificial sequence
  SiRNA target sequence
gtcatgtttttgtcactacgt

SEQ ID NO: 289429 - DNA, 21 bp, Artificial sequence
  SiRNA target sequence
tcatgtttttgtcactacgtt

SEQ ID NO: 289430 - DNA, 21 bp, Artificial sequence
  SiRNA target sequence
catgtttttgtcactacgttt

SEQ ID NO: 289431 - DNA, 21 bp, Artificial sequence
  SiRNA target sequence
atgtttttgtcactacgttta

SEQ ID NO: 289432 - DNA, 21 bp, Artificial sequence
  SiRNA target sequence
tgtttttgtcactacgtttac

SEQ ID NO: 289433 - DNA, 21 bp, Artificial sequence
  SiRNA target sequence
gtttttgtcactacgtttact

SEQ ID NO: 289434 - DNA, 21 bp, Artificial sequence
  SiRNA target sequence
tttttgtcactacgtttactc

SEQ ID NO: 289435 - DNA, 21 bp, Artificial sequence
  SiRNA target sequence
ttttgtcactacgtttactca

SEQ ID NO: 289436 - DNA, 21 bp, Artificial sequence
  SiRNA target sequence
tttgtcactacgtttactcat

SEQ ID NO: 289437 - DNA, 21 bp, Artificial sequence
  SiRNA target sequence
ttgtcactacgtttactcatc

SEQ ID NO: 289438 - DNA, 21 bp, Artificial sequence
  SiRNA target sequence
tgtcactacgtttactcatct

SEQ ID NO: 289439 - DNA, 21 bp, Artificial sequence
  SiRNA target sequence
gtcactacgtttactcatcta

SEQ ID NO: 289440 - DNA, 21 bp, Artificial sequence
  SiRNA target sequence
tcactacgtttactcatctaa

SEQ ID NO: 289441 - DNA, 21 bp, Artificial sequence
  SiRNA target sequence
cactacgtttactcatctaat

SEQ ID NO: 289442 - DNA, 21 bp, Artificial sequence
  SiRNA target sequence
actacgtttactcatctaatg

SEQ ID NO: 289443 - DNA, 21 bp, Artificial sequence
  SiRNA target sequence
ctacgtttactcatctaatgt

SEQ ID NO: 289444 - DNA, 21 bp, Artificial sequence
  SiRNA target sequence
tacgtttactcatctaatgta

SEQ ID NO: 289445 - DNA, 21 bp, Artificial sequence
  SiRNA target sequence
acgtttactcatctaatgtag

SEQ ID NO: 289446 - DNA, 21 bp, Artificial sequence
  SiRNA target sequence
cgtttactcatctaatgtaga

SEQ ID NO: 289447 - DNA, 21 bp, Artificial sequence
  SiRNA target sequence
gtttactcatctaatgtagat

SEQ ID NO: 289448 - DNA, 21 bp, Artificial sequence
  SiRNA target sequence
tttactcatctaatgtagata

SEQ ID NO: 289449 - DNA, 21 bp, Artificial sequence
  SiRNA target sequence
ttactcatctaatgtagataa

SEQ ID NO: 289450 - DNA, 21 bp, Artificial sequence
  SiRNA target sequence
tactcatctaatgtagataat

SEQ ID NO: 289451 - DNA, 21 bp, Artificial sequence
  SiRNA target sequence
actcatctaatgtagataatt

SEQ ID NO: 289452 - DNA, 21 bp, Artificial sequence
  SiRNA target sequence
ctcatctaatgtagataattt

SEQ ID NO: 289453 - DNA, 21 bp, Artificial sequence
  SiRNA target sequence
tcatctaatgtagataatttt

SEQ ID NO: 289454 - DNA, 21 bp, Artificial sequence
  SiRNA target sequence
catctaatgtagataattttg

SEQ ID NO: 289455 - DNA, 21 bp, Artificial sequence
  SiRNA target sequence
atctaatgtagataattttgt

SEQ ID NO: 289456 - DNA, 21 bp, Artificial sequence
  SiRNA target sequence
tctaatgtagataattttgtt

SEQ ID NO: 289457 - DNA, 21 bp, Artificial sequence
  SiRNA target sequence
ctaatgtagataattttgttt

SEQ ID NO: 289458 - DNA, 21 bp, Artificial sequence
  SiRNA target sequence
taatgtagataattttgttta

SEQ ID NO: 289459 - DNA, 21 bp, Artificial sequence
  SiRNA target sequence
aatgtagataattttgtttaa

SEQ ID NO: 289460 - DNA, 21 bp, Artificial sequence
  SiRNA target sequence
atgtagataattttgtttaag

SEQ ID NO: 289461 - DNA, 21 bp, Artificial sequence
  SiRNA target sequence
tgtagataattttgtttaagt

SEQ ID NO: 289462 - DNA, 21 bp, Artificial sequence
  SiRNA target sequence
gtagataattttgtttaagta

SEQ ID NO: 289463 - DNA, 21 bp, Artificial sequence
  SiRNA target sequence
tagataattttgtttaagtac

SEQ ID NO: 289464 - DNA, 21 bp, Artificial sequence
  SiRNA target sequence
agataattttgtttaagtacc

SEQ ID NO: 289465 - DNA, 21 bp, Artificial sequence
  SiRNA target sequence
gataattttgtttaagtacct

SEQ ID NO: 289466 - DNA, 21 bp, Artificial sequence
  SiRNA target sequence
ataattttgtttaagtaccta

SEQ ID NO: 289467 - DNA, 21 bp, Artificial sequence
  SiRNA target sequence
taattttgtttaagtacctat

SEQ ID NO: 289468 - DNA, 21 bp, Artificial sequence
  SiRNA target sequence
aattttgtttaagtacctatt

SEQ ID NO: 289469 - DNA, 21 bp, Artificial sequence
  SiRNA target sequence
attttgtttaagtacctattt

SEQ ID NO: 289470 - DNA, 21 bp, Artificial sequence
  SiRNA target sequence
ttttgtttaagtacctattta

SEQ ID NO: 289471 - DNA, 21 bp, Artificial sequence
  SiRNA target sequence
tttgtttaagtacctatttag

SEQ ID NO: 289472 - DNA, 21 bp, Artificial sequence
  SiRNA target sequence
ttgtttaagtacctatttagg

SEQ ID NO: 289473 - DNA, 21 bp, Artificial sequence
  SiRNA target sequence
tgtttaagtacctatttaggt

SEQ ID NO: 289474 - DNA, 21 bp, Artificial sequence
  SiRNA target sequence
gtttaagtacctatttaggtg

SEQ ID NO: 289475 - DNA, 21 bp, Artificial sequence
  SiRNA target sequence
tttaagtacctatttaggtgt

SEQ ID NO: 289476 - DNA, 21 bp, Artificial sequence
  SiRNA target sequence
ttaagtacctatttaggtgtc

SEQ ID NO: 289477 - DNA, 21 bp, Artificial sequence
  SiRNA target sequence
taagtacctatttaggtgtca

SEQ ID NO: 289478 - DNA, 21 bp, Artificial sequence
  SiRNA target sequence
aagtacctatttaggtgtcat

SEQ ID NO: 289479 - DNA, 21 bp, Artificial sequence
  SiRNA target sequence
agtacctatttaggtgtcatc

SEQ ID NO: 289480 - DNA, 21 bp, Artificial sequence
  SiRNA target sequence
gtacctatttaggtgtcatcc

SEQ ID NO: 289481 - DNA, 21 bp, Artificial sequence
  SiRNA target sequence
tacctatttaggtgtcatccc

SEQ ID NO: 289482 - DNA, 21 bp, Artificial sequence
  SiRNA target sequence
acctatttaggtgtcatccca

SEQ ID NO: 289483 - DNA, 21 bp, Artificial sequence
  SiRNA target sequence
cctatttaggtgtcatcccac

SEQ ID NO: 289484 - DNA, 21 bp, Artificial sequence
  SiRNA target sequence
ctatttaggtgtcatcccacc

SEQ ID NO: 289485 - DNA, 21 bp, Artificial sequence
  SiRNA target sequence
tatttaggtgtcatcccacca

SEQ ID NO: 289486 - DNA, 21 bp, Artificial sequence
  SiRNA target sequence
atttaggtgtcatcccaccag

SEQ ID NO: 289487 - DNA, 21 bp, Artificial sequence
  SiRNA target sequence
tttaggtgtcatcccaccaga

SEQ ID NO: 289488 - DNA, 21 bp, Artificial sequence
  SiRNA target sequence
ttaggtgtcatcccaccagag

SEQ ID NO: 289489 - DNA, 21 bp, Artificial sequence
  SiRNA target sequence
taggtgtcatcccaccagaga

SEQ ID NO: 289490 - DNA, 21 bp, Artificial sequence
  SiRNA target sequence
aggtgtcatcccaccagagaa

SEQ ID NO: 289491 - DNA, 21 bp, Artificial sequence
  SiRNA target sequence
ggtgtcatcccaccagagaag

SEQ ID NO: 289492 - DNA, 21 bp, Artificial sequence
  SiRNA target sequence
gtgtcatcccaccagagaaga

SEQ ID NO: 289493 - DNA, 21 bp, Artificial sequence
  SiRNA target sequence
tgtcatcccaccagagaagaa

SEQ ID NO: 289494 - DNA, 21 bp, Artificial sequence
  SiRNA target sequence
gtcatcccaccagagaagaaa

SEQ ID NO: 289495 - DNA, 21 bp, Artificial sequence
  SiRNA target sequence
tcatcccaccagagaagaaat

SEQ ID NO: 289496 - DNA, 21 bp, Artificial sequence
  SiRNA target sequence
catcccaccagagaagaaata

SEQ ID NO: 289497 - DNA, 21 bp, Artificial sequence
  SiRNA target sequence
atcccaccagagaagaaataa

SEQ ID NO: 289498 - DNA, 21 bp, Artificial sequence
  SiRNA target sequence
tcccaccagagaagaaataat

SEQ ID NO: 289499 - DNA, 21 bp, Artificial sequence
  SiRNA target sequence
cccaccagagaagaaataata

SEQ ID NO: 289500 - DNA, 21 bp, Artificial sequence
  SiRNA target sequence
ccaccagagaagaaataatac

SEQ ID NO: 289501 - DNA, 21 bp, Artificial sequence
  SiRNA target sequence
caccagagaagaaataatacg

SEQ ID NO: 289502 - DNA, 21 bp, Artificial sequence
  SiRNA target sequence
accagagaagaaataatacgt

SEQ ID NO: 289503 - DNA, 21 bp, Artificial sequence
  SiRNA target sequence
ccagagaagaaataatacgta

SEQ ID NO: 289504 - DNA, 21 bp, Artificial sequence
  SiRNA target sequence
cagagaagaaataatacgtac

SEQ ID NO: 289505 - DNA, 21 bp, Artificial sequence
  SiRNA target sequence
agagaagaaataatacgtacc

SEQ ID NO: 289506 - DNA, 21 bp, Artificial sequence
  SiRNA target sequence
gagaagaaataatacgtaccg

SEQ ID NO: 289507 - DNA, 21 bp, Artificial sequence
  SiRNA target sequence
agaagaaataatacgtaccgg

SEQ ID NO: 289508 - DNA, 21 bp, Artificial sequence
  SiRNA target sequence
gaagaaataatacgtaccgga

SEQ ID NO: 289509 - DNA, 21 bp, Artificial sequence
  SiRNA target sequence
aagaaataatacgtaccggaa

SEQ ID NO: 289510 - DNA, 21 bp, Artificial sequence
  SiRNA target sequence
agaaataatacgtaccggaac

SEQ ID NO: 289511 - DNA, 21 bp, Artificial sequence
  SiRNA target sequence
gaaataatacgtaccggaacc

SEQ ID NO: 289512 - DNA, 21 bp, Artificial sequence
  SiRNA target sequence
aaataatacgtaccggaaccc

SEQ ID NO: 289513 - DNA, 21 bp, Artificial sequence
  SiRNA target sequence
aataatacgtaccggaaccca

SEQ ID NO: 289514 - DNA, 21 bp, Artificial sequence
  SiRNA target sequence
ataatacgtaccggaacccag

SEQ ID NO: 289515 - DNA, 21 bp, Artificial sequence
  SiRNA target sequence
taatacgtaccggaacccaga

SEQ ID NO: 289516 - DNA, 21 bp, Artificial sequence
  SiRNA target sequence
aatacgtaccggaacccagag

SEQ ID NO: 289517 - DNA, 21 bp, Artificial sequence
  SiRNA target sequence
atacgtaccggaacccagagt

SEQ ID NO: 289518 - DNA, 21 bp, Artificial sequence
  SiRNA target sequence
tacgtaccggaacccagagta

SEQ ID NO: 289519 - DNA, 21 bp, Artificial sequence
  SiRNA target sequence
acgtaccggaacccagagtac

SEQ ID NO: 289520 - DNA, 21 bp, Artificial sequence
  SiRNA target sequence
cgtaccggaacccagagtaca

SEQ ID NO: 289521 - DNA, 21 bp, Artificial sequence
  SiRNA target sequence
gtaccggaacccagagtacac

SEQ ID NO: 289522 - DNA, 21 bp, Artificial sequence
  SiRNA target sequence
taccggaacccagagtacacc

SEQ ID NO: 289523 - DNA, 21 bp, Artificial sequence
  SiRNA target sequence
accggaacccagagtacaccc

SEQ ID NO: 289524 - DNA, 21 bp, Artificial sequence
  SiRNA target sequence
ccggaacccagagtacacccc

SEQ ID NO: 289525 - DNA, 21 bp, Artificial sequence
  SiRNA target sequence
cggaacccagagtacacccct

SEQ ID NO: 289526 - DNA, 21 bp, Artificial sequence
  SiRNA target sequence
ggaacccagagtacacccctt

SEQ ID NO: 289527 - DNA, 21 bp, Artificial sequence
  SiRNA target sequence
gaacccagagtacacccctta

SEQ ID NO: 289528 - DNA, 21 bp, Artificial sequence
  SiRNA target sequence
aacccagagtacaccccttat

SEQ ID NO: 289529 - DNA, 21 bp, Artificial sequence
  SiRNA target sequence
acccagagtacaccccttatt

SEQ ID NO: 289530 - DNA, 21 bp, Artificial sequence
  SiRNA target sequence
cccagagtacaccccttattt

SEQ ID NO: 289531 - DNA, 21 bp, Artificial sequence
  SiRNA target sequence
ccagagtacaccccttatttt

SEQ ID NO: 289532 - DNA, 21 bp, Artificial sequence
  SiRNA target sequence
cagagtacaccccttatttta

SEQ ID NO: 289533 - DNA, 21 bp, Artificial sequence
  SiRNA target sequence
agagtacaccccttattttaa

SEQ ID NO: 289534 - DNA, 21 bp, Artificial sequence
  SiRNA target sequence
gagtacaccccttattttaag

SEQ ID NO: 289535 - DNA, 21 bp, Artificial sequence
  SiRNA target sequence
agtacaccccttattttaagc

SEQ ID NO: 289536 - DNA, 21 bp, Artificial sequence
  SiRNA target sequence
gtacaccccttattttaagcc

SEQ ID NO: 289537 - DNA, 21 bp, Artificial sequence
  SiRNA target sequence
tacaccccttattttaagcct

SEQ ID NO: 289538 - DNA, 21 bp, Artificial sequence
  SiRNA target sequence
acaccccttattttaagcctt

SEQ ID NO: 289539 - DNA, 21 bp, Artificial sequence
  SiRNA target sequence
caccccttattttaagcctta

SEQ ID NO: 289540 - DNA, 21 bp, Artificial sequence
  SiRNA target sequence
accccttattttaagccttac

SEQ ID NO: 289541 - DNA, 21 bp, Artificial sequence
  SiRNA target sequence
ccccttattttaagccttact

SEQ ID NO: 289542 - DNA, 21 bp, Artificial sequence
  SiRNA target sequence
cccttattttaagccttactg

SEQ ID NO: 289543 - DNA, 21 bp, Artificial sequence
  SiRNA target sequence
ccttattttaagccttactgg

SEQ ID NO: 289544 - DNA, 21 bp, Artificial sequence
  SiRNA target sequence
cttattttaagccttactggg

SEQ ID NO: 289545 - DNA, 21 bp, Artificial sequence
  SiRNA target sequence
ttattttaagccttactgggc

SEQ ID NO: 289546 - DNA, 21 bp, Artificial sequence
  SiRNA target sequence
tattttaagccttactgggct

SEQ ID NO: 289547 - DNA, 21 bp, Artificial sequence
  SiRNA target sequence
attttaagccttactgggctt

SEQ ID NO: 289548 - DNA, 21 bp, Artificial sequence
  SiRNA target sequence
ttttaagccttactgggcttc

SEQ ID NO: 289549 - DNA, 21 bp, Artificial sequence
  SiRNA target sequence
tttaagccttactgggcttct

SEQ ID NO: 289550 - DNA, 21 bp, Artificial sequence
  SiRNA target sequence
ttaagccttactgggcttctc

SEQ ID NO: 289551 - DNA, 21 bp, Artificial sequence
  SiRNA target sequence
taagccttactgggcttctct

SEQ ID NO: 289552 - DNA, 21 bp, Artificial sequence
  SiRNA target sequence
aagccttactgggcttctctg

SEQ ID NO: 289553 - DNA, 21 bp, Artificial sequence
  SiRNA target sequence
agccttactgggcttctctgt

SEQ ID NO: 289554 - DNA, 21 bp, Artificial sequence
  SiRNA target sequence
gccttactgggcttctctgtt

SEQ ID NO: 289555 - DNA, 21 bp, Artificial sequence
  SiRNA target sequence
ccttactgggcttctctgtta

SEQ ID NO: 289556 - DNA, 21 bp, Artificial sequence
  SiRNA target sequence
cttactgggcttctctgttag

SEQ ID NO: 289557 - DNA, 21 bp, Artificial sequence
  SiRNA target sequence
ttactgggcttctctgttagt

SEQ ID NO: 289558 - DNA, 21 bp, Artificial sequence
  SiRNA target sequence
tactgggcttctctgttagtt

SEQ ID NO: 289559 - DNA, 21 bp, Artificial sequence
  SiRNA target sequence
actgggcttctctgttagtta

SEQ ID NO: 289560 - DNA, 21 bp, Artificial sequence
  SiRNA target sequence
ctgggcttctctgttagttag

SEQ ID NO: 289561 - DNA, 21 bp, Artificial sequence
  SiRNA target sequence
tgggcttctctgttagttagt

SEQ ID NO: 289562 - DNA, 21 bp, Artificial sequence
  SiRNA target sequence
gggcttctctgttagttagta

SEQ ID NO: 289563 - DNA, 21 bp, Artificial sequence
  SiRNA target sequence
ggcttctctgttagttagtaa

SEQ ID NO: 289564 - DNA, 21 bp, Artificial sequence
  SiRNA target sequence
gcttctctgttagttagtaat

SEQ ID NO: 289565 - DNA, 21 bp, Artificial sequence
  SiRNA target sequence
cttctctgttagttagtaatc

SEQ ID NO: 289566 - DNA, 21 bp, Artificial sequence
  SiRNA target sequence
ttctctgttagttagtaatct

SEQ ID NO: 289567 - DNA, 21 bp, Artificial sequence
  SiRNA target sequence
tctctgttagttagtaatctg

SEQ ID NO: 289568 - DNA, 21 bp, Artificial sequence
  SiRNA target sequence
ctctgttagttagtaatctgg

SEQ ID NO: 289569 - DNA, 21 bp, Artificial sequence
  SiRNA target sequence
tctgttagttagtaatctggc

SEQ ID NO: 289570 - DNA, 21 bp, Artificial sequence
  SiRNA target sequence
ctgttagttagtaatctggcc

SEQ ID NO: 289571 - DNA, 21 bp, Artificial sequence
  SiRNA target sequence
tgttagttagtaatctggccc

SEQ ID NO: 289572 - DNA, 21 bp, Artificial sequence
  SiRNA target sequence
gttagttagtaatctggccca

SEQ ID NO: 289573 - DNA, 21 bp, Artificial sequence
  SiRNA target sequence
ttagttagtaatctggcccac

SEQ ID NO: 289574 - DNA, 21 bp, Artificial sequence
  SiRNA target sequence
tagttagtaatctggcccacg

SEQ ID NO: 289575 - DNA, 21 bp, Artificial sequence
  SiRNA target sequence
agttagtaatctggcccacgt

SEQ ID NO: 289576 - DNA, 21 bp, Artificial sequence
  SiRNA target sequence
gttagtaatctggcccacgtt

SEQ ID NO: 289577 - DNA, 21 bp, Artificial sequence
  SiRNA target sequence
ttagtaatctggcccacgttt

SEQ ID NO: 289578 - DNA, 21 bp, Artificial sequence
  SiRNA target sequence
tagtaatctggcccacgtttt

SEQ ID NO: 289579 - DNA, 21 bp, Artificial sequence
  SiRNA target sequence
agtaatctggcccacgttttg

SEQ ID NO: 289580 - DNA, 21 bp, Artificial sequence
  SiRNA target sequence
gtaatctggcccacgttttgc

SEQ ID NO: 289581 - DNA, 21 bp, Artificial sequence
  SiRNA target sequence
taatctggcccacgttttgcg

SEQ ID NO: 289582 - DNA, 21 bp, Artificial sequence
  SiRNA target sequence
aatctggcccacgttttgcgt

SEQ ID NO: 289583 - DNA, 21 bp, Artificial sequence
  SiRNA target sequence
atctggcccacgttttgcgtt

SEQ ID NO: 289584 - DNA, 21 bp, Artificial sequence
  SiRNA target sequence
tctggcccacgttttgcgttg

SEQ ID NO: 289585 - DNA, 21 bp, Artificial sequence
  SiRNA target sequence
ctggcccacgttttgcgttga

SEQ ID NO: 289586 - DNA, 21 bp, Artificial sequence
  SiRNA target sequence
tggcccacgttttgcgttgag

SEQ ID NO: 289587 - DNA, 21 bp, Artificial sequence
  SiRNA target sequence
ggcccacgttttgcgttgagt

SEQ ID NO: 289588 - DNA, 21 bp, Artificial sequence
  SiRNA target sequence
gcccacgttttgcgttgagtg

SEQ ID NO: 289589 - DNA, 21 bp, Artificial sequence
  SiRNA target sequence
cccacgttttgcgttgagtgg

SEQ ID NO: 289590 - DNA, 21 bp, Artificial sequence
  SiRNA target sequence
ccacgttttgcgttgagtggg

SEQ ID NO: 289591 - DNA, 21 bp, Artificial sequence
  SiRNA target sequence
cacgttttgcgttgagtgggg

SEQ ID NO: 289592 - DNA, 21 bp, Artificial sequence
  SiRNA target sequence
acgttttgcgttgagtggggt

SEQ ID NO: 289593 - DNA, 21 bp, Artificial sequence
  SiRNA target sequence
cgttttgcgttgagtggggtc

SEQ ID NO: 289594 - DNA, 21 bp, Artificial sequence
  SiRNA target sequence
gttttgcgttgagtggggtcc

SEQ ID NO: 289595 - DNA, 21 bp, Artificial sequence
  SiRNA target sequence
ttttgcgttgagtggggtccc

SEQ ID NO: 289596 - DNA, 21 bp, Artificial sequence
  SiRNA target sequence
tttgcgttgagtggggtccca

SEQ ID NO: 289597 - DNA, 21 bp, Artificial sequence
  SiRNA target sequence
ttgcgttgagtggggtcccaa

SEQ ID NO: 289598 - DNA, 21 bp, Artificial sequence
  SiRNA target sequence
tgcgttgagtggggtcccaac

SEQ ID NO: 289599 - DNA, 21 bp, Artificial sequence
  SiRNA target sequence
gcgttgagtggggtcccaaca

SEQ ID NO: 289600 - DNA, 21 bp, Artificial sequence
  SiRNA target sequence
cgttgagtggggtcccaacag

SEQ ID NO: 289601 - DNA, 21 bp, Artificial sequence
  SiRNA target sequence
gttgagtggggtcccaacagt

SEQ ID NO: 289602 - DNA, 21 bp, Artificial sequence
  SiRNA target sequence
ttgagtggggtcccaacagta

SEQ ID NO: 289603 - DNA, 21 bp, Artificial sequence
  SiRNA target sequence
tgagtggggtcccaacagtag

SEQ ID NO: 289604 - DNA, 21 bp, Artificial sequence
  SiRNA target sequence
gagtggggtcccaacagtagg

SEQ ID NO: 289605 - DNA, 21 bp, Artificial sequence
  SiRNA target sequence
agtggggtcccaacagtagga

SEQ ID NO: 289606 - DNA, 21 bp, Artificial sequence
  SiRNA target sequence
gtggggtcccaacagtaggaa

SEQ ID NO: 289607 - DNA, 21 bp, Artificial sequence
  SiRNA target sequence
tggggtcccaacagtaggaat

SEQ ID NO: 289608 - DNA, 21 bp, Artificial sequence
  SiRNA target sequence
ggggtcccaacagtaggaatt

SEQ ID NO: 289609 - DNA, 21 bp, Artificial sequence
  SiRNA target sequence
gggtcccaacagtaggaattc

SEQ ID NO: 289610 - DNA, 21 bp, Artificial sequence
  SiRNA target sequence
ggtcccaacagtaggaattcg

SEQ ID NO: 289611 - DNA, 21 bp, Artificial sequence
  SiRNA target sequence
gtcccaacagtaggaattcga

SEQ ID NO: 289612 - DNA, 21 bp, Artificial sequence
  SiRNA target sequence
tcccaacagtaggaattcgac

SEQ ID NO: 289613 - DNA, 21 bp, Artificial sequence
  SiRNA target sequence
cccaacagtaggaattcgacg

SEQ ID NO: 289614 - DNA, 21 bp, Artificial sequence
  SiRNA target sequence
ccaacagtaggaattcgacgg

SEQ ID NO: 289615 - DNA, 21 bp, Artificial sequence
  SiRNA target sequence
caacagtaggaattcgacgga

SEQ ID NO: 289616 - DNA, 21 bp, Artificial sequence
  SiRNA target sequence
aacagtaggaattcgacggac

SEQ ID NO: 289617 - DNA, 21 bp, Artificial sequence
  SiRNA target sequence
acagtaggaattcgacggaca

SEQ ID NO: 289618 - DNA, 21 bp, Artificial sequence
  SiRNA target sequence
cagtaggaattcgacggacaa

SEQ ID NO: 289619 - DNA, 21 bp, Artificial sequence
  SiRNA target sequence
agtaggaattcgacggacaag

SEQ ID NO: 289620 - DNA, 21 bp, Artificial sequence
  SiRNA target sequence
gtaggaattcgacggacaagt

SEQ ID NO: 289621 - DNA, 21 bp, Artificial sequence
  SiRNA target sequence
taggaattcgacggacaagta

SEQ ID NO: 289622 - DNA, 21 bp, Artificial sequence
  SiRNA target sequence
aggaattcgacggacaagtag

SEQ ID NO: 289623 - DNA, 21 bp, Artificial sequence
  SiRNA target sequence
ggaattcgacggacaagtagc

SEQ ID NO: 289624 - DNA, 21 bp, Artificial sequence
  SiRNA target sequence
gaattcgacggacaagtagca

SEQ ID NO: 289625 - DNA, 21 bp, Artificial sequence
  SiRNA target sequence
aattcgacggacaagtagcaa

SEQ ID NO: 289626 - DNA, 21 bp, Artificial sequence
  SiRNA target sequence
attcgacggacaagtagcaag

SEQ ID NO: 289627 - DNA, 21 bp, Artificial sequence
  SiRNA target sequence
ttcgacggacaagtagcaagc

SEQ ID NO: 289628 - DNA, 21 bp, Artificial sequence
  SiRNA target sequence
tcgacggacaagtagcaagcg

SEQ ID NO: 289629 - DNA, 21 bp, Artificial sequence
  SiRNA target sequence
cgacggacaagtagcaagcga

SEQ ID NO: 289630 - DNA, 21 bp, Artificial sequence
  SiRNA target sequence
gacggacaagtagcaagcgag

SEQ ID NO: 289631 - DNA, 21 bp, Artificial sequence
  SiRNA target sequence
acggacaagtagcaagcgagt

SEQ ID NO: 289632 - DNA, 21 bp, Artificial sequence
  SiRNA target sequence
cggacaagtagcaagcgagtc

SEQ ID NO: 289633 - DNA, 21 bp, Artificial sequence
  SiRNA target sequence
ggacaagtagcaagcgagtcg

SEQ ID NO: 289634 - DNA, 21 bp, Artificial sequence
  SiRNA target sequence
gacaagtagcaagcgagtcgg

SEQ ID NO: 289635 - DNA, 21 bp, Artificial sequence
  SiRNA target sequence
acaagtagcaagcgagtcggt

SEQ ID NO: 289636 - DNA, 21 bp, Artificial sequence
  SiRNA target sequence
caagtagcaagcgagtcggta

SEQ ID NO: 289637 - DNA, 21 bp, Artificial sequence
  SiRNA target sequence
aagtagcaagcgagtcggtac

SEQ ID NO: 289638 - DNA, 21 bp, Artificial sequence
  SiRNA target sequence
agtagcaagcgagtcggtacc

SEQ ID NO: 289639 - DNA, 21 bp, Artificial sequence
  SiRNA target sequence
gtagcaagcgagtcggtacca

SEQ ID NO: 289640 - DNA, 21 bp, Artificial sequence
  SiRNA target sequence
tagcaagcgagtcggtaccaa

SEQ ID NO: 289641 - DNA, 21 bp, Artificial sequence
  SiRNA target sequence
agcaagcgagtcggtaccaat

SEQ ID NO: 289642 - DNA, 21 bp, Artificial sequence
  SiRNA target sequence
gcaagcgagtcggtaccaatt

SEQ ID NO: 289643 - DNA, 21 bp, Artificial sequence
  SiRNA target sequence
caagcgagtcggtaccaattg

SEQ ID NO: 289644 - DNA, 21 bp, Artificial sequence
  SiRNA target sequence
aagcgagtcggtaccaattgg

SEQ ID NO: 289645 - DNA, 21 bp, Artificial sequence
  SiRNA target sequence
agcgagtcggtaccaattggt

SEQ ID NO: 289646 - DNA, 21 bp, Artificial sequence
  SiRNA target sequence
gcgagtcggtaccaattggtt

SEQ ID NO: 289647 - DNA, 21 bp, Artificial sequence
  SiRNA target sequence
cgagtcggtaccaattggttt

SEQ ID NO: 289648 - DNA, 21 bp, Artificial sequence
  SiRNA target sequence
gagtcggtaccaattggttta

SEQ ID NO: 289649 - DNA, 21 bp, Artificial sequence
  SiRNA target sequence
agtcggtaccaattggtttag

SEQ ID NO: 289650 - DNA, 21 bp, Artificial sequence
  SiRNA target sequence
gtcggtaccaattggtttagc

SEQ ID NO: 289651 - DNA, 21 bp, Artificial sequence
  SiRNA target sequence
tcggtaccaattggtttagcc

SEQ ID NO: 289652 - DNA, 21 bp, Artificial sequence
  SiRNA target sequence
cggtaccaattggtttagcct

SEQ ID NO: 289653 - DNA, 21 bp, Artificial sequence
  SiRNA target sequence
ggtaccaattggtttagcctt

SEQ ID NO: 289654 - DNA, 21 bp, Artificial sequence
  SiRNA target sequence
gtaccaattggtttagccttc

SEQ ID NO: 289655 - DNA, 21 bp, Artificial sequence
  SiRNA target sequence
taccaattggtttagccttcg

SEQ ID NO: 289656 - DNA, 21 bp, Artificial sequence
  SiRNA target sequence
accaattggtttagccttcga

SEQ ID NO: 289657 - DNA, 21 bp, Artificial sequence
  SiRNA target sequence
ccaattggtttagccttcgaa

SEQ ID NO: 289658 - DNA, 21 bp, Artificial sequence
  SiRNA target sequence
caattggtttagccttcgaaa

SEQ ID NO: 289659 - DNA, 21 bp, Artificial sequence
  SiRNA target sequence
aattggtttagccttcgaaat

SEQ ID NO: 289660 - DNA, 21 bp, Artificial sequence
  SiRNA target sequence
attggtttagccttcgaaatt

SEQ ID NO: 289661 - DNA, 21 bp, Artificial sequence
  SiRNA target sequence
ttggtttagccttcgaaatta

SEQ ID NO: 289662 - DNA, 21 bp, Artificial sequence
  SiRNA target sequence
tggtttagccttcgaaattac

SEQ ID NO: 289663 - DNA, 21 bp, Artificial sequence
  SiRNA target sequence
ggtttagccttcgaaattact

SEQ ID NO: 289664 - DNA, 21 bp, Artificial sequence
  SiRNA target sequence
gtttagccttcgaaattactc

SEQ ID NO: 289665 - DNA, 21 bp, Artificial sequence
  SiRNA target sequence
tttagccttcgaaattactct

SEQ ID NO: 289666 - DNA, 21 bp, Artificial sequence
  SiRNA target sequence
ttagccttcgaaattactctg

SEQ ID NO: 289667 - DNA, 21 bp, Artificial sequence
  SiRNA target sequence
tagccttcgaaattactctgg

SEQ ID NO: 289668 - DNA, 21 bp, Artificial sequence
  SiRNA target sequence
agccttcgaaattactctggg

SEQ ID NO: 289669 - DNA, 21 bp, Artificial sequence
  SiRNA target sequence
gccttcgaaattactctgggc

SEQ ID NO: 289670 - DNA, 21 bp, Artificial sequence
  SiRNA target sequence
ccttcgaaattactctgggca

SEQ ID NO: 289671 - DNA, 21 bp, Artificial sequence
  SiRNA target sequence
cttcgaaattactctgggcag

SEQ ID NO: 289672 - DNA, 21 bp, Artificial sequence
  SiRNA target sequence
ttcgaaattactctgggcagg

SEQ ID NO: 289673 - DNA, 21 bp, Artificial sequence
  SiRNA target sequence
tcgaaattactctgggcagga

SEQ ID NO: 289674 - DNA, 21 bp, Artificial sequence
  SiRNA target sequence
cgaaattactctgggcaggaa

SEQ ID NO: 289675 - DNA, 21 bp, Artificial sequence
  SiRNA target sequence
gaaattactctgggcaggaag

SEQ ID NO: 289676 - DNA, 21 bp, Artificial sequence
  SiRNA target sequence
aaattactctgggcaggaagt

SEQ ID NO: 289677 - DNA, 21 bp, Artificial sequence
  SiRNA target sequence
aattactctgggcaggaagtt

SEQ ID NO: 289678 - DNA, 21 bp, Artificial sequence
  SiRNA target sequence
attactctgggcaggaagtta

SEQ ID NO: 289679 - DNA, 21 bp, Artificial sequence
  SiRNA target sequence
ttactctgggcaggaagttac

SEQ ID NO: 289680 - DNA, 21 bp, Artificial sequence
  SiRNA target sequence
tactctgggcaggaagttact

SEQ ID NO: 289681 - DNA, 21 bp, Artificial sequence
  SiRNA target sequence
actctgggcaggaagttacta

SEQ ID NO: 289682 - DNA, 21 bp, Artificial sequence
  SiRNA target sequence
ctctgggcaggaagttactaa

SEQ ID NO: 289683 - DNA, 21 bp, Artificial sequence
  SiRNA target sequence
tctgggcaggaagttactaaa

SEQ ID NO: 289684 - DNA, 21 bp, Artificial sequence
  SiRNA target sequence
ctgggcaggaagttactaaac

SEQ ID NO: 289685 - DNA, 21 bp, Artificial sequence
  SiRNA target sequence
tgggcaggaagttactaaacg

SEQ ID NO: 289686 - DNA, 21 bp, Artificial sequence
  SiRNA target sequence
gggcaggaagttactaaacga

SEQ ID NO: 289687 - DNA, 21 bp, Artificial sequence
  SiRNA target sequence
ggcaggaagttactaaacgag

SEQ ID NO: 289688 - DNA, 21 bp, Artificial sequence
  SiRNA target sequence
gcaggaagttactaaacgaga

SEQ ID NO: 289689 - DNA, 21 bp, Artificial sequence
  SiRNA target sequence
caggaagttactaaacgagaa

SEQ ID NO: 289690 - DNA, 21 bp, Artificial sequence
  SiRNA target sequence
aggaagttactaaacgagaac

SEQ ID NO: 289691 - DNA, 21 bp, Artificial sequence
  SiRNA target sequence
ggaagttactaaacgagaact

SEQ ID NO: 289692 - DNA, 21 bp, Artificial sequence
  SiRNA target sequence
gaagttactaaacgagaactt

SEQ ID NO: 289693 - DNA, 21 bp, Artificial sequence
  SiRNA target sequence
aagttactaaacgagaacttt

SEQ ID NO: 289694 - DNA, 21 bp, Artificial sequence
  SiRNA target sequence
agttactaaacgagaactttc

SEQ ID NO: 289695 - DNA, 21 bp, Artificial sequence
  SiRNA target sequence
gttactaaacgagaactttct

SEQ ID NO: 289696 - DNA, 21 bp, Artificial sequence
  SiRNA target sequence
ttactaaacgagaactttctg

SEQ ID NO: 289697 - DNA, 21 bp, Artificial sequence
  SiRNA target sequence
tactaaacgagaactttctgc

SEQ ID NO: 289698 - DNA, 21 bp, Artificial sequence
  SiRNA target sequence
actaaacgagaactttctgct

SEQ ID NO: 289699 - DNA, 21 bp, Artificial sequence
  SiRNA target sequence
ctaaacgagaactttctgctt

SEQ ID NO: 289700 - DNA, 21 bp, Artificial sequence
  SiRNA target sequence
taaacgagaactttctgctta

SEQ ID NO: 289701 - DNA, 21 bp, Artificial sequence
  SiRNA target sequence
aaacgagaactttctgcttaa

SEQ ID NO: 289702 - DNA, 21 bp, Artificial sequence
  SiRNA target sequence
aacgagaactttctgcttaaa

SEQ ID NO: 289703 - DNA, 21 bp, Artificial sequence
  SiRNA target sequence
acgagaactttctgcttaaat

SEQ ID NO: 289704 - DNA, 21 bp, Artificial sequence
  SiRNA target sequence
cgagaactttctgcttaaatc

SEQ ID NO: 289705 - DNA, 21 bp, Artificial sequence
  SiRNA target sequence
gagaactttctgcttaaatcc

SEQ ID NO: 289706 - DNA, 21 bp, Artificial sequence
  SiRNA target sequence
agaactttctgcttaaatccc

SEQ ID NO: 289707 - DNA, 21 bp, Artificial sequence
  SiRNA target sequence
gaactttctgcttaaatccca

SEQ ID NO: 289708 - DNA, 21 bp, Artificial sequence
  SiRNA target sequence
aactttctgcttaaatcccaa

SEQ ID NO: 289709 - DNA, 21 bp, Artificial sequence
  SiRNA target sequence
actttctgcttaaatcccaac

SEQ ID NO: 289710 - DNA, 21 bp, Artificial sequence
  SiRNA target sequence
ctttctgcttaaatcccaacg

SEQ ID NO: 289711 - DNA, 21 bp, Artificial sequence
  SiRNA target sequence
tttctgcttaaatcccaacgc

SEQ ID NO: 289712 - DNA, 21 bp, Artificial sequence
  SiRNA target sequence
ttctgcttaaatcccaacgca

SEQ ID NO: 289713 - DNA, 21 bp, Artificial sequence
  SiRNA target sequence
tctgcttaaatcccaacgcac

SEQ ID NO: 289714 - DNA, 21 bp, Artificial sequence
  SiRNA target sequence
ctgcttaaatcccaacgcaca

SEQ ID NO: 289715 - DNA, 21 bp, Artificial sequence
  SiRNA target sequence
tgcttaaatcccaacgcacaa

SEQ ID NO: 289716 - DNA, 21 bp, Artificial sequence
  SiRNA target sequence
gcttaaatcccaacgcacaaa

SEQ ID NO: 289717 - DNA, 21 bp, Artificial sequence
  SiRNA target sequence
cttaaatcccaacgcacaaac

SEQ ID NO: 289718 - DNA, 21 bp, Artificial sequence
  SiRNA target sequence
ttaaatcccaacgcacaaaca

SEQ ID NO: 289719 - DNA, 21 bp, Artificial sequence
  SiRNA target sequence
taaatcccaacgcacaaacaa

SEQ ID NO: 289720 - DNA, 21 bp, Artificial sequence
  SiRNA target sequence
aaatcccaacgcacaaacaaa

SEQ ID NO: 289721 - DNA, 21 bp, Artificial sequence
  SiRNA target sequence
aatcccaacgcacaaacaaat

SEQ ID NO: 289722 - DNA, 21 bp, Artificial sequence
  SiRNA target sequence
atcccaacgcacaaacaaata

SEQ ID NO: 289723 - DNA, 21 bp, Artificial sequence
  SiRNA target sequence
tcccaacgcacaaacaaatag

SEQ ID NO: 289724 - DNA, 21 bp, Artificial sequence
  SiRNA target sequence
cccaacgcacaaacaaataga

SEQ ID NO: 289725 - DNA, 21 bp, Artificial sequence
  SiRNA target sequence
ccaacgcacaaacaaatagag

SEQ ID NO: 289726 - DNA, 21 bp, Artificial sequence
  SiRNA target sequence
caacgcacaaacaaatagagt

SEQ ID NO: 289727 - DNA, 21 bp, Artificial sequence
  SiRNA target sequence
aacgcacaaacaaatagagta

SEQ ID NO: 289728 - DNA, 21 bp, Artificial sequence
  SiRNA target sequence
acgcacaaacaaatagagtaa

SEQ ID NO: 289729 - DNA, 21 bp, Artificial sequence
  SiRNA target sequence
cgcacaaacaaatagagtaaa

SEQ ID NO: 289730 - DNA, 21 bp, Artificial sequence
  SiRNA target sequence
gcacaaacaaatagagtaaat

SEQ ID NO: 289731 - DNA, 21 bp, Artificial sequence
  SiRNA target sequence
cacaaacaaatagagtaaata

SEQ ID NO: 289732 - DNA, 21 bp, Artificial sequence
  SiRNA target sequence
acaaacaaatagagtaaataa

SEQ ID NO: 289733 - DNA, 21 bp, Artificial sequence
  SiRNA target sequence
caaacaaatagagtaaataaa

SEQ ID NO: 289734 - DNA, 21 bp, Artificial sequence
  SiRNA target sequence
aaacaaatagagtaaataaat

SEQ ID NO: 289735 - DNA, 21 bp, Artificial sequence
  SiRNA target sequence
aacaaatagagtaaataaata

SEQ ID NO: 289736 - DNA, 21 bp, Artificial sequence
  SiRNA target sequence
acaaatagagtaaataaataa

SEQ ID NO: 289737 - DNA, 21 bp, Artificial sequence
  SiRNA target sequence
caaatagagtaaataaataat

SEQ ID NO: 289738 - DNA, 21 bp, Artificial sequence
  SiRNA target sequence
aaatagagtaaataaataatt

SEQ ID NO: 289739 - DNA, 21 bp, Artificial sequence
  SiRNA target sequence
aatagagtaaataaataatta

SEQ ID NO: 289740 - DNA, 21 bp, Artificial sequence
  SiRNA target sequence
atagagtaaataaataattat

SEQ ID NO: 289741 - DNA, 21 bp, Artificial sequence
  SiRNA target sequence
tagagtaaataaataattata

SEQ ID NO: 289742 - DNA, 21 bp, Artificial sequence
  SiRNA target sequence
agagtaaataaataattataa

SEQ ID NO: 289743 - DNA, 21 bp, Artificial sequence
  SiRNA target sequence
gagtaaataaataattataat

SEQ ID NO: 289744 - DNA, 21 bp, Artificial sequence
  SiRNA target sequence
agtaaataaataattataatg

SEQ ID NO: 289745 - DNA, 21 bp, Artificial sequence
  SiRNA target sequence
gtaaataaataattataatga

SEQ ID NO: 289746 - DNA, 21 bp, Artificial sequence
  SiRNA target sequence
taaataaataattataatgaa

SEQ ID NO: 289747 - DNA, 21 bp, Artificial sequence
  SiRNA target sequence
aaataaataattataatgaat

SEQ ID NO: 289748 - DNA, 21 bp, Artificial sequence
  SiRNA target sequence
aataaataattataatgaatt

SEQ ID NO: 289749 - DNA, 21 bp, Artificial sequence
  SiRNA target sequence
ataaataattataatgaattt

SEQ ID NO: 289750 - DNA, 21 bp, Artificial sequence
  SiRNA target sequence
taaataattataatgaatttt

SEQ ID NO: 289751 - DNA, 21 bp, Artificial sequence
  SiRNA target sequence
aaataattataatgaatttta

SEQ ID NO: 289752 - DNA, 21 bp, Artificial sequence
  SiRNA target sequence
aataattataatgaattttac

SEQ ID NO: 289753 - DNA, 21 bp, Artificial sequence
  SiRNA target sequence
ataattataatgaattttaca

SEQ ID NO: 289754 - DNA, 21 bp, Artificial sequence
  SiRNA target sequence
taattataatgaattttacaa

SEQ ID NO: 289755 - DNA, 21 bp, Artificial sequence
  SiRNA target sequence
aattataatgaattttacaaa

SEQ ID NO: 289756 - DNA, 21 bp, Artificial sequence
  SiRNA target sequence
attataatgaattttacaaag

SEQ ID NO: 289757 - DNA, 21 bp, Artificial sequence
  SiRNA target sequence
ttataatgaattttacaaagc

SEQ ID NO: 289758 - DNA, 21 bp, Artificial sequence
  SiRNA target sequence
tataatgaattttacaaagca

SEQ ID NO: 289759 - DNA, 21 bp, Artificial sequence
  SiRNA target sequence
ataatgaattttacaaagcaa

SEQ ID NO: 289760 - DNA, 21 bp, Artificial sequence
  SiRNA target sequence
taatgaattttacaaagcaac

SEQ ID NO: 289761 - DNA, 21 bp, Artificial sequence
  SiRNA target sequence
aatgaattttacaaagcaacc

SEQ ID NO: 289762 - DNA, 21 bp, Artificial sequence
  SiRNA target sequence
atgaattttacaaagcaacca

SEQ ID NO: 289763 - DNA, 21 bp, Artificial sequence
  SiRNA target sequence
tgaattttacaaagcaaccag

SEQ ID NO: 289764 - DNA, 21 bp, Artificial sequence
  SiRNA target sequence
gaattttacaaagcaaccagc

SEQ ID NO: 289765 - DNA, 21 bp, Artificial sequence
  SiRNA target sequence
aattttacaaagcaaccagca

SEQ ID NO: 289766 - DNA, 21 bp, Artificial sequence
  SiRNA target sequence
attttacaaagcaaccagcaa

SEQ ID NO: 289767 - DNA, 21 bp, Artificial sequence
  SiRNA target sequence
ttttacaaagcaaccagcaag

SEQ ID NO: 289768 - DNA, 21 bp, Artificial sequence
  SiRNA target sequence
tttacaaagcaaccagcaagt

SEQ ID NO: 289769 - DNA, 21 bp, Artificial sequence
  SiRNA target sequence
ttacaaagcaaccagcaagtc

SEQ ID NO: 289770 - DNA, 21 bp, Artificial sequence
  SiRNA target sequence
tacaaagcaaccagcaagtct

SEQ ID NO: 289771 - DNA, 21 bp, Artificial sequence
  SiRNA target sequence
acaaagcaaccagcaagtctc

SEQ ID NO: 289772 - DNA, 21 bp, Artificial sequence
  SiRNA target sequence
caaagcaaccagcaagtctca

SEQ ID NO: 289773 - DNA, 21 bp, Artificial sequence
  SiRNA target sequence
aaagcaaccagcaagtctcaa

SEQ ID NO: 289774 - DNA, 21 bp, Artificial sequence
  SiRNA target sequence
aagcaaccagcaagtctcaaa

SEQ ID NO: 289775 - DNA, 21 bp, Artificial sequence
  SiRNA target sequence
agcaaccagcaagtctcaaat

SEQ ID NO: 289776 - DNA, 21 bp, Artificial sequence
  SiRNA target sequence
gcaaccagcaagtctcaaata

SEQ ID NO: 289777 - DNA, 21 bp, Artificial sequence
  SiRNA target sequence
caaccagcaagtctcaaatat

SEQ ID NO: 289778 - DNA, 21 bp, Artificial sequence
  SiRNA target sequence
aaccagcaagtctcaaatatt

SEQ ID NO: 289779 - DNA, 21 bp, Artificial sequence
  SiRNA target sequence
accagcaagtctcaaatattt

SEQ ID NO: 289780 - DNA, 21 bp, Artificial sequence
  SiRNA target sequence
ccagcaagtctcaaatattta

SEQ ID NO: 289781 - DNA, 21 bp, Artificial sequence
  SiRNA target sequence
cagcaagtctcaaatatttat

SEQ ID NO: 289782 - DNA, 21 bp, Artificial sequence
  SiRNA target sequence
agcaagtctcaaatatttatc

SEQ ID NO: 289783 - DNA, 21 bp, Artificial sequence
  SiRNA target sequence
gcaagtctcaaatatttatca

SEQ ID NO: 289784 - DNA, 21 bp, Artificial sequence
  SiRNA target sequence
caagtctcaaatatttatcaa

SEQ ID NO: 289785 - DNA, 21 bp, Artificial sequence
  SiRNA target sequence
aagtctcaaatatttatcaag

SEQ ID NO: 289786 - DNA, 21 bp, Artificial sequence
  SiRNA target sequence
agtctcaaatatttatcaagc

SEQ ID NO: 289787 - DNA, 21 bp, Artificial sequence
  SiRNA target sequence
gtctcaaatatttatcaagca

SEQ ID NO: 289788 - DNA, 21 bp, Artificial sequence
  SiRNA target sequence
tctcaaatatttatcaagcat

SEQ ID NO: 289789 - DNA, 21 bp, Artificial sequence
  SiRNA target sequence
ctcaaatatttatcaagcatg

SEQ ID NO: 289790 - DNA, 21 bp, Artificial sequence
  SiRNA target sequence
tcaaatatttatcaagcatga

SEQ ID NO: 289791 - DNA, 21 bp, Artificial sequence
  SiRNA target sequence
caaatatttatcaagcatgaa

SEQ ID NO: 289792 - DNA, 21 bp, Artificial sequence
  SiRNA target sequence
aaatatttatcaagcatgaaa

SEQ ID NO: 289793 - DNA, 21 bp, Artificial sequence
  SiRNA target sequence
aatatttatcaagcatgaaac

SEQ ID NO: 289794 - DNA, 21 bp, Artificial sequence
  SiRNA target sequence
atatttatcaagcatgaaact

SEQ ID NO: 289795 - DNA, 21 bp, Artificial sequence
  SiRNA target sequence
tatttatcaagcatgaaactt

SEQ ID NO: 289796 - DNA, 21 bp, Artificial sequence
  SiRNA target sequence
atttatcaagcatgaaactta

SEQ ID NO: 289797 - DNA, 21 bp, Artificial sequence
  SiRNA target sequence
tttatcaagcatgaaacttat

SEQ ID NO: 289798 - DNA, 21 bp, Artificial sequence
  SiRNA target sequence
ttatcaagcatgaaacttata

SEQ ID NO: 289799 - DNA, 21 bp, Artificial sequence
  SiRNA target sequence
tatcaagcatgaaacttataa

SEQ ID NO: 289800 - DNA, 21 bp, Artificial sequence
  SiRNA target sequence
atcaagcatgaaacttataac

SEQ ID NO: 289801 - DNA, 21 bp, Artificial sequence
  SiRNA target sequence
tcaagcatgaaacttataact

SEQ ID NO: 289802 - DNA, 21 bp, Artificial sequence
  SiRNA target sequence
caagcatgaaacttataactt

SEQ ID NO: 289803 - DNA, 21 bp, Artificial sequence
  SiRNA target sequence
aagcatgaaacttataacttc

SEQ ID NO: 289804 - DNA, 21 bp, Artificial sequence
  SiRNA target sequence
agcatgaaacttataacttca

SEQ ID NO: 289805 - DNA, 21 bp, Artificial sequence
  SiRNA target sequence
gcatgaaacttataacttcac

SEQ ID NO: 289806 - DNA, 21 bp, Artificial sequence
  SiRNA target sequence
catgaaacttataacttcaca

SEQ ID NO: 289807 - DNA, 21 bp, Artificial sequence
  SiRNA target sequence
atgaaacttataacttcacaa

SEQ ID NO: 289808 - DNA, 21 bp, Artificial sequence
  SiRNA target sequence
tgaaacttataacttcacaag

SEQ ID NO: 289809 - DNA, 21 bp, Artificial sequence
  SiRNA target sequence
gaaacttataacttcacaaga

SEQ ID NO: 289810 - DNA, 21 bp, Artificial sequence
  SiRNA target sequence
aaacttataacttcacaagac

SEQ ID NO: 289811 - DNA, 21 bp, Artificial sequence
  SiRNA target sequence
aacttataacttcacaagacc

SEQ ID NO: 289812 - DNA, 21 bp, Artificial sequence
  SiRNA target sequence
acttataacttcacaagacca

SEQ ID NO: 289813 - DNA, 21 bp, Artificial sequence
  SiRNA target sequence
cttataacttcacaagaccaa

SEQ ID NO: 289814 - DNA, 21 bp, Artificial sequence
  SiRNA target sequence
ttataacttcacaagaccaag

SEQ ID NO: 289815 - DNA, 21 bp, Artificial sequence
  SiRNA target sequence
tataacttcacaagaccaaga

SEQ ID NO: 289816 - DNA, 21 bp, Artificial sequence
  SiRNA target sequence
ataacttcacaagaccaagat

SEQ ID NO: 289817 - DNA, 21 bp, Artificial sequence
  SiRNA target sequence
taacttcacaagaccaagatt

SEQ ID NO: 289818 - DNA, 21 bp, Artificial sequence
  SiRNA target sequence
aacttcacaagaccaagattt

SEQ ID NO: 289819 - DNA, 21 bp, Artificial sequence
  SiRNA target sequence
acttcacaagaccaagatttc

SEQ ID NO: 289820 - DNA, 21 bp, Artificial sequence
  SiRNA target sequence
cttcacaagaccaagatttct

SEQ ID NO: 289821 - DNA, 21 bp, Artificial sequence
  SiRNA target sequence
ttcacaagaccaagatttctt

SEQ ID NO: 289822 - DNA, 21 bp, Artificial sequence
  SiRNA target sequence
tcacaagaccaagatttcttt

SEQ ID NO: 289823 - DNA, 21 bp, Artificial sequence
  SiRNA target sequence
cacaagaccaagatttcttta

SEQ ID NO: 289824 - DNA, 21 bp, Artificial sequence
  SiRNA target sequence
acaagaccaagatttctttaa

SEQ ID NO: 289825 - DNA, 21 bp, Artificial sequence
  SiRNA target sequence
caagaccaagatttctttaac

SEQ ID NO: 289826 - DNA, 21 bp, Artificial sequence
  SiRNA target sequence
aagaccaagatttctttaact

SEQ ID NO: 289827 - DNA, 21 bp, Artificial sequence
  SiRNA target sequence
agaccaagatttctttaactt

SEQ ID NO: 289828 - DNA, 21 bp, Artificial sequence
  SiRNA target sequence
gaccaagatttctttaacttt

SEQ ID NO: 289829 - DNA, 21 bp, Artificial sequence
  SiRNA target sequence
accaagatttctttaactttg

SEQ ID NO: 289830 - DNA, 21 bp, Artificial sequence
  SiRNA target sequence
ccaagatttctttaactttgg

SEQ ID NO: 289831 - DNA, 21 bp, Artificial sequence
  SiRNA target sequence
caagatttctttaactttgga

SEQ ID NO: 289832 - DNA, 21 bp, Artificial sequence
  SiRNA target sequence
aagatttctttaactttggag

SEQ ID NO: 289833 - DNA, 21 bp, Artificial sequence
  SiRNA target sequence
agatttctttaactttggaga

SEQ ID NO: 289834 - DNA, 21 bp, Artificial sequence
  SiRNA target sequence
gatttctttaactttggagaa

SEQ ID NO: 289835 - DNA, 21 bp, Artificial sequence
  SiRNA target sequence
atttctttaactttggagaag

SEQ ID NO: 289836 - DNA, 21 bp, Artificial sequence
  SiRNA target sequence
tttctttaactttggagaagt

SEQ ID NO: 289837 - DNA, 21 bp, Artificial sequence
  SiRNA target sequence
ttctttaactttggagaagtt

SEQ ID NO: 289838 - DNA, 21 bp, Artificial sequence
  SiRNA target sequence
tctttaactttggagaagttt

SEQ ID NO: 289839 - DNA, 21 bp, Artificial sequence
  SiRNA target sequence
ctttaactttggagaagtttc

SEQ ID NO: 289840 - DNA, 21 bp, Artificial sequence
  SiRNA target sequence
tttaactttggagaagtttca

SEQ ID NO: 289841 - DNA, 21 bp, Artificial sequence
  SiRNA target sequence
ttaactttggagaagtttcac

SEQ ID NO: 289842 - DNA, 21 bp, Artificial sequence
  SiRNA target sequence
taactttggagaagtttcacg

SEQ ID NO: 289843 - DNA, 21 bp, Artificial sequence
  SiRNA target sequence
aactttggagaagtttcacga

SEQ ID NO: 289844 - DNA, 21 bp, Artificial sequence
  SiRNA target sequence
actttggagaagtttcacgag

SEQ ID NO: 289845 - DNA, 21 bp, Artificial sequence
  SiRNA target sequence
ctttggagaagtttcacgaga

SEQ ID NO: 289846 - DNA, 21 bp, Artificial sequence
  SiRNA target sequence
tttggagaagtttcacgagaa

SEQ ID NO: 289847 - DNA, 21 bp, Artificial sequence
  SiRNA target sequence
ttggagaagtttcacgagaat

SEQ ID NO: 289848 - DNA, 21 bp, Artificial sequence
  SiRNA target sequence
tggagaagtttcacgagaatt

SEQ ID NO: 289849 - DNA, 21 bp, Artificial sequence
  SiRNA target sequence
ggagaagtttcacgagaattt

SEQ ID NO: 289850 - DNA, 21 bp, Artificial sequence
  SiRNA target sequence
gagaagtttcacgagaattta

SEQ ID NO: 289851 - DNA, 21 bp, Artificial sequence
  SiRNA target sequence
agaagtttcacgagaatttat

SEQ ID NO: 289852 - DNA, 21 bp, Artificial sequence
  SiRNA target sequence
gaagtttcacgagaatttata

SEQ ID NO: 289853 - DNA, 21 bp, Artificial sequence
  SiRNA target sequence
aagtttcacgagaatttatat

SEQ ID NO: 289854 - DNA, 21 bp, Artificial sequence
  SiRNA target sequence
agtttcacgagaatttatatt

SEQ ID NO: 289855 - DNA, 21 bp, Artificial sequence
  SiRNA target sequence
gtttcacgagaatttatattg

SEQ ID NO: 289856 - DNA, 21 bp, Artificial sequence
  SiRNA target sequence
tttcacgagaatttatattgg

SEQ ID NO: 289857 - DNA, 21 bp, Artificial sequence
  SiRNA target sequence
ttcacgagaatttatattgga

SEQ ID NO: 289858 - DNA, 21 bp, Artificial sequence
  SiRNA target sequence
tcacgagaatttatattggaa

SEQ ID NO: 289859 - DNA, 21 bp, Artificial sequence
  SiRNA target sequence
cacgagaatttatattggaac

SEQ ID NO: 289860 - DNA, 21 bp, Artificial sequence
  SiRNA target sequence
acgagaatttatattggaaca

SEQ ID NO: 289861 - DNA, 21 bp, Artificial sequence
  SiRNA target sequence
cgagaatttatattggaacag

SEQ ID NO: 289862 - DNA, 21 bp, Artificial sequence
  SiRNA target sequence
gagaatttatattggaacagg

SEQ ID NO: 289863 - DNA, 21 bp, Artificial sequence
  SiRNA target sequence
agaatttatattggaacaggc

SEQ ID NO: 289864 - DNA, 21 bp, Artificial sequence
  SiRNA target sequence
gaatttatattggaacaggca

SEQ ID NO: 289865 - DNA, 21 bp, Artificial sequence
  SiRNA target sequence
aatttatattggaacaggcat

SEQ ID NO: 289866 - DNA, 21 bp, Artificial sequence
  SiRNA target sequence
atttatattggaacaggcata

SEQ ID NO: 289867 - DNA, 21 bp, Artificial sequence
  SiRNA target sequence
tttatattggaacaggcatac

SEQ ID NO: 289868 - DNA, 21 bp, Artificial sequence
  SiRNA target sequence
ttatattggaacaggcatacg

SEQ ID NO: 289869 - DNA, 21 bp, Artificial sequence
  SiRNA target sequence
tatattggaacaggcatacgt

SEQ ID NO: 289870 - DNA, 21 bp, Artificial sequence
  SiRNA target sequence
atattggaacaggcatacgtc

SEQ ID NO: 289871 - DNA, 21 bp, Artificial sequence
  SiRNA target sequence
tattggaacaggcatacgtca

SEQ ID NO: 289872 - DNA, 21 bp, Artificial sequence
  SiRNA target sequence
attggaacaggcatacgtcaa

SEQ ID NO: 289873 - DNA, 21 bp, Artificial sequence
  SiRNA target sequence
ttggaacaggcatacgtcaat

SEQ ID NO: 289874 - DNA, 21 bp, Artificial sequence
  SiRNA target sequence
tggaacaggcatacgtcaatg

SEQ ID NO: 289875 - DNA, 21 bp, Artificial sequence
  SiRNA target sequence
ggaacaggcatacgtcaatgg

SEQ ID NO: 289876 - DNA, 21 bp, Artificial sequence
  SiRNA target sequence
gaacaggcatacgtcaatgga

SEQ ID NO: 289877 - DNA, 21 bp, Artificial sequence
  SiRNA target sequence
aacaggcatacgtcaatggat

SEQ ID NO: 289878 - DNA, 21 bp, Artificial sequence
  SiRNA target sequence
acaggcatacgtcaatggata

SEQ ID NO: 289879 - DNA, 21 bp, Artificial sequence
  SiRNA target sequence
caggcatacgtcaatggatac

SEQ ID NO: 289880 - DNA, 21 bp, Artificial sequence
  SiRNA target sequence
aggcatacgtcaatggatacg

SEQ ID NO: 289881 - DNA, 21 bp, Artificial sequence
  SiRNA target sequence
ggcatacgtcaatggatacga

SEQ ID NO: 289882 - DNA, 21 bp, Artificial sequence
  SiRNA target sequence
gcatacgtcaatggatacgat

SEQ ID NO: 289883 - DNA, 21 bp, Artificial sequence
  SiRNA target sequence
catacgtcaatggatacgatt

SEQ ID NO: 289884 - DNA, 21 bp, Artificial sequence
  SiRNA target sequence
atacgtcaatggatacgattt

SEQ ID NO: 289885 - DNA, 21 bp, Artificial sequence
  SiRNA target sequence
tacgtcaatggatacgatttc

SEQ ID NO: 289886 - DNA, 21 bp, Artificial sequence
  SiRNA target sequence
acgtcaatggatacgatttcc

SEQ ID NO: 289887 - DNA, 21 bp, Artificial sequence
  SiRNA target sequence
cgtcaatggatacgatttcca

SEQ ID NO: 289888 - DNA, 21 bp, Artificial sequence
  SiRNA target sequence
gtcaatggatacgatttccac

SEQ ID NO: 289889 - DNA, 21 bp, Artificial sequence
  SiRNA target sequence
tcaatggatacgatttccaca

SEQ ID NO: 289890 - DNA, 21 bp, Artificial sequence
  SiRNA target sequence
caatggatacgatttccacat

SEQ ID NO: 289891 - DNA, 21 bp, Artificial sequence
  SiRNA target sequence
aatggatacgatttccacatg

SEQ ID NO: 289892 - DNA, 21 bp, Artificial sequence
  SiRNA target sequence
atggatacgatttccacatgc

SEQ ID NO: 289893 - DNA, 21 bp, Artificial sequence
  SiRNA target sequence
tggatacgatttccacatgct

SEQ ID NO: 289894 - DNA, 21 bp, Artificial sequence
  SiRNA target sequence
ggatacgatttccacatgcta

SEQ ID NO: 289895 - DNA, 21 bp, Artificial sequence
  SiRNA target sequence
gatacgatttccacatgctac

SEQ ID NO: 289896 - DNA, 21 bp, Artificial sequence
  SiRNA target sequence
atacgatttccacatgctaca

SEQ ID NO: 289897 - DNA, 21 bp, Artificial sequence
  SiRNA target sequence
tacgatttccacatgctacat

SEQ ID NO: 289898 - DNA, 21 bp, Artificial sequence
  SiRNA target sequence
acgatttccacatgctacatc

SEQ ID NO: 289899 - DNA, 21 bp, Artificial sequence
  SiRNA target sequence
cgatttccacatgctacatca

SEQ ID NO: 289900 - DNA, 21 bp, Artificial sequence
  SiRNA target sequence
gatttccacatgctacatcaa

SEQ ID NO: 289901 - DNA, 21 bp, Artificial sequence
  SiRNA target sequence
atttccacatgctacatcaag

SEQ ID NO: 289902 - DNA, 21 bp, Artificial sequence
  SiRNA target sequence
tttccacatgctacatcaaga

SEQ ID NO: 289903 - DNA, 21 bp, Artificial sequence
  SiRNA target sequence
ttccacatgctacatcaagac

SEQ ID NO: 289904 - DNA, 21 bp, Artificial sequence
  SiRNA target sequence
tccacatgctacatcaagaca

SEQ ID NO: 289905 - DNA, 21 bp, Artificial sequence
  SiRNA target sequence
ccacatgctacatcaagacat

SEQ ID NO: 289906 - DNA, 21 bp, Artificial sequence
  SiRNA target sequence
cacatgctacatcaagacatg

SEQ ID NO: 289907 - DNA, 21 bp, Artificial sequence
  SiRNA target sequence
acatgctacatcaagacatga

SEQ ID NO: 289908 - DNA, 21 bp, Artificial sequence
  SiRNA target sequence
catgctacatcaagacatgaa

SEQ ID NO: 289909 - DNA, 21 bp, Artificial sequence
  SiRNA target sequence
atgctacatcaagacatgaat

SEQ ID NO: 289910 - DNA, 21 bp, Artificial sequence
  SiRNA target sequence
tgctacatcaagacatgaatt

SEQ ID NO: 289911 - DNA, 21 bp, Artificial sequence
  SiRNA target sequence
gctacatcaagacatgaattg

SEQ ID NO: 289912 - DNA, 21 bp, Artificial sequence
  SiRNA target sequence
ctacatcaagacatgaattgt

SEQ ID NO: 289913 - DNA, 21 bp, Artificial sequence
  SiRNA target sequence
tacatcaagacatgaattgta

SEQ ID NO: 289914 - DNA, 21 bp, Artificial sequence
  SiRNA target sequence
acatcaagacatgaattgtat

SEQ ID NO: 289915 - DNA, 21 bp, Artificial sequence
  SiRNA target sequence
catcaagacatgaattgtata

SEQ ID NO: 289916 - DNA, 21 bp, Artificial sequence
  SiRNA target sequence
atcaagacatgaattgtatag

SEQ ID NO: 289917 - DNA, 21 bp, Artificial sequence
  SiRNA target sequence
tcaagacatgaattgtatagg

SEQ ID NO: 289918 - DNA, 21 bp, Artificial sequence
  SiRNA target sequence
caagacatgaattgtatagga

SEQ ID NO: 289919 - DNA, 21 bp, Artificial sequence
  SiRNA target sequence
aagacatgaattgtataggat

SEQ ID NO: 289920 - DNA, 21 bp, Artificial sequence
  SiRNA target sequence
agacatgaattgtataggatt

SEQ ID NO: 289921 - DNA, 21 bp, Artificial sequence
  SiRNA target sequence
gacatgaattgtataggattc

SEQ ID NO: 289922 - DNA, 21 bp, Artificial sequence
  SiRNA target sequence
acatgaattgtataggattcg

SEQ ID NO: 289923 - DNA, 21 bp, Artificial sequence
  SiRNA target sequence
catgaattgtataggattcgt

SEQ ID NO: 289924 - DNA, 21 bp, Artificial sequence
  SiRNA target sequence
atgaattgtataggattcgta

SEQ ID NO: 289925 - DNA, 21 bp, Artificial sequence
  SiRNA target sequence
tgaattgtataggattcgtac

SEQ ID NO: 289926 - DNA, 21 bp, Artificial sequence
  SiRNA target sequence
gaattgtataggattcgtact

SEQ ID NO: 289927 - DNA, 21 bp, Artificial sequence
  SiRNA target sequence
aattgtataggattcgtacta

SEQ ID NO: 289928 - DNA, 21 bp, Artificial sequence
  SiRNA target sequence
attgtataggattcgtactat

SEQ ID NO: 289929 - DNA, 21 bp, Artificial sequence
  SiRNA target sequence
ttgtataggattcgtactatc

SEQ ID NO: 289930 - DNA, 21 bp, Artificial sequence
  SiRNA target sequence
tgtataggattcgtactatca

SEQ ID NO: 289931 - DNA, 21 bp, Artificial sequence
  SiRNA target sequence
gtataggattcgtactatcaa

SEQ ID NO: 289932 - DNA, 21 bp, Artificial sequence
  SiRNA target sequence
tataggattcgtactatcaat

SEQ ID NO: 289933 - DNA, 21 bp, Artificial sequence
  SiRNA target sequence
ataggattcgtactatcaatt

SEQ ID NO: 289934 - DNA, 21 bp, Artificial sequence
  SiRNA target sequence
taggattcgtactatcaattt

SEQ ID NO: 289935 - DNA, 21 bp, Artificial sequence
  SiRNA target sequence
aggattcgtactatcaatttt

SEQ ID NO: 289936 - DNA, 21 bp, Artificial sequence
  SiRNA target sequence
ggattcgtactatcaattttt

SEQ ID NO: 289937 - DNA, 21 bp, Artificial sequence
  SiRNA target sequence
gattcgtactatcaatttttg

SEQ ID NO: 289938 - DNA, 21 bp, Artificial sequence
  SiRNA target sequence
attcgtactatcaatttttga

SEQ ID NO: 289939 - DNA, 21 bp, Artificial sequence
  SiRNA target sequence
ttcgtactatcaatttttgat

SEQ ID NO: 289940 - DNA, 21 bp, Artificial sequence
  SiRNA target sequence
tcgtactatcaatttttgatg

SEQ ID NO: 289941 - DNA, 21 bp, Artificial sequence
  SiRNA target sequence
cgtactatcaatttttgatga

SEQ ID NO: 289942 - DNA, 21 bp, Artificial sequence
  SiRNA target sequence
gtactatcaatttttgatgaa

SEQ ID NO: 289943 - DNA, 21 bp, Artificial sequence
  SiRNA target sequence
tactatcaatttttgatgaag

SEQ ID NO: 289944 - DNA, 21 bp, Artificial sequence
  SiRNA target sequence
actatcaatttttgatgaaga

SEQ ID NO: 289945 - DNA, 21 bp, Artificial sequence
  SiRNA target sequence
ctatcaatttttgatgaagat

SEQ ID NO: 289946 - DNA, 21 bp, Artificial sequence
  SiRNA target sequence
tatcaatttttgatgaagatg

SEQ ID NO: 289947 - DNA, 21 bp, Artificial sequence
  SiRNA target sequence
atcaatttttgatgaagatgc

SEQ ID NO: 289948 - DNA, 21 bp, Artificial sequence
  SiRNA target sequence
tcaatttttgatgaagatgct

SEQ ID NO: 289949 - DNA, 21 bp, Artificial sequence
  SiRNA target sequence
caatttttgatgaagatgcta

SEQ ID NO: 289950 - DNA, 21 bp, Artificial sequence
  SiRNA target sequence
aatttttgatgaagatgctag

SEQ ID NO: 289951 - DNA, 21 bp, Artificial sequence
  SiRNA target sequence
atttttgatgaagatgctaga

SEQ ID NO: 289952 - DNA, 21 bp, Artificial sequence
  SiRNA target sequence
tttttgatgaagatgctagag

SEQ ID NO: 289953 - DNA, 21 bp, Artificial sequence
  SiRNA target sequence
ttttgatgaagatgctagaga

SEQ ID NO: 289954 - DNA, 21 bp, Artificial sequence
  SiRNA target sequence
tttgatgaagatgctagagat

SEQ ID NO: 289955 - DNA, 21 bp, Artificial sequence
  SiRNA target sequence
ttgatgaagatgctagagatg

SEQ ID NO: 289956 - DNA, 21 bp, Artificial sequence
  SiRNA target sequence
tgatgaagatgctagagatga

SEQ ID NO: 289957 - DNA, 21 bp, Artificial sequence
  SiRNA target sequence
gatgaagatgctagagatgag

SEQ ID NO: 289958 - DNA, 21 bp, Artificial sequence
  SiRNA target sequence
atgaagatgctagagatgagt

SEQ ID NO: 289959 - DNA, 21 bp, Artificial sequence
  SiRNA target sequence
tgaagatgctagagatgagta

SEQ ID NO: 289960 - DNA, 21 bp, Artificial sequence
  SiRNA target sequence
gaagatgctagagatgagtat

SEQ ID NO: 289961 - DNA, 21 bp, Artificial sequence
  SiRNA target sequence
aagatgctagagatgagtatg

SEQ ID NO: 289962 - DNA, 21 bp, Artificial sequence
  SiRNA target sequence
agatgctagagatgagtatga

SEQ ID NO: 289963 - DNA, 21 bp, Artificial sequence
  SiRNA target sequence
gatgctagagatgagtatgaa

SEQ ID NO: 289964 - DNA, 21 bp, Artificial sequence
  SiRNA target sequence
atgctagagatgagtatgaat

SEQ ID NO: 289965 - DNA, 21 bp, Artificial sequence
  SiRNA target sequence
tgctagagatgagtatgaata

SEQ ID NO: 289966 - DNA, 21 bp, Artificial sequence
  SiRNA target sequence
gctagagatgagtatgaatac

SEQ ID NO: 289967 - DNA, 21 bp, Artificial sequence
  SiRNA target sequence
ctagagatgagtatgaataca

SEQ ID NO: 289968 - DNA, 21 bp, Artificial sequence
  SiRNA target sequence
tagagatgagtatgaatacaa

SEQ ID NO: 289969 - DNA, 21 bp, Artificial sequence
  SiRNA target sequence
agagatgagtatgaatacaaa

SEQ ID NO: 289970 - DNA, 21 bp, Artificial sequence
  SiRNA target sequence
gagatgagtatgaatacaaag

SEQ ID NO: 289971 - DNA, 21 bp, Artificial sequence
  SiRNA target sequence
agatgagtatgaatacaaaga

SEQ ID NO: 289972 - DNA, 21 bp, Artificial sequence
  SiRNA target sequence
gatgagtatgaatacaaagat

SEQ ID NO: 289973 - DNA, 21 bp, Artificial sequence
  SiRNA target sequence
atgagtatgaatacaaagatc

SEQ ID NO: 289974 - DNA, 21 bp, Artificial sequence
  SiRNA target sequence
tgagtatgaatacaaagatct

SEQ ID NO: 289975 - DNA, 21 bp, Artificial sequence
  SiRNA target sequence
gagtatgaatacaaagatctg

SEQ ID NO: 289976 - DNA, 21 bp, Artificial sequence
  SiRNA target sequence
agtatgaatacaaagatctga

SEQ ID NO: 289977 - DNA, 21 bp, Artificial sequence
  SiRNA target sequence
gtatgaatacaaagatctgaa

SEQ ID NO: 289978 - DNA, 21 bp, Artificial sequence
  SiRNA target sequence
tatgaatacaaagatctgaat

SEQ ID NO: 289979 - DNA, 21 bp, Artificial sequence
  SiRNA target sequence
atgaatacaaagatctgaatt

SEQ ID NO: 289980 - DNA, 21 bp, Artificial sequence
  SiRNA target sequence
tgaatacaaagatctgaattg

SEQ ID NO: 289981 - DNA, 21 bp, Artificial sequence
  SiRNA target sequence
gaatacaaagatctgaattgt

SEQ ID NO: 289982 - DNA, 21 bp, Artificial sequence
  SiRNA target sequence
aatacaaagatctgaattgtg

SEQ ID NO: 289983 - DNA, 21 bp, Artificial sequence
  SiRNA target sequence
atacaaagatctgaattgtga

SEQ ID NO: 289984 - DNA, 21 bp, Artificial sequence
  SiRNA target sequence
tacaaagatctgaattgtgaa

SEQ ID NO: 289985 - DNA, 21 bp, Artificial sequence
  SiRNA target sequence
acaaagatctgaattgtgaat

SEQ ID NO: 289986 - DNA, 21 bp, Artificial sequence
  SiRNA target sequence
caaagatctgaattgtgaata

SEQ ID NO: 289987 - DNA, 21 bp, Artificial sequence
  SiRNA target sequence
aaagatctgaattgtgaatat

SEQ ID NO: 289988 - DNA, 21 bp, Artificial sequence
  SiRNA target sequence
aagatctgaattgtgaatatc

SEQ ID NO: 289989 - DNA, 21 bp, Artificial sequence
  SiRNA target sequence
agatctgaattgtgaatatca

SEQ ID NO: 289990 - DNA, 21 bp, Artificial sequence
  SiRNA target sequence
gatctgaattgtgaatatcat

SEQ ID NO: 289991 - DNA, 21 bp, Artificial sequence
  SiRNA target sequence
atctgaattgtgaatatcatg

SEQ ID NO: 289992 - DNA, 21 bp, Artificial sequence
  SiRNA target sequence
tctgaattgtgaatatcatga

SEQ ID NO: 289993 - DNA, 21 bp, Artificial sequence
  SiRNA target sequence
ctgaattgtgaatatcatgag

SEQ ID NO: 289994 - DNA, 21 bp, Artificial sequence
  SiRNA target sequence
tgaattgtgaatatcatgaga

SEQ ID NO: 289995 - DNA, 21 bp, Artificial sequence
  SiRNA target sequence
gaattgtgaatatcatgagaa

SEQ ID NO: 289996 - DNA, 21 bp, Artificial sequence
  SiRNA target sequence
aattgtgaatatcatgagaat

SEQ ID NO: 289997 - DNA, 21 bp, Artificial sequence
  SiRNA target sequence
attgtgaatatcatgagaatt

SEQ ID NO: 289998 - DNA, 21 bp, Artificial sequence
  SiRNA target sequence
ttgtgaatatcatgagaattt

SEQ ID NO: 289999 - DNA, 21 bp, Artificial sequence
  SiRNA target sequence
tgtgaatatcatgagaattta

SEQ ID NO: 290000 - DNA, 21 bp, Artificial sequence
  SiRNA target sequence
gtgaatatcatgagaatttat

SEQ ID NO: 290001 - DNA, 21 bp, Artificial sequence
  SiRNA target sequence
tgaatatcatgagaatttatt

SEQ ID NO: 290002 - DNA, 21 bp, Artificial sequence
  SiRNA target sequence
gaatatcatgagaatttattt

SEQ ID NO: 290003 - DNA, 21 bp, Artificial sequence
  SiRNA target sequence
aatatcatgagaatttatttg

SEQ ID NO: 290004 - DNA, 21 bp, Artificial sequence
  SiRNA target sequence
atatcatgagaatttatttga

SEQ ID NO: 290005 - DNA, 21 bp, Artificial sequence
  SiRNA target sequence
tatcatgagaatttatttgat

SEQ ID NO: 290006 - DNA, 21 bp, Artificial sequence
  SiRNA target sequence
atcatgagaatttatttgatg

SEQ ID NO: 290007 - DNA, 21 bp, Artificial sequence
  SiRNA target sequence
tcatgagaatttatttgatgc

SEQ ID NO: 290008 - DNA, 21 bp, Artificial sequence
  SiRNA target sequence
catgagaatttatttgatgca

SEQ ID NO: 290009 - DNA, 21 bp, Artificial sequence
  SiRNA target sequence
atgagaatttatttgatgcag

SEQ ID NO: 290010 - DNA, 21 bp, Artificial sequence
  SiRNA target sequence
tgagaatttatttgatgcagt

SEQ ID NO: 290011 - DNA, 21 bp, Artificial sequence
  SiRNA target sequence
gagaatttatttgatgcagta

SEQ ID NO: 290012 - DNA, 21 bp, Artificial sequence
  SiRNA target sequence
agaatttatttgatgcagtag

SEQ ID NO: 290013 - DNA, 21 bp, Artificial sequence
  SiRNA target sequence
gaatttatttgatgcagtagt

SEQ ID NO: 290014 - DNA, 21 bp, Artificial sequence
  SiRNA target sequence
aatttatttgatgcagtagta

SEQ ID NO: 290015 - DNA, 21 bp, Artificial sequence
  SiRNA target sequence
atttatttgatgcagtagtag

SEQ ID NO: 290016 - DNA, 21 bp, Artificial sequence
  SiRNA target sequence
tttatttgatgcagtagtaga

SEQ ID NO: 290017 - DNA, 21 bp, Artificial sequence
  SiRNA target sequence
ttatttgatgcagtagtagat

SEQ ID NO: 290018 - DNA, 21 bp, Artificial sequence
  SiRNA target sequence
tatttgatgcagtagtagatt

SEQ ID NO: 290019 - DNA, 21 bp, Artificial sequence
  SiRNA target sequence
atttgatgcagtagtagattc

SEQ ID NO: 290020 - DNA, 21 bp, Artificial sequence
  SiRNA target sequence
tttgatgcagtagtagattct

SEQ ID NO: 290021 - DNA, 21 bp, Artificial sequence
  SiRNA target sequence
ttgatgcagtagtagattctg

SEQ ID NO: 290022 - DNA, 21 bp, Artificial sequence
  SiRNA target sequence
tgatgcagtagtagattctga

SEQ ID NO: 290023 - DNA, 21 bp, Artificial sequence
  SiRNA target sequence
gatgcagtagtagattctgaa

SEQ ID NO: 290024 - DNA, 21 bp, Artificial sequence
  SiRNA target sequence
atgcagtagtagattctgaat

SEQ ID NO: 290025 - DNA, 21 bp, Artificial sequence
  SiRNA target sequence
tgcagtagtagattctgaatt

SEQ ID NO: 290026 - DNA, 21 bp, Artificial sequence
  SiRNA target sequence
gcagtagtagattctgaattt

SEQ ID NO: 290027 - DNA, 21 bp, Artificial sequence
  SiRNA target sequence
cagtagtagattctgaatttg

SEQ ID NO: 290028 - DNA, 21 bp, Artificial sequence
  SiRNA target sequence
agtagtagattctgaatttga

SEQ ID NO: 290029 - DNA, 21 bp, Artificial sequence
  SiRNA target sequence
gtagtagattctgaatttgat

SEQ ID NO: 290030 - DNA, 21 bp, Artificial sequence
  SiRNA target sequence
tagtagattctgaatttgata

SEQ ID NO: 290031 - DNA, 21 bp, Artificial sequence
  SiRNA target sequence
agtagattctgaatttgataa

SEQ ID NO: 290032 - DNA, 21 bp, Artificial sequence
  SiRNA target sequence
gtagattctgaatttgataaa

SEQ ID NO: 290033 - DNA, 21 bp, Artificial sequence
  SiRNA target sequence
tagattctgaatttgataaaa

SEQ ID NO: 290034 - DNA, 21 bp, Artificial sequence
  SiRNA target sequence
agattctgaatttgataaaat

SEQ ID NO: 290035 - DNA, 21 bp, Artificial sequence
  SiRNA target sequence
gattctgaatttgataaaatt

SEQ ID NO: 290036 - DNA, 21 bp, Artificial sequence
  SiRNA target sequence
attctgaatttgataaaattt

SEQ ID NO: 290037 - DNA, 21 bp, Artificial sequence
  SiRNA target sequence
ttctgaatttgataaaatttg

SEQ ID NO: 290038 - DNA, 21 bp, Artificial sequence
  SiRNA target sequence
tctgaatttgataaaatttgg

SEQ ID NO: 290039 - DNA, 21 bp, Artificial sequence
  SiRNA target sequence
ctgaatttgataaaatttggc

SEQ ID NO: 290040 - DNA, 21 bp, Artificial sequence
  SiRNA target sequence
tgaatttgataaaatttggcc

SEQ ID NO: 290041 - DNA, 21 bp, Artificial sequence
  SiRNA target sequence
gaatttgataaaatttggcca

SEQ ID NO: 290042 - DNA, 21 bp, Artificial sequence
  SiRNA target sequence
aatttgataaaatttggccac

SEQ ID NO: 290043 - DNA, 21 bp, Artificial sequence
  SiRNA target sequence
atttgataaaatttggccaca

SEQ ID NO: 290044 - DNA, 21 bp, Artificial sequence
  SiRNA target sequence
tttgataaaatttggccacac

SEQ ID NO: 290045 - DNA, 21 bp, Artificial sequence
  SiRNA target sequence
ttgataaaatttggccacact

SEQ ID NO: 290046 - DNA, 21 bp, Artificial sequence
  SiRNA target sequence
tgataaaatttggccacactt

SEQ ID NO: 290047 - DNA, 21 bp, Artificial sequence
  SiRNA target sequence
gataaaatttggccacacttg

SEQ ID NO: 290048 - DNA, 21 bp, Artificial sequence
  SiRNA target sequence
ataaaatttggccacacttgg

SEQ ID NO: 290049 - DNA, 21 bp, Artificial sequence
  SiRNA target sequence
taaaatttggccacacttggt

SEQ ID NO: 290050 - DNA, 21 bp, Artificial sequence
  SiRNA target sequence
aaaatttggccacacttggtt

SEQ ID NO: 290051 - DNA, 21 bp, Artificial sequence
  SiRNA target sequence
aaatttggccacacttggttt

SEQ ID NO: 290052 - DNA, 21 bp, Artificial sequence
  SiRNA target sequence
aatttggccacacttggtttt

SEQ ID NO: 290053 - DNA, 21 bp, Artificial sequence
  SiRNA target sequence
atttggccacacttggttttg

SEQ ID NO: 290054 - DNA, 21 bp, Artificial sequence
  SiRNA target sequence
tttggccacacttggttttga

SEQ ID NO: 290055 - DNA, 21 bp, Artificial sequence
  SiRNA target sequence
ttggccacacttggttttgaa

SEQ ID NO: 290056 - DNA, 21 bp, Artificial sequence
  SiRNA target sequence
tggccacacttggttttgaaa

SEQ ID NO: 290057 - DNA, 21 bp, Artificial sequence
  SiRNA target sequence
ggccacacttggttttgaaat

SEQ ID NO: 290058 - DNA, 21 bp, Artificial sequence
  SiRNA target sequence
gccacacttggttttgaaata

SEQ ID NO: 290059 - DNA, 21 bp, Artificial sequence
  SiRNA target sequence
ccacacttggttttgaaatat

SEQ ID NO: 290060 - DNA, 21 bp, Artificial sequence
  SiRNA target sequence
cacacttggttttgaaatata

SEQ ID NO: 290061 - DNA, 21 bp, Artificial sequence
  SiRNA target sequence
acacttggttttgaaatatat

SEQ ID NO: 290062 - DNA, 21 bp, Artificial sequence
  SiRNA target sequence
cacttggttttgaaatatata

SEQ ID NO: 290063 - DNA, 21 bp, Artificial sequence
  SiRNA target sequence
acttggttttgaaatatataa

SEQ ID NO: 290064 - DNA, 21 bp, Artificial sequence
  SiRNA target sequence
cttggttttgaaatatataac

SEQ ID NO: 290065 - DNA, 21 bp, Artificial sequence
  SiRNA target sequence
ttggttttgaaatatataaca

SEQ ID NO: 290066 - DNA, 21 bp, Artificial sequence
  SiRNA target sequence
tggttttgaaatatataacat

SEQ ID NO: 290067 - DNA, 21 bp, Artificial sequence
  SiRNA target sequence
ggttttgaaatatataacata

SEQ ID NO: 290068 - DNA, 21 bp, Artificial sequence
  SiRNA target sequence
gttttgaaatatataacatat

SEQ ID NO: 290069 - DNA, 21 bp, Artificial sequence
  SiRNA target sequence
ttttgaaatatataacatatt

SEQ ID NO: 290070 - DNA, 21 bp, Artificial sequence
  SiRNA target sequence
tttgaaatatataacatatta

SEQ ID NO: 290071 - DNA, 21 bp, Artificial sequence
  SiRNA target sequence
ttgaaatatataacatattat

SEQ ID NO: 290072 - DNA, 21 bp, Artificial sequence
  SiRNA target sequence
tgaaatatataacatattatc

SEQ ID NO: 290073 - DNA, 21 bp, Artificial sequence
  SiRNA target sequence
gaaatatataacatattatcc

SEQ ID NO: 290074 - DNA, 21 bp, Artificial sequence
  SiRNA target sequence
aaatatataacatattatcca

SEQ ID NO: 290075 - DNA, 21 bp, Artificial sequence
  SiRNA target sequence
aatatataacatattatccat

SEQ ID NO: 290076 - DNA, 21 bp, Artificial sequence
  SiRNA target sequence
atatataacatattatccatg

SEQ ID NO: 290077 - DNA, 21 bp, Artificial sequence
  SiRNA target sequence
tatataacatattatccatgt

SEQ ID NO: 290078 - DNA, 21 bp, Artificial sequence
  SiRNA target sequence
atataacatattatccatgta

SEQ ID NO: 290079 - DNA, 21 bp, Artificial sequence
  SiRNA target sequence
tataacatattatccatgtag

SEQ ID NO: 290080 - DNA, 21 bp, Artificial sequence
  SiRNA target sequence
ataacatattatccatgtagt

SEQ ID NO: 290081 - DNA, 21 bp, Artificial sequence
  SiRNA target sequence
taacatattatccatgtagtt

SEQ ID NO: 290082 - DNA, 21 bp, Artificial sequence
  SiRNA target sequence
aacatattatccatgtagttt

SEQ ID NO: 290083 - DNA, 21 bp, Artificial sequence
  SiRNA target sequence
acatattatccatgtagtttg

SEQ ID NO: 290084 - DNA, 21 bp, Artificial sequence
  SiRNA target sequence
catattatccatgtagtttga

SEQ ID NO: 290085 - DNA, 21 bp, Artificial sequence
  SiRNA target sequence
atattatccatgtagtttgaa

SEQ ID NO: 290086 - DNA, 21 bp, Artificial sequence
  SiRNA target sequence
tattatccatgtagtttgaat

SEQ ID NO: 290087 - DNA, 21 bp, Artificial sequence
  SiRNA target sequence
attatccatgtagtttgaatt

SEQ ID NO: 290088 - DNA, 21 bp, Artificial sequence
  SiRNA target sequence
ttatccatgtagtttgaattg

SEQ ID NO: 290089 - DNA, 21 bp, Artificial sequence
  SiRNA target sequence
tatccatgtagtttgaattgg

SEQ ID NO: 290090 - DNA, 21 bp, Artificial sequence
  SiRNA target sequence
atccatgtagtttgaattgga

SEQ ID NO: 290091 - DNA, 21 bp, Artificial sequence
  SiRNA target sequence
tccatgtagtttgaattggag

SEQ ID NO: 290092 - DNA, 21 bp, Artificial sequence
  SiRNA target sequence
ccatgtagtttgaattggagg

SEQ ID NO: 290093 - DNA, 21 bp, Artificial sequence
  SiRNA target sequence
catgtagtttgaattggaggg

SEQ ID NO: 290094 - DNA, 21 bp, Artificial sequence
  SiRNA target sequence
atgtagtttgaattggagggg

SEQ ID NO: 290095 - DNA, 21 bp, Artificial sequence
  SiRNA target sequence
tgtagtttgaattggaggggt

SEQ ID NO: 290096 - DNA, 21 bp, Artificial sequence
  SiRNA target sequence
gtagtttgaattggaggggta

SEQ ID NO: 290097 - DNA, 21 bp, Artificial sequence
  SiRNA target sequence
tagtttgaattggaggggtat

SEQ ID NO: 290098 - DNA, 21 bp, Artificial sequence
  SiRNA target sequence
agtttgaattggaggggtatg

SEQ ID NO: 290099 - DNA, 21 bp, Artificial sequence
  SiRNA target sequence
gtttgaattggaggggtatgc

SEQ ID NO: 290100 - DNA, 21 bp, Artificial sequence
  SiRNA target sequence
tttgaattggaggggtatgcc

SEQ ID NO: 290101 - DNA, 21 bp, Artificial sequence
  SiRNA target sequence
ttgaattggaggggtatgcca

SEQ ID NO: 290102 - DNA, 21 bp, Artificial sequence
  SiRNA target sequence
tgaattggaggggtatgccaa

SEQ ID NO: 290103 - DNA, 21 bp, Artificial sequence
  SiRNA target sequence
gaattggaggggtatgccaac

SEQ ID NO: 290104 - DNA, 21 bp, Artificial sequence
  SiRNA target sequence
aattggaggggtatgccaact

SEQ ID NO: 290105 - DNA, 21 bp, Artificial sequence
  SiRNA target sequence
attggaggggtatgccaacta

SEQ ID NO: 290106 - DNA, 21 bp, Artificial sequence
  SiRNA target sequence
ttggaggggtatgccaactat

SEQ ID NO: 290107 - DNA, 21 bp, Artificial sequence
  SiRNA target sequence
tggaggggtatgccaactata

SEQ ID NO: 290108 - DNA, 21 bp, Artificial sequence
  SiRNA target sequence
ggaggggtatgccaactatac

SEQ ID NO: 290109 - DNA, 21 bp, Artificial sequence
  SiRNA target sequence
gaggggtatgccaactatacc

SEQ ID NO: 290110 - DNA, 21 bp, Artificial sequence
  SiRNA target sequence
aggggtatgccaactatacct

SEQ ID NO: 290111 - DNA, 21 bp, Artificial sequence
  SiRNA target sequence
ggggtatgccaactataccta

SEQ ID NO: 290112 - DNA, 21 bp, Artificial sequence
  SiRNA target sequence
gggtatgccaactatacctat

SEQ ID NO: 290113 - DNA, 21 bp, Artificial sequence
  SiRNA target sequence
ggtatgccaactatacctatt

SEQ ID NO: 290114 - DNA, 21 bp, Artificial sequence
  SiRNA target sequence
gtatgccaactatacctattg

SEQ ID NO: 290115 - DNA, 21 bp, Artificial sequence
  SiRNA target sequence
tatgccaactatacctattgt

SEQ ID NO: 290116 - DNA, 21 bp, Artificial sequence
  SiRNA target sequence
atgccaactatacctattgtt

SEQ ID NO: 290117 - DNA, 21 bp, Artificial sequence
  SiRNA target sequence
tgccaactatacctattgttt

SEQ ID NO: 290118 - DNA, 21 bp, Artificial sequence
  SiRNA target sequence
gccaactatacctattgttta

SEQ ID NO: 290119 - DNA, 21 bp, Artificial sequence
  SiRNA target sequence
ccaactatacctattgtttat

SEQ ID NO: 290120 - DNA, 21 bp, Artificial sequence
  SiRNA target sequence
caactatacctattgtttatg

SEQ ID NO: 290121 - DNA, 21 bp, Artificial sequence
  SiRNA target sequence
aactatacctattgtttatgt

SEQ ID NO: 290122 - DNA, 21 bp, Artificial sequence
  SiRNA target sequence
actatacctattgtttatgtt

SEQ ID NO: 290123 - DNA, 21 bp, Artificial sequence
  SiRNA target sequence
ctatacctattgtttatgttt

SEQ ID NO: 290124 - DNA, 21 bp, Artificial sequence
  SiRNA target sequence
tatacctattgtttatgtttc

SEQ ID NO: 290125 - DNA, 21 bp, Artificial sequence
  SiRNA target sequence
atacctattgtttatgtttca

SEQ ID NO: 290126 - DNA, 21 bp, Artificial sequence
  SiRNA target sequence
tacctattgtttatgtttcaa

SEQ ID NO: 290127 - DNA, 21 bp, Artificial sequence
  SiRNA target sequence
acctattgtttatgtttcaaa

SEQ ID NO: 290128 - DNA, 21 bp, Artificial sequence
  SiRNA target sequence
cctattgtttatgtttcaaaa

SEQ ID NO: 290129 - DNA, 21 bp, Artificial sequence
  SiRNA target sequence
ctattgtttatgtttcaaaac

SEQ ID NO: 290130 - DNA, 21 bp, Artificial sequence
  SiRNA target sequence
tattgtttatgtttcaaaaca

SEQ ID NO: 290131 - DNA, 21 bp, Artificial sequence
  SiRNA target sequence
attgtttatgtttcaaaacat

SEQ ID NO: 290132 - DNA, 21 bp, Artificial sequence
  SiRNA target sequence
ttgtttatgtttcaaaacatt

SEQ ID NO: 290133 - DNA, 21 bp, Artificial sequence
  SiRNA target sequence
tgtttatgtttcaaaacattt

SEQ ID NO: 290134 - DNA, 21 bp, Artificial sequence
  SiRNA target sequence
gtttatgtttcaaaacatttt

SEQ ID NO: 290135 - DNA, 21 bp, Artificial sequence
  SiRNA target sequence
tttatgtttcaaaacattttt

SEQ ID NO: 290136 - DNA, 21 bp, Artificial sequence
  SiRNA target sequence
ttatgtttcaaaacatttttg

SEQ ID NO: 290137 - DNA, 21 bp, Artificial sequence
  SiRNA target sequence
tatgtttcaaaacatttttgg

SEQ ID NO: 290138 - DNA, 21 bp, Artificial sequence
  SiRNA target sequence
atgtttcaaaacatttttggt

SEQ ID NO: 290139 - DNA, 21 bp, Artificial sequence
  SiRNA target sequence
tgtttcaaaacatttttggta

SEQ ID NO: 290140 - DNA, 21 bp, Artificial sequence
  SiRNA target sequence
gtttcaaaacatttttggtat

SEQ ID NO: 290141 - DNA, 21 bp, Artificial sequence
  SiRNA target sequence
tttcaaaacatttttggtatg

SEQ ID NO: 290142 - DNA, 21 bp, Artificial sequence
  SiRNA target sequence
ttcaaaacatttttggtatga

SEQ ID NO: 290143 - DNA, 21 bp, Artificial sequence
  SiRNA target sequence
tcaaaacatttttggtatgaa

SEQ ID NO: 290144 - DNA, 21 bp, Artificial sequence
  SiRNA target sequence
caaaacatttttggtatgaat

SEQ ID NO: 290145 - DNA, 21 bp, Artificial sequence
  SiRNA target sequence
aaaacatttttggtatgaatt

SEQ ID NO: 290146 - DNA, 21 bp, Artificial sequence
  SiRNA target sequence
aaacatttttggtatgaattg

SEQ ID NO: 290147 - DNA, 21 bp, Artificial sequence
  SiRNA target sequence
aacatttttggtatgaattgt

SEQ ID NO: 290148 - DNA, 21 bp, Artificial sequence
  SiRNA target sequence
acatttttggtatgaattgta

SEQ ID NO: 290149 - DNA, 21 bp, Artificial sequence
  SiRNA target sequence
catttttggtatgaattgtat

SEQ ID NO: 290150 - DNA, 21 bp, Artificial sequence
  SiRNA target sequence
atttttggtatgaattgtata

SEQ ID NO: 290151 - DNA, 21 bp, Artificial sequence
  SiRNA target sequence
tttttggtatgaattgtatag

SEQ ID NO: 290152 - DNA, 21 bp, Artificial sequence
  SiRNA target sequence
ttttggtatgaattgtataga

SEQ ID NO: 290153 - DNA, 21 bp, Artificial sequence
  SiRNA target sequence
tttggtatgaattgtatagaa

SEQ ID NO: 290154 - DNA, 21 bp, Artificial sequence
  SiRNA target sequence
ttggtatgaattgtatagaac

SEQ ID NO: 290155 - DNA, 21 bp, Artificial sequence
  SiRNA target sequence
tggtatgaattgtatagaact

SEQ ID NO: 290156 - DNA, 21 bp, Artificial sequence
  SiRNA target sequence
ggtatgaattgtatagaactg

SEQ ID NO: 290157 - DNA, 21 bp, Artificial sequence
  SiRNA target sequence
gtatgaattgtatagaactgg

SEQ ID NO: 290158 - DNA, 21 bp, Artificial sequence
  SiRNA target sequence
tatgaattgtatagaactggt

SEQ ID NO: 290159 - DNA, 21 bp, Artificial sequence
  SiRNA target sequence
atgaattgtatagaactggtt

SEQ ID NO: 290160 - DNA, 21 bp, Artificial sequence
  SiRNA target sequence
tgaattgtatagaactggttt

SEQ ID NO: 290161 - DNA, 21 bp, Artificial sequence
  SiRNA target sequence
gaattgtatagaactggtttt

SEQ ID NO: 290162 - DNA, 21 bp, Artificial sequence
  SiRNA target sequence
aattgtatagaactggttttt

SEQ ID NO: 290163 - DNA, 21 bp, Artificial sequence
  SiRNA target sequence
attgtatagaactggtttttt

SEQ ID NO: 290164 - DNA, 21 bp, Artificial sequence
  SiRNA target sequence
ttgtatagaactggtttttta

SEQ ID NO: 290165 - DNA, 21 bp, Artificial sequence
  SiRNA target sequence
tgtatagaactggttttttaa

SEQ ID NO: 290166 - DNA, 21 bp, Artificial sequence
  SiRNA target sequence
gtatagaactggttttttaaa

SEQ ID NO: 290167 - DNA, 21 bp, Artificial sequence
  SiRNA target sequence
tatagaactggttttttaaac

SEQ ID NO: 290168 - DNA, 21 bp, Artificial sequence
  SiRNA target sequence
atagaactggttttttaaaca

SEQ ID NO: 290169 - DNA, 21 bp, Artificial sequence
  SiRNA target sequence
tagaactggttttttaaacaa

SEQ ID NO: 290170 - DNA, 21 bp, Artificial sequence
  SiRNA target sequence
agaactggttttttaaacaag

SEQ ID NO: 290171 - DNA, 21 bp, Artificial sequence
  SiRNA target sequence
gaactggttttttaaacaagt

SEQ ID NO: 290172 - DNA, 21 bp, Artificial sequence
  SiRNA target sequence
aactggttttttaaacaagtt

SEQ ID NO: 290173 - DNA, 21 bp, Artificial sequence
  SiRNA target sequence
actggttttttaaacaagtta

SEQ ID NO: 290174 - DNA, 21 bp, Artificial sequence
  SiRNA target sequence
ctggttttttaaacaagttat

SEQ ID NO: 290175 - DNA, 21 bp, Artificial sequence
  SiRNA target sequence
tggttttttaaacaagttata

SEQ ID NO: 290176 - DNA, 21 bp, Artificial sequence
  SiRNA target sequence
ggttttttaaacaagttatat

SEQ ID NO: 290177 - DNA, 21 bp, Artificial sequence
  SiRNA target sequence
gttttttaaacaagttatatc

SEQ ID NO: 290178 - DNA, 21 bp, Artificial sequence
  SiRNA target sequence
ttttttaaacaagttatatca

SEQ ID NO: 290179 - DNA, 21 bp, Artificial sequence
  SiRNA target sequence
tttttaaacaagttatatcat

SEQ ID NO: 290180 - DNA, 21 bp, Artificial sequence
  SiRNA target sequence
ttttaaacaagttatatcatt

SEQ ID NO: 290181 - DNA, 21 bp, Artificial sequence
  SiRNA target sequence
tttaaacaagttatatcattg

SEQ ID NO: 290182 - DNA, 21 bp, Artificial sequence
  SiRNA target sequence
ttaaacaagttatatcattgt

SEQ ID NO: 290183 - DNA, 21 bp, Artificial sequence
  SiRNA target sequence
taaacaagttatatcattgtg

SEQ ID NO: 290184 - DNA, 21 bp, Artificial sequence
  SiRNA target sequence
aaacaagttatatcattgtgg

SEQ ID NO: 290185 - DNA, 21 bp, Artificial sequence
  SiRNA target sequence
aacaagttatatcattgtggc

SEQ ID NO: 290186 - DNA, 21 bp, Artificial sequence
  SiRNA target sequence
acaagttatatcattgtggct

SEQ ID NO: 290187 - DNA, 21 bp, Artificial sequence
  SiRNA target sequence
caagttatatcattgtggctc

SEQ ID NO: 290188 - DNA, 21 bp, Artificial sequence
  SiRNA target sequence
aagttatatcattgtggctca

SEQ ID NO: 290189 - DNA, 21 bp, Artificial sequence
  SiRNA target sequence
agttatatcattgtggctcat

SEQ ID NO: 290190 - DNA, 21 bp, Artificial sequence
  SiRNA target sequence
gttatatcattgtggctcatg

SEQ ID NO: 290191 - DNA, 21 bp, Artificial sequence
  SiRNA target sequence
ttatatcattgtggctcatgg

SEQ ID NO: 290192 - DNA, 21 bp, Artificial sequence
  SiRNA target sequence
tatatcattgtggctcatgga

SEQ ID NO: 290193 - DNA, 21 bp, Artificial sequence
  SiRNA target sequence
atatcattgtggctcatggac

SEQ ID NO: 290194 - DNA, 21 bp, Artificial sequence
  SiRNA target sequence
tatcattgtggctcatggact

SEQ ID NO: 290195 - DNA, 21 bp, Artificial sequence
  SiRNA target sequence
atcattgtggctcatggactg

SEQ ID NO: 290196 - DNA, 21 bp, Artificial sequence
  SiRNA target sequence
tcattgtggctcatggactga

SEQ ID NO: 290197 - DNA, 21 bp, Artificial sequence
  SiRNA target sequence
cattgtggctcatggactgac

SEQ ID NO: 290198 - DNA, 21 bp, Artificial sequence
  SiRNA target sequence
attgtggctcatggactgaca

SEQ ID NO: 290199 - DNA, 21 bp, Artificial sequence
  SiRNA target sequence
ttgtggctcatggactgacat

SEQ ID NO: 290200 - DNA, 21 bp, Artificial sequence
  SiRNA target sequence
tgtggctcatggactgacata

SEQ ID NO: 290201 - DNA, 21 bp, Artificial sequence
  SiRNA target sequence
gtggctcatggactgacatat

SEQ ID NO: 290202 - DNA, 21 bp, Artificial sequence
  SiRNA target sequence
tggctcatggactgacatatt

SEQ ID NO: 290203 - DNA, 21 bp, Artificial sequence
  SiRNA target sequence
ggctcatggactgacatattg

SEQ ID NO: 290204 - DNA, 21 bp, Artificial sequence
  SiRNA target sequence
gctcatggactgacatattgt

SEQ ID NO: 290205 - DNA, 21 bp, Artificial sequence
  SiRNA target sequence
ctcatggactgacatattgtt

SEQ ID NO: 290206 - DNA, 21 bp, Artificial sequence
  SiRNA target sequence
tcatggactgacatattgttg

SEQ ID NO: 290207 - DNA, 21 bp, Artificial sequence
  SiRNA target sequence
catggactgacatattgttgt

SEQ ID NO: 290208 - DNA, 21 bp, Artificial sequence
  SiRNA target sequence
atggactgacatattgttgtt

SEQ ID NO: 290209 - DNA, 21 bp, Artificial sequence
  SiRNA target sequence
tggactgacatattgttgttg

SEQ ID NO: 290210 - DNA, 21 bp, Artificial sequence
  SiRNA target sequence
ggactgacatattgttgttgt

SEQ ID NO: 290211 - DNA, 21 bp, Artificial sequence
  SiRNA target sequence
gactgacatattgttgttgtt

SEQ ID NO: 290212 - DNA, 21 bp, Artificial sequence
  SiRNA target sequence
actgacatattgttgttgttg

SEQ ID NO: 290213 - DNA, 21 bp, Artificial sequence
  SiRNA target sequence
ctgacatattgttgttgttgt

SEQ ID NO: 290214 - DNA, 21 bp, Artificial sequence
  SiRNA target sequence
tgacatattgttgttgttgtc

SEQ ID NO: 290215 - DNA, 21 bp, Artificial sequence
  SiRNA target sequence
gacatattgttgttgttgtct

SEQ ID NO: 290216 - DNA, 21 bp, Artificial sequence
  SiRNA target sequence
acatattgttgttgttgtctg

SEQ ID NO: 290217 - DNA, 21 bp, Artificial sequence
  SiRNA target sequence
catattgttgttgttgtctgg

SEQ ID NO: 290218 - DNA, 21 bp, Artificial sequence
  SiRNA target sequence
atattgttgttgttgtctgga

SEQ ID NO: 290219 - DNA, 21 bp, Artificial sequence
  SiRNA target sequence
tattgttgttgttgtctggag

SEQ ID NO: 290220 - DNA, 21 bp, Artificial sequence
  SiRNA target sequence
attgttgttgttgtctggaga

SEQ ID NO: 290221 - DNA, 21 bp, Artificial sequence
  SiRNA target sequence
ttgttgttgttgtctggagat

SEQ ID NO: 290222 - DNA, 21 bp, Artificial sequence
  SiRNA target sequence
tgttgttgttgtctggagatg

SEQ ID NO: 290223 - DNA, 21 bp, Artificial sequence
  SiRNA target sequence
gttgttgttgtctggagatgt

SEQ ID NO: 290224 - DNA, 21 bp, Artificial sequence
  SiRNA target sequence
ttgttgttgtctggagatgta

SEQ ID NO: 290225 - DNA, 21 bp, Artificial sequence
  SiRNA target sequence
tgttgttgtctggagatgtag

SEQ ID NO: 290226 - DNA, 21 bp, Artificial sequence
  SiRNA target sequence
gttgttgtctggagatgtaga

SEQ ID NO: 290227 - DNA, 21 bp, Artificial sequence
  SiRNA target sequence
ttgttgtctggagatgtagaa

SEQ ID NO: 290228 - DNA, 21 bp, Artificial sequence
  SiRNA target sequence
tgttgtctggagatgtagaaa

SEQ ID NO: 290229 - DNA, 21 bp, Artificial sequence
  SiRNA target sequence
gttgtctggagatgtagaaac

SEQ ID NO: 290230 - DNA, 21 bp, Artificial sequence
  SiRNA target sequence
ttgtctggagatgtagaaacc

SEQ ID NO: 290231 - DNA, 21 bp, Artificial sequence
  SiRNA target sequence
tgtctggagatgtagaaacca

SEQ ID NO: 290232 - DNA, 21 bp, Artificial sequence
  SiRNA target sequence
gtctggagatgtagaaaccaa

SEQ ID NO: 290233 - DNA, 21 bp, Artificial sequence
  SiRNA target sequence
tctggagatgtagaaaccaat

SEQ ID NO: 290234 - DNA, 21 bp, Artificial sequence
  SiRNA target sequence
ctggagatgtagaaaccaatc

SEQ ID NO: 290235 - DNA, 21 bp, Artificial sequence
  SiRNA target sequence
tggagatgtagaaaccaatcc

SEQ ID NO: 290236 - DNA, 21 bp, Artificial sequence
  SiRNA target sequence
ggagatgtagaaaccaatcca

SEQ ID NO: 290237 - DNA, 21 bp, Artificial sequence
  SiRNA target sequence
gagatgtagaaaccaatccag

SEQ ID NO: 290238 - DNA, 21 bp, Artificial sequence
  SiRNA target sequence
agatgtagaaaccaatccagg

SEQ ID NO: 290239 - DNA, 21 bp, Artificial sequence
  SiRNA target sequence
gatgtagaaaccaatccagga

SEQ ID NO: 290240 - DNA, 21 bp, Artificial sequence
  SiRNA target sequence
atgtagaaaccaatccaggac

SEQ ID NO: 290241 - DNA, 21 bp, Artificial sequence
  SiRNA target sequence
tgtagaaaccaatccaggacc

SEQ ID NO: 290242 - DNA, 21 bp, Artificial sequence
  SiRNA target sequence
gtagaaaccaatccaggacct

SEQ ID NO: 290243 - DNA, 21 bp, Artificial sequence
  SiRNA target sequence
tagaaaccaatccaggacctg

SEQ ID NO: 290244 - DNA, 21 bp, Artificial sequence
  SiRNA target sequence
agaaaccaatccaggacctgt

SEQ ID NO: 290245 - DNA, 21 bp, Artificial sequence
  SiRNA target sequence
gaaaccaatccaggacctgtt

SEQ ID NO: 290246 - DNA, 21 bp, Artificial sequence
  SiRNA target sequence
aaaccaatccaggacctgttg

SEQ ID NO: 290247 - DNA, 21 bp, Artificial sequence
  SiRNA target sequence
aaccaatccaggacctgttga

SEQ ID NO: 290248 - DNA, 21 bp, Artificial sequence
  SiRNA target sequence
accaatccaggacctgttgaa

SEQ ID NO: 290249 - DNA, 21 bp, Artificial sequence
  SiRNA target sequence
ccaatccaggacctgttgaaa

SEQ ID NO: 290250 - DNA, 21 bp, Artificial sequence
  SiRNA target sequence
caatccaggacctgttgaaac

SEQ ID NO: 290251 - DNA, 21 bp, Artificial sequence
  SiRNA target sequence
aatccaggacctgttgaaacg

SEQ ID NO: 290252 - DNA, 21 bp, Artificial sequence
  SiRNA target sequence
atccaggacctgttgaaacgt

SEQ ID NO: 290253 - DNA, 21 bp, Artificial sequence
  SiRNA target sequence
tccaggacctgttgaaacgta

SEQ ID NO: 290254 - DNA, 21 bp, Artificial sequence
  SiRNA target sequence
ccaggacctgttgaaacgtat

SEQ ID NO: 290255 - DNA, 21 bp, Artificial sequence
  SiRNA target sequence
caggacctgttgaaacgtata

SEQ ID NO: 290256 - DNA, 21 bp, Artificial sequence
  SiRNA target sequence
aggacctgttgaaacgtataa

SEQ ID NO: 290257 - DNA, 21 bp, Artificial sequence
  SiRNA target sequence
ggacctgttgaaacgtataaa

SEQ ID NO: 290258 - DNA, 21 bp, Artificial sequence
  SiRNA target sequence
gacctgttgaaacgtataaag

SEQ ID NO: 290259 - DNA, 21 bp, Artificial sequence
  SiRNA target sequence
acctgttgaaacgtataaaga

SEQ ID NO: 290260 - DNA, 21 bp, Artificial sequence
  SiRNA target sequence
cctgttgaaacgtataaagac

SEQ ID NO: 290261 - DNA, 21 bp, Artificial sequence
  SiRNA target sequence
ctgttgaaacgtataaagact

SEQ ID NO: 290262 - DNA, 21 bp, Artificial sequence
  SiRNA target sequence
tgttgaaacgtataaagactt

SEQ ID NO: 290263 - DNA, 21 bp, Artificial sequence
  SiRNA target sequence
gttgaaacgtataaagactta

SEQ ID NO: 290264 - DNA, 21 bp, Artificial sequence
  SiRNA target sequence
ttgaaacgtataaagacttat

SEQ ID NO: 290265 - DNA, 21 bp, Artificial sequence
  SiRNA target sequence
tgaaacgtataaagacttatg

SEQ ID NO: 290266 - DNA, 21 bp, Artificial sequence
  SiRNA target sequence
gaaacgtataaagacttatgc

SEQ ID NO: 290267 - DNA, 21 bp, Artificial sequence
  SiRNA target sequence
aaacgtataaagacttatgca

SEQ ID NO: 290268 - DNA, 21 bp, Artificial sequence
  SiRNA target sequence
aacgtataaagacttatgcag

SEQ ID NO: 290269 - DNA, 21 bp, Artificial sequence
  SiRNA target sequence
acgtataaagacttatgcaga

SEQ ID NO: 290270 - DNA, 21 bp, Artificial sequence
  SiRNA target sequence
cgtataaagacttatgcagaa

SEQ ID NO: 290271 - DNA, 21 bp, Artificial sequence
  SiRNA target sequence
gtataaagacttatgcagaag

SEQ ID NO: 290272 - DNA, 21 bp, Artificial sequence
  SiRNA target sequence
tataaagacttatgcagaagg

SEQ ID NO: 290273 - DNA, 21 bp, Artificial sequence
  SiRNA target sequence
ataaagacttatgcagaagga

SEQ ID NO: 290274 - DNA, 21 bp, Artificial sequence
  SiRNA target sequence
taaagacttatgcagaaggaa

SEQ ID NO: 290275 - DNA, 21 bp, Artificial sequence
  SiRNA target sequence
aaagacttatgcagaaggaaa

SEQ ID NO: 290276 - DNA, 21 bp, Artificial sequence
  SiRNA target sequence
aagacttatgcagaaggaaaa

SEQ ID NO: 290277 - DNA, 21 bp, Artificial sequence
  SiRNA target sequence
agacttatgcagaaggaaaaa

SEQ ID NO: 290278 - DNA, 21 bp, Artificial sequence
  SiRNA target sequence
gacttatgcagaaggaaaaat

SEQ ID NO: 290279 - DNA, 21 bp, Artificial sequence
  SiRNA target sequence
acttatgcagaaggaaaaata

SEQ ID NO: 290280 - DNA, 21 bp, Artificial sequence
  SiRNA target sequence
cttatgcagaaggaaaaatat

SEQ ID NO: 290281 - DNA, 21 bp, Artificial sequence
  SiRNA target sequence
ttatgcagaaggaaaaatatt

SEQ ID NO: 290282 - DNA, 21 bp, Artificial sequence
  SiRNA target sequence
tatgcagaaggaaaaatattc

SEQ ID NO: 290283 - DNA, 21 bp, Artificial sequence
  SiRNA target sequence
atgcagaaggaaaaatattcg

SEQ ID NO: 290284 - DNA, 21 bp, Artificial sequence
  SiRNA target sequence
tgcagaaggaaaaatattcgt

SEQ ID NO: 290285 - DNA, 21 bp, Artificial sequence
  SiRNA target sequence
gcagaaggaaaaatattcgta

SEQ ID NO: 290286 - DNA, 21 bp, Artificial sequence
  SiRNA target sequence
cagaaggaaaaatattcgtaa

SEQ ID NO: 290287 - DNA, 21 bp, Artificial sequence
  SiRNA target sequence
agaaggaaaaatattcgtaag

SEQ ID NO: 290288 - DNA, 21 bp, Artificial sequence
  SiRNA target sequence
gaaggaaaaatattcgtaaga

SEQ ID NO: 290289 - DNA, 21 bp, Artificial sequence
  SiRNA target sequence
aaggaaaaatattcgtaagag

SEQ ID NO: 290290 - DNA, 21 bp, Artificial sequence
  SiRNA target sequence
aggaaaaatattcgtaagaga

SEQ ID NO: 290291 - DNA, 21 bp, Artificial sequence
  SiRNA target sequence
ggaaaaatattcgtaagagaa

SEQ ID NO: 290292 - DNA, 21 bp, Artificial sequence
  SiRNA target sequence
gaaaaatattcgtaagagaaa

SEQ ID NO: 290293 - DNA, 21 bp, Artificial sequence
  SiRNA target sequence
aaaaatattcgtaagagaaaa

SEQ ID NO: 290294 - DNA, 21 bp, Artificial sequence
  SiRNA target sequence
aaaatattcgtaagagaaaat

SEQ ID NO: 290295 - DNA, 21 bp, Artificial sequence
  SiRNA target sequence
aaatattcgtaagagaaaatc

SEQ ID NO: 290296 - DNA, 21 bp, Artificial sequence
  SiRNA target sequence
aatattcgtaagagaaaatct

SEQ ID NO: 290297 - DNA, 21 bp, Artificial sequence
  SiRNA target sequence
atattcgtaagagaaaatctc

SEQ ID NO: 290298 - DNA, 21 bp, Artificial sequence
  SiRNA target sequence
tattcgtaagagaaaatctcg

SEQ ID NO: 290299 - DNA, 21 bp, Artificial sequence
  SiRNA target sequence
attcgtaagagaaaatctcga

SEQ ID NO: 290300 - DNA, 21 bp, Artificial sequence
  SiRNA target sequence
ttcgtaagagaaaatctcgaa

SEQ ID NO: 290301 - DNA, 21 bp, Artificial sequence
  SiRNA target sequence
tcgtaagagaaaatctcgaat

SEQ ID NO: 290302 - DNA, 21 bp, Artificial sequence
  SiRNA target sequence
cgtaagagaaaatctcgaatt

SEQ ID NO: 290303 - DNA, 21 bp, Artificial sequence
  SiRNA target sequence
gtaagagaaaatctcgaattc

SEQ ID NO: 290304 - DNA, 21 bp, Artificial sequence
  SiRNA target sequence
taagagaaaatctcgaattcg

SEQ ID NO: 290305 - DNA, 21 bp, Artificial sequence
  SiRNA target sequence
aagagaaaatctcgaattcga

SEQ ID NO: 290306 - DNA, 21 bp, Artificial sequence
  SiRNA target sequence
agagaaaatctcgaattcgag

SEQ ID NO: 290307 - DNA, 21 bp, Artificial sequence
  SiRNA target sequence
gagaaaatctcgaattcgaga

SEQ ID NO: 290308 - DNA, 21 bp, Artificial sequence
  SiRNA target sequence
agaaaatctcgaattcgagaa

SEQ ID NO: 290309 - DNA, 21 bp, Artificial sequence
  SiRNA target sequence
gaaaatctcgaattcgagaag

SEQ ID NO: 290310 - DNA, 21 bp, Artificial sequence
  SiRNA target sequence
aaaatctcgaattcgagaaga

SEQ ID NO: 290311 - DNA, 21 bp, Artificial sequence
  SiRNA target sequence
aaatctcgaattcgagaagaa

SEQ ID NO: 290312 - DNA, 21 bp, Artificial sequence
  SiRNA target sequence
aatctcgaattcgagaagaaa

SEQ ID NO: 290313 - DNA, 21 bp, Artificial sequence
  SiRNA target sequence
atctcgaattcgagaagaaat

SEQ ID NO: 290314 - DNA, 21 bp, Artificial sequence
  SiRNA target sequence
tctcgaattcgagaagaaatc

SEQ ID NO: 290315 - DNA, 21 bp, Artificial sequence
  SiRNA target sequence
ctcgaattcgagaagaaatca

SEQ ID NO: 290316 - DNA, 21 bp, Artificial sequence
  SiRNA target sequence
tcgaattcgagaagaaatcaa

SEQ ID NO: 290317 - DNA, 21 bp, Artificial sequence
  SiRNA target sequence
cgaattcgagaagaaatcaaa

SEQ ID NO: 290318 - DNA, 21 bp, Artificial sequence
  SiRNA target sequence
gaattcgagaagaaatcaaaa

SEQ ID NO: 290319 - DNA, 21 bp, Artificial sequence
  SiRNA target sequence
aattcgagaagaaatcaaaat

SEQ ID NO: 290320 - DNA, 21 bp, Artificial sequence
  SiRNA target sequence
attcgagaagaaatcaaaatg

SEQ ID NO: 290321 - DNA, 21 bp, Artificial sequence
  SiRNA target sequence
ttcgagaagaaatcaaaatgc

SEQ ID NO: 290322 - DNA, 21 bp, Artificial sequence
  SiRNA target sequence
tcgagaagaaatcaaaatgca

SEQ ID NO: 290323 - DNA, 21 bp, Artificial sequence
  SiRNA target sequence
cgagaagaaatcaaaatgcaa

SEQ ID NO: 290324 - DNA, 21 bp, Artificial sequence
  SiRNA target sequence
gagaagaaatcaaaatgcaac

SEQ ID NO: 290325 - DNA, 21 bp, Artificial sequence
  SiRNA target sequence
agaagaaatcaaaatgcaaca

SEQ ID NO: 290326 - DNA, 21 bp, Artificial sequence
  SiRNA target sequence
gaagaaatcaaaatgcaacaa

SEQ ID NO: 290327 - DNA, 21 bp, Artificial sequence
  SiRNA target sequence
aagaaatcaaaatgcaacaac

SEQ ID NO: 290328 - DNA, 21 bp, Artificial sequence
  SiRNA target sequence
agaaatcaaaatgcaacaaca

SEQ ID NO: 290329 - DNA, 21 bp, Artificial sequence
  SiRNA target sequence
gaaatcaaaatgcaacaacat

SEQ ID NO: 290330 - DNA, 21 bp, Artificial sequence
  SiRNA target sequence
aaatcaaaatgcaacaacata

SEQ ID NO: 290331 - DNA, 21 bp, Artificial sequence
  SiRNA target sequence
aatcaaaatgcaacaacatat

SEQ ID NO: 290332 - DNA, 21 bp, Artificial sequence
  SiRNA target sequence
atcaaaatgcaacaacatatt

SEQ ID NO: 290333 - DNA, 21 bp, Artificial sequence
  SiRNA target sequence
tcaaaatgcaacaacatattg

SEQ ID NO: 290334 - DNA, 21 bp, Artificial sequence
  SiRNA target sequence
caaaatgcaacaacatattga

SEQ ID NO: 290335 - DNA, 21 bp, Artificial sequence
  SiRNA target sequence
aaaatgcaacaacatattgat

SEQ ID NO: 290336 - DNA, 21 bp, Artificial sequence
  SiRNA target sequence
aaatgcaacaacatattgata

SEQ ID NO: 290337 - DNA, 21 bp, Artificial sequence
  SiRNA target sequence
aatgcaacaacatattgataa

SEQ ID NO: 290338 - DNA, 21 bp, Artificial sequence
  SiRNA target sequence
atgcaacaacatattgataag

SEQ ID NO: 290339 - DNA, 21 bp, Artificial sequence
  SiRNA target sequence
tgcaacaacatattgataaga

SEQ ID NO: 290340 - DNA, 21 bp, Artificial sequence
  SiRNA target sequence
gcaacaacatattgataagat

SEQ ID NO: 290341 - DNA, 21 bp, Artificial sequence
  SiRNA target sequence
caacaacatattgataagata

SEQ ID NO: 290342 - DNA, 21 bp, Artificial sequence
  SiRNA target sequence
aacaacatattgataagataa

SEQ ID NO: 290343 - DNA, 21 bp, Artificial sequence
  SiRNA target sequence
acaacatattgataagataat

SEQ ID NO: 290344 - DNA, 21 bp, Artificial sequence
  SiRNA target sequence
caacatattgataagataata

SEQ ID NO: 290345 - DNA, 21 bp, Artificial sequence
  SiRNA target sequence
aacatattgataagataatag

SEQ ID NO: 290346 - DNA, 21 bp, Artificial sequence
  SiRNA target sequence
acatattgataagataatagg

SEQ ID NO: 290347 - DNA, 21 bp, Artificial sequence
  SiRNA target sequence
catattgataagataataggg

SEQ ID NO: 290348 - DNA, 21 bp, Artificial sequence
  SiRNA target sequence
atattgataagataatagggc

SEQ ID NO: 290349 - DNA, 21 bp, Artificial sequence
  SiRNA target sequence
tattgataagataatagggca

SEQ ID NO: 290350 - DNA, 21 bp, Artificial sequence
  SiRNA target sequence
attgataagataatagggcag

SEQ ID NO: 290351 - DNA, 21 bp, Artificial sequence
  SiRNA target sequence
ttgataagataatagggcagg

SEQ ID NO: 290352 - DNA, 21 bp, Artificial sequence
  SiRNA target sequence
tgataagataatagggcagga

SEQ ID NO: 290353 - DNA, 21 bp, Artificial sequence
  SiRNA target sequence
gataagataatagggcaggag

SEQ ID NO: 290354 - DNA, 21 bp, Artificial sequence
  SiRNA target sequence
ataagataatagggcaggaga

SEQ ID NO: 290355 - DNA, 21 bp, Artificial sequence
  SiRNA target sequence
taagataatagggcaggagaa

SEQ ID NO: 290356 - DNA, 21 bp, Artificial sequence
  SiRNA target sequence
aagataatagggcaggagaat

SEQ ID NO: 290357 - DNA, 21 bp, Artificial sequence
  SiRNA target sequence
agataatagggcaggagaatg

SEQ ID NO: 290358 - DNA, 21 bp, Artificial sequence
  SiRNA target sequence
gataatagggcaggagaatga

SEQ ID NO: 290359 - DNA, 21 bp, Artificial sequence
  SiRNA target sequence
ataatagggcaggagaatgaa

SEQ ID NO: 290360 - DNA, 21 bp, Artificial sequence
  SiRNA target sequence
taatagggcaggagaatgaag

SEQ ID NO: 290361 - DNA, 21 bp, Artificial sequence
  SiRNA target sequence
aatagggcaggagaatgaaga

SEQ ID NO: 290362 - DNA, 21 bp, Artificial sequence
  SiRNA target sequence
atagggcaggagaatgaagag

SEQ ID NO: 290363 - DNA, 21 bp, Artificial sequence
  SiRNA target sequence
tagggcaggagaatgaagagt

SEQ ID NO: 290364 - DNA, 21 bp, Artificial sequence
  SiRNA target sequence
agggcaggagaatgaagagta

SEQ ID NO: 290365 - DNA, 21 bp, Artificial sequence
  SiRNA target sequence
gggcaggagaatgaagagtat

SEQ ID NO: 290366 - DNA, 21 bp, Artificial sequence
  SiRNA target sequence
ggcaggagaatgaagagtata

SEQ ID NO: 290367 - DNA, 21 bp, Artificial sequence
  SiRNA target sequence
gcaggagaatgaagagtataa

SEQ ID NO: 290368 - DNA, 21 bp, Artificial sequence
  SiRNA target sequence
caggagaatgaagagtataag

SEQ ID NO: 290369 - DNA, 21 bp, Artificial sequence
  SiRNA target sequence
aggagaatgaagagtataaga

SEQ ID NO: 290370 - DNA, 21 bp, Artificial sequence
  SiRNA target sequence
ggagaatgaagagtataagat

SEQ ID NO: 290371 - DNA, 21 bp, Artificial sequence
  SiRNA target sequence
gagaatgaagagtataagatt

SEQ ID NO: 290372 - DNA, 21 bp, Artificial sequence
  SiRNA target sequence
agaatgaagagtataagatta

SEQ ID NO: 290373 - DNA, 21 bp, Artificial sequence
  SiRNA target sequence
gaatgaagagtataagattat

SEQ ID NO: 290374 - DNA, 21 bp, Artificial sequence
  SiRNA target sequence
aatgaagagtataagattata

SEQ ID NO: 290375 - DNA, 21 bp, Artificial sequence
  SiRNA target sequence
atgaagagtataagattataa

SEQ ID NO: 290376 - DNA, 21 bp, Artificial sequence
  SiRNA target sequence
tgaagagtataagattataaa

SEQ ID NO: 290377 - DNA, 21 bp, Artificial sequence
  SiRNA target sequence
gaagagtataagattataaac

SEQ ID NO: 290378 - DNA, 21 bp, Artificial sequence
  SiRNA target sequence
aagagtataagattataaacg

SEQ ID NO: 290379 - DNA, 21 bp, Artificial sequence
  SiRNA target sequence
agagtataagattataaacgt

SEQ ID NO: 290380 - DNA, 21 bp, Artificial sequence
  SiRNA target sequence
gagtataagattataaacgtc

SEQ ID NO: 290381 - DNA, 21 bp, Artificial sequence
  SiRNA target sequence
agtataagattataaacgtca

SEQ ID NO: 290382 - DNA, 21 bp, Artificial sequence
  SiRNA target sequence
gtataagattataaacgtcaa

SEQ ID NO: 290383 - DNA, 21 bp, Artificial sequence
  SiRNA target sequence
tataagattataaacgtcaat

SEQ ID NO: 290384 - DNA, 21 bp, Artificial sequence
  SiRNA target sequence
ataagattataaacgtcaata

SEQ ID NO: 290385 - DNA, 21 bp, Artificial sequence
  SiRNA target sequence
taagattataaacgtcaatat

SEQ ID NO: 290386 - DNA, 21 bp, Artificial sequence
  SiRNA target sequence
aagattataaacgtcaatatg

SEQ ID NO: 290387 - DNA, 21 bp, Artificial sequence
  SiRNA target sequence
agattataaacgtcaatatgc

SEQ ID NO: 290388 - DNA, 21 bp, Artificial sequence
  SiRNA target sequence
gattataaacgtcaatatgca

SEQ ID NO: 290389 - DNA, 21 bp, Artificial sequence
  SiRNA target sequence
attataaacgtcaatatgcag

SEQ ID NO: 290390 - DNA, 21 bp, Artificial sequence
  SiRNA target sequence
ttataaacgtcaatatgcagg

SEQ ID NO: 290391 - DNA, 21 bp, Artificial sequence
  SiRNA target sequence
tataaacgtcaatatgcaggg

SEQ ID NO: 290392 - DNA, 21 bp, Artificial sequence
  SiRNA target sequence
ataaacgtcaatatgcaggga

SEQ ID NO: 290393 - DNA, 21 bp, Artificial sequence
  SiRNA target sequence
taaacgtcaatatgcagggaa

SEQ ID NO: 290394 - DNA, 21 bp, Artificial sequence
  SiRNA target sequence
aaacgtcaatatgcagggaat

SEQ ID NO: 290395 - DNA, 21 bp, Artificial sequence
  SiRNA target sequence
aacgtcaatatgcagggaatc

SEQ ID NO: 290396 - DNA, 21 bp, Artificial sequence
  SiRNA target sequence
acgtcaatatgcagggaatct

SEQ ID NO: 290397 - DNA, 21 bp, Artificial sequence
  SiRNA target sequence
cgtcaatatgcagggaatctt

SEQ ID NO: 290398 - DNA, 21 bp, Artificial sequence
  SiRNA target sequence
gtcaatatgcagggaatcttt

SEQ ID NO: 290399 - DNA, 21 bp, Artificial sequence
  SiRNA target sequence
tcaatatgcagggaatcttta

SEQ ID NO: 290400 - DNA, 21 bp, Artificial sequence
  SiRNA target sequence
caatatgcagggaatctttag

SEQ ID NO: 290401 - DNA, 21 bp, Artificial sequence
  SiRNA target sequence
aatatgcagggaatctttagt

SEQ ID NO: 290402 - DNA, 21 bp, Artificial sequence
  SiRNA target sequence
atatgcagggaatctttagtt

SEQ ID NO: 290403 - DNA, 21 bp, Artificial sequence
  SiRNA target sequence
tatgcagggaatctttagttt

SEQ ID NO: 290404 - DNA, 21 bp, Artificial sequence
  SiRNA target sequence
atgcagggaatctttagtttt

SEQ ID NO: 290405 - DNA, 21 bp, Artificial sequence
  SiRNA target sequence
tgcagggaatctttagtttta

SEQ ID NO: 290406 - DNA, 21 bp, Artificial sequence
  SiRNA target sequence
gcagggaatctttagttttaa

SEQ ID NO: 290407 - DNA, 21 bp, Artificial sequence
  SiRNA target sequence
cagggaatctttagttttaat

SEQ ID NO: 290408 - DNA, 21 bp, Artificial sequence
  SiRNA target sequence
agggaatctttagttttaatg

SEQ ID NO: 290409 - DNA, 21 bp, Artificial sequence
  SiRNA target sequence
gggaatctttagttttaatga

SEQ ID NO: 290410 - DNA, 21 bp, Artificial sequence
  SiRNA target sequence
ggaatctttagttttaatgaa

SEQ ID NO: 290411 - DNA, 21 bp, Artificial sequence
  SiRNA target sequence
gaatctttagttttaatgaag

SEQ ID NO: 290412 - DNA, 21 bp, Artificial sequence
  SiRNA target sequence
aatctttagttttaatgaaga

SEQ ID NO: 290413 - DNA, 21 bp, Artificial sequence
  SiRNA target sequence
atctttagttttaatgaagaa

SEQ ID NO: 290414 - DNA, 21 bp, Artificial sequence
  SiRNA target sequence
tctttagttttaatgaagaaa

SEQ ID NO: 290415 - DNA, 21 bp, Artificial sequence
  SiRNA target sequence
ctttagttttaatgaagaaaa

SEQ ID NO: 290416 - DNA, 21 bp, Artificial sequence
  SiRNA target sequence
tttagttttaatgaagaaaaa

SEQ ID NO: 290417 - DNA, 21 bp, Artificial sequence
  SiRNA target sequence
ttagttttaatgaagaaaaag

SEQ ID NO: 290418 - DNA, 21 bp, Artificial sequence
  SiRNA target sequence
tagttttaatgaagaaaaaga

SEQ ID NO: 290419 - DNA, 21 bp, Artificial sequence
  SiRNA target sequence
agttttaatgaagaaaaagaa

SEQ ID NO: 290420 - DNA, 21 bp, Artificial sequence
  SiRNA target sequence
gttttaatgaagaaaaagaaa

SEQ ID NO: 290421 - DNA, 21 bp, Artificial sequence
  SiRNA target sequence
ttttaatgaagaaaaagaaat

SEQ ID NO: 290422 - DNA, 21 bp, Artificial sequence
  SiRNA target sequence
tttaatgaagaaaaagaaata

SEQ ID NO: 290423 - DNA, 21 bp, Artificial sequence
  SiRNA target sequence
ttaatgaagaaaaagaaataa

SEQ ID NO: 290424 - DNA, 21 bp, Artificial sequence
  SiRNA target sequence
taatgaagaaaaagaaataat

SEQ ID NO: 290425 - DNA, 21 bp, Artificial sequence
  SiRNA target sequence
aatgaagaaaaagaaataatt

SEQ ID NO: 290426 - DNA, 21 bp, Artificial sequence
  SiRNA target sequence
atgaagaaaaagaaataatta

SEQ ID NO: 290427 - DNA, 21 bp, Artificial sequence
  SiRNA target sequence
tgaagaaaaagaaataattaa

SEQ ID NO: 290428 - DNA, 21 bp, Artificial sequence
  SiRNA target sequence
gaagaaaaagaaataattaaa

SEQ ID NO: 290429 - DNA, 21 bp, Artificial sequence
  SiRNA target sequence
aagaaaaagaaataattaaaa

SEQ ID NO: 290430 - DNA, 21 bp, Artificial sequence
  SiRNA target sequence
agaaaaagaaataattaaaag

SEQ ID NO: 290431 - DNA, 21 bp, Artificial sequence
  SiRNA target sequence
gaaaaagaaataattaaaagt

SEQ ID NO: 290432 - DNA, 21 bp, Artificial sequence
  SiRNA target sequence
aaaaagaaataattaaaagta

SEQ ID NO: 290433 - DNA, 21 bp, Artificial sequence
  SiRNA target sequence
aaaagaaataattaaaagtac

SEQ ID NO: 290434 - DNA, 21 bp, Artificial sequence
  SiRNA target sequence
aaagaaataattaaaagtacg

SEQ ID NO: 290435 - DNA, 21 bp, Artificial sequence
  SiRNA target sequence
aagaaataattaaaagtacgg

SEQ ID NO: 290436 - DNA, 21 bp, Artificial sequence
  SiRNA target sequence
agaaataattaaaagtacggc

SEQ ID NO: 290437 - DNA, 21 bp, Artificial sequence
  SiRNA target sequence
gaaataattaaaagtacggct

SEQ ID NO: 290438 - DNA, 21 bp, Artificial sequence
  SiRNA target sequence
aaataattaaaagtacggctt

SEQ ID NO: 290439 - DNA, 21 bp, Artificial sequence
  SiRNA target sequence
aataattaaaagtacggcttg

SEQ ID NO: 290440 - DNA, 21 bp, Artificial sequence
  SiRNA target sequence
ataattaaaagtacggcttgg

SEQ ID NO: 290441 - DNA, 21 bp, Artificial sequence
  SiRNA target sequence
taattaaaagtacggcttgga

SEQ ID NO: 290442 - DNA, 21 bp, Artificial sequence
  SiRNA target sequence
aattaaaagtacggcttggaa

SEQ ID NO: 290443 - DNA, 21 bp, Artificial sequence
  SiRNA target sequence
attaaaagtacggcttggaaa

SEQ ID NO: 290444 - DNA, 21 bp, Artificial sequence
  SiRNA target sequence
ttaaaagtacggcttggaaat

SEQ ID NO: 290445 - DNA, 21 bp, Artificial sequence
  SiRNA target sequence
taaaagtacggcttggaaatt

SEQ ID NO: 290446 - DNA, 21 bp, Artificial sequence
  SiRNA target sequence
aaaagtacggcttggaaattc

SEQ ID NO: 290447 - DNA, 21 bp, Artificial sequence
  SiRNA target sequence
aaagtacggcttggaaattca

SEQ ID NO: 290448 - DNA, 21 bp, Artificial sequence
  SiRNA target sequence
aagtacggcttggaaattcaa

SEQ ID NO: 290449 - DNA, 21 bp, Artificial sequence
  SiRNA target sequence
agtacggcttggaaattcaat

SEQ ID NO: 290450 - DNA, 21 bp, Artificial sequence
  SiRNA target sequence
gtacggcttggaaattcaata

SEQ ID NO: 290451 - DNA, 21 bp, Artificial sequence
  SiRNA target sequence
tacggcttggaaattcaatag

SEQ ID NO: 290452 - DNA, 21 bp, Artificial sequence
  SiRNA target sequence
acggcttggaaattcaatagc

SEQ ID NO: 290453 - DNA, 21 bp, Artificial sequence
  SiRNA target sequence
cggcttggaaattcaatagca

SEQ ID NO: 290454 - DNA, 21 bp, Artificial sequence
  SiRNA target sequence
ggcttggaaattcaatagcac

SEQ ID NO: 290455 - DNA, 21 bp, Artificial sequence
  SiRNA target sequence
gcttggaaattcaatagcact

SEQ ID NO: 290456 - DNA, 21 bp, Artificial sequence
  SiRNA target sequence
cttggaaattcaatagcactc

SEQ ID NO: 290457 - DNA, 21 bp, Artificial sequence
  SiRNA target sequence
ttggaaattcaatagcactct

SEQ ID NO: 290458 - DNA, 21 bp, Artificial sequence
  SiRNA target sequence
tggaaattcaatagcactcta

SEQ ID NO: 290459 - DNA, 21 bp, Artificial sequence
  SiRNA target sequence
ggaaattcaatagcactctag

SEQ ID NO: 290460 - DNA, 21 bp, Artificial sequence
  SiRNA target sequence
gaaattcaatagcactctaga

SEQ ID NO: 290461 - DNA, 21 bp, Artificial sequence
  SiRNA target sequence
aaattcaatagcactctagac

SEQ ID NO: 290462 - DNA, 21 bp, Artificial sequence
  SiRNA target sequence
aattcaatagcactctagaca

SEQ ID NO: 290463 - DNA, 21 bp, Artificial sequence
  SiRNA target sequence
attcaatagcactctagacaa

SEQ ID NO: 290464 - DNA, 21 bp, Artificial sequence
  SiRNA target sequence
ttcaatagcactctagacaaa

SEQ ID NO: 290465 - DNA, 21 bp, Artificial sequence
  SiRNA target sequence
tcaatagcactctagacaaaa

SEQ ID NO: 290466 - DNA, 21 bp, Artificial sequence
  SiRNA target sequence
caatagcactctagacaaaac

SEQ ID NO: 290467 - DNA, 21 bp, Artificial sequence
  SiRNA target sequence
aatagcactctagacaaaaca

SEQ ID NO: 290468 - DNA, 21 bp, Artificial sequence
  SiRNA target sequence
atagcactctagacaaaacaa

SEQ ID NO: 290469 - DNA, 21 bp, Artificial sequence
  SiRNA target sequence
tagcactctagacaaaacaaa

SEQ ID NO: 290470 - DNA, 21 bp, Artificial sequence
  SiRNA target sequence
agcactctagacaaaacaaat

SEQ ID NO: 290471 - DNA, 21 bp, Artificial sequence
  SiRNA target sequence
gcactctagacaaaacaaatt

SEQ ID NO: 290472 - DNA, 21 bp, Artificial sequence
  SiRNA target sequence
cactctagacaaaacaaattc

SEQ ID NO: 290473 - DNA, 21 bp, Artificial sequence
  SiRNA target sequence
actctagacaaaacaaattct

SEQ ID NO: 290474 - DNA, 21 bp, Artificial sequence
  SiRNA target sequence
ctctagacaaaacaaattcta

SEQ ID NO: 290475 - DNA, 21 bp, Artificial sequence
  SiRNA target sequence
tctagacaaaacaaattctat

SEQ ID NO: 290476 - DNA, 21 bp, Artificial sequence
  SiRNA target sequence
ctagacaaaacaaattctata

SEQ ID NO: 290477 - DNA, 21 bp, Artificial sequence
  SiRNA target sequence
tagacaaaacaaattctataa

SEQ ID NO: 290478 - DNA, 21 bp, Artificial sequence
  SiRNA target sequence
agacaaaacaaattctataat

SEQ ID NO: 290479 - DNA, 21 bp, Artificial sequence
  SiRNA target sequence
gacaaaacaaattctataata

SEQ ID NO: 290480 - DNA, 21 bp, Artificial sequence
  SiRNA target sequence
acaaaacaaattctataatag

SEQ ID NO: 290481 - DNA, 21 bp, Artificial sequence
  SiRNA target sequence
caaaacaaattctataataga

SEQ ID NO: 290482 - DNA, 21 bp, Artificial sequence
  SiRNA target sequence
aaaacaaattctataatagac

SEQ ID NO: 290483 - DNA, 21 bp, Artificial sequence
  SiRNA target sequence
aaacaaattctataatagaca

SEQ ID NO: 290484 - DNA, 21 bp, Artificial sequence
  SiRNA target sequence
aacaaattctataatagacaa

SEQ ID NO: 290485 - DNA, 21 bp, Artificial sequence
  SiRNA target sequence
acaaattctataatagacaat

SEQ ID NO: 290486 - DNA, 21 bp, Artificial sequence
  SiRNA target sequence
caaattctataatagacaatt

SEQ ID NO: 290487 - DNA, 21 bp, Artificial sequence
  SiRNA target sequence
aaattctataatagacaattt

SEQ ID NO: 290488 - DNA, 21 bp, Artificial sequence
  SiRNA target sequence
aattctataatagacaattta

SEQ ID NO: 290489 - DNA, 21 bp, Artificial sequence
  SiRNA target sequence
attctataatagacaatttaa

SEQ ID NO: 290490 - DNA, 21 bp, Artificial sequence
  SiRNA target sequence
ttctataatagacaatttaat

SEQ ID NO: 290491 - DNA, 21 bp, Artificial sequence
  SiRNA target sequence
tctataatagacaatttaata

SEQ ID NO: 290492 - DNA, 21 bp, Artificial sequence
  SiRNA target sequence
ctataatagacaatttaatac

SEQ ID NO: 290493 - DNA, 21 bp, Artificial sequence
  SiRNA target sequence
tataatagacaatttaatacc

SEQ ID NO: 290494 - DNA, 21 bp, Artificial sequence
  SiRNA target sequence
ataatagacaatttaataccc

SEQ ID NO: 290495 - DNA, 21 bp, Artificial sequence
  SiRNA target sequence
taatagacaatttaatacccc

SEQ ID NO: 290496 - DNA, 21 bp, Artificial sequence
  SiRNA target sequence
aatagacaatttaatacccca

SEQ ID NO: 290497 - DNA, 21 bp, Artificial sequence
  SiRNA target sequence
atagacaatttaataccccaa

SEQ ID NO: 290498 - DNA, 21 bp, Artificial sequence
  SiRNA target sequence
tagacaatttaataccccaat

SEQ ID NO: 290499 - DNA, 21 bp, Artificial sequence
  SiRNA target sequence
agacaatttaataccccaatt

SEQ ID NO: 290500 - DNA, 21 bp, Artificial sequence
  SiRNA target sequence
gacaatttaataccccaatta

SEQ ID NO: 290501 - DNA, 21 bp, Artificial sequence
  SiRNA target sequence
acaatttaataccccaattag

SEQ ID NO: 290502 - DNA, 21 bp, Artificial sequence
  SiRNA target sequence
caatttaataccccaattaga

SEQ ID NO: 290503 - DNA, 21 bp, Artificial sequence
  SiRNA target sequence
aatttaataccccaattagaa

SEQ ID NO: 290504 - DNA, 21 bp, Artificial sequence
  SiRNA target sequence
atttaataccccaattagaag

SEQ ID NO: 290505 - DNA, 21 bp, Artificial sequence
  SiRNA target sequence
tttaataccccaattagaaga

SEQ ID NO: 290506 - DNA, 21 bp, Artificial sequence
  SiRNA target sequence
ttaataccccaattagaagaa

SEQ ID NO: 290507 - DNA, 21 bp, Artificial sequence
  SiRNA target sequence
taataccccaattagaagaaa

SEQ ID NO: 290508 - DNA, 21 bp, Artificial sequence
  SiRNA target sequence
aataccccaattagaagaaac

SEQ ID NO: 290509 - DNA, 21 bp, Artificial sequence
  SiRNA target sequence
ataccccaattagaagaaact

SEQ ID NO: 290510 - DNA, 21 bp, Artificial sequence
  SiRNA target sequence
taccccaattagaagaaactt

SEQ ID NO: 290511 - DNA, 21 bp, Artificial sequence
  SiRNA target sequence
accccaattagaagaaacttt

SEQ ID NO: 290512 - DNA, 21 bp, Artificial sequence
  SiRNA target sequence
ccccaattagaagaaacttta

SEQ ID NO: 290513 - DNA, 21 bp, Artificial sequence
  SiRNA target sequence
cccaattagaagaaactttag

SEQ ID NO: 290514 - DNA, 21 bp, Artificial sequence
  SiRNA target sequence
ccaattagaagaaactttagc

SEQ ID NO: 290515 - DNA, 21 bp, Artificial sequence
  SiRNA target sequence
caattagaagaaactttagca

SEQ ID NO: 290516 - DNA, 21 bp, Artificial sequence
  SiRNA target sequence
aattagaagaaactttagcag

SEQ ID NO: 290517 - DNA, 21 bp, Artificial sequence
  SiRNA target sequence
attagaagaaactttagcagg

SEQ ID NO: 290518 - DNA, 21 bp, Artificial sequence
  SiRNA target sequence
ttagaagaaactttagcaggt

SEQ ID NO: 290519 - DNA, 21 bp, Artificial sequence
  SiRNA target sequence
tagaagaaactttagcaggtt

SEQ ID NO: 290520 - DNA, 21 bp, Artificial sequence
  SiRNA target sequence
agaagaaactttagcaggttt

SEQ ID NO: 290521 - DNA, 21 bp, Artificial sequence
  SiRNA target sequence
gaagaaactttagcaggtttc

SEQ ID NO: 290522 - DNA, 21 bp, Artificial sequence
  SiRNA target sequence
aagaaactttagcaggtttca

SEQ ID NO: 290523 - DNA, 21 bp, Artificial sequence
  SiRNA target sequence
agaaactttagcaggtttcag

SEQ ID NO: 290524 - DNA, 21 bp, Artificial sequence
  SiRNA target sequence
gaaactttagcaggtttcaga

SEQ ID NO: 290525 - DNA, 21 bp, Artificial sequence
  SiRNA target sequence
aaactttagcaggtttcagaa

SEQ ID NO: 290526 - DNA, 21 bp, Artificial sequence
  SiRNA target sequence
aactttagcaggtttcagaaa

SEQ ID NO: 290527 - DNA, 21 bp, Artificial sequence
  SiRNA target sequence
actttagcaggtttcagaaaa

SEQ ID NO: 290528 - DNA, 21 bp, Artificial sequence
  SiRNA target sequence
ctttagcaggtttcagaaaaa

SEQ ID NO: 290529 - DNA, 21 bp, Artificial sequence
  SiRNA target sequence
tttagcaggtttcagaaaaac

SEQ ID NO: 290530 - DNA, 21 bp, Artificial sequence
  SiRNA target sequence
ttagcaggtttcagaaaaaca

SEQ ID NO: 290531 - DNA, 21 bp, Artificial sequence
  SiRNA target sequence
tagcaggtttcagaaaaacat

SEQ ID NO: 290532 - DNA, 21 bp, Artificial sequence
  SiRNA target sequence
agcaggtttcagaaaaacata

SEQ ID NO: 290533 - DNA, 21 bp, Artificial sequence
  SiRNA target sequence
gcaggtttcagaaaaacatat

SEQ ID NO: 290534 - DNA, 21 bp, Artificial sequence
  SiRNA target sequence
caggtttcagaaaaacatatt

SEQ ID NO: 290535 - DNA, 21 bp, Artificial sequence
  SiRNA target sequence
aggtttcagaaaaacatattc

SEQ ID NO: 290536 - DNA, 21 bp, Artificial sequence
  SiRNA target sequence
ggtttcagaaaaacatattca

SEQ ID NO: 290537 - DNA, 21 bp, Artificial sequence
  SiRNA target sequence
gtttcagaaaaacatattcaa

SEQ ID NO: 290538 - DNA, 21 bp, Artificial sequence
  SiRNA target sequence
tttcagaaaaacatattcaaa

SEQ ID NO: 290539 - DNA, 21 bp, Artificial sequence
  SiRNA target sequence
ttcagaaaaacatattcaaaa

SEQ ID NO: 290540 - DNA, 21 bp, Artificial sequence
  SiRNA target sequence
tcagaaaaacatattcaaaat

SEQ ID NO: 290541 - DNA, 21 bp, Artificial sequence
  SiRNA target sequence
cagaaaaacatattcaaaatg

SEQ ID NO: 290542 - DNA, 21 bp, Artificial sequence
  SiRNA target sequence
agaaaaacatattcaaaatgt

SEQ ID NO: 290543 - DNA, 21 bp, Artificial sequence
  SiRNA target sequence
gaaaaacatattcaaaatgtg

SEQ ID NO: 290544 - DNA, 21 bp, Artificial sequence
  SiRNA target sequence
aaaaacatattcaaaatgtga

SEQ ID NO: 290545 - DNA, 21 bp, Artificial sequence
  SiRNA target sequence
aaaacatattcaaaatgtgaa

SEQ ID NO: 290546 - DNA, 21 bp, Artificial sequence
  SiRNA target sequence
aaacatattcaaaatgtgaat

SEQ ID NO: 290547 - DNA, 21 bp, Artificial sequence
  SiRNA target sequence
aacatattcaaaatgtgaatc

SEQ ID NO: 290548 - DNA, 21 bp, Artificial sequence
  SiRNA target sequence
acatattcaaaatgtgaatca

SEQ ID NO: 290549 - DNA, 21 bp, Artificial sequence
  SiRNA target sequence
catattcaaaatgtgaatcaa

SEQ ID NO: 290550 - DNA, 21 bp, Artificial sequence
  SiRNA target sequence
atattcaaaatgtgaatcaaa

SEQ ID NO: 290551 - DNA, 21 bp, Artificial sequence
  SiRNA target sequence
tattcaaaatgtgaatcaaaa

SEQ ID NO: 290552 - DNA, 21 bp, Artificial sequence
  SiRNA target sequence
attcaaaatgtgaatcaaaaa

SEQ ID NO: 290553 - DNA, 21 bp, Artificial sequence
  SiRNA target sequence
ttcaaaatgtgaatcaaaaat

SEQ ID NO: 290554 - DNA, 21 bp, Artificial sequence
  SiRNA target sequence
tcaaaatgtgaatcaaaaatt

SEQ ID NO: 290555 - DNA, 21 bp, Artificial sequence
  SiRNA target sequence
caaaatgtgaatcaaaaattt

SEQ ID NO: 290556 - DNA, 21 bp, Artificial sequence
  SiRNA target sequence
aaaatgtgaatcaaaaatttt

SEQ ID NO: 290557 - DNA, 21 bp, Artificial sequence
  SiRNA target sequence
aaatgtgaatcaaaaattttt

SEQ ID NO: 290558 - DNA, 21 bp, Artificial sequence
  SiRNA target sequence
aatgtgaatcaaaaatttttg

SEQ ID NO: 290559 - DNA, 21 bp, Artificial sequence
  SiRNA target sequence
atgtgaatcaaaaatttttgg

SEQ ID NO: 290560 - DNA, 21 bp, Artificial sequence
  SiRNA target sequence
tgtgaatcaaaaatttttggt

SEQ ID NO: 290561 - DNA, 21 bp, Artificial sequence
  SiRNA target sequence
gtgaatcaaaaatttttggta

SEQ ID NO: 290562 - DNA, 21 bp, Artificial sequence
  SiRNA target sequence
tgaatcaaaaatttttggtac

SEQ ID NO: 290563 - DNA, 21 bp, Artificial sequence
  SiRNA target sequence
gaatcaaaaatttttggtact

SEQ ID NO: 290564 - DNA, 21 bp, Artificial sequence
  SiRNA target sequence
aatcaaaaatttttggtacta

SEQ ID NO: 290565 - DNA, 21 bp, Artificial sequence
  SiRNA target sequence
atcaaaaatttttggtactat

SEQ ID NO: 290566 - DNA, 21 bp, Artificial sequence
  SiRNA target sequence
tcaaaaatttttggtactata

SEQ ID NO: 290567 - DNA, 21 bp, Artificial sequence
  SiRNA target sequence
caaaaatttttggtactataa

SEQ ID NO: 290568 - DNA, 21 bp, Artificial sequence
  SiRNA target sequence
aaaaatttttggtactataag

SEQ ID NO: 290569 - DNA, 21 bp, Artificial sequence
  SiRNA target sequence
aaaatttttggtactataagt

SEQ ID NO: 290570 - DNA, 21 bp, Artificial sequence
  SiRNA target sequence
aaatttttggtactataagtg

SEQ ID NO: 290571 - DNA, 21 bp, Artificial sequence
  SiRNA target sequence
aatttttggtactataagtgt

SEQ ID NO: 290572 - DNA, 21 bp, Artificial sequence
  SiRNA target sequence
atttttggtactataagtgtg

SEQ ID NO: 290573 - DNA, 21 bp, Artificial sequence
  SiRNA target sequence
tttttggtactataagtgtgg

SEQ ID NO: 290574 - DNA, 21 bp, Artificial sequence
  SiRNA target sequence
ttttggtactataagtgtggt

SEQ ID NO: 290575 - DNA, 21 bp, Artificial sequence
  SiRNA target sequence
tttggtactataagtgtggtt

SEQ ID NO: 290576 - DNA, 21 bp, Artificial sequence
  SiRNA target sequence
ttggtactataagtgtggttg

SEQ ID NO: 290577 - DNA, 21 bp, Artificial sequence
  SiRNA target sequence
tggtactataagtgtggttga

SEQ ID NO: 290578 - DNA, 21 bp, Artificial sequence
  SiRNA target sequence
ggtactataagtgtggttgat

SEQ ID NO: 290579 - DNA, 21 bp, Artificial sequence
  SiRNA target sequence
gtactataagtgtggttgatg

SEQ ID NO: 290580 - DNA, 21 bp, Artificial sequence
  SiRNA target sequence
tactataagtgtggttgatgt

SEQ ID NO: 290581 - DNA, 21 bp, Artificial sequence
  SiRNA target sequence
actataagtgtggttgatgtg

SEQ ID NO: 290582 - DNA, 21 bp, Artificial sequence
  SiRNA target sequence
ctataagtgtggttgatgtgt

SEQ ID NO: 290583 - DNA, 21 bp, Artificial sequence
  SiRNA target sequence
tataagtgtggttgatgtgtg

SEQ ID NO: 290584 - DNA, 21 bp, Artificial sequence
  SiRNA target sequence
ataagtgtggttgatgtgtgt

SEQ ID NO: 290585 - DNA, 21 bp, Artificial sequence
  SiRNA target sequence
taagtgtggttgatgtgtgtg

SEQ ID NO: 290586 - DNA, 21 bp, Artificial sequence
  SiRNA target sequence
aagtgtggttgatgtgtgtgt

SEQ ID NO: 290587 - DNA, 21 bp, Artificial sequence
  SiRNA target sequence
agtgtggttgatgtgtgtgta

SEQ ID NO: 290588 - DNA, 21 bp, Artificial sequence
  SiRNA target sequence
gtgtggttgatgtgtgtgtag

SEQ ID NO: 290589 - DNA, 21 bp, Artificial sequence
  SiRNA target sequence
tgtggttgatgtgtgtgtaga

SEQ ID NO: 290590 - DNA, 21 bp, Artificial sequence
  SiRNA target sequence
gtggttgatgtgtgtgtagat

SEQ ID NO: 290591 - DNA, 21 bp, Artificial sequence
  SiRNA target sequence
tggttgatgtgtgtgtagatt

SEQ ID NO: 290592 - DNA, 21 bp, Artificial sequence
  SiRNA target sequence
ggttgatgtgtgtgtagattt

SEQ ID NO: 290593 - DNA, 21 bp, Artificial sequence
  SiRNA target sequence
gttgatgtgtgtgtagatttg

SEQ ID NO: 290594 - DNA, 21 bp, Artificial sequence
  SiRNA target sequence
ttgatgtgtgtgtagatttga

SEQ ID NO: 290595 - DNA, 21 bp, Artificial sequence
  SiRNA target sequence
tgatgtgtgtgtagatttgat

SEQ ID NO: 290596 - DNA, 21 bp, Artificial sequence
  SiRNA target sequence
gatgtgtgtgtagatttgatt

SEQ ID NO: 290597 - DNA, 21 bp, Artificial sequence
  SiRNA target sequence
atgtgtgtgtagatttgatta

SEQ ID NO: 290598 - DNA, 21 bp, Artificial sequence
  SiRNA target sequence
tgtgtgtgtagatttgattag

SEQ ID NO: 290599 - DNA, 21 bp, Artificial sequence
  SiRNA target sequence
gtgtgtgtagatttgattagt

SEQ ID NO: 290600 - DNA, 21 bp, Artificial sequence
  SiRNA target sequence
tgtgtgtagatttgattagtg

SEQ ID NO: 290601 - DNA, 21 bp, Artificial sequence
  SiRNA target sequence
gtgtgtagatttgattagtgc

SEQ ID NO: 290602 - DNA, 21 bp, Artificial sequence
  SiRNA target sequence
tgtgtagatttgattagtgct

SEQ ID NO: 290603 - DNA, 21 bp, Artificial sequence
  SiRNA target sequence
gtgtagatttgattagtgctt

SEQ ID NO: 290604 - DNA, 21 bp, Artificial sequence
  SiRNA target sequence
tgtagatttgattagtgcttt

SEQ ID NO: 290605 - DNA, 21 bp, Artificial sequence
  SiRNA target sequence
gtagatttgattagtgcttta

SEQ ID NO: 290606 - DNA, 21 bp, Artificial sequence
  SiRNA target sequence
tagatttgattagtgctttat

SEQ ID NO: 290607 - DNA, 21 bp, Artificial sequence
  SiRNA target sequence
agatttgattagtgctttatt

SEQ ID NO: 290608 - DNA, 21 bp, Artificial sequence
  SiRNA target sequence
gatttgattagtgctttatta

SEQ ID NO: 290609 - DNA, 21 bp, Artificial sequence
  SiRNA target sequence
atttgattagtgctttattac

SEQ ID NO: 290610 - DNA, 21 bp, Artificial sequence
  SiRNA target sequence
tttgattagtgctttattaca

SEQ ID NO: 290611 - DNA, 21 bp, Artificial sequence
  SiRNA target sequence
ttgattagtgctttattacaa

SEQ ID NO: 290612 - DNA, 21 bp, Artificial sequence
  SiRNA target sequence
tgattagtgctttattacaag

SEQ ID NO: 290613 - DNA, 21 bp, Artificial sequence
  SiRNA target sequence
gattagtgctttattacaagt

SEQ ID NO: 290614 - DNA, 21 bp, Artificial sequence
  SiRNA target sequence
attagtgctttattacaagtt

SEQ ID NO: 290615 - DNA, 21 bp, Artificial sequence
  SiRNA target sequence
ttagtgctttattacaagtta

SEQ ID NO: 290616 - DNA, 21 bp, Artificial sequence
  SiRNA target sequence
tagtgctttattacaagttag

SEQ ID NO: 290617 - DNA, 21 bp, Artificial sequence
  SiRNA target sequence
agtgctttattacaagttagt

SEQ ID NO: 290618 - DNA, 21 bp, Artificial sequence
  SiRNA target sequence
gtgctttattacaagttagtt

SEQ ID NO: 290619 - DNA, 21 bp, Artificial sequence
  SiRNA target sequence
tgctttattacaagttagttt

SEQ ID NO: 290620 - DNA, 21 bp, Artificial sequence
  SiRNA target sequence
gctttattacaagttagtttt

SEQ ID NO: 290621 - DNA, 21 bp, Artificial sequence
  SiRNA target sequence
ctttattacaagttagttttg

SEQ ID NO: 290622 - DNA, 21 bp, Artificial sequence
  SiRNA target sequence
tttattacaagttagttttgc

SEQ ID NO: 290623 - DNA, 21 bp, Artificial sequence
  SiRNA target sequence
ttattacaagttagttttgct

SEQ ID NO: 290624 - DNA, 21 bp, Artificial sequence
  SiRNA target sequence
tattacaagttagttttgcta

SEQ ID NO: 290625 - DNA, 21 bp, Artificial sequence
  SiRNA target sequence
attacaagttagttttgctaa

SEQ ID NO: 290626 - DNA, 21 bp, Artificial sequence
  SiRNA target sequence
ttacaagttagttttgctaaa

SEQ ID NO: 290627 - DNA, 21 bp, Artificial sequence
  SiRNA target sequence
tacaagttagttttgctaaac

SEQ ID NO: 290628 - DNA, 21 bp, Artificial sequence
  SiRNA target sequence
acaagttagttttgctaaacc

SEQ ID NO: 290629 - DNA, 21 bp, Artificial sequence
  SiRNA target sequence
caagttagttttgctaaacca

SEQ ID NO: 290630 - DNA, 21 bp, Artificial sequence
  SiRNA target sequence
aagttagttttgctaaaccag

SEQ ID NO: 290631 - DNA, 21 bp, Artificial sequence
  SiRNA target sequence
agttagttttgctaaaccagc

SEQ ID NO: 290632 - DNA, 21 bp, Artificial sequence
  SiRNA target sequence
gttagttttgctaaaccagca

SEQ ID NO: 290633 - DNA, 21 bp, Artificial sequence
  SiRNA target sequence
ttagttttgctaaaccagcaa

SEQ ID NO: 290634 - DNA, 21 bp, Artificial sequence
  SiRNA target sequence
tagttttgctaaaccagcaat

SEQ ID NO: 290635 - DNA, 21 bp, Artificial sequence
  SiRNA target sequence
agttttgctaaaccagcaatg

SEQ ID NO: 290636 - DNA, 21 bp, Artificial sequence
  SiRNA target sequence
gttttgctaaaccagcaatga

SEQ ID NO: 290637 - DNA, 21 bp, Artificial sequence
  SiRNA target sequence
ttttgctaaaccagcaatgaa

SEQ ID NO: 290638 - DNA, 21 bp, Artificial sequence
  SiRNA target sequence
tttgctaaaccagcaatgaag

SEQ ID NO: 290639 - DNA, 21 bp, Artificial sequence
  SiRNA target sequence
ttgctaaaccagcaatgaaga

SEQ ID NO: 290640 - DNA, 21 bp, Artificial sequence
  SiRNA target sequence
tgctaaaccagcaatgaagat

SEQ ID NO: 290641 - DNA, 21 bp, Artificial sequence
  SiRNA target sequence
gctaaaccagcaatgaagata

SEQ ID NO: 290642 - DNA, 21 bp, Artificial sequence
  SiRNA target sequence
ctaaaccagcaatgaagatag

SEQ ID NO: 290643 - DNA, 21 bp, Artificial sequence
  SiRNA target sequence
taaaccagcaatgaagatagc

SEQ ID NO: 290644 - DNA, 21 bp, Artificial sequence
  SiRNA target sequence
aaaccagcaatgaagatagct

SEQ ID NO: 290645 - DNA, 21 bp, Artificial sequence
  SiRNA target sequence
aaccagcaatgaagatagctt

SEQ ID NO: 290646 - DNA, 21 bp, Artificial sequence
  SiRNA target sequence
accagcaatgaagatagcttc

SEQ ID NO: 290647 - DNA, 21 bp, Artificial sequence
  SiRNA target sequence
ccagcaatgaagatagcttca

SEQ ID NO: 290648 - DNA, 21 bp, Artificial sequence
  SiRNA target sequence
cagcaatgaagatagcttcat

SEQ ID NO: 290649 - DNA, 21 bp, Artificial sequence
  SiRNA target sequence
agcaatgaagatagcttcatt

SEQ ID NO: 290650 - DNA, 21 bp, Artificial sequence
  SiRNA target sequence
gcaatgaagatagcttcatta

SEQ ID NO: 290651 - DNA, 21 bp, Artificial sequence
  SiRNA target sequence
caatgaagatagcttcattag

SEQ ID NO: 290652 - DNA, 21 bp, Artificial sequence
  SiRNA target sequence
aatgaagatagcttcattagc

SEQ ID NO: 290653 - DNA, 21 bp, Artificial sequence
  SiRNA target sequence
atgaagatagcttcattagca

SEQ ID NO: 290654 - DNA, 21 bp, Artificial sequence
  SiRNA target sequence
tgaagatagcttcattagcag

SEQ ID NO: 290655 - DNA, 21 bp, Artificial sequence
  SiRNA target sequence
gaagatagcttcattagcagt

SEQ ID NO: 290656 - DNA, 21 bp, Artificial sequence
  SiRNA target sequence
aagatagcttcattagcagta

SEQ ID NO: 290657 - DNA, 21 bp, Artificial sequence
  SiRNA target sequence
agatagcttcattagcagtag

SEQ ID NO: 290658 - DNA, 21 bp, Artificial sequence
  SiRNA target sequence
gatagcttcattagcagtaga

SEQ ID NO: 290659 - DNA, 21 bp, Artificial sequence
  SiRNA target sequence
atagcttcattagcagtagaa

SEQ ID NO: 290660 - DNA, 21 bp, Artificial sequence
  SiRNA target sequence
tagcttcattagcagtagaag

SEQ ID NO: 290661 - DNA, 21 bp, Artificial sequence
  SiRNA target sequence
agcttcattagcagtagaagt

SEQ ID NO: 290662 - DNA, 21 bp, Artificial sequence
  SiRNA target sequence
gcttcattagcagtagaagtt

SEQ ID NO: 290663 - DNA, 21 bp, Artificial sequence
  SiRNA target sequence
cttcattagcagtagaagttt

SEQ ID NO: 290664 - DNA, 21 bp, Artificial sequence
  SiRNA target sequence
ttcattagcagtagaagtttt

SEQ ID NO: 290665 - DNA, 21 bp, Artificial sequence
  SiRNA target sequence
tcattagcagtagaagttttt

SEQ ID NO: 290666 - DNA, 21 bp, Artificial sequence
  SiRNA target sequence
cattagcagtagaagttttta

SEQ ID NO: 290667 - DNA, 21 bp, Artificial sequence
  SiRNA target sequence
attagcagtagaagtttttag

SEQ ID NO: 290668 - DNA, 21 bp, Artificial sequence
  SiRNA target sequence
ttagcagtagaagtttttaga

SEQ ID NO: 290669 - DNA, 21 bp, Artificial sequence
  SiRNA target sequence
tagcagtagaagtttttagat

SEQ ID NO: 290670 - DNA, 21 bp, Artificial sequence
  SiRNA target sequence
agcagtagaagtttttagatt

SEQ ID NO: 290671 - DNA, 21 bp, Artificial sequence
  SiRNA target sequence
gcagtagaagtttttagatta

SEQ ID NO: 290672 - DNA, 21 bp, Artificial sequence
  SiRNA target sequence
cagtagaagtttttagattaa

SEQ ID NO: 290673 - DNA, 21 bp, Artificial sequence
  SiRNA target sequence
agtagaagtttttagattaat

SEQ ID NO: 290674 - DNA, 21 bp, Artificial sequence
  SiRNA target sequence
gtagaagtttttagattaatt

SEQ ID NO: 290675 - DNA, 21 bp, Artificial sequence
  SiRNA target sequence
tagaagtttttagattaatta

SEQ ID NO: 290676 - DNA, 21 bp, Artificial sequence
  SiRNA target sequence
agaagtttttagattaattaa

SEQ ID NO: 290677 - DNA, 21 bp, Artificial sequence
  SiRNA target sequence
gaagtttttagattaattaag

SEQ ID NO: 290678 - DNA, 21 bp, Artificial sequence
  SiRNA target sequence
aagtttttagattaattaaga

SEQ ID NO: 290679 - DNA, 21 bp, Artificial sequence
  SiRNA target sequence
agtttttagattaattaagaa

SEQ ID NO: 290680 - DNA, 21 bp, Artificial sequence
  SiRNA target sequence
gtttttagattaattaagaaa

SEQ ID NO: 290681 - DNA, 21 bp, Artificial sequence
  SiRNA target sequence
tttttagattaattaagaaat

SEQ ID NO: 290682 - DNA, 21 bp, Artificial sequence
  SiRNA target sequence
ttttagattaattaagaaata

SEQ ID NO: 290683 - DNA, 21 bp, Artificial sequence
  SiRNA target sequence
tttagattaattaagaaatat

SEQ ID NO: 290684 - DNA, 21 bp, Artificial sequence
  SiRNA target sequence
ttagattaattaagaaatatg

SEQ ID NO: 290685 - DNA, 21 bp, Artificial sequence
  SiRNA target sequence
tagattaattaagaaatatgt

SEQ ID NO: 290686 - DNA, 21 bp, Artificial sequence
  SiRNA target sequence
agattaattaagaaatatgtt

SEQ ID NO: 290687 - DNA, 21 bp, Artificial sequence
  SiRNA target sequence
gattaattaagaaatatgtta

SEQ ID NO: 290688 - DNA, 21 bp, Artificial sequence
  SiRNA target sequence
attaattaagaaatatgttag

SEQ ID NO: 290689 - DNA, 21 bp, Artificial sequence
  SiRNA target sequence
ttaattaagaaatatgttagc

SEQ ID NO: 290690 - DNA, 21 bp, Artificial sequence
  SiRNA target sequence
taattaagaaatatgttagca

SEQ ID NO: 290691 - DNA, 21 bp, Artificial sequence
  SiRNA target sequence
aattaagaaatatgttagcaa

SEQ ID NO: 290692 - DNA, 21 bp, Artificial sequence
  SiRNA target sequence
attaagaaatatgttagcaat

SEQ ID NO: 290693 - DNA, 21 bp, Artificial sequence
  SiRNA target sequence
ttaagaaatatgttagcaata

SEQ ID NO: 290694 - DNA, 21 bp, Artificial sequence
  SiRNA target sequence
taagaaatatgttagcaatat

SEQ ID NO: 290695 - DNA, 21 bp, Artificial sequence
  SiRNA target sequence
aagaaatatgttagcaatatt

SEQ ID NO: 290696 - DNA, 21 bp, Artificial sequence
  SiRNA target sequence
agaaatatgttagcaatatta

SEQ ID NO: 290697 - DNA, 21 bp, Artificial sequence
  SiRNA target sequence
gaaatatgttagcaatattaa

SEQ ID NO: 290698 - DNA, 21 bp, Artificial sequence
  SiRNA target sequence
aaatatgttagcaatattaat

SEQ ID NO: 290699 - DNA, 21 bp, Artificial sequence
  SiRNA target sequence
aatatgttagcaatattaata

SEQ ID NO: 290700 - DNA, 21 bp, Artificial sequence
  SiRNA target sequence
atatgttagcaatattaatat

SEQ ID NO: 290701 - DNA, 21 bp, Artificial sequence
  SiRNA target sequence
tatgttagcaatattaatatc

SEQ ID NO: 290702 - DNA, 21 bp, Artificial sequence
  SiRNA target sequence
atgttagcaatattaatatca

SEQ ID NO: 290703 - DNA, 21 bp, Artificial sequence
  SiRNA target sequence
tgttagcaatattaatatcaa

SEQ ID NO: 290704 - DNA, 21 bp, Artificial sequence
  SiRNA target sequence
gttagcaatattaatatcaat

SEQ ID NO: 290705 - DNA, 21 bp, Artificial sequence
  SiRNA target sequence
ttagcaatattaatatcaata

SEQ ID NO: 290706 - DNA, 21 bp, Artificial sequence
  SiRNA target sequence
tagcaatattaatatcaatat

SEQ ID NO: 290707 - DNA, 21 bp, Artificial sequence
  SiRNA target sequence
agcaatattaatatcaatatc

SEQ ID NO: 290708 - DNA, 21 bp, Artificial sequence
  SiRNA target sequence
gcaatattaatatcaatatcg

SEQ ID NO: 290709 - DNA, 21 bp, Artificial sequence
  SiRNA target sequence
caatattaatatcaatatcga

SEQ ID NO: 290710 - DNA, 21 bp, Artificial sequence
  SiRNA target sequence
aatattaatatcaatatcgat

SEQ ID NO: 290711 - DNA, 21 bp, Artificial sequence
  SiRNA target sequence
atattaatatcaatatcgata

SEQ ID NO: 290712 - DNA, 21 bp, Artificial sequence
  SiRNA target sequence
tattaatatcaatatcgataa

SEQ ID NO: 290713 - DNA, 21 bp, Artificial sequence
  SiRNA target sequence
attaatatcaatatcgataag

SEQ ID NO: 290714 - DNA, 21 bp, Artificial sequence
  SiRNA target sequence
ttaatatcaatatcgataaga

SEQ ID NO: 290715 - DNA, 21 bp, Artificial sequence
  SiRNA target sequence
taatatcaatatcgataagat

SEQ ID NO: 290716 - DNA, 21 bp, Artificial sequence
  SiRNA target sequence
aatatcaatatcgataagatt

SEQ ID NO: 290717 - DNA, 21 bp, Artificial sequence
  SiRNA target sequence
atatcaatatcgataagatta

SEQ ID NO: 290718 - DNA, 21 bp, Artificial sequence
  SiRNA target sequence
tatcaatatcgataagattaa

SEQ ID NO: 290719 - DNA, 21 bp, Artificial sequence
  SiRNA target sequence
atcaatatcgataagattaaa

SEQ ID NO: 290720 - DNA, 21 bp, Artificial sequence
  SiRNA target sequence
tcaatatcgataagattaaag

SEQ ID NO: 290721 - DNA, 21 bp, Artificial sequence
  SiRNA target sequence
caatatcgataagattaaaga

SEQ ID NO: 290722 - DNA, 21 bp, Artificial sequence
  SiRNA target sequence
aatatcgataagattaaagaa

SEQ ID NO: 290723 - DNA, 21 bp, Artificial sequence
  SiRNA target sequence
atatcgataagattaaagaat

SEQ ID NO: 290724 - DNA, 21 bp, Artificial sequence
  SiRNA target sequence
tatcgataagattaaagaatt

SEQ ID NO: 290725 - DNA, 21 bp, Artificial sequence
  SiRNA target sequence
atcgataagattaaagaattg

SEQ ID NO: 290726 - DNA, 21 bp, Artificial sequence
  SiRNA target sequence
tcgataagattaaagaattgt

SEQ ID NO: 290727 - DNA, 21 bp, Artificial sequence
  SiRNA target sequence
cgataagattaaagaattgtt

SEQ ID NO: 290728 - DNA, 21 bp, Artificial sequence
  SiRNA target sequence
gataagattaaagaattgtta

SEQ ID NO: 290729 - DNA, 21 bp, Artificial sequence
  SiRNA target sequence
ataagattaaagaattgttat

SEQ ID NO: 290730 - DNA, 21 bp, Artificial sequence
  SiRNA target sequence
taagattaaagaattgttatc

SEQ ID NO: 290731 - DNA, 21 bp, Artificial sequence
  SiRNA target sequence
aagattaaagaattgttatct

SEQ ID NO: 290732 - DNA, 21 bp, Artificial sequence
  SiRNA target sequence
agattaaagaattgttatctt

SEQ ID NO: 290733 - DNA, 21 bp, Artificial sequence
  SiRNA target sequence
gattaaagaattgttatctta

SEQ ID NO: 290734 - DNA, 21 bp, Artificial sequence
  SiRNA target sequence
attaaagaattgttatcttat

SEQ ID NO: 290735 - DNA, 21 bp, Artificial sequence
  SiRNA target sequence
ttaaagaattgttatcttatg

SEQ ID NO: 290736 - DNA, 21 bp, Artificial sequence
  SiRNA target sequence
taaagaattgttatcttatgg

SEQ ID NO: 290737 - DNA, 21 bp, Artificial sequence
  SiRNA target sequence
aaagaattgttatcttatggt

SEQ ID NO: 290738 - DNA, 21 bp, Artificial sequence
  SiRNA target sequence
aagaattgttatcttatggta

SEQ ID NO: 290739 - DNA, 21 bp, Artificial sequence
  SiRNA target sequence
agaattgttatcttatggtaa

SEQ ID NO: 290740 - DNA, 21 bp, Artificial sequence
  SiRNA target sequence
gaattgttatcttatggtaag

SEQ ID NO: 290741 - DNA, 21 bp, Artificial sequence
  SiRNA target sequence
aattgttatcttatggtaagg

SEQ ID NO: 290742 - DNA, 21 bp, Artificial sequence
  SiRNA target sequence
attgttatcttatggtaaggt

SEQ ID NO: 290743 - DNA, 21 bp, Artificial sequence
  SiRNA target sequence
ttgttatcttatggtaaggta

SEQ ID NO: 290744 - DNA, 21 bp, Artificial sequence
  SiRNA target sequence
tgttatcttatggtaaggtag

SEQ ID NO: 290745 - DNA, 21 bp, Artificial sequence
  SiRNA target sequence
gttatcttatggtaaggtagc

SEQ ID NO: 290746 - DNA, 21 bp, Artificial sequence
  SiRNA target sequence
ttatcttatggtaaggtagct

SEQ ID NO: 290747 - DNA, 21 bp, Artificial sequence
  SiRNA target sequence
tatcttatggtaaggtagctc

SEQ ID NO: 290748 - DNA, 21 bp, Artificial sequence
  SiRNA target sequence
atcttatggtaaggtagctct

SEQ ID NO: 290749 - DNA, 21 bp, Artificial sequence
  SiRNA target sequence
tcttatggtaaggtagctctt

SEQ ID NO: 290750 - DNA, 21 bp, Artificial sequence
  SiRNA target sequence
cttatggtaaggtagctctta

SEQ ID NO: 290751 - DNA, 21 bp, Artificial sequence
  SiRNA target sequence
ttatggtaaggtagctcttaa

SEQ ID NO: 290752 - DNA, 21 bp, Artificial sequence
  SiRNA target sequence
tatggtaaggtagctcttaac

SEQ ID NO: 290753 - DNA, 21 bp, Artificial sequence
  SiRNA target sequence
atggtaaggtagctcttaaca

SEQ ID NO: 290754 - DNA, 21 bp, Artificial sequence
  SiRNA target sequence
tggtaaggtagctcttaacaa

SEQ ID NO: 290755 - DNA, 21 bp, Artificial sequence
  SiRNA target sequence
ggtaaggtagctcttaacaat

SEQ ID NO: 290756 - DNA, 21 bp, Artificial sequence
  SiRNA target sequence
gtaaggtagctcttaacaata

SEQ ID NO: 290757 - DNA, 21 bp, Artificial sequence
  SiRNA target sequence
taaggtagctcttaacaataa

SEQ ID NO: 290758 - DNA, 21 bp, Artificial sequence
  SiRNA target sequence
aaggtagctcttaacaataat

SEQ ID NO: 290759 - DNA, 21 bp, Artificial sequence
  SiRNA target sequence
aggtagctcttaacaataata

SEQ ID NO: 290760 - DNA, 21 bp, Artificial sequence
  SiRNA target sequence
ggtagctcttaacaataataa

SEQ ID NO: 290761 - DNA, 21 bp, Artificial sequence
  SiRNA target sequence
gtagctcttaacaataataat

SEQ ID NO: 290762 - DNA, 21 bp, Artificial sequence
  SiRNA target sequence
tagctcttaacaataataatc

SEQ ID NO: 290763 - DNA, 21 bp, Artificial sequence
  SiRNA target sequence
agctcttaacaataataatcc

SEQ ID NO: 290764 - DNA, 21 bp, Artificial sequence
  SiRNA target sequence
gctcttaacaataataatcca

SEQ ID NO: 290765 - DNA, 21 bp, Artificial sequence
  SiRNA target sequence
ctcttaacaataataatccaa

SEQ ID NO: 290766 - DNA, 21 bp, Artificial sequence
  SiRNA target sequence
tcttaacaataataatccaat

SEQ ID NO: 290767 - DNA, 21 bp, Artificial sequence
  SiRNA target sequence
cttaacaataataatccaatt

SEQ ID NO: 290768 - DNA, 21 bp, Artificial sequence
  SiRNA target sequence
ttaacaataataatccaatta

SEQ ID NO: 290769 - DNA, 21 bp, Artificial sequence
  SiRNA target sequence
taacaataataatccaattat

SEQ ID NO: 290770 - DNA, 21 bp, Artificial sequence
  SiRNA target sequence
aacaataataatccaattatt

SEQ ID NO: 290771 - DNA, 21 bp, Artificial sequence
  SiRNA target sequence
acaataataatccaattattc

SEQ ID NO: 290772 - DNA, 21 bp, Artificial sequence
  SiRNA target sequence
caataataatccaattattca

SEQ ID NO: 290773 - DNA, 21 bp, Artificial sequence
  SiRNA target sequence
aataataatccaattattcat

SEQ ID NO: 290774 - DNA, 21 bp, Artificial sequence
  SiRNA target sequence
ataataatccaattattcatg

SEQ ID NO: 290775 - DNA, 21 bp, Artificial sequence
  SiRNA target sequence
taataatccaattattcatgt

SEQ ID NO: 290776 - DNA, 21 bp, Artificial sequence
  SiRNA target sequence
aataatccaattattcatgta

SEQ ID NO: 290777 - DNA, 21 bp, Artificial sequence
  SiRNA target sequence
ataatccaattattcatgtaa

SEQ ID NO: 290778 - DNA, 21 bp, Artificial sequence
  SiRNA target sequence
taatccaattattcatgtaac

SEQ ID NO: 290779 - DNA, 21 bp, Artificial sequence
  SiRNA target sequence
aatccaattattcatgtaaca

SEQ ID NO: 290780 - DNA, 21 bp, Artificial sequence
  SiRNA target sequence
atccaattattcatgtaacaa

SEQ ID NO: 290781 - DNA, 21 bp, Artificial sequence
  SiRNA target sequence
tccaattattcatgtaacaat

SEQ ID NO: 290782 - DNA, 21 bp, Artificial sequence
  SiRNA target sequence
ccaattattcatgtaacaatg

SEQ ID NO: 290783 - DNA, 21 bp, Artificial sequence
  SiRNA target sequence
caattattcatgtaacaatgc

SEQ ID NO: 290784 - DNA, 21 bp, Artificial sequence
  SiRNA target sequence
aattattcatgtaacaatgca

SEQ ID NO: 290785 - DNA, 21 bp, Artificial sequence
  SiRNA target sequence
attattcatgtaacaatgcaa

SEQ ID NO: 290786 - DNA, 21 bp, Artificial sequence
  SiRNA target sequence
ttattcatgtaacaatgcaat

SEQ ID NO: 290787 - DNA, 21 bp, Artificial sequence
  SiRNA target sequence
tattcatgtaacaatgcaatc

SEQ ID NO: 290788 - DNA, 21 bp, Artificial sequence
  SiRNA target sequence
attcatgtaacaatgcaatct

SEQ ID NO: 290789 - DNA, 21 bp, Artificial sequence
  SiRNA target sequence
ttcatgtaacaatgcaatcta

SEQ ID NO: 290790 - DNA, 21 bp, Artificial sequence
  SiRNA target sequence
tcatgtaacaatgcaatctaa

SEQ ID NO: 290791 - DNA, 21 bp, Artificial sequence
  SiRNA target sequence
catgtaacaatgcaatctaat

SEQ ID NO: 290792 - DNA, 21 bp, Artificial sequence
  SiRNA target sequence
atgtaacaatgcaatctaatt

SEQ ID NO: 290793 - DNA, 21 bp, Artificial sequence
  SiRNA target sequence
tgtaacaatgcaatctaattc

SEQ ID NO: 290794 - DNA, 21 bp, Artificial sequence
  SiRNA target sequence
gtaacaatgcaatctaattct

SEQ ID NO: 290795 - DNA, 21 bp, Artificial sequence
  SiRNA target sequence
taacaatgcaatctaattctc

SEQ ID NO: 290796 - DNA, 21 bp, Artificial sequence
  SiRNA target sequence
aacaatgcaatctaattctcc

SEQ ID NO: 290797 - DNA, 21 bp, Artificial sequence
  SiRNA target sequence
acaatgcaatctaattctccc

SEQ ID NO: 290798 - DNA, 21 bp, Artificial sequence
  SiRNA target sequence
caatgcaatctaattctccca

SEQ ID NO: 290799 - DNA, 21 bp, Artificial sequence
  SiRNA target sequence
aatgcaatctaattctcccat

SEQ ID NO: 290800 - DNA, 21 bp, Artificial sequence
  SiRNA target sequence
atgcaatctaattctcccatt

SEQ ID NO: 290801 - DNA, 21 bp, Artificial sequence
  SiRNA target sequence
tgcaatctaattctcccattc

SEQ ID NO: 290802 - DNA, 21 bp, Artificial sequence
  SiRNA target sequence
gcaatctaattctcccattct

SEQ ID NO: 290803 - DNA, 21 bp, Artificial sequence
  SiRNA target sequence
caatctaattctcccattctt

SEQ ID NO: 290804 - DNA, 21 bp, Artificial sequence
  SiRNA target sequence
aatctaattctcccattcttg

SEQ ID NO: 290805 - DNA, 21 bp, Artificial sequence
  SiRNA target sequence
atctaattctcccattcttga

SEQ ID NO: 290806 - DNA, 21 bp, Artificial sequence
  SiRNA target sequence
tctaattctcccattcttgaa

SEQ ID NO: 290807 - DNA, 21 bp, Artificial sequence
  SiRNA target sequence
ctaattctcccattcttgaag

SEQ ID NO: 290808 - DNA, 21 bp, Artificial sequence
  SiRNA target sequence
taattctcccattcttgaagt

SEQ ID NO: 290809 - DNA, 21 bp, Artificial sequence
  SiRNA target sequence
aattctcccattcttgaagtt

SEQ ID NO: 290810 - DNA, 21 bp, Artificial sequence
  SiRNA target sequence
attctcccattcttgaagttt

SEQ ID NO: 290811 - DNA, 21 bp, Artificial sequence
  SiRNA target sequence
ttctcccattcttgaagtttt

SEQ ID NO: 290812 - DNA, 21 bp, Artificial sequence
  SiRNA target sequence
tctcccattcttgaagtttta

SEQ ID NO: 290813 - DNA, 21 bp, Artificial sequence
  SiRNA target sequence
ctcccattcttgaagttttat

SEQ ID NO: 290814 - DNA, 21 bp, Artificial sequence
  SiRNA target sequence
tcccattcttgaagttttatt

SEQ ID NO: 290815 - DNA, 21 bp, Artificial sequence
  SiRNA target sequence
cccattcttgaagttttatta

SEQ ID NO: 290816 - DNA, 21 bp, Artificial sequence
  SiRNA target sequence
ccattcttgaagttttattac

SEQ ID NO: 290817 - DNA, 21 bp, Artificial sequence
  SiRNA target sequence
cattcttgaagttttattaca

SEQ ID NO: 290818 - DNA, 21 bp, Artificial sequence
  SiRNA target sequence
attcttgaagttttattacaa

SEQ ID NO: 290819 - DNA, 21 bp, Artificial sequence
  SiRNA target sequence
ttcttgaagttttattacaac

SEQ ID NO: 290820 - DNA, 21 bp, Artificial sequence
  SiRNA target sequence
tcttgaagttttattacaacc

SEQ ID NO: 290821 - DNA, 21 bp, Artificial sequence
  SiRNA target sequence
cttgaagttttattacaaccc

SEQ ID NO: 290822 - DNA, 21 bp, Artificial sequence
  SiRNA target sequence
ttgaagttttattacaaccca

SEQ ID NO: 290823 - DNA, 21 bp, Artificial sequence
  SiRNA target sequence
tgaagttttattacaacccaa

SEQ ID NO: 290824 - DNA, 21 bp, Artificial sequence
  SiRNA target sequence
gaagttttattacaacccaac

SEQ ID NO: 290825 - DNA, 21 bp, Artificial sequence
  SiRNA target sequence
aagttttattacaacccaaca

SEQ ID NO: 290826 - DNA, 21 bp, Artificial sequence
  SiRNA target sequence
agttttattacaacccaacat

SEQ ID NO: 290827 - DNA, 21 bp, Artificial sequence
  SiRNA target sequence
gttttattacaacccaacatt

SEQ ID NO: 290828 - DNA, 21 bp, Artificial sequence
  SiRNA target sequence
ttttattacaacccaacatta

SEQ ID NO: 290829 - DNA, 21 bp, Artificial sequence
  SiRNA target sequence
tttattacaacccaacattat

SEQ ID NO: 290830 - DNA, 21 bp, Artificial sequence
  SiRNA target sequence
ttattacaacccaacattata

SEQ ID NO: 290831 - DNA, 21 bp, Artificial sequence
  SiRNA target sequence
tattacaacccaacattatag

SEQ ID NO: 290832 - DNA, 21 bp, Artificial sequence
  SiRNA target sequence
attacaacccaacattatagt

SEQ ID NO: 290833 - DNA, 21 bp, Artificial sequence
  SiRNA target sequence
ttacaacccaacattatagtt

SEQ ID NO: 290834 - DNA, 21 bp, Artificial sequence
  SiRNA target sequence
tacaacccaacattatagtta

SEQ ID NO: 290835 - DNA, 21 bp, Artificial sequence
  SiRNA target sequence
acaacccaacattatagttag

SEQ ID NO: 290836 - DNA, 21 bp, Artificial sequence
  SiRNA target sequence
caacccaacattatagttagc

SEQ ID NO: 290837 - DNA, 21 bp, Artificial sequence
  SiRNA target sequence
aacccaacattatagttagcg

SEQ ID NO: 290838 - DNA, 21 bp, Artificial sequence
  SiRNA target sequence
acccaacattatagttagcgc

SEQ ID NO: 290839 - DNA, 21 bp, Artificial sequence
  SiRNA target sequence
cccaacattatagttagcgcc

SEQ ID NO: 290840 - DNA, 21 bp, Artificial sequence
  SiRNA target sequence
ccaacattatagttagcgcca

SEQ ID NO: 290841 - DNA, 21 bp, Artificial sequence
  SiRNA target sequence
caacattatagttagcgccat

SEQ ID NO: 290842 - DNA, 21 bp, Artificial sequence
  SiRNA target sequence
aacattatagttagcgccata

SEQ ID NO: 290843 - DNA, 21 bp, Artificial sequence
  SiRNA target sequence
acattatagttagcgccatat

SEQ ID NO: 290844 - DNA, 21 bp, Artificial sequence
  SiRNA target sequence
cattatagttagcgccatatt

SEQ ID NO: 290845 - DNA, 21 bp, Artificial sequence
  SiRNA target sequence
attatagttagcgccatattt

SEQ ID NO: 290846 - DNA, 21 bp, Artificial sequence
  SiRNA target sequence
ttatagttagcgccatattta

SEQ ID NO: 290847 - DNA, 21 bp, Artificial sequence
  SiRNA target sequence
tatagttagcgccatatttat

SEQ ID NO: 290848 - DNA, 21 bp, Artificial sequence
  SiRNA target sequence
atagttagcgccatatttata

SEQ ID NO: 290849 - DNA, 21 bp, Artificial sequence
  SiRNA target sequence
tagttagcgccatatttatag

SEQ ID NO: 290850 - DNA, 21 bp, Artificial sequence
  SiRNA target sequence
agttagcgccatatttatagc

SEQ ID NO: 290851 - DNA, 21 bp, Artificial sequence
  SiRNA target sequence
gttagcgccatatttatagca

SEQ ID NO: 290852 - DNA, 21 bp, Artificial sequence
  SiRNA target sequence
ttagcgccatatttatagcat

SEQ ID NO: 290853 - DNA, 21 bp, Artificial sequence
  SiRNA target sequence
tagcgccatatttatagcatt

SEQ ID NO: 290854 - DNA, 21 bp, Artificial sequence
  SiRNA target sequence
agcgccatatttatagcatta

SEQ ID NO: 290855 - DNA, 21 bp, Artificial sequence
  SiRNA target sequence
gcgccatatttatagcattaa

SEQ ID NO: 290856 - DNA, 21 bp, Artificial sequence
  SiRNA target sequence
cgccatatttatagcattaag

SEQ ID NO: 290857 - DNA, 21 bp, Artificial sequence
  SiRNA target sequence
gccatatttatagcattaagc

SEQ ID NO: 290858 - DNA, 21 bp, Artificial sequence
  SiRNA target sequence
ccatatttatagcattaagcg

SEQ ID NO: 290859 - DNA, 21 bp, Artificial sequence
  SiRNA target sequence
catatttatagcattaagcgt

SEQ ID NO: 290860 - DNA, 21 bp, Artificial sequence
  SiRNA target sequence
atatttatagcattaagcgta

SEQ ID NO: 290861 - DNA, 21 bp, Artificial sequence
  SiRNA target sequence
tatttatagcattaagcgtag

SEQ ID NO: 290862 - DNA, 21 bp, Artificial sequence
  SiRNA target sequence
atttatagcattaagcgtagt

SEQ ID NO: 290863 - DNA, 21 bp, Artificial sequence
  SiRNA target sequence
tttatagcattaagcgtagtg

SEQ ID NO: 290864 - DNA, 21 bp, Artificial sequence
  SiRNA target sequence
ttatagcattaagcgtagtgt

SEQ ID NO: 290865 - DNA, 21 bp, Artificial sequence
  SiRNA target sequence
tatagcattaagcgtagtgtt

SEQ ID NO: 290866 - DNA, 21 bp, Artificial sequence
  SiRNA target sequence
atagcattaagcgtagtgttc

SEQ ID NO: 290867 - DNA, 21 bp, Artificial sequence
  SiRNA target sequence
tagcattaagcgtagtgttcc

SEQ ID NO: 290868 - DNA, 21 bp, Artificial sequence
  SiRNA target sequence
agcattaagcgtagtgttcca

SEQ ID NO: 290869 - DNA, 21 bp, Artificial sequence
  SiRNA target sequence
gcattaagcgtagtgttccac

SEQ ID NO: 290870 - DNA, 21 bp, Artificial sequence
  SiRNA target sequence
cattaagcgtagtgttccaca

SEQ ID NO: 290871 - DNA, 21 bp, Artificial sequence
  SiRNA target sequence
attaagcgtagtgttccacaa

SEQ ID NO: 290872 - DNA, 21 bp, Artificial sequence
  SiRNA target sequence
ttaagcgtagtgttccacaaa

SEQ ID NO: 290873 - DNA, 21 bp, Artificial sequence
  SiRNA target sequence
taagcgtagtgttccacaaaa

SEQ ID NO: 290874 - DNA, 21 bp, Artificial sequence
  SiRNA target sequence
aagcgtagtgttccacaaaaa

SEQ ID NO: 290875 - DNA, 21 bp, Artificial sequence
  SiRNA target sequence
agcgtagtgttccacaaaaaa

SEQ ID NO: 290876 - DNA, 21 bp, Artificial sequence
  SiRNA target sequence
gcgtagtgttccacaaaaaat

SEQ ID NO: 290877 - DNA, 21 bp, Artificial sequence
  SiRNA target sequence
cgtagtgttccacaaaaaatt

SEQ ID NO: 290878 - DNA, 21 bp, Artificial sequence
  SiRNA target sequence
gtagtgttccacaaaaaattt

SEQ ID NO: 290879 - DNA, 21 bp, Artificial sequence
  SiRNA target sequence
tagtgttccacaaaaaattta

SEQ ID NO: 290880 - DNA, 21 bp, Artificial sequence
  SiRNA target sequence
agtgttccacaaaaaatttac

SEQ ID NO: 290881 - DNA, 21 bp, Artificial sequence
  SiRNA target sequence
gtgttccacaaaaaatttacc

SEQ ID NO: 290882 - DNA, 21 bp, Artificial sequence
  SiRNA target sequence
tgttccacaaaaaatttacct

SEQ ID NO: 290883 - DNA, 21 bp, Artificial sequence
  SiRNA target sequence
gttccacaaaaaatttaccta

SEQ ID NO: 290884 - DNA, 21 bp, Artificial sequence
  SiRNA target sequence
ttccacaaaaaatttacctac

SEQ ID NO: 290885 - DNA, 21 bp, Artificial sequence
  SiRNA target sequence
tccacaaaaaatttacctaca

SEQ ID NO: 290886 - DNA, 21 bp, Artificial sequence
  SiRNA target sequence
ccacaaaaaatttacctacaa

SEQ ID NO: 290887 - DNA, 21 bp, Artificial sequence
  SiRNA target sequence
cacaaaaaatttacctacaaa

SEQ ID NO: 290888 - DNA, 21 bp, Artificial sequence
  SiRNA target sequence
acaaaaaatttacctacaaaa

SEQ ID NO: 290889 - DNA, 21 bp, Artificial sequence
  SiRNA target sequence
caaaaaatttacctacaaaaa

SEQ ID NO: 290890 - DNA, 21 bp, Artificial sequence
  SiRNA target sequence
aaaaaatttacctacaaaaaa

SEQ ID NO: 290891 - DNA, 21 bp, Artificial sequence
  SiRNA target sequence
aaaaatttacctacaaaaaac

SEQ ID NO: 290892 - DNA, 21 bp, Artificial sequence
  SiRNA target sequence
aaaatttacctacaaaaaact

SEQ ID NO: 290893 - DNA, 21 bp, Artificial sequence
  SiRNA target sequence
aaatttacctacaaaaaactg

SEQ ID NO: 290894 - DNA, 21 bp, Artificial sequence
  SiRNA target sequence
aatttacctacaaaaaactgg

SEQ ID NO: 290895 - DNA, 21 bp, Artificial sequence
  SiRNA target sequence
atttacctacaaaaaactggg

SEQ ID NO: 290896 - DNA, 21 bp, Artificial sequence
  SiRNA target sequence
tttacctacaaaaaactggga

SEQ ID NO: 290897 - DNA, 21 bp, Artificial sequence
  SiRNA target sequence
ttacctacaaaaaactgggaa

SEQ ID NO: 290898 - DNA, 21 bp, Artificial sequence
  SiRNA target sequence
tacctacaaaaaactgggaat

SEQ ID NO: 290899 - DNA, 21 bp, Artificial sequence
  SiRNA target sequence
acctacaaaaaactgggaatt

SEQ ID NO: 290900 - DNA, 21 bp, Artificial sequence
  SiRNA target sequence
cctacaaaaaactgggaattg

SEQ ID NO: 290901 - DNA, 21 bp, Artificial sequence
  SiRNA target sequence
ctacaaaaaactgggaattga

SEQ ID NO: 290902 - DNA, 21 bp, Artificial sequence
  SiRNA target sequence
tacaaaaaactgggaattgaa

SEQ ID NO: 290903 - DNA, 21 bp, Artificial sequence
  SiRNA target sequence
acaaaaaactgggaattgaag

SEQ ID NO: 290904 - DNA, 21 bp, Artificial sequence
  SiRNA target sequence
caaaaaactgggaattgaagc

SEQ ID NO: 290905 - DNA, 21 bp, Artificial sequence
  SiRNA target sequence
aaaaaactgggaattgaagca

SEQ ID NO: 290906 - DNA, 21 bp, Artificial sequence
  SiRNA target sequence
aaaaactgggaattgaagcaa

SEQ ID NO: 290907 - DNA, 21 bp, Artificial sequence
  SiRNA target sequence
aaaactgggaattgaagcaat

SEQ ID NO: 290908 - DNA, 21 bp, Artificial sequence
  SiRNA target sequence
aaactgggaattgaagcaatg

SEQ ID NO: 290909 - DNA, 21 bp, Artificial sequence
  SiRNA target sequence
aactgggaattgaagcaatga

SEQ ID NO: 290910 - DNA, 21 bp, Artificial sequence
  SiRNA target sequence
actgggaattgaagcaatgat

SEQ ID NO: 290911 - DNA, 21 bp, Artificial sequence
  SiRNA target sequence
ctgggaattgaagcaatgatt

SEQ ID NO: 290912 - DNA, 21 bp, Artificial sequence
  SiRNA target sequence
tgggaattgaagcaatgatta

SEQ ID NO: 290913 - DNA, 21 bp, Artificial sequence
  SiRNA target sequence
gggaattgaagcaatgattaa

SEQ ID NO: 290914 - DNA, 21 bp, Artificial sequence
  SiRNA target sequence
ggaattgaagcaatgattaaa

SEQ ID NO: 290915 - DNA, 21 bp, Artificial sequence
  SiRNA target sequence
gaattgaagcaatgattaaaa

SEQ ID NO: 290916 - DNA, 21 bp, Artificial sequence
  SiRNA target sequence
aattgaagcaatgattaaaag

SEQ ID NO: 290917 - DNA, 21 bp, Artificial sequence
  SiRNA target sequence
attgaagcaatgattaaaaga

SEQ ID NO: 290918 - DNA, 21 bp, Artificial sequence
  SiRNA target sequence
ttgaagcaatgattaaaagac

SEQ ID NO: 290919 - DNA, 21 bp, Artificial sequence
  SiRNA target sequence
tgaagcaatgattaaaagact

SEQ ID NO: 290920 - DNA, 21 bp, Artificial sequence
  SiRNA target sequence
gaagcaatgattaaaagactt

SEQ ID NO: 290921 - DNA, 21 bp, Artificial sequence
  SiRNA target sequence
aagcaatgattaaaagacttg

SEQ ID NO: 290922 - DNA, 21 bp, Artificial sequence
  SiRNA target sequence
agcaatgattaaaagacttgg

SEQ ID NO: 290923 - DNA, 21 bp, Artificial sequence
  SiRNA target sequence
gcaatgattaaaagacttgga

SEQ ID NO: 290924 - DNA, 21 bp, Artificial sequence
  SiRNA target sequence
caatgattaaaagacttggag

SEQ ID NO: 290925 - DNA, 21 bp, Artificial sequence
  SiRNA target sequence
aatgattaaaagacttggaga

SEQ ID NO: 290926 - DNA, 21 bp, Artificial sequence
  SiRNA target sequence
atgattaaaagacttggagat

SEQ ID NO: 290927 - DNA, 21 bp, Artificial sequence
  SiRNA target sequence
tgattaaaagacttggagatt

SEQ ID NO: 290928 - DNA, 21 bp, Artificial sequence
  SiRNA target sequence
gattaaaagacttggagattt

SEQ ID NO: 290929 - DNA, 21 bp, Artificial sequence
  SiRNA target sequence
attaaaagacttggagatttg

SEQ ID NO: 290930 - DNA, 21 bp, Artificial sequence
  SiRNA target sequence
ttaaaagacttggagatttgg

SEQ ID NO: 290931 - DNA, 21 bp, Artificial sequence
  SiRNA target sequence
taaaagacttggagatttggg

SEQ ID NO: 290932 - DNA, 21 bp, Artificial sequence
  SiRNA target sequence
aaaagacttggagatttggga

SEQ ID NO: 290933 - DNA, 21 bp, Artificial sequence
  SiRNA target sequence
aaagacttggagatttgggaa

SEQ ID NO: 290934 - DNA, 21 bp, Artificial sequence
  SiRNA target sequence
aagacttggagatttgggaag

SEQ ID NO: 290935 - DNA, 21 bp, Artificial sequence
  SiRNA target sequence
agacttggagatttgggaaga

SEQ ID NO: 290936 - DNA, 21 bp, Artificial sequence
  SiRNA target sequence
gacttggagatttgggaagag

SEQ ID NO: 290937 - DNA, 21 bp, Artificial sequence
  SiRNA target sequence
acttggagatttgggaagagc

SEQ ID NO: 290938 - DNA, 21 bp, Artificial sequence
  SiRNA target sequence
cttggagatttgggaagagca

SEQ ID NO: 290939 - DNA, 21 bp, Artificial sequence
  SiRNA target sequence
ttggagatttgggaagagcag

SEQ ID NO: 290940 - DNA, 21 bp, Artificial sequence
  SiRNA target sequence
tggagatttgggaagagcagc

SEQ ID NO: 290941 - DNA, 21 bp, Artificial sequence
  SiRNA target sequence
ggagatttgggaagagcagcc

SEQ ID NO: 290942 - DNA, 21 bp, Artificial sequence
  SiRNA target sequence
gagatttgggaagagcagcca

SEQ ID NO: 290943 - DNA, 21 bp, Artificial sequence
  SiRNA target sequence
agatttgggaagagcagccaa

SEQ ID NO: 290944 - DNA, 21 bp, Artificial sequence
  SiRNA target sequence
gatttgggaagagcagccaaa

SEQ ID NO: 290945 - DNA, 21 bp, Artificial sequence
  SiRNA target sequence
atttgggaagagcagccaaag

SEQ ID NO: 290946 - DNA, 21 bp, Artificial sequence
  SiRNA target sequence
tttgggaagagcagccaaagg

SEQ ID NO: 290947 - DNA, 21 bp, Artificial sequence
  SiRNA target sequence
ttgggaagagcagccaaaggc

SEQ ID NO: 290948 - DNA, 21 bp, Artificial sequence
  SiRNA target sequence
tgggaagagcagccaaaggct

SEQ ID NO: 290949 - DNA, 21 bp, Artificial sequence
  SiRNA target sequence
gggaagagcagccaaaggctg

SEQ ID NO: 290950 - DNA, 21 bp, Artificial sequence
  SiRNA target sequence
ggaagagcagccaaaggctgt

SEQ ID NO: 290951 - DNA, 21 bp, Artificial sequence
  SiRNA target sequence
gaagagcagccaaaggctgtt

SEQ ID NO: 290952 - DNA, 21 bp, Artificial sequence
  SiRNA target sequence
aagagcagccaaaggctgttc

SEQ ID NO: 290953 - DNA, 21 bp, Artificial sequence
  SiRNA target sequence
agagcagccaaaggctgttca

SEQ ID NO: 290954 - DNA, 21 bp, Artificial sequence
  SiRNA target sequence
gagcagccaaaggctgttcag

SEQ ID NO: 290955 - DNA, 21 bp, Artificial sequence
  SiRNA target sequence
agcagccaaaggctgttcaga

SEQ ID NO: 290956 - DNA, 21 bp, Artificial sequence
  SiRNA target sequence
gcagccaaaggctgttcagat

SEQ ID NO: 290957 - DNA, 21 bp, Artificial sequence
  SiRNA target sequence
cagccaaaggctgttcagatt

SEQ ID NO: 290958 - DNA, 21 bp, Artificial sequence
  SiRNA target sequence
agccaaaggctgttcagattt

SEQ ID NO: 290959 - DNA, 21 bp, Artificial sequence
  SiRNA target sequence
gccaaaggctgttcagatttg

SEQ ID NO: 290960 - DNA, 21 bp, Artificial sequence
  SiRNA target sequence
ccaaaggctgttcagatttga

SEQ ID NO: 290961 - DNA, 21 bp, Artificial sequence
  SiRNA target sequence
caaaggctgttcagatttgaa

SEQ ID NO: 290962 - DNA, 21 bp, Artificial sequence
  SiRNA target sequence
aaaggctgttcagatttgaat

SEQ ID NO: 290963 - DNA, 21 bp, Artificial sequence
  SiRNA target sequence
aaggctgttcagatttgaatg

SEQ ID NO: 290964 - DNA, 21 bp, Artificial sequence
  SiRNA target sequence
aggctgttcagatttgaatgt

SEQ ID NO: 290965 - DNA, 21 bp, Artificial sequence
  SiRNA target sequence
ggctgttcagatttgaatgtg

SEQ ID NO: 290966 - DNA, 21 bp, Artificial sequence
  SiRNA target sequence
gctgttcagatttgaatgtgg

SEQ ID NO: 290967 - DNA, 21 bp, Artificial sequence
  SiRNA target sequence
ctgttcagatttgaatgtggt

SEQ ID NO: 290968 - DNA, 21 bp, Artificial sequence
  SiRNA target sequence
tgttcagatttgaatgtggtg

SEQ ID NO: 290969 - DNA, 21 bp, Artificial sequence
  SiRNA target sequence
gttcagatttgaatgtggtgc

SEQ ID NO: 290970 - DNA, 21 bp, Artificial sequence
  SiRNA target sequence
ttcagatttgaatgtggtgct

SEQ ID NO: 290971 - DNA, 21 bp, Artificial sequence
  SiRNA target sequence
tcagatttgaatgtggtgctc

SEQ ID NO: 290972 - DNA, 21 bp, Artificial sequence
  SiRNA target sequence
cagatttgaatgtggtgctca

SEQ ID NO: 290973 - DNA, 21 bp, Artificial sequence
  SiRNA target sequence
agatttgaatgtggtgctcaa

SEQ ID NO: 290974 - DNA, 21 bp, Artificial sequence
  SiRNA target sequence
gatttgaatgtggtgctcaac

SEQ ID NO: 290975 - DNA, 21 bp, Artificial sequence
  SiRNA target sequence
atttgaatgtggtgctcaacc

SEQ ID NO: 290976 - DNA, 21 bp, Artificial sequence
  SiRNA target sequence
tttgaatgtggtgctcaacca

SEQ ID NO: 290977 - DNA, 21 bp, Artificial sequence
  SiRNA target sequence
ttgaatgtggtgctcaaccag

SEQ ID NO: 290978 - DNA, 21 bp, Artificial sequence
  SiRNA target sequence
tgaatgtggtgctcaaccagg

SEQ ID NO: 290979 - DNA, 21 bp, Artificial sequence
  SiRNA target sequence
gaatgtggtgctcaaccaggc

SEQ ID NO: 290980 - DNA, 21 bp, Artificial sequence
  SiRNA target sequence
aatgtggtgctcaaccaggct

SEQ ID NO: 290981 - DNA, 21 bp, Artificial sequence
  SiRNA target sequence
atgtggtgctcaaccaggcta

SEQ ID NO: 290982 - DNA, 21 bp, Artificial sequence
  SiRNA target sequence
tgtggtgctcaaccaggctat

SEQ ID NO: 290983 - DNA, 21 bp, Artificial sequence
  SiRNA target sequence
gtggtgctcaaccaggctata

SEQ ID NO: 290984 - DNA, 21 bp, Artificial sequence
  SiRNA target sequence
tggtgctcaaccaggctataa

SEQ ID NO: 290985 - DNA, 21 bp, Artificial sequence
  SiRNA target sequence
ggtgctcaaccaggctataac

SEQ ID NO: 290986 - DNA, 21 bp, Artificial sequence
  SiRNA target sequence
gtgctcaaccaggctataacc

SEQ ID NO: 290987 - DNA, 21 bp, Artificial sequence
  SiRNA target sequence
tgctcaaccaggctataacca

SEQ ID NO: 290988 - DNA, 21 bp, Artificial sequence
  SiRNA target sequence
gctcaaccaggctataaccaa

SEQ ID NO: 290989 - DNA, 21 bp, Artificial sequence
  SiRNA target sequence
ctcaaccaggctataaccaac

SEQ ID NO: 290990 - DNA, 21 bp, Artificial sequence
  SiRNA target sequence
tcaaccaggctataaccaacc

SEQ ID NO: 290991 - DNA, 21 bp, Artificial sequence
  SiRNA target sequence
caaccaggctataaccaacca

SEQ ID NO: 290992 - DNA, 21 bp, Artificial sequence
  SiRNA target sequence
aaccaggctataaccaaccac

SEQ ID NO: 290993 - DNA, 21 bp, Artificial sequence
  SiRNA target sequence
accaggctataaccaaccaca

SEQ ID NO: 290994 - DNA, 21 bp, Artificial sequence
  SiRNA target sequence
ccaggctataaccaaccacat

SEQ ID NO: 290995 - DNA, 21 bp, Artificial sequence
  SiRNA target sequence
caggctataaccaaccacatg

SEQ ID NO: 290996 - DNA, 21 bp, Artificial sequence
  SiRNA target sequence
aggctataaccaaccacatgt

SEQ ID NO: 290997 - DNA, 21 bp, Artificial sequence
  SiRNA target sequence
ggctataaccaaccacatgtt

SEQ ID NO: 290998 - DNA, 21 bp, Artificial sequence
  SiRNA target sequence
gctataaccaaccacatgtta

SEQ ID NO: 290999 - DNA, 21 bp, Artificial sequence
  SiRNA target sequence
ctataaccaaccacatgttag

SEQ ID NO: 291000 - DNA, 21 bp, Artificial sequence
  SiRNA target sequence
tataaccaaccacatgttaga

SEQ ID NO: 291001 - DNA, 21 bp, Artificial sequence
  SiRNA target sequence
ataaccaaccacatgttagaa

SEQ ID NO: 291002 - DNA, 21 bp, Artificial sequence
  SiRNA target sequence
taaccaaccacatgttagaac

SEQ ID NO: 291003 - DNA, 21 bp, Artificial sequence
  SiRNA target sequence
aaccaaccacatgttagaaca

SEQ ID NO: 291004 - DNA, 21 bp, Artificial sequence
  SiRNA target sequence
accaaccacatgttagaacat

SEQ ID NO: 291005 - DNA, 21 bp, Artificial sequence
  SiRNA target sequence
ccaaccacatgttagaacatt

SEQ ID NO: 291006 - DNA, 21 bp, Artificial sequence
  SiRNA target sequence
caaccacatgttagaacattt

SEQ ID NO: 291007 - DNA, 21 bp, Artificial sequence
  SiRNA target sequence
aaccacatgttagaacatttt

SEQ ID NO: 291008 - DNA, 21 bp, Artificial sequence
  SiRNA target sequence
accacatgttagaacattttg

SEQ ID NO: 291009 - DNA, 21 bp, Artificial sequence
  SiRNA target sequence
ccacatgttagaacattttgg

SEQ ID NO: 291010 - DNA, 21 bp, Artificial sequence
  SiRNA target sequence
cacatgttagaacattttggg

SEQ ID NO: 291011 - DNA, 21 bp, Artificial sequence
  SiRNA target sequence
acatgttagaacattttggga

SEQ ID NO: 291012 - DNA, 21 bp, Artificial sequence
  SiRNA target sequence
catgttagaacattttgggaa

SEQ ID NO: 291013 - DNA, 21 bp, Artificial sequence
  SiRNA target sequence
atgttagaacattttgggaag

SEQ ID NO: 291014 - DNA, 21 bp, Artificial sequence
  SiRNA target sequence
tgttagaacattttgggaaga

SEQ ID NO: 291015 - DNA, 21 bp, Artificial sequence
  SiRNA target sequence
gttagaacattttgggaagaa

SEQ ID NO: 291016 - DNA, 21 bp, Artificial sequence
  SiRNA target sequence
ttagaacattttgggaagaat

SEQ ID NO: 291017 - DNA, 21 bp, Artificial sequence
  SiRNA target sequence
tagaacattttgggaagaatg

SEQ ID NO: 291018 - DNA, 21 bp, Artificial sequence
  SiRNA target sequence
agaacattttgggaagaatgt

SEQ ID NO: 291019 - DNA, 21 bp, Artificial sequence
  SiRNA target sequence
gaacattttgggaagaatgtt

SEQ ID NO: 291020 - DNA, 21 bp, Artificial sequence
  SiRNA target sequence
aacattttgggaagaatgttc

SEQ ID NO: 291021 - DNA, 21 bp, Artificial sequence
  SiRNA target sequence
acattttgggaagaatgttct

SEQ ID NO: 291022 - DNA, 21 bp, Artificial sequence
  SiRNA target sequence
cattttgggaagaatgttctt

SEQ ID NO: 291023 - DNA, 21 bp, Artificial sequence
  SiRNA target sequence
attttgggaagaatgttcttg

SEQ ID NO: 291024 - DNA, 21 bp, Artificial sequence
  SiRNA target sequence
ttttgggaagaatgttcttgg

SEQ ID NO: 291025 - DNA, 21 bp, Artificial sequence
  SiRNA target sequence
tttgggaagaatgttcttggt

SEQ ID NO: 291026 - DNA, 21 bp, Artificial sequence
  SiRNA target sequence
ttgggaagaatgttcttggtt

SEQ ID NO: 291027 - DNA, 21 bp, Artificial sequence
  SiRNA target sequence
tgggaagaatgttcttggttt

SEQ ID NO: 291028 - DNA, 21 bp, Artificial sequence
  SiRNA target sequence
gggaagaatgttcttggttta

SEQ ID NO: 291029 - DNA, 21 bp, Artificial sequence
  SiRNA target sequence
ggaagaatgttcttggtttaa

SEQ ID NO: 291030 - DNA, 21 bp, Artificial sequence
  SiRNA target sequence
gaagaatgttcttggtttaaa

SEQ ID NO: 291031 - DNA, 21 bp, Artificial sequence
  SiRNA target sequence
aagaatgttcttggtttaaaa

SEQ ID NO: 291032 - DNA, 21 bp, Artificial sequence
  SiRNA target sequence
agaatgttcttggtttaaaac

SEQ ID NO: 291033 - DNA, 21 bp, Artificial sequence
  SiRNA target sequence
gaatgttcttggtttaaaaca

SEQ ID NO: 291034 - DNA, 21 bp, Artificial sequence
  SiRNA target sequence
aatgttcttggtttaaaacaa

SEQ ID NO: 291035 - DNA, 21 bp, Artificial sequence
  SiRNA target sequence
atgttcttggtttaaaacaag

SEQ ID NO: 291036 - DNA, 21 bp, Artificial sequence
  SiRNA target sequence
tgttcttggtttaaaacaaga

SEQ ID NO: 291037 - DNA, 21 bp, Artificial sequence
  SiRNA target sequence
gttcttggtttaaaacaagaa

SEQ ID NO: 291038 - DNA, 21 bp, Artificial sequence
  SiRNA target sequence
ttcttggtttaaaacaagaag

SEQ ID NO: 291039 - DNA, 21 bp, Artificial sequence
  SiRNA target sequence
tcttggtttaaaacaagaaga

SEQ ID NO: 291040 - DNA, 21 bp, Artificial sequence
  SiRNA target sequence
cttggtttaaaacaagaagat

SEQ ID NO: 291041 - DNA, 21 bp, Artificial sequence
  SiRNA target sequence
ttggtttaaaacaagaagatg

SEQ ID NO: 291042 - DNA, 21 bp, Artificial sequence
  SiRNA target sequence
tggtttaaaacaagaagatga

SEQ ID NO: 291043 - DNA, 21 bp, Artificial sequence
  SiRNA target sequence
ggtttaaaacaagaagatgaa

SEQ ID NO: 291044 - DNA, 21 bp, Artificial sequence
  SiRNA target sequence
gtttaaaacaagaagatgaac

SEQ ID NO: 291045 - DNA, 21 bp, Artificial sequence
  SiRNA target sequence
tttaaaacaagaagatgaact

SEQ ID NO: 291046 - DNA, 21 bp, Artificial sequence
  SiRNA target sequence
ttaaaacaagaagatgaactc

SEQ ID NO: 291047 - DNA, 21 bp, Artificial sequence
  SiRNA target sequence
taaaacaagaagatgaactca

SEQ ID NO: 291048 - DNA, 21 bp, Artificial sequence
  SiRNA target sequence
aaaacaagaagatgaactcaa

SEQ ID NO: 291049 - DNA, 21 bp, Artificial sequence
  SiRNA target sequence
aaacaagaagatgaactcaaa

SEQ ID NO: 291050 - DNA, 21 bp, Artificial sequence
  SiRNA target sequence
aacaagaagatgaactcaaag

SEQ ID NO: 291051 - DNA, 21 bp, Artificial sequence
  SiRNA target sequence
acaagaagatgaactcaaagt

SEQ ID NO: 291052 - DNA, 21 bp, Artificial sequence
  SiRNA target sequence
caagaagatgaactcaaagtc

SEQ ID NO: 291053 - DNA, 21 bp, Artificial sequence
  SiRNA target sequence
aagaagatgaactcaaagtcc

SEQ ID NO: 291054 - DNA, 21 bp, Artificial sequence
  SiRNA target sequence
agaagatgaactcaaagtcct

SEQ ID NO: 291055 - DNA, 21 bp, Artificial sequence
  SiRNA target sequence
gaagatgaactcaaagtccta

SEQ ID NO: 291056 - DNA, 21 bp, Artificial sequence
  SiRNA target sequence
aagatgaactcaaagtcctag

SEQ ID NO: 291057 - DNA, 21 bp, Artificial sequence
  SiRNA target sequence
agatgaactcaaagtcctagt

SEQ ID NO: 291058 - DNA, 21 bp, Artificial sequence
  SiRNA target sequence
gatgaactcaaagtcctagtg

SEQ ID NO: 291059 - DNA, 21 bp, Artificial sequence
  SiRNA target sequence
atgaactcaaagtcctagtgg

SEQ ID NO: 291060 - DNA, 21 bp, Artificial sequence
  SiRNA target sequence
tgaactcaaagtcctagtgga

SEQ ID NO: 291061 - DNA, 21 bp, Artificial sequence
  SiRNA target sequence
gaactcaaagtcctagtggaa

SEQ ID NO: 291062 - DNA, 21 bp, Artificial sequence
  SiRNA target sequence
aactcaaagtcctagtggaag

SEQ ID NO: 291063 - DNA, 21 bp, Artificial sequence
  SiRNA target sequence
actcaaagtcctagtggaagg

SEQ ID NO: 291064 - DNA, 21 bp, Artificial sequence
  SiRNA target sequence
ctcaaagtcctagtggaagga

SEQ ID NO: 291065 - DNA, 21 bp, Artificial sequence
  SiRNA target sequence
tcaaagtcctagtggaaggat

SEQ ID NO: 291066 - DNA, 21 bp, Artificial sequence
  SiRNA target sequence
caaagtcctagtggaaggata

SEQ ID NO: 291067 - DNA, 21 bp, Artificial sequence
  SiRNA target sequence
aaagtcctagtggaaggatat

SEQ ID NO: 291068 - DNA, 21 bp, Artificial sequence
  SiRNA target sequence
aagtcctagtggaaggatata

SEQ ID NO: 291069 - DNA, 21 bp, Artificial sequence
  SiRNA target sequence
agtcctagtggaaggatatag

SEQ ID NO: 291070 - DNA, 21 bp, Artificial sequence
  SiRNA target sequence
gtcctagtggaaggatataga

SEQ ID NO: 291071 - DNA, 21 bp, Artificial sequence
  SiRNA target sequence
tcctagtggaaggatatagaa

SEQ ID NO: 291072 - DNA, 21 bp, Artificial sequence
  SiRNA target sequence
cctagtggaaggatatagaaa

SEQ ID NO: 291073 - DNA, 21 bp, Artificial sequence
  SiRNA target sequence
ctagtggaaggatatagaaat

SEQ ID NO: 291074 - DNA, 21 bp, Artificial sequence
  SiRNA target sequence
tagtggaaggatatagaaatt

SEQ ID NO: 291075 - DNA, 21 bp, Artificial sequence
  SiRNA target sequence
agtggaaggatatagaaattg

SEQ ID NO: 291076 - DNA, 21 bp, Artificial sequence
  SiRNA target sequence
gtggaaggatatagaaattgg

SEQ ID NO: 291077 - DNA, 21 bp, Artificial sequence
  SiRNA target sequence
tggaaggatatagaaattggt

SEQ ID NO: 291078 - DNA, 21 bp, Artificial sequence
  SiRNA target sequence
ggaaggatatagaaattggtg

SEQ ID NO: 291079 - DNA, 21 bp, Artificial sequence
  SiRNA target sequence
gaaggatatagaaattggtgt

SEQ ID NO: 291080 - DNA, 21 bp, Artificial sequence
  SiRNA target sequence
aaggatatagaaattggtgtg

SEQ ID NO: 291081 - DNA, 21 bp, Artificial sequence
  SiRNA target sequence
aggatatagaaattggtgtga

SEQ ID NO: 291082 - DNA, 21 bp, Artificial sequence
  SiRNA target sequence
ggatatagaaattggtgtgat

SEQ ID NO: 291083 - DNA, 21 bp, Artificial sequence
  SiRNA target sequence
gatatagaaattggtgtgatg

SEQ ID NO: 291084 - DNA, 21 bp, Artificial sequence
  SiRNA target sequence
atatagaaattggtgtgatga

SEQ ID NO: 291085 - DNA, 21 bp, Artificial sequence
  SiRNA target sequence
tatagaaattggtgtgatgaa

SEQ ID NO: 291086 - DNA, 21 bp, Artificial sequence
  SiRNA target sequence
atagaaattggtgtgatgaag

SEQ ID NO: 291087 - DNA, 21 bp, Artificial sequence
  SiRNA target sequence
tagaaattggtgtgatgaagt

SEQ ID NO: 291088 - DNA, 21 bp, Artificial sequence
  SiRNA target sequence
agaaattggtgtgatgaagtc

SEQ ID NO: 291089 - DNA, 21 bp, Artificial sequence
  SiRNA target sequence
gaaattggtgtgatgaagtca

SEQ ID NO: 291090 - DNA, 21 bp, Artificial sequence
  SiRNA target sequence
aaattggtgtgatgaagtcag

SEQ ID NO: 291091 - DNA, 21 bp, Artificial sequence
  SiRNA target sequence
aattggtgtgatgaagtcaga

SEQ ID NO: 291092 - DNA, 21 bp, Artificial sequence
  SiRNA target sequence
attggtgtgatgaagtcagag

SEQ ID NO: 291093 - DNA, 21 bp, Artificial sequence
  SiRNA target sequence
ttggtgtgatgaagtcagaga

SEQ ID NO: 291094 - DNA, 21 bp, Artificial sequence
  SiRNA target sequence
tggtgtgatgaagtcagagat

SEQ ID NO: 291095 - DNA, 21 bp, Artificial sequence
  SiRNA target sequence
ggtgtgatgaagtcagagatt

SEQ ID NO: 291096 - DNA, 21 bp, Artificial sequence
  SiRNA target sequence
gtgtgatgaagtcagagattt

SEQ ID NO: 291097 - DNA, 21 bp, Artificial sequence
  SiRNA target sequence
tgtgatgaagtcagagattta

SEQ ID NO: 291098 - DNA, 21 bp, Artificial sequence
  SiRNA target sequence
gtgatgaagtcagagatttag

SEQ ID NO: 291099 - DNA, 21 bp, Artificial sequence
  SiRNA target sequence
tgatgaagtcagagatttagt

SEQ ID NO: 291100 - DNA, 21 bp, Artificial sequence
  SiRNA target sequence
gatgaagtcagagatttagta

SEQ ID NO: 291101 - DNA, 21 bp, Artificial sequence
  SiRNA target sequence
atgaagtcagagatttagtag

SEQ ID NO: 291102 - DNA, 21 bp, Artificial sequence
  SiRNA target sequence
tgaagtcagagatttagtagg

SEQ ID NO: 291103 - DNA, 21 bp, Artificial sequence
  SiRNA target sequence
gaagtcagagatttagtagga

SEQ ID NO: 291104 - DNA, 21 bp, Artificial sequence
  SiRNA target sequence
aagtcagagatttagtaggac

SEQ ID NO: 291105 - DNA, 21 bp, Artificial sequence
  SiRNA target sequence
agtcagagatttagtaggaca

SEQ ID NO: 291106 - DNA, 21 bp, Artificial sequence
  SiRNA target sequence
gtcagagatttagtaggacat

SEQ ID NO: 291107 - DNA, 21 bp, Artificial sequence
  SiRNA target sequence
tcagagatttagtaggacata

SEQ ID NO: 291108 - DNA, 21 bp, Artificial sequence
  SiRNA target sequence
cagagatttagtaggacataa

SEQ ID NO: 291109 - DNA, 21 bp, Artificial sequence
  SiRNA target sequence
agagatttagtaggacataaa

SEQ ID NO: 291110 - DNA, 21 bp, Artificial sequence
  SiRNA target sequence
gagatttagtaggacataaaa

SEQ ID NO: 291111 - DNA, 21 bp, Artificial sequence
  SiRNA target sequence
agatttagtaggacataaaat

SEQ ID NO: 291112 - DNA, 21 bp, Artificial sequence
  SiRNA target sequence
gatttagtaggacataaaatc

SEQ ID NO: 291113 - DNA, 21 bp, Artificial sequence
  SiRNA target sequence
atttagtaggacataaaatca

SEQ ID NO: 291114 - DNA, 21 bp, Artificial sequence
  SiRNA target sequence
tttagtaggacataaaatcaa

SEQ ID NO: 291115 - DNA, 21 bp, Artificial sequence
  SiRNA target sequence
ttagtaggacataaaatcaat

SEQ ID NO: 291116 - DNA, 21 bp, Artificial sequence
  SiRNA target sequence
tagtaggacataaaatcaatt

SEQ ID NO: 291117 - DNA, 21 bp, Artificial sequence
  SiRNA target sequence
agtaggacataaaatcaattc

SEQ ID NO: 291118 - DNA, 21 bp, Artificial sequence
  SiRNA target sequence
gtaggacataaaatcaattca

SEQ ID NO: 291119 - DNA, 21 bp, Artificial sequence
  SiRNA target sequence
taggacataaaatcaattcag

SEQ ID NO: 291120 - DNA, 21 bp, Artificial sequence
  SiRNA target sequence
aggacataaaatcaattcaga

SEQ ID NO: 291121 - DNA, 21 bp, Artificial sequence
  SiRNA target sequence
ggacataaaatcaattcagat

SEQ ID NO: 291122 - DNA, 21 bp, Artificial sequence
  SiRNA target sequence
gacataaaatcaattcagatg

SEQ ID NO: 291123 - DNA, 21 bp, Artificial sequence
  SiRNA target sequence
acataaaatcaattcagatgg

SEQ ID NO: 291124 - DNA, 21 bp, Artificial sequence
  SiRNA target sequence
cataaaatcaattcagatggg

SEQ ID NO: 291125 - DNA, 21 bp, Artificial sequence
  SiRNA target sequence
ataaaatcaattcagatgggg

SEQ ID NO: 291126 - DNA, 21 bp, Artificial sequence
  SiRNA target sequence
taaaatcaattcagatgggga

SEQ ID NO: 291127 - DNA, 21 bp, Artificial sequence
  SiRNA target sequence
aaaatcaattcagatggggaa

SEQ ID NO: 291128 - DNA, 21 bp, Artificial sequence
  SiRNA target sequence
aaatcaattcagatggggaat

SEQ ID NO: 291129 - DNA, 21 bp, Artificial sequence
  SiRNA target sequence
aatcaattcagatggggaatt

SEQ ID NO: 291130 - DNA, 21 bp, Artificial sequence
  SiRNA target sequence
atcaattcagatggggaatta

SEQ ID NO: 291131 - DNA, 21 bp, Artificial sequence
  SiRNA target sequence
tcaattcagatggggaattag

SEQ ID NO: 291132 - DNA, 21 bp, Artificial sequence
  SiRNA target sequence
caattcagatggggaattaga

SEQ ID NO: 291133 - DNA, 21 bp, Artificial sequence
  SiRNA target sequence
aattcagatggggaattagac

SEQ ID NO: 291134 - DNA, 21 bp, Artificial sequence
  SiRNA target sequence
attcagatggggaattagaca

SEQ ID NO: 291135 - DNA, 21 bp, Artificial sequence
  SiRNA target sequence
ttcagatggggaattagacag

SEQ ID NO: 291136 - DNA, 21 bp, Artificial sequence
  SiRNA target sequence
tcagatggggaattagacagc

SEQ ID NO: 291137 - DNA, 21 bp, Artificial sequence
  SiRNA target sequence
cagatggggaattagacagca

SEQ ID NO: 291138 - DNA, 21 bp, Artificial sequence
  SiRNA target sequence
agatggggaattagacagcaa

SEQ ID NO: 291139 - DNA, 21 bp, Artificial sequence
  SiRNA target sequence
gatggggaattagacagcaaa

SEQ ID NO: 291140 - DNA, 21 bp, Artificial sequence
  SiRNA target sequence
atggggaattagacagcaaaa

SEQ ID NO: 291141 - DNA, 21 bp, Artificial sequence
  SiRNA target sequence
tggggaattagacagcaaaag

SEQ ID NO: 291142 - DNA, 21 bp, Artificial sequence
  SiRNA target sequence
ggggaattagacagcaaaagt

SEQ ID NO: 291143 - DNA, 21 bp, Artificial sequence
  SiRNA target sequence
gggaattagacagcaaaagta

SEQ ID NO: 291144 - DNA, 21 bp, Artificial sequence
  SiRNA target sequence
ggaattagacagcaaaagtat

SEQ ID NO: 291145 - DNA, 21 bp, Artificial sequence
  SiRNA target sequence
gaattagacagcaaaagtatc

SEQ ID NO: 291146 - DNA, 21 bp, Artificial sequence
  SiRNA target sequence
aattagacagcaaaagtatcg

SEQ ID NO: 291147 - DNA, 21 bp, Artificial sequence
  SiRNA target sequence
attagacagcaaaagtatcgt

SEQ ID NO: 291148 - DNA, 21 bp, Artificial sequence
  SiRNA target sequence
ttagacagcaaaagtatcgtt

SEQ ID NO: 291149 - DNA, 21 bp, Artificial sequence
  SiRNA target sequence
tagacagcaaaagtatcgttg

SEQ ID NO: 291150 - DNA, 21 bp, Artificial sequence
  SiRNA target sequence
agacagcaaaagtatcgttga

SEQ ID NO: 291151 - DNA, 21 bp, Artificial sequence
  SiRNA target sequence
gacagcaaaagtatcgttgaa

SEQ ID NO: 291152 - DNA, 21 bp, Artificial sequence
  SiRNA target sequence
acagcaaaagtatcgttgaaa

SEQ ID NO: 291153 - DNA, 21 bp, Artificial sequence
  SiRNA target sequence
cagcaaaagtatcgttgaaaa

SEQ ID NO: 291154 - DNA, 21 bp, Artificial sequence
  SiRNA target sequence
agcaaaagtatcgttgaaaat

SEQ ID NO: 291155 - DNA, 21 bp, Artificial sequence
  SiRNA target sequence
gcaaaagtatcgttgaaaata

SEQ ID NO: 291156 - DNA, 21 bp, Artificial sequence
  SiRNA target sequence
caaaagtatcgttgaaaatat

SEQ ID NO: 291157 - DNA, 21 bp, Artificial sequence
  SiRNA target sequence
aaaagtatcgttgaaaatata

SEQ ID NO: 291158 - DNA, 21 bp, Artificial sequence
  SiRNA target sequence
aaagtatcgttgaaaatataa

SEQ ID NO: 291159 - DNA, 21 bp, Artificial sequence
  SiRNA target sequence
aagtatcgttgaaaatataat

SEQ ID NO: 291160 - DNA, 21 bp, Artificial sequence
  SiRNA target sequence
agtatcgttgaaaatataatg

SEQ ID NO: 291161 - DNA, 21 bp, Artificial sequence
  SiRNA target sequence
gtatcgttgaaaatataatga

SEQ ID NO: 291162 - DNA, 21 bp, Artificial sequence
  SiRNA target sequence
tatcgttgaaaatataatgaa

SEQ ID NO: 291163 - DNA, 21 bp, Artificial sequence
  SiRNA target sequence
atcgttgaaaatataatgaag

SEQ ID NO: 291164 - DNA, 21 bp, Artificial sequence
  SiRNA target sequence
tcgttgaaaatataatgaagg

SEQ ID NO: 291165 - DNA, 21 bp, Artificial sequence
  SiRNA target sequence
cgttgaaaatataatgaagga

SEQ ID NO: 291166 - DNA, 21 bp, Artificial sequence
  SiRNA target sequence
gttgaaaatataatgaaggat

SEQ ID NO: 291167 - DNA, 21 bp, Artificial sequence
  SiRNA target sequence
ttgaaaatataatgaaggatg

SEQ ID NO: 291168 - DNA, 21 bp, Artificial sequence
  SiRNA target sequence
tgaaaatataatgaaggatgt

SEQ ID NO: 291169 - DNA, 21 bp, Artificial sequence
  SiRNA target sequence
gaaaatataatgaaggatgtt

SEQ ID NO: 291170 - DNA, 21 bp, Artificial sequence
  SiRNA target sequence
aaaatataatgaaggatgttt

SEQ ID NO: 291171 - DNA, 21 bp, Artificial sequence
  SiRNA target sequence
aaatataatgaaggatgttta

SEQ ID NO: 291172 - DNA, 21 bp, Artificial sequence
  SiRNA target sequence
aatataatgaaggatgtttat

SEQ ID NO: 291173 - DNA, 21 bp, Artificial sequence
  SiRNA target sequence
atataatgaaggatgtttatg

SEQ ID NO: 291174 - DNA, 21 bp, Artificial sequence
  SiRNA target sequence
tataatgaaggatgtttatga

SEQ ID NO: 291175 - DNA, 21 bp, Artificial sequence
  SiRNA target sequence
ataatgaaggatgtttatgag

SEQ ID NO: 291176 - DNA, 21 bp, Artificial sequence
  SiRNA target sequence
taatgaaggatgtttatgaga

SEQ ID NO: 291177 - DNA, 21 bp, Artificial sequence
  SiRNA target sequence
aatgaaggatgtttatgagat

SEQ ID NO: 291178 - DNA, 21 bp, Artificial sequence
  SiRNA target sequence
atgaaggatgtttatgagata

SEQ ID NO: 291179 - DNA, 21 bp, Artificial sequence
  SiRNA target sequence
tgaaggatgtttatgagatac

SEQ ID NO: 291180 - DNA, 21 bp, Artificial sequence
  SiRNA target sequence
gaaggatgtttatgagataca

SEQ ID NO: 291181 - DNA, 21 bp, Artificial sequence
  SiRNA target sequence
aaggatgtttatgagatacaa

SEQ ID NO: 291182 - DNA, 21 bp, Artificial sequence
  SiRNA target sequence
aggatgtttatgagatacaaa

SEQ ID NO: 291183 - DNA, 21 bp, Artificial sequence
  SiRNA target sequence
ggatgtttatgagatacaaag

SEQ ID NO: 291184 - DNA, 21 bp, Artificial sequence
  SiRNA target sequence
gatgtttatgagatacaaaga

SEQ ID NO: 291185 - DNA, 21 bp, Artificial sequence
  SiRNA target sequence
atgtttatgagatacaaagaa

SEQ ID NO: 291186 - DNA, 21 bp, Artificial sequence
  SiRNA target sequence
tgtttatgagatacaaagaat

SEQ ID NO: 291187 - DNA, 21 bp, Artificial sequence
  SiRNA target sequence
gtttatgagatacaaagaatt

SEQ ID NO: 291188 - DNA, 21 bp, Artificial sequence
  SiRNA target sequence
tttatgagatacaaagaattg

SEQ ID NO: 291189 - DNA, 21 bp, Artificial sequence
  SiRNA target sequence
ttatgagatacaaagaattga

SEQ ID NO: 291190 - DNA, 21 bp, Artificial sequence
  SiRNA target sequence
tatgagatacaaagaattgag

SEQ ID NO: 291191 - DNA, 21 bp, Artificial sequence
  SiRNA target sequence
atgagatacaaagaattgaga

SEQ ID NO: 291192 - DNA, 21 bp, Artificial sequence
  SiRNA target sequence
tgagatacaaagaattgagaa

SEQ ID NO: 291193 - DNA, 21 bp, Artificial sequence
  SiRNA target sequence
gagatacaaagaattgagaat

SEQ ID NO: 291194 - DNA, 21 bp, Artificial sequence
  SiRNA target sequence
agatacaaagaattgagaata

SEQ ID NO: 291195 - DNA, 21 bp, Artificial sequence
  SiRNA target sequence
gatacaaagaattgagaatat

SEQ ID NO: 291196 - DNA, 21 bp, Artificial sequence
  SiRNA target sequence
atacaaagaattgagaatatg

SEQ ID NO: 291197 - DNA, 21 bp, Artificial sequence
  SiRNA target sequence
tacaaagaattgagaatatgt

SEQ ID NO: 291198 - DNA, 21 bp, Artificial sequence
  SiRNA target sequence
acaaagaattgagaatatgta

SEQ ID NO: 291199 - DNA, 21 bp, Artificial sequence
  SiRNA target sequence
caaagaattgagaatatgtat

SEQ ID NO: 291200 - DNA, 21 bp, Artificial sequence
  SiRNA target sequence
aaagaattgagaatatgtata

SEQ ID NO: 291201 - DNA, 21 bp, Artificial sequence
  SiRNA target sequence
aagaattgagaatatgtataa

SEQ ID NO: 291202 - DNA, 21 bp, Artificial sequence
  SiRNA target sequence
agaattgagaatatgtataag

SEQ ID NO: 291203 - DNA, 21 bp, Artificial sequence
  SiRNA target sequence
gaattgagaatatgtataaga

SEQ ID NO: 291204 - DNA, 21 bp, Artificial sequence
  SiRNA target sequence
aattgagaatatgtataagaa

SEQ ID NO: 291205 - DNA, 21 bp, Artificial sequence
  SiRNA target sequence
attgagaatatgtataagaaa

SEQ ID NO: 291206 - DNA, 21 bp, Artificial sequence
  SiRNA target sequence
ttgagaatatgtataagaaag

SEQ ID NO: 291207 - DNA, 21 bp, Artificial sequence
  SiRNA target sequence
tgagaatatgtataagaaagg

SEQ ID NO: 291208 - DNA, 21 bp, Artificial sequence
  SiRNA target sequence
gagaatatgtataagaaaggt

SEQ ID NO: 291209 - DNA, 21 bp, Artificial sequence
  SiRNA target sequence
agaatatgtataagaaaggtt

SEQ ID NO: 291210 - DNA, 21 bp, Artificial sequence
  SiRNA target sequence
gaatatgtataagaaaggttt

SEQ ID NO: 291211 - DNA, 21 bp, Artificial sequence
  SiRNA target sequence
aatatgtataagaaaggtttg

SEQ ID NO: 291212 - DNA, 21 bp, Artificial sequence
  SiRNA target sequence
atatgtataagaaaggtttgg

SEQ ID NO: 291213 - DNA, 21 bp, Artificial sequence
  SiRNA target sequence
tatgtataagaaaggtttgga

SEQ ID NO: 291214 - DNA, 21 bp, Artificial sequence
  SiRNA target sequence
atgtataagaaaggtttggag

SEQ ID NO: 291215 - DNA, 21 bp, Artificial sequence
  SiRNA target sequence
tgtataagaaaggtttggaga

SEQ ID NO: 291216 - DNA, 21 bp, Artificial sequence
  SiRNA target sequence
gtataagaaaggtttggagat

SEQ ID NO: 291217 - DNA, 21 bp, Artificial sequence
  SiRNA target sequence
tataagaaaggtttggagatt

SEQ ID NO: 291218 - DNA, 21 bp, Artificial sequence
  SiRNA target sequence
ataagaaaggtttggagattt

SEQ ID NO: 291219 - DNA, 21 bp, Artificial sequence
  SiRNA target sequence
taagaaaggtttggagatttc

SEQ ID NO: 291220 - DNA, 21 bp, Artificial sequence
  SiRNA target sequence
aagaaaggtttggagatttct

SEQ ID NO: 291221 - DNA, 21 bp, Artificial sequence
  SiRNA target sequence
agaaaggtttggagatttctc

SEQ ID NO: 291222 - DNA, 21 bp, Artificial sequence
  SiRNA target sequence
gaaaggtttggagatttctcg

SEQ ID NO: 291223 - DNA, 21 bp, Artificial sequence
  SiRNA target sequence
aaaggtttggagatttctcgt

SEQ ID NO: 291224 - DNA, 21 bp, Artificial sequence
  SiRNA target sequence
aaggtttggagatttctcgta

SEQ ID NO: 291225 - DNA, 21 bp, Artificial sequence
  SiRNA target sequence
aggtttggagatttctcgtaa

SEQ ID NO: 291226 - DNA, 21 bp, Artificial sequence
  SiRNA target sequence
ggtttggagatttctcgtaac

SEQ ID NO: 291227 - DNA, 21 bp, Artificial sequence
  SiRNA target sequence
gtttggagatttctcgtaaca

SEQ ID NO: 291228 - DNA, 21 bp, Artificial sequence
  SiRNA target sequence
tttggagatttctcgtaacat

SEQ ID NO: 291229 - DNA, 21 bp, Artificial sequence
  SiRNA target sequence
ttggagatttctcgtaacata

SEQ ID NO: 291230 - DNA, 21 bp, Artificial sequence
  SiRNA target sequence
tggagatttctcgtaacatag

SEQ ID NO: 291231 - DNA, 21 bp, Artificial sequence
  SiRNA target sequence
ggagatttctcgtaacatagc

SEQ ID NO: 291232 - DNA, 21 bp, Artificial sequence
  SiRNA target sequence
gagatttctcgtaacatagct

SEQ ID NO: 291233 - DNA, 21 bp, Artificial sequence
  SiRNA target sequence
agatttctcgtaacatagctg

SEQ ID NO: 291234 - DNA, 21 bp, Artificial sequence
  SiRNA target sequence
gatttctcgtaacatagctga

SEQ ID NO: 291235 - DNA, 21 bp, Artificial sequence
  SiRNA target sequence
atttctcgtaacatagctgaa

SEQ ID NO: 291236 - DNA, 21 bp, Artificial sequence
  SiRNA target sequence
tttctcgtaacatagctgaat

SEQ ID NO: 291237 - DNA, 21 bp, Artificial sequence
  SiRNA target sequence
ttctcgtaacatagctgaatt

SEQ ID NO: 291238 - DNA, 21 bp, Artificial sequence
  SiRNA target sequence
tctcgtaacatagctgaatta

SEQ ID NO: 291239 - DNA, 21 bp, Artificial sequence
  SiRNA target sequence
ctcgtaacatagctgaattaa

SEQ ID NO: 291240 - DNA, 21 bp, Artificial sequence
  SiRNA target sequence
tcgtaacatagctgaattaaa

SEQ ID NO: 291241 - DNA, 21 bp, Artificial sequence
  SiRNA target sequence
cgtaacatagctgaattaaag

SEQ ID NO: 291242 - DNA, 21 bp, Artificial sequence
  SiRNA target sequence
gtaacatagctgaattaaagt

SEQ ID NO: 291243 - DNA, 21 bp, Artificial sequence
  SiRNA target sequence
taacatagctgaattaaagtt

SEQ ID NO: 291244 - DNA, 21 bp, Artificial sequence
  SiRNA target sequence
aacatagctgaattaaagtta

SEQ ID NO: 291245 - DNA, 21 bp, Artificial sequence
  SiRNA target sequence
acatagctgaattaaagttac

SEQ ID NO: 291246 - DNA, 21 bp, Artificial sequence
  SiRNA target sequence
catagctgaattaaagttacc

SEQ ID NO: 291247 - DNA, 21 bp, Artificial sequence
  SiRNA target sequence
atagctgaattaaagttacca

SEQ ID NO: 291248 - DNA, 21 bp, Artificial sequence
  SiRNA target sequence
tagctgaattaaagttaccaa

SEQ ID NO: 291249 - DNA, 21 bp, Artificial sequence
  SiRNA target sequence
agctgaattaaagttaccaac

SEQ ID NO: 291250 - DNA, 21 bp, Artificial sequence
  SiRNA target sequence
gctgaattaaagttaccaaca

SEQ ID NO: 291251 - DNA, 21 bp, Artificial sequence
  SiRNA target sequence
ctgaattaaagttaccaacaa

SEQ ID NO: 291252 - DNA, 21 bp, Artificial sequence
  SiRNA target sequence
tgaattaaagttaccaacaaa

SEQ ID NO: 291253 - DNA, 21 bp, Artificial sequence
  SiRNA target sequence
gaattaaagttaccaacaaaa

SEQ ID NO: 291254 - DNA, 21 bp, Artificial sequence
  SiRNA target sequence
aattaaagttaccaacaaaat

SEQ ID NO: 291255 - DNA, 21 bp, Artificial sequence
  SiRNA target sequence
attaaagttaccaacaaaatt

SEQ ID NO: 291256 - DNA, 21 bp, Artificial sequence
  SiRNA target sequence
ttaaagttaccaacaaaatta

SEQ ID NO: 291257 - DNA, 21 bp, Artificial sequence
  SiRNA target sequence
taaagttaccaacaaaattaa

SEQ ID NO: 291258 - DNA, 21 bp, Artificial sequence
  SiRNA target sequence
aaagttaccaacaaaattaac

SEQ ID NO: 291259 - DNA, 21 bp, Artificial sequence
  SiRNA target sequence
aagttaccaacaaaattaaca

SEQ ID NO: 291260 - DNA, 21 bp, Artificial sequence
  SiRNA target sequence
agttaccaacaaaattaacaa

SEQ ID NO: 291261 - DNA, 21 bp, Artificial sequence
  SiRNA target sequence
gttaccaacaaaattaacaat

SEQ ID NO: 291262 - DNA, 21 bp, Artificial sequence
  SiRNA target sequence
ttaccaacaaaattaacaatt

SEQ ID NO: 291263 - DNA, 21 bp, Artificial sequence
  SiRNA target sequence
taccaacaaaattaacaatta

SEQ ID NO: 291264 - DNA, 21 bp, Artificial sequence
  SiRNA target sequence
accaacaaaattaacaattag

SEQ ID NO: 291265 - DNA, 21 bp, Artificial sequence
  SiRNA target sequence
ccaacaaaattaacaattagt

SEQ ID NO: 291266 - DNA, 21 bp, Artificial sequence
  SiRNA target sequence
caacaaaattaacaattagtt

SEQ ID NO: 291267 - DNA, 21 bp, Artificial sequence
  SiRNA target sequence
aacaaaattaacaattagttt

SEQ ID NO: 291268 - DNA, 21 bp, Artificial sequence
  SiRNA target sequence
acaaaattaacaattagtttt

SEQ ID NO: 291269 - DNA, 21 bp, Artificial sequence
  SiRNA target sequence
caaaattaacaattagtttta

SEQ ID NO: 291270 - DNA, 21 bp, Artificial sequence
  SiRNA target sequence
aaaattaacaattagttttaa

SEQ ID NO: 291271 - DNA, 21 bp, Artificial sequence
  SiRNA target sequence
aaattaacaattagttttaat

SEQ ID NO: 291272 - DNA, 21 bp, Artificial sequence
  SiRNA target sequence
aattaacaattagttttaata

SEQ ID NO: 291273 - DNA, 21 bp, Artificial sequence
  SiRNA target sequence
attaacaattagttttaatac

SEQ ID NO: 291274 - DNA, 21 bp, Artificial sequence
  SiRNA target sequence
ttaacaattagttttaatacg

SEQ ID NO: 291275 - DNA, 21 bp, Artificial sequence
  SiRNA target sequence
taacaattagttttaatacgc

SEQ ID NO: 291276 - DNA, 21 bp, Artificial sequence
  SiRNA target sequence
aacaattagttttaatacgca

SEQ ID NO: 291277 - DNA, 21 bp, Artificial sequence
  SiRNA target sequence
acaattagttttaatacgcac

SEQ ID NO: 291278 - DNA, 21 bp, Artificial sequence
  SiRNA target sequence
caattagttttaatacgcaca

SEQ ID NO: 291279 - DNA, 21 bp, Artificial sequence
  SiRNA target sequence
aattagttttaatacgcacat

SEQ ID NO: 291280 - DNA, 21 bp, Artificial sequence
  SiRNA target sequence
attagttttaatacgcacatg

SEQ ID NO: 291281 - DNA, 21 bp, Artificial sequence
  SiRNA target sequence
ttagttttaatacgcacatga

SEQ ID NO: 291282 - DNA, 21 bp, Artificial sequence
  SiRNA target sequence
tagttttaatacgcacatgag

SEQ ID NO: 291283 - DNA, 21 bp, Artificial sequence
  SiRNA target sequence
agttttaatacgcacatgaga

SEQ ID NO: 291284 - DNA, 21 bp, Artificial sequence
  SiRNA target sequence
gttttaatacgcacatgagat

SEQ ID NO: 291285 - DNA, 21 bp, Artificial sequence
  SiRNA target sequence
ttttaatacgcacatgagata

SEQ ID NO: 291286 - DNA, 21 bp, Artificial sequence
  SiRNA target sequence
tttaatacgcacatgagatac

SEQ ID NO: 291287 - DNA, 21 bp, Artificial sequence
  SiRNA target sequence
ttaatacgcacatgagatact

SEQ ID NO: 291288 - DNA, 21 bp, Artificial sequence
  SiRNA target sequence
taatacgcacatgagatactt

SEQ ID NO: 291289 - DNA, 21 bp, Artificial sequence
  SiRNA target sequence
aatacgcacatgagatacttg

SEQ ID NO: 291290 - DNA, 21 bp, Artificial sequence
  SiRNA target sequence
atacgcacatgagatacttga

SEQ ID NO: 291291 - DNA, 21 bp, Artificial sequence
  SiRNA target sequence
tacgcacatgagatacttgac

SEQ ID NO: 291292 - DNA, 21 bp, Artificial sequence
  SiRNA target sequence
acgcacatgagatacttgact

SEQ ID NO: 291293 - DNA, 21 bp, Artificial sequence
  SiRNA target sequence
cgcacatgagatacttgactg

SEQ ID NO: 291294 - DNA, 21 bp, Artificial sequence
  SiRNA target sequence
gcacatgagatacttgactga

SEQ ID NO: 291295 - DNA, 21 bp, Artificial sequence
  SiRNA target sequence
cacatgagatacttgactgaa

SEQ ID NO: 291296 - DNA, 21 bp, Artificial sequence
  SiRNA target sequence
acatgagatacttgactgaag

SEQ ID NO: 291297 - DNA, 21 bp, Artificial sequence
  SiRNA target sequence
catgagatacttgactgaagt

SEQ ID NO: 291298 - DNA, 21 bp, Artificial sequence
  SiRNA target sequence
atgagatacttgactgaagtt

SEQ ID NO: 291299 - DNA, 21 bp, Artificial sequence
  SiRNA target sequence
tgagatacttgactgaagttt

SEQ ID NO: 291300 - DNA, 21 bp, Artificial sequence
  SiRNA target sequence
gagatacttgactgaagtttt

SEQ ID NO: 291301 - DNA, 21 bp, Artificial sequence
  SiRNA target sequence
agatacttgactgaagttttc

SEQ ID NO: 291302 - DNA, 21 bp, Artificial sequence
  SiRNA target sequence
gatacttgactgaagttttca

SEQ ID NO: 291303 - DNA, 21 bp, Artificial sequence
  SiRNA target sequence
atacttgactgaagttttcaa

SEQ ID NO: 291304 - DNA, 21 bp, Artificial sequence
  SiRNA target sequence
tacttgactgaagttttcaaa

SEQ ID NO: 291305 - DNA, 21 bp, Artificial sequence
  SiRNA target sequence
acttgactgaagttttcaaat

SEQ ID NO: 291306 - DNA, 21 bp, Artificial sequence
  SiRNA target sequence
cttgactgaagttttcaaatc

SEQ ID NO: 291307 - DNA, 21 bp, Artificial sequence
  SiRNA target sequence
ttgactgaagttttcaaatca

SEQ ID NO: 291308 - DNA, 21 bp, Artificial sequence
  SiRNA target sequence
tgactgaagttttcaaatcag

SEQ ID NO: 291309 - DNA, 21 bp, Artificial sequence
  SiRNA target sequence
gactgaagttttcaaatcagt

SEQ ID NO: 291310 - DNA, 21 bp, Artificial sequence
  SiRNA target sequence
actgaagttttcaaatcagtt

SEQ ID NO: 291311 - DNA, 21 bp, Artificial sequence
  SiRNA target sequence
ctgaagttttcaaatcagttg

SEQ ID NO: 291312 - DNA, 21 bp, Artificial sequence
  SiRNA target sequence
tgaagttttcaaatcagttga

SEQ ID NO: 291313 - DNA, 21 bp, Artificial sequence
  SiRNA target sequence
gaagttttcaaatcagttgac

SEQ ID NO: 291314 - DNA, 21 bp, Artificial sequence
  SiRNA target sequence
aagttttcaaatcagttgaca

SEQ ID NO: 291315 - DNA, 21 bp, Artificial sequence
  SiRNA target sequence
agttttcaaatcagttgacac

SEQ ID NO: 291316 - DNA, 21 bp, Artificial sequence
  SiRNA target sequence
gttttcaaatcagttgacaca

SEQ ID NO: 291317 - DNA, 21 bp, Artificial sequence
  SiRNA target sequence
ttttcaaatcagttgacacat

SEQ ID NO: 291318 - DNA, 21 bp, Artificial sequence
  SiRNA target sequence
tttcaaatcagttgacacatc

SEQ ID NO: 291319 - DNA, 21 bp, Artificial sequence
  SiRNA target sequence
ttcaaatcagttgacacatct

SEQ ID NO: 291320 - DNA, 21 bp, Artificial sequence
  SiRNA target sequence
tcaaatcagttgacacatctg

SEQ ID NO: 291321 - DNA, 21 bp, Artificial sequence
  SiRNA target sequence
caaatcagttgacacatctgg

SEQ ID NO: 291322 - DNA, 21 bp, Artificial sequence
  SiRNA target sequence
aaatcagttgacacatctgga

SEQ ID NO: 291323 - DNA, 21 bp, Artificial sequence
  SiRNA target sequence
aatcagttgacacatctggag

SEQ ID NO: 291324 - DNA, 21 bp, Artificial sequence
  SiRNA target sequence
atcagttgacacatctggagc

SEQ ID NO: 291325 - DNA, 21 bp, Artificial sequence
  SiRNA target sequence
tcagttgacacatctggagct

SEQ ID NO: 291326 - DNA, 21 bp, Artificial sequence
  SiRNA target sequence
cagttgacacatctggagctt

SEQ ID NO: 291327 - DNA, 21 bp, Artificial sequence
  SiRNA target sequence
agttgacacatctggagcttt

SEQ ID NO: 291328 - DNA, 21 bp, Artificial sequence
  SiRNA target sequence
gttgacacatctggagctttt

SEQ ID NO: 291329 - DNA, 21 bp, Artificial sequence
  SiRNA target sequence
ttgacacatctggagcttttg

SEQ ID NO: 291330 - DNA, 21 bp, Artificial sequence
  SiRNA target sequence
tgacacatctggagcttttgg

SEQ ID NO: 291331 - DNA, 21 bp, Artificial sequence
  SiRNA target sequence
gacacatctggagcttttgga

SEQ ID NO: 291332 - DNA, 21 bp, Artificial sequence
  SiRNA target sequence
acacatctggagcttttggaa

SEQ ID NO: 291333 - DNA, 21 bp, Artificial sequence
  SiRNA target sequence
cacatctggagcttttggaaa

SEQ ID NO: 291334 - DNA, 21 bp, Artificial sequence
  SiRNA target sequence
acatctggagcttttggaaac

SEQ ID NO: 291335 - DNA, 21 bp, Artificial sequence
  SiRNA target sequence
catctggagcttttggaaaca

SEQ ID NO: 291336 - DNA, 21 bp, Artificial sequence
  SiRNA target sequence
atctggagcttttggaaacaa

SEQ ID NO: 291337 - DNA, 21 bp, Artificial sequence
  SiRNA target sequence
tctggagcttttggaaacaaa

SEQ ID NO: 291338 - DNA, 21 bp, Artificial sequence
  SiRNA target sequence
ctggagcttttggaaacaaac

SEQ ID NO: 291339 - DNA, 21 bp, Artificial sequence
  SiRNA target sequence
tggagcttttggaaacaaacc

SEQ ID NO: 291340 - DNA, 21 bp, Artificial sequence
  SiRNA target sequence
ggagcttttggaaacaaacct

SEQ ID NO: 291341 - DNA, 21 bp, Artificial sequence
  SiRNA target sequence
gagcttttggaaacaaacctc

SEQ ID NO: 291342 - DNA, 21 bp, Artificial sequence
  SiRNA target sequence
agcttttggaaacaaacctcg

SEQ ID NO: 291343 - DNA, 21 bp, Artificial sequence
  SiRNA target sequence
gcttttggaaacaaacctcga

SEQ ID NO: 291344 - DNA, 21 bp, Artificial sequence
  SiRNA target sequence
cttttggaaacaaacctcgaa

SEQ ID NO: 291345 - DNA, 21 bp, Artificial sequence
  SiRNA target sequence
ttttggaaacaaacctcgaac

SEQ ID NO: 291346 - DNA, 21 bp, Artificial sequence
  SiRNA target sequence
tttggaaacaaacctcgaacg

SEQ ID NO: 291347 - DNA, 21 bp, Artificial sequence
  SiRNA target sequence
ttggaaacaaacctcgaacgc

SEQ ID NO: 291348 - DNA, 21 bp, Artificial sequence
  SiRNA target sequence
tggaaacaaacctcgaacgca

SEQ ID NO: 291349 - DNA, 21 bp, Artificial sequence
  SiRNA target sequence
ggaaacaaacctcgaacgcaa

SEQ ID NO: 291350 - DNA, 21 bp, Artificial sequence
  SiRNA target sequence
gaaacaaacctcgaacgcaac

SEQ ID NO: 291351 - DNA, 21 bp, Artificial sequence
  SiRNA target sequence
aaacaaacctcgaacgcaacc

SEQ ID NO: 291352 - DNA, 21 bp, Artificial sequence
  SiRNA target sequence
aacaaacctcgaacgcaacca

SEQ ID NO: 291353 - DNA, 21 bp, Artificial sequence
  SiRNA target sequence
acaaacctcgaacgcaaccaa

SEQ ID NO: 291354 - DNA, 21 bp, Artificial sequence
  SiRNA target sequence
caaacctcgaacgcaaccaat

SEQ ID NO: 291355 - DNA, 21 bp, Artificial sequence
  SiRNA target sequence
aaacctcgaacgcaaccaata

SEQ ID NO: 291356 - DNA, 21 bp, Artificial sequence
  SiRNA target sequence
aacctcgaacgcaaccaatag

SEQ ID NO: 291357 - DNA, 21 bp, Artificial sequence
  SiRNA target sequence
acctcgaacgcaaccaatagt

SEQ ID NO: 291358 - DNA, 21 bp, Artificial sequence
  SiRNA target sequence
cctcgaacgcaaccaatagtt

SEQ ID NO: 291359 - DNA, 21 bp, Artificial sequence
  SiRNA target sequence
ctcgaacgcaaccaatagtta

SEQ ID NO: 291360 - DNA, 21 bp, Artificial sequence
  SiRNA target sequence
tcgaacgcaaccaatagttat

SEQ ID NO: 291361 - DNA, 21 bp, Artificial sequence
  SiRNA target sequence
cgaacgcaaccaatagttatt

SEQ ID NO: 291362 - DNA, 21 bp, Artificial sequence
  SiRNA target sequence
gaacgcaaccaatagttattt

SEQ ID NO: 291363 - DNA, 21 bp, Artificial sequence
  SiRNA target sequence
aacgcaaccaatagttatttg

SEQ ID NO: 291364 - DNA, 21 bp, Artificial sequence
  SiRNA target sequence
acgcaaccaatagttatttgg

SEQ ID NO: 291365 - DNA, 21 bp, Artificial sequence
  SiRNA target sequence
cgcaaccaatagttatttggc

SEQ ID NO: 291366 - DNA, 21 bp, Artificial sequence
  SiRNA target sequence
gcaaccaatagttatttggct

SEQ ID NO: 291367 - DNA, 21 bp, Artificial sequence
  SiRNA target sequence
caaccaatagttatttggctt

SEQ ID NO: 291368 - DNA, 21 bp, Artificial sequence
  SiRNA target sequence
aaccaatagttatttggcttt

SEQ ID NO: 291369 - DNA, 21 bp, Artificial sequence
  SiRNA target sequence
accaatagttatttggctttt

SEQ ID NO: 291370 - DNA, 21 bp, Artificial sequence
  SiRNA target sequence
ccaatagttatttggcttttt

SEQ ID NO: 291371 - DNA, 21 bp, Artificial sequence
  SiRNA target sequence
caatagttatttggctttttg

SEQ ID NO: 291372 - DNA, 21 bp, Artificial sequence
  SiRNA target sequence
aatagttatttggctttttgg

SEQ ID NO: 291373 - DNA, 21 bp, Artificial sequence
  SiRNA target sequence
atagttatttggctttttgga

SEQ ID NO: 291374 - DNA, 21 bp, Artificial sequence
  SiRNA target sequence
tagttatttggctttttggag

SEQ ID NO: 291375 - DNA, 21 bp, Artificial sequence
  SiRNA target sequence
agttatttggctttttggaga

SEQ ID NO: 291376 - DNA, 21 bp, Artificial sequence
  SiRNA target sequence
gttatttggctttttggagaa

SEQ ID NO: 291377 - DNA, 21 bp, Artificial sequence
  SiRNA target sequence
ttatttggctttttggagaat

SEQ ID NO: 291378 - DNA, 21 bp, Artificial sequence
  SiRNA target sequence
tatttggctttttggagaatc

SEQ ID NO: 291379 - DNA, 21 bp, Artificial sequence
  SiRNA target sequence
atttggctttttggagaatca

SEQ ID NO: 291380 - DNA, 21 bp, Artificial sequence
  SiRNA target sequence
tttggctttttggagaatcag

SEQ ID NO: 291381 - DNA, 21 bp, Artificial sequence
  SiRNA target sequence
ttggctttttggagaatcagg

SEQ ID NO: 291382 - DNA, 21 bp, Artificial sequence
  SiRNA target sequence
tggctttttggagaatcagga

SEQ ID NO: 291383 - DNA, 21 bp, Artificial sequence
  SiRNA target sequence
ggctttttggagaatcaggaa

SEQ ID NO: 291384 - DNA, 21 bp, Artificial sequence
  SiRNA target sequence
gctttttggagaatcaggaag

SEQ ID NO: 291385 - DNA, 21 bp, Artificial sequence
  SiRNA target sequence
ctttttggagaatcaggaaga

SEQ ID NO: 291386 - DNA, 21 bp, Artificial sequence
  SiRNA target sequence
tttttggagaatcaggaagag

SEQ ID NO: 291387 - DNA, 21 bp, Artificial sequence
  SiRNA target sequence
ttttggagaatcaggaagagg

SEQ ID NO: 291388 - DNA, 21 bp, Artificial sequence
  SiRNA target sequence
tttggagaatcaggaagagga

SEQ ID NO: 291389 - DNA, 21 bp, Artificial sequence
  SiRNA target sequence
ttggagaatcaggaagaggaa

SEQ ID NO: 291390 - DNA, 21 bp, Artificial sequence
  SiRNA target sequence
tggagaatcaggaagaggaaa

SEQ ID NO: 291391 - DNA, 21 bp, Artificial sequence
  SiRNA target sequence
ggagaatcaggaagaggaaaa

SEQ ID NO: 291392 - DNA, 21 bp, Artificial sequence
  SiRNA target sequence
gagaatcaggaagaggaaaat

SEQ ID NO: 291393 - DNA, 21 bp, Artificial sequence
  SiRNA target sequence
agaatcaggaagaggaaaatc

SEQ ID NO: 291394 - DNA, 21 bp, Artificial sequence
  SiRNA target sequence
gaatcaggaagaggaaaatcg

SEQ ID NO: 291395 - DNA, 21 bp, Artificial sequence
  SiRNA target sequence
aatcaggaagaggaaaatcgg

SEQ ID NO: 291396 - DNA, 21 bp, Artificial sequence
  SiRNA target sequence
atcaggaagaggaaaatcggg

SEQ ID NO: 291397 - DNA, 21 bp, Artificial sequence
  SiRNA target sequence
tcaggaagaggaaaatcgggg

SEQ ID NO: 291398 - DNA, 21 bp, Artificial sequence
  SiRNA target sequence
caggaagaggaaaatcgggga

SEQ ID NO: 291399 - DNA, 21 bp, Artificial sequence
  SiRNA target sequence
aggaagaggaaaatcggggat

SEQ ID NO: 291400 - DNA, 21 bp, Artificial sequence
  SiRNA target sequence
ggaagaggaaaatcggggatg

SEQ ID NO: 291401 - DNA, 21 bp, Artificial sequence
  SiRNA target sequence
gaagaggaaaatcggggatga

SEQ ID NO: 291402 - DNA, 21 bp, Artificial sequence
  SiRNA target sequence
aagaggaaaatcggggatgac

SEQ ID NO: 291403 - DNA, 21 bp, Artificial sequence
  SiRNA target sequence
agaggaaaatcggggatgact

SEQ ID NO: 291404 - DNA, 21 bp, Artificial sequence
  SiRNA target sequence
gaggaaaatcggggatgactt

SEQ ID NO: 291405 - DNA, 21 bp, Artificial sequence
  SiRNA target sequence
aggaaaatcggggatgacttg

SEQ ID NO: 291406 - DNA, 21 bp, Artificial sequence
  SiRNA target sequence
ggaaaatcggggatgacttgg

SEQ ID NO: 291407 - DNA, 21 bp, Artificial sequence
  SiRNA target sequence
gaaaatcggggatgacttggc

SEQ ID NO: 291408 - DNA, 21 bp, Artificial sequence
  SiRNA target sequence
aaaatcggggatgacttggcc

SEQ ID NO: 291409 - DNA, 21 bp, Artificial sequence
  SiRNA target sequence
aaatcggggatgacttggcct

SEQ ID NO: 291410 - DNA, 21 bp, Artificial sequence
  SiRNA target sequence
aatcggggatgacttggcctc

SEQ ID NO: 291411 - DNA, 21 bp, Artificial sequence
  SiRNA target sequence
atcggggatgacttggcctct

SEQ ID NO: 291412 - DNA, 21 bp, Artificial sequence
  SiRNA target sequence
tcggggatgacttggcctcta

SEQ ID NO: 291413 - DNA, 21 bp, Artificial sequence
  SiRNA target sequence
cggggatgacttggcctctag

SEQ ID NO: 291414 - DNA, 21 bp, Artificial sequence
  SiRNA target sequence
ggggatgacttggcctctagc

SEQ ID NO: 291415 - DNA, 21 bp, Artificial sequence
  SiRNA target sequence
gggatgacttggcctctagca

SEQ ID NO: 291416 - DNA, 21 bp, Artificial sequence
  SiRNA target sequence
ggatgacttggcctctagcaa

SEQ ID NO: 291417 - DNA, 21 bp, Artificial sequence
  SiRNA target sequence
gatgacttggcctctagcaat

SEQ ID NO: 291418 - DNA, 21 bp, Artificial sequence
  SiRNA target sequence
atgacttggcctctagcaata

SEQ ID NO: 291419 - DNA, 21 bp, Artificial sequence
  SiRNA target sequence
tgacttggcctctagcaatag

SEQ ID NO: 291420 - DNA, 21 bp, Artificial sequence
  SiRNA target sequence
gacttggcctctagcaataga

SEQ ID NO: 291421 - DNA, 21 bp, Artificial sequence
  SiRNA target sequence
acttggcctctagcaatagat

SEQ ID NO: 291422 - DNA, 21 bp, Artificial sequence
  SiRNA target sequence
cttggcctctagcaatagatc

SEQ ID NO: 291423 - DNA, 21 bp, Artificial sequence
  SiRNA target sequence
ttggcctctagcaatagatct

SEQ ID NO: 291424 - DNA, 21 bp, Artificial sequence
  SiRNA target sequence
tggcctctagcaatagatcta

SEQ ID NO: 291425 - DNA, 21 bp, Artificial sequence
  SiRNA target sequence
ggcctctagcaatagatctaa

SEQ ID NO: 291426 - DNA, 21 bp, Artificial sequence
  SiRNA target sequence
gcctctagcaatagatctaaa

SEQ ID NO: 291427 - DNA, 21 bp, Artificial sequence
  SiRNA target sequence
cctctagcaatagatctaaat

SEQ ID NO: 291428 - DNA, 21 bp, Artificial sequence
  SiRNA target sequence
ctctagcaatagatctaaata

SEQ ID NO: 291429 - DNA, 21 bp, Artificial sequence
  SiRNA target sequence
tctagcaatagatctaaataa

SEQ ID NO: 291430 - DNA, 21 bp, Artificial sequence
  SiRNA target sequence
ctagcaatagatctaaataac

SEQ ID NO: 291431 - DNA, 21 bp, Artificial sequence
  SiRNA target sequence
tagcaatagatctaaataaca

SEQ ID NO: 291432 - DNA, 21 bp, Artificial sequence
  SiRNA target sequence
agcaatagatctaaataacag

SEQ ID NO: 291433 - DNA, 21 bp, Artificial sequence
  SiRNA target sequence
gcaatagatctaaataacagc

SEQ ID NO: 291434 - DNA, 21 bp, Artificial sequence
  SiRNA target sequence
caatagatctaaataacagct

SEQ ID NO: 291435 - DNA, 21 bp, Artificial sequence
  SiRNA target sequence
aatagatctaaataacagctt

SEQ ID NO: 291436 - DNA, 21 bp, Artificial sequence
  SiRNA target sequence
atagatctaaataacagctta

SEQ ID NO: 291437 - DNA, 21 bp, Artificial sequence
  SiRNA target sequence
tagatctaaataacagcttac

SEQ ID NO: 291438 - DNA, 21 bp, Artificial sequence
  SiRNA target sequence
agatctaaataacagcttact

SEQ ID NO: 291439 - DNA, 21 bp, Artificial sequence
  SiRNA target sequence
gatctaaataacagcttactt

SEQ ID NO: 291440 - DNA, 21 bp, Artificial sequence
  SiRNA target sequence
atctaaataacagcttacttg

SEQ ID NO: 291441 - DNA, 21 bp, Artificial sequence
  SiRNA target sequence
tctaaataacagcttacttga

SEQ ID NO: 291442 - DNA, 21 bp, Artificial sequence
  SiRNA target sequence
ctaaataacagcttacttgat

SEQ ID NO: 291443 - DNA, 21 bp, Artificial sequence
  SiRNA target sequence
taaataacagcttacttgata

SEQ ID NO: 291444 - DNA, 21 bp, Artificial sequence
  SiRNA target sequence
aaataacagcttacttgataa

SEQ ID NO: 291445 - DNA, 21 bp, Artificial sequence
  SiRNA target sequence
aataacagcttacttgataat

SEQ ID NO: 291446 - DNA, 21 bp, Artificial sequence
  SiRNA target sequence
ataacagcttacttgataatg

SEQ ID NO: 291447 - DNA, 21 bp, Artificial sequence
  SiRNA target sequence
taacagcttacttgataatgt

SEQ ID NO: 291448 - DNA, 21 bp, Artificial sequence
  SiRNA target sequence
aacagcttacttgataatgta

SEQ ID NO: 291449 - DNA, 21 bp, Artificial sequence
  SiRNA target sequence
acagcttacttgataatgtag

SEQ ID NO: 291450 - DNA, 21 bp, Artificial sequence
  SiRNA target sequence
cagcttacttgataatgtaga

SEQ ID NO: 291451 - DNA, 21 bp, Artificial sequence
  SiRNA target sequence
agcttacttgataatgtagat

SEQ ID NO: 291452 - DNA, 21 bp, Artificial sequence
  SiRNA target sequence
gcttacttgataatgtagatg

SEQ ID NO: 291453 - DNA, 21 bp, Artificial sequence
  SiRNA target sequence
cttacttgataatgtagatga

SEQ ID NO: 291454 - DNA, 21 bp, Artificial sequence
  SiRNA target sequence
ttacttgataatgtagatgaa

SEQ ID NO: 291455 - DNA, 21 bp, Artificial sequence
  SiRNA target sequence
tacttgataatgtagatgaaa

SEQ ID NO: 291456 - DNA, 21 bp, Artificial sequence
  SiRNA target sequence
acttgataatgtagatgaaat

SEQ ID NO: 291457 - DNA, 21 bp, Artificial sequence
  SiRNA target sequence
cttgataatgtagatgaaatg

SEQ ID NO: 291458 - DNA, 21 bp, Artificial sequence
  SiRNA target sequence
ttgataatgtagatgaaatga

SEQ ID NO: 291459 - DNA, 21 bp, Artificial sequence
  SiRNA target sequence
tgataatgtagatgaaatgag

SEQ ID NO: 291460 - DNA, 21 bp, Artificial sequence
  SiRNA target sequence
gataatgtagatgaaatgagg

SEQ ID NO: 291461 - DNA, 21 bp, Artificial sequence
  SiRNA target sequence
ataatgtagatgaaatgagga

SEQ ID NO: 291462 - DNA, 21 bp, Artificial sequence
  SiRNA target sequence
taatgtagatgaaatgaggaa

SEQ ID NO: 291463 - DNA, 21 bp, Artificial sequence
  SiRNA target sequence
aatgtagatgaaatgaggaat

SEQ ID NO: 291464 - DNA, 21 bp, Artificial sequence
  SiRNA target sequence
atgtagatgaaatgaggaatt

SEQ ID NO: 291465 - DNA, 21 bp, Artificial sequence
  SiRNA target sequence
tgtagatgaaatgaggaattt

SEQ ID NO: 291466 - DNA, 21 bp, Artificial sequence
  SiRNA target sequence
gtagatgaaatgaggaatttt

SEQ ID NO: 291467 - DNA, 21 bp, Artificial sequence
  SiRNA target sequence
tagatgaaatgaggaattttt

SEQ ID NO: 291468 - DNA, 21 bp, Artificial sequence
  SiRNA target sequence
agatgaaatgaggaatttttc

SEQ ID NO: 291469 - DNA, 21 bp, Artificial sequence
  SiRNA target sequence
gatgaaatgaggaatttttca

SEQ ID NO: 291470 - DNA, 21 bp, Artificial sequence
  SiRNA target sequence
atgaaatgaggaatttttcaa

SEQ ID NO: 291471 - DNA, 21 bp, Artificial sequence
  SiRNA target sequence
tgaaatgaggaatttttcaaa

SEQ ID NO: 291472 - DNA, 21 bp, Artificial sequence
  SiRNA target sequence
gaaatgaggaatttttcaaag

SEQ ID NO: 291473 - DNA, 21 bp, Artificial sequence
  SiRNA target sequence
aaatgaggaatttttcaaaga

SEQ ID NO: 291474 - DNA, 21 bp, Artificial sequence
  SiRNA target sequence
aatgaggaatttttcaaagaa

SEQ ID NO: 291475 - DNA, 21 bp, Artificial sequence
  SiRNA target sequence
atgaggaatttttcaaagaac

SEQ ID NO: 291476 - DNA, 21 bp, Artificial sequence
  SiRNA target sequence
tgaggaatttttcaaagaaca

SEQ ID NO: 291477 - DNA, 21 bp, Artificial sequence
  SiRNA target sequence
gaggaatttttcaaagaacat

SEQ ID NO: 291478 - DNA, 21 bp, Artificial sequence
  SiRNA target sequence
aggaatttttcaaagaacatc

SEQ ID NO: 291479 - DNA, 21 bp, Artificial sequence
  SiRNA target sequence
ggaatttttcaaagaacatct

SEQ ID NO: 291480 - DNA, 21 bp, Artificial sequence
  SiRNA target sequence
gaatttttcaaagaacatcta

SEQ ID NO: 291481 - DNA, 21 bp, Artificial sequence
  SiRNA target sequence
aatttttcaaagaacatctat

SEQ ID NO: 291482 - DNA, 21 bp, Artificial sequence
  SiRNA target sequence
atttttcaaagaacatctata

SEQ ID NO: 291483 - DNA, 21 bp, Artificial sequence
  SiRNA target sequence
tttttcaaagaacatctatat

SEQ ID NO: 291484 - DNA, 21 bp, Artificial sequence
  SiRNA target sequence
ttttcaaagaacatctatatg

SEQ ID NO: 291485 - DNA, 21 bp, Artificial sequence
  SiRNA target sequence
tttcaaagaacatctatatga

SEQ ID NO: 291486 - DNA, 21 bp, Artificial sequence
  SiRNA target sequence
ttcaaagaacatctatatgag

SEQ ID NO: 291487 - DNA, 21 bp, Artificial sequence
  SiRNA target sequence
tcaaagaacatctatatgaga

SEQ ID NO: 291488 - DNA, 21 bp, Artificial sequence
  SiRNA target sequence
caaagaacatctatatgagaa

SEQ ID NO: 291489 - DNA, 21 bp, Artificial sequence
  SiRNA target sequence
aaagaacatctatatgagaaa

SEQ ID NO: 291490 - DNA, 21 bp, Artificial sequence
  SiRNA target sequence
aagaacatctatatgagaaat

SEQ ID NO: 291491 - DNA, 21 bp, Artificial sequence
  SiRNA target sequence
agaacatctatatgagaaatg

SEQ ID NO: 291492 - DNA, 21 bp, Artificial sequence
  SiRNA target sequence
gaacatctatatgagaaatgt

SEQ ID NO: 291493 - DNA, 21 bp, Artificial sequence
  SiRNA target sequence
aacatctatatgagaaatgtt

SEQ ID NO: 291494 - DNA, 21 bp, Artificial sequence
  SiRNA target sequence
acatctatatgagaaatgttg

SEQ ID NO: 291495 - DNA, 21 bp, Artificial sequence
  SiRNA target sequence
catctatatgagaaatgttga

SEQ ID NO: 291496 - DNA, 21 bp, Artificial sequence
  SiRNA target sequence
atctatatgagaaatgttgaa

SEQ ID NO: 291497 - DNA, 21 bp, Artificial sequence
  SiRNA target sequence
tctatatgagaaatgttgaac

SEQ ID NO: 291498 - DNA, 21 bp, Artificial sequence
  SiRNA target sequence
ctatatgagaaatgttgaaca

SEQ ID NO: 291499 - DNA, 21 bp, Artificial sequence
  SiRNA target sequence
tatatgagaaatgttgaacag

SEQ ID NO: 291500 - DNA, 21 bp, Artificial sequence
  SiRNA target sequence
atatgagaaatgttgaacagg

SEQ ID NO: 291501 - DNA, 21 bp, Artificial sequence
  SiRNA target sequence
tatgagaaatgttgaacagga

SEQ ID NO: 291502 - DNA, 21 bp, Artificial sequence
  SiRNA target sequence
atgagaaatgttgaacaggaa

SEQ ID NO: 291503 - DNA, 21 bp, Artificial sequence
  SiRNA target sequence
tgagaaatgttgaacaggaat

SEQ ID NO: 291504 - DNA, 21 bp, Artificial sequence
  SiRNA target sequence
gagaaatgttgaacaggaatt

SEQ ID NO: 291505 - DNA, 21 bp, Artificial sequence
  SiRNA target sequence
agaaatgttgaacaggaattc

SEQ ID NO: 291506 - DNA, 21 bp, Artificial sequence
  SiRNA target sequence
gaaatgttgaacaggaattct

SEQ ID NO: 291507 - DNA, 21 bp, Artificial sequence
  SiRNA target sequence
aaatgttgaacaggaattctg

SEQ ID NO: 291508 - DNA, 21 bp, Artificial sequence
  SiRNA target sequence
aatgttgaacaggaattctgg

SEQ ID NO: 291509 - DNA, 21 bp, Artificial sequence
  SiRNA target sequence
atgttgaacaggaattctggg

SEQ ID NO: 291510 - DNA, 21 bp, Artificial sequence
  SiRNA target sequence
tgttgaacaggaattctggga

SEQ ID NO: 291511 - DNA, 21 bp, Artificial sequence
  SiRNA target sequence
gttgaacaggaattctgggat

SEQ ID NO: 291512 - DNA, 21 bp, Artificial sequence
  SiRNA target sequence
ttgaacaggaattctgggata

SEQ ID NO: 291513 - DNA, 21 bp, Artificial sequence
  SiRNA target sequence
tgaacaggaattctgggataa

SEQ ID NO: 291514 - DNA, 21 bp, Artificial sequence
  SiRNA target sequence
gaacaggaattctgggataat

SEQ ID NO: 291515 - DNA, 21 bp, Artificial sequence
  SiRNA target sequence
aacaggaattctgggataatt

SEQ ID NO: 291516 - DNA, 21 bp, Artificial sequence
  SiRNA target sequence
acaggaattctgggataatta

SEQ ID NO: 291517 - DNA, 21 bp, Artificial sequence
  SiRNA target sequence
caggaattctgggataattat

SEQ ID NO: 291518 - DNA, 21 bp, Artificial sequence
  SiRNA target sequence
aggaattctgggataattatc

SEQ ID NO: 291519 - DNA, 21 bp, Artificial sequence
  SiRNA target sequence
ggaattctgggataattatca

SEQ ID NO: 291520 - DNA, 21 bp, Artificial sequence
  SiRNA target sequence
gaattctgggataattatcaa

SEQ ID NO: 291521 - DNA, 21 bp, Artificial sequence
  SiRNA target sequence
aattctgggataattatcaag

SEQ ID NO: 291522 - DNA, 21 bp, Artificial sequence
  SiRNA target sequence
attctgggataattatcaagg

SEQ ID NO: 291523 - DNA, 21 bp, Artificial sequence
  SiRNA target sequence
ttctgggataattatcaagga

SEQ ID NO: 291524 - DNA, 21 bp, Artificial sequence
  SiRNA target sequence
tctgggataattatcaaggac

SEQ ID NO: 291525 - DNA, 21 bp, Artificial sequence
  SiRNA target sequence
ctgggataattatcaaggaca

SEQ ID NO: 291526 - DNA, 21 bp, Artificial sequence
  SiRNA target sequence
tgggataattatcaaggacaa

SEQ ID NO: 291527 - DNA, 21 bp, Artificial sequence
  SiRNA target sequence
gggataattatcaaggacaaa

SEQ ID NO: 291528 - DNA, 21 bp, Artificial sequence
  SiRNA target sequence
ggataattatcaaggacaaaa

SEQ ID NO: 291529 - DNA, 21 bp, Artificial sequence
  SiRNA target sequence
gataattatcaaggacaaaat

SEQ ID NO: 291530 - DNA, 21 bp, Artificial sequence
  SiRNA target sequence
ataattatcaaggacaaaata

SEQ ID NO: 291531 - DNA, 21 bp, Artificial sequence
  SiRNA target sequence
taattatcaaggacaaaatat

SEQ ID NO: 291532 - DNA, 21 bp, Artificial sequence
  SiRNA target sequence
aattatcaaggacaaaatatt

SEQ ID NO: 291533 - DNA, 21 bp, Artificial sequence
  SiRNA target sequence
attatcaaggacaaaatattg

SEQ ID NO: 291534 - DNA, 21 bp, Artificial sequence
  SiRNA target sequence
ttatcaaggacaaaatattgt

SEQ ID NO: 291535 - DNA, 21 bp, Artificial sequence
  SiRNA target sequence
tatcaaggacaaaatattgta

SEQ ID NO: 291536 - DNA, 21 bp, Artificial sequence
  SiRNA target sequence
atcaaggacaaaatattgtat

SEQ ID NO: 291537 - DNA, 21 bp, Artificial sequence
  SiRNA target sequence
tcaaggacaaaatattgtatg

SEQ ID NO: 291538 - DNA, 21 bp, Artificial sequence
  SiRNA target sequence
caaggacaaaatattgtatgt

SEQ ID NO: 291539 - DNA, 21 bp, Artificial sequence
  SiRNA target sequence
aaggacaaaatattgtatgty

SEQ ID NO: 291540 - DNA, 21 bp, Artificial sequence
  SiRNA target sequence
aggacaaaatattgtatgtya

SEQ ID NO: 291541 - DNA, 21 bp, Artificial sequence
  SiRNA target sequence
ggacaaaatattgtatgtyat

SEQ ID NO: 291542 - DNA, 21 bp, Artificial sequence
  SiRNA target sequence
gacaaaatattgtatgtyatg

SEQ ID NO: 291543 - DNA, 21 bp, Artificial sequence
  SiRNA target sequence
acaaaatattgtatgtyatga

SEQ ID NO: 291544 - DNA, 21 bp, Artificial sequence
  SiRNA target sequence
caaaatattgtatgtyatgat

SEQ ID NO: 291545 - DNA, 21 bp, Artificial sequence
  SiRNA target sequence
aaaatattgtatgtyatgatg

SEQ ID NO: 291546 - DNA, 21 bp, Artificial sequence
  SiRNA target sequence
aaatattgtatgtyatgatga

SEQ ID NO: 291547 - DNA, 21 bp, Artificial sequence
  SiRNA target sequence
aatattgtatgtyatgatgat

SEQ ID NO: 291548 - DNA, 21 bp, Artificial sequence
  SiRNA target sequence
atattgtatgtyatgatgatt

SEQ ID NO: 291549 - DNA, 21 bp, Artificial sequence
  SiRNA target sequence
tattgtatgtyatgatgattt

SEQ ID NO: 291550 - DNA, 21 bp, Artificial sequence
  SiRNA target sequence
attgtatgtyatgatgatttt

SEQ ID NO: 291551 - DNA, 21 bp, Artificial sequence
  SiRNA target sequence
ttgtatgtyatgatgattttg

SEQ ID NO: 291552 - DNA, 21 bp, Artificial sequence
  SiRNA target sequence
tgtatgtyatgatgattttgg

SEQ ID NO: 291553 - DNA, 21 bp, Artificial sequence
  SiRNA target sequence
gtatgtyatgatgattttgga

SEQ ID NO: 291554 - DNA, 21 bp, Artificial sequence
  SiRNA target sequence
tatgtyatgatgattttggac

SEQ ID NO: 291555 - DNA, 21 bp, Artificial sequence
  SiRNA target sequence
atgtyatgatgattttggaca

SEQ ID NO: 291556 - DNA, 21 bp, Artificial sequence
  SiRNA target sequence
tgtyatgatgattttggacaa

SEQ ID NO: 291557 - DNA, 21 bp, Artificial sequence
  SiRNA target sequence
gtyatgatgattttggacaaa

SEQ ID NO: 291558 - DNA, 21 bp, Artificial sequence
  SiRNA target sequence
tyatgatgattttggacaaat

SEQ ID NO: 291559 - DNA, 21 bp, Artificial sequence
  SiRNA target sequence
yatgatgattttggacaaatg

SEQ ID NO: 291560 - DNA, 21 bp, Artificial sequence
  SiRNA target sequence
atgatgattttggacaaatga

SEQ ID NO: 291561 - DNA, 21 bp, Artificial sequence
  SiRNA target sequence
tgatgattttggacaaatgag

SEQ ID NO: 291562 - DNA, 21 bp, Artificial sequence
  SiRNA target sequence
gatgattttggacaaatgagg

SEQ ID NO: 291563 - DNA, 21 bp, Artificial sequence
  SiRNA target sequence
atgattttggacaaatgaggg

SEQ ID NO: 291564 - DNA, 21 bp, Artificial sequence
  SiRNA target sequence
tgattttggacaaatgaggga

SEQ ID NO: 291565 - DNA, 21 bp, Artificial sequence
  SiRNA target sequence
gattttggacaaatgagggat

SEQ ID NO: 291566 - DNA, 21 bp, Artificial sequence
  SiRNA target sequence
attttggacaaatgagggatt

SEQ ID NO: 291567 - DNA, 21 bp, Artificial sequence
  SiRNA target sequence
ttttggacaaatgagggattc

SEQ ID NO: 291568 - DNA, 21 bp, Artificial sequence
  SiRNA target sequence
tttggacaaatgagggattca

SEQ ID NO: 291569 - DNA, 21 bp, Artificial sequence
  SiRNA target sequence
ttggacaaatgagggattcat

SEQ ID NO: 291570 - DNA, 21 bp, Artificial sequence
  SiRNA target sequence
tggacaaatgagggattcatc

SEQ ID NO: 291571 - DNA, 21 bp, Artificial sequence
  SiRNA target sequence
ggacaaatgagggattcatca

SEQ ID NO: 291572 - DNA, 21 bp, Artificial sequence
  SiRNA target sequence
gacaaatgagggattcatcat

SEQ ID NO: 291573 - DNA, 21 bp, Artificial sequence
  SiRNA target sequence
acaaatgagggattcatcatc

SEQ ID NO: 291574 - DNA, 21 bp, Artificial sequence
  SiRNA target sequence
caaatgagggattcatcatct

SEQ ID NO: 291575 - DNA, 21 bp, Artificial sequence
  SiRNA target sequence
aaatgagggattcatcatcta

SEQ ID NO: 291576 - DNA, 21 bp, Artificial sequence
  SiRNA target sequence
aatgagggattcatcatctaa

SEQ ID NO: 291577 - DNA, 21 bp, Artificial sequence
  SiRNA target sequence
atgagggattcatcatctaac

SEQ ID NO: 291578 - DNA, 21 bp, Artificial sequence
  SiRNA target sequence
tgagggattcatcatctaacc

SEQ ID NO: 291579 - DNA, 21 bp, Artificial sequence
  SiRNA target sequence
gagggattcatcatctaaccc

SEQ ID NO: 291580 - DNA, 21 bp, Artificial sequence
  SiRNA target sequence
agggattcatcatctaaccct

SEQ ID NO: 291581 - DNA, 21 bp, Artificial sequence
  SiRNA target sequence
gggattcatcatctaacccta

SEQ ID NO: 291582 - DNA, 21 bp, Artificial sequence
  SiRNA target sequence
ggattcatcatctaaccctaa

SEQ ID NO: 291583 - DNA, 21 bp, Artificial sequence
  SiRNA target sequence
gattcatcatctaaccctaac

SEQ ID NO: 291584 - DNA, 21 bp, Artificial sequence
  SiRNA target sequence
attcatcatctaaccctaacc

SEQ ID NO: 291585 - DNA, 21 bp, Artificial sequence
  SiRNA target sequence
ttcatcatctaaccctaaccc

SEQ ID NO: 291586 - DNA, 21 bp, Artificial sequence
  SiRNA target sequence
tcatcatctaaccctaaccct

SEQ ID NO: 291587 - DNA, 21 bp, Artificial sequence
  SiRNA target sequence
catcatctaaccctaaccctg

SEQ ID NO: 291588 - DNA, 21 bp, Artificial sequence
  SiRNA target sequence
atcatctaaccctaaccctga

SEQ ID NO: 291589 - DNA, 21 bp, Artificial sequence
  SiRNA target sequence
tcatctaaccctaaccctgaa

SEQ ID NO: 291590 - DNA, 21 bp, Artificial sequence
  SiRNA target sequence
catctaaccctaaccctgaat

SEQ ID NO: 291591 - DNA, 21 bp, Artificial sequence
  SiRNA target sequence
atctaaccctaaccctgaatt

SEQ ID NO: 291592 - DNA, 21 bp, Artificial sequence
  SiRNA target sequence
tctaaccctaaccctgaattt

SEQ ID NO: 291593 - DNA, 21 bp, Artificial sequence
  SiRNA target sequence
ctaaccctaaccctgaattta

SEQ ID NO: 291594 - DNA, 21 bp, Artificial sequence
  SiRNA target sequence
taaccctaaccctgaatttat

SEQ ID NO: 291595 - DNA, 21 bp, Artificial sequence
  SiRNA target sequence
aaccctaaccctgaatttatg

SEQ ID NO: 291596 - DNA, 21 bp, Artificial sequence
  SiRNA target sequence
accctaaccctgaatttatgg

SEQ ID NO: 291597 - DNA, 21 bp, Artificial sequence
  SiRNA target sequence
ccctaaccctgaatttatgga

SEQ ID NO: 291598 - DNA, 21 bp, Artificial sequence
  SiRNA target sequence
cctaaccctgaatttatggag

SEQ ID NO: 291599 - DNA, 21 bp, Artificial sequence
  SiRNA target sequence
ctaaccctgaatttatggagt

SEQ ID NO: 291600 - DNA, 21 bp, Artificial sequence
  SiRNA target sequence
taaccctgaatttatggagtt

SEQ ID NO: 291601 - DNA, 21 bp, Artificial sequence
  SiRNA target sequence
aaccctgaatttatggagtta

SEQ ID NO: 291602 - DNA, 21 bp, Artificial sequence
  SiRNA target sequence
accctgaatttatggagttaa

SEQ ID NO: 291603 - DNA, 21 bp, Artificial sequence
  SiRNA target sequence
ccctgaatttatggagttaat

SEQ ID NO: 291604 - DNA, 21 bp, Artificial sequence
  SiRNA target sequence
cctgaatttatggagttaata

SEQ ID NO: 291605 - DNA, 21 bp, Artificial sequence
  SiRNA target sequence
ctgaatttatggagttaatac

SEQ ID NO: 291606 - DNA, 21 bp, Artificial sequence
  SiRNA target sequence
tgaatttatggagttaatacg

SEQ ID NO: 291607 - DNA, 21 bp, Artificial sequence
  SiRNA target sequence
gaatttatggagttaatacgt

SEQ ID NO: 291608 - DNA, 21 bp, Artificial sequence
  SiRNA target sequence
aatttatggagttaatacgta

SEQ ID NO: 291609 - DNA, 21 bp, Artificial sequence
  SiRNA target sequence
atttatggagttaatacgtac

SEQ ID NO: 291610 - DNA, 21 bp, Artificial sequence
  SiRNA target sequence
tttatggagttaatacgtaca

SEQ ID NO: 291611 - DNA, 21 bp, Artificial sequence
  SiRNA target sequence
ttatggagttaatacgtacag

SEQ ID NO: 291612 - DNA, 21 bp, Artificial sequence
  SiRNA target sequence
tatggagttaatacgtacagc

SEQ ID NO: 291613 - DNA, 21 bp, Artificial sequence
  SiRNA target sequence
atggagttaatacgtacagct

SEQ ID NO: 291614 - DNA, 21 bp, Artificial sequence
  SiRNA target sequence
tggagttaatacgtacagcta

SEQ ID NO: 291615 - DNA, 21 bp, Artificial sequence
  SiRNA target sequence
ggagttaatacgtacagctaa

SEQ ID NO: 291616 - DNA, 21 bp, Artificial sequence
  SiRNA target sequence
gagttaatacgtacagctaac

SEQ ID NO: 291617 - DNA, 21 bp, Artificial sequence
  SiRNA target sequence
agttaatacgtacagctaaca

SEQ ID NO: 291618 - DNA, 21 bp, Artificial sequence
  SiRNA target sequence
gttaatacgtacagctaacat

SEQ ID NO: 291619 - DNA, 21 bp, Artificial sequence
  SiRNA target sequence
ttaatacgtacagctaacata

SEQ ID NO: 291620 - DNA, 21 bp, Artificial sequence
  SiRNA target sequence
taatacgtacagctaacatag

SEQ ID NO: 291621 - DNA, 21 bp, Artificial sequence
  SiRNA target sequence
aatacgtacagctaacatagc

SEQ ID NO: 291622 - DNA, 21 bp, Artificial sequence
  SiRNA target sequence
atacgtacagctaacatagct

SEQ ID NO: 291623 - DNA, 21 bp, Artificial sequence
  SiRNA target sequence
tacgtacagctaacatagctc

SEQ ID NO: 291624 - DNA, 21 bp, Artificial sequence
  SiRNA target sequence
acgtacagctaacatagctcc

SEQ ID NO: 291625 - DNA, 21 bp, Artificial sequence
  SiRNA target sequence
cgtacagctaacatagctcca

SEQ ID NO: 291626 - DNA, 21 bp, Artificial sequence
  SiRNA target sequence
gtacagctaacatagctccat

SEQ ID NO: 291627 - DNA, 21 bp, Artificial sequence
  SiRNA target sequence
tacagctaacatagctccata

SEQ ID NO: 291628 - DNA, 21 bp, Artificial sequence
  SiRNA target sequence
acagctaacatagctccatac

SEQ ID NO: 291629 - DNA, 21 bp, Artificial sequence
  SiRNA target sequence
cagctaacatagctccatacc

SEQ ID NO: 291630 - DNA, 21 bp, Artificial sequence
  SiRNA target sequence
agctaacatagctccataccc

SEQ ID NO: 291631 - DNA, 21 bp, Artificial sequence
  SiRNA target sequence
gctaacatagctccatacccc

SEQ ID NO: 291632 - DNA, 21 bp, Artificial sequence
  SiRNA target sequence
ctaacatagctccatacccct

SEQ ID NO: 291633 - DNA, 21 bp, Artificial sequence
  SiRNA target sequence
taacatagctccatacccctt

SEQ ID NO: 291634 - DNA, 21 bp, Artificial sequence
  SiRNA target sequence
aacatagctccatacccctta

SEQ ID NO: 291635 - DNA, 21 bp, Artificial sequence
  SiRNA target sequence
acatagctccataccccttac

SEQ ID NO: 291636 - DNA, 21 bp, Artificial sequence
  SiRNA target sequence
catagctccataccccttaca

SEQ ID NO: 291637 - DNA, 21 bp, Artificial sequence
  SiRNA target sequence
atagctccataccccttacac

SEQ ID NO: 291638 - DNA, 21 bp, Artificial sequence
  SiRNA target sequence
tagctccataccccttacaca

SEQ ID NO: 291639 - DNA, 21 bp, Artificial sequence
  SiRNA target sequence
agctccataccccttacacat

SEQ ID NO: 291640 - DNA, 21 bp, Artificial sequence
  SiRNA target sequence
gctccataccccttacacatg

SEQ ID NO: 291641 - DNA, 21 bp, Artificial sequence
  SiRNA target sequence
ctccataccccttacacatgg

SEQ ID NO: 291642 - DNA, 21 bp, Artificial sequence
  SiRNA target sequence
tccataccccttacacatggc

SEQ ID NO: 291643 - DNA, 21 bp, Artificial sequence
  SiRNA target sequence
ccataccccttacacatggct

SEQ ID NO: 291644 - DNA, 21 bp, Artificial sequence
  SiRNA target sequence
cataccccttacacatggctc

SEQ ID NO: 291645 - DNA, 21 bp, Artificial sequence
  SiRNA target sequence
ataccccttacacatggctca

SEQ ID NO: 291646 - DNA, 21 bp, Artificial sequence
  SiRNA target sequence
taccccttacacatggctcac

SEQ ID NO: 291647 - DNA, 21 bp, Artificial sequence
  SiRNA target sequence
accccttacacatggctcacc

SEQ ID NO: 291648 - DNA, 21 bp, Artificial sequence
  SiRNA target sequence
ccccttacacatggctcacct

SEQ ID NO: 291649 - DNA, 21 bp, Artificial sequence
  SiRNA target sequence
cccttacacatggctcacctc

SEQ ID NO: 291650 - DNA, 21 bp, Artificial sequence
  SiRNA target sequence
ccttacacatggctcacctcg

SEQ ID NO: 291651 - DNA, 21 bp, Artificial sequence
  SiRNA target sequence
cttacacatggctcacctcga

SEQ ID NO: 291652 - DNA, 21 bp, Artificial sequence
  SiRNA target sequence
ttacacatggctcacctcgaa

SEQ ID NO: 291653 - DNA, 21 bp, Artificial sequence
  SiRNA target sequence
tacacatggctcacctcgaag

SEQ ID NO: 291654 - DNA, 21 bp, Artificial sequence
  SiRNA target sequence
acacatggctcacctcgaaga

SEQ ID NO: 291655 - DNA, 21 bp, Artificial sequence
  SiRNA target sequence
cacatggctcacctcgaagat

SEQ ID NO: 291656 - DNA, 21 bp, Artificial sequence
  SiRNA target sequence
acatggctcacctcgaagata

SEQ ID NO: 291657 - DNA, 21 bp, Artificial sequence
  SiRNA target sequence
catggctcacctcgaagataa

SEQ ID NO: 291658 - DNA, 21 bp, Artificial sequence
  SiRNA target sequence
atggctcacctcgaagataaa

SEQ ID NO: 291659 - DNA, 21 bp, Artificial sequence
  SiRNA target sequence
tggctcacctcgaagataaaa

SEQ ID NO: 291660 - DNA, 21 bp, Artificial sequence
  SiRNA target sequence
ggctcacctcgaagataaaag

SEQ ID NO: 291661 - DNA, 21 bp, Artificial sequence
  SiRNA target sequence
gctcacctcgaagataaaagg

SEQ ID NO: 291662 - DNA, 21 bp, Artificial sequence
  SiRNA target sequence
ctcacctcgaagataaaagga

SEQ ID NO: 291663 - DNA, 21 bp, Artificial sequence
  SiRNA target sequence
tcacctcgaagataaaaggaa

SEQ ID NO: 291664 - DNA, 21 bp, Artificial sequence
  SiRNA target sequence
cacctcgaagataaaaggaaa

SEQ ID NO: 291665 - DNA, 21 bp, Artificial sequence
  SiRNA target sequence
acctcgaagataaaaggaaaa

SEQ ID NO: 291666 - DNA, 21 bp, Artificial sequence
  SiRNA target sequence
cctcgaagataaaaggaaaac

SEQ ID NO: 291667 - DNA, 21 bp, Artificial sequence
  SiRNA target sequence
ctcgaagataaaaggaaaaca

SEQ ID NO: 291668 - DNA, 21 bp, Artificial sequence
  SiRNA target sequence
tcgaagataaaaggaaaacaa

SEQ ID NO: 291669 - DNA, 21 bp, Artificial sequence
  SiRNA target sequence
cgaagataaaaggaaaacaaa

SEQ ID NO: 291670 - DNA, 21 bp, Artificial sequence
  SiRNA target sequence
gaagataaaaggaaaacaaaa

SEQ ID NO: 291671 - DNA, 21 bp, Artificial sequence
  SiRNA target sequence
aagataaaaggaaaacaaaat

SEQ ID NO: 291672 - DNA, 21 bp, Artificial sequence
  SiRNA target sequence
agataaaaggaaaacaaaatt

SEQ ID NO: 291673 - DNA, 21 bp, Artificial sequence
  SiRNA target sequence
gataaaaggaaaacaaaattc

SEQ ID NO: 291674 - DNA, 21 bp, Artificial sequence
  SiRNA target sequence
ataaaaggaaaacaaaattca

SEQ ID NO: 291675 - DNA, 21 bp, Artificial sequence
  SiRNA target sequence
taaaaggaaaacaaaattcac

SEQ ID NO: 291676 - DNA, 21 bp, Artificial sequence
  SiRNA target sequence
aaaaggaaaacaaaattcaca

SEQ ID NO: 291677 - DNA, 21 bp, Artificial sequence
  SiRNA target sequence
aaaggaaaacaaaattcacat

SEQ ID NO: 291678 - DNA, 21 bp, Artificial sequence
  SiRNA target sequence
aaggaaaacaaaattcacatc

SEQ ID NO: 291679 - DNA, 21 bp, Artificial sequence
  SiRNA target sequence
aggaaaacaaaattcacatca

SEQ ID NO: 291680 - DNA, 21 bp, Artificial sequence
  SiRNA target sequence
ggaaaacaaaattcacatcaa

SEQ ID NO: 291681 - DNA, 21 bp, Artificial sequence
  SiRNA target sequence
gaaaacaaaattcacatcaaa

SEQ ID NO: 291682 - DNA, 21 bp, Artificial sequence
  SiRNA target sequence
aaaacaaaattcacatcaaaa

SEQ ID NO: 291683 - DNA, 21 bp, Artificial sequence
  SiRNA target sequence
aaacaaaattcacatcaaaag

SEQ ID NO: 291684 - DNA, 21 bp, Artificial sequence
  SiRNA target sequence
aacaaaattcacatcaaaagt

SEQ ID NO: 291685 - DNA, 21 bp, Artificial sequence
  SiRNA target sequence
acaaaattcacatcaaaagta

SEQ ID NO: 291686 - DNA, 21 bp, Artificial sequence
  SiRNA target sequence
caaaattcacatcaaaagtaa

SEQ ID NO: 291687 - DNA, 21 bp, Artificial sequence
  SiRNA target sequence
aaaattcacatcaaaagtaat

SEQ ID NO: 291688 - DNA, 21 bp, Artificial sequence
  SiRNA target sequence
aaattcacatcaaaagtaatc

SEQ ID NO: 291689 - DNA, 21 bp, Artificial sequence
  SiRNA target sequence
aattcacatcaaaagtaatca

SEQ ID NO: 291690 - DNA, 21 bp, Artificial sequence
  SiRNA target sequence
attcacatcaaaagtaatcat

SEQ ID NO: 291691 - DNA, 21 bp, Artificial sequence
  SiRNA target sequence
ttcacatcaaaagtaatcatt

SEQ ID NO: 291692 - DNA, 21 bp, Artificial sequence
  SiRNA target sequence
tcacatcaaaagtaatcatta

SEQ ID NO: 291693 - DNA, 21 bp, Artificial sequence
  SiRNA target sequence
cacatcaaaagtaatcattat

SEQ ID NO: 291694 - DNA, 21 bp, Artificial sequence
  SiRNA target sequence
acatcaaaagtaatcattatg

SEQ ID NO: 291695 - DNA, 21 bp, Artificial sequence
  SiRNA target sequence
catcaaaagtaatcattatga

SEQ ID NO: 291696 - DNA, 21 bp, Artificial sequence
  SiRNA target sequence
atcaaaagtaatcattatgac

SEQ ID NO: 291697 - DNA, 21 bp, Artificial sequence
  SiRNA target sequence
tcaaaagtaatcattatgaca

SEQ ID NO: 291698 - DNA, 21 bp, Artificial sequence
  SiRNA target sequence
caaaagtaatcattatgacat

SEQ ID NO: 291699 - DNA, 21 bp, Artificial sequence
  SiRNA target sequence
aaaagtaatcattatgacatc

SEQ ID NO: 291700 - DNA, 21 bp, Artificial sequence
  SiRNA target sequence
aaagtaatcattatgacatct

SEQ ID NO: 291701 - DNA, 21 bp, Artificial sequence
  SiRNA target sequence
aagtaatcattatgacatcta

SEQ ID NO: 291702 - DNA, 21 bp, Artificial sequence
  SiRNA target sequence
agtaatcattatgacatctaa

SEQ ID NO: 291703 - DNA, 21 bp, Artificial sequence
  SiRNA target sequence
gtaatcattatgacatctaat

SEQ ID NO: 291704 - DNA, 21 bp, Artificial sequence
  SiRNA target sequence
taatcattatgacatctaatg

SEQ ID NO: 291705 - DNA, 21 bp, Artificial sequence
  SiRNA target sequence
aatcattatgacatctaatgt

SEQ ID NO: 291706 - DNA, 21 bp, Artificial sequence
  SiRNA target sequence
atcattatgacatctaatgtt

SEQ ID NO: 291707 - DNA, 21 bp, Artificial sequence
  SiRNA target sequence
tcattatgacatctaatgttt

SEQ ID NO: 291708 - DNA, 21 bp, Artificial sequence
  SiRNA target sequence
cattatgacatctaatgtttt

SEQ ID NO: 291709 - DNA, 21 bp, Artificial sequence
  SiRNA target sequence
attatgacatctaatgttttt

SEQ ID NO: 291710 - DNA, 21 bp, Artificial sequence
  SiRNA target sequence
ttatgacatctaatgtttttg

SEQ ID NO: 291711 - DNA, 21 bp, Artificial sequence
  SiRNA target sequence
tatgacatctaatgtttttga

SEQ ID NO: 291712 - DNA, 21 bp, Artificial sequence
  SiRNA target sequence
atgacatctaatgtttttgaa

SEQ ID NO: 291713 - DNA, 21 bp, Artificial sequence
  SiRNA target sequence
tgacatctaatgtttttgaac

SEQ ID NO: 291714 - DNA, 21 bp, Artificial sequence
  SiRNA target sequence
gacatctaatgtttttgaaca

SEQ ID NO: 291715 - DNA, 21 bp, Artificial sequence
  SiRNA target sequence
acatctaatgtttttgaacag

SEQ ID NO: 291716 - DNA, 21 bp, Artificial sequence
  SiRNA target sequence
catctaatgtttttgaacagg

SEQ ID NO: 291717 - DNA, 21 bp, Artificial sequence
  SiRNA target sequence
atctaatgtttttgaacagga

SEQ ID NO: 291718 - DNA, 21 bp, Artificial sequence
  SiRNA target sequence
tctaatgtttttgaacaggat

SEQ ID NO: 291719 - DNA, 21 bp, Artificial sequence
  SiRNA target sequence
ctaatgtttttgaacaggatg

SEQ ID NO: 291720 - DNA, 21 bp, Artificial sequence
  SiRNA target sequence
taatgtttttgaacaggatgt

SEQ ID NO: 291721 - DNA, 21 bp, Artificial sequence
  SiRNA target sequence
aatgtttttgaacaggatgtt

SEQ ID NO: 291722 - DNA, 21 bp, Artificial sequence
  SiRNA target sequence
atgtttttgaacaggatgtta

SEQ ID NO: 291723 - DNA, 21 bp, Artificial sequence
  SiRNA target sequence
tgtttttgaacaggatgttaa

SEQ ID NO: 291724 - DNA, 21 bp, Artificial sequence
  SiRNA target sequence
gtttttgaacaggatgttaat

SEQ ID NO: 291725 - DNA, 21 bp, Artificial sequence
  SiRNA target sequence
tttttgaacaggatgttaatt

SEQ ID NO: 291726 - DNA, 21 bp, Artificial sequence
  SiRNA target sequence
ttttgaacaggatgttaattc

SEQ ID NO: 291727 - DNA, 21 bp, Artificial sequence
  SiRNA target sequence
tttgaacaggatgttaattca

SEQ ID NO: 291728 - DNA, 21 bp, Artificial sequence
  SiRNA target sequence
ttgaacaggatgttaattcac

SEQ ID NO: 291729 - DNA, 21 bp, Artificial sequence
  SiRNA target sequence
tgaacaggatgttaattcact

SEQ ID NO: 291730 - DNA, 21 bp, Artificial sequence
  SiRNA target sequence
gaacaggatgttaattcacta

SEQ ID NO: 291731 - DNA, 21 bp, Artificial sequence
  SiRNA target sequence
aacaggatgttaattcactaa

SEQ ID NO: 291732 - DNA, 21 bp, Artificial sequence
  SiRNA target sequence
acaggatgttaattcactaac

SEQ ID NO: 291733 - DNA, 21 bp, Artificial sequence
  SiRNA target sequence
caggatgttaattcactaaca

SEQ ID NO: 291734 - DNA, 21 bp, Artificial sequence
  SiRNA target sequence
aggatgttaattcactaacat

SEQ ID NO: 291735 - DNA, 21 bp, Artificial sequence
  SiRNA target sequence
ggatgttaattcactaacatt

SEQ ID NO: 291736 - DNA, 21 bp, Artificial sequence
  SiRNA target sequence
gatgttaattcactaacattt

SEQ ID NO: 291737 - DNA, 21 bp, Artificial sequence
  SiRNA target sequence
atgttaattcactaacatttc

SEQ ID NO: 291738 - DNA, 21 bp, Artificial sequence
  SiRNA target sequence
tgttaattcactaacatttcc

SEQ ID NO: 291739 - DNA, 21 bp, Artificial sequence
  SiRNA target sequence
gttaattcactaacatttcca

SEQ ID NO: 291740 - DNA, 21 bp, Artificial sequence
  SiRNA target sequence
ttaattcactaacatttccag

SEQ ID NO: 291741 - DNA, 21 bp, Artificial sequence
  SiRNA target sequence
taattcactaacatttccaga

SEQ ID NO: 291742 - DNA, 21 bp, Artificial sequence
  SiRNA target sequence
aattcactaacatttccagat

SEQ ID NO: 291743 - DNA, 21 bp, Artificial sequence
  SiRNA target sequence
attcactaacatttccagatg

SEQ ID NO: 291744 - DNA, 21 bp, Artificial sequence
  SiRNA target sequence
ttcactaacatttccagatgc

SEQ ID NO: 291745 - DNA, 21 bp, Artificial sequence
  SiRNA target sequence
tcactaacatttccagatgca

SEQ ID NO: 291746 - DNA, 21 bp, Artificial sequence
  SiRNA target sequence
cactaacatttccagatgcat

SEQ ID NO: 291747 - DNA, 21 bp, Artificial sequence
  SiRNA target sequence
actaacatttccagatgcatt

SEQ ID NO: 291748 - DNA, 21 bp, Artificial sequence
  SiRNA target sequence
ctaacatttccagatgcattt

SEQ ID NO: 291749 - DNA, 21 bp, Artificial sequence
  SiRNA target sequence
taacatttccagatgcattta

SEQ ID NO: 291750 - DNA, 21 bp, Artificial sequence
  SiRNA target sequence
aacatttccagatgcatttag

SEQ ID NO: 291751 - DNA, 21 bp, Artificial sequence
  SiRNA target sequence
acatttccagatgcatttagg

SEQ ID NO: 291752 - DNA, 21 bp, Artificial sequence
  SiRNA target sequence
catttccagatgcatttagga

SEQ ID NO: 291753 - DNA, 21 bp, Artificial sequence
  SiRNA target sequence
atttccagatgcatttaggag

SEQ ID NO: 291754 - DNA, 21 bp, Artificial sequence
  SiRNA target sequence
tttccagatgcatttaggaga

SEQ ID NO: 291755 - DNA, 21 bp, Artificial sequence
  SiRNA target sequence
ttccagatgcatttaggagaa

SEQ ID NO: 291756 - DNA, 21 bp, Artificial sequence
  SiRNA target sequence
tccagatgcatttaggagaag

SEQ ID NO: 291757 - DNA, 21 bp, Artificial sequence
  SiRNA target sequence
ccagatgcatttaggagaaga

SEQ ID NO: 291758 - DNA, 21 bp, Artificial sequence
  SiRNA target sequence
cagatgcatttaggagaagag

SEQ ID NO: 291759 - DNA, 21 bp, Artificial sequence
  SiRNA target sequence
agatgcatttaggagaagagt

SEQ ID NO: 291760 - DNA, 21 bp, Artificial sequence
  SiRNA target sequence
gatgcatttaggagaagagta

SEQ ID NO: 291761 - DNA, 21 bp, Artificial sequence
  SiRNA target sequence
atgcatttaggagaagagtag

SEQ ID NO: 291762 - DNA, 21 bp, Artificial sequence
  SiRNA target sequence
tgcatttaggagaagagtaga

SEQ ID NO: 291763 - DNA, 21 bp, Artificial sequence
  SiRNA target sequence
gcatttaggagaagagtagat

SEQ ID NO: 291764 - DNA, 21 bp, Artificial sequence
  SiRNA target sequence
catttaggagaagagtagatt

SEQ ID NO: 291765 - DNA, 21 bp, Artificial sequence
  SiRNA target sequence
atttaggagaagagtagattt

SEQ ID NO: 291766 - DNA, 21 bp, Artificial sequence
  SiRNA target sequence
tttaggagaagagtagatttg

SEQ ID NO: 291767 - DNA, 21 bp, Artificial sequence
  SiRNA target sequence
ttaggagaagagtagatttgt

SEQ ID NO: 291768 - DNA, 21 bp, Artificial sequence
  SiRNA target sequence
taggagaagagtagatttgtg

SEQ ID NO: 291769 - DNA, 21 bp, Artificial sequence
  SiRNA target sequence
aggagaagagtagatttgtgc

SEQ ID NO: 291770 - DNA, 21 bp, Artificial sequence
  SiRNA target sequence
ggagaagagtagatttgtgcg

SEQ ID NO: 291771 - DNA, 21 bp, Artificial sequence
  SiRNA target sequence
gagaagagtagatttgtgcgc

SEQ ID NO: 291772 - DNA, 21 bp, Artificial sequence
  SiRNA target sequence
agaagagtagatttgtgcgct

SEQ ID NO: 291773 - DNA, 21 bp, Artificial sequence
  SiRNA target sequence
gaagagtagatttgtgcgctg

SEQ ID NO: 291774 - DNA, 21 bp, Artificial sequence
  SiRNA target sequence
aagagtagatttgtgcgctga

SEQ ID NO: 291775 - DNA, 21 bp, Artificial sequence
  SiRNA target sequence
agagtagatttgtgcgctgag

SEQ ID NO: 291776 - DNA, 21 bp, Artificial sequence
  SiRNA target sequence
gagtagatttgtgcgctgagg

SEQ ID NO: 291777 - DNA, 21 bp, Artificial sequence
  SiRNA target sequence
agtagatttgtgcgctgaggt

SEQ ID NO: 291778 - DNA, 21 bp, Artificial sequence
  SiRNA target sequence
gtagatttgtgcgctgaggta

SEQ ID NO: 291779 - DNA, 21 bp, Artificial sequence
  SiRNA target sequence
tagatttgtgcgctgaggtaa

SEQ ID NO: 291780 - DNA, 21 bp, Artificial sequence
  SiRNA target sequence
agatttgtgcgctgaggtaaa

SEQ ID NO: 291781 - DNA, 21 bp, Artificial sequence
  SiRNA target sequence
gatttgtgcgctgaggtaaag

SEQ ID NO: 291782 - DNA, 21 bp, Artificial sequence
  SiRNA target sequence
atttgtgcgctgaggtaaaga

SEQ ID NO: 291783 - DNA, 21 bp, Artificial sequence
  SiRNA target sequence
tttgtgcgctgaggtaaagaa

SEQ ID NO: 291784 - DNA, 21 bp, Artificial sequence
  SiRNA target sequence
ttgtgcgctgaggtaaagaat

SEQ ID NO: 291785 - DNA, 21 bp, Artificial sequence
  SiRNA target sequence
tgtgcgctgaggtaaagaata

SEQ ID NO: 291786 - DNA, 21 bp, Artificial sequence
  SiRNA target sequence
gtgcgctgaggtaaagaataa

SEQ ID NO: 291787 - DNA, 21 bp, Artificial sequence
  SiRNA target sequence
tgcgctgaggtaaagaataaa

SEQ ID NO: 291788 - DNA, 21 bp, Artificial sequence
  SiRNA target sequence
gcgctgaggtaaagaataaag

SEQ ID NO: 291789 - DNA, 21 bp, Artificial sequence
  SiRNA target sequence
cgctgaggtaaagaataaaga

SEQ ID NO: 291790 - DNA, 21 bp, Artificial sequence
  SiRNA target sequence
gctgaggtaaagaataaagat

SEQ ID NO: 291791 - DNA, 21 bp, Artificial sequence
  SiRNA target sequence
ctgaggtaaagaataaagatg

SEQ ID NO: 291792 - DNA, 21 bp, Artificial sequence
  SiRNA target sequence
tgaggtaaagaataaagatga

SEQ ID NO: 291793 - DNA, 21 bp, Artificial sequence
  SiRNA target sequence
gaggtaaagaataaagatgaa

SEQ ID NO: 291794 - DNA, 21 bp, Artificial sequence
  SiRNA target sequence
aggtaaagaataaagatgaat

SEQ ID NO: 291795 - DNA, 21 bp, Artificial sequence
  SiRNA target sequence
ggtaaagaataaagatgaatt

SEQ ID NO: 291796 - DNA, 21 bp, Artificial sequence
  SiRNA target sequence
gtaaagaataaagatgaattt

SEQ ID NO: 291797 - DNA, 21 bp, Artificial sequence
  SiRNA target sequence
taaagaataaagatgaattta

SEQ ID NO: 291798 - DNA, 21 bp, Artificial sequence
  SiRNA target sequence
aaagaataaagatgaatttac

SEQ ID NO: 291799 - DNA, 21 bp, Artificial sequence
  SiRNA target sequence
aagaataaagatgaatttaca

SEQ ID NO: 291800 - DNA, 21 bp, Artificial sequence
  SiRNA target sequence
agaataaagatgaatttacaa

SEQ ID NO: 291801 - DNA, 21 bp, Artificial sequence
  SiRNA target sequence
gaataaagatgaatttacaaa

SEQ ID NO: 291802 - DNA, 21 bp, Artificial sequence
  SiRNA target sequence
aataaagatgaatttacaaaa

SEQ ID NO: 291803 - DNA, 21 bp, Artificial sequence
  SiRNA target sequence
ataaagatgaatttacaaaaa

SEQ ID NO: 291804 - DNA, 21 bp, Artificial sequence
  SiRNA target sequence
taaagatgaatttacaaaaat

SEQ ID NO: 291805 - DNA, 21 bp, Artificial sequence
  SiRNA target sequence
aaagatgaatttacaaaaatg

SEQ ID NO: 291806 - DNA, 21 bp, Artificial sequence
  SiRNA target sequence
aagatgaatttacaaaaatgt

SEQ ID NO: 291807 - DNA, 21 bp, Artificial sequence
  SiRNA target sequence
agatgaatttacaaaaatgtg

SEQ ID NO: 291808 - DNA, 21 bp, Artificial sequence
  SiRNA target sequence
gatgaatttacaaaaatgtgc

SEQ ID NO: 291809 - DNA, 21 bp, Artificial sequence
  SiRNA target sequence
atgaatttacaaaaatgtgct

SEQ ID NO: 291810 - DNA, 21 bp, Artificial sequence
  SiRNA target sequence
tgaatttacaaaaatgtgctg

SEQ ID NO: 291811 - DNA, 21 bp, Artificial sequence
  SiRNA target sequence
gaatttacaaaaatgtgctgg

SEQ ID NO: 291812 - DNA, 21 bp, Artificial sequence
  SiRNA target sequence
aatttacaaaaatgtgctggt

SEQ ID NO: 291813 - DNA, 21 bp, Artificial sequence
  SiRNA target sequence
atttacaaaaatgtgctggtc

SEQ ID NO: 291814 - DNA, 21 bp, Artificial sequence
  SiRNA target sequence
tttacaaaaatgtgctggtct

SEQ ID NO: 291815 - DNA, 21 bp, Artificial sequence
  SiRNA target sequence
ttacaaaaatgtgctggtcta

SEQ ID NO: 291816 - DNA, 21 bp, Artificial sequence
  SiRNA target sequence
tacaaaaatgtgctggtctaa

SEQ ID NO: 291817 - DNA, 21 bp, Artificial sequence
  SiRNA target sequence
acaaaaatgtgctggtctaaa

SEQ ID NO: 291818 - DNA, 21 bp, Artificial sequence
  SiRNA target sequence
caaaaatgtgctggtctaaat

SEQ ID NO: 291819 - DNA, 21 bp, Artificial sequence
  SiRNA target sequence
aaaaatgtgctggtctaaatc

SEQ ID NO: 291820 - DNA, 21 bp, Artificial sequence
  SiRNA target sequence
aaaatgtgctggtctaaatca

SEQ ID NO: 291821 - DNA, 21 bp, Artificial sequence
  SiRNA target sequence
aaatgtgctggtctaaatcag

SEQ ID NO: 291822 - DNA, 21 bp, Artificial sequence
  SiRNA target sequence
aatgtgctggtctaaatcagc

SEQ ID NO: 291823 - DNA, 21 bp, Artificial sequence
  SiRNA target sequence
atgtgctggtctaaatcagca

SEQ ID NO: 291824 - DNA, 21 bp, Artificial sequence
  SiRNA target sequence
tgtgctggtctaaatcagcag

SEQ ID NO: 291825 - DNA, 21 bp, Artificial sequence
  SiRNA target sequence
gtgctggtctaaatcagcagg

SEQ ID NO: 291826 - DNA, 21 bp, Artificial sequence
  SiRNA target sequence
tgctggtctaaatcagcagga

SEQ ID NO: 291827 - DNA, 21 bp, Artificial sequence
  SiRNA target sequence
gctggtctaaatcagcaggaa

SEQ ID NO: 291828 - DNA, 21 bp, Artificial sequence
  SiRNA target sequence
ctggtctaaatcagcaggaaa

SEQ ID NO: 291829 - DNA, 21 bp, Artificial sequence
  SiRNA target sequence
tggtctaaatcagcaggaaaa

SEQ ID NO: 291830 - DNA, 21 bp, Artificial sequence
  SiRNA target sequence
ggtctaaatcagcaggaaaaa

SEQ ID NO: 291831 - DNA, 21 bp, Artificial sequence
  SiRNA target sequence
gtctaaatcagcaggaaaaat

SEQ ID NO: 291832 - DNA, 21 bp, Artificial sequence
  SiRNA target sequence
tctaaatcagcaggaaaaatg

SEQ ID NO: 291833 - DNA, 21 bp, Artificial sequence
  SiRNA target sequence
ctaaatcagcaggaaaaatgg

SEQ ID NO: 291834 - DNA, 21 bp, Artificial sequence
  SiRNA target sequence
taaatcagcaggaaaaatggt

SEQ ID NO: 291835 - DNA, 21 bp, Artificial sequence
  SiRNA target sequence
aaatcagcaggaaaaatggtt

SEQ ID NO: 291836 - DNA, 21 bp, Artificial sequence
  SiRNA target sequence
aatcagcaggaaaaatggttc

SEQ ID NO: 291837 - DNA, 21 bp, Artificial sequence
  SiRNA target sequence
atcagcaggaaaaatggttca

SEQ ID NO: 291838 - DNA, 21 bp, Artificial sequence
  SiRNA target sequence
tcagcaggaaaaatggttcag

SEQ ID NO: 291839 - DNA, 21 bp, Artificial sequence
  SiRNA target sequence
cagcaggaaaaatggttcaga

SEQ ID NO: 291840 - DNA, 21 bp, Artificial sequence
  SiRNA target sequence
agcaggaaaaatggttcagag

SEQ ID NO: 291841 - DNA, 21 bp, Artificial sequence
  SiRNA target sequence
gcaggaaaaatggttcagaga

SEQ ID NO: 291842 - DNA, 21 bp, Artificial sequence
  SiRNA target sequence
caggaaaaatggttcagagat

SEQ ID NO: 291843 - DNA, 21 bp, Artificial sequence
  SiRNA target sequence
aggaaaaatggttcagagatt

SEQ ID NO: 291844 - DNA, 21 bp, Artificial sequence
  SiRNA target sequence
ggaaaaatggttcagagatta

SEQ ID NO: 291845 - DNA, 21 bp, Artificial sequence
  SiRNA target sequence
gaaaaatggttcagagattag

SEQ ID NO: 291846 - DNA, 21 bp, Artificial sequence
  SiRNA target sequence
aaaaatggttcagagattaga

SEQ ID NO: 291847 - DNA, 21 bp, Artificial sequence
  SiRNA target sequence
aaaatggttcagagattagat

SEQ ID NO: 291848 - DNA, 21 bp, Artificial sequence
  SiRNA target sequence
aaatggttcagagattagata

SEQ ID NO: 291849 - DNA, 21 bp, Artificial sequence
  SiRNA target sequence
aatggttcagagattagataa

SEQ ID NO: 291850 - DNA, 21 bp, Artificial sequence
  SiRNA target sequence
atggttcagagattagataag

SEQ ID NO: 291851 - DNA, 21 bp, Artificial sequence
  SiRNA target sequence
tggttcagagattagataagg

SEQ ID NO: 291852 - DNA, 21 bp, Artificial sequence
  SiRNA target sequence
ggttcagagattagataaggg

SEQ ID NO: 291853 - DNA, 21 bp, Artificial sequence
  SiRNA target sequence
gttcagagattagataaggga

SEQ ID NO: 291854 - DNA, 21 bp, Artificial sequence
  SiRNA target sequence
ttcagagattagataagggaa

SEQ ID NO: 291855 - DNA, 21 bp, Artificial sequence
  SiRNA target sequence
tcagagattagataagggaaa

SEQ ID NO: 291856 - DNA, 21 bp, Artificial sequence
  SiRNA target sequence
cagagattagataagggaaag

SEQ ID NO: 291857 - DNA, 21 bp, Artificial sequence
  SiRNA target sequence
agagattagataagggaaagg

SEQ ID NO: 291858 - DNA, 21 bp, Artificial sequence
  SiRNA target sequence
gagattagataagggaaaggt

SEQ ID NO: 291859 - DNA, 21 bp, Artificial sequence
  SiRNA target sequence
agattagataagggaaaggtt

SEQ ID NO: 291860 - DNA, 21 bp, Artificial sequence
  SiRNA target sequence
gattagataagggaaaggtta

SEQ ID NO: 291861 - DNA, 21 bp, Artificial sequence
  SiRNA target sequence
attagataagggaaaggttaa

SEQ ID NO: 291862 - DNA, 21 bp, Artificial sequence
  SiRNA target sequence
ttagataagggaaaggttaag

SEQ ID NO: 291863 - DNA, 21 bp, Artificial sequence
  SiRNA target sequence
tagataagggaaaggttaaga

SEQ ID NO: 291864 - DNA, 21 bp, Artificial sequence
  SiRNA target sequence
agataagggaaaggttaagaa

SEQ ID NO: 291865 - DNA, 21 bp, Artificial sequence
  SiRNA target sequence
gataagggaaaggttaagaaa

SEQ ID NO: 291866 - DNA, 21 bp, Artificial sequence
  SiRNA target sequence
ataagggaaaggttaagaaaa

SEQ ID NO: 291867 - DNA, 21 bp, Artificial sequence
  SiRNA target sequence
taagggaaaggttaagaaaat

SEQ ID NO: 291868 - DNA, 21 bp, Artificial sequence
  SiRNA target sequence
aagggaaaggttaagaaaata

SEQ ID NO: 291869 - DNA, 21 bp, Artificial sequence
  SiRNA target sequence
agggaaaggttaagaaaataa

SEQ ID NO: 291870 - DNA, 21 bp, Artificial sequence
  SiRNA target sequence
gggaaaggttaagaaaataac

SEQ ID NO: 291871 - DNA, 21 bp, Artificial sequence
  SiRNA target sequence
ggaaaggttaagaaaataaca

SEQ ID NO: 291872 - DNA, 21 bp, Artificial sequence
  SiRNA target sequence
gaaaggttaagaaaataacag

SEQ ID NO: 291873 - DNA, 21 bp, Artificial sequence
  SiRNA target sequence
aaaggttaagaaaataacagg

SEQ ID NO: 291874 - DNA, 21 bp, Artificial sequence
  SiRNA target sequence
aaggttaagaaaataacagga

SEQ ID NO: 291875 - DNA, 21 bp, Artificial sequence
  SiRNA target sequence
aggttaagaaaataacaggag

SEQ ID NO: 291876 - DNA, 21 bp, Artificial sequence
  SiRNA target sequence
ggttaagaaaataacaggaga

SEQ ID NO: 291877 - DNA, 21 bp, Artificial sequence
  SiRNA target sequence
gttaagaaaataacaggagat

SEQ ID NO: 291878 - DNA, 21 bp, Artificial sequence
  SiRNA target sequence
ttaagaaaataacaggagata

SEQ ID NO: 291879 - DNA, 21 bp, Artificial sequence
  SiRNA target sequence
taagaaaataacaggagatat

SEQ ID NO: 291880 - DNA, 21 bp, Artificial sequence
  SiRNA target sequence
aagaaaataacaggagatatt

SEQ ID NO: 291881 - DNA, 21 bp, Artificial sequence
  SiRNA target sequence
agaaaataacaggagatattc

SEQ ID NO: 291882 - DNA, 21 bp, Artificial sequence
  SiRNA target sequence
gaaaataacaggagatattca

SEQ ID NO: 291883 - DNA, 21 bp, Artificial sequence
  SiRNA target sequence
aaaataacaggagatattcat

SEQ ID NO: 291884 - DNA, 21 bp, Artificial sequence
  SiRNA target sequence
aaataacaggagatattcatt

SEQ ID NO: 291885 - DNA, 21 bp, Artificial sequence
  SiRNA target sequence
aataacaggagatattcattc

SEQ ID NO: 291886 - DNA, 21 bp, Artificial sequence
  SiRNA target sequence
ataacaggagatattcattca

SEQ ID NO: 291887 - DNA, 21 bp, Artificial sequence
  SiRNA target sequence
taacaggagatattcattcaa

SEQ ID NO: 291888 - DNA, 21 bp, Artificial sequence
  SiRNA target sequence
aacaggagatattcattcaac

SEQ ID NO: 291889 - DNA, 21 bp, Artificial sequence
  SiRNA target sequence
acaggagatattcattcaaca

SEQ ID NO: 291890 - DNA, 21 bp, Artificial sequence
  SiRNA target sequence
caggagatattcattcaacag

SEQ ID NO: 291891 - DNA, 21 bp, Artificial sequence
  SiRNA target sequence
aggagatattcattcaacagt

SEQ ID NO: 291892 - DNA, 21 bp, Artificial sequence
  SiRNA target sequence
ggagatattcattcaacagta

SEQ ID NO: 291893 - DNA, 21 bp, Artificial sequence
  SiRNA target sequence
gagatattcattcaacagtac

SEQ ID NO: 291894 - DNA, 21 bp, Artificial sequence
  SiRNA target sequence
agatattcattcaacagtacc

SEQ ID NO: 291895 - DNA, 21 bp, Artificial sequence
  SiRNA target sequence
gatattcattcaacagtacca

SEQ ID NO: 291896 - DNA, 21 bp, Artificial sequence
  SiRNA target sequence
atattcattcaacagtaccat

SEQ ID NO: 291897 - DNA, 21 bp, Artificial sequence
  SiRNA target sequence
tattcattcaacagtaccata

SEQ ID NO: 291898 - DNA, 21 bp, Artificial sequence
  SiRNA target sequence
attcattcaacagtaccatac

SEQ ID NO: 291899 - DNA, 21 bp, Artificial sequence
  SiRNA target sequence
ttcattcaacagtaccataca

SEQ ID NO: 291900 - DNA, 21 bp, Artificial sequence
  SiRNA target sequence
tcattcaacagtaccatacat

SEQ ID NO: 291901 - DNA, 21 bp, Artificial sequence
  SiRNA target sequence
cattcaacagtaccatacatt

SEQ ID NO: 291902 - DNA, 21 bp, Artificial sequence
  SiRNA target sequence
attcaacagtaccatacattg

SEQ ID NO: 291903 - DNA, 21 bp, Artificial sequence
  SiRNA target sequence
ttcaacagtaccatacattgt

SEQ ID NO: 291904 - DNA, 21 bp, Artificial sequence
  SiRNA target sequence
tcaacagtaccatacattgtt

SEQ ID NO: 291905 - DNA, 21 bp, Artificial sequence
  SiRNA target sequence
caacagtaccatacattgttg

SEQ ID NO: 291906 - DNA, 21 bp, Artificial sequence
  SiRNA target sequence
aacagtaccatacattgttga

SEQ ID NO: 291907 - DNA, 21 bp, Artificial sequence
  SiRNA target sequence
acagtaccatacattgttgat

SEQ ID NO: 291908 - DNA, 21 bp, Artificial sequence
  SiRNA target sequence
cagtaccatacattgttgatc

SEQ ID NO: 291909 - DNA, 21 bp, Artificial sequence
  SiRNA target sequence
agtaccatacattgttgatct

SEQ ID NO: 291910 - DNA, 21 bp, Artificial sequence
  SiRNA target sequence
gtaccatacattgttgatctg

SEQ ID NO: 291911 - DNA, 21 bp, Artificial sequence
  SiRNA target sequence
taccatacattgttgatctga

SEQ ID NO: 291912 - DNA, 21 bp, Artificial sequence
  SiRNA target sequence
accatacattgttgatctgat

SEQ ID NO: 291913 - DNA, 21 bp, Artificial sequence
  SiRNA target sequence
ccatacattgttgatctgatt

SEQ ID NO: 291914 - DNA, 21 bp, Artificial sequence
  SiRNA target sequence
catacattgttgatctgattg

SEQ ID NO: 291915 - DNA, 21 bp, Artificial sequence
  SiRNA target sequence
atacattgttgatctgattga

SEQ ID NO: 291916 - DNA, 21 bp, Artificial sequence
  SiRNA target sequence
tacattgttgatctgattgat

SEQ ID NO: 291917 - DNA, 21 bp, Artificial sequence
  SiRNA target sequence
acattgttgatctgattgatc

SEQ ID NO: 291918 - DNA, 21 bp, Artificial sequence
  SiRNA target sequence
cattgttgatctgattgatcc

SEQ ID NO: 291919 - DNA, 21 bp, Artificial sequence
  SiRNA target sequence
attgttgatctgattgatcca

SEQ ID NO: 291920 - DNA, 21 bp, Artificial sequence
  SiRNA target sequence
ttgttgatctgattgatccag

SEQ ID NO: 291921 - DNA, 21 bp, Artificial sequence
  SiRNA target sequence
tgttgatctgattgatccaga

SEQ ID NO: 291922 - DNA, 21 bp, Artificial sequence
  SiRNA target sequence
gttgatctgattgatccagaa

SEQ ID NO: 291923 - DNA, 21 bp, Artificial sequence
  SiRNA target sequence
ttgatctgattgatccagaaa

SEQ ID NO: 291924 - DNA, 21 bp, Artificial sequence
  SiRNA target sequence
tgatctgattgatccagaaag

SEQ ID NO: 291925 - DNA, 21 bp, Artificial sequence
  SiRNA target sequence
gatctgattgatccagaaagc

SEQ ID NO: 291926 - DNA, 21 bp, Artificial sequence
  SiRNA target sequence
atctgattgatccagaaagcg

SEQ ID NO: 291927 - DNA, 21 bp, Artificial sequence
  SiRNA target sequence
tctgattgatccagaaagcgg

SEQ ID NO: 291928 - DNA, 21 bp, Artificial sequence
  SiRNA target sequence
ctgattgatccagaaagcggg

SEQ ID NO: 291929 - DNA, 21 bp, Artificial sequence
  SiRNA target sequence
tgattgatccagaaagcgggg

SEQ ID NO: 291930 - DNA, 21 bp, Artificial sequence
  SiRNA target sequence
gattgatccagaaagcgggga

SEQ ID NO: 291931 - DNA, 21 bp, Artificial sequence
  SiRNA target sequence
attgatccagaaagcggggaa

SEQ ID NO: 291932 - DNA, 21 bp, Artificial sequence
  SiRNA target sequence
ttgatccagaaagcggggaag

SEQ ID NO: 291933 - DNA, 21 bp, Artificial sequence
  SiRNA target sequence
tgatccagaaagcggggaagt

SEQ ID NO: 291934 - DNA, 21 bp, Artificial sequence
  SiRNA target sequence
gatccagaaagcggggaagtg

SEQ ID NO: 291935 - DNA, 21 bp, Artificial sequence
  SiRNA target sequence
atccagaaagcggggaagtgt

SEQ ID NO: 291936 - DNA, 21 bp, Artificial sequence
  SiRNA target sequence
tccagaaagcggggaagtgta

SEQ ID NO: 291937 - DNA, 21 bp, Artificial sequence
  SiRNA target sequence
ccagaaagcggggaagtgtat

SEQ ID NO: 291938 - DNA, 21 bp, Artificial sequence
  SiRNA target sequence
cagaaagcggggaagtgtata

SEQ ID NO: 291939 - DNA, 21 bp, Artificial sequence
  SiRNA target sequence
agaaagcggggaagtgtataa

SEQ ID NO: 291940 - DNA, 21 bp, Artificial sequence
  SiRNA target sequence
gaaagcggggaagtgtataag

SEQ ID NO: 291941 - DNA, 21 bp, Artificial sequence
  SiRNA target sequence
aaagcggggaagtgtataaga

SEQ ID NO: 291942 - DNA, 21 bp, Artificial sequence
  SiRNA target sequence
aagcggggaagtgtataagac

SEQ ID NO: 291943 - DNA, 21 bp, Artificial sequence
  SiRNA target sequence
agcggggaagtgtataagact

SEQ ID NO: 291944 - DNA, 21 bp, Artificial sequence
  SiRNA target sequence
gcggggaagtgtataagactg

SEQ ID NO: 291945 - DNA, 21 bp, Artificial sequence
  SiRNA target sequence
cggggaagtgtataagactgg

SEQ ID NO: 291946 - DNA, 21 bp, Artificial sequence
  SiRNA target sequence
ggggaagtgtataagactgga

SEQ ID NO: 291947 - DNA, 21 bp, Artificial sequence
  SiRNA target sequence
gggaagtgtataagactggat

SEQ ID NO: 291948 - DNA, 21 bp, Artificial sequence
  SiRNA target sequence
ggaagtgtataagactggatt

SEQ ID NO: 291949 - DNA, 21 bp, Artificial sequence
  SiRNA target sequence
gaagtgtataagactggatta

SEQ ID NO: 291950 - DNA, 21 bp, Artificial sequence
  SiRNA target sequence
aagtgtataagactggattag

SEQ ID NO: 291951 - DNA, 21 bp, Artificial sequence
  SiRNA target sequence
agtgtataagactggattaga

SEQ ID NO: 291952 - DNA, 21 bp, Artificial sequence
  SiRNA target sequence
gtgtataagactggattagaa

SEQ ID NO: 291953 - DNA, 21 bp, Artificial sequence
  SiRNA target sequence
tgtataagactggattagaat

SEQ ID NO: 291954 - DNA, 21 bp, Artificial sequence
  SiRNA target sequence
gtataagactggattagaata

SEQ ID NO: 291955 - DNA, 21 bp, Artificial sequence
  SiRNA target sequence
tataagactggattagaatat

SEQ ID NO: 291956 - DNA, 21 bp, Artificial sequence
  SiRNA target sequence
ataagactggattagaatatg

SEQ ID NO: 291957 - DNA, 21 bp, Artificial sequence
  SiRNA target sequence
taagactggattagaatatga

SEQ ID NO: 291958 - DNA, 21 bp, Artificial sequence
  SiRNA target sequence
aagactggattagaatatgaa

SEQ ID NO: 291959 - DNA, 21 bp, Artificial sequence
  SiRNA target sequence
agactggattagaatatgaag

SEQ ID NO: 291960 - DNA, 21 bp, Artificial sequence
  SiRNA target sequence
gactggattagaatatgaaga

SEQ ID NO: 291961 - DNA, 21 bp, Artificial sequence
  SiRNA target sequence
actggattagaatatgaagaa

SEQ ID NO: 291962 - DNA, 21 bp, Artificial sequence
  SiRNA target sequence
ctggattagaatatgaagaat

SEQ ID NO: 291963 - DNA, 21 bp, Artificial sequence
  SiRNA target sequence
tggattagaatatgaagaatt

SEQ ID NO: 291964 - DNA, 21 bp, Artificial sequence
  SiRNA target sequence
ggattagaatatgaagaattt

SEQ ID NO: 291965 - DNA, 21 bp, Artificial sequence
  SiRNA target sequence
gattagaatatgaagaatttc

SEQ ID NO: 291966 - DNA, 21 bp, Artificial sequence
  SiRNA target sequence
attagaatatgaagaatttct

SEQ ID NO: 291967 - DNA, 21 bp, Artificial sequence
  SiRNA target sequence
ttagaatatgaagaatttctc

SEQ ID NO: 291968 - DNA, 21 bp, Artificial sequence
  SiRNA target sequence
tagaatatgaagaatttctcg

SEQ ID NO: 291969 - DNA, 21 bp, Artificial sequence
  SiRNA target sequence
agaatatgaagaatttctcga

SEQ ID NO: 291970 - DNA, 21 bp, Artificial sequence
  SiRNA target sequence
gaatatgaagaatttctcgat

SEQ ID NO: 291971 - DNA, 21 bp, Artificial sequence
  SiRNA target sequence
aatatgaagaatttctcgata

SEQ ID NO: 291972 - DNA, 21 bp, Artificial sequence
  SiRNA target sequence
atatgaagaatttctcgatat

SEQ ID NO: 291973 - DNA, 21 bp, Artificial sequence
  SiRNA target sequence
tatgaagaatttctcgatatg

SEQ ID NO: 291974 - DNA, 21 bp, Artificial sequence
  SiRNA target sequence
atgaagaatttctcgatatgt

SEQ ID NO: 291975 - DNA, 21 bp, Artificial sequence
  SiRNA target sequence
tgaagaatttctcgatatgtg

SEQ ID NO: 291976 - DNA, 21 bp, Artificial sequence
  SiRNA target sequence
gaagaatttctcgatatgtgt

SEQ ID NO: 291977 - DNA, 21 bp, Artificial sequence
  SiRNA target sequence
aagaatttctcgatatgtgtc

SEQ ID NO: 291978 - DNA, 21 bp, Artificial sequence
  SiRNA target sequence
agaatttctcgatatgtgtct

SEQ ID NO: 291979 - DNA, 21 bp, Artificial sequence
  SiRNA target sequence
gaatttctcgatatgtgtcta

SEQ ID NO: 291980 - DNA, 21 bp, Artificial sequence
  SiRNA target sequence
aatttctcgatatgtgtctag

SEQ ID NO: 291981 - DNA, 21 bp, Artificial sequence
  SiRNA target sequence
atttctcgatatgtgtctaga

SEQ ID NO: 291982 - DNA, 21 bp, Artificial sequence
  SiRNA target sequence
tttctcgatatgtgtctagaa

SEQ ID NO: 291983 - DNA, 21 bp, Artificial sequence
  SiRNA target sequence
ttctcgatatgtgtctagaaa

SEQ ID NO: 291984 - DNA, 21 bp, Artificial sequence
  SiRNA target sequence
tctcgatatgtgtctagaaaa

SEQ ID NO: 291985 - DNA, 21 bp, Artificial sequence
  SiRNA target sequence
ctcgatatgtgtctagaaaag

SEQ ID NO: 291986 - DNA, 21 bp, Artificial sequence
  SiRNA target sequence
tcgatatgtgtctagaaaaga

SEQ ID NO: 291987 - DNA, 21 bp, Artificial sequence
  SiRNA target sequence
cgatatgtgtctagaaaagac

SEQ ID NO: 291988 - DNA, 21 bp, Artificial sequence
  SiRNA target sequence
gatatgtgtctagaaaagact

SEQ ID NO: 291989 - DNA, 21 bp, Artificial sequence
  SiRNA target sequence
atatgtgtctagaaaagacta

SEQ ID NO: 291990 - DNA, 21 bp, Artificial sequence
  SiRNA target sequence
tatgtgtctagaaaagactag

SEQ ID NO: 291991 - DNA, 21 bp, Artificial sequence
  SiRNA target sequence
atgtgtctagaaaagactagt

SEQ ID NO: 291992 - DNA, 21 bp, Artificial sequence
  SiRNA target sequence
tgtgtctagaaaagactagtc

SEQ ID NO: 291993 - DNA, 21 bp, Artificial sequence
  SiRNA target sequence
gtgtctagaaaagactagtca

SEQ ID NO: 291994 - DNA, 21 bp, Artificial sequence
  SiRNA target sequence
tgtctagaaaagactagtcaa

SEQ ID NO: 291995 - DNA, 21 bp, Artificial sequence
  SiRNA target sequence
gtctagaaaagactagtcaat

SEQ ID NO: 291996 - DNA, 21 bp, Artificial sequence
  SiRNA target sequence
tctagaaaagactagtcaatg

SEQ ID NO: 291997 - DNA, 21 bp, Artificial sequence
  SiRNA target sequence
ctagaaaagactagtcaatgt

SEQ ID NO: 291998 - DNA, 21 bp, Artificial sequence
  SiRNA target sequence
tagaaaagactagtcaatgta

SEQ ID NO: 291999 - DNA, 21 bp, Artificial sequence
  SiRNA target sequence
agaaaagactagtcaatgtag

SEQ ID NO: 292000 - DNA, 21 bp, Artificial sequence
  SiRNA target sequence
gaaaagactagtcaatgtaga

SEQ ID NO: 292001 - DNA, 21 bp, Artificial sequence
  SiRNA target sequence
aaaagactagtcaatgtagag

SEQ ID NO: 292002 - DNA, 21 bp, Artificial sequence
  SiRNA target sequence
aaagactagtcaatgtagaga

SEQ ID NO: 292003 - DNA, 21 bp, Artificial sequence
  SiRNA target sequence
aagactagtcaatgtagagat

SEQ ID NO: 292004 - DNA, 21 bp, Artificial sequence
  SiRNA target sequence
agactagtcaatgtagagatg

SEQ ID NO: 292005 - DNA, 21 bp, Artificial sequence
  SiRNA target sequence
gactagtcaatgtagagatga

SEQ ID NO: 292006 - DNA, 21 bp, Artificial sequence
  SiRNA target sequence
actagtcaatgtagagatgat

SEQ ID NO: 292007 - DNA, 21 bp, Artificial sequence
  SiRNA target sequence
ctagtcaatgtagagatgatt

SEQ ID NO: 292008 - DNA, 21 bp, Artificial sequence
  SiRNA target sequence
tagtcaatgtagagatgattc

SEQ ID NO: 292009 - DNA, 21 bp, Artificial sequence
  SiRNA target sequence
agtcaatgtagagatgattct

SEQ ID NO: 292010 - DNA, 21 bp, Artificial sequence
  SiRNA target sequence
gtcaatgtagagatgattctg

SEQ ID NO: 292011 - DNA, 21 bp, Artificial sequence
  SiRNA target sequence
tcaatgtagagatgattctgc

SEQ ID NO: 292012 - DNA, 21 bp, Artificial sequence
  SiRNA target sequence
caatgtagagatgattctgca

SEQ ID NO: 292013 - DNA, 21 bp, Artificial sequence
  SiRNA target sequence
aatgtagagatgattctgcaa

SEQ ID NO: 292014 - DNA, 21 bp, Artificial sequence
  SiRNA target sequence
atgtagagatgattctgcaaa

SEQ ID NO: 292015 - DNA, 21 bp, Artificial sequence
  SiRNA target sequence
tgtagagatgattctgcaaaa

SEQ ID NO: 292016 - DNA, 21 bp, Artificial sequence
  SiRNA target sequence
gtagagatgattctgcaaaat

SEQ ID NO: 292017 - DNA, 21 bp, Artificial sequence
  SiRNA target sequence
tagagatgattctgcaaaatt

SEQ ID NO: 292018 - DNA, 21 bp, Artificial sequence
  SiRNA target sequence
agagatgattctgcaaaatta

SEQ ID NO: 292019 - DNA, 21 bp, Artificial sequence
  SiRNA target sequence
gagatgattctgcaaaattaa

SEQ ID NO: 292020 - DNA, 21 bp, Artificial sequence
  SiRNA target sequence
agatgattctgcaaaattaaa

SEQ ID NO: 292021 - DNA, 21 bp, Artificial sequence
  SiRNA target sequence
gatgattctgcaaaattaaat

SEQ ID NO: 292022 - DNA, 21 bp, Artificial sequence
  SiRNA target sequence
atgattctgcaaaattaaatg

SEQ ID NO: 292023 - DNA, 21 bp, Artificial sequence
  SiRNA target sequence
tgattctgcaaaattaaatga

SEQ ID NO: 292024 - DNA, 21 bp, Artificial sequence
  SiRNA target sequence
gattctgcaaaattaaatgat

SEQ ID NO: 292025 - DNA, 21 bp, Artificial sequence
  SiRNA target sequence
attctgcaaaattaaatgatt

SEQ ID NO: 292026 - DNA, 21 bp, Artificial sequence
  SiRNA target sequence
ttctgcaaaattaaatgattt

SEQ ID NO: 292027 - DNA, 21 bp, Artificial sequence
  SiRNA target sequence
tctgcaaaattaaatgatttt

SEQ ID NO: 292028 - DNA, 21 bp, Artificial sequence
  SiRNA target sequence
ctgcaaaattaaatgattttt

SEQ ID NO: 292029 - DNA, 21 bp, Artificial sequence
  SiRNA target sequence
tgcaaaattaaatgatttttt

SEQ ID NO: 292030 - DNA, 21 bp, Artificial sequence
  SiRNA target sequence
gcaaaattaaatgatttttta

SEQ ID NO: 292031 - DNA, 21 bp, Artificial sequence
  SiRNA target sequence
caaaattaaatgattttttaa

SEQ ID NO: 292032 - DNA, 21 bp, Artificial sequence
  SiRNA target sequence
aaaattaaatgattttttaat

SEQ ID NO: 292033 - DNA, 21 bp, Artificial sequence
  SiRNA target sequence
aaattaaatgattttttaatg

SEQ ID NO: 292034 - DNA, 21 bp, Artificial sequence
  SiRNA target sequence
aattaaatgattttttaatgg

SEQ ID NO: 292035 - DNA, 21 bp, Artificial sequence
  SiRNA target sequence
attaaatgattttttaatgga

SEQ ID NO: 292036 - DNA, 21 bp, Artificial sequence
  SiRNA target sequence
ttaaatgattttttaatggat

SEQ ID NO: 292037 - DNA, 21 bp, Artificial sequence
  SiRNA target sequence
taaatgattttttaatggatt

SEQ ID NO: 292038 - DNA, 21 bp, Artificial sequence
  SiRNA target sequence
aaatgattttttaatggatta

SEQ ID NO: 292039 - DNA, 21 bp, Artificial sequence
  SiRNA target sequence
aatgattttttaatggattat

SEQ ID NO: 292040 - DNA, 21 bp, Artificial sequence
  SiRNA target sequence
atgattttttaatggattatg

SEQ ID NO: 292041 - DNA, 21 bp, Artificial sequence
  SiRNA target sequence
tgattttttaatggattatgc

SEQ ID NO: 292042 - DNA, 21 bp, Artificial sequence
  SiRNA target sequence
gattttttaatggattatgca

SEQ ID NO: 292043 - DNA, 21 bp, Artificial sequence
  SiRNA target sequence
attttttaatggattatgcag

SEQ ID NO: 292044 - DNA, 21 bp, Artificial sequence
  SiRNA target sequence
ttttttaatggattatgcaga

SEQ ID NO: 292045 - DNA, 21 bp, Artificial sequence
  SiRNA target sequence
tttttaatggattatgcagag

SEQ ID NO: 292046 - DNA, 21 bp, Artificial sequence
  SiRNA target sequence
ttttaatggattatgcagaga

SEQ ID NO: 292047 - DNA, 21 bp, Artificial sequence
  SiRNA target sequence
tttaatggattatgcagagaa

SEQ ID NO: 292048 - DNA, 21 bp, Artificial sequence
  SiRNA target sequence
ttaatggattatgcagagaaa

SEQ ID NO: 292049 - DNA, 21 bp, Artificial sequence
  SiRNA target sequence
taatggattatgcagagaaaa

SEQ ID NO: 292050 - DNA, 21 bp, Artificial sequence
  SiRNA target sequence
aatggattatgcagagaaaag

SEQ ID NO: 292051 - DNA, 21 bp, Artificial sequence
  SiRNA target sequence
atggattatgcagagaaaaga

SEQ ID NO: 292052 - DNA, 21 bp, Artificial sequence
  SiRNA target sequence
tggattatgcagagaaaagag

SEQ ID NO: 292053 - DNA, 21 bp, Artificial sequence
  SiRNA target sequence
ggattatgcagagaaaagagc

SEQ ID NO: 292054 - DNA, 21 bp, Artificial sequence
  SiRNA target sequence
gattatgcagagaaaagagca

SEQ ID NO: 292055 - DNA, 21 bp, Artificial sequence
  SiRNA target sequence
attatgcagagaaaagagcaa

SEQ ID NO: 292056 - DNA, 21 bp, Artificial sequence
  SiRNA target sequence
ttatgcagagaaaagagcaaa

SEQ ID NO: 292057 - DNA, 21 bp, Artificial sequence
  SiRNA target sequence
tatgcagagaaaagagcaaat

SEQ ID NO: 292058 - DNA, 21 bp, Artificial sequence
  SiRNA target sequence
atgcagagaaaagagcaaata

SEQ ID NO: 292059 - DNA, 21 bp, Artificial sequence
  SiRNA target sequence
tgcagagaaaagagcaaatag

SEQ ID NO: 292060 - DNA, 21 bp, Artificial sequence
  SiRNA target sequence
gcagagaaaagagcaaataga

SEQ ID NO: 292061 - DNA, 21 bp, Artificial sequence
  SiRNA target sequence
cagagaaaagagcaaatagaa

SEQ ID NO: 292062 - DNA, 21 bp, Artificial sequence
  SiRNA target sequence
agagaaaagagcaaatagaag

SEQ ID NO: 292063 - DNA, 21 bp, Artificial sequence
  SiRNA target sequence
gagaaaagagcaaatagaagc

SEQ ID NO: 292064 - DNA, 21 bp, Artificial sequence
  SiRNA target sequence
agaaaagagcaaatagaagca

SEQ ID NO: 292065 - DNA, 21 bp, Artificial sequence
  SiRNA target sequence
gaaaagagcaaatagaagcag

SEQ ID NO: 292066 - DNA, 21 bp, Artificial sequence
  SiRNA target sequence
aaaagagcaaatagaagcaga

SEQ ID NO: 292067 - DNA, 21 bp, Artificial sequence
  SiRNA target sequence
aaagagcaaatagaagcagag

SEQ ID NO: 292068 - DNA, 21 bp, Artificial sequence
  SiRNA target sequence
aagagcaaatagaagcagaga

SEQ ID NO: 292069 - DNA, 21 bp, Artificial sequence
  SiRNA target sequence
agagcaaatagaagcagagaa

SEQ ID NO: 292070 - DNA, 21 bp, Artificial sequence
  SiRNA target sequence
gagcaaatagaagcagagaaa

SEQ ID NO: 292071 - DNA, 21 bp, Artificial sequence
  SiRNA target sequence
agcaaatagaagcagagaaat

SEQ ID NO: 292072 - DNA, 21 bp, Artificial sequence
  SiRNA target sequence
gcaaatagaagcagagaaatt

SEQ ID NO: 292073 - DNA, 21 bp, Artificial sequence
  SiRNA target sequence
caaatagaagcagagaaattg

SEQ ID NO: 292074 - DNA, 21 bp, Artificial sequence
  SiRNA target sequence
aaatagaagcagagaaattga

SEQ ID NO: 292075 - DNA, 21 bp, Artificial sequence
  SiRNA target sequence
aatagaagcagagaaattgat

SEQ ID NO: 292076 - DNA, 21 bp, Artificial sequence
  SiRNA target sequence
atagaagcagagaaattgatg

SEQ ID NO: 292077 - DNA, 21 bp, Artificial sequence
  SiRNA target sequence
tagaagcagagaaattgatga

SEQ ID NO: 292078 - DNA, 21 bp, Artificial sequence
  SiRNA target sequence
agaagcagagaaattgatgaa

SEQ ID NO: 292079 - DNA, 21 bp, Artificial sequence
  SiRNA target sequence
gaagcagagaaattgatgaag

SEQ ID NO: 292080 - DNA, 21 bp, Artificial sequence
  SiRNA target sequence
aagcagagaaattgatgaagt

SEQ ID NO: 292081 - DNA, 21 bp, Artificial sequence
  SiRNA target sequence
agcagagaaattgatgaagtt

SEQ ID NO: 292082 - DNA, 21 bp, Artificial sequence
  SiRNA target sequence
gcagagaaattgatgaagttt

SEQ ID NO: 292083 - DNA, 21 bp, Artificial sequence
  SiRNA target sequence
cagagaaattgatgaagtttg

SEQ ID NO: 292084 - DNA, 21 bp, Artificial sequence
  SiRNA target sequence
agagaaattgatgaagtttgc

SEQ ID NO: 292085 - DNA, 21 bp, Artificial sequence
  SiRNA target sequence
gagaaattgatgaagtttgcg

SEQ ID NO: 292086 - DNA, 21 bp, Artificial sequence
  SiRNA target sequence
agaaattgatgaagtttgcgc

SEQ ID NO: 292087 - DNA, 21 bp, Artificial sequence
  SiRNA target sequence
gaaattgatgaagtttgcgca

SEQ ID NO: 292088 - DNA, 21 bp, Artificial sequence
  SiRNA target sequence
aaattgatgaagtttgcgcac

SEQ ID NO: 292089 - DNA, 21 bp, Artificial sequence
  SiRNA target sequence
aattgatgaagtttgcgcacg

SEQ ID NO: 292090 - DNA, 21 bp, Artificial sequence
  SiRNA target sequence
attgatgaagtttgcgcacgt

SEQ ID NO: 292091 - DNA, 21 bp, Artificial sequence
  SiRNA target sequence
ttgatgaagtttgcgcacgta

SEQ ID NO: 292092 - DNA, 21 bp, Artificial sequence
  SiRNA target sequence
tgatgaagtttgcgcacgtac

SEQ ID NO: 292093 - DNA, 21 bp, Artificial sequence
  SiRNA target sequence
gatgaagtttgcgcacgtact

SEQ ID NO: 292094 - DNA, 21 bp, Artificial sequence
  SiRNA target sequence
atgaagtttgcgcacgtacta

SEQ ID NO: 292095 - DNA, 21 bp, Artificial sequence
  SiRNA target sequence
tgaagtttgcgcacgtactat

SEQ ID NO: 292096 - DNA, 21 bp, Artificial sequence
  SiRNA target sequence
gaagtttgcgcacgtactatg

SEQ ID NO: 292097 - DNA, 21 bp, Artificial sequence
  SiRNA target sequence
aagtttgcgcacgtactatgg

SEQ ID NO: 292098 - DNA, 21 bp, Artificial sequence
  SiRNA target sequence
agtttgcgcacgtactatgga

SEQ ID NO: 292099 - DNA, 21 bp, Artificial sequence
  SiRNA target sequence
gtttgcgcacgtactatggat

SEQ ID NO: 292100 - DNA, 21 bp, Artificial sequence
  SiRNA target sequence
tttgcgcacgtactatggatg

SEQ ID NO: 292101 - DNA, 21 bp, Artificial sequence
  SiRNA target sequence
ttgcgcacgtactatggatga

SEQ ID NO: 292102 - DNA, 21 bp, Artificial sequence
  SiRNA target sequence
tgcgcacgtactatggatgaa

SEQ ID NO: 292103 - DNA, 21 bp, Artificial sequence
  SiRNA target sequence
gcgcacgtactatggatgaag

SEQ ID NO: 292104 - DNA, 21 bp, Artificial sequence
  SiRNA target sequence
cgcacgtactatggatgaagc

SEQ ID NO: 292105 - DNA, 21 bp, Artificial sequence
  SiRNA target sequence
gcacgtactatggatgaagct

SEQ ID NO: 292106 - DNA, 21 bp, Artificial sequence
  SiRNA target sequence
cacgtactatggatgaagctt

SEQ ID NO: 292107 - DNA, 21 bp, Artificial sequence
  SiRNA target sequence
acgtactatggatgaagcttt

SEQ ID NO: 292108 - DNA, 21 bp, Artificial sequence
  SiRNA target sequence
cgtactatggatgaagctttt

SEQ ID NO: 292109 - DNA, 21 bp, Artificial sequence
  SiRNA target sequence
gtactatggatgaagcttttg

SEQ ID NO: 292110 - DNA, 21 bp, Artificial sequence
  SiRNA target sequence
tactatggatgaagcttttgt

SEQ ID NO: 292111 - DNA, 21 bp, Artificial sequence
  SiRNA target sequence
actatggatgaagcttttgtt

SEQ ID NO: 292112 - DNA, 21 bp, Artificial sequence
  SiRNA target sequence
ctatggatgaagcttttgttg

SEQ ID NO: 292113 - DNA, 21 bp, Artificial sequence
  SiRNA target sequence
tatggatgaagcttttgttga

SEQ ID NO: 292114 - DNA, 21 bp, Artificial sequence
  SiRNA target sequence
atggatgaagcttttgttgac

SEQ ID NO: 292115 - DNA, 21 bp, Artificial sequence
  SiRNA target sequence
tggatgaagcttttgttgacg

SEQ ID NO: 292116 - DNA, 21 bp, Artificial sequence
  SiRNA target sequence
ggatgaagcttttgttgacgc

SEQ ID NO: 292117 - DNA, 21 bp, Artificial sequence
  SiRNA target sequence
gatgaagcttttgttgacgca

SEQ ID NO: 292118 - DNA, 21 bp, Artificial sequence
  SiRNA target sequence
atgaagcttttgttgacgcat

SEQ ID NO: 292119 - DNA, 21 bp, Artificial sequence
  SiRNA target sequence
tgaagcttttgttgacgcata

SEQ ID NO: 292120 - DNA, 21 bp, Artificial sequence
  SiRNA target sequence
gaagcttttgttgacgcatat

SEQ ID NO: 292121 - DNA, 21 bp, Artificial sequence
  SiRNA target sequence
aagcttttgttgacgcatatg

SEQ ID NO: 292122 - DNA, 21 bp, Artificial sequence
  SiRNA target sequence
agcttttgttgacgcatatga

SEQ ID NO: 292123 - DNA, 21 bp, Artificial sequence
  SiRNA target sequence
gcttttgttgacgcatatgat

SEQ ID NO: 292124 - DNA, 21 bp, Artificial sequence
  SiRNA target sequence
cttttgttgacgcatatgatg

SEQ ID NO: 292125 - DNA, 21 bp, Artificial sequence
  SiRNA target sequence
ttttgttgacgcatatgatga

SEQ ID NO: 292126 - DNA, 21 bp, Artificial sequence
  SiRNA target sequence
tttgttgacgcatatgatgac

SEQ ID NO: 292127 - DNA, 21 bp, Artificial sequence
  SiRNA target sequence
ttgttgacgcatatgatgacg

SEQ ID NO: 292128 - DNA, 21 bp, Artificial sequence
  SiRNA target sequence
tgttgacgcatatgatgacgt

SEQ ID NO: 292129 - DNA, 21 bp, Artificial sequence
  SiRNA target sequence
gttgacgcatatgatgacgtc

SEQ ID NO: 292130 - DNA, 21 bp, Artificial sequence
  SiRNA target sequence
ttgacgcatatgatgacgtca

SEQ ID NO: 292131 - DNA, 21 bp, Artificial sequence
  SiRNA target sequence
tgacgcatatgatgacgtcat

SEQ ID NO: 292132 - DNA, 21 bp, Artificial sequence
  SiRNA target sequence
gacgcatatgatgacgtcatc

SEQ ID NO: 292133 - DNA, 21 bp, Artificial sequence
  SiRNA target sequence
acgcatatgatgacgtcatcg

SEQ ID NO: 292134 - DNA, 21 bp, Artificial sequence
  SiRNA target sequence
cgcatatgatgacgtcatcga

SEQ ID NO: 292135 - DNA, 21 bp, Artificial sequence
  SiRNA target sequence
gcatatgatgacgtcatcgat

SEQ ID NO: 292136 - DNA, 21 bp, Artificial sequence
  SiRNA target sequence
catatgatgacgtcatcgatg

SEQ ID NO: 292137 - DNA, 21 bp, Artificial sequence
  SiRNA target sequence
atatgatgacgtcatcgatgt

SEQ ID NO: 292138 - DNA, 21 bp, Artificial sequence
  SiRNA target sequence
tatgatgacgtcatcgatgta

SEQ ID NO: 292139 - DNA, 21 bp, Artificial sequence
  SiRNA target sequence
atgatgacgtcatcgatgtaa

SEQ ID NO: 292140 - DNA, 21 bp, Artificial sequence
  SiRNA target sequence
tgatgacgtcatcgatgtaaa

SEQ ID NO: 292141 - DNA, 21 bp, Artificial sequence
  SiRNA target sequence
gatgacgtcatcgatgtaaac

SEQ ID NO: 292142 - DNA, 21 bp, Artificial sequence
  SiRNA target sequence
atgacgtcatcgatgtaaaca

SEQ ID NO: 292143 - DNA, 21 bp, Artificial sequence
  SiRNA target sequence
tgacgtcatcgatgtaaacat

SEQ ID NO: 292144 - DNA, 21 bp, Artificial sequence
  SiRNA target sequence
gacgtcatcgatgtaaacatg

SEQ ID NO: 292145 - DNA, 21 bp, Artificial sequence
  SiRNA target sequence
acgtcatcgatgtaaacatgc

SEQ ID NO: 292146 - DNA, 21 bp, Artificial sequence
  SiRNA target sequence
cgtcatcgatgtaaacatgca

SEQ ID NO: 292147 - DNA, 21 bp, Artificial sequence
  SiRNA target sequence
gtcatcgatgtaaacatgcaa

SEQ ID NO: 292148 - DNA, 21 bp, Artificial sequence
  SiRNA target sequence
tcatcgatgtaaacatgcaaa

SEQ ID NO: 292149 - DNA, 21 bp, Artificial sequence
  SiRNA target sequence
catcgatgtaaacatgcaaat

SEQ ID NO: 292150 - DNA, 21 bp, Artificial sequence
  SiRNA target sequence
atcgatgtaaacatgcaaatt

SEQ ID NO: 292151 - DNA, 21 bp, Artificial sequence
  SiRNA target sequence
tcgatgtaaacatgcaaattg

SEQ ID NO: 292152 - DNA, 21 bp, Artificial sequence
  SiRNA target sequence
cgatgtaaacatgcaaattga

SEQ ID NO: 292153 - DNA, 21 bp, Artificial sequence
  SiRNA target sequence
gatgtaaacatgcaaattgaa

SEQ ID NO: 292154 - DNA, 21 bp, Artificial sequence
  SiRNA target sequence
atgtaaacatgcaaattgaaa

SEQ ID NO: 292155 - DNA, 21 bp, Artificial sequence
  SiRNA target sequence
tgtaaacatgcaaattgaaac

SEQ ID NO: 292156 - DNA, 21 bp, Artificial sequence
  SiRNA target sequence
gtaaacatgcaaattgaaaca

SEQ ID NO: 292157 - DNA, 21 bp, Artificial sequence
  SiRNA target sequence
taaacatgcaaattgaaacag

SEQ ID NO: 292158 - DNA, 21 bp, Artificial sequence
  SiRNA target sequence
aaacatgcaaattgaaacagt

SEQ ID NO: 292159 - DNA, 21 bp, Artificial sequence
  SiRNA target sequence
aacatgcaaattgaaacagtt

SEQ ID NO: 292160 - DNA, 21 bp, Artificial sequence
  SiRNA target sequence
acatgcaaattgaaacagttg

SEQ ID NO: 292161 - DNA, 21 bp, Artificial sequence
  SiRNA target sequence
catgcaaattgaaacagttga

SEQ ID NO: 292162 - DNA, 21 bp, Artificial sequence
  SiRNA target sequence
atgcaaattgaaacagttgat

SEQ ID NO: 292163 - DNA, 21 bp, Artificial sequence
  SiRNA target sequence
tgcaaattgaaacagttgatg

SEQ ID NO: 292164 - DNA, 21 bp, Artificial sequence
  SiRNA target sequence
gcaaattgaaacagttgatga

SEQ ID NO: 292165 - DNA, 21 bp, Artificial sequence
  SiRNA target sequence
caaattgaaacagttgatgaa

SEQ ID NO: 292166 - DNA, 21 bp, Artificial sequence
  SiRNA target sequence
aaattgaaacagttgatgaaa

SEQ ID NO: 292167 - DNA, 21 bp, Artificial sequence
  SiRNA target sequence
aattgaaacagttgatgaaat

SEQ ID NO: 292168 - DNA, 21 bp, Artificial sequence
  SiRNA target sequence
attgaaacagttgatgaaatg

SEQ ID NO: 292169 - DNA, 21 bp, Artificial sequence
  SiRNA target sequence
ttgaaacagttgatgaaatgg

SEQ ID NO: 292170 - DNA, 21 bp, Artificial sequence
  SiRNA target sequence
tgaaacagttgatgaaatgga

SEQ ID NO: 292171 - DNA, 21 bp, Artificial sequence
  SiRNA target sequence
gaaacagttgatgaaatggaa

SEQ ID NO: 292172 - DNA, 21 bp, Artificial sequence
  SiRNA target sequence
aaacagttgatgaaatggaac

SEQ ID NO: 292173 - DNA, 21 bp, Artificial sequence
  SiRNA target sequence
aacagttgatgaaatggaact

SEQ ID NO: 292174 - DNA, 21 bp, Artificial sequence
  SiRNA target sequence
acagttgatgaaatggaactg

SEQ ID NO: 292175 - DNA, 21 bp, Artificial sequence
  SiRNA target sequence
cagttgatgaaatggaactga

SEQ ID NO: 292176 - DNA, 21 bp, Artificial sequence
  SiRNA target sequence
agttgatgaaatggaactgat

SEQ ID NO: 292177 - DNA, 21 bp, Artificial sequence
  SiRNA target sequence
gttgatgaaatggaactgatt

SEQ ID NO: 292178 - DNA, 21 bp, Artificial sequence
  SiRNA target sequence
ttgatgaaatggaactgattg

SEQ ID NO: 292179 - DNA, 21 bp, Artificial sequence
  SiRNA target sequence
tgatgaaatggaactgattga

SEQ ID NO: 292180 - DNA, 21 bp, Artificial sequence
  SiRNA target sequence
gatgaaatggaactgattgaa

SEQ ID NO: 292181 - DNA, 21 bp, Artificial sequence
  SiRNA target sequence
atgaaatggaactgattgaac

SEQ ID NO: 292182 - DNA, 21 bp, Artificial sequence
  SiRNA target sequence
tgaaatggaactgattgaacc

SEQ ID NO: 292183 - DNA, 21 bp, Artificial sequence
  SiRNA target sequence
gaaatggaactgattgaaccc

SEQ ID NO: 292184 - DNA, 21 bp, Artificial sequence
  SiRNA target sequence
aaatggaactgattgaaccca

SEQ ID NO: 292185 - DNA, 21 bp, Artificial sequence
  SiRNA target sequence
aatggaactgattgaacccaa

SEQ ID NO: 292186 - DNA, 21 bp, Artificial sequence
  SiRNA target sequence
atggaactgattgaacccaac

SEQ ID NO: 292187 - DNA, 21 bp, Artificial sequence
  SiRNA target sequence
tggaactgattgaacccaaca

SEQ ID NO: 292188 - DNA, 21 bp, Artificial sequence
  SiRNA target sequence
ggaactgattgaacccaacaa

SEQ ID NO: 292189 - DNA, 21 bp, Artificial sequence
  SiRNA target sequence
gaactgattgaacccaacaaa

SEQ ID NO: 292190 - DNA, 21 bp, Artificial sequence
  SiRNA target sequence
aactgattgaacccaacaaat

SEQ ID NO: 292191 - DNA, 21 bp, Artificial sequence
  SiRNA target sequence
actgattgaacccaacaaatt

SEQ ID NO: 292192 - DNA, 21 bp, Artificial sequence
  SiRNA target sequence
ctgattgaacccaacaaatta

SEQ ID NO: 292193 - DNA, 21 bp, Artificial sequence
  SiRNA target sequence
tgattgaacccaacaaattaa

SEQ ID NO: 292194 - DNA, 21 bp, Artificial sequence
  SiRNA target sequence
gattgaacccaacaaattaag

SEQ ID NO: 292195 - DNA, 21 bp, Artificial sequence
  SiRNA target sequence
attgaacccaacaaattaaga

SEQ ID NO: 292196 - DNA, 21 bp, Artificial sequence
  SiRNA target sequence
ttgaacccaacaaattaagag

SEQ ID NO: 292197 - DNA, 21 bp, Artificial sequence
  SiRNA target sequence
tgaacccaacaaattaagaga

SEQ ID NO: 292198 - DNA, 21 bp, Artificial sequence
  SiRNA target sequence
gaacccaacaaattaagagag

SEQ ID NO: 292199 - DNA, 21 bp, Artificial sequence
  SiRNA target sequence
aacccaacaaattaagagaga

SEQ ID NO: 292200 - DNA, 21 bp, Artificial sequence
  SiRNA target sequence
acccaacaaattaagagagat

SEQ ID NO: 292201 - DNA, 21 bp, Artificial sequence
  SiRNA target sequence
cccaacaaattaagagagatg

SEQ ID NO: 292202 - DNA, 21 bp, Artificial sequence
  SiRNA target sequence
ccaacaaattaagagagatga

SEQ ID NO: 292203 - DNA, 21 bp, Artificial sequence
  SiRNA target sequence
caacaaattaagagagatgat

SEQ ID NO: 292204 - DNA, 21 bp, Artificial sequence
  SiRNA target sequence
aacaaattaagagagatgata

SEQ ID NO: 292205 - DNA, 21 bp, Artificial sequence
  SiRNA target sequence
acaaattaagagagatgatag

SEQ ID NO: 292206 - DNA, 21 bp, Artificial sequence
  SiRNA target sequence
caaattaagagagatgataga

SEQ ID NO: 292207 - DNA, 21 bp, Artificial sequence
  SiRNA target sequence
aaattaagagagatgatagaa

SEQ ID NO: 292208 - DNA, 21 bp, Artificial sequence
  SiRNA target sequence
aattaagagagatgatagaac

SEQ ID NO: 292209 - DNA, 21 bp, Artificial sequence
  SiRNA target sequence
attaagagagatgatagaaca

SEQ ID NO: 292210 - DNA, 21 bp, Artificial sequence
  SiRNA target sequence
ttaagagagatgatagaacaa

SEQ ID NO: 292211 - DNA, 21 bp, Artificial sequence
  SiRNA target sequence
taagagagatgatagaacaat

SEQ ID NO: 292212 - DNA, 21 bp, Artificial sequence
  SiRNA target sequence
aagagagatgatagaacaatg

SEQ ID NO: 292213 - DNA, 21 bp, Artificial sequence
  SiRNA target sequence
agagagatgatagaacaatgc

SEQ ID NO: 292214 - DNA, 21 bp, Artificial sequence
  SiRNA target sequence
gagagatgatagaacaatgct

SEQ ID NO: 292215 - DNA, 21 bp, Artificial sequence
  SiRNA target sequence
agagatgatagaacaatgctc

SEQ ID NO: 292216 - DNA, 21 bp, Artificial sequence
  SiRNA target sequence
gagatgatagaacaatgctca

SEQ ID NO: 292217 - DNA, 21 bp, Artificial sequence
  SiRNA target sequence
agatgatagaacaatgctcaa

SEQ ID NO: 292218 - DNA, 21 bp, Artificial sequence
  SiRNA target sequence
gatgatagaacaatgctcaaa

SEQ ID NO: 292219 - DNA, 21 bp, Artificial sequence
  SiRNA target sequence
atgatagaacaatgctcaaat

SEQ ID NO: 292220 - DNA, 21 bp, Artificial sequence
  SiRNA target sequence
tgatagaacaatgctcaaata

SEQ ID NO: 292221 - DNA, 21 bp, Artificial sequence
  SiRNA target sequence
gatagaacaatgctcaaataa

SEQ ID NO: 292222 - DNA, 21 bp, Artificial sequence
  SiRNA target sequence
atagaacaatgctcaaataag

SEQ ID NO: 292223 - DNA, 21 bp, Artificial sequence
  SiRNA target sequence
tagaacaatgctcaaataaga

SEQ ID NO: 292224 - DNA, 21 bp, Artificial sequence
  SiRNA target sequence
agaacaatgctcaaataagat

SEQ ID NO: 292225 - DNA, 21 bp, Artificial sequence
  SiRNA target sequence
gaacaatgctcaaataagata

SEQ ID NO: 292226 - DNA, 21 bp, Artificial sequence
  SiRNA target sequence
aacaatgctcaaataagatag

SEQ ID NO: 292227 - DNA, 21 bp, Artificial sequence
  SiRNA target sequence
acaatgctcaaataagatagt

SEQ ID NO: 292228 - DNA, 21 bp, Artificial sequence
  SiRNA target sequence
caatgctcaaataagatagta

SEQ ID NO: 292229 - DNA, 21 bp, Artificial sequence
  SiRNA target sequence
aatgctcaaataagatagtat

SEQ ID NO: 292230 - DNA, 21 bp, Artificial sequence
  SiRNA target sequence
atgctcaaataagatagtata

SEQ ID NO: 292231 - DNA, 21 bp, Artificial sequence
  SiRNA target sequence
tgctcaaataagatagtatac

SEQ ID NO: 292232 - DNA, 21 bp, Artificial sequence
  SiRNA target sequence
gctcaaataagatagtataca

SEQ ID NO: 292233 - DNA, 21 bp, Artificial sequence
  SiRNA target sequence
ctcaaataagatagtatacac

SEQ ID NO: 292234 - DNA, 21 bp, Artificial sequence
  SiRNA target sequence
tcaaataagatagtatacacg

SEQ ID NO: 292235 - DNA, 21 bp, Artificial sequence
  SiRNA target sequence
caaataagatagtatacacgt

SEQ ID NO: 292236 - DNA, 21 bp, Artificial sequence
  SiRNA target sequence
aaataagatagtatacacgta

SEQ ID NO: 292237 - DNA, 21 bp, Artificial sequence
  SiRNA target sequence
aataagatagtatacacgtat

SEQ ID NO: 292238 - DNA, 21 bp, Artificial sequence
  SiRNA target sequence
ataagatagtatacacgtatg

SEQ ID NO: 292239 - DNA, 21 bp, Artificial sequence
  SiRNA target sequence
taagatagtatacacgtatga

SEQ ID NO: 292240 - DNA, 21 bp, Artificial sequence
  SiRNA target sequence
aagatagtatacacgtatgaa

SEQ ID NO: 292241 - DNA, 21 bp, Artificial sequence
  SiRNA target sequence
agatagtatacacgtatgaag

SEQ ID NO: 292242 - DNA, 21 bp, Artificial sequence
  SiRNA target sequence
gatagtatacacgtatgaagg

SEQ ID NO: 292243 - DNA, 21 bp, Artificial sequence
  SiRNA target sequence
atagtatacacgtatgaagga

SEQ ID NO: 292244 - DNA, 21 bp, Artificial sequence
  SiRNA target sequence
tagtatacacgtatgaaggaa

SEQ ID NO: 292245 - DNA, 21 bp, Artificial sequence
  SiRNA target sequence
agtatacacgtatgaaggaat

SEQ ID NO: 292246 - DNA, 21 bp, Artificial sequence
  SiRNA target sequence
gtatacacgtatgaaggaata

SEQ ID NO: 292247 - DNA, 21 bp, Artificial sequence
  SiRNA target sequence
tatacacgtatgaaggaatag

SEQ ID NO: 292248 - DNA, 21 bp, Artificial sequence
  SiRNA target sequence
atacacgtatgaaggaatagc

SEQ ID NO: 292249 - DNA, 21 bp, Artificial sequence
  SiRNA target sequence
tacacgtatgaaggaatagct

SEQ ID NO: 292250 - DNA, 21 bp, Artificial sequence
  SiRNA target sequence
acacgtatgaaggaatagctg

SEQ ID NO: 292251 - DNA, 21 bp, Artificial sequence
  SiRNA target sequence
cacgtatgaaggaatagctgt

SEQ ID NO: 292252 - DNA, 21 bp, Artificial sequence
  SiRNA target sequence
acgtatgaaggaatagctgtt

SEQ ID NO: 292253 - DNA, 21 bp, Artificial sequence
  SiRNA target sequence
cgtatgaaggaatagctgtta

SEQ ID NO: 292254 - DNA, 21 bp, Artificial sequence
  SiRNA target sequence
gtatgaaggaatagctgttaa

SEQ ID NO: 292255 - DNA, 21 bp, Artificial sequence
  SiRNA target sequence
tatgaaggaatagctgttaaa

SEQ ID NO: 292256 - DNA, 21 bp, Artificial sequence
  SiRNA target sequence
atgaaggaatagctgttaaaa

SEQ ID NO: 292257 - DNA, 21 bp, Artificial sequence
  SiRNA target sequence
tgaaggaatagctgttaaaat

SEQ ID NO: 292258 - DNA, 21 bp, Artificial sequence
  SiRNA target sequence
gaaggaatagctgttaaaata

SEQ ID NO: 292259 - DNA, 21 bp, Artificial sequence
  SiRNA target sequence
aaggaatagctgttaaaataa

SEQ ID NO: 292260 - DNA, 21 bp, Artificial sequence
  SiRNA target sequence
aggaatagctgttaaaataac

SEQ ID NO: 292261 - DNA, 21 bp, Artificial sequence
  SiRNA target sequence
ggaatagctgttaaaataaca

SEQ ID NO: 292262 - DNA, 21 bp, Artificial sequence
  SiRNA target sequence
gaatagctgttaaaataacat

SEQ ID NO: 292263 - DNA, 21 bp, Artificial sequence
  SiRNA target sequence
aatagctgttaaaataacatc

SEQ ID NO: 292264 - DNA, 21 bp, Artificial sequence
  SiRNA target sequence
atagctgttaaaataacatca

SEQ ID NO: 292265 - DNA, 21 bp, Artificial sequence
  SiRNA target sequence
tagctgttaaaataacatcat

SEQ ID NO: 292266 - DNA, 21 bp, Artificial sequence
  SiRNA target sequence
agctgttaaaataacatcatt

SEQ ID NO: 292267 - DNA, 21 bp, Artificial sequence
  SiRNA target sequence
gctgttaaaataacatcatta

SEQ ID NO: 292268 - DNA, 21 bp, Artificial sequence
  SiRNA target sequence
ctgttaaaataacatcattag

SEQ ID NO: 292269 - DNA, 21 bp, Artificial sequence
  SiRNA target sequence
tgttaaaataacatcattagc

SEQ ID NO: 292270 - DNA, 21 bp, Artificial sequence
  SiRNA target sequence
gttaaaataacatcattagca

SEQ ID NO: 292271 - DNA, 21 bp, Artificial sequence
  SiRNA target sequence
ttaaaataacatcattagcat

SEQ ID NO: 292272 - DNA, 21 bp, Artificial sequence
  SiRNA target sequence
taaaataacatcattagcatt

SEQ ID NO: 292273 - DNA, 21 bp, Artificial sequence
  SiRNA target sequence
aaaataacatcattagcattt

SEQ ID NO: 292274 - DNA, 21 bp, Artificial sequence
  SiRNA target sequence
aaataacatcattagcattta

SEQ ID NO: 292275 - DNA, 21 bp, Artificial sequence
  SiRNA target sequence
aataacatcattagcatttaa

SEQ ID NO: 292276 - DNA, 21 bp, Artificial sequence
  SiRNA target sequence
ataacatcattagcatttaaa

SEQ ID NO: 292277 - DNA, 21 bp, Artificial sequence
  SiRNA target sequence
taacatcattagcatttaaac

SEQ ID NO: 292278 - DNA, 21 bp, Artificial sequence
  SiRNA target sequence
aacatcattagcatttaaact

SEQ ID NO: 292279 - DNA, 21 bp, Artificial sequence
  SiRNA target sequence
acatcattagcatttaaacta

SEQ ID NO: 292280 - DNA, 21 bp, Artificial sequence
  SiRNA target sequence
catcattagcatttaaactag

SEQ ID NO: 292281 - DNA, 21 bp, Artificial sequence
  SiRNA target sequence
atcattagcatttaaactagc

SEQ ID NO: 292282 - DNA, 21 bp, Artificial sequence
  SiRNA target sequence
tcattagcatttaaactagcc

SEQ ID NO: 292283 - DNA, 21 bp, Artificial sequence
  SiRNA target sequence
cattagcatttaaactagcca

SEQ ID NO: 292284 - DNA, 21 bp, Artificial sequence
  SiRNA target sequence
attagcatttaaactagccac

SEQ ID NO: 292285 - DNA, 21 bp, Artificial sequence
  SiRNA target sequence
ttagcatttaaactagccaca

SEQ ID NO: 292286 - DNA, 21 bp, Artificial sequence
  SiRNA target sequence
tagcatttaaactagccacac

SEQ ID NO: 292287 - DNA, 21 bp, Artificial sequence
  SiRNA target sequence
agcatttaaactagccacact

SEQ ID NO: 292288 - DNA, 21 bp, Artificial sequence
  SiRNA target sequence
gcatttaaactagccacacta

SEQ ID NO: 292289 - DNA, 21 bp, Artificial sequence
  SiRNA target sequence
catttaaactagccacactaa

SEQ ID NO: 292290 - DNA, 21 bp, Artificial sequence
  SiRNA target sequence
atttaaactagccacactaaa

SEQ ID NO: 292291 - DNA, 21 bp, Artificial sequence
  SiRNA target sequence
tttaaactagccacactaaac

SEQ ID NO: 292292 - DNA, 21 bp, Artificial sequence
  SiRNA target sequence
ttaaactagccacactaaact

SEQ ID NO: 292293 - DNA, 21 bp, Artificial sequence
  SiRNA target sequence
taaactagccacactaaacta

SEQ ID NO: 292294 - DNA, 21 bp, Artificial sequence
  SiRNA target sequence
aaactagccacactaaactac

SEQ ID NO: 292295 - DNA, 21 bp, Artificial sequence
  SiRNA target sequence
aactagccacactaaactacg

SEQ ID NO: 292296 - DNA, 21 bp, Artificial sequence
  SiRNA target sequence
actagccacactaaactacga

SEQ ID NO: 292297 - DNA, 21 bp, Artificial sequence
  SiRNA target sequence
ctagccacactaaactacgaa

SEQ ID NO: 292298 - DNA, 21 bp, Artificial sequence
  SiRNA target sequence
tagccacactaaactacgaag

SEQ ID NO: 292299 - DNA, 21 bp, Artificial sequence
  SiRNA target sequence
agccacactaaactacgaaga

SEQ ID NO: 292300 - DNA, 21 bp, Artificial sequence
  SiRNA target sequence
gccacactaaactacgaagaa

SEQ ID NO: 292301 - DNA, 21 bp, Artificial sequence
  SiRNA target sequence
ccacactaaactacgaagaac

SEQ ID NO: 292302 - DNA, 21 bp, Artificial sequence
  SiRNA target sequence
cacactaaactacgaagaaca

SEQ ID NO: 292303 - DNA, 21 bp, Artificial sequence
  SiRNA target sequence
acactaaactacgaagaacaa

SEQ ID NO: 292304 - DNA, 21 bp, Artificial sequence
  SiRNA target sequence
cactaaactacgaagaacaat

SEQ ID NO: 292305 - DNA, 21 bp, Artificial sequence
  SiRNA target sequence
actaaactacgaagaacaatg

SEQ ID NO: 292306 - DNA, 21 bp, Artificial sequence
  SiRNA target sequence
ctaaactacgaagaacaatgg

SEQ ID NO: 292307 - DNA, 21 bp, Artificial sequence
  SiRNA target sequence
taaactacgaagaacaatggg

SEQ ID NO: 292308 - DNA, 21 bp, Artificial sequence
  SiRNA target sequence
aaactacgaagaacaatggga

SEQ ID NO: 292309 - DNA, 21 bp, Artificial sequence
  SiRNA target sequence
aactacgaagaacaatgggaa

SEQ ID NO: 292310 - DNA, 21 bp, Artificial sequence
  SiRNA target sequence
actacgaagaacaatgggaac

SEQ ID NO: 292311 - DNA, 21 bp, Artificial sequence
  SiRNA target sequence
ctacgaagaacaatgggaaca

SEQ ID NO: 292312 - DNA, 21 bp, Artificial sequence
  SiRNA target sequence
tacgaagaacaatgggaacag

SEQ ID NO: 292313 - DNA, 21 bp, Artificial sequence
  SiRNA target sequence
acgaagaacaatgggaacaga

SEQ ID NO: 292314 - DNA, 21 bp, Artificial sequence
  SiRNA target sequence
cgaagaacaatgggaacagat

SEQ ID NO: 292315 - DNA, 21 bp, Artificial sequence
  SiRNA target sequence
gaagaacaatgggaacagatt

SEQ ID NO: 292316 - DNA, 21 bp, Artificial sequence
  SiRNA target sequence
aagaacaatgggaacagatta

SEQ ID NO: 292317 - DNA, 21 bp, Artificial sequence
  SiRNA target sequence
agaacaatgggaacagattaa

SEQ ID NO: 292318 - DNA, 21 bp, Artificial sequence
  SiRNA target sequence
gaacaatgggaacagattaag

SEQ ID NO: 292319 - DNA, 21 bp, Artificial sequence
  SiRNA target sequence
aacaatgggaacagattaagg

SEQ ID NO: 292320 - DNA, 21 bp, Artificial sequence
  SiRNA target sequence
acaatgggaacagattaagga

SEQ ID NO: 292321 - DNA, 21 bp, Artificial sequence
  SiRNA target sequence
caatgggaacagattaaggaa

SEQ ID NO: 292322 - DNA, 21 bp, Artificial sequence
  SiRNA target sequence
aatgggaacagattaaggaaa

SEQ ID NO: 292323 - DNA, 21 bp, Artificial sequence
  SiRNA target sequence
atgggaacagattaaggaaat

SEQ ID NO: 292324 - DNA, 21 bp, Artificial sequence
  SiRNA target sequence
tgggaacagattaaggaaatg

SEQ ID NO: 292325 - DNA, 21 bp, Artificial sequence
  SiRNA target sequence
gggaacagattaaggaaatga

SEQ ID NO: 292326 - DNA, 21 bp, Artificial sequence
  SiRNA target sequence
ggaacagattaaggaaatgaa

SEQ ID NO: 292327 - DNA, 21 bp, Artificial sequence
  SiRNA target sequence
gaacagattaaggaaatgaaa

SEQ ID NO: 292328 - DNA, 21 bp, Artificial sequence
  SiRNA target sequence
aacagattaaggaaatgaaat

SEQ ID NO: 292329 - DNA, 21 bp, Artificial sequence
  SiRNA target sequence
acagattaaggaaatgaaata

SEQ ID NO: 292330 - DNA, 21 bp, Artificial sequence
  SiRNA target sequence
cagattaaggaaatgaaatat

SEQ ID NO: 292331 - DNA, 21 bp, Artificial sequence
  SiRNA target sequence
agattaaggaaatgaaatatt

SEQ ID NO: 292332 - DNA, 21 bp, Artificial sequence
  SiRNA target sequence
gattaaggaaatgaaatatta

SEQ ID NO: 292333 - DNA, 21 bp, Artificial sequence
  SiRNA target sequence
attaaggaaatgaaatattat

SEQ ID NO: 292334 - DNA, 21 bp, Artificial sequence
  SiRNA target sequence
ttaaggaaatgaaatattatg

SEQ ID NO: 292335 - DNA, 21 bp, Artificial sequence
  SiRNA target sequence
taaggaaatgaaatattatgt

SEQ ID NO: 292336 - DNA, 21 bp, Artificial sequence
  SiRNA target sequence
aaggaaatgaaatattatgtt

SEQ ID NO: 292337 - DNA, 21 bp, Artificial sequence
  SiRNA target sequence
aggaaatgaaatattatgtta

SEQ ID NO: 292338 - DNA, 21 bp, Artificial sequence
  SiRNA target sequence
ggaaatgaaatattatgttaa

SEQ ID NO: 292339 - DNA, 21 bp, Artificial sequence
  SiRNA target sequence
gaaatgaaatattatgttaaa

SEQ ID NO: 292340 - DNA, 21 bp, Artificial sequence
  SiRNA target sequence
aaatgaaatattatgttaaag

SEQ ID NO: 292341 - DNA, 21 bp, Artificial sequence
  SiRNA target sequence
aatgaaatattatgttaaagt

SEQ ID NO: 292342 - DNA, 21 bp, Artificial sequence
  SiRNA target sequence
atgaaatattatgttaaagtg

SEQ ID NO: 292343 - DNA, 21 bp, Artificial sequence
  SiRNA target sequence
tgaaatattatgttaaagtga

SEQ ID NO: 292344 - DNA, 21 bp, Artificial sequence
  SiRNA target sequence
gaaatattatgttaaagtgag

SEQ ID NO: 292345 - DNA, 21 bp, Artificial sequence
  SiRNA target sequence
aaatattatgttaaagtgagt

SEQ ID NO: 292346 - DNA, 21 bp, Artificial sequence
  SiRNA target sequence
aatattatgttaaagtgagtt

SEQ ID NO: 292347 - DNA, 21 bp, Artificial sequence
  SiRNA target sequence
atattatgttaaagtgagttc

SEQ ID NO: 292348 - DNA, 21 bp, Artificial sequence
  SiRNA target sequence
tattatgttaaagtgagttca

SEQ ID NO: 292349 - DNA, 21 bp, Artificial sequence
  SiRNA target sequence
attatgttaaagtgagttcag

SEQ ID NO: 292350 - DNA, 21 bp, Artificial sequence
  SiRNA target sequence
ttatgttaaagtgagttcagg

SEQ ID NO: 292351 - DNA, 21 bp, Artificial sequence
  SiRNA target sequence
tatgttaaagtgagttcaggt

SEQ ID NO: 292352 - DNA, 21 bp, Artificial sequence
  SiRNA target sequence
atgttaaagtgagttcaggtg

SEQ ID NO: 292353 - DNA, 21 bp, Artificial sequence
  SiRNA target sequence
tgttaaagtgagttcaggtgt

SEQ ID NO: 292354 - DNA, 21 bp, Artificial sequence
  SiRNA target sequence
gttaaagtgagttcaggtgtg

SEQ ID NO: 292355 - DNA, 21 bp, Artificial sequence
  SiRNA target sequence
ttaaagtgagttcaggtgtga

SEQ ID NO: 292356 - DNA, 21 bp, Artificial sequence
  SiRNA target sequence
taaagtgagttcaggtgtgaa

SEQ ID NO: 292357 - DNA, 21 bp, Artificial sequence
  SiRNA target sequence
aaagtgagttcaggtgtgaac

SEQ ID NO: 292358 - DNA, 21 bp, Artificial sequence
  SiRNA target sequence
aagtgagttcaggtgtgaact

SEQ ID NO: 292359 - DNA, 21 bp, Artificial sequence
  SiRNA target sequence
agtgagttcaggtgtgaacta

SEQ ID NO: 292360 - DNA, 21 bp, Artificial sequence
  SiRNA target sequence
gtgagttcaggtgtgaactat

SEQ ID NO: 292361 - DNA, 21 bp, Artificial sequence
  SiRNA target sequence
tgagttcaggtgtgaactatc

SEQ ID NO: 292362 - DNA, 21 bp, Artificial sequence
  SiRNA target sequence
gagttcaggtgtgaactatct

SEQ ID NO: 292363 - DNA, 21 bp, Artificial sequence
  SiRNA target sequence
agttcaggtgtgaactatctt

SEQ ID NO: 292364 - DNA, 21 bp, Artificial sequence
  SiRNA target sequence
gttcaggtgtgaactatctta

SEQ ID NO: 292365 - DNA, 21 bp, Artificial sequence
  SiRNA target sequence
ttcaggtgtgaactatcttaa

SEQ ID NO: 292366 - DNA, 21 bp, Artificial sequence
  SiRNA target sequence
tcaggtgtgaactatcttaaa

SEQ ID NO: 292367 - DNA, 21 bp, Artificial sequence
  SiRNA target sequence
caggtgtgaactatcttaaaa

SEQ ID NO: 292368 - DNA, 21 bp, Artificial sequence
  SiRNA target sequence
aggtgtgaactatcttaaaag

SEQ ID NO: 292369 - DNA, 21 bp, Artificial sequence
  SiRNA target sequence
ggtgtgaactatcttaaaaga

SEQ ID NO: 292370 - DNA, 21 bp, Artificial sequence
  SiRNA target sequence
gtgtgaactatcttaaaagag

SEQ ID NO: 292371 - DNA, 21 bp, Artificial sequence
  SiRNA target sequence
tgtgaactatcttaaaagagt

SEQ ID NO: 292372 - DNA, 21 bp, Artificial sequence
  SiRNA target sequence
gtgaactatcttaaaagagtg

SEQ ID NO: 292373 - DNA, 21 bp, Artificial sequence
  SiRNA target sequence
tgaactatcttaaaagagtgt

SEQ ID NO: 292374 - DNA, 21 bp, Artificial sequence
  SiRNA target sequence
gaactatcttaaaagagtgtt

SEQ ID NO: 292375 - DNA, 21 bp, Artificial sequence
  SiRNA target sequence
aactatcttaaaagagtgtta

SEQ ID NO: 292376 - DNA, 21 bp, Artificial sequence
  SiRNA target sequence
actatcttaaaagagtgttaa

SEQ ID NO: 292377 - DNA, 21 bp, Artificial sequence
  SiRNA target sequence
ctatcttaaaagagtgttaag

SEQ ID NO: 292378 - DNA, 21 bp, Artificial sequence
  SiRNA target sequence
tatcttaaaagagtgttaagt

SEQ ID NO: 292379 - DNA, 21 bp, Artificial sequence
  SiRNA target sequence
atcttaaaagagtgttaagtc

SEQ ID NO: 292380 - DNA, 21 bp, Artificial sequence
  SiRNA target sequence
tcttaaaagagtgttaagtca

SEQ ID NO: 292381 - DNA, 21 bp, Artificial sequence
  SiRNA target sequence
cttaaaagagtgttaagtcag

SEQ ID NO: 292382 - DNA, 21 bp, Artificial sequence
  SiRNA target sequence
ttaaaagagtgttaagtcagg

SEQ ID NO: 292383 - DNA, 21 bp, Artificial sequence
  SiRNA target sequence
taaaagagtgttaagtcaggg

SEQ ID NO: 292384 - DNA, 21 bp, Artificial sequence
  SiRNA target sequence
aaaagagtgttaagtcagggt

SEQ ID NO: 292385 - DNA, 21 bp, Artificial sequence
  SiRNA target sequence
aaagagtgttaagtcagggta

SEQ ID NO: 292386 - DNA, 21 bp, Artificial sequence
  SiRNA target sequence
aagagtgttaagtcagggtat

SEQ ID NO: 292387 - DNA, 21 bp, Artificial sequence
  SiRNA target sequence
agagtgttaagtcagggtatg

SEQ ID NO: 292388 - DNA, 21 bp, Artificial sequence
  SiRNA target sequence
gagtgttaagtcagggtatga

SEQ ID NO: 292389 - DNA, 21 bp, Artificial sequence
  SiRNA target sequence
agtgttaagtcagggtatgaa

SEQ ID NO: 292390 - DNA, 21 bp, Artificial sequence
  SiRNA target sequence
gtgttaagtcagggtatgaaa

SEQ ID NO: 292391 - DNA, 21 bp, Artificial sequence
  SiRNA target sequence
tgttaagtcagggtatgaaag

SEQ ID NO: 292392 - DNA, 21 bp, Artificial sequence
  SiRNA target sequence
gttaagtcagggtatgaaagt

SEQ ID NO: 292393 - DNA, 21 bp, Artificial sequence
  SiRNA target sequence
ttaagtcagggtatgaaagtg

SEQ ID NO: 292394 - DNA, 21 bp, Artificial sequence
  SiRNA target sequence
taagtcagggtatgaaagtgt

SEQ ID NO: 292395 - DNA, 21 bp, Artificial sequence
  SiRNA target sequence
aagtcagggtatgaaagtgtg

SEQ ID NO: 292396 - DNA, 21 bp, Artificial sequence
  SiRNA target sequence
agtcagggtatgaaagtgtgt

SEQ ID NO: 292397 - DNA, 21 bp, Artificial sequence
  SiRNA target sequence
gtcagggtatgaaagtgtgtg

SEQ ID NO: 292398 - DNA, 21 bp, Artificial sequence
  SiRNA target sequence
tcagggtatgaaagtgtgtga

SEQ ID NO: 292399 - DNA, 21 bp, Artificial sequence
  SiRNA target sequence
cagggtatgaaagtgtgtgaa

SEQ ID NO: 292400 - DNA, 21 bp, Artificial sequence
  SiRNA target sequence
agggtatgaaagtgtgtgaag

SEQ ID NO: 292401 - DNA, 21 bp, Artificial sequence
  SiRNA target sequence
gggtatgaaagtgtgtgaaga

SEQ ID NO: 292402 - DNA, 21 bp, Artificial sequence
  SiRNA target sequence
ggtatgaaagtgtgtgaagaa

SEQ ID NO: 292403 - DNA, 21 bp, Artificial sequence
  SiRNA target sequence
gtatgaaagtgtgtgaagaat

SEQ ID NO: 292404 - DNA, 21 bp, Artificial sequence
  SiRNA target sequence
tatgaaagtgtgtgaagaatg

SEQ ID NO: 292405 - DNA, 21 bp, Artificial sequence
  SiRNA target sequence
atgaaagtgtgtgaagaatgg

SEQ ID NO: 292406 - DNA, 21 bp, Artificial sequence
  SiRNA target sequence
tgaaagtgtgtgaagaatgga

SEQ ID NO: 292407 - DNA, 21 bp, Artificial sequence
  SiRNA target sequence
gaaagtgtgtgaagaatggat

SEQ ID NO: 292408 - DNA, 21 bp, Artificial sequence
  SiRNA target sequence
aaagtgtgtgaagaatggatg

SEQ ID NO: 292409 - DNA, 21 bp, Artificial sequence
  SiRNA target sequence
aagtgtgtgaagaatggatga

SEQ ID NO: 292410 - DNA, 21 bp, Artificial sequence
  SiRNA target sequence
agtgtgtgaagaatggatgaa

SEQ ID NO: 292411 - DNA, 21 bp, Artificial sequence
  SiRNA target sequence
gtgtgtgaagaatggatgaaa

SEQ ID NO: 292412 - DNA, 21 bp, Artificial sequence
  SiRNA target sequence
tgtgtgaagaatggatgaaag

SEQ ID NO: 292413 - DNA, 21 bp, Artificial sequence
  SiRNA target sequence
gtgtgaagaatggatgaaaga

SEQ ID NO: 292414 - DNA, 21 bp, Artificial sequence
  SiRNA target sequence
tgtgaagaatggatgaaagaa

SEQ ID NO: 292415 - DNA, 21 bp, Artificial sequence
  SiRNA target sequence
gtgaagaatggatgaaagaaa

SEQ ID NO: 292416 - DNA, 21 bp, Artificial sequence
  SiRNA target sequence
tgaagaatggatgaaagaaat

SEQ ID NO: 292417 - DNA, 21 bp, Artificial sequence
  SiRNA target sequence
gaagaatggatgaaagaaatg

SEQ ID NO: 292418 - DNA, 21 bp, Artificial sequence
  SiRNA target sequence
aagaatggatgaaagaaatga

SEQ ID NO: 292419 - DNA, 21 bp, Artificial sequence
  SiRNA target sequence
agaatggatgaaagaaatgat

SEQ ID NO: 292420 - DNA, 21 bp, Artificial sequence
  SiRNA target sequence
gaatggatgaaagaaatgatt

SEQ ID NO: 292421 - DNA, 21 bp, Artificial sequence
  SiRNA target sequence
aatggatgaaagaaatgatta

SEQ ID NO: 292422 - DNA, 21 bp, Artificial sequence
  SiRNA target sequence
atggatgaaagaaatgattaa

SEQ ID NO: 292423 - DNA, 21 bp, Artificial sequence
  SiRNA target sequence
tggatgaaagaaatgattaac

SEQ ID NO: 292424 - DNA, 21 bp, Artificial sequence
  SiRNA target sequence
ggatgaaagaaatgattaact

SEQ ID NO: 292425 - DNA, 21 bp, Artificial sequence
  SiRNA target sequence
gatgaaagaaatgattaacta

SEQ ID NO: 292426 - DNA, 21 bp, Artificial sequence
  SiRNA target sequence
atgaaagaaatgattaactac

SEQ ID NO: 292427 - DNA, 21 bp, Artificial sequence
  SiRNA target sequence
tgaaagaaatgattaactacg

SEQ ID NO: 292428 - DNA, 21 bp, Artificial sequence
  SiRNA target sequence
gaaagaaatgattaactacgt

SEQ ID NO: 292429 - DNA, 21 bp, Artificial sequence
  SiRNA target sequence
aaagaaatgattaactacgtt

SEQ ID NO: 292430 - DNA, 21 bp, Artificial sequence
  SiRNA target sequence
aagaaatgattaactacgtta

SEQ ID NO: 292431 - DNA, 21 bp, Artificial sequence
  SiRNA target sequence
agaaatgattaactacgttaa

SEQ ID NO: 292432 - DNA, 21 bp, Artificial sequence
  SiRNA target sequence
gaaatgattaactacgttaag

SEQ ID NO: 292433 - DNA, 21 bp, Artificial sequence
  SiRNA target sequence
aaatgattaactacgttaagg

SEQ ID NO: 292434 - DNA, 21 bp, Artificial sequence
  SiRNA target sequence
aatgattaactacgttaagga

SEQ ID NO: 292435 - DNA, 21 bp, Artificial sequence
  SiRNA target sequence
atgattaactacgttaaggaa

SEQ ID NO: 292436 - DNA, 21 bp, Artificial sequence
  SiRNA target sequence
tgattaactacgttaaggaac

SEQ ID NO: 292437 - DNA, 21 bp, Artificial sequence
  SiRNA target sequence
gattaactacgttaaggaaca

SEQ ID NO: 292438 - DNA, 21 bp, Artificial sequence
  SiRNA target sequence
attaactacgttaaggaacat

SEQ ID NO: 292439 - DNA, 21 bp, Artificial sequence
  SiRNA target sequence
ttaactacgttaaggaacatc

SEQ ID NO: 292440 - DNA, 21 bp, Artificial sequence
  SiRNA target sequence
taactacgttaaggaacatcc

SEQ ID NO: 292441 - DNA, 21 bp, Artificial sequence
  SiRNA target sequence
aactacgttaaggaacatcca

SEQ ID NO: 292442 - DNA, 21 bp, Artificial sequence
  SiRNA target sequence
actacgttaaggaacatccat

SEQ ID NO: 292443 - DNA, 21 bp, Artificial sequence
  SiRNA target sequence
ctacgttaaggaacatccatg

SEQ ID NO: 292444 - DNA, 21 bp, Artificial sequence
  SiRNA target sequence
tacgttaaggaacatccatgg

SEQ ID NO: 292445 - DNA, 21 bp, Artificial sequence
  SiRNA target sequence
acgttaaggaacatccatgga

SEQ ID NO: 292446 - DNA, 21 bp, Artificial sequence
  SiRNA target sequence
cgttaaggaacatccatggat

SEQ ID NO: 292447 - DNA, 21 bp, Artificial sequence
  SiRNA target sequence
gttaaggaacatccatggatg

SEQ ID NO: 292448 - DNA, 21 bp, Artificial sequence
  SiRNA target sequence
ttaaggaacatccatggatga

SEQ ID NO: 292449 - DNA, 21 bp, Artificial sequence
  SiRNA target sequence
taaggaacatccatggatgac

SEQ ID NO: 292450 - DNA, 21 bp, Artificial sequence
  SiRNA target sequence
aaggaacatccatggatgacc

SEQ ID NO: 292451 - DNA, 21 bp, Artificial sequence
  SiRNA target sequence
aggaacatccatggatgaccg

SEQ ID NO: 292452 - DNA, 21 bp, Artificial sequence
  SiRNA target sequence
ggaacatccatggatgaccgt

SEQ ID NO: 292453 - DNA, 21 bp, Artificial sequence
  SiRNA target sequence
gaacatccatggatgaccgtt

SEQ ID NO: 292454 - DNA, 21 bp, Artificial sequence
  SiRNA target sequence
aacatccatggatgaccgtta

SEQ ID NO: 292455 - DNA, 21 bp, Artificial sequence
  SiRNA target sequence
acatccatggatgaccgttag

SEQ ID NO: 292456 - DNA, 21 bp, Artificial sequence
  SiRNA target sequence
catccatggatgaccgttagt

SEQ ID NO: 292457 - DNA, 21 bp, Artificial sequence
  SiRNA target sequence
atccatggatgaccgttagtt

SEQ ID NO: 292458 - DNA, 21 bp, Artificial sequence
  SiRNA target sequence
tccatggatgaccgttagttt

SEQ ID NO: 292459 - DNA, 21 bp, Artificial sequence
  SiRNA target sequence
ccatggatgaccgttagttta

SEQ ID NO: 292460 - DNA, 21 bp, Artificial sequence
  SiRNA target sequence
catggatgaccgttagtttaa

SEQ ID NO: 292461 - DNA, 21 bp, Artificial sequence
  SiRNA target sequence
atggatgaccgttagtttaat

SEQ ID NO: 292462 - DNA, 21 bp, Artificial sequence
  SiRNA target sequence
tggatgaccgttagtttaata

SEQ ID NO: 292463 - DNA, 21 bp, Artificial sequence
  SiRNA target sequence
ggatgaccgttagtttaatac

SEQ ID NO: 292464 - DNA, 21 bp, Artificial sequence
  SiRNA target sequence
gatgaccgttagtttaatact

SEQ ID NO: 292465 - DNA, 21 bp, Artificial sequence
  SiRNA target sequence
atgaccgttagtttaatactg

SEQ ID NO: 292466 - DNA, 21 bp, Artificial sequence
  SiRNA target sequence
tgaccgttagtttaatactgg

SEQ ID NO: 292467 - DNA, 21 bp, Artificial sequence
  SiRNA target sequence
gaccgttagtttaatactggg

SEQ ID NO: 292468 - DNA, 21 bp, Artificial sequence
  SiRNA target sequence
accgttagtttaatactgggc

SEQ ID NO: 292469 - DNA, 21 bp, Artificial sequence
  SiRNA target sequence
ccgttagtttaatactgggca

SEQ ID NO: 292470 - DNA, 21 bp, Artificial sequence
  SiRNA target sequence
cgttagtttaatactgggcac

SEQ ID NO: 292471 - DNA, 21 bp, Artificial sequence
  SiRNA target sequence
gttagtttaatactgggcact

SEQ ID NO: 292472 - DNA, 21 bp, Artificial sequence
  SiRNA target sequence
ttagtttaatactgggcactc

SEQ ID NO: 292473 - DNA, 21 bp, Artificial sequence
  SiRNA target sequence
tagtttaatactgggcactct

SEQ ID NO: 292474 - DNA, 21 bp, Artificial sequence
  SiRNA target sequence
agtttaatactgggcactctc

SEQ ID NO: 292475 - DNA, 21 bp, Artificial sequence
  SiRNA target sequence
gtttaatactgggcactctca

SEQ ID NO: 292476 - DNA, 21 bp, Artificial sequence
  SiRNA target sequence
tttaatactgggcactctcat

SEQ ID NO: 292477 - DNA, 21 bp, Artificial sequence
  SiRNA target sequence
ttaatactgggcactctcatt

SEQ ID NO: 292478 - DNA, 21 bp, Artificial sequence
  SiRNA target sequence
taatactgggcactctcattg

SEQ ID NO: 292479 - DNA, 21 bp, Artificial sequence
  SiRNA target sequence
aatactgggcactctcattgg

SEQ ID NO: 292480 - DNA, 21 bp, Artificial sequence
  SiRNA target sequence
atactgggcactctcattgga

SEQ ID NO: 292481 - DNA, 21 bp, Artificial sequence
  SiRNA target sequence
tactgggcactctcattggaa

SEQ ID NO: 292482 - DNA, 21 bp, Artificial sequence
  SiRNA target sequence
actgggcactctcattggaat

SEQ ID NO: 292483 - DNA, 21 bp, Artificial sequence
  SiRNA target sequence
ctgggcactctcattggaata

SEQ ID NO: 292484 - DNA, 21 bp, Artificial sequence
  SiRNA target sequence
tgggcactctcattggaatac

SEQ ID NO: 292485 - DNA, 21 bp, Artificial sequence
  SiRNA target sequence
gggcactctcattggaatact

SEQ ID NO: 292486 - DNA, 21 bp, Artificial sequence
  SiRNA target sequence
ggcactctcattggaatactt

SEQ ID NO: 292487 - DNA, 21 bp, Artificial sequence
  SiRNA target sequence
gcactctcattggaatactta

SEQ ID NO: 292488 - DNA, 21 bp, Artificial sequence
  SiRNA target sequence
cactctcattggaatacttac

SEQ ID NO: 292489 - DNA, 21 bp, Artificial sequence
  SiRNA target sequence
actctcattggaatacttact

SEQ ID NO: 292490 - DNA, 21 bp, Artificial sequence
  SiRNA target sequence
ctctcattggaatacttactg

SEQ ID NO: 292491 - DNA, 21 bp, Artificial sequence
  SiRNA target sequence
tctcattggaatacttactgt

SEQ ID NO: 292492 - DNA, 21 bp, Artificial sequence
  SiRNA target sequence
ctcattggaatacttactgtt

SEQ ID NO: 292493 - DNA, 21 bp, Artificial sequence
  SiRNA target sequence
tcattggaatacttactgttg

SEQ ID NO: 292494 - DNA, 21 bp, Artificial sequence
  SiRNA target sequence
cattggaatacttactgttgt

SEQ ID NO: 292495 - DNA, 21 bp, Artificial sequence
  SiRNA target sequence
attggaatacttactgttgta

SEQ ID NO: 292496 - DNA, 21 bp, Artificial sequence
  SiRNA target sequence
ttggaatacttactgttgtag

SEQ ID NO: 292497 - DNA, 21 bp, Artificial sequence
  SiRNA target sequence
tggaatacttactgttgtagg

SEQ ID NO: 292498 - DNA, 21 bp, Artificial sequence
  SiRNA target sequence
ggaatacttactgttgtaggg

SEQ ID NO: 292499 - DNA, 21 bp, Artificial sequence
  SiRNA target sequence
gaatacttactgttgtagggt

SEQ ID NO: 292500 - DNA, 21 bp, Artificial sequence
  SiRNA target sequence
aatacttactgttgtagggtt

SEQ ID NO: 292501 - DNA, 21 bp, Artificial sequence
  SiRNA target sequence
atacttactgttgtagggttt

SEQ ID NO: 292502 - DNA, 21 bp, Artificial sequence
  SiRNA target sequence
tacttactgttgtagggtttt

SEQ ID NO: 292503 - DNA, 21 bp, Artificial sequence
  SiRNA target sequence
acttactgttgtagggttttg

SEQ ID NO: 292504 - DNA, 21 bp, Artificial sequence
  SiRNA target sequence
cttactgttgtagggttttgg

SEQ ID NO: 292505 - DNA, 21 bp, Artificial sequence
  SiRNA target sequence
ttactgttgtagggttttgga

SEQ ID NO: 292506 - DNA, 21 bp, Artificial sequence
  SiRNA target sequence
tactgttgtagggttttggaa

SEQ ID NO: 292507 - DNA, 21 bp, Artificial sequence
  SiRNA target sequence
actgttgtagggttttggaaa

SEQ ID NO: 292508 - DNA, 21 bp, Artificial sequence
  SiRNA target sequence
ctgttgtagggttttggaaat

SEQ ID NO: 292509 - DNA, 21 bp, Artificial sequence
  SiRNA target sequence
tgttgtagggttttggaaatg

SEQ ID NO: 292510 - DNA, 21 bp, Artificial sequence
  SiRNA target sequence
gttgtagggttttggaaatgg

SEQ ID NO: 292511 - DNA, 21 bp, Artificial sequence
  SiRNA target sequence
ttgtagggttttggaaatggt

SEQ ID NO: 292512 - DNA, 21 bp, Artificial sequence
  SiRNA target sequence
tgtagggttttggaaatggtt

SEQ ID NO: 292513 - DNA, 21 bp, Artificial sequence
  SiRNA target sequence
gtagggttttggaaatggtta

SEQ ID NO: 292514 - DNA, 21 bp, Artificial sequence
  SiRNA target sequence
tagggttttggaaatggttat

SEQ ID NO: 292515 - DNA, 21 bp, Artificial sequence
  SiRNA target sequence
agggttttggaaatggttatg

SEQ ID NO: 292516 - DNA, 21 bp, Artificial sequence
  SiRNA target sequence
gggttttggaaatggttatgt

SEQ ID NO: 292517 - DNA, 21 bp, Artificial sequence
  SiRNA target sequence
ggttttggaaatggttatgta

SEQ ID NO: 292518 - DNA, 21 bp, Artificial sequence
  SiRNA target sequence
gttttggaaatggttatgtag

SEQ ID NO: 292519 - DNA, 21 bp, Artificial sequence
  SiRNA target sequence
ttttggaaatggttatgtagt

SEQ ID NO: 292520 - DNA, 21 bp, Artificial sequence
  SiRNA target sequence
tttggaaatggttatgtagtg

SEQ ID NO: 292521 - DNA, 21 bp, Artificial sequence
  SiRNA target sequence
ttggaaatggttatgtagtgg

SEQ ID NO: 292522 - DNA, 21 bp, Artificial sequence
  SiRNA target sequence
tggaaatggttatgtagtggc

SEQ ID NO: 292523 - DNA, 21 bp, Artificial sequence
  SiRNA target sequence
ggaaatggttatgtagtggcg

SEQ ID NO: 292524 - DNA, 21 bp, Artificial sequence
  SiRNA target sequence
gaaatggttatgtagtggcga

SEQ ID NO: 292525 - DNA, 21 bp, Artificial sequence
  SiRNA target sequence
aaatggttatgtagtggcgat

SEQ ID NO: 292526 - DNA, 21 bp, Artificial sequence
  SiRNA target sequence
aatggttatgtagtggcgata

SEQ ID NO: 292527 - DNA, 21 bp, Artificial sequence
  SiRNA target sequence
atggttatgtagtggcgataa

SEQ ID NO: 292528 - DNA, 21 bp, Artificial sequence
  SiRNA target sequence
tggttatgtagtggcgataaa

SEQ ID NO: 292529 - DNA, 21 bp, Artificial sequence
  SiRNA target sequence
ggttatgtagtggcgataaaa

SEQ ID NO: 292530 - DNA, 21 bp, Artificial sequence
  SiRNA target sequence
gttatgtagtggcgataaaaa

SEQ ID NO: 292531 - DNA, 21 bp, Artificial sequence
  SiRNA target sequence
ttatgtagtggcgataaaaag

SEQ ID NO: 292532 - DNA, 21 bp, Artificial sequence
  SiRNA target sequence
tatgtagtggcgataaaaaga

SEQ ID NO: 292533 - DNA, 21 bp, Artificial sequence
  SiRNA target sequence
atgtagtggcgataaaaagaa

SEQ ID NO: 292534 - DNA, 21 bp, Artificial sequence
  SiRNA target sequence
tgtagtggcgataaaaagaag

SEQ ID NO: 292535 - DNA, 21 bp, Artificial sequence
  SiRNA target sequence
gtagtggcgataaaaagaaga

SEQ ID NO: 292536 - DNA, 21 bp, Artificial sequence
  SiRNA target sequence
tagtggcgataaaaagaagaa

SEQ ID NO: 292537 - DNA, 21 bp, Artificial sequence
  SiRNA target sequence
agtggcgataaaaagaagaat

SEQ ID NO: 292538 - DNA, 21 bp, Artificial sequence
  SiRNA target sequence
gtggcgataaaaagaagaatc

SEQ ID NO: 292539 - DNA, 21 bp, Artificial sequence
  SiRNA target sequence
tggcgataaaaagaagaatcc

SEQ ID NO: 292540 - DNA, 21 bp, Artificial sequence
  SiRNA target sequence
ggcgataaaaagaagaatccg

SEQ ID NO: 292541 - DNA, 21 bp, Artificial sequence
  SiRNA target sequence
gcgataaaaagaagaatccga

SEQ ID NO: 292542 - DNA, 21 bp, Artificial sequence
  SiRNA target sequence
cgataaaaagaagaatccgat

SEQ ID NO: 292543 - DNA, 21 bp, Artificial sequence
  SiRNA target sequence
gataaaaagaagaatccgata

SEQ ID NO: 292544 - DNA, 21 bp, Artificial sequence
  SiRNA target sequence
ataaaaagaagaatccgataa

SEQ ID NO: 292545 - DNA, 21 bp, Artificial sequence
  SiRNA target sequence
taaaaagaagaatccgataaa

SEQ ID NO: 292546 - DNA, 21 bp, Artificial sequence
  SiRNA target sequence
aaaaagaagaatccgataaaa

SEQ ID NO: 292547 - DNA, 21 bp, Artificial sequence
  SiRNA target sequence
aaaagaagaatccgataaaaa

SEQ ID NO: 292548 - DNA, 21 bp, Artificial sequence
  SiRNA target sequence
aaagaagaatccgataaaaag

SEQ ID NO: 292549 - DNA, 21 bp, Artificial sequence
  SiRNA target sequence
aagaagaatccgataaaaaga

SEQ ID NO: 292550 - DNA, 21 bp, Artificial sequence
  SiRNA target sequence
agaagaatccgataaaaagac

SEQ ID NO: 292551 - DNA, 21 bp, Artificial sequence
  SiRNA target sequence
gaagaatccgataaaaagaca

SEQ ID NO: 292552 - DNA, 21 bp, Artificial sequence
  SiRNA target sequence
aagaatccgataaaaagacat

SEQ ID NO: 292553 - DNA, 21 bp, Artificial sequence
  SiRNA target sequence
agaatccgataaaaagacatt

SEQ ID NO: 292554 - DNA, 21 bp, Artificial sequence
  SiRNA target sequence
gaatccgataaaaagacattt

SEQ ID NO: 292555 - DNA, 21 bp, Artificial sequence
  SiRNA target sequence
aatccgataaaaagacatttt

SEQ ID NO: 292556 - DNA, 21 bp, Artificial sequence
  SiRNA target sequence
atccgataaaaagacatttta

SEQ ID NO: 292557 - DNA, 21 bp, Artificial sequence
  SiRNA target sequence
tccgataaaaagacattttat

SEQ ID NO: 292558 - DNA, 21 bp, Artificial sequence
  SiRNA target sequence
ccgataaaaagacattttatt

SEQ ID NO: 292559 - DNA, 21 bp, Artificial sequence
  SiRNA target sequence
cgataaaaagacattttatta

SEQ ID NO: 292560 - DNA, 21 bp, Artificial sequence
  SiRNA target sequence
gataaaaagacattttattaa

SEQ ID NO: 292561 - DNA, 21 bp, Artificial sequence
  SiRNA target sequence
ataaaaagacattttattaat

SEQ ID NO: 292562 - DNA, 21 bp, Artificial sequence
  SiRNA target sequence
taaaaagacattttattaata

SEQ ID NO: 292563 - DNA, 21 bp, Artificial sequence
  SiRNA target sequence
aaaaagacattttattaatac

SEQ ID NO: 292564 - DNA, 21 bp, Artificial sequence
  SiRNA target sequence
aaaagacattttattaataca

SEQ ID NO: 292565 - DNA, 21 bp, Artificial sequence
  SiRNA target sequence
aaagacattttattaatacag

SEQ ID NO: 292566 - DNA, 21 bp, Artificial sequence
  SiRNA target sequence
aagacattttattaatacagg

SEQ ID NO: 292567 - DNA, 21 bp, Artificial sequence
  SiRNA target sequence
agacattttattaatacaggc

SEQ ID NO: 292568 - DNA, 21 bp, Artificial sequence
  SiRNA target sequence
gacattttattaatacaggca

SEQ ID NO: 292569 - DNA, 21 bp, Artificial sequence
  SiRNA target sequence
acattttattaatacaggcaa

SEQ ID NO: 292570 - DNA, 21 bp, Artificial sequence
  SiRNA target sequence
cattttattaatacaggcaat

SEQ ID NO: 292571 - DNA, 21 bp, Artificial sequence
  SiRNA target sequence
attttattaatacaggcaatg

SEQ ID NO: 292572 - DNA, 21 bp, Artificial sequence
  SiRNA target sequence
ttttattaatacaggcaatgt

SEQ ID NO: 292573 - DNA, 21 bp, Artificial sequence
  SiRNA target sequence
tttattaatacaggcaatgtt

SEQ ID NO: 292574 - DNA, 21 bp, Artificial sequence
  SiRNA target sequence
ttattaatacaggcaatgttc

SEQ ID NO: 292575 - DNA, 21 bp, Artificial sequence
  SiRNA target sequence
tattaatacaggcaatgttct

SEQ ID NO: 292576 - DNA, 21 bp, Artificial sequence
  SiRNA target sequence
attaatacaggcaatgttcta

SEQ ID NO: 292577 - DNA, 21 bp, Artificial sequence
  SiRNA target sequence
ttaatacaggcaatgttctaa

SEQ ID NO: 292578 - DNA, 21 bp, Artificial sequence
  SiRNA target sequence
taatacaggcaatgttctaat

SEQ ID NO: 292579 - DNA, 21 bp, Artificial sequence
  SiRNA target sequence
aatacaggcaatgttctaatc

SEQ ID NO: 292580 - DNA, 21 bp, Artificial sequence
  SiRNA target sequence
atacaggcaatgttctaatct

SEQ ID NO: 292581 - DNA, 21 bp, Artificial sequence
  SiRNA target sequence
tacaggcaatgttctaatctt

SEQ ID NO: 292582 - DNA, 21 bp, Artificial sequence
  SiRNA target sequence
acaggcaatgttctaatctta

SEQ ID NO: 292583 - DNA, 21 bp, Artificial sequence
  SiRNA target sequence
caggcaatgttctaatcttac

SEQ ID NO: 292584 - DNA, 21 bp, Artificial sequence
  SiRNA target sequence
aggcaatgttctaatcttacc

SEQ ID NO: 292585 - DNA, 21 bp, Artificial sequence
  SiRNA target sequence
ggcaatgttctaatcttaccc

SEQ ID NO: 292586 - DNA, 21 bp, Artificial sequence
  SiRNA target sequence
gcaatgttctaatcttacccg

SEQ ID NO: 292587 - DNA, 21 bp, Artificial sequence
  SiRNA target sequence
caatgttctaatcttacccga

SEQ ID NO: 292588 - DNA, 21 bp, Artificial sequence
  SiRNA target sequence
aatgttctaatcttacccgat

SEQ ID NO: 292589 - DNA, 21 bp, Artificial sequence
  SiRNA target sequence
atgttctaatcttacccgata

SEQ ID NO: 292590 - DNA, 21 bp, Artificial sequence
  SiRNA target sequence
tgttctaatcttacccgatag

SEQ ID NO: 292591 - DNA, 21 bp, Artificial sequence
  SiRNA target sequence
gttctaatcttacccgataga

SEQ ID NO: 292592 - DNA, 21 bp, Artificial sequence
  SiRNA target sequence
ttctaatcttacccgatagag

SEQ ID NO: 292593 - DNA, 21 bp, Artificial sequence
  SiRNA target sequence
tctaatcttacccgatagaga

SEQ ID NO: 292594 - DNA, 21 bp, Artificial sequence
  SiRNA target sequence
ctaatcttacccgatagagaa

SEQ ID NO: 292595 - DNA, 21 bp, Artificial sequence
  SiRNA target sequence
taatcttacccgatagagaat

SEQ ID NO: 292596 - DNA, 21 bp, Artificial sequence
  SiRNA target sequence
aatcttacccgatagagaatt

SEQ ID NO: 292597 - DNA, 21 bp, Artificial sequence
  SiRNA target sequence
atcttacccgatagagaatta

SEQ ID NO: 292598 - DNA, 21 bp, Artificial sequence
  SiRNA target sequence
tcttacccgatagagaattaa

SEQ ID NO: 292599 - DNA, 21 bp, Artificial sequence
  SiRNA target sequence
cttacccgatagagaattaaa

SEQ ID NO: 292600 - DNA, 21 bp, Artificial sequence
  SiRNA target sequence
ttacccgatagagaattaaac

SEQ ID NO: 292601 - DNA, 21 bp, Artificial sequence
  SiRNA target sequence
tacccgatagagaattaaaca

SEQ ID NO: 292602 - DNA, 21 bp, Artificial sequence
  SiRNA target sequence
acccgatagagaattaaacac

SEQ ID NO: 292603 - DNA, 21 bp, Artificial sequence
  SiRNA target sequence
cccgatagagaattaaacacc

SEQ ID NO: 292604 - DNA, 21 bp, Artificial sequence
  SiRNA target sequence
ccgatagagaattaaacacct

SEQ ID NO: 292605 - DNA, 21 bp, Artificial sequence
  SiRNA target sequence
cgatagagaattaaacacctt

SEQ ID NO: 292606 - DNA, 21 bp, Artificial sequence
  SiRNA target sequence
gatagagaattaaacaccttt

SEQ ID NO: 292607 - DNA, 21 bp, Artificial sequence
  SiRNA target sequence
atagagaattaaacacctttt

SEQ ID NO: 292608 - DNA, 21 bp, Artificial sequence
  SiRNA target sequence
tagagaattaaacaccttttg

SEQ ID NO: 292609 - DNA, 21 bp, Artificial sequence
  SiRNA target sequence
agagaattaaacaccttttgg

SEQ ID NO: 292610 - DNA, 21 bp, Artificial sequence
  SiRNA target sequence
gagaattaaacaccttttgga

SEQ ID NO: 292611 - DNA, 21 bp, Artificial sequence
  SiRNA target sequence
agaattaaacaccttttggaa

SEQ ID NO: 292612 - DNA, 21 bp, Artificial sequence
  SiRNA target sequence
gaattaaacaccttttggaaa

SEQ ID NO: 292613 - DNA, 21 bp, Artificial sequence
  SiRNA target sequence
aattaaacaccttttggaaaa

SEQ ID NO: 292614 - DNA, 21 bp, Artificial sequence
  SiRNA target sequence
attaaacaccttttggaaaaa

SEQ ID NO: 292615 - DNA, 21 bp, Artificial sequence
  SiRNA target sequence
ttaaacaccttttggaaaaat

SEQ ID NO: 292616 - DNA, 21 bp, Artificial sequence
  SiRNA target sequence
taaacaccttttggaaaaatc

SEQ ID NO: 292617 - DNA, 21 bp, Artificial sequence
  SiRNA target sequence
aaacaccttttggaaaaatca

SEQ ID NO: 292618 - DNA, 21 bp, Artificial sequence
  SiRNA target sequence
aacaccttttggaaaaatcaa

SEQ ID NO: 292619 - DNA, 21 bp, Artificial sequence
  SiRNA target sequence
acaccttttggaaaaatcaag

SEQ ID NO: 292620 - DNA, 21 bp, Artificial sequence
  SiRNA target sequence
caccttttggaaaaatcaaga

SEQ ID NO: 292621 - DNA, 21 bp, Artificial sequence
  SiRNA target sequence
accttttggaaaaatcaagaa

SEQ ID NO: 292622 - DNA, 21 bp, Artificial sequence
  SiRNA target sequence
ccttttggaaaaatcaagaat

SEQ ID NO: 292623 - DNA, 21 bp, Artificial sequence
  SiRNA target sequence
cttttggaaaaatcaagaatc

SEQ ID NO: 292624 - DNA, 21 bp, Artificial sequence
  SiRNA target sequence
ttttggaaaaatcaagaatca

SEQ ID NO: 292625 - DNA, 21 bp, Artificial sequence
  SiRNA target sequence
tttggaaaaatcaagaatcat

SEQ ID NO: 292626 - DNA, 21 bp, Artificial sequence
  SiRNA target sequence
ttggaaaaatcaagaatcatt

SEQ ID NO: 292627 - DNA, 21 bp, Artificial sequence
  SiRNA target sequence
tggaaaaatcaagaatcattg

SEQ ID NO: 292628 - DNA, 21 bp, Artificial sequence
  SiRNA target sequence
ggaaaaatcaagaatcattgg

SEQ ID NO: 292629 - DNA, 21 bp, Artificial sequence
  SiRNA target sequence
gaaaaatcaagaatcattgga

SEQ ID NO: 292630 - DNA, 21 bp, Artificial sequence
  SiRNA target sequence
aaaaatcaagaatcattggac

SEQ ID NO: 292631 - DNA, 21 bp, Artificial sequence
  SiRNA target sequence
aaaatcaagaatcattggact

SEQ ID NO: 292632 - DNA, 21 bp, Artificial sequence
  SiRNA target sequence
aaatcaagaatcattggactt

SEQ ID NO: 292633 - DNA, 21 bp, Artificial sequence
  SiRNA target sequence
aatcaagaatcattggactta

SEQ ID NO: 292634 - DNA, 21 bp, Artificial sequence
  SiRNA target sequence
atcaagaatcattggacttaa

SEQ ID NO: 292635 - DNA, 21 bp, Artificial sequence
  SiRNA target sequence
tcaagaatcattggacttaag

SEQ ID NO: 292636 - DNA, 21 bp, Artificial sequence
  SiRNA target sequence
caagaatcattggacttaagg

SEQ ID NO: 292637 - DNA, 21 bp, Artificial sequence
  SiRNA target sequence
aagaatcattggacttaaggg

SEQ ID NO: 292638 - DNA, 21 bp, Artificial sequence
  SiRNA target sequence
agaatcattggacttaaggga

SEQ ID NO: 292639 - DNA, 21 bp, Artificial sequence
  SiRNA target sequence
gaatcattggacttaagggat

SEQ ID NO: 292640 - DNA, 21 bp, Artificial sequence
  SiRNA target sequence
aatcattggacttaagggata

SEQ ID NO: 292641 - DNA, 21 bp, Artificial sequence
  SiRNA target sequence
atcattggacttaagggatat

SEQ ID NO: 292642 - DNA, 21 bp, Artificial sequence
  SiRNA target sequence
tcattggacttaagggatatg

SEQ ID NO: 292643 - DNA, 21 bp, Artificial sequence
  SiRNA target sequence
cattggacttaagggatatgt

SEQ ID NO: 292644 - DNA, 21 bp, Artificial sequence
  SiRNA target sequence
attggacttaagggatatgta

SEQ ID NO: 292645 - DNA, 21 bp, Artificial sequence
  SiRNA target sequence
ttggacttaagggatatgtat

SEQ ID NO: 292646 - DNA, 21 bp, Artificial sequence
  SiRNA target sequence
tggacttaagggatatgtata

SEQ ID NO: 292647 - DNA, 21 bp, Artificial sequence
  SiRNA target sequence
ggacttaagggatatgtatat

SEQ ID NO: 292648 - DNA, 21 bp, Artificial sequence
  SiRNA target sequence
gacttaagggatatgtatatt

SEQ ID NO: 292649 - DNA, 21 bp, Artificial sequence
  SiRNA target sequence
acttaagggatatgtatatta

SEQ ID NO: 292650 - DNA, 21 bp, Artificial sequence
  SiRNA target sequence
cttaagggatatgtatattaa

SEQ ID NO: 292651 - DNA, 21 bp, Artificial sequence
  SiRNA target sequence
ttaagggatatgtatattaat

SEQ ID NO: 292652 - DNA, 21 bp, Artificial sequence
  SiRNA target sequence
taagggatatgtatattaatc

SEQ ID NO: 292653 - DNA, 21 bp, Artificial sequence
  SiRNA target sequence
aagggatatgtatattaatcg

SEQ ID NO: 292654 - DNA, 21 bp, Artificial sequence
  SiRNA target sequence
agggatatgtatattaatcga

SEQ ID NO: 292655 - DNA, 21 bp, Artificial sequence
  SiRNA target sequence
gggatatgtatattaatcgag

SEQ ID NO: 292656 - DNA, 21 bp, Artificial sequence
  SiRNA target sequence
ggatatgtatattaatcgagt

SEQ ID NO: 292657 - DNA, 21 bp, Artificial sequence
  SiRNA target sequence
gatatgtatattaatcgagtt

SEQ ID NO: 292658 - DNA, 21 bp, Artificial sequence
  SiRNA target sequence
atatgtatattaatcgagttg

SEQ ID NO: 292659 - DNA, 21 bp, Artificial sequence
  SiRNA target sequence
tatgtatattaatcgagttga

SEQ ID NO: 292660 - DNA, 21 bp, Artificial sequence
  SiRNA target sequence
atgtatattaatcgagttgaa

SEQ ID NO: 292661 - DNA, 21 bp, Artificial sequence
  SiRNA target sequence
tgtatattaatcgagttgaag

SEQ ID NO: 292662 - DNA, 21 bp, Artificial sequence
  SiRNA target sequence
gtatattaatcgagttgaaga

SEQ ID NO: 292663 - DNA, 21 bp, Artificial sequence
  SiRNA target sequence
tatattaatcgagttgaagaa

SEQ ID NO: 292664 - DNA, 21 bp, Artificial sequence
  SiRNA target sequence
atattaatcgagttgaagaac

SEQ ID NO: 292665 - DNA, 21 bp, Artificial sequence
  SiRNA target sequence
tattaatcgagttgaagaaca

SEQ ID NO: 292666 - DNA, 21 bp, Artificial sequence
  SiRNA target sequence
attaatcgagttgaagaacac

SEQ ID NO: 292667 - DNA, 21 bp, Artificial sequence
  SiRNA target sequence
ttaatcgagttgaagaacaca

SEQ ID NO: 292668 - DNA, 21 bp, Artificial sequence
  SiRNA target sequence
taatcgagttgaagaacacat

SEQ ID NO: 292669 - DNA, 21 bp, Artificial sequence
  SiRNA target sequence
aatcgagttgaagaacacata

SEQ ID NO: 292670 - DNA, 21 bp, Artificial sequence
  SiRNA target sequence
atcgagttgaagaacacataa

SEQ ID NO: 292671 - DNA, 21 bp, Artificial sequence
  SiRNA target sequence
tcgagttgaagaacacataat

SEQ ID NO: 292672 - DNA, 21 bp, Artificial sequence
  SiRNA target sequence
cgagttgaagaacacataatt

SEQ ID NO: 292673 - DNA, 21 bp, Artificial sequence
  SiRNA target sequence
gagttgaagaacacataatta

SEQ ID NO: 292674 - DNA, 21 bp, Artificial sequence
  SiRNA target sequence
agttgaagaacacataattag

SEQ ID NO: 292675 - DNA, 21 bp, Artificial sequence
  SiRNA target sequence
gttgaagaacacataattagc

SEQ ID NO: 292676 - DNA, 21 bp, Artificial sequence
  SiRNA target sequence
ttgaagaacacataattagcc

SEQ ID NO: 292677 - DNA, 21 bp, Artificial sequence
  SiRNA target sequence
tgaagaacacataattagcct

SEQ ID NO: 292678 - DNA, 21 bp, Artificial sequence
  SiRNA target sequence
gaagaacacataattagccta

SEQ ID NO: 292679 - DNA, 21 bp, Artificial sequence
  SiRNA target sequence
aagaacacataattagcctat

SEQ ID NO: 292680 - DNA, 21 bp, Artificial sequence
  SiRNA target sequence
agaacacataattagcctatt

SEQ ID NO: 292681 - DNA, 21 bp, Artificial sequence
  SiRNA target sequence
gaacacataattagcctattg

SEQ ID NO: 292682 - DNA, 21 bp, Artificial sequence
  SiRNA target sequence
aacacataattagcctattga

SEQ ID NO: 292683 - DNA, 21 bp, Artificial sequence
  SiRNA target sequence
acacataattagcctattgaa

SEQ ID NO: 292684 - DNA, 21 bp, Artificial sequence
  SiRNA target sequence
cacataattagcctattgaaa

SEQ ID NO: 292685 - DNA, 21 bp, Artificial sequence
  SiRNA target sequence
acataattagcctattgaaat

SEQ ID NO: 292686 - DNA, 21 bp, Artificial sequence
  SiRNA target sequence
cataattagcctattgaaatt

SEQ ID NO: 292687 - DNA, 21 bp, Artificial sequence
  SiRNA target sequence
ataattagcctattgaaattg

SEQ ID NO: 292688 - DNA, 21 bp, Artificial sequence
  SiRNA target sequence
taattagcctattgaaattgc

SEQ ID NO: 292689 - DNA, 21 bp, Artificial sequence
  SiRNA target sequence
aattagcctattgaaattgca

SEQ ID NO: 292690 - DNA, 21 bp, Artificial sequence
  SiRNA target sequence
attagcctattgaaattgcaa

SEQ ID NO: 292691 - DNA, 21 bp, Artificial sequence
  SiRNA target sequence
ttagcctattgaaattgcaac

SEQ ID NO: 292692 - DNA, 21 bp, Artificial sequence
  SiRNA target sequence
tagcctattgaaattgcaaca

SEQ ID NO: 292693 - DNA, 21 bp, Artificial sequence
  SiRNA target sequence
agcctattgaaattgcaacat

SEQ ID NO: 292694 - DNA, 21 bp, Artificial sequence
  SiRNA target sequence
gcctattgaaattgcaacata

SEQ ID NO: 292695 - DNA, 21 bp, Artificial sequence
  SiRNA target sequence
cctattgaaattgcaacataa

SEQ ID NO: 292696 - DNA, 21 bp, Artificial sequence
  SiRNA target sequence
ctattgaaattgcaacataaa

SEQ ID NO: 292697 - DNA, 21 bp, Artificial sequence
  SiRNA target sequence
tattgaaattgcaacataaag

SEQ ID NO: 292698 - DNA, 21 bp, Artificial sequence
  SiRNA target sequence
attgaaattgcaacataaagt

SEQ ID NO: 292699 - DNA, 21 bp, Artificial sequence
  SiRNA target sequence
ttgaaattgcaacataaagta

SEQ ID NO: 292700 - DNA, 21 bp, Artificial sequence
  SiRNA target sequence
tgaaattgcaacataaagtag

SEQ ID NO: 292701 - DNA, 21 bp, Artificial sequence
  SiRNA target sequence
gaaattgcaacataaagtagt

SEQ ID NO: 292702 - DNA, 21 bp, Artificial sequence
  SiRNA target sequence
aaattgcaacataaagtagtc

SEQ ID NO: 292703 - DNA, 21 bp, Artificial sequence
  SiRNA target sequence
aattgcaacataaagtagtct

SEQ ID NO: 292704 - DNA, 21 bp, Artificial sequence
  SiRNA target sequence
attgcaacataaagtagtctt

SEQ ID NO: 292705 - DNA, 21 bp, Artificial sequence
  SiRNA target sequence
ttgcaacataaagtagtctta

SEQ ID NO: 292706 - DNA, 21 bp, Artificial sequence
  SiRNA target sequence
tgcaacataaagtagtcttag

SEQ ID NO: 292707 - DNA, 21 bp, Artificial sequence
  SiRNA target sequence
gcaacataaagtagtcttagt

SEQ ID NO: 292708 - DNA, 21 bp, Artificial sequence
  SiRNA target sequence
caacataaagtagtcttagtt

SEQ ID NO: 292709 - DNA, 21 bp, Artificial sequence
  SiRNA target sequence
aacataaagtagtcttagttc

SEQ ID NO: 292710 - DNA, 21 bp, Artificial sequence
  SiRNA target sequence
acataaagtagtcttagttcc

SEQ ID NO: 292711 - DNA, 21 bp, Artificial sequence
  SiRNA target sequence
cataaagtagtcttagttcca

SEQ ID NO: 292712 - DNA, 21 bp, Artificial sequence
  SiRNA target sequence
ataaagtagtcttagttccaa

SEQ ID NO: 292713 - DNA, 21 bp, Artificial sequence
  SiRNA target sequence
taaagtagtcttagttccaaa

SEQ ID NO: 292714 - DNA, 21 bp, Artificial sequence
  SiRNA target sequence
aaagtagtcttagttccaaaa

SEQ ID NO: 292715 - DNA, 21 bp, Artificial sequence
  SiRNA target sequence
aagtagtcttagttccaaaag

SEQ ID NO: 292716 - DNA, 21 bp, Artificial sequence
  SiRNA target sequence
agtagtcttagttccaaaagt

SEQ ID NO: 292717 - DNA, 21 bp, Artificial sequence
  SiRNA target sequence
gtagtcttagttccaaaagtt

SEQ ID NO: 292718 - DNA, 21 bp, Artificial sequence
  SiRNA target sequence
tagtcttagttccaaaagtta

SEQ ID NO: 292719 - DNA, 21 bp, Artificial sequence
  SiRNA target sequence
agtcttagttccaaaagttac

SEQ ID NO: 292720 - DNA, 21 bp, Artificial sequence
  SiRNA target sequence
gtcttagttccaaaagttact

SEQ ID NO: 292721 - DNA, 21 bp, Artificial sequence
  SiRNA target sequence
tcttagttccaaaagttacta

SEQ ID NO: 292722 - DNA, 21 bp, Artificial sequence
  SiRNA target sequence
cttagttccaaaagttactaa

SEQ ID NO: 292723 - DNA, 21 bp, Artificial sequence
  SiRNA target sequence
ttagttccaaaagttactaag

SEQ ID NO: 292724 - DNA, 21 bp, Artificial sequence
  SiRNA target sequence
tagttccaaaagttactaagt

SEQ ID NO: 292725 - DNA, 21 bp, Artificial sequence
  SiRNA target sequence
agttccaaaagttactaagta

SEQ ID NO: 292726 - DNA, 21 bp, Artificial sequence
  SiRNA target sequence
gttccaaaagttactaagtat

SEQ ID NO: 292727 - DNA, 21 bp, Artificial sequence
  SiRNA target sequence
ttccaaaagttactaagtata

SEQ ID NO: 292728 - DNA, 21 bp, Artificial sequence
  SiRNA target sequence
tccaaaagttactaagtatat

SEQ ID NO: 292729 - DNA, 21 bp, Artificial sequence
  SiRNA target sequence
ccaaaagttactaagtatatt

SEQ ID NO: 292730 - DNA, 21 bp, Artificial sequence
  SiRNA target sequence
caaaagttactaagtatattc

SEQ ID NO: 292731 - DNA, 21 bp, Artificial sequence
  SiRNA target sequence
aaaagttactaagtatattct

SEQ ID NO: 292732 - DNA, 21 bp, Artificial sequence
  SiRNA target sequence
aaagttactaagtatattctt

SEQ ID NO: 292733 - DNA, 21 bp, Artificial sequence
  SiRNA target sequence
aagttactaagtatattctta

SEQ ID NO: 292734 - DNA, 21 bp, Artificial sequence
  SiRNA target sequence
agttactaagtatattcttac

SEQ ID NO: 292735 - DNA, 21 bp, Artificial sequence
  SiRNA target sequence
gttactaagtatattcttaca

SEQ ID NO: 292736 - DNA, 21 bp, Artificial sequence
  SiRNA target sequence
ttactaagtatattcttacaa

SEQ ID NO: 292737 - DNA, 21 bp, Artificial sequence
  SiRNA target sequence
tactaagtatattcttacaac

SEQ ID NO: 292738 - DNA, 21 bp, Artificial sequence
  SiRNA target sequence
actaagtatattcttacaact

SEQ ID NO: 292739 - DNA, 21 bp, Artificial sequence
  SiRNA target sequence
ctaagtatattcttacaactg

SEQ ID NO: 292740 - DNA, 21 bp, Artificial sequence
  SiRNA target sequence
taagtatattcttacaactgt

SEQ ID NO: 292741 - DNA, 21 bp, Artificial sequence
  SiRNA target sequence
aagtatattcttacaactgtt

SEQ ID NO: 292742 - DNA, 21 bp, Artificial sequence
  SiRNA target sequence
agtatattcttacaactgttg

SEQ ID NO: 292743 - DNA, 21 bp, Artificial sequence
  SiRNA target sequence
gtatattcttacaactgttga

SEQ ID NO: 292744 - DNA, 21 bp, Artificial sequence
  SiRNA target sequence
tatattcttacaactgttgag

SEQ ID NO: 292745 - DNA, 21 bp, Artificial sequence
  SiRNA target sequence
atattcttacaactgttgaga

SEQ ID NO: 292746 - DNA, 21 bp, Artificial sequence
  SiRNA target sequence
tattcttacaactgttgagaa

SEQ ID NO: 292747 - DNA, 21 bp, Artificial sequence
  SiRNA target sequence
attcttacaactgttgagaac

SEQ ID NO: 292748 - DNA, 21 bp, Artificial sequence
  SiRNA target sequence
ttcttacaactgttgagaacc

SEQ ID NO: 292749 - DNA, 21 bp, Artificial sequence
  SiRNA target sequence
tcttacaactgttgagaacca

SEQ ID NO: 292750 - DNA, 21 bp, Artificial sequence
  SiRNA target sequence
cttacaactgttgagaaccat

SEQ ID NO: 292751 - DNA, 21 bp, Artificial sequence
  SiRNA target sequence
ttacaactgttgagaaccatg

SEQ ID NO: 292752 - DNA, 21 bp, Artificial sequence
  SiRNA target sequence
tacaactgttgagaaccatgc

SEQ ID NO: 292753 - DNA, 21 bp, Artificial sequence
  SiRNA target sequence
acaactgttgagaaccatgct

SEQ ID NO: 292754 - DNA, 21 bp, Artificial sequence
  SiRNA target sequence
caactgttgagaaccatgcta

SEQ ID NO: 292755 - DNA, 21 bp, Artificial sequence
  SiRNA target sequence
aactgttgagaaccatgctaa

SEQ ID NO: 292756 - DNA, 21 bp, Artificial sequence
  SiRNA target sequence
actgttgagaaccatgctaaa

SEQ ID NO: 292757 - DNA, 21 bp, Artificial sequence
  SiRNA target sequence
ctgttgagaaccatgctaaaa

SEQ ID NO: 292758 - DNA, 21 bp, Artificial sequence
  SiRNA target sequence
tgttgagaaccatgctaaaat

SEQ ID NO: 292759 - DNA, 21 bp, Artificial sequence
  SiRNA target sequence
gttgagaaccatgctaaaata

SEQ ID NO: 292760 - DNA, 21 bp, Artificial sequence
  SiRNA target sequence
ttgagaaccatgctaaaatat

SEQ ID NO: 292761 - DNA, 21 bp, Artificial sequence
  SiRNA target sequence
tgagaaccatgctaaaatatc

SEQ ID NO: 292762 - DNA, 21 bp, Artificial sequence
  SiRNA target sequence
gagaaccatgctaaaatatca

SEQ ID NO: 292763 - DNA, 21 bp, Artificial sequence
  SiRNA target sequence
agaaccatgctaaaatatcag

SEQ ID NO: 292764 - DNA, 21 bp, Artificial sequence
  SiRNA target sequence
gaaccatgctaaaatatcaga

SEQ ID NO: 292765 - DNA, 21 bp, Artificial sequence
  SiRNA target sequence
aaccatgctaaaatatcagat

SEQ ID NO: 292766 - DNA, 21 bp, Artificial sequence
  SiRNA target sequence
accatgctaaaatatcagata

SEQ ID NO: 292767 - DNA, 21 bp, Artificial sequence
  SiRNA target sequence
ccatgctaaaatatcagataa

SEQ ID NO: 292768 - DNA, 21 bp, Artificial sequence
  SiRNA target sequence
catgctaaaatatcagataaa

SEQ ID NO: 292769 - DNA, 21 bp, Artificial sequence
  SiRNA target sequence
atgctaaaatatcagataaaa

SEQ ID NO: 292770 - DNA, 21 bp, Artificial sequence
  SiRNA target sequence
tgctaaaatatcagataaaat

SEQ ID NO: 292771 - DNA, 21 bp, Artificial sequence
  SiRNA target sequence
gctaaaatatcagataaaatc

SEQ ID NO: 292772 - DNA, 21 bp, Artificial sequence
  SiRNA target sequence
ctaaaatatcagataaaatca

SEQ ID NO: 292773 - DNA, 21 bp, Artificial sequence
  SiRNA target sequence
taaaatatcagataaaatcat

SEQ ID NO: 292774 - DNA, 21 bp, Artificial sequence
  SiRNA target sequence
aaaatatcagataaaatcatt

SEQ ID NO: 292775 - DNA, 21 bp, Artificial sequence
  SiRNA target sequence
aaatatcagataaaatcattt

SEQ ID NO: 292776 - DNA, 21 bp, Artificial sequence
  SiRNA target sequence
aatatcagataaaatcatttt

SEQ ID NO: 292777 - DNA, 21 bp, Artificial sequence
  SiRNA target sequence
atatcagataaaatcattttg

SEQ ID NO: 292778 - DNA, 21 bp, Artificial sequence
  SiRNA target sequence
tatcagataaaatcattttga

SEQ ID NO: 292779 - DNA, 21 bp, Artificial sequence
  SiRNA target sequence
atcagataaaatcattttgat

SEQ ID NO: 292780 - DNA, 21 bp, Artificial sequence
  SiRNA target sequence
tcagataaaatcattttgatt

SEQ ID NO: 292781 - DNA, 21 bp, Artificial sequence
  SiRNA target sequence
cagataaaatcattttgatta

SEQ ID NO: 292782 - DNA, 21 bp, Artificial sequence
  SiRNA target sequence
agataaaatcattttgattac

SEQ ID NO: 292783 - DNA, 21 bp, Artificial sequence
  SiRNA target sequence
gataaaatcattttgattaca

SEQ ID NO: 292784 - DNA, 21 bp, Artificial sequence
  SiRNA target sequence
ataaaatcattttgattacaa

SEQ ID NO: 292785 - DNA, 21 bp, Artificial sequence
  SiRNA target sequence
taaaatcattttgattacaag

SEQ ID NO: 292786 - DNA, 21 bp, Artificial sequence
  SiRNA target sequence
aaaatcattttgattacaaga

SEQ ID NO: 292787 - DNA, 21 bp, Artificial sequence
  SiRNA target sequence
aaatcattttgattacaagaa

SEQ ID NO: 292788 - DNA, 21 bp, Artificial sequence
  SiRNA target sequence
aatcattttgattacaagaaa

SEQ ID NO: 292789 - DNA, 21 bp, Artificial sequence
  SiRNA target sequence
atcattttgattacaagaaat

SEQ ID NO: 292790 - DNA, 21 bp, Artificial sequence
  SiRNA target sequence
tcattttgattacaagaaata

SEQ ID NO: 292791 - DNA, 21 bp, Artificial sequence
  SiRNA target sequence
cattttgattacaagaaatag

SEQ ID NO: 292792 - DNA, 21 bp, Artificial sequence
  SiRNA target sequence
attttgattacaagaaataga

SEQ ID NO: 292793 - DNA, 21 bp, Artificial sequence
  SiRNA target sequence
ttttgattacaagaaatagat

SEQ ID NO: 292794 - DNA, 21 bp, Artificial sequence
  SiRNA target sequence
tttgattacaagaaatagata

SEQ ID NO: 292795 - DNA, 21 bp, Artificial sequence
  SiRNA target sequence
ttgattacaagaaatagatat

SEQ ID NO: 292796 - DNA, 21 bp, Artificial sequence
  SiRNA target sequence
tgattacaagaaatagatatt

SEQ ID NO: 292797 - DNA, 21 bp, Artificial sequence
  SiRNA target sequence
gattacaagaaatagatattt

SEQ ID NO: 292798 - DNA, 21 bp, Artificial sequence
  SiRNA target sequence
attacaagaaatagatatttg

SEQ ID NO: 292799 - DNA, 21 bp, Artificial sequence
  SiRNA target sequence
ttacaagaaatagatatttga

SEQ ID NO: 292800 - DNA, 21 bp, Artificial sequence
  SiRNA target sequence
tacaagaaatagatatttgaa

SEQ ID NO: 292801 - DNA, 21 bp, Artificial sequence
  SiRNA target sequence
acaagaaatagatatttgaat

SEQ ID NO: 292802 - DNA, 21 bp, Artificial sequence
  SiRNA target sequence
caagaaatagatatttgaatt

SEQ ID NO: 292803 - DNA, 21 bp, Artificial sequence
  SiRNA target sequence
aagaaatagatatttgaatta

SEQ ID NO: 292804 - DNA, 21 bp, Artificial sequence
  SiRNA target sequence
agaaatagatatttgaattac

SEQ ID NO: 292805 - DNA, 21 bp, Artificial sequence
  SiRNA target sequence
gaaatagatatttgaattacc

SEQ ID NO: 292806 - DNA, 21 bp, Artificial sequence
  SiRNA target sequence
aaatagatatttgaattacca

SEQ ID NO: 292807 - DNA, 21 bp, Artificial sequence
  SiRNA target sequence
aatagatatttgaattaccag

SEQ ID NO: 292808 - DNA, 21 bp, Artificial sequence
  SiRNA target sequence
atagatatttgaattaccagg

SEQ ID NO: 292809 - DNA, 21 bp, Artificial sequence
  SiRNA target sequence
tagatatttgaattaccaggg

SEQ ID NO: 292810 - DNA, 21 bp, Artificial sequence
  SiRNA target sequence
agatatttgaattaccagggc

SEQ ID NO: 292811 - DNA, 21 bp, Artificial sequence
  SiRNA target sequence
gatatttgaattaccagggca

SEQ ID NO: 292812 - DNA, 21 bp, Artificial sequence
  SiRNA target sequence
atatttgaattaccagggcaa

SEQ ID NO: 292813 - DNA, 21 bp, Artificial sequence
  SiRNA target sequence
tatttgaattaccagggcaag

SEQ ID NO: 292814 - DNA, 21 bp, Artificial sequence
  SiRNA target sequence
atttgaattaccagggcaagt

SEQ ID NO: 292815 - DNA, 21 bp, Artificial sequence
  SiRNA target sequence
tttgaattaccagggcaagtt

SEQ ID NO: 292816 - DNA, 21 bp, Artificial sequence
  SiRNA target sequence
ttgaattaccagggcaagttt

SEQ ID NO: 292817 - DNA, 21 bp, Artificial sequence
  SiRNA target sequence
tgaattaccagggcaagtttg

SEQ ID NO: 292818 - DNA, 21 bp, Artificial sequence
  SiRNA target sequence
gaattaccagggcaagtttgt

SEQ ID NO: 292819 - DNA, 21 bp, Artificial sequence
  SiRNA target sequence
aattaccagggcaagtttgtt

SEQ ID NO: 292820 - DNA, 21 bp, Artificial sequence
  SiRNA target sequence
attaccagggcaagtttgttg

SEQ ID NO: 292821 - DNA, 21 bp, Artificial sequence
  SiRNA target sequence
ttaccagggcaagtttgttga

SEQ ID NO: 292822 - DNA, 21 bp, Artificial sequence
  SiRNA target sequence
taccagggcaagtttgttgaa

SEQ ID NO: 292823 - DNA, 21 bp, Artificial sequence
  SiRNA target sequence
accagggcaagtttgttgaat

SEQ ID NO: 292824 - DNA, 21 bp, Artificial sequence
  SiRNA target sequence
ccagggcaagtttgttgaatt

SEQ ID NO: 292825 - DNA, 21 bp, Artificial sequence
  SiRNA target sequence
cagggcaagtttgttgaattg

SEQ ID NO: 292826 - DNA, 21 bp, Artificial sequence
  SiRNA target sequence
agggcaagtttgttgaattga

SEQ ID NO: 292827 - DNA, 21 bp, Artificial sequence
  SiRNA target sequence
gggcaagtttgttgaattgat

SEQ ID NO: 292828 - DNA, 21 bp, Artificial sequence
  SiRNA target sequence
ggcaagtttgttgaattgatt

SEQ ID NO: 292829 - DNA, 21 bp, Artificial sequence
  SiRNA target sequence
gcaagtttgttgaattgattt

SEQ ID NO: 292830 - DNA, 21 bp, Artificial sequence
  SiRNA target sequence
caagtttgttgaattgatttg

SEQ ID NO: 292831 - DNA, 21 bp, Artificial sequence
  SiRNA target sequence
aagtttgttgaattgatttgt

SEQ ID NO: 292832 - DNA, 21 bp, Artificial sequence
  SiRNA target sequence
agtttgttgaattgatttgtg

SEQ ID NO: 292833 - DNA, 21 bp, Artificial sequence
  SiRNA target sequence
gtttgttgaattgatttgtgg

SEQ ID NO: 292834 - DNA, 21 bp, Artificial sequence
  SiRNA target sequence
tttgttgaattgatttgtgga

SEQ ID NO: 292835 - DNA, 21 bp, Artificial sequence
  SiRNA target sequence
ttgttgaattgatttgtggag

SEQ ID NO: 292836 - DNA, 21 bp, Artificial sequence
  SiRNA target sequence
tgttgaattgatttgtggaga

SEQ ID NO: 292837 - DNA, 21 bp, Artificial sequence
  SiRNA target sequence
gttgaattgatttgtggagaa

SEQ ID NO: 292838 - DNA, 21 bp, Artificial sequence
  SiRNA target sequence
ttgaattgatttgtggagaaa

SEQ ID NO: 292839 - DNA, 21 bp, Artificial sequence
  SiRNA target sequence
tgaattgatttgtggagaaat

SEQ ID NO: 292840 - DNA, 21 bp, Artificial sequence
  SiRNA target sequence
gaattgatttgtggagaaatt

SEQ ID NO: 292841 - DNA, 21 bp, Artificial sequence
  SiRNA target sequence
aattgatttgtggagaaatta

SEQ ID NO: 292842 - DNA, 21 bp, Artificial sequence
  SiRNA target sequence
attgatttgtggagaaattaa

SEQ ID NO: 292843 - DNA, 21 bp, Artificial sequence
  SiRNA target sequence
ttgatttgtggagaaattaat

SEQ ID NO: 292844 - DNA, 21 bp, Artificial sequence
  SiRNA target sequence
tgatttgtggagaaattaatc

SEQ ID NO: 292845 - DNA, 21 bp, Artificial sequence
  SiRNA target sequence
gatttgtggagaaattaatca

SEQ ID NO: 292846 - DNA, 21 bp, Artificial sequence
  SiRNA target sequence
atttgtggagaaattaatcaa

SEQ ID NO: 292847 - DNA, 21 bp, Artificial sequence
  SiRNA target sequence
tttgtggagaaattaatcaat

SEQ ID NO: 292848 - DNA, 21 bp, Artificial sequence
  SiRNA target sequence
ttgtggagaaattaatcaatt

SEQ ID NO: 292849 - DNA, 21 bp, Artificial sequence
  SiRNA target sequence
tgtggagaaattaatcaattc

SEQ ID NO: 292850 - DNA, 21 bp, Artificial sequence
  SiRNA target sequence
gtggagaaattaatcaattct

SEQ ID NO: 292851 - DNA, 21 bp, Artificial sequence
  SiRNA target sequence
tggagaaattaatcaattctt

SEQ ID NO: 292852 - DNA, 21 bp, Artificial sequence
  SiRNA target sequence
ggagaaattaatcaattcttc

SEQ ID NO: 292853 - DNA, 21 bp, Artificial sequence
  SiRNA target sequence
gagaaattaatcaattcttca

SEQ ID NO: 292854 - DNA, 21 bp, Artificial sequence
  SiRNA target sequence
agaaattaatcaattcttcat

SEQ ID NO: 292855 - DNA, 21 bp, Artificial sequence
  SiRNA target sequence
gaaattaatcaattcttcatt

SEQ ID NO: 292856 - DNA, 21 bp, Artificial sequence
  SiRNA target sequence
aaattaatcaattcttcattg

SEQ ID NO: 292857 - DNA, 21 bp, Artificial sequence
  SiRNA target sequence
aattaatcaattcttcattga

SEQ ID NO: 292858 - DNA, 21 bp, Artificial sequence
  SiRNA target sequence
attaatcaattcttcattgac

SEQ ID NO: 292859 - DNA, 21 bp, Artificial sequence
  SiRNA target sequence
ttaatcaattcttcattgacc

SEQ ID NO: 292860 - DNA, 21 bp, Artificial sequence
  SiRNA target sequence
taatcaattcttcattgaccc

SEQ ID NO: 292861 - DNA, 21 bp, Artificial sequence
  SiRNA target sequence
aatcaattcttcattgacccg

SEQ ID NO: 292862 - DNA, 21 bp, Artificial sequence
  SiRNA target sequence
atcaattcttcattgacccgg

SEQ ID NO: 292863 - DNA, 21 bp, Artificial sequence
  SiRNA target sequence
tcaattcttcattgacccgga

SEQ ID NO: 292864 - DNA, 21 bp, Artificial sequence
  SiRNA target sequence
caattcttcattgacccggaa

SEQ ID NO: 292865 - DNA, 21 bp, Artificial sequence
  SiRNA target sequence
aattcttcattgacccggaaa

SEQ ID NO: 292866 - DNA, 21 bp, Artificial sequence
  SiRNA target sequence
attcttcattgacccggaaac

SEQ ID NO: 292867 - DNA, 21 bp, Artificial sequence
  SiRNA target sequence
ttcttcattgacccggaaaca

SEQ ID NO: 292868 - DNA, 21 bp, Artificial sequence
  SiRNA target sequence
tcttcattgacccggaaacat

SEQ ID NO: 292869 - DNA, 21 bp, Artificial sequence
  SiRNA target sequence
cttcattgacccggaaacatt

SEQ ID NO: 292870 - DNA, 21 bp, Artificial sequence
  SiRNA target sequence
ttcattgacccggaaacatta

SEQ ID NO: 292871 - DNA, 21 bp, Artificial sequence
  SiRNA target sequence
tcattgacccggaaacattag

SEQ ID NO: 292872 - DNA, 21 bp, Artificial sequence
  SiRNA target sequence
cattgacccggaaacattaga

SEQ ID NO: 292873 - DNA, 21 bp, Artificial sequence
  SiRNA target sequence
attgacccggaaacattagat

SEQ ID NO: 292874 - DNA, 21 bp, Artificial sequence
  SiRNA target sequence
ttgacccggaaacattagata

SEQ ID NO: 292875 - DNA, 21 bp, Artificial sequence
  SiRNA target sequence
tgacccggaaacattagatac

SEQ ID NO: 292876 - DNA, 21 bp, Artificial sequence
  SiRNA target sequence
gacccggaaacattagatacc

SEQ ID NO: 292877 - DNA, 21 bp, Artificial sequence
  SiRNA target sequence
acccggaaacattagatacca

SEQ ID NO: 292878 - DNA, 21 bp, Artificial sequence
  SiRNA target sequence
cccggaaacattagataccaa

SEQ ID NO: 292879 - DNA, 21 bp, Artificial sequence
  SiRNA target sequence
ccggaaacattagataccaac

SEQ ID NO: 292880 - DNA, 21 bp, Artificial sequence
  SiRNA target sequence
cggaaacattagataccaacg

SEQ ID NO: 292881 - DNA, 21 bp, Artificial sequence
  SiRNA target sequence
ggaaacattagataccaacgt

SEQ ID NO: 292882 - DNA, 21 bp, Artificial sequence
  SiRNA target sequence
gaaacattagataccaacgtg

SEQ ID NO: 292883 - DNA, 21 bp, Artificial sequence
  SiRNA target sequence
aaacattagataccaacgtgg

SEQ ID NO: 292884 - DNA, 21 bp, Artificial sequence
  SiRNA target sequence
aacattagataccaacgtgga

SEQ ID NO: 292885 - DNA, 21 bp, Artificial sequence
  SiRNA target sequence
acattagataccaacgtggaa

SEQ ID NO: 292886 - DNA, 21 bp, Artificial sequence
  SiRNA target sequence
cattagataccaacgtggaag

SEQ ID NO: 292887 - DNA, 21 bp, Artificial sequence
  SiRNA target sequence
attagataccaacgtggaagc

SEQ ID NO: 292888 - DNA, 21 bp, Artificial sequence
  SiRNA target sequence
ttagataccaacgtggaagct

SEQ ID NO: 292889 - DNA, 21 bp, Artificial sequence
  SiRNA target sequence
tagataccaacgtggaagctt

SEQ ID NO: 292890 - DNA, 21 bp, Artificial sequence
  SiRNA target sequence
agataccaacgtggaagcttt

SEQ ID NO: 292891 - DNA, 21 bp, Artificial sequence
  SiRNA target sequence
gataccaacgtggaagctttt

SEQ ID NO: 292892 - DNA, 21 bp, Artificial sequence
  SiRNA target sequence
ataccaacgtggaagcttttg

SEQ ID NO: 292893 - DNA, 21 bp, Artificial sequence
  SiRNA target sequence
taccaacgtggaagcttttgc

SEQ ID NO: 292894 - DNA, 21 bp, Artificial sequence
  SiRNA target sequence
accaacgtggaagcttttgct

SEQ ID NO: 292895 - DNA, 21 bp, Artificial sequence
  SiRNA target sequence
ccaacgtggaagcttttgctt

SEQ ID NO: 292896 - DNA, 21 bp, Artificial sequence
  SiRNA target sequence
caacgtggaagcttttgcttc

SEQ ID NO: 292897 - DNA, 21 bp, Artificial sequence
  SiRNA target sequence
aacgtggaagcttttgcttca

SEQ ID NO: 292898 - DNA, 21 bp, Artificial sequence
  SiRNA target sequence
acgtggaagcttttgcttcag

SEQ ID NO: 292899 - DNA, 21 bp, Artificial sequence
  SiRNA target sequence
cgtggaagcttttgcttcagc

SEQ ID NO: 292900 - DNA, 21 bp, Artificial sequence
  SiRNA target sequence
gtggaagcttttgcttcagct

SEQ ID NO: 292901 - DNA, 21 bp, Artificial sequence
  SiRNA target sequence
tggaagcttttgcttcagctg

SEQ ID NO: 292902 - DNA, 21 bp, Artificial sequence
  SiRNA target sequence
ggaagcttttgcttcagctga

SEQ ID NO: 292903 - DNA, 21 bp, Artificial sequence
  SiRNA target sequence
gaagcttttgcttcagctgat

SEQ ID NO: 292904 - DNA, 21 bp, Artificial sequence
  SiRNA target sequence
aagcttttgcttcagctgatc

SEQ ID NO: 292905 - DNA, 21 bp, Artificial sequence
  SiRNA target sequence
agcttttgcttcagctgatct

SEQ ID NO: 292906 - DNA, 21 bp, Artificial sequence
  SiRNA target sequence
gcttttgcttcagctgatctt

SEQ ID NO: 292907 - DNA, 21 bp, Artificial sequence
  SiRNA target sequence
cttttgcttcagctgatctta

SEQ ID NO: 292908 - DNA, 21 bp, Artificial sequence
  SiRNA target sequence
ttttgcttcagctgatcttaa

SEQ ID NO: 292909 - DNA, 21 bp, Artificial sequence
  SiRNA target sequence
tttgcttcagctgatcttaag

SEQ ID NO: 292910 - DNA, 21 bp, Artificial sequence
  SiRNA target sequence
ttgcttcagctgatcttaaga

SEQ ID NO: 292911 - DNA, 21 bp, Artificial sequence
  SiRNA target sequence
tgcttcagctgatcttaagac

SEQ ID NO: 292912 - DNA, 21 bp, Artificial sequence
  SiRNA target sequence
gcttcagctgatcttaagaca

SEQ ID NO: 292913 - DNA, 21 bp, Artificial sequence
  SiRNA target sequence
cttcagctgatcttaagacat

SEQ ID NO: 292914 - DNA, 21 bp, Artificial sequence
  SiRNA target sequence
ttcagctgatcttaagacatt

SEQ ID NO: 292915 - DNA, 21 bp, Artificial sequence
  SiRNA target sequence
tcagctgatcttaagacattt

SEQ ID NO: 292916 - DNA, 21 bp, Artificial sequence
  SiRNA target sequence
cagctgatcttaagacatttg

SEQ ID NO: 292917 - DNA, 21 bp, Artificial sequence
  SiRNA target sequence
agctgatcttaagacatttgt

SEQ ID NO: 292918 - DNA, 21 bp, Artificial sequence
  SiRNA target sequence
gctgatcttaagacatttgta

SEQ ID NO: 292919 - DNA, 21 bp, Artificial sequence
  SiRNA target sequence
ctgatcttaagacatttgtac

SEQ ID NO: 292920 - DNA, 21 bp, Artificial sequence
  SiRNA target sequence
tgatcttaagacatttgtaca

SEQ ID NO: 292921 - DNA, 21 bp, Artificial sequence
  SiRNA target sequence
gatcttaagacatttgtacaa

SEQ ID NO: 292922 - DNA, 21 bp, Artificial sequence
  SiRNA target sequence
atcttaagacatttgtacaaa

SEQ ID NO: 292923 - DNA, 21 bp, Artificial sequence
  SiRNA target sequence
tcttaagacatttgtacaaag

SEQ ID NO: 292924 - DNA, 21 bp, Artificial sequence
  SiRNA target sequence
cttaagacatttgtacaaagg

SEQ ID NO: 292925 - DNA, 21 bp, Artificial sequence
  SiRNA target sequence
ttaagacatttgtacaaagga

SEQ ID NO: 292926 - DNA, 21 bp, Artificial sequence
  SiRNA target sequence
taagacatttgtacaaaggaa

SEQ ID NO: 292927 - DNA, 21 bp, Artificial sequence
  SiRNA target sequence
aagacatttgtacaaaggaaa

SEQ ID NO: 292928 - DNA, 21 bp, Artificial sequence
  SiRNA target sequence
agacatttgtacaaaggaaac

SEQ ID NO: 292929 - DNA, 21 bp, Artificial sequence
  SiRNA target sequence
gacatttgtacaaaggaaacc

SEQ ID NO: 292930 - DNA, 21 bp, Artificial sequence
  SiRNA target sequence
acatttgtacaaaggaaacct

SEQ ID NO: 292931 - DNA, 21 bp, Artificial sequence
  SiRNA target sequence
catttgtacaaaggaaaccta

SEQ ID NO: 292932 - DNA, 21 bp, Artificial sequence
  SiRNA target sequence
atttgtacaaaggaaacctat

SEQ ID NO: 292933 - DNA, 21 bp, Artificial sequence
  SiRNA target sequence
tttgtacaaaggaaacctatt

SEQ ID NO: 292934 - DNA, 21 bp, Artificial sequence
  SiRNA target sequence
ttgtacaaaggaaacctattg

SEQ ID NO: 292935 - DNA, 21 bp, Artificial sequence
  SiRNA target sequence
tgtacaaaggaaacctattgt

SEQ ID NO: 292936 - DNA, 21 bp, Artificial sequence
  SiRNA target sequence
gtacaaaggaaacctattgtc

SEQ ID NO: 292937 - DNA, 21 bp, Artificial sequence
  SiRNA target sequence
tacaaaggaaacctattgtca

SEQ ID NO: 292938 - DNA, 21 bp, Artificial sequence
  SiRNA target sequence
acaaaggaaacctattgtcat

SEQ ID NO: 292939 - DNA, 21 bp, Artificial sequence
  SiRNA target sequence
caaaggaaacctattgtcatt

SEQ ID NO: 292940 - DNA, 21 bp, Artificial sequence
  SiRNA target sequence
aaaggaaacctattgtcattg

SEQ ID NO: 292941 - DNA, 21 bp, Artificial sequence
  SiRNA target sequence
aaggaaacctattgtcattga

SEQ ID NO: 292942 - DNA, 21 bp, Artificial sequence
  SiRNA target sequence
aggaaacctattgtcattgaa

SEQ ID NO: 292943 - DNA, 21 bp, Artificial sequence
  SiRNA target sequence
ggaaacctattgtcattgaag

SEQ ID NO: 292944 - DNA, 21 bp, Artificial sequence
  SiRNA target sequence
gaaacctattgtcattgaagg

SEQ ID NO: 292945 - DNA, 21 bp, Artificial sequence
  SiRNA target sequence
aaacctattgtcattgaagga

SEQ ID NO: 292946 - DNA, 21 bp, Artificial sequence
  SiRNA target sequence
aacctattgtcattgaaggac

SEQ ID NO: 292947 - DNA, 21 bp, Artificial sequence
  SiRNA target sequence
acctattgtcattgaaggacc

SEQ ID NO: 292948 - DNA, 21 bp, Artificial sequence
  SiRNA target sequence
cctattgtcattgaaggacct

SEQ ID NO: 292949 - DNA, 21 bp, Artificial sequence
  SiRNA target sequence
ctattgtcattgaaggacctg

SEQ ID NO: 292950 - DNA, 21 bp, Artificial sequence
  SiRNA target sequence
tattgtcattgaaggacctga

SEQ ID NO: 292951 - DNA, 21 bp, Artificial sequence
  SiRNA target sequence
attgtcattgaaggacctgaa

SEQ ID NO: 292952 - DNA, 21 bp, Artificial sequence
  SiRNA target sequence
ttgtcattgaaggacctgaat

SEQ ID NO: 292953 - DNA, 21 bp, Artificial sequence
  SiRNA target sequence
tgtcattgaaggacctgaatt

SEQ ID NO: 292954 - DNA, 21 bp, Artificial sequence
  SiRNA target sequence
gtcattgaaggacctgaattt

SEQ ID NO: 292955 - DNA, 21 bp, Artificial sequence
  SiRNA target sequence
tcattgaaggacctgaatttg

SEQ ID NO: 292956 - DNA, 21 bp, Artificial sequence
  SiRNA target sequence
cattgaaggacctgaatttgt

SEQ ID NO: 292957 - DNA, 21 bp, Artificial sequence
  SiRNA target sequence
attgaaggacctgaatttgta

SEQ ID NO: 292958 - DNA, 21 bp, Artificial sequence
  SiRNA target sequence
ttgaaggacctgaatttgtag

SEQ ID NO: 292959 - DNA, 21 bp, Artificial sequence
  SiRNA target sequence
tgaaggacctgaatttgtaga

SEQ ID NO: 292960 - DNA, 21 bp, Artificial sequence
  SiRNA target sequence
gaaggacctgaatttgtagag

SEQ ID NO: 292961 - DNA, 21 bp, Artificial sequence
  SiRNA target sequence
aaggacctgaatttgtagagg

SEQ ID NO: 292962 - DNA, 21 bp, Artificial sequence
  SiRNA target sequence
aggacctgaatttgtagaggc

SEQ ID NO: 292963 - DNA, 21 bp, Artificial sequence
  SiRNA target sequence
ggacctgaatttgtagaggca

SEQ ID NO: 292964 - DNA, 21 bp, Artificial sequence
  SiRNA target sequence
gacctgaatttgtagaggcac

SEQ ID NO: 292965 - DNA, 21 bp, Artificial sequence
  SiRNA target sequence
acctgaatttgtagaggcaca

SEQ ID NO: 292966 - DNA, 21 bp, Artificial sequence
  SiRNA target sequence
cctgaatttgtagaggcacaa

SEQ ID NO: 292967 - DNA, 21 bp, Artificial sequence
  SiRNA target sequence
ctgaatttgtagaggcacaaa

SEQ ID NO: 292968 - DNA, 21 bp, Artificial sequence
  SiRNA target sequence
tgaatttgtagaggcacaaac

SEQ ID NO: 292969 - DNA, 21 bp, Artificial sequence
  SiRNA target sequence
gaatttgtagaggcacaaaca

SEQ ID NO: 292970 - DNA, 21 bp, Artificial sequence
  SiRNA target sequence
aatttgtagaggcacaaacat

SEQ ID NO: 292971 - DNA, 21 bp, Artificial sequence
  SiRNA target sequence
atttgtagaggcacaaacatc

SEQ ID NO: 292972 - DNA, 21 bp, Artificial sequence
  SiRNA target sequence
tttgtagaggcacaaacatca

SEQ ID NO: 292973 - DNA, 21 bp, Artificial sequence
  SiRNA target sequence
ttgtagaggcacaaacatcag

SEQ ID NO: 292974 - DNA, 21 bp, Artificial sequence
  SiRNA target sequence
tgtagaggcacaaacatcagg

SEQ ID NO: 292975 - DNA, 21 bp, Artificial sequence
  SiRNA target sequence
gtagaggcacaaacatcagga

SEQ ID NO: 292976 - DNA, 21 bp, Artificial sequence
  SiRNA target sequence
tagaggcacaaacatcaggag

SEQ ID NO: 292977 - DNA, 21 bp, Artificial sequence
  SiRNA target sequence
agaggcacaaacatcaggaga

SEQ ID NO: 292978 - DNA, 21 bp, Artificial sequence
  SiRNA target sequence
gaggcacaaacatcaggagat

SEQ ID NO: 292979 - DNA, 21 bp, Artificial sequence
  SiRNA target sequence
aggcacaaacatcaggagatc

SEQ ID NO: 292980 - DNA, 21 bp, Artificial sequence
  SiRNA target sequence
ggcacaaacatcaggagatca

SEQ ID NO: 292981 - DNA, 21 bp, Artificial sequence
  SiRNA target sequence
gcacaaacatcaggagatcag

SEQ ID NO: 292982 - DNA, 21 bp, Artificial sequence
  SiRNA target sequence
cacaaacatcaggagatcaga

SEQ ID NO: 292983 - DNA, 21 bp, Artificial sequence
  SiRNA target sequence
acaaacatcaggagatcagat

SEQ ID NO: 292984 - DNA, 21 bp, Artificial sequence
  SiRNA target sequence
caaacatcaggagatcagatt

SEQ ID NO: 292985 - DNA, 21 bp, Artificial sequence
  SiRNA target sequence
aaacatcaggagatcagatta

SEQ ID NO: 292986 - DNA, 21 bp, Artificial sequence
  SiRNA target sequence
aacatcaggagatcagattac

SEQ ID NO: 292987 - DNA, 21 bp, Artificial sequence
  SiRNA target sequence
acatcaggagatcagattaca

SEQ ID NO: 292988 - DNA, 21 bp, Artificial sequence
  SiRNA target sequence
catcaggagatcagattacat

SEQ ID NO: 292989 - DNA, 21 bp, Artificial sequence
  SiRNA target sequence
atcaggagatcagattacatt

SEQ ID NO: 292990 - DNA, 21 bp, Artificial sequence
  SiRNA target sequence
tcaggagatcagattacatta

SEQ ID NO: 292991 - DNA, 21 bp, Artificial sequence
  SiRNA target sequence
caggagatcagattacattaa

SEQ ID NO: 292992 - DNA, 21 bp, Artificial sequence
  SiRNA target sequence
aggagatcagattacattaag

SEQ ID NO: 292993 - DNA, 21 bp, Artificial sequence
  SiRNA target sequence
ggagatcagattacattaagg

SEQ ID NO: 292994 - DNA, 21 bp, Artificial sequence
  SiRNA target sequence
gagatcagattacattaagga

SEQ ID NO: 292995 - DNA, 21 bp, Artificial sequence
  SiRNA target sequence
agatcagattacattaaggaa

SEQ ID NO: 292996 - DNA, 21 bp, Artificial sequence
  SiRNA target sequence
gatcagattacattaaggaaa

SEQ ID NO: 292997 - DNA, 21 bp, Artificial sequence
  SiRNA target sequence
atcagattacattaaggaaac

SEQ ID NO: 292998 - DNA, 21 bp, Artificial sequence
  SiRNA target sequence
tcagattacattaaggaaaca

SEQ ID NO: 292999 - DNA, 21 bp, Artificial sequence
  SiRNA target sequence
cagattacattaaggaaacaa

SEQ ID NO: 293000 - DNA, 21 bp, Artificial sequence
  SiRNA target sequence
agattacattaaggaaacaaa

SEQ ID NO: 293001 - DNA, 21 bp, Artificial sequence
  SiRNA target sequence
gattacattaaggaaacaaac

SEQ ID NO: 293002 - DNA, 21 bp, Artificial sequence
  SiRNA target sequence
attacattaaggaaacaaaca

SEQ ID NO: 293003 - DNA, 21 bp, Artificial sequence
  SiRNA target sequence
ttacattaaggaaacaaacac

SEQ ID NO: 293004 - DNA, 21 bp, Artificial sequence
  SiRNA target sequence
tacattaaggaaacaaacaca

SEQ ID NO: 293005 - DNA, 21 bp, Artificial sequence
  SiRNA target sequence
acattaaggaaacaaacacaa

SEQ ID NO: 293006 - DNA, 21 bp, Artificial sequence
  SiRNA target sequence
cattaaggaaacaaacacaaa

SEQ ID NO: 293007 - DNA, 21 bp, Artificial sequence
  SiRNA target sequence
attaaggaaacaaacacaaaa

SEQ ID NO: 293008 - DNA, 21 bp, Artificial sequence
  SiRNA target sequence
ttaaggaaacaaacacaaaaa

SEQ ID NO: 293009 - DNA, 21 bp, Artificial sequence
  SiRNA target sequence
taaggaaacaaacacaaaaag

SEQ ID NO: 293010 - DNA, 21 bp, Artificial sequence
  SiRNA target sequence
aaggaaacaaacacaaaaagt

SEQ ID NO: 293011 - DNA, 21 bp, Artificial sequence
  SiRNA target sequence
aggaaacaaacacaaaaagtc

SEQ ID NO: 293012 - DNA, 21 bp, Artificial sequence
  SiRNA target sequence
ggaaacaaacacaaaaagtca

SEQ ID NO: 293013 - DNA, 21 bp, Artificial sequence
  SiRNA target sequence
gaaacaaacacaaaaagtcat

SEQ ID NO: 293014 - DNA, 21 bp, Artificial sequence
  SiRNA target sequence
aaacaaacacaaaaagtcata

SEQ ID NO: 293015 - DNA, 21 bp, Artificial sequence
  SiRNA target sequence
aacaaacacaaaaagtcatag

SEQ ID NO: 293016 - DNA, 21 bp, Artificial sequence
  SiRNA target sequence
acaaacacaaaaagtcataga

SEQ ID NO: 293017 - DNA, 21 bp, Artificial sequence
  SiRNA target sequence
caaacacaaaaagtcatagag

SEQ ID NO: 293018 - DNA, 21 bp, Artificial sequence
  SiRNA target sequence
aaacacaaaaagtcatagagg

SEQ ID NO: 293019 - DNA, 21 bp, Artificial sequence
  SiRNA target sequence
aacacaaaaagtcatagaggc

SEQ ID NO: 293020 - DNA, 21 bp, Artificial sequence
  SiRNA target sequence
acacaaaaagtcatagaggca

SEQ ID NO: 293021 - DNA, 21 bp, Artificial sequence
  SiRNA target sequence
cacaaaaagtcatagaggcat

SEQ ID NO: 293022 - DNA, 21 bp, Artificial sequence
  SiRNA target sequence
acaaaaagtcatagaggcatt

SEQ ID NO: 293023 - DNA, 21 bp, Artificial sequence
  SiRNA target sequence
caaaaagtcatagaggcattc

SEQ ID NO: 293024 - DNA, 21 bp, Artificial sequence
  SiRNA target sequence
aaaaagtcatagaggcattcg

SEQ ID NO: 293025 - DNA, 21 bp, Artificial sequence
  SiRNA target sequence
aaaagtcatagaggcattcgc

SEQ ID NO: 293026 - DNA, 21 bp, Artificial sequence
  SiRNA target sequence
aaagtcatagaggcattcgct

SEQ ID NO: 293027 - DNA, 21 bp, Artificial sequence
  SiRNA target sequence
aagtcatagaggcattcgcta

SEQ ID NO: 293028 - DNA, 21 bp, Artificial sequence
  SiRNA target sequence
agtcatagaggcattcgctag

SEQ ID NO: 293029 - DNA, 21 bp, Artificial sequence
  SiRNA target sequence
gtcatagaggcattcgctagt

SEQ ID NO: 293030 - DNA, 21 bp, Artificial sequence
  SiRNA target sequence
tcatagaggcattcgctagtt

SEQ ID NO: 293031 - DNA, 21 bp, Artificial sequence
  SiRNA target sequence
catagaggcattcgctagttc

SEQ ID NO: 293032 - DNA, 21 bp, Artificial sequence
  SiRNA target sequence
atagaggcattcgctagttca

SEQ ID NO: 293033 - DNA, 21 bp, Artificial sequence
  SiRNA target sequence
tagaggcattcgctagttcag

SEQ ID NO: 293034 - DNA, 21 bp, Artificial sequence
  SiRNA target sequence
agaggcattcgctagttcaga

SEQ ID NO: 293035 - DNA, 21 bp, Artificial sequence
  SiRNA target sequence
gaggcattcgctagttcagat

SEQ ID NO: 293036 - DNA, 21 bp, Artificial sequence
  SiRNA target sequence
aggcattcgctagttcagatg

SEQ ID NO: 293037 - DNA, 21 bp, Artificial sequence
  SiRNA target sequence
ggcattcgctagttcagatgc

SEQ ID NO: 293038 - DNA, 21 bp, Artificial sequence
  SiRNA target sequence
gcattcgctagttcagatgca

SEQ ID NO: 293039 - DNA, 21 bp, Artificial sequence
  SiRNA target sequence
cattcgctagttcagatgcaa

SEQ ID NO: 293040 - DNA, 21 bp, Artificial sequence
  SiRNA target sequence
attcgctagttcagatgcaat

SEQ ID NO: 293041 - DNA, 21 bp, Artificial sequence
  SiRNA target sequence
ttcgctagttcagatgcaatc

SEQ ID NO: 293042 - DNA, 21 bp, Artificial sequence
  SiRNA target sequence
tcgctagttcagatgcaatca

SEQ ID NO: 293043 - DNA, 21 bp, Artificial sequence
  SiRNA target sequence
cgctagttcagatgcaatcac

SEQ ID NO: 293044 - DNA, 21 bp, Artificial sequence
  SiRNA target sequence
gctagttcagatgcaatcaca

SEQ ID NO: 293045 - DNA, 21 bp, Artificial sequence
  SiRNA target sequence
ctagttcagatgcaatcacaa

SEQ ID NO: 293046 - DNA, 21 bp, Artificial sequence
  SiRNA target sequence
tagttcagatgcaatcacaat

SEQ ID NO: 293047 - DNA, 21 bp, Artificial sequence
  SiRNA target sequence
agttcagatgcaatcacaatg

SEQ ID NO: 293048 - DNA, 21 bp, Artificial sequence
  SiRNA target sequence
gttcagatgcaatcacaatgg

SEQ ID NO: 293049 - DNA, 21 bp, Artificial sequence
  SiRNA target sequence
ttcagatgcaatcacaatggc

SEQ ID NO: 293050 - DNA, 21 bp, Artificial sequence
  SiRNA target sequence
tcagatgcaatcacaatggct

SEQ ID NO: 293051 - DNA, 21 bp, Artificial sequence
  SiRNA target sequence
cagatgcaatcacaatggctc

SEQ ID NO: 293052 - DNA, 21 bp, Artificial sequence
  SiRNA target sequence
agatgcaatcacaatggctcg

SEQ ID NO: 293053 - DNA, 21 bp, Artificial sequence
  SiRNA target sequence
gatgcaatcacaatggctcgc

SEQ ID NO: 293054 - DNA, 21 bp, Artificial sequence
  SiRNA target sequence
atgcaatcacaatggctcgca

SEQ ID NO: 293055 - DNA, 21 bp, Artificial sequence
  SiRNA target sequence
tgcaatcacaatggctcgcaa

SEQ ID NO: 293056 - DNA, 21 bp, Artificial sequence
  SiRNA target sequence
gcaatcacaatggctcgcaaa

SEQ ID NO: 293057 - DNA, 21 bp, Artificial sequence
  SiRNA target sequence
caatcacaatggctcgcaaaa

SEQ ID NO: 293058 - DNA, 21 bp, Artificial sequence
  SiRNA target sequence
aatcacaatggctcgcaaaac

SEQ ID NO: 293059 - DNA, 21 bp, Artificial sequence
  SiRNA target sequence
atcacaatggctcgcaaaaca

SEQ ID NO: 293060 - DNA, 21 bp, Artificial sequence
  SiRNA target sequence
tcacaatggctcgcaaaacac

SEQ ID NO: 293061 - DNA, 21 bp, Artificial sequence
  SiRNA target sequence
cacaatggctcgcaaaacacc

SEQ ID NO: 293062 - DNA, 21 bp, Artificial sequence
  SiRNA target sequence
acaatggctcgcaaaacacca

SEQ ID NO: 293063 - DNA, 21 bp, Artificial sequence
  SiRNA target sequence
caatggctcgcaaaacaccaa

SEQ ID NO: 293064 - DNA, 21 bp, Artificial sequence
  SiRNA target sequence
aatggctcgcaaaacaccaaa

SEQ ID NO: 293065 - DNA, 21 bp, Artificial sequence
  SiRNA target sequence
atggctcgcaaaacaccaaag

SEQ ID NO: 293066 - DNA, 21 bp, Artificial sequence
  SiRNA target sequence
tggctcgcaaaacaccaaagt

SEQ ID NO: 293067 - DNA, 21 bp, Artificial sequence
  SiRNA target sequence
ggctcgcaaaacaccaaagtt

SEQ ID NO: 293068 - DNA, 21 bp, Artificial sequence
  SiRNA target sequence
gctcgcaaaacaccaaagttt

SEQ ID NO: 293069 - DNA, 21 bp, Artificial sequence
  SiRNA target sequence
ctcgcaaaacaccaaagtttg

SEQ ID NO: 293070 - DNA, 21 bp, Artificial sequence
  SiRNA target sequence
tcgcaaaacaccaaagtttgt

SEQ ID NO: 293071 - DNA, 21 bp, Artificial sequence
  SiRNA target sequence
cgcaaaacaccaaagtttgtt

SEQ ID NO: 293072 - DNA, 21 bp, Artificial sequence
  SiRNA target sequence
gcaaaacaccaaagtttgttg

SEQ ID NO: 293073 - DNA, 21 bp, Artificial sequence
  SiRNA target sequence
caaaacaccaaagtttgttga

SEQ ID NO: 293074 - DNA, 21 bp, Artificial sequence
  SiRNA target sequence
aaaacaccaaagtttgttgag

SEQ ID NO: 293075 - DNA, 21 bp, Artificial sequence
  SiRNA target sequence
aaacaccaaagtttgttgaga

SEQ ID NO: 293076 - DNA, 21 bp, Artificial sequence
  SiRNA target sequence
aacaccaaagtttgttgagag

SEQ ID NO: 293077 - DNA, 21 bp, Artificial sequence
  SiRNA target sequence
acaccaaagtttgttgagagt

SEQ ID NO: 293078 - DNA, 21 bp, Artificial sequence
  SiRNA target sequence
caccaaagtttgttgagagtg

SEQ ID NO: 293079 - DNA, 21 bp, Artificial sequence
  SiRNA target sequence
accaaagtttgttgagagtga

SEQ ID NO: 293080 - DNA, 21 bp, Artificial sequence
  SiRNA target sequence
ccaaagtttgttgagagtgat

SEQ ID NO: 293081 - DNA, 21 bp, Artificial sequence
  SiRNA target sequence
caaagtttgttgagagtgatg

SEQ ID NO: 293082 - DNA, 21 bp, Artificial sequence
  SiRNA target sequence
aaagtttgttgagagtgatga

SEQ ID NO: 293083 - DNA, 21 bp, Artificial sequence
  SiRNA target sequence
aagtttgttgagagtgatgat

SEQ ID NO: 293084 - DNA, 21 bp, Artificial sequence
  SiRNA target sequence
agtttgttgagagtgatgatg

SEQ ID NO: 293085 - DNA, 21 bp, Artificial sequence
  SiRNA target sequence
gtttgttgagagtgatgatgt

SEQ ID NO: 293086 - DNA, 21 bp, Artificial sequence
  SiRNA target sequence
tttgttgagagtgatgatgtg

SEQ ID NO: 293087 - DNA, 21 bp, Artificial sequence
  SiRNA target sequence
ttgttgagagtgatgatgtgg

SEQ ID NO: 293088 - DNA, 21 bp, Artificial sequence
  SiRNA target sequence
tgttgagagtgatgatgtggt

SEQ ID NO: 293089 - DNA, 21 bp, Artificial sequence
  SiRNA target sequence
gttgagagtgatgatgtggtc

SEQ ID NO: 293090 - DNA, 21 bp, Artificial sequence
  SiRNA target sequence
ttgagagtgatgatgtggtcg

SEQ ID NO: 293091 - DNA, 21 bp, Artificial sequence
  SiRNA target sequence
tgagagtgatgatgtggtcga

SEQ ID NO: 293092 - DNA, 21 bp, Artificial sequence
  SiRNA target sequence
gagagtgatgatgtggtcgaa

SEQ ID NO: 293093 - DNA, 21 bp, Artificial sequence
  SiRNA target sequence
agagtgatgatgtggtcgaag

SEQ ID NO: 293094 - DNA, 21 bp, Artificial sequence
  SiRNA target sequence
gagtgatgatgtggtcgaagt

SEQ ID NO: 293095 - DNA, 21 bp, Artificial sequence
  SiRNA target sequence
agtgatgatgtggtcgaagtt

SEQ ID NO: 293096 - DNA, 21 bp, Artificial sequence
  SiRNA target sequence
gtgatgatgtggtcgaagttt

SEQ ID NO: 293097 - DNA, 21 bp, Artificial sequence
  SiRNA target sequence
tgatgatgtggtcgaagtttc

SEQ ID NO: 293098 - DNA, 21 bp, Artificial sequence
  SiRNA target sequence
gatgatgtggtcgaagtttca

SEQ ID NO: 293099 - DNA, 21 bp, Artificial sequence
  SiRNA target sequence
atgatgtggtcgaagtttcaa

SEQ ID NO: 293100 - DNA, 21 bp, Artificial sequence
  SiRNA target sequence
tgatgtggtcgaagtttcaat

SEQ ID NO: 293101 - DNA, 21 bp, Artificial sequence
  SiRNA target sequence
gatgtggtcgaagtttcaatg

SEQ ID NO: 293102 - DNA, 21 bp, Artificial sequence
  SiRNA target sequence
atgtggtcgaagtttcaatgc

SEQ ID NO: 293103 - DNA, 21 bp, Artificial sequence
  SiRNA target sequence
tgtggtcgaagtttcaatgca

SEQ ID NO: 293104 - DNA, 21 bp, Artificial sequence
  SiRNA target sequence
gtggtcgaagtttcaatgcaa

SEQ ID NO: 293105 - DNA, 21 bp, Artificial sequence
  SiRNA target sequence
tggtcgaagtttcaatgcaaa

SEQ ID NO: 293106 - DNA, 21 bp, Artificial sequence
  SiRNA target sequence
ggtcgaagtttcaatgcaaat

SEQ ID NO: 293107 - DNA, 21 bp, Artificial sequence
  SiRNA target sequence
gtcgaagtttcaatgcaaatg

SEQ ID NO: 293108 - DNA, 21 bp, Artificial sequence
  SiRNA target sequence
tcgaagtttcaatgcaaatgt

SEQ ID NO: 293109 - DNA, 21 bp, Artificial sequence
  SiRNA target sequence
cgaagtttcaatgcaaatgtg

SEQ ID NO: 293110 - DNA, 21 bp, Artificial sequence
  SiRNA target sequence
gaagtttcaatgcaaatgtgg

SEQ ID NO: 293111 - DNA, 21 bp, Artificial sequence
  SiRNA target sequence
aagtttcaatgcaaatgtgga

SEQ ID NO: 293112 - DNA, 21 bp, Artificial sequence
  SiRNA target sequence
agtttcaatgcaaatgtggaa

SEQ ID NO: 293113 - DNA, 21 bp, Artificial sequence
  SiRNA target sequence
gtttcaatgcaaatgtggaaa

SEQ ID NO: 293114 - DNA, 21 bp, Artificial sequence
  SiRNA target sequence
tttcaatgcaaatgtggaaag

SEQ ID NO: 293115 - DNA, 21 bp, Artificial sequence
  SiRNA target sequence
ttcaatgcaaatgtggaaaga

SEQ ID NO: 293116 - DNA, 21 bp, Artificial sequence
  SiRNA target sequence
tcaatgcaaatgtggaaagat

SEQ ID NO: 293117 - DNA, 21 bp, Artificial sequence
  SiRNA target sequence
caatgcaaatgtggaaagatc

SEQ ID NO: 293118 - DNA, 21 bp, Artificial sequence
  SiRNA target sequence
aatgcaaatgtggaaagatca

SEQ ID NO: 293119 - DNA, 21 bp, Artificial sequence
  SiRNA target sequence
atgcaaatgtggaaagatcaa

SEQ ID NO: 293120 - DNA, 21 bp, Artificial sequence
  SiRNA target sequence
tgcaaatgtggaaagatcaag

SEQ ID NO: 293121 - DNA, 21 bp, Artificial sequence
  SiRNA target sequence
gcaaatgtggaaagatcaagt

SEQ ID NO: 293122 - DNA, 21 bp, Artificial sequence
  SiRNA target sequence
caaatgtggaaagatcaagtt

SEQ ID NO: 293123 - DNA, 21 bp, Artificial sequence
  SiRNA target sequence
aaatgtggaaagatcaagttg

SEQ ID NO: 293124 - DNA, 21 bp, Artificial sequence
  SiRNA target sequence
aatgtggaaagatcaagttgc

SEQ ID NO: 293125 - DNA, 21 bp, Artificial sequence
  SiRNA target sequence
atgtggaaagatcaagttgcg

SEQ ID NO: 293126 - DNA, 21 bp, Artificial sequence
  SiRNA target sequence
tgtggaaagatcaagttgcgc

SEQ ID NO: 293127 - DNA, 21 bp, Artificial sequence
  SiRNA target sequence
gtggaaagatcaagttgcgca

SEQ ID NO: 293128 - DNA, 21 bp, Artificial sequence
  SiRNA target sequence
tggaaagatcaagttgcgcaa

SEQ ID NO: 293129 - DNA, 21 bp, Artificial sequence
  SiRNA target sequence
ggaaagatcaagttgcgcaaa

SEQ ID NO: 293130 - DNA, 21 bp, Artificial sequence
  SiRNA target sequence
gaaagatcaagttgcgcaaaa

SEQ ID NO: 293131 - DNA, 21 bp, Artificial sequence
  SiRNA target sequence
aaagatcaagttgcgcaaaag

SEQ ID NO: 293132 - DNA, 21 bp, Artificial sequence
  SiRNA target sequence
aagatcaagttgcgcaaaagt

SEQ ID NO: 293133 - DNA, 21 bp, Artificial sequence
  SiRNA target sequence
agatcaagttgcgcaaaagtt

SEQ ID NO: 293134 - DNA, 21 bp, Artificial sequence
  SiRNA target sequence
gatcaagttgcgcaaaagttg

SEQ ID NO: 293135 - DNA, 21 bp, Artificial sequence
  SiRNA target sequence
atcaagttgcgcaaaagttga

SEQ ID NO: 293136 - DNA, 21 bp, Artificial sequence
  SiRNA target sequence
tcaagttgcgcaaaagttgat

SEQ ID NO: 293137 - DNA, 21 bp, Artificial sequence
  SiRNA target sequence
caagttgcgcaaaagttgata

SEQ ID NO: 293138 - DNA, 21 bp, Artificial sequence
  SiRNA target sequence
aagttgcgcaaaagttgataa

SEQ ID NO: 293139 - DNA, 21 bp, Artificial sequence
  SiRNA target sequence
agttgcgcaaaagttgataac

SEQ ID NO: 293140 - DNA, 21 bp, Artificial sequence
  SiRNA target sequence
gttgcgcaaaagttgataact

SEQ ID NO: 293141 - DNA, 21 bp, Artificial sequence
  SiRNA target sequence
ttgcgcaaaagttgataacta

SEQ ID NO: 293142 - DNA, 21 bp, Artificial sequence
  SiRNA target sequence
tgcgcaaaagttgataactaa

SEQ ID NO: 293143 - DNA, 21 bp, Artificial sequence
  SiRNA target sequence
gcgcaaaagttgataactaac

SEQ ID NO: 293144 - DNA, 21 bp, Artificial sequence
  SiRNA target sequence
cgcaaaagttgataactaacc

SEQ ID NO: 293145 - DNA, 21 bp, Artificial sequence
  SiRNA target sequence
gcaaaagttgataactaaccg

SEQ ID NO: 293146 - DNA, 21 bp, Artificial sequence
  SiRNA target sequence
caaaagttgataactaaccga

SEQ ID NO: 293147 - DNA, 21 bp, Artificial sequence
  SiRNA target sequence
aaaagttgataactaaccgag

SEQ ID NO: 293148 - DNA, 21 bp, Artificial sequence
  SiRNA target sequence
aaagttgataactaaccgagt

SEQ ID NO: 293149 - DNA, 21 bp, Artificial sequence
  SiRNA target sequence
aagttgataactaaccgagtt

SEQ ID NO: 293150 - DNA, 21 bp, Artificial sequence
  SiRNA target sequence
agttgataactaaccgagttt

SEQ ID NO: 293151 - DNA, 21 bp, Artificial sequence
  SiRNA target sequence
gttgataactaaccgagtttt

SEQ ID NO: 293152 - DNA, 21 bp, Artificial sequence
  SiRNA target sequence
ttgataactaaccgagtttta

SEQ ID NO: 293153 - DNA, 21 bp, Artificial sequence
  SiRNA target sequence
tgataactaaccgagttttaa

SEQ ID NO: 293154 - DNA, 21 bp, Artificial sequence
  SiRNA target sequence
gataactaaccgagttttaac

SEQ ID NO: 293155 - DNA, 21 bp, Artificial sequence
  SiRNA target sequence
ataactaaccgagttttaaca

SEQ ID NO: 293156 - DNA, 21 bp, Artificial sequence
  SiRNA target sequence
taactaaccgagttttaacaa

SEQ ID NO: 293157 - DNA, 21 bp, Artificial sequence
  SiRNA target sequence
aactaaccgagttttaacaaa

SEQ ID NO: 293158 - DNA, 21 bp, Artificial sequence
  SiRNA target sequence
actaaccgagttttaacaaac

SEQ ID NO: 293159 - DNA, 21 bp, Artificial sequence
  SiRNA target sequence
ctaaccgagttttaacaaacc

SEQ ID NO: 293160 - DNA, 21 bp, Artificial sequence
  SiRNA target sequence
taaccgagttttaacaaacct

SEQ ID NO: 293161 - DNA, 21 bp, Artificial sequence
  SiRNA target sequence
aaccgagttttaacaaacctg

SEQ ID NO: 293162 - DNA, 21 bp, Artificial sequence
  SiRNA target sequence
accgagttttaacaaacctgt

SEQ ID NO: 293163 - DNA, 21 bp, Artificial sequence
  SiRNA target sequence
ccgagttttaacaaacctgta

SEQ ID NO: 293164 - DNA, 21 bp, Artificial sequence
  SiRNA target sequence
cgagttttaacaaacctgtat

SEQ ID NO: 293165 - DNA, 21 bp, Artificial sequence
  SiRNA target sequence
gagttttaacaaacctgtata

SEQ ID NO: 293166 - DNA, 21 bp, Artificial sequence
  SiRNA target sequence
agttttaacaaacctgtataa

SEQ ID NO: 293167 - DNA, 21 bp, Artificial sequence
  SiRNA target sequence
gttttaacaaacctgtataaa

SEQ ID NO: 293168 - DNA, 21 bp, Artificial sequence
  SiRNA target sequence
ttttaacaaacctgtataaaa

SEQ ID NO: 293169 - DNA, 21 bp, Artificial sequence
  SiRNA target sequence
tttaacaaacctgtataaaat

SEQ ID NO: 293170 - DNA, 21 bp, Artificial sequence
  SiRNA target sequence
ttaacaaacctgtataaaatt

SEQ ID NO: 293171 - DNA, 21 bp, Artificial sequence
  SiRNA target sequence
taacaaacctgtataaaattt

SEQ ID NO: 293172 - DNA, 21 bp, Artificial sequence
  SiRNA target sequence
aacaaacctgtataaaatttg

SEQ ID NO: 293173 - DNA, 21 bp, Artificial sequence
  SiRNA target sequence
acaaacctgtataaaatttgt

SEQ ID NO: 293174 - DNA, 21 bp, Artificial sequence
  SiRNA target sequence
caaacctgtataaaatttgtt

SEQ ID NO: 293175 - DNA, 21 bp, Artificial sequence
  SiRNA target sequence
aaacctgtataaaatttgttt

SEQ ID NO: 293176 - DNA, 21 bp, Artificial sequence
  SiRNA target sequence
aacctgtataaaatttgttta

SEQ ID NO: 293177 - DNA, 21 bp, Artificial sequence
  SiRNA target sequence
acctgtataaaatttgtttag

SEQ ID NO: 293178 - DNA, 21 bp, Artificial sequence
  SiRNA target sequence
cctgtataaaatttgtttagt

SEQ ID NO: 293179 - DNA, 21 bp, Artificial sequence
  SiRNA target sequence
ctgtataaaatttgtttagtt

SEQ ID NO: 293180 - DNA, 21 bp, Artificial sequence
  SiRNA target sequence
tgtataaaatttgtttagtta

SEQ ID NO: 293181 - DNA, 21 bp, Artificial sequence
  SiRNA target sequence
gtataaaatttgtttagttaa

SEQ ID NO: 293182 - DNA, 21 bp, Artificial sequence
  SiRNA target sequence
tataaaatttgtttagttaag

SEQ ID NO: 293183 - DNA, 21 bp, Artificial sequence
  SiRNA target sequence
ataaaatttgtttagttaagg

SEQ ID NO: 293184 - DNA, 21 bp, Artificial sequence
  SiRNA target sequence
taaaatttgtttagttaagga

SEQ ID NO: 293185 - DNA, 21 bp, Artificial sequence
  SiRNA target sequence
aaaatttgtttagttaaggag

SEQ ID NO: 293186 - DNA, 21 bp, Artificial sequence
  SiRNA target sequence
aaatttgtttagttaaggaga

SEQ ID NO: 293187 - DNA, 21 bp, Artificial sequence
  SiRNA target sequence
aatttgtttagttaaggagaa

SEQ ID NO: 293188 - DNA, 21 bp, Artificial sequence
  SiRNA target sequence
atttgtttagttaaggagaat

SEQ ID NO: 293189 - DNA, 21 bp, Artificial sequence
  SiRNA target sequence
tttgtttagttaaggagaatg

SEQ ID NO: 293190 - DNA, 21 bp, Artificial sequence
  SiRNA target sequence
ttgtttagttaaggagaatgg

SEQ ID NO: 293191 - DNA, 21 bp, Artificial sequence
  SiRNA target sequence
tgtttagttaaggagaatggt

SEQ ID NO: 293192 - DNA, 21 bp, Artificial sequence
  SiRNA target sequence
gtttagttaaggagaatggtg

SEQ ID NO: 293193 - DNA, 21 bp, Artificial sequence
  SiRNA target sequence
tttagttaaggagaatggtga

SEQ ID NO: 293194 - DNA, 21 bp, Artificial sequence
  SiRNA target sequence
ttagttaaggagaatggtgat

SEQ ID NO: 293195 - DNA, 21 bp, Artificial sequence
  SiRNA target sequence
tagttaaggagaatggtgata

SEQ ID NO: 293196 - DNA, 21 bp, Artificial sequence
  SiRNA target sequence
agttaaggagaatggtgatat

SEQ ID NO: 293197 - DNA, 21 bp, Artificial sequence
  SiRNA target sequence
gttaaggagaatggtgatatg

SEQ ID NO: 293198 - DNA, 21 bp, Artificial sequence
  SiRNA target sequence
ttaaggagaatggtgatatgg

SEQ ID NO: 293199 - DNA, 21 bp, Artificial sequence
  SiRNA target sequence
taaggagaatggtgatatggt

SEQ ID NO: 293200 - DNA, 21 bp, Artificial sequence
  SiRNA target sequence
aaggagaatggtgatatggta

SEQ ID NO: 293201 - DNA, 21 bp, Artificial sequence
  SiRNA target sequence
aggagaatggtgatatggtac

SEQ ID NO: 293202 - DNA, 21 bp, Artificial sequence
  SiRNA target sequence
ggagaatggtgatatggtacc

SEQ ID NO: 293203 - DNA, 21 bp, Artificial sequence
  SiRNA target sequence
gagaatggtgatatggtaccg

SEQ ID NO: 293204 - DNA, 21 bp, Artificial sequence
  SiRNA target sequence
agaatggtgatatggtaccgc

SEQ ID NO: 293205 - DNA, 21 bp, Artificial sequence
  SiRNA target sequence
gaatggtgatatggtaccgct

SEQ ID NO: 293206 - DNA, 21 bp, Artificial sequence
  SiRNA target sequence
aatggtgatatggtaccgctg

SEQ ID NO: 293207 - DNA, 21 bp, Artificial sequence
  SiRNA target sequence
atggtgatatggtaccgctgc

SEQ ID NO: 293208 - DNA, 21 bp, Artificial sequence
  SiRNA target sequence
tggtgatatggtaccgctgct

SEQ ID NO: 293209 - DNA, 21 bp, Artificial sequence
  SiRNA target sequence
ggtgatatggtaccgctgcta

SEQ ID NO: 293210 - DNA, 21 bp, Artificial sequence
  SiRNA target sequence
gtgatatggtaccgctgctaa

SEQ ID NO: 293211 - DNA, 21 bp, Artificial sequence
  SiRNA target sequence
tgatatggtaccgctgctaaa

SEQ ID NO: 293212 - DNA, 21 bp, Artificial sequence
  SiRNA target sequence
gatatggtaccgctgctaaat

SEQ ID NO: 293213 - DNA, 21 bp, Artificial sequence
  SiRNA target sequence
atatggtaccgctgctaaatg

SEQ ID NO: 293214 - DNA, 21 bp, Artificial sequence
  SiRNA target sequence
tatggtaccgctgctaaatgg

SEQ ID NO: 293215 - DNA, 21 bp, Artificial sequence
  SiRNA target sequence
atggtaccgctgctaaatggt

SEQ ID NO: 293216 - DNA, 21 bp, Artificial sequence
  SiRNA target sequence
tggtaccgctgctaaatggtt

SEQ ID NO: 293217 - DNA, 21 bp, Artificial sequence
  SiRNA target sequence
ggtaccgctgctaaatggttt

SEQ ID NO: 293218 - DNA, 21 bp, Artificial sequence
  SiRNA target sequence
gtaccgctgctaaatggtttg

SEQ ID NO: 293219 - DNA, 21 bp, Artificial sequence
  SiRNA target sequence
taccgctgctaaatggtttgt

SEQ ID NO: 293220 - DNA, 21 bp, Artificial sequence
  SiRNA target sequence
accgctgctaaatggtttgtt

SEQ ID NO: 293221 - DNA, 21 bp, Artificial sequence
  SiRNA target sequence
ccgctgctaaatggtttgttt

SEQ ID NO: 293222 - DNA, 21 bp, Artificial sequence
  SiRNA target sequence
cgctgctaaatggtttgtttg

SEQ ID NO: 293223 - DNA, 21 bp, Artificial sequence
  SiRNA target sequence
gctgctaaatggtttgtttgt

SEQ ID NO: 293224 - DNA, 21 bp, Artificial sequence
  SiRNA target sequence
ctgctaaatggtttgtttgtt

SEQ ID NO: 293225 - DNA, 21 bp, Artificial sequence
  SiRNA target sequence
tgctaaatggtttgtttgttc

SEQ ID NO: 293226 - DNA, 21 bp, Artificial sequence
  SiRNA target sequence
gctaaatggtttgtttgttcg

SEQ ID NO: 293227 - DNA, 21 bp, Artificial sequence
  SiRNA target sequence
ctaaatggtttgtttgttcgt

SEQ ID NO: 293228 - DNA, 21 bp, Artificial sequence
  SiRNA target sequence
taaatggtttgtttgttcgtt

SEQ ID NO: 293229 - DNA, 21 bp, Artificial sequence
  SiRNA target sequence
aaatggtttgtttgttcgttc

SEQ ID NO: 293230 - DNA, 21 bp, Artificial sequence
  SiRNA target sequence
aatggtttgtttgttcgttca

SEQ ID NO: 293231 - DNA, 21 bp, Artificial sequence
  SiRNA target sequence
atggtttgtttgttcgttcaa

SEQ ID NO: 293232 - DNA, 21 bp, Artificial sequence
  SiRNA target sequence
tggtttgtttgttcgttcaaa

SEQ ID NO: 293233 - DNA, 21 bp, Artificial sequence
  SiRNA target sequence
ggtttgtttgttcgttcaaac

SEQ ID NO: 293234 - DNA, 21 bp, Artificial sequence
  SiRNA target sequence
gtttgtttgttcgttcaaaca

SEQ ID NO: 293235 - DNA, 21 bp, Artificial sequence
  SiRNA target sequence
tttgtttgttcgttcaaacat

SEQ ID NO: 293236 - DNA, 21 bp, Artificial sequence
  SiRNA target sequence
ttgtttgttcgttcaaacata

SEQ ID NO: 293237 - DNA, 21 bp, Artificial sequence
  SiRNA target sequence
tgtttgttcgttcaaacataa

SEQ ID NO: 293238 - DNA, 21 bp, Artificial sequence
  SiRNA target sequence
gtttgttcgttcaaacataat

SEQ ID NO: 293239 - DNA, 21 bp, Artificial sequence
  SiRNA target sequence
tttgttcgttcaaacataatg

SEQ ID NO: 293240 - DNA, 21 bp, Artificial sequence
  SiRNA target sequence
ttgttcgttcaaacataatgt

SEQ ID NO: 293241 - DNA, 21 bp, Artificial sequence
  SiRNA target sequence
tgttcgttcaaacataatgtt

SEQ ID NO: 293242 - DNA, 21 bp, Artificial sequence
  SiRNA target sequence
gttcgttcaaacataatgtta

SEQ ID NO: 293243 - DNA, 21 bp, Artificial sequence
  SiRNA target sequence
ttcgttcaaacataatgttag

SEQ ID NO: 293244 - DNA, 21 bp, Artificial sequence
  SiRNA target sequence
tcgttcaaacataatgttagc

SEQ ID NO: 293245 - DNA, 21 bp, Artificial sequence
  SiRNA target sequence
cgttcaaacataatgttagcc

SEQ ID NO: 293246 - DNA, 21 bp, Artificial sequence
  SiRNA target sequence
gttcaaacataatgttagccc

SEQ ID NO: 293247 - DNA, 21 bp, Artificial sequence
  SiRNA target sequence
ttcaaacataatgttagcccc

SEQ ID NO: 293248 - DNA, 21 bp, Artificial sequence
  SiRNA target sequence
tcaaacataatgttagcccct

SEQ ID NO: 293249 - DNA, 21 bp, Artificial sequence
  SiRNA target sequence
caaacataatgttagcccctg

SEQ ID NO: 293250 - DNA, 21 bp, Artificial sequence
  SiRNA target sequence
aaacataatgttagcccctgg

SEQ ID NO: 293251 - DNA, 21 bp, Artificial sequence
  SiRNA target sequence
aacataatgttagcccctgga

SEQ ID NO: 293252 - DNA, 21 bp, Artificial sequence
  SiRNA target sequence
acataatgttagcccctggac

SEQ ID NO: 293253 - DNA, 21 bp, Artificial sequence
  SiRNA target sequence
cataatgttagcccctggaca

SEQ ID NO: 293254 - DNA, 21 bp, Artificial sequence
  SiRNA target sequence
ataatgttagcccctggacac

SEQ ID NO: 293255 - DNA, 21 bp, Artificial sequence
  SiRNA target sequence
taatgttagcccctggacact

SEQ ID NO: 293256 - DNA, 21 bp, Artificial sequence
  SiRNA target sequence
aatgttagcccctggacactt

SEQ ID NO: 293257 - DNA, 21 bp, Artificial sequence
  SiRNA target sequence
atgttagcccctggacactta

SEQ ID NO: 293258 - DNA, 21 bp, Artificial sequence
  SiRNA target sequence
tgttagcccctggacacttag

SEQ ID NO: 293259 - DNA, 21 bp, Artificial sequence
  SiRNA target sequence
gttagcccctggacacttagt

SEQ ID NO: 293260 - DNA, 21 bp, Artificial sequence
  SiRNA target sequence
ttagcccctggacacttagtg

SEQ ID NO: 293261 - DNA, 21 bp, Artificial sequence
  SiRNA target sequence
tagcccctggacacttagtgg

SEQ ID NO: 293262 - DNA, 21 bp, Artificial sequence
  SiRNA target sequence
agcccctggacacttagtggg

SEQ ID NO: 293263 - DNA, 21 bp, Artificial sequence
  SiRNA target sequence
gcccctggacacttagtgggt

SEQ ID NO: 293264 - DNA, 21 bp, Artificial sequence
  SiRNA target sequence
cccctggacacttagtgggtt

SEQ ID NO: 293265 - DNA, 21 bp, Artificial sequence
  SiRNA target sequence
ccctggacacttagtgggttt

SEQ ID NO: 293266 - DNA, 21 bp, Artificial sequence
  SiRNA target sequence
cctggacacttagtgggtttc

SEQ ID NO: 293267 - DNA, 21 bp, Artificial sequence
  SiRNA target sequence
ctggacacttagtgggtttct

SEQ ID NO: 293268 - DNA, 21 bp, Artificial sequence
  SiRNA target sequence
tggacacttagtgggtttctt

SEQ ID NO: 293269 - DNA, 21 bp, Artificial sequence
  SiRNA target sequence
ggacacttagtgggtttctta

SEQ ID NO: 293270 - DNA, 21 bp, Artificial sequence
  SiRNA target sequence
gacacttagtgggtttcttat

SEQ ID NO: 293271 - DNA, 21 bp, Artificial sequence
  SiRNA target sequence
acacttagtgggtttcttatc

SEQ ID NO: 293272 - DNA, 21 bp, Artificial sequence
  SiRNA target sequence
cacttagtgggtttcttatca

SEQ ID NO: 293273 - DNA, 21 bp, Artificial sequence
  SiRNA target sequence
acttagtgggtttcttatcag

SEQ ID NO: 293274 - DNA, 21 bp, Artificial sequence
  SiRNA target sequence
cttagtgggtttcttatcaga

SEQ ID NO: 293275 - DNA, 21 bp, Artificial sequence
  SiRNA target sequence
ttagtgggtttcttatcagat

SEQ ID NO: 293276 - DNA, 21 bp, Artificial sequence
  SiRNA target sequence
tagtgggtttcttatcagata

SEQ ID NO: 293277 - DNA, 21 bp, Artificial sequence
  SiRNA target sequence
agtgggtttcttatcagatag

SEQ ID NO: 293278 - DNA, 21 bp, Artificial sequence
  SiRNA target sequence
gtgggtttcttatcagatagt

SEQ ID NO: 293279 - DNA, 21 bp, Artificial sequence
  SiRNA target sequence
tgggtttcttatcagatagtg

SEQ ID NO: 293280 - DNA, 21 bp, Artificial sequence
  SiRNA target sequence
gggtttcttatcagatagtga

SEQ ID NO: 293281 - DNA, 21 bp, Artificial sequence
  SiRNA target sequence
ggtttcttatcagatagtgat

SEQ ID NO: 293282 - DNA, 21 bp, Artificial sequence
  SiRNA target sequence
gtttcttatcagatagtgata

SEQ ID NO: 293283 - DNA, 21 bp, Artificial sequence
  SiRNA target sequence
tttcttatcagatagtgatac

SEQ ID NO: 293284 - DNA, 21 bp, Artificial sequence
  SiRNA target sequence
ttcttatcagatagtgataca

SEQ ID NO: 293285 - DNA, 21 bp, Artificial sequence
  SiRNA target sequence
tcttatcagatagtgatacaa

SEQ ID NO: 293286 - DNA, 21 bp, Artificial sequence
  SiRNA target sequence
cttatcagatagtgatacaat

SEQ ID NO: 293287 - DNA, 21 bp, Artificial sequence
  SiRNA target sequence
ttatcagatagtgatacaatt

SEQ ID NO: 293288 - DNA, 21 bp, Artificial sequence
  SiRNA target sequence
tatcagatagtgatacaattg

SEQ ID NO: 293289 - DNA, 21 bp, Artificial sequence
  SiRNA target sequence
atcagatagtgatacaattga

SEQ ID NO: 293290 - DNA, 21 bp, Artificial sequence
  SiRNA target sequence
tcagatagtgatacaattgaa

SEQ ID NO: 293291 - DNA, 21 bp, Artificial sequence
  SiRNA target sequence
cagatagtgatacaattgaaa

SEQ ID NO: 293292 - DNA, 21 bp, Artificial sequence
  SiRNA target sequence
agatagtgatacaattgaaat

SEQ ID NO: 293293 - DNA, 21 bp, Artificial sequence
  SiRNA target sequence
gatagtgatacaattgaaata

SEQ ID NO: 293294 - DNA, 21 bp, Artificial sequence
  SiRNA target sequence
atagtgatacaattgaaataa

SEQ ID NO: 293295 - DNA, 21 bp, Artificial sequence
  SiRNA target sequence
tagtgatacaattgaaataag

SEQ ID NO: 293296 - DNA, 21 bp, Artificial sequence
  SiRNA target sequence
agtgatacaattgaaataaga

SEQ ID NO: 293297 - DNA, 21 bp, Artificial sequence
  SiRNA target sequence
gtgatacaattgaaataagaa

SEQ ID NO: 293298 - DNA, 21 bp, Artificial sequence
  SiRNA target sequence
tgatacaattgaaataagaaa

SEQ ID NO: 293299 - DNA, 21 bp, Artificial sequence
  SiRNA target sequence
gatacaattgaaataagaaat

SEQ ID NO: 293300 - DNA, 21 bp, Artificial sequence
  SiRNA target sequence
atacaattgaaataagaaatc

SEQ ID NO: 293301 - DNA, 21 bp, Artificial sequence
  SiRNA target sequence
tacaattgaaataagaaatct

SEQ ID NO: 293302 - DNA, 21 bp, Artificial sequence
  SiRNA target sequence
acaattgaaataagaaatcta

SEQ ID NO: 293303 - DNA, 21 bp, Artificial sequence
  SiRNA target sequence
caattgaaataagaaatctat

SEQ ID NO: 293304 - DNA, 21 bp, Artificial sequence
  SiRNA target sequence
aattgaaataagaaatctatt

SEQ ID NO: 293305 - DNA, 21 bp, Artificial sequence
  SiRNA target sequence
attgaaataagaaatctattt

SEQ ID NO: 293306 - DNA, 21 bp, Artificial sequence
  SiRNA target sequence
ttgaaataagaaatctatttg

SEQ ID NO: 293307 - DNA, 21 bp, Artificial sequence
  SiRNA target sequence
tgaaataagaaatctatttga

SEQ ID NO: 293308 - DNA, 21 bp, Artificial sequence
  SiRNA target sequence
gaaataagaaatctatttgat

SEQ ID NO: 293309 - DNA, 21 bp, Artificial sequence
  SiRNA target sequence
aaataagaaatctatttgatg

SEQ ID NO: 293310 - DNA, 21 bp, Artificial sequence
  SiRNA target sequence
aataagaaatctatttgatgt

SEQ ID NO: 293311 - DNA, 21 bp, Artificial sequence
  SiRNA target sequence
ataagaaatctatttgatgta

SEQ ID NO: 293312 - DNA, 21 bp, Artificial sequence
  SiRNA target sequence
taagaaatctatttgatgtag

SEQ ID NO: 293313 - DNA, 21 bp, Artificial sequence
  SiRNA target sequence
aagaaatctatttgatgtagt

SEQ ID NO: 293314 - DNA, 21 bp, Artificial sequence
  SiRNA target sequence
agaaatctatttgatgtagtt

SEQ ID NO: 293315 - DNA, 21 bp, Artificial sequence
  SiRNA target sequence
gaaatctatttgatgtagttt

SEQ ID NO: 293316 - DNA, 21 bp, Artificial sequence
  SiRNA target sequence
aaatctatttgatgtagtttt

SEQ ID NO: 293317 - DNA, 21 bp, Artificial sequence
  SiRNA target sequence
aatctatttgatgtagttttc

SEQ ID NO: 293318 - DNA, 21 bp, Artificial sequence
  SiRNA target sequence
atctatttgatgtagttttca

SEQ ID NO: 293319 - DNA, 21 bp, Artificial sequence
  SiRNA target sequence
tctatttgatgtagttttcag

SEQ ID NO: 293320 - DNA, 21 bp, Artificial sequence
  SiRNA target sequence
ctatttgatgtagttttcaga

SEQ ID NO: 293321 - DNA, 21 bp, Artificial sequence
  SiRNA target sequence
tatttgatgtagttttcagag

SEQ ID NO: 293322 - DNA, 21 bp, Artificial sequence
  SiRNA target sequence
atttgatgtagttttcagagt

SEQ ID NO: 293323 - DNA, 21 bp, Artificial sequence
  SiRNA target sequence
tttgatgtagttttcagagta

SEQ ID NO: 293324 - DNA, 21 bp, Artificial sequence
  SiRNA target sequence
ttgatgtagttttcagagtac

SEQ ID NO: 293325 - DNA, 21 bp, Artificial sequence
  SiRNA target sequence
tgatgtagttttcagagtacc

SEQ ID NO: 293326 - DNA, 21 bp, Artificial sequence
  SiRNA target sequence
gatgtagttttcagagtacca

SEQ ID NO: 293327 - DNA, 21 bp, Artificial sequence
  SiRNA target sequence
atgtagttttcagagtaccat

SEQ ID NO: 293328 - DNA, 21 bp, Artificial sequence
  SiRNA target sequence
tgtagttttcagagtaccatg

SEQ ID NO: 293329 - DNA, 21 bp, Artificial sequence
  SiRNA target sequence
gtagttttcagagtaccatgg

SEQ ID NO: 293330 - DNA, 21 bp, Artificial sequence
  SiRNA target sequence
tagttttcagagtaccatgga

SEQ ID NO: 293331 - DNA, 21 bp, Artificial sequence
  SiRNA target sequence
agttttcagagtaccatggaa

SEQ ID NO: 293332 - DNA, 21 bp, Artificial sequence
  SiRNA target sequence
gttttcagagtaccatggaaa

SEQ ID NO: 293333 - DNA, 21 bp, Artificial sequence
  SiRNA target sequence
ttttcagagtaccatggaaag

SEQ ID NO: 293334 - DNA, 21 bp, Artificial sequence
  SiRNA target sequence
tttcagagtaccatggaaaga

SEQ ID NO: 293335 - DNA, 21 bp, Artificial sequence
  SiRNA target sequence
ttcagagtaccatggaaagac

SEQ ID NO: 293336 - DNA, 21 bp, Artificial sequence
  SiRNA target sequence
tcagagtaccatggaaagacg

SEQ ID NO: 293337 - DNA, 21 bp, Artificial sequence
  SiRNA target sequence
cagagtaccatggaaagacgt

SEQ ID NO: 293338 - DNA, 21 bp, Artificial sequence
  SiRNA target sequence
agagtaccatggaaagacgtg

SEQ ID NO: 293339 - DNA, 21 bp, Artificial sequence
  SiRNA target sequence
gagtaccatggaaagacgtga

SEQ ID NO: 293340 - DNA, 21 bp, Artificial sequence
  SiRNA target sequence
agtaccatggaaagacgtgaa

SEQ ID NO: 293341 - DNA, 21 bp, Artificial sequence
  SiRNA target sequence
gtaccatggaaagacgtgaag

SEQ ID NO: 293342 - DNA, 21 bp, Artificial sequence
  SiRNA target sequence
taccatggaaagacgtgaaga

SEQ ID NO: 293343 - DNA, 21 bp, Artificial sequence
  SiRNA target sequence
accatggaaagacgtgaagaa

SEQ ID NO: 293344 - DNA, 21 bp, Artificial sequence
  SiRNA target sequence
ccatggaaagacgtgaagaaa

SEQ ID NO: 293345 - DNA, 21 bp, Artificial sequence
  SiRNA target sequence
catggaaagacgtgaagaaag

SEQ ID NO: 293346 - DNA, 21 bp, Artificial sequence
  SiRNA target sequence
atggaaagacgtgaagaaagt

SEQ ID NO: 293347 - DNA, 21 bp, Artificial sequence
  SiRNA target sequence
tggaaagacgtgaagaaagtt

SEQ ID NO: 293348 - DNA, 21 bp, Artificial sequence
  SiRNA target sequence
ggaaagacgtgaagaaagttg

SEQ ID NO: 293349 - DNA, 21 bp, Artificial sequence
  SiRNA target sequence
gaaagacgtgaagaaagttga

SEQ ID NO: 293350 - DNA, 21 bp, Artificial sequence
  SiRNA target sequence
aaagacgtgaagaaagttgac

SEQ ID NO: 293351 - DNA, 21 bp, Artificial sequence
  SiRNA target sequence
aagacgtgaagaaagttgacg

SEQ ID NO: 293352 - DNA, 21 bp, Artificial sequence
  SiRNA target sequence
agacgtgaagaaagttgacgt

SEQ ID NO: 293353 - DNA, 21 bp, Artificial sequence
  SiRNA target sequence
gacgtgaagaaagttgacgta

SEQ ID NO: 293354 - DNA, 21 bp, Artificial sequence
  SiRNA target sequence
acgtgaagaaagttgacgtag

SEQ ID NO: 293355 - DNA, 21 bp, Artificial sequence
  SiRNA target sequence
cgtgaagaaagttgacgtagt

SEQ ID NO: 293356 - DNA, 21 bp, Artificial sequence
  SiRNA target sequence
gtgaagaaagttgacgtagta

SEQ ID NO: 293357 - DNA, 21 bp, Artificial sequence
  SiRNA target sequence
tgaagaaagttgacgtagtaa

SEQ ID NO: 293358 - DNA, 21 bp, Artificial sequence
  SiRNA target sequence
gaagaaagttgacgtagtaaa

SEQ ID NO: 293359 - DNA, 21 bp, Artificial sequence
  SiRNA target sequence
aagaaagttgacgtagtaaac

SEQ ID NO: 293360 - DNA, 21 bp, Artificial sequence
  SiRNA target sequence
agaaagttgacgtagtaaacg

SEQ ID NO: 293361 - DNA, 21 bp, Artificial sequence
  SiRNA target sequence
gaaagttgacgtagtaaacgc

SEQ ID NO: 293362 - DNA, 21 bp, Artificial sequence
  SiRNA target sequence
aaagttgacgtagtaaacgcc

SEQ ID NO: 293363 - DNA, 21 bp, Artificial sequence
  SiRNA target sequence
aagttgacgtagtaaacgcct

SEQ ID NO: 293364 - DNA, 21 bp, Artificial sequence
  SiRNA target sequence
agttgacgtagtaaacgcctt

SEQ ID NO: 293365 - DNA, 21 bp, Artificial sequence
  SiRNA target sequence
gttgacgtagtaaacgccttc

SEQ ID NO: 293366 - DNA, 21 bp, Artificial sequence
  SiRNA target sequence
ttgacgtagtaaacgccttcg

SEQ ID NO: 293367 - DNA, 21 bp, Artificial sequence
  SiRNA target sequence
tgacgtagtaaacgccttcgg

SEQ ID NO: 293368 - DNA, 21 bp, Artificial sequence
  SiRNA target sequence
gacgtagtaaacgccttcggt

SEQ ID NO: 293369 - DNA, 21 bp, Artificial sequence
  SiRNA target sequence
acgtagtaaacgccttcggtg

SEQ ID NO: 293370 - DNA, 21 bp, Artificial sequence
  SiRNA target sequence
cgtagtaaacgccttcggtga

SEQ ID NO: 293371 - DNA, 21 bp, Artificial sequence
  SiRNA target sequence
gtagtaaacgccttcggtgag

SEQ ID NO: 293372 - DNA, 21 bp, Artificial sequence
  SiRNA target sequence
tagtaaacgccttcggtgaga

SEQ ID NO: 293373 - DNA, 21 bp, Artificial sequence
  SiRNA target sequence
agtaaacgccttcggtgagag

SEQ ID NO: 293374 - DNA, 21 bp, Artificial sequence
  SiRNA target sequence
gtaaacgccttcggtgagagc

SEQ ID NO: 293375 - DNA, 21 bp, Artificial sequence
  SiRNA target sequence
taaacgccttcggtgagagca

SEQ ID NO: 293376 - DNA, 21 bp, Artificial sequence
  SiRNA target sequence
aaacgccttcggtgagagcaa

SEQ ID NO: 293377 - DNA, 21 bp, Artificial sequence
  SiRNA target sequence
aacgccttcggtgagagcaaa

SEQ ID NO: 293378 - DNA, 21 bp, Artificial sequence
  SiRNA target sequence
acgccttcggtgagagcaaag

SEQ ID NO: 293379 - DNA, 21 bp, Artificial sequence
  SiRNA target sequence
cgccttcggtgagagcaaaga

SEQ ID NO: 293380 - DNA, 21 bp, Artificial sequence
  SiRNA target sequence
gccttcggtgagagcaaagaa

SEQ ID NO: 293381 - DNA, 21 bp, Artificial sequence
  SiRNA target sequence
ccttcggtgagagcaaagaag

SEQ ID NO: 293382 - DNA, 21 bp, Artificial sequence
  SiRNA target sequence
cttcggtgagagcaaagaagc

SEQ ID NO: 293383 - DNA, 21 bp, Artificial sequence
  SiRNA target sequence
ttcggtgagagcaaagaagcg

SEQ ID NO: 293384 - DNA, 21 bp, Artificial sequence
  SiRNA target sequence
tcggtgagagcaaagaagcgg

SEQ ID NO: 293385 - DNA, 21 bp, Artificial sequence
  SiRNA target sequence
cggtgagagcaaagaagcggt

SEQ ID NO: 293386 - DNA, 21 bp, Artificial sequence
  SiRNA target sequence
ggtgagagcaaagaagcggtt

SEQ ID NO: 293387 - DNA, 21 bp, Artificial sequence
  SiRNA target sequence
gtgagagcaaagaagcggttt

SEQ ID NO: 293388 - DNA, 21 bp, Artificial sequence
  SiRNA target sequence
tgagagcaaagaagcggtttt

SEQ ID NO: 293389 - DNA, 21 bp, Artificial sequence
  SiRNA target sequence
gagagcaaagaagcggttttg

SEQ ID NO: 293390 - DNA, 21 bp, Artificial sequence
  SiRNA target sequence
agagcaaagaagcggttttgt

SEQ ID NO: 293391 - DNA, 21 bp, Artificial sequence
  SiRNA target sequence
gagcaaagaagcggttttgtt

SEQ ID NO: 293392 - DNA, 21 bp, Artificial sequence
  SiRNA target sequence
agcaaagaagcggttttgtta

SEQ ID NO: 293393 - DNA, 21 bp, Artificial sequence
  SiRNA target sequence
gcaaagaagcggttttgttat

SEQ ID NO: 293394 - DNA, 21 bp, Artificial sequence
  SiRNA target sequence
caaagaagcggttttgttatg

SEQ ID NO: 293395 - DNA, 21 bp, Artificial sequence
  SiRNA target sequence
aaagaagcggttttgttatgt

SEQ ID NO: 293396 - DNA, 21 bp, Artificial sequence
  SiRNA target sequence
aagaagcggttttgttatgtt

SEQ ID NO: 293397 - DNA, 21 bp, Artificial sequence
  SiRNA target sequence
agaagcggttttgttatgttt

SEQ ID NO: 293398 - DNA, 21 bp, Artificial sequence
  SiRNA target sequence
gaagcggttttgttatgtttt

SEQ ID NO: 293399 - DNA, 21 bp, Artificial sequence
  SiRNA target sequence
aagcggttttgttatgttttc

SEQ ID NO: 293400 - DNA, 21 bp, Artificial sequence
  SiRNA target sequence
agcggttttgttatgttttcc

SEQ ID NO: 293401 - DNA, 21 bp, Artificial sequence
  SiRNA target sequence
gcggttttgttatgttttccg

SEQ ID NO: 293402 - DNA, 21 bp, Artificial sequence
  SiRNA target sequence
cggttttgttatgttttccga

SEQ ID NO: 293403 - DNA, 21 bp, Artificial sequence
  SiRNA target sequence
ggttttgttatgttttccgaa

SEQ ID NO: 293404 - DNA, 21 bp, Artificial sequence
  SiRNA target sequence
gttttgttatgttttccgaaa

SEQ ID NO: 293405 - DNA, 21 bp, Artificial sequence
  SiRNA target sequence
ttttgttatgttttccgaaat

SEQ ID NO: 293406 - DNA, 21 bp, Artificial sequence
  SiRNA target sequence
tttgttatgttttccgaaatt

SEQ ID NO: 293407 - DNA, 21 bp, Artificial sequence
  SiRNA target sequence
ttgttatgttttccgaaattt

SEQ ID NO: 293408 - DNA, 21 bp, Artificial sequence
  SiRNA target sequence
tgttatgttttccgaaatttg

SEQ ID NO: 293409 - DNA, 21 bp, Artificial sequence
  SiRNA target sequence
gttatgttttccgaaatttgt

SEQ ID NO: 293410 - DNA, 21 bp, Artificial sequence
  SiRNA target sequence
ttatgttttccgaaatttgta

SEQ ID NO: 293411 - DNA, 21 bp, Artificial sequence
  SiRNA target sequence
tatgttttccgaaatttgtat

SEQ ID NO: 293412 - DNA, 21 bp, Artificial sequence
  SiRNA target sequence
atgttttccgaaatttgtatg

SEQ ID NO: 293413 - DNA, 21 bp, Artificial sequence
  SiRNA target sequence
tgttttccgaaatttgtatgt

SEQ ID NO: 293414 - DNA, 21 bp, Artificial sequence
  SiRNA target sequence
gttttccgaaatttgtatgtc

SEQ ID NO: 293415 - DNA, 21 bp, Artificial sequence
  SiRNA target sequence
ttttccgaaatttgtatgtca

SEQ ID NO: 293416 - DNA, 21 bp, Artificial sequence
  SiRNA target sequence
tttccgaaatttgtatgtcaa

SEQ ID NO: 293417 - DNA, 21 bp, Artificial sequence
  SiRNA target sequence
ttccgaaatttgtatgtcaac

SEQ ID NO: 293418 - DNA, 21 bp, Artificial sequence
  SiRNA target sequence
tccgaaatttgtatgtcaaca

SEQ ID NO: 293419 - DNA, 21 bp, Artificial sequence
  SiRNA target sequence
ccgaaatttgtatgtcaacac

SEQ ID NO: 293420 - DNA, 21 bp, Artificial sequence
  SiRNA target sequence
cgaaatttgtatgtcaacaca

SEQ ID NO: 293421 - DNA, 21 bp, Artificial sequence
  SiRNA target sequence
gaaatttgtatgtcaacacac

SEQ ID NO: 293422 - DNA, 21 bp, Artificial sequence
  SiRNA target sequence
aaatttgtatgtcaacacacg

SEQ ID NO: 293423 - DNA, 21 bp, Artificial sequence
  SiRNA target sequence
aatttgtatgtcaacacacgg

SEQ ID NO: 293424 - DNA, 21 bp, Artificial sequence
  SiRNA target sequence
atttgtatgtcaacacacgga

SEQ ID NO: 293425 - DNA, 21 bp, Artificial sequence
  SiRNA target sequence
tttgtatgtcaacacacggat

SEQ ID NO: 293426 - DNA, 21 bp, Artificial sequence
  SiRNA target sequence
ttgtatgtcaacacacggatt

SEQ ID NO: 293427 - DNA, 21 bp, Artificial sequence
  SiRNA target sequence
tgtatgtcaacacacggattt

SEQ ID NO: 293428 - DNA, 21 bp, Artificial sequence
  SiRNA target sequence
gtatgtcaacacacggatttg

SEQ ID NO: 293429 - DNA, 21 bp, Artificial sequence
  SiRNA target sequence
tatgtcaacacacggatttgg

SEQ ID NO: 293430 - DNA, 21 bp, Artificial sequence
  SiRNA target sequence
atgtcaacacacggatttggt

SEQ ID NO: 293431 - DNA, 21 bp, Artificial sequence
  SiRNA target sequence
tgtcaacacacggatttggtg

SEQ ID NO: 293432 - DNA, 21 bp, Artificial sequence
  SiRNA target sequence
gtcaacacacggatttggtga

SEQ ID NO: 293433 - DNA, 21 bp, Artificial sequence
  SiRNA target sequence
tcaacacacggatttggtgaa

SEQ ID NO: 293434 - DNA, 21 bp, Artificial sequence
  SiRNA target sequence
caacacacggatttggtgaag

SEQ ID NO: 293435 - DNA, 21 bp, Artificial sequence
  SiRNA target sequence
aacacacggatttggtgaagc

SEQ ID NO: 293436 - DNA, 21 bp, Artificial sequence
  SiRNA target sequence
acacacggatttggtgaagca

SEQ ID NO: 293437 - DNA, 21 bp, Artificial sequence
  SiRNA target sequence
cacacggatttggtgaagcat

SEQ ID NO: 293438 - DNA, 21 bp, Artificial sequence
  SiRNA target sequence
acacggatttggtgaagcatt

SEQ ID NO: 293439 - DNA, 21 bp, Artificial sequence
  SiRNA target sequence
cacggatttggtgaagcattt

SEQ ID NO: 293440 - DNA, 21 bp, Artificial sequence
  SiRNA target sequence
acggatttggtgaagcatttt

SEQ ID NO: 293441 - DNA, 21 bp, Artificial sequence
  SiRNA target sequence
cggatttggtgaagcattttc

SEQ ID NO: 293442 - DNA, 21 bp, Artificial sequence
  SiRNA target sequence
ggatttggtgaagcattttca

SEQ ID NO: 293443 - DNA, 21 bp, Artificial sequence
  SiRNA target sequence
gatttggtgaagcattttcaa

SEQ ID NO: 293444 - DNA, 21 bp, Artificial sequence
  SiRNA target sequence
atttggtgaagcattttcaag

SEQ ID NO: 293445 - DNA, 21 bp, Artificial sequence
  SiRNA target sequence
tttggtgaagcattttcaaga

SEQ ID NO: 293446 - DNA, 21 bp, Artificial sequence
  SiRNA target sequence
ttggtgaagcattttcaagat

SEQ ID NO: 293447 - DNA, 21 bp, Artificial sequence
  SiRNA target sequence
tggtgaagcattttcaagatt

SEQ ID NO: 293448 - DNA, 21 bp, Artificial sequence
  SiRNA target sequence
ggtgaagcattttcaagattc

SEQ ID NO: 293449 - DNA, 21 bp, Artificial sequence
  SiRNA target sequence
gtgaagcattttcaagattca

SEQ ID NO: 293450 - DNA, 21 bp, Artificial sequence
  SiRNA target sequence
tgaagcattttcaagattcag

SEQ ID NO: 293451 - DNA, 21 bp, Artificial sequence
  SiRNA target sequence
gaagcattttcaagattcaga

SEQ ID NO: 293452 - DNA, 21 bp, Artificial sequence
  SiRNA target sequence
aagcattttcaagattcagaa

SEQ ID NO: 293453 - DNA, 21 bp, Artificial sequence
  SiRNA target sequence
agcattttcaagattcagaat

SEQ ID NO: 293454 - DNA, 21 bp, Artificial sequence
  SiRNA target sequence
gcattttcaagattcagaatc

SEQ ID NO: 293455 - DNA, 21 bp, Artificial sequence
  SiRNA target sequence
cattttcaagattcagaatct

SEQ ID NO: 293456 - DNA, 21 bp, Artificial sequence
  SiRNA target sequence
attttcaagattcagaatcta

SEQ ID NO: 293457 - DNA, 21 bp, Artificial sequence
  SiRNA target sequence
ttttcaagattcagaatctat

SEQ ID NO: 293458 - DNA, 21 bp, Artificial sequence
  SiRNA target sequence
tttcaagattcagaatctatg

SEQ ID NO: 293459 - DNA, 21 bp, Artificial sequence
  SiRNA target sequence
ttcaagattcagaatctatgt

SEQ ID NO: 293460 - DNA, 21 bp, Artificial sequence
  SiRNA target sequence
tcaagattcagaatctatgtc

SEQ ID NO: 293461 - DNA, 21 bp, Artificial sequence
  SiRNA target sequence
caagattcagaatctatgtca

SEQ ID NO: 293462 - DNA, 21 bp, Artificial sequence
  SiRNA target sequence
aagattcagaatctatgtcaa

SEQ ID NO: 293463 - DNA, 21 bp, Artificial sequence
  SiRNA target sequence
agattcagaatctatgtcaaa

SEQ ID NO: 293464 - DNA, 21 bp, Artificial sequence
  SiRNA target sequence
gattcagaatctatgtcaaaa

SEQ ID NO: 293465 - DNA, 21 bp, Artificial sequence
  SiRNA target sequence
attcagaatctatgtcaaaat

SEQ ID NO: 293466 - DNA, 21 bp, Artificial sequence
  SiRNA target sequence
ttcagaatctatgtcaaaatt

SEQ ID NO: 293467 - DNA, 21 bp, Artificial sequence
  SiRNA target sequence
tcagaatctatgtcaaaattc

SEQ ID NO: 293468 - DNA, 21 bp, Artificial sequence
  SiRNA target sequence
cagaatctatgtcaaaattca

SEQ ID NO: 293469 - DNA, 21 bp, Artificial sequence
  SiRNA target sequence
agaatctatgtcaaaattcaa

SEQ ID NO: 293470 - DNA, 21 bp, Artificial sequence
  SiRNA target sequence
gaatctatgtcaaaattcaaa

SEQ ID NO: 293471 - DNA, 21 bp, Artificial sequence
  SiRNA target sequence
aatctatgtcaaaattcaaaa

SEQ ID NO: 293472 - DNA, 21 bp, Artificial sequence
  SiRNA target sequence
atctatgtcaaaattcaaaag

SEQ ID NO: 293473 - DNA, 21 bp, Artificial sequence
  SiRNA target sequence
tctatgtcaaaattcaaaaga

SEQ ID NO: 293474 - DNA, 21 bp, Artificial sequence
  SiRNA target sequence
ctatgtcaaaattcaaaagat

SEQ ID NO: 293475 - DNA, 21 bp, Artificial sequence
  SiRNA target sequence
tatgtcaaaattcaaaagatg

SEQ ID NO: 293476 - DNA, 21 bp, Artificial sequence
  SiRNA target sequence
atgtcaaaattcaaaagatgt

SEQ ID NO: 293477 - DNA, 21 bp, Artificial sequence
  SiRNA target sequence
tgtcaaaattcaaaagatgtg

SEQ ID NO: 293478 - DNA, 21 bp, Artificial sequence
  SiRNA target sequence
gtcaaaattcaaaagatgtga

SEQ ID NO: 293479 - DNA, 21 bp, Artificial sequence
  SiRNA target sequence
tcaaaattcaaaagatgtgag

SEQ ID NO: 293480 - DNA, 21 bp, Artificial sequence
  SiRNA target sequence
caaaattcaaaagatgtgagg

SEQ ID NO: 293481 - DNA, 21 bp, Artificial sequence
  SiRNA target sequence
aaaattcaaaagatgtgaggt

SEQ ID NO: 293482 - DNA, 21 bp, Artificial sequence
  SiRNA target sequence
aaattcaaaagatgtgaggtc

SEQ ID NO: 293483 - DNA, 21 bp, Artificial sequence
  SiRNA target sequence
aattcaaaagatgtgaggtca

SEQ ID NO: 293484 - DNA, 21 bp, Artificial sequence
  SiRNA target sequence
attcaaaagatgtgaggtcac

SEQ ID NO: 293485 - DNA, 21 bp, Artificial sequence
  SiRNA target sequence
ttcaaaagatgtgaggtcact

SEQ ID NO: 293486 - DNA, 21 bp, Artificial sequence
  SiRNA target sequence
tcaaaagatgtgaggtcactc

SEQ ID NO: 293487 - DNA, 21 bp, Artificial sequence
  SiRNA target sequence
caaaagatgtgaggtcactct

SEQ ID NO: 293488 - DNA, 21 bp, Artificial sequence
  SiRNA target sequence
aaaagatgtgaggtcactctt

SEQ ID NO: 293489 - DNA, 21 bp, Artificial sequence
  SiRNA target sequence
aaagatgtgaggtcactcttc

SEQ ID NO: 293490 - DNA, 21 bp, Artificial sequence
  SiRNA target sequence
aagatgtgaggtcactcttcc

SEQ ID NO: 293491 - DNA, 21 bp, Artificial sequence
  SiRNA target sequence
agatgtgaggtcactcttcca

SEQ ID NO: 293492 - DNA, 21 bp, Artificial sequence
  SiRNA target sequence
gatgtgaggtcactcttccag

SEQ ID NO: 293493 - DNA, 21 bp, Artificial sequence
  SiRNA target sequence
atgtgaggtcactcttccagt

SEQ ID NO: 293494 - DNA, 21 bp, Artificial sequence
  SiRNA target sequence
tgtgaggtcactcttccagtg

SEQ ID NO: 293495 - DNA, 21 bp, Artificial sequence
  SiRNA target sequence
gtgaggtcactcttccagtgt

SEQ ID NO: 293496 - DNA, 21 bp, Artificial sequence
  SiRNA target sequence
tgaggtcactcttccagtgtt

SEQ ID NO: 293497 - DNA, 21 bp, Artificial sequence
  SiRNA target sequence
gaggtcactcttccagtgttg

SEQ ID NO: 293498 - DNA, 21 bp, Artificial sequence
  SiRNA target sequence
aggtcactcttccagtgttga

SEQ ID NO: 293499 - DNA, 21 bp, Artificial sequence
  SiRNA target sequence
ggtcactcttccagtgttgag

SEQ ID NO: 293500 - DNA, 21 bp, Artificial sequence
  SiRNA target sequence
gtcactcttccagtgttgaga

SEQ ID NO: 293501 - DNA, 21 bp, Artificial sequence
  SiRNA target sequence
tcactcttccagtgttgagat

SEQ ID NO: 293502 - DNA, 21 bp, Artificial sequence
  SiRNA target sequence
cactcttccagtgttgagata

SEQ ID NO: 293503 - DNA, 21 bp, Artificial sequence
  SiRNA target sequence
actcttccagtgttgagatat

SEQ ID NO: 293504 - DNA, 21 bp, Artificial sequence
  SiRNA target sequence
ctcttccagtgttgagatatt

SEQ ID NO: 293505 - DNA, 21 bp, Artificial sequence
  SiRNA target sequence
tcttccagtgttgagatattc

SEQ ID NO: 293506 - DNA, 21 bp, Artificial sequence
  SiRNA target sequence
cttccagtgttgagatattca

SEQ ID NO: 293507 - DNA, 21 bp, Artificial sequence
  SiRNA target sequence
ttccagtgttgagatattcag

SEQ ID NO: 293508 - DNA, 21 bp, Artificial sequence
  SiRNA target sequence
tccagtgttgagatattcaga

SEQ ID NO: 293509 - DNA, 21 bp, Artificial sequence
  SiRNA target sequence
ccagtgttgagatattcagat

SEQ ID NO: 293510 - DNA, 21 bp, Artificial sequence
  SiRNA target sequence
cagtgttgagatattcagata

SEQ ID NO: 293511 - DNA, 21 bp, Artificial sequence
  SiRNA target sequence
agtgttgagatattcagataa

SEQ ID NO: 293512 - DNA, 21 bp, Artificial sequence
  SiRNA target sequence
gtgttgagatattcagataaa

SEQ ID NO: 293513 - DNA, 21 bp, Artificial sequence
  SiRNA target sequence
tgttgagatattcagataaaa

SEQ ID NO: 293514 - DNA, 21 bp, Artificial sequence
  SiRNA target sequence
gttgagatattcagataaaat

SEQ ID NO: 293515 - DNA, 21 bp, Artificial sequence
  SiRNA target sequence
ttgagatattcagataaaatg

SEQ ID NO: 293516 - DNA, 21 bp, Artificial sequence
  SiRNA target sequence
tgagatattcagataaaatga

SEQ ID NO: 293517 - DNA, 21 bp, Artificial sequence
  SiRNA target sequence
gagatattcagataaaatgaa

SEQ ID NO: 293518 - DNA, 21 bp, Artificial sequence
  SiRNA target sequence
agatattcagataaaatgaat

SEQ ID NO: 293519 - DNA, 21 bp, Artificial sequence
  SiRNA target sequence
gatattcagataaaatgaata

SEQ ID NO: 293520 - DNA, 21 bp, Artificial sequence
  SiRNA target sequence
atattcagataaaatgaatag

SEQ ID NO: 293521 - DNA, 21 bp, Artificial sequence
  SiRNA target sequence
tattcagataaaatgaataga

SEQ ID NO: 293522 - DNA, 21 bp, Artificial sequence
  SiRNA target sequence
attcagataaaatgaatagat

SEQ ID NO: 293523 - DNA, 21 bp, Artificial sequence
  SiRNA target sequence
ttcagataaaatgaatagatt

SEQ ID NO: 293524 - DNA, 21 bp, Artificial sequence
  SiRNA target sequence
tcagataaaatgaatagattt

SEQ ID NO: 293525 - DNA, 21 bp, Artificial sequence
  SiRNA target sequence
cagataaaatgaatagatttt

SEQ ID NO: 293526 - DNA, 21 bp, Artificial sequence
  SiRNA target sequence
agataaaatgaatagattttt

SEQ ID NO: 293527 - DNA, 21 bp, Artificial sequence
  SiRNA target sequence
gataaaatgaatagattttta

SEQ ID NO: 293528 - DNA, 21 bp, Artificial sequence
  SiRNA target sequence
ataaaatgaatagatttttag

SEQ ID NO: 293529 - DNA, 21 bp, Artificial sequence
  SiRNA target sequence
taaaatgaatagatttttagc

SEQ ID NO: 293530 - DNA, 21 bp, Artificial sequence
  SiRNA target sequence
aaaatgaatagatttttagca

SEQ ID NO: 293531 - DNA, 21 bp, Artificial sequence
  SiRNA target sequence
aaatgaatagatttttagcaa

SEQ ID NO: 293532 - DNA, 21 bp, Artificial sequence
  SiRNA target sequence
aatgaatagatttttagcaac

SEQ ID NO: 293533 - DNA, 21 bp, Artificial sequence
  SiRNA target sequence
atgaatagatttttagcaaca

SEQ ID NO: 293534 - DNA, 21 bp, Artificial sequence
  SiRNA target sequence
tgaatagatttttagcaacat

SEQ ID NO: 293535 - DNA, 21 bp, Artificial sequence
  SiRNA target sequence
gaatagatttttagcaacatt

SEQ ID NO: 293536 - DNA, 21 bp, Artificial sequence
  SiRNA target sequence
aatagatttttagcaacatta

SEQ ID NO: 293537 - DNA, 21 bp, Artificial sequence
  SiRNA target sequence
atagatttttagcaacattaa

SEQ ID NO: 293538 - DNA, 21 bp, Artificial sequence
  SiRNA target sequence
tagatttttagcaacattaat

SEQ ID NO: 293539 - DNA, 21 bp, Artificial sequence
  SiRNA target sequence
agatttttagcaacattaata

SEQ ID NO: 293540 - DNA, 21 bp, Artificial sequence
  SiRNA target sequence
gatttttagcaacattaatag

SEQ ID NO: 293541 - DNA, 21 bp, Artificial sequence
  SiRNA target sequence
atttttagcaacattaataga

SEQ ID NO: 293542 - DNA, 21 bp, Artificial sequence
  SiRNA target sequence
tttttagcaacattaatagaa

SEQ ID NO: 293543 - DNA, 21 bp, Artificial sequence
  SiRNA target sequence
ttttagcaacattaatagaat

SEQ ID NO: 293544 - DNA, 21 bp, Artificial sequence
  SiRNA target sequence
tttagcaacattaatagaatg

SEQ ID NO: 293545 - DNA, 21 bp, Artificial sequence
  SiRNA target sequence
ttagcaacattaatagaatgt

SEQ ID NO: 293546 - DNA, 21 bp, Artificial sequence
  SiRNA target sequence
tagcaacattaatagaatgtg

SEQ ID NO: 293547 - DNA, 21 bp, Artificial sequence
  SiRNA target sequence
agcaacattaatagaatgtga

SEQ ID NO: 293548 - DNA, 21 bp, Artificial sequence
  SiRNA target sequence
gcaacattaatagaatgtgac

SEQ ID NO: 293549 - DNA, 21 bp, Artificial sequence
  SiRNA target sequence
caacattaatagaatgtgaca

SEQ ID NO: 293550 - DNA, 21 bp, Artificial sequence
  SiRNA target sequence
aacattaatagaatgtgacaa

SEQ ID NO: 293551 - DNA, 21 bp, Artificial sequence
  SiRNA target sequence
acattaatagaatgtgacaaa

SEQ ID NO: 293552 - DNA, 21 bp, Artificial sequence
  SiRNA target sequence
cattaatagaatgtgacaaag

SEQ ID NO: 293553 - DNA, 21 bp, Artificial sequence
  SiRNA target sequence
attaatagaatgtgacaaagt

SEQ ID NO: 293554 - DNA, 21 bp, Artificial sequence
  SiRNA target sequence
ttaatagaatgtgacaaagtt

SEQ ID NO: 293555 - DNA, 21 bp, Artificial sequence
  SiRNA target sequence
taatagaatgtgacaaagttg

SEQ ID NO: 293556 - DNA, 21 bp, Artificial sequence
  SiRNA target sequence
aatagaatgtgacaaagttga

SEQ ID NO: 293557 - DNA, 21 bp, Artificial sequence
  SiRNA target sequence
atagaatgtgacaaagttgaa

SEQ ID NO: 293558 - DNA, 21 bp, Artificial sequence
  SiRNA target sequence
tagaatgtgacaaagttgaag

SEQ ID NO: 293559 - DNA, 21 bp, Artificial sequence
  SiRNA target sequence
agaatgtgacaaagttgaagc

SEQ ID NO: 293560 - DNA, 21 bp, Artificial sequence
  SiRNA target sequence
gaatgtgacaaagttgaagct

SEQ ID NO: 293561 - DNA, 21 bp, Artificial sequence
  SiRNA target sequence
aatgtgacaaagttgaagctt

SEQ ID NO: 293562 - DNA, 21 bp, Artificial sequence
  SiRNA target sequence
atgtgacaaagttgaagctta

SEQ ID NO: 293563 - DNA, 21 bp, Artificial sequence
  SiRNA target sequence
tgtgacaaagttgaagcttat

SEQ ID NO: 293564 - DNA, 21 bp, Artificial sequence
  SiRNA target sequence
gtgacaaagttgaagcttatg

SEQ ID NO: 293565 - DNA, 21 bp, Artificial sequence
  SiRNA target sequence
tgacaaagttgaagcttatga

SEQ ID NO: 293566 - DNA, 21 bp, Artificial sequence
  SiRNA target sequence
gacaaagttgaagcttatgat

SEQ ID NO: 293567 - DNA, 21 bp, Artificial sequence
  SiRNA target sequence
acaaagttgaagcttatgata

SEQ ID NO: 293568 - DNA, 21 bp, Artificial sequence
  SiRNA target sequence
caaagttgaagcttatgatag

SEQ ID NO: 293569 - DNA, 21 bp, Artificial sequence
  SiRNA target sequence
aaagttgaagcttatgataga

SEQ ID NO: 293570 - DNA, 21 bp, Artificial sequence
  SiRNA target sequence
aagttgaagcttatgatagac

SEQ ID NO: 293571 - DNA, 21 bp, Artificial sequence
  SiRNA target sequence
agttgaagcttatgatagacc

SEQ ID NO: 293572 - DNA, 21 bp, Artificial sequence
  SiRNA target sequence
gttgaagcttatgatagacca

SEQ ID NO: 293573 - DNA, 21 bp, Artificial sequence
  SiRNA target sequence
ttgaagcttatgatagaccat

SEQ ID NO: 293574 - DNA, 21 bp, Artificial sequence
  SiRNA target sequence
tgaagcttatgatagaccata

SEQ ID NO: 293575 - DNA, 21 bp, Artificial sequence
  SiRNA target sequence
gaagcttatgatagaccatac

SEQ ID NO: 293576 - DNA, 21 bp, Artificial sequence
  SiRNA target sequence
aagcttatgatagaccataca

SEQ ID NO: 293577 - DNA, 21 bp, Artificial sequence
  SiRNA target sequence
agcttatgatagaccatacac

SEQ ID NO: 293578 - DNA, 21 bp, Artificial sequence
  SiRNA target sequence
gcttatgatagaccatacact

SEQ ID NO: 293579 - DNA, 21 bp, Artificial sequence
  SiRNA target sequence
cttatgatagaccatacactt

SEQ ID NO: 293580 - DNA, 21 bp, Artificial sequence
  SiRNA target sequence
ttatgatagaccatacacttt

SEQ ID NO: 293581 - DNA, 21 bp, Artificial sequence
  SiRNA target sequence
tatgatagaccatacacttta

SEQ ID NO: 293582 - DNA, 21 bp, Artificial sequence
  SiRNA target sequence
atgatagaccatacactttaa

SEQ ID NO: 293583 - DNA, 21 bp, Artificial sequence
  SiRNA target sequence
tgatagaccatacactttaaa

SEQ ID NO: 293584 - DNA, 21 bp, Artificial sequence
  SiRNA target sequence
gatagaccatacactttaaat

SEQ ID NO: 293585 - DNA, 21 bp, Artificial sequence
  SiRNA target sequence
atagaccatacactttaaatg

SEQ ID NO: 293586 - DNA, 21 bp, Artificial sequence
  SiRNA target sequence
tagaccatacactttaaatga

SEQ ID NO: 293587 - DNA, 21 bp, Artificial sequence
  SiRNA target sequence
agaccatacactttaaatgac

SEQ ID NO: 293588 - DNA, 21 bp, Artificial sequence
  SiRNA target sequence
gaccatacactttaaatgact

SEQ ID NO: 293589 - DNA, 21 bp, Artificial sequence
  SiRNA target sequence
accatacactttaaatgactc

SEQ ID NO: 293590 - DNA, 21 bp, Artificial sequence
  SiRNA target sequence
ccatacactttaaatgactca

SEQ ID NO: 293591 - DNA, 21 bp, Artificial sequence
  SiRNA target sequence
catacactttaaatgactcat

SEQ ID NO: 293592 - DNA, 21 bp, Artificial sequence
  SiRNA target sequence
atacactttaaatgactcatc

SEQ ID NO: 293593 - DNA, 21 bp, Artificial sequence
  SiRNA target sequence
tacactttaaatgactcatca

SEQ ID NO: 293594 - DNA, 21 bp, Artificial sequence
  SiRNA target sequence
acactttaaatgactcatcaa

SEQ ID NO: 293595 - DNA, 21 bp, Artificial sequence
  SiRNA target sequence
cactttaaatgactcatcaaa

SEQ ID NO: 293596 - DNA, 21 bp, Artificial sequence
  SiRNA target sequence
actttaaatgactcatcaaaa

SEQ ID NO: 293597 - DNA, 21 bp, Artificial sequence
  SiRNA target sequence
ctttaaatgactcatcaaaag

SEQ ID NO: 293598 - DNA, 21 bp, Artificial sequence
  SiRNA target sequence
tttaaatgactcatcaaaagg

SEQ ID NO: 293599 - DNA, 21 bp, Artificial sequence
  SiRNA target sequence
ttaaatgactcatcaaaagga

SEQ ID NO: 293600 - DNA, 21 bp, Artificial sequence
  SiRNA target sequence
taaatgactcatcaaaaggac

SEQ ID NO: 293601 - DNA, 21 bp, Artificial sequence
  SiRNA target sequence
aaatgactcatcaaaaggaca

SEQ ID NO: 293602 - DNA, 21 bp, Artificial sequence
  SiRNA target sequence
aatgactcatcaaaaggacaa

SEQ ID NO: 293603 - DNA, 21 bp, Artificial sequence
  SiRNA target sequence
atgactcatcaaaaggacaat

SEQ ID NO: 293604 - DNA, 21 bp, Artificial sequence
  SiRNA target sequence
tgactcatcaaaaggacaata

SEQ ID NO: 293605 - DNA, 21 bp, Artificial sequence
  SiRNA target sequence
gactcatcaaaaggacaatat

SEQ ID NO: 293606 - DNA, 21 bp, Artificial sequence
  SiRNA target sequence
actcatcaaaaggacaatata

SEQ ID NO: 293607 - DNA, 21 bp, Artificial sequence
  SiRNA target sequence
ctcatcaaaaggacaatatat

SEQ ID NO: 293608 - DNA, 21 bp, Artificial sequence
  SiRNA target sequence
tcatcaaaaggacaatatata

SEQ ID NO: 293609 - DNA, 21 bp, Artificial sequence
  SiRNA target sequence
catcaaaaggacaatatatat

SEQ ID NO: 293610 - DNA, 21 bp, Artificial sequence
  SiRNA target sequence
atcaaaaggacaatatatatt

SEQ ID NO: 293611 - DNA, 21 bp, Artificial sequence
  SiRNA target sequence
tcaaaaggacaatatatatta

SEQ ID NO: 293612 - DNA, 21 bp, Artificial sequence
  SiRNA target sequence
caaaaggacaatatatattaa

SEQ ID NO: 293613 - DNA, 21 bp, Artificial sequence
  SiRNA target sequence
aaaaggacaatatatattaag

SEQ ID NO: 293614 - DNA, 21 bp, Artificial sequence
  SiRNA target sequence
aaaggacaatatatattaaga

SEQ ID NO: 293615 - DNA, 21 bp, Artificial sequence
  SiRNA target sequence
aaggacaatatatattaagac

SEQ ID NO: 293616 - DNA, 21 bp, Artificial sequence
  SiRNA target sequence
aggacaatatatattaagaca

SEQ ID NO: 293617 - DNA, 21 bp, Artificial sequence
  SiRNA target sequence
ggacaatatatattaagacaa

SEQ ID NO: 293618 - DNA, 21 bp, Artificial sequence
  SiRNA target sequence
gacaatatatattaagacaag

SEQ ID NO: 293619 - DNA, 21 bp, Artificial sequence
  SiRNA target sequence
acaatatatattaagacaagg

SEQ ID NO: 293620 - DNA, 21 bp, Artificial sequence
  SiRNA target sequence
caatatatattaagacaagga

SEQ ID NO: 293621 - DNA, 21 bp, Artificial sequence
  SiRNA target sequence
aatatatattaagacaaggat

SEQ ID NO: 293622 - DNA, 21 bp, Artificial sequence
  SiRNA target sequence
atatatattaagacaaggatt

SEQ ID NO: 293623 - DNA, 21 bp, Artificial sequence
  SiRNA target sequence
tatatattaagacaaggattg

SEQ ID NO: 293624 - DNA, 21 bp, Artificial sequence
  SiRNA target sequence
atatattaagacaaggattgg

SEQ ID NO: 293625 - DNA, 21 bp, Artificial sequence
  SiRNA target sequence
tatattaagacaaggattgga

SEQ ID NO: 293626 - DNA, 21 bp, Artificial sequence
  SiRNA target sequence
atattaagacaaggattggaa

SEQ ID NO: 293627 - DNA, 21 bp, Artificial sequence
  SiRNA target sequence
tattaagacaaggattggaat

SEQ ID NO: 293628 - DNA, 21 bp, Artificial sequence
  SiRNA target sequence
attaagacaaggattggaata

SEQ ID NO: 293629 - DNA, 21 bp, Artificial sequence
  SiRNA target sequence
ttaagacaaggattggaatac

SEQ ID NO: 293630 - DNA, 21 bp, Artificial sequence
  SiRNA target sequence
taagacaaggattggaataca

SEQ ID NO: 293631 - DNA, 21 bp, Artificial sequence
  SiRNA target sequence
aagacaaggattggaatacac

SEQ ID NO: 293632 - DNA, 21 bp, Artificial sequence
  SiRNA target sequence
agacaaggattggaatacacc

SEQ ID NO: 293633 - DNA, 21 bp, Artificial sequence
  SiRNA target sequence
gacaaggattggaatacacca

SEQ ID NO: 293634 - DNA, 21 bp, Artificial sequence
  SiRNA target sequence
acaaggattggaatacaccat

SEQ ID NO: 293635 - DNA, 21 bp, Artificial sequence
  SiRNA target sequence
caaggattggaatacaccatg

SEQ ID NO: 293636 - DNA, 21 bp, Artificial sequence
  SiRNA target sequence
aaggattggaatacaccatgc

SEQ ID NO: 293637 - DNA, 21 bp, Artificial sequence
  SiRNA target sequence
aggattggaatacaccatgcc

SEQ ID NO: 293638 - DNA, 21 bp, Artificial sequence
  SiRNA target sequence
ggattggaatacaccatgcca

SEQ ID NO: 293639 - DNA, 21 bp, Artificial sequence
  SiRNA target sequence
gattggaatacaccatgccaa

SEQ ID NO: 293640 - DNA, 21 bp, Artificial sequence
  SiRNA target sequence
attggaatacaccatgccaac

SEQ ID NO: 293641 - DNA, 21 bp, Artificial sequence
  SiRNA target sequence
ttggaatacaccatgccaaca

SEQ ID NO: 293642 - DNA, 21 bp, Artificial sequence
  SiRNA target sequence
tggaatacaccatgccaacaa

SEQ ID NO: 293643 - DNA, 21 bp, Artificial sequence
  SiRNA target sequence
ggaatacaccatgccaacaac

SEQ ID NO: 293644 - DNA, 21 bp, Artificial sequence
  SiRNA target sequence
gaatacaccatgccaacaaca

SEQ ID NO: 293645 - DNA, 21 bp, Artificial sequence
  SiRNA target sequence
aatacaccatgccaacaacaa

SEQ ID NO: 293646 - DNA, 21 bp, Artificial sequence
  SiRNA target sequence
atacaccatgccaacaacaaa

SEQ ID NO: 293647 - DNA, 21 bp, Artificial sequence
  SiRNA target sequence
tacaccatgccaacaacaaat

SEQ ID NO: 293648 - DNA, 21 bp, Artificial sequence
  SiRNA target sequence
acaccatgccaacaacaaatg

SEQ ID NO: 293649 - DNA, 21 bp, Artificial sequence
  SiRNA target sequence
caccatgccaacaacaaatgg

SEQ ID NO: 293650 - DNA, 21 bp, Artificial sequence
  SiRNA target sequence
accatgccaacaacaaatggg

SEQ ID NO: 293651 - DNA, 21 bp, Artificial sequence
  SiRNA target sequence
ccatgccaacaacaaatgggg

SEQ ID NO: 293652 - DNA, 21 bp, Artificial sequence
  SiRNA target sequence
catgccaacaacaaatgggga

SEQ ID NO: 293653 - DNA, 21 bp, Artificial sequence
  SiRNA target sequence
atgccaacaacaaatggggat

SEQ ID NO: 293654 - DNA, 21 bp, Artificial sequence
  SiRNA target sequence
tgccaacaacaaatggggatt

SEQ ID NO: 293655 - DNA, 21 bp, Artificial sequence
  SiRNA target sequence
gccaacaacaaatggggattg

SEQ ID NO: 293656 - DNA, 21 bp, Artificial sequence
  SiRNA target sequence
ccaacaacaaatggggattgt

SEQ ID NO: 293657 - DNA, 21 bp, Artificial sequence
  SiRNA target sequence
caacaacaaatggggattgtg

SEQ ID NO: 293658 - DNA, 21 bp, Artificial sequence
  SiRNA target sequence
aacaacaaatggggattgtgg

SEQ ID NO: 293659 - DNA, 21 bp, Artificial sequence
  SiRNA target sequence
acaacaaatggggattgtggt

SEQ ID NO: 293660 - DNA, 21 bp, Artificial sequence
  SiRNA target sequence
caacaaatggggattgtggtg

SEQ ID NO: 293661 - DNA, 21 bp, Artificial sequence
  SiRNA target sequence
aacaaatggggattgtggtgc

SEQ ID NO: 293662 - DNA, 21 bp, Artificial sequence
  SiRNA target sequence
acaaatggggattgtggtgca

SEQ ID NO: 293663 - DNA, 21 bp, Artificial sequence
  SiRNA target sequence
caaatggggattgtggtgcac

SEQ ID NO: 293664 - DNA, 21 bp, Artificial sequence
  SiRNA target sequence
aaatggggattgtggtgcacc

SEQ ID NO: 293665 - DNA, 21 bp, Artificial sequence
  SiRNA target sequence
aatggggattgtggtgcacca

SEQ ID NO: 293666 - DNA, 21 bp, Artificial sequence
  SiRNA target sequence
atggggattgtggtgcaccat

SEQ ID NO: 293667 - DNA, 21 bp, Artificial sequence
  SiRNA target sequence
tggggattgtggtgcaccatt

SEQ ID NO: 293668 - DNA, 21 bp, Artificial sequence
  SiRNA target sequence
ggggattgtggtgcaccatta

SEQ ID NO: 293669 - DNA, 21 bp, Artificial sequence
  SiRNA target sequence
gggattgtggtgcaccattag

SEQ ID NO: 293670 - DNA, 21 bp, Artificial sequence
  SiRNA target sequence
ggattgtggtgcaccattagt

SEQ ID NO: 293671 - DNA, 21 bp, Artificial sequence
  SiRNA target sequence
gattgtggtgcaccattagta

SEQ ID NO: 293672 - DNA, 21 bp, Artificial sequence
  SiRNA target sequence
attgtggtgcaccattagtaa

SEQ ID NO: 293673 - DNA, 21 bp, Artificial sequence
  SiRNA target sequence
ttgtggtgcaccattagtaat

SEQ ID NO: 293674 - DNA, 21 bp, Artificial sequence
  SiRNA target sequence
tgtggtgcaccattagtaatt

SEQ ID NO: 293675 - DNA, 21 bp, Artificial sequence
  SiRNA target sequence
gtggtgcaccattagtaatta

SEQ ID NO: 293676 - DNA, 21 bp, Artificial sequence
  SiRNA target sequence
tggtgcaccattagtaattaa

SEQ ID NO: 293677 - DNA, 21 bp, Artificial sequence
  SiRNA target sequence
ggtgcaccattagtaattaat

SEQ ID NO: 293678 - DNA, 21 bp, Artificial sequence
  SiRNA target sequence
gtgcaccattagtaattaatg

SEQ ID NO: 293679 - DNA, 21 bp, Artificial sequence
  SiRNA target sequence
tgcaccattagtaattaatga

SEQ ID NO: 293680 - DNA, 21 bp, Artificial sequence
  SiRNA target sequence
gcaccattagtaattaatgaa

SEQ ID NO: 293681 - DNA, 21 bp, Artificial sequence
  SiRNA target sequence
caccattagtaattaatgaaa

SEQ ID NO: 293682 - DNA, 21 bp, Artificial sequence
  SiRNA target sequence
accattagtaattaatgaaac

SEQ ID NO: 293683 - DNA, 21 bp, Artificial sequence
  SiRNA target sequence
ccattagtaattaatgaaacc

SEQ ID NO: 293684 - DNA, 21 bp, Artificial sequence
  SiRNA target sequence
cattagtaattaatgaaaccc

SEQ ID NO: 293685 - DNA, 21 bp, Artificial sequence
  SiRNA target sequence
attagtaattaatgaaaccca

SEQ ID NO: 293686 - DNA, 21 bp, Artificial sequence
  SiRNA target sequence
ttagtaattaatgaaacccaa

SEQ ID NO: 293687 - DNA, 21 bp, Artificial sequence
  SiRNA target sequence
tagtaattaatgaaacccaag

SEQ ID NO: 293688 - DNA, 21 bp, Artificial sequence
  SiRNA target sequence
agtaattaatgaaacccaagt

SEQ ID NO: 293689 - DNA, 21 bp, Artificial sequence
  SiRNA target sequence
gtaattaatgaaacccaagtt

SEQ ID NO: 293690 - DNA, 21 bp, Artificial sequence
  SiRNA target sequence
taattaatgaaacccaagtta

SEQ ID NO: 293691 - DNA, 21 bp, Artificial sequence
  SiRNA target sequence
aattaatgaaacccaagttat

SEQ ID NO: 293692 - DNA, 21 bp, Artificial sequence
  SiRNA target sequence
attaatgaaacccaagttata

SEQ ID NO: 293693 - DNA, 21 bp, Artificial sequence
  SiRNA target sequence
ttaatgaaacccaagttatac

SEQ ID NO: 293694 - DNA, 21 bp, Artificial sequence
  SiRNA target sequence
taatgaaacccaagttatacg

SEQ ID NO: 293695 - DNA, 21 bp, Artificial sequence
  SiRNA target sequence
aatgaaacccaagttatacgt

SEQ ID NO: 293696 - DNA, 21 bp, Artificial sequence
  SiRNA target sequence
atgaaacccaagttatacgta

SEQ ID NO: 293697 - DNA, 21 bp, Artificial sequence
  SiRNA target sequence
tgaaacccaagttatacgtaa

SEQ ID NO: 293698 - DNA, 21 bp, Artificial sequence
  SiRNA target sequence
gaaacccaagttatacgtaaa

SEQ ID NO: 293699 - DNA, 21 bp, Artificial sequence
  SiRNA target sequence
aaacccaagttatacgtaaaa

SEQ ID NO: 293700 - DNA, 21 bp, Artificial sequence
  SiRNA target sequence
aacccaagttatacgtaaaat

SEQ ID NO: 293701 - DNA, 21 bp, Artificial sequence
  SiRNA target sequence
acccaagttatacgtaaaata

SEQ ID NO: 293702 - DNA, 21 bp, Artificial sequence
  SiRNA target sequence
cccaagttatacgtaaaatag

SEQ ID NO: 293703 - DNA, 21 bp, Artificial sequence
  SiRNA target sequence
ccaagttatacgtaaaatagc

SEQ ID NO: 293704 - DNA, 21 bp, Artificial sequence
  SiRNA target sequence
caagttatacgtaaaatagct

SEQ ID NO: 293705 - DNA, 21 bp, Artificial sequence
  SiRNA target sequence
aagttatacgtaaaatagctg

SEQ ID NO: 293706 - DNA, 21 bp, Artificial sequence
  SiRNA target sequence
agttatacgtaaaatagctgg

SEQ ID NO: 293707 - DNA, 21 bp, Artificial sequence
  SiRNA target sequence
gttatacgtaaaatagctgga

SEQ ID NO: 293708 - DNA, 21 bp, Artificial sequence
  SiRNA target sequence
ttatacgtaaaatagctggaa

SEQ ID NO: 293709 - DNA, 21 bp, Artificial sequence
  SiRNA target sequence
tatacgtaaaatagctggaat

SEQ ID NO: 293710 - DNA, 21 bp, Artificial sequence
  SiRNA target sequence
atacgtaaaatagctggaatt

SEQ ID NO: 293711 - DNA, 21 bp, Artificial sequence
  SiRNA target sequence
tacgtaaaatagctggaattc

SEQ ID NO: 293712 - DNA, 21 bp, Artificial sequence
  SiRNA target sequence
acgtaaaatagctggaattca

SEQ ID NO: 293713 - DNA, 21 bp, Artificial sequence
  SiRNA target sequence
cgtaaaatagctggaattcat

SEQ ID NO: 293714 - DNA, 21 bp, Artificial sequence
  SiRNA target sequence
gtaaaatagctggaattcatg

SEQ ID NO: 293715 - DNA, 21 bp, Artificial sequence
  SiRNA target sequence
taaaatagctggaattcatgt

SEQ ID NO: 293716 - DNA, 21 bp, Artificial sequence
  SiRNA target sequence
aaaatagctggaattcatgtt

SEQ ID NO: 293717 - DNA, 21 bp, Artificial sequence
  SiRNA target sequence
aaatagctggaattcatgttg

SEQ ID NO: 293718 - DNA, 21 bp, Artificial sequence
  SiRNA target sequence
aatagctggaattcatgttgc

SEQ ID NO: 293719 - DNA, 21 bp, Artificial sequence
  SiRNA target sequence
atagctggaattcatgttgct

SEQ ID NO: 293720 - DNA, 21 bp, Artificial sequence
  SiRNA target sequence
tagctggaattcatgttgctg

SEQ ID NO: 293721 - DNA, 21 bp, Artificial sequence
  SiRNA target sequence
agctggaattcatgttgctgg

SEQ ID NO: 293722 - DNA, 21 bp, Artificial sequence
  SiRNA target sequence
gctggaattcatgttgctggt

SEQ ID NO: 293723 - DNA, 21 bp, Artificial sequence
  SiRNA target sequence
ctggaattcatgttgctggtg

SEQ ID NO: 293724 - DNA, 21 bp, Artificial sequence
  SiRNA target sequence
tggaattcatgttgctggtga

SEQ ID NO: 293725 - DNA, 21 bp, Artificial sequence
  SiRNA target sequence
ggaattcatgttgctggtgat

SEQ ID NO: 293726 - DNA, 21 bp, Artificial sequence
  SiRNA target sequence
gaattcatgttgctggtgatg

SEQ ID NO: 293727 - DNA, 21 bp, Artificial sequence
  SiRNA target sequence
aattcatgttgctggtgatgc

SEQ ID NO: 293728 - DNA, 21 bp, Artificial sequence
  SiRNA target sequence
attcatgttgctggtgatgcc

SEQ ID NO: 293729 - DNA, 21 bp, Artificial sequence
  SiRNA target sequence
ttcatgttgctggtgatgccc

SEQ ID NO: 293730 - DNA, 21 bp, Artificial sequence
  SiRNA target sequence
tcatgttgctggtgatgcccg

SEQ ID NO: 293731 - DNA, 21 bp, Artificial sequence
  SiRNA target sequence
catgttgctggtgatgcccga

SEQ ID NO: 293732 - DNA, 21 bp, Artificial sequence
  SiRNA target sequence
atgttgctggtgatgcccgag

SEQ ID NO: 293733 - DNA, 21 bp, Artificial sequence
  SiRNA target sequence
tgttgctggtgatgcccgagg

SEQ ID NO: 293734 - DNA, 21 bp, Artificial sequence
  SiRNA target sequence
gttgctggtgatgcccgagga

SEQ ID NO: 293735 - DNA, 21 bp, Artificial sequence
  SiRNA target sequence
ttgctggtgatgcccgaggaa

SEQ ID NO: 293736 - DNA, 21 bp, Artificial sequence
  SiRNA target sequence
tgctggtgatgcccgaggaaa

SEQ ID NO: 293737 - DNA, 21 bp, Artificial sequence
  SiRNA target sequence
gctggtgatgcccgaggaaaa

SEQ ID NO: 293738 - DNA, 21 bp, Artificial sequence
  SiRNA target sequence
ctggtgatgcccgaggaaaag

SEQ ID NO: 293739 - DNA, 21 bp, Artificial sequence
  SiRNA target sequence
tggtgatgcccgaggaaaagc

SEQ ID NO: 293740 - DNA, 21 bp, Artificial sequence
  SiRNA target sequence
ggtgatgcccgaggaaaagct

SEQ ID NO: 293741 - DNA, 21 bp, Artificial sequence
  SiRNA target sequence
gtgatgcccgaggaaaagctt

SEQ ID NO: 293742 - DNA, 21 bp, Artificial sequence
  SiRNA target sequence
tgatgcccgaggaaaagctta

SEQ ID NO: 293743 - DNA, 21 bp, Artificial sequence
  SiRNA target sequence
gatgcccgaggaaaagcttat

SEQ ID NO: 293744 - DNA, 21 bp, Artificial sequence
  SiRNA target sequence
atgcccgaggaaaagcttatg

SEQ ID NO: 293745 - DNA, 21 bp, Artificial sequence
  SiRNA target sequence
tgcccgaggaaaagcttatgc

SEQ ID NO: 293746 - DNA, 21 bp, Artificial sequence
  SiRNA target sequence
gcccgaggaaaagcttatgca

SEQ ID NO: 293747 - DNA, 21 bp, Artificial sequence
  SiRNA target sequence
cccgaggaaaagcttatgcag

SEQ ID NO: 293748 - DNA, 21 bp, Artificial sequence
  SiRNA target sequence
ccgaggaaaagcttatgcaga

SEQ ID NO: 293749 - DNA, 21 bp, Artificial sequence
  SiRNA target sequence
cgaggaaaagcttatgcagaa

SEQ ID NO: 293750 - DNA, 21 bp, Artificial sequence
  SiRNA target sequence
gaggaaaagcttatgcagaat

SEQ ID NO: 293751 - DNA, 21 bp, Artificial sequence
  SiRNA target sequence
aggaaaagcttatgcagaatc

SEQ ID NO: 293752 - DNA, 21 bp, Artificial sequence
  SiRNA target sequence
ggaaaagcttatgcagaatca

SEQ ID NO: 293753 - DNA, 21 bp, Artificial sequence
  SiRNA target sequence
gaaaagcttatgcagaatcaa

SEQ ID NO: 293754 - DNA, 21 bp, Artificial sequence
  SiRNA target sequence
aaaagcttatgcagaatcaat

SEQ ID NO: 293755 - DNA, 21 bp, Artificial sequence
  SiRNA target sequence
aaagcttatgcagaatcaata

SEQ ID NO: 293756 - DNA, 21 bp, Artificial sequence
  SiRNA target sequence
aagcttatgcagaatcaataa

SEQ ID NO: 293757 - DNA, 21 bp, Artificial sequence
  SiRNA target sequence
agcttatgcagaatcaataag

SEQ ID NO: 293758 - DNA, 21 bp, Artificial sequence
  SiRNA target sequence
gcttatgcagaatcaataagt

SEQ ID NO: 293759 - DNA, 21 bp, Artificial sequence
  SiRNA target sequence
cttatgcagaatcaataagtc

SEQ ID NO: 293760 - DNA, 21 bp, Artificial sequence
  SiRNA target sequence
ttatgcagaatcaataagtca

SEQ ID NO: 293761 - DNA, 21 bp, Artificial sequence
  SiRNA target sequence
tatgcagaatcaataagtcaa

SEQ ID NO: 293762 - DNA, 21 bp, Artificial sequence
  SiRNA target sequence
atgcagaatcaataagtcaaa

SEQ ID NO: 293763 - DNA, 21 bp, Artificial sequence
  SiRNA target sequence
tgcagaatcaataagtcaaaa

SEQ ID NO: 293764 - DNA, 21 bp, Artificial sequence
  SiRNA target sequence
gcagaatcaataagtcaaaaa

SEQ ID NO: 293765 - DNA, 21 bp, Artificial sequence
  SiRNA target sequence
cagaatcaataagtcaaaaag

SEQ ID NO: 293766 - DNA, 21 bp, Artificial sequence
  SiRNA target sequence
agaatcaataagtcaaaaaga

SEQ ID NO: 293767 - DNA, 21 bp, Artificial sequence
  SiRNA target sequence
gaatcaataagtcaaaaagat

SEQ ID NO: 293768 - DNA, 21 bp, Artificial sequence
  SiRNA target sequence
aatcaataagtcaaaaagatt

SEQ ID NO: 293769 - DNA, 21 bp, Artificial sequence
  SiRNA target sequence
atcaataagtcaaaaagattt

SEQ ID NO: 293770 - DNA, 21 bp, Artificial sequence
  SiRNA target sequence
tcaataagtcaaaaagattta

SEQ ID NO: 293771 - DNA, 21 bp, Artificial sequence
  SiRNA target sequence
caataagtcaaaaagatttaa

SEQ ID NO: 293772 - DNA, 21 bp, Artificial sequence
  SiRNA target sequence
aataagtcaaaaagatttaat

SEQ ID NO: 293773 - DNA, 21 bp, Artificial sequence
  SiRNA target sequence
ataagtcaaaaagatttaata

SEQ ID NO: 293774 - DNA, 21 bp, Artificial sequence
  SiRNA target sequence
taagtcaaaaagatttaataa

SEQ ID NO: 293775 - DNA, 21 bp, Artificial sequence
  SiRNA target sequence
aagtcaaaaagatttaataag

SEQ ID NO: 293776 - DNA, 21 bp, Artificial sequence
  SiRNA target sequence
agtcaaaaagatttaataaga

SEQ ID NO: 293777 - DNA, 21 bp, Artificial sequence
  SiRNA target sequence
gtcaaaaagatttaataagag

SEQ ID NO: 293778 - DNA, 21 bp, Artificial sequence
  SiRNA target sequence
tcaaaaagatttaataagagc

SEQ ID NO: 293779 - DNA, 21 bp, Artificial sequence
  SiRNA target sequence
caaaaagatttaataagagct

SEQ ID NO: 293780 - DNA, 21 bp, Artificial sequence
  SiRNA target sequence
aaaaagatttaataagagctt

SEQ ID NO: 293781 - DNA, 21 bp, Artificial sequence
  SiRNA target sequence
aaaagatttaataagagcttt

SEQ ID NO: 293782 - DNA, 21 bp, Artificial sequence
  SiRNA target sequence
aaagatttaataagagctttt

SEQ ID NO: 293783 - DNA, 21 bp, Artificial sequence
  SiRNA target sequence
aagatttaataagagcttttt

SEQ ID NO: 293784 - DNA, 21 bp, Artificial sequence
  SiRNA target sequence
agatttaataagagctttttc

SEQ ID NO: 293785 - DNA, 21 bp, Artificial sequence
  SiRNA target sequence
gatttaataagagctttttct

SEQ ID NO: 293786 - DNA, 21 bp, Artificial sequence
  SiRNA target sequence
atttaataagagctttttcta

SEQ ID NO: 293787 - DNA, 21 bp, Artificial sequence
  SiRNA target sequence
tttaataagagctttttctaa

SEQ ID NO: 293788 - DNA, 21 bp, Artificial sequence
  SiRNA target sequence
ttaataagagctttttctaaa

SEQ ID NO: 293789 - DNA, 21 bp, Artificial sequence
  SiRNA target sequence
taataagagctttttctaaaa

SEQ ID NO: 293790 - DNA, 21 bp, Artificial sequence
  SiRNA target sequence
aataagagctttttctaaaat

SEQ ID NO: 293791 - DNA, 21 bp, Artificial sequence
  SiRNA target sequence
ataagagctttttctaaaatt

SEQ ID NO: 293792 - DNA, 21 bp, Artificial sequence
  SiRNA target sequence
taagagctttttctaaaattg

SEQ ID NO: 293793 - DNA, 21 bp, Artificial sequence
  SiRNA target sequence
aagagctttttctaaaattga

SEQ ID NO: 293794 - DNA, 21 bp, Artificial sequence
  SiRNA target sequence
agagctttttctaaaattgac

SEQ ID NO: 293795 - DNA, 21 bp, Artificial sequence
  SiRNA target sequence
gagctttttctaaaattgacg

SEQ ID NO: 293796 - DNA, 21 bp, Artificial sequence
  SiRNA target sequence
agctttttctaaaattgacgt

SEQ ID NO: 293797 - DNA, 21 bp, Artificial sequence
  SiRNA target sequence
gctttttctaaaattgacgtt

SEQ ID NO: 293798 - DNA, 21 bp, Artificial sequence
  SiRNA target sequence
ctttttctaaaattgacgtta

SEQ ID NO: 293799 - DNA, 21 bp, Artificial sequence
  SiRNA target sequence
tttttctaaaattgacgttag

SEQ ID NO: 293800 - DNA, 21 bp, Artificial sequence
  SiRNA target sequence
ttttctaaaattgacgttagt

SEQ ID NO: 293801 - DNA, 21 bp, Artificial sequence
  SiRNA target sequence
tttctaaaattgacgttagta

SEQ ID NO: 293802 - DNA, 21 bp, Artificial sequence
  SiRNA target sequence
ttctaaaattgacgttagtat

SEQ ID NO: 293803 - DNA, 21 bp, Artificial sequence
  SiRNA target sequence
tctaaaattgacgttagtatg

SEQ ID NO: 293804 - DNA, 21 bp, Artificial sequence
  SiRNA target sequence
ctaaaattgacgttagtatgc

SEQ ID NO: 293805 - DNA, 21 bp, Artificial sequence
  SiRNA target sequence
taaaattgacgttagtatgca

SEQ ID NO: 293806 - DNA, 21 bp, Artificial sequence
  SiRNA target sequence
aaaattgacgttagtatgcag

SEQ ID NO: 293807 - DNA, 21 bp, Artificial sequence
  SiRNA target sequence
aaattgacgttagtatgcaga

SEQ ID NO: 293808 - DNA, 21 bp, Artificial sequence
  SiRNA target sequence
aattgacgttagtatgcagat

SEQ ID NO: 293809 - DNA, 21 bp, Artificial sequence
  SiRNA target sequence
attgacgttagtatgcagatt

SEQ ID NO: 293810 - DNA, 21 bp, Artificial sequence
  SiRNA target sequence
ttgacgttagtatgcagattc

SEQ ID NO: 293811 - DNA, 21 bp, Artificial sequence
  SiRNA target sequence
tgacgttagtatgcagattca

SEQ ID NO: 293812 - DNA, 21 bp, Artificial sequence
  SiRNA target sequence
gacgttagtatgcagattcaa

SEQ ID NO: 293813 - DNA, 21 bp, Artificial sequence
  SiRNA target sequence
acgttagtatgcagattcaat

SEQ ID NO: 293814 - DNA, 21 bp, Artificial sequence
  SiRNA target sequence
cgttagtatgcagattcaatt

SEQ ID NO: 293815 - DNA, 21 bp, Artificial sequence
  SiRNA target sequence
gttagtatgcagattcaattg

SEQ ID NO: 293816 - DNA, 21 bp, Artificial sequence
  SiRNA target sequence
ttagtatgcagattcaattgg

SEQ ID NO: 293817 - DNA, 21 bp, Artificial sequence
  SiRNA target sequence
tagtatgcagattcaattgga

SEQ ID NO: 293818 - DNA, 21 bp, Artificial sequence
  SiRNA target sequence
agtatgcagattcaattggac

SEQ ID NO: 293819 - DNA, 21 bp, Artificial sequence
  SiRNA target sequence
gtatgcagattcaattggacc

SEQ ID NO: 293820 - DNA, 21 bp, Artificial sequence
  SiRNA target sequence
tatgcagattcaattggacct

SEQ ID NO: 293821 - DNA, 21 bp, Artificial sequence
  SiRNA target sequence
atgcagattcaattggaccta

SEQ ID NO: 293822 - DNA, 21 bp, Artificial sequence
  SiRNA target sequence
tgcagattcaattggacctag

SEQ ID NO: 293823 - DNA, 21 bp, Artificial sequence
  SiRNA target sequence
gcagattcaattggacctaga

SEQ ID NO: 293824 - DNA, 21 bp, Artificial sequence
  SiRNA target sequence
cagattcaattggacctagat

SEQ ID NO: 293825 - DNA, 21 bp, Artificial sequence
  SiRNA target sequence
agattcaattggacctagatc

SEQ ID NO: 293826 - DNA, 21 bp, Artificial sequence
  SiRNA target sequence
gattcaattggacctagatca

SEQ ID NO: 293827 - DNA, 21 bp, Artificial sequence
  SiRNA target sequence
attcaattggacctagatcag

SEQ ID NO: 293828 - DNA, 21 bp, Artificial sequence
  SiRNA target sequence
ttcaattggacctagatcaga

SEQ ID NO: 293829 - DNA, 21 bp, Artificial sequence
  SiRNA target sequence
tcaattggacctagatcagac

SEQ ID NO: 293830 - DNA, 21 bp, Artificial sequence
  SiRNA target sequence
caattggacctagatcagaca

SEQ ID NO: 293831 - DNA, 21 bp, Artificial sequence
  SiRNA target sequence
aattggacctagatcagacat

SEQ ID NO: 293832 - DNA, 21 bp, Artificial sequence
  SiRNA target sequence
attggacctagatcagacatt

SEQ ID NO: 293833 - DNA, 21 bp, Artificial sequence
  SiRNA target sequence
ttggacctagatcagacattg

SEQ ID NO: 293834 - DNA, 21 bp, Artificial sequence
  SiRNA target sequence
tggacctagatcagacattga

SEQ ID NO: 293835 - DNA, 21 bp, Artificial sequence
  SiRNA target sequence
ggacctagatcagacattgaa

SEQ ID NO: 293836 - DNA, 21 bp, Artificial sequence
  SiRNA target sequence
gacctagatcagacattgaat

SEQ ID NO: 293837 - DNA, 21 bp, Artificial sequence
  SiRNA target sequence
acctagatcagacattgaatt

SEQ ID NO: 293838 - DNA, 21 bp, Artificial sequence
  SiRNA target sequence
cctagatcagacattgaattt

SEQ ID NO: 293839 - DNA, 21 bp, Artificial sequence
  SiRNA target sequence
ctagatcagacattgaatttt

SEQ ID NO: 293840 - DNA, 21 bp, Artificial sequence
  SiRNA target sequence
tagatcagacattgaatttta

SEQ ID NO: 293841 - DNA, 21 bp, Artificial sequence
  SiRNA target sequence
agatcagacattgaattttaa

SEQ ID NO: 293842 - DNA, 21 bp, Artificial sequence
  SiRNA target sequence
gatcagacattgaattttaac

SEQ ID NO: 293843 - DNA, 21 bp, Artificial sequence
  SiRNA target sequence
atcagacattgaattttaacc

SEQ ID NO: 293844 - DNA, 21 bp, Artificial sequence
  SiRNA target sequence
tcagacattgaattttaacca

SEQ ID NO: 293845 - DNA, 21 bp, Artificial sequence
  SiRNA target sequence
cagacattgaattttaaccaa

SEQ ID NO: 293846 - DNA, 21 bp, Artificial sequence
  SiRNA target sequence
agacattgaattttaaccaac

SEQ ID NO: 293847 - DNA, 21 bp, Artificial sequence
  SiRNA target sequence
gacattgaattttaaccaaca

SEQ ID NO: 293848 - DNA, 21 bp, Artificial sequence
  SiRNA target sequence
acattgaattttaaccaacag

SEQ ID NO: 293849 - DNA, 21 bp, Artificial sequence
  SiRNA target sequence
cattgaattttaaccaacagc

SEQ ID NO: 293850 - DNA, 21 bp, Artificial sequence
  SiRNA target sequence
attgaattttaaccaacagca

SEQ ID NO: 293851 - DNA, 21 bp, Artificial sequence
  SiRNA target sequence
ttgaattttaaccaacagcag

SEQ ID NO: 293852 - DNA, 21 bp, Artificial sequence
  SiRNA target sequence
tgaattttaaccaacagcaga

SEQ ID NO: 293853 - DNA, 21 bp, Artificial sequence
  SiRNA target sequence
gaattttaaccaacagcagav

SEQ ID NO: 293854 - DNA, 21 bp, Artificial sequence
  SiRNA target sequence
aattttaaccaacagcagava

SEQ ID NO: 293855 - DNA, 21 bp, Artificial sequence
  SiRNA target sequence
attttaaccaacagcagavaa

SEQ ID NO: 293856 - DNA, 21 bp, Artificial sequence
  SiRNA target sequence
ttttaaccaacagcagavaat

SEQ ID NO: 293857 - DNA, 21 bp, Artificial sequence
  SiRNA target sequence
tttaaccaacagcagavaata

SEQ ID NO: 293858 - DNA, 21 bp, Artificial sequence
  SiRNA target sequence
ttaaccaacagcagavaataa

SEQ ID NO: 293859 - DNA, 21 bp, Artificial sequence
  SiRNA target sequence
taaccaacagcagavaataat

SEQ ID NO: 293860 - DNA, 21 bp, Artificial sequence
  SiRNA target sequence
aaccaacagcagavaataata

SEQ ID NO: 293861 - DNA, 21 bp, Artificial sequence
  SiRNA target sequence
accaacagcagavaataatac

SEQ ID NO: 293862 - DNA, 21 bp, Artificial sequence
  SiRNA target sequence
ccaacagcagavaataatacc

SEQ ID NO: 293863 - DNA, 21 bp, Artificial sequence
  SiRNA target sequence
caacagcagavaataatacca

SEQ ID NO: 293864 - DNA, 21 bp, Artificial sequence
  SiRNA target sequence
aacagcagavaataataccac

SEQ ID NO: 293865 - DNA, 21 bp, Artificial sequence
  SiRNA target sequence
acagcagavaataataccacc

SEQ ID NO: 293866 - DNA, 21 bp, Artificial sequence
  SiRNA target sequence
cagcagavaataataccacca

SEQ ID NO: 293867 - DNA, 21 bp, Artificial sequence
  SiRNA target sequence
agcagavaataataccaccaa

SEQ ID NO: 293868 - DNA, 21 bp, Artificial sequence
  SiRNA target sequence
gcagavaataataccaccaaa

SEQ ID NO: 293869 - DNA, 21 bp, Artificial sequence
  SiRNA target sequence
cagavaataataccaccaaac

SEQ ID NO: 293870 - DNA, 21 bp, Artificial sequence
  SiRNA target sequence
agavaataataccaccaaacg

SEQ ID NO: 293871 - DNA, 21 bp, Artificial sequence
  SiRNA target sequence
gavaataataccaccaaacgc

SEQ ID NO: 293872 - DNA, 21 bp, Artificial sequence
  SiRNA target sequence
avaataataccaccaaacgca

SEQ ID NO: 293873 - DNA, 21 bp, Artificial sequence
  SiRNA target sequence
vaataataccaccaaacgcag

SEQ ID NO: 293874 - DNA, 21 bp, Artificial sequence
  SiRNA target sequence
aataataccaccaaacgcaga

SEQ ID NO: 293875 - DNA, 21 bp, Artificial sequence
  SiRNA target sequence
ataataccaccaaacgcagaa

SEQ ID NO: 293876 - DNA, 21 bp, Artificial sequence
  SiRNA target sequence
taataccaccaaacgcagaat

SEQ ID NO: 293877 - DNA, 21 bp, Artificial sequence
  SiRNA target sequence
aataccaccaaacgcagaatt

SEQ ID NO: 293878 - DNA, 21 bp, Artificial sequence
  SiRNA target sequence
ataccaccaaacgcagaattc

SEQ ID NO: 293879 - DNA, 21 bp, Artificial sequence
  SiRNA target sequence
taccaccaaacgcagaattcg

SEQ ID NO: 293880 - DNA, 21 bp, Artificial sequence
  SiRNA target sequence
accaccaaacgcagaattcgg

SEQ ID NO: 293881 - DNA, 21 bp, Artificial sequence
  SiRNA target sequence
ccaccaaacgcagaattcgga

SEQ ID NO: 293882 - DNA, 21 bp, Artificial sequence
  SiRNA target sequence
caccaaacgcagaattcggac

SEQ ID NO: 293883 - DNA, 21 bp, Artificial sequence
  SiRNA target sequence
accaaacgcagaattcggacc

SEQ ID NO: 293884 - DNA, 21 bp, Artificial sequence
  SiRNA target sequence
ccaaacgcagaattcggacct

SEQ ID NO: 293885 - DNA, 21 bp, Artificial sequence
  SiRNA target sequence
caaacgcagaattcggacctg

SEQ ID NO: 293886 - DNA, 21 bp, Artificial sequence
  SiRNA target sequence
aaacgcagaattcggacctga

SEQ ID NO: 293887 - DNA, 21 bp, Artificial sequence
  SiRNA target sequence
aacgcagaattcggacctgag

SEQ ID NO: 293888 - DNA, 21 bp, Artificial sequence
  SiRNA target sequence
acgcagaattcggacctgagg

SEQ ID NO: 293889 - DNA, 21 bp, Artificial sequence
  SiRNA target sequence
cgcagaattcggacctgagga

SEQ ID NO: 293890 - DNA, 21 bp, Artificial sequence
  SiRNA target sequence
gcagaattcggacctgaggat

SEQ ID NO: 293891 - DNA, 21 bp, Artificial sequence
  SiRNA target sequence
cagaattcggacctgaggatt

SEQ ID NO: 293892 - DNA, 21 bp, Artificial sequence
  SiRNA target sequence
agaattcggacctgaggattt

SEQ ID NO: 293893 - DNA, 21 bp, Artificial sequence
  SiRNA target sequence
gaattcggacctgaggattta

SEQ ID NO: 293894 - DNA, 21 bp, Artificial sequence
  SiRNA target sequence
aattcggacctgaggatttag

SEQ ID NO: 293895 - DNA, 21 bp, Artificial sequence
  SiRNA target sequence
attcggacctgaggatttaga

SEQ ID NO: 293896 - DNA, 21 bp, Artificial sequence
  SiRNA target sequence
ttcggacctgaggatttagat

SEQ ID NO: 293897 - DNA, 21 bp, Artificial sequence
  SiRNA target sequence
tcggacctgaggatttagatt

SEQ ID NO: 293898 - DNA, 21 bp, Artificial sequence
  SiRNA target sequence
cggacctgaggatttagattt

SEQ ID NO: 293899 - DNA, 21 bp, Artificial sequence
  SiRNA target sequence
ggacctgaggatttagatttt

SEQ ID NO: 293900 - DNA, 21 bp, Artificial sequence
  SiRNA target sequence
gacctgaggatttagattttt

SEQ ID NO: 293901 - DNA, 21 bp, Artificial sequence
  SiRNA target sequence
acctgaggatttagatttttg

SEQ ID NO: 293902 - DNA, 21 bp, Artificial sequence
  SiRNA target sequence
cctgaggatttagatttttgc

SEQ ID NO: 293903 - DNA, 21 bp, Artificial sequence
  SiRNA target sequence
ctgaggatttagatttttgcg

SEQ ID NO: 293904 - DNA, 21 bp, Artificial sequence
  SiRNA target sequence
tgaggatttagatttttgcga

SEQ ID NO: 293905 - DNA, 21 bp, Artificial sequence
  SiRNA target sequence
gaggatttagatttttgcgat

SEQ ID NO: 293906 - DNA, 21 bp, Artificial sequence
  SiRNA target sequence
aggatttagatttttgcgatt

SEQ ID NO: 293907 - DNA, 21 bp, Artificial sequence
  SiRNA target sequence
ggatttagatttttgcgattt

SEQ ID NO: 293908 - DNA, 21 bp, Artificial sequence
  SiRNA target sequence
gatttagatttttgcgatttg

SEQ ID NO: 293909 - DNA, 21 bp, Artificial sequence
  SiRNA target sequence
atttagatttttgcgatttgc

SEQ ID NO: 293910 - DNA, 21 bp, Artificial sequence
  SiRNA target sequence
tttagatttttgcgatttgcc

SEQ ID NO: 293911 - DNA, 21 bp, Artificial sequence
  SiRNA target sequence
ttagatttttgcgatttgcct

SEQ ID NO: 293912 - DNA, 21 bp, Artificial sequence
  SiRNA target sequence
tagatttttgcgatttgcctt

SEQ ID NO: 293913 - DNA, 21 bp, Artificial sequence
  SiRNA target sequence
agatttttgcgatttgccttc

SEQ ID NO: 293914 - DNA, 21 bp, Artificial sequence
  SiRNA target sequence
gatttttgcgatttgccttca

SEQ ID NO: 293915 - DNA, 21 bp, Artificial sequence
  SiRNA target sequence
atttttgcgatttgccttcac

SEQ ID NO: 293916 - DNA, 21 bp, Artificial sequence
  SiRNA target sequence
tttttgcgatttgccttcact

SEQ ID NO: 293917 - DNA, 21 bp, Artificial sequence
  SiRNA target sequence
ttttgcgatttgccttcactt

SEQ ID NO: 293918 - DNA, 21 bp, Artificial sequence
  SiRNA target sequence
tttgcgatttgccttcactta

SEQ ID NO: 293919 - DNA, 21 bp, Artificial sequence
  SiRNA target sequence
ttgcgatttgccttcacttaa

SEQ ID NO: 293920 - DNA, 21 bp, Artificial sequence
  SiRNA target sequence
tgcgatttgccttcacttaaa

SEQ ID NO: 293921 - DNA, 21 bp, Artificial sequence
  SiRNA target sequence
gcgatttgccttcacttaaaa

SEQ ID NO: 293922 - DNA, 21 bp, Artificial sequence
  SiRNA target sequence
cgatttgccttcacttaaaat

SEQ ID NO: 293923 - DNA, 21 bp, Artificial sequence
  SiRNA target sequence
gatttgccttcacttaaaatg

SEQ ID NO: 293924 - DNA, 21 bp, Artificial sequence
  SiRNA target sequence
atttgccttcacttaaaatga

SEQ ID NO: 293925 - DNA, 21 bp, Artificial sequence
  SiRNA target sequence
tttgccttcacttaaaatgat

SEQ ID NO: 293926 - DNA, 21 bp, Artificial sequence
  SiRNA target sequence
ttgccttcacttaaaatgata

SEQ ID NO: 293927 - DNA, 21 bp, Artificial sequence
  SiRNA target sequence
tgccttcacttaaaatgatac

SEQ ID NO: 293928 - DNA, 21 bp, Artificial sequence
  SiRNA target sequence
gccttcacttaaaatgatacc

SEQ ID NO: 293929 - DNA, 21 bp, Artificial sequence
  SiRNA target sequence
ccttcacttaaaatgatacca

SEQ ID NO: 293930 - DNA, 21 bp, Artificial sequence
  SiRNA target sequence
cttcacttaaaatgataccag

SEQ ID NO: 293931 - DNA, 21 bp, Artificial sequence
  SiRNA target sequence
ttcacttaaaatgataccagt

SEQ ID NO: 293932 - DNA, 21 bp, Artificial sequence
  SiRNA target sequence
tcacttaaaatgataccagtg

SEQ ID NO: 293933 - DNA, 21 bp, Artificial sequence
  SiRNA target sequence
cacttaaaatgataccagtgg

SEQ ID NO: 293934 - DNA, 21 bp, Artificial sequence
  SiRNA target sequence
acttaaaatgataccagtggg

SEQ ID NO: 293935 - DNA, 21 bp, Artificial sequence
  SiRNA target sequence
cttaaaatgataccagtgggt

SEQ ID NO: 293936 - DNA, 21 bp, Artificial sequence
  SiRNA target sequence
ttaaaatgataccagtgggta

SEQ ID NO: 293937 - DNA, 21 bp, Artificial sequence
  SiRNA target sequence
taaaatgataccagtgggtag

SEQ ID NO: 293938 - DNA, 21 bp, Artificial sequence
  SiRNA target sequence
aaaatgataccagtgggtaga

SEQ ID NO: 293939 - DNA, 21 bp, Artificial sequence
  SiRNA target sequence
aaatgataccagtgggtagat

SEQ ID NO: 293940 - DNA, 21 bp, Artificial sequence
  SiRNA target sequence
aatgataccagtgggtagatt

SEQ ID NO: 293941 - DNA, 21 bp, Artificial sequence
  SiRNA target sequence
atgataccagtgggtagattg

SEQ ID NO: 293942 - DNA, 21 bp, Artificial sequence
  SiRNA target sequence
tgataccagtgggtagattga

SEQ ID NO: 293943 - DNA, 21 bp, Artificial sequence
  SiRNA target sequence
gataccagtgggtagattgag

SEQ ID NO: 293944 - DNA, 21 bp, Artificial sequence
  SiRNA target sequence
ataccagtgggtagattgagt

SEQ ID NO: 293945 - DNA, 21 bp, Artificial sequence
  SiRNA target sequence
taccagtgggtagattgagtg

SEQ ID NO: 293946 - DNA, 21 bp, Artificial sequence
  SiRNA target sequence
accagtgggtagattgagtga

SEQ ID NO: 293947 - DNA, 21 bp, Artificial sequence
  SiRNA target sequence
ccagtgggtagattgagtgaa

SEQ ID NO: 293948 - DNA, 21 bp, Artificial sequence
  SiRNA target sequence
cagtgggtagattgagtgaac

SEQ ID NO: 293949 - DNA, 21 bp, Artificial sequence
  SiRNA target sequence
agtgggtagattgagtgaacc

SEQ ID NO: 293950 - DNA, 21 bp, Artificial sequence
  SiRNA target sequence
gtgggtagattgagtgaacct

SEQ ID NO: 293951 - DNA, 21 bp, Artificial sequence
  SiRNA target sequence
tgggtagattgagtgaacctt

SEQ ID NO: 293952 - DNA, 21 bp, Artificial sequence
  SiRNA target sequence
gggtagattgagtgaaccttt

SEQ ID NO: 293953 - DNA, 21 bp, Artificial sequence
  SiRNA target sequence
ggtagattgagtgaacctttg

SEQ ID NO: 293954 - DNA, 21 bp, Artificial sequence
  SiRNA target sequence
gtagattgagtgaacctttgt

SEQ ID NO: 293955 - DNA, 21 bp, Artificial sequence
  SiRNA target sequence
tagattgagtgaacctttgtt

SEQ ID NO: 293956 - DNA, 21 bp, Artificial sequence
  SiRNA target sequence
agattgagtgaacctttgttc

SEQ ID NO: 293957 - DNA, 21 bp, Artificial sequence
  SiRNA target sequence
gattgagtgaacctttgttcg

SEQ ID NO: 293958 - DNA, 21 bp, Artificial sequence
  SiRNA target sequence
attgagtgaacctttgttcga

SEQ ID NO: 293959 - DNA, 21 bp, Artificial sequence
  SiRNA target sequence
ttgagtgaacctttgttcgaa

SEQ ID NO: 293960 - DNA, 21 bp, Artificial sequence
  SiRNA target sequence
tgagtgaacctttgttcgaac

SEQ ID NO: 293961 - DNA, 21 bp, Artificial sequence
  SiRNA target sequence
gagtgaacctttgttcgaacc

SEQ ID NO: 293962 - DNA, 21 bp, Artificial sequence
  SiRNA target sequence
agtgaacctttgttcgaacct

SEQ ID NO: 293963 - DNA, 21 bp, Artificial sequence
  SiRNA target sequence
gtgaacctttgttcgaacctg

SEQ ID NO: 293964 - DNA, 21 bp, Artificial sequence
  SiRNA target sequence
tgaacctttgttcgaacctgg

SEQ ID NO: 293965 - DNA, 21 bp, Artificial sequence
  SiRNA target sequence
gaacctttgttcgaacctggt

SEQ ID NO: 293966 - DNA, 21 bp, Artificial sequence
  SiRNA target sequence
aacctttgttcgaacctggta

SEQ ID NO: 293967 - DNA, 21 bp, Artificial sequence
  SiRNA target sequence
acctttgttcgaacctggtaa

SEQ ID NO: 293968 - DNA, 21 bp, Artificial sequence
  SiRNA target sequence
cctttgttcgaacctggtaag

SEQ ID NO: 293969 - DNA, 21 bp, Artificial sequence
  SiRNA target sequence
ctttgttcgaacctggtaaga

SEQ ID NO: 293970 - DNA, 21 bp, Artificial sequence
  SiRNA target sequence
tttgttcgaacctggtaagac

SEQ ID NO: 293971 - DNA, 21 bp, Artificial sequence
  SiRNA target sequence
ttgttcgaacctggtaagaca

SEQ ID NO: 293972 - DNA, 21 bp, Artificial sequence
  SiRNA target sequence
tgttcgaacctggtaagacag

SEQ ID NO: 293973 - DNA, 21 bp, Artificial sequence
  SiRNA target sequence
gttcgaacctggtaagacaga

SEQ ID NO: 293974 - DNA, 21 bp, Artificial sequence
  SiRNA target sequence
ttcgaacctggtaagacagac

SEQ ID NO: 293975 - DNA, 21 bp, Artificial sequence
  SiRNA target sequence
tcgaacctggtaagacagaca

SEQ ID NO: 293976 - DNA, 21 bp, Artificial sequence
  SiRNA target sequence
cgaacctggtaagacagacat

SEQ ID NO: 293977 - DNA, 21 bp, Artificial sequence
  SiRNA target sequence
gaacctggtaagacagacata

SEQ ID NO: 293978 - DNA, 21 bp, Artificial sequence
  SiRNA target sequence
aacctggtaagacagacatac

SEQ ID NO: 293979 - DNA, 21 bp, Artificial sequence
  SiRNA target sequence
acctggtaagacagacatacg

SEQ ID NO: 293980 - DNA, 21 bp, Artificial sequence
  SiRNA target sequence
cctggtaagacagacatacga

SEQ ID NO: 293981 - DNA, 21 bp, Artificial sequence
  SiRNA target sequence
ctggtaagacagacatacgac

SEQ ID NO: 293982 - DNA, 21 bp, Artificial sequence
  SiRNA target sequence
tggtaagacagacatacgacc

SEQ ID NO: 293983 - DNA, 21 bp, Artificial sequence
  SiRNA target sequence
ggtaagacagacatacgacct

SEQ ID NO: 293984 - DNA, 21 bp, Artificial sequence
  SiRNA target sequence
gtaagacagacatacgacctt

SEQ ID NO: 293985 - DNA, 21 bp, Artificial sequence
  SiRNA target sequence
taagacagacatacgaccttc

SEQ ID NO: 293986 - DNA, 21 bp, Artificial sequence
  SiRNA target sequence
aagacagacatacgaccttcc

SEQ ID NO: 293987 - DNA, 21 bp, Artificial sequence
  SiRNA target sequence
agacagacatacgaccttccc

SEQ ID NO: 293988 - DNA, 21 bp, Artificial sequence
  SiRNA target sequence
gacagacatacgaccttccct

SEQ ID NO: 293989 - DNA, 21 bp, Artificial sequence
  SiRNA target sequence
acagacatacgaccttccctg

SEQ ID NO: 293990 - DNA, 21 bp, Artificial sequence
  SiRNA target sequence
cagacatacgaccttccctgg

SEQ ID NO: 293991 - DNA, 21 bp, Artificial sequence
  SiRNA target sequence
agacatacgaccttccctggt

SEQ ID NO: 293992 - DNA, 21 bp, Artificial sequence
  SiRNA target sequence
gacatacgaccttccctggta

SEQ ID NO: 293993 - DNA, 21 bp, Artificial sequence
  SiRNA target sequence
acatacgaccttccctggtat

SEQ ID NO: 293994 - DNA, 21 bp, Artificial sequence
  SiRNA target sequence
catacgaccttccctggtata

SEQ ID NO: 293995 - DNA, 21 bp, Artificial sequence
  SiRNA target sequence
atacgaccttccctggtatat

SEQ ID NO: 293996 - DNA, 21 bp, Artificial sequence
  SiRNA target sequence
tacgaccttccctggtatatg

SEQ ID NO: 293997 - DNA, 21 bp, Artificial sequence
  SiRNA target sequence
acgaccttccctggtatatgg

SEQ ID NO: 293998 - DNA, 21 bp, Artificial sequence
  SiRNA target sequence
cgaccttccctggtatatgga

SEQ ID NO: 293999 - DNA, 21 bp, Artificial sequence
  SiRNA target sequence
gaccttccctggtatatggaa

SEQ ID NO: 294000 - DNA, 21 bp, Artificial sequence
  SiRNA target sequence
accttccctggtatatggaaa

SEQ ID NO: 294001 - DNA, 21 bp, Artificial sequence
  SiRNA target sequence
ccttccctggtatatggaaaa

SEQ ID NO: 294002 - DNA, 21 bp, Artificial sequence
  SiRNA target sequence
cttccctggtatatggaaaaa

SEQ ID NO: 294003 - DNA, 21 bp, Artificial sequence
  SiRNA target sequence
ttccctggtatatggaaaaat

SEQ ID NO: 294004 - DNA, 21 bp, Artificial sequence
  SiRNA target sequence
tccctggtatatggaaaaatc

SEQ ID NO: 294005 - DNA, 21 bp, Artificial sequence
  SiRNA target sequence
ccctggtatatggaaaaatct

SEQ ID NO: 294006 - DNA, 21 bp, Artificial sequence
  SiRNA target sequence
cctggtatatggaaaaatctc

SEQ ID NO: 294007 - DNA, 21 bp, Artificial sequence
  SiRNA target sequence
ctggtatatggaaaaatctca

SEQ ID NO: 294008 - DNA, 21 bp, Artificial sequence
  SiRNA target sequence
tggtatatggaaaaatctcag

SEQ ID NO: 294009 - DNA, 21 bp, Artificial sequence
  SiRNA target sequence
ggtatatggaaaaatctcaga

SEQ ID NO: 294010 - DNA, 21 bp, Artificial sequence
  SiRNA target sequence
gtatatggaaaaatctcagaa

SEQ ID NO: 294011 - DNA, 21 bp, Artificial sequence
  SiRNA target sequence
tatatggaaaaatctcagaaa
